United States Patent Application Publication US 2015/0232836 A1 - sequence listing, part 7

SEQ ID NO: 131584 - DNA, 15 bp, Homo sapiens
acaggagcggagaaa

SEQ ID NO: 131585 - DNA, 15 bp, Homo sapiens
gacaggagcggagaa

SEQ ID NO: 131586 - DNA, 15 bp, Homo sapiens
ggacaggagcggaga

SEQ ID NO: 131587 - DNA, 15 bp, Homo sapiens
aggacaggagcggag

SEQ ID NO: 131588 - DNA, 15 bp, Homo sapiens
gaggacaggagcgga

SEQ ID NO: 131589 - DNA, 15 bp, Homo sapiens
agaggacaggagcgg

SEQ ID NO: 131590 - DNA, 15 bp, Homo sapiens
tagaggacaggagcg

SEQ ID NO: 131591 - DNA, 15 bp, Homo sapiens
ttagaggacaggagc

SEQ ID NO: 131592 - DNA, 15 bp, Homo sapiens
cttagaggacaggag

SEQ ID NO: 131593 - DNA, 15 bp, Homo sapiens
acttagaggacagga

SEQ ID NO: 131594 - DNA, 15 bp, Homo sapiens
gacttagaggacagg

SEQ ID NO: 131595 - DNA, 15 bp, Homo sapiens
cgacttagaggacag

SEQ ID NO: 131596 - DNA, 15 bp, Homo sapiens
acgacttagaggaca

SEQ ID NO: 131597 - DNA, 15 bp, Homo sapiens
aacgacttagaggac

SEQ ID NO: 131598 - DNA, 15 bp, Homo sapiens
taacgacttagagga

SEQ ID NO: 131599 - DNA, 15 bp, Homo sapiens
ttaacgacttagagg

SEQ ID NO: 131600 - DNA, 15 bp, Homo sapiens
gttaacgacttagag

SEQ ID NO: 131601 - DNA, 15 bp, Homo sapiens
ggttaacgacttaga

SEQ ID NO: 131602 - DNA, 15 bp, Homo sapiens
gggttaacgacttag

SEQ ID NO: 131603 - DNA, 15 bp, Homo sapiens
ggggttaacgactta

SEQ ID NO: 131604 - DNA, 15 bp, Homo sapiens
aggggttaacgactt

SEQ ID NO: 131605 - DNA, 15 bp, Homo sapiens
aaggggttaacgact

SEQ ID NO: 131606 - DNA, 15 bp, Homo sapiens
gaaggggttaacgac

SEQ ID NO: 131607 - DNA, 15 bp, Homo sapiens
tgaaggggttaacga

SEQ ID NO: 131608 - DNA, 15 bp, Homo sapiens
ctgaaggggttaacg

SEQ ID NO: 131609 - DNA, 15 bp, Homo sapiens
cctgaaggggttaac

SEQ ID NO: 131610 - DNA, 15 bp, Homo sapiens
gcctgaaggggttaa

SEQ ID NO: 131611 - DNA, 15 bp, Homo sapiens
tgcctgaaggggtta

SEQ ID NO: 131612 - DNA, 15 bp, Homo sapiens
atgcctgaaggggtt

SEQ ID NO: 131613 - DNA, 15 bp, Homo sapiens
tatgcctgaaggggt

SEQ ID NO: 131614 - DNA, 15 bp, Homo sapiens
ttatgcctgaagggg

SEQ ID NO: 131615 - DNA, 15 bp, Homo sapiens
attatgcctgaaggg

SEQ ID NO: 131616 - DNA, 15 bp, Homo sapiens
cattatgcctgaagg

SEQ ID NO: 131617 - DNA, 15 bp, Homo sapiens
tcattatgcctgaag

SEQ ID NO: 131618 - DNA, 15 bp, Homo sapiens
ttcattatgcctgaa

SEQ ID NO: 131619 - DNA, 15 bp, Homo sapiens
attcattatgcctga

SEQ ID NO: 131620 - DNA, 15 bp, Homo sapiens
aattcattatgcctg

SEQ ID NO: 131621 - DNA, 15 bp, Homo sapiens
aaattcattatgcct

SEQ ID NO: 131622 - DNA, 15 bp, Homo sapiens
taaattcattatgcc

SEQ ID NO: 131623 - DNA, 15 bp, Homo sapiens
ataaattcattatgc

SEQ ID NO: 131624 - DNA, 15 bp, Homo sapiens
aataaattcattatg

SEQ ID NO: 131625 - DNA, 15 bp, Homo sapiens
taataaattcattat

SEQ ID NO: 131626 - DNA, 15 bp, Homo sapiens
ataataaattcatta

SEQ ID NO: 131627 - DNA, 15 bp, Homo sapiens
tataataaattcatt

SEQ ID NO: 131628 - DNA, 15 bp, Homo sapiens
ctataataaattcat

SEQ ID NO: 131629 - DNA, 15 bp, Homo sapiens
actataataaattca

SEQ ID NO: 131630 - DNA, 15 bp, Homo sapiens
tactataataaattc

SEQ ID NO: 131631 - DNA, 15 bp, Homo sapiens
ttactataataaatt

SEQ ID NO: 131632 - DNA, 15 bp, Homo sapiens
attactataataaat

SEQ ID NO: 131633 - DNA, 15 bp, Homo sapiens
aattactataataaa

SEQ ID NO: 131634 - DNA, 15 bp, Homo sapiens
gaattactataataa

SEQ ID NO: 131635 - DNA, 15 bp, Homo sapiens
agaattactataata

SEQ ID NO: 131636 - DNA, 15 bp, Homo sapiens
aagaattactataat

SEQ ID NO: 131637 - DNA, 15 bp, Homo sapiens
aaagaattactataa

SEQ ID NO: 131638 - DNA, 15 bp, Homo sapiens
taaagaattactata

SEQ ID NO: 131639 - DNA, 15 bp, Homo sapiens
ataaagaattactat

SEQ ID NO: 131640 - DNA, 15 bp, Homo sapiens
aataaagaattacta

SEQ ID NO: 131641 - DNA, 15 bp, Homo sapiens
taataaagaattact

SEQ ID NO: 131642 - DNA, 15 bp, Homo sapiens
ttaataaagaattac

SEQ ID NO: 131643 - DNA, 15 bp, Homo sapiens
attaataaagaatta

SEQ ID NO: 131644 - DNA, 15 bp, Homo sapiens
cattaataaagaatt

SEQ ID NO: 131645 - DNA, 15 bp, Homo sapiens
tcattaataaagaat

SEQ ID NO: 131646 - DNA, 15 bp, Homo sapiens
atcattaataaagaa

SEQ ID NO: 131647 - DNA, 15 bp, Homo sapiens
gatcattaataaaga

SEQ ID NO: 131648 - DNA, 15 bp, Homo sapiens
tgatcattaataaag

SEQ ID NO: 131649 - DNA, 15 bp, Homo sapiens
ttgatcattaataaa

SEQ ID NO: 131650 - DNA, 15 bp, Homo sapiens
attgatcattaataa

SEQ ID NO: 131651 - DNA, 15 bp, Homo sapiens
aattgatcattaata

SEQ ID NO: 131652 - DNA, 15 bp, Homo sapiens
taattgatcattaat

SEQ ID NO: 131653 - DNA, 15 bp, Homo sapiens
ataattgatcattaa

SEQ ID NO: 131654 - DNA, 15 bp, Homo sapiens
aataattgatcatta

SEQ ID NO: 131655 - DNA, 15 bp, Homo sapiens
caataattgatcatt

SEQ ID NO: 131656 - DNA, 15 bp, Homo sapiens
acaataattgatcat

SEQ ID NO: 131657 - DNA, 15 bp, Homo sapiens
tacaataattgatca

SEQ ID NO: 131658 - DNA, 15 bp, Homo sapiens
ttacaataattgatc

SEQ ID NO: 131659 - DNA, 15 bp, Homo sapiens
attacaataattgat

SEQ ID NO: 131660 - DNA, 15 bp, Homo sapiens
cattacaataattga

SEQ ID NO: 131661 - DNA, 15 bp, Homo sapiens
ccattacaataattg

SEQ ID NO: 131662 - DNA, 15 bp, Homo sapiens
cccattacaataatt

SEQ ID NO: 131663 - DNA, 15 bp, Homo sapiens
tcccattacaataat

SEQ ID NO: 131664 - DNA, 15 bp, Homo sapiens
ctcccattacaataa

SEQ ID NO: 131665 - DNA, 15 bp, Homo sapiens
actcccattacaata

SEQ ID NO: 131666 - DNA, 15 bp, Homo sapiens
cactcccattacaat

SEQ ID NO: 131667 - DNA, 15 bp, Homo sapiens
ccactcccattacaa

SEQ ID NO: 131668 - DNA, 15 bp, Homo sapiens
cccactcccattaca

SEQ ID NO: 131669 - DNA, 15 bp, Homo sapiens
tcccactcccattac

SEQ ID NO: 131670 - DNA, 15 bp, Homo sapiens
ctcccactcccatta

SEQ ID NO: 131671 - DNA, 15 bp, Homo sapiens
cctcccactcccatt

SEQ ID NO: 131672 - DNA, 15 bp, Homo sapiens
ccctcccactcccat

SEQ ID NO: 131673 - DNA, 15 bp, Homo sapiens
gccctcccactccca

SEQ ID NO: 131674 - DNA, 15 bp, Homo sapiens
tgccctcccactccc

SEQ ID NO: 131675 - DNA, 15 bp, Homo sapiens
ctgccctcccactcc

SEQ ID NO: 131676 - DNA, 15 bp, Homo sapiens
cctgccctcccactc

SEQ ID NO: 131677 - DNA, 15 bp, Homo sapiens
acctgccctcccact

SEQ ID NO: 131678 - DNA, 15 bp, Homo sapiens
aacctgccctcccac

SEQ ID NO: 131679 - DNA, 15 bp, Homo sapiens
caacctgccctccca

SEQ ID NO: 131680 - DNA, 15 bp, Homo sapiens
acaacctgccctccc

SEQ ID NO: 131681 - DNA, 15 bp, Homo sapiens
cacaacctgccctcc

SEQ ID NO: 131682 - DNA, 15 bp, Homo sapiens
ccacaacctgccctc

SEQ ID NO: 131683 - DNA, 15 bp, Homo sapiens
tccacaacctgccct

SEQ ID NO: 131684 - DNA, 15 bp, Homo sapiens
gtccacaacctgccc

SEQ ID NO: 131685 - DNA, 15 bp, Homo sapiens
ggtccacaacctgcc

SEQ ID NO: 131686 - DNA, 15 bp, Homo sapiens
tggtccacaacctgc

SEQ ID NO: 131687 - DNA, 15 bp, Homo sapiens
ttggtccacaacctg

SEQ ID NO: 131688 - DNA, 15 bp, Homo sapiens
tttggtccacaacct

SEQ ID NO: 131689 - DNA, 15 bp, Homo sapiens
gtttggtccacaacc

SEQ ID NO: 131690 - DNA, 15 bp, Homo sapiens
tgtttggtccacaac

SEQ ID NO: 131691 - DNA, 15 bp, Homo sapiens
atgtttggtccacaa

SEQ ID NO: 131692 - DNA, 15 bp, Homo sapiens
gatgtttggtccaca

SEQ ID NO: 131693 - DNA, 15 bp, Homo sapiens
tgatgtttggtccac

SEQ ID NO: 131694 - DNA, 15 bp, Homo sapiens
ctgatgtttggtcca

SEQ ID NO: 131695 - DNA, 15 bp, Homo sapiens
cctgatgtttggtcc

SEQ ID NO: 131696 - DNA, 15 bp, Homo sapiens
gcctgatgtttggtc

SEQ ID NO: 131697 - DNA, 15 bp, Homo sapiens
tgcctgatgtttggt

SEQ ID NO: 131698 - DNA, 15 bp, Homo sapiens
ttgcctgatgtttgg

SEQ ID NO: 131699 - DNA, 15 bp, Homo sapiens
cttgcctgatgtttg

SEQ ID NO: 131700 - DNA, 15 bp, Homo sapiens
gcttgcctgatgttt

SEQ ID NO: 131701 - DNA, 15 bp, Homo sapiens
tgcttgcctgatgtt

SEQ ID NO: 131702 - DNA, 15 bp, Homo sapiens
atgcttgcctgatgt

SEQ ID NO: 131703 - DNA, 15 bp, Homo sapiens
catgcttgcctgatg

SEQ ID NO: 131704 - DNA, 15 bp, Homo sapiens
acatgcttgcctgat

SEQ ID NO: 131705 - DNA, 15 bp, Homo sapiens
tacatgcttgcctga

SEQ ID NO: 131706 - DNA, 15 bp, Homo sapiens
atacatgcttgcctg

SEQ ID NO: 131707 - DNA, 15 bp, Homo sapiens
gatacatgcttgcct

SEQ ID NO: 131708 - DNA, 15 bp, Homo sapiens
agatacatgcttgcc

SEQ ID NO: 131709 - DNA, 15 bp, Homo sapiens
cagatacatgcttgc

SEQ ID NO: 131710 - DNA, 15 bp, Homo sapiens
gcagatacatgcttg

SEQ ID NO: 131711 - DNA, 15 bp, Homo sapiens
ggcagatacatgctt

SEQ ID NO: 131712 - DNA, 15 bp, Homo sapiens
aggcagatacatgct

SEQ ID NO: 131713 - DNA, 15 bp, Homo sapiens
aaggcagatacatgc

SEQ ID NO: 131714 - DNA, 15 bp, Homo sapiens
gaaggcagatacatg

SEQ ID NO: 131715 - DNA, 15 bp, Homo sapiens
tgaaggcagatacat

SEQ ID NO: 131716 - DNA, 15 bp, Homo sapiens
ctgaaggcagataca

SEQ ID NO: 131717 - DNA, 15 bp, Homo sapiens
gctgaaggcagatac

SEQ ID NO: 131718 - DNA, 15 bp, Homo sapiens
agctgaaggcagata

SEQ ID NO: 131719 - DNA, 15 bp, Homo sapiens
tagctgaaggcagat

SEQ ID NO: 131720 - DNA, 15 bp, Homo sapiens
ctagctgaaggcaga

SEQ ID NO: 131721 - DNA, 15 bp, Homo sapiens
tctagctgaaggcag

SEQ ID NO: 131722 - DNA, 15 bp, Homo sapiens
atctagctgaaggca

SEQ ID NO: 131723 - DNA, 15 bp, Homo sapiens
gatctagctgaaggc

SEQ ID NO: 131724 - DNA, 15 bp, Homo sapiens
ggatctagctgaagg

SEQ ID NO: 131725 - DNA, 15 bp, Homo sapiens
tggatctagctgaag

SEQ ID NO: 131726 - DNA, 15 bp, Homo sapiens
ttggatctagctgaa

SEQ ID NO: 131727 - DNA, 15 bp, Homo sapiens
attggatctagctga

SEQ ID NO: 131728 - DNA, 15 bp, Homo sapiens
gattggatctagctg

SEQ ID NO: 131729 - DNA, 15 bp, Homo sapiens
ggattggatctagct

SEQ ID NO: 131730 - DNA, 15 bp, Homo sapiens
tggattggatctagc

SEQ ID NO: 131731 - DNA, 15 bp, Homo sapiens
atggattggatctag

SEQ ID NO: 131732 - DNA, 15 bp, Homo sapiens
catggattggatcta

SEQ ID NO: 131733 - DNA, 15 bp, Homo sapiens
tcatggattggatct

SEQ ID NO: 131734 - DNA, 15 bp, Homo sapiens
gtcatggattggatc

SEQ ID NO: 131735 - DNA, 15 bp, Homo sapiens
ggtcatggattggat

SEQ ID NO: 131736 - DNA, 15 bp, Homo sapiens
gggtcatggattgga

SEQ ID NO: 131737 - DNA, 15 bp, Homo sapiens
tgggtcatggattgg

SEQ ID NO: 131738 - DNA, 15 bp, Homo sapiens
gtgggtcatggattg

SEQ ID NO: 131739 - DNA, 15 bp, Homo sapiens
tgtgggtcatggatt

SEQ ID NO: 131740 - DNA, 15 bp, Homo sapiens
ttgtgggtcatggat

SEQ ID NO: 131741 - DNA, 15 bp, Homo sapiens
cttgtgggtcatgga

SEQ ID NO: 131742 - DNA, 15 bp, Homo sapiens
tcttgtgggtcatgg

SEQ ID NO: 131743 - DNA, 15 bp, Homo sapiens
ctcttgtgggtcatg

SEQ ID NO: 131744 - DNA, 15 bp, Homo sapiens
tctcttgtgggtcat

SEQ ID NO: 131745 - DNA, 15 bp, Homo sapiens
gtctcttgtgggtca

SEQ ID NO: 131746 - DNA, 15 bp, Homo sapiens
ggtctcttgtgggtc

SEQ ID NO: 131747 - DNA, 15 bp, Homo sapiens
gggtctcttgtgggt

SEQ ID NO: 131748 - DNA, 15 bp, Homo sapiens
agggtctcttgtggg

SEQ ID NO: 131749 - DNA, 15 bp, Homo sapiens
aagggtctcttgtgg

SEQ ID NO: 131750 - DNA, 15 bp, Homo sapiens
gaagggtctcttgtg

SEQ ID NO: 131751 - DNA, 15 bp, Homo sapiens
ggaagggtctcttgt

SEQ ID NO: 131752 - DNA, 15 bp, Homo sapiens
gggaagggtctcttg

SEQ ID NO: 131753 - DNA, 15 bp, Homo sapiens
agggaagggtctctt

SEQ ID NO: 131754 - DNA, 15 bp, Homo sapiens
cagggaagggtctct

SEQ ID NO: 131755 - DNA, 15 bp, Homo sapiens
tcagggaagggtctc

SEQ ID NO: 131756 - DNA, 15 bp, Homo sapiens
ttcagggaagggtct

SEQ ID NO: 131757 - DNA, 15 bp, Homo sapiens
cttcagggaagggtc

SEQ ID NO: 131758 - DNA, 15 bp, Homo sapiens
gcttcagggaagggt

SEQ ID NO: 131759 - DNA, 15 bp, Homo sapiens
tgcttcagggaaggg

SEQ ID NO: 131760 - DNA, 15 bp, Homo sapiens
ctgcttcagggaagg

SEQ ID NO: 131761 - DNA, 15 bp, Homo sapiens
actgcttcagggaag

SEQ ID NO: 131762 - DNA, 15 bp, Homo sapiens
aactgcttcagggaa

SEQ ID NO: 131763 - DNA, 15 bp, Homo sapiens
caactgcttcaggga

SEQ ID NO: 131764 - DNA, 15 bp, Homo sapiens
gcaactgcttcaggg

SEQ ID NO: 131765 - DNA, 15 bp, Homo sapiens
ggcaactgcttcagg

SEQ ID NO: 131766 - DNA, 15 bp, Homo sapiens
tggcaactgcttcag

SEQ ID NO: 131767 - DNA, 15 bp, Homo sapiens
atggcaactgcttca

SEQ ID NO: 131768 - DNA, 15 bp, Homo sapiens
catggcaactgcttc

SEQ ID NO: 131769 - DNA, 15 bp, Homo sapiens
ccatggcaactgctt

SEQ ID NO: 131770 - DNA, 15 bp, Homo sapiens
accatggcaactgct

SEQ ID NO: 131771 - DNA, 15 bp, Homo sapiens
caccatggcaactgc

SEQ ID NO: 131772 - DNA, 15 bp, Homo sapiens
ccaccatggcaactg

SEQ ID NO: 131773 - DNA, 15 bp, Homo sapiens
gccaccatggcaact

SEQ ID NO: 131774 - DNA, 15 bp, Homo sapiens
ggccaccatggcaac

SEQ ID NO: 131775 - DNA, 15 bp, Homo sapiens
aggccaccatggcaa

SEQ ID NO: 131776 - DNA, 15 bp, Homo sapiens
gaggccaccatggca

SEQ ID NO: 131777 - DNA, 15 bp, Homo sapiens
ggaggccaccatggc

SEQ ID NO: 131778 - DNA, 15 bp, Homo sapiens
aggaggccaccatgg

SEQ ID NO: 131779 - DNA, 15 bp, Homo sapiens
aaggaggccaccatg

SEQ ID NO: 131780 - DNA, 15 bp, Homo sapiens
aaaggaggccaccat

SEQ ID NO: 131781 - DNA, 15 bp, Homo sapiens
caaaggaggccacca

SEQ ID NO: 131782 - DNA, 15 bp, Homo sapiens
gcaaaggaggccacc

SEQ ID NO: 131783 - DNA, 15 bp, Homo sapiens
ggcaaaggaggccac

SEQ ID NO: 131784 - DNA, 15 bp, Homo sapiens
tggcaaaggaggcca

SEQ ID NO: 131785 - DNA, 15 bp, Homo sapiens
gtggcaaaggaggcc

SEQ ID NO: 131786 - DNA, 15 bp, Homo sapiens
ggtggcaaaggaggc

SEQ ID NO: 131787 - DNA, 15 bp, Homo sapiens
gggtggcaaaggagg

SEQ ID NO: 131788 - DNA, 15 bp, Homo sapiens
agggtggcaaaggag

SEQ ID NO: 131789 - DNA, 15 bp, Homo sapiens
gagggtggcaaagga

SEQ ID NO: 131790 - DNA, 15 bp, Homo sapiens
agagggtggcaaagg

SEQ ID NO: 131791 - DNA, 15 bp, Homo sapiens
gagagggtggcaaag

SEQ ID NO: 131792 - DNA, 15 bp, Homo sapiens
tgagagggtggcaaa

SEQ ID NO: 131793 - DNA, 15 bp, Homo sapiens
ctgagagggtggcaa

SEQ ID NO: 131794 - DNA, 15 bp, Homo sapiens
tctgagagggtggca

SEQ ID NO: 131795 - DNA, 15 bp, Homo sapiens
ttctgagagggtggc

SEQ ID NO: 131796 - DNA, 15 bp, Homo sapiens
tttctgagagggtgg

SEQ ID NO: 131797 - DNA, 15 bp, Homo sapiens
atttctgagagggtg

SEQ ID NO: 131798 - DNA, 15 bp, Homo sapiens
catttctgagagggt

SEQ ID NO: 131799 - DNA, 15 bp, Homo sapiens
tcatttctgagaggg

SEQ ID NO: 131800 - DNA, 15 bp, Homo sapiens
gtcatttctgagagg

SEQ ID NO: 131801 - DNA, 15 bp, Homo sapiens
ggtcatttctgagag

SEQ ID NO: 131802 - DNA, 15 bp, Homo sapiens
tggtcatttctgaga

SEQ ID NO: 131803 - DNA, 15 bp, Homo sapiens
ttggtcatttctgag

SEQ ID NO: 131804 - DNA, 15 bp, Homo sapiens
tttggtcatttctga

SEQ ID NO: 131805 - DNA, 15 bp, Homo sapiens
ttttggtcatttctg

SEQ ID NO: 131806 - DNA, 15 bp, Homo sapiens
attttggtcatttct

SEQ ID NO: 131807 - DNA, 15 bp, Homo sapiens
tattttggtcatttc

SEQ ID NO: 131808 - DNA, 15 bp, Homo sapiens
atattttggtcattt

SEQ ID NO: 131809 - DNA, 15 bp, Homo sapiens
tatattttggtcatt

SEQ ID NO: 131810 - DNA, 15 bp, Homo sapiens
atatattttggtcat

SEQ ID NO: 131811 - DNA, 15 bp, Homo sapiens
tatatattttggtca

SEQ ID NO: 131812 - DNA, 15 bp, Homo sapiens
gtatatattttggtc

SEQ ID NO: 131813 - DNA, 15 bp, Homo sapiens
tgtatatattttggt

SEQ ID NO: 131814 - DNA, 15 bp, Homo sapiens
atgtatatattttgg

SEQ ID NO: 131815 - DNA, 15 bp, Homo sapiens
aatgtatatattttg

SEQ ID NO: 131816 - DNA, 15 bp, Homo sapiens
gaatgtatatatttt

SEQ ID NO: 131817 - DNA, 15 bp, Homo sapiens
ggaatgtatatattt

SEQ ID NO: 131818 - DNA, 15 bp, Homo sapiens
gggaatgtatatatt

SEQ ID NO: 131819 - DNA, 15 bp, Homo sapiens
ggggaatgtatatat

SEQ ID NO: 131820 - DNA, 15 bp, Homo sapiens
aggggaatgtatata

SEQ ID NO: 131821 - DNA, 15 bp, Homo sapiens
gaggggaatgtatat

SEQ ID NO: 131822 - DNA, 15 bp, Homo sapiens
agaggggaatgtata

SEQ ID NO: 131823 - DNA, 15 bp, Homo sapiens
cagaggggaatgtat

SEQ ID NO: 131824 - DNA, 15 bp, Homo sapiens
acagaggggaatgta

SEQ ID NO: 131825 - DNA, 15 bp, Homo sapiens
gacagaggggaatgt

SEQ ID NO: 131826 - DNA, 15 bp, Homo sapiens
ggacagaggggaatg

SEQ ID NO: 131827 - DNA, 15 bp, Homo sapiens
aggacagaggggaat

SEQ ID NO: 131828 - DNA, 15 bp, Homo sapiens
caggacagaggggaa

SEQ ID NO: 131829 - DNA, 15 bp, Homo sapiens
ccaggacagagggga

SEQ ID NO: 131830 - DNA, 15 bp, Homo sapiens
cccaggacagagggg

SEQ ID NO: 131831 - DNA, 15 bp, Homo sapiens
gcccaggacagaggg

SEQ ID NO: 131832 - DNA, 15 bp, Homo sapiens
ggcccaggacagagg

SEQ ID NO: 131833 - DNA, 15 bp, Homo sapiens
tggcccaggacagag

SEQ ID NO: 131834 - DNA, 15 bp, Homo sapiens
ttggcccaggacaga

SEQ ID NO: 131835 - DNA, 15 bp, Homo sapiens
tttggcccaggacag

SEQ ID NO: 131836 - DNA, 15 bp, Homo sapiens
atttggcccaggaca

SEQ ID NO: 131837 - DNA, 15 bp, Homo sapiens
gatttggcccaggac

SEQ ID NO: 131838 - DNA, 15 bp, Homo sapiens
agatttggcccagga

SEQ ID NO: 131839 - DNA, 15 bp, Homo sapiens
aagatttggcccagg

SEQ ID NO: 131840 - DNA, 15 bp, Homo sapiens
caagatttggcccag

SEQ ID NO: 131841 - DNA, 15 bp, Homo sapiens
gcaagatttggccca

SEQ ID NO: 131842 - DNA, 15 bp, Homo sapiens
agcaagatttggccc

SEQ ID NO: 131843 - DNA, 15 bp, Homo sapiens
tagcaagatttggcc

SEQ ID NO: 131844 - DNA, 15 bp, Homo sapiens
ttagcaagatttggc

SEQ ID NO: 131845 - DNA, 15 bp, Homo sapiens
tttagcaagatttgg

SEQ ID NO: 131846 - DNA, 15 bp, Homo sapiens
ttttagcaagatttg

SEQ ID NO: 131847 - DNA, 15 bp, Homo sapiens
cttttagcaagattt

SEQ ID NO: 131848 - DNA, 15 bp, Homo sapiens
ccttttagcaagatt

SEQ ID NO: 131849 - DNA, 15 bp, Homo sapiens
tccttttagcaagat

SEQ ID NO: 131850 - DNA, 15 bp, Homo sapiens
ctccttttagcaaga

SEQ ID NO: 131851 - DNA, 15 bp, Homo sapiens
gctccttttagcaag

SEQ ID NO: 131852 - DNA, 15 bp, Homo sapiens
agctccttttagcaa

SEQ ID NO: 131853 - DNA, 15 bp, Homo sapiens
gagctccttttagca

SEQ ID NO: 131854 - DNA, 15 bp, Homo sapiens
agagctccttttagc

SEQ ID NO: 131855 - DNA, 15 bp, Homo sapiens
gagagctccttttag

SEQ ID NO: 131856 - DNA, 15 bp, Homo sapiens
agagagctcctttta

SEQ ID NO: 131857 - DNA, 15 bp, Homo sapiens
aagagagctcctttt

SEQ ID NO: 131858 - DNA, 15 bp, Homo sapiens
aaagagagctccttt

SEQ ID NO: 131859 - DNA, 15 bp, Homo sapiens
aaaagagagctcctt

SEQ ID NO: 131860 - DNA, 15 bp, Homo sapiens
aaaaagagagctcct

SEQ ID NO: 131861 - DNA, 15 bp, Homo sapiens
taaaaagagagctcc

SEQ ID NO: 131862 - DNA, 15 bp, Homo sapiens
ctaaaaagagagctc

SEQ ID NO: 131863 - DNA, 15 bp, Homo sapiens
tctaaaaagagagct

SEQ ID NO: 131864 - DNA, 15 bp, Homo sapiens
ctctaaaaagagagc

SEQ ID NO: 131865 - DNA, 15 bp, Homo sapiens
cctctaaaaagagag

SEQ ID NO: 131866 - DNA, 15 bp, Homo sapiens
acctctaaaaagaga

SEQ ID NO: 131867 - DNA, 15 bp, Homo sapiens
aacctctaaaaagag

SEQ ID NO: 131868 - DNA, 15 bp, Homo sapiens
aaacctctaaaaaga

SEQ ID NO: 131869 - DNA, 15 bp, Homo sapiens
aaaacctctaaaaag

SEQ ID NO: 131870 - DNA, 15 bp, Homo sapiens
caaaacctctaaaaa

SEQ ID NO: 131871 - DNA, 15 bp, Homo sapiens
acaaaacctctaaaa

SEQ ID NO: 131872 - DNA, 15 bp, Homo sapiens
aacaaaacctctaaa

SEQ ID NO: 131873 - DNA, 15 bp, Homo sapiens
aaacaaaacctctaa

SEQ ID NO: 131874 - DNA, 15 bp, Homo sapiens
taaacaaaacctcta

SEQ ID NO: 131875 - DNA, 15 bp, Homo sapiens
ataaacaaaacctct

SEQ ID NO: 131876 - DNA, 15 bp, Homo sapiens
gataaacaaaacctc

SEQ ID NO: 131877 - DNA, 15 bp, Homo sapiens
tgataaacaaaacct

SEQ ID NO: 131878 - DNA, 15 bp, Homo sapiens
ctgataaacaaaacc

SEQ ID NO: 131879 - DNA, 15 bp, Homo sapiens
cctgataaacaaaac

SEQ ID NO: 131880 - DNA, 15 bp, Homo sapiens
ccctgataaacaaaa

SEQ ID NO: 131881 - DNA, 15 bp, Homo sapiens
accctgataaacaaa

SEQ ID NO: 131882 - DNA, 15 bp, Homo sapiens
taccctgataaacaa

SEQ ID NO: 131883 - DNA, 15 bp, Homo sapiens
ataccctgataaaca

SEQ ID NO: 131884 - DNA, 15 bp, Homo sapiens
gataccctgataaac

SEQ ID NO: 131885 - DNA, 15 bp, Homo sapiens
tgataccctgataaa

SEQ ID NO: 131886 - DNA, 15 bp, Homo sapiens
gtgataccctgataa

SEQ ID NO: 131887 - DNA, 15 bp, Homo sapiens
tgtgataccctgata

SEQ ID NO: 131888 - DNA, 15 bp, Homo sapiens
gtgtgataccctgat

SEQ ID NO: 131889 - DNA, 15 bp, Homo sapiens
agtgtgataccctga

SEQ ID NO: 131890 - DNA, 15 bp, Homo sapiens
aagtgtgataccctg

SEQ ID NO: 131891 - DNA, 15 bp, Homo sapiens
taagtgtgataccct

SEQ ID NO: 131892 - DNA, 15 bp, Homo sapiens
ttaagtgtgataccc

SEQ ID NO: 131893 - DNA, 15 bp, Homo sapiens
gttaagtgtgatacc

SEQ ID NO: 131894 - DNA, 15 bp, Homo sapiens
agttaagtgtgatac

SEQ ID NO: 131895 - DNA, 15 bp, Homo sapiens
cagttaagtgtgata

SEQ ID NO: 131896 - DNA, 15 bp, Homo sapiens
acagttaagtgtgat

SEQ ID NO: 131897 - DNA, 15 bp, Homo sapiens
gacagttaagtgtga

SEQ ID NO: 131898 - DNA, 15 bp, Homo sapiens
cgacagttaagtgtg

SEQ ID NO: 131899 - DNA, 15 bp, Homo sapiens
acgacagttaagtgt

SEQ ID NO: 131900 - DNA, 15 bp, Homo sapiens
cacgacagttaagtg

SEQ ID NO: 131901 - DNA, 15 bp, Homo sapiens
ccacgacagttaagt

SEQ ID NO: 131902 - DNA, 15 bp, Homo sapiens
tccacgacagttaag

SEQ ID NO: 131903 - DNA, 15 bp, Homo sapiens
atccacgacagttaa

SEQ ID NO: 131904 - DNA, 15 bp, Homo sapiens
tatccacgacagtta

SEQ ID NO: 131905 - DNA, 15 bp, Homo sapiens
ttatccacgacagtt

SEQ ID NO: 131906 - DNA, 15 bp, Homo sapiens
attatccacgacagt

SEQ ID NO: 131907 - DNA, 15 bp, Homo sapiens
gattatccacgacag

SEQ ID NO: 131908 - DNA, 15 bp, Homo sapiens
agattatccacgaca

SEQ ID NO: 131909 - DNA, 15 bp, Homo sapiens
aagattatccacgac

SEQ ID NO: 131910 - DNA, 15 bp, Homo sapiens
aaagattatccacga

SEQ ID NO: 131911 - DNA, 15 bp, Homo sapiens
aaaagattatccacg

SEQ ID NO: 131912 - DNA, 15 bp, Homo sapiens
gaaaagattatccac

SEQ ID NO: 131913 - DNA, 15 bp, Homo sapiens
ggaaaagattatcca

SEQ ID NO: 131914 - DNA, 15 bp, Homo sapiens
aggaaaagattatcc

SEQ ID NO: 131915 - DNA, 15 bp, Homo sapiens
gaggaaaagattatc

SEQ ID NO: 131916 - DNA, 15 bp, Homo sapiens
ggaggaaaagattat

SEQ ID NO: 131917 - DNA, 15 bp, Homo sapiens
tggaggaaaagatta

SEQ ID NO: 131918 - DNA, 15 bp, Homo sapiens
ctggaggaaaagatt

SEQ ID NO: 131919 - DNA, 15 bp, Homo sapiens
tctggaggaaaagat

SEQ ID NO: 131920 - DNA, 15 bp, Homo sapiens
ctctggaggaaaaga

SEQ ID NO: 131921 - DNA, 15 bp, Homo sapiens
tctctggaggaaaag

SEQ ID NO: 131922 - DNA, 15 bp, Homo sapiens
ctctctggaggaaaa

SEQ ID NO: 131923 - DNA, 15 bp, Homo sapiens
actctctggaggaaa

SEQ ID NO: 131924 - DNA, 15 bp, Homo sapiens
tactctctggaggaa

SEQ ID NO: 131925 - DNA, 15 bp, Homo sapiens
atactctctggagga

SEQ ID NO: 131926 - DNA, 15 bp, Homo sapiens
tatactctctggagg

SEQ ID NO: 131927 - DNA, 15 bp, Homo sapiens
ctatactctctggag

SEQ ID NO: 131928 - DNA, 15 bp, Homo sapiens
tctatactctctgga

SEQ ID NO: 131929 - DNA, 15 bp, Homo sapiens
atctatactctctgg

SEQ ID NO: 131930 - DNA, 15 bp, Homo sapiens
catctatactctctg

SEQ ID NO: 131931 - DNA, 15 bp, Homo sapiens
acatctatactctct

SEQ ID NO: 131932 - DNA, 15 bp, Homo sapiens
aacatctatactctc

SEQ ID NO: 131933 - DNA, 15 bp, Homo sapiens
aaacatctatactct

SEQ ID NO: 131934 - DNA, 15 bp, Homo sapiens
taaacatctatactc

SEQ ID NO: 131935 - DNA, 15 bp, Homo sapiens
ttaaacatctatact

SEQ ID NO: 131936 - DNA, 15 bp, Homo sapiens
tttaaacatctatac

SEQ ID NO: 131937 - DNA, 15 bp, Homo sapiens
ctttaaacatctata

SEQ ID NO: 131938 - DNA, 15 bp, Homo sapiens
cctttaaacatctat

SEQ ID NO: 131939 - DNA, 15 bp, Homo sapiens
tcctttaaacatcta

SEQ ID NO: 131940 - DNA, 15 bp, Homo sapiens
ttcctttaaacatct

SEQ ID NO: 131941 - DNA, 15 bp, Homo sapiens
gttcctttaaacatc

SEQ ID NO: 131942 - DNA, 15 bp, Homo sapiens
tgttcctttaaacat

SEQ ID NO: 131943 - DNA, 15 bp, Homo sapiens
gtgttcctttaaaca

SEQ ID NO: 131944 - DNA, 15 bp, Homo sapiens
tgtgttcctttaaac

SEQ ID NO: 131945 - DNA, 15 bp, Homo sapiens
ctgtgttcctttaaa

SEQ ID NO: 131946 - DNA, 15 bp, Homo sapiens
gctgtgttcctttaa

SEQ ID NO: 131947 - DNA, 15 bp, Homo sapiens
agctgtgttccttta

SEQ ID NO: 131948 - DNA, 15 bp, Homo sapiens
tagctgtgttccttt

SEQ ID NO: 131949 - DNA, 15 bp, Homo sapiens
atagctgtgttcctt

SEQ ID NO: 131950 - DNA, 15 bp, Homo sapiens
aatagctgtgttcct

SEQ ID NO: 131951 - DNA, 15 bp, Homo sapiens
aaatagctgtgttcc

SEQ ID NO: 131952 - DNA, 15 bp, Homo sapiens
taaatagctgtgttc

SEQ ID NO: 131953 - DNA, 15 bp, Homo sapiens
ttaaatagctgtgtt

SEQ ID NO: 131954 - DNA, 15 bp, Homo sapiens
attaaatagctgtgt

SEQ ID NO: 131955 - DNA, 15 bp, Homo sapiens
cattaaatagctgtg

SEQ ID NO: 131956 - DNA, 15 bp, Homo sapiens
tcattaaatagctgt

SEQ ID NO: 131957 - DNA, 15 bp, Homo sapiens
atcattaaatagctg

SEQ ID NO: 131958 - DNA, 15 bp, Homo sapiens
tatcattaaatagct

SEQ ID NO: 131959 - DNA, 15 bp, Homo sapiens
atatcattaaatagc

SEQ ID NO: 131960 - DNA, 15 bp, Homo sapiens
catatcattaaatag

SEQ ID NO: 131961 - DNA, 15 bp, Homo sapiens
ccatatcattaaata

SEQ ID NO: 131962 - DNA, 15 bp, Homo sapiens
gccatatcattaaat

SEQ ID NO: 131963 - DNA, 15 bp, Homo sapiens
tgccatatcattaaa

SEQ ID NO: 131964 - DNA, 15 bp, Homo sapiens
gtgccatatcattaa

SEQ ID NO: 131965 - DNA, 15 bp, Homo sapiens
tgtgccatatcatta

SEQ ID NO: 131966 - DNA, 15 bp, Homo sapiens
atgtgccatatcatt

SEQ ID NO: 131967 - DNA, 15 bp, Homo sapiens
gatgtgccatatcat

SEQ ID NO: 131968 - DNA, 15 bp, Homo sapiens
tgatgtgccatatca

SEQ ID NO: 131969 - DNA, 15 bp, Homo sapiens
ttgatgtgccatatc

SEQ ID NO: 131970 - DNA, 15 bp, Homo sapiens
cttgatgtgccatat

SEQ ID NO: 131971 - DNA, 15 bp, Homo sapiens
ccttgatgtgccata

SEQ ID NO: 131972 - DNA, 15 bp, Homo sapiens
accttgatgtgccat

SEQ ID NO: 131973 - DNA, 15 bp, Homo sapiens
aaccttgatgtgcca

SEQ ID NO: 131974 - DNA, 15 bp, Homo sapiens
aaaccttgatgtgcc

SEQ ID NO: 131975 - DNA, 15 bp, Homo sapiens
caaaccttgatgtgc

SEQ ID NO: 131976 - DNA, 15 bp, Homo sapiens
tcaaaccttgatgtg

SEQ ID NO: 131977 - DNA, 15 bp, Homo sapiens
ttataaacatgtttc

SEQ ID NO: 131978 - DNA, 15 bp, Homo sapiens
gttataaacatgttt

SEQ ID NO: 131979 - DNA, 15 bp, Homo sapiens
ggttataaacatgtt

SEQ ID NO: 131980 - DNA, 15 bp, Homo sapiens
tggttataaacatgt

SEQ ID NO: 131981 - DNA, 15 bp, Homo sapiens
ttggttataaacatg

SEQ ID NO: 131982 - DNA, 15 bp, Homo sapiens
tttggttataaacat

SEQ ID NO: 131983 - DNA, 15 bp, Homo sapiens
ttttggttataaaca

SEQ ID NO: 131984 - DNA, 15 bp, Homo sapiens
attttggttataaac

SEQ ID NO: 131985 - DNA, 15 bp, Homo sapiens
aattttggttataaa

SEQ ID NO: 131986 - DNA, 15 bp, Homo sapiens
taattttggttataa

SEQ ID NO: 131987 - DNA, 15 bp, Homo sapiens
ttaattttggttata

SEQ ID NO: 131988 - DNA, 15 bp, Homo sapiens
gttaattttggttat

SEQ ID NO: 131989 - DNA, 15 bp, Homo sapiens
ggttaattttggtta

SEQ ID NO: 131990 - DNA, 15 bp, Homo sapiens
aggttaattttggtt

SEQ ID NO: 131991 - DNA, 15 bp, Homo sapiens
gaggttaattttggt

SEQ ID NO: 131992 - DNA, 15 bp, Homo sapiens
tgaggttaattttgg

SEQ ID NO: 131993 - DNA, 15 bp, Homo sapiens
ttgaggttaattttg

SEQ ID NO: 131994 - DNA, 15 bp, Homo sapiens
tttgaggttaatttt

SEQ ID NO: 131995 - DNA, 15 bp, Homo sapiens
atttgaggttaattt

SEQ ID NO: 131996 - DNA, 15 bp, Homo sapiens
tatttgaggttaatt

SEQ ID NO: 131997 - DNA, 15 bp, Homo sapiens
atatttgaggttaat

SEQ ID NO: 131998 - DNA, 15 bp, Homo sapiens
aatatttgaggttaa

SEQ ID NO: 131999 - DNA, 15 bp, Homo sapiens
caatatttgaggtta

SEQ ID NO: 132000 - DNA, 15 bp, Homo sapiens
gcaatatttgaggtt

SEQ ID NO: 132001 - DNA, 15 bp, Homo sapiens
tgcaatatttgaggt

SEQ ID NO: 132002 - DNA, 15 bp, Homo sapiens
ttgcaatatttgagg

SEQ ID NO: 132003 - DNA, 15 bp, Homo sapiens
tttgcaatatttgag

SEQ ID NO: 132004 - DNA, 15 bp, Homo sapiens
ctttgcaatatttga

SEQ ID NO: 132005 - DNA, 15 bp, Homo sapiens
gctttgcaatatttg

SEQ ID NO: 132006 - DNA, 15 bp, Homo sapiens
ggctttgcaatattt

SEQ ID NO: 132007 - DNA, 15 bp, Homo sapiens
gggctttgcaatatt

SEQ ID NO: 132008 - DNA, 15 bp, Homo sapiens
agggctttgcaatat

SEQ ID NO: 132009 - DNA, 15 bp, Homo sapiens
aagggctttgcaata

SEQ ID NO: 132010 - DNA, 15 bp, Homo sapiens
gaagggctttgcaat

SEQ ID NO: 132011 - DNA, 15 bp, Homo sapiens
tgaagggctttgcaa

SEQ ID NO: 132012 - DNA, 15 bp, Homo sapiens
atgaagggctttgca

SEQ ID NO: 132013 - DNA, 15 bp, Homo sapiens
aatgaagggctttgc

SEQ ID NO: 132014 - DNA, 15 bp, Homo sapiens
aaatgaagggctttg

SEQ ID NO: 132015 - DNA, 15 bp, Homo sapiens
aaaatgaagggcttt

SEQ ID NO: 132016 - DNA, 15 bp, Homo sapiens
caaaatgaagggctt

SEQ ID NO: 132017 - DNA, 15 bp, Homo sapiens
tcaaaatgaagggct

SEQ ID NO: 132018 - DNA, 15 bp, Homo sapiens
ctcaaaatgaagggc

SEQ ID NO: 132019 - DNA, 15 bp, Homo sapiens
actcaaaatgaaggg

SEQ ID NO: 132020 - DNA, 15 bp, Homo sapiens
aactcaaaatgaagg

SEQ ID NO: 132021 - DNA, 15 bp, Homo sapiens
aaactcaaaatgaag

SEQ ID NO: 132022 - DNA, 15 bp, Homo sapiens
taaactcaaaatgaa

SEQ ID NO: 132023 - DNA, 15 bp, Homo sapiens
ttaaactcaaaatga

SEQ ID NO: 132024 - DNA, 15 bp, Homo sapiens
tttaaactcaaaatg

SEQ ID NO: 132025 - DNA, 15 bp, Homo sapiens
ttttaaactcaaaat

SEQ ID NO: 132026 - DNA, 15 bp, Homo sapiens
attttaaactcaaaa

SEQ ID NO: 132027 - DNA, 15 bp, Homo sapiens
aattttaaactcaaa

SEQ ID NO: 132028 - DNA, 15 bp, Homo sapiens
aaattttaaactcaa

SEQ ID NO: 132029 - DNA, 15 bp, Homo sapiens
aaaattttaaactca

SEQ ID NO: 132030 - DNA, 15 bp, Homo sapiens
caaaattttaaactc

SEQ ID NO: 132031 - DNA, 15 bp, Homo sapiens
acaaaattttaaact

SEQ ID NO: 132032 - DNA, 15 bp, Homo sapiens
aacaaaattttaaac

SEQ ID NO: 132033 - DNA, 15 bp, Homo sapiens
aaacaaaattttaaa

SEQ ID NO: 132034 - DNA, 15 bp, Homo sapiens
aaaacaaaattttaa

SEQ ID NO: 132035 - DNA, 15 bp, Homo sapiens
taaaacaaaatttta

SEQ ID NO: 132036 - DNA, 15 bp, Homo sapiens
ataaaacaaaatttt

SEQ ID NO: 132037 - DNA, 15 bp, Homo sapiens
cataaaacaaaattt

SEQ ID NO: 132038 - DNA, 15 bp, Homo sapiens
tcataaaacaaaatt

SEQ ID NO: 132039 - DNA, 15 bp, Homo sapiens
ttcataaaacaaaat

SEQ ID NO: 132040 - DNA, 15 bp, Homo sapiens
tttcataaaacaaaa

SEQ ID NO: 132041 - DNA, 15 bp, Homo sapiens
atttcataaaacaaa

SEQ ID NO: 132042 - DNA, 15 bp, Homo sapiens
catttcataaaacaa

SEQ ID NO: 132043 - DNA, 15 bp, Homo sapiens
ccatttcataaaaca

SEQ ID NO: 132044 - DNA, 15 bp, Homo sapiens
tccatttcataaaac

SEQ ID NO: 132045 - DNA, 15 bp, Homo sapiens
ttccatttcataaaa

SEQ ID NO: 132046 - DNA, 15 bp, Homo sapiens
tttccatttcataaa

SEQ ID NO: 132047 - DNA, 15 bp, Homo sapiens
ctttccatttcataa

SEQ ID NO: 132048 - DNA, 15 bp, Homo sapiens
actttccatttcata

SEQ ID NO: 132049 - DNA, 15 bp, Homo sapiens
cactttccatttcat

SEQ ID NO: 132050 - DNA, 15 bp, Homo sapiens
tcactttccatttca

SEQ ID NO: 132051 - DNA, 15 bp, Homo sapiens
atcactttccatttc

SEQ ID NO: 132052 - DNA, 15 bp, Homo sapiens
tatcactttccattt

SEQ ID NO: 132053 - DNA, 15 bp, Homo sapiens
ttatcactttccatt

SEQ ID NO: 132054 - DNA, 15 bp, Homo sapiens
attatcactttccat

SEQ ID NO: 132055 - DNA, 15 bp, Homo sapiens
tattatcactttcca

SEQ ID NO: 132056 - DNA, 15 bp, Homo sapiens
gtattatcactttcc

SEQ ID NO: 132057 - DNA, 15 bp, Homo sapiens
agtattatcactttc

SEQ ID NO: 132058 - DNA, 15 bp, Homo sapiens
gagtattatcacttt

SEQ ID NO: 132059 - DNA, 15 bp, Homo sapiens
agagtattatcactt

SEQ ID NO: 132060 - DNA, 15 bp, Homo sapiens
aagagtattatcact

SEQ ID NO: 132061 - DNA, 15 bp, Homo sapiens
caagagtattatcac

SEQ ID NO: 132062 - DNA, 15 bp, Homo sapiens
ccaagagtattatca

SEQ ID NO: 132063 - DNA, 15 bp, Homo sapiens
accaagagtattatc

SEQ ID NO: 132064 - DNA, 15 bp, Homo sapiens
caccaagagtattat

SEQ ID NO: 132065 - DNA, 15 bp, Homo sapiens
ccaccaagagtatta

SEQ ID NO: 132066 - DNA, 15 bp, Homo sapiens
cccaccaagagtatt

SEQ ID NO: 132067 - DNA, 15 bp, Homo sapiens
gcccaccaagagtat

SEQ ID NO: 132068 - DNA, 15 bp, Homo sapiens
agcccaccaagagta

SEQ ID NO: 132069 - DNA, 15 bp, Homo sapiens
aagcccaccaagagt

SEQ ID NO: 132070 - DNA, 15 bp, Homo sapiens
taagcccaccaagag

SEQ ID NO: 132071 - DNA, 15 bp, Homo sapiens
ataagcccaccaaga

SEQ ID NO: 132072 - DNA, 15 bp, Homo sapiens
tataagcccaccaag

SEQ ID NO: 132073 - DNA, 15 bp, Homo sapiens
ttataagcccaccaa

SEQ ID NO: 132074 - DNA, 15 bp, Homo sapiens
tttataagcccacca

SEQ ID NO: 132075 - DNA, 15 bp, Homo sapiens
atttataagcccacc

SEQ ID NO: 132076 - DNA, 15 bp, Homo sapiens
aatttataagcccac

SEQ ID NO: 132077 - DNA, 15 bp, Homo sapiens
caatttataagccca

SEQ ID NO: 132078 - DNA, 15 bp, Homo sapiens
ccaatttataagccc

SEQ ID NO: 132079 - DNA, 15 bp, Homo sapiens
cccaatttataagcc

SEQ ID NO: 132080 - DNA, 15 bp, Homo sapiens
tcccaatttataagc

SEQ ID NO: 132081 - DNA, 15 bp, Homo sapiens
ttcccaatttataag

SEQ ID NO: 132082 - DNA, 15 bp, Homo sapiens
cttcccaatttataa

SEQ ID NO: 132083 - DNA, 15 bp, Homo sapiens
tcttcccaatttata

SEQ ID NO: 132084 - DNA, 15 bp, Homo sapiens
ctcttcccaatttat

SEQ ID NO: 132085 - DNA, 15 bp, Homo sapiens
actcttcccaattta

SEQ ID NO: 132086 - DNA, 15 bp, Homo sapiens
aactcttcccaattt

SEQ ID NO: 132087 - DNA, 15 bp, Homo sapiens
aaactcttcccaatt

SEQ ID NO: 132088 - DNA, 15 bp, Homo sapiens
aaaactcttcccaat

SEQ ID NO: 132089 - DNA, 15 bp, Homo sapiens
caaaactcttcccaa

SEQ ID NO: 132090 - DNA, 15 bp, Homo sapiens
ccaaaactcttccca

SEQ ID NO: 132091 - DNA, 15 bp, Homo sapiens
tccaaaactcttccc

SEQ ID NO: 132092 - DNA, 15 bp, Homo sapiens
atccaaaactcttcc

SEQ ID NO: 132093 - DNA, 15 bp, Homo sapiens
aatccaaaactcttc

SEQ ID NO: 132094 - DNA, 15 bp, Homo sapiens
taatccaaaactctt

SEQ ID NO: 132095 - DNA, 15 bp, Homo sapiens
gtaatccaaaactct

SEQ ID NO: 132096 - DNA, 15 bp, Homo sapiens
ggtaatccaaaactc

SEQ ID NO: 132097 - DNA, 15 bp, Homo sapiens
gggtaatccaaaact

SEQ ID NO: 132098 - DNA, 15 bp, Homo sapiens
ggggtaatccaaaac

SEQ ID NO: 132099 - DNA, 15 bp, Homo sapiens
aggggtaatccaaaa

SEQ ID NO: 132100 - DNA, 15 bp, Homo sapiens
caggggtaatccaaa

SEQ ID NO: 132101 - DNA, 15 bp, Homo sapiens
tcaggggtaatccaa

SEQ ID NO: 132102 - DNA, 15 bp, Homo sapiens
ttcaggggtaatcca

SEQ ID NO: 132103 - DNA, 15 bp, Homo sapiens
tttcaggggtaatcc

SEQ ID NO: 132104 - DNA, 15 bp, Homo sapiens
gtttcaggggtaatc

SEQ ID NO: 132105 - DNA, 15 bp, Homo sapiens
cgtttcaggggtaat

SEQ ID NO: 132106 - DNA, 15 bp, Homo sapiens
acgtttcaggggtaa

SEQ ID NO: 132107 - DNA, 15 bp, Homo sapiens
gacgtttcaggggta

SEQ ID NO: 132108 - DNA, 15 bp, Homo sapiens
agacgtttcaggggt

SEQ ID NO: 132109 - DNA, 15 bp, Homo sapiens
gagacgtttcagggg

SEQ ID NO: 132110 - DNA, 15 bp, Homo sapiens
agagacgtttcaggg

SEQ ID NO: 132111 - DNA, 15 bp, Homo sapiens
cagagacgtttcagg

SEQ ID NO: 132112 - DNA, 15 bp, Homo sapiens
ccagagacgtttcag

SEQ ID NO: 132113 - DNA, 15 bp, Homo sapiens
tccagagacgtttca

SEQ ID NO: 132114 - DNA, 15 bp, Homo sapiens
ttccagagacgtttc

SEQ ID NO: 132115 - DNA, 15 bp, Homo sapiens
cttccagagacgttt

SEQ ID NO: 132116 - DNA, 15 bp, Homo sapiens
gcttccagagacgtt

SEQ ID NO: 132117 - DNA, 15 bp, Homo sapiens
agcttccagagacgt

SEQ ID NO: 132118 - DNA, 15 bp, Homo sapiens
aagcttccagagacg

SEQ ID NO: 132119 - DNA, 15 bp, Homo sapiens
gaagcttccagagac

SEQ ID NO: 132120 - DNA, 15 bp, Homo sapiens
agaagcttccagaga

SEQ ID NO: 132121 - DNA, 15 bp, Homo sapiens
cagaagcttccagag

SEQ ID NO: 132122 - DNA, 15 bp, Homo sapiens
acagaagcttccaga

SEQ ID NO: 132123 - DNA, 15 bp, Homo sapiens
aacagaagcttccag

SEQ ID NO: 132124 - DNA, 15 bp, Homo sapiens
taacagaagcttcca

SEQ ID NO: 132125 - DNA, 15 bp, Homo sapiens
ttaacagaagcttcc

SEQ ID NO: 132126 - DNA, 15 bp, Homo sapiens
gttaacagaagcttc

SEQ ID NO: 132127 - DNA, 15 bp, Homo sapiens
ggttaacagaagctt

SEQ ID NO: 132128 - DNA, 15 bp, Homo sapiens
gggttaacagaagct

SEQ ID NO: 132129 - DNA, 15 bp, Homo sapiens
agggttaacagaagc

SEQ ID NO: 132130 - DNA, 15 bp, Homo sapiens
gagggttaacagaag

SEQ ID NO: 132131 - DNA, 15 bp, Homo sapiens
agagggttaacagaa

SEQ ID NO: 132132 - DNA, 15 bp, Homo sapiens
aagagggttaacaga

SEQ ID NO: 132133 - DNA, 15 bp, Homo sapiens
aaagagggttaacag

SEQ ID NO: 132134 - DNA, 15 bp, Homo sapiens
aaaagagggttaaca

SEQ ID NO: 132135 - DNA, 15 bp, Homo sapiens
aaaaagagggttaac

SEQ ID NO: 132136 - DNA, 15 bp, Homo sapiens
aaaaaagagggttaa

SEQ ID NO: 132137 - DNA, 15 bp, Homo sapiens
aaaaaaagagggtta

SEQ ID NO: 132138 - DNA, 15 bp, Homo sapiens
aaaaaaaagagggtt

SEQ ID NO: 132139 - DNA, 15 bp, Homo sapiens
aaaaaaaaagagggt

SEQ ID NO: 132140 - DNA, 15 bp, Homo sapiens
aaaaaaaaaagaggg

SEQ ID NO: 132141 - DNA, 15 bp, Homo sapiens
aaaaaaaaaaagagg

SEQ ID NO: 132142 - DNA, 15 bp, Homo sapiens
aaaaaaaaaaaagag

SEQ ID NO: 132143 - DNA, 15 bp, Homo sapiens
aaaaaaaaaaaaaga

SEQ ID NO: 132144 - DNA, 15 bp, Homo sapiens
actttaaaaaaaaaa

SEQ ID NO: 132145 - DNA, 15 bp, Homo sapiens
gactttaaaaaaaaa

SEQ ID NO: 132146 - DNA, 15 bp, Homo sapiens
tgactttaaaaaaaa

SEQ ID NO: 132147 - DNA, 15 bp, Homo sapiens
ctgactttaaaaaaa

SEQ ID NO: 132148 - DNA, 15 bp, Homo sapiens
tctgactttaaaaaa

SEQ ID NO: 132149 - DNA, 15 bp, Homo sapiens
gtctgactttaaaaa

SEQ ID NO: 132150 - DNA, 15 bp, Homo sapiens
tgtctgactttaaaa

SEQ ID NO: 132151 - DNA, 15 bp, Homo sapiens
ttgtctgactttaaa

SEQ ID NO: 132152 - DNA, 15 bp, Homo sapiens
attgtctgactttaa

SEQ ID NO: 132153 - DNA, 15 bp, Homo sapiens
cattgtctgacttta

SEQ ID NO: 132154 - DNA, 15 bp, Homo sapiens
ccattgtctgacttt

SEQ ID NO: 132155 - DNA, 15 bp, Homo sapiens
accattgtctgactt

SEQ ID NO: 132156 - DNA, 15 bp, Homo sapiens
taccattgtctgact

SEQ ID NO: 132157 - DNA, 15 bp, Homo sapiens
ataccattgtctgac

SEQ ID NO: 132158 - DNA, 15 bp, Homo sapiens
tataccattgtctga

SEQ ID NO: 132159 - DNA, 15 bp, Homo sapiens
atataccattgtctg

SEQ ID NO: 132160 - DNA, 15 bp, Homo sapiens
tatataccattgtct

SEQ ID NO: 132161 - DNA, 15 bp, Homo sapiens
ttatataccattgtc

SEQ ID NO: 132162 - DNA, 15 bp, Homo sapiens
gttatataccattgt

SEQ ID NO: 132163 - DNA, 15 bp, Homo sapiens
agttatataccattg

SEQ ID NO: 132164 - DNA, 15 bp, Homo sapiens
aagttatataccatt

SEQ ID NO: 132165 - DNA, 15 bp, Homo sapiens
aaagttatataccat

SEQ ID NO: 132166 - DNA, 15 bp, Homo sapiens
aaaagttatatacca

SEQ ID NO: 132167 - DNA, 15 bp, Homo sapiens
taaaagttatatacc

SEQ ID NO: 132168 - DNA, 15 bp, Homo sapiens
ttaaaagttatatac

SEQ ID NO: 132169 - DNA, 15 bp, Homo sapiens
gttaaaagttatata

SEQ ID NO: 132170 - DNA, 15 bp, Homo sapiens
agttaaaagttatat

SEQ ID NO: 132171 - DNA, 15 bp, Homo sapiens
gagttaaaagttata

SEQ ID NO: 132172 - DNA, 15 bp, Homo sapiens
agagttaaaagttat

SEQ ID NO: 132173 - DNA, 15 bp, Homo sapiens
gagagttaaaagtta

SEQ ID NO: 132174 - DNA, 15 bp, Homo sapiens
cgagagttaaaagtt

SEQ ID NO: 132175 - DNA, 15 bp, Homo sapiens
tcgagagttaaaagt

SEQ ID NO: 132176 - DNA, 15 bp, Homo sapiens
atcgagagttaaaag

SEQ ID NO: 132177 - DNA, 15 bp, Homo sapiens
tatcgagagttaaaa

SEQ ID NO: 132178 - DNA, 15 bp, Homo sapiens
ctatcgagagttaaa

SEQ ID NO: 132179 - DNA, 15 bp, Homo sapiens
cctatcgagagttaa

SEQ ID NO: 132180 - DNA, 15 bp, Homo sapiens
tcctatcgagagtta

SEQ ID NO: 132181 - DNA, 15 bp, Homo sapiens
ttcctatcgagagtt

SEQ ID NO: 132182 - DNA, 15 bp, Homo sapiens
gttcctatcgagagt

SEQ ID NO: 132183 - DNA, 15 bp, Homo sapiens
agttcctatcgagag

SEQ ID NO: 132184 - DNA, 15 bp, Homo sapiens
tagttcctatcgaga

SEQ ID NO: 132185 - DNA, 15 bp, Homo sapiens
ttagttcctatcgag

SEQ ID NO: 132186 - DNA, 15 bp, Homo sapiens
attagttcctatcga

SEQ ID NO: 132187 - DNA, 15 bp, Homo sapiens
aattagttcctatcg

SEQ ID NO: 132188 - DNA, 15 bp, Homo sapiens
gaattagttcctatc

SEQ ID NO: 132189 - DNA, 15 bp, Homo sapiens
agaattagttcctat

SEQ ID NO: 132190 - DNA, 15 bp, Homo sapiens
cagaattagttccta

SEQ ID NO: 132191 - DNA, 15 bp, Homo sapiens
tcagaattagttcct

SEQ ID NO: 132192 - DNA, 15 bp, Homo sapiens
ttcagaattagttcc

SEQ ID NO: 132193 - DNA, 15 bp, Homo sapiens
cttcagaattagttc

SEQ ID NO: 132194 - DNA, 15 bp, Homo sapiens
gcttcagaattagtt

SEQ ID NO: 132195 - DNA, 15 bp, Homo sapiens
tgcttcagaattagt

SEQ ID NO: 132196 - DNA, 15 bp, Homo sapiens
atgcttcagaattag

SEQ ID NO: 132197 - DNA, 15 bp, Homo sapiens
gatgcttcagaatta

SEQ ID NO: 132198 - DNA, 15 bp, Homo sapiens
tgatgcttcagaatt

SEQ ID NO: 132199 - DNA, 15 bp, Homo sapiens
ttgatgcttcagaat

SEQ ID NO: 132200 - DNA, 15 bp, Homo sapiens
tttgatgcttcagaa

SEQ ID NO: 132201 - DNA, 15 bp, Homo sapiens
atttgatgcttcaga

SEQ ID NO: 132202 - DNA, 15 bp, Homo sapiens
catttgatgcttcag

SEQ ID NO: 132203 - DNA, 15 bp, Homo sapiens
gcatttgatgcttca

SEQ ID NO: 132204 - DNA, 15 bp, Homo sapiens
agcatttgatgcttc

SEQ ID NO: 132205 - DNA, 15 bp, Homo sapiens
aagcatttgatgctt

SEQ ID NO: 132206 - DNA, 15 bp, Homo sapiens
gaagcatttgatgct

SEQ ID NO: 132207 - DNA, 15 bp, Homo sapiens
agaagcatttgatgc

SEQ ID NO: 132208 - DNA, 15 bp, Homo sapiens
cagaagcatttgatg

SEQ ID NO: 132209 - DNA, 15 bp, Homo sapiens
tcagaagcatttgat

SEQ ID NO: 132210 - DNA, 15 bp, Homo sapiens
ttcagaagcatttga

SEQ ID NO: 132211 - DNA, 15 bp, Homo sapiens
tttcagaagcatttg

SEQ ID NO: 132212 - DNA, 15 bp, Homo sapiens
gtttcagaagcattt

SEQ ID NO: 132213 - DNA, 15 bp, Homo sapiens
tgtttcagaagcatt

SEQ ID NO: 132214 - DNA, 15 bp, Homo sapiens
ctgtttcagaagcat

SEQ ID NO: 132215 - DNA, 15 bp, Homo sapiens
tctgtttcagaagca

SEQ ID NO: 132216 - DNA, 15 bp, Homo sapiens
ttctgtttcagaagc

SEQ ID NO: 132217 - DNA, 15 bp, Homo sapiens
attctgtttcagaag

SEQ ID NO: 132218 - DNA, 15 bp, Homo sapiens
gattctgtttcagaa

SEQ ID NO: 132219 - DNA, 15 bp, Homo sapiens
agattctgtttcaga

SEQ ID NO: 132220 - DNA, 15 bp, Homo sapiens
cagattctgtttcag

SEQ ID NO: 132221 - DNA, 15 bp, Homo sapiens
tcagattctgtttca

SEQ ID NO: 132222 - DNA, 15 bp, Homo sapiens
gtcagattctgtttc

SEQ ID NO: 132223 - DNA, 15 bp, Homo sapiens
ggtcagattctgttt

SEQ ID NO: 132224 - DNA, 15 bp, Homo sapiens
tggtcagattctgtt

SEQ ID NO: 132225 - DNA, 15 bp, Homo sapiens
gtggtcagattctgt

SEQ ID NO: 132226 - DNA, 15 bp, Homo sapiens
tgtggtcagattctg

SEQ ID NO: 132227 - DNA, 15 bp, Homo sapiens
ctgtggtcagattct

SEQ ID NO: 132228 - DNA, 15 bp, Homo sapiens
tctgtggtcagattc

SEQ ID NO: 132229 - DNA, 15 bp, Homo sapiens
ctctgtggtcagatt

SEQ ID NO: 132230 - DNA, 15 bp, Homo sapiens
tctctgtggtcagat

SEQ ID NO: 132231 - DNA, 15 bp, Homo sapiens
gtctctgtggtcaga

SEQ ID NO: 132232 - DNA, 15 bp, Homo sapiens
cgtctctgtggtcag

SEQ ID NO: 132233 - DNA, 15 bp, Homo sapiens
tcgtctctgtggtca

SEQ ID NO: 132234 - DNA, 15 bp, Homo sapiens
ttcgtctctgtggtc

SEQ ID NO: 132235 - DNA, 15 bp, Homo sapiens
gttcgtctctgtggt

SEQ ID NO: 132236 - DNA, 15 bp, Homo sapiens
agttcgtctctgtgg

SEQ ID NO: 132237 - DNA, 15 bp, Homo sapiens
gagttcgtctctgtg

SEQ ID NO: 132238 - DNA, 15 bp, Homo sapiens
tgagttcgtctctgt

SEQ ID NO: 132239 - DNA, 15 bp, Homo sapiens
ctgagttcgtctctg

SEQ ID NO: 132240 - DNA, 15 bp, Homo sapiens
actgagttcgtctct

SEQ ID NO: 132241 - DNA, 15 bp, Homo sapiens
cactgagttcgtctc

SEQ ID NO: 132242 - DNA, 15 bp, Homo sapiens
tcactgagttcgtct

SEQ ID NO: 132243 - DNA, 15 bp, Homo sapiens
atcactgagttcgtc

SEQ ID NO: 132244 - DNA, 15 bp, Homo sapiens
aatcactgagttcgt

SEQ ID NO: 132245 - DNA, 15 bp, Homo sapiens
caatcactgagttcg

SEQ ID NO: 132246 - DNA, 15 bp, Homo sapiens
ccaatcactgagttc

SEQ ID NO: 132247 - DNA, 15 bp, Homo sapiens
accaatcactgagtt

SEQ ID NO: 132248 - DNA, 15 bp, Homo sapiens
gaccaatcactgagt

SEQ ID NO: 132249 - DNA, 15 bp, Homo sapiens
tgaccaatcactgag

SEQ ID NO: 132250 - DNA, 15 bp, Homo sapiens
atgaccaatcactga

SEQ ID NO: 132251 - DNA, 15 bp, Homo sapiens
aatgaccaatcactg

SEQ ID NO: 132252 - DNA, 15 bp, Homo sapiens
taatgaccaatcact

SEQ ID NO: 132253 - DNA, 15 bp, Homo sapiens
ctaatgaccaatcac

SEQ ID NO: 132254 - DNA, 15 bp, Homo sapiens
gctaatgaccaatca

SEQ ID NO: 132255 - DNA, 15 bp, Homo sapiens
agctaatgaccaatc

SEQ ID NO: 132256 - DNA, 15 bp, Homo sapiens
cctctcttcctctgt

SEQ ID NO: 132257 - DNA, 15 bp, Homo sapiens
ccctctcttcctctg

SEQ ID NO: 132258 - DNA, 15 bp, Homo sapiens
tccctctcttcctct

SEQ ID NO: 132259 - DNA, 15 bp, Homo sapiens
ctccctctcttcctc

SEQ ID NO: 132260 - DNA, 15 bp, Homo sapiens
tctccctctcttcct

SEQ ID NO: 132261 - DNA, 15 bp, Homo sapiens
ctctccctctcttcc

SEQ ID NO: 132262 - DNA, 15 bp, Homo sapiens
gctctccctctcttc

SEQ ID NO: 132263 - DNA, 15 bp, Homo sapiens
agctctccctctctt

SEQ ID NO: 132264 - DNA, 15 bp, Homo sapiens
aagctctccctctct

SEQ ID NO: 132265 - DNA, 15 bp, Homo sapiens
gaagctctccctctc

SEQ ID NO: 132266 - DNA, 15 bp, Homo sapiens
ggaagctctccctct

SEQ ID NO: 132267 - DNA, 15 bp, Homo sapiens
aggaagctctccctc

SEQ ID NO: 132268 - DNA, 15 bp, Homo sapiens
caggaagctctccct

SEQ ID NO: 132269 - DNA, 15 bp, Homo sapiens
gcaggaagctctccc

SEQ ID NO: 132270 - DNA, 15 bp, Homo sapiens
cgcaggaagctctcc

SEQ ID NO: 132271 - DNA, 15 bp, Homo sapiens
gcgcaggaagctctc

SEQ ID NO: 132272 - DNA, 15 bp, Homo sapiens
tgcgcaggaagctct

SEQ ID NO: 132273 - DNA, 15 bp, Homo sapiens
ctgcgcaggaagctc

SEQ ID NO: 132274 - DNA, 15 bp, Homo sapiens
tctgcgcaggaagct

SEQ ID NO: 132275 - DNA, 15 bp, Homo sapiens
ctctgcgcaggaagc

SEQ ID NO: 132276 - DNA, 15 bp, Homo sapiens
cctctgcgcaggaag

SEQ ID NO: 132277 - DNA, 15 bp, Homo sapiens
tcctctgcgcaggaa

SEQ ID NO: 132278 - DNA, 15 bp, Homo sapiens
ctcctctgcgcagga

SEQ ID NO: 132279 - DNA, 15 bp, Homo sapiens
tctcctctgcgcagg

SEQ ID NO: 132280 - DNA, 15 bp, Homo sapiens
gtctcctctgcgcag

SEQ ID NO: 132281 - DNA, 15 bp, Homo sapiens
cgtctcctctgcgca

SEQ ID NO: 132282 - DNA, 15 bp, Homo sapiens
ccgtctcctctgcgc

SEQ ID NO: 132283 - DNA, 15 bp, Homo sapiens
tccgtctcctctgcg

SEQ ID NO: 132284 - DNA, 15 bp, Homo sapiens
gtccgtctcctctgc

SEQ ID NO: 132285 - DNA, 15 bp, Homo sapiens
cgtccgtctcctctg

SEQ ID NO: 132286 - DNA, 15 bp, Homo sapiens
ccgtccgtctcctct

SEQ ID NO: 132287 - DNA, 15 bp, Homo sapiens
gccgtccgtctcctc

SEQ ID NO: 132288 - DNA, 15 bp, Homo sapiens
cgccgtccgtctcct

SEQ ID NO: 132289 - DNA, 15 bp, Homo sapiens
ccgccgtccgtctcc

SEQ ID NO: 132290 - DNA, 15 bp, Homo sapiens
gccgccgtccgtctc

SEQ ID NO: 132291 - DNA, 15 bp, Homo sapiens
cgccgccgtccgtct

SEQ ID NO: 132292 - DNA, 15 bp, Homo sapiens
acgccgccgtccgtc

SEQ ID NO: 132293 - DNA, 15 bp, Homo sapiens
cacgccgccgtccgt

SEQ ID NO: 132294 - DNA, 15 bp, Homo sapiens
ccacgccgccgtccg

SEQ ID NO: 132295 - DNA, 15 bp, Homo sapiens
tccacgccgccgtcc

SEQ ID NO: 132296 - DNA, 15 bp, Homo sapiens
ctccacgccgccgtc

SEQ ID NO: 132297 - DNA, 15 bp, Homo sapiens
cctccacgccgccgt

SEQ ID NO: 132298 - DNA, 15 bp, Homo sapiens
ccctccacgccgccg

SEQ ID NO: 132299 - DNA, 15 bp, Homo sapiens
cccctccacgccgcc

SEQ ID NO: 132300 - DNA, 15 bp, Homo sapiens
ccccctccacgccgc

SEQ ID NO: 132301 - DNA, 15 bp, Homo sapiens
tccccctccacgccg

SEQ ID NO: 132302 - DNA, 15 bp, Homo sapiens
ctccccctccacgcc

SEQ ID NO: 132303 - DNA, 15 bp, Homo sapiens
cctccccctccacgc

SEQ ID NO: 132304 - DNA, 15 bp, Homo sapiens
tcctccccctccacg

SEQ ID NO: 132305 - DNA, 15 bp, Homo sapiens
ttcctccccctccac

SEQ ID NO: 132306 - DNA, 15 bp, Homo sapiens
cttcctccccctcca

SEQ ID NO: 132307 - DNA, 15 bp, Homo sapiens
tcttcctccccctcc

SEQ ID NO: 132308 - DNA, 15 bp, Homo sapiens
ctcttcctccccctc

SEQ ID NO: 132309 - DNA, 15 bp, Homo sapiens
cctcttcctccccct

SEQ ID NO: 132310 - DNA, 15 bp, Homo sapiens
tcctcttcctccccc

SEQ ID NO: 132311 - DNA, 15 bp, Homo sapiens
gtcctcttcctcccc

SEQ ID NO: 132312 - DNA, 15 bp, Homo sapiens
tgtcctcttcctccc

SEQ ID NO: 132313 - DNA, 15 bp, Homo sapiens
ttgtcctcttcctcc

SEQ ID NO: 132314 - DNA, 15 bp, Homo sapiens
cttgtcctcttcctc

SEQ ID NO: 132315 - DNA, 15 bp, Homo sapiens
ccttgtcctcttcct

SEQ ID NO: 132316 - DNA, 15 bp, Homo sapiens
tccttgtcctcttcc

SEQ ID NO: 132317 - DNA, 15 bp, Homo sapiens
ctccttgtcctcttc

SEQ ID NO: 132318 - DNA, 15 bp, Homo sapiens
cctccttgtcctctt

SEQ ID NO: 132319 - DNA, 15 bp, Homo sapiens
tcctccttgtcctct

SEQ ID NO: 132320 - DNA, 15 bp, Homo sapiens
ttcctccttgtcctc

SEQ ID NO: 132321 - DNA, 15 bp, Homo sapiens
cttcctccttgtcct

SEQ ID NO: 132322 - DNA, 15 bp, Homo sapiens
tcttcctccttgtcc

SEQ ID NO: 132323 - DNA, 15 bp, Homo sapiens
ctcttcctccttgtc

SEQ ID NO: 132324 - DNA, 15 bp, Homo sapiens
cctcttcctccttgt

SEQ ID NO: 132325 - DNA, 15 bp, Homo sapiens
tcctcttcctccttg

SEQ ID NO: 132326 - DNA, 15 bp, Homo sapiens
gtcctcttcctcctt

SEQ ID NO: 132327 - DNA, 15 bp, Homo sapiens
cgtcctcttcctcct

SEQ ID NO: 132328 - DNA, 15 bp, Homo sapiens
acgtcctcttcctcc

SEQ ID NO: 132329 - DNA, 15 bp, Homo sapiens
cacgtcctcttcctc

SEQ ID NO: 132330 - DNA, 15 bp, Homo sapiens
ccacgtcctcttcct

SEQ ID NO: 132331 - DNA, 15 bp, Homo sapiens
tccacgtcctcttcc

SEQ ID NO: 132332 - DNA, 15 bp, Homo sapiens
ctccacgtcctcttc

SEQ ID NO: 132333 - DNA, 15 bp, Homo sapiens
cctccacgtcctctt

SEQ ID NO: 132334 - DNA, 15 bp, Homo sapiens
tcctccacgtcctct

SEQ ID NO: 132335 - DNA, 15 bp, Homo sapiens
ctcctccacgtcctc

SEQ ID NO: 132336 - DNA, 15 bp, Homo sapiens
cctcctccacgtcct

SEQ ID NO: 132337 - DNA, 15 bp, Homo sapiens
gcctcctccacgtcc

SEQ ID NO: 132338 - DNA, 15 bp, Homo sapiens
agcctcctccacgtc

SEQ ID NO: 132339 - DNA, 15 bp, Homo sapiens
aagcctcctccacgt

SEQ ID NO: 132340 - DNA, 15 bp, Homo sapiens
gaagcctcctccacg

SEQ ID NO: 132341 - DNA, 15 bp, Homo sapiens
tgaagcctcctccac

SEQ ID NO: 132342 - DNA, 15 bp, Homo sapiens
ttgaagcctcctcca

SEQ ID NO: 132343 - DNA, 15 bp, Homo sapiens
tttgaagcctcctcc

SEQ ID NO: 132344 - DNA, 15 bp, Homo sapiens
ctttgaagcctcctc

SEQ ID NO: 132345 - DNA, 15 bp, Homo sapiens
cctttgaagcctcct

SEQ ID NO: 132346 - DNA, 15 bp, Homo sapiens
acctttgaagcctcc

SEQ ID NO: 132347 - DNA, 15 bp, Homo sapiens
tacctttgaagcctc

SEQ ID NO: 132348 - DNA, 15 bp, Homo sapiens
atacctttgaagcct

SEQ ID NO: 132349 - DNA, 15 bp, Homo sapiens
catacctttgaagcc

SEQ ID NO: 132350 - DNA, 15 bp, Homo sapiens
ccatacctttgaagc

SEQ ID NO: 132351 - DNA, 15 bp, Homo sapiens
tccatacctttgaag

SEQ ID NO: 132352 - DNA, 15 bp, Homo sapiens
ctccatacctttgaa

SEQ ID NO: 132353 - DNA, 15 bp, Homo sapiens
tctccatacctttga

SEQ ID NO: 132354 - DNA, 15 bp, Homo sapiens
atctccatacctttg

SEQ ID NO: 132355 - DNA, 15 bp, Homo sapiens
gatctccataccttt

SEQ ID NO: 132356 - DNA, 15 bp, Homo sapiens
agatctccatacctt

SEQ ID NO: 132357 - DNA, 15 bp, Homo sapiens
aagatctccatacct

SEQ ID NO: 132358 - DNA, 15 bp, Homo sapiens
gaagatctccatacc

SEQ ID NO: 132359 - DNA, 15 bp, Homo sapiens
tgaagatctccatac

SEQ ID NO: 132360 - DNA, 15 bp, Homo sapiens
atgaagatctccata

SEQ ID NO: 132361 - DNA, 15 bp, Homo sapiens
aatgaagatctccat

SEQ ID NO: 132362 - DNA, 15 bp, Homo sapiens
taatgaagatctcca

SEQ ID NO: 132363 - DNA, 15 bp, Homo sapiens
ttaatgaagatctcc

SEQ ID NO: 132364 - DNA, 15 bp, Homo sapiens
cttaatgaagatctc

SEQ ID NO: 132365 - DNA, 15 bp, Homo sapiens
tcttaatgaagatct

SEQ ID NO: 132366 - DNA, 15 bp, Homo sapiens
ttcttaatgaagatc

SEQ ID NO: 132367 - DNA, 15 bp, Homo sapiens
tttcttaatgaagat

SEQ ID NO: 132368 - DNA, 15 bp, Homo sapiens
atttcttaatgaaga

SEQ ID NO: 132369 - DNA, 15 bp, Homo sapiens
gatttcttaatgaag

SEQ ID NO: 132370 - DNA, 15 bp, Homo sapiens
tgatttcttaatgaa

SEQ ID NO: 132371 - DNA, 15 bp, Homo sapiens
ttgatttcttaatga

SEQ ID NO: 132372 - DNA, 15 bp, Homo sapiens
tttgatttcttaatg

SEQ ID NO: 132373 - DNA, 15 bp, Homo sapiens
ctttgatttcttaat

SEQ ID NO: 132374 - DNA, 15 bp, Homo sapiens
actttgatttcttaa

SEQ ID NO: 132375 - DNA, 15 bp, Homo sapiens
cactttgatttctta

SEQ ID NO: 132376 - DNA, 15 bp, Homo sapiens
tcactttgatttctt

SEQ ID NO: 132377 - DNA, 15 bp, Homo sapiens
ttcactttgatttct

SEQ ID NO: 132378 - DNA, 15 bp, Homo sapiens
attcactttgatttc

SEQ ID NO: 132379 - DNA, 15 bp, Homo sapiens
aattcactttgattt

SEQ ID NO: 132380 - DNA, 15 bp, Homo sapiens
caattcactttgatt

SEQ ID NO: 132381 - DNA, 15 bp, Homo sapiens
acaattcactttgat

SEQ ID NO: 132382 - DNA, 15 bp, Homo sapiens
tacaattcactttga

SEQ ID NO: 132383 - DNA, 15 bp, Homo sapiens
ttacaattcactttg

SEQ ID NO: 132384 - DNA, 15 bp, Homo sapiens
gttacaattcacttt

SEQ ID NO: 132385 - DNA, 15 bp, Homo sapiens
tgttacaattcactt

SEQ ID NO: 132386 - DNA, 15 bp, Homo sapiens
ctgttacaattcact

SEQ ID NO: 132387 - DNA, 15 bp, Homo sapiens
gctgttacaattcac

SEQ ID NO: 132388 - DNA, 15 bp, Homo sapiens
agctgttacaattca

SEQ ID NO: 132389 - DNA, 15 bp, Homo sapiens
cagctgttacaattc

SEQ ID NO: 132390 - DNA, 15 bp, Homo sapiens
acagctgttacaatt

SEQ ID NO: 132391 - DNA, 15 bp, Homo sapiens
gacagctgttacaat

SEQ ID NO: 132392 - DNA, 15 bp, Homo sapiens
agacagctgttacaa

SEQ ID NO: 132393 - DNA, 15 bp, Homo sapiens
aagacagctgttaca

SEQ ID NO: 132394 - DNA, 15 bp, Homo sapiens
caagacagctgttac

SEQ ID NO: 132395 - DNA, 15 bp, Homo sapiens
tcaagacagctgtta

SEQ ID NO: 132396 - DNA, 15 bp, Homo sapiens
ttcaagacagctgtt

SEQ ID NO: 132397 - DNA, 15 bp, Homo sapiens
cttcaagacagctgt

SEQ ID NO: 132398 - DNA, 15 bp, Homo sapiens
acttcaagacagctg

SEQ ID NO: 132399 - DNA, 15 bp, Homo sapiens
aacttcaagacagct

SEQ ID NO: 132400 - DNA, 15 bp, Homo sapiens
gaacttcaagacagc

SEQ ID NO: 132401 - DNA, 15 bp, Homo sapiens
ggaacttcaagacag

SEQ ID NO: 132402 - DNA, 15 bp, Homo sapiens
tggaacttcaagaca

SEQ ID NO: 132403 - DNA, 15 bp, Homo sapiens
atggaacttcaagac

SEQ ID NO: 132404 - DNA, 15 bp, Homo sapiens
catggaacttcaaga

SEQ ID NO: 132405 - DNA, 15 bp, Homo sapiens
tcatggaacttcaag

SEQ ID NO: 132406 - DNA, 15 bp, Homo sapiens
ctcatggaacttcaa

SEQ ID NO: 132407 - DNA, 15 bp, Homo sapiens
tctcatggaacttca

SEQ ID NO: 132408 - DNA, 15 bp, Homo sapiens
ttctcatggaacttc

SEQ ID NO: 132409 - DNA, 15 bp, Homo sapiens
tttctcatggaactt

SEQ ID NO: 132410 - DNA, 15 bp, Homo sapiens
atttctcatggaact

SEQ ID NO: 132411 - DNA, 15 bp, Homo sapiens
gatttctcatggaac

SEQ ID NO: 132412 - DNA, 15 bp, Homo sapiens
ggatttctcatggaa

SEQ ID NO: 132413 - DNA, 15 bp, Homo sapiens
aggatttctcatgga

SEQ ID NO: 132414 - DNA, 15 bp, Homo sapiens
taggatttctcatgg

SEQ ID NO: 132415 - DNA, 15 bp, Homo sapiens
ataggatttctcatg

SEQ ID NO: 132416 - DNA, 15 bp, Homo sapiens
aataggatttctcat

SEQ ID NO: 132417 - DNA, 15 bp, Homo sapiens
caataggatttctca

SEQ ID NO: 132418 - DNA, 15 bp, Homo sapiens
tcaataggatttctc

SEQ ID NO: 132419 - DNA, 15 bp, Homo sapiens
atcaataggatttct

SEQ ID NO: 132420 - DNA, 15 bp, Homo sapiens
catcaataggatttc

SEQ ID NO: 132421 - DNA, 15 bp, Homo sapiens
gcatcaataggattt

SEQ ID NO: 132422 - DNA, 15 bp, Homo sapiens
tgcatcaataggatt

SEQ ID NO: 132423 - DNA, 15 bp, Homo sapiens
ttgcatcaataggat

SEQ ID NO: 132424 - DNA, 15 bp, Homo sapiens
attgcatcaatagga

SEQ ID NO: 132425 - DNA, 15 bp, Homo sapiens
cattgcatcaatagg

SEQ ID NO: 132426 - DNA, 15 bp, Homo sapiens
tcattgcatcaatag

SEQ ID NO: 132427 - DNA, 15 bp, Homo sapiens
ttcattgcatcaata

SEQ ID NO: 132428 - DNA, 15 bp, Homo sapiens
gttcattgcatcaat

SEQ ID NO: 132429 - DNA, 15 bp, Homo sapiens
agttcattgcatcaa

SEQ ID NO: 132430 - DNA, 15 bp, Homo sapiens
cagttcattgcatca

SEQ ID NO: 132431 - DNA, 15 bp, Homo sapiens
acagttcattgcatc

SEQ ID NO: 132432 - DNA, 15 bp, Homo sapiens
aacagttcattgcat

SEQ ID NO: 132433 - DNA, 15 bp, Homo sapiens
taacagttcattgca

SEQ ID NO: 132434 - DNA, 15 bp, Homo sapiens
gtaacagttcattgc

SEQ ID NO: 132435 - DNA, 15 bp, Homo sapiens
ggtaacagttcattg

SEQ ID NO: 132436 - DNA, 15 bp, Homo sapiens
tggtaacagttcatt

SEQ ID NO: 132437 - DNA, 15 bp, Homo sapiens
ttggtaacagttcat

SEQ ID NO: 132438 - DNA, 15 bp, Homo sapiens
cttggtaacagttca

SEQ ID NO: 132439 - DNA, 15 bp, Homo sapiens
tcttggtaacagttc

SEQ ID NO: 132440 - DNA, 15 bp, Homo sapiens
atcttggtaacagtt

SEQ ID NO: 132441 - DNA, 15 bp, Homo sapiens
gatcttggtaacagt

SEQ ID NO: 132442 - DNA, 15 bp, Homo sapiens
ggatcttggtaacag

SEQ ID NO: 132443 - DNA, 15 bp, Homo sapiens
gggatcttggtaaca

SEQ ID NO: 132444 - DNA, 15 bp, Homo sapiens
tgggatcttggtaac

SEQ ID NO: 132445 - DNA, 15 bp, Homo sapiens
atgggatcttggtaa

SEQ ID NO: 132446 - DNA, 15 bp, Homo sapiens
gatgggatcttggta

SEQ ID NO: 132447 - DNA, 15 bp, Homo sapiens
agatgggatcttggt

SEQ ID NO: 132448 - DNA, 15 bp, Homo sapiens
gagatgggatcttgg

SEQ ID NO: 132449 - DNA, 15 bp, Homo sapiens
agagatgggatcttg

SEQ ID NO: 132450 - DNA, 15 bp, Homo sapiens
gagagatgggatctt

SEQ ID NO: 132451 - DNA, 15 bp, Homo sapiens
ggagagatgggatct

SEQ ID NO: 132452 - DNA, 15 bp, Homo sapiens
gggagagatgggatc

SEQ ID NO: 132453 - DNA, 15 bp, Homo sapiens
cgggagagatgggat

SEQ ID NO: 132454 - DNA, 15 bp, Homo sapiens
acgggagagatggga

SEQ ID NO: 132455 - DNA, 15 bp, Homo sapiens
aacgggagagatggg

SEQ ID NO: 132456 - DNA, 15 bp, Homo sapiens
aaacgggagagatgg

SEQ ID NO: 132457 - DNA, 15 bp, Homo sapiens
aaaacgggagagatg

SEQ ID NO: 132458 - DNA, 15 bp, Homo sapiens
caaaacgggagagat

SEQ ID NO: 132459 - DNA, 15 bp, Homo sapiens
acaaaacgggagaga

SEQ ID NO: 132460 - DNA, 15 bp, Homo sapiens
cacaaaacgggagag

SEQ ID NO: 132461 - DNA, 15 bp, Homo sapiens
gcacaaaacgggaga

SEQ ID NO: 132462 - DNA, 15 bp, Homo sapiens
agcacaaaacgggag

SEQ ID NO: 132463 - DNA, 15 bp, Homo sapiens
cagcacaaaacggga

SEQ ID NO: 132464 - DNA, 15 bp, Homo sapiens
tcagcacaaaacggg

SEQ ID NO: 132465 - DNA, 15 bp, Homo sapiens
atcagcacaaaacgg

SEQ ID NO: 132466 - DNA, 15 bp, Homo sapiens
tatcagcacaaaacg

SEQ ID NO: 132467 - DNA, 15 bp, Homo sapiens
gtatcagcacaaaac

SEQ ID NO: 132468 - DNA, 15 bp, Homo sapiens
ggtatcagcacaaaa

SEQ ID NO: 132469 - DNA, 15 bp, Homo sapiens
tggtatcagcacaaa

SEQ ID NO: 132470 - DNA, 15 bp, Homo sapiens
atggtatcagcacaa

SEQ ID NO: 132471 - DNA, 15 bp, Homo sapiens
tatggtatcagcaca

SEQ ID NO: 132472 - DNA, 15 bp, Homo sapiens
ctatggtatcagcac

SEQ ID NO: 132473 - DNA, 15 bp, Homo sapiens
cctatggtatcagca

SEQ ID NO: 132474 - DNA, 15 bp, Homo sapiens
tcctatggtatcagc

SEQ ID NO: 132475 - DNA, 15 bp, Homo sapiens
ttcctatggtatcag

SEQ ID NO: 132476 - DNA, 15 bp, Homo sapiens
tttcctatggtatca

SEQ ID NO: 132477 - DNA, 15 bp, Homo sapiens
ctttcctatggtatc

SEQ ID NO: 132478 - DNA, 15 bp, Homo sapiens
cctttcctatggtat

SEQ ID NO: 132479 - DNA, 15 bp, Homo sapiens
tcctttcctatggta

SEQ ID NO: 132480 - DNA, 15 bp, Homo sapiens
atcctttcctatggt

SEQ ID NO: 132481 - DNA, 15 bp, Homo sapiens
gatcctttcctatgg

SEQ ID NO: 132482 - DNA, 15 bp, Homo sapiens
tgatcctttcctatg

SEQ ID NO: 132483 - DNA, 15 bp, Homo sapiens
ctgatcctttcctat

SEQ ID NO: 132484 - DNA, 15 bp, Homo sapiens
gctgatcctttccta

SEQ ID NO: 132485 - DNA, 15 bp, Homo sapiens
ggctgatcctttcct

SEQ ID NO: 132486 - DNA, 15 bp, Homo sapiens
aggctgatcctttcc

SEQ ID NO: 132487 - DNA, 15 bp, Homo sapiens
aaggctgatcctttc

SEQ ID NO: 132488 - DNA, 15 bp, Homo sapiens
gaaggctgatccttt

SEQ ID NO: 132489 - DNA, 15 bp, Homo sapiens
ggaaggctgatcctt

SEQ ID NO: 132490 - DNA, 15 bp, Homo sapiens
tggaaggctgatcct

SEQ ID NO: 132491 - DNA, 15 bp, Homo sapiens
gtggaaggctgatcc

SEQ ID NO: 132492 - DNA, 15 bp, Homo sapiens
agtggaaggctgatc

SEQ ID NO: 132493 - DNA, 15 bp, Homo sapiens
aagtggaaggctgat

SEQ ID NO: 132494 - DNA, 15 bp, Homo sapiens
caagtggaaggctga

SEQ ID NO: 132495 - DNA, 15 bp, Homo sapiens
acaagtggaaggctg

SEQ ID NO: 132496 - DNA, 15 bp, Homo sapiens
cacaagtggaaggct

SEQ ID NO: 132497 - DNA, 15 bp, Homo sapiens
acacaagtggaaggc

SEQ ID NO: 132498 - DNA, 15 bp, Homo sapiens
tacacaagtggaagg

SEQ ID NO: 132499 - DNA, 15 bp, Homo sapiens
ctacacaagtggaag

SEQ ID NO: 132500 - DNA, 15 bp, Homo sapiens
tctacacaagtggaa

SEQ ID NO: 132501 - DNA, 15 bp, Homo sapiens
ttctacacaagtgga

SEQ ID NO: 132502 - DNA, 15 bp, Homo sapiens
tttctacacaagtgg

SEQ ID NO: 132503 - DNA, 15 bp, Homo sapiens
ctttctacacaagtg

SEQ ID NO: 132504 - DNA, 15 bp, Homo sapiens
tctttctacacaagt

SEQ ID NO: 132505 - DNA, 15 bp, Homo sapiens
ttctttctacacaag

SEQ ID NO: 132506 - DNA, 15 bp, Homo sapiens
tttctttctacacaa

SEQ ID NO: 132507 - DNA, 15 bp, Homo sapiens
ctttctttctacaca

SEQ ID NO: 132508 - DNA, 15 bp, Homo sapiens
tctttctttctacac

SEQ ID NO: 132509 - DNA, 15 bp, Homo sapiens
ttctttctttctaca

SEQ ID NO: 132510 - DNA, 15 bp, Homo sapiens
attctttctttctac

SEQ ID NO: 132511 - DNA, 15 bp, Homo sapiens
tattctttctttcta

SEQ ID NO: 132512 - DNA, 15 bp, Homo sapiens
atattctttctttct

SEQ ID NO: 132513 - DNA, 15 bp, Homo sapiens
aatattctttctttc

SEQ ID NO: 132514 - DNA, 15 bp, Homo sapiens
taatattctttcttt

SEQ ID NO: 132515 - DNA, 15 bp, Homo sapiens
ctaatattctttctt

SEQ ID NO: 132516 - DNA, 15 bp, Homo sapiens
cctaatattctttct

SEQ ID NO: 132517 - DNA, 15 bp, Homo sapiens
gcctaatattctttc

SEQ ID NO: 132518 - DNA, 15 bp, Homo sapiens
tgcctaatattcttt

SEQ ID NO: 132519 - DNA, 15 bp, Homo sapiens
ctgcctaatattctt

SEQ ID NO: 132520 - DNA, 15 bp, Homo sapiens
gctgcctaatattct

SEQ ID NO: 132521 - DNA, 15 bp, Homo sapiens
ggctgcctaatattc

SEQ ID NO: 132522 - DNA, 15 bp, Homo sapiens
aggctgcctaatatt

SEQ ID NO: 132523 - DNA, 15 bp, Homo sapiens
aaggctgcctaatat

SEQ ID NO: 132524 - DNA, 15 bp, Homo sapiens
gaaggctgcctaata

SEQ ID NO: 132525 - DNA, 15 bp, Homo sapiens
ggaaggctgcctaat

SEQ ID NO: 132526 - DNA, 15 bp, Homo sapiens
aggaaggctgcctaa

SEQ ID NO: 132527 - DNA, 15 bp, Homo sapiens
aaggaaggctgccta

SEQ ID NO: 132528 - DNA, 15 bp, Homo sapiens
taaggaaggctgcct

SEQ ID NO: 132529 - DNA, 15 bp, Homo sapiens
ataaggaaggctgcc

SEQ ID NO: 132530 - DNA, 15 bp, Homo sapiens
cataaggaaggctgc

SEQ ID NO: 132531 - DNA, 15 bp, Homo sapiens
ccataaggaaggctg

SEQ ID NO: 132532 - DNA, 15 bp, Homo sapiens
accataaggaaggct

SEQ ID NO: 132533 - DNA, 15 bp, Homo sapiens
aaccataaggaaggc

SEQ ID NO: 132534 - DNA, 15 bp, Homo sapiens
gaaccataaggaagg

SEQ ID NO: 132535 - DNA, 15 bp, Homo sapiens
tgaaccataaggaag

SEQ ID NO: 132536 - DNA, 15 bp, Homo sapiens
atgaaccataaggaa

SEQ ID NO: 132537 - DNA, 15 bp, Homo sapiens
tatgaaccataagga

SEQ ID NO: 132538 - DNA, 15 bp, Homo sapiens
gtatgaaccataagg

SEQ ID NO: 132539 - DNA, 15 bp, Homo sapiens
tgtatgaaccataag

SEQ ID NO: 132540 - DNA, 15 bp, Homo sapiens
ctgtatgaaccataa

SEQ ID NO: 132541 - DNA, 15 bp, Homo sapiens
tctgtatgaaccata

SEQ ID NO: 132542 - DNA, 15 bp, Homo sapiens
atctgtatgaaccat

SEQ ID NO: 132543 - DNA, 15 bp, Homo sapiens
tatctgtatgaacca

SEQ ID NO: 132544 - DNA, 15 bp, Homo sapiens
atatctgtatgaacc

SEQ ID NO: 132545 - DNA, 15 bp, Homo sapiens
tatatctgtatgaac

SEQ ID NO: 132546 - DNA, 15 bp, Homo sapiens
atatatctgtatgaa

SEQ ID NO: 132547 - DNA, 15 bp, Homo sapiens
catatatctgtatga

SEQ ID NO: 132548 - DNA, 15 bp, Homo sapiens
tcatatatctgtatg

SEQ ID NO: 132549 - DNA, 15 bp, Homo sapiens
ttcatatatctgtat

SEQ ID NO: 132550 - DNA, 15 bp, Homo sapiens
attcatatatctgta

SEQ ID NO: 132551 - DNA, 15 bp, Homo sapiens
tattcatatatctgt

SEQ ID NO: 132552 - DNA, 15 bp, Homo sapiens
ttattcatatatctg

SEQ ID NO: 132553 - DNA, 15 bp, Homo sapiens
tttattcatatatct

SEQ ID NO: 132554 - DNA, 15 bp, Homo sapiens
atttattcatatatc

SEQ ID NO: 132555 - DNA, 15 bp, Homo sapiens
catttattcatatat

SEQ ID NO: 132556 - DNA, 15 bp, Homo sapiens
gcatttattcatata

SEQ ID NO: 132557 - DNA, 15 bp, Homo sapiens
agcatttattcatat

SEQ ID NO: 132558 - DNA, 15 bp, Homo sapiens
cagcatttattcata

SEQ ID NO: 132559 - DNA, 15 bp, Homo sapiens
tcagcatttattcat

SEQ ID NO: 132560 - DNA, 15 bp, Homo sapiens
atcagcatttattca

SEQ ID NO: 132561 - DNA, 15 bp, Homo sapiens
tatcagcatttattc

SEQ ID NO: 132562 - DNA, 15 bp, Homo sapiens
ttatcagcatttatt

SEQ ID NO: 132563 - DNA, 15 bp, Homo sapiens
gttatcagcatttat

SEQ ID NO: 132564 - DNA, 15 bp, Homo sapiens
agttatcagcattta

SEQ ID NO: 132565 - DNA, 15 bp, Homo sapiens
tagttatcagcattt

SEQ ID NO: 132566 - DNA, 15 bp, Homo sapiens
ttagttatcagcatt

SEQ ID NO: 132567 - DNA, 15 bp, Homo sapiens
attagttatcagcat

SEQ ID NO: 132568 - DNA, 15 bp, Homo sapiens
aattagttatcagca

SEQ ID NO: 132569 - DNA, 15 bp, Homo sapiens
gaattagttatcagc

SEQ ID NO: 132570 - DNA, 15 bp, Homo sapiens
tgaattagttatcag

SEQ ID NO: 132571 - DNA, 15 bp, Homo sapiens
ctgaattagttatca

SEQ ID NO: 132572 - DNA, 15 bp, Homo sapiens
gctgaattagttatc

SEQ ID NO: 132573 - DNA, 15 bp, Homo sapiens
tgctgaattagttat

SEQ ID NO: 132574 - DNA, 15 bp, Homo sapiens
atgctgaattagtta

SEQ ID NO: 132575 - DNA, 15 bp, Homo sapiens
gatgctgaattagtt

SEQ ID NO: 132576 - DNA, 15 bp, Homo sapiens
agatgctgaattagt

SEQ ID NO: 132577 - DNA, 15 bp, Homo sapiens
aagatgctgaattag

SEQ ID NO: 132578 - DNA, 15 bp, Homo sapiens
caagatgctgaatta

SEQ ID NO: 132579 - DNA, 15 bp, Homo sapiens
ccaagatgctgaatt

SEQ ID NO: 132580 - DNA, 15 bp, Homo sapiens
accaagatgctgaat

SEQ ID NO: 132581 - DNA, 15 bp, Homo sapiens
caccaagatgctgaa

SEQ ID NO: 132582 - DNA, 15 bp, Homo sapiens
ccaccaagatgctga

SEQ ID NO: 132583 - DNA, 15 bp, Homo sapiens
cccaccaagatgctg

SEQ ID NO: 132584 - DNA, 15 bp, Homo sapiens
acccaccaagatgct

SEQ ID NO: 132585 - DNA, 15 bp, Homo sapiens
gacccaccaagatgc

SEQ ID NO: 132586 - DNA, 15 bp, Homo sapiens
agacccaccaagatg

SEQ ID NO: 132587 - DNA, 15 bp, Homo sapiens
tagacccaccaagat

SEQ ID NO: 132588 - DNA, 15 bp, Homo sapiens
ttagacccaccaaga

SEQ ID NO: 132589 - DNA, 15 bp, Homo sapiens
tttagacccaccaag

SEQ ID NO: 132590 - DNA, 15 bp, Homo sapiens
gtttagacccaccaa

SEQ ID NO: 132591 - DNA, 15 bp, Homo sapiens
tgtttagacccacca

SEQ ID NO: 132592 - DNA, 15 bp, Homo sapiens
ctgtttagacccacc

SEQ ID NO: 132593 - DNA, 15 bp, Homo sapiens
gctgtttagacccac

SEQ ID NO: 132594 - DNA, 15 bp, Homo sapiens
tgctgtttagaccca

SEQ ID NO: 132595 - DNA, 15 bp, Homo sapiens
atgctgtttagaccc

SEQ ID NO: 132596 - DNA, 15 bp, Homo sapiens
gatgctgtttagacc

SEQ ID NO: 132597 - DNA, 15 bp, Homo sapiens
ggatgctgtttagac

SEQ ID NO: 132598 - DNA, 15 bp, Homo sapiens
gggatgctgtttaga

SEQ ID NO: 132599 - DNA, 15 bp, Homo sapiens
agggatgctgtttag

SEQ ID NO: 132600 - DNA, 15 bp, Homo sapiens
aagggatgctgttta

SEQ ID NO: 132601 - DNA, 15 bp, Homo sapiens
gaagggatgctgttt

SEQ ID NO: 132602 - DNA, 15 bp, Homo sapiens
tgaagggatgctgtt

SEQ ID NO: 132603 - DNA, 15 bp, Homo sapiens
atgaagggatgctgt

SEQ ID NO: 132604 - DNA, 15 bp, Homo sapiens
aatgaagggatgctg

SEQ ID NO: 132605 - DNA, 15 bp, Homo sapiens
taatgaagggatgct

SEQ ID NO: 132606 - DNA, 15 bp, Homo sapiens
ttaatgaagggatgc

SEQ ID NO: 132607 - DNA, 15 bp, Homo sapiens
gttaatgaagggatg

SEQ ID NO: 132608 - DNA, 15 bp, Homo sapiens
agttaatgaagggat

SEQ ID NO: 132609 - DNA, 15 bp, Homo sapiens
gagttaatgaaggga

SEQ ID NO: 132610 - DNA, 15 bp, Homo sapiens
tgagttaatgaaggg

SEQ ID NO: 132611 - DNA, 15 bp, Homo sapiens
gtgagttaatgaagg

SEQ ID NO: 132612 - DNA, 15 bp, Homo sapiens
tgtgagttaatgaag

SEQ ID NO: 132613 - DNA, 15 bp, Homo sapiens
atgtgagttaatgaa

SEQ ID NO: 132614 - DNA, 15 bp, Homo sapiens
aatgtgagttaatga

SEQ ID NO: 132615 - DNA, 15 bp, Homo sapiens
caatgtgagttaatg

SEQ ID NO: 132616 - DNA, 15 bp, Homo sapiens
tcaatgtgagttaat

SEQ ID NO: 132617 - DNA, 15 bp, Homo sapiens
gtcaatgtgagttaa

SEQ ID NO: 132618 - DNA, 15 bp, Homo sapiens
ggtcaatgtgagtta

SEQ ID NO: 132619 - DNA, 15 bp, Homo sapiens
aggtcaatgtgagtt

SEQ ID NO: 132620 - DNA, 15 bp, Homo sapiens
caggtcaatgtgagt

SEQ ID NO: 132621 - DNA, 15 bp, Homo sapiens
acaggtcaatgtgag

SEQ ID NO: 132622 - DNA, 15 bp, Homo sapiens
tacaggtcaatgtga

SEQ ID NO: 132623 - DNA, 15 bp, Homo sapiens
ctacaggtcaatgtg

SEQ ID NO: 132624 - DNA, 15 bp, Homo sapiens
tctacaggtcaatgt

SEQ ID NO: 132625 - DNA, 15 bp, Homo sapiens
atctacaggtcaatg

SEQ ID NO: 132626 - DNA, 15 bp, Homo sapiens
catctacaggtcaat

SEQ ID NO: 132627 - DNA, 15 bp, Homo sapiens
gcatctacaggtcaa

SEQ ID NO: 132628 - DNA, 15 bp, Homo sapiens
tgcatctacaggtca

SEQ ID NO: 132629 - DNA, 15 bp, Homo sapiens
ctgcatctacaggtc

SEQ ID NO: 132630 - DNA, 15 bp, Homo sapiens
tctgcatctacaggt

SEQ ID NO: 132631 - DNA, 15 bp, Homo sapiens
ttctgcatctacagg

SEQ ID NO: 132632 - DNA, 15 bp, Homo sapiens
attctgcatctacag

SEQ ID NO: 132633 - DNA, 15 bp, Homo sapiens
aattctgcatctaca

SEQ ID NO: 132634 - DNA, 15 bp, Homo sapiens
taattctgcatctac

SEQ ID NO: 132635 - DNA, 15 bp, Homo sapiens
ataattctgcatcta

SEQ ID NO: 132636 - DNA, 15 bp, Homo sapiens
tataattctgcatct

SEQ ID NO: 132637 - DNA, 15 bp, Homo sapiens
ttataattctgcatc

SEQ ID NO: 132638 - DNA, 15 bp, Homo sapiens
attataattctgcat

SEQ ID NO: 132639 - DNA, 15 bp, Homo sapiens
tattataattctgca

SEQ ID NO: 132640 - DNA, 15 bp, Homo sapiens
ttattataattctgc

SEQ ID NO: 132641 - DNA, 15 bp, Homo sapiens
gttattataattctg

SEQ ID NO: 132642 - DNA, 15 bp, Homo sapiens
agttattataattct

SEQ ID NO: 132643 - DNA, 15 bp, Homo sapiens
cagttattataattc

SEQ ID NO: 132644 - DNA, 15 bp, Homo sapiens
acagttattataatt

SEQ ID NO: 132645 - DNA, 15 bp, Homo sapiens
cacagttattataat

SEQ ID NO: 132646 - DNA, 15 bp, Homo sapiens
tcacagttattataa

SEQ ID NO: 132647 - DNA, 15 bp, Homo sapiens
ttcacagttattata

SEQ ID NO: 132648 - DNA, 15 bp, Homo sapiens
tttcacagttattat

SEQ ID NO: 132649 - DNA, 15 bp, Homo sapiens
atttcacagttatta

SEQ ID NO: 132650 - DNA, 15 bp, Homo sapiens
tatttcacagttatt

SEQ ID NO: 132651 - DNA, 15 bp, Homo sapiens
atatttcacagttat

SEQ ID NO: 132652 - DNA, 15 bp, Homo sapiens
aatatttcacagtta

SEQ ID NO: 132653 - DNA, 15 bp, Homo sapiens
aaatatttcacagtt

SEQ ID NO: 132654 - DNA, 15 bp, Homo sapiens
aaaatatttcacagt

SEQ ID NO: 132655 - DNA, 15 bp, Homo sapiens
gaaaatatttcacag

SEQ ID NO: 132656 - DNA, 15 bp, Homo sapiens
agaaaatatttcaca

SEQ ID NO: 132657 - DNA, 15 bp, Homo sapiens
cagaaaatatttcac

SEQ ID NO: 132658 - DNA, 15 bp, Homo sapiens
acagaaaatatttca

SEQ ID NO: 132659 - DNA, 15 bp, Homo sapiens
aacagaaaatatttc

SEQ ID NO: 132660 - DNA, 15 bp, Homo sapiens
taacagaaaatattt

SEQ ID NO: 132661 - DNA, 15 bp, Homo sapiens
gtaacagaaaatatt

SEQ ID NO: 132662 - DNA, 15 bp, Homo sapiens
agtaacagaaaatat

SEQ ID NO: 132663 - DNA, 15 bp, Homo sapiens
aagtaacagaaaata

SEQ ID NO: 132664 - DNA, 15 bp, Homo sapiens
taagtaacagaaaat

SEQ ID NO: 132665 - DNA, 15 bp, Homo sapiens
ctaagtaacagaaaa

SEQ ID NO: 132666 - DNA, 15 bp, Homo sapiens
gctaagtaacagaaa

SEQ ID NO: 132667 - DNA, 15 bp, Homo sapiens
tgctaagtaacagaa

SEQ ID NO: 132668 - DNA, 15 bp, Homo sapiens
ctgctaagtaacaga

SEQ ID NO: 132669 - DNA, 15 bp, Homo sapiens
gctgctaagtaacag

SEQ ID NO: 132670 - DNA, 15 bp, Homo sapiens
tgctgctaagtaaca

SEQ ID NO: 132671 - DNA, 15 bp, Homo sapiens
ctgctgctaagtaac

SEQ ID NO: 132672 - DNA, 15 bp, Homo sapiens
cctgctgctaagtaa

SEQ ID NO: 132673 - DNA, 15 bp, Homo sapiens
gcctgctgctaagta

SEQ ID NO: 132674 - DNA, 15 bp, Homo sapiens
agcctgctgctaagt

SEQ ID NO: 132675 - DNA, 15 bp, Homo sapiens
tagcctgctgctaag

SEQ ID NO: 132676 - DNA, 15 bp, Homo sapiens
ctagcctgctgctaa

SEQ ID NO: 132677 - DNA, 15 bp, Homo sapiens
tctagcctgctgcta

SEQ ID NO: 132678 - DNA, 15 bp, Homo sapiens
atctagcctgctgct

SEQ ID NO: 132679 - DNA, 15 bp, Homo sapiens
aatctagcctgctgc

SEQ ID NO: 132680 - DNA, 15 bp, Homo sapiens
taatctagcctgctg

SEQ ID NO: 132681 - DNA, 15 bp, Homo sapiens
ataatctagcctgct

SEQ ID NO: 132682 - DNA, 15 bp, Homo sapiens
aataatctagcctgc

SEQ ID NO: 132683 - DNA, 15 bp, Homo sapiens
taataatctagcctg

SEQ ID NO: 132684 - DNA, 15 bp, Homo sapiens
ctaataatctagcct

SEQ ID NO: 132685 - DNA, 15 bp, Homo sapiens
gctaataatctagcc

SEQ ID NO: 132686 - DNA, 15 bp, Homo sapiens
ggctaataatctagc

SEQ ID NO: 132687 - DNA, 15 bp, Homo sapiens
tggctaataatctag

SEQ ID NO: 132688 - DNA, 15 bp, Homo sapiens
atggctaataatcta

SEQ ID NO: 132689 - DNA, 15 bp, Homo sapiens
aatggctaataatct

SEQ ID NO: 132690 - DNA, 15 bp, Homo sapiens
caatggctaataatc

SEQ ID NO: 132691 - DNA, 15 bp, Homo sapiens
acaatggctaataat

SEQ ID NO: 132692 - DNA, 15 bp, Homo sapiens
cacaatggctaataa

SEQ ID NO: 132693 - DNA, 15 bp, Homo sapiens
acacaatggctaata

SEQ ID NO: 132694 - DNA, 15 bp, Homo sapiens
tacacaatggctaat

SEQ ID NO: 132695 - DNA, 15 bp, Homo sapiens
ttacacaatggctaa

SEQ ID NO: 132696 - DNA, 15 bp, Homo sapiens
gttacacaatggcta

SEQ ID NO: 132697 - DNA, 15 bp, Homo sapiens
agttacacaatggct

SEQ ID NO: 132698 - DNA, 15 bp, Homo sapiens
cagttacacaatggc

SEQ ID NO: 132699 - DNA, 15 bp, Homo sapiens
ccagttacacaatgg

SEQ ID NO: 132700 - DNA, 15 bp, Homo sapiens
tccagttacacaatg

SEQ ID NO: 132701 - DNA, 15 bp, Homo sapiens
ttccagttacacaat

SEQ ID NO: 132702 - DNA, 15 bp, Homo sapiens
attccagttacacaa

SEQ ID NO: 132703 - DNA, 15 bp, Homo sapiens
gattccagttacaca

SEQ ID NO: 132704 - DNA, 15 bp, Homo sapiens
tgattccagttacac

SEQ ID NO: 132705 - DNA, 15 bp, Homo sapiens
gtgattccagttaca

SEQ ID NO: 132706 - DNA, 15 bp, Homo sapiens
agtgattccagttac

SEQ ID NO: 132707 - DNA, 15 bp, Homo sapiens
cagtgattccagtta

SEQ ID NO: 132708 - DNA, 15 bp, Homo sapiens
ccagtgattccagtt

SEQ ID NO: 132709 - DNA, 15 bp, Homo sapiens
cccagtgattccagt

SEQ ID NO: 132710 - DNA, 15 bp, Homo sapiens
ccccagtgattccag

SEQ ID NO: 132711 - DNA, 15 bp, Homo sapiens
accccagtgattcca

SEQ ID NO: 132712 - DNA, 15 bp, Homo sapiens
taccccagtgattcc

SEQ ID NO: 132713 - DNA, 15 bp, Homo sapiens
ataccccagtgattc

SEQ ID NO: 132714 - DNA, 15 bp, Homo sapiens
aataccccagtgatt

SEQ ID NO: 132715 - DNA, 15 bp, Homo sapiens
caataccccagtgat

SEQ ID NO: 132716 - DNA, 15 bp, Homo sapiens
tcaataccccagtga

SEQ ID NO: 132717 - DNA, 15 bp, Homo sapiens
atcaataccccagtg

SEQ ID NO: 132718 - DNA, 15 bp, Homo sapiens
aatcaataccccagt

SEQ ID NO: 132719 - DNA, 15 bp, Homo sapiens
taatcaataccccag

SEQ ID NO: 132720 - DNA, 15 bp, Homo sapiens
gtaatcaatacccca

SEQ ID NO: 132721 - DNA, 15 bp, Homo sapiens
tgtaatcaatacccc

SEQ ID NO: 132722 - DNA, 15 bp, Homo sapiens
atgtaatcaataccc

SEQ ID NO: 132723 - DNA, 15 bp, Homo sapiens
aatgtaatcaatacc

SEQ ID NO: 132724 - DNA, 15 bp, Homo sapiens
aaatgtaatcaatac

SEQ ID NO: 132725 - DNA, 15 bp, Homo sapiens
gaaatgtaatcaata

SEQ ID NO: 132726 - DNA, 15 bp, Homo sapiens
tgaaatgtaatcaat

SEQ ID NO: 132727 - DNA, 15 bp, Homo sapiens
ctgaaatgtaatcaa

SEQ ID NO: 132728 - DNA, 15 bp, Homo sapiens
tctgaaatgtaatca

SEQ ID NO: 132729 - DNA, 15 bp, Homo sapiens
atctgaaatgtaatc

SEQ ID NO: 132730 - DNA, 15 bp, Homo sapiens
aatctgaaatgtaat

SEQ ID NO: 132731 - DNA, 15 bp, Homo sapiens
gaatctgaaatgtaa

SEQ ID NO: 132732 - DNA, 15 bp, Homo sapiens
agaatctgaaatgta

SEQ ID NO: 132733 - DNA, 15 bp, Homo sapiens
cagaatctgaaatgt

SEQ ID NO: 132734 - DNA, 15 bp, Homo sapiens
acagaatctgaaatg

SEQ ID NO: 132735 - DNA, 15 bp, Homo sapiens
cacagaatctgaaat

SEQ ID NO: 132736 - DNA, 15 bp, Homo sapiens
ccacagaatctgaaa

SEQ ID NO: 132737 - DNA, 15 bp, Homo sapiens
accacagaatctgaa

SEQ ID NO: 132738 - DNA, 15 bp, Homo sapiens
aaccacagaatctga

SEQ ID NO: 132739 - DNA, 15 bp, Homo sapiens
caaccacagaatctg

SEQ ID NO: 132740 - DNA, 15 bp, Homo sapiens
ccaaccacagaatct

SEQ ID NO: 132741 - DNA, 15 bp, Homo sapiens
accaaccacagaatc

SEQ ID NO: 132742 - DNA, 15 bp, Homo sapiens
aaccaaccacagaat

SEQ ID NO: 132743 - DNA, 15 bp, Homo sapiens
aaaccaaccacagaa

SEQ ID NO: 132744 - DNA, 15 bp, Homo sapiens
taaaccaaccacaga

SEQ ID NO: 132745 - DNA, 15 bp, Homo sapiens
ttaaaccaaccacag

SEQ ID NO: 132746 - DNA, 15 bp, Homo sapiens
tttaaaccaaccaca

SEQ ID NO: 132747 - DNA, 15 bp, Homo sapiens
atttaaaccaaccac

SEQ ID NO: 132748 - DNA, 15 bp, Homo sapiens
tatttaaaccaacca

SEQ ID NO: 132749 - DNA, 15 bp, Homo sapiens
ctatttaaaccaacc

SEQ ID NO: 132750 - DNA, 15 bp, Homo sapiens
tctatttaaaccaac

SEQ ID NO: 132751 - DNA, 15 bp, Homo sapiens
ctctatttaaaccaa

SEQ ID NO: 132752 - DNA, 15 bp, Homo sapiens
cctctatttaaacca

SEQ ID NO: 132753 - DNA, 15 bp, Homo sapiens
ccctctatttaaacc

SEQ ID NO: 132754 - DNA, 15 bp, Homo sapiens
accctctatttaaac

SEQ ID NO: 132755 - DNA, 15 bp, Homo sapiens
caccctctatttaaa

SEQ ID NO: 132756 - DNA, 15 bp, Homo sapiens
acaccctctatttaa

SEQ ID NO: 132757 - DNA, 15 bp, Homo sapiens
cacaccctctattta

SEQ ID NO: 132758 - DNA, 15 bp, Homo sapiens
ccacaccctctattt

SEQ ID NO: 132759 - DNA, 15 bp, Homo sapiens
cccacaccctctatt

SEQ ID NO: 132760 - DNA, 15 bp, Homo sapiens
tcccacaccctctat

SEQ ID NO: 132761 - DNA, 15 bp, Homo sapiens
ttcccacaccctcta

SEQ ID NO: 132762 - DNA, 15 bp, Homo sapiens
attcccacaccctct

SEQ ID NO: 132763 - DNA, 15 bp, Homo sapiens
tattcccacaccctc

SEQ ID NO: 132764 - DNA, 15 bp, Homo sapiens
ttattcccacaccct

SEQ ID NO: 132765 - DNA, 15 bp, Homo sapiens
tttattcccacaccc

SEQ ID NO: 132766 - DNA, 15 bp, Homo sapiens
ctttattcccacacc

SEQ ID NO: 132767 - DNA, 15 bp, Homo sapiens
tctttattcccacac

SEQ ID NO: 132768 - DNA, 15 bp, Homo sapiens
ttctttattcccaca

SEQ ID NO: 132769 - DNA, 15 bp, Homo sapiens
gttctttattcccac

SEQ ID NO: 132770 - DNA, 15 bp, Homo sapiens
agttctttattccca

SEQ ID NO: 132771 - DNA, 15 bp, Homo sapiens
aagttctttattccc

SEQ ID NO: 132772 - DNA, 15 bp, Homo sapiens
gaagttctttattcc

SEQ ID NO: 132773 - DNA, 15 bp, Homo sapiens
ggaagttctttattc

SEQ ID NO: 132774 - DNA, 15 bp, Homo sapiens
tggaagttctttatt

SEQ ID NO: 132775 - DNA, 15 bp, Homo sapiens
ctggaagttctttat

SEQ ID NO: 132776 - DNA, 15 bp, Homo sapiens
actggaagttcttta

SEQ ID NO: 132777 - DNA, 15 bp, Homo sapiens
tactggaagttcttt

SEQ ID NO: 132778 - DNA, 15 bp, Homo sapiens
ttactggaagttctt

SEQ ID NO: 132779 - DNA, 15 bp, Homo sapiens
cttactggaagttct

SEQ ID NO: 132780 - DNA, 15 bp, Homo sapiens
gcttactggaagttc

SEQ ID NO: 132781 - DNA, 15 bp, Homo sapiens
tgcttactggaagtt

SEQ ID NO: 132782 - DNA, 15 bp, Homo sapiens
atgcttactggaagt

SEQ ID NO: 132783 - DNA, 15 bp, Homo sapiens
aatgcttactggaag

SEQ ID NO: 132784 - DNA, 15 bp, Homo sapiens
aaatgcttactggaa

SEQ ID NO: 132785 - DNA, 15 bp, Homo sapiens
gaaatgcttactgga

SEQ ID NO: 132786 - DNA, 15 bp, Homo sapiens
tgaaatgcttactgg

SEQ ID NO: 132787 - DNA, 15 bp, Homo sapiens
ctgaaatgcttactg

SEQ ID NO: 132788 - DNA, 15 bp, Homo sapiens
tctgaaatgcttact

SEQ ID NO: 132789 - DNA, 15 bp, Homo sapiens
ttctgaaatgcttac

SEQ ID NO: 132790 - DNA, 15 bp, Homo sapiens
attctgaaatgctta

SEQ ID NO: 132791 - DNA, 15 bp, Homo sapiens
gattctgaaatgctt

SEQ ID NO: 132792 - DNA, 15 bp, Homo sapiens
tgattctgaaatgct

SEQ ID NO: 132793 - DNA, 15 bp, Homo sapiens
ctgattctgaaatgc

SEQ ID NO: 132794 - DNA, 15 bp, Homo sapiens
actgattctgaaatg

SEQ ID NO: 132795 - DNA, 15 bp, Homo sapiens
tactgattctgaaat

SEQ ID NO: 132796 - DNA, 15 bp, Homo sapiens
ttactgattctgaaa

SEQ ID NO: 132797 - DNA, 15 bp, Homo sapiens
gttactgattctgaa

SEQ ID NO: 132798 - DNA, 15 bp, Homo sapiens
agttactgattctga

SEQ ID NO: 132799 - DNA, 15 bp, Homo sapiens
cagttactgattctg

SEQ ID NO: 132800 - DNA, 15 bp, Homo sapiens
acagttactgattct

SEQ ID NO: 132801 - DNA, 15 bp, Homo sapiens
aacagttactgattc

SEQ ID NO: 132802 - DNA, 15 bp, Homo sapiens
caacagttactgatt

SEQ ID NO: 132803 - DNA, 15 bp, Homo sapiens
tcaacagttactgat

SEQ ID NO: 132804 - DNA, 15 bp, Homo sapiens
ttcaacagttactga

SEQ ID NO: 132805 - DNA, 15 bp, Homo sapiens
gttcaacagttactg

SEQ ID NO: 132806 - DNA, 15 bp, Homo sapiens
ggttcaacagttact

SEQ ID NO: 132807 - DNA, 15 bp, Homo sapiens
aggttcaacagttac

SEQ ID NO: 132808 - DNA, 15 bp, Homo sapiens
aaggttcaacagtta

SEQ ID NO: 132809 - DNA, 15 bp, Homo sapiens
aaaggttcaacagtt

SEQ ID NO: 132810 - DNA, 15 bp, Homo sapiens
aaaaggttcaacagt

SEQ ID NO: 132811 - DNA, 15 bp, Homo sapiens
caaaaggttcaacag

SEQ ID NO: 132812 - DNA, 15 bp, Homo sapiens
tcaaaaggttcaaca

SEQ ID NO: 132813 - DNA, 15 bp, Homo sapiens
ttcaaaaggttcaac

SEQ ID NO: 132814 - DNA, 15 bp, Homo sapiens
tttcaaaaggttcaa

SEQ ID NO: 132815 - DNA, 15 bp, Homo sapiens
ttttcaaaaggttca

SEQ ID NO: 132816 - DNA, 15 bp, Homo sapiens
attttcaaaaggttc

SEQ ID NO: 132817 - DNA, 15 bp, Homo sapiens
tattttcaaaaggtt

SEQ ID NO: 132818 - DNA, 15 bp, Homo sapiens
atattttcaaaaggt

SEQ ID NO: 132819 - DNA, 15 bp, Homo sapiens
aatattttcaaaagg

SEQ ID NO: 132820 - DNA, 15 bp, Homo sapiens
gaatattttcaaaag

SEQ ID NO: 132821 - DNA, 15 bp, Homo sapiens
agaatattttcaaaa

SEQ ID NO: 132822 - DNA, 15 bp, Homo sapiens
gagaatattttcaaa

SEQ ID NO: 132823 - DNA, 15 bp, Homo sapiens
tgagaatattttcaa

SEQ ID NO: 132824 - DNA, 15 bp, Homo sapiens
atgagaatattttca

SEQ ID NO: 132825 - DNA, 15 bp, Homo sapiens
tatgagaatattttc

SEQ ID NO: 132826 - DNA, 15 bp, Homo sapiens
ctatgagaatatttt

SEQ ID NO: 132827 - DNA, 15 bp, Homo sapiens
cctatgagaatattt

SEQ ID NO: 132828 - DNA, 15 bp, Homo sapiens
tcctatgagaatatt

SEQ ID NO: 132829 - DNA, 15 bp, Homo sapiens
ttcctatgagaatat

SEQ ID NO: 132830 - DNA, 15 bp, Homo sapiens
tttcctatgagaata

SEQ ID NO: 132831 - DNA, 15 bp, Homo sapiens
gtttcctatgagaat

SEQ ID NO: 132832 - DNA, 15 bp, Homo sapiens
cgtttcctatgagaa

SEQ ID NO: 132833 - DNA, 15 bp, Homo sapiens
tcgtttcctatgaga

SEQ ID NO: 132834 - DNA, 15 bp, Homo sapiens
gtcgtttcctatgag

SEQ ID NO: 132835 - DNA, 15 bp, Homo sapiens
cgtcgtttcctatga

SEQ ID NO: 132836 - DNA, 15 bp, Homo sapiens
tcgtcgtttcctatg

SEQ ID NO: 132837 - DNA, 15 bp, Homo sapiens
atcgtcgtttcctat

SEQ ID NO: 132838 - DNA, 15 bp, Homo sapiens
gatcgtcgtttccta

SEQ ID NO: 132839 - DNA, 15 bp, Homo sapiens
tgatcgtcgtttcct

SEQ ID NO: 132840 - DNA, 15 bp, Homo sapiens
gtgatcgtcgtttcc

SEQ ID NO: 132841 - DNA, 15 bp, Homo sapiens
agtgatcgtcgtttc

SEQ ID NO: 132842 - DNA, 15 bp, Homo sapiens
gagtgatcgtcgttt

SEQ ID NO: 132843 - DNA, 15 bp, Homo sapiens
ggagtgatcgtcgtt

SEQ ID NO: 132844 - DNA, 15 bp, Homo sapiens
gggagtgatcgtcgt

SEQ ID NO: 132845 - DNA, 15 bp, Homo sapiens
cgggagtgatcgtcg

SEQ ID NO: 132846 - DNA, 15 bp, Homo sapiens
tcgggagtgatcgtc

SEQ ID NO: 132847 - DNA, 15 bp, Homo sapiens
ttcgggagtgatcgt

SEQ ID NO: 132848 - DNA, 15 bp, Homo sapiens
gttcgggagtgatcg

SEQ ID NO: 132849 - DNA, 15 bp, Homo sapiens
tgttcgggagtgatc

SEQ ID NO: 132850 - DNA, 15 bp, Homo sapiens
ctgttcgggagtgat

SEQ ID NO: 132851 - DNA, 15 bp, Homo sapiens
tctgttcgggagtga

SEQ ID NO: 132852 - DNA, 15 bp, Homo sapiens
atctgttcgggagtg

SEQ ID NO: 132853 - DNA, 15 bp, Homo sapiens
tatctgttcgggagt

SEQ ID NO: 132854 - DNA, 15 bp, Homo sapiens
ttatctgttcgggag

SEQ ID NO: 132855 - DNA, 15 bp, Homo sapiens
attatctgttcggga

SEQ ID NO: 132856 - DNA, 15 bp, Homo sapiens
gattatctgttcggg

SEQ ID NO: 132857 - DNA, 15 bp, Homo sapiens
cgattatctgttcgg

SEQ ID NO: 132858 - DNA, 15 bp, Homo sapiens
acgattatctgttcg

SEQ ID NO: 132859 - DNA, 15 bp, Homo sapiens
gacgattatctgttc

SEQ ID NO: 132860 - DNA, 15 bp, Homo sapiens
ggacgattatctgtt

SEQ ID NO: 132861 - DNA, 15 bp, Homo sapiens
tggacgattatctgt

SEQ ID NO: 132862 - DNA, 15 bp, Homo sapiens
gtggacgattatctg

SEQ ID NO: 132863 - DNA, 15 bp, Homo sapiens
cgtggacgattatct

SEQ ID NO: 132864 - DNA, 15 bp, Homo sapiens
acgtggacgattatc

SEQ ID NO: 132865 - DNA, 15 bp, Homo sapiens
tacgtggacgattat

SEQ ID NO: 132866 - DNA, 15 bp, Homo sapiens
ttacgtggacgatta

SEQ ID NO: 132867 - DNA, 15 bp, Homo sapiens
attacgtggacgatt

SEQ ID NO: 132868 - DNA, 15 bp, Homo sapiens
gattacgtggacgat

SEQ ID NO: 132869 - DNA, 15 bp, Homo sapiens
ggattacgtggacga

SEQ ID NO: 132870 - DNA, 15 bp, Homo sapiens
tggattacgtggacg

SEQ ID NO: 132871 - DNA, 15 bp, Homo sapiens
ttggattacgtggac

SEQ ID NO: 132872 - DNA, 15 bp, Homo sapiens
cttggattacgtgga

SEQ ID NO: 132873 - DNA, 15 bp, Homo sapiens
tcttggattacgtgg

SEQ ID NO: 132874 - DNA, 15 bp, Homo sapiens
ctcttggattacgtg

SEQ ID NO: 132875 - DNA, 15 bp, Homo sapiens
tctcttggattacgt

SEQ ID NO: 132876 - DNA, 15 bp, Homo sapiens
ctctcttggattacg

SEQ ID NO: 132877 - DNA, 15 bp, Homo sapiens
cctctcttggattac

SEQ ID NO: 132878 - DNA, 15 bp, Homo sapiens
gcctctcttggatta

SEQ ID NO: 132879 - DNA, 15 bp, Homo sapiens
agcctctcttggatt

SEQ ID NO: 132880 - DNA, 15 bp, Homo sapiens
tagcctctcttggat

SEQ ID NO: 132881 - DNA, 15 bp, Homo sapiens
ttagcctctcttgga

SEQ ID NO: 132882 - DNA, 15 bp, Homo sapiens
tttagcctctcttgg

SEQ ID NO: 132883 - DNA, 15 bp, Homo sapiens
ctttagcctctcttg

SEQ ID NO: 132884 - DNA, 15 bp, Homo sapiens
cctttagcctctctt

SEQ ID NO: 132885 - DNA, 15 bp, Homo sapiens
tcctttagcctctct

SEQ ID NO: 132886 - DNA, 15 bp, Homo sapiens
ttcctttagcctctc

SEQ ID NO: 132887 - DNA, 15 bp, Homo sapiens
cttcctttagcctct

SEQ ID NO: 132888 - DNA, 15 bp, Homo sapiens
tcttcctttagcctc

SEQ ID NO: 132889 - DNA, 15 bp, Homo sapiens
ttcttcctttagcct

SEQ ID NO: 132890 - DNA, 15 bp, Homo sapiens
gttcttcctttagcc

SEQ ID NO: 132891 - DNA, 15 bp, Homo sapiens
tgttcttcctttagc

SEQ ID NO: 132892 - DNA, 15 bp, Homo sapiens
ttgttcttcctttag

SEQ ID NO: 132893 - DNA, 15 bp, Homo sapiens
gttgttcttccttta

SEQ ID NO: 132894 - DNA, 15 bp, Homo sapiens
tgttgttcttccttt

SEQ ID NO: 132895 - DNA, 15 bp, Homo sapiens
ctgttgttcttcctt

SEQ ID NO: 132896 - DNA, 15 bp, Homo sapiens
tctgttgttcttcct

SEQ ID NO: 132897 - DNA, 15 bp, Homo sapiens
atctgttgttcttcc

SEQ ID NO: 132898 - DNA, 15 bp, Homo sapiens
catctgttgttcttc

SEQ ID NO: 132899 - DNA, 15 bp, Homo sapiens
ccatctgttgttctt

SEQ ID NO: 132900 - DNA, 15 bp, Homo sapiens
tccatctgttgttct

SEQ ID NO: 132901 - DNA, 15 bp, Homo sapiens
atccatctgttgttc

SEQ ID NO: 132902 - DNA, 15 bp, Homo sapiens
gatccatctgttgtt

SEQ ID NO: 132903 - DNA, 15 bp, Homo sapiens
ggatccatctgttgt

SEQ ID NO: 132904 - DNA, 15 bp, Homo sapiens
gggatccatctgttg

SEQ ID NO: 132905 - DNA, 15 bp, Homo sapiens
agggatccatctgtt

SEQ ID NO: 132906 - DNA, 15 bp, Homo sapiens
aagggatccatctgt

SEQ ID NO: 132907 - DNA, 15 bp, Homo sapiens
gaagggatccatctg

SEQ ID NO: 132908 - DNA, 15 bp, Homo sapiens
tgaagggatccatct

SEQ ID NO: 132909 - DNA, 15 bp, Homo sapiens
ctgaagggatccatc

SEQ ID NO: 132910 - DNA, 15 bp, Homo sapiens
cctgaagggatccat

SEQ ID NO: 132911 - DNA, 15 bp, Homo sapiens
acctgaagggatcca

SEQ ID NO: 132912 - DNA, 15 bp, Homo sapiens
tacctgaagggatcc

SEQ ID NO: 132913 - DNA, 15 bp, Homo sapiens
ttacctgaagggatc

SEQ ID NO: 132914 - DNA, 15 bp, Homo sapiens
tttacctgaagggat

SEQ ID NO: 132915 - DNA, 15 bp, Homo sapiens
ttttacctgaaggga

SEQ ID NO: 132916 - DNA, 15 bp, Homo sapiens
gttttacctgaaggg

SEQ ID NO: 132917 - DNA, 15 bp, Homo sapiens
ggttttacctgaagg

SEQ ID NO: 132918 - DNA, 15 bp, Homo sapiens
aggttttacctgaag

SEQ ID NO: 132919 - DNA, 15 bp, Homo sapiens
caggttttacctgaa

SEQ ID NO: 132920 - DNA, 15 bp, Homo sapiens
acaggttttacctga

SEQ ID NO: 132921 - DNA, 15 bp, Homo sapiens
gacaggttttacctg

SEQ ID NO: 132922 - DNA, 15 bp, Homo sapiens
agacaggttttacct

SEQ ID NO: 132923 - DNA, 15 bp, Homo sapiens
cagacaggttttacc

SEQ ID NO: 132924 - DNA, 15 bp, Homo sapiens
gcagacaggttttac

SEQ ID NO: 132925 - DNA, 15 bp, Homo sapiens
ggcagacaggtttta

SEQ ID NO: 132926 - DNA, 15 bp, Homo sapiens
aggcagacaggtttt

SEQ ID NO: 132927 - DNA, 15 bp, Homo sapiens
gaggcagacaggttt

SEQ ID NO: 132928 - DNA, 15 bp, Homo sapiens
agaggcagacaggtt

SEQ ID NO: 132929 - DNA, 15 bp, Homo sapiens
aagaggcagacaggt

SEQ ID NO: 132930 - DNA, 15 bp, Homo sapiens
aaagaggcagacagg

SEQ ID NO: 132931 - DNA, 15 bp, Homo sapiens
aaaagaggcagacag

SEQ ID NO: 132932 - DNA, 15 bp, Homo sapiens
gaaaagaggcagaca

SEQ ID NO: 132933 - DNA, 15 bp, Homo sapiens
tgaaaagaggcagac

SEQ ID NO: 132934 - DNA, 15 bp, Homo sapiens
atgaaaagaggcaga

SEQ ID NO: 132935 - DNA, 15 bp, Homo sapiens
gatgaaaagaggcag

SEQ ID NO: 132936 - DNA, 15 bp, Homo sapiens
agatgaaaagaggca

SEQ ID NO: 132937 - DNA, 15 bp, Homo sapiens
aagatgaaaagaggc

SEQ ID NO: 132938 - DNA, 15 bp, Homo sapiens
taagatgaaaagagg

SEQ ID NO: 132939 - DNA, 15 bp, Homo sapiens
ttaagatgaaaagag

SEQ ID NO: 132940 - DNA, 15 bp, Homo sapiens
attaagatgaaaaga

SEQ ID NO: 132941 - DNA, 15 bp, Homo sapiens
aattaagatgaaaag

SEQ ID NO: 132942 - DNA, 15 bp, Homo sapiens
caattaagatgaaaa

SEQ ID NO: 132943 - DNA, 15 bp, Homo sapiens
acaattaagatgaaa

SEQ ID NO: 132944 - DNA, 15 bp, Homo sapiens
aacaattaagatgaa

SEQ ID NO: 132945 - DNA, 15 bp, Homo sapiens
aaacaattaagatga

SEQ ID NO: 132946 - DNA, 15 bp, Homo sapiens
caaacaattaagatg

SEQ ID NO: 132947 - DNA, 15 bp, Homo sapiens
tcaaacaattaagat

SEQ ID NO: 132948 - DNA, 15 bp, Homo sapiens
ttcaaacaattaaga

SEQ ID NO: 132949 - DNA, 15 bp, Homo sapiens
attcaaacaattaag

SEQ ID NO: 132950 - DNA, 15 bp, Homo sapiens
tattcaaacaattaa

SEQ ID NO: 132951 - DNA, 15 bp, Homo sapiens
atattcaaacaatta

SEQ ID NO: 132952 - DNA, 15 bp, Homo sapiens
catattcaaacaatt

SEQ ID NO: 132953 - DNA, 15 bp, Homo sapiens
ccatattcaaacaat

SEQ ID NO: 132954 - DNA, 15 bp, Homo sapiens
accatattcaaacaa

SEQ ID NO: 132955 - DNA, 15 bp, Homo sapiens
taccatattcaaaca

SEQ ID NO: 132956 - DNA, 15 bp, Homo sapiens
ctaccatattcaaac

SEQ ID NO: 132957 - DNA, 15 bp, Homo sapiens
actaccatattcaaa

SEQ ID NO: 132958 - DNA, 15 bp, Homo sapiens
aactaccatattcaa

SEQ ID NO: 132959 - DNA, 15 bp, Homo sapiens
aaactaccatattca

SEQ ID NO: 132960 - DNA, 15 bp, Homo sapiens
caaactaccatattc

SEQ ID NO: 132961 - DNA, 15 bp, Homo sapiens
tcaaactaccatatt

SEQ ID NO: 132962 - DNA, 15 bp, Homo sapiens
ctcaaactaccatat

SEQ ID NO: 132963 - DNA, 15 bp, Homo sapiens
tctcaaactaccata

SEQ ID NO: 132964 - DNA, 15 bp, Homo sapiens
atctcaaactaccat

SEQ ID NO: 132965 - DNA, 15 bp, Homo sapiens
aatctcaaactacca

SEQ ID NO: 132966 - DNA, 15 bp, Homo sapiens
aaatctcaaactacc

SEQ ID NO: 132967 - DNA, 15 bp, Homo sapiens
taaatctcaaactac

SEQ ID NO: 132968 - DNA, 15 bp, Homo sapiens
ataaatctcaaacta

SEQ ID NO: 132969 - DNA, 15 bp, Homo sapiens
cataaatctcaaact

SEQ ID NO: 132970 - DNA, 15 bp, Homo sapiens
tcataaatctcaaac

SEQ ID NO: 132971 - DNA, 15 bp, Homo sapiens
ctcataaatctcaaa

SEQ ID NO: 132972 - DNA, 15 bp, Homo sapiens
actcataaatctcaa

SEQ ID NO: 132973 - DNA, 15 bp, Homo sapiens
aactcataaatctca

SEQ ID NO: 132974 - DNA, 15 bp, Homo sapiens
aaactcataaatctc

SEQ ID NO: 132975 - DNA, 15 bp, Homo sapiens
taaactcataaatct

SEQ ID NO: 132976 - DNA, 15 bp, Homo sapiens
ataaactcataaatc

SEQ ID NO: 132977 - DNA, 15 bp, Homo sapiens
aataaactcataaat

SEQ ID NO: 132978 - DNA, 15 bp, Homo sapiens
aaataaactcataaa

SEQ ID NO: 132979 - DNA, 15 bp, Homo sapiens
aaaataaactcataa

SEQ ID NO: 132980 - DNA, 15 bp, Homo sapiens
taaaataaactcata

SEQ ID NO: 132981 - DNA, 15 bp, Homo sapiens
gtaaaataaactcat

SEQ ID NO: 132982 - DNA, 15 bp, Homo sapiens
agtaaaataaactca

SEQ ID NO: 132983 - DNA, 15 bp, Homo sapiens
aagtaaaataaactc

SEQ ID NO: 132984 - DNA, 15 bp, Homo sapiens
aaagtaaaataaact

SEQ ID NO: 132985 - DNA, 15 bp, Homo sapiens
taaagtaaaataaac

SEQ ID NO: 132986 - DNA, 15 bp, Homo sapiens
ataaagtaaaataaa

SEQ ID NO: 132987 - DNA, 15 bp, Homo sapiens
aataaagtaaaataa

SEQ ID NO: 132988 - DNA, 15 bp, Homo sapiens
taataaagtaaaata

SEQ ID NO: 132989 - DNA, 15 bp, Homo sapiens
ttaataaagtaaaat

SEQ ID NO: 132990 - DNA, 15 bp, Homo sapiens
tttaataaagtaaaa

SEQ ID NO: 132991 - DNA, 15 bp, Homo sapiens
ttttaataaagtaaa

SEQ ID NO: 132992 - DNA, 15 bp, Homo sapiens
tttttaataaagtaa

SEQ ID NO: 132993 - DNA, 15 bp, Homo sapiens
gtttttaataaagta

SEQ ID NO: 132994 - DNA, 15 bp, Homo sapiens
tgtttttaataaagt

SEQ ID NO: 132995 - DNA, 15 bp, Homo sapiens
atgtttttaataaag

SEQ ID NO: 132996 - DNA, 15 bp, Homo sapiens
catgtttttaataaa

SEQ ID NO: 132997 - DNA, 15 bp, Homo sapiens
acatgtttttaataa

SEQ ID NO: 132998 - DNA, 15 bp, Homo sapiens
aacatgtttttaata

SEQ ID NO: 132999 - DNA, 15 bp, Homo sapiens
gaacatgtttttaat

SEQ ID NO: 133000 - DNA, 15 bp, Homo sapiens
tgaacatgtttttaa

SEQ ID NO: 133001 - DNA, 15 bp, Homo sapiens
ttgaacatgttttta

SEQ ID NO: 133002 - DNA, 15 bp, Homo sapiens
tttgaacatgttttt

SEQ ID NO: 133003 - DNA, 15 bp, Homo sapiens
ctttgaacatgtttt

SEQ ID NO: 133004 - DNA, 15 bp, Homo sapiens
tctttgaacatgttt

SEQ ID NO: 133005 - DNA, 15 bp, Homo sapiens
atctttgaacatgtt

SEQ ID NO: 133006 - DNA, 15 bp, Homo sapiens
aatctttgaacatgt

SEQ ID NO: 133007 - DNA, 15 bp, Homo sapiens
taatctttgaacatg

SEQ ID NO: 133008 - DNA, 15 bp, Homo sapiens
gtaatctttgaacat

SEQ ID NO: 133009 - DNA, 15 bp, Homo sapiens
tgtaatctttgaaca

SEQ ID NO: 133010 - DNA, 15 bp, Homo sapiens
ttgtaatctttgaac

SEQ ID NO: 133011 - DNA, 15 bp, Homo sapiens
tttgtaatctttgaa

SEQ ID NO: 133012 - DNA, 15 bp, Homo sapiens
atttgtaatctttga

SEQ ID NO: 133013 - DNA, 15 bp, Homo sapiens
gatttgtaatctttg

SEQ ID NO: 133014 - DNA, 15 bp, Homo sapiens
ggatttgtaatcttt

SEQ ID NO: 133015 - DNA, 15 bp, Homo sapiens
tggatttgtaatctt

SEQ ID NO: 133016 - DNA, 15 bp, Homo sapiens
ctggatttgtaatct

SEQ ID NO: 133017 - DNA, 15 bp, Homo sapiens
actggatttgtaatc

SEQ ID NO: 133018 - DNA, 15 bp, Homo sapiens
aactggatttgtaat

SEQ ID NO: 133019 - DNA, 15 bp, Homo sapiens
aaactggatttgtaa

SEQ ID NO: 133020 - DNA, 15 bp, Homo sapiens
taaactggatttgta

SEQ ID NO: 133021 - DNA, 15 bp, Homo sapiens
ataaactggatttgt

SEQ ID NO: 133022 - DNA, 15 bp, Homo sapiens
cataaactggatttg

SEQ ID NO: 133023 - DNA, 15 bp, Homo sapiens
acataaactggattt

SEQ ID NO: 133024 - DNA, 15 bp, Homo sapiens
cacataaactggatt

SEQ ID NO: 133025 - DNA, 15 bp, Homo sapiens
tcacataaactggat

SEQ ID NO: 133026 - DNA, 15 bp, Homo sapiens
ttcacataaactgga

SEQ ID NO: 133027 - DNA, 15 bp, Homo sapiens
tttcacataaactgg

SEQ ID NO: 133028 - DNA, 15 bp, Homo sapiens
atttcacataaactg

SEQ ID NO: 133029 - DNA, 15 bp, Homo sapiens
tatttcacataaact

SEQ ID NO: 133030 - DNA, 15 bp, Homo sapiens
atatttcacataaac

SEQ ID NO: 133031 - DNA, 15 bp, Homo sapiens
aatatttcacataaa

SEQ ID NO: 133032 - DNA, 15 bp, Homo sapiens
aaatatttcacataa

SEQ ID NO: 133033 - DNA, 15 bp, Homo sapiens
aaaatatttcacata

SEQ ID NO: 133034 - DNA, 15 bp, Homo sapiens
taaaatatttcacat

SEQ ID NO: 133035 - DNA, 15 bp, Homo sapiens
gtaaaatatttcaca

SEQ ID NO: 133036 - DNA, 15 bp, Homo sapiens
ggtaaaatatttcac

SEQ ID NO: 133037 - DNA, 15 bp, Homo sapiens
aggtaaaatatttca

SEQ ID NO: 133038 - DNA, 15 bp, Homo sapiens
aaggtaaaatatttc

SEQ ID NO: 133039 - DNA, 15 bp, Homo sapiens
gaaggtaaaatattt

SEQ ID NO: 133040 - DNA, 15 bp, Homo sapiens
tgaaggtaaaatatt

SEQ ID NO: 133041 - DNA, 15 bp, Homo sapiens
ttgaaggtaaaatat

SEQ ID NO: 133042 - DNA, 15 bp, Homo sapiens
gttgaaggtaaaata

SEQ ID NO: 133043 - DNA, 15 bp, Homo sapiens
tgttgaaggtaaaat

SEQ ID NO: 133044 - DNA, 15 bp, Homo sapiens
atgttgaaggtaaaa

SEQ ID NO: 133045 - DNA, 15 bp, Homo sapiens
aatgttgaaggtaaa

SEQ ID NO: 133046 - DNA, 15 bp, Homo sapiens
taatgttgaaggtaa

SEQ ID NO: 133047 - DNA, 15 bp, Homo sapiens
gtaatgttgaaggta

SEQ ID NO: 133048 - DNA, 15 bp, Homo sapiens
tgtaatgttgaaggt

SEQ ID NO: 133049 - DNA, 15 bp, Homo sapiens
ttgtaatgttgaagg

SEQ ID NO: 133050 - DNA, 15 bp, Homo sapiens
attgtaatgttgaag

SEQ ID NO: 133051 - DNA, 15 bp, Homo sapiens
aattgtaatgttgaa

SEQ ID NO: 133052 - DNA, 15 bp, Homo sapiens
caattgtaatgttga

SEQ ID NO: 133053 - DNA, 15 bp, Homo sapiens
acaattgtaatgttg

SEQ ID NO: 133054 - DNA, 15 bp, Homo sapiens
tacaattgtaatgtt

SEQ ID NO: 133055 - DNA, 15 bp, Homo sapiens
ctacaattgtaatgt

SEQ ID NO: 133056 - DNA, 15 bp, Homo sapiens
actacaattgtaatg

SEQ ID NO: 133057 - DNA, 15 bp, Homo sapiens
gactacaattgtaat

SEQ ID NO: 133058 - DNA, 15 bp, Homo sapiens
tgactacaattgtaa

SEQ ID NO: 133059 - DNA, 15 bp, Homo sapiens
ttgactacaattgta

SEQ ID NO: 133060 - DNA, 15 bp, Homo sapiens
attgactacaattgt

SEQ ID NO: 133061 - DNA, 15 bp, Homo sapiens
gattgactacaattg

SEQ ID NO: 133062 - DNA, 15 bp, Homo sapiens
agattgactacaatt

SEQ ID NO: 133063 - DNA, 15 bp, Homo sapiens
aagattgactacaat

SEQ ID NO: 133064 - DNA, 15 bp, Homo sapiens
taagattgactacaa

SEQ ID NO: 133065 - DNA, 15 bp, Homo sapiens
ctaagattgactaca

SEQ ID NO: 133066 - DNA, 15 bp, Homo sapiens
actaagattgactac

SEQ ID NO: 133067 - DNA, 15 bp, Homo sapiens
aactaagattgacta

SEQ ID NO: 133068 - DNA, 15 bp, Homo sapiens
gaactaagattgact

SEQ ID NO: 133069 - DNA, 15 bp, Homo sapiens
agaactaagattgac

SEQ ID NO: 133070 - DNA, 15 bp, Homo sapiens
aagaactaagattga

SEQ ID NO: 133071 - DNA, 15 bp, Homo sapiens
aaagaactaagattg

SEQ ID NO: 133072 - DNA, 15 bp, Homo sapiens
caaagaactaagatt

SEQ ID NO: 133073 - DNA, 15 bp, Homo sapiens
acaaagaactaagat

SEQ ID NO: 133074 - DNA, 15 bp, Homo sapiens
cacaaagaactaaga

SEQ ID NO: 133075 - DNA, 15 bp, Homo sapiens
tcacaaagaactaag

SEQ ID NO: 133076 - DNA, 15 bp, Homo sapiens
gtcacaaagaactaa

SEQ ID NO: 133077 - DNA, 15 bp, Homo sapiens
tgtcacaaagaacta

SEQ ID NO: 133078 - DNA, 15 bp, Homo sapiens
ttgtcacaaagaact

SEQ ID NO: 133079 - DNA, 15 bp, Homo sapiens
cttgtcacaaagaac

SEQ ID NO: 133080 - DNA, 15 bp, Homo sapiens
acttgtcacaaagaa

SEQ ID NO: 133081 - DNA, 15 bp, Homo sapiens
tacttgtcacaaaga

SEQ ID NO: 133082 - DNA, 15 bp, Homo sapiens
atacttgtcacaaag

SEQ ID NO: 133083 - DNA, 15 bp, Homo sapiens
tatacttgtcacaaa

SEQ ID NO: 133084 - DNA, 15 bp, Homo sapiens
gtatacttgtcacaa

SEQ ID NO: 133085 - DNA, 15 bp, Homo sapiens
tgtatacttgtcaca

SEQ ID NO: 133086 - DNA, 15 bp, Homo sapiens
ttgtatacttgtcac

SEQ ID NO: 133087 - DNA, 15 bp, Homo sapiens
tttgtatacttgtca

SEQ ID NO: 133088 - DNA, 15 bp, Homo sapiens
atttgtatacttgtc

SEQ ID NO: 133089 - DNA, 15 bp, Homo sapiens
tatttgtatacttgt

SEQ ID NO: 133090 - DNA, 15 bp, Homo sapiens
ttatttgtatacttg

SEQ ID NO: 133091 - DNA, 15 bp, Homo sapiens
cttatttgtatactt

SEQ ID NO: 133092 - DNA, 15 bp, Homo sapiens
tcttatttgtatact

SEQ ID NO: 133093 - DNA, 15 bp, Homo sapiens
ctcttatttgtatac

SEQ ID NO: 133094 - DNA, 15 bp, Homo sapiens
cctcttatttgtata

SEQ ID NO: 133095 - DNA, 15 bp, Homo sapiens
tcctcttatttgtat

SEQ ID NO: 133096 - DNA, 15 bp, Homo sapiens
atcctcttatttgta

SEQ ID NO: 133097 - DNA, 15 bp, Homo sapiens
aatcctcttatttgt

SEQ ID NO: 133098 - DNA, 15 bp, Homo sapiens
aaatcctcttatttg

SEQ ID NO: 133099 - DNA, 15 bp, Homo sapiens
gaaatcctcttattt

SEQ ID NO: 133100 - DNA, 15 bp, Homo sapiens
agaaatcctcttatt

SEQ ID NO: 133101 - DNA, 15 bp, Homo sapiens
gagaaatcctcttat

SEQ ID NO: 133102 - DNA, 15 bp, Homo sapiens
agagaaatcctctta

SEQ ID NO: 133103 - DNA, 15 bp, Homo sapiens
tagagaaatcctctt

SEQ ID NO: 133104 - DNA, 15 bp, Homo sapiens
ctagagaaatcctct

SEQ ID NO: 133105 - DNA, 15 bp, Homo sapiens
tctagagaaatcctc

SEQ ID NO: 133106 - DNA, 15 bp, Homo sapiens
ctctagagaaatcct

SEQ ID NO: 133107 - DNA, 15 bp, Homo sapiens
tctctagagaaatcc

SEQ ID NO: 133108 - DNA, 15 bp, Homo sapiens
ttctctagagaaatc

SEQ ID NO: 133109 - DNA, 15 bp, Homo sapiens
attctctagagaaat

SEQ ID NO: 133110 - DNA, 15 bp, Homo sapiens
tattctctagagaaa

SEQ ID NO: 133111 - DNA, 15 bp, Homo sapiens
atattctctagagaa

SEQ ID NO: 133112 - DNA, 15 bp, Homo sapiens
catattctctagaga

SEQ ID NO: 133113 - DNA, 15 bp, Homo sapiens
gcatattctctagag

SEQ ID NO: 133114 - DNA, 15 bp, Homo sapiens
tgcatattctctaga

SEQ ID NO: 133115 - DNA, 15 bp, Homo sapiens
ctgcatattctctag

SEQ ID NO: 133116 - DNA, 15 bp, Homo sapiens
actgcatattctcta

SEQ ID NO: 133117 - DNA, 15 bp, Homo sapiens
gactgcatattctct

SEQ ID NO: 133118 - DNA, 15 bp, Homo sapiens
agactgcatattctc

SEQ ID NO: 133119 - DNA, 15 bp, Homo sapiens
cagactgcatattct

SEQ ID NO: 133120 - DNA, 15 bp, Homo sapiens
tcagactgcatattc

SEQ ID NO: 133121 - DNA, 15 bp, Homo sapiens
ctcagactgcatatt

SEQ ID NO: 133122 - DNA, 15 bp, Homo sapiens
actcagactgcatat

SEQ ID NO: 133123 - DNA, 15 bp, Homo sapiens
tactcagactgcata

SEQ ID NO: 133124 - DNA, 15 bp, Homo sapiens
atactcagactgcat

SEQ ID NO: 133125 - DNA, 15 bp, Homo sapiens
aatactcagactgca

SEQ ID NO: 133126 - DNA, 15 bp, Homo sapiens
aaatactcagactgc

SEQ ID NO: 133127 - DNA, 15 bp, Homo sapiens
caaatactcagactg

SEQ ID NO: 133128 - DNA, 15 bp, Homo sapiens
acaaatactcagact

SEQ ID NO: 133129 - DNA, 15 bp, Homo sapiens
cacaaatactcagac

SEQ ID NO: 133130 - DNA, 15 bp, Homo sapiens
tcacaaatactcaga

SEQ ID NO: 133131 - DNA, 15 bp, Homo sapiens
ttcacaaatactcag

SEQ ID NO: 133132 - DNA, 15 bp, Homo sapiens
cttcacaaatactca

SEQ ID NO: 133133 - DNA, 15 bp, Homo sapiens
tcttcacaaatactc

SEQ ID NO: 133134 - DNA, 15 bp, Homo sapiens
gtcttcacaaatact

SEQ ID NO: 133135 - DNA, 15 bp, Homo sapiens
ggtcttcacaaatac

SEQ ID NO: 133136 - DNA, 15 bp, Homo sapiens
aggtcttcacaaata

SEQ ID NO: 133137 - DNA, 15 bp, Homo sapiens
aaggtcttcacaaat

SEQ ID NO: 133138 - DNA, 15 bp, Homo sapiens
caaggtcttcacaaa

SEQ ID NO: 133139 - DNA, 15 bp, Homo sapiens
tcaaggtcttcacaa

SEQ ID NO: 133140 - DNA, 15 bp, Homo sapiens
gtcaaggtcttcaca

SEQ ID NO: 133141 - DNA, 15 bp, Homo sapiens
tgtcaaggtcttcac

SEQ ID NO: 133142 - DNA, 15 bp, Homo sapiens
ctgtcaaggtcttca

SEQ ID NO: 133143 - DNA, 15 bp, Homo sapiens
gctgtcaaggtcttc

SEQ ID NO: 133144 - DNA, 15 bp, Homo sapiens
ggctgtcaaggtctt

SEQ ID NO: 133145 - DNA, 15 bp, Homo sapiens
tggctgtcaaggtct

SEQ ID NO: 133146 - DNA, 15 bp, Homo sapiens
gtggctgtcaaggtc

SEQ ID NO: 133147 - DNA, 15 bp, Homo sapiens
tgtggctgtcaaggt

SEQ ID NO: 133148 - DNA, 15 bp, Homo sapiens
gtgtggctgtcaagg

SEQ ID NO: 133149 - DNA, 15 bp, Homo sapiens
agtgtggctgtcaag

SEQ ID NO: 133150 - DNA, 15 bp, Homo sapiens
tagtgtggctgtcaa

SEQ ID NO: 133151 - DNA, 15 bp, Homo sapiens
atagtgtggctgtca

SEQ ID NO: 133152 - DNA, 15 bp, Homo sapiens
catagtgtggctgtc

SEQ ID NO: 133153 - DNA, 15 bp, Homo sapiens
tcatagtgtggctgt

SEQ ID NO: 133154 - DNA, 15 bp, Homo sapiens
atcatagtgtggctg

SEQ ID NO: 133155 - DNA, 15 bp, Homo sapiens
aatcatagtgtggct

SEQ ID NO: 133156 - DNA, 15 bp, Homo sapiens
aaatcatagtgtggc

SEQ ID NO: 133157 - DNA, 15 bp, Homo sapiens
aaaatcatagtgtgg

SEQ ID NO: 133158 - DNA, 15 bp, Homo sapiens
taaaatcatagtgtg

SEQ ID NO: 133159 - DNA, 15 bp, Homo sapiens
ataaaatcatagtgt

SEQ ID NO: 133160 - DNA, 15 bp, Homo sapiens
aataaaatcatagtg

SEQ ID NO: 133161 - DNA, 15 bp, Homo sapiens
taataaaatcatagt

SEQ ID NO: 133162 - DNA, 15 bp, Homo sapiens
ataataaaatcatag

SEQ ID NO: 133163 - DNA, 15 bp, Homo sapiens
aataataaaatcata

SEQ ID NO: 133164 - DNA, 15 bp, Homo sapiens
aaataataaaatcat

SEQ ID NO: 133165 - DNA, 15 bp, Homo sapiens
taaataataaaatca

SEQ ID NO: 133166 - DNA, 15 bp, Homo sapiens
ataaataataaaatc

SEQ ID NO: 133167 - DNA, 15 bp, Homo sapiens
aataaataataaaat

SEQ ID NO: 133168 - DNA, 15 bp, Homo sapiens
taataaataataaaa

SEQ ID NO: 133169 - DNA, 15 bp, Homo sapiens
ataataaataataaa

SEQ ID NO: 133170 - DNA, 15 bp, Homo sapiens
aataataaataataa

SEQ ID NO: 133171 - DNA, 15 bp, Homo sapiens
aaataataaataata

SEQ ID NO: 133172 - DNA, 15 bp, Homo sapiens
taaataataaataat

SEQ ID NO: 133173 - DNA, 15 bp, Homo sapiens
ataaataataaataa

SEQ ID NO: 133174 - DNA, 15 bp, Homo sapiens
aataaataataaata

SEQ ID NO: 133175 - DNA, 15 bp, Homo sapiens
aaataaataataaat

SEQ ID NO: 133176 - DNA, 15 bp, Homo sapiens
aaaataaataataaa

SEQ ID NO: 133177 - DNA, 15 bp, Homo sapiens
aaaaataaataataa

SEQ ID NO: 133178 - DNA, 15 bp, Homo sapiens
taaaaataaataata

SEQ ID NO: 133179 - DNA, 15 bp, Homo sapiens
ataaaaataaataat

SEQ ID NO: 133180 - DNA, 15 bp, Homo sapiens
aataaaaataaataa

SEQ ID NO: 133181 - DNA, 15 bp, Homo sapiens
aaataaaaataaata

SEQ ID NO: 133182 - DNA, 15 bp, Homo sapiens
aaaataaaaataaat

SEQ ID NO: 133183 - DNA, 15 bp, Homo sapiens
aaaaataaaaataaa

SEQ ID NO: 133184 - DNA, 15 bp, Homo sapiens
aaaaaataaaaataa

SEQ ID NO: 133185 - DNA, 15 bp, Homo sapiens
aaaaaaataaaaata

SEQ ID NO: 133186 - DNA, 15 bp, Homo sapiens
caaaaaaataaaaat

SEQ ID NO: 133187 - DNA, 15 bp, Homo sapiens
tcaaaaaaataaaaa

SEQ ID NO: 133188 - DNA, 15 bp, Homo sapiens
ctcaaaaaaataaaa

SEQ ID NO: 133189 - DNA, 15 bp, Homo sapiens
tctcaaaaaaataaa

SEQ ID NO: 133190 - DNA, 15 bp, Homo sapiens
gtctcaaaaaaataa

SEQ ID NO: 133191 - DNA, 15 bp, Homo sapiens
cgtctcaaaaaaata

SEQ ID NO: 133192 - DNA, 15 bp, Homo sapiens
ccgtctcaaaaaaat

SEQ ID NO: 133193 - DNA, 15 bp, Homo sapiens
cccgtctcaaaaaaa

SEQ ID NO: 133194 - DNA, 15 bp, Homo sapiens
tcccgtctcaaaaaa

SEQ ID NO: 133195 - DNA, 15 bp, Homo sapiens
ctcccgtctcaaaaa

SEQ ID NO: 133196 - DNA, 15 bp, Homo sapiens
actcccgtctcaaaa

SEQ ID NO: 133197 - DNA, 15 bp, Homo sapiens
aactcccgtctcaaa

SEQ ID NO: 133198 - DNA, 15 bp, Homo sapiens
aaactcccgtctcaa

SEQ ID NO: 133199 - DNA, 15 bp, Homo sapiens
gaaactcccgtctca

SEQ ID NO: 133200 - DNA, 15 bp, Homo sapiens
cgaaactcccgtctc

SEQ ID NO: 133201 - DNA, 15 bp, Homo sapiens
gcgaaactcccgtct

SEQ ID NO: 133202 - DNA, 15 bp, Homo sapiens
agcgaaactcccgtc

SEQ ID NO: 133203 - DNA, 15 bp, Homo sapiens
aagcgaaactcccgt

SEQ ID NO: 133204 - DNA, 15 bp, Homo sapiens
aaagcgaaactcccg

SEQ ID NO: 133205 - DNA, 15 bp, Homo sapiens
aaaagcgaaactccc

SEQ ID NO: 133206 - DNA, 15 bp, Homo sapiens
caaaagcgaaactcc

SEQ ID NO: 133207 - DNA, 15 bp, Homo sapiens
acaaaagcgaaactc

SEQ ID NO: 133208 - DNA, 15 bp, Homo sapiens
aacaaaagcgaaact

SEQ ID NO: 133209 - DNA, 15 bp, Homo sapiens
caacaaaagcgaaac

SEQ ID NO: 133210 - DNA, 15 bp, Homo sapiens
gcaacaaaagcgaaa

SEQ ID NO: 133211 - DNA, 15 bp, Homo sapiens
ggcaacaaaagcgaa

SEQ ID NO: 133212 - DNA, 15 bp, Homo sapiens
gggcaacaaaagcga

SEQ ID NO: 133213 - DNA, 15 bp, Homo sapiens
tgggcaacaaaagcg

SEQ ID NO: 133214 - DNA, 15 bp, Homo sapiens
ctgggcaacaaaagc

SEQ ID NO: 133215 - DNA, 15 bp, Homo sapiens
cctgggcaacaaaag

SEQ ID NO: 133216 - DNA, 15 bp, Homo sapiens
gcctgggcaacaaaa

SEQ ID NO: 133217 - DNA, 15 bp, Homo sapiens
agcctgggcaacaaa

SEQ ID NO: 133218 - DNA, 15 bp, Homo sapiens
ccagcctgggcaaca

SEQ ID NO: 133219 - DNA, 15 bp, Homo sapiens
tccagcctgggcaac

SEQ ID NO: 133220 - DNA, 15 bp, Homo sapiens
ctccagcctgggcaa

SEQ ID NO: 133221 - DNA, 15 bp, Homo sapiens
actccagcctgggca

SEQ ID NO: 133222 - DNA, 15 bp, Homo sapiens
cactccagcctgggc

SEQ ID NO: 133223 - DNA, 15 bp, Homo sapiens
gcactccagcctggg

SEQ ID NO: 133224 - DNA, 15 bp, Homo sapiens
tgcactccagcctgg

SEQ ID NO: 133225 - DNA, 15 bp, Homo sapiens
ttgcactccagcctg

SEQ ID NO: 133226 - DNA, 15 bp, Homo sapiens
attgcactccagcct

SEQ ID NO: 133227 - DNA, 15 bp, Homo sapiens
cattgcactccagcc

SEQ ID NO: 133228 - DNA, 15 bp, Homo sapiens
ccattgcactccagc

SEQ ID NO: 133229 - DNA, 15 bp, Homo sapiens
gccattgcactccag

SEQ ID NO: 133230 - DNA, 15 bp, Homo sapiens
cgccattgcactcca

SEQ ID NO: 133231 - DNA, 15 bp, Homo sapiens
tgcgccattgcactc

SEQ ID NO: 133232 - DNA, 15 bp, Homo sapiens
ttgcgccattgcact

SEQ ID NO: 133233 - DNA, 15 bp, Homo sapiens
attgcgccattgcac

SEQ ID NO: 133234 - DNA, 15 bp, Homo sapiens
gattgcgccattgca

SEQ ID NO: 133235 - DNA, 15 bp, Homo sapiens
agattgcgccattgc

SEQ ID NO: 133236 - DNA, 15 bp, Homo sapiens
gagattgcgccattg

SEQ ID NO: 133237 - DNA, 15 bp, Homo sapiens
cgagattgcgccatt

SEQ ID NO: 133238 - DNA, 15 bp, Homo sapiens
ccgagattgcgccat

SEQ ID NO: 133239 - DNA, 15 bp, Homo sapiens
gccgagattgcgcca

SEQ ID NO: 133240 - DNA, 15 bp, Homo sapiens
agccgagattgcgcc

SEQ ID NO: 133241 - DNA, 15 bp, Homo sapiens
gagccgagattgcgc

SEQ ID NO: 133242 - DNA, 15 bp, Homo sapiens
tgagccgagattgcg

SEQ ID NO: 133243 - DNA, 15 bp, Homo sapiens
ctgagccgagattgc

SEQ ID NO: 133244 - DNA, 15 bp, Homo sapiens
tctgagccgagattg

SEQ ID NO: 133245 - DNA, 15 bp, Homo sapiens
ctctgagccgagatt

SEQ ID NO: 133246 - DNA, 15 bp, Homo sapiens
gctctgagccgagat

SEQ ID NO: 133247 - DNA, 15 bp, Homo sapiens
tgctctgagccgaga

SEQ ID NO: 133248 - DNA, 15 bp, Homo sapiens
ttgctctgagccgag

SEQ ID NO: 133249 - DNA, 15 bp, Homo sapiens
gttgctctgagccga

SEQ ID NO: 133250 - DNA, 15 bp, Homo sapiens
ggttgctctgagccg

SEQ ID NO: 133251 - DNA, 15 bp, Homo sapiens
aggttgctctgagcc

SEQ ID NO: 133252 - DNA, 15 bp, Homo sapiens
gaggttgctctgagc

SEQ ID NO: 133253 - DNA, 15 bp, Homo sapiens
agaggttgctctgag

SEQ ID NO: 133254 - DNA, 15 bp, Homo sapiens
cagaggttgctctga

SEQ ID NO: 133255 - DNA, 15 bp, Homo sapiens
gcagaggttgctctg

SEQ ID NO: 133256 - DNA, 15 bp, Homo sapiens
ggcagaggttgctct

SEQ ID NO: 133257 - DNA, 15 bp, Homo sapiens
aggcagaggttgctc

SEQ ID NO: 133258 - DNA, 15 bp, Homo sapiens
gaggcagaggttgct

SEQ ID NO: 133259 - DNA, 15 bp, Homo sapiens
cgggaggcagaggtt

SEQ ID NO: 133260 - DNA, 15 bp, Homo sapiens
ccgggaggcagaggt

SEQ ID NO: 133261 - DNA, 15 bp, Homo sapiens
cccgggaggcagagg

SEQ ID NO: 133262 - DNA, 15 bp, Homo sapiens
acccgggaggcagag

SEQ ID NO: 133263 - DNA, 15 bp, Homo sapiens
aacccgggaggcaga

SEQ ID NO: 133264 - DNA, 15 bp, Homo sapiens
gaacccgggaggcag

SEQ ID NO: 133265 - DNA, 15 bp, Homo sapiens
tgaacccgggaggca

SEQ ID NO: 133266 - DNA, 15 bp, Homo sapiens
ttgaacccgggaggc

SEQ ID NO: 133267 - DNA, 15 bp, Homo sapiens
cttgaacccgggagg

SEQ ID NO: 133268 - DNA, 15 bp, Homo sapiens
acttgaacccgggag

SEQ ID NO: 133269 - DNA, 15 bp, Homo sapiens
cacttgaacccggga

SEQ ID NO: 133270 - DNA, 15 bp, Homo sapiens
tcacttgaacccggg

SEQ ID NO: 133271 - DNA, 15 bp, Homo sapiens
atcacttgaacccgg

SEQ ID NO: 133272 - DNA, 15 bp, Homo sapiens
aatcacttgaacccg

SEQ ID NO: 133273 - DNA, 15 bp, Homo sapiens
ctgaggcaggagaat

SEQ ID NO: 133274 - DNA, 15 bp, Homo sapiens
gctgaggcaggagaa

SEQ ID NO: 133275 - DNA, 15 bp, Homo sapiens
ggctgaggcaggaga

SEQ ID NO: 133276 - DNA, 15 bp, Homo sapiens
aggctgaggcaggag

SEQ ID NO: 133277 - DNA, 15 bp, Homo sapiens
gaggctgaggcagga

SEQ ID NO: 133278 - DNA, 15 bp, Homo sapiens
ggaggctgaggcagg

SEQ ID NO: 133279 - DNA, 15 bp, Homo sapiens
tccagctactcagga

SEQ ID NO: 133280 - DNA, 15 bp, Homo sapiens
ttccagctactcagg

SEQ ID NO: 133281 - DNA, 15 bp, Homo sapiens
attccagctactcag

SEQ ID NO: 133282 - DNA, 15 bp, Homo sapiens
aattccagctactca

SEQ ID NO: 133283 - DNA, 15 bp, Homo sapiens
taattccagctactc

SEQ ID NO: 133284 - DNA, 15 bp, Homo sapiens
gtaattccagctact

SEQ ID NO: 133285 - DNA, 15 bp, Homo sapiens
tgtaattccagctac

SEQ ID NO: 133286 - DNA, 15 bp, Homo sapiens
ctgtaattccagcta

SEQ ID NO: 133287 - DNA, 15 bp, Homo sapiens
cctgtaattccagct

SEQ ID NO: 133288 - DNA, 15 bp, Homo sapiens
gatgcctgtaattcc

SEQ ID NO: 133289 - DNA, 15 bp, Homo sapiens
ggatgcctgtaattc

SEQ ID NO: 133290 - DNA, 15 bp, Homo sapiens
tggatgcctgtaatt

SEQ ID NO: 133291 - DNA, 15 bp, Homo sapiens
gtggatgcctgtaat

SEQ ID NO: 133292 - DNA, 15 bp, Homo sapiens
agtggatgcctgtaa

SEQ ID NO: 133293 - DNA, 15 bp, Homo sapiens
tagtggatgcctgta

SEQ ID NO: 133294 - DNA, 15 bp, Homo sapiens
gtagtggatgcctgt

SEQ ID NO: 133295 - DNA, 15 bp, Homo sapiens
ggtagtggatgcctg

SEQ ID NO: 133296 - DNA, 15 bp, Homo sapiens
tggtagtggatgcct

SEQ ID NO: 133297 - DNA, 15 bp, Homo sapiens
atggtagtggatgcc

SEQ ID NO: 133298 - DNA, 15 bp, Homo sapiens
catggtagtggatgc

SEQ ID NO: 133299 - DNA, 15 bp, Homo sapiens
gcatggtagtggatg

SEQ ID NO: 133300 - DNA, 15 bp, Homo sapiens
ggcatggtagtggat

SEQ ID NO: 133301 - DNA, 15 bp, Homo sapiens
gggcatggtagtgga

SEQ ID NO: 133302 - DNA, 15 bp, Homo sapiens
tgggcatggtagtgg

SEQ ID NO: 133303 - DNA, 15 bp, Homo sapiens
ctgggcatggtagtg

SEQ ID NO: 133304 - DNA, 15 bp, Homo sapiens
gctgggcatggtagt

SEQ ID NO: 133305 - DNA, 15 bp, Homo sapiens
agctgggcatggtag

SEQ ID NO: 133306 - DNA, 15 bp, Homo sapiens
tagctgggcatggta

SEQ ID NO: 133307 - DNA, 15 bp, Homo sapiens
ttagctgggcatggt

SEQ ID NO: 133308 - DNA, 15 bp, Homo sapiens
attagctgggcatgg

SEQ ID NO: 133309 - DNA, 15 bp, Homo sapiens
aattagctgggcatg

SEQ ID NO: 133310 - DNA, 15 bp, Homo sapiens
aaattagctgggcat

SEQ ID NO: 133311 - DNA, 15 bp, Homo sapiens
aaaattagctgggca

SEQ ID NO: 133312 - DNA, 15 bp, Homo sapiens
aaaaattagctgggc

SEQ ID NO: 133313 - DNA, 15 bp, Homo sapiens
caaaaattagctggg

SEQ ID NO: 133314 - DNA, 15 bp, Homo sapiens
acaaaaattagctgg

SEQ ID NO: 133315 - DNA, 15 bp, Homo sapiens
tacaaaaattagctg

SEQ ID NO: 133316 - DNA, 15 bp, Homo sapiens
atacaaaaattagct

SEQ ID NO: 133317 - DNA, 15 bp, Homo sapiens
aatacaaaaattagc

SEQ ID NO: 133318 - DNA, 15 bp, Homo sapiens
aaatacaaaaattag

SEQ ID NO: 133319 - DNA, 15 bp, Homo sapiens
aaaatacaaaaatta

SEQ ID NO: 133320 - DNA, 15 bp, Homo sapiens
aaaaatacaaaaatt

SEQ ID NO: 133321 - DNA, 15 bp, Homo sapiens
taaaaatacaaaaat

SEQ ID NO: 133322 - DNA, 15 bp, Homo sapiens
cagcctgaccaacat

SEQ ID NO: 133323 - DNA, 15 bp, Homo sapiens
ccagcctgaccaaca

SEQ ID NO: 133324 - DNA, 15 bp, Homo sapiens
accagcctgaccaac

SEQ ID NO: 133325 - DNA, 15 bp, Homo sapiens
gaccagcctgaccaa

SEQ ID NO: 133326 - DNA, 15 bp, Homo sapiens
agaccagcctgacca

SEQ ID NO: 133327 - DNA, 15 bp, Homo sapiens
aagaccagcctgacc

SEQ ID NO: 133328 - DNA, 15 bp, Homo sapiens
caagaccagcctgac

SEQ ID NO: 133329 - DNA, 15 bp, Homo sapiens
tcaagaccagcctga

SEQ ID NO: 133330 - DNA, 15 bp, Homo sapiens
ttcaagaccagcctg

SEQ ID NO: 133331 - DNA, 15 bp, Homo sapiens
gttcaagaccagcct

SEQ ID NO: 133332 - DNA, 15 bp, Homo sapiens
agttcaagaccagcc

SEQ ID NO: 133333 - DNA, 15 bp, Homo sapiens
gagttcaagaccagc

SEQ ID NO: 133334 - DNA, 15 bp, Homo sapiens
ggagttcaagaccag

SEQ ID NO: 133335 - DNA, 15 bp, Homo sapiens
gggagttcaagacca

SEQ ID NO: 133336 - DNA, 15 bp, Homo sapiens
tgggagttcaagacc

SEQ ID NO: 133337 - DNA, 15 bp, Homo sapiens
ttgggagttcaagac

SEQ ID NO: 133338 - DNA, 15 bp, Homo sapiens
gttgggagttcaaga

SEQ ID NO: 133339 - DNA, 15 bp, Homo sapiens
ggttgggagttcaag

SEQ ID NO: 133340 - DNA, 15 bp, Homo sapiens
aggttgggagttcaa

SEQ ID NO: 133341 - DNA, 15 bp, Homo sapiens
gaggttgggagttca

SEQ ID NO: 133342 - DNA, 15 bp, Homo sapiens
tgaggttgggagttc

SEQ ID NO: 133343 - DNA, 15 bp, Homo sapiens
ctgaggttgggagtt

SEQ ID NO: 133344 - DNA, 15 bp, Homo sapiens
cctgaggttgggagt

SEQ ID NO: 133345 - DNA, 15 bp, Homo sapiens
acctgaggttgggag

SEQ ID NO: 133346 - DNA, 15 bp, Homo sapiens
cacctgaggttggga

SEQ ID NO: 133347 - DNA, 15 bp, Homo sapiens
tcacctgaggttggg

SEQ ID NO: 133348 - DNA, 15 bp, Homo sapiens
atcacctgaggttgg

SEQ ID NO: 133349 - DNA, 15 bp, Homo sapiens
gatcacctgaggttg

SEQ ID NO: 133350 - DNA, 15 bp, Homo sapiens
agatcacctgaggtt

SEQ ID NO: 133351 - DNA, 15 bp, Homo sapiens
cagatcacctgaggt

SEQ ID NO: 133352 - DNA, 15 bp, Homo sapiens
gcagatcacctgagg

SEQ ID NO: 133353 - DNA, 15 bp, Homo sapiens
ggcagatcacctgag

SEQ ID NO: 133354 - DNA, 15 bp, Homo sapiens
gggcagatcacctga

SEQ ID NO: 133355 - DNA, 15 bp, Homo sapiens
tgggcagatcacctg

SEQ ID NO: 133356 - DNA, 15 bp, Homo sapiens
gtgggcagatcacct

SEQ ID NO: 133357 - DNA, 15 bp, Homo sapiens
ggtgggcagatcacc

SEQ ID NO: 133358 - DNA, 15 bp, Homo sapiens
aggtgggcagatcac

SEQ ID NO: 133359 - DNA, 15 bp, Homo sapiens
aaggtgggcagatca

SEQ ID NO: 133360 - DNA, 15 bp, Homo sapiens
caaggtgggcagatc

SEQ ID NO: 133361 - DNA, 15 bp, Homo sapiens
ccaaggtgggcagat

SEQ ID NO: 133362 - DNA, 15 bp, Homo sapiens
gccaaggtgggcaga

SEQ ID NO: 133363 - DNA, 15 bp, Homo sapiens
ggccaaggtgggcag

SEQ ID NO: 133364 - DNA, 15 bp, Homo sapiens
aggccaaggtgggca

SEQ ID NO: 133365 - DNA, 15 bp, Homo sapiens
gaggccaaggtgggc

SEQ ID NO: 133366 - DNA, 15 bp, Homo sapiens
ctgggaggccaaggt

SEQ ID NO: 133367 - DNA, 15 bp, Homo sapiens
actgggaggccaagg

SEQ ID NO: 133368 - DNA, 15 bp, Homo sapiens
cactgggaggccaag

SEQ ID NO: 133369 - DNA, 15 bp, Homo sapiens
acactgggaggccaa

SEQ ID NO: 133370 - DNA, 15 bp, Homo sapiens
cacactgggaggcca

SEQ ID NO: 133371 - DNA, 15 bp, Homo sapiens
gcacactgggaggcc

SEQ ID NO: 133372 - DNA, 15 bp, Homo sapiens
agcacactgggaggc

SEQ ID NO: 133373 - DNA, 15 bp, Homo sapiens
cagcacactgggagg

SEQ ID NO: 133374 - DNA, 15 bp, Homo sapiens
ccagcacactgggag

SEQ ID NO: 133375 - DNA, 15 bp, Homo sapiens
cccagcacactggga

SEQ ID NO: 133376 - DNA, 15 bp, Homo sapiens
tcccagcacactggg

SEQ ID NO: 133377 - DNA, 15 bp, Homo sapiens
atcccagcacactgg

SEQ ID NO: 133378 - DNA, 15 bp, Homo sapiens
aatcccagcacactg

SEQ ID NO: 133379 - DNA, 15 bp, Homo sapiens
taatcccagcacact

SEQ ID NO: 133380 - DNA, 15 bp, Homo sapiens
gtaatcccagcacac

SEQ ID NO: 133381 - DNA, 15 bp, Homo sapiens
tgtaatcccagcaca

SEQ ID NO: 133382 - DNA, 15 bp, Homo sapiens
cctgtaatcccagca

SEQ ID NO: 133383 - DNA, 15 bp, Homo sapiens
cgcctgtaatcccag

SEQ ID NO: 133384 - DNA, 15 bp, Homo sapiens
acgcctgtaatccca

SEQ ID NO: 133385 - DNA, 15 bp, Homo sapiens
cacgcctgtaatccc

SEQ ID NO: 133386 - DNA, 15 bp, Homo sapiens
tcacgcctgtaatcc

SEQ ID NO: 133387 - DNA, 15 bp, Homo sapiens
ctcacgcctgtaatc

SEQ ID NO: 133388 - DNA, 15 bp, Homo sapiens
gctcacgcctgtaat

SEQ ID NO: 133389 - DNA, 15 bp, Homo sapiens
tgctcacgcctgtaa

SEQ ID NO: 133390 - DNA, 15 bp, Homo sapiens
gtgctcacgcctgta

SEQ ID NO: 133391 - DNA, 15 bp, Homo sapiens
agtgctcacgcctgt

SEQ ID NO: 133392 - DNA, 15 bp, Homo sapiens
cagtgctcacgcctg

SEQ ID NO: 133393 - DNA, 15 bp, Homo sapiens
acagtgctcacgcct

SEQ ID NO: 133394 - DNA, 15 bp, Homo sapiens
cacagtgctcacgcc

SEQ ID NO: 133395 - DNA, 15 bp, Homo sapiens
gcacagtgctcacgc

SEQ ID NO: 133396 - DNA, 15 bp, Homo sapiens
ggcacagtgctcacg

SEQ ID NO: 133397 - DNA, 15 bp, Homo sapiens
gggcacagtgctcac

SEQ ID NO: 133398 - DNA, 15 bp, Homo sapiens
tgggcacagtgctca

SEQ ID NO: 133399 - DNA, 15 bp, Homo sapiens
ctgggcacagtgctc

SEQ ID NO: 133400 - DNA, 15 bp, Homo sapiens
gctgggcacagtgct

SEQ ID NO: 133401 - DNA, 15 bp, Homo sapiens
ggctgggcacagtgc

SEQ ID NO: 133402 - DNA, 15 bp, Homo sapiens
tggctgggcacagtg

SEQ ID NO: 133403 - DNA, 15 bp, Homo sapiens
gtggctgggcacagt

SEQ ID NO: 133404 - DNA, 15 bp, Homo sapiens
tgtggctgggcacag

SEQ ID NO: 133405 - DNA, 15 bp, Homo sapiens
gtgtggctgggcaca

SEQ ID NO: 133406 - DNA, 15 bp, Homo sapiens
agtgtggctgggcac

SEQ ID NO: 133407 - DNA, 15 bp, Homo sapiens
tagtgtggctgggca

SEQ ID NO: 133408 - DNA, 15 bp, Homo sapiens
atagtgtggctgggc

SEQ ID NO: 133409 - DNA, 15 bp, Homo sapiens
catagtgtggctggg

SEQ ID NO: 133410 - DNA, 15 bp, Homo sapiens
tcatagtgtggctgg

SEQ ID NO: 133411 - DNA, 15 bp, Homo sapiens
ttaaaatcatagtgt

SEQ ID NO: 133412 - DNA, 15 bp, Homo sapiens
attaaaatcatagtg

SEQ ID NO: 133413 - DNA, 15 bp, Homo sapiens
tattaaaatcatagt

SEQ ID NO: 133414 - DNA, 15 bp, Homo sapiens
gtattaaaatcatag

SEQ ID NO: 133415 - DNA, 15 bp, Homo sapiens
ggtattaaaatcata

SEQ ID NO: 133416 - DNA, 15 bp, Homo sapiens
tggtattaaaatcat

SEQ ID NO: 133417 - DNA, 15 bp, Homo sapiens
gtggtattaaaatca

SEQ ID NO: 133418 - DNA, 15 bp, Homo sapiens
tgtggtattaaaatc

SEQ ID NO: 133419 - DNA, 15 bp, Homo sapiens
atgtggtattaaaat

SEQ ID NO: 133420 - DNA, 15 bp, Homo sapiens
aatgtggtattaaaa

SEQ ID NO: 133421 - DNA, 15 bp, Homo sapiens
caatgtggtattaaa

SEQ ID NO: 133422 - DNA, 15 bp, Homo sapiens
ccaatgtggtattaa

SEQ ID NO: 133423 - DNA, 15 bp, Homo sapiens
accaatgtggtatta

SEQ ID NO: 133424 - DNA, 15 bp, Homo sapiens
taccaatgtggtatt

SEQ ID NO: 133425 - DNA, 15 bp, Homo sapiens
ctaccaatgtggtat

SEQ ID NO: 133426 - DNA, 15 bp, Homo sapiens
tctaccaatgtggta

SEQ ID NO: 133427 - DNA, 15 bp, Homo sapiens
gtctaccaatgtggt

SEQ ID NO: 133428 - DNA, 15 bp, Homo sapiens
ggtctaccaatgtgg

SEQ ID NO: 133429 - DNA, 15 bp, Homo sapiens
aggtctaccaatgtg

SEQ ID NO: 133430 - DNA, 15 bp, Homo sapiens
caggtctaccaatgt

SEQ ID NO: 133431 - DNA, 15 bp, Homo sapiens
gcaggtctaccaatg

SEQ ID NO: 133432 - DNA, 15 bp, Homo sapiens
tgcaggtctaccaat

SEQ ID NO: 133433 - DNA, 15 bp, Homo sapiens
ttgcaggtctaccaa

SEQ ID NO: 133434 - DNA, 15 bp, Homo sapiens
attgcaggtctacca

SEQ ID NO: 133435 - DNA, 15 bp, Homo sapiens
gattgcaggtctacc

SEQ ID NO: 133436 - DNA, 15 bp, Homo sapiens
ggattgcaggtctac

SEQ ID NO: 133437 - DNA, 15 bp, Homo sapiens
gggattgcaggtcta

SEQ ID NO: 133438 - DNA, 15 bp, Homo sapiens
ggggattgcaggtct

SEQ ID NO: 133439 - DNA, 15 bp, Homo sapiens
gggggattgcaggtc

SEQ ID NO: 133440 - DNA, 15 bp, Homo sapiens
tgggggattgcaggt

SEQ ID NO: 133441 - DNA, 15 bp, Homo sapiens
ctgggggattgcagg

SEQ ID NO: 133442 - DNA, 15 bp, Homo sapiens
tctgggggattgcag

SEQ ID NO: 133443 - DNA, 15 bp, Homo sapiens
ctctgggggattgca

SEQ ID NO: 133444 - DNA, 15 bp, Homo sapiens
tctctgggggattgc

SEQ ID NO: 133445 - DNA, 15 bp, Homo sapiens
ttctctgggggattg

SEQ ID NO: 133446 - DNA, 15 bp, Homo sapiens
cttctctgggggatt

SEQ ID NO: 133447 - DNA, 15 bp, Homo sapiens
ccttctctgggggat

SEQ ID NO: 133448 - DNA, 15 bp, Homo sapiens
tccttctctggggga

SEQ ID NO: 133449 - DNA, 15 bp, Homo sapiens
ttccttctctggggg

SEQ ID NO: 133450 - DNA, 15 bp, Homo sapiens
gttccttctctgggg

SEQ ID NO: 133451 - DNA, 15 bp, Homo sapiens
tgttccttctctggg

SEQ ID NO: 133452 - DNA, 15 bp, Homo sapiens
atgttccttctctgg

SEQ ID NO: 133453 - DNA, 15 bp, Homo sapiens
gatgttccttctctg

SEQ ID NO: 133454 - DNA, 15 bp, Homo sapiens
ggatgttccttctct

SEQ ID NO: 133455 - DNA, 15 bp, Homo sapiens
aggatgttccttctc

SEQ ID NO: 133456 - DNA, 15 bp, Homo sapiens
caggatgttccttct

SEQ ID NO: 133457 - DNA, 15 bp, Homo sapiens
ccaggatgttccttc

SEQ ID NO: 133458 - DNA, 15 bp, Homo sapiens
cccaggatgttcctt

SEQ ID NO: 133459 - DNA, 15 bp, Homo sapiens
tcccaggatgttcct

SEQ ID NO: 133460 - DNA, 15 bp, Homo sapiens
atcccaggatgttcc

SEQ ID NO: 133461 - DNA, 15 bp, Homo sapiens
catcccaggatgttc

SEQ ID NO: 133462 - DNA, 15 bp, Homo sapiens
acatcccaggatgtt

SEQ ID NO: 133463 - DNA, 15 bp, Homo sapiens
tacatcccaggatgt

SEQ ID NO: 133464 - DNA, 15 bp, Homo sapiens
gtacatcccaggatg

SEQ ID NO: 133465 - DNA, 15 bp, Homo sapiens
agtacatcccaggat

SEQ ID NO: 133466 - DNA, 15 bp, Homo sapiens
aagtacatcccagga

SEQ ID NO: 133467 - DNA, 15 bp, Homo sapiens
taagtacatcccagg

SEQ ID NO: 133468 - DNA, 15 bp, Homo sapiens
ctaagtacatcccag

SEQ ID NO: 133469 - DNA, 15 bp, Homo sapiens
tctaagtacatccca

SEQ ID NO: 133470 - DNA, 15 bp, Homo sapiens
ctctaagtacatccc

SEQ ID NO: 133471 - DNA, 15 bp, Homo sapiens
tctctaagtacatcc

SEQ ID NO: 133472 - DNA, 15 bp, Homo sapiens
gtctctaagtacatc

SEQ ID NO: 133473 - DNA, 15 bp, Homo sapiens
ggtctctaagtacat

SEQ ID NO: 133474 - DNA, 15 bp, Homo sapiens
aggtctctaagtaca

SEQ ID NO: 133475 - DNA, 15 bp, Homo sapiens
gaggtctctaagtac

SEQ ID NO: 133476 - DNA, 15 bp, Homo sapiens
tgaggtctctaagta

SEQ ID NO: 133477 - DNA, 15 bp, Homo sapiens
ctgaggtctctaagt

SEQ ID NO: 133478 - DNA, 15 bp, Homo sapiens
actgaggtctctaag

SEQ ID NO: 133479 - DNA, 15 bp, Homo sapiens
tactgaggtctctaa

SEQ ID NO: 133480 - DNA, 15 bp, Homo sapiens
ttactgaggtctcta

SEQ ID NO: 133481 - DNA, 15 bp, Homo sapiens
tttactgaggtctct

SEQ ID NO: 133482 - DNA, 15 bp, Homo sapiens
gtttactgaggtctc

SEQ ID NO: 133483 - DNA, 15 bp, Homo sapiens
ggtttactgaggtct

SEQ ID NO: 133484 - DNA, 15 bp, Homo sapiens
aggtttactgaggtc

SEQ ID NO: 133485 - DNA, 15 bp, Homo sapiens
aaggtttactgaggt

SEQ ID NO: 133486 - DNA, 15 bp, Homo sapiens
taaggtttactgagg

SEQ ID NO: 133487 - DNA, 15 bp, Homo sapiens
ataaggtttactgag

SEQ ID NO: 133488 - DNA, 15 bp, Homo sapiens
cataaggtttactga

SEQ ID NO: 133489 - DNA, 15 bp, Homo sapiens
acataaggtttactg

SEQ ID NO: 133490 - DNA, 15 bp, Homo sapiens
cacataaggtttact

SEQ ID NO: 133491 - DNA, 15 bp, Homo sapiens
acacataaggtttac

SEQ ID NO: 133492 - DNA, 15 bp, Homo sapiens
gacacataaggttta

SEQ ID NO: 133493 - DNA, 15 bp, Homo sapiens
agacacataaggttt

SEQ ID NO: 133494 - DNA, 15 bp, Homo sapiens
aagacacataaggtt

SEQ ID NO: 133495 - DNA, 15 bp, Homo sapiens
aaagacacataaggt

SEQ ID NO: 133496 - DNA, 15 bp, Homo sapiens
caaagacacataagg

SEQ ID NO: 133497 - DNA, 15 bp, Homo sapiens
gcaaagacacataag

SEQ ID NO: 133498 - DNA, 15 bp, Homo sapiens
agcaaagacacataa

SEQ ID NO: 133499 - DNA, 15 bp, Homo sapiens
gagcaaagacacata

SEQ ID NO: 133500 - DNA, 15 bp, Homo sapiens
ggagcaaagacacat

SEQ ID NO: 133501 - DNA, 15 bp, Homo sapiens
gggagcaaagacaca

SEQ ID NO: 133502 - DNA, 15 bp, Homo sapiens
ggggagcaaagacac

SEQ ID NO: 133503 - DNA, 15 bp, Homo sapiens
gggggagcaaagaca

SEQ ID NO: 133504 - DNA, 15 bp, Homo sapiens
tgggggagcaaagac

SEQ ID NO: 133505 - DNA, 15 bp, Homo sapiens
ttgggggagcaaaga

SEQ ID NO: 133506 - DNA, 15 bp, Homo sapiens
tttgggggagcaaag

SEQ ID NO: 133507 - DNA, 15 bp, Homo sapiens
atttgggggagcaaa

SEQ ID NO: 133508 - DNA, 15 bp, Homo sapiens
aatttgggggagcaa

SEQ ID NO: 133509 - DNA, 15 bp, Homo sapiens
taatttgggggagca

SEQ ID NO: 133510 - DNA, 15 bp, Homo sapiens
ttaatttgggggagc

SEQ ID NO: 133511 - DNA, 15 bp, Homo sapiens
gttaatttgggggag

SEQ ID NO: 133512 - DNA, 15 bp, Homo sapiens
tgttaatttggggga

SEQ ID NO: 133513 - DNA, 15 bp, Homo sapiens
ctgttaatttggggg

SEQ ID NO: 133514 - DNA, 15 bp, Homo sapiens
cctgttaatttgggg

SEQ ID NO: 133515 - DNA, 15 bp, Homo sapiens
ccctgttaatttggg

SEQ ID NO: 133516 - DNA, 15 bp, Homo sapiens
tccctgttaatttgg

SEQ ID NO: 133517 - DNA, 15 bp, Homo sapiens
atccctgttaatttg

SEQ ID NO: 133518 - DNA, 15 bp, Homo sapiens
tatccctgttaattt

SEQ ID NO: 133519 - DNA, 15 bp, Homo sapiens
ctatccctgttaatt

SEQ ID NO: 133520 - DNA, 15 bp, Homo sapiens
cctatccctgttaat

SEQ ID NO: 133521 - DNA, 15 bp, Homo sapiens
ccctatccctgttaa

SEQ ID NO: 133522 - DNA, 15 bp, Homo sapiens
accctatccctgtta

SEQ ID NO: 133523 - DNA, 15 bp, Homo sapiens
taccctatccctgtt

SEQ ID NO: 133524 - DNA, 15 bp, Homo sapiens
ataccctatccctgt

SEQ ID NO: 133525 - DNA, 15 bp, Homo sapiens
aataccctatccctg

SEQ ID NO: 133526 - DNA, 15 bp, Homo sapiens
gaataccctatccct

SEQ ID NO: 133527 - DNA, 15 bp, Homo sapiens
agaataccctatccc

SEQ ID NO: 133528 - DNA, 15 bp, Homo sapiens
gagaataccctatcc

SEQ ID NO: 133529 - DNA, 15 bp, Homo sapiens
agagaataccctatc

SEQ ID NO: 133530 - DNA, 15 bp, Homo sapiens
aagagaataccctat

SEQ ID NO: 133531 - DNA, 15 bp, Homo sapiens
aaagagaatacccta

SEQ ID NO: 133532 - DNA, 15 bp, Homo sapiens
caaagagaataccct

SEQ ID NO: 133533 - DNA, 15 bp, Homo sapiens
tcaaagagaataccc

SEQ ID NO: 133534 - DNA, 15 bp, Homo sapiens
ttcaaagagaatacc

SEQ ID NO: 133535 - DNA, 15 bp, Homo sapiens
attcaaagagaatac

SEQ ID NO: 133536 - DNA, 15 bp, Homo sapiens
tattcaaagagaata

SEQ ID NO: 133537 - DNA, 15 bp, Homo sapiens
ctattcaaagagaat

SEQ ID NO: 133538 - DNA, 15 bp, Homo sapiens
tctattcaaagagaa

SEQ ID NO: 133539 - DNA, 15 bp, Homo sapiens
ttctattcaaagaga

SEQ ID NO: 133540 - DNA, 15 bp, Homo sapiens
tttctattcaaagag

SEQ ID NO: 133541 - DNA, 15 bp, Homo sapiens
ttttctattcaaaga

SEQ ID NO: 133542 - DNA, 15 bp, Homo sapiens
attttctattcaaag

SEQ ID NO: 133543 - DNA, 15 bp, Homo sapiens
tattttctattcaaa

SEQ ID NO: 133544 - DNA, 15 bp, Homo sapiens
ttattttctattcaa

SEQ ID NO: 133545 - DNA, 15 bp, Homo sapiens
cttattttctattca

SEQ ID NO: 133546 - DNA, 15 bp, Homo sapiens
ccttattttctattc

SEQ ID NO: 133547 - DNA, 15 bp, Homo sapiens
tccttattttctatt

SEQ ID NO: 133548 - DNA, 15 bp, Homo sapiens
ttccttattttctat

SEQ ID NO: 133549 - DNA, 15 bp, Homo sapiens
tttccttattttcta

SEQ ID NO: 133550 - DNA, 15 bp, Homo sapiens
ttttccttattttct

SEQ ID NO: 133551 - DNA, 15 bp, Homo sapiens
cttttccttattttc

SEQ ID NO: 133552 - DNA, 15 bp, Homo sapiens
tcttttccttatttt

SEQ ID NO: 133553 - DNA, 15 bp, Homo sapiens
ttcttttccttattt

SEQ ID NO: 133554 - DNA, 15 bp, Homo sapiens
cttcttttccttatt

SEQ ID NO: 133555 - DNA, 15 bp, Homo sapiens
ccttcttttccttat

SEQ ID NO: 133556 - DNA, 15 bp, Homo sapiens
accttcttttcctta

SEQ ID NO: 133557 - DNA, 15 bp, Homo sapiens
caccttcttttcctt

SEQ ID NO: 133558 - DNA, 15 bp, Homo sapiens
acaccttcttttcct

SEQ ID NO: 133559 - DNA, 15 bp, Homo sapiens
gacaccttcttttcc

SEQ ID NO: 133560 - DNA, 15 bp, Homo sapiens
agacaccttcttttc

SEQ ID NO: 133561 - DNA, 15 bp, Homo sapiens
cagacaccttctttt

SEQ ID NO: 133562 - DNA, 15 bp, Homo sapiens
acagacaccttcttt

SEQ ID NO: 133563 - DNA, 15 bp, Homo sapiens
gacagacaccttctt

SEQ ID NO: 133564 - DNA, 15 bp, Homo sapiens
agacagacaccttct

SEQ ID NO: 133565 - DNA, 15 bp, Homo sapiens
aagacagacaccttc

SEQ ID NO: 133566 - DNA, 15 bp, Homo sapiens
taagacagacacctt

SEQ ID NO: 133567 - DNA, 15 bp, Homo sapiens
gtaagacagacacct

SEQ ID NO: 133568 - DNA, 15 bp, Homo sapiens
tgtaagacagacacc

SEQ ID NO: 133569 - DNA, 15 bp, Homo sapiens
ttgtaagacagacac

SEQ ID NO: 133570 - DNA, 15 bp, Homo sapiens
gttgtaagacagaca

SEQ ID NO: 133571 - DNA, 15 bp, Homo sapiens
agttgtaagacagac

SEQ ID NO: 133572 - DNA, 15 bp, Homo sapiens
tagttgtaagacaga

SEQ ID NO: 133573 - DNA, 15 bp, Homo sapiens
ttagttgtaagacag

SEQ ID NO: 133574 - DNA, 15 bp, Homo sapiens
attagttgtaagaca

SEQ ID NO: 133575 - DNA, 15 bp, Homo sapiens
tattagttgtaagac

SEQ ID NO: 133576 - DNA, 15 bp, Homo sapiens
ttattagttgtaaga

SEQ ID NO: 133577 - DNA, 15 bp, Homo sapiens
attattagttgtaag

SEQ ID NO: 133578 - DNA, 15 bp, Homo sapiens
gattattagttgtaa

SEQ ID NO: 133579 - DNA, 15 bp, Homo sapiens
tgattattagttgta

SEQ ID NO: 133580 - DNA, 15 bp, Homo sapiens
atgattattagttgt

SEQ ID NO: 133581 - DNA, 15 bp, Homo sapiens
catgattattagttg

SEQ ID NO: 133582 - DNA, 15 bp, Homo sapiens
tcatgattattagtt

SEQ ID NO: 133583 - DNA, 15 bp, Homo sapiens
atcatgattattagt

SEQ ID NO: 133584 - DNA, 15 bp, Homo sapiens
tatcatgattattag

SEQ ID NO: 133585 - DNA, 15 bp, Homo sapiens
ctatcatgattatta

SEQ ID NO: 133586 - DNA, 15 bp, Homo sapiens
tctatcatgattatt

SEQ ID NO: 133587 - DNA, 15 bp, Homo sapiens
gtctatcatgattat

SEQ ID NO: 133588 - DNA, 15 bp, Homo sapiens
tgtctatcatgatta

SEQ ID NO: 133589 - DNA, 15 bp, Homo sapiens
ctgtctatcatgatt

SEQ ID NO: 133590 - DNA, 15 bp, Homo sapiens
tctgtctatcatgat

SEQ ID NO: 133591 - DNA, 15 bp, Homo sapiens
ctctgtctatcatga

SEQ ID NO: 133592 - DNA, 15 bp, Homo sapiens
gctctgtctatcatg

SEQ ID NO: 133593 - DNA, 15 bp, Homo sapiens
agctctgtctatcat

SEQ ID NO: 133594 - DNA, 15 bp, Homo sapiens
cagctctgtctatca

SEQ ID NO: 133595 - DNA, 15 bp, Homo sapiens
tcagctctgtctatc

SEQ ID NO: 133596 - DNA, 15 bp, Homo sapiens
atcagctctgtctat

SEQ ID NO: 133597 - DNA, 15 bp, Homo sapiens
catcagctctgtcta

SEQ ID NO: 133598 - DNA, 15 bp, Homo sapiens
tcatcagctctgtct

SEQ ID NO: 133599 - DNA, 15 bp, Homo sapiens
atcatcagctctgtc

SEQ ID NO: 133600 - DNA, 15 bp, Homo sapiens
tatcatcagctctgt

SEQ ID NO: 133601 - DNA, 15 bp, Homo sapiens
atatcatcagctctg

SEQ ID NO: 133602 - DNA, 15 bp, Homo sapiens
aatatcatcagctct

SEQ ID NO: 133603 - DNA, 15 bp, Homo sapiens
gaatatcatcagctc

SEQ ID NO: 133604 - DNA, 15 bp, Homo sapiens
tgaatatcatcagct

SEQ ID NO: 133605 - DNA, 15 bp, Homo sapiens
ctgaatatcatcagc

SEQ ID NO: 133606 - DNA, 15 bp, Homo sapiens
gctgaatatcatcag

SEQ ID NO: 133607 - DNA, 15 bp, Homo sapiens
agctgaatatcatca

SEQ ID NO: 133608 - DNA, 15 bp, Homo sapiens
tagctgaatatcatc

SEQ ID NO: 133609 - DNA, 15 bp, Homo sapiens
ctagctgaatatcat

SEQ ID NO: 133610 - DNA, 15 bp, Homo sapiens
actagctgaatatca

SEQ ID NO: 133611 - DNA, 15 bp, Homo sapiens
gactagctgaatatc

SEQ ID NO: 133612 - DNA, 15 bp, Homo sapiens
agactagctgaatat

SEQ ID NO: 133613 - DNA, 15 bp, Homo sapiens
gagactagctgaata

SEQ ID NO: 133614 - DNA, 15 bp, Homo sapiens
ggagactagctgaat

SEQ ID NO: 133615 - DNA, 15 bp, Homo sapiens
tggagactagctgaa

SEQ ID NO: 133616 - DNA, 15 bp, Homo sapiens
atggagactagctga

SEQ ID NO: 133617 - DNA, 15 bp, Homo sapiens
catggagactagctg

SEQ ID NO: 133618 - DNA, 15 bp, Homo sapiens
gcatggagactagct

SEQ ID NO: 133619 - DNA, 15 bp, Homo sapiens
agcatggagactagc

SEQ ID NO: 133620 - DNA, 15 bp, Homo sapiens
aagcatggagactag

SEQ ID NO: 133621 - DNA, 15 bp, Homo sapiens
caagcatggagacta

SEQ ID NO: 133622 - DNA, 15 bp, Homo sapiens
ccaagcatggagact

SEQ ID NO: 133623 - DNA, 15 bp, Homo sapiens
accaagcatggagac

SEQ ID NO: 133624 - DNA, 15 bp, Homo sapiens
gaccaagcatggaga

SEQ ID NO: 133625 - DNA, 15 bp, Homo sapiens
tgaccaagcatggag

SEQ ID NO: 133626 - DNA, 15 bp, Homo sapiens
ctgaccaagcatgga

SEQ ID NO: 133627 - DNA, 15 bp, Homo sapiens
actgaccaagcatgg

SEQ ID NO: 133628 - DNA, 15 bp, Homo sapiens
gactgaccaagcatg

SEQ ID NO: 133629 - DNA, 15 bp, Homo sapiens
tgactgaccaagcat

SEQ ID NO: 133630 - DNA, 15 bp, Homo sapiens
atgactgaccaagca

SEQ ID NO: 133631 - DNA, 15 bp, Homo sapiens
gatgactgaccaagc

SEQ ID NO: 133632 - DNA, 15 bp, Homo sapiens
agatgactgaccaag

SEQ ID NO: 133633 - DNA, 15 bp, Homo sapiens
cagatgactgaccaa

SEQ ID NO: 133634 - DNA, 15 bp, Homo sapiens
gcagatgactgacca

SEQ ID NO: 133635 - DNA, 15 bp, Homo sapiens
agcagatgactgacc

SEQ ID NO: 133636 - DNA, 15 bp, Homo sapiens
aagcagatgactgac

SEQ ID NO: 133637 - DNA, 15 bp, Homo sapiens
taagcagatgactga

SEQ ID NO: 133638 - DNA, 15 bp, Homo sapiens
ataagcagatgactg

SEQ ID NO: 133639 - DNA, 15 bp, Homo sapiens
aataagcagatgact

SEQ ID NO: 133640 - DNA, 15 bp, Homo sapiens
aaataagcagatgac

SEQ ID NO: 133641 - DNA, 15 bp, Homo sapiens
taaataagcagatga

SEQ ID NO: 133642 - DNA, 15 bp, Homo sapiens
gtaaataagcagatg

SEQ ID NO: 133643 - DNA, 15 bp, Homo sapiens
tgtaaataagcagat

SEQ ID NO: 133644 - DNA, 15 bp, Homo sapiens
ctgtaaataagcaga

SEQ ID NO: 133645 - DNA, 15 bp, Homo sapiens
gctgtaaataagcag

SEQ ID NO: 133646 - DNA, 15 bp, Homo sapiens
ggctgtaaataagca

SEQ ID NO: 133647 - DNA, 15 bp, Homo sapiens
tggctgtaaataagc

SEQ ID NO: 133648 - DNA, 15 bp, Homo sapiens
ctggctgtaaataag

SEQ ID NO: 133649 - DNA, 15 bp, Homo sapiens
cctggctgtaaataa

SEQ ID NO: 133650 - DNA, 15 bp, Homo sapiens
tcctggctgtaaata

SEQ ID NO: 133651 - DNA, 15 bp, Homo sapiens
gtcctggctgtaaat

SEQ ID NO: 133652 - DNA, 15 bp, Homo sapiens
ggtcctggctgtaaa

SEQ ID NO: 133653 - DNA, 15 bp, Homo sapiens
aggtcctggctgtaa

SEQ ID NO: 133654 - DNA, 15 bp, Homo sapiens
taggtcctggctgta

SEQ ID NO: 133655 - DNA, 15 bp, Homo sapiens
ctaggtcctggctgt

SEQ ID NO: 133656 - DNA, 15 bp, Homo sapiens
actaggtcctggctg

SEQ ID NO: 133657 - DNA, 15 bp, Homo sapiens
gactaggtcctggct

SEQ ID NO: 133658 - DNA, 15 bp, Homo sapiens
ggactaggtcctggc

SEQ ID NO: 133659 - DNA, 15 bp, Homo sapiens
cggactaggtcctgg

SEQ ID NO: 133660 - DNA, 15 bp, Homo sapiens
tcggactaggtcctg

SEQ ID NO: 133661 - DNA, 15 bp, Homo sapiens
ctcggactaggtcct

SEQ ID NO: 133662 - DNA, 15 bp, Homo sapiens
cctcggactaggtcc

SEQ ID NO: 133663 - DNA, 15 bp, Homo sapiens
tcctcggactaggtc

SEQ ID NO: 133664 - DNA, 15 bp, Homo sapiens
atcctcggactaggt

SEQ ID NO: 133665 - DNA, 15 bp, Homo sapiens
gatcctcggactagg

SEQ ID NO: 133666 - DNA, 15 bp, Homo sapiens
agatcctcggactag

SEQ ID NO: 133667 - DNA, 15 bp, Homo sapiens
gagatcctcggacta

SEQ ID NO: 133668 - DNA, 15 bp, Homo sapiens
agagatcctcggact

SEQ ID NO: 133669 - DNA, 15 bp, Homo sapiens
aagagatcctcggac

SEQ ID NO: 133670 - DNA, 15 bp, Homo sapiens
gaagagatcctcgga

SEQ ID NO: 133671 - DNA, 15 bp, Homo sapiens
agaagagatcctcgg

SEQ ID NO: 133672 - DNA, 15 bp, Homo sapiens
gagaagagatcctcg

SEQ ID NO: 133673 - DNA, 15 bp, Homo sapiens
tgagaagagatcctc

SEQ ID NO: 133674 - DNA, 15 bp, Homo sapiens
ttgagaagagatcct

SEQ ID NO: 133675 - DNA, 15 bp, Homo sapiens
attgagaagagatcc

SEQ ID NO: 133676 - DNA, 15 bp, Homo sapiens
aattgagaagagatc

SEQ ID NO: 133677 - DNA, 15 bp, Homo sapiens
caattgagaagagat

SEQ ID NO: 133678 - DNA, 15 bp, Homo sapiens
ccaattgagaagaga

SEQ ID NO: 133679 - DNA, 15 bp, Homo sapiens
gccaattgagaagag

SEQ ID NO: 133680 - DNA, 15 bp, Homo sapiens
agccaattgagaaga

SEQ ID NO: 133681 - DNA, 15 bp, Homo sapiens
cagccaattgagaag

SEQ ID NO: 133682 - DNA, 15 bp, Homo sapiens
acagccaattgagaa

SEQ ID NO: 133683 - DNA, 15 bp, Homo sapiens
gacagccaattgaga

SEQ ID NO: 133684 - DNA, 15 bp, Homo sapiens
tgacagccaattgag

SEQ ID NO: 133685 - DNA, 15 bp, Homo sapiens
gtgacagccaattga

SEQ ID NO: 133686 - DNA, 15 bp, Homo sapiens
ggtgacagccaattg

SEQ ID NO: 133687 - DNA, 15 bp, Homo sapiens
tggtgacagccaatt

SEQ ID NO: 133688 - DNA, 15 bp, Homo sapiens
ctggtgacagccaat

SEQ ID NO: 133689 - DNA, 15 bp, Homo sapiens
actggtgacagccaa

SEQ ID NO: 133690 - DNA, 15 bp, Homo sapiens
cactggtgacagcca

SEQ ID NO: 133691 - DNA, 15 bp, Homo sapiens
gcactggtgacagcc

SEQ ID NO: 133692 - DNA, 15 bp, Homo sapiens
agcactggtgacagc

SEQ ID NO: 133693 - DNA, 15 bp, Homo sapiens
tagcactggtgacag

SEQ ID NO: 133694 - DNA, 15 bp, Homo sapiens
ttagcactggtgaca

SEQ ID NO: 133695 - DNA, 15 bp, Homo sapiens
tttagcactggtgac

SEQ ID NO: 133696 - DNA, 15 bp, Homo sapiens
gtttagcactggtga

SEQ ID NO: 133697 - DNA, 15 bp, Homo sapiens
ggtttagcactggtg

SEQ ID NO: 133698 - DNA, 15 bp, Homo sapiens
tggtttagcactggt

SEQ ID NO: 133699 - DNA, 15 bp, Homo sapiens
ttggtttagcactgg

SEQ ID NO: 133700 - DNA, 15 bp, Homo sapiens
attggtttagcactg

SEQ ID NO: 133701 - DNA, 15 bp, Homo sapiens
aattggtttagcact

SEQ ID NO: 133702 - DNA, 15 bp, Homo sapiens
caattggtttagcac

SEQ ID NO: 133703 - DNA, 15 bp, Homo sapiens
acaattggtttagca

SEQ ID NO: 133704 - DNA, 15 bp, Homo sapiens
aacaattggtttagc

SEQ ID NO: 133705 - DNA, 15 bp, Homo sapiens
taacaattggtttag

SEQ ID NO: 133706 - DNA, 15 bp, Homo sapiens
ttaacaattggttta

SEQ ID NO: 133707 - DNA, 15 bp, Homo sapiens
tttaacaattggttt

SEQ ID NO: 133708 - DNA, 15 bp, Homo sapiens
atttaacaattggtt

SEQ ID NO: 133709 - DNA, 15 bp, Homo sapiens
tatttaacaattggt

SEQ ID NO: 133710 - DNA, 15 bp, Homo sapiens
ttatttaacaattgg

SEQ ID NO: 133711 - DNA, 15 bp, Homo sapiens
attatttaacaattg

SEQ ID NO: 133712 - DNA, 15 bp, Homo sapiens
aattatttaacaatt

SEQ ID NO: 133713 - DNA, 15 bp, Homo sapiens
aaattatttaacaat

SEQ ID NO: 133714 - DNA, 15 bp, Homo sapiens
aaaattatttaacaa

SEQ ID NO: 133715 - DNA, 15 bp, Homo sapiens
taaaattatttaaca

SEQ ID NO: 133716 - DNA, 15 bp, Homo sapiens
ttaaaattatttaac

SEQ ID NO: 133717 - DNA, 15 bp, Homo sapiens
tttaaaattatttaa

SEQ ID NO: 133718 - DNA, 15 bp, Homo sapiens
ttttaaaattattta

SEQ ID NO: 133719 - DNA, 15 bp, Homo sapiens
attttaaaattattt

SEQ ID NO: 133720 - DNA, 15 bp, Homo sapiens
aattttaaaattatt

SEQ ID NO: 133721 - DNA, 15 bp, Homo sapiens
taattttaaaattat

SEQ ID NO: 133722 - DNA, 15 bp, Homo sapiens
ataattttaaaatta

SEQ ID NO: 133723 - DNA, 15 bp, Homo sapiens
gataattttaaaatt

SEQ ID NO: 133724 - DNA, 15 bp, Homo sapiens
agataattttaaaat

SEQ ID NO: 133725 - DNA, 15 bp, Homo sapiens
gagataattttaaaa

SEQ ID NO: 133726 - DNA, 15 bp, Homo sapiens
ggagataattttaaa

SEQ ID NO: 133727 - DNA, 15 bp, Homo sapiens
aggagataattttaa

SEQ ID NO: 133728 - DNA, 15 bp, Homo sapiens
caggagataatttta

SEQ ID NO: 133729 - DNA, 15 bp, Homo sapiens
tcaggagataatttt

SEQ ID NO: 133730 - DNA, 15 bp, Homo sapiens
ctcaggagataattt

SEQ ID NO: 133731 - DNA, 15 bp, Homo sapiens
gctcaggagataatt

SEQ ID NO: 133732 - DNA, 15 bp, Homo sapiens
tgctcaggagataat

SEQ ID NO: 133733 - DNA, 15 bp, Homo sapiens
gtgctcaggagataa

SEQ ID NO: 133734 - DNA, 15 bp, Homo sapiens
tgtgctcaggagata

SEQ ID NO: 133735 - DNA, 15 bp, Homo sapiens
atgtgctcaggagat

SEQ ID NO: 133736 - DNA, 15 bp, Homo sapiens
gatgtgctcaggaga

SEQ ID NO: 133737 - DNA, 15 bp, Homo sapiens
ggatgtgctcaggag

SEQ ID NO: 133738 - DNA, 15 bp, Homo sapiens
tggatgtgctcagga

SEQ ID NO: 133739 - DNA, 15 bp, Homo sapiens
ctggatgtgctcagg

SEQ ID NO: 133740 - DNA, 15 bp, Homo sapiens
cctggatgtgctcag

SEQ ID NO: 133741 - DNA, 15 bp, Homo sapiens
gcctggatgtgctca

SEQ ID NO: 133742 - DNA, 15 bp, Homo sapiens
tgcctggatgtgctc

SEQ ID NO: 133743 - DNA, 15 bp, Homo sapiens
gtgcctggatgtgct

SEQ ID NO: 133744 - DNA, 15 bp, Homo sapiens
ggtgcctggatgtgc

SEQ ID NO: 133745 - DNA, 15 bp, Homo sapiens
aggtgcctggatgtg

SEQ ID NO: 133746 - DNA, 15 bp, Homo sapiens
aaggtgcctggatgt

SEQ ID NO: 133747 - DNA, 15 bp, Homo sapiens
aaaggtgcctggatg

SEQ ID NO: 133748 - DNA, 15 bp, Homo sapiens
caaaggtgcctggat

SEQ ID NO: 133749 - DNA, 15 bp, Homo sapiens
gcaaaggtgcctgga

SEQ ID NO: 133750 - DNA, 15 bp, Homo sapiens
agcaaaggtgcctgg

SEQ ID NO: 133751 - DNA, 15 bp, Homo sapiens
tagcaaaggtgcctg

SEQ ID NO: 133752 - DNA, 15 bp, Homo sapiens
ttagcaaaggtgcct

SEQ ID NO: 133753 - DNA, 15 bp, Homo sapiens
cttagcaaaggtgcc

SEQ ID NO: 133754 - DNA, 15 bp, Homo sapiens
acttagcaaaggtgc

SEQ ID NO: 133755 - DNA, 15 bp, Homo sapiens
cacttagcaaaggtg

SEQ ID NO: 133756 - DNA, 15 bp, Homo sapiens
gcacttagcaaaggt

SEQ ID NO: 133757 - DNA, 15 bp, Homo sapiens
agcacttagcaaagg

SEQ ID NO: 133758 - DNA, 15 bp, Homo sapiens
aagcacttagcaaag

SEQ ID NO: 133759 - DNA, 15 bp, Homo sapiens
aaagcacttagcaaa

SEQ ID NO: 133760 - DNA, 15 bp, Homo sapiens
caaagcacttagcaa

SEQ ID NO: 133761 - DNA, 15 bp, Homo sapiens
acaaagcacttagca

SEQ ID NO: 133762 - DNA, 15 bp, Homo sapiens
cacaaagcacttagc

SEQ ID NO: 133763 - DNA, 15 bp, Homo sapiens
acacaaagcacttag

SEQ ID NO: 133764 - DNA, 15 bp, Homo sapiens
tacacaaagcactta

SEQ ID NO: 133765 - DNA, 15 bp, Homo sapiens
atacacaaagcactt

SEQ ID NO: 133766 - DNA, 15 bp, Homo sapiens
catacacaaagcact

SEQ ID NO: 133767 - DNA, 15 bp, Homo sapiens
acatacacaaagcac

SEQ ID NO: 133768 - DNA, 15 bp, Homo sapiens
aacatacacaaagca

SEQ ID NO: 133769 - DNA, 15 bp, Homo sapiens
aaacatacacaaagc

SEQ ID NO: 133770 - DNA, 15 bp, Homo sapiens
aaaacatacacaaag

SEQ ID NO: 133771 - DNA, 15 bp, Homo sapiens
taaaacatacacaaa

SEQ ID NO: 133772 - DNA, 15 bp, Homo sapiens
ataaaacatacacaa

SEQ ID NO: 133773 - DNA, 15 bp, Homo sapiens
gataaaacatacaca

SEQ ID NO: 133774 - DNA, 15 bp, Homo sapiens
agataaaacatacac

SEQ ID NO: 133775 - DNA, 15 bp, Homo sapiens
gagataaaacataca

SEQ ID NO: 133776 - DNA, 15 bp, Homo sapiens
tgagataaaacatac

SEQ ID NO: 133777 - DNA, 15 bp, Homo sapiens
atgagataaaacata

SEQ ID NO: 133778 - DNA, 15 bp, Homo sapiens
aatgagataaaacat

SEQ ID NO: 133779 - DNA, 15 bp, Homo sapiens
aaatgagataaaaca

SEQ ID NO: 133780 - DNA, 15 bp, Homo sapiens
taaatgagataaaac

SEQ ID NO: 133781 - DNA, 15 bp, Homo sapiens
ttaaatgagataaaa

SEQ ID NO: 133782 - DNA, 15 bp, Homo sapiens
attaaatgagataaa

SEQ ID NO: 133783 - DNA, 15 bp, Homo sapiens
gattaaatgagataa

SEQ ID NO: 133784 - DNA, 15 bp, Homo sapiens
agattaaatgagata

SEQ ID NO: 133785 - DNA, 15 bp, Homo sapiens
aagattaaatgagat

SEQ ID NO: 133786 - DNA, 15 bp, Homo sapiens
taagattaaatgaga

SEQ ID NO: 133787 - DNA, 15 bp, Homo sapiens
gtaagattaaatgag

SEQ ID NO: 133788 - DNA, 15 bp, Homo sapiens
tgtaagattaaatga

SEQ ID NO: 133789 - DNA, 15 bp, Homo sapiens
ctgtaagattaaatg

SEQ ID NO: 133790 - DNA, 15 bp, Homo sapiens
gctgtaagattaaat

SEQ ID NO: 133791 - DNA, 15 bp, Homo sapiens
tgctgtaagattaaa

SEQ ID NO: 133792 - DNA, 15 bp, Homo sapiens
ttgctgtaagattaa

SEQ ID NO: 133793 - DNA, 15 bp, Homo sapiens
gttgctgtaagatta

SEQ ID NO: 133794 - DNA, 15 bp, Homo sapiens
ggttgctgtaagatt

SEQ ID NO: 133795 - DNA, 15 bp, Homo sapiens
gggttgctgtaagat

SEQ ID NO: 133796 - DNA, 15 bp, Homo sapiens
tgggttgctgtaaga

SEQ ID NO: 133797 - DNA, 15 bp, Homo sapiens
gtgggttgctgtaag

SEQ ID NO: 133798 - DNA, 15 bp, Homo sapiens
agtgggttgctgtaa

SEQ ID NO: 133799 - DNA, 15 bp, Homo sapiens
cagtgggttgctgta

SEQ ID NO: 133800 - DNA, 15 bp, Homo sapiens
tcagtgggttgctgt

SEQ ID NO: 133801 - DNA, 15 bp, Homo sapiens
ctcagtgggttgctg

SEQ ID NO: 133802 - DNA, 15 bp, Homo sapiens
cctcagtgggttgct

SEQ ID NO: 133803 - DNA, 15 bp, Homo sapiens
acctcagtgggttgc

SEQ ID NO: 133804 - DNA, 15 bp, Homo sapiens
tacctcagtgggttg

SEQ ID NO: 133805 - DNA, 15 bp, Homo sapiens
ctacctcagtgggtt

SEQ ID NO: 133806 - DNA, 15 bp, Homo sapiens
actacctcagtgggt

SEQ ID NO: 133807 - DNA, 15 bp, Homo sapiens
aactacctcagtggg

SEQ ID NO: 133808 - DNA, 15 bp, Homo sapiens
aaactacctcagtgg

SEQ ID NO: 133809 - DNA, 15 bp, Homo sapiens
aaaactacctcagtg

SEQ ID NO: 133810 - DNA, 15 bp, Homo sapiens
taaaactacctcagt

SEQ ID NO: 133811 - DNA, 15 bp, Homo sapiens
ataaaactacctcag

SEQ ID NO: 133812 - DNA, 15 bp, Homo sapiens
aataaaactacctca

SEQ ID NO: 133813 - DNA, 15 bp, Homo sapiens
taataaaactacctc

SEQ ID NO: 133814 - DNA, 15 bp, Homo sapiens
ataataaaactacct

SEQ ID NO: 133815 - DNA, 15 bp, Homo sapiens
aataataaaactacc

SEQ ID NO: 133816 - DNA, 15 bp, Homo sapiens
gaataataaaactac

SEQ ID NO: 133817 - DNA, 15 bp, Homo sapiens
ggaataataaaacta

SEQ ID NO: 133818 - DNA, 15 bp, Homo sapiens
tggaataataaaact

SEQ ID NO: 133819 - DNA, 15 bp, Homo sapiens
gtggaataataaaac

SEQ ID NO: 133820 - DNA, 15 bp, Homo sapiens
agtggaataataaaa

SEQ ID NO: 133821 - DNA, 15 bp, Homo sapiens
aagtggaataataaa

SEQ ID NO: 133822 - DNA, 15 bp, Homo sapiens
aaagtggaataataa

SEQ ID NO: 133823 - DNA, 15 bp, Homo sapiens
taaagtggaataata

SEQ ID NO: 133824 - DNA, 15 bp, Homo sapiens
ataaagtggaataat

SEQ ID NO: 133825 - DNA, 15 bp, Homo sapiens
tataaagtggaataa

SEQ ID NO: 133826 - DNA, 15 bp, Homo sapiens
ctataaagtggaata

SEQ ID NO: 133827 - DNA, 15 bp, Homo sapiens
cctataaagtggaat

SEQ ID NO: 133828 - DNA, 15 bp, Homo sapiens
acctataaagtggaa

SEQ ID NO: 133829 - DNA, 15 bp, Homo sapiens
cacctataaagtgga

SEQ ID NO: 133830 - DNA, 15 bp, Homo sapiens
tcacctataaagtgg

SEQ ID NO: 133831 - DNA, 15 bp, Homo sapiens
ctcacctataaagtg

SEQ ID NO: 133832 - DNA, 15 bp, Homo sapiens
actcacctataaagt

SEQ ID NO: 133833 - DNA, 15 bp, Homo sapiens
cactcacctataaag

SEQ ID NO: 133834 - DNA, 15 bp, Homo sapiens
gcactcacctataaa

SEQ ID NO: 133835 - DNA, 15 bp, Homo sapiens
tgcactcacctataa

SEQ ID NO: 133836 - DNA, 15 bp, Homo sapiens
gtgcactcacctata

SEQ ID NO: 133837 - DNA, 15 bp, Homo sapiens
agtgcactcacctat

SEQ ID NO: 133838 - DNA, 15 bp, Homo sapiens
cagtgcactcaccta

SEQ ID NO: 133839 - DNA, 15 bp, Homo sapiens
acagtgcactcacct

SEQ ID NO: 133840 - DNA, 15 bp, Homo sapiens
tacagtgcactcacc

SEQ ID NO: 133841 - DNA, 15 bp, Homo sapiens
ctacagtgcactcac

SEQ ID NO: 133842 - DNA, 15 bp, Homo sapiens
gctacagtgcactca

SEQ ID NO: 133843 - DNA, 15 bp, Homo sapiens
agctacagtgcactc

SEQ ID NO: 133844 - DNA, 15 bp, Homo sapiens
aagctacagtgcact

SEQ ID NO: 133845 - DNA, 15 bp, Homo sapiens
gaagctacagtgcac

SEQ ID NO: 133846 - DNA, 15 bp, Homo sapiens
tgaagctacagtgca

SEQ ID NO: 133847 - DNA, 15 bp, Homo sapiens
ctgaagctacagtgc

SEQ ID NO: 133848 - DNA, 15 bp, Homo sapiens
actgaagctacagtg

SEQ ID NO: 133849 - DNA, 15 bp, Homo sapiens
gactgaagctacagt

SEQ ID NO: 133850 - DNA, 15 bp, Homo sapiens
ggactgaagctacag

SEQ ID NO: 133851 - DNA, 15 bp, Homo sapiens
aggactgaagctaca

SEQ ID NO: 133852 - DNA, 15 bp, Homo sapiens
aaggactgaagctac

SEQ ID NO: 133853 - DNA, 15 bp, Homo sapiens
aaaggactgaagcta

SEQ ID NO: 133854 - DNA, 15 bp, Homo sapiens
caaaggactgaagct

SEQ ID NO: 133855 - DNA, 15 bp, Homo sapiens
gcaaaggactgaagc

SEQ ID NO: 133856 - DNA, 15 bp, Homo sapiens
ggcaaaggactgaag

SEQ ID NO: 133857 - DNA, 15 bp, Homo sapiens
gggcaaaggactgaa

SEQ ID NO: 133858 - DNA, 15 bp, Homo sapiens
tgggcaaaggactga

SEQ ID NO: 133859 - DNA, 15 bp, Homo sapiens
gtgggcaaaggactg

SEQ ID NO: 133860 - DNA, 15 bp, Homo sapiens
tgtgggcaaaggact

SEQ ID NO: 133861 - DNA, 15 bp, Homo sapiens
ctgtgggcaaaggac

SEQ ID NO: 133862 - DNA, 15 bp, Homo sapiens
actgtgggcaaagga

SEQ ID NO: 133863 - DNA, 15 bp, Homo sapiens
gactgtgggcaaagg

SEQ ID NO: 133864 - DNA, 15 bp, Homo sapiens
tgactgtgggcaaag

SEQ ID NO: 133865 - DNA, 15 bp, Homo sapiens
gtgactgtgggcaaa

SEQ ID NO: 133866 - DNA, 15 bp, Homo sapiens
tgtgactgtgggcaa

SEQ ID NO: 133867 - DNA, 15 bp, Homo sapiens
atgtgactgtgggca

SEQ ID NO: 133868 - DNA, 15 bp, Homo sapiens
tatgtgactgtgggc

SEQ ID NO: 133869 - DNA, 15 bp, Homo sapiens
ctatgtgactgtggg

SEQ ID NO: 133870 - DNA, 15 bp, Homo sapiens
gctatgtgactgtgg

SEQ ID NO: 133871 - DNA, 15 bp, Homo sapiens
agctatgtgactgtg

SEQ ID NO: 133872 - DNA, 15 bp, Homo sapiens
tagctatgtgactgt

SEQ ID NO: 133873 - DNA, 15 bp, Homo sapiens
ctagctatgtgactg

SEQ ID NO: 133874 - DNA, 15 bp, Homo sapiens
gctagctatgtgact

SEQ ID NO: 133875 - DNA, 15 bp, Homo sapiens
tgctagctatgtgac

SEQ ID NO: 133876 - DNA, 15 bp, Homo sapiens
atgctagctatgtga

SEQ ID NO: 133877 - DNA, 15 bp, Homo sapiens
tatgctagctatgtg

SEQ ID NO: 133878 - DNA, 15 bp, Homo sapiens
atatgctagctatgt

SEQ ID NO: 133879 - DNA, 15 bp, Homo sapiens
catatgctagctatg

SEQ ID NO: 133880 - DNA, 15 bp, Homo sapiens
acatatgctagctat

SEQ ID NO: 133881 - DNA, 15 bp, Homo sapiens
gacatatgctagcta

SEQ ID NO: 133882 - DNA, 15 bp, Homo sapiens
ggacatatgctagct

SEQ ID NO: 133883 - DNA, 15 bp, Homo sapiens
tggacatatgctagc

SEQ ID NO: 133884 - DNA, 15 bp, Homo sapiens
ttggacatatgctag

SEQ ID NO: 133885 - DNA, 15 bp, Homo sapiens
tttggacatatgcta

SEQ ID NO: 133886 - DNA, 15 bp, Homo sapiens
atttggacatatgct

SEQ ID NO: 133887 - DNA, 15 bp, Homo sapiens
catttggacatatgc

SEQ ID NO: 133888 - DNA, 15 bp, Homo sapiens
tcatttggacatatg

SEQ ID NO: 133889 - DNA, 15 bp, Homo sapiens
atcatttggacatat

SEQ ID NO: 133890 - DNA, 15 bp, Homo sapiens
tatcatttggacata

SEQ ID NO: 133891 - DNA, 15 bp, Homo sapiens
ctatcatttggacat

SEQ ID NO: 133892 - DNA, 15 bp, Homo sapiens
actatcatttggaca

SEQ ID NO: 133893 - DNA, 15 bp, Homo sapiens
gactatcatttggac

SEQ ID NO: 133894 - DNA, 15 bp, Homo sapiens
tgactatcatttgga

SEQ ID NO: 133895 - DNA, 15 bp, Homo sapiens
ttgactatcatttgg

SEQ ID NO: 133896 - DNA, 15 bp, Homo sapiens
tttgactatcatttg

SEQ ID NO: 133897 - DNA, 15 bp, Homo sapiens
gtttgactatcattt

SEQ ID NO: 133898 - DNA, 15 bp, Homo sapiens
ggtttgactatcatt

SEQ ID NO: 133899 - DNA, 15 bp, Homo sapiens
aggtttgactatcat

SEQ ID NO: 133900 - DNA, 15 bp, Homo sapiens
aaggtttgactatca

SEQ ID NO: 133901 - DNA, 15 bp, Homo sapiens
taaggtttgactatc

SEQ ID NO: 133902 - DNA, 15 bp, Homo sapiens
ctaaggtttgactat

SEQ ID NO: 133903 - DNA, 15 bp, Homo sapiens
actaaggtttgacta

SEQ ID NO: 133904 - DNA, 15 bp, Homo sapiens
cactaaggtttgact

SEQ ID NO: 133905 - DNA, 15 bp, Homo sapiens
acactaaggtttgac

SEQ ID NO: 133906 - DNA, 15 bp, Homo sapiens
gacactaaggtttga

SEQ ID NO: 133907 - DNA, 15 bp, Homo sapiens
agacactaaggtttg

SEQ ID NO: 133908 - DNA, 15 bp, Homo sapiens
cagacactaaggttt

SEQ ID NO: 133909 - DNA, 15 bp, Homo sapiens
tcagacactaaggtt

SEQ ID NO: 133910 - DNA, 15 bp, Homo sapiens
atcagacactaaggt

SEQ ID NO: 133911 - DNA, 15 bp, Homo sapiens
aatcagacactaagg

SEQ ID NO: 133912 - DNA, 15 bp, Homo sapiens
gaatcagacactaag

SEQ ID NO: 133913 - DNA, 15 bp, Homo sapiens
agaatcagacactaa

SEQ ID NO: 133914 - DNA, 15 bp, Homo sapiens
gagaatcagacacta

SEQ ID NO: 133915 - DNA, 15 bp, Homo sapiens
agagaatcagacact

SEQ ID NO: 133916 - DNA, 15 bp, Homo sapiens
cagagaatcagacac

SEQ ID NO: 133917 - DNA, 15 bp, Homo sapiens
tcagagaatcagaca

SEQ ID NO: 133918 - DNA, 15 bp, Homo sapiens
ttcagagaatcagac

SEQ ID NO: 133919 - DNA, 15 bp, Homo sapiens
attcagagaatcaga

SEQ ID NO: 133920 - DNA, 15 bp, Homo sapiens
gattcagagaatcag

SEQ ID NO: 133921 - DNA, 15 bp, Homo sapiens
agattcagagaatca

SEQ ID NO: 133922 - DNA, 15 bp, Homo sapiens
tagattcagagaatc

SEQ ID NO: 133923 - DNA, 15 bp, Homo sapiens
atagattcagagaat

SEQ ID NO: 133924 - DNA, 15 bp, Homo sapiens
catagattcagagaa

SEQ ID NO: 133925 - DNA, 15 bp, Homo sapiens
acatagattcagaga

SEQ ID NO: 133926 - DNA, 15 bp, Homo sapiens
aacatagattcagag

SEQ ID NO: 133927 - DNA, 15 bp, Homo sapiens
caacatagattcaga

SEQ ID NO: 133928 - DNA, 15 bp, Homo sapiens
acaacatagattcag

SEQ ID NO: 133929 - DNA, 15 bp, Homo sapiens
gacaacatagattca

SEQ ID NO: 133930 - DNA, 15 bp, Homo sapiens
cgacaacatagattc

SEQ ID NO: 133931 - DNA, 15 bp, Homo sapiens
acgacaacatagatt

SEQ ID NO: 133932 - DNA, 15 bp, Homo sapiens
gacgacaacatagat

SEQ ID NO: 133933 - DNA, 15 bp, Homo sapiens
agacgacaacataga

SEQ ID NO: 133934 - DNA, 15 bp, Homo sapiens
tagacgacaacatag

SEQ ID NO: 133935 - DNA, 15 bp, Homo sapiens
gtagacgacaacata

SEQ ID NO: 133936 - DNA, 15 bp, Homo sapiens
agtagacgacaacat

SEQ ID NO: 133937 - DNA, 15 bp, Homo sapiens
aagtagacgacaaca

SEQ ID NO: 133938 - DNA, 15 bp, Homo sapiens
aaagtagacgacaac

SEQ ID NO: 133939 - DNA, 15 bp, Homo sapiens
aaaagtagacgacaa

SEQ ID NO: 133940 - DNA, 15 bp, Homo sapiens
aaaaagtagacgaca

SEQ ID NO: 133941 - DNA, 15 bp, Homo sapiens
gaaaaagtagacgac

SEQ ID NO: 133942 - DNA, 15 bp, Homo sapiens
agaaaaagtagacga

SEQ ID NO: 133943 - DNA, 15 bp, Homo sapiens
cagaaaaagtagacg

SEQ ID NO: 133944 - DNA, 15 bp, Homo sapiens
acagaaaaagtagac

SEQ ID NO: 133945 - DNA, 15 bp, Homo sapiens
tacagaaaaagtaga

SEQ ID NO: 133946 - DNA, 15 bp, Homo sapiens
ttacagaaaaagtag

SEQ ID NO: 133947 - DNA, 15 bp, Homo sapiens
gttacagaaaaagta

SEQ ID NO: 133948 - DNA, 15 bp, Homo sapiens
agttacagaaaaagt

SEQ ID NO: 133949 - DNA, 15 bp, Homo sapiens
aagttacagaaaaag

SEQ ID NO: 133950 - DNA, 15 bp, Homo sapiens
aaagttacagaaaaa

SEQ ID NO: 133951 - DNA, 15 bp, Homo sapiens
aaaagttacagaaaa

SEQ ID NO: 133952 - DNA, 15 bp, Homo sapiens
taaaagttacagaaa

SEQ ID NO: 133953 - DNA, 15 bp, Homo sapiens
ttaaaagttacagaa

SEQ ID NO: 133954 - DNA, 15 bp, Homo sapiens
attaaaagttacaga

SEQ ID NO: 133955 - DNA, 15 bp, Homo sapiens
aattaaaagttacag

SEQ ID NO: 133956 - DNA, 15 bp, Homo sapiens
taattaaaagttaca

SEQ ID NO: 133957 - DNA, 15 bp, Homo sapiens
ataattaaaagttac

SEQ ID NO: 133958 - DNA, 15 bp, Homo sapiens
aataattaaaagtta

SEQ ID NO: 133959 - DNA, 15 bp, Homo sapiens
taataattaaaagtt

SEQ ID NO: 133960 - DNA, 15 bp, Homo sapiens
ttaataattaaaagt

SEQ ID NO: 133961 - DNA, 15 bp, Homo sapiens
cttaataattaaaag

SEQ ID NO: 133962 - DNA, 15 bp, Homo sapiens
acttaataattaaaa

SEQ ID NO: 133963 - DNA, 15 bp, Homo sapiens
tacttaataattaaa

SEQ ID NO: 133964 - DNA, 15 bp, Homo sapiens
ctacttaataattaa

SEQ ID NO: 133965 - DNA, 15 bp, Homo sapiens
actacttaataatta

SEQ ID NO: 133966 - DNA, 15 bp, Homo sapiens
aactacttaataatt

SEQ ID NO: 133967 - DNA, 15 bp, Homo sapiens
taactacttaataat

SEQ ID NO: 133968 - DNA, 15 bp, Homo sapiens
ctaactacttaataa

SEQ ID NO: 133969 - DNA, 15 bp, Homo sapiens
cctaactacttaata

SEQ ID NO: 133970 - DNA, 15 bp, Homo sapiens
ccctaactacttaat

SEQ ID NO: 133971 - DNA, 15 bp, Homo sapiens
accctaactacttaa

SEQ ID NO: 133972 - DNA, 15 bp, Homo sapiens
aaccctaactactta

SEQ ID NO: 133973 - DNA, 15 bp, Homo sapiens
gaaccctaactactt

SEQ ID NO: 133974 - DNA, 15 bp, Homo sapiens
ggaaccctaactact

SEQ ID NO: 133975 - DNA, 15 bp, Homo sapiens
aggaaccctaactac

SEQ ID NO: 133976 - DNA, 15 bp, Homo sapiens
aaggaaccctaacta

SEQ ID NO: 133977 - DNA, 15 bp, Homo sapiens
gaaggaaccctaact

SEQ ID NO: 133978 - DNA, 15 bp, Homo sapiens
ggaaggaaccctaac

SEQ ID NO: 133979 - DNA, 15 bp, Homo sapiens
aggaaggaaccctaa

SEQ ID NO: 133980 - DNA, 15 bp, Homo sapiens
caggaaggaacccta

SEQ ID NO: 133981 - DNA, 15 bp, Homo sapiens
tcaggaaggaaccct

SEQ ID NO: 133982 - DNA, 15 bp, Homo sapiens
gtcaggaaggaaccc

SEQ ID NO: 133983 - DNA, 15 bp, Homo sapiens
agtcaggaaggaacc

SEQ ID NO: 133984 - DNA, 15 bp, Homo sapiens
tagtcaggaaggaac

SEQ ID NO: 133985 - DNA, 15 bp, Homo sapiens
atagtcaggaaggaa

SEQ ID NO: 133986 - DNA, 15 bp, Homo sapiens
catagtcaggaagga

SEQ ID NO: 133987 - DNA, 15 bp, Homo sapiens
ccatagtcaggaagg

SEQ ID NO: 133988 - DNA, 15 bp, Homo sapiens
tccatagtcaggaag

SEQ ID NO: 133989 - DNA, 15 bp, Homo sapiens
atccatagtcaggaa

SEQ ID NO: 133990 - DNA, 15 bp, Homo sapiens
aatccatagtcagga

SEQ ID NO: 133991 - DNA, 15 bp, Homo sapiens
gaatccatagtcagg

SEQ ID NO: 133992 - DNA, 15 bp, Homo sapiens
tgaatccatagtcag

SEQ ID NO: 133993 - DNA, 15 bp, Homo sapiens
atgaatccatagtca

SEQ ID NO: 133994 - DNA, 15 bp, Homo sapiens
aatgaatccatagtc

SEQ ID NO: 133995 - DNA, 15 bp, Homo sapiens
aaatgaatccatagt

SEQ ID NO: 133996 - DNA, 15 bp, Homo sapiens
caaatgaatccatag

SEQ ID NO: 133997 - DNA, 15 bp, Homo sapiens
ccaaatgaatccata

SEQ ID NO: 133998 - DNA, 15 bp, Homo sapiens
cccaaatgaatccat

SEQ ID NO: 133999 - DNA, 15 bp, Homo sapiens
tcccaaatgaatcca

SEQ ID NO: 134000 - DNA, 15 bp, Homo sapiens
gtcccaaatgaatcc

SEQ ID NO: 134001 - DNA, 15 bp, Homo sapiens
ggtcccaaatgaatc

SEQ ID NO: 134002 - DNA, 15 bp, Homo sapiens
tggtcccaaatgaat

SEQ ID NO: 134003 - DNA, 15 bp, Homo sapiens
atggtcccaaatgaa

SEQ ID NO: 134004 - DNA, 15 bp, Homo sapiens
gatggtcccaaatga

SEQ ID NO: 134005 - DNA, 15 bp, Homo sapiens
tgatggtcccaaatg

SEQ ID NO: 134006 - DNA, 15 bp, Homo sapiens
gtgatggtcccaaat

SEQ ID NO: 134007 - DNA, 15 bp, Homo sapiens
ggtgatggtcccaaa

SEQ ID NO: 134008 - DNA, 15 bp, Homo sapiens
gggtgatggtcccaa

SEQ ID NO: 134009 - DNA, 15 bp, Homo sapiens
tgggtgatggtccca

SEQ ID NO: 134010 - DNA, 15 bp, Homo sapiens
ttgggtgatggtccc

SEQ ID NO: 134011 - DNA, 15 bp, Homo sapiens
cttgggtgatggtcc

SEQ ID NO: 134012 - DNA, 15 bp, Homo sapiens
tcttgggtgatggtc

SEQ ID NO: 134013 - DNA, 15 bp, Homo sapiens
atcttgggtgatggt

SEQ ID NO: 134014 - DNA, 15 bp, Homo sapiens
aatcttgggtgatgg

SEQ ID NO: 134015 - DNA, 15 bp, Homo sapiens
taatcttgggtgatg

SEQ ID NO: 134016 - DNA, 15 bp, Homo sapiens
ctaatcttgggtgat

SEQ ID NO: 134017 - DNA, 15 bp, Homo sapiens
actaatcttgggtga

SEQ ID NO: 134018 - DNA, 15 bp, Homo sapiens
cactaatcttgggtg

SEQ ID NO: 134019 - DNA, 15 bp, Homo sapiens
tcactaatcttgggt

SEQ ID NO: 134020 - DNA, 15 bp, Homo sapiens
ctcactaatcttggg

SEQ ID NO: 134021 - DNA, 15 bp, Homo sapiens
tctcactaatcttgg

SEQ ID NO: 134022 - DNA, 15 bp, Homo sapiens
ctctcactaatcttg

SEQ ID NO: 134023 - DNA, 15 bp, Homo sapiens
tctctcactaatctt

SEQ ID NO: 134024 - DNA, 15 bp, Homo sapiens
atctctcactaatct

SEQ ID NO: 134025 - DNA, 15 bp, Homo sapiens
tatctctcactaatc

SEQ ID NO: 134026 - DNA, 15 bp, Homo sapiens
gtatctctcactaat

SEQ ID NO: 134027 - DNA, 15 bp, Homo sapiens
agtatctctcactaa

SEQ ID NO: 134028 - DNA, 15 bp, Homo sapiens
aagtatctctcacta

SEQ ID NO: 134029 - DNA, 15 bp, Homo sapiens
aaagtatctctcact

SEQ ID NO: 134030 - DNA, 15 bp, Homo sapiens
aaaagtatctctcac

SEQ ID NO: 134031 - DNA, 15 bp, Homo sapiens
aaaaagtatctctca

SEQ ID NO: 134032 - DNA, 15 bp, Homo sapiens
taaaaagtatctctc

SEQ ID NO: 134033 - DNA, 15 bp, Homo sapiens
ttaaaaagtatctct

SEQ ID NO: 134034 - DNA, 15 bp, Homo sapiens
cttaaaaagtatctc

SEQ ID NO: 134035 - DNA, 15 bp, Homo sapiens
tcttaaaaagtatct

SEQ ID NO: 134036 - DNA, 15 bp, Homo sapiens
gtcttaaaaagtatc

SEQ ID NO: 134037 - DNA, 15 bp, Homo sapiens
tgtcttaaaaagtat

SEQ ID NO: 134038 - DNA, 15 bp, Homo sapiens
ttgtcttaaaaagta

SEQ ID NO: 134039 - DNA, 15 bp, Homo sapiens
tttgtcttaaaaagt

SEQ ID NO: 134040 - DNA, 15 bp, Homo sapiens
ctttgtcttaaaaag

SEQ ID NO: 134041 - DNA, 15 bp, Homo sapiens
actttgtcttaaaaa

SEQ ID NO: 134042 - DNA, 15 bp, Homo sapiens
aactttgtcttaaaa

SEQ ID NO: 134043 - DNA, 15 bp, Homo sapiens
aaactttgtcttaaa

SEQ ID NO: 134044 - DNA, 15 bp, Homo sapiens
taaactttgtcttaa

SEQ ID NO: 134045 - DNA, 15 bp, Homo sapiens
ataaactttgtctta

SEQ ID NO: 134046 - DNA, 15 bp, Homo sapiens
cataaactttgtctt

SEQ ID NO: 134047 - DNA, 15 bp, Homo sapiens
tcataaactttgtct

SEQ ID NO: 134048 - DNA, 15 bp, Homo sapiens
atcataaactttgtc

SEQ ID NO: 134049 - DNA, 15 bp, Homo sapiens
catcataaactttgt

SEQ ID NO: 134050 - DNA, 15 bp, Homo sapiens
ccatcataaactttg

SEQ ID NO: 134051 - DNA, 15 bp, Homo sapiens
tccatcataaacttt

SEQ ID NO: 134052 - DNA, 15 bp, Homo sapiens
ttccatcataaactt

SEQ ID NO: 134053 - DNA, 15 bp, Homo sapiens
attccatcataaact

SEQ ID NO: 134054 - DNA, 15 bp, Homo sapiens
tattccatcataaac

SEQ ID NO: 134055 - DNA, 15 bp, Homo sapiens
atattccatcataaa

SEQ ID NO: 134056 - DNA, 15 bp, Homo sapiens
aatattccatcataa

SEQ ID NO: 134057 - DNA, 15 bp, Homo sapiens
aaatattccatcata

SEQ ID NO: 134058 - DNA, 15 bp, Homo sapiens
gaaatattccatcat

SEQ ID NO: 134059 - DNA, 15 bp, Homo sapiens
agaaatattccatca

SEQ ID NO: 134060 - DNA, 15 bp, Homo sapiens
aagaaatattccatc

SEQ ID NO: 134061 - DNA, 15 bp, Homo sapiens
caagaaatattccat

SEQ ID NO: 134062 - DNA, 15 bp, Homo sapiens
ccaagaaatattcca

SEQ ID NO: 134063 - DNA, 15 bp, Homo sapiens
tccaagaaatattcc

SEQ ID NO: 134064 - DNA, 15 bp, Homo sapiens
ttccaagaaatattc

SEQ ID NO: 134065 - DNA, 15 bp, Homo sapiens
attccaagaaatatt

SEQ ID NO: 134066 - DNA, 15 bp, Homo sapiens
aattccaagaaatat

SEQ ID NO: 134067 - DNA, 15 bp, Homo sapiens
gaattccaagaaata

SEQ ID NO: 134068 - DNA, 15 bp, Homo sapiens
tgaattccaagaaat

SEQ ID NO: 134069 - DNA, 15 bp, Homo sapiens
atgaattccaagaaa

SEQ ID NO: 134070 - DNA, 15 bp, Homo sapiens
tatgaattccaagaa

SEQ ID NO: 134071 - DNA, 15 bp, Homo sapiens
ctatgaattccaaga

SEQ ID NO: 134072 - DNA, 15 bp, Homo sapiens
gctatgaattccaag

SEQ ID NO: 134073 - DNA, 15 bp, Homo sapiens
tgctatgaattccaa

SEQ ID NO: 134074 - DNA, 15 bp, Homo sapiens
ctgctatgaattcca

SEQ ID NO: 134075 - DNA, 15 bp, Homo sapiens
gctgctatgaattcc

SEQ ID NO: 134076 - DNA, 15 bp, Homo sapiens
agctgctatgaattc

SEQ ID NO: 134077 - DNA, 15 bp, Homo sapiens
gagctgctatgaatt

SEQ ID NO: 134078 - DNA, 15 bp, Homo sapiens
tgagctgctatgaat

SEQ ID NO: 134079 - DNA, 15 bp, Homo sapiens
ttgagctgctatgaa

SEQ ID NO: 134080 - DNA, 15 bp, Homo sapiens
tttgagctgctatga

SEQ ID NO: 134081 - DNA, 15 bp, Homo sapiens
ctttgagctgctatg

SEQ ID NO: 134082 - DNA, 15 bp, Homo sapiens
actttgagctgctat

SEQ ID NO: 134083 - DNA, 15 bp, Homo sapiens
tactttgagctgcta

SEQ ID NO: 134084 - DNA, 15 bp, Homo sapiens
ttactttgagctgct

SEQ ID NO: 134085 - DNA, 15 bp, Homo sapiens
cttactttgagctgc

SEQ ID NO: 134086 - DNA, 15 bp, Homo sapiens
acttactttgagctg

SEQ ID NO: 134087 - DNA, 15 bp, Homo sapiens
cacttactttgagct

SEQ ID NO: 134088 - DNA, 15 bp, Homo sapiens
acacttactttgagc

SEQ ID NO: 134089 - DNA, 15 bp, Homo sapiens
aacacttactttgag

SEQ ID NO: 134090 - DNA, 15 bp, Homo sapiens
taacacttactttga

SEQ ID NO: 134091 - DNA, 15 bp, Homo sapiens
ttaacacttactttg

SEQ ID NO: 134092 - DNA, 15 bp, Homo sapiens
gttaacacttacttt

SEQ ID NO: 134093 - DNA, 15 bp, Homo sapiens
agttaacacttactt

SEQ ID NO: 134094 - DNA, 15 bp, Homo sapiens
tagttaacacttact

SEQ ID NO: 134095 - DNA, 15 bp, Homo sapiens
atagttaacacttac

SEQ ID NO: 134096 - DNA, 15 bp, Homo sapiens
aatagttaacactta

SEQ ID NO: 134097 - DNA, 15 bp, Homo sapiens
caatagttaacactt

SEQ ID NO: 134098 - DNA, 15 bp, Homo sapiens
ccaatagttaacact

SEQ ID NO: 134099 - DNA, 15 bp, Homo sapiens
accaatagttaacac

SEQ ID NO: 134100 - DNA, 15 bp, Homo sapiens
caccaatagttaaca

SEQ ID NO: 134101 - DNA, 15 bp, Homo sapiens
ccaccaatagttaac

SEQ ID NO: 134102 - DNA, 15 bp, Homo sapiens
cccaccaatagttaa

SEQ ID NO: 134103 - DNA, 15 bp, Homo sapiens
acccaccaatagtta

SEQ ID NO: 134104 - DNA, 15 bp, Homo sapiens
aacccaccaatagtt

SEQ ID NO: 134105 - DNA, 15 bp, Homo sapiens
gaacccaccaatagt

SEQ ID NO: 134106 - DNA, 15 bp, Homo sapiens
agaacccaccaatag

SEQ ID NO: 134107 - DNA, 15 bp, Homo sapiens
aagaacccaccaata

SEQ ID NO: 134108 - DNA, 15 bp, Homo sapiens
taagaacccaccaat

SEQ ID NO: 134109 - DNA, 15 bp, Homo sapiens
ttaagaacccaccaa

SEQ ID NO: 134110 - DNA, 15 bp, Homo sapiens
cttaagaacccacca

SEQ ID NO: 134111 - DNA, 15 bp, Homo sapiens
ccttaagaacccacc

SEQ ID NO: 134112 - DNA, 15 bp, Homo sapiens
tccttaagaacccac

SEQ ID NO: 134113 - DNA, 15 bp, Homo sapiens
gtccttaagaaccca

SEQ ID NO: 134114 - DNA, 15 bp, Homo sapiens
ggtccttaagaaccc

SEQ ID NO: 134115 - DNA, 15 bp, Homo sapiens
tggtccttaagaacc

SEQ ID NO: 134116 - DNA, 15 bp, Homo sapiens
ctggtccttaagaac

SEQ ID NO: 134117 - DNA, 15 bp, Homo sapiens
gctggtccttaagaa

SEQ ID NO: 134118 - DNA, 15 bp, Homo sapiens
tgctggtccttaaga

SEQ ID NO: 134119 - DNA, 15 bp, Homo sapiens
atgctggtccttaag

SEQ ID NO: 134120 - DNA, 15 bp, Homo sapiens
catgctggtccttaa

SEQ ID NO: 134121 - DNA, 15 bp, Homo sapiens
acatgctggtcctta

SEQ ID NO: 134122 - DNA, 15 bp, Homo sapiens
gacatgctggtcctt

SEQ ID NO: 134123 - DNA, 15 bp, Homo sapiens
ggacatgctggtcct

SEQ ID NO: 134124 - DNA, 15 bp, Homo sapiens
tggacatgctggtcc

SEQ ID NO: 134125 - DNA, 15 bp, Homo sapiens
ttggacatgctggtc

SEQ ID NO: 134126 - DNA, 15 bp, Homo sapiens
cttggacatgctggt

SEQ ID NO: 134127 - DNA, 15 bp, Homo sapiens
ccttggacatgctgg

SEQ ID NO: 134128 - DNA, 15 bp, Homo sapiens
cccttggacatgctg

SEQ ID NO: 134129 - DNA, 15 bp, Homo sapiens
tcccttggacatgct

SEQ ID NO: 134130 - DNA, 15 bp, Homo sapiens
atcccttggacatgc

SEQ ID NO: 134131 - DNA, 15 bp, Homo sapiens
tatcccttggacatg

SEQ ID NO: 134132 - DNA, 15 bp, Homo sapiens
ctatcccttggacat

SEQ ID NO: 134133 - DNA, 15 bp, Homo sapiens
tctatcccttggaca

SEQ ID NO: 134134 - DNA, 15 bp, Homo sapiens
atctatcccttggac

SEQ ID NO: 134135 - DNA, 15 bp, Homo sapiens
tatctatcccttgga

SEQ ID NO: 134136 - DNA, 15 bp, Homo sapiens
ctatctatcccttgg

SEQ ID NO: 134137 - DNA, 15 bp, Homo sapiens
tctatctatcccttg

SEQ ID NO: 134138 - DNA, 15 bp, Homo sapiens
atctatctatccctt

SEQ ID NO: 134139 - DNA, 15 bp, Homo sapiens
aatctatctatccct

SEQ ID NO: 134140 - DNA, 15 bp, Homo sapiens
caatctatctatccc

SEQ ID NO: 134141 - DNA, 15 bp, Homo sapiens
ccaatctatctatcc

SEQ ID NO: 134142 - DNA, 15 bp, Homo sapiens
accaatctatctatc

SEQ ID NO: 134143 - DNA, 15 bp, Homo sapiens
taccaatctatctat

SEQ ID NO: 134144 - DNA, 15 bp, Homo sapiens
ttaccaatctatcta

SEQ ID NO: 134145 - DNA, 15 bp, Homo sapiens
tttaccaatctatct

SEQ ID NO: 134146 - DNA, 15 bp, Homo sapiens
atttaccaatctatc

SEQ ID NO: 134147 - DNA, 15 bp, Homo sapiens
aatttaccaatctat

SEQ ID NO: 134148 - DNA, 15 bp, Homo sapiens
taatttaccaatcta

SEQ ID NO: 134149 - DNA, 15 bp, Homo sapiens
gtaatttaccaatct

SEQ ID NO: 134150 - DNA, 15 bp, Homo sapiens
agtaatttaccaatc

SEQ ID NO: 134151 - DNA, 15 bp, Homo sapiens
cagtaatttaccaat

SEQ ID NO: 134152 - DNA, 15 bp, Homo sapiens
acagtaatttaccaa

SEQ ID NO: 134153 - DNA, 15 bp, Homo sapiens
tacagtaatttacca

SEQ ID NO: 134154 - DNA, 15 bp, Homo sapiens
atacagtaatttacc

SEQ ID NO: 134155 - DNA, 15 bp, Homo sapiens
catacagtaatttac

SEQ ID NO: 134156 - DNA, 15 bp, Homo sapiens
acatacagtaattta

SEQ ID NO: 134157 - DNA, 15 bp, Homo sapiens
tacatacagtaattt

SEQ ID NO: 134158 - DNA, 15 bp, Homo sapiens
gtacatacagtaatt

SEQ ID NO: 134159 - DNA, 15 bp, Homo sapiens
ggtacatacagtaat

SEQ ID NO: 134160 - DNA, 15 bp, Homo sapiens
aggtacatacagtaa

SEQ ID NO: 134161 - DNA, 15 bp, Homo sapiens
caggtacatacagta

SEQ ID NO: 134162 - DNA, 15 bp, Homo sapiens
acaggtacatacagt

SEQ ID NO: 134163 - DNA, 15 bp, Homo sapiens
gacaggtacatacag

SEQ ID NO: 134164 - DNA, 15 bp, Homo sapiens
agacaggtacataca

SEQ ID NO: 134165 - DNA, 15 bp, Homo sapiens
aagacaggtacatac

SEQ ID NO: 134166 - DNA, 15 bp, Homo sapiens
aaagacaggtacata

SEQ ID NO: 134167 - DNA, 15 bp, Homo sapiens
aaaagacaggtacat

SEQ ID NO: 134168 - DNA, 15 bp, Homo sapiens
taaaagacaggtaca

SEQ ID NO: 134169 - DNA, 15 bp, Homo sapiens
gtaaaagacaggtac

SEQ ID NO: 134170 - DNA, 15 bp, Homo sapiens
tgtaaaagacaggta

SEQ ID NO: 134171 - DNA, 15 bp, Homo sapiens
ttgtaaaagacaggt

SEQ ID NO: 134172 - DNA, 15 bp, Homo sapiens
tttgtaaaagacagg

SEQ ID NO: 134173 - DNA, 15 bp, Homo sapiens
ctttgtaaaagacag

SEQ ID NO: 134174 - DNA, 15 bp, Homo sapiens
gctttgtaaaagaca

SEQ ID NO: 134175 - DNA, 15 bp, Homo sapiens
agctttgtaaaagac

SEQ ID NO: 134176 - DNA, 15 bp, Homo sapiens
tagctttgtaaaaga

SEQ ID NO: 134177 - DNA, 15 bp, Homo sapiens
atagctttgtaaaag

SEQ ID NO: 134178 - DNA, 15 bp, Homo sapiens
tatagctttgtaaaa

SEQ ID NO: 134179 - DNA, 15 bp, Homo sapiens
ttatagctttgtaaa

SEQ ID NO: 134180 - DNA, 15 bp, Homo sapiens
cttatagctttgtaa

SEQ ID NO: 134181 - DNA, 15 bp, Homo sapiens
tcttatagctttgta

SEQ ID NO: 134182 - DNA, 15 bp, Homo sapiens
atcttatagctttgt

SEQ ID NO: 134183 - DNA, 15 bp, Homo sapiens
tatcttatagctttg

SEQ ID NO: 134184 - DNA, 15 bp, Homo sapiens
atatcttatagcttt

SEQ ID NO: 134185 - DNA, 15 bp, Homo sapiens
aatatcttatagctt

SEQ ID NO: 134186 - DNA, 15 bp, Homo sapiens
aaatatcttatagct

SEQ ID NO: 134187 - DNA, 15 bp, Homo sapiens
taaatatcttatagc

SEQ ID NO: 134188 - DNA, 15 bp, Homo sapiens
ttaaatatcttatag

SEQ ID NO: 134189 - DNA, 15 bp, Homo sapiens
cttaaatatcttata

SEQ ID NO: 134190 - DNA, 15 bp, Homo sapiens
acttaaatatcttat

SEQ ID NO: 134191 - DNA, 15 bp, Homo sapiens
tacttaaatatctta

SEQ ID NO: 134192 - DNA, 15 bp, Homo sapiens
gtacttaaatatctt

SEQ ID NO: 134193 - DNA, 15 bp, Homo sapiens
ggtacttaaatatct

SEQ ID NO: 134194 - DNA, 15 bp, Homo sapiens
gggtacttaaatatc

SEQ ID NO: 134195 - DNA, 15 bp, Homo sapiens
cgggtacttaaatat

SEQ ID NO: 134196 - DNA, 15 bp, Homo sapiens
acgggtacttaaata

SEQ ID NO: 134197 - DNA, 15 bp, Homo sapiens
aacgggtacttaaat

SEQ ID NO: 134198 - DNA, 15 bp, Homo sapiens
aaacgggtacttaaa

SEQ ID NO: 134199 - DNA, 15 bp, Homo sapiens
aaaacgggtacttaa

SEQ ID NO: 134200 - DNA, 15 bp, Homo sapiens
caaaacgggtactta

SEQ ID NO: 134201 - DNA, 15 bp, Homo sapiens
acaaaacgggtactt

SEQ ID NO: 134202 - DNA, 15 bp, Homo sapiens
tacaaaacgggtact

SEQ ID NO: 134203 - DNA, 15 bp, Homo sapiens
ttacaaaacgggtac

SEQ ID NO: 134204 - DNA, 15 bp, Homo sapiens
attacaaaacgggta

SEQ ID NO: 134205 - DNA, 15 bp, Homo sapiens
aattacaaaacgggt

SEQ ID NO: 134206 - DNA, 15 bp, Homo sapiens
aaattacaaaacggg

SEQ ID NO: 134207 - DNA, 15 bp, Homo sapiens
aaaattacaaaacgg

SEQ ID NO: 134208 - DNA, 15 bp, Homo sapiens
gaaaattacaaaacg

SEQ ID NO: 134209 - DNA, 15 bp, Homo sapiens
ggaaaattacaaaac

SEQ ID NO: 134210 - DNA, 15 bp, Homo sapiens
tggaaaattacaaaa

SEQ ID NO: 134211 - DNA, 15 bp, Homo sapiens
gtggaaaattacaaa

SEQ ID NO: 134212 - DNA, 15 bp, Homo sapiens
agtggaaaattacaa

SEQ ID NO: 134213 - DNA, 15 bp, Homo sapiens
aagtggaaaattaca

SEQ ID NO: 134214 - DNA, 15 bp, Homo sapiens
taagtggaaaattac

SEQ ID NO: 134215 - DNA, 15 bp, Homo sapiens
ttaagtggaaaatta

SEQ ID NO: 134216 - DNA, 15 bp, Homo sapiens
tttaagtggaaaatt

SEQ ID NO: 134217 - DNA, 15 bp, Homo sapiens
gtttaagtggaaaat

SEQ ID NO: 134218 - DNA, 15 bp, Homo sapiens
agtttaagtggaaaa

SEQ ID NO: 134219 - DNA, 15 bp, Homo sapiens
cagtttaagtggaaa

SEQ ID NO: 134220 - DNA, 15 bp, Homo sapiens
tcagtttaagtggaa

SEQ ID NO: 134221 - DNA, 15 bp, Homo sapiens
atcagtttaagtgga

SEQ ID NO: 134222 - DNA, 15 bp, Homo sapiens
tatcagtttaagtgg

SEQ ID NO: 134223 - DNA, 15 bp, Homo sapiens
atatcagtttaagtg

SEQ ID NO: 134224 - DNA, 15 bp, Homo sapiens
catatcagtttaagt

SEQ ID NO: 134225 - DNA, 15 bp, Homo sapiens
acatatcagtttaag

SEQ ID NO: 134226 - DNA, 15 bp, Homo sapiens
aacatatcagtttaa

SEQ ID NO: 134227 - DNA, 15 bp, Homo sapiens
aaacatatcagttta

SEQ ID NO: 134228 - DNA, 15 bp, Homo sapiens
caaacatatcagttt

SEQ ID NO: 134229 - DNA, 15 bp, Homo sapiens
tcaaacatatcagtt

SEQ ID NO: 134230 - DNA, 15 bp, Homo sapiens
atcaaacatatcagt

SEQ ID NO: 134231 - DNA, 15 bp, Homo sapiens
catcaaacatatcag

SEQ ID NO: 134232 - DNA, 15 bp, Homo sapiens
tcatcaaacatatca

SEQ ID NO: 134233 - DNA, 15 bp, Homo sapiens
ttcatcaaacatatc

SEQ ID NO: 134234 - DNA, 15 bp, Homo sapiens
gttcatcaaacatat

SEQ ID NO: 134235 - DNA, 15 bp, Homo sapiens
agttcatcaaacata

SEQ ID NO: 134236 - DNA, 15 bp, Homo sapiens
aagttcatcaaacat

SEQ ID NO: 134237 - DNA, 15 bp, Homo sapiens
caagttcatcaaaca

SEQ ID NO: 134238 - DNA, 15 bp, Homo sapiens
ccaagttcatcaaac

SEQ ID NO: 134239 - DNA, 15 bp, Homo sapiens
gccaagttcatcaaa

SEQ ID NO: 134240 - DNA, 15 bp, Homo sapiens
tgccaagttcatcaa

SEQ ID NO: 134241 - DNA, 15 bp, Homo sapiens
ctgccaagttcatca

SEQ ID NO: 134242 - DNA, 15 bp, Homo sapiens
actgccaagttcatc

SEQ ID NO: 134243 - DNA, 15 bp, Homo sapiens
gactgccaagttcat

SEQ ID NO: 134244 - DNA, 15 bp, Homo sapiens
agactgccaagttca

SEQ ID NO: 134245 - DNA, 15 bp, Homo sapiens
tagactgccaagttc

SEQ ID NO: 134246 - DNA, 15 bp, Homo sapiens
ttagactgccaagtt

SEQ ID NO: 134247 - DNA, 15 bp, Homo sapiens
gttagactgccaagt

SEQ ID NO: 134248 - DNA, 15 bp, Homo sapiens
agttagactgccaag

SEQ ID NO: 134249 - DNA, 15 bp, Homo sapiens
cagttagactgccaa

SEQ ID NO: 134250 - DNA, 15 bp, Homo sapiens
gcagttagactgcca

SEQ ID NO: 134251 - DNA, 15 bp, Homo sapiens
tgcagttagactgcc

SEQ ID NO: 134252 - DNA, 15 bp, Homo sapiens
atgcagttagactgc

SEQ ID NO: 134253 - DNA, 15 bp, Homo sapiens
aatgcagttagactg

SEQ ID NO: 134254 - DNA, 15 bp, Homo sapiens
caatgcagttagact

SEQ ID NO: 134255 - DNA, 15 bp, Homo sapiens
ccaatgcagttagac

SEQ ID NO: 134256 - DNA, 15 bp, Homo sapiens
accaatgcagttaga

SEQ ID NO: 134257 - DNA, 15 bp, Homo sapiens
aaccaatgcagttag

SEQ ID NO: 134258 - DNA, 15 bp, Homo sapiens
taaccaatgcagtta

SEQ ID NO: 134259 - DNA, 15 bp, Homo sapiens
ttaaccaatgcagtt

SEQ ID NO: 134260 - DNA, 15 bp, Homo sapiens
tttaaccaatgcagt

SEQ ID NO: 134261 - DNA, 15 bp, Homo sapiens
ttttaaccaatgcag

SEQ ID NO: 134262 - DNA, 15 bp, Homo sapiens
cttttaaccaatgca

SEQ ID NO: 134263 - DNA, 15 bp, Homo sapiens
ccttttaaccaatgc

SEQ ID NO: 134264 - DNA, 15 bp, Homo sapiens
tccttttaaccaatg

SEQ ID NO: 134265 - DNA, 15 bp, Homo sapiens
atccttttaaccaat

SEQ ID NO: 134266 - DNA, 15 bp, Homo sapiens
catccttttaaccaa

SEQ ID NO: 134267 - DNA, 15 bp, Homo sapiens
gcatccttttaacca

SEQ ID NO: 134268 - DNA, 15 bp, Homo sapiens
tgcatccttttaacc

SEQ ID NO: 134269 - DNA, 15 bp, Homo sapiens
gtgcatccttttaac

SEQ ID NO: 134270 - DNA, 15 bp, Homo sapiens
tgtgcatccttttaa

SEQ ID NO: 134271 - DNA, 15 bp, Homo sapiens
atgtgcatcctttta

SEQ ID NO: 134272 - DNA, 15 bp, Homo sapiens
aatgtgcatcctttt

SEQ ID NO: 134273 - DNA, 15 bp, Homo sapiens
aaatgtgcatccttt

SEQ ID NO: 134274 - DNA, 15 bp, Homo sapiens
taaatgtgcatcctt

SEQ ID NO: 134275 - DNA, 15 bp, Homo sapiens
ataaatgtgcatcct

SEQ ID NO: 134276 - DNA, 15 bp, Homo sapiens
tataaatgtgcatcc

SEQ ID NO: 134277 - DNA, 15 bp, Homo sapiens
atataaatgtgcatc

SEQ ID NO: 134278 - DNA, 15 bp, Homo sapiens
aatataaatgtgcat

SEQ ID NO: 134279 - DNA, 15 bp, Homo sapiens
aaatataaatgtgca

SEQ ID NO: 134280 - DNA, 15 bp, Homo sapiens
gaaatataaatgtgc

SEQ ID NO: 134281 - DNA, 15 bp, Homo sapiens
agaaatataaatgtg

SEQ ID NO: 134282 - DNA, 15 bp, Homo sapiens
tagaaatataaatgt

SEQ ID NO: 134283 - DNA, 15 bp, Homo sapiens
ttagaaatataaatg

SEQ ID NO: 134284 - DNA, 15 bp, Homo sapiens
tttagaaatataaat

SEQ ID NO: 134285 - DNA, 15 bp, Homo sapiens
atttagaaatataaa

SEQ ID NO: 134286 - DNA, 15 bp, Homo sapiens
catttagaaatataa

SEQ ID NO: 134287 - DNA, 15 bp, Homo sapiens
tcatttagaaatata

SEQ ID NO: 134288 - DNA, 15 bp, Homo sapiens
ttcatttagaaatat

SEQ ID NO: 134289 - DNA, 15 bp, Homo sapiens
tttcatttagaaata

SEQ ID NO: 134290 - DNA, 15 bp, Homo sapiens
atttcatttagaaat

SEQ ID NO: 134291 - DNA, 15 bp, Homo sapiens
catttcatttagaaa

SEQ ID NO: 134292 - DNA, 15 bp, Homo sapiens
ccatttcatttagaa

SEQ ID NO: 134293 - DNA, 15 bp, Homo sapiens
tccatttcatttaga

SEQ ID NO: 134294 - DNA, 15 bp, Homo sapiens
ttccatttcatttag

SEQ ID NO: 134295 - DNA, 15 bp, Homo sapiens
attccatttcattta

SEQ ID NO: 134296 - DNA, 15 bp, Homo sapiens
tattccatttcattt

SEQ ID NO: 134297 - DNA, 15 bp, Homo sapiens
gtattccatttcatt

SEQ ID NO: 134298 - DNA, 15 bp, Homo sapiens
agtattccatttcat

SEQ ID NO: 134299 - DNA, 15 bp, Homo sapiens
cagtattccatttca

SEQ ID NO: 134300 - DNA, 15 bp, Homo sapiens
tcagtattccatttc

SEQ ID NO: 134301 - DNA, 15 bp, Homo sapiens
ttcagtattccattt

SEQ ID NO: 134302 - DNA, 15 bp, Homo sapiens
attcagtattccatt

SEQ ID NO: 134303 - DNA, 15 bp, Homo sapiens
aattcagtattccat

SEQ ID NO: 134304 - DNA, 15 bp, Homo sapiens
aaattcagtattcca

SEQ ID NO: 134305 - DNA, 15 bp, Homo sapiens
taaattcagtattcc

SEQ ID NO: 134306 - DNA, 15 bp, Homo sapiens
ttaaattcagtattc

SEQ ID NO: 134307 - DNA, 15 bp, Homo sapiens
tttaaattcagtatt

SEQ ID NO: 134308 - DNA, 15 bp, Homo sapiens
ttttaaattcagtat

SEQ ID NO: 134309 - DNA, 15 bp, Homo sapiens
cttttaaattcagta

SEQ ID NO: 134310 - DNA, 15 bp, Homo sapiens
ccttttaaattcagt

SEQ ID NO: 134311 - DNA, 15 bp, Homo sapiens
accttttaaattcag

SEQ ID NO: 134312 - DNA, 15 bp, Homo sapiens
caccttttaaattca

SEQ ID NO: 134313 - DNA, 15 bp, Homo sapiens
tcaccttttaaattc

SEQ ID NO: 134314 - DNA, 15 bp, Homo sapiens
atcaccttttaaatt

SEQ ID NO: 134315 - DNA, 15 bp, Homo sapiens
catcaccttttaaat

SEQ ID NO: 134316 - DNA, 15 bp, Homo sapiens
acatcaccttttaaa

SEQ ID NO: 134317 - DNA, 15 bp, Homo sapiens
aacatcaccttttaa

SEQ ID NO: 134318 - DNA, 15 bp, Homo sapiens
aaacatcacctttta

SEQ ID NO: 134319 - DNA, 15 bp, Homo sapiens
aaaacatcacctttt

SEQ ID NO: 134320 - DNA, 15 bp, Homo sapiens
gaaaacatcaccttt

SEQ ID NO: 134321 - DNA, 15 bp, Homo sapiens
agaaaacatcacctt

SEQ ID NO: 134322 - DNA, 15 bp, Homo sapiens
gagaaaacatcacct

SEQ ID NO: 134323 - DNA, 15 bp, Homo sapiens
agagaaaacatcacc

SEQ ID NO: 134324 - DNA, 15 bp, Homo sapiens
tagagaaaacatcac

SEQ ID NO: 134325 - DNA, 15 bp, Homo sapiens
atagagaaaacatca

SEQ ID NO: 134326 - DNA, 15 bp, Homo sapiens
aatagagaaaacatc

SEQ ID NO: 134327 - DNA, 15 bp, Homo sapiens
taatagagaaaacat

SEQ ID NO: 134328 - DNA, 15 bp, Homo sapiens
ttaatagagaaaaca

SEQ ID NO: 134329 - DNA, 15 bp, Homo sapiens
cttaatagagaaaac

SEQ ID NO: 134330 - DNA, 15 bp, Homo sapiens
acttaatagagaaaa

SEQ ID NO: 134331 - DNA, 15 bp, Homo sapiens
tacttaatagagaaa

SEQ ID NO: 134332 - DNA, 15 bp, Homo sapiens
atacttaatagagaa

SEQ ID NO: 134333 - DNA, 15 bp, Homo sapiens
catacttaatagaga

SEQ ID NO: 134334 - DNA, 15 bp, Homo sapiens
tcatacttaatagag

SEQ ID NO: 134335 - DNA, 15 bp, Homo sapiens
ttcatacttaataga

SEQ ID NO: 134336 - DNA, 15 bp, Homo sapiens
tttcatacttaatag

SEQ ID NO: 134337 - DNA, 15 bp, Homo sapiens
ttttcatacttaata

SEQ ID NO: 134338 - DNA, 15 bp, Homo sapiens
attttcatacttaat

SEQ ID NO: 134339 - DNA, 15 bp, Homo sapiens
tattttcatacttaa

SEQ ID NO: 134340 - DNA, 15 bp, Homo sapiens
ctattttcatactta

SEQ ID NO: 134341 - DNA, 15 bp, Homo sapiens
tctattttcatactt

SEQ ID NO: 134342 - DNA, 15 bp, Homo sapiens
atctattttcatact

SEQ ID NO: 134343 - DNA, 15 bp, Homo sapiens
tatctattttcatac

SEQ ID NO: 134344 - DNA, 15 bp, Homo sapiens
gtatctattttcata

SEQ ID NO: 134345 - DNA, 15 bp, Homo sapiens
tgtatctattttcat

SEQ ID NO: 134346 - DNA, 15 bp, Homo sapiens
ttgtatctattttca

SEQ ID NO: 134347 - DNA, 15 bp, Homo sapiens
tttgtatctattttc

SEQ ID NO: 134348 - DNA, 15 bp, Homo sapiens
atttgtatctatttt

SEQ ID NO: 134349 - DNA, 15 bp, Homo sapiens
gatttgtatctattt

SEQ ID NO: 134350 - DNA, 15 bp, Homo sapiens
agatttgtatctatt

SEQ ID NO: 134351 - DNA, 15 bp, Homo sapiens
cagatttgtatctat

SEQ ID NO: 134352 - DNA, 15 bp, Homo sapiens
ccagatttgtatcta

SEQ ID NO: 134353 - DNA, 15 bp, Homo sapiens
gccagatttgtatct

SEQ ID NO: 134354 - DNA, 15 bp, Homo sapiens
ggccagatttgtatc

SEQ ID NO: 134355 - DNA, 15 bp, Homo sapiens
tggccagatttgtat

SEQ ID NO: 134356 - DNA, 15 bp, Homo sapiens
ctggccagatttgta

SEQ ID NO: 134357 - DNA, 15 bp, Homo sapiens
cctggccagatttgt

SEQ ID NO: 134358 - DNA, 15 bp, Homo sapiens
gcctggccagatttg

SEQ ID NO: 134359 - DNA, 15 bp, Homo sapiens
cgcctggccagattt

SEQ ID NO: 134360 - DNA, 15 bp, Homo sapiens
gcgcctggccagatt

SEQ ID NO: 134361 - DNA, 15 bp, Homo sapiens
cgcgcctggccagat

SEQ ID NO: 134362 - DNA, 15 bp, Homo sapiens
ccgcgcctggccaga

SEQ ID NO: 134363 - DNA, 15 bp, Homo sapiens
accgcgcctggccag

SEQ ID NO: 134364 - DNA, 15 bp, Homo sapiens
caccgcgcctggcca

SEQ ID NO: 134365 - DNA, 15 bp, Homo sapiens
gcaccgcgcctggcc

SEQ ID NO: 134366 - DNA, 15 bp, Homo sapiens
agcaccgcgcctggc

SEQ ID NO: 134367 - DNA, 15 bp, Homo sapiens
gagcaccgcgcctgg

SEQ ID NO: 134368 - DNA, 15 bp, Homo sapiens
tgagcaccgcgcctg

SEQ ID NO: 134369 - DNA, 15 bp, Homo sapiens
gtgagcaccgcgcct

SEQ ID NO: 134370 - DNA, 15 bp, Homo sapiens
cgtgagcaccgcgcc

SEQ ID NO: 134371 - DNA, 15 bp, Homo sapiens
gcgtgagcaccgcgc

SEQ ID NO: 134372 - DNA, 15 bp, Homo sapiens
ggcgtgagcaccgcg

SEQ ID NO: 134373 - DNA, 15 bp, Homo sapiens
aggcgtgagcaccgc

SEQ ID NO: 134374 - DNA, 15 bp, Homo sapiens
caggcgtgagcaccg

SEQ ID NO: 134375 - DNA, 15 bp, Homo sapiens
acaggcgtgagcacc

SEQ ID NO: 134376 - DNA, 15 bp, Homo sapiens
tacaggcgtgagcac

SEQ ID NO: 134377 - DNA, 15 bp, Homo sapiens
ctacaggcgtgagca

SEQ ID NO: 134378 - DNA, 15 bp, Homo sapiens
actacaggcgtgagc

SEQ ID NO: 134379 - DNA, 15 bp, Homo sapiens
gactacaggcgtgag

SEQ ID NO: 134380 - DNA, 15 bp, Homo sapiens
ggactacaggcgtga

SEQ ID NO: 134381 - DNA, 15 bp, Homo sapiens
gggactacaggcgtg

SEQ ID NO: 134382 - DNA, 15 bp, Homo sapiens
tgggactacaggcgt

SEQ ID NO: 134383 - DNA, 15 bp, Homo sapiens
ctgggactacaggcg

SEQ ID NO: 134384 - DNA, 15 bp, Homo sapiens
cgctgggactacagg

SEQ ID NO: 134385 - DNA, 15 bp, Homo sapiens
gcgctgggactacag

SEQ ID NO: 134386 - DNA, 15 bp, Homo sapiens
agcgctgggactaca

SEQ ID NO: 134387 - DNA, 15 bp, Homo sapiens
aagcgctgggactac

SEQ ID NO: 134388 - DNA, 15 bp, Homo sapiens
aaagcgctgggacta

SEQ ID NO: 134389 - DNA, 15 bp, Homo sapiens
caaagcgctgggact

SEQ ID NO: 134390 - DNA, 15 bp, Homo sapiens
ccaaagcgctgggac

SEQ ID NO: 134391 - DNA, 15 bp, Homo sapiens
cccaaagcgctggga

SEQ ID NO: 134392 - DNA, 15 bp, Homo sapiens
tcccaaagcgctggg

SEQ ID NO: 134393 - DNA, 15 bp, Homo sapiens
ctcccaaagcgctgg

SEQ ID NO: 134394 - DNA, 15 bp, Homo sapiens
cctcccaaagcgctg

SEQ ID NO: 134395 - DNA, 15 bp, Homo sapiens
gcctcccaaagcgct

SEQ ID NO: 134396 - DNA, 15 bp, Homo sapiens
ggcctcccaaagcgc

SEQ ID NO: 134397 - DNA, 15 bp, Homo sapiens
tggcctcccaaagcg

SEQ ID NO: 134398 - DNA, 15 bp, Homo sapiens
ttggcctcccaaagc

SEQ ID NO: 134399 - DNA, 15 bp, Homo sapiens
accttggcctcccaa

SEQ ID NO: 134400 - DNA, 15 bp, Homo sapiens
caccttggcctccca

SEQ ID NO: 134401 - DNA, 15 bp, Homo sapiens
ccaccttggcctccc

SEQ ID NO: 134402 - DNA, 15 bp, Homo sapiens
accaccttggcctcc

SEQ ID NO: 134403 - DNA, 15 bp, Homo sapiens
gaccaccttggcctc

SEQ ID NO: 134404 - DNA, 15 bp, Homo sapiens
tgaccaccttggcct

SEQ ID NO: 134405 - DNA, 15 bp, Homo sapiens
ctgaccaccttggcc

SEQ ID NO: 134406 - DNA, 15 bp, Homo sapiens
tctgaccaccttggc

SEQ ID NO: 134407 - DNA, 15 bp, Homo sapiens
atctgaccaccttgg

SEQ ID NO: 134408 - DNA, 15 bp, Homo sapiens
gatctgaccaccttg

SEQ ID NO: 134409 - DNA, 15 bp, Homo sapiens
tgatctgaccacctt

SEQ ID NO: 134410 - DNA, 15 bp, Homo sapiens
gtgatctgaccacct

SEQ ID NO: 134411 - DNA, 15 bp, Homo sapiens
ggtgatctgaccacc

SEQ ID NO: 134412 - DNA, 15 bp, Homo sapiens
aggtgatctgaccac

SEQ ID NO: 134413 - DNA, 15 bp, Homo sapiens
caggtgatctgacca

SEQ ID NO: 134414 - DNA, 15 bp, Homo sapiens
tcaggtgatctgacc

SEQ ID NO: 134415 - DNA, 15 bp, Homo sapiens
ctcaggtgatctgac

SEQ ID NO: 134416 - DNA, 15 bp, Homo sapiens
cctcaggtgatctga

SEQ ID NO: 134417 - DNA, 15 bp, Homo sapiens
acctcaggtgatctg

SEQ ID NO: 134418 - DNA, 15 bp, Homo sapiens
gacctcaggtgatct

SEQ ID NO: 134419 - DNA, 15 bp, Homo sapiens
tgacctcaggtgatc

SEQ ID NO: 134420 - DNA, 15 bp, Homo sapiens
ctgacctcaggtgat

SEQ ID NO: 134421 - DNA, 15 bp, Homo sapiens
cctgacctcaggtga

SEQ ID NO: 134422 - DNA, 15 bp, Homo sapiens
tcctgacctcaggtg

SEQ ID NO: 134423 - DNA, 15 bp, Homo sapiens
ctcctgacctcaggt

SEQ ID NO: 134424 - DNA, 15 bp, Homo sapiens
actcctgacctcagg

SEQ ID NO: 134425 - DNA, 15 bp, Homo sapiens
aactcctgacctcag

SEQ ID NO: 134426 - DNA, 15 bp, Homo sapiens
gaactcctgacctca

SEQ ID NO: 134427 - DNA, 15 bp, Homo sapiens
cgaactcctgacctc

SEQ ID NO: 134428 - DNA, 15 bp, Homo sapiens
tcgaactcctgacct

SEQ ID NO: 134429 - DNA, 15 bp, Homo sapiens
ctcgaactcctgacc

SEQ ID NO: 134430 - DNA, 15 bp, Homo sapiens
tctcgaactcctgac

SEQ ID NO: 134431 - DNA, 15 bp, Homo sapiens
ggctggtctcgaact

SEQ ID NO: 134432 - DNA, 15 bp, Homo sapiens
aggctggtctcgaac

SEQ ID NO: 134433 - DNA, 15 bp, Homo sapiens
gccaggctggtctcg

SEQ ID NO: 134434 - DNA, 15 bp, Homo sapiens
agccaggctggtctc

SEQ ID NO: 134435 - DNA, 15 bp, Homo sapiens
tagccaggctggtct

SEQ ID NO: 134436 - DNA, 15 bp, Homo sapiens
ttagccaggctggtc

SEQ ID NO: 134437 - DNA, 15 bp, Homo sapiens
gttagccaggctggt

SEQ ID NO: 134438 - DNA, 15 bp, Homo sapiens
tgttagccaggctgg

SEQ ID NO: 134439 - DNA, 15 bp, Homo sapiens
atgttagccaggctg

SEQ ID NO: 134440 - DNA, 15 bp, Homo sapiens
catgttagccaggct

SEQ ID NO: 134441 - DNA, 15 bp, Homo sapiens
ccatgttagccaggc

SEQ ID NO: 134442 - DNA, 15 bp, Homo sapiens
accatgttagccagg

SEQ ID NO: 134443 - DNA, 15 bp, Homo sapiens
caccatgttagccag

SEQ ID NO: 134444 - DNA, 15 bp, Homo sapiens
tcaccatgttagcca

SEQ ID NO: 134445 - DNA, 15 bp, Homo sapiens
ttcaccatgttagcc

SEQ ID NO: 134446 - DNA, 15 bp, Homo sapiens
tttcaccatgttagc

SEQ ID NO: 134447 - DNA, 15 bp, Homo sapiens
gtttcaccatgttag

SEQ ID NO: 134448 - DNA, 15 bp, Homo sapiens
ggtttcaccatgtta

SEQ ID NO: 134449 - DNA, 15 bp, Homo sapiens
tggggtttcaccatg

SEQ ID NO: 134450 - DNA, 15 bp, Homo sapiens
atggggtttcaccat

SEQ ID NO: 134451 - DNA, 15 bp, Homo sapiens
aatggggtttcacca

SEQ ID NO: 134452 - DNA, 15 bp, Homo sapiens
aaatggggtttcacc

SEQ ID NO: 134453 - DNA, 15 bp, Homo sapiens
gaaatggggtttcac

SEQ ID NO: 134454 - DNA, 15 bp, Homo sapiens
agaaatggggtttca

SEQ ID NO: 134455 - DNA, 15 bp, Homo sapiens
tagaaatggggtttc

SEQ ID NO: 134456 - DNA, 15 bp, Homo sapiens
gtagaaatggggttt

SEQ ID NO: 134457 - DNA, 15 bp, Homo sapiens
agtagaaatggggtt

SEQ ID NO: 134458 - DNA, 15 bp, Homo sapiens
tagtagaaatggggt

SEQ ID NO: 134459 - DNA, 15 bp, Homo sapiens
ttagtagaaatgggg

SEQ ID NO: 134460 - DNA, 15 bp, Homo sapiens
tttagtagaaatggg

SEQ ID NO: 134461 - DNA, 15 bp, Homo sapiens
ttttagtagaaatgg

SEQ ID NO: 134462 - DNA, 15 bp, Homo sapiens
tttttagtagaaatg

SEQ ID NO: 134463 - DNA, 15 bp, Homo sapiens
atttttagtagaaat

SEQ ID NO: 134464 - DNA, 15 bp, Homo sapiens
tatttttagtagaaa

SEQ ID NO: 134465 - DNA, 15 bp, Homo sapiens
gtatttttagtagaa

SEQ ID NO: 134466 - DNA, 15 bp, Homo sapiens
tgtatttttagtaga

SEQ ID NO: 134467 - DNA, 15 bp, Homo sapiens
ttgtatttttagtag

SEQ ID NO: 134468 - DNA, 15 bp, Homo sapiens
tttgtatttttagta

SEQ ID NO: 134469 - DNA, 15 bp, Homo sapiens
ttttgtatttttagt

SEQ ID NO: 134470 - DNA, 15 bp, Homo sapiens
tttttgtatttttag

SEQ ID NO: 134471 - DNA, 15 bp, Homo sapiens
ttttttgtattttta

SEQ ID NO: 134472 - DNA, 15 bp, Homo sapiens
attttttgtattttt

SEQ ID NO: 134473 - DNA, 15 bp, Homo sapiens
aattttttgtatttt

SEQ ID NO: 134474 - DNA, 15 bp, Homo sapiens
taattttttgtattt

SEQ ID NO: 134475 - DNA, 15 bp, Homo sapiens
ctaattttttgtatt

SEQ ID NO: 134476 - DNA, 15 bp, Homo sapiens
gctaattttttgtat

SEQ ID NO: 134477 - DNA, 15 bp, Homo sapiens
ggctaattttttgta

SEQ ID NO: 134478 - DNA, 15 bp, Homo sapiens
tggctaattttttgt

SEQ ID NO: 134479 - DNA, 15 bp, Homo sapiens
ctggctaattttttg

SEQ ID NO: 134480 - DNA, 15 bp, Homo sapiens
tctggctaatttttt

SEQ ID NO: 134481 - DNA, 15 bp, Homo sapiens
gtctggctaattttt

SEQ ID NO: 134482 - DNA, 15 bp, Homo sapiens
cgtctggctaatttt

SEQ ID NO: 134483 - DNA, 15 bp, Homo sapiens
acgtctggctaattt

SEQ ID NO: 134484 - DNA, 15 bp, Homo sapiens
cacgtctggctaatt

SEQ ID NO: 134485 - DNA, 15 bp, Homo sapiens
acacgtctggctaat

SEQ ID NO: 134486 - DNA, 15 bp, Homo sapiens
aacacgtctggctaa

SEQ ID NO: 134487 - DNA, 15 bp, Homo sapiens
caacacgtctggcta

SEQ ID NO: 134488 - DNA, 15 bp, Homo sapiens
ccaacacgtctggct

SEQ ID NO: 134489 - DNA, 15 bp, Homo sapiens
gccaacacgtctggc

SEQ ID NO: 134490 - DNA, 15 bp, Homo sapiens
cgccaacacgtctgg

SEQ ID NO: 134491 - DNA, 15 bp, Homo sapiens
ccgccaacacgtctg

SEQ ID NO: 134492 - DNA, 15 bp, Homo sapiens
cccgccaacacgtct

SEQ ID NO: 134493 - DNA, 15 bp, Homo sapiens
gcccgccaacacgtc

SEQ ID NO: 134494 - DNA, 15 bp, Homo sapiens
tgcccgccaacacgt

SEQ ID NO: 134495 - DNA, 15 bp, Homo sapiens
gtgcccgccaacacg

SEQ ID NO: 134496 - DNA, 15 bp, Homo sapiens
ggtgcccgccaacac

SEQ ID NO: 134497 - DNA, 15 bp, Homo sapiens
aggtgcccgccaaca

SEQ ID NO: 134498 - DNA, 15 bp, Homo sapiens
caggtgcccgccaac

SEQ ID NO: 134499 - DNA, 15 bp, Homo sapiens
acaggtgcccgccaa

SEQ ID NO: 134500 - DNA, 15 bp, Homo sapiens
tacaggtgcccgcca

SEQ ID NO: 134501 - DNA, 15 bp, Homo sapiens
ttacaggtgcccgcc

SEQ ID NO: 134502 - DNA, 15 bp, Homo sapiens
attacaggtgcccgc

SEQ ID NO: 134503 - DNA, 15 bp, Homo sapiens
gattacaggtgcccg

SEQ ID NO: 134504 - DNA, 15 bp, Homo sapiens
agattacaggtgccc

SEQ ID NO: 134505 - DNA, 15 bp, Homo sapiens
gagattacaggtgcc

SEQ ID NO: 134506 - DNA, 15 bp, Homo sapiens
tgagattacaggtgc

SEQ ID NO: 134507 - DNA, 15 bp, Homo sapiens
ctgagattacaggtg

SEQ ID NO: 134508 - DNA, 15 bp, Homo sapiens
gctgagattacaggt

SEQ ID NO: 134509 - DNA, 15 bp, Homo sapiens
agctgagattacagg

SEQ ID NO: 134510 - DNA, 15 bp, Homo sapiens
tagctgagattacag

SEQ ID NO: 134511 - DNA, 15 bp, Homo sapiens
gtagctgagattaca

SEQ ID NO: 134512 - DNA, 15 bp, Homo sapiens
agtagctgagattac

SEQ ID NO: 134513 - DNA, 15 bp, Homo sapiens
gagtagctgagatta

SEQ ID NO: 134514 - DNA, 15 bp, Homo sapiens
cgagtagctgagatt

SEQ ID NO: 134515 - DNA, 15 bp, Homo sapiens
ccgagtagctgagat

SEQ ID NO: 134516 - DNA, 15 bp, Homo sapiens
cccgagtagctgaga

SEQ ID NO: 134517 - DNA, 15 bp, Homo sapiens
tcccgagtagctgag

SEQ ID NO: 134518 - DNA, 15 bp, Homo sapiens
ctcccgagtagctga

SEQ ID NO: 134519 - DNA, 15 bp, Homo sapiens
cctcccgagtagctg

SEQ ID NO: 134520 - DNA, 15 bp, Homo sapiens
gcctcccgagtagct

SEQ ID NO: 134521 - DNA, 15 bp, Homo sapiens
agcctcccgagtagc

SEQ ID NO: 134522 - DNA, 15 bp, Homo sapiens
cagcctcccgagtag

SEQ ID NO: 134523 - DNA, 15 bp, Homo sapiens
tcagcctcccgagta

SEQ ID NO: 134524 - DNA, 15 bp, Homo sapiens
ctcagcctcccgagt

SEQ ID NO: 134525 - DNA, 15 bp, Homo sapiens
cctcagcctcccgag

SEQ ID NO: 134526 - DNA, 15 bp, Homo sapiens
gcctcagcctcccga

SEQ ID NO: 134527 - DNA, 15 bp, Homo sapiens
tgcctcagcctcccg

SEQ ID NO: 134528 - DNA, 15 bp, Homo sapiens
gattctcctgcctca

SEQ ID NO: 134529 - DNA, 15 bp, Homo sapiens
cgattctcctgcctc

SEQ ID NO: 134530 - DNA, 15 bp, Homo sapiens
gcgattctcctgcct

SEQ ID NO: 134531 - DNA, 15 bp, Homo sapiens
agcgattctcctgcc

SEQ ID NO: 134532 - DNA, 15 bp, Homo sapiens
aagcgattctcctgc

SEQ ID NO: 134533 - DNA, 15 bp, Homo sapiens
caagcgattctcctg

SEQ ID NO: 134534 - DNA, 15 bp, Homo sapiens
tcaagcgattctcct

SEQ ID NO: 134535 - DNA, 15 bp, Homo sapiens
ttcaagcgattctcc

SEQ ID NO: 134536 - DNA, 15 bp, Homo sapiens
gttcaagcgattctc

SEQ ID NO: 134537 - DNA, 15 bp, Homo sapiens
ggttcaagcgattct

SEQ ID NO: 134538 - DNA, 15 bp, Homo sapiens
gggttcaagcgattc

SEQ ID NO: 134539 - DNA, 15 bp, Homo sapiens
tgggttcaagcgatt

SEQ ID NO: 134540 - DNA, 15 bp, Homo sapiens
ctgggttcaagcgat

SEQ ID NO: 134541 - DNA, 15 bp, Homo sapiens
cctgggttcaagcga

SEQ ID NO: 134542 - DNA, 15 bp, Homo sapiens
acctgggttcaagcg

SEQ ID NO: 134543 - DNA, 15 bp, Homo sapiens
cacctgggttcaagc

SEQ ID NO: 134544 - DNA, 15 bp, Homo sapiens
ccacctgggttcaag

SEQ ID NO: 134545 - DNA, 15 bp, Homo sapiens
gccacctgggttcaa

SEQ ID NO: 134546 - DNA, 15 bp, Homo sapiens
tgccacctgggttca

SEQ ID NO: 134547 - DNA, 15 bp, Homo sapiens
ctgccacctgggttc

SEQ ID NO: 134548 - DNA, 15 bp, Homo sapiens
tctgccacctgggtt

SEQ ID NO: 134549 - DNA, 15 bp, Homo sapiens
ctctgccacctgggt

SEQ ID NO: 134550 - DNA, 15 bp, Homo sapiens
cctctgccacctggg

SEQ ID NO: 134551 - DNA, 15 bp, Homo sapiens
acctctgccacctgg

SEQ ID NO: 134552 - DNA, 15 bp, Homo sapiens
aacctctgccacctg

SEQ ID NO: 134553 - DNA, 15 bp, Homo sapiens
caacctctgccacct

SEQ ID NO: 134554 - DNA, 15 bp, Homo sapiens
gcaacctctgccacc

SEQ ID NO: 134555 - DNA, 15 bp, Homo sapiens
tgcaacctctgccac

SEQ ID NO: 134556 - DNA, 15 bp, Homo sapiens
ctgcaacctctgcca

SEQ ID NO: 134557 - DNA, 15 bp, Homo sapiens
actgcaacctctgcc

SEQ ID NO: 134558 - DNA, 15 bp, Homo sapiens
cactgcaacctctgc

SEQ ID NO: 134559 - DNA, 15 bp, Homo sapiens
tcactgcaacctctg

SEQ ID NO: 134560 - DNA, 15 bp, Homo sapiens
ctcactgcaacctct

SEQ ID NO: 134561 - DNA, 15 bp, Homo sapiens
gctcactgcaacctc

SEQ ID NO: 134562 - DNA, 15 bp, Homo sapiens
ggctcactgcaacct

SEQ ID NO: 134563 - DNA, 15 bp, Homo sapiens
tggctcactgcaacc

SEQ ID NO: 134564 - DNA, 15 bp, Homo sapiens
ttggctcactgcaac

SEQ ID NO: 134565 - DNA, 15 bp, Homo sapiens
cttggctcactgcaa

SEQ ID NO: 134566 - DNA, 15 bp, Homo sapiens
tcttggctcactgca

SEQ ID NO: 134567 - DNA, 15 bp, Homo sapiens
atcttggctcactgc

SEQ ID NO: 134568 - DNA, 15 bp, Homo sapiens
gatcttggctcactg

SEQ ID NO: 134569 - DNA, 15 bp, Homo sapiens
agatcttggctcact

SEQ ID NO: 134570 - DNA, 15 bp, Homo sapiens
aagatcttggctcac

SEQ ID NO: 134571 - DNA, 15 bp, Homo sapiens
caagatcttggctca

SEQ ID NO: 134572 - DNA, 15 bp, Homo sapiens
gcaagatcttggctc

SEQ ID NO: 134573 - DNA, 15 bp, Homo sapiens
ggcaagatcttggct

SEQ ID NO: 134574 - DNA, 15 bp, Homo sapiens
tggcaagatcttggc

SEQ ID NO: 134575 - DNA, 15 bp, Homo sapiens
atggcaagatcttgg

SEQ ID NO: 134576 - DNA, 15 bp, Homo sapiens
aatggcaagatcttg

SEQ ID NO: 134577 - DNA, 15 bp, Homo sapiens
caatggcaagatctt

SEQ ID NO: 134578 - DNA, 15 bp, Homo sapiens
gcaatggcaagatct

SEQ ID NO: 134579 - DNA, 15 bp, Homo sapiens
tgcaatggcaagatc

SEQ ID NO: 134580 - DNA, 15 bp, Homo sapiens
gtgcaatggcaagat

SEQ ID NO: 134581 - DNA, 15 bp, Homo sapiens
agtgcaatggcaaga

SEQ ID NO: 134582 - DNA, 15 bp, Homo sapiens
gagtgcaatggcaag

SEQ ID NO: 134583 - DNA, 15 bp, Homo sapiens
ggagtgcaatggcaa

SEQ ID NO: 134584 - DNA, 15 bp, Homo sapiens
tggagtgcaatggca

SEQ ID NO: 134585 - DNA, 15 bp, Homo sapiens
ctggagtgcaatggc

SEQ ID NO: 134586 - DNA, 15 bp, Homo sapiens
gctggagtgcaatgg

SEQ ID NO: 134587 - DNA, 15 bp, Homo sapiens
ggctggagtgcaatg

SEQ ID NO: 134588 - DNA, 15 bp, Homo sapiens
aggctggagtgcaat

SEQ ID NO: 134589 - DNA, 15 bp, Homo sapiens
caggctggagtgcaa

SEQ ID NO: 134590 - DNA, 15 bp, Homo sapiens
tcaggctggagtgca

SEQ ID NO: 134591 - DNA, 15 bp, Homo sapiens
ctcaggctggagtgc

SEQ ID NO: 134592 - DNA, 15 bp, Homo sapiens
gctcaggctggagtg

SEQ ID NO: 134593 - DNA, 15 bp, Homo sapiens
tgctcaggctggagt

SEQ ID NO: 134594 - DNA, 15 bp, Homo sapiens
ttgctcaggctggag

SEQ ID NO: 134595 - DNA, 15 bp, Homo sapiens
gttgctcaggctgga

SEQ ID NO: 134596 - DNA, 15 bp, Homo sapiens
tgttgctcaggctgg

SEQ ID NO: 134597 - DNA, 15 bp, Homo sapiens
ttgttgctcaggctg

SEQ ID NO: 134598 - DNA, 15 bp, Homo sapiens
cttgttgctcaggct

SEQ ID NO: 134599 - DNA, 15 bp, Homo sapiens
tcttgttgctcaggc

SEQ ID NO: 134600 - DNA, 15 bp, Homo sapiens
ctcttgttgctcagg

SEQ ID NO: 134601 - DNA, 15 bp, Homo sapiens
gctcttgttgctcag

SEQ ID NO: 134602 - DNA, 15 bp, Homo sapiens
tgctcttgttgctca

SEQ ID NO: 134603 - DNA, 15 bp, Homo sapiens
ttgctcttgttgctc

SEQ ID NO: 134604 - DNA, 15 bp, Homo sapiens
tttgctcttgttgct

SEQ ID NO: 134605 - DNA, 15 bp, Homo sapiens
ttttgctcttgttgc

SEQ ID NO: 134606 - DNA, 15 bp, Homo sapiens
gttttgctcttgttg

SEQ ID NO: 134607 - DNA, 15 bp, Homo sapiens
tgttttgctcttgtt

SEQ ID NO: 134608 - DNA, 15 bp, Homo sapiens
gtgttttgctcttgt

SEQ ID NO: 134609 - DNA, 15 bp, Homo sapiens
ggtgttttgctcttg

SEQ ID NO: 134610 - DNA, 15 bp, Homo sapiens
tggtgttttgctctt

SEQ ID NO: 134611 - DNA, 15 bp, Homo sapiens
atggtgttttgctct

SEQ ID NO: 134612 - DNA, 15 bp, Homo sapiens
gatggtgttttgctc

SEQ ID NO: 134613 - DNA, 15 bp, Homo sapiens
agatggtgttttgct

SEQ ID NO: 134614 - DNA, 15 bp, Homo sapiens
gagatggtgttttgc

SEQ ID NO: 134615 - DNA, 15 bp, Homo sapiens
tgagatggtgttttg

SEQ ID NO: 134616 - DNA, 15 bp, Homo sapiens
ttgagatggtgtttt

SEQ ID NO: 134617 - DNA, 15 bp, Homo sapiens
tttgagatggtgttt

SEQ ID NO: 134618 - DNA, 15 bp, Homo sapiens
ttttgagatggtgtt

SEQ ID NO: 134619 - DNA, 15 bp, Homo sapiens
tttttgagatggtgt

SEQ ID NO: 134620 - DNA, 15 bp, Homo sapiens
ttttttgagatggtg

SEQ ID NO: 134621 - DNA, 15 bp, Homo sapiens
tttttttgagatggt

SEQ ID NO: 134622 - DNA, 15 bp, Homo sapiens
ttttttttgagatgg

SEQ ID NO: 134623 - DNA, 15 bp, Homo sapiens
tttttttttgagatg

SEQ ID NO: 134624 - DNA, 15 bp, Homo sapiens
ttttttttttgagat

SEQ ID NO: 134625 - DNA, 15 bp, Homo sapiens
ccttttttttttttt

SEQ ID NO: 134626 - DNA, 15 bp, Homo sapiens
ccctttttttttttt

SEQ ID NO: 134627 - DNA, 15 bp, Homo sapiens
gcccttttttttttt

SEQ ID NO: 134628 - DNA, 15 bp, Homo sapiens
ggccctttttttttt

SEQ ID NO: 134629 - DNA, 15 bp, Homo sapiens
tggcccttttttttt

SEQ ID NO: 134630 - DNA, 15 bp, Homo sapiens
ctggccctttttttt

SEQ ID NO: 134631 - DNA, 15 bp, Homo sapiens
cctggcccttttttt

SEQ ID NO: 134632 - DNA, 15 bp, Homo sapiens
gcctggccctttttt

SEQ ID NO: 134633 - DNA, 15 bp, Homo sapiens
tgcctggcccttttt

SEQ ID NO: 134634 - DNA, 15 bp, Homo sapiens
gtgcctggccctttt

SEQ ID NO: 134635 - DNA, 15 bp, Homo sapiens
cgtgcctggcccttt

SEQ ID NO: 134636 - DNA, 15 bp, Homo sapiens
ccgtgcctggccctt

SEQ ID NO: 134637 - DNA, 15 bp, Homo sapiens
accgtgcctggccct

SEQ ID NO: 134638 - DNA, 15 bp, Homo sapiens
caccgtgcctggccc

SEQ ID NO: 134639 - DNA, 15 bp, Homo sapiens
ccaccgtgcctggcc

SEQ ID NO: 134640 - DNA, 15 bp, Homo sapiens
gccaccgtgcctggc

SEQ ID NO: 134641 - DNA, 15 bp, Homo sapiens
cgccaccgtgcctgg

SEQ ID NO: 134642 - DNA, 15 bp, Homo sapiens
gcgccaccgtgcctg

SEQ ID NO: 134643 - DNA, 15 bp, Homo sapiens
tgcgccaccgtgcct

SEQ ID NO: 134644 - DNA, 15 bp, Homo sapiens
gtgcgccaccgtgcc

SEQ ID NO: 134645 - DNA, 15 bp, Homo sapiens
cgtgcgccaccgtgc

SEQ ID NO: 134646 - DNA, 15 bp, Homo sapiens
gcgtgcgccaccgtg

SEQ ID NO: 134647 - DNA, 15 bp, Homo sapiens
ggcgtgcgccaccgt

SEQ ID NO: 134648 - DNA, 15 bp, Homo sapiens
aggcgtgcgccaccg

SEQ ID NO: 134649 - DNA, 15 bp, Homo sapiens
caggcgtgcgccacc

SEQ ID NO: 134650 - DNA, 15 bp, Homo sapiens
acaggcgtgcgccac

SEQ ID NO: 134651 - DNA, 15 bp, Homo sapiens
tacaggcgtgcgcca

SEQ ID NO: 134652 - DNA, 15 bp, Homo sapiens
ttacaggcgtgcgcc

SEQ ID NO: 134653 - DNA, 15 bp, Homo sapiens
attacaggcgtgcgc

SEQ ID NO: 134654 - DNA, 15 bp, Homo sapiens
gattacaggcgtgcg

SEQ ID NO: 134655 - DNA, 15 bp, Homo sapiens
ggattacaggcgtgc

SEQ ID NO: 134656 - DNA, 15 bp, Homo sapiens
gggattacaggcgtg

SEQ ID NO: 134657 - DNA, 15 bp, Homo sapiens
tgggattacaggcgt

SEQ ID NO: 134658 - DNA, 15 bp, Homo sapiens
ctgggattacaggcg

SEQ ID NO: 134659 - DNA, 15 bp, Homo sapiens
ccgccttggcctccc

SEQ ID NO: 134660 - DNA, 15 bp, Homo sapiens
cccgccttggcctcc

SEQ ID NO: 134661 - DNA, 15 bp, Homo sapiens
acccgccttggcctc

SEQ ID NO: 134662 - DNA, 15 bp, Homo sapiens
cacccgccttggcct

SEQ ID NO: 134663 - DNA, 15 bp, Homo sapiens
ccacccgccttggcc

SEQ ID NO: 134664 - DNA, 15 bp, Homo sapiens
tccacccgccttggc

SEQ ID NO: 134665 - DNA, 15 bp, Homo sapiens
atccacccgccttgg

SEQ ID NO: 134666 - DNA, 15 bp, Homo sapiens
gatccacccgccttg

SEQ ID NO: 134667 - DNA, 15 bp, Homo sapiens
tgatccacccgcctt

SEQ ID NO: 134668 - DNA, 15 bp, Homo sapiens
gtgatccacccgcct

SEQ ID NO: 134669 - DNA, 15 bp, Homo sapiens
tgtgatccacccgcc

SEQ ID NO: 134670 - DNA, 15 bp, Homo sapiens
ttgtgatccacccgc

SEQ ID NO: 134671 - DNA, 15 bp, Homo sapiens
cttgtgatccacccg

SEQ ID NO: 134672 - DNA, 15 bp, Homo sapiens
ccttgtgatccaccc

SEQ ID NO: 134673 - DNA, 15 bp, Homo sapiens
accttgtgatccacc

SEQ ID NO: 134674 - DNA, 15 bp, Homo sapiens
gaccttgtgatccac

SEQ ID NO: 134675 - DNA, 15 bp, Homo sapiens
tgaccttgtgatcca

SEQ ID NO: 134676 - DNA, 15 bp, Homo sapiens
ctgaccttgtgatcc

SEQ ID NO: 134677 - DNA, 15 bp, Homo sapiens
cctgaccttgtgatc

SEQ ID NO: 134678 - DNA, 15 bp, Homo sapiens
tcctgaccttgtgat

SEQ ID NO: 134679 - DNA, 15 bp, Homo sapiens
ctcctgaccttgtga

SEQ ID NO: 134680 - DNA, 15 bp, Homo sapiens
tctcctgaccttgtg

SEQ ID NO: 134681 - DNA, 15 bp, Homo sapiens
atctcctgaccttgt

SEQ ID NO: 134682 - DNA, 15 bp, Homo sapiens
gatctcctgaccttg

SEQ ID NO: 134683 - DNA, 15 bp, Homo sapiens
cgatctcctgacctt

SEQ ID NO: 134684 - DNA, 15 bp, Homo sapiens
aggatggtctcgatc

SEQ ID NO: 134685 - DNA, 15 bp, Homo sapiens
caggatggtctcgat

SEQ ID NO: 134686 - DNA, 15 bp, Homo sapiens
ccaggatggtctcga

SEQ ID NO: 134687 - DNA, 15 bp, Homo sapiens
gccaggatggtctcg

SEQ ID NO: 134688 - DNA, 15 bp, Homo sapiens
agccaggatggtctc

SEQ ID NO: 134689 - DNA, 15 bp, Homo sapiens
tagccaggatggtct

SEQ ID NO: 134690 - DNA, 15 bp, Homo sapiens
ttagccaggatggtc

SEQ ID NO: 134691 - DNA, 15 bp, Homo sapiens
gttagccaggatggt

SEQ ID NO: 134692 - DNA, 15 bp, Homo sapiens
tgttagccaggatgg

SEQ ID NO: 134693 - DNA, 15 bp, Homo sapiens
atgttagccaggatg

SEQ ID NO: 134694 - DNA, 15 bp, Homo sapiens
catgttagccaggat

SEQ ID NO: 134695 - DNA, 15 bp, Homo sapiens
ccatgttagccagga

SEQ ID NO: 134696 - DNA, 15 bp, Homo sapiens
gatggggtttcacca

SEQ ID NO: 134697 - DNA, 15 bp, Homo sapiens
agatggggtttcacc

SEQ ID NO: 134698 - DNA, 15 bp, Homo sapiens
gagatggggtttcac

SEQ ID NO: 134699 - DNA, 15 bp, Homo sapiens
agagatggggtttca

SEQ ID NO: 134700 - DNA, 15 bp, Homo sapiens
tagagatggggtttc

SEQ ID NO: 134701 - DNA, 15 bp, Homo sapiens
gtagagatggggttt

SEQ ID NO: 134702 - DNA, 15 bp, Homo sapiens
agtagagatggggtt

SEQ ID NO: 134703 - DNA, 15 bp, Homo sapiens
tagtagagatggggt

SEQ ID NO: 134704 - DNA, 15 bp, Homo sapiens
ttagtagagatgggg

SEQ ID NO: 134705 - DNA, 15 bp, Homo sapiens
tttagtagagatggg

SEQ ID NO: 134706 - DNA, 15 bp, Homo sapiens
ttttagtagagatgg

SEQ ID NO: 134707 - DNA, 15 bp, Homo sapiens
tttttagtagagatg

SEQ ID NO: 134708 - DNA, 15 bp, Homo sapiens
atttttagtagagat

SEQ ID NO: 134709 - DNA, 15 bp, Homo sapiens
tatttttagtagaga

SEQ ID NO: 134710 - DNA, 15 bp, Homo sapiens
gtatttttagtagag

SEQ ID NO: 134711 - DNA, 15 bp, Homo sapiens
cggctaattttttgt

SEQ ID NO: 134712 - DNA, 15 bp, Homo sapiens
ccggctaattttttg

SEQ ID NO: 134713 - DNA, 15 bp, Homo sapiens
cccggctaatttttt

SEQ ID NO: 134714 - DNA, 15 bp, Homo sapiens
gcccggctaattttt

SEQ ID NO: 134715 - DNA, 15 bp, Homo sapiens
tgcccggctaatttt

SEQ ID NO: 134716 - DNA, 15 bp, Homo sapiens
atgcccggctaattt

SEQ ID NO: 134717 - DNA, 15 bp, Homo sapiens
catgcccggctaatt

SEQ ID NO: 134718 - DNA, 15 bp, Homo sapiens
ccatgcccggctaat

SEQ ID NO: 134719 - DNA, 15 bp, Homo sapiens
accatgcccggctaa

SEQ ID NO: 134720 - DNA, 15 bp, Homo sapiens
caccatgcccggcta

SEQ ID NO: 134721 - DNA, 15 bp, Homo sapiens
ccaccatgcccggct

SEQ ID NO: 134722 - DNA, 15 bp, Homo sapiens
gccaccatgcccggc

SEQ ID NO: 134723 - DNA, 15 bp, Homo sapiens
cgccaccatgcccgg

SEQ ID NO: 134724 - DNA, 15 bp, Homo sapiens
ccgccaccatgcccg

SEQ ID NO: 134725 - DNA, 15 bp, Homo sapiens
cccgccaccatgccc

SEQ ID NO: 134726 - DNA, 15 bp, Homo sapiens
gcccgccaccatgcc

SEQ ID NO: 134727 - DNA, 15 bp, Homo sapiens
tgcccgccaccatgc

SEQ ID NO: 134728 - DNA, 15 bp, Homo sapiens
gtgcccgccaccatg

SEQ ID NO: 134729 - DNA, 15 bp, Homo sapiens
ggtgcccgccaccat

SEQ ID NO: 134730 - DNA, 15 bp, Homo sapiens
aggtgcccgccacca

SEQ ID NO: 134731 - DNA, 15 bp, Homo sapiens
taggtgcccgccacc

SEQ ID NO: 134732 - DNA, 15 bp, Homo sapiens
ataggtgcccgccac

SEQ ID NO: 134733 - DNA, 15 bp, Homo sapiens
tataggtgcccgcca

SEQ ID NO: 134734 - DNA, 15 bp, Homo sapiens
ctataggtgcccgcc

SEQ ID NO: 134735 - DNA, 15 bp, Homo sapiens
actataggtgcccgc

SEQ ID NO: 134736 - DNA, 15 bp, Homo sapiens
gactataggtgcccg

SEQ ID NO: 134737 - DNA, 15 bp, Homo sapiens
ggactataggtgccc

SEQ ID NO: 134738 - DNA, 15 bp, Homo sapiens
gggactataggtgcc

SEQ ID NO: 134739 - DNA, 15 bp, Homo sapiens
tgggactataggtgc

SEQ ID NO: 134740 - DNA, 15 bp, Homo sapiens
ctgggactataggtg

SEQ ID NO: 134741 - DNA, 15 bp, Homo sapiens
gctgggactataggt

SEQ ID NO: 134742 - DNA, 15 bp, Homo sapiens
agctgggactatagg

SEQ ID NO: 134743 - DNA, 15 bp, Homo sapiens
tagctgggactatag

SEQ ID NO: 134744 - DNA, 15 bp, Homo sapiens
gtagctgggactata

SEQ ID NO: 134745 - DNA, 15 bp, Homo sapiens
agtagctgggactat

SEQ ID NO: 134746 - DNA, 15 bp, Homo sapiens
ctgagtagctgggac

SEQ ID NO: 134747 - DNA, 15 bp, Homo sapiens
cctgagtagctggga

SEQ ID NO: 134748 - DNA, 15 bp, Homo sapiens
tcctgagtagctggg

SEQ ID NO: 134749 - DNA, 15 bp, Homo sapiens
ctcctgagtagctgg

SEQ ID NO: 134750 - DNA, 15 bp, Homo sapiens
cctcctgagtagctg

SEQ ID NO: 134751 - DNA, 15 bp, Homo sapiens
gcctcctgagtagct

SEQ ID NO: 134752 - DNA, 15 bp, Homo sapiens
agcctcctgagtagc

SEQ ID NO: 134753 - DNA, 15 bp, Homo sapiens
cagcctcctgagtag

SEQ ID NO: 134754 - DNA, 15 bp, Homo sapiens
tcagcctcctgagta

SEQ ID NO: 134755 - DNA, 15 bp, Homo sapiens
ctcagcctcctgagt

SEQ ID NO: 134756 - DNA, 15 bp, Homo sapiens
cctcagcctcctgag

SEQ ID NO: 134757 - DNA, 15 bp, Homo sapiens
gcctcagcctcctga

SEQ ID NO: 134758 - DNA, 15 bp, Homo sapiens
tgcctcagcctcctg

SEQ ID NO: 134759 - DNA, 15 bp, Homo sapiens
ctgcctcagcctcct

SEQ ID NO: 134760 - DNA, 15 bp, Homo sapiens
cctcctgcctcagcc

SEQ ID NO: 134761 - DNA, 15 bp, Homo sapiens
tcctcctgcctcagc

SEQ ID NO: 134762 - DNA, 15 bp, Homo sapiens
atcctcctgcctcag

SEQ ID NO: 134763 - DNA, 15 bp, Homo sapiens
catcctcctgcctca

SEQ ID NO: 134764 - DNA, 15 bp, Homo sapiens
ccatcctcctgcctc

SEQ ID NO: 134765 - DNA, 15 bp, Homo sapiens
gccatcctcctgcct

SEQ ID NO: 134766 - DNA, 15 bp, Homo sapiens
cgccatcctcctgcc

SEQ ID NO: 134767 - DNA, 15 bp, Homo sapiens
acgccatcctcctgc

SEQ ID NO: 134768 - DNA, 15 bp, Homo sapiens
cacgccatcctcctg

SEQ ID NO: 134769 - DNA, 15 bp, Homo sapiens
tcacgccatcctcct

SEQ ID NO: 134770 - DNA, 15 bp, Homo sapiens
ttcacgccatcctcc

SEQ ID NO: 134771 - DNA, 15 bp, Homo sapiens
gttcacgccatcctc

SEQ ID NO: 134772 - DNA, 15 bp, Homo sapiens
ggttcacgccatcct

SEQ ID NO: 134773 - DNA, 15 bp, Homo sapiens
aggttcacgccatcc

SEQ ID NO: 134774 - DNA, 15 bp, Homo sapiens
caggttcacgccatc

SEQ ID NO: 134775 - DNA, 15 bp, Homo sapiens
ccaggttcacgccat

SEQ ID NO: 134776 - DNA, 15 bp, Homo sapiens
cccaggttcacgcca

SEQ ID NO: 134777 - DNA, 15 bp, Homo sapiens
tcccaggttcacgcc

SEQ ID NO: 134778 - DNA, 15 bp, Homo sapiens
ctcccaggttcacgc

SEQ ID NO: 134779 - DNA, 15 bp, Homo sapiens
cctcccaggttcacg

SEQ ID NO: 134780 - DNA, 15 bp, Homo sapiens
gcctcccaggttcac

SEQ ID NO: 134781 - DNA, 15 bp, Homo sapiens
cgcctcccaggttca

SEQ ID NO: 134782 - DNA, 15 bp, Homo sapiens
ccgcctcccaggttc

SEQ ID NO: 134783 - DNA, 15 bp, Homo sapiens
tccgcctcccaggtt

SEQ ID NO: 134784 - DNA, 15 bp, Homo sapiens
ctccgcctcccaggt

SEQ ID NO: 134785 - DNA, 15 bp, Homo sapiens
gctccgcctcccagg

SEQ ID NO: 134786 - DNA, 15 bp, Homo sapiens
agctccgcctcccag

SEQ ID NO: 134787 - DNA, 15 bp, Homo sapiens
aagctccgcctccca

SEQ ID NO: 134788 - DNA, 15 bp, Homo sapiens
caagctccgcctccc

SEQ ID NO: 134789 - DNA, 15 bp, Homo sapiens
gcaagctccgcctcc

SEQ ID NO: 134790 - DNA, 15 bp, Homo sapiens
tgcaagctccgcctc

SEQ ID NO: 134791 - DNA, 15 bp, Homo sapiens
ctgcaagctccgcct

SEQ ID NO: 134792 - DNA, 15 bp, Homo sapiens
actgcaagctccgcc

SEQ ID NO: 134793 - DNA, 15 bp, Homo sapiens
cactgcaagctccgc

SEQ ID NO: 134794 - DNA, 15 bp, Homo sapiens
tcactgcaagctccg

SEQ ID NO: 134795 - DNA, 15 bp, Homo sapiens
tggctcactgcaagc

SEQ ID NO: 134796 - DNA, 15 bp, Homo sapiens
ttggctcactgcaag

SEQ ID NO: 134797 - DNA, 15 bp, Homo sapiens
cgatcttggctcact

SEQ ID NO: 134798 - DNA, 15 bp, Homo sapiens
gcgatcttggctcac

SEQ ID NO: 134799 - DNA, 15 bp, Homo sapiens
cgcgatcttggctca

SEQ ID NO: 134800 - DNA, 15 bp, Homo sapiens
gcgcgatcttggctc

SEQ ID NO: 134801 - DNA, 15 bp, Homo sapiens
ggcgcgatcttggct

SEQ ID NO: 134802 - DNA, 15 bp, Homo sapiens
tggcgcgatcttggc

SEQ ID NO: 134803 - DNA, 15 bp, Homo sapiens
gtggcgcgatcttgg

SEQ ID NO: 134804 - DNA, 15 bp, Homo sapiens
agtggcgcgatcttg

SEQ ID NO: 134805 - DNA, 15 bp, Homo sapiens
cagtggcgcgatctt

SEQ ID NO: 134806 - DNA, 15 bp, Homo sapiens
gcagtggcgcgatct

SEQ ID NO: 134807 - DNA, 15 bp, Homo sapiens
tgcagtggcgcgatc

SEQ ID NO: 134808 - DNA, 15 bp, Homo sapiens
gtgcagtggcgcgat

SEQ ID NO: 134809 - DNA, 15 bp, Homo sapiens
agtgcagtggcgcga

SEQ ID NO: 134810 - DNA, 15 bp, Homo sapiens
gagtgcagtggcgcg

SEQ ID NO: 134811 - DNA, 15 bp, Homo sapiens
ggagtgcagtggcgc

SEQ ID NO: 134812 - DNA, 15 bp, Homo sapiens
cagtctcgctctgtc

SEQ ID NO: 134813 - DNA, 15 bp, Homo sapiens
acagtctcgctctgt

SEQ ID NO: 134814 - DNA, 15 bp, Homo sapiens
gacagtctcgctctg

SEQ ID NO: 134815 - DNA, 15 bp, Homo sapiens
agacagtctcgctct

SEQ ID NO: 134816 - DNA, 15 bp, Homo sapiens
cagacagtctcgctc

SEQ ID NO: 134817 - DNA, 15 bp, Homo sapiens
ccagacagtctcgct

SEQ ID NO: 134818 - DNA, 15 bp, Homo sapiens
cccagacagtctcgc

SEQ ID NO: 134819 - DNA, 15 bp, Homo sapiens
tcccagacagtctcg

SEQ ID NO: 134820 - DNA, 15 bp, Homo sapiens
ttcccagacagtctc

SEQ ID NO: 134821 - DNA, 15 bp, Homo sapiens
tttcccagacagtct

SEQ ID NO: 134822 - DNA, 15 bp, Homo sapiens
ttttcccagacagtc

SEQ ID NO: 134823 - DNA, 15 bp, Homo sapiens
tttttcccagacagt

SEQ ID NO: 134824 - DNA, 15 bp, Homo sapiens
ttttttcccagacag

SEQ ID NO: 134825 - DNA, 15 bp, Homo sapiens
tttttttcccagaca

SEQ ID NO: 134826 - DNA, 15 bp, Homo sapiens
ttttttttcccagac

SEQ ID NO: 134827 - DNA, 15 bp, Homo sapiens
tttttttttcccaga

SEQ ID NO: 134828 - DNA, 15 bp, Homo sapiens
ttttttttttcccag

SEQ ID NO: 134829 - DNA, 15 bp, Homo sapiens
tttttttttttccca

SEQ ID NO: 134830 - DNA, 15 bp, Homo sapiens
ttttttttttttccc

SEQ ID NO: 134831 - DNA, 15 bp, Homo sapiens
tttttttttttttcc

SEQ ID NO: 134832 - DNA, 15 bp, Homo sapiens
ttttttttttttttc

SEQ ID NO: 134833 - DNA, 15 bp, Homo sapiens
atctttttttttttt

SEQ ID NO: 134834 - DNA, 15 bp, Homo sapiens
tatcttttttttttt

SEQ ID NO: 134835 - DNA, 15 bp, Homo sapiens
gtatctttttttttt

SEQ ID NO: 134836 - DNA, 15 bp, Homo sapiens
tgtatcttttttttt

SEQ ID NO: 134837 - DNA, 15 bp, Homo sapiens
ttgtatctttttttt

SEQ ID NO: 134838 - DNA, 15 bp, Homo sapiens
tttgtatcttttttt

SEQ ID NO: 134839 - DNA, 15 bp, Homo sapiens
atttgtatctttttt

SEQ ID NO: 134840 - DNA, 15 bp, Homo sapiens
gatttgtatcttttt

SEQ ID NO: 134841 - DNA, 15 bp, Homo sapiens
tgatttgtatctttt

SEQ ID NO: 134842 - DNA, 15 bp, Homo sapiens
ttgatttgtatcttt

SEQ ID NO: 134843 - DNA, 15 bp, Homo sapiens
tttgatttgtatctt

SEQ ID NO: 134844 - DNA, 15 bp, Homo sapiens
ctttgatttgtatct

SEQ ID NO: 134845 - DNA, 15 bp, Homo sapiens
actttgatttgtatc

SEQ ID NO: 134846 - DNA, 15 bp, Homo sapiens
tactttgatttgtat

SEQ ID NO: 134847 - DNA, 15 bp, Homo sapiens
gtactttgatttgta

SEQ ID NO: 134848 - DNA, 15 bp, Homo sapiens
agtactttgatttgt

SEQ ID NO: 134849 - DNA, 15 bp, Homo sapiens
cagtactttgatttg

SEQ ID NO: 134850 - DNA, 15 bp, Homo sapiens
tcagtactttgattt

SEQ ID NO: 134851 - DNA, 15 bp, Homo sapiens
ttcagtactttgatt

SEQ ID NO: 134852 - DNA, 15 bp, Homo sapiens
attcagtactttgat

SEQ ID NO: 134853 - DNA, 15 bp, Homo sapiens
gattcagtactttga

SEQ ID NO: 134854 - DNA, 15 bp, Homo sapiens
ggattcagtactttg

SEQ ID NO: 134855 - DNA, 15 bp, Homo sapiens
aggattcagtacttt

SEQ ID NO: 134856 - DNA, 15 bp, Homo sapiens
aaggattcagtactt

SEQ ID NO: 134857 - DNA, 15 bp, Homo sapiens
caaggattcagtact

SEQ ID NO: 134858 - DNA, 15 bp, Homo sapiens
ccaaggattcagtac

SEQ ID NO: 134859 - DNA, 15 bp, Homo sapiens
accaaggattcagta

SEQ ID NO: 134860 - DNA, 15 bp, Homo sapiens
taccaaggattcagt

SEQ ID NO: 134861 - DNA, 15 bp, Homo sapiens
ttaccaaggattcag

SEQ ID NO: 134862 - DNA, 15 bp, Homo sapiens
gttaccaaggattca

SEQ ID NO: 134863 - DNA, 15 bp, Homo sapiens
cgttaccaaggattc

SEQ ID NO: 134864 - DNA, 15 bp, Homo sapiens
tcgttaccaaggatt

SEQ ID NO: 134865 - DNA, 15 bp, Homo sapiens
ctcgttaccaaggat

SEQ ID NO: 134866 - DNA, 15 bp, Homo sapiens
tctcgttaccaagga

SEQ ID NO: 134867 - DNA, 15 bp, Homo sapiens
gtctcgttaccaagg

SEQ ID NO: 134868 - DNA, 15 bp, Homo sapiens
tgtctcgttaccaag

SEQ ID NO: 134869 - DNA, 15 bp, Homo sapiens
atgtctcgttaccaa

SEQ ID NO: 134870 - DNA, 15 bp, Homo sapiens
aatgtctcgttacca

SEQ ID NO: 134871 - DNA, 15 bp, Homo sapiens
aaatgtctcgttacc

SEQ ID NO: 134872 - DNA, 15 bp, Homo sapiens
taaatgtctcgttac

SEQ ID NO: 134873 - DNA, 15 bp, Homo sapiens
ttaaatgtctcgtta

SEQ ID NO: 134874 - DNA, 15 bp, Homo sapiens
tttaaatgtctcgtt

SEQ ID NO: 134875 - DNA, 15 bp, Homo sapiens
ttttaaatgtctcgt

SEQ ID NO: 134876 - DNA, 15 bp, Homo sapiens
gttttaaatgtctcg

SEQ ID NO: 134877 - DNA, 15 bp, Homo sapiens
tgttttaaatgtctc

SEQ ID NO: 134878 - DNA, 15 bp, Homo sapiens
gtgttttaaatgtct

SEQ ID NO: 134879 - DNA, 15 bp, Homo sapiens
tgtgttttaaatgtc

SEQ ID NO: 134880 - DNA, 15 bp, Homo sapiens
atgtgttttaaatgt

SEQ ID NO: 134881 - DNA, 15 bp, Homo sapiens
catgtgttttaaatg

SEQ ID NO: 134882 - DNA, 15 bp, Homo sapiens
gcatgtgttttaaat

SEQ ID NO: 134883 - DNA, 15 bp, Homo sapiens
tgcatgtgttttaaa

SEQ ID NO: 134884 - DNA, 15 bp, Homo sapiens
gtgcatgtgttttaa

SEQ ID NO: 134885 - DNA, 15 bp, Homo sapiens
tgtgcatgtgtttta

SEQ ID NO: 134886 - DNA, 15 bp, Homo sapiens
atgtgcatgtgtttt

SEQ ID NO: 134887 - DNA, 15 bp, Homo sapiens
tatgtgcatgtgttt

SEQ ID NO: 134888 - DNA, 15 bp, Homo sapiens
gtatgtgcatgtgtt

SEQ ID NO: 134889 - DNA, 15 bp, Homo sapiens
ggtatgtgcatgtgt

SEQ ID NO: 134890 - DNA, 15 bp, Homo sapiens
gggtatgtgcatgtg

SEQ ID NO: 134891 - DNA, 15 bp, Homo sapiens
tgggtatgtgcatgt

SEQ ID NO: 134892 - DNA, 15 bp, Homo sapiens
gtgggtatgtgcatg

SEQ ID NO: 134893 - DNA, 15 bp, Homo sapiens
agtgggtatgtgcat

SEQ ID NO: 134894 - DNA, 15 bp, Homo sapiens
tagtgggtatgtgca

SEQ ID NO: 134895 - DNA, 15 bp, Homo sapiens
gtagtgggtatgtgc

SEQ ID NO: 134896 - DNA, 15 bp, Homo sapiens
agtagtgggtatgtg

SEQ ID NO: 134897 - DNA, 15 bp, Homo sapiens
aagtagtgggtatgt

SEQ ID NO: 134898 - DNA, 15 bp, Homo sapiens
taagtagtgggtatg

SEQ ID NO: 134899 - DNA, 15 bp, Homo sapiens
ttaagtagtgggtat

SEQ ID NO: 134900 - DNA, 15 bp, Homo sapiens
tttaagtagtgggta

SEQ ID NO: 134901 - DNA, 15 bp, Homo sapiens
gtttaagtagtgggt

SEQ ID NO: 134902 - DNA, 15 bp, Homo sapiens
tgtttaagtagtggg

SEQ ID NO: 134903 - DNA, 15 bp, Homo sapiens
atgtttaagtagtgg

SEQ ID NO: 134904 - DNA, 15 bp, Homo sapiens
tatgtttaagtagtg

SEQ ID NO: 134905 - DNA, 15 bp, Homo sapiens
gtatgtttaagtagt

SEQ ID NO: 134906 - DNA, 15 bp, Homo sapiens
agtatgtttaagtag

SEQ ID NO: 134907 - DNA, 15 bp, Homo sapiens
aagtatgtttaagta

SEQ ID NO: 134908 - DNA, 15 bp, Homo sapiens
aaagtatgtttaagt

SEQ ID NO: 134909 - DNA, 15 bp, Homo sapiens
caaagtatgtttaag

SEQ ID NO: 134910 - DNA, 15 bp, Homo sapiens
tcaaagtatgtttaa

SEQ ID NO: 134911 - DNA, 15 bp, Homo sapiens
ttcaaagtatgttta

SEQ ID NO: 134912 - DNA, 15 bp, Homo sapiens
tttcaaagtatgttt

SEQ ID NO: 134913 - DNA, 15 bp, Homo sapiens
atttcaaagtatgtt

SEQ ID NO: 134914 - DNA, 15 bp, Homo sapiens
aatttcaaagtatgt

SEQ ID NO: 134915 - DNA, 15 bp, Homo sapiens
taatttcaaagtatg

SEQ ID NO: 134916 - DNA, 15 bp, Homo sapiens
gtaatttcaaagtat

SEQ ID NO: 134917 - DNA, 15 bp, Homo sapiens
tgtaatttcaaagta

SEQ ID NO: 134918 - DNA, 15 bp, Homo sapiens
ttgtaatttcaaagt

SEQ ID NO: 134919 - DNA, 15 bp, Homo sapiens
gttgtaatttcaaag

SEQ ID NO: 134920 - DNA, 15 bp, Homo sapiens
ggttgtaatttcaaa

SEQ ID NO: 134921 - DNA, 15 bp, Homo sapiens
tggttgtaatttcaa

SEQ ID NO: 134922 - DNA, 15 bp, Homo sapiens
atggttgtaatttca

SEQ ID NO: 134923 - DNA, 15 bp, Homo sapiens
aatggttgtaatttc

SEQ ID NO: 134924 - DNA, 15 bp, Homo sapiens
aaatggttgtaattt

SEQ ID NO: 134925 - DNA, 15 bp, Homo sapiens
caaatggttgtaatt

SEQ ID NO: 134926 - DNA, 15 bp, Homo sapiens
ccaaatggttgtaat

SEQ ID NO: 134927 - DNA, 15 bp, Homo sapiens
cccaaatggttgtaa

SEQ ID NO: 134928 - DNA, 15 bp, Homo sapiens
ccccaaatggttgta

SEQ ID NO: 134929 - DNA, 15 bp, Homo sapiens
tccccaaatggttgt

SEQ ID NO: 134930 - DNA, 15 bp, Homo sapiens
atccccaaatggttg

SEQ ID NO: 134931 - DNA, 15 bp, Homo sapiens
catccccaaatggtt

SEQ ID NO: 134932 - DNA, 15 bp, Homo sapiens
acatccccaaatggt

SEQ ID NO: 134933 - DNA, 15 bp, Homo sapiens
aacatccccaaatgg

SEQ ID NO: 134934 - DNA, 15 bp, Homo sapiens
aaacatccccaaatg

SEQ ID NO: 134935 - DNA, 15 bp, Homo sapiens
aaaacatccccaaat

SEQ ID NO: 134936 - DNA, 15 bp, Homo sapiens
aaaaacatccccaaa

SEQ ID NO: 134937 - DNA, 15 bp, Homo sapiens
taaaaacatccccaa

SEQ ID NO: 134938 - DNA, 15 bp, Homo sapiens
ctaaaaacatcccca

SEQ ID NO: 134939 - DNA, 15 bp, Homo sapiens
gctaaaaacatcccc

SEQ ID NO: 134940 - DNA, 15 bp, Homo sapiens
tgctaaaaacatccc

SEQ ID NO: 134941 - DNA, 15 bp, Homo sapiens
atgctaaaaacatcc

SEQ ID NO: 134942 - DNA, 15 bp, Homo sapiens
aatgctaaaaacatc

SEQ ID NO: 134943 - DNA, 15 bp, Homo sapiens
aaatgctaaaaacat

SEQ ID NO: 134944 - DNA, 15 bp, Homo sapiens
caaatgctaaaaaca

SEQ ID NO: 134945 - DNA, 15 bp, Homo sapiens
acaaatgctaaaaac

SEQ ID NO: 134946 - DNA, 15 bp, Homo sapiens
cacaaatgctaaaaa

SEQ ID NO: 134947 - DNA, 15 bp, Homo sapiens
gcacaaatgctaaaa

SEQ ID NO: 134948 - DNA, 15 bp, Homo sapiens
agcacaaatgctaaa

SEQ ID NO: 134949 - DNA, 15 bp, Homo sapiens
aagcacaaatgctaa

SEQ ID NO: 134950 - DNA, 15 bp, Homo sapiens
caagcacaaatgcta

SEQ ID NO: 134951 - DNA, 15 bp, Homo sapiens
tcaagcacaaatgct

SEQ ID NO: 134952 - DNA, 15 bp, Homo sapiens
ttcaagcacaaatgc

SEQ ID NO: 134953 - DNA, 15 bp, Homo sapiens
cttcaagcacaaatg

SEQ ID NO: 134954 - DNA, 15 bp, Homo sapiens
acttcaagcacaaat

SEQ ID NO: 134955 - DNA, 15 bp, Homo sapiens
tacttcaagcacaaa

SEQ ID NO: 134956 - DNA, 15 bp, Homo sapiens
ctacttcaagcacaa

SEQ ID NO: 134957 - DNA, 15 bp, Homo sapiens
tctacttcaagcaca

SEQ ID NO: 134958 - DNA, 15 bp, Homo sapiens
atctacttcaagcac

SEQ ID NO: 134959 - DNA, 15 bp, Homo sapiens
gatctacttcaagca

SEQ ID NO: 134960 - DNA, 15 bp, Homo sapiens
tgatctacttcaagc

SEQ ID NO: 134961 - DNA, 15 bp, Homo sapiens
ttgatctacttcaag

SEQ ID NO: 134962 - DNA, 15 bp, Homo sapiens
attgatctacttcaa

SEQ ID NO: 134963 - DNA, 15 bp, Homo sapiens
tattgatctacttca

SEQ ID NO: 134964 - DNA, 15 bp, Homo sapiens
atattgatctacttc

SEQ ID NO: 134965 - DNA, 15 bp, Homo sapiens
aatattgatctactt

SEQ ID NO: 134966 - DNA, 15 bp, Homo sapiens
aaatattgatctact

SEQ ID NO: 134967 - DNA, 15 bp, Homo sapiens
caaatattgatctac

SEQ ID NO: 134968 - DNA, 15 bp, Homo sapiens
acaaatattgatcta

SEQ ID NO: 134969 - DNA, 15 bp, Homo sapiens
tacaaatattgatct

SEQ ID NO: 134970 - DNA, 15 bp, Homo sapiens
ctacaaatattgatc

SEQ ID NO: 134971 - DNA, 15 bp, Homo sapiens
actacaaatattgat

SEQ ID NO: 134972 - DNA, 15 bp, Homo sapiens
aactacaaatattga

SEQ ID NO: 134973 - DNA, 15 bp, Homo sapiens
caactacaaatattg

SEQ ID NO: 134974 - DNA, 15 bp, Homo sapiens
acaactacaaatatt

SEQ ID NO: 134975 - DNA, 15 bp, Homo sapiens
aacaactacaaatat

SEQ ID NO: 134976 - DNA, 15 bp, Homo sapiens
aaacaactacaaata

SEQ ID NO: 134977 - DNA, 15 bp, Homo sapiens
aaaacaactacaaat

SEQ ID NO: 134978 - DNA, 15 bp, Homo sapiens
taaaacaactacaaa

SEQ ID NO: 134979 - DNA, 15 bp, Homo sapiens
ctaaaacaactacaa

SEQ ID NO: 134980 - DNA, 15 bp, Homo sapiens
actaaaacaactaca

SEQ ID NO: 134981 - DNA, 15 bp, Homo sapiens
aactaaaacaactac

SEQ ID NO: 134982 - DNA, 15 bp, Homo sapiens
gaactaaaacaacta

SEQ ID NO: 134983 - DNA, 15 bp, Homo sapiens
ggaactaaaacaact

SEQ ID NO: 134984 - DNA, 15 bp, Homo sapiens
tggaactaaaacaac

SEQ ID NO: 134985 - DNA, 15 bp, Homo sapiens
atggaactaaaacaa

SEQ ID NO: 134986 - DNA, 15 bp, Homo sapiens
aatggaactaaaaca

SEQ ID NO: 134987 - DNA, 15 bp, Homo sapiens
aaatggaactaaaac

SEQ ID NO: 134988 - DNA, 15 bp, Homo sapiens
caaatggaactaaaa

SEQ ID NO: 134989 - DNA, 15 bp, Homo sapiens
acaaatggaactaaa

SEQ ID NO: 134990 - DNA, 15 bp, Homo sapiens
gacaaatggaactaa

SEQ ID NO: 134991 - DNA, 15 bp, Homo sapiens
tgacaaatggaacta

SEQ ID NO: 134992 - DNA, 15 bp, Homo sapiens
gtgacaaatggaact

SEQ ID NO: 134993 - DNA, 15 bp, Homo sapiens
agtgacaaatggaac

SEQ ID NO: 134994 - DNA, 15 bp, Homo sapiens
cagtgacaaatggaa

SEQ ID NO: 134995 - DNA, 15 bp, Homo sapiens
acagtgacaaatgga

SEQ ID NO: 134996 - DNA, 15 bp, Homo sapiens
aacagtgacaaatgg

SEQ ID NO: 134997 - DNA, 15 bp, Homo sapiens
taacagtgacaaatg

SEQ ID NO: 134998 - DNA, 15 bp, Homo sapiens
ttaacagtgacaaat

SEQ ID NO: 134999 - DNA, 15 bp, Homo sapiens
gttaacagtgacaaa

SEQ ID NO: 135000 - DNA, 15 bp, Homo sapiens
agttaacagtgacaa

SEQ ID NO: 135001 - DNA, 15 bp, Homo sapiens
aagttaacagtgaca

SEQ ID NO: 135002 - DNA, 15 bp, Homo sapiens
aaagttaacagtgac

SEQ ID NO: 135003 - DNA, 15 bp, Homo sapiens
gaaagttaacagtga

SEQ ID NO: 135004 - DNA, 15 bp, Homo sapiens
tgaaagttaacagtg

SEQ ID NO: 135005 - DNA, 15 bp, Homo sapiens
atgaaagttaacagt

SEQ ID NO: 135006 - DNA, 15 bp, Homo sapiens
aatgaaagttaacag

SEQ ID NO: 135007 - DNA, 15 bp, Homo sapiens
aaatgaaagttaaca

SEQ ID NO: 135008 - DNA, 15 bp, Homo sapiens
caaatgaaagttaac

SEQ ID NO: 135009 - DNA, 15 bp, Homo sapiens
acaaatgaaagttaa

SEQ ID NO: 135010 - DNA, 15 bp, Homo sapiens
tacaaatgaaagtta

SEQ ID NO: 135011 - DNA, 15 bp, Homo sapiens
gtacaaatgaaagtt

SEQ ID NO: 135012 - DNA, 15 bp, Homo sapiens
ggtacaaatgaaagt

SEQ ID NO: 135013 - DNA, 15 bp, Homo sapiens
aggtacaaatgaaag

SEQ ID NO: 135014 - DNA, 15 bp, Homo sapiens
gaggtacaaatgaaa

SEQ ID NO: 135015 - DNA, 15 bp, Homo sapiens
agaggtacaaatgaa

SEQ ID NO: 135016 - DNA, 15 bp, Homo sapiens
cagaggtacaaatga

SEQ ID NO: 135017 - DNA, 15 bp, Homo sapiens
ccagaggtacaaatg

SEQ ID NO: 135018 - DNA, 15 bp, Homo sapiens
tccagaggtacaaat

SEQ ID NO: 135019 - DNA, 15 bp, Homo sapiens
ttccagaggtacaaa

SEQ ID NO: 135020 - DNA, 15 bp, Homo sapiens
attccagaggtacaa

SEQ ID NO: 135021 - DNA, 15 bp, Homo sapiens
aattccagaggtaca

SEQ ID NO: 135022 - DNA, 15 bp, Homo sapiens
taattccagaggtac

SEQ ID NO: 135023 - DNA, 15 bp, Homo sapiens
ctaattccagaggta

SEQ ID NO: 135024 - DNA, 15 bp, Homo sapiens
gctaattccagaggt

SEQ ID NO: 135025 - DNA, 15 bp, Homo sapiens
tgctaattccagagg

SEQ ID NO: 135026 - DNA, 15 bp, Homo sapiens
ctgctaattccagag

SEQ ID NO: 135027 - DNA, 15 bp, Homo sapiens
actgctaattccaga

SEQ ID NO: 135028 - DNA, 15 bp, Homo sapiens
cactgctaattccag

SEQ ID NO: 135029 - DNA, 15 bp, Homo sapiens
gcactgctaattcca

SEQ ID NO: 135030 - DNA, 15 bp, Homo sapiens
agcactgctaattcc

SEQ ID NO: 135031 - DNA, 15 bp, Homo sapiens
cagcactgctaattc

SEQ ID NO: 135032 - DNA, 15 bp, Homo sapiens
acagcactgctaatt

SEQ ID NO: 135033 - DNA, 15 bp, Homo sapiens
tacagcactgctaat

SEQ ID NO: 135034 - DNA, 15 bp, Homo sapiens
atacagcactgctaa

SEQ ID NO: 135035 - DNA, 15 bp, Homo sapiens
aatacagcactgcta

SEQ ID NO: 135036 - DNA, 15 bp, Homo sapiens
gaatacagcactgct

SEQ ID NO: 135037 - DNA, 15 bp, Homo sapiens
tgaatacagcactgc

SEQ ID NO: 135038 - DNA, 15 bp, Homo sapiens
ctgaatacagcactg

SEQ ID NO: 135039 - DNA, 15 bp, Homo sapiens
gctgaatacagcact

SEQ ID NO: 135040 - DNA, 15 bp, Homo sapiens
tgctgaatacagcac

SEQ ID NO: 135041 - DNA, 15 bp, Homo sapiens
atgctgaatacagca

SEQ ID NO: 135042 - DNA, 15 bp, Homo sapiens
aatgctgaatacagc

SEQ ID NO: 135043 - DNA, 15 bp, Homo sapiens
caatgctgaatacag

SEQ ID NO: 135044 - DNA, 15 bp, Homo sapiens
ccaatgctgaataca

SEQ ID NO: 135045 - DNA, 15 bp, Homo sapiens
gccaatgctgaatac

SEQ ID NO: 135046 - DNA, 15 bp, Homo sapiens
tgccaatgctgaata

SEQ ID NO: 135047 - DNA, 15 bp, Homo sapiens
gtgccaatgctgaat

SEQ ID NO: 135048 - DNA, 15 bp, Homo sapiens
agtgccaatgctgaa

SEQ ID NO: 135049 - DNA, 15 bp, Homo sapiens
aagtgccaatgctga

SEQ ID NO: 135050 - DNA, 15 bp, Homo sapiens
taagtgccaatgctg

SEQ ID NO: 135051 - DNA, 15 bp, Homo sapiens
ttaagtgccaatgct

SEQ ID NO: 135052 - DNA, 15 bp, Homo sapiens
tttaagtgccaatgc

SEQ ID NO: 135053 - DNA, 15 bp, Homo sapiens
ttttaagtgccaatg

SEQ ID NO: 135054 - DNA, 15 bp, Homo sapiens
attttaagtgccaat

SEQ ID NO: 135055 - DNA, 15 bp, Homo sapiens
tattttaagtgccaa

SEQ ID NO: 135056 - DNA, 15 bp, Homo sapiens
atattttaagtgcca

SEQ ID NO: 135057 - DNA, 15 bp, Homo sapiens
aatattttaagtgcc

SEQ ID NO: 135058 - DNA, 15 bp, Homo sapiens
aaatattttaagtgc

SEQ ID NO: 135059 - DNA, 15 bp, Homo sapiens
aaaatattttaagtg

SEQ ID NO: 135060 - DNA, 15 bp, Homo sapiens
taaaatattttaagt

SEQ ID NO: 135061 - DNA, 15 bp, Homo sapiens
ataaaatattttaag

SEQ ID NO: 135062 - DNA, 15 bp, Homo sapiens
tataaaatattttaa

SEQ ID NO: 135063 - DNA, 15 bp, Homo sapiens
ctataaaatatttta

SEQ ID NO: 135064 - DNA, 15 bp, Homo sapiens
gctataaaatatttt

SEQ ID NO: 135065 - DNA, 15 bp, Homo sapiens
agctataaaatattt

SEQ ID NO: 135066 - DNA, 15 bp, Homo sapiens
gagctataaaatatt

SEQ ID NO: 135067 - DNA, 15 bp, Homo sapiens
agagctataaaatat

SEQ ID NO: 135068 - DNA, 15 bp, Homo sapiens
aagagctataaaata

SEQ ID NO: 135069 - DNA, 15 bp, Homo sapiens
taagagctataaaat

SEQ ID NO: 135070 - DNA, 15 bp, Homo sapiens
ctaagagctataaaa

SEQ ID NO: 135071 - DNA, 15 bp, Homo sapiens
tctaagagctataaa

SEQ ID NO: 135072 - DNA, 15 bp, Homo sapiens
ttctaagagctataa

SEQ ID NO: 135073 - DNA, 15 bp, Homo sapiens
gttctaagagctata

SEQ ID NO: 135074 - DNA, 15 bp, Homo sapiens
tgttctaagagctat

SEQ ID NO: 135075 - DNA, 15 bp, Homo sapiens
gtgttctaagagcta

SEQ ID NO: 135076 - DNA, 15 bp, Homo sapiens
agtgttctaagagct

SEQ ID NO: 135077 - DNA, 15 bp, Homo sapiens
tagtgttctaagagc

SEQ ID NO: 135078 - DNA, 15 bp, Homo sapiens
atagtgttctaagag

SEQ ID NO: 135079 - DNA, 15 bp, Homo sapiens
aatagtgttctaaga

SEQ ID NO: 135080 - DNA, 15 bp, Homo sapiens
aaatagtgttctaag

SEQ ID NO: 135081 - DNA, 15 bp, Homo sapiens
aaaatagtgttctaa

SEQ ID NO: 135082 - DNA, 15 bp, Homo sapiens
aaaaatagtgttcta

SEQ ID NO: 135083 - DNA, 15 bp, Homo sapiens
aaaaaatagtgttct

SEQ ID NO: 135084 - DNA, 15 bp, Homo sapiens
taaaaaatagtgttc

SEQ ID NO: 135085 - DNA, 15 bp, Homo sapiens
ttaaaaaatagtgtt

SEQ ID NO: 135086 - DNA, 15 bp, Homo sapiens
tttaaaaaatagtgt

SEQ ID NO: 135087 - DNA, 15 bp, Homo sapiens
atttaaaaaatagtg

SEQ ID NO: 135088 - DNA, 15 bp, Homo sapiens
aatttaaaaaatagt

SEQ ID NO: 135089 - DNA, 15 bp, Homo sapiens
taatttaaaaaatag

SEQ ID NO: 135090 - DNA, 15 bp, Homo sapiens
gtaatttaaaaaata

SEQ ID NO: 135091 - DNA, 15 bp, Homo sapiens
tgtaatttaaaaaat

SEQ ID NO: 135092 - DNA, 15 bp, Homo sapiens
atgtaatttaaaaaa

SEQ ID NO: 135093 - DNA, 15 bp, Homo sapiens
aatgtaatttaaaaa

SEQ ID NO: 135094 - DNA, 15 bp, Homo sapiens
caatgtaatttaaaa

SEQ ID NO: 135095 - DNA, 15 bp, Homo sapiens
tcaatgtaatttaaa

SEQ ID NO: 135096 - DNA, 15 bp, Homo sapiens
atcaatgtaatttaa

SEQ ID NO: 135097 - DNA, 15 bp, Homo sapiens
gatcaatgtaattta

SEQ ID NO: 135098 - DNA, 15 bp, Homo sapiens
agatcaatgtaattt

SEQ ID NO: 135099 - DNA, 15 bp, Homo sapiens
aagatcaatgtaatt

SEQ ID NO: 135100 - DNA, 15 bp, Homo sapiens
aaagatcaatgtaat

SEQ ID NO: 135101 - DNA, 15 bp, Homo sapiens
taaagatcaatgtaa

SEQ ID NO: 135102 - DNA, 15 bp, Homo sapiens
ataaagatcaatgta

SEQ ID NO: 135103 - DNA, 15 bp, Homo sapiens
tataaagatcaatgt

SEQ ID NO: 135104 - DNA, 15 bp, Homo sapiens
gtataaagatcaatg

SEQ ID NO: 135105 - DNA, 15 bp, Homo sapiens
agtataaagatcaat

SEQ ID NO: 135106 - DNA, 15 bp, Homo sapiens
gagtataaagatcaa

SEQ ID NO: 135107 - DNA, 15 bp, Homo sapiens
agagtataaagatca

SEQ ID NO: 135108 - DNA, 15 bp, Homo sapiens
gagagtataaagatc

SEQ ID NO: 135109 - DNA, 15 bp, Homo sapiens
ggagagtataaagat

SEQ ID NO: 135110 - DNA, 15 bp, Homo sapiens
aggagagtataaaga

SEQ ID NO: 135111 - DNA, 15 bp, Homo sapiens
taggagagtataaag

SEQ ID NO: 135112 - DNA, 15 bp, Homo sapiens
ctaggagagtataaa

SEQ ID NO: 135113 - DNA, 15 bp, Homo sapiens
cctaggagagtataa

SEQ ID NO: 135114 - DNA, 15 bp, Homo sapiens
tcctaggagagtata

SEQ ID NO: 135115 - DNA, 15 bp, Homo sapiens
atcctaggagagtat

SEQ ID NO: 135116 - DNA, 15 bp, Homo sapiens
aatcctaggagagta

SEQ ID NO: 135117 - DNA, 15 bp, Homo sapiens
gaatcctaggagagt

SEQ ID NO: 135118 - DNA, 15 bp, Homo sapiens
ggaatcctaggagag

SEQ ID NO: 135119 - DNA, 15 bp, Homo sapiens
tggaatcctaggaga

SEQ ID NO: 135120 - DNA, 15 bp, Homo sapiens
ctggaatcctaggag

SEQ ID NO: 135121 - DNA, 15 bp, Homo sapiens
actggaatcctagga

SEQ ID NO: 135122 - DNA, 15 bp, Homo sapiens
gactggaatcctagg

SEQ ID NO: 135123 - DNA, 15 bp, Homo sapiens
ggactggaatcctag

SEQ ID NO: 135124 - DNA, 15 bp, Homo sapiens
aggactggaatccta

SEQ ID NO: 135125 - DNA, 15 bp, Homo sapiens
aaggactggaatcct

SEQ ID NO: 135126 - DNA, 15 bp, Homo sapiens
gaaggactggaatcc

SEQ ID NO: 135127 - DNA, 15 bp, Homo sapiens
ggaaggactggaatc

SEQ ID NO: 135128 - DNA, 15 bp, Homo sapiens
tggaaggactggaat

SEQ ID NO: 135129 - DNA, 15 bp, Homo sapiens
gtggaaggactggaa

SEQ ID NO: 135130 - DNA, 15 bp, Homo sapiens
tgtggaaggactgga

SEQ ID NO: 135131 - DNA, 15 bp, Homo sapiens
ttgtggaaggactgg

SEQ ID NO: 135132 - DNA, 15 bp, Homo sapiens
tttgtggaaggactg

SEQ ID NO: 135133 - DNA, 15 bp, Homo sapiens
atttgtggaaggact

SEQ ID NO: 135134 - DNA, 15 bp, Homo sapiens
aatttgtggaaggac

SEQ ID NO: 135135 - DNA, 15 bp, Homo sapiens
taatttgtggaagga

SEQ ID NO: 135136 - DNA, 15 bp, Homo sapiens
ataatttgtggaagg

SEQ ID NO: 135137 - DNA, 15 bp, Homo sapiens
aataatttgtggaag

SEQ ID NO: 135138 - DNA, 15 bp, Homo sapiens
taataatttgtggaa

SEQ ID NO: 135139 - DNA, 15 bp, Homo sapiens
ataataatttgtgga

SEQ ID NO: 135140 - DNA, 15 bp, Homo sapiens
tataataatttgtgg

SEQ ID NO: 135141 - DNA, 15 bp, Homo sapiens
atataataatttgtg

SEQ ID NO: 135142 - DNA, 15 bp, Homo sapiens
catataataatttgt

SEQ ID NO: 135143 - DNA, 15 bp, Homo sapiens
gcatataataatttg

SEQ ID NO: 135144 - DNA, 15 bp, Homo sapiens
tgcatataataattt

SEQ ID NO: 135145 - DNA, 15 bp, Homo sapiens
ctgcatataataatt

SEQ ID NO: 135146 - DNA, 15 bp, Homo sapiens
actgcatataataat

SEQ ID NO: 135147 - DNA, 15 bp, Homo sapiens
aactgcatataataa

SEQ ID NO: 135148 - DNA, 15 bp, Homo sapiens
aaactgcatataata

SEQ ID NO: 135149 - DNA, 15 bp, Homo sapiens
aaaactgcatataat

SEQ ID NO: 135150 - DNA, 15 bp, Homo sapiens
gaaaactgcatataa

SEQ ID NO: 135151 - DNA, 15 bp, Homo sapiens
agaaaactgcatata

SEQ ID NO: 135152 - DNA, 15 bp, Homo sapiens
aagaaaactgcatat

SEQ ID NO: 135153 - DNA, 15 bp, Homo sapiens
aaagaaaactgcata

SEQ ID NO: 135154 - DNA, 15 bp, Homo sapiens
taaagaaaactgcat

SEQ ID NO: 135155 - DNA, 15 bp, Homo sapiens
ataaagaaaactgca

SEQ ID NO: 135156 - DNA, 15 bp, Homo sapiens
tataaagaaaactgc

SEQ ID NO: 135157 - DNA, 15 bp, Homo sapiens
gtataaagaaaactg

SEQ ID NO: 135158 - DNA, 15 bp, Homo sapiens
agtataaagaaaact

SEQ ID NO: 135159 - DNA, 15 bp, Homo sapiens
cagtataaagaaaac

SEQ ID NO: 135160 - DNA, 15 bp, Homo sapiens
acagtataaagaaaa

SEQ ID NO: 135161 - DNA, 15 bp, Homo sapiens
aacagtataaagaaa

SEQ ID NO: 135162 - DNA, 15 bp, Homo sapiens
gaacagtataaagaa

SEQ ID NO: 135163 - DNA, 15 bp, Homo sapiens
ggaacagtataaaga

SEQ ID NO: 135164 - DNA, 15 bp, Homo sapiens
tggaacagtataaag

SEQ ID NO: 135165 - DNA, 15 bp, Homo sapiens
atggaacagtataaa

SEQ ID NO: 135166 - DNA, 15 bp, Homo sapiens
aatggaacagtataa

SEQ ID NO: 135167 - DNA, 15 bp, Homo sapiens
gaatggaacagtata

SEQ ID NO: 135168 - DNA, 15 bp, Homo sapiens
agaatggaacagtat

SEQ ID NO: 135169 - DNA, 15 bp, Homo sapiens
aagaatggaacagta

SEQ ID NO: 135170 - DNA, 15 bp, Homo sapiens
gaagaatggaacagt

SEQ ID NO: 135171 - DNA, 15 bp, Homo sapiens
tgaagaatggaacag

SEQ ID NO: 135172 - DNA, 15 bp, Homo sapiens
ctgaagaatggaaca

SEQ ID NO: 135173 - DNA, 15 bp, Homo sapiens
tctgaagaatggaac

SEQ ID NO: 135174 - DNA, 15 bp, Homo sapiens
gtctgaagaatggaa

SEQ ID NO: 135175 - DNA, 15 bp, Homo sapiens
tgtctgaagaatgga

SEQ ID NO: 135176 - DNA, 15 bp, Homo sapiens
ctgtctgaagaatgg

SEQ ID NO: 135177 - DNA, 15 bp, Homo sapiens
tctgtctgaagaatg

SEQ ID NO: 135178 - DNA, 15 bp, Homo sapiens
ctctgtctgaagaat

SEQ ID NO: 135179 - DNA, 15 bp, Homo sapiens
actctgtctgaagaa

SEQ ID NO: 135180 - DNA, 15 bp, Homo sapiens
aactctgtctgaaga

SEQ ID NO: 135181 - DNA, 15 bp, Homo sapiens
gaactctgtctgaag

SEQ ID NO: 135182 - DNA, 15 bp, Homo sapiens
tgaactctgtctgaa

SEQ ID NO: 135183 - DNA, 15 bp, Homo sapiens
ctgaactctgtctga

SEQ ID NO: 135184 - DNA, 15 bp, Homo sapiens
cctgaactctgtctg

SEQ ID NO: 135185 - DNA, 15 bp, Homo sapiens
acctgaactctgtct

SEQ ID NO: 135186 - DNA, 15 bp, Homo sapiens
aacctgaactctgtc

SEQ ID NO: 135187 - DNA, 15 bp, Homo sapiens
caacctgaactctgt

SEQ ID NO: 135188 - DNA, 15 bp, Homo sapiens
acaacctgaactctg

SEQ ID NO: 135189 - DNA, 15 bp, Homo sapiens
tacaacctgaactct

SEQ ID NO: 135190 - DNA, 15 bp, Homo sapiens
ctacaacctgaactc

SEQ ID NO: 135191 - DNA, 15 bp, Homo sapiens
cctacaacctgaact

SEQ ID NO: 135192 - DNA, 15 bp, Homo sapiens
tcctacaacctgaac

SEQ ID NO: 135193 - DNA, 15 bp, Homo sapiens
atcctacaacctgaa

SEQ ID NO: 135194 - DNA, 15 bp, Homo sapiens
gatcctacaacctga

SEQ ID NO: 135195 - DNA, 15 bp, Homo sapiens
tgatcctacaacctg

SEQ ID NO: 135196 - DNA, 15 bp, Homo sapiens
atgatcctacaacct

SEQ ID NO: 135197 - DNA, 15 bp, Homo sapiens
gatgatcctacaacc

SEQ ID NO: 135198 - DNA, 15 bp, Homo sapiens
agatgatcctacaac

SEQ ID NO: 135199 - DNA, 15 bp, Homo sapiens
cagatgatcctacaa

SEQ ID NO: 135200 - DNA, 15 bp, Homo sapiens
tcagatgatcctaca

SEQ ID NO: 135201 - DNA, 15 bp, Homo sapiens
ttcagatgatcctac

SEQ ID NO: 135202 - DNA, 15 bp, Homo sapiens
attcagatgatccta

SEQ ID NO: 135203 - DNA, 15 bp, Homo sapiens
aattcagatgatcct

SEQ ID NO: 135204 - DNA, 15 bp, Homo sapiens
aaattcagatgatcc

SEQ ID NO: 135205 - DNA, 15 bp, Homo sapiens
aaaattcagatgatc

SEQ ID NO: 135206 - DNA, 15 bp, Homo sapiens
gaaaattcagatgat

SEQ ID NO: 135207 - DNA, 15 bp, Homo sapiens
agaaaattcagatga

SEQ ID NO: 135208 - DNA, 15 bp, Homo sapiens
aagaaaattcagatg

SEQ ID NO: 135209 - DNA, 15 bp, Homo sapiens
taagaaaattcagat

SEQ ID NO: 135210 - DNA, 15 bp, Homo sapiens
ctaagaaaattcaga

SEQ ID NO: 135211 - DNA, 15 bp, Homo sapiens
actaagaaaattcag

SEQ ID NO: 135212 - DNA, 15 bp, Homo sapiens
cactaagaaaattca

SEQ ID NO: 135213 - DNA, 15 bp, Homo sapiens
tcactaagaaaattc

SEQ ID NO: 135214 - DNA, 15 bp, Homo sapiens
ttcactaagaaaatt

SEQ ID NO: 135215 - DNA, 15 bp, Homo sapiens
tttcactaagaaaat

SEQ ID NO: 135216 - DNA, 15 bp, Homo sapiens
atttcactaagaaaa

SEQ ID NO: 135217 - DNA, 15 bp, Homo sapiens
tatttcactaagaaa

SEQ ID NO: 135218 - DNA, 15 bp, Homo sapiens
gtatttcactaagaa

SEQ ID NO: 135219 - DNA, 15 bp, Homo sapiens
tgtatttcactaaga

SEQ ID NO: 135220 - DNA, 15 bp, Homo sapiens
ttgtatttcactaag

SEQ ID NO: 135221 - DNA, 15 bp, Homo sapiens
cttgtatttcactaa

SEQ ID NO: 135222 - DNA, 15 bp, Homo sapiens
gcttgtatttcacta

SEQ ID NO: 135223 - DNA, 15 bp, Homo sapiens
ggcttgtatttcact

SEQ ID NO: 135224 - DNA, 15 bp, Homo sapiens
tggcttgtatttcac

SEQ ID NO: 135225 - DNA, 15 bp, Homo sapiens
ctggcttgtatttca

SEQ ID NO: 135226 - DNA, 15 bp, Homo sapiens
actggcttgtatttc

SEQ ID NO: 135227 - DNA, 15 bp, Homo sapiens
tactggcttgtattt

SEQ ID NO: 135228 - DNA, 15 bp, Homo sapiens
ctactggcttgtatt

SEQ ID NO: 135229 - DNA, 15 bp, Homo sapiens
tctactggcttgtat

SEQ ID NO: 135230 - DNA, 15 bp, Homo sapiens
ttctactggcttgta

SEQ ID NO: 135231 - DNA, 15 bp, Homo sapiens
tttctactggcttgt

SEQ ID NO: 135232 - DNA, 15 bp, Homo sapiens
gtttctactggcttg

SEQ ID NO: 135233 - DNA, 15 bp, Homo sapiens
ggtttctactggctt

SEQ ID NO: 135234 - DNA, 15 bp, Homo sapiens
tggtttctactggct

SEQ ID NO: 135235 - DNA, 15 bp, Homo sapiens
ttggtttctactggc

SEQ ID NO: 135236 - DNA, 15 bp, Homo sapiens
tttggtttctactgg

SEQ ID NO: 135237 - DNA, 15 bp, Homo sapiens
ctttggtttctactg

SEQ ID NO: 135238 - DNA, 15 bp, Homo sapiens
gctttggtttctact

SEQ ID NO: 135239 - DNA, 15 bp, Homo sapiens
agctttggtttctac

SEQ ID NO: 135240 - DNA, 15 bp, Homo sapiens
gagctttggtttcta

SEQ ID NO: 135241 - DNA, 15 bp, Homo sapiens
cgagctttggtttct

SEQ ID NO: 135242 - DNA, 15 bp, Homo sapiens
acgagctttggtttc

SEQ ID NO: 135243 - DNA, 15 bp, Homo sapiens
cacgagctttggttt

SEQ ID NO: 135244 - DNA, 15 bp, Homo sapiens
acacgagctttggtt

SEQ ID NO: 135245 - DNA, 15 bp, Homo sapiens
aacacgagctttggt

SEQ ID NO: 135246 - DNA, 15 bp, Homo sapiens
aaacacgagctttgg

SEQ ID NO: 135247 - DNA, 15 bp, Homo sapiens
aaaacacgagctttg

SEQ ID NO: 135248 - DNA, 15 bp, Homo sapiens
aaaaacacgagcttt

SEQ ID NO: 135249 - DNA, 15 bp, Homo sapiens
gaaaaacacgagctt

SEQ ID NO: 135250 - DNA, 15 bp, Homo sapiens
agaaaaacacgagct

SEQ ID NO: 135251 - DNA, 15 bp, Homo sapiens
tagaaaaacacgagc

SEQ ID NO: 135252 - DNA, 15 bp, Homo sapiens
gtagaaaaacacgag

SEQ ID NO: 135253 - DNA, 15 bp, Homo sapiens
agtagaaaaacacga

SEQ ID NO: 135254 - DNA, 15 bp, Homo sapiens
cagtagaaaaacacg

SEQ ID NO: 135255 - DNA, 15 bp, Homo sapiens
acagtagaaaaacac

SEQ ID NO: 135256 - DNA, 15 bp, Homo sapiens
tacagtagaaaaaca

SEQ ID NO: 135257 - DNA, 15 bp, Homo sapiens
atacagtagaaaaac

SEQ ID NO: 135258 - DNA, 15 bp, Homo sapiens
catacagtagaaaaa

SEQ ID NO: 135259 - DNA, 15 bp, Homo sapiens
tcatacagtagaaaa

SEQ ID NO: 135260 - DNA, 15 bp, Homo sapiens
gtcatacagtagaaa

SEQ ID NO: 135261 - DNA, 15 bp, Homo sapiens
agtcatacagtagaa

SEQ ID NO: 135262 - DNA, 15 bp, Homo sapiens
tagtcatacagtaga

SEQ ID NO: 135263 - DNA, 15 bp, Homo sapiens
atagtcatacagtag

SEQ ID NO: 135264 - DNA, 15 bp, Homo sapiens
catagtcatacagta

SEQ ID NO: 135265 - DNA, 15 bp, Homo sapiens
ccatagtcatacagt

SEQ ID NO: 135266 - DNA, 15 bp, Homo sapiens
cccatagtcatacag

SEQ ID NO: 135267 - DNA, 15 bp, Homo sapiens
tcccatagtcataca

SEQ ID NO: 135268 - DNA, 15 bp, Homo sapiens
ctcccatagtcatac

SEQ ID NO: 135269 - DNA, 15 bp, Homo sapiens
gctcccatagtcata

SEQ ID NO: 135270 - DNA, 15 bp, Homo sapiens
agctcccatagtcat

SEQ ID NO: 135271 - DNA, 15 bp, Homo sapiens
gagctcccatagtca

SEQ ID NO: 135272 - DNA, 15 bp, Homo sapiens
agagctcccatagtc

SEQ ID NO: 135273 - DNA, 15 bp, Homo sapiens
gagagctcccatagt

SEQ ID NO: 135274 - DNA, 15 bp, Homo sapiens
tgagagctcccatag

SEQ ID NO: 135275 - DNA, 15 bp, Homo sapiens
ctgagagctcccata

SEQ ID NO: 135276 - DNA, 15 bp, Homo sapiens
actgagagctcccat

SEQ ID NO: 135277 - DNA, 15 bp, Homo sapiens
tactgagagctccca

SEQ ID NO: 135278 - DNA, 15 bp, Homo sapiens
atactgagagctccc

SEQ ID NO: 135279 - DNA, 15 bp, Homo sapiens
tatactgagagctcc

SEQ ID NO: 135280 - DNA, 15 bp, Homo sapiens
ctatactgagagctc

SEQ ID NO: 135281 - DNA, 15 bp, Homo sapiens
tctatactgagagct

SEQ ID NO: 135282 - DNA, 15 bp, Homo sapiens
ctctatactgagagc

SEQ ID NO: 135283 - DNA, 15 bp, Homo sapiens
tctctatactgagag

SEQ ID NO: 135284 - DNA, 15 bp, Homo sapiens
ttctctatactgaga

SEQ ID NO: 135285 - DNA, 15 bp, Homo sapiens
tttctctatactgag

SEQ ID NO: 135286 - DNA, 15 bp, Homo sapiens
gtttctctatactga

SEQ ID NO: 135287 - DNA, 15 bp, Homo sapiens
agtttctctatactg

SEQ ID NO: 135288 - DNA, 15 bp, Homo sapiens
aagtttctctatact

SEQ ID NO: 135289 - DNA, 15 bp, Homo sapiens
caagtttctctatac

SEQ ID NO: 135290 - DNA, 15 bp, Homo sapiens
tcaagtttctctata

SEQ ID NO: 135291 - DNA, 15 bp, Homo sapiens
atcaagtttctctat

SEQ ID NO: 135292 - DNA, 15 bp, Homo sapiens
gatcaagtttctcta

SEQ ID NO: 135293 - DNA, 15 bp, Homo sapiens
tgatcaagtttctct

SEQ ID NO: 135294 - DNA, 15 bp, Homo sapiens
atgatcaagtttctc

SEQ ID NO: 135295 - DNA, 15 bp, Homo sapiens
tatgatcaagtttct

SEQ ID NO: 135296 - DNA, 15 bp, Homo sapiens
gtatgatcaagtttc

SEQ ID NO: 135297 - DNA, 15 bp, Homo sapiens
ggtatgatcaagttt

SEQ ID NO: 135298 - DNA, 15 bp, Homo sapiens
aggtatgatcaagtt

SEQ ID NO: 135299 - DNA, 15 bp, Homo sapiens
caggtatgatcaagt

SEQ ID NO: 135300 - DNA, 15 bp, Homo sapiens
acaggtatgatcaag

SEQ ID NO: 135301 - DNA, 15 bp, Homo sapiens
cacaggtatgatcaa

SEQ ID NO: 135302 - DNA, 15 bp, Homo sapiens
tcacaggtatgatca

SEQ ID NO: 135303 - DNA, 15 bp, Homo sapiens
atcacaggtatgatc

SEQ ID NO: 135304 - DNA, 15 bp, Homo sapiens
tatcacaggtatgat

SEQ ID NO: 135305 - DNA, 15 bp, Homo sapiens
ctatcacaggtatga

SEQ ID NO: 135306 - DNA, 15 bp, Homo sapiens
tctatcacaggtatg

SEQ ID NO: 135307 - DNA, 15 bp, Homo sapiens
atctatcacaggtat

SEQ ID NO: 135308 - DNA, 15 bp, Homo sapiens
tatctatcacaggta

SEQ ID NO: 135309 - DNA, 15 bp, Homo sapiens
atatctatcacaggt

SEQ ID NO: 135310 - DNA, 15 bp, Homo sapiens
tatatctatcacagg

SEQ ID NO: 135311 - DNA, 15 bp, Homo sapiens
ttatatctatcacag

SEQ ID NO: 135312 - DNA, 15 bp, Homo sapiens
tttatatctatcaca

SEQ ID NO: 135313 - DNA, 15 bp, Homo sapiens
ctttatatctatcac

SEQ ID NO: 135314 - DNA, 15 bp, Homo sapiens
tctttatatctatca

SEQ ID NO: 135315 - DNA, 15 bp, Homo sapiens
atctttatatctatc

SEQ ID NO: 135316 - DNA, 15 bp, Homo sapiens
catctttatatctat

SEQ ID NO: 135317 - DNA, 15 bp, Homo sapiens
acatctttatatcta

SEQ ID NO: 135318 - DNA, 15 bp, Homo sapiens
tacatctttatatct

SEQ ID NO: 135319 - DNA, 15 bp, Homo sapiens
ttacatctttatatc

SEQ ID NO: 135320 - DNA, 15 bp, Homo sapiens
tttacatctttatat

SEQ ID NO: 135321 - DNA, 15 bp, Homo sapiens
atttacatctttata

SEQ ID NO: 135322 - DNA, 15 bp, Homo sapiens
aatttacatctttat

SEQ ID NO: 135323 - DNA, 15 bp, Homo sapiens
taatttacatcttta

SEQ ID NO: 135324 - DNA, 15 bp, Homo sapiens
ttaatttacatcttt

SEQ ID NO: 135325 - DNA, 15 bp, Homo sapiens
tttaatttacatctt

SEQ ID NO: 135326 - DNA, 15 bp, Homo sapiens
ctttaatttacatct

SEQ ID NO: 135327 - DNA, 15 bp, Homo sapiens
actttaatttacatc

SEQ ID NO: 135328 - DNA, 15 bp, Homo sapiens
gactttaatttacat

SEQ ID NO: 135329 - DNA, 15 bp, Homo sapiens
agactttaatttaca

SEQ ID NO: 135330 - DNA, 15 bp, Homo sapiens
tagactttaatttac

SEQ ID NO: 135331 - DNA, 15 bp, Homo sapiens
ctagactttaattta

SEQ ID NO: 135332 - DNA, 15 bp, Homo sapiens
actagactttaattt

SEQ ID NO: 135333 - DNA, 15 bp, Homo sapiens
aactagactttaatt

SEQ ID NO: 135334 - DNA, 15 bp, Homo sapiens
taactagactttaat

SEQ ID NO: 135335 - DNA, 15 bp, Homo sapiens
ctaactagactttaa

SEQ ID NO: 135336 - DNA, 15 bp, Homo sapiens
actaactagacttta

SEQ ID NO: 135337 - DNA, 15 bp, Homo sapiens
cactaactagacttt

SEQ ID NO: 135338 - DNA, 15 bp, Homo sapiens
tcactaactagactt

SEQ ID NO: 135339 - DNA, 15 bp, Homo sapiens
ctcactaactagact

SEQ ID NO: 135340 - DNA, 15 bp, Homo sapiens
actcactaactagac

SEQ ID NO: 135341 - DNA, 15 bp, Homo sapiens
aactcactaactaga

SEQ ID NO: 135342 - DNA, 15 bp, Homo sapiens
taactcactaactag

SEQ ID NO: 135343 - DNA, 15 bp, Homo sapiens
ataactcactaacta

SEQ ID NO: 135344 - DNA, 15 bp, Homo sapiens
aataactcactaact

SEQ ID NO: 135345 - DNA, 15 bp, Homo sapiens
aaataactcactaac

SEQ ID NO: 135346 - DNA, 15 bp, Homo sapiens
caaataactcactaa

SEQ ID NO: 135347 - DNA, 15 bp, Homo sapiens
tcaaataactcacta

SEQ ID NO: 135348 - DNA, 15 bp, Homo sapiens
ctcaaataactcact

SEQ ID NO: 135349 - DNA, 15 bp, Homo sapiens
cctcaaataactcac

SEQ ID NO: 135350 - DNA, 15 bp, Homo sapiens
ccctcaaataactca

SEQ ID NO: 135351 - DNA, 15 bp, Homo sapiens
accctcaaataactc

SEQ ID NO: 135352 - DNA, 15 bp, Homo sapiens
taccctcaaataact

SEQ ID NO: 135353 - DNA, 15 bp, Homo sapiens
ttaccctcaaataac

SEQ ID NO: 135354 - DNA, 15 bp, Homo sapiens
tttaccctcaaataa

SEQ ID NO: 135355 - DNA, 15 bp, Homo sapiens
ctttaccctcaaata

SEQ ID NO: 135356 - DNA, 15 bp, Homo sapiens
gctttaccctcaaat

SEQ ID NO: 135357 - DNA, 15 bp, Homo sapiens
ggctttaccctcaaa

SEQ ID NO: 135358 - DNA, 15 bp, Homo sapiens
tggctttaccctcaa

SEQ ID NO: 135359 - DNA, 15 bp, Homo sapiens
ctggctttaccctca

SEQ ID NO: 135360 - DNA, 15 bp, Homo sapiens
tctggctttaccctc

SEQ ID NO: 135361 - DNA, 15 bp, Homo sapiens
ttctggctttaccct

SEQ ID NO: 135362 - DNA, 15 bp, Homo sapiens
attctggctttaccc

SEQ ID NO: 135363 - DNA, 15 bp, Homo sapiens
tattctggctttacc

SEQ ID NO: 135364 - DNA, 15 bp, Homo sapiens
ctattctggctttac

SEQ ID NO: 135365 - DNA, 15 bp, Homo sapiens
cctattctggcttta

SEQ ID NO: 135366 - DNA, 15 bp, Homo sapiens
tcctattctggcttt

SEQ ID NO: 135367 - DNA, 15 bp, Homo sapiens
ttcctattctggctt

SEQ ID NO: 135368 - DNA, 15 bp, Homo sapiens
tttcctattctggct

SEQ ID NO: 135369 - DNA, 15 bp, Homo sapiens
ttttcctattctggc

SEQ ID NO: 135370 - DNA, 15 bp, Homo sapiens
gttttcctattctgg

SEQ ID NO: 135371 - DNA, 15 bp, Homo sapiens
tgttttcctattctg

SEQ ID NO: 135372 - DNA, 15 bp, Homo sapiens
atgttttcctattct

SEQ ID NO: 135373 - DNA, 15 bp, Homo sapiens
aatgttttcctattc

SEQ ID NO: 135374 - DNA, 15 bp, Homo sapiens
aaatgttttcctatt

SEQ ID NO: 135375 - DNA, 15 bp, Homo sapiens
aaaatgttttcctat

SEQ ID NO: 135376 - DNA, 15 bp, Homo sapiens
caaaatgttttccta

SEQ ID NO: 135377 - DNA, 15 bp, Homo sapiens
acaaaatgttttcct

SEQ ID NO: 135378 - DNA, 15 bp, Homo sapiens
aacaaaatgttttcc

SEQ ID NO: 135379 - DNA, 15 bp, Homo sapiens
aaacaaaatgttttc

SEQ ID NO: 135380 - DNA, 15 bp, Homo sapiens
gaaacaaaatgtttt

SEQ ID NO: 135381 - DNA, 15 bp, Homo sapiens
agaaacaaaatgttt

SEQ ID NO: 135382 - DNA, 15 bp, Homo sapiens
gagaaacaaaatgtt

SEQ ID NO: 135383 - DNA, 15 bp, Homo sapiens
agagaaacaaaatgt

SEQ ID NO: 135384 - DNA, 15 bp, Homo sapiens
aagagaaacaaaatg

SEQ ID NO: 135385 - DNA, 15 bp, Homo sapiens
aaagagaaacaaaat

SEQ ID NO: 135386 - DNA, 15 bp, Homo sapiens
aaaagagaaacaaaa

SEQ ID NO: 135387 - DNA, 15 bp, Homo sapiens
gaaaagagaaacaaa

SEQ ID NO: 135388 - DNA, 15 bp, Homo sapiens
ggaaaagagaaacaa

SEQ ID NO: 135389 - DNA, 15 bp, Homo sapiens
aggaaaagagaaaca

SEQ ID NO: 135390 - DNA, 15 bp, Homo sapiens
caggaaaagagaaac

SEQ ID NO: 135391 - DNA, 15 bp, Homo sapiens
ccaggaaaagagaaa

SEQ ID NO: 135392 - DNA, 15 bp, Homo sapiens
cccaggaaaagagaa

SEQ ID NO: 135393 - DNA, 15 bp, Homo sapiens
gcccaggaaaagaga

SEQ ID NO: 135394 - DNA, 15 bp, Homo sapiens
agcccaggaaaagag

SEQ ID NO: 135395 - DNA, 15 bp, Homo sapiens
aagcccaggaaaaga

SEQ ID NO: 135396 - DNA, 15 bp, Homo sapiens
gaagcccaggaaaag

SEQ ID NO: 135397 - DNA, 15 bp, Homo sapiens
tgaagcccaggaaaa

SEQ ID NO: 135398 - DNA, 15 bp, Homo sapiens
gtgaagcccaggaaa

SEQ ID NO: 135399 - DNA, 15 bp, Homo sapiens
tgtgaagcccaggaa

SEQ ID NO: 135400 - DNA, 15 bp, Homo sapiens
ttgtgaagcccagga

SEQ ID NO: 135401 - DNA, 15 bp, Homo sapiens
attgtgaagcccagg

SEQ ID NO: 135402 - DNA, 15 bp, Homo sapiens
gattgtgaagcccag

SEQ ID NO: 135403 - DNA, 15 bp, Homo sapiens
agattgtgaagccca

SEQ ID NO: 135404 - DNA, 15 bp, Homo sapiens
aagattgtgaagccc

SEQ ID NO: 135405 - DNA, 15 bp, Homo sapiens
aaagattgtgaagcc

SEQ ID NO: 135406 - DNA, 15 bp, Homo sapiens
caaagattgtgaagc

SEQ ID NO: 135407 - DNA, 15 bp, Homo sapiens
ccaaagattgtgaag

SEQ ID NO: 135408 - DNA, 15 bp, Homo sapiens
tccaaagattgtgaa

SEQ ID NO: 135409 - DNA, 15 bp, Homo sapiens
ctccaaagattgtga

SEQ ID NO: 135410 - DNA, 15 bp, Homo sapiens
tctccaaagattgtg

SEQ ID NO: 135411 - DNA, 15 bp, Homo sapiens
ttctccaaagattgt

SEQ ID NO: 135412 - DNA, 15 bp, Homo sapiens
attctccaaagattg

SEQ ID NO: 135413 - DNA, 15 bp, Homo sapiens
tattctccaaagatt

SEQ ID NO: 135414 - DNA, 15 bp, Homo sapiens
ttattctccaaagat

SEQ ID NO: 135415 - DNA, 15 bp, Homo sapiens
gttattctccaaaga

SEQ ID NO: 135416 - DNA, 15 bp, Homo sapiens
agttattctccaaag

SEQ ID NO: 135417 - DNA, 15 bp, Homo sapiens
tagttattctccaaa

SEQ ID NO: 135418 - DNA, 15 bp, Homo sapiens
ttagttattctccaa

SEQ ID NO: 135419 - DNA, 15 bp, Homo sapiens
attagttattctcca

SEQ ID NO: 135420 - DNA, 15 bp, Homo sapiens
aattagttattctcc

SEQ ID NO: 135421 - DNA, 15 bp, Homo sapiens
aaattagttattctc

SEQ ID NO: 135422 - DNA, 15 bp, Homo sapiens
aaaattagttattct

SEQ ID NO: 135423 - DNA, 15 bp, Homo sapiens
taaaattagttattc

SEQ ID NO: 135424 - DNA, 15 bp, Homo sapiens
ataaaattagttatt

SEQ ID NO: 135425 - DNA, 15 bp, Homo sapiens
aataaaattagttat

SEQ ID NO: 135426 - DNA, 15 bp, Homo sapiens
aaataaaattagtta

SEQ ID NO: 135427 - DNA, 15 bp, Homo sapiens
aaaataaaattagtt

SEQ ID NO: 135428 - DNA, 15 bp, Homo sapiens
taaaataaaattagt

SEQ ID NO: 135429 - DNA, 15 bp, Homo sapiens
ttaaaataaaattag

SEQ ID NO: 135430 - DNA, 15 bp, Homo sapiens
gttaaaataaaatta

SEQ ID NO: 135431 - DNA, 15 bp, Homo sapiens
agttaaaataaaatt

SEQ ID NO: 135432 - DNA, 15 bp, Homo sapiens
gagttaaaataaaat

SEQ ID NO: 135433 - DNA, 15 bp, Homo sapiens
agagttaaaataaaa

SEQ ID NO: 135434 - DNA, 15 bp, Homo sapiens
tagagttaaaataaa

SEQ ID NO: 135435 - DNA, 15 bp, Homo sapiens
ctagagttaaaataa

SEQ ID NO: 135436 - DNA, 15 bp, Homo sapiens
actagagttaaaata

SEQ ID NO: 135437 - DNA, 15 bp, Homo sapiens
cactagagttaaaat

SEQ ID NO: 135438 - DNA, 15 bp, Homo sapiens
acactagagttaaaa

SEQ ID NO: 135439 - DNA, 15 bp, Homo sapiens
aacactagagttaaa

SEQ ID NO: 135440 - DNA, 15 bp, Homo sapiens
taacactagagttaa

SEQ ID NO: 135441 - DNA, 15 bp, Homo sapiens
ctaacactagagtta

SEQ ID NO: 135442 - DNA, 15 bp, Homo sapiens
tctaacactagagtt

SEQ ID NO: 135443 - DNA, 15 bp, Homo sapiens
ctctaacactagagt

SEQ ID NO: 135444 - DNA, 15 bp, Homo sapiens
cctctaacactagag

SEQ ID NO: 135445 - DNA, 15 bp, Homo sapiens
gcctctaacactaga

SEQ ID NO: 135446 - DNA, 15 bp, Homo sapiens
tgcctctaacactag

SEQ ID NO: 135447 - DNA, 15 bp, Homo sapiens
atgcctctaacacta

SEQ ID NO: 135448 - DNA, 15 bp, Homo sapiens
catgcctctaacact

SEQ ID NO: 135449 - DNA, 15 bp, Homo sapiens
acatgcctctaacac

SEQ ID NO: 135450 - DNA, 15 bp, Homo sapiens
tacatgcctctaaca

SEQ ID NO: 135451 - DNA, 15 bp, Homo sapiens
atacatgcctctaac

SEQ ID NO: 135452 - DNA, 15 bp, Homo sapiens
catacatgcctctaa

SEQ ID NO: 135453 - DNA, 15 bp, Homo sapiens
acatacatgcctcta

SEQ ID NO: 135454 - DNA, 15 bp, Homo sapiens
gacatacatgcctct

SEQ ID NO: 135455 - DNA, 15 bp, Homo sapiens
agacatacatgcctc

SEQ ID NO: 135456 - DNA, 15 bp, Homo sapiens
aagacatacatgcct

SEQ ID NO: 135457 - DNA, 15 bp, Homo sapiens
gaagacatacatgcc

SEQ ID NO: 135458 - DNA, 15 bp, Homo sapiens
agaagacatacatgc

SEQ ID NO: 135459 - DNA, 15 bp, Homo sapiens
cagaagacatacatg

SEQ ID NO: 135460 - DNA, 15 bp, Homo sapiens
ccagaagacatacat

SEQ ID NO: 135461 - DNA, 15 bp, Homo sapiens
accagaagacataca

SEQ ID NO: 135462 - DNA, 15 bp, Homo sapiens
taccagaagacatac

SEQ ID NO: 135463 - DNA, 15 bp, Homo sapiens
ttaccagaagacata

SEQ ID NO: 135464 - DNA, 15 bp, Homo sapiens
attaccagaagacat

SEQ ID NO: 135465 - DNA, 15 bp, Homo sapiens
gattaccagaagaca

SEQ ID NO: 135466 - DNA, 15 bp, Homo sapiens
tgattaccagaagac

SEQ ID NO: 135467 - DNA, 15 bp, Homo sapiens
ctgattaccagaaga

SEQ ID NO: 135468 - DNA, 15 bp, Homo sapiens
actgattaccagaag

SEQ ID NO: 135469 - DNA, 15 bp, Homo sapiens
tactgattaccagaa

SEQ ID NO: 135470 - DNA, 15 bp, Homo sapiens
ttactgattaccaga

SEQ ID NO: 135471 - DNA, 15 bp, Homo sapiens
attactgattaccag

SEQ ID NO: 135472 - DNA, 15 bp, Homo sapiens
tattactgattacca

SEQ ID NO: 135473 - DNA, 15 bp, Homo sapiens
ctattactgattacc

SEQ ID NO: 135474 - DNA, 15 bp, Homo sapiens
actattactgattac

SEQ ID NO: 135475 - DNA, 15 bp, Homo sapiens
tactattactgatta

SEQ ID NO: 135476 - DNA, 15 bp, Homo sapiens
ttactattactgatt

SEQ ID NO: 135477 - DNA, 15 bp, Homo sapiens
attactattactgat

SEQ ID NO: 135478 - DNA, 15 bp, Homo sapiens
aattactattactga

SEQ ID NO: 135479 - DNA, 15 bp, Homo sapiens
gaattactattactg

SEQ ID NO: 135480 - DNA, 15 bp, Homo sapiens
tgaattactattact

SEQ ID NO: 135481 - DNA, 15 bp, Homo sapiens
atgaattactattac

SEQ ID NO: 135482 - DNA, 15 bp, Homo sapiens
aatgaattactatta

SEQ ID NO: 135483 - DNA, 15 bp, Homo sapiens
aaatgaattactatt

SEQ ID NO: 135484 - DNA, 15 bp, Homo sapiens
aaaatgaattactat

SEQ ID NO: 135485 - DNA, 15 bp, Homo sapiens
taaaatgaattacta

SEQ ID NO: 135486 - DNA, 15 bp, Homo sapiens
gtaaaatgaattact

SEQ ID NO: 135487 - DNA, 15 bp, Homo sapiens
ggtaaaatgaattac

SEQ ID NO: 135488 - DNA, 15 bp, Homo sapiens
aggtaaaatgaatta

SEQ ID NO: 135489 - DNA, 15 bp, Homo sapiens
caggtaaaatgaatt

SEQ ID NO: 135490 - DNA, 15 bp, Homo sapiens
acaggtaaaatgaat

SEQ ID NO: 135491 - DNA, 15 bp, Homo sapiens
aacaggtaaaatgaa

SEQ ID NO: 135492 - DNA, 15 bp, Homo sapiens
aaacaggtaaaatga

SEQ ID NO: 135493 - DNA, 15 bp, Homo sapiens
caaacaggtaaaatg

SEQ ID NO: 135494 - DNA, 15 bp, Homo sapiens
acaaacaggtaaaat

SEQ ID NO: 135495 - DNA, 15 bp, Homo sapiens
aacaaacaggtaaaa

SEQ ID NO: 135496 - DNA, 15 bp, Homo sapiens
aaacaaacaggtaaa

SEQ ID NO: 135497 - DNA, 15 bp, Homo sapiens
gaaacaaacaggtaa

SEQ ID NO: 135498 - DNA, 15 bp, Homo sapiens
agaaacaaacaggta

SEQ ID NO: 135499 - DNA, 15 bp, Homo sapiens
gagaaacaaacaggt

SEQ ID NO: 135500 - DNA, 15 bp, Homo sapiens
tgagaaacaaacagg

SEQ ID NO: 135501 - DNA, 15 bp, Homo sapiens
gtgagaaacaaacag

SEQ ID NO: 135502 - DNA, 15 bp, Homo sapiens
agtgagaaacaaaca

SEQ ID NO: 135503 - DNA, 15 bp, Homo sapiens
cagtgagaaacaaac

SEQ ID NO: 135504 - DNA, 15 bp, Homo sapiens
acagtgagaaacaaa

SEQ ID NO: 135505 - DNA, 15 bp, Homo sapiens
aacagtgagaaacaa

SEQ ID NO: 135506 - DNA, 15 bp, Homo sapiens
aaacagtgagaaaca

SEQ ID NO: 135507 - DNA, 15 bp, Homo sapiens
aaaacagtgagaaac

SEQ ID NO: 135508 - DNA, 15 bp, Homo sapiens
taaaacagtgagaaa

SEQ ID NO: 135509 - DNA, 15 bp, Homo sapiens
ataaaacagtgagaa

SEQ ID NO: 135510 - DNA, 15 bp, Homo sapiens
aataaaacagtgaga

SEQ ID NO: 135511 - DNA, 15 bp, Homo sapiens
gaataaaacagtgag

SEQ ID NO: 135512 - DNA, 15 bp, Homo sapiens
agaataaaacagtga

SEQ ID NO: 135513 - DNA, 15 bp, Homo sapiens
tagaataaaacagtg

SEQ ID NO: 135514 - DNA, 15 bp, Homo sapiens
gtagaataaaacagt

SEQ ID NO: 135515 - DNA, 15 bp, Homo sapiens
agtagaataaaacag

SEQ ID NO: 135516 - DNA, 15 bp, Homo sapiens
aagtagaataaaaca

SEQ ID NO: 135517 - DNA, 15 bp, Homo sapiens
taagtagaataaaac

SEQ ID NO: 135518 - DNA, 15 bp, Homo sapiens
ctaagtagaataaaa

SEQ ID NO: 135519 - DNA, 15 bp, Homo sapiens
tctaagtagaataaa

SEQ ID NO: 135520 - DNA, 15 bp, Homo sapiens
ttctaagtagaataa

SEQ ID NO: 135521 - DNA, 15 bp, Homo sapiens
cttctaagtagaata

SEQ ID NO: 135522 - DNA, 15 bp, Homo sapiens
tcttctaagtagaat

SEQ ID NO: 135523 - DNA, 15 bp, Homo sapiens
ttcttctaagtagaa

SEQ ID NO: 135524 - DNA, 15 bp, Homo sapiens
cttcttctaagtaga

SEQ ID NO: 135525 - DNA, 15 bp, Homo sapiens
tcttcttctaagtag

SEQ ID NO: 135526 - DNA, 15 bp, Homo sapiens
gtcttcttctaagta

SEQ ID NO: 135527 - DNA, 15 bp, Homo sapiens
tgtcttcttctaagt

SEQ ID NO: 135528 - DNA, 15 bp, Homo sapiens
atgtcttcttctaag

SEQ ID NO: 135529 - DNA, 15 bp, Homo sapiens
catgtcttcttctaa

SEQ ID NO: 135530 - DNA, 15 bp, Homo sapiens
tcatgtcttcttcta

SEQ ID NO: 135531 - DNA, 15 bp, Homo sapiens
atcatgtcttcttct

SEQ ID NO: 135532 - DNA, 15 bp, Homo sapiens
tatcatgtcttcttc

SEQ ID NO: 135533 - DNA, 15 bp, Homo sapiens
ctatcatgtcttctt

SEQ ID NO: 135534 - DNA, 15 bp, Homo sapiens
cctatcatgtcttct

SEQ ID NO: 135535 - DNA, 15 bp, Homo sapiens
tcctatcatgtcttc

SEQ ID NO: 135536 - DNA, 15 bp, Homo sapiens
atcctatcatgtctt

SEQ ID NO: 135537 - DNA, 15 bp, Homo sapiens
aatcctatcatgtct

SEQ ID NO: 135538 - DNA, 15 bp, Homo sapiens
caatcctatcatgtc

SEQ ID NO: 135539 - DNA, 15 bp, Homo sapiens
acaatcctatcatgt

SEQ ID NO: 135540 - DNA, 15 bp, Homo sapiens
cacaatcctatcatg

SEQ ID NO: 135541 - DNA, 15 bp, Homo sapiens
tcacaatcctatcat

SEQ ID NO: 135542 - DNA, 15 bp, Homo sapiens
ctcacaatcctatca

SEQ ID NO: 135543 - DNA, 15 bp, Homo sapiens
actcacaatcctatc

SEQ ID NO: 135544 - DNA, 15 bp, Homo sapiens
aactcacaatcctat

SEQ ID NO: 135545 - DNA, 15 bp, Homo sapiens
aaactcacaatccta

SEQ ID NO: 135546 - DNA, 15 bp, Homo sapiens
aaaactcacaatcct

SEQ ID NO: 135547 - DNA, 15 bp, Homo sapiens
aaaaactcacaatcc

SEQ ID NO: 135548 - DNA, 15 bp, Homo sapiens
gaaaaactcacaatc

SEQ ID NO: 135549 - DNA, 15 bp, Homo sapiens
agaaaaactcacaat

SEQ ID NO: 135550 - DNA, 15 bp, Homo sapiens
gagaaaaactcacaa

SEQ ID NO: 135551 - DNA, 15 bp, Homo sapiens
agagaaaaactcaca

SEQ ID NO: 135552 - DNA, 15 bp, Homo sapiens
tagagaaaaactcac

SEQ ID NO: 135553 - DNA, 15 bp, Homo sapiens
ttagagaaaaactca

SEQ ID NO: 135554 - DNA, 15 bp, Homo sapiens
gttagagaaaaactc

SEQ ID NO: 135555 - DNA, 15 bp, Homo sapiens
agttagagaaaaact

SEQ ID NO: 135556 - DNA, 15 bp, Homo sapiens
aagttagagaaaaac

SEQ ID NO: 135557 - DNA, 15 bp, Homo sapiens
aaagttagagaaaaa

SEQ ID NO: 135558 - DNA, 15 bp, Homo sapiens
caaagttagagaaaa

SEQ ID NO: 135559 - DNA, 15 bp, Homo sapiens
ccaaagttagagaaa

SEQ ID NO: 135560 - DNA, 15 bp, Homo sapiens
tccaaagttagagaa

SEQ ID NO: 135561 - DNA, 15 bp, Homo sapiens
atccaaagttagaga

SEQ ID NO: 135562 - DNA, 15 bp, Homo sapiens
catccaaagttagag

SEQ ID NO: 135563 - DNA, 15 bp, Homo sapiens
gcatccaaagttaga

SEQ ID NO: 135564 - DNA, 15 bp, Homo sapiens
tgcatccaaagttag

SEQ ID NO: 135565 - DNA, 15 bp, Homo sapiens
ctgcatccaaagtta

SEQ ID NO: 135566 - DNA, 15 bp, Homo sapiens
actgcatccaaagtt

SEQ ID NO: 135567 - DNA, 15 bp, Homo sapiens
cactgcatccaaagt

SEQ ID NO: 135568 - DNA, 15 bp, Homo sapiens
tcactgcatccaaag

SEQ ID NO: 135569 - DNA, 15 bp, Homo sapiens
ctcactgcatccaaa

SEQ ID NO: 135570 - DNA, 15 bp, Homo sapiens
tctcactgcatccaa

SEQ ID NO: 135571 - DNA, 15 bp, Homo sapiens
atctcactgcatcca

SEQ ID NO: 135572 - DNA, 15 bp, Homo sapiens
catctcactgcatcc

SEQ ID NO: 135573 - DNA, 15 bp, Homo sapiens
tcatctcactgcatc

SEQ ID NO: 135574 - DNA, 15 bp, Homo sapiens
gtcatctcactgcat

SEQ ID NO: 135575 - DNA, 15 bp, Homo sapiens
ggtcatctcactgca

SEQ ID NO: 135576 - DNA, 15 bp, Homo sapiens
tggtcatctcactgc

SEQ ID NO: 135577 - DNA, 15 bp, Homo sapiens
ctggtcatctcactg

SEQ ID NO: 135578 - DNA, 15 bp, Homo sapiens
actggtcatctcact

SEQ ID NO: 135579 - DNA, 15 bp, Homo sapiens
cactggtcatctcac

SEQ ID NO: 135580 - DNA, 15 bp, Homo sapiens
acactggtcatctca

SEQ ID NO: 135581 - DNA, 15 bp, Homo sapiens
cacactggtcatctc

SEQ ID NO: 135582 - DNA, 15 bp, Homo sapiens
acacactggtcatct

SEQ ID NO: 135583 - DNA, 15 bp, Homo sapiens
aacacactggtcatc

SEQ ID NO: 135584 - DNA, 15 bp, Homo sapiens
gaacacactggtcat

SEQ ID NO: 135585 - DNA, 15 bp, Homo sapiens
ggaacacactggtca

SEQ ID NO: 135586 - DNA, 15 bp, Homo sapiens
tggaacacactggtc

SEQ ID NO: 135587 - DNA, 15 bp, Homo sapiens
ctggaacacactggt

SEQ ID NO: 135588 - DNA, 15 bp, Homo sapiens
actggaacacactgg

SEQ ID NO: 135589 - DNA, 15 bp, Homo sapiens
aactggaacacactg

SEQ ID NO: 135590 - DNA, 15 bp, Homo sapiens
taactggaacacact

SEQ ID NO: 135591 - DNA, 15 bp, Homo sapiens
ttaactggaacacac

SEQ ID NO: 135592 - DNA, 15 bp, Homo sapiens
tttaactggaacaca

SEQ ID NO: 135593 - DNA, 15 bp, Homo sapiens
ctttaactggaacac

SEQ ID NO: 135594 - DNA, 15 bp, Homo sapiens
tctttaactggaaca

SEQ ID NO: 135595 - DNA, 15 bp, Homo sapiens
ttctttaactggaac

SEQ ID NO: 135596 - DNA, 15 bp, Homo sapiens
cttctttaactggaa

SEQ ID NO: 135597 - DNA, 15 bp, Homo sapiens
tcttctttaactgga

SEQ ID NO: 135598 - DNA, 15 bp, Homo sapiens
ttcttctttaactgg

SEQ ID NO: 135599 - DNA, 15 bp, Homo sapiens
cttcttctttaactg

SEQ ID NO: 135600 - DNA, 15 bp, Homo sapiens
tcttcttctttaact

SEQ ID NO: 135601 - DNA, 15 bp, Homo sapiens
ctcttcttctttaac

SEQ ID NO: 135602 - DNA, 15 bp, Homo sapiens
actcttcttctttaa

SEQ ID NO: 135603 - DNA, 15 bp, Homo sapiens
cactcttcttcttta

SEQ ID NO: 135604 - DNA, 15 bp, Homo sapiens
acactcttcttcttt

SEQ ID NO: 135605 - DNA, 15 bp, Homo sapiens
aacactcttcttctt

SEQ ID NO: 135606 - DNA, 15 bp, Homo sapiens
aaacactcttcttct

SEQ ID NO: 135607 - DNA, 15 bp, Homo sapiens
aaaacactcttcttc

SEQ ID NO: 135608 - DNA, 15 bp, Homo sapiens
taaaacactcttctt

SEQ ID NO: 135609 - DNA, 15 bp, Homo sapiens
ttaaaacactcttct

SEQ ID NO: 135610 - DNA, 15 bp, Homo sapiens
tttaaaacactcttc

SEQ ID NO: 135611 - DNA, 15 bp, Homo sapiens
ttttaaaacactctt

SEQ ID NO: 135612 - DNA, 15 bp, Homo sapiens
attttaaaacactct

SEQ ID NO: 135613 - DNA, 15 bp, Homo sapiens
gattttaaaacactc

SEQ ID NO: 135614 - DNA, 15 bp, Homo sapiens
tgattttaaaacact

SEQ ID NO: 135615 - DNA, 15 bp, Homo sapiens
atgattttaaaacac

SEQ ID NO: 135616 - DNA, 15 bp, Homo sapiens
tatgattttaaaaca

SEQ ID NO: 135617 - DNA, 15 bp, Homo sapiens
ttatgattttaaaac

SEQ ID NO: 135618 - DNA, 15 bp, Homo sapiens
tttatgattttaaaa

SEQ ID NO: 135619 - DNA, 15 bp, Homo sapiens
gtttatgattttaaa

SEQ ID NO: 135620 - DNA, 15 bp, Homo sapiens
ggtttatgattttaa

SEQ ID NO: 135621 - DNA, 15 bp, Homo sapiens
tggtttatgatttta

SEQ ID NO: 135622 - DNA, 15 bp, Homo sapiens
ttggtttatgatttt

SEQ ID NO: 135623 - DNA, 15 bp, Homo sapiens
tttggtttatgattt

SEQ ID NO: 135624 - DNA, 15 bp, Homo sapiens
atttggtttatgatt

SEQ ID NO: 135625 - DNA, 15 bp, Homo sapiens
tatttggtttatgat

SEQ ID NO: 135626 - DNA, 15 bp, Homo sapiens
ttatttggtttatga

SEQ ID NO: 135627 - DNA, 15 bp, Homo sapiens
tttatttggtttatg

SEQ ID NO: 135628 - DNA, 15 bp, Homo sapiens
ctttatttggtttat

SEQ ID NO: 135629 - DNA, 15 bp, Homo sapiens
tctttatttggttta

SEQ ID NO: 135630 - DNA, 15 bp, Homo sapiens
ttctttatttggttt

SEQ ID NO: 135631 - DNA, 15 bp, Homo sapiens
attctttatttggtt

SEQ ID NO: 135632 - DNA, 15 bp, Homo sapiens
gattctttatttggt

SEQ ID NO: 135633 - DNA, 15 bp, Homo sapiens
ggattctttatttgg

SEQ ID NO: 135634 - DNA, 15 bp, Homo sapiens
aggattctttatttg

SEQ ID NO: 135635 - DNA, 15 bp, Homo sapiens
taggattctttattt

SEQ ID NO: 135636 - DNA, 15 bp, Homo sapiens
gtaggattctttatt

SEQ ID NO: 135637 - DNA, 15 bp, Homo sapiens
ggtaggattctttat

SEQ ID NO: 135638 - DNA, 15 bp, Homo sapiens
aggtaggattcttta

SEQ ID NO: 135639 - DNA, 15 bp, Homo sapiens
aaggtaggattcttt

SEQ ID NO: 135640 - DNA, 15 bp, Homo sapiens
taaggtaggattctt

SEQ ID NO: 135641 - DNA, 15 bp, Homo sapiens
gtaaggtaggattct

SEQ ID NO: 135642 - DNA, 15 bp, Homo sapiens
tgtaaggtaggattc

SEQ ID NO: 135643 - DNA, 15 bp, Homo sapiens
atgtaaggtaggatt

SEQ ID NO: 135644 - DNA, 15 bp, Homo sapiens
aatgtaaggtaggat

SEQ ID NO: 135645 - DNA, 15 bp, Homo sapiens
taatgtaaggtagga

SEQ ID NO: 135646 - DNA, 15 bp, Homo sapiens
ttaatgtaaggtagg

SEQ ID NO: 135647 - DNA, 15 bp, Homo sapiens
attaatgtaaggtag

SEQ ID NO: 135648 - DNA, 15 bp, Homo sapiens
aattaatgtaaggta

SEQ ID NO: 135649 - DNA, 15 bp, Homo sapiens
aaattaatgtaaggt

SEQ ID NO: 135650 - DNA, 15 bp, Homo sapiens
gaaattaatgtaagg

SEQ ID NO: 135651 - DNA, 15 bp, Homo sapiens
agaaattaatgtaag

SEQ ID NO: 135652 - DNA, 15 bp, Homo sapiens
aagaaattaatgtaa

SEQ ID NO: 135653 - DNA, 15 bp, Homo sapiens
caagaaattaatgta

SEQ ID NO: 135654 - DNA, 15 bp, Homo sapiens
gcaagaaattaatgt

SEQ ID NO: 135655 - DNA, 15 bp, Homo sapiens
tgcaagaaattaatg

SEQ ID NO: 135656 - DNA, 15 bp, Homo sapiens
gtgcaagaaattaat

SEQ ID NO: 135657 - DNA, 15 bp, Homo sapiens
agtgcaagaaattaa

SEQ ID NO: 135658 - DNA, 15 bp, Homo sapiens
aagtgcaagaaatta

SEQ ID NO: 135659 - DNA, 15 bp, Homo sapiens
gaagtgcaagaaatt

SEQ ID NO: 135660 - DNA, 15 bp, Homo sapiens
agaagtgcaagaaat

SEQ ID NO: 135661 - DNA, 15 bp, Homo sapiens
aagaagtgcaagaaa

SEQ ID NO: 135662 - DNA, 15 bp, Homo sapiens
gaagaagtgcaagaa

SEQ ID NO: 135663 - DNA, 15 bp, Homo sapiens
agaagaagtgcaaga

SEQ ID NO: 135664 - DNA, 15 bp, Homo sapiens
cagaagaagtgcaag

SEQ ID NO: 135665 - DNA, 15 bp, Homo sapiens
acagaagaagtgcaa

SEQ ID NO: 135666 - DNA, 15 bp, Homo sapiens
aacagaagaagtgca

SEQ ID NO: 135667 - DNA, 15 bp, Homo sapiens
gaacagaagaagtgc

SEQ ID NO: 135668 - DNA, 15 bp, Homo sapiens
agaacagaagaagtg

SEQ ID NO: 135669 - DNA, 15 bp, Homo sapiens
gagaacagaagaagt

SEQ ID NO: 135670 - DNA, 15 bp, Homo sapiens
tgagaacagaagaag

SEQ ID NO: 135671 - DNA, 15 bp, Homo sapiens
atgagaacagaagaa

SEQ ID NO: 135672 - DNA, 15 bp, Homo sapiens
gatgagaacagaaga

SEQ ID NO: 135673 - DNA, 15 bp, Homo sapiens
agatgagaacagaag

SEQ ID NO: 135674 - DNA, 15 bp, Homo sapiens
gagatgagaacagaa

SEQ ID NO: 135675 - DNA, 15 bp, Homo sapiens
ggagatgagaacaga

SEQ ID NO: 135676 - DNA, 15 bp, Homo sapiens
tggagatgagaacag

SEQ ID NO: 135677 - DNA, 15 bp, Homo sapiens
atggagatgagaaca

SEQ ID NO: 135678 - DNA, 15 bp, Homo sapiens
aatggagatgagaac

SEQ ID NO: 135679 - DNA, 15 bp, Homo sapiens
aaatggagatgagaa

SEQ ID NO: 135680 - DNA, 15 bp, Homo sapiens
gaaatggagatgaga

SEQ ID NO: 135681 - DNA, 15 bp, Homo sapiens
agaaatggagatgag

SEQ ID NO: 135682 - DNA, 15 bp, Homo sapiens
gagaaatggagatga

SEQ ID NO: 135683 - DNA, 15 bp, Homo sapiens
agagaaatggagatg

SEQ ID NO: 135684 - DNA, 15 bp, Homo sapiens
aagagaaatggagat

SEQ ID NO: 135685 - DNA, 15 bp, Homo sapiens
aaagagaaatggaga

SEQ ID NO: 135686 - DNA, 15 bp, Homo sapiens
aaaagagaaatggag

SEQ ID NO: 135687 - DNA, 15 bp, Homo sapiens
aaaaagagaaatgga

SEQ ID NO: 135688 - DNA, 15 bp, Homo sapiens
taaaaagagaaatgg

SEQ ID NO: 135689 - DNA, 15 bp, Homo sapiens
ttaaaaagagaaatg

SEQ ID NO: 135690 - DNA, 15 bp, Homo sapiens
gttaaaaagagaaat

SEQ ID NO: 135691 - DNA, 15 bp, Homo sapiens
tgttaaaaagagaaa

SEQ ID NO: 135692 - DNA, 15 bp, Homo sapiens
atgttaaaaagagaa

SEQ ID NO: 135693 - DNA, 15 bp, Homo sapiens
catgttaaaaagaga

SEQ ID NO: 135694 - DNA, 15 bp, Homo sapiens
acatgttaaaaagag

SEQ ID NO: 135695 - DNA, 15 bp, Homo sapiens
cacatgttaaaaaga

SEQ ID NO: 135696 - DNA, 15 bp, Homo sapiens
ccacatgttaaaaag

SEQ ID NO: 135697 - DNA, 15 bp, Homo sapiens
tccacatgttaaaaa

SEQ ID NO: 135698 - DNA, 15 bp, Homo sapiens
ttccacatgttaaaa

SEQ ID NO: 135699 - DNA, 15 bp, Homo sapiens
attccacatgttaaa

SEQ ID NO: 135700 - DNA, 15 bp, Homo sapiens
aattccacatgttaa

SEQ ID NO: 135701 - DNA, 15 bp, Homo sapiens
aaattccacatgtta

SEQ ID NO: 135702 - DNA, 15 bp, Homo sapiens
taaattccacatgtt

SEQ ID NO: 135703 - DNA, 15 bp, Homo sapiens
gtaaattccacatgt

SEQ ID NO: 135704 - DNA, 15 bp, Homo sapiens
tgtaaattccacatg

SEQ ID NO: 135705 - DNA, 15 bp, Homo sapiens
gtgtaaattccacat

SEQ ID NO: 135706 - DNA, 15 bp, Homo sapiens
agtgtaaattccaca

SEQ ID NO: 135707 - DNA, 15 bp, Homo sapiens
aagtgtaaattccac

SEQ ID NO: 135708 - DNA, 15 bp, Homo sapiens
gaagtgtaaattcca

SEQ ID NO: 135709 - DNA, 15 bp, Homo sapiens
tgaagtgtaaattcc

SEQ ID NO: 135710 - DNA, 15 bp, Homo sapiens
ctgaagtgtaaattc

SEQ ID NO: 135711 - DNA, 15 bp, Homo sapiens
cctgaagtgtaaatt

SEQ ID NO: 135712 - DNA, 15 bp, Homo sapiens
acctgaagtgtaaat

SEQ ID NO: 135713 - DNA, 15 bp, Homo sapiens
aacctgaagtgtaaa

SEQ ID NO: 135714 - DNA, 15 bp, Homo sapiens
aaacctgaagtgtaa

SEQ ID NO: 135715 - DNA, 15 bp, Homo sapiens
taaacctgaagtgta

SEQ ID NO: 135716 - DNA, 15 bp, Homo sapiens
ttaaacctgaagtgt

SEQ ID NO: 135717 - DNA, 15 bp, Homo sapiens
tttaaacctgaagtg

SEQ ID NO: 135718 - DNA, 15 bp, Homo sapiens
atttaaacctgaagt

SEQ ID NO: 135719 - DNA, 15 bp, Homo sapiens
aatttaaacctgaag

SEQ ID NO: 135720 - DNA, 15 bp, Homo sapiens
aaatttaaacctgaa

SEQ ID NO: 135721 - DNA, 15 bp, Homo sapiens
gaaatttaaacctga

SEQ ID NO: 135722 - DNA, 15 bp, Homo sapiens
agaaatttaaacctg

SEQ ID NO: 135723 - DNA, 15 bp, Homo sapiens
aagaaatttaaacct

SEQ ID NO: 135724 - DNA, 15 bp, Homo sapiens
caagaaatttaaacc

SEQ ID NO: 135725 - DNA, 15 bp, Homo sapiens
acaagaaatttaaac

SEQ ID NO: 135726 - DNA, 15 bp, Homo sapiens
gacaagaaatttaaa

SEQ ID NO: 135727 - DNA, 15 bp, Homo sapiens
tgacaagaaatttaa

SEQ ID NO: 135728 - DNA, 15 bp, Homo sapiens
ctgacaagaaattta

SEQ ID NO: 135729 - DNA, 15 bp, Homo sapiens
cctgacaagaaattt

SEQ ID NO: 135730 - DNA, 15 bp, Homo sapiens
gcctgacaagaaatt

SEQ ID NO: 135731 - DNA, 15 bp, Homo sapiens
ggcctgacaagaaat

SEQ ID NO: 135732 - DNA, 15 bp, Homo sapiens
tggcctgacaagaaa

SEQ ID NO: 135733 - DNA, 15 bp, Homo sapiens
ttggcctgacaagaa

SEQ ID NO: 135734 - DNA, 15 bp, Homo sapiens
attggcctgacaaga

SEQ ID NO: 135735 - DNA, 15 bp, Homo sapiens
aattggcctgacaag

SEQ ID NO: 135736 - DNA, 15 bp, Homo sapiens
taattggcctgacaa

SEQ ID NO: 135737 - DNA, 15 bp, Homo sapiens
gtaattggcctgaca

SEQ ID NO: 135738 - DNA, 15 bp, Homo sapiens
tgtaattggcctgac

SEQ ID NO: 135739 - DNA, 15 bp, Homo sapiens
ctgtaattggcctga

SEQ ID NO: 135740 - DNA, 15 bp, Homo sapiens
tctgtaattggcctg

SEQ ID NO: 135741 - DNA, 15 bp, Homo sapiens
atctgtaattggcct

SEQ ID NO: 135742 - DNA, 15 bp, Homo sapiens
aatctgtaattggcc

SEQ ID NO: 135743 - DNA, 15 bp, Homo sapiens
taatctgtaattggc

SEQ ID NO: 135744 - DNA, 15 bp, Homo sapiens
gtaatctgtaattgg

SEQ ID NO: 135745 - DNA, 15 bp, Homo sapiens
tgtaatctgtaattg

SEQ ID NO: 135746 - DNA, 15 bp, Homo sapiens
ctgtaatctgtaatt

SEQ ID NO: 135747 - DNA, 15 bp, Homo sapiens
actgtaatctgtaat

SEQ ID NO: 135748 - DNA, 15 bp, Homo sapiens
tactgtaatctgtaa

SEQ ID NO: 135749 - DNA, 15 bp, Homo sapiens
ctactgtaatctgta

SEQ ID NO: 135750 - DNA, 15 bp, Homo sapiens
cctactgtaatctgt

SEQ ID NO: 135751 - DNA, 15 bp, Homo sapiens
tcctactgtaatctg

SEQ ID NO: 135752 - DNA, 15 bp, Homo sapiens
atcctactgtaatct

SEQ ID NO: 135753 - DNA, 15 bp, Homo sapiens
tatcctactgtaatc

SEQ ID NO: 135754 - DNA, 15 bp, Homo sapiens
atatcctactgtaat

SEQ ID NO: 135755 - DNA, 15 bp, Homo sapiens
catatcctactgtaa

SEQ ID NO: 135756 - DNA, 15 bp, Homo sapiens
ccatatcctactgta

SEQ ID NO: 135757 - DNA, 15 bp, Homo sapiens
accatatcctactgt

SEQ ID NO: 135758 - DNA, 15 bp, Homo sapiens
gaccatatcctactg

SEQ ID NO: 135759 - DNA, 15 bp, Homo sapiens
agaccatatcctact

SEQ ID NO: 135760 - DNA, 15 bp, Homo sapiens
cagaccatatcctac

SEQ ID NO: 135761 - DNA, 15 bp, Homo sapiens
acagaccatatccta

SEQ ID NO: 135762 - DNA, 15 bp, Homo sapiens
cacagaccatatcct

SEQ ID NO: 135763 - DNA, 15 bp, Homo sapiens
acacagaccatatcc

SEQ ID NO: 135764 - DNA, 15 bp, Homo sapiens
tacacagaccatatc

SEQ ID NO: 135765 - DNA, 15 bp, Homo sapiens
atacacagaccatat

SEQ ID NO: 135766 - DNA, 15 bp, Homo sapiens
tatacacagaccata

SEQ ID NO: 135767 - DNA, 15 bp, Homo sapiens
atatacacagaccat

SEQ ID NO: 135768 - DNA, 15 bp, Homo sapiens
tatatacacagacca

SEQ ID NO: 135769 - DNA, 15 bp, Homo sapiens
ttatatacacagacc

SEQ ID NO: 135770 - DNA, 15 bp, Homo sapiens
gttatatacacagac

SEQ ID NO: 135771 - DNA, 15 bp, Homo sapiens
tgttatatacacaga

SEQ ID NO: 135772 - DNA, 15 bp, Homo sapiens
ttgttatatacacag

SEQ ID NO: 135773 - DNA, 15 bp, Homo sapiens
gttgttatatacaca

SEQ ID NO: 135774 - DNA, 15 bp, Homo sapiens
agttgttatatacac

SEQ ID NO: 135775 - DNA, 15 bp, Homo sapiens
tagttgttatataca

SEQ ID NO: 135776 - DNA, 15 bp, Homo sapiens
atagttgttatatac

SEQ ID NO: 135777 - DNA, 15 bp, Homo sapiens
tatagttgttatata

SEQ ID NO: 135778 - DNA, 15 bp, Homo sapiens
ttatagttgttatat

SEQ ID NO: 135779 - DNA, 15 bp, Homo sapiens
gttatagttgttata

SEQ ID NO: 135780 - DNA, 15 bp, Homo sapiens
agttatagttgttat

SEQ ID NO: 135781 - DNA, 15 bp, Homo sapiens
aagttatagttgtta

SEQ ID NO: 135782 - DNA, 15 bp, Homo sapiens
caagttatagttgtt

SEQ ID NO: 135783 - DNA, 15 bp, Homo sapiens
acaagttatagttgt

SEQ ID NO: 135784 - DNA, 15 bp, Homo sapiens
aacaagttatagttg

SEQ ID NO: 135785 - DNA, 15 bp, Homo sapiens
aaacaagttatagtt

SEQ ID NO: 135786 - DNA, 15 bp, Homo sapiens
aaaacaagttatagt

SEQ ID NO: 135787 - DNA, 15 bp, Homo sapiens
taaaacaagttatag

SEQ ID NO: 135788 - DNA, 15 bp, Homo sapiens
ctaaaacaagttata

SEQ ID NO: 135789 - DNA, 15 bp, Homo sapiens
tctaaaacaagttat

SEQ ID NO: 135790 - DNA, 15 bp, Homo sapiens
atctaaaacaagtta

SEQ ID NO: 135791 - DNA, 15 bp, Homo sapiens
gatctaaaacaagtt

SEQ ID NO: 135792 - DNA, 15 bp, Homo sapiens
tgatctaaaacaagt

SEQ ID NO: 135793 - DNA, 15 bp, Homo sapiens
ctgatctaaaacaag

SEQ ID NO: 135794 - DNA, 15 bp, Homo sapiens
tctgatctaaaacaa

SEQ ID NO: 135795 - DNA, 15 bp, Homo sapiens
ctctgatctaaaaca

SEQ ID NO: 135796 - DNA, 15 bp, Homo sapiens
actctgatctaaaac

SEQ ID NO: 135797 - DNA, 15 bp, Homo sapiens
aactctgatctaaaa

SEQ ID NO: 135798 - DNA, 15 bp, Homo sapiens
caactctgatctaaa

SEQ ID NO: 135799 - DNA, 15 bp, Homo sapiens
tcaactctgatctaa

SEQ ID NO: 135800 - DNA, 15 bp, Homo sapiens
gtcaactctgatcta

SEQ ID NO: 135801 - DNA, 15 bp, Homo sapiens
agtcaactctgatct

SEQ ID NO: 135802 - DNA, 15 bp, Homo sapiens
cagtcaactctgatc

SEQ ID NO: 135803 - DNA, 15 bp, Homo sapiens
gcagtcaactctgat

SEQ ID NO: 135804 - DNA, 15 bp, Homo sapiens
tgcagtcaactctga

SEQ ID NO: 135805 - DNA, 15 bp, Homo sapiens
ttgcagtcaactctg

SEQ ID NO: 135806 - DNA, 15 bp, Homo sapiens
attgcagtcaactct

SEQ ID NO: 135807 - DNA, 15 bp, Homo sapiens
tattgcagtcaactc

SEQ ID NO: 135808 - DNA, 15 bp, Homo sapiens
ttattgcagtcaact

SEQ ID NO: 135809 - DNA, 15 bp, Homo sapiens
attattgcagtcaac

SEQ ID NO: 135810 - DNA, 15 bp, Homo sapiens
cattattgcagtcaa

SEQ ID NO: 135811 - DNA, 15 bp, Homo sapiens
tcattattgcagtca

SEQ ID NO: 135812 - DNA, 15 bp, Homo sapiens
ttcattattgcagtc

SEQ ID NO: 135813 - DNA, 15 bp, Homo sapiens
tttcattattgcagt

SEQ ID NO: 135814 - DNA, 15 bp, Homo sapiens
ctttcattattgcag

SEQ ID NO: 135815 - DNA, 15 bp, Homo sapiens
cctttcattattgca

SEQ ID NO: 135816 - DNA, 15 bp, Homo sapiens
tcctttcattattgc

SEQ ID NO: 135817 - DNA, 15 bp, Homo sapiens
ctcctttcattattg

SEQ ID NO: 135818 - DNA, 15 bp, Homo sapiens
actcctttcattatt

SEQ ID NO: 135819 - DNA, 15 bp, Homo sapiens
cactcctttcattat

SEQ ID NO: 135820 - DNA, 15 bp, Homo sapiens
acactcctttcatta

SEQ ID NO: 135821 - DNA, 15 bp, Homo sapiens
gacactcctttcatt

SEQ ID NO: 135822 - DNA, 15 bp, Homo sapiens
ggacactcctttcat

SEQ ID NO: 135823 - DNA, 15 bp, Homo sapiens
tggacactcctttca

SEQ ID NO: 135824 - DNA, 15 bp, Homo sapiens
gtggacactcctttc

SEQ ID NO: 135825 - DNA, 15 bp, Homo sapiens
tgtggacactccttt

SEQ ID NO: 135826 - DNA, 15 bp, Homo sapiens
gtgtggacactcctt

SEQ ID NO: 135827 - DNA, 15 bp, Homo sapiens
agtgtggacactcct

SEQ ID NO: 135828 - DNA, 15 bp, Homo sapiens
tagtgtggacactcc

SEQ ID NO: 135829 - DNA, 15 bp, Homo sapiens
ttagtgtggacactc

SEQ ID NO: 135830 - DNA, 15 bp, Homo sapiens
tttagtgtggacact

SEQ ID NO: 135831 - DNA, 15 bp, Homo sapiens
ttttagtgtggacac

SEQ ID NO: 135832 - DNA, 15 bp, Homo sapiens
gttttagtgtggaca

SEQ ID NO: 135833 - DNA, 15 bp, Homo sapiens
tgttttagtgtggac

SEQ ID NO: 135834 - DNA, 15 bp, Homo sapiens
atgttttagtgtgga

SEQ ID NO: 135835 - DNA, 15 bp, Homo sapiens
aatgttttagtgtgg

SEQ ID NO: 135836 - DNA, 15 bp, Homo sapiens
taatgttttagtgtg

SEQ ID NO: 135837 - DNA, 15 bp, Homo sapiens
gtaatgttttagtgt

SEQ ID NO: 135838 - DNA, 15 bp, Homo sapiens
tgtaatgttttagtg

SEQ ID NO: 135839 - DNA, 15 bp, Homo sapiens
ctgtaatgttttagt

SEQ ID NO: 135840 - DNA, 15 bp, Homo sapiens
tctgtaatgttttag

SEQ ID NO: 135841 - DNA, 15 bp, Homo sapiens
ttctgtaatgtttta

SEQ ID NO: 135842 - DNA, 15 bp, Homo sapiens
attctgtaatgtttt

SEQ ID NO: 135843 - DNA, 15 bp, Homo sapiens
tattctgtaatgttt

SEQ ID NO: 135844 - DNA, 15 bp, Homo sapiens
gtattctgtaatgtt

SEQ ID NO: 135845 - DNA, 15 bp, Homo sapiens
ggtattctgtaatgt

SEQ ID NO: 135846 - DNA, 15 bp, Homo sapiens
aggtattctgtaatg

SEQ ID NO: 135847 - DNA, 15 bp, Homo sapiens
gaggtattctgtaat

SEQ ID NO: 135848 - DNA, 15 bp, Homo sapiens
ggaggtattctgtaa

SEQ ID NO: 135849 - DNA, 15 bp, Homo sapiens
tggaggtattctgta

SEQ ID NO: 135850 - DNA, 15 bp, Homo sapiens
ctggaggtattctgt

SEQ ID NO: 135851 - DNA, 15 bp, Homo sapiens
actggaggtattctg

SEQ ID NO: 135852 - DNA, 15 bp, Homo sapiens
cactggaggtattct

SEQ ID NO: 135853 - DNA, 15 bp, Homo sapiens
tcactggaggtattc

SEQ ID NO: 135854 - DNA, 15 bp, Homo sapiens
ttcactggaggtatt

SEQ ID NO: 135855 - DNA, 15 bp, Homo sapiens
cttcactggaggtat

SEQ ID NO: 135856 - DNA, 15 bp, Homo sapiens
ccttcactggaggta

SEQ ID NO: 135857 - DNA, 15 bp, Homo sapiens
accttcactggaggt

SEQ ID NO: 135858 - DNA, 15 bp, Homo sapiens
taccttcactggagg

SEQ ID NO: 135859 - DNA, 15 bp, Homo sapiens
ctaccttcactggag

SEQ ID NO: 135860 - DNA, 15 bp, Homo sapiens
actaccttcactgga

SEQ ID NO: 135861 - DNA, 15 bp, Homo sapiens
gactaccttcactgg

SEQ ID NO: 135862 - DNA, 15 bp, Homo sapiens
cgactaccttcactg

SEQ ID NO: 135863 - DNA, 15 bp, Homo sapiens
ccgactaccttcact

SEQ ID NO: 135864 - DNA, 15 bp, Homo sapiens
gccgactaccttcac

SEQ ID NO: 135865 - DNA, 15 bp, Homo sapiens
agccgactaccttca

SEQ ID NO: 135866 - DNA, 15 bp, Homo sapiens
cagccgactaccttc

SEQ ID NO: 135867 - DNA, 15 bp, Homo sapiens
gcagccgactacctt

SEQ ID NO: 135868 - DNA, 15 bp, Homo sapiens
cgcagccgactacct

SEQ ID NO: 135869 - DNA, 15 bp, Homo sapiens
gcgcagccgactacc

SEQ ID NO: 135870 - DNA, 15 bp, Homo sapiens
tgcgcagccgactac

SEQ ID NO: 135871 - DNA, 15 bp, Homo sapiens
gtgcgcagccgacta

SEQ ID NO: 135872 - DNA, 15 bp, Homo sapiens
cgtgcgcagccgact

SEQ ID NO: 135873 - DNA, 15 bp, Homo sapiens
ccgtgcgcagccgac

SEQ ID NO: 135874 - DNA, 15 bp, Homo sapiens
cccgtgcgcagccga

SEQ ID NO: 135875 - DNA, 15 bp, Homo sapiens
acccgtgcgcagccg

SEQ ID NO: 135876 - DNA, 15 bp, Homo sapiens
tacccgtgcgcagcc

SEQ ID NO: 135877 - DNA, 15 bp, Homo sapiens
ttacccgtgcgcagc

SEQ ID NO: 135878 - DNA, 15 bp, Homo sapiens
tttacccgtgcgcag

SEQ ID NO: 135879 - DNA, 15 bp, Homo sapiens
ctttacccgtgcgca

SEQ ID NO: 135880 - DNA, 15 bp, Homo sapiens
tctttacccgtgcgc

SEQ ID NO: 135881 - DNA, 15 bp, Homo sapiens
atctttacccgtgcg

SEQ ID NO: 135882 - DNA, 15 bp, Homo sapiens
gatctttacccgtgc

SEQ ID NO: 135883 - DNA, 15 bp, Homo sapiens
cgatctttacccgtg

SEQ ID NO: 135884 - DNA, 15 bp, Homo sapiens
acgatctttacccgt

SEQ ID NO: 135885 - DNA, 15 bp, Homo sapiens
tacgatctttacccg

SEQ ID NO: 135886 - DNA, 15 bp, Homo sapiens
ttacgatctttaccc

SEQ ID NO: 135887 - DNA, 15 bp, Homo sapiens
gttacgatctttacc

SEQ ID NO: 135888 - DNA, 15 bp, Homo sapiens
ggttacgatctttac

SEQ ID NO: 135889 - DNA, 15 bp, Homo sapiens
tggttacgatcttta

SEQ ID NO: 135890 - DNA, 15 bp, Homo sapiens
ctggttacgatcttt

SEQ ID NO: 135891 - DNA, 15 bp, Homo sapiens
tctggttacgatctt

SEQ ID NO: 135892 - DNA, 15 bp, Homo sapiens
ttctggttacgatct

SEQ ID NO: 135893 - DNA, 15 bp, Homo sapiens
cttctggttacgatc

SEQ ID NO: 135894 - DNA, 15 bp, Homo sapiens
tcttctggttacgat

SEQ ID NO: 135895 - DNA, 15 bp, Homo sapiens
ttcttctggttacga

SEQ ID NO: 135896 - DNA, 15 bp, Homo sapiens
tttcttctggttacg

SEQ ID NO: 135897 - DNA, 15 bp, Homo sapiens
ctttcttctggttac

SEQ ID NO: 135898 - DNA, 15 bp, Homo sapiens
tctttcttctggtta

SEQ ID NO: 135899 - DNA, 15 bp, Homo sapiens
ctctttcttctggtt

SEQ ID NO: 135900 - DNA, 15 bp, Homo sapiens
tctctttcttctggt

SEQ ID NO: 135901 - DNA, 15 bp, Homo sapiens
ttctctttcttctgg

SEQ ID NO: 135902 - DNA, 15 bp, Homo sapiens
cttctctttcttctg

SEQ ID NO: 135903 - DNA, 15 bp, Homo sapiens
gcttctctttcttct

SEQ ID NO: 135904 - DNA, 15 bp, Homo sapiens
ggcttctctttcttc

SEQ ID NO: 135905 - DNA, 15 bp, Homo sapiens
tggcttctctttctt

SEQ ID NO: 135906 - DNA, 15 bp, Homo sapiens
ctggcttctctttct

SEQ ID NO: 135907 - DNA, 15 bp, Homo sapiens
tctggcttctctttc

SEQ ID NO: 135908 - DNA, 15 bp, Homo sapiens
gtctggcttctcttt

SEQ ID NO: 135909 - DNA, 15 bp, Homo sapiens
tgtctggcttctctt

SEQ ID NO: 135910 - DNA, 15 bp, Homo sapiens
ctgtctggcttctct

SEQ ID NO: 135911 - DNA, 15 bp, Homo sapiens
gctgtctggcttctc

SEQ ID NO: 135912 - DNA, 15 bp, Homo sapiens
cgctgtctggcttct

SEQ ID NO: 135913 - DNA, 15 bp, Homo sapiens
acgctgtctggcttc

SEQ ID NO: 135914 - DNA, 15 bp, Homo sapiens
cacgctgtctggctt

SEQ ID NO: 135915 - DNA, 15 bp, Homo sapiens
ccacgctgtctggct

SEQ ID NO: 135916 - DNA, 15 bp, Homo sapiens
tccacgctgtctggc

SEQ ID NO: 135917 - DNA, 15 bp, Homo sapiens
atccacgctgtctgg

SEQ ID NO: 135918 - DNA, 15 bp, Homo sapiens
catccacgctgtctg

SEQ ID NO: 135919 - DNA, 15 bp, Homo sapiens
ccatccacgctgtct

SEQ ID NO: 135920 - DNA, 15 bp, Homo sapiens
accatccacgctgtc

SEQ ID NO: 135921 - DNA, 15 bp, Homo sapiens
gaccatccacgctgt

SEQ ID NO: 135922 - DNA, 15 bp, Homo sapiens
tgaccatccacgctg

SEQ ID NO: 135923 - DNA, 15 bp, Homo sapiens
ctgaccatccacgct

SEQ ID NO: 135924 - DNA, 15 bp, Homo sapiens
gctgaccatccacgc

SEQ ID NO: 135925 - DNA, 15 bp, Homo sapiens
tgctgaccatccacg

SEQ ID NO: 135926 - DNA, 15 bp, Homo sapiens
ttgctgaccatccac

SEQ ID NO: 135927 - DNA, 15 bp, Homo sapiens
gttgctgaccatcca

SEQ ID NO: 135928 - DNA, 15 bp, Homo sapiens
ggttgctgaccatcc

SEQ ID NO: 135929 - DNA, 15 bp, Homo sapiens
tggttgctgaccatc

SEQ ID NO: 135930 - DNA, 15 bp, Homo sapiens
gtggttgctgaccat

SEQ ID NO: 135931 - DNA, 15 bp, Homo sapiens
agtggttgctgacca

SEQ ID NO: 135932 - DNA, 15 bp, Homo sapiens
gagtggttgctgacc

SEQ ID NO: 135933 - DNA, 15 bp, Homo sapiens
cgagtggttgctgac

SEQ ID NO: 135934 - DNA, 15 bp, Homo sapiens
acgagtggttgctga

SEQ ID NO: 135935 - DNA, 15 bp, Homo sapiens
cacgagtggttgctg

SEQ ID NO: 135936 - DNA, 15 bp, Homo sapiens
tcacgagtggttgct

SEQ ID NO: 135937 - DNA, 15 bp, Homo sapiens
ttcacgagtggttgc

SEQ ID NO: 135938 - DNA, 15 bp, Homo sapiens
attcacgagtggttg

SEQ ID NO: 135939 - DNA, 15 bp, Homo sapiens
cattcacgagtggtt

SEQ ID NO: 135940 - DNA, 15 bp, Homo sapiens
ccattcacgagtggt

SEQ ID NO: 135941 - DNA, 15 bp, Homo sapiens
tccattcacgagtgg

SEQ ID NO: 135942 - DNA, 15 bp, Homo sapiens
ctccattcacgagtg

SEQ ID NO: 135943 - DNA, 15 bp, Homo sapiens
actccattcacgagt

SEQ ID NO: 135944 - DNA, 15 bp, Homo sapiens
tactccattcacgag

SEQ ID NO: 135945 - DNA, 15 bp, Homo sapiens
gtactccattcacga

SEQ ID NO: 135946 - DNA, 15 bp, Homo sapiens
ggtactccattcacg

SEQ ID NO: 135947 - DNA, 15 bp, Homo sapiens
gggtactccattcac

SEQ ID NO: 135948 - DNA, 15 bp, Homo sapiens
agggtactccattca

SEQ ID NO: 135949 - DNA, 15 bp, Homo sapiens
tagggtactccattc

SEQ ID NO: 135950 - DNA, 15 bp, Homo sapiens
ttagggtactccatt

SEQ ID NO: 135951 - DNA, 15 bp, Homo sapiens
tttagggtactccat

SEQ ID NO: 135952 - DNA, 15 bp, Homo sapiens
gtttagggtactcca

SEQ ID NO: 135953 - DNA, 15 bp, Homo sapiens
agtttagggtactcc

SEQ ID NO: 135954 - DNA, 15 bp, Homo sapiens
cagtttagggtactc

SEQ ID NO: 135955 - DNA, 15 bp, Homo sapiens
gcagtttagggtact

SEQ ID NO: 135956 - DNA, 15 bp, Homo sapiens
tgcagtttagggtac

SEQ ID NO: 135957 - DNA, 15 bp, Homo sapiens
atgcagtttagggta

SEQ ID NO: 135958 - DNA, 15 bp, Homo sapiens
tatgcagtttagggt

SEQ ID NO: 135959 - DNA, 15 bp, Homo sapiens
ttatgcagtttaggg

SEQ ID NO: 135960 - DNA, 15 bp, Homo sapiens
attatgcagtttagg

SEQ ID NO: 135961 - DNA, 15 bp, Homo sapiens
aattatgcagtttag

SEQ ID NO: 135962 - DNA, 15 bp, Homo sapiens
gaattatgcagttta

SEQ ID NO: 135963 - DNA, 15 bp, Homo sapiens
agaattatgcagttt

SEQ ID NO: 135964 - DNA, 15 bp, Homo sapiens
cagaattatgcagtt

SEQ ID NO: 135965 - DNA, 15 bp, Homo sapiens
tcagaattatgcagt

SEQ ID NO: 135966 - DNA, 15 bp, Homo sapiens
ttcagaattatgcag

SEQ ID NO: 135967 - DNA, 15 bp, Homo sapiens
cttcagaattatgca

SEQ ID NO: 135968 - DNA, 15 bp, Homo sapiens
acttcagaattatgc

SEQ ID NO: 135969 - DNA, 15 bp, Homo sapiens
aacttcagaattatg

SEQ ID NO: 135970 - DNA, 15 bp, Homo sapiens
taacttcagaattat

SEQ ID NO: 135971 - DNA, 15 bp, Homo sapiens
ataacttcagaatta

SEQ ID NO: 135972 - DNA, 15 bp, Homo sapiens
tataacttcagaatt

SEQ ID NO: 135973 - DNA, 15 bp, Homo sapiens
atataacttcagaat

SEQ ID NO: 135974 - DNA, 15 bp, Homo sapiens
aatataacttcagaa

SEQ ID NO: 135975 - DNA, 15 bp, Homo sapiens
aaatataacttcaga

SEQ ID NO: 135976 - DNA, 15 bp, Homo sapiens
gaaatataacttcag

SEQ ID NO: 135977 - DNA, 15 bp, Homo sapiens
ggaaatataacttca

SEQ ID NO: 135978 - DNA, 15 bp, Homo sapiens
aggaaatataacttc

SEQ ID NO: 135979 - DNA, 15 bp, Homo sapiens
taggaaatataactt

SEQ ID NO: 135980 - DNA, 15 bp, Homo sapiens
ataggaaatataact

SEQ ID NO: 135981 - DNA, 15 bp, Homo sapiens
tataggaaatataac

SEQ ID NO: 135982 - DNA, 15 bp, Homo sapiens
gtataggaaatataa

SEQ ID NO: 135983 - DNA, 15 bp, Homo sapiens
ggtataggaaatata

SEQ ID NO: 135984 - DNA, 15 bp, Homo sapiens
tggtataggaaatat

SEQ ID NO: 135985 - DNA, 15 bp, Homo sapiens
atggtataggaaata

SEQ ID NO: 135986 - DNA, 15 bp, Homo sapiens
aatggtataggaaat

SEQ ID NO: 135987 - DNA, 15 bp, Homo sapiens
aaatggtataggaaa

SEQ ID NO: 135988 - DNA, 15 bp, Homo sapiens
gaaatggtataggaa

SEQ ID NO: 135989 - DNA, 15 bp, Homo sapiens
ggaaatggtatagga

SEQ ID NO: 135990 - DNA, 15 bp, Homo sapiens
cggaaatggtatagg

SEQ ID NO: 135991 - DNA, 15 bp, Homo sapiens
acggaaatggtatag

SEQ ID NO: 135992 - DNA, 15 bp, Homo sapiens
tacggaaatggtata

SEQ ID NO: 135993 - DNA, 15 bp, Homo sapiens
ttacggaaatggtat

SEQ ID NO: 135994 - DNA, 15 bp, Homo sapiens
attacggaaatggta

SEQ ID NO: 135995 - DNA, 15 bp, Homo sapiens
aattacggaaatggt

SEQ ID NO: 135996 - DNA, 15 bp, Homo sapiens
gaattacggaaatgg

SEQ ID NO: 135997 - DNA, 15 bp, Homo sapiens
agaattacggaaatg

SEQ ID NO: 135998 - DNA, 15 bp, Homo sapiens
aagaattacggaaat

SEQ ID NO: 135999 - DNA, 15 bp, Homo sapiens
taagaattacggaaa

SEQ ID NO: 136000 - DNA, 15 bp, Homo sapiens
ataagaattacggaa

SEQ ID NO: 136001 - DNA, 15 bp, Homo sapiens
aataagaattacgga

SEQ ID NO: 136002 - DNA, 15 bp, Homo sapiens
gaataagaattacgg

SEQ ID NO: 136003 - DNA, 15 bp, Homo sapiens
ggaataagaattacg

SEQ ID NO: 136004 - DNA, 15 bp, Homo sapiens
tggaataagaattac

SEQ ID NO: 136005 - DNA, 15 bp, Homo sapiens
atggaataagaatta

SEQ ID NO: 136006 - DNA, 15 bp, Homo sapiens
tatggaataagaatt

SEQ ID NO: 136007 - DNA, 15 bp, Homo sapiens
atatggaataagaat

SEQ ID NO: 136008 - DNA, 15 bp, Homo sapiens
aatatggaataagaa

SEQ ID NO: 136009 - DNA, 15 bp, Homo sapiens
taatatggaataaga

SEQ ID NO: 136010 - DNA, 15 bp, Homo sapiens
ctaatatggaataag

SEQ ID NO: 136011 - DNA, 15 bp, Homo sapiens
tctaatatggaataa

SEQ ID NO: 136012 - DNA, 15 bp, Homo sapiens
ttctaatatggaata

SEQ ID NO: 136013 - DNA, 15 bp, Homo sapiens
tttctaatatggaat

SEQ ID NO: 136014 - DNA, 15 bp, Homo sapiens
ttttctaatatggaa

SEQ ID NO: 136015 - DNA, 15 bp, Homo sapiens
gttttctaatatgga

SEQ ID NO: 136016 - DNA, 15 bp, Homo sapiens
agttttctaatatgg

SEQ ID NO: 136017 - DNA, 15 bp, Homo sapiens
aagttttctaatatg

SEQ ID NO: 136018 - DNA, 15 bp, Homo sapiens
aaagttttctaatat

SEQ ID NO: 136019 - DNA, 15 bp, Homo sapiens
caaagttttctaata

SEQ ID NO: 136020 - DNA, 15 bp, Homo sapiens
acaaagttttctaat

SEQ ID NO: 136021 - DNA, 15 bp, Homo sapiens
aacaaagttttctaa

SEQ ID NO: 136022 - DNA, 15 bp, Homo sapiens
taacaaagttttcta

SEQ ID NO: 136023 - DNA, 15 bp, Homo sapiens
ctaacaaagttttct

SEQ ID NO: 136024 - DNA, 15 bp, Homo sapiens
cctaacaaagttttc

SEQ ID NO: 136025 - DNA, 15 bp, Homo sapiens
gcctaacaaagtttt

SEQ ID NO: 136026 - DNA, 15 bp, Homo sapiens
ggcctaacaaagttt

SEQ ID NO: 136027 - DNA, 15 bp, Homo sapiens
tggcctaacaaagtt

SEQ ID NO: 136028 - DNA, 15 bp, Homo sapiens
ttggcctaacaaagt

SEQ ID NO: 136029 - DNA, 15 bp, Homo sapiens
tttggcctaacaaag

SEQ ID NO: 136030 - DNA, 15 bp, Homo sapiens
ctttggcctaacaaa

SEQ ID NO: 136031 - DNA, 15 bp, Homo sapiens
tctttggcctaacaa

SEQ ID NO: 136032 - DNA, 15 bp, Homo sapiens
gtctttggcctaaca

SEQ ID NO: 136033 - DNA, 15 bp, Homo sapiens
tgtctttggcctaac

SEQ ID NO: 136034 - DNA, 15 bp, Homo sapiens
ttgtctttggcctaa

SEQ ID NO: 136035 - DNA, 15 bp, Homo sapiens
tttgtctttggccta

SEQ ID NO: 136036 - DNA, 15 bp, Homo sapiens
atttgtctttggcct

SEQ ID NO: 136037 - DNA, 15 bp, Homo sapiens
tatttgtctttggcc

SEQ ID NO: 136038 - DNA, 15 bp, Homo sapiens
ctatttgtctttggc

SEQ ID NO: 136039 - DNA, 15 bp, Homo sapiens
actatttgtctttgg

SEQ ID NO: 136040 - DNA, 15 bp, Homo sapiens
tactatttgtctttg

SEQ ID NO: 136041 - DNA, 15 bp, Homo sapiens
ctactatttgtcttt

SEQ ID NO: 136042 - DNA, 15 bp, Homo sapiens
cctactatttgtctt

SEQ ID NO: 136043 - DNA, 15 bp, Homo sapiens
gcctactatttgtct

SEQ ID NO: 136044 - DNA, 15 bp, Homo sapiens
tgcctactatttgtc

SEQ ID NO: 136045 - DNA, 15 bp, Homo sapiens
ttgcctactatttgt

SEQ ID NO: 136046 - DNA, 15 bp, Homo sapiens
cttgcctactatttg

SEQ ID NO: 136047 - DNA, 15 bp, Homo sapiens
tcttgcctactattt

SEQ ID NO: 136048 - DNA, 15 bp, Homo sapiens
atcttgcctactatt

SEQ ID NO: 136049 - DNA, 15 bp, Homo sapiens
catcttgcctactat

SEQ ID NO: 136050 - DNA, 15 bp, Homo sapiens
ccatcttgcctacta

SEQ ID NO: 136051 - DNA, 15 bp, Homo sapiens
gccatcttgcctact

SEQ ID NO: 136052 - DNA, 15 bp, Homo sapiens
tgccatcttgcctac

SEQ ID NO: 136053 - DNA, 15 bp, Homo sapiens
gtgccatcttgccta

SEQ ID NO: 136054 - DNA, 15 bp, Homo sapiens
tgtgccatcttgcct

SEQ ID NO: 136055 - DNA, 15 bp, Homo sapiens
ctgtgccatcttgcc

SEQ ID NO: 136056 - DNA, 15 bp, Homo sapiens
cctgtgccatcttgc

SEQ ID NO: 136057 - DNA, 15 bp, Homo sapiens
ccctgtgccatcttg

SEQ ID NO: 136058 - DNA, 15 bp, Homo sapiens
gccctgtgccatctt

SEQ ID NO: 136059 - DNA, 15 bp, Homo sapiens
tgccctgtgccatct

SEQ ID NO: 136060 - DNA, 15 bp, Homo sapiens
atgccctgtgccatc

SEQ ID NO: 136061 - DNA, 15 bp, Homo sapiens
catgccctgtgccat

SEQ ID NO: 136062 - DNA, 15 bp, Homo sapiens
tcatgccctgtgcca

SEQ ID NO: 136063 - DNA, 15 bp, Homo sapiens
ttcatgccctgtgcc

SEQ ID NO: 136064 - DNA, 15 bp, Homo sapiens
tttcatgccctgtgc

SEQ ID NO: 136065 - DNA, 15 bp, Homo sapiens
atttcatgccctgtg

SEQ ID NO: 136066 - DNA, 15 bp, Homo sapiens
catttcatgccctgt

SEQ ID NO: 136067 - DNA, 15 bp, Homo sapiens
tcatttcatgccctg

SEQ ID NO: 136068 - DNA, 15 bp, Homo sapiens
ttcatttcatgccct

SEQ ID NO: 136069 - DNA, 15 bp, Homo sapiens
gttcatttcatgccc

SEQ ID NO: 136070 - DNA, 15 bp, Homo sapiens
tgttcatttcatgcc

SEQ ID NO: 136071 - DNA, 15 bp, Homo sapiens
gtgttcatttcatgc

SEQ ID NO: 136072 - DNA, 15 bp, Homo sapiens
tgtgttcatttcatg

SEQ ID NO: 136073 - DNA, 15 bp, Homo sapiens
ttgtgttcatttcat

SEQ ID NO: 136074 - DNA, 15 bp, Homo sapiens
tttgtgttcatttca

SEQ ID NO: 136075 - DNA, 15 bp, Homo sapiens
atttgtgttcatttc

SEQ ID NO: 136076 - DNA, 15 bp, Homo sapiens
aatttgtgttcattt

SEQ ID NO: 136077 - DNA, 15 bp, Homo sapiens
taatttgtgttcatt

SEQ ID NO: 136078 - DNA, 15 bp, Homo sapiens
ataatttgtgttcat

SEQ ID NO: 136079 - DNA, 15 bp, Homo sapiens
cataatttgtgttca

SEQ ID NO: 136080 - DNA, 15 bp, Homo sapiens
gcataatttgtgttc

SEQ ID NO: 136081 - DNA, 15 bp, Homo sapiens
agcataatttgtgtt

SEQ ID NO: 136082 - DNA, 15 bp, Homo sapiens
tagcataatttgtgt

SEQ ID NO: 136083 - DNA, 15 bp, Homo sapiens
ttagcataatttgtg

SEQ ID NO: 136084 - DNA, 15 bp, Homo sapiens
cttagcataatttgt

SEQ ID NO: 136085 - DNA, 15 bp, Homo sapiens
tcttagcataatttg

SEQ ID NO: 136086 - DNA, 15 bp, Homo sapiens
ttcttagcataattt

SEQ ID NO: 136087 - DNA, 15 bp, Homo sapiens
attcttagcataatt

SEQ ID NO: 136088 - DNA, 15 bp, Homo sapiens
aattcttagcataat

SEQ ID NO: 136089 - DNA, 15 bp, Homo sapiens
aaattcttagcataa

SEQ ID NO: 136090 - DNA, 15 bp, Homo sapiens
aaaattcttagcata

SEQ ID NO: 136091 - DNA, 15 bp, Homo sapiens
aaaaattcttagcat

SEQ ID NO: 136092 - DNA, 15 bp, Homo sapiens
aaaaaattcttagca

SEQ ID NO: 136093 - DNA, 15 bp, Homo sapiens
taaaaaattcttagc

SEQ ID NO: 136094 - DNA, 15 bp, Homo sapiens
ataaaaaattcttag

SEQ ID NO: 136095 - DNA, 15 bp, Homo sapiens
aataaaaaattctta

SEQ ID NO: 136096 - DNA, 15 bp, Homo sapiens
aaataaaaaattctt

SEQ ID NO: 136097 - DNA, 15 bp, Homo sapiens
aaaataaaaaattct

SEQ ID NO: 136098 - DNA, 15 bp, Homo sapiens
aaaaataaaaaattc

SEQ ID NO: 136099 - DNA, 15 bp, Homo sapiens
aaaaaataaaaaatt

SEQ ID NO: 136100 - DNA, 15 bp, Homo sapiens
caaaaaataaaaaat

SEQ ID NO: 136101 - DNA, 15 bp, Homo sapiens
ccaaaaaataaaaaa

SEQ ID NO: 136102 - DNA, 15 bp, Homo sapiens
accaaaaaataaaaa

SEQ ID NO: 136103 - DNA, 15 bp, Homo sapiens
taccaaaaaataaaa

SEQ ID NO: 136104 - DNA, 15 bp, Homo sapiens
ataccaaaaaataaa

SEQ ID NO: 136105 - DNA, 15 bp, Homo sapiens
aataccaaaaaataa

SEQ ID NO: 136106 - DNA, 15 bp, Homo sapiens
caataccaaaaaata

SEQ ID NO: 136107 - DNA, 15 bp, Homo sapiens
ccaataccaaaaaat

SEQ ID NO: 136108 - DNA, 15 bp, Homo sapiens
gccaataccaaaaaa

SEQ ID NO: 136109 - DNA, 15 bp, Homo sapiens
ggccaataccaaaaa

SEQ ID NO: 136110 - DNA, 15 bp, Homo sapiens
tggccaataccaaaa

SEQ ID NO: 136111 - DNA, 15 bp, Homo sapiens
atggccaataccaaa

SEQ ID NO: 136112 - DNA, 15 bp, Homo sapiens
tatggccaataccaa

SEQ ID NO: 136113 - DNA, 15 bp, Homo sapiens
ttatggccaatacca

SEQ ID NO: 136114 - DNA, 15 bp, Homo sapiens
cttatggccaatacc

SEQ ID NO: 136115 - DNA, 15 bp, Homo sapiens
gcttatggccaatac

SEQ ID NO: 136116 - DNA, 15 bp, Homo sapiens
tgcttatggccaata

SEQ ID NO: 136117 - DNA, 15 bp, Homo sapiens
ttgcttatggccaat

SEQ ID NO: 136118 - DNA, 15 bp, Homo sapiens
gttgcttatggccaa

SEQ ID NO: 136119 - DNA, 15 bp, Homo sapiens
tgttgcttatggcca

SEQ ID NO: 136120 - DNA, 15 bp, Homo sapiens
ttgttgcttatggcc

SEQ ID NO: 136121 - DNA, 15 bp, Homo sapiens
attgttgcttatggc

SEQ ID NO: 136122 - DNA, 15 bp, Homo sapiens
aattgttgcttatgg

SEQ ID NO: 136123 - DNA, 15 bp, Homo sapiens
aaattgttgcttatg

SEQ ID NO: 136124 - DNA, 15 bp, Homo sapiens
aaaattgttgcttat

SEQ ID NO: 136125 - DNA, 15 bp, Homo sapiens
gaaaattgttgctta

SEQ ID NO: 136126 - DNA, 15 bp, Homo sapiens
tgaaaattgttgctt

SEQ ID NO: 136127 - DNA, 15 bp, Homo sapiens
ctgaaaattgttgct

SEQ ID NO: 136128 - DNA, 15 bp, Homo sapiens
tctgaaaattgttgc

SEQ ID NO: 136129 - DNA, 15 bp, Homo sapiens
atctgaaaattgttg

SEQ ID NO: 136130 - DNA, 15 bp, Homo sapiens
aatctgaaaattgtt

SEQ ID NO: 136131 - DNA, 15 bp, Homo sapiens
aaatctgaaaattgt

SEQ ID NO: 136132 - DNA, 15 bp, Homo sapiens
caaatctgaaaattg

SEQ ID NO: 136133 - DNA, 15 bp, Homo sapiens
gcaaatctgaaaatt

SEQ ID NO: 136134 - DNA, 15 bp, Homo sapiens
tgcaaatctgaaaat

SEQ ID NO: 136135 - DNA, 15 bp, Homo sapiens
gtgcaaatctgaaaa

SEQ ID NO: 136136 - DNA, 15 bp, Homo sapiens
tgtgcaaatctgaaa

SEQ ID NO: 136137 - DNA, 15 bp, Homo sapiens
ttgtgcaaatctgaa

SEQ ID NO: 136138 - DNA, 15 bp, Homo sapiens
tttgtgcaaatctga

SEQ ID NO: 136139 - DNA, 15 bp, Homo sapiens
ttttgtgcaaatctg

SEQ ID NO: 136140 - DNA, 15 bp, Homo sapiens
tttttgtgcaaatct

SEQ ID NO: 136141 - DNA, 15 bp, Homo sapiens
ctttttgtgcaaatc

SEQ ID NO: 136142 - DNA, 15 bp, Homo sapiens
tctttttgtgcaaat

SEQ ID NO: 136143 - DNA, 15 bp, Homo sapiens
atctttttgtgcaaa

SEQ ID NO: 136144 - DNA, 15 bp, Homo sapiens
tatctttttgtgcaa

SEQ ID NO: 136145 - DNA, 15 bp, Homo sapiens
gtatctttttgtgca

SEQ ID NO: 136146 - DNA, 15 bp, Homo sapiens
ggtatctttttgtgc

SEQ ID NO: 136147 - DNA, 15 bp, Homo sapiens
aggtatctttttgtg

SEQ ID NO: 136148 - DNA, 15 bp, Homo sapiens
aaggtatctttttgt

SEQ ID NO: 136149 - DNA, 15 bp, Homo sapiens
taaggtatctttttg

SEQ ID NO: 136150 - DNA, 15 bp, Homo sapiens
ttaaggtatcttttt

SEQ ID NO: 136151 - DNA, 15 bp, Homo sapiens
tttaaggtatctttt

SEQ ID NO: 136152 - DNA, 15 bp, Homo sapiens
ttttaaggtatcttt

SEQ ID NO: 136153 - DNA, 15 bp, Homo sapiens
attttaaggtatctt

SEQ ID NO: 136154 - DNA, 15 bp, Homo sapiens
aattttaaggtatct

SEQ ID NO: 136155 - DNA, 15 bp, Homo sapiens
aaattttaaggtatc

SEQ ID NO: 136156 - DNA, 15 bp, Homo sapiens
caaattttaaggtat

SEQ ID NO: 136157 - DNA, 15 bp, Homo sapiens
tcaaattttaaggta

SEQ ID NO: 136158 - DNA, 15 bp, Homo sapiens
ttcaaattttaaggt

SEQ ID NO: 136159 - DNA, 15 bp, Homo sapiens
tttcaaattttaagg

SEQ ID NO: 136160 - DNA, 15 bp, Homo sapiens
gtttcaaattttaag

SEQ ID NO: 136161 - DNA, 15 bp, Homo sapiens
tgtttcaaattttaa

SEQ ID NO: 136162 - DNA, 15 bp, Homo sapiens
atgtttcaaatttta

SEQ ID NO: 136163 - DNA, 15 bp, Homo sapiens
aatgtttcaaatttt

SEQ ID NO: 136164 - DNA, 15 bp, Homo sapiens
caatgtttcaaattt

SEQ ID NO: 136165 - DNA, 15 bp, Homo sapiens
gcaatgtttcaaatt

SEQ ID NO: 136166 - DNA, 15 bp, Homo sapiens
agcaatgtttcaaat

SEQ ID NO: 136167 - DNA, 15 bp, Homo sapiens
aagcaatgtttcaaa

SEQ ID NO: 136168 - DNA, 15 bp, Homo sapiens
aaagcaatgtttcaa

SEQ ID NO: 136169 - DNA, 15 bp, Homo sapiens
aaaagcaatgtttca

SEQ ID NO: 136170 - DNA, 15 bp, Homo sapiens
taaaagcaatgtttc

SEQ ID NO: 136171 - DNA, 15 bp, Homo sapiens
ttaaaagcaatgttt

SEQ ID NO: 136172 - DNA, 15 bp, Homo sapiens
tttaaaagcaatgtt

SEQ ID NO: 136173 - DNA, 15 bp, Homo sapiens
ttttaaaagcaatgt

SEQ ID NO: 136174 - DNA, 15 bp, Homo sapiens
gttttaaaagcaatg

SEQ ID NO: 136175 - DNA, 15 bp, Homo sapiens
agttttaaaagcaat

SEQ ID NO: 136176 - DNA, 15 bp, Homo sapiens
tagttttaaaagcaa

SEQ ID NO: 136177 - DNA, 15 bp, Homo sapiens
gtagttttaaaagca

SEQ ID NO: 136178 - DNA, 15 bp, Homo sapiens
agtagttttaaaagc

SEQ ID NO: 136179 - DNA, 15 bp, Homo sapiens
aagtagttttaaaag

SEQ ID NO: 136180 - DNA, 15 bp, Homo sapiens
taagtagttttaaaa

SEQ ID NO: 136181 - DNA, 15 bp, Homo sapiens
ctaagtagttttaaa

SEQ ID NO: 136182 - DNA, 15 bp, Homo sapiens
gctaagtagttttaa

SEQ ID NO: 136183 - DNA, 15 bp, Homo sapiens
tgctaagtagtttta

SEQ ID NO: 136184 - DNA, 15 bp, Homo sapiens
gtgctaagtagtttt

SEQ ID NO: 136185 - DNA, 15 bp, Homo sapiens
agtgctaagtagttt

SEQ ID NO: 136186 - DNA, 15 bp, Homo sapiens
aagtgctaagtagtt

SEQ ID NO: 136187 - DNA, 15 bp, Homo sapiens
gaagtgctaagtagt

SEQ ID NO: 136188 - DNA, 15 bp, Homo sapiens
tgaagtgctaagtag

SEQ ID NO: 136189 - DNA, 15 bp, Homo sapiens
ctgaagtgctaagta

SEQ ID NO: 136190 - DNA, 15 bp, Homo sapiens
cctgaagtgctaagt

SEQ ID NO: 136191 - DNA, 15 bp, Homo sapiens
ccctgaagtgctaag

SEQ ID NO: 136192 - DNA, 15 bp, Homo sapiens
gccctgaagtgctaa

SEQ ID NO: 136193 - DNA, 15 bp, Homo sapiens
tgccctgaagtgcta

SEQ ID NO: 136194 - DNA, 15 bp, Homo sapiens
ctgccctgaagtgct

SEQ ID NO: 136195 - DNA, 15 bp, Homo sapiens
tctgccctgaagtgc

SEQ ID NO: 136196 - DNA, 15 bp, Homo sapiens
atctgccctgaagtg

SEQ ID NO: 136197 - DNA, 15 bp, Homo sapiens
aatctgccctgaagt

SEQ ID NO: 136198 - DNA, 15 bp, Homo sapiens
aaatctgccctgaag

SEQ ID NO: 136199 - DNA, 15 bp, Homo sapiens
aaaatctgccctgaa

SEQ ID NO: 136200 - DNA, 15 bp, Homo sapiens
taaaatctgccctga

SEQ ID NO: 136201 - DNA, 15 bp, Homo sapiens
ctaaaatctgccctg

SEQ ID NO: 136202 - DNA, 15 bp, Homo sapiens
actaaaatctgccct

SEQ ID NO: 136203 - DNA, 15 bp, Homo sapiens
aactaaaatctgccc

SEQ ID NO: 136204 - DNA, 15 bp, Homo sapiens
aaactaaaatctgcc

SEQ ID NO: 136205 - DNA, 15 bp, Homo sapiens
aaaactaaaatctgc

SEQ ID NO: 136206 - DNA, 15 bp, Homo sapiens
taaaactaaaatctg

SEQ ID NO: 136207 - DNA, 15 bp, Homo sapiens
ataaaactaaaatct

SEQ ID NO: 136208 - DNA, 15 bp, Homo sapiens
aataaaactaaaatc

SEQ ID NO: 136209 - DNA, 15 bp, Homo sapiens
aaataaaactaaaat

SEQ ID NO: 136210 - DNA, 15 bp, Homo sapiens
aaaataaaactaaaa

SEQ ID NO: 136211 - DNA, 15 bp, Homo sapiens
gaaaataaaactaaa

SEQ ID NO: 136212 - DNA, 15 bp, Homo sapiens
agaaaataaaactaa

SEQ ID NO: 136213 - DNA, 15 bp, Homo sapiens
tagaaaataaaacta

SEQ ID NO: 136214 - DNA, 15 bp, Homo sapiens
ttagaaaataaaact

SEQ ID NO: 136215 - DNA, 15 bp, Homo sapiens
tttagaaaataaaac

SEQ ID NO: 136216 - DNA, 15 bp, Homo sapiens
ctttagaaaataaaa

SEQ ID NO: 136217 - DNA, 15 bp, Homo sapiens
actttagaaaataaa

SEQ ID NO: 136218 - DNA, 15 bp, Homo sapiens
tactttagaaaataa

SEQ ID NO: 136219 - DNA, 15 bp, Homo sapiens
gtactttagaaaata

SEQ ID NO: 136220 - DNA, 15 bp, Homo sapiens
agtactttagaaaat

SEQ ID NO: 136221 - DNA, 15 bp, Homo sapiens
cagtactttagaaaa

SEQ ID NO: 136222 - DNA, 15 bp, Homo sapiens
tcagtactttagaaa

SEQ ID NO: 136223 - DNA, 15 bp, Homo sapiens
ctcagtactttagaa

SEQ ID NO: 136224 - DNA, 15 bp, Homo sapiens
gctcagtactttaga

SEQ ID NO: 136225 - DNA, 15 bp, Homo sapiens
tgctcagtactttag

SEQ ID NO: 136226 - DNA, 15 bp, Homo sapiens
ctgctcagtacttta

SEQ ID NO: 136227 - DNA, 15 bp, Homo sapiens
actgctcagtacttt

SEQ ID NO: 136228 - DNA, 15 bp, Homo sapiens
cactgctcagtactt

SEQ ID NO: 136229 - DNA, 15 bp, Homo sapiens
tcactgctcagtact

SEQ ID NO: 136230 - DNA, 15 bp, Homo sapiens
atcactgctcagtac

SEQ ID NO: 136231 - DNA, 15 bp, Homo sapiens
tatcactgctcagta

SEQ ID NO: 136232 - DNA, 15 bp, Homo sapiens
atatcactgctcagt

SEQ ID NO: 136233 - DNA, 15 bp, Homo sapiens
aatatcactgctcag

SEQ ID NO: 136234 - DNA, 15 bp, Homo sapiens
gaatatcactgctca

SEQ ID NO: 136235 - DNA, 15 bp, Homo sapiens
agaatatcactgctc

SEQ ID NO: 136236 - DNA, 15 bp, Homo sapiens
aagaatatcactgct

SEQ ID NO: 136237 - DNA, 15 bp, Homo sapiens
aaagaatatcactgc

SEQ ID NO: 136238 - DNA, 15 bp, Homo sapiens
caaagaatatcactg

SEQ ID NO: 136239 - DNA, 15 bp, Homo sapiens
acaaagaatatcact

SEQ ID NO: 136240 - DNA, 15 bp, Homo sapiens
aacaaagaatatcac

SEQ ID NO: 136241 - DNA, 15 bp, Homo sapiens
taacaaagaatatca

SEQ ID NO: 136242 - DNA, 15 bp, Homo sapiens
ttaacaaagaatatc

SEQ ID NO: 136243 - DNA, 15 bp, Homo sapiens
attaacaaagaatat

SEQ ID NO: 136244 - DNA, 15 bp, Homo sapiens
aattaacaaagaata

SEQ ID NO: 136245 - DNA, 15 bp, Homo sapiens
aaattaacaaagaat

SEQ ID NO: 136246 - DNA, 15 bp, Homo sapiens
caaattaacaaagaa

SEQ ID NO: 136247 - DNA, 15 bp, Homo sapiens
ccaaattaacaaaga

SEQ ID NO: 136248 - DNA, 15 bp, Homo sapiens
tccaaattaacaaag

SEQ ID NO: 136249 - DNA, 15 bp, Homo sapiens
gtccaaattaacaaa

SEQ ID NO: 136250 - DNA, 15 bp, Homo sapiens
ggtccaaattaacaa

SEQ ID NO: 136251 - DNA, 15 bp, Homo sapiens
tggtccaaattaaca

SEQ ID NO: 136252 - DNA, 15 bp, Homo sapiens
atggtccaaattaac

SEQ ID NO: 136253 - DNA, 15 bp, Homo sapiens
aatggtccaaattaa

SEQ ID NO: 136254 - DNA, 15 bp, Homo sapiens
aaatggtccaaatta

SEQ ID NO: 136255 - DNA, 15 bp, Homo sapiens
aaaatggtccaaatt

SEQ ID NO: 136256 - DNA, 15 bp, Homo sapiens
gaaaatggtccaaat

SEQ ID NO: 136257 - DNA, 15 bp, Homo sapiens
ggaaaatggtccaaa

SEQ ID NO: 136258 - DNA, 15 bp, Homo sapiens
aggaaaatggtccaa

SEQ ID NO: 136259 - DNA, 15 bp, Homo sapiens
caggaaaatggtcca

SEQ ID NO: 136260 - DNA, 15 bp, Homo sapiens
gcaggaaaatggtcc

SEQ ID NO: 136261 - DNA, 15 bp, Homo sapiens
tgcaggaaaatggtc

SEQ ID NO: 136262 - DNA, 15 bp, Homo sapiens
atgcaggaaaatggt

SEQ ID NO: 136263 - DNA, 15 bp, Homo sapiens
aatgcaggaaaatgg

SEQ ID NO: 136264 - DNA, 15 bp, Homo sapiens
caatgcaggaaaatg

SEQ ID NO: 136265 - DNA, 15 bp, Homo sapiens
ccaatgcaggaaaat

SEQ ID NO: 136266 - DNA, 15 bp, Homo sapiens
cccaatgcaggaaaa

SEQ ID NO: 136267 - DNA, 15 bp, Homo sapiens
acccaatgcaggaaa

SEQ ID NO: 136268 - DNA, 15 bp, Homo sapiens
cacccaatgcaggaa

SEQ ID NO: 136269 - DNA, 15 bp, Homo sapiens
tcacccaatgcagga

SEQ ID NO: 136270 - DNA, 15 bp, Homo sapiens
atcacccaatgcagg

SEQ ID NO: 136271 - DNA, 15 bp, Homo sapiens
gatcacccaatgcag

SEQ ID NO: 136272 - DNA, 15 bp, Homo sapiens
tgatcacccaatgca

SEQ ID NO: 136273 - DNA, 15 bp, Homo sapiens
atgatcacccaatgc

SEQ ID NO: 136274 - DNA, 15 bp, Homo sapiens
aatgatcacccaatg

SEQ ID NO: 136275 - DNA, 15 bp, Homo sapiens
gaatgatcacccaat

SEQ ID NO: 136276 - DNA, 15 bp, Homo sapiens
tgaatgatcacccaa

SEQ ID NO: 136277 - DNA, 15 bp, Homo sapiens
gtgaatgatcaccca

SEQ ID NO: 136278 - DNA, 15 bp, Homo sapiens
ggtgaatgatcaccc

SEQ ID NO: 136279 - DNA, 15 bp, Homo sapiens
tggtgaatgatcacc

SEQ ID NO: 136280 - DNA, 15 bp, Homo sapiens
ctggtgaatgatcac

SEQ ID NO: 136281 - DNA, 15 bp, Homo sapiens
actggtgaatgatca

SEQ ID NO: 136282 - DNA, 15 bp, Homo sapiens
tactggtgaatgatc

SEQ ID NO: 136283 - DNA, 15 bp, Homo sapiens
gtactggtgaatgat

SEQ ID NO: 136284 - DNA, 15 bp, Homo sapiens
tgtactggtgaatga

SEQ ID NO: 136285 - DNA, 15 bp, Homo sapiens
atgtactggtgaatg

SEQ ID NO: 136286 - DNA, 15 bp, Homo sapiens
aatgtactggtgaat

SEQ ID NO: 136287 - DNA, 15 bp, Homo sapiens
gaatgtactggtgaa

SEQ ID NO: 136288 - DNA, 15 bp, Homo sapiens
agaatgtactggtga

SEQ ID NO: 136289 - DNA, 15 bp, Homo sapiens
gagaatgtactggtg

SEQ ID NO: 136290 - DNA, 15 bp, Homo sapiens
tgagaatgtactggt

SEQ ID NO: 136291 - DNA, 15 bp, Homo sapiens
ctgagaatgtactgg

SEQ ID NO: 136292 - DNA, 15 bp, Homo sapiens
actgagaatgtactg

SEQ ID NO: 136293 - DNA, 15 bp, Homo sapiens
aactgagaatgtact

SEQ ID NO: 136294 - DNA, 15 bp, Homo sapiens
aaactgagaatgtac

SEQ ID NO: 136295 - DNA, 15 bp, Homo sapiens
aaaactgagaatgta

SEQ ID NO: 136296 - DNA, 15 bp, Homo sapiens
aaaaactgagaatgt

SEQ ID NO: 136297 - DNA, 15 bp, Homo sapiens
gaaaaactgagaatg

SEQ ID NO: 136298 - DNA, 15 bp, Homo sapiens
agaaaaactgagaat

SEQ ID NO: 136299 - DNA, 15 bp, Homo sapiens
aagaaaaactgagaa

SEQ ID NO: 136300 - DNA, 15 bp, Homo sapiens
taagaaaaactgaga

SEQ ID NO: 136301 - DNA, 15 bp, Homo sapiens
ttaagaaaaactgag

SEQ ID NO: 136302 - DNA, 15 bp, Homo sapiens
attaagaaaaactga

SEQ ID NO: 136303 - DNA, 15 bp, Homo sapiens
tattaagaaaaactg

SEQ ID NO: 136304 - DNA, 15 bp, Homo sapiens
atattaagaaaaact

SEQ ID NO: 136305 - DNA, 15 bp, Homo sapiens
tatattaagaaaaac

SEQ ID NO: 136306 - DNA, 15 bp, Homo sapiens
atatattaagaaaaa

SEQ ID NO: 136307 - DNA, 15 bp, Homo sapiens
tatatattaagaaaa

SEQ ID NO: 136308 - DNA, 15 bp, Homo sapiens
ctatatattaagaaa

SEQ ID NO: 136309 - DNA, 15 bp, Homo sapiens
gctatatattaagaa

SEQ ID NO: 136310 - DNA, 15 bp, Homo sapiens
tgctatatattaaga

SEQ ID NO: 136311 - DNA, 15 bp, Homo sapiens
atgctatatattaag

SEQ ID NO: 136312 - DNA, 15 bp, Homo sapiens
aatgctatatattaa

SEQ ID NO: 136313 - DNA, 15 bp, Homo sapiens
aaatgctatatatta

SEQ ID NO: 136314 - DNA, 15 bp, Homo sapiens
taaatgctatatatt

SEQ ID NO: 136315 - DNA, 15 bp, Homo sapiens
ataaatgctatatat

SEQ ID NO: 136316 - DNA, 15 bp, Homo sapiens
cataaatgctatata

SEQ ID NO: 136317 - DNA, 15 bp, Homo sapiens
ccataaatgctatat

SEQ ID NO: 136318 - DNA, 15 bp, Homo sapiens
accataaatgctata

SEQ ID NO: 136319 - DNA, 15 bp, Homo sapiens
taccataaatgctat

SEQ ID NO: 136320 - DNA, 15 bp, Homo sapiens
ttaccataaatgcta

SEQ ID NO: 136321 - DNA, 15 bp, Homo sapiens
attaccataaatgct

SEQ ID NO: 136322 - DNA, 15 bp, Homo sapiens
gattaccataaatgc

SEQ ID NO: 136323 - DNA, 15 bp, Homo sapiens
tgattaccataaatg

SEQ ID NO: 136324 - DNA, 15 bp, Homo sapiens
atgattaccataaat

SEQ ID NO: 136325 - DNA, 15 bp, Homo sapiens
tatgattaccataaa

SEQ ID NO: 136326 - DNA, 15 bp, Homo sapiens
atatgattaccataa

SEQ ID NO: 136327 - DNA, 15 bp, Homo sapiens
aatatgattaccata

SEQ ID NO: 136328 - DNA, 15 bp, Homo sapiens
taatatgattaccat

SEQ ID NO: 136329 - DNA, 15 bp, Homo sapiens
ctaatatgattacca

SEQ ID NO: 136330 - DNA, 15 bp, Homo sapiens
tctaatatgattacc

SEQ ID NO: 136331 - DNA, 15 bp, Homo sapiens
gtctaatatgattac

SEQ ID NO: 136332 - DNA, 15 bp, Homo sapiens
agtctaatatgatta

SEQ ID NO: 136333 - DNA, 15 bp, Homo sapiens
aagtctaatatgatt

SEQ ID NO: 136334 - DNA, 15 bp, Homo sapiens
gaagtctaatatgat

SEQ ID NO: 136335 - DNA, 15 bp, Homo sapiens
agaagtctaatatga

SEQ ID NO: 136336 - DNA, 15 bp, Homo sapiens
cagaagtctaatatg

SEQ ID NO: 136337 - DNA, 15 bp, Homo sapiens
acagaagtctaatat

SEQ ID NO: 136338 - DNA, 15 bp, Homo sapiens
aacagaagtctaata

SEQ ID NO: 136339 - DNA, 15 bp, Homo sapiens
aaacagaagtctaat

SEQ ID NO: 136340 - DNA, 15 bp, Homo sapiens
aaaacagaagtctaa

SEQ ID NO: 136341 - DNA, 15 bp, Homo sapiens
gaaaacagaagtcta

SEQ ID NO: 136342 - DNA, 15 bp, Homo sapiens
tgaaaacagaagtct

SEQ ID NO: 136343 - DNA, 15 bp, Homo sapiens
ttgaaaacagaagtc

SEQ ID NO: 136344 - DNA, 15 bp, Homo sapiens
attgaaaacagaagt

SEQ ID NO: 136345 - DNA, 15 bp, Homo sapiens
gattgaaaacagaag

SEQ ID NO: 136346 - DNA, 15 bp, Homo sapiens
agattgaaaacagaa

SEQ ID NO: 136347 - DNA, 15 bp, Homo sapiens
gagattgaaaacaga

SEQ ID NO: 136348 - DNA, 15 bp, Homo sapiens
cgagattgaaaacag

SEQ ID NO: 136349 - DNA, 15 bp, Homo sapiens
acgagattgaaaaca

SEQ ID NO: 136350 - DNA, 15 bp, Homo sapiens
tacgagattgaaaac

SEQ ID NO: 136351 - DNA, 15 bp, Homo sapiens
atacgagattgaaaa

SEQ ID NO: 136352 - DNA, 15 bp, Homo sapiens
tatacgagattgaaa

SEQ ID NO: 136353 - DNA, 15 bp, Homo sapiens
ctatacgagattgaa

SEQ ID NO: 136354 - DNA, 15 bp, Homo sapiens
tctatacgagattga

SEQ ID NO: 136355 - DNA, 15 bp, Homo sapiens
ttctatacgagattg

SEQ ID NO: 136356 - DNA, 15 bp, Homo sapiens
cttctatacgagatt

SEQ ID NO: 136357 - DNA, 15 bp, Homo sapiens
acttctatacgagat

SEQ ID NO: 136358 - DNA, 15 bp, Homo sapiens
gacttctatacgaga

SEQ ID NO: 136359 - DNA, 15 bp, Homo sapiens
agacttctatacgag

SEQ ID NO: 136360 - DNA, 15 bp, Homo sapiens
aagacttctatacga

SEQ ID NO: 136361 - DNA, 15 bp, Homo sapiens
gaagacttctatacg

SEQ ID NO: 136362 - DNA, 15 bp, Homo sapiens
tgaagacttctatac

SEQ ID NO: 136363 - DNA, 15 bp, Homo sapiens
atgaagacttctata

SEQ ID NO: 136364 - DNA, 15 bp, Homo sapiens
catgaagacttctat

SEQ ID NO: 136365 - DNA, 15 bp, Homo sapiens
tcatgaagacttcta

SEQ ID NO: 136366 - DNA, 15 bp, Homo sapiens
ttcatgaagacttct

SEQ ID NO: 136367 - DNA, 15 bp, Homo sapiens
tttcatgaagacttc

SEQ ID NO: 136368 - DNA, 15 bp, Homo sapiens
atttcatgaagactt

SEQ ID NO: 136369 - DNA, 15 bp, Homo sapiens
catttcatgaagact

SEQ ID NO: 136370 - DNA, 15 bp, Homo sapiens
gcatttcatgaagac

SEQ ID NO: 136371 - DNA, 15 bp, Homo sapiens
agcatttcatgaaga

SEQ ID NO: 136372 - DNA, 15 bp, Homo sapiens
tagcatttcatgaag

SEQ ID NO: 136373 - DNA, 15 bp, Homo sapiens
atagcatttcatgaa

SEQ ID NO: 136374 - DNA, 15 bp, Homo sapiens
catagcatttcatga

SEQ ID NO: 136375 - DNA, 15 bp, Homo sapiens
acatagcatttcatg

SEQ ID NO: 136376 - DNA, 15 bp, Homo sapiens
gacatagcatttcat

SEQ ID NO: 136377 - DNA, 15 bp, Homo sapiens
tgacatagcatttca

SEQ ID NO: 136378 - DNA, 15 bp, Homo sapiens
atgacatagcatttc

SEQ ID NO: 136379 - DNA, 15 bp, Homo sapiens
aatgacatagcattt

SEQ ID NO: 136380 - DNA, 15 bp, Homo sapiens
aaatgacatagcatt

SEQ ID NO: 136381 - DNA, 15 bp, Homo sapiens
gaaatgacatagcat

SEQ ID NO: 136382 - DNA, 15 bp, Homo sapiens
tgaaatgacatagca

SEQ ID NO: 136383 - DNA, 15 bp, Homo sapiens
atgaaatgacatagc

SEQ ID NO: 136384 - DNA, 15 bp, Homo sapiens
catgaaatgacatag

SEQ ID NO: 136385 - DNA, 15 bp, Homo sapiens
acatgaaatgacata

SEQ ID NO: 136386 - DNA, 15 bp, Homo sapiens
gacatgaaatgacat

SEQ ID NO: 136387 - DNA, 15 bp, Homo sapiens
ggacatgaaatgaca

SEQ ID NO: 136388 - DNA, 15 bp, Homo sapiens
aggacatgaaatgac

SEQ ID NO: 136389 - DNA, 15 bp, Homo sapiens
caggacatgaaatga

SEQ ID NO: 136390 - DNA, 15 bp, Homo sapiens
acaggacatgaaatg

SEQ ID NO: 136391 - DNA, 15 bp, Homo sapiens
cacaggacatgaaat

SEQ ID NO: 136392 - DNA, 15 bp, Homo sapiens
acacaggacatgaaa

SEQ ID NO: 136393 - DNA, 15 bp, Homo sapiens
gacacaggacatgaa

SEQ ID NO: 136394 - DNA, 15 bp, Homo sapiens
tgacacaggacatga

SEQ ID NO: 136395 - DNA, 15 bp, Homo sapiens
ctgacacaggacatg

SEQ ID NO: 136396 - DNA, 15 bp, Homo sapiens
actgacacaggacat

SEQ ID NO: 136397 - DNA, 15 bp, Homo sapiens
aactgacacaggaca

SEQ ID NO: 136398 - DNA, 15 bp, Homo sapiens
aaactgacacaggac

SEQ ID NO: 136399 - DNA, 15 bp, Homo sapiens
taaactgacacagga

SEQ ID NO: 136400 - DNA, 15 bp, Homo sapiens
ataaactgacacagg

SEQ ID NO: 136401 - DNA, 15 bp, Homo sapiens
cataaactgacacag

SEQ ID NO: 136402 - DNA, 15 bp, Homo sapiens
acataaactgacaca

SEQ ID NO: 136403 - DNA, 15 bp, Homo sapiens
aacataaactgacac

SEQ ID NO: 136404 - DNA, 15 bp, Homo sapiens
aaacataaactgaca

SEQ ID NO: 136405 - DNA, 15 bp, Homo sapiens
aaaacataaactgac

SEQ ID NO: 136406 - DNA, 15 bp, Homo sapiens
caaaacataaactga

SEQ ID NO: 136407 - DNA, 15 bp, Homo sapiens
ccaaaacataaactg

SEQ ID NO: 136408 - DNA, 15 bp, Homo sapiens
accaaaacataaact

SEQ ID NO: 136409 - DNA, 15 bp, Homo sapiens
gaccaaaacataaac

SEQ ID NO: 136410 - DNA, 15 bp, Homo sapiens
ggaccaaaacataaa

SEQ ID NO: 136411 - DNA, 15 bp, Homo sapiens
tggaccaaaacataa

SEQ ID NO: 136412 - DNA, 15 bp, Homo sapiens
gtggaccaaaacata

SEQ ID NO: 136413 - DNA, 15 bp, Homo sapiens
agtggaccaaaacat

SEQ ID NO: 136414 - DNA, 15 bp, Homo sapiens
aagtggaccaaaaca

SEQ ID NO: 136415 - DNA, 15 bp, Homo sapiens
aaagtggaccaaaac

SEQ ID NO: 136416 - DNA, 15 bp, Homo sapiens
aaaagtggaccaaaa

SEQ ID NO: 136417 - DNA, 15 bp, Homo sapiens
gaaaagtggaccaaa

SEQ ID NO: 136418 - DNA, 15 bp, Homo sapiens
ggaaaagtggaccaa

SEQ ID NO: 136419 - DNA, 15 bp, Homo sapiens
tggaaaagtggacca

SEQ ID NO: 136420 - DNA, 15 bp, Homo sapiens
ctggaaaagtggacc

SEQ ID NO: 136421 - DNA, 15 bp, Homo sapiens
actggaaaagtggac

SEQ ID NO: 136422 - DNA, 15 bp, Homo sapiens
tactggaaaagtgga

SEQ ID NO: 136423 - DNA, 15 bp, Homo sapiens
atactggaaaagtgg

SEQ ID NO: 136424 - DNA, 15 bp, Homo sapiens
aatactggaaaagtg

SEQ ID NO: 136425 - DNA, 15 bp, Homo sapiens
aaatactggaaaagt

SEQ ID NO: 136426 - DNA, 15 bp, Homo sapiens
aaaatactggaaaag

SEQ ID NO: 136427 - DNA, 15 bp, Homo sapiens
taaaatactggaaaa

SEQ ID NO: 136428 - DNA, 15 bp, Homo sapiens
ctaaaatactggaaa

SEQ ID NO: 136429 - DNA, 15 bp, Homo sapiens
actaaaatactggaa

SEQ ID NO: 136430 - DNA, 15 bp, Homo sapiens
cactaaaatactgga

SEQ ID NO: 136431 - DNA, 15 bp, Homo sapiens
ccactaaaatactgg

SEQ ID NO: 136432 - DNA, 15 bp, Homo sapiens
tccactaaaatactg

SEQ ID NO: 136433 - DNA, 15 bp, Homo sapiens
gtccactaaaatact

SEQ ID NO: 136434 - DNA, 15 bp, Homo sapiens
ggtccactaaaatac

SEQ ID NO: 136435 - DNA, 15 bp, Homo sapiens
gggtccactaaaata

SEQ ID NO: 136436 - DNA, 15 bp, Homo sapiens
agggtccactaaaat

SEQ ID NO: 136437 - DNA, 15 bp, Homo sapiens
cagggtccactaaaa

SEQ ID NO: 136438 - DNA, 15 bp, Homo sapiens
tcagggtccactaaa

SEQ ID NO: 136439 - DNA, 15 bp, Homo sapiens
ttcagggtccactaa

SEQ ID NO: 136440 - DNA, 15 bp, Homo sapiens
tttcagggtccacta

SEQ ID NO: 136441 - DNA, 15 bp, Homo sapiens
atttcagggtccact

SEQ ID NO: 136442 - DNA, 15 bp, Homo sapiens
catttcagggtccac

SEQ ID NO: 136443 - DNA, 15 bp, Homo sapiens
acatttcagggtcca

SEQ ID NO: 136444 - DNA, 15 bp, Homo sapiens
cacatttcagggtcc

SEQ ID NO: 136445 - DNA, 15 bp, Homo sapiens
acacatttcagggtc

SEQ ID NO: 136446 - DNA, 15 bp, Homo sapiens
cacacatttcagggt

SEQ ID NO: 136447 - DNA, 15 bp, Homo sapiens
acacacatttcaggg

SEQ ID NO: 136448 - DNA, 15 bp, Homo sapiens
cacacacatttcagg

SEQ ID NO: 136449 - DNA, 15 bp, Homo sapiens
tcacacacatttcag

SEQ ID NO: 136450 - DNA, 15 bp, Homo sapiens
atcacacacatttca

SEQ ID NO: 136451 - DNA, 15 bp, Homo sapiens
catcacacacatttc

SEQ ID NO: 136452 - DNA, 15 bp, Homo sapiens
acatcacacacattt

SEQ ID NO: 136453 - DNA, 15 bp, Homo sapiens
cacatcacacacatt

SEQ ID NO: 136454 - DNA, 15 bp, Homo sapiens
tcacatcacacacat

SEQ ID NO: 136455 - DNA, 15 bp, Homo sapiens
gtcacatcacacaca

SEQ ID NO: 136456 - DNA, 15 bp, Homo sapiens
tgtcacatcacacac

SEQ ID NO: 136457 - DNA, 15 bp, Homo sapiens
atgtcacatcacaca

SEQ ID NO: 136458 - DNA, 15 bp, Homo sapiens
aatgtcacatcacac

SEQ ID NO: 136459 - DNA, 15 bp, Homo sapiens
aaatgtcacatcaca

SEQ ID NO: 136460 - DNA, 15 bp, Homo sapiens
caaatgtcacatcac

SEQ ID NO: 136461 - DNA, 15 bp, Homo sapiens
acaaatgtcacatca

SEQ ID NO: 136462 - DNA, 15 bp, Homo sapiens
gacaaatgtcacatc

SEQ ID NO: 136463 - DNA, 15 bp, Homo sapiens
tgacaaatgtcacat

SEQ ID NO: 136464 - DNA, 15 bp, Homo sapiens
atgacaaatgtcaca

SEQ ID NO: 136465 - DNA, 15 bp, Homo sapiens
aatgacaaatgtcac

SEQ ID NO: 136466 - DNA, 15 bp, Homo sapiens
aaatgacaaatgtca

SEQ ID NO: 136467 - DNA, 15 bp, Homo sapiens
aaaatgacaaatgtc

SEQ ID NO: 136468 - DNA, 15 bp, Homo sapiens
gaaaatgacaaatgt

SEQ ID NO: 136469 - DNA, 15 bp, Homo sapiens
tgaaaatgacaaatg

SEQ ID NO: 136470 - DNA, 15 bp, Homo sapiens
atgaaaatgacaaat

SEQ ID NO: 136471 - DNA, 15 bp, Homo sapiens
aatgaaaatgacaaa

SEQ ID NO: 136472 - DNA, 15 bp, Homo sapiens
taatgaaaatgacaa

SEQ ID NO: 136473 - DNA, 15 bp, Homo sapiens
ctaatgaaaatgaca

SEQ ID NO: 136474 - DNA, 15 bp, Homo sapiens
gctaatgaaaatgac

SEQ ID NO: 136475 - DNA, 15 bp, Homo sapiens
tgctaatgaaaatga

SEQ ID NO: 136476 - DNA, 15 bp, Homo sapiens
ttgctaatgaaaatg

SEQ ID NO: 136477 - DNA, 15 bp, Homo sapiens
tttgctaatgaaaat

SEQ ID NO: 136478 - DNA, 15 bp, Homo sapiens
ttttgctaatgaaaa

SEQ ID NO: 136479 - DNA, 15 bp, Homo sapiens
tttttgctaatgaaa

SEQ ID NO: 136480 - DNA, 15 bp, Homo sapiens
ttttttgctaatgaa

SEQ ID NO: 136481 - DNA, 15 bp, Homo sapiens
tttttttgctaatga

SEQ ID NO: 136482 - DNA, 15 bp, Homo sapiens
ctttttttgctaatg

SEQ ID NO: 136483 - DNA, 15 bp, Homo sapiens
actttttttgctaat

SEQ ID NO: 136484 - DNA, 15 bp, Homo sapiens
aactttttttgctaa

SEQ ID NO: 136485 - DNA, 15 bp, Homo sapiens
caactttttttgcta

SEQ ID NO: 136486 - DNA, 15 bp, Homo sapiens
acaactttttttgct

SEQ ID NO: 136487 - DNA, 15 bp, Homo sapiens
tacaactttttttgc

SEQ ID NO: 136488 - DNA, 15 bp, Homo sapiens
atacaactttttttg

SEQ ID NO: 136489 - DNA, 15 bp, Homo sapiens
catacaacttttttt

SEQ ID NO: 136490 - DNA, 15 bp, Homo sapiens
tcatacaactttttt

SEQ ID NO: 136491 - DNA, 15 bp, Homo sapiens
atcatacaacttttt

SEQ ID NO: 136492 - DNA, 15 bp, Homo sapiens
gatcatacaactttt

SEQ ID NO: 136493 - DNA, 15 bp, Homo sapiens
agatcatacaacttt

SEQ ID NO: 136494 - DNA, 15 bp, Homo sapiens
cagatcatacaactt

SEQ ID NO: 136495 - DNA, 15 bp, Homo sapiens
acagatcatacaact

SEQ ID NO: 136496 - DNA, 15 bp, Homo sapiens
cacagatcatacaac

SEQ ID NO: 136497 - DNA, 15 bp, Homo sapiens
gcacagatcatacaa

SEQ ID NO: 136498 - DNA, 15 bp, Homo sapiens
ggcacagatcataca

SEQ ID NO: 136499 - DNA, 15 bp, Homo sapiens
aggcacagatcatac

SEQ ID NO: 136500 - DNA, 15 bp, Homo sapiens
aaggcacagatcata

SEQ ID NO: 136501 - DNA, 15 bp, Homo sapiens
aaaggcacagatcat

SEQ ID NO: 136502 - DNA, 15 bp, Homo sapiens
aaaaggcacagatca

SEQ ID NO: 136503 - DNA, 15 bp, Homo sapiens
aaaaaggcacagatc

SEQ ID NO: 136504 - DNA, 15 bp, Homo sapiens
aaaaaaggcacagat

SEQ ID NO: 136505 - DNA, 15 bp, Homo sapiens
taaaaaaggcacaga

SEQ ID NO: 136506 - DNA, 15 bp, Homo sapiens
ataaaaaaggcacag

SEQ ID NO: 136507 - DNA, 15 bp, Homo sapiens
tataaaaaaggcaca

SEQ ID NO: 136508 - DNA, 15 bp, Homo sapiens
atataaaaaaggcac

SEQ ID NO: 136509 - DNA, 15 bp, Homo sapiens
gatataaaaaaggca

SEQ ID NO: 136510 - DNA, 15 bp, Homo sapiens
agatataaaaaaggc

SEQ ID NO: 136511 - DNA, 15 bp, Homo sapiens
aagatataaaaaagg

SEQ ID NO: 136512 - DNA, 15 bp, Homo sapiens
caagatataaaaaag

SEQ ID NO: 136513 - DNA, 15 bp, Homo sapiens
ccaagatataaaaaa

SEQ ID NO: 136514 - DNA, 15 bp, Homo sapiens
gccaagatataaaaa

SEQ ID NO: 136515 - DNA, 15 bp, Homo sapiens
tgccaagatataaaa

SEQ ID NO: 136516 - DNA, 15 bp, Homo sapiens
ctgccaagatataaa

SEQ ID NO: 136517 - DNA, 15 bp, Homo sapiens
cctgccaagatataa

SEQ ID NO: 136518 - DNA, 15 bp, Homo sapiens
acctgccaagatata

SEQ ID NO: 136519 - DNA, 15 bp, Homo sapiens
tacctgccaagatat

SEQ ID NO: 136520 - DNA, 15 bp, Homo sapiens
ctacctgccaagata

SEQ ID NO: 136521 - DNA, 15 bp, Homo sapiens
cctacctgccaagat

SEQ ID NO: 136522 - DNA, 15 bp, Homo sapiens
tcctacctgccaaga

SEQ ID NO: 136523 - DNA, 15 bp, Homo sapiens
attcctacctgccaa

SEQ ID NO: 136524 - DNA, 15 bp, Homo sapiens
tattcctacctgcca

SEQ ID NO: 136525 - DNA, 15 bp, Homo sapiens
atattcctacctgcc

SEQ ID NO: 136526 - DNA, 15 bp, Homo sapiens
aatattcctacctgc

SEQ ID NO: 136527 - DNA, 15 bp, Homo sapiens
taatattcctacctg

SEQ ID NO: 136528 - DNA, 15 bp, Homo sapiens
ataatattcctacct

SEQ ID NO: 136529 - DNA, 15 bp, Homo sapiens
tataatattcctacc

SEQ ID NO: 136530 - DNA, 15 bp, Homo sapiens
atataatattcctac

SEQ ID NO: 136531 - DNA, 15 bp, Homo sapiens
aatataatattccta

SEQ ID NO: 136532 - DNA, 15 bp, Homo sapiens
aaatataatattcct

SEQ ID NO: 136533 - DNA, 15 bp, Homo sapiens
caaatataatattcc

SEQ ID NO: 136534 - DNA, 15 bp, Homo sapiens
ccaaatataatattc

SEQ ID NO: 136535 - DNA, 15 bp, Homo sapiens
tccaaatataatatt

SEQ ID NO: 136536 - DNA, 15 bp, Homo sapiens
atccaaatataatat

SEQ ID NO: 136537 - DNA, 15 bp, Homo sapiens
catccaaatataata

SEQ ID NO: 136538 - DNA, 15 bp, Homo sapiens
gcatccaaatataat

SEQ ID NO: 136539 - DNA, 15 bp, Homo sapiens
tgcatccaaatataa

SEQ ID NO: 136540 - DNA, 15 bp, Homo sapiens
ctgcatccaaatata

SEQ ID NO: 136541 - DNA, 15 bp, Homo sapiens
tctgcatccaaatat

SEQ ID NO: 136542 - DNA, 15 bp, Homo sapiens
ctctgcatccaaata

SEQ ID NO: 136543 - DNA, 15 bp, Homo sapiens
actctgcatccaaat

SEQ ID NO: 136544 - DNA, 15 bp, Homo sapiens
aactctgcatccaaa

SEQ ID NO: 136545 - DNA, 15 bp, Homo sapiens
gaactctgcatccaa

SEQ ID NO: 136546 - DNA, 15 bp, Homo sapiens
tgaactctgcatcca

SEQ ID NO: 136547 - DNA, 15 bp, Homo sapiens
ctgaactctgcatcc

SEQ ID NO: 136548 - DNA, 15 bp, Homo sapiens
cctgaactctgcatc

SEQ ID NO: 136549 - DNA, 15 bp, Homo sapiens
ccctgaactctgcat

SEQ ID NO: 136550 - DNA, 15 bp, Homo sapiens
tccctgaactctgca

SEQ ID NO: 136551 - DNA, 15 bp, Homo sapiens
ttccctgaactctgc

SEQ ID NO: 136552 - DNA, 15 bp, Homo sapiens
cttccctgaactctg

SEQ ID NO: 136553 - DNA, 15 bp, Homo sapiens
tcttccctgaactct

SEQ ID NO: 136554 - DNA, 15 bp, Homo sapiens
atcttccctgaactc

SEQ ID NO: 136555 - DNA, 15 bp, Homo sapiens
tatcttccctgaact

SEQ ID NO: 136556 - DNA, 15 bp, Homo sapiens
ttatcttccctgaac

SEQ ID NO: 136557 - DNA, 15 bp, Homo sapiens
cttatcttccctgaa

SEQ ID NO: 136558 - DNA, 15 bp, Homo sapiens
acttatcttccctga

SEQ ID NO: 136559 - DNA, 15 bp, Homo sapiens
aacttatcttccctg

SEQ ID NO: 136560 - DNA, 15 bp, Homo sapiens
caacttatcttccct

SEQ ID NO: 136561 - DNA, 15 bp, Homo sapiens
ccaacttatcttccc

SEQ ID NO: 136562 - DNA, 15 bp, Homo sapiens
tccaacttatcttcc

SEQ ID NO: 136563 - DNA, 15 bp, Homo sapiens
ttccaacttatcttc

SEQ ID NO: 136564 - DNA, 15 bp, Homo sapiens
tttccaacttatctt

SEQ ID NO: 136565 - DNA, 15 bp, Homo sapiens
gtttccaacttatct

SEQ ID NO: 136566 - DNA, 15 bp, Homo sapiens
tgtttccaacttatc

SEQ ID NO: 136567 - DNA, 15 bp, Homo sapiens
gtgtttccaacttat

SEQ ID NO: 136568 - DNA, 15 bp, Homo sapiens
agtgtttccaactta

SEQ ID NO: 136569 - DNA, 15 bp, Homo sapiens
tagtgtttccaactt

SEQ ID NO: 136570 - DNA, 15 bp, Homo sapiens
ttagtgtttccaact

SEQ ID NO: 136571 - DNA, 15 bp, Homo sapiens
tttagtgtttccaac

SEQ ID NO: 136572 - DNA, 15 bp, Homo sapiens
atttagtgtttccaa

SEQ ID NO: 136573 - DNA, 15 bp, Homo sapiens
catttagtgtttcca

SEQ ID NO: 136574 - DNA, 15 bp, Homo sapiens
acatttagtgtttcc

SEQ ID NO: 136575 - DNA, 15 bp, Homo sapiens
aacatttagtgtttc

SEQ ID NO: 136576 - DNA, 15 bp, Homo sapiens
taacatttagtgttt

SEQ ID NO: 136577 - DNA, 15 bp, Homo sapiens
ttaacatttagtgtt

SEQ ID NO: 136578 - DNA, 15 bp, Homo sapiens
tttaacatttagtgt

SEQ ID NO: 136579 - DNA, 15 bp, Homo sapiens
ctttaacatttagtg

SEQ ID NO: 136580 - DNA, 15 bp, Homo sapiens
tctttaacatttagt

SEQ ID NO: 136581 - DNA, 15 bp, Homo sapiens
atctttaacatttag

SEQ ID NO: 136582 - DNA, 15 bp, Homo sapiens
catctttaacattta

SEQ ID NO: 136583 - DNA, 15 bp, Homo sapiens
acatctttaacattt

SEQ ID NO: 136584 - DNA, 15 bp, Homo sapiens
tacatctttaacatt

SEQ ID NO: 136585 - DNA, 15 bp, Homo sapiens
ctacatctttaacat

SEQ ID NO: 136586 - DNA, 15 bp, Homo sapiens
gctacatctttaaca

SEQ ID NO: 136587 - DNA, 15 bp, Homo sapiens
tgctacatctttaac

SEQ ID NO: 136588 - DNA, 15 bp, Homo sapiens
ttgctacatctttaa

SEQ ID NO: 136589 - DNA, 15 bp, Homo sapiens
tttgctacatcttta

SEQ ID NO: 136590 - DNA, 15 bp, Homo sapiens
gtttgctacatcttt

SEQ ID NO: 136591 - DNA, 15 bp, Homo sapiens
ggtttgctacatctt

SEQ ID NO: 136592 - DNA, 15 bp, Homo sapiens
gggtttgctacatct

SEQ ID NO: 136593 - DNA, 15 bp, Homo sapiens
agggtttgctacatc

SEQ ID NO: 136594 - DNA, 15 bp, Homo sapiens
cagggtttgctacat

SEQ ID NO: 136595 - DNA, 15 bp, Homo sapiens
acagggtttgctaca

SEQ ID NO: 136596 - DNA, 15 bp, Homo sapiens
gacagggtttgctac

SEQ ID NO: 136597 - DNA, 15 bp, Homo sapiens
tgacagggtttgcta

SEQ ID NO: 136598 - DNA, 15 bp, Homo sapiens
ttgacagggtttgct

SEQ ID NO: 136599 - DNA, 15 bp, Homo sapiens
tttgacagggtttgc

SEQ ID NO: 136600 - DNA, 15 bp, Homo sapiens
gtttgacagggtttg

SEQ ID NO: 136601 - DNA, 15 bp, Homo sapiens
tgtttgacagggttt

SEQ ID NO: 136602 - DNA, 15 bp, Homo sapiens
atgtttgacagggtt

SEQ ID NO: 136603 - DNA, 15 bp, Homo sapiens
aatgtttgacagggt

SEQ ID NO: 136604 - DNA, 15 bp, Homo sapiens
taatgtttgacaggg

SEQ ID NO: 136605 - DNA, 15 bp, Homo sapiens
ctaatgtttgacagg

SEQ ID NO: 136606 - DNA, 15 bp, Homo sapiens
actaatgtttgacag

SEQ ID NO: 136607 - DNA, 15 bp, Homo sapiens
tactaatgtttgaca

SEQ ID NO: 136608 - DNA, 15 bp, Homo sapiens
gtactaatgtttgac

SEQ ID NO: 136609 - DNA, 15 bp, Homo sapiens
agtactaatgtttga

SEQ ID NO: 136610 - DNA, 15 bp, Homo sapiens
aagtactaatgtttg

SEQ ID NO: 136611 - DNA, 15 bp, Homo sapiens
aaagtactaatgttt

SEQ ID NO: 136612 - DNA, 15 bp, Homo sapiens
taaagtactaatgtt

SEQ ID NO: 136613 - DNA, 15 bp, Homo sapiens
ataaagtactaatgt

SEQ ID NO: 136614 - DNA, 15 bp, Homo sapiens
tataaagtactaatg

SEQ ID NO: 136615 - DNA, 15 bp, Homo sapiens
ctataaagtactaat

SEQ ID NO: 136616 - DNA, 15 bp, Homo sapiens
tctataaagtactaa

SEQ ID NO: 136617 - DNA, 15 bp, Homo sapiens
ttctataaagtacta

SEQ ID NO: 136618 - DNA, 15 bp, Homo sapiens
cttctataaagtact

SEQ ID NO: 136619 - DNA, 15 bp, Homo sapiens
tcttctataaagtac

SEQ ID NO: 136620 - DNA, 15 bp, Homo sapiens
ttcttctataaagta

SEQ ID NO: 136621 - DNA, 15 bp, Homo sapiens
attcttctataaagt

SEQ ID NO: 136622 - DNA, 15 bp, Homo sapiens
cattcttctataaag

SEQ ID NO: 136623 - DNA, 15 bp, Homo sapiens
gcattcttctataaa

SEQ ID NO: 136624 - DNA, 15 bp, Homo sapiens
tgcattcttctataa

SEQ ID NO: 136625 - DNA, 15 bp, Homo sapiens
atgcattcttctata

SEQ ID NO: 136626 - DNA, 15 bp, Homo sapiens
catgcattcttctat

SEQ ID NO: 136627 - DNA, 15 bp, Homo sapiens
gcatgcattcttcta

SEQ ID NO: 136628 - DNA, 15 bp, Homo sapiens
agcatgcattcttct

SEQ ID NO: 136629 - DNA, 15 bp, Homo sapiens
aagcatgcattcttc

SEQ ID NO: 136630 - DNA, 15 bp, Homo sapiens
aaagcatgcattctt

SEQ ID NO: 136631 - DNA, 15 bp, Homo sapiens
gaaagcatgcattct

SEQ ID NO: 136632 - DNA, 15 bp, Homo sapiens
ggaaagcatgcattc

SEQ ID NO: 136633 - DNA, 15 bp, Homo sapiens
tggaaagcatgcatt

SEQ ID NO: 136634 - DNA, 15 bp, Homo sapiens
atggaaagcatgcat

SEQ ID NO: 136635 - DNA, 15 bp, Homo sapiens
tatggaaagcatgca

SEQ ID NO: 136636 - DNA, 15 bp, Homo sapiens
atatggaaagcatgc

SEQ ID NO: 136637 - DNA, 15 bp, Homo sapiens
aatatggaaagcatg

SEQ ID NO: 136638 - DNA, 15 bp, Homo sapiens
aaatatggaaagcat

SEQ ID NO: 136639 - DNA, 15 bp, Homo sapiens
aaaatatggaaagca

SEQ ID NO: 136640 - DNA, 15 bp, Homo sapiens
aaaaatatggaaagc

SEQ ID NO: 136641 - DNA, 15 bp, Homo sapiens
aaaaaatatggaaag

SEQ ID NO: 136642 - DNA, 15 bp, Homo sapiens
aaaaaaatatggaaa

SEQ ID NO: 136643 - DNA, 15 bp, Homo sapiens
gaaaaaaatatggaa

SEQ ID NO: 136644 - DNA, 15 bp, Homo sapiens
ggaaaaaaatatgga

SEQ ID NO: 136645 - DNA, 15 bp, Homo sapiens
aggaaaaaaatatgg

SEQ ID NO: 136646 - DNA, 15 bp, Homo sapiens
aaggaaaaaaatatg

SEQ ID NO: 136647 - DNA, 15 bp, Homo sapiens
taaggaaaaaaatat

SEQ ID NO: 136648 - DNA, 15 bp, Homo sapiens
gtaaggaaaaaaata

SEQ ID NO: 136649 - DNA, 15 bp, Homo sapiens
tgtaaggaaaaaaat

SEQ ID NO: 136650 - DNA, 15 bp, Homo sapiens
atgtaaggaaaaaaa

SEQ ID NO: 136651 - DNA, 15 bp, Homo sapiens
tatgtaaggaaaaaa

SEQ ID NO: 136652 - DNA, 15 bp, Homo sapiens
ttatgtaaggaaaaa

SEQ ID NO: 136653 - DNA, 15 bp, Homo sapiens
tttatgtaaggaaaa

SEQ ID NO: 136654 - DNA, 15 bp, Homo sapiens
gtttatgtaaggaaa

SEQ ID NO: 136655 - DNA, 15 bp, Homo sapiens
tgtttatgtaaggaa

SEQ ID NO: 136656 - DNA, 15 bp, Homo sapiens
atgtttatgtaagga

SEQ ID NO: 136657 - DNA, 15 bp, Homo sapiens
gatgtttatgtaagg

SEQ ID NO: 136658 - DNA, 15 bp, Homo sapiens
tgatgtttatgtaag

SEQ ID NO: 136659 - DNA, 15 bp, Homo sapiens
ctgatgtttatgtaa

SEQ ID NO: 136660 - DNA, 15 bp, Homo sapiens
cctgatgtttatgta

SEQ ID NO: 136661 - DNA, 15 bp, Homo sapiens
acctgatgtttatgt

SEQ ID NO: 136662 - DNA, 15 bp, Homo sapiens
aacctgatgtttatg

SEQ ID NO: 136663 - DNA, 15 bp, Homo sapiens
taacctgatgtttat

SEQ ID NO: 136664 - DNA, 15 bp, Homo sapiens
ctaacctgatgttta

SEQ ID NO: 136665 - DNA, 15 bp, Homo sapiens
cctaacctgatgttt

SEQ ID NO: 136666 - DNA, 15 bp, Homo sapiens
gcctaacctgatgtt

SEQ ID NO: 136667 - DNA, 15 bp, Homo sapiens
tgcctaacctgatgt

SEQ ID NO: 136668 - DNA, 15 bp, Homo sapiens
ctgcctaacctgatg

SEQ ID NO: 136669 - DNA, 15 bp, Homo sapiens
actgcctaacctgat

SEQ ID NO: 136670 - DNA, 15 bp, Homo sapiens
tactgcctaacctga

SEQ ID NO: 136671 - DNA, 15 bp, Homo sapiens
atactgcctaacctg

SEQ ID NO: 136672 - DNA, 15 bp, Homo sapiens
tatactgcctaacct

SEQ ID NO: 136673 - DNA, 15 bp, Homo sapiens
ttatactgcctaacc

SEQ ID NO: 136674 - DNA, 15 bp, Homo sapiens
tttatactgcctaac

SEQ ID NO: 136675 - DNA, 15 bp, Homo sapiens
ctttatactgcctaa

SEQ ID NO: 136676 - DNA, 15 bp, Homo sapiens
tctttatactgccta

SEQ ID NO: 136677 - DNA, 15 bp, Homo sapiens
ttctttatactgcct

SEQ ID NO: 136678 - DNA, 15 bp, Homo sapiens
attctttatactgcc

SEQ ID NO: 136679 - DNA, 15 bp, Homo sapiens
tattctttatactgc

SEQ ID NO: 136680 - DNA, 15 bp, Homo sapiens
ctattctttatactg

SEQ ID NO: 136681 - DNA, 15 bp, Homo sapiens
cctattctttatact

SEQ ID NO: 136682 - DNA, 15 bp, Homo sapiens
tcctattctttatac

SEQ ID NO: 136683 - DNA, 15 bp, Homo sapiens
gtcctattctttata

SEQ ID NO: 136684 - DNA, 15 bp, Homo sapiens
agtcctattctttat

SEQ ID NO: 136685 - DNA, 15 bp, Homo sapiens
aagtcctattcttta

SEQ ID NO: 136686 - DNA, 15 bp, Homo sapiens
caagtcctattcttt

SEQ ID NO: 136687 - DNA, 15 bp, Homo sapiens
acaagtcctattctt

SEQ ID NO: 136688 - DNA, 15 bp, Homo sapiens
aacaagtcctattct

SEQ ID NO: 136689 - DNA, 15 bp, Homo sapiens
aaacaagtcctattc

SEQ ID NO: 136690 - DNA, 15 bp, Homo sapiens
aaaacaagtcctatt

SEQ ID NO: 136691 - DNA, 15 bp, Homo sapiens
aaaaacaagtcctat

SEQ ID NO: 136692 - DNA, 15 bp, Homo sapiens
caaaaacaagtccta

SEQ ID NO: 136693 - DNA, 15 bp, Homo sapiens
acaaaaacaagtcct

SEQ ID NO: 136694 - DNA, 15 bp, Homo sapiens
aacaaaaacaagtcc

SEQ ID NO: 136695 - DNA, 15 bp, Homo sapiens
aaacaaaaacaagtc

SEQ ID NO: 136696 - DNA, 15 bp, Homo sapiens
aaaacaaaaacaagt

SEQ ID NO: 136697 - DNA, 15 bp, Homo sapiens
aaaaacaaaaacaag

SEQ ID NO: 136698 - DNA, 15 bp, Homo sapiens
caaaaacaaaaacaa

SEQ ID NO: 136699 - DNA, 15 bp, Homo sapiens
acaaaaacaaaaaca

SEQ ID NO: 136700 - DNA, 15 bp, Homo sapiens
aacaaaaacaaaaac

SEQ ID NO: 136701 - DNA, 15 bp, Homo sapiens
aaacaaaaacaaaaa

SEQ ID NO: 136702 - DNA, 15 bp, Homo sapiens
aaaacaaaaacaaaa

SEQ ID NO: 136703 - DNA, 15 bp, Homo sapiens
caaaacaaaaacaaa

SEQ ID NO: 136704 - DNA, 15 bp, Homo sapiens
gcaacaaaacaaaaa

SEQ ID NO: 136705 - DNA, 15 bp, Homo sapiens
tgcaacaaaacaaaa

SEQ ID NO: 136706 - DNA, 15 bp, Homo sapiens
gtgcaacaaaacaaa

SEQ ID NO: 136707 - DNA, 15 bp, Homo sapiens
agtgcaacaaaacaa

SEQ ID NO: 136708 - DNA, 15 bp, Homo sapiens
cagtgcaacaaaaca

SEQ ID NO: 136709 - DNA, 15 bp, Homo sapiens
tcagtgcaacaaaac

SEQ ID NO: 136710 - DNA, 15 bp, Homo sapiens
ttcagtgcaacaaaa

SEQ ID NO: 136711 - DNA, 15 bp, Homo sapiens
cttcagtgcaacaaa

SEQ ID NO: 136712 - DNA, 15 bp, Homo sapiens
acttcagtgcaacaa

SEQ ID NO: 136713 - DNA, 15 bp, Homo sapiens
aacttcagtgcaaca

SEQ ID NO: 136714 - DNA, 15 bp, Homo sapiens
aaacttcagtgcaac

SEQ ID NO: 136715 - DNA, 15 bp, Homo sapiens
caaacttcagtgcaa

SEQ ID NO: 136716 - DNA, 15 bp, Homo sapiens
tcaaacttcagtgca

SEQ ID NO: 136717 - DNA, 15 bp, Homo sapiens
atcaaacttcagtgc

SEQ ID NO: 136718 - DNA, 15 bp, Homo sapiens
tatcaaacttcagtg

SEQ ID NO: 136719 - DNA, 15 bp, Homo sapiens
ttatcaaacttcagt

SEQ ID NO: 136720 - DNA, 15 bp, Homo sapiens
tttatcaaacttcag

SEQ ID NO: 136721 - DNA, 15 bp, Homo sapiens
atttatcaaacttca

SEQ ID NO: 136722 - DNA, 15 bp, Homo sapiens
tatttatcaaacttc

SEQ ID NO: 136723 - DNA, 15 bp, Homo sapiens
ctatttatcaaactt

SEQ ID NO: 136724 - DNA, 15 bp, Homo sapiens
actatttatcaaact

SEQ ID NO: 136725 - DNA, 15 bp, Homo sapiens
cactatttatcaaac

SEQ ID NO: 136726 - DNA, 15 bp, Homo sapiens
acactatttatcaaa

SEQ ID NO: 136727 - DNA, 15 bp, Homo sapiens
aacactatttatcaa

SEQ ID NO: 136728 - DNA, 15 bp, Homo sapiens
taacactatttatca

SEQ ID NO: 136729 - DNA, 15 bp, Homo sapiens
ataacactatttatc

SEQ ID NO: 136730 - DNA, 15 bp, Homo sapiens
aataacactatttat

SEQ ID NO: 136731 - DNA, 15 bp, Homo sapiens
caataacactattta

SEQ ID NO: 136732 - DNA, 15 bp, Homo sapiens
tcaataacactattt

SEQ ID NO: 136733 - DNA, 15 bp, Homo sapiens
ctcaataacactatt

SEQ ID NO: 136734 - DNA, 15 bp, Homo sapiens
tctcaataacactat

SEQ ID NO: 136735 - DNA, 15 bp, Homo sapiens
ctctcaataacacta

SEQ ID NO: 136736 - DNA, 15 bp, Homo sapiens
tctctcaataacact

SEQ ID NO: 136737 - DNA, 15 bp, Homo sapiens
ctctctcaataacac

SEQ ID NO: 136738 - DNA, 15 bp, Homo sapiens
tctctctcaataaca

SEQ ID NO: 136739 - DNA, 15 bp, Homo sapiens
atctctctcaataac

SEQ ID NO: 136740 - DNA, 15 bp, Homo sapiens
catctctctcaataa

SEQ ID NO: 136741 - DNA, 15 bp, Homo sapiens
acatctctctcaata

SEQ ID NO: 136742 - DNA, 15 bp, Homo sapiens
cacatctctctcaat

SEQ ID NO: 136743 - DNA, 15 bp, Homo sapiens
acacatctctctcaa

SEQ ID NO: 136744 - DNA, 15 bp, Homo sapiens
tacacatctctctca

SEQ ID NO: 136745 - DNA, 15 bp, Homo sapiens
ttacacatctctctc

SEQ ID NO: 136746 - DNA, 15 bp, Homo sapiens
attacacatctctct

SEQ ID NO: 136747 - DNA, 15 bp, Homo sapiens
aattacacatctctc

SEQ ID NO: 136748 - DNA, 15 bp, Homo sapiens
aaattacacatctct

SEQ ID NO: 136749 - DNA, 15 bp, Homo sapiens
aaaattacacatctc

SEQ ID NO: 136750 - DNA, 15 bp, Homo sapiens
aaaaattacacatct

SEQ ID NO: 136751 - DNA, 15 bp, Homo sapiens
gaaaaattacacatc

SEQ ID NO: 136752 - DNA, 15 bp, Homo sapiens
agaaaaattacacat

SEQ ID NO: 136753 - DNA, 15 bp, Homo sapiens
cagaaaaattacaca

SEQ ID NO: 136754 - DNA, 15 bp, Homo sapiens
acagaaaaattacac

SEQ ID NO: 136755 - DNA, 15 bp, Homo sapiens
tacagaaaaattaca

SEQ ID NO: 136756 - DNA, 15 bp, Homo sapiens
atacagaaaaattac

SEQ ID NO: 136757 - DNA, 15 bp, Homo sapiens
tatacagaaaaatta

SEQ ID NO: 136758 - DNA, 15 bp, Homo sapiens
ctatacagaaaaatt

SEQ ID NO: 136759 - DNA, 15 bp, Homo sapiens
tctatacagaaaaat

SEQ ID NO: 136760 - DNA, 15 bp, Homo sapiens
gtctatacagaaaaa

SEQ ID NO: 136761 - DNA, 15 bp, Homo sapiens
tgtctatacagaaaa

SEQ ID NO: 136762 - DNA, 15 bp, Homo sapiens
ctgtctatacagaaa

SEQ ID NO: 136763 - DNA, 15 bp, Homo sapiens
cctgtctatacagaa

SEQ ID NO: 136764 - DNA, 15 bp, Homo sapiens
tcctgtctatacaga

SEQ ID NO: 136765 - DNA, 15 bp, Homo sapiens
ctcctgtctatacag

SEQ ID NO: 136766 - DNA, 15 bp, Homo sapiens
tctcctgtctataca

SEQ ID NO: 136767 - DNA, 15 bp, Homo sapiens
ttctcctgtctatac

SEQ ID NO: 136768 - DNA, 15 bp, Homo sapiens
cttctcctgtctata

SEQ ID NO: 136769 - DNA, 15 bp, Homo sapiens
tcttctcctgtctat

SEQ ID NO: 136770 - DNA, 15 bp, Homo sapiens
ttcttctcctgtcta

SEQ ID NO: 136771 - DNA, 15 bp, Homo sapiens
tttcttctcctgtct

SEQ ID NO: 136772 - DNA, 15 bp, Homo sapiens
ctttcttctcctgtc

SEQ ID NO: 136773 - DNA, 15 bp, Homo sapiens
tctttcttctcctgt

SEQ ID NO: 136774 - DNA, 15 bp, Homo sapiens
ttctttcttctcctg

SEQ ID NO: 136775 - DNA, 15 bp, Homo sapiens
gttctttcttctcct

SEQ ID NO: 136776 - DNA, 15 bp, Homo sapiens
agttctttcttctcc

SEQ ID NO: 136777 - DNA, 15 bp, Homo sapiens
tagttctttcttctc

SEQ ID NO: 136778 - DNA, 15 bp, Homo sapiens
atagttctttcttct

SEQ ID NO: 136779 - DNA, 15 bp, Homo sapiens
gatagttctttcttc

SEQ ID NO: 136780 - DNA, 15 bp, Homo sapiens
agatagttctttctt

SEQ ID NO: 136781 - DNA, 15 bp, Homo sapiens
aagatagttctttct

SEQ ID NO: 136782 - DNA, 15 bp, Homo sapiens
gaagatagttctttc

SEQ ID NO: 136783 - DNA, 15 bp, Homo sapiens
tgaagatagttcttt

SEQ ID NO: 136784 - DNA, 15 bp, Homo sapiens
atgaagatagttctt

SEQ ID NO: 136785 - DNA, 15 bp, Homo sapiens
gatgaagatagttct

SEQ ID NO: 136786 - DNA, 15 bp, Homo sapiens
agatgaagatagttc

SEQ ID NO: 136787 - DNA, 15 bp, Homo sapiens
cagatgaagatagtt

SEQ ID NO: 136788 - DNA, 15 bp, Homo sapiens
tcagatgaagatagt

SEQ ID NO: 136789 - DNA, 15 bp, Homo sapiens
ctcagatgaagatag

SEQ ID NO: 136790 - DNA, 15 bp, Homo sapiens
tctcagatgaagata

SEQ ID NO: 136791 - DNA, 15 bp, Homo sapiens
ctctcagatgaagat

SEQ ID NO: 136792 - DNA, 15 bp, Homo sapiens
tctctcagatgaaga

SEQ ID NO: 136793 - DNA, 15 bp, Homo sapiens
ctctctcagatgaag

SEQ ID NO: 136794 - DNA, 15 bp, Homo sapiens
cctctctcagatgaa

SEQ ID NO: 136795 - DNA, 15 bp, Homo sapiens
gcctctctcagatga

SEQ ID NO: 136796 - DNA, 15 bp, Homo sapiens
agcctctctcagatg

SEQ ID NO: 136797 - DNA, 15 bp, Homo sapiens
tagcctctctcagat

SEQ ID NO: 136798 - DNA, 15 bp, Homo sapiens
ttagcctctctcaga

SEQ ID NO: 136799 - DNA, 15 bp, Homo sapiens
tttagcctctctcag

SEQ ID NO: 136800 - DNA, 15 bp, Homo sapiens
ttttagcctctctca

SEQ ID NO: 136801 - DNA, 15 bp, Homo sapiens
attttagcctctctc

SEQ ID NO: 136802 - DNA, 15 bp, Homo sapiens
cattttagcctctct

SEQ ID NO: 136803 - DNA, 15 bp, Homo sapiens
acattttagcctctc

SEQ ID NO: 136804 - DNA, 15 bp, Homo sapiens
aacattttagcctct

SEQ ID NO: 136805 - DNA, 15 bp, Homo sapiens
aaacattttagcctc

SEQ ID NO: 136806 - DNA, 15 bp, Homo sapiens
aaaacattttagcct

SEQ ID NO: 136807 - DNA, 15 bp, Homo sapiens
gaaaacattttagcc

SEQ ID NO: 136808 - DNA, 15 bp, Homo sapiens
tgaaaacattttagc

SEQ ID NO: 136809 - DNA, 15 bp, Homo sapiens
gctgaaaacatttta

SEQ ID NO: 136810 - DNA, 15 bp, Homo sapiens
agctgaaaacatttt

SEQ ID NO: 136811 - DNA, 15 bp, Homo sapiens
tagctgaaaacattt

SEQ ID NO: 136812 - DNA, 15 bp, Homo sapiens
ctagctgaaaacatt

SEQ ID NO: 136813 - DNA, 15 bp, Homo sapiens
cctagctgaaaacat

SEQ ID NO: 136814 - DNA, 15 bp, Homo sapiens
tcctagctgaaaaca

SEQ ID NO: 136815 - DNA, 15 bp, Homo sapiens
ttcctagctgaaaac

SEQ ID NO: 136816 - DNA, 15 bp, Homo sapiens
gttcctagctgaaaa

SEQ ID NO: 136817 - DNA, 15 bp, Homo sapiens
tgttcctagctgaaa

SEQ ID NO: 136818 - DNA, 15 bp, Homo sapiens
ttgttcctagctgaa

SEQ ID NO: 136819 - DNA, 15 bp, Homo sapiens
tttgttcctagctga

SEQ ID NO: 136820 - DNA, 15 bp, Homo sapiens
atttgttcctagctg

SEQ ID NO: 136821 - DNA, 15 bp, Homo sapiens
gatttgttcctagct

SEQ ID NO: 136822 - DNA, 15 bp, Homo sapiens
agatttgttcctagc

SEQ ID NO: 136823 - DNA, 15 bp, Homo sapiens
aagatttgttcctag

SEQ ID NO: 136824 - DNA, 15 bp, Homo sapiens
gaagatttgttccta

SEQ ID NO: 136825 - DNA, 15 bp, Homo sapiens
ggaagatttgttcct

SEQ ID NO: 136826 - DNA, 15 bp, Homo sapiens
aggaagatttgttcc

SEQ ID NO: 136827 - DNA, 15 bp, Homo sapiens
caggaagatttgttc

SEQ ID NO: 136828 - DNA, 15 bp, Homo sapiens
ccaggaagatttgtt

SEQ ID NO: 136829 - DNA, 15 bp, Homo sapiens
accaggaagatttgt

SEQ ID NO: 136830 - DNA, 15 bp, Homo sapiens
gaccaggaagatttg

SEQ ID NO: 136831 - DNA, 15 bp, Homo sapiens
cgaccaggaagattt

SEQ ID NO: 136832 - DNA, 15 bp, Homo sapiens
tcgaccaggaagatt

SEQ ID NO: 136833 - DNA, 15 bp, Homo sapiens
ttcgaccaggaagat

SEQ ID NO: 136834 - DNA, 15 bp, Homo sapiens
tttcgaccaggaaga

SEQ ID NO: 136835 - DNA, 15 bp, Homo sapiens
ctttcgaccaggaag

SEQ ID NO: 136836 - DNA, 15 bp, Homo sapiens
actttcgaccaggaa

SEQ ID NO: 136837 - DNA, 15 bp, Homo sapiens
aactttcgaccagga

SEQ ID NO: 136838 - DNA, 15 bp, Homo sapiens
taactttcgaccagg

SEQ ID NO: 136839 - DNA, 15 bp, Homo sapiens
ctaactttcgaccag

SEQ ID NO: 136840 - DNA, 15 bp, Homo sapiens
actaactttcgacca

SEQ ID NO: 136841 - DNA, 15 bp, Homo sapiens
tactaactttcgacc

SEQ ID NO: 136842 - DNA, 15 bp, Homo sapiens
ctactaactttcgac

SEQ ID NO: 136843 - DNA, 15 bp, Homo sapiens
cctactaactttcga

SEQ ID NO: 136844 - DNA, 15 bp, Homo sapiens
tcctactaactttcg

SEQ ID NO: 136845 - DNA, 15 bp, Homo sapiens
atcctactaactttc

SEQ ID NO: 136846 - DNA, 15 bp, Homo sapiens
tatcctactaacttt

SEQ ID NO: 136847 - DNA, 15 bp, Homo sapiens
atatcctactaactt

SEQ ID NO: 136848 - DNA, 15 bp, Homo sapiens
catatcctactaact

SEQ ID NO: 136849 - DNA, 15 bp, Homo sapiens
gcatatcctactaac

SEQ ID NO: 136850 - DNA, 15 bp, Homo sapiens
ggcatatcctactaa

SEQ ID NO: 136851 - DNA, 15 bp, Homo sapiens
aggcatatcctacta

SEQ ID NO: 136852 - DNA, 15 bp, Homo sapiens
caggcatatcctact

SEQ ID NO: 136853 - DNA, 15 bp, Homo sapiens
gcaggcatatcctac

SEQ ID NO: 136854 - DNA, 15 bp, Homo sapiens
agcaggcatatccta

SEQ ID NO: 136855 - DNA, 15 bp, Homo sapiens
gagcaggcatatcct

SEQ ID NO: 136856 - DNA, 15 bp, Homo sapiens
agagcaggcatatcc

SEQ ID NO: 136857 - DNA, 15 bp, Homo sapiens
aagagcaggcatatc

SEQ ID NO: 136858 - DNA, 15 bp, Homo sapiens
aaagagcaggcatat

SEQ ID NO: 136859 - DNA, 15 bp, Homo sapiens
caaagagcaggcata

SEQ ID NO: 136860 - DNA, 15 bp, Homo sapiens
ccaaagagcaggcat

SEQ ID NO: 136861 - DNA, 15 bp, Homo sapiens
gccaaagagcaggca

SEQ ID NO: 136862 - DNA, 15 bp, Homo sapiens
ggccaaagagcaggc

SEQ ID NO: 136863 - DNA, 15 bp, Homo sapiens
aggccaaagagcagg

SEQ ID NO: 136864 - DNA, 15 bp, Homo sapiens
caggccaaagagcag

SEQ ID NO: 136865 - DNA, 15 bp, Homo sapiens
tcaggccaaagagca

SEQ ID NO: 136866 - DNA, 15 bp, Homo sapiens
atcaggccaaagagc

SEQ ID NO: 136867 - DNA, 15 bp, Homo sapiens
catcaggccaaagag

SEQ ID NO: 136868 - DNA, 15 bp, Homo sapiens
tcatcaggccaaaga

SEQ ID NO: 136869 - DNA, 15 bp, Homo sapiens
gtcatcaggccaaag

SEQ ID NO: 136870 - DNA, 15 bp, Homo sapiens
ggtcatcaggccaaa

SEQ ID NO: 136871 - DNA, 15 bp, Homo sapiens
tggtcatcaggccaa

SEQ ID NO: 136872 - DNA, 15 bp, Homo sapiens
ttggtcatcaggcca

SEQ ID NO: 136873 - DNA, 15 bp, Homo sapiens
attggtcatcaggcc

SEQ ID NO: 136874 - DNA, 15 bp, Homo sapiens
aattggtcatcaggc

SEQ ID NO: 136875 - DNA, 15 bp, Homo sapiens
aaattggtcatcagg

SEQ ID NO: 136876 - DNA, 15 bp, Homo sapiens
aaaattggtcatcag

SEQ ID NO: 136877 - DNA, 15 bp, Homo sapiens
taaaattggtcatca

SEQ ID NO: 136878 - DNA, 15 bp, Homo sapiens
ttaaaattggtcatc

SEQ ID NO: 136879 - DNA, 15 bp, Homo sapiens
gttaaaattggtcat

SEQ ID NO: 136880 - DNA, 15 bp, Homo sapiens
agttaaaattggtca

SEQ ID NO: 136881 - DNA, 15 bp, Homo sapiens
aagttaaaattggtc

SEQ ID NO: 136882 - DNA, 15 bp, Homo sapiens
taagttaaaattggt

SEQ ID NO: 136883 - DNA, 15 bp, Homo sapiens
ctaagttaaaattgg

SEQ ID NO: 136884 - DNA, 15 bp, Homo sapiens
tctaagttaaaattg

SEQ ID NO: 136885 - DNA, 15 bp, Homo sapiens
ctctaagttaaaatt

SEQ ID NO: 136886 - DNA, 15 bp, Homo sapiens
gctctaagttaaaat

SEQ ID NO: 136887 - DNA, 15 bp, Homo sapiens
agctctaagttaaaa

SEQ ID NO: 136888 - DNA, 15 bp, Homo sapiens
aagctctaagttaaa

SEQ ID NO: 136889 - DNA, 15 bp, Homo sapiens
aaagctctaagttaa

SEQ ID NO: 136890 - DNA, 15 bp, Homo sapiens
aaaagctctaagtta

SEQ ID NO: 136891 - DNA, 15 bp, Homo sapiens
aaaaagctctaagtt

SEQ ID NO: 136892 - DNA, 15 bp, Homo sapiens
aaaaaagctctaagt

SEQ ID NO: 136893 - DNA, 15 bp, Homo sapiens
aaaaaaagctctaag

SEQ ID NO: 136894 - DNA, 15 bp, Homo sapiens
aaaaaaaagctctaa

SEQ ID NO: 136895 - DNA, 15 bp, Homo sapiens
aaaaaaaaagctcta

SEQ ID NO: 136896 - DNA, 15 bp, Homo sapiens
aaaaaaaaaagctct

SEQ ID NO: 136897 - DNA, 15 bp, Homo sapiens
aaaaaaaaaaagctc

SEQ ID NO: 136898 - DNA, 15 bp, Homo sapiens
taaaaaaaaaaagct

SEQ ID NO: 136899 - DNA, 15 bp, Homo sapiens
ttaaaaaaaaaaagc

SEQ ID NO: 136900 - DNA, 15 bp, Homo sapiens
attaaaaaaaaaaag

SEQ ID NO: 136901 - DNA, 15 bp, Homo sapiens
aattaaaaaaaaaaa

SEQ ID NO: 136902 - DNA, 15 bp, Homo sapiens
aaattaaaaaaaaaa

SEQ ID NO: 136903 - DNA, 15 bp, Homo sapiens
aaaattaaaaaaaaa

SEQ ID NO: 136904 - DNA, 15 bp, Homo sapiens
caaaattaaaaaaaa

SEQ ID NO: 136905 - DNA, 15 bp, Homo sapiens
acaaaattaaaaaaa

SEQ ID NO: 136906 - DNA, 15 bp, Homo sapiens
gacaaaattaaaaaa

SEQ ID NO: 136907 - DNA, 15 bp, Homo sapiens
agacaaaattaaaaa

SEQ ID NO: 136908 - DNA, 15 bp, Homo sapiens
cagacaaaattaaaa

SEQ ID NO: 136909 - DNA, 15 bp, Homo sapiens
gcagacaaaattaaa

SEQ ID NO: 136910 - DNA, 15 bp, Homo sapiens
ggcagacaaaattaa

SEQ ID NO: 136911 - DNA, 15 bp, Homo sapiens
gggcagacaaaatta

SEQ ID NO: 136912 - DNA, 15 bp, Homo sapiens
ggggcagacaaaatt

SEQ ID NO: 136913 - DNA, 15 bp, Homo sapiens
tggggcagacaaaat

SEQ ID NO: 136914 - DNA, 15 bp, Homo sapiens
ttggggcagacaaaa

SEQ ID NO: 136915 - DNA, 15 bp, Homo sapiens
cttggggcagacaaa

SEQ ID NO: 136916 - DNA, 15 bp, Homo sapiens
acttggggcagacaa

SEQ ID NO: 136917 - DNA, 15 bp, Homo sapiens
aacttggggcagaca

SEQ ID NO: 136918 - DNA, 15 bp, Homo sapiens
aaacttggggcagac

SEQ ID NO: 136919 - DNA, 15 bp, Homo sapiens
aaaacttggggcaga

SEQ ID NO: 136920 - DNA, 15 bp, Homo sapiens
caaaacttggggcag

SEQ ID NO: 136921 - DNA, 15 bp, Homo sapiens
acaaaacttggggca

SEQ ID NO: 136922 - DNA, 15 bp, Homo sapiens
cacaaaacttggggc

SEQ ID NO: 136923 - DNA, 15 bp, Homo sapiens
tcacaaaacttgggg

SEQ ID NO: 136924 - DNA, 15 bp, Homo sapiens
ttcacaaaacttggg

SEQ ID NO: 136925 - DNA, 15 bp, Homo sapiens
tttcacaaaacttgg

SEQ ID NO: 136926 - DNA, 15 bp, Homo sapiens
atttcacaaaacttg

SEQ ID NO: 136927 - DNA, 15 bp, Homo sapiens
aatttcacaaaactt

SEQ ID NO: 136928 - DNA, 15 bp, Homo sapiens
aaatttcacaaaact

SEQ ID NO: 136929 - DNA, 15 bp, Homo sapiens
aaaatttcacaaaac

SEQ ID NO: 136930 - DNA, 15 bp, Homo sapiens
aaaaatttcacaaaa

SEQ ID NO: 136931 - DNA, 15 bp, Homo sapiens
gaaaaatttcacaaa

SEQ ID NO: 136932 - DNA, 15 bp, Homo sapiens
tgaaaaatttcacaa

SEQ ID NO: 136933 - DNA, 15 bp, Homo sapiens
atgaaaaatttcaca

SEQ ID NO: 136934 - DNA, 15 bp, Homo sapiens
tatgaaaaatttcac

SEQ ID NO: 136935 - DNA, 15 bp, Homo sapiens
atatgaaaaatttca

SEQ ID NO: 136936 - DNA, 15 bp, Homo sapiens
aatatgaaaaatttc

SEQ ID NO: 136937 - DNA, 15 bp, Homo sapiens
aaatatgaaaaattt

SEQ ID NO: 136938 - DNA, 15 bp, Homo sapiens
aaaatatgaaaaatt

SEQ ID NO: 136939 - DNA, 15 bp, Homo sapiens
taaaatatgaaaaat

SEQ ID NO: 136940 - DNA, 15 bp, Homo sapiens
ttaaaatatgaaaaa

SEQ ID NO: 136941 - DNA, 15 bp, Homo sapiens
attaaaatatgaaaa

SEQ ID NO: 136942 - DNA, 15 bp, Homo sapiens
aattaaaatatgaaa

SEQ ID NO: 136943 - DNA, 15 bp, Homo sapiens
aaattaaaatatgaa

SEQ ID NO: 136944 - DNA, 15 bp, Homo sapiens
gaaattaaaatatga

SEQ ID NO: 136945 - DNA, 15 bp, Homo sapiens
tgaaattaaaatatg

SEQ ID NO: 136946 - DNA, 15 bp, Homo sapiens
ttgaaattaaaatat

SEQ ID NO: 136947 - DNA, 15 bp, Homo sapiens
cttgaaattaaaata

SEQ ID NO: 136948 - DNA, 15 bp, Homo sapiens
gcttgaaattaaaat

SEQ ID NO: 136949 - DNA, 15 bp, Homo sapiens
agcttgaaattaaaa

SEQ ID NO: 136950 - DNA, 15 bp, Homo sapiens
aagcttgaaattaaa

SEQ ID NO: 136951 - DNA, 15 bp, Homo sapiens
taagcttgaaattaa

SEQ ID NO: 136952 - DNA, 15 bp, Homo sapiens
ataagcttgaaatta

SEQ ID NO: 136953 - DNA, 15 bp, Homo sapiens
aataagcttgaaatt

SEQ ID NO: 136954 - DNA, 15 bp, Homo sapiens
aaataagcttgaaat

SEQ ID NO: 136955 - DNA, 15 bp, Homo sapiens
aaaataagcttgaaa

SEQ ID NO: 136956 - DNA, 15 bp, Homo sapiens
caaaataagcttgaa

SEQ ID NO: 136957 - DNA, 15 bp, Homo sapiens
ccaaaataagcttga

SEQ ID NO: 136958 - DNA, 15 bp, Homo sapiens
tccaaaataagcttg

SEQ ID NO: 136959 - DNA, 15 bp, Homo sapiens
ctccaaaataagctt

SEQ ID NO: 136960 - DNA, 15 bp, Homo sapiens
tctccaaaataagct

SEQ ID NO: 136961 - DNA, 15 bp, Homo sapiens
ctctccaaaataagc

SEQ ID NO: 136962 - DNA, 15 bp, Homo sapiens
tctctccaaaataag

SEQ ID NO: 136963 - DNA, 15 bp, Homo sapiens
atctctccaaaataa

SEQ ID NO: 136964 - DNA, 15 bp, Homo sapiens
tatctctccaaaata

SEQ ID NO: 136965 - DNA, 15 bp, Homo sapiens
ctatctctccaaaat

SEQ ID NO: 136966 - DNA, 15 bp, Homo sapiens
cctatctctccaaaa

SEQ ID NO: 136967 - DNA, 15 bp, Homo sapiens
tcctatctctccaaa

SEQ ID NO: 136968 - DNA, 15 bp, Homo sapiens
ttcctatctctccaa

SEQ ID NO: 136969 - DNA, 15 bp, Homo sapiens
cttcctatctctcca

SEQ ID NO: 136970 - DNA, 15 bp, Homo sapiens
ccttcctatctctcc

SEQ ID NO: 136971 - DNA, 15 bp, Homo sapiens
accttcctatctctc

SEQ ID NO: 136972 - DNA, 15 bp, Homo sapiens
gaccttcctatctct

SEQ ID NO: 136973 - DNA, 15 bp, Homo sapiens
tgaccttcctatctc

SEQ ID NO: 136974 - DNA, 15 bp, Homo sapiens
atgaccttcctatct

SEQ ID NO: 136975 - DNA, 15 bp, Homo sapiens
aatgaccttcctatc

SEQ ID NO: 136976 - DNA, 15 bp, Homo sapiens
aaatgaccttcctat

SEQ ID NO: 136977 - DNA, 15 bp, Homo sapiens
gaaatgaccttccta

SEQ ID NO: 136978 - DNA, 15 bp, Homo sapiens
ggaaatgaccttcct

SEQ ID NO: 136979 - DNA, 15 bp, Homo sapiens
tggaaatgaccttcc

SEQ ID NO: 136980 - DNA, 15 bp, Homo sapiens
atggaaatgaccttc

SEQ ID NO: 136981 - DNA, 15 bp, Homo sapiens
catggaaatgacctt

SEQ ID NO: 136982 - DNA, 15 bp, Homo sapiens
acatggaaatgacct

SEQ ID NO: 136983 - DNA, 15 bp, Homo sapiens
tacatggaaatgacc

SEQ ID NO: 136984 - DNA, 15 bp, Homo sapiens
atacatggaaatgac

SEQ ID NO: 136985 - DNA, 15 bp, Homo sapiens
catacatggaaatga

SEQ ID NO: 136986 - DNA, 15 bp, Homo sapiens
gcatacatggaaatg

SEQ ID NO: 136987 - DNA, 15 bp, Homo sapiens
tgcatacatggaaat

SEQ ID NO: 136988 - DNA, 15 bp, Homo sapiens
atgcatacatggaaa

SEQ ID NO: 136989 - DNA, 15 bp, Homo sapiens
tatgcatacatggaa

SEQ ID NO: 136990 - DNA, 15 bp, Homo sapiens
ttatgcatacatgga

SEQ ID NO: 136991 - DNA, 15 bp, Homo sapiens
attatgcatacatgg

SEQ ID NO: 136992 - DNA, 15 bp, Homo sapiens
tattatgcatacatg

SEQ ID NO: 136993 - DNA, 15 bp, Homo sapiens
ttattatgcatacat

SEQ ID NO: 136994 - DNA, 15 bp, Homo sapiens
attattatgcataca

SEQ ID NO: 136995 - DNA, 15 bp, Homo sapiens
gattattatgcatac

SEQ ID NO: 136996 - DNA, 15 bp, Homo sapiens
ggattattatgcata

SEQ ID NO: 136997 - DNA, 15 bp, Homo sapiens
aggattattatgcat

SEQ ID NO: 136998 - DNA, 15 bp, Homo sapiens
caggattattatgca

SEQ ID NO: 136999 - DNA, 15 bp, Homo sapiens
gcaggattattatgc

SEQ ID NO: 137000 - DNA, 15 bp, Homo sapiens
tgcaggattattatg

SEQ ID NO: 137001 - DNA, 15 bp, Homo sapiens
ttgcaggattattat

SEQ ID NO: 137002 - DNA, 15 bp, Homo sapiens
tttgcaggattatta

SEQ ID NO: 137003 - DNA, 15 bp, Homo sapiens
ctttgcaggattatt

SEQ ID NO: 137004 - DNA, 15 bp, Homo sapiens
actttgcaggattat

SEQ ID NO: 137005 - DNA, 15 bp, Homo sapiens
tactttgcaggatta

SEQ ID NO: 137006 - DNA, 15 bp, Homo sapiens
gtactttgcaggatt

SEQ ID NO: 137007 - DNA, 15 bp, Homo sapiens
tgtactttgcaggat

SEQ ID NO: 137008 - DNA, 15 bp, Homo sapiens
ctgtactttgcagga

SEQ ID NO: 137009 - DNA, 15 bp, Homo sapiens
cctgtactttgcagg

SEQ ID NO: 137010 - DNA, 15 bp, Homo sapiens
acctgtactttgcag

SEQ ID NO: 137011 - DNA, 15 bp, Homo sapiens
tacctgtactttgca

SEQ ID NO: 137012 - DNA, 15 bp, Homo sapiens
gtacctgtactttgc

SEQ ID NO: 137013 - DNA, 15 bp, Homo sapiens
agtacctgtactttg

SEQ ID NO: 137014 - DNA, 15 bp, Homo sapiens
aagtacctgtacttt

SEQ ID NO: 137015 - DNA, 15 bp, Homo sapiens
aaagtacctgtactt

SEQ ID NO: 137016 - DNA, 15 bp, Homo sapiens
caaagtacctgtact

SEQ ID NO: 137017 - DNA, 15 bp, Homo sapiens
acaaagtacctgtac

SEQ ID NO: 137018 - DNA, 15 bp, Homo sapiens
gacaaagtacctgta

SEQ ID NO: 137019 - DNA, 15 bp, Homo sapiens
agacaaagtacctgt

SEQ ID NO: 137020 - DNA, 15 bp, Homo sapiens
tagacaaagtacctg

SEQ ID NO: 137021 - DNA, 15 bp, Homo sapiens
ttagacaaagtacct

SEQ ID NO: 137022 - DNA, 15 bp, Homo sapiens
cttagacaaagtacc

SEQ ID NO: 137023 - DNA, 15 bp, Homo sapiens
tcttagacaaagtac

SEQ ID NO: 137024 - DNA, 15 bp, Homo sapiens
ttcttagacaaagta

SEQ ID NO: 137025 - DNA, 15 bp, Homo sapiens
tttcttagacaaagt

SEQ ID NO: 137026 - DNA, 15 bp, Homo sapiens
gtttcttagacaaag

SEQ ID NO: 137027 - DNA, 15 bp, Homo sapiens
tgtttcttagacaaa

SEQ ID NO: 137028 - DNA, 15 bp, Homo sapiens
atgtttcttagacaa

SEQ ID NO: 137029 - DNA, 15 bp, Homo sapiens
aatgtttcttagaca

SEQ ID NO: 137030 - DNA, 15 bp, Homo sapiens
caatgtttcttagac

SEQ ID NO: 137031 - DNA, 15 bp, Homo sapiens
ccaatgtttcttaga

SEQ ID NO: 137032 - DNA, 15 bp, Homo sapiens
tccaatgtttcttag

SEQ ID NO: 137033 - DNA, 15 bp, Homo sapiens
ttccaatgtttctta

SEQ ID NO: 137034 - DNA, 15 bp, Homo sapiens
cttccaatgtttctt

SEQ ID NO: 137035 - DNA, 15 bp, Homo sapiens
gcttccaatgtttct

SEQ ID NO: 137036 - DNA, 15 bp, Homo sapiens
tgcttccaatgtttc

SEQ ID NO: 137037 - DNA, 15 bp, Homo sapiens
ctgcttccaatgttt

SEQ ID NO: 137038 - DNA, 15 bp, Homo sapiens
cctgcttccaatgtt

SEQ ID NO: 137039 - DNA, 15 bp, Homo sapiens
acctgcttccaatgt

SEQ ID NO: 137040 - DNA, 15 bp, Homo sapiens
aacctgcttccaatg

SEQ ID NO: 137041 - DNA, 15 bp, Homo sapiens
taacctgcttccaat

SEQ ID NO: 137042 - DNA, 15 bp, Homo sapiens
ttaacctgcttccaa

SEQ ID NO: 137043 - DNA, 15 bp, Homo sapiens
tttaacctgcttcca

SEQ ID NO: 137044 - DNA, 15 bp, Homo sapiens
atttaacctgcttcc

SEQ ID NO: 137045 - DNA, 15 bp, Homo sapiens
catttaacctgcttc

SEQ ID NO: 137046 - DNA, 15 bp, Homo sapiens
acatttaacctgctt

SEQ ID NO: 137047 - DNA, 15 bp, Homo sapiens
aacatttaacctgct

SEQ ID NO: 137048 - DNA, 15 bp, Homo sapiens
aaacatttaacctgc

SEQ ID NO: 137049 - DNA, 15 bp, Homo sapiens
aaaacatttaacctg

SEQ ID NO: 137050 - DNA, 15 bp, Homo sapiens
caaaacatttaacct

SEQ ID NO: 137051 - DNA, 15 bp, Homo sapiens
acaaaacatttaacc

SEQ ID NO: 137052 - DNA, 15 bp, Homo sapiens
tacaaaacatttaac

SEQ ID NO: 137053 - DNA, 15 bp, Homo sapiens
ttacaaaacatttaa

SEQ ID NO: 137054 - DNA, 15 bp, Homo sapiens
tttacaaaacattta

SEQ ID NO: 137055 - DNA, 15 bp, Homo sapiens
gtttacaaaacattt

SEQ ID NO: 137056 - DNA, 15 bp, Homo sapiens
agtttacaaaacatt

SEQ ID NO: 137057 - DNA, 15 bp, Homo sapiens
aagtttacaaaacat

SEQ ID NO: 137058 - DNA, 15 bp, Homo sapiens
aaagtttacaaaaca

SEQ ID NO: 137059 - DNA, 15 bp, Homo sapiens
caaagtttacaaaac

SEQ ID NO: 137060 - DNA, 15 bp, Homo sapiens
tcaaagtttacaaaa

SEQ ID NO: 137061 - DNA, 15 bp, Homo sapiens
ttcaaagtttacaaa

SEQ ID NO: 137062 - DNA, 15 bp, Homo sapiens
tttcaaagtttacaa

SEQ ID NO: 137063 - DNA, 15 bp, Homo sapiens
atttcaaagtttaca

SEQ ID NO: 137064 - DNA, 15 bp, Homo sapiens
tatttcaaagtttac

SEQ ID NO: 137065 - DNA, 15 bp, Homo sapiens
atatttcaaagttta

SEQ ID NO: 137066 - DNA, 15 bp, Homo sapiens
tatatttcaaagttt

SEQ ID NO: 137067 - DNA, 15 bp, Homo sapiens
atatatttcaaagtt

SEQ ID NO: 137068 - DNA, 15 bp, Homo sapiens
catatatttcaaagt

SEQ ID NO: 137069 - DNA, 15 bp, Homo sapiens
ccatatatttcaaag

SEQ ID NO: 137070 - DNA, 15 bp, Homo sapiens
accatatatttcaaa

SEQ ID NO: 137071 - DNA, 15 bp, Homo sapiens
gaccatatatttcaa

SEQ ID NO: 137072 - DNA, 15 bp, Homo sapiens
agaccatatatttca

SEQ ID NO: 137073 - DNA, 15 bp, Homo sapiens
tagaccatatatttc

SEQ ID NO: 137074 - DNA, 15 bp, Homo sapiens
ttagaccatatattt

SEQ ID NO: 137075 - DNA, 15 bp, Homo sapiens
attagaccatatatt

SEQ ID NO: 137076 - DNA, 15 bp, Homo sapiens
cattagaccatatat

SEQ ID NO: 137077 - DNA, 15 bp, Homo sapiens
acattagaccatata

SEQ ID NO: 137078 - DNA, 15 bp, Homo sapiens
aacattagaccatat

SEQ ID NO: 137079 - DNA, 15 bp, Homo sapiens
aaacattagaccata

SEQ ID NO: 137080 - DNA, 15 bp, Homo sapiens
taaacattagaccat

SEQ ID NO: 137081 - DNA, 15 bp, Homo sapiens
ttaaacattagacca

SEQ ID NO: 137082 - DNA, 15 bp, Homo sapiens
cttaaacattagacc

SEQ ID NO: 137083 - DNA, 15 bp, Homo sapiens
gcttaaacattagac

SEQ ID NO: 137084 - DNA, 15 bp, Homo sapiens
tgcttaaacattaga

SEQ ID NO: 137085 - DNA, 15 bp, Homo sapiens
ctgcttaaacattag

SEQ ID NO: 137086 - DNA, 15 bp, Homo sapiens
tctgcttaaacatta

SEQ ID NO: 137087 - DNA, 15 bp, Homo sapiens
ttctgcttaaacatt

SEQ ID NO: 137088 - DNA, 15 bp, Homo sapiens
attctgcttaaacat

SEQ ID NO: 137089 - DNA, 15 bp, Homo sapiens
aattctgcttaaaca

SEQ ID NO: 137090 - DNA, 15 bp, Homo sapiens
caattctgcttaaac

SEQ ID NO: 137091 - DNA, 15 bp, Homo sapiens
ccaattctgcttaaa

SEQ ID NO: 137092 - DNA, 15 bp, Homo sapiens
tccaattctgcttaa

SEQ ID NO: 137093 - DNA, 15 bp, Homo sapiens
ttccaattctgctta

SEQ ID NO: 137094 - DNA, 15 bp, Homo sapiens
tttccaattctgctt

SEQ ID NO: 137095 - DNA, 15 bp, Homo sapiens
ttttccaattctgct

SEQ ID NO: 137096 - DNA, 15 bp, Homo sapiens
cttttccaattctgc

SEQ ID NO: 137097 - DNA, 15 bp, Homo sapiens
tcttttccaattctg

SEQ ID NO: 137098 - DNA, 15 bp, Homo sapiens
gtcttttccaattct

SEQ ID NO: 137099 - DNA, 15 bp, Homo sapiens
agtcttttccaattc

SEQ ID NO: 137100 - DNA, 15 bp, Homo sapiens
tagtcttttccaatt

SEQ ID NO: 137101 - DNA, 15 bp, Homo sapiens
ttagtcttttccaat

SEQ ID NO: 137102 - DNA, 15 bp, Homo sapiens
cttagtcttttccaa

SEQ ID NO: 137103 - DNA, 15 bp, Homo sapiens
tcttagtcttttcca

SEQ ID NO: 137104 - DNA, 15 bp, Homo sapiens
atcttagtcttttcc

SEQ ID NO: 137105 - DNA, 15 bp, Homo sapiens
gatcttagtcttttc

SEQ ID NO: 137106 - DNA, 15 bp, Homo sapiens
cgatcttagtctttt

SEQ ID NO: 137107 - DNA, 15 bp, Homo sapiens
ccgatcttagtcttt

SEQ ID NO: 137108 - DNA, 15 bp, Homo sapiens
accgatcttagtctt

SEQ ID NO: 137109 - DNA, 15 bp, Homo sapiens
aaccgatcttagtct

SEQ ID NO: 137110 - DNA, 15 bp, Homo sapiens
taaccgatcttagtc

SEQ ID NO: 137111 - DNA, 15 bp, Homo sapiens
ttaaccgatcttagt

SEQ ID NO: 137112 - DNA, 15 bp, Homo sapiens
gttaaccgatcttag

SEQ ID NO: 137113 - DNA, 15 bp, Homo sapiens
tgttaaccgatctta

SEQ ID NO: 137114 - DNA, 15 bp, Homo sapiens
ttgttaaccgatctt

SEQ ID NO: 137115 - DNA, 15 bp, Homo sapiens
tttgttaaccgatct

SEQ ID NO: 137116 - DNA, 15 bp, Homo sapiens
atttgttaaccgatc

SEQ ID NO: 137117 - DNA, 15 bp, Homo sapiens
tatttgttaaccgat

SEQ ID NO: 137118 - DNA, 15 bp, Homo sapiens
ttatttgttaaccga

SEQ ID NO: 137119 - DNA, 15 bp, Homo sapiens
gttatttgttaaccg

SEQ ID NO: 137120 - DNA, 15 bp, Homo sapiens
tgttatttgttaacc

SEQ ID NO: 137121 - DNA, 15 bp, Homo sapiens
ttgttatttgttaac

SEQ ID NO: 137122 - DNA, 15 bp, Homo sapiens
gttgttatttgttaa

SEQ ID NO: 137123 - DNA, 15 bp, Homo sapiens
agttgttatttgtta

SEQ ID NO: 137124 - DNA, 15 bp, Homo sapiens
aagttgttatttgtt

SEQ ID NO: 137125 - DNA, 15 bp, Homo sapiens
aaagttgttatttgt

SEQ ID NO: 137126 - DNA, 15 bp, Homo sapiens
aaaagttgttatttg

SEQ ID NO: 137127 - DNA, 15 bp, Homo sapiens
aaaaagttgttattt

SEQ ID NO: 137128 - DNA, 15 bp, Homo sapiens
aaaaaagttgttatt

SEQ ID NO: 137129 - DNA, 15 bp, Homo sapiens
aaaaaaagttgttat

SEQ ID NO: 137130 - DNA, 15 bp, Homo sapiens
aaaaaaaagttgtta

SEQ ID NO: 137131 - DNA, 15 bp, Homo sapiens
gaaaaaaaagttgtt

SEQ ID NO: 137132 - DNA, 15 bp, Homo sapiens
agaaaaaaaagttgt

SEQ ID NO: 137133 - DNA, 15 bp, Homo sapiens
aagaaaaaaaagttg

SEQ ID NO: 137134 - DNA, 15 bp, Homo sapiens
aaagaaaaaaaagtt

SEQ ID NO: 137135 - DNA, 15 bp, Homo sapiens
aaaagaaaaaaaagt

SEQ ID NO: 137136 - DNA, 15 bp, Homo sapiens
aaaaagaaaaaaaag

SEQ ID NO: 137137 - DNA, 15 bp, Homo sapiens
aaaaaagaaaaaaaa

SEQ ID NO: 137138 - DNA, 15 bp, Homo sapiens
aaaaaaagaaaaaaa

SEQ ID NO: 137139 - DNA, 15 bp, Homo sapiens
gaaaaaaagaaaaaa

SEQ ID NO: 137140 - DNA, 15 bp, Homo sapiens
agaaaaaaagaaaaa

SEQ ID NO: 137141 - DNA, 15 bp, Homo sapiens
aagaaaaaaagaaaa

SEQ ID NO: 137142 - DNA, 15 bp, Homo sapiens
aaagaaaaaaagaaa

SEQ ID NO: 137143 - DNA, 15 bp, Homo sapiens
aaaagaaaaaaagaa

SEQ ID NO: 137144 - DNA, 15 bp, Homo sapiens
caaaagaaaaaaaga

SEQ ID NO: 137145 - DNA, 15 bp, Homo sapiens
acaaaagaaaaaaag

SEQ ID NO: 137146 - DNA, 15 bp, Homo sapiens
aacaaaagaaaaaaa

SEQ ID NO: 137147 - DNA, 15 bp, Homo sapiens
aaacaaaagaaaaaa

SEQ ID NO: 137148 - DNA, 15 bp, Homo sapiens
aaaacaaaagaaaaa

SEQ ID NO: 137149 - DNA, 15 bp, Homo sapiens
aaaaacaaaagaaaa

SEQ ID NO: 137150 - DNA, 15 bp, Homo sapiens
aaaaaacaaaagaaa

SEQ ID NO: 137151 - DNA, 15 bp, Homo sapiens
caaaaaacaaaagaa

SEQ ID NO: 137152 - DNA, 15 bp, Homo sapiens
tcaaaaaacaaaaga

SEQ ID NO: 137153 - DNA, 15 bp, Homo sapiens
ttcaaaaaacaaaag

SEQ ID NO: 137154 - DNA, 15 bp, Homo sapiens
cttcaaaaaacaaaa

SEQ ID NO: 137155 - DNA, 15 bp, Homo sapiens
acttcaaaaaacaaa

SEQ ID NO: 137156 - DNA, 15 bp, Homo sapiens
cacttcaaaaaacaa

SEQ ID NO: 137157 - DNA, 15 bp, Homo sapiens
acacttcaaaaaaca

SEQ ID NO: 137158 - DNA, 15 bp, Homo sapiens
aacacttcaaaaaac

SEQ ID NO: 137159 - DNA, 15 bp, Homo sapiens
caacacttcaaaaaa

SEQ ID NO: 137160 - DNA, 15 bp, Homo sapiens
ccaacacttcaaaaa

SEQ ID NO: 137161 - DNA, 15 bp, Homo sapiens
cccaacacttcaaaa

SEQ ID NO: 137162 - DNA, 15 bp, Homo sapiens
ccccaacacttcaaa

SEQ ID NO: 137163 - DNA, 15 bp, Homo sapiens
accccaacacttcaa

SEQ ID NO: 137164 - DNA, 15 bp, Homo sapiens
aaccccaacacttca

SEQ ID NO: 137165 - DNA, 15 bp, Homo sapiens
aaaccccaacacttc

SEQ ID NO: 137166 - DNA, 15 bp, Homo sapiens
caaaccccaacactt

SEQ ID NO: 137167 - DNA, 15 bp, Homo sapiens
ccaaaccccaacact

SEQ ID NO: 137168 - DNA, 15 bp, Homo sapiens
accaaaccccaacac

SEQ ID NO: 137169 - DNA, 15 bp, Homo sapiens
aaccaaaccccaaca

SEQ ID NO: 137170 - DNA, 15 bp, Homo sapiens
aaaccaaaccccaac

SEQ ID NO: 137171 - DNA, 15 bp, Homo sapiens
aaaaccaaaccccaa

SEQ ID NO: 137172 - DNA, 15 bp, Homo sapiens
caaaaccaaacccca

SEQ ID NO: 137173 - DNA, 15 bp, Homo sapiens
acaaaaccaaacccc

SEQ ID NO: 137174 - DNA, 15 bp, Homo sapiens
aacaaaaccaaaccc

SEQ ID NO: 137175 - DNA, 15 bp, Homo sapiens
aaacaaaaccaaacc

SEQ ID NO: 137176 - DNA, 15 bp, Homo sapiens
aaaacaaaaccaaac

SEQ ID NO: 137177 - DNA, 15 bp, Homo sapiens
aaaaacaaaaccaaa

SEQ ID NO: 137178 - DNA, 15 bp, Homo sapiens
aaaaaacaaaaccaa

SEQ ID NO: 137179 - DNA, 15 bp, Homo sapiens
caaaaaacaaaacca

SEQ ID NO: 137180 - DNA, 15 bp, Homo sapiens
tcaaaaaacaaaacc

SEQ ID NO: 137181 - DNA, 15 bp, Homo sapiens
ctcaaaaaacaaaac

SEQ ID NO: 137182 - DNA, 15 bp, Homo sapiens
actcaaaaaacaaaa

SEQ ID NO: 137183 - DNA, 15 bp, Homo sapiens
gactcaaaaaacaaa

SEQ ID NO: 137184 - DNA, 15 bp, Homo sapiens
agactcaaaaaacaa

SEQ ID NO: 137185 - DNA, 15 bp, Homo sapiens
aagactcaaaaaaca

SEQ ID NO: 137186 - DNA, 15 bp, Homo sapiens
aaagactcaaaaaac

SEQ ID NO: 137187 - DNA, 15 bp, Homo sapiens
aaaagactcaaaaaa

SEQ ID NO: 137188 - DNA, 15 bp, Homo sapiens
aaaaagactcaaaaa

SEQ ID NO: 137189 - DNA, 15 bp, Homo sapiens
aaaaaagactcaaaa

SEQ ID NO: 137190 - DNA, 15 bp, Homo sapiens
aaaaaaagactcaaa

SEQ ID NO: 137191 - DNA, 15 bp, Homo sapiens
aaaaaaaagactcaa

SEQ ID NO: 137192 - DNA, 15 bp, Homo sapiens
aaaaaaaaagactca

SEQ ID NO: 137193 - DNA, 15 bp, Homo sapiens
aaaaaaaaaagactc

SEQ ID NO: 137194 - DNA, 15 bp, Homo sapiens
taaaaaaaaaagact

SEQ ID NO: 137195 - DNA, 15 bp, Homo sapiens
ttaaaaaaaaaagac

SEQ ID NO: 137196 - DNA, 15 bp, Homo sapiens
cttaaaaaaaaaaga

SEQ ID NO: 137197 - DNA, 15 bp, Homo sapiens
acttaaaaaaaaaag

SEQ ID NO: 137198 - DNA, 15 bp, Homo sapiens
cacttaaaaaaaaaa

SEQ ID NO: 137199 - DNA, 15 bp, Homo sapiens
tcacttaaaaaaaaa

SEQ ID NO: 137200 - DNA, 15 bp, Homo sapiens
ttcacttaaaaaaaa

SEQ ID NO: 137201 - DNA, 15 bp, Homo sapiens
tttcacttaaaaaaa

SEQ ID NO: 137202 - DNA, 15 bp, Homo sapiens
atttcacttaaaaaa

SEQ ID NO: 137203 - DNA, 15 bp, Homo sapiens
aatttcacttaaaaa

SEQ ID NO: 137204 - DNA, 15 bp, Homo sapiens
aaatttcacttaaaa

SEQ ID NO: 137205 - DNA, 15 bp, Homo sapiens
taaatttcacttaaa

SEQ ID NO: 137206 - DNA, 15 bp, Homo sapiens
ataaatttcacttaa

SEQ ID NO: 137207 - DNA, 15 bp, Homo sapiens
aataaatttcactta

SEQ ID NO: 137208 - DNA, 15 bp, Homo sapiens
caataaatttcactt

SEQ ID NO: 137209 - DNA, 15 bp, Homo sapiens
tcaataaatttcact

SEQ ID NO: 137210 - DNA, 15 bp, Homo sapiens
ctcaataaatttcac

SEQ ID NO: 137211 - DNA, 15 bp, Homo sapiens
cctcaataaatttca

SEQ ID NO: 137212 - DNA, 15 bp, Homo sapiens
tcctcaataaatttc

SEQ ID NO: 137213 - DNA, 15 bp, Homo sapiens
ttcctcaataaattt

SEQ ID NO: 137214 - DNA, 15 bp, Homo sapiens
tttcctcaataaatt

SEQ ID NO: 137215 - DNA, 15 bp, Homo sapiens
ttttcctcaataaat

SEQ ID NO: 137216 - DNA, 15 bp, Homo sapiens
tttttcctcaataaa

SEQ ID NO: 137217 - DNA, 15 bp, Homo sapiens
atttttcctcaataa

SEQ ID NO: 137218 - DNA, 15 bp, Homo sapiens
tatttttcctcaata

SEQ ID NO: 137219 - DNA, 15 bp, Homo sapiens
atatttttcctcaat

SEQ ID NO: 137220 - DNA, 15 bp, Homo sapiens
catatttttcctcaa

SEQ ID NO: 137221 - DNA, 15 bp, Homo sapiens
acatatttttcctca

SEQ ID NO: 137222 - DNA, 15 bp, Homo sapiens
cacatatttttcctc

SEQ ID NO: 137223 - DNA, 15 bp, Homo sapiens
tcacatatttttcct

SEQ ID NO: 137224 - DNA, 15 bp, Homo sapiens
ttcacatatttttcc

SEQ ID NO: 137225 - DNA, 15 bp, Homo sapiens
cttcacatatttttc

SEQ ID NO: 137226 - DNA, 15 bp, Homo sapiens
ccttcacatattttt

SEQ ID NO: 137227 - DNA, 15 bp, Homo sapiens
tccttcacatatttt

SEQ ID NO: 137228 - DNA, 15 bp, Homo sapiens
gtccttcacatattt

SEQ ID NO: 137229 - DNA, 15 bp, Homo sapiens
ggtccttcacatatt

SEQ ID NO: 137230 - DNA, 15 bp, Homo sapiens
aggtccttcacatat

SEQ ID NO: 137231 - DNA, 15 bp, Homo sapiens
aaggtccttcacata

SEQ ID NO: 137232 - DNA, 15 bp, Homo sapiens
gaaggtccttcacat

SEQ ID NO: 137233 - DNA, 15 bp, Homo sapiens
tgaaggtccttcaca

SEQ ID NO: 137234 - DNA, 15 bp, Homo sapiens
gtgaaggtccttcac

SEQ ID NO: 137235 - DNA, 15 bp, Homo sapiens
agtgaaggtccttca

SEQ ID NO: 137236 - DNA, 15 bp, Homo sapiens
gagtgaaggtccttc

SEQ ID NO: 137237 - DNA, 15 bp, Homo sapiens
agagtgaaggtcctt

SEQ ID NO: 137238 - DNA, 15 bp, Homo sapiens
tagagtgaaggtcct

SEQ ID NO: 137239 - DNA, 15 bp, Homo sapiens
ttagagtgaaggtcc

SEQ ID NO: 137240 - DNA, 15 bp, Homo sapiens
cttagagtgaaggtc

SEQ ID NO: 137241 - DNA, 15 bp, Homo sapiens
tcttagagtgaaggt

SEQ ID NO: 137242 - DNA, 15 bp, Homo sapiens
atcttagagtgaagg

SEQ ID NO: 137243 - DNA, 15 bp, Homo sapiens
catcttagagtgaag

SEQ ID NO: 137244 - DNA, 15 bp, Homo sapiens
acatcttagagtgaa

SEQ ID NO: 137245 - DNA, 15 bp, Homo sapiens
aacatcttagagtga

SEQ ID NO: 137246 - DNA, 15 bp, Homo sapiens
taacatcttagagtg

SEQ ID NO: 137247 - DNA, 15 bp, Homo sapiens
ataacatcttagagt

SEQ ID NO: 137248 - DNA, 15 bp, Homo sapiens
tataacatcttagag

SEQ ID NO: 137249 - DNA, 15 bp, Homo sapiens
atataacatcttaga

SEQ ID NO: 137250 - DNA, 15 bp, Homo sapiens
aatataacatcttag

SEQ ID NO: 137251 - DNA, 15 bp, Homo sapiens
aaatataacatctta

SEQ ID NO: 137252 - DNA, 15 bp, Homo sapiens
aaaatataacatctt

SEQ ID NO: 137253 - DNA, 15 bp, Homo sapiens
aaaaatataacatct

SEQ ID NO: 137254 - DNA, 15 bp, Homo sapiens
gaaaaatataacatc

SEQ ID NO: 137255 - DNA, 15 bp, Homo sapiens
agaaaaatataacat

SEQ ID NO: 137256 - DNA, 15 bp, Homo sapiens
aagaaaaatataaca

SEQ ID NO: 137257 - DNA, 15 bp, Homo sapiens
taagaaaaatataac

SEQ ID NO: 137258 - DNA, 15 bp, Homo sapiens
ttaagaaaaatataa

SEQ ID NO: 137259 - DNA, 15 bp, Homo sapiens
tttaagaaaaatata

SEQ ID NO: 137260 - DNA, 15 bp, Homo sapiens
ttttaagaaaaatat

SEQ ID NO: 137261 - DNA, 15 bp, Homo sapiens
tttttaagaaaaata

SEQ ID NO: 137262 - DNA, 15 bp, Homo sapiens
ctttttaagaaaaat

SEQ ID NO: 137263 - DNA, 15 bp, Homo sapiens
actttttaagaaaaa

SEQ ID NO: 137264 - DNA, 15 bp, Homo sapiens
tactttttaagaaaa

SEQ ID NO: 137265 - DNA, 15 bp, Homo sapiens
ttactttttaagaaa

SEQ ID NO: 137266 - DNA, 15 bp, Homo sapiens
gttactttttaagaa

SEQ ID NO: 137267 - DNA, 15 bp, Homo sapiens
agttactttttaaga

SEQ ID NO: 137268 - DNA, 15 bp, Homo sapiens
gagttactttttaag

SEQ ID NO: 137269 - DNA, 15 bp, Homo sapiens
ggagttactttttaa

SEQ ID NO: 137270 - DNA, 15 bp, Homo sapiens
aggagttacttttta

SEQ ID NO: 137271 - DNA, 15 bp, Homo sapiens
taggagttacttttt

SEQ ID NO: 137272 - DNA, 15 bp, Homo sapiens
ctaggagttactttt

SEQ ID NO: 137273 - DNA, 15 bp, Homo sapiens
actaggagttacttt

SEQ ID NO: 137274 - DNA, 15 bp, Homo sapiens
tactaggagttactt

SEQ ID NO: 137275 - DNA, 15 bp, Homo sapiens
ctactaggagttact

SEQ ID NO: 137276 - DNA, 15 bp, Homo sapiens
cctactaggagttac

SEQ ID NO: 137277 - DNA, 15 bp, Homo sapiens
ccctactaggagtta

SEQ ID NO: 137278 - DNA, 15 bp, Homo sapiens
cccctactaggagtt

SEQ ID NO: 137279 - DNA, 15 bp, Homo sapiens
acccctactaggagt

SEQ ID NO: 137280 - DNA, 15 bp, Homo sapiens
tacccctactaggag

SEQ ID NO: 137281 - DNA, 15 bp, Homo sapiens
gtacccctactagga

SEQ ID NO: 137282 - DNA, 15 bp, Homo sapiens
ggtacccctactagg

SEQ ID NO: 137283 - DNA, 15 bp, Homo sapiens
tggtacccctactag

SEQ ID NO: 137284 - DNA, 15 bp, Homo sapiens
gtggtacccctacta

SEQ ID NO: 137285 - DNA, 15 bp, Homo sapiens
agtggtacccctact

SEQ ID NO: 137286 - DNA, 15 bp, Homo sapiens
cagtggtacccctac

SEQ ID NO: 137287 - DNA, 15 bp, Homo sapiens
tcagtggtaccccta

SEQ ID NO: 137288 - DNA, 15 bp, Homo sapiens
ttcagtggtacccct

SEQ ID NO: 137289 - DNA, 15 bp, Homo sapiens
attcagtggtacccc

SEQ ID NO: 137290 - DNA, 15 bp, Homo sapiens
gattcagtggtaccc

SEQ ID NO: 137291 - DNA, 15 bp, Homo sapiens
agattcagtggtacc

SEQ ID NO: 137292 - DNA, 15 bp, Homo sapiens
cagattcagtggtac

SEQ ID NO: 137293 - DNA, 15 bp, Homo sapiens
acagattcagtggta

SEQ ID NO: 137294 - DNA, 15 bp, Homo sapiens
tacagattcagtggt

SEQ ID NO: 137295 - DNA, 15 bp, Homo sapiens
gtacagattcagtgg

SEQ ID NO: 137296 - DNA, 15 bp, Homo sapiens
tgtacagattcagtg

SEQ ID NO: 137297 - DNA, 15 bp, Homo sapiens
ctgtacagattcagt

SEQ ID NO: 137298 - DNA, 15 bp, Homo sapiens
tctgtacagattcag

SEQ ID NO: 137299 - DNA, 15 bp, Homo sapiens
ctctgtacagattca

SEQ ID NO: 137300 - DNA, 15 bp, Homo sapiens
gctctgtacagattc

SEQ ID NO: 137301 - DNA, 15 bp, Homo sapiens
ggctctgtacagatt

SEQ ID NO: 137302 - DNA, 15 bp, Homo sapiens
cggctctgtacagat

SEQ ID NO: 137303 - DNA, 15 bp, Homo sapiens
acggctctgtacaga

SEQ ID NO: 137304 - DNA, 15 bp, Homo sapiens
tacggctctgtacag

SEQ ID NO: 137305 - DNA, 15 bp, Homo sapiens
ttacggctctgtaca

SEQ ID NO: 137306 - DNA, 15 bp, Homo sapiens
tttacggctctgtac

SEQ ID NO: 137307 - DNA, 15 bp, Homo sapiens
ttttacggctctgta

SEQ ID NO: 137308 - DNA, 15 bp, Homo sapiens
tttttacggctctgt

SEQ ID NO: 137309 - DNA, 15 bp, Homo sapiens
gtttttacggctctg

SEQ ID NO: 137310 - DNA, 15 bp, Homo sapiens
agtttttacggctct

SEQ ID NO: 137311 - DNA, 15 bp, Homo sapiens
cagtttttacggctc

SEQ ID NO: 137312 - DNA, 15 bp, Homo sapiens
tcagtttttacggct

SEQ ID NO: 137313 - DNA, 15 bp, Homo sapiens
ttcagtttttacggc

SEQ ID NO: 137314 - DNA, 15 bp, Homo sapiens
cttcagtttttacgg

SEQ ID NO: 137315 - DNA, 15 bp, Homo sapiens
acttcagtttttacg

SEQ ID NO: 137316 - DNA, 15 bp, Homo sapiens
aacttcagtttttac

SEQ ID NO: 137317 - DNA, 15 bp, Homo sapiens
gaacttcagttttta

SEQ ID NO: 137318 - DNA, 15 bp, Homo sapiens
agaacttcagttttt

SEQ ID NO: 137319 - DNA, 15 bp, Homo sapiens
cagaacttcagtttt

SEQ ID NO: 137320 - DNA, 15 bp, Homo sapiens
gcagaacttcagttt

SEQ ID NO: 137321 - DNA, 15 bp, Homo sapiens
ggcagaacttcagtt

SEQ ID NO: 137322 - DNA, 15 bp, Homo sapiens
aggcagaacttcagt

SEQ ID NO: 137323 - DNA, 15 bp, Homo sapiens
gaggcagaacttcag

SEQ ID NO: 137324 - DNA, 15 bp, Homo sapiens
agaggcagaacttca

SEQ ID NO: 137325 - DNA, 15 bp, Homo sapiens
cagaggcagaacttc

SEQ ID NO: 137326 - DNA, 15 bp, Homo sapiens
tcagaggcagaactt

SEQ ID NO: 137327 - DNA, 15 bp, Homo sapiens
atcagaggcagaact

SEQ ID NO: 137328 - DNA, 15 bp, Homo sapiens
catcagaggcagaac

SEQ ID NO: 137329 - DNA, 15 bp, Homo sapiens
acatcagaggcagaa

SEQ ID NO: 137330 - DNA, 15 bp, Homo sapiens
tacatcagaggcaga

SEQ ID NO: 137331 - DNA, 15 bp, Homo sapiens
atacatcagaggcag

SEQ ID NO: 137332 - DNA, 15 bp, Homo sapiens
aatacatcagaggca

SEQ ID NO: 137333 - DNA, 15 bp, Homo sapiens
aaatacatcagaggc

SEQ ID NO: 137334 - DNA, 15 bp, Homo sapiens
aaaatacatcagagg

SEQ ID NO: 137335 - DNA, 15 bp, Homo sapiens
caaaatacatcagag

SEQ ID NO: 137336 - DNA, 15 bp, Homo sapiens
acaaaatacatcaga

SEQ ID NO: 137337 - DNA, 15 bp, Homo sapiens
cacaaaatacatcag

SEQ ID NO: 137338 - DNA, 15 bp, Homo sapiens
tcacaaaatacatca

SEQ ID NO: 137339 - DNA, 15 bp, Homo sapiens
ctcacaaaatacatc

SEQ ID NO: 137340 - DNA, 15 bp, Homo sapiens
actcacaaaatacat

SEQ ID NO: 137341 - DNA, 15 bp, Homo sapiens
aactcacaaaataca

SEQ ID NO: 137342 - DNA, 15 bp, Homo sapiens
aaactcacaaaatac

SEQ ID NO: 137343 - DNA, 15 bp, Homo sapiens
caaactcacaaaata

SEQ ID NO: 137344 - DNA, 15 bp, Homo sapiens
acaaactcacaaaat

SEQ ID NO: 137345 - DNA, 15 bp, Homo sapiens
aacaaactcacaaaa

SEQ ID NO: 137346 - DNA, 15 bp, Homo sapiens
aaacaaactcacaaa

SEQ ID NO: 137347 - DNA, 15 bp, Homo sapiens
gaaacaaactcacaa

SEQ ID NO: 137348 - DNA, 15 bp, Homo sapiens
agaaacaaactcaca

SEQ ID NO: 137349 - DNA, 15 bp, Homo sapiens
aagaaacaaactcac

SEQ ID NO: 137350 - DNA, 15 bp, Homo sapiens
aaagaaacaaactca

SEQ ID NO: 137351 - DNA, 15 bp, Homo sapiens
caaagaaacaaactc

SEQ ID NO: 137352 - DNA, 15 bp, Homo sapiens
tcaaagaaacaaact

SEQ ID NO: 137353 - DNA, 15 bp, Homo sapiens
ttcaaagaaacaaac

SEQ ID NO: 137354 - DNA, 15 bp, Homo sapiens
attcaaagaaacaaa

SEQ ID NO: 137355 - DNA, 15 bp, Homo sapiens
aattcaaagaaacaa

SEQ ID NO: 137356 - DNA, 15 bp, Homo sapiens
aaattcaaagaaaca

SEQ ID NO: 137357 - DNA, 15 bp, Homo sapiens
aaaattcaaagaaac

SEQ ID NO: 137358 - DNA, 15 bp, Homo sapiens
gaaaattcaaagaaa

SEQ ID NO: 137359 - DNA, 15 bp, Homo sapiens
tgaaaattcaaagaa

SEQ ID NO: 137360 - DNA, 15 bp, Homo sapiens
atgaaaattcaaaga

SEQ ID NO: 137361 - DNA, 15 bp, Homo sapiens
aatgaaaattcaaag

SEQ ID NO: 137362 - DNA, 15 bp, Homo sapiens
aaatgaaaattcaaa

SEQ ID NO: 137363 - DNA, 15 bp, Homo sapiens
aaaatgaaaattcaa

SEQ ID NO: 137364 - DNA, 15 bp, Homo sapiens
taaaatgaaaattca

SEQ ID NO: 137365 - DNA, 15 bp, Homo sapiens
gtaaaatgaaaattc

SEQ ID NO: 137366 - DNA, 15 bp, Homo sapiens
tgtaaaatgaaaatt

SEQ ID NO: 137367 - DNA, 15 bp, Homo sapiens
ctgtaaaatgaaaat

SEQ ID NO: 137368 - DNA, 15 bp, Homo sapiens
actgtaaaatgaaaa

SEQ ID NO: 137369 - DNA, 15 bp, Homo sapiens
aactgtaaaatgaaa

SEQ ID NO: 137370 - DNA, 15 bp, Homo sapiens
taactgtaaaatgaa

SEQ ID NO: 137371 - DNA, 15 bp, Homo sapiens
gtaactgtaaaatga

SEQ ID NO: 137372 - DNA, 15 bp, Homo sapiens
agtaactgtaaaatg

SEQ ID NO: 137373 - DNA, 15 bp, Homo sapiens
aagtaactgtaaaat

SEQ ID NO: 137374 - DNA, 15 bp, Homo sapiens
aaagtaactgtaaaa

SEQ ID NO: 137375 - DNA, 15 bp, Homo sapiens
aaaagtaactgtaaa

SEQ ID NO: 137376 - DNA, 15 bp, Homo sapiens
gaaaagtaactgtaa

SEQ ID NO: 137377 - DNA, 15 bp, Homo sapiens
ggaaaagtaactgta

SEQ ID NO: 137378 - DNA, 15 bp, Homo sapiens
aggaaaagtaactgt

SEQ ID NO: 137379 - DNA, 15 bp, Homo sapiens
aaggaaaagtaactg

SEQ ID NO: 137380 - DNA, 15 bp, Homo sapiens
caaggaaaagtaact

SEQ ID NO: 137381 - DNA, 15 bp, Homo sapiens
gcaaggaaaagtaac

SEQ ID NO: 137382 - DNA, 15 bp, Homo sapiens
tgcaaggaaaagtaa

SEQ ID NO: 137383 - DNA, 15 bp, Homo sapiens
atgcaaggaaaagta

SEQ ID NO: 137384 - DNA, 15 bp, Homo sapiens
tatgcaaggaaaagt

SEQ ID NO: 137385 - DNA, 15 bp, Homo sapiens
gtatgcaaggaaaag

SEQ ID NO: 137386 - DNA, 15 bp, Homo sapiens
tgtatgcaaggaaaa

SEQ ID NO: 137387 - DNA, 15 bp, Homo sapiens
ttgtatgcaaggaaa

SEQ ID NO: 137388 - DNA, 15 bp, Homo sapiens
tttgtatgcaaggaa

SEQ ID NO: 137389 - DNA, 15 bp, Homo sapiens
gtttgtatgcaagga

SEQ ID NO: 137390 - DNA, 15 bp, Homo sapiens
tgtttgtatgcaagg

SEQ ID NO: 137391 - DNA, 15 bp, Homo sapiens
ttgtttgtatgcaag

SEQ ID NO: 137392 - DNA, 15 bp, Homo sapiens
cttgtttgtatgcaa

SEQ ID NO: 137393 - DNA, 15 bp, Homo sapiens
gcttgtttgtatgca

SEQ ID NO: 137394 - DNA, 15 bp, Homo sapiens
tgcttgtttgtatgc

SEQ ID NO: 137395 - DNA, 15 bp, Homo sapiens
atgcttgtttgtatg

SEQ ID NO: 137396 - DNA, 15 bp, Homo sapiens
tatgcttgtttgtat

SEQ ID NO: 137397 - DNA, 15 bp, Homo sapiens
atatgcttgtttgta

SEQ ID NO: 137398 - DNA, 15 bp, Homo sapiens
tatatgcttgtttgt

SEQ ID NO: 137399 - DNA, 15 bp, Homo sapiens
ttatatgcttgtttg

SEQ ID NO: 137400 - DNA, 15 bp, Homo sapiens
tttatatgcttgttt

SEQ ID NO: 137401 - DNA, 15 bp, Homo sapiens
ttttatatgcttgtt

SEQ ID NO: 137402 - DNA, 15 bp, Homo sapiens
attttatatgcttgt

SEQ ID NO: 137403 - DNA, 15 bp, Homo sapiens
cattttatatgcttg

SEQ ID NO: 137404 - DNA, 15 bp, Homo sapiens
ccattttatatgctt

SEQ ID NO: 137405 - DNA, 15 bp, Homo sapiens
gccattttatatgct

SEQ ID NO: 137406 - DNA, 15 bp, Homo sapiens
tgccattttatatgc

SEQ ID NO: 137407 - DNA, 15 bp, Homo sapiens
ttgccattttatatg

SEQ ID NO: 137408 - DNA, 15 bp, Homo sapiens
gttgccattttatat

SEQ ID NO: 137409 - DNA, 15 bp, Homo sapiens
tgttgccattttata

SEQ ID NO: 137410 - DNA, 15 bp, Homo sapiens
ttgttgccattttat

SEQ ID NO: 137411 - DNA, 15 bp, Homo sapiens
tttgttgccatttta

SEQ ID NO: 137412 - DNA, 15 bp, Homo sapiens
gtttgttgccatttt

SEQ ID NO: 137413 - DNA, 15 bp, Homo sapiens
agtttgttgccattt

SEQ ID NO: 137414 - DNA, 15 bp, Homo sapiens
cagtttgttgccatt

SEQ ID NO: 137415 - DNA, 15 bp, Homo sapiens
gcagtttgttgccat

SEQ ID NO: 137416 - DNA, 15 bp, Homo sapiens
tgcagtttgttgcca

SEQ ID NO: 137417 - DNA, 15 bp, Homo sapiens
gtgcagtttgttgcc

SEQ ID NO: 137418 - DNA, 15 bp, Homo sapiens
tgtgcagtttgttgc

SEQ ID NO: 137419 - DNA, 15 bp, Homo sapiens
atgtgcagtttgttg

SEQ ID NO: 137420 - DNA, 15 bp, Homo sapiens
catgtgcagtttgtt

SEQ ID NO: 137421 - DNA, 15 bp, Homo sapiens
tcatgtgcagtttgt

SEQ ID NO: 137422 - DNA, 15 bp, Homo sapiens
atcatgtgcagtttg

SEQ ID NO: 137423 - DNA, 15 bp, Homo sapiens
aatcatgtgcagttt

SEQ ID NO: 137424 - DNA, 15 bp, Homo sapiens
aaatcatgtgcagtt

SEQ ID NO: 137425 - DNA, 15 bp, Homo sapiens
gaaatcatgtgcagt

SEQ ID NO: 137426 - DNA, 15 bp, Homo sapiens
tgaaatcatgtgcag

SEQ ID NO: 137427 - DNA, 15 bp, Homo sapiens
gtgaaatcatgtgca

SEQ ID NO: 137428 - DNA, 15 bp, Homo sapiens
tgtgaaatcatgtgc

SEQ ID NO: 137429 - DNA, 15 bp, Homo sapiens
ttgtgaaatcatgtg

SEQ ID NO: 137430 - DNA, 15 bp, Homo sapiens
tttgtgaaatcatgt

SEQ ID NO: 137431 - DNA, 15 bp, Homo sapiens
atttgtgaaatcatg

SEQ ID NO: 137432 - DNA, 15 bp, Homo sapiens
tatttgtgaaatcat

SEQ ID NO: 137433 - DNA, 15 bp, Homo sapiens
atatttgtgaaatca

SEQ ID NO: 137434 - DNA, 15 bp, Homo sapiens
aatatttgtgaaatc

SEQ ID NO: 137435 - DNA, 15 bp, Homo sapiens
taatatttgtgaaat

SEQ ID NO: 137436 - DNA, 15 bp, Homo sapiens
ttaatatttgtgaaa

SEQ ID NO: 137437 - DNA, 15 bp, Homo sapiens
tttaatatttgtgaa

SEQ ID NO: 137438 - DNA, 15 bp, Homo sapiens
ttttaatatttgtga

SEQ ID NO: 137439 - DNA, 15 bp, Homo sapiens
tttttaatatttgtg

SEQ ID NO: 137440 - DNA, 15 bp, Homo sapiens
ctttttaatatttgt

SEQ ID NO: 137441 - DNA, 15 bp, Homo sapiens
actttttaatatttg

SEQ ID NO: 137442 - DNA, 15 bp, Homo sapiens
gactttttaatattt

SEQ ID NO: 137443 - DNA, 15 bp, Homo sapiens
agactttttaatatt

SEQ ID NO: 137444 - DNA, 15 bp, Homo sapiens
aagactttttaatat

SEQ ID NO: 137445 - DNA, 15 bp, Homo sapiens
aaagactttttaata

SEQ ID NO: 137446 - DNA, 15 bp, Homo sapiens
aaaagactttttaat

SEQ ID NO: 137447 - DNA, 15 bp, Homo sapiens
taaaagactttttaa

SEQ ID NO: 137448 - DNA, 15 bp, Homo sapiens
ttaaaagacttttta

SEQ ID NO: 137449 - DNA, 15 bp, Homo sapiens
tttaaaagacttttt

SEQ ID NO: 137450 - DNA, 15 bp, Homo sapiens
ttttaaaagactttt

SEQ ID NO: 137451 - DNA, 15 bp, Homo sapiens
tttttaaaagacttt

SEQ ID NO: 137452 - DNA, 15 bp, Homo sapiens
ctttttaaaagactt

SEQ ID NO: 137453 - DNA, 15 bp, Homo sapiens
actttttaaaagact

SEQ ID NO: 137454 - DNA, 15 bp, Homo sapiens
tactttttaaaagac

SEQ ID NO: 137455 - DNA, 15 bp, Homo sapiens
atactttttaaaaga

SEQ ID NO: 137456 - DNA, 15 bp, Homo sapiens
aatactttttaaaag

SEQ ID NO: 137457 - DNA, 15 bp, Homo sapiens
caatactttttaaaa

SEQ ID NO: 137458 - DNA, 15 bp, Homo sapiens
gcaatactttttaaa

SEQ ID NO: 137459 - DNA, 15 bp, Homo sapiens
ggcaatactttttaa

SEQ ID NO: 137460 - DNA, 15 bp, Homo sapiens
tggcaatacttttta

SEQ ID NO: 137461 - DNA, 15 bp, Homo sapiens
ttggcaatacttttt

SEQ ID NO: 137462 - DNA, 15 bp, Homo sapiens
tttggcaatactttt

SEQ ID NO: 137463 - DNA, 15 bp, Homo sapiens
gtttggcaatacttt

SEQ ID NO: 137464 - DNA, 15 bp, Homo sapiens
tgtttggcaatactt

SEQ ID NO: 137465 - DNA, 15 bp, Homo sapiens
atgtttggcaatact

SEQ ID NO: 137466 - DNA, 15 bp, Homo sapiens
aatgtttggcaatac

SEQ ID NO: 137467 - DNA, 15 bp, Homo sapiens
taatgtttggcaata

SEQ ID NO: 137468 - DNA, 15 bp, Homo sapiens
ttaatgtttggcaat

SEQ ID NO: 137469 - DNA, 15 bp, Homo sapiens
attaatgtttggcaa

SEQ ID NO: 137470 - DNA, 15 bp, Homo sapiens
cattaatgtttggca

SEQ ID NO: 137471 - DNA, 15 bp, Homo sapiens
acattaatgtttggc

SEQ ID NO: 137472 - DNA, 15 bp, Homo sapiens
aacattaatgtttgg

SEQ ID NO: 137473 - DNA, 15 bp, Homo sapiens
caacattaatgtttg

SEQ ID NO: 137474 - DNA, 15 bp, Homo sapiens
tcaacattaatgttt

SEQ ID NO: 137475 - DNA, 15 bp, Homo sapiens
atcaacattaatgtt

SEQ ID NO: 137476 - DNA, 15 bp, Homo sapiens
aatcaacattaatgt

SEQ ID NO: 137477 - DNA, 15 bp, Homo sapiens
aaatcaacattaatg

SEQ ID NO: 137478 - DNA, 15 bp, Homo sapiens
gaaatcaacattaat

SEQ ID NO: 137479 - DNA, 15 bp, Homo sapiens
agaaatcaacattaa

SEQ ID NO: 137480 - DNA, 15 bp, Homo sapiens
tagaaatcaacatta

SEQ ID NO: 137481 - DNA, 15 bp, Homo sapiens
ctagaaatcaacatt

SEQ ID NO: 137482 - DNA, 15 bp, Homo sapiens
actagaaatcaacat

SEQ ID NO: 137483 - DNA, 15 bp, Homo sapiens
aactagaaatcaaca

SEQ ID NO: 137484 - DNA, 15 bp, Homo sapiens
taactagaaatcaac

SEQ ID NO: 137485 - DNA, 15 bp, Homo sapiens
ataactagaaatcaa

SEQ ID NO: 137486 - DNA, 15 bp, Homo sapiens
aataactagaaatca

SEQ ID NO: 137487 - DNA, 15 bp, Homo sapiens
aaataactagaaatc

SEQ ID NO: 137488 - DNA, 15 bp, Homo sapiens
taaataactagaaat

SEQ ID NO: 137489 - DNA, 15 bp, Homo sapiens
ataaataactagaaa

SEQ ID NO: 137490 - DNA, 15 bp, Homo sapiens
aataaataactagaa

SEQ ID NO: 137491 - DNA, 15 bp, Homo sapiens
gaataaataactaga

SEQ ID NO: 137492 - DNA, 15 bp, Homo sapiens
agaataaataactag

SEQ ID NO: 137493 - DNA, 15 bp, Homo sapiens
cagaataaataacta

SEQ ID NO: 137494 - DNA, 15 bp, Homo sapiens
ccagaataaataact

SEQ ID NO: 137495 - DNA, 15 bp, Homo sapiens
cccagaataaataac

SEQ ID NO: 137496 - DNA, 15 bp, Homo sapiens
tcccagaataaataa

SEQ ID NO: 137497 - DNA, 15 bp, Homo sapiens
ttcccagaataaata

SEQ ID NO: 137498 - DNA, 15 bp, Homo sapiens
attcccagaataaat

SEQ ID NO: 137499 - DNA, 15 bp, Homo sapiens
cattcccagaataaa

SEQ ID NO: 137500 - DNA, 15 bp, Homo sapiens
acattcccagaataa

SEQ ID NO: 137501 - DNA, 15 bp, Homo sapiens
tacattcccagaata

SEQ ID NO: 137502 - DNA, 15 bp, Homo sapiens
atacattcccagaat

SEQ ID NO: 137503 - DNA, 15 bp, Homo sapiens
tatacattcccagaa

SEQ ID NO: 137504 - DNA, 15 bp, Homo sapiens
ctatacattcccaga

SEQ ID NO: 137505 - DNA, 15 bp, Homo sapiens
actatacattcccag

SEQ ID NO: 137506 - DNA, 15 bp, Homo sapiens
tactatacattccca

SEQ ID NO: 137507 - DNA, 15 bp, Homo sapiens
atactatacattccc

SEQ ID NO: 137508 - DNA, 15 bp, Homo sapiens
aatactatacattcc

SEQ ID NO: 137509 - DNA, 15 bp, Homo sapiens
aaatactatacattc

SEQ ID NO: 137510 - DNA, 15 bp, Homo sapiens
caaatactatacatt

SEQ ID NO: 137511 - DNA, 15 bp, Homo sapiens
tcaaatactatacat

SEQ ID NO: 137512 - DNA, 15 bp, Homo sapiens
ttcaaatactataca

SEQ ID NO: 137513 - DNA, 15 bp, Homo sapiens
tttcaaatactatac

SEQ ID NO: 137514 - DNA, 15 bp, Homo sapiens
ttttcaaatactata

SEQ ID NO: 137515 - DNA, 15 bp, Homo sapiens
gttttcaaatactat

SEQ ID NO: 137516 - DNA, 15 bp, Homo sapiens
tgttttcaaatacta

SEQ ID NO: 137517 - DNA, 15 bp, Homo sapiens
ctgttttcaaatact

SEQ ID NO: 137518 - DNA, 15 bp, Homo sapiens
tctgttttcaaatac

SEQ ID NO: 137519 - DNA, 15 bp, Homo sapiens
ttctgttttcaaata

SEQ ID NO: 137520 - DNA, 15 bp, Homo sapiens
tttctgttttcaaat

SEQ ID NO: 137521 - DNA, 15 bp, Homo sapiens
atttctgttttcaaa

SEQ ID NO: 137522 - DNA, 15 bp, Homo sapiens
aatttctgttttcaa

SEQ ID NO: 137523 - DNA, 15 bp, Homo sapiens
caatttctgttttca

SEQ ID NO: 137524 - DNA, 15 bp, Homo sapiens
ccaatttctgttttc

SEQ ID NO: 137525 - DNA, 15 bp, Homo sapiens
accaatttctgtttt

SEQ ID NO: 137526 - DNA, 15 bp, Homo sapiens
taccaatttctgttt

SEQ ID NO: 137527 - DNA, 15 bp, Homo sapiens
gtaccaatttctgtt

SEQ ID NO: 137528 - DNA, 15 bp, Homo sapiens
ggtaccaatttctgt

SEQ ID NO: 137529 - DNA, 15 bp, Homo sapiens
aggtaccaatttctg

SEQ ID NO: 137530 - DNA, 15 bp, Homo sapiens
aaggtaccaatttct

SEQ ID NO: 137531 - DNA, 15 bp, Homo sapiens
caaggtaccaatttc

SEQ ID NO: 137532 - DNA, 15 bp, Homo sapiens
gcaaggtaccaattt

SEQ ID NO: 137533 - DNA, 15 bp, Homo sapiens
tgcaaggtaccaatt

SEQ ID NO: 137534 - DNA, 15 bp, Homo sapiens
gtgcaaggtaccaat

SEQ ID NO: 137535 - DNA, 15 bp, Homo sapiens
tgtgcaaggtaccaa

SEQ ID NO: 137536 - DNA, 15 bp, Homo sapiens
gtgtgcaaggtacca

SEQ ID NO: 137537 - DNA, 15 bp, Homo sapiens
tgtgtgcaaggtacc

SEQ ID NO: 137538 - DNA, 15 bp, Homo sapiens
atgtgtgcaaggtac

SEQ ID NO: 137539 - DNA, 15 bp, Homo sapiens
gatgtgtgcaaggta

SEQ ID NO: 137540 - DNA, 15 bp, Homo sapiens
tgatgtgtgcaaggt

SEQ ID NO: 137541 - DNA, 15 bp, Homo sapiens
atgatgtgtgcaagg

SEQ ID NO: 137542 - DNA, 15 bp, Homo sapiens
gatgatgtgtgcaag

SEQ ID NO: 137543 - DNA, 15 bp, Homo sapiens
agatgatgtgtgcaa

SEQ ID NO: 137544 - DNA, 15 bp, Homo sapiens
cagatgatgtgtgca

SEQ ID NO: 137545 - DNA, 15 bp, Homo sapiens
acagatgatgtgtgc

SEQ ID NO: 137546 - DNA, 15 bp, Homo sapiens
tacagatgatgtgtg

SEQ ID NO: 137547 - DNA, 15 bp, Homo sapiens
ttacagatgatgtgt

SEQ ID NO: 137548 - DNA, 15 bp, Homo sapiens
cttacagatgatgtg

SEQ ID NO: 137549 - DNA, 15 bp, Homo sapiens
gcttacagatgatgt

SEQ ID NO: 137550 - DNA, 15 bp, Homo sapiens
agcttacagatgatg

SEQ ID NO: 137551 - DNA, 15 bp, Homo sapiens
cagcttacagatgat

SEQ ID NO: 137552 - DNA, 15 bp, Homo sapiens
acagcttacagatga

SEQ ID NO: 137553 - DNA, 15 bp, Homo sapiens
aacagcttacagatg

SEQ ID NO: 137554 - DNA, 15 bp, Homo sapiens
aaacagcttacagat

SEQ ID NO: 137555 - DNA, 15 bp, Homo sapiens
caaacagcttacaga

SEQ ID NO: 137556 - DNA, 15 bp, Homo sapiens
ccaaacagcttacag

SEQ ID NO: 137557 - DNA, 15 bp, Homo sapiens
accaaacagcttaca

SEQ ID NO: 137558 - DNA, 15 bp, Homo sapiens
aaccaaacagcttac

SEQ ID NO: 137559 - DNA, 15 bp, Homo sapiens
aaaccaaacagctta

SEQ ID NO: 137560 - DNA, 15 bp, Homo sapiens
aaaaccaaacagctt

SEQ ID NO: 137561 - DNA, 15 bp, Homo sapiens
taaaaccaaacagct

SEQ ID NO: 137562 - DNA, 15 bp, Homo sapiens
ttaaaaccaaacagc

SEQ ID NO: 137563 - DNA, 15 bp, Homo sapiens
tttaaaaccaaacag

SEQ ID NO: 137564 - DNA, 15 bp, Homo sapiens
ttttaaaaccaaaca

SEQ ID NO: 137565 - DNA, 15 bp, Homo sapiens
attttaaaaccaaac

SEQ ID NO: 137566 - DNA, 15 bp, Homo sapiens
tattttaaaaccaaa

SEQ ID NO: 137567 - DNA, 15 bp, Homo sapiens
gtattttaaaaccaa

SEQ ID NO: 137568 - DNA, 15 bp, Homo sapiens
agtattttaaaacca

SEQ ID NO: 137569 - DNA, 15 bp, Homo sapiens
cagtattttaaaacc

SEQ ID NO: 137570 - DNA, 15 bp, Homo sapiens
acagtattttaaaac

SEQ ID NO: 137571 - DNA, 15 bp, Homo sapiens
tacagtattttaaaa

SEQ ID NO: 137572 - DNA, 15 bp, Homo sapiens
ctacagtattttaaa

SEQ ID NO: 137573 - DNA, 15 bp, Homo sapiens
tctacagtattttaa

SEQ ID NO: 137574 - DNA, 15 bp, Homo sapiens
atctacagtatttta

SEQ ID NO: 137575 - DNA, 15 bp, Homo sapiens
tatctacagtatttt

SEQ ID NO: 137576 - DNA, 15 bp, Homo sapiens
ttatctacagtattt

SEQ ID NO: 137577 - DNA, 15 bp, Homo sapiens
attatctacagtatt

SEQ ID NO: 137578 - DNA, 15 bp, Homo sapiens
aattatctacagtat

SEQ ID NO: 137579 - DNA, 15 bp, Homo sapiens
taattatctacagta

SEQ ID NO: 137580 - DNA, 15 bp, Homo sapiens
ttaattatctacagt

SEQ ID NO: 137581 - DNA, 15 bp, Homo sapiens
gttaattatctacag

SEQ ID NO: 137582 - DNA, 15 bp, Homo sapiens
ggttaattatctaca

SEQ ID NO: 137583 - DNA, 15 bp, Homo sapiens
tggttaattatctac

SEQ ID NO: 137584 - DNA, 15 bp, Homo sapiens
ttggttaattatcta

SEQ ID NO: 137585 - DNA, 15 bp, Homo sapiens
cttggttaattatct

SEQ ID NO: 137586 - DNA, 15 bp, Homo sapiens
ccttggttaattatc

SEQ ID NO: 137587 - DNA, 15 bp, Homo sapiens
accttggttaattat

SEQ ID NO: 137588 - DNA, 15 bp, Homo sapiens
taccttggttaatta

SEQ ID NO: 137589 - DNA, 15 bp, Homo sapiens
ctaccttggttaatt

SEQ ID NO: 137590 - DNA, 15 bp, Homo sapiens
tctaccttggttaat

SEQ ID NO: 137591 - DNA, 15 bp, Homo sapiens
ttctaccttggttaa

SEQ ID NO: 137592 - DNA, 15 bp, Homo sapiens
attctaccttggtta

SEQ ID NO: 137593 - DNA, 15 bp, Homo sapiens
cattctaccttggtt

SEQ ID NO: 137594 - DNA, 15 bp, Homo sapiens
tcattctaccttggt

SEQ ID NO: 137595 - DNA, 15 bp, Homo sapiens
gtcattctaccttgg

SEQ ID NO: 137596 - DNA, 15 bp, Homo sapiens
ggtcattctaccttg

SEQ ID NO: 137597 - DNA, 15 bp, Homo sapiens
aggtcattctacctt

SEQ ID NO: 137598 - DNA, 15 bp, Homo sapiens
aaggtcattctacct

SEQ ID NO: 137599 - DNA, 15 bp, Homo sapiens
caaggtcattctacc

SEQ ID NO: 137600 - DNA, 15 bp, Homo sapiens
acaaggtcattctac

SEQ ID NO: 137601 - DNA, 15 bp, Homo sapiens
tacaaggtcattcta

SEQ ID NO: 137602 - DNA, 15 bp, Homo sapiens
ttacaaggtcattct

SEQ ID NO: 137603 - DNA, 15 bp, Homo sapiens
attacaaggtcattc

SEQ ID NO: 137604 - DNA, 15 bp, Homo sapiens
cattacaaggtcatt

SEQ ID NO: 137605 - DNA, 15 bp, Homo sapiens
acattacaaggtcat

SEQ ID NO: 137606 - DNA, 15 bp, Homo sapiens
tacattacaaggtca

SEQ ID NO: 137607 - DNA, 15 bp, Homo sapiens
ttacattacaaggtc

SEQ ID NO: 137608 - DNA, 15 bp, Homo sapiens
gttacattacaaggt

SEQ ID NO: 137609 - DNA, 15 bp, Homo sapiens
agttacattacaagg

SEQ ID NO: 137610 - DNA, 15 bp, Homo sapiens
cagttacattacaag

SEQ ID NO: 137611 - DNA, 15 bp, Homo sapiens
gcagttacattacaa

SEQ ID NO: 137612 - DNA, 15 bp, Homo sapiens
agcagttacattaca

SEQ ID NO: 137613 - DNA, 15 bp, Homo sapiens
gagcagttacattac

SEQ ID NO: 137614 - DNA, 15 bp, Homo sapiens
agagcagttacatta

SEQ ID NO: 137615 - DNA, 15 bp, Homo sapiens
aagagcagttacatt

SEQ ID NO: 137616 - DNA, 15 bp, Homo sapiens
caagagcagttacat

SEQ ID NO: 137617 - DNA, 15 bp, Homo sapiens
ccaagagcagttaca

SEQ ID NO: 137618 - DNA, 15 bp, Homo sapiens
cccaagagcagttac

SEQ ID NO: 137619 - DNA, 15 bp, Homo sapiens
gcccaagagcagtta

SEQ ID NO: 137620 - DNA, 15 bp, Homo sapiens
tgcccaagagcagtt

SEQ ID NO: 137621 - DNA, 15 bp, Homo sapiens
ttgcccaagagcagt

SEQ ID NO: 137622 - DNA, 15 bp, Homo sapiens
attgcccaagagcag

SEQ ID NO: 137623 - DNA, 15 bp, Homo sapiens
tattgcccaagagca

SEQ ID NO: 137624 - DNA, 15 bp, Homo sapiens
atattgcccaagagc

SEQ ID NO: 137625 - DNA, 15 bp, Homo sapiens
aatattgcccaagag

SEQ ID NO: 137626 - DNA, 15 bp, Homo sapiens
gaatattgcccaaga

SEQ ID NO: 137627 - DNA, 15 bp, Homo sapiens
agaatattgcccaag

SEQ ID NO: 137628 - DNA, 15 bp, Homo sapiens
gagaatattgcccaa

SEQ ID NO: 137629 - DNA, 15 bp, Homo sapiens
agagaatattgccca

SEQ ID NO: 137630 - DNA, 15 bp, Homo sapiens
cagagaatattgccc

SEQ ID NO: 137631 - DNA, 15 bp, Homo sapiens
acagagaatattgcc

SEQ ID NO: 137632 - DNA, 15 bp, Homo sapiens
tacagagaatattgc

SEQ ID NO: 137633 - DNA, 15 bp, Homo sapiens
gtacagagaatattg

SEQ ID NO: 137634 - DNA, 15 bp, Homo sapiens
tgtacagagaatatt

SEQ ID NO: 137635 - DNA, 15 bp, Homo sapiens
atgtacagagaatat

SEQ ID NO: 137636 - DNA, 15 bp, Homo sapiens
tatgtacagagaata

SEQ ID NO: 137637 - DNA, 15 bp, Homo sapiens
atatgtacagagaat

SEQ ID NO: 137638 - DNA, 15 bp, Homo sapiens
aatatgtacagagaa

SEQ ID NO: 137639 - DNA, 15 bp, Homo sapiens
taatatgtacagaga

SEQ ID NO: 137640 - DNA, 15 bp, Homo sapiens
ctaatatgtacagag

SEQ ID NO: 137641 - DNA, 15 bp, Homo sapiens
gctaatatgtacaga

SEQ ID NO: 137642 - DNA, 15 bp, Homo sapiens
cgctaatatgtacag

SEQ ID NO: 137643 - DNA, 15 bp, Homo sapiens
tcgctaatatgtaca

SEQ ID NO: 137644 - DNA, 15 bp, Homo sapiens
gtcgctaatatgtac

SEQ ID NO: 137645 - DNA, 15 bp, Homo sapiens
tgtcgctaatatgta

SEQ ID NO: 137646 - DNA, 15 bp, Homo sapiens
ttgtcgctaatatgt

SEQ ID NO: 137647 - DNA, 15 bp, Homo sapiens
gttgtcgctaatatg

SEQ ID NO: 137648 - DNA, 15 bp, Homo sapiens
tgttgtcgctaatat

SEQ ID NO: 137649 - DNA, 15 bp, Homo sapiens
ctgttgtcgctaata

SEQ ID NO: 137650 - DNA, 15 bp, Homo sapiens
tctgttgtcgctaat

SEQ ID NO: 137651 - DNA, 15 bp, Homo sapiens
atctgttgtcgctaa

SEQ ID NO: 137652 - DNA, 15 bp, Homo sapiens
aatctgttgtcgcta

SEQ ID NO: 137653 - DNA, 15 bp, Homo sapiens
caatctgttgtcgct

SEQ ID NO: 137654 - DNA, 15 bp, Homo sapiens
ccaatctgttgtcgc

SEQ ID NO: 137655 - DNA, 15 bp, Homo sapiens
tccaatctgttgtcg

SEQ ID NO: 137656 - DNA, 15 bp, Homo sapiens
atccaatctgttgtc

SEQ ID NO: 137657 - DNA, 15 bp, Homo sapiens
aatccaatctgttgt

SEQ ID NO: 137658 - DNA, 15 bp, Homo sapiens
aaatccaatctgttg

SEQ ID NO: 137659 - DNA, 15 bp, Homo sapiens
aaaatccaatctgtt

SEQ ID NO: 137660 - DNA, 15 bp, Homo sapiens
taaaatccaatctgt

SEQ ID NO: 137661 - DNA, 15 bp, Homo sapiens
ataaaatccaatctg

SEQ ID NO: 137662 - DNA, 15 bp, Homo sapiens
cataaaatccaatct

SEQ ID NO: 137663 - DNA, 15 bp, Homo sapiens
acataaaatccaatc

SEQ ID NO: 137664 - DNA, 15 bp, Homo sapiens
aacataaaatccaat

SEQ ID NO: 137665 - DNA, 15 bp, Homo sapiens
caacataaaatccaa

SEQ ID NO: 137666 - DNA, 15 bp, Homo sapiens
tcaacataaaatcca

SEQ ID NO: 137667 - DNA, 15 bp, Homo sapiens
gtcaacataaaatcc

SEQ ID NO: 137668 - DNA, 15 bp, Homo sapiens
tgtcaacataaaatc

SEQ ID NO: 137669 - DNA, 15 bp, Homo sapiens
atgtcaacataaaat

SEQ ID NO: 137670 - DNA, 15 bp, Homo sapiens
aatgtcaacataaaa

SEQ ID NO: 137671 - DNA, 15 bp, Homo sapiens
aaatgtcaacataaa

SEQ ID NO: 137672 - DNA, 15 bp, Homo sapiens
caaatgtcaacataa

SEQ ID NO: 137673 - DNA, 15 bp, Homo sapiens
acaaatgtcaacata

SEQ ID NO: 137674 - DNA, 15 bp, Homo sapiens
aacaaatgtcaacat

SEQ ID NO: 137675 - DNA, 15 bp, Homo sapiens
aaacaaatgtcaaca

SEQ ID NO: 137676 - DNA, 15 bp, Homo sapiens
caaacaaatgtcaac

SEQ ID NO: 137677 - DNA, 15 bp, Homo sapiens
ccaaacaaatgtcaa

SEQ ID NO: 137678 - DNA, 15 bp, Homo sapiens
accaaacaaatgtca

SEQ ID NO: 137679 - DNA, 15 bp, Homo sapiens
aaccaaacaaatgtc

SEQ ID NO: 137680 - DNA, 15 bp, Homo sapiens
taaccaaacaaatgt

SEQ ID NO: 137681 - DNA, 15 bp, Homo sapiens
ataaccaaacaaatg

SEQ ID NO: 137682 - DNA, 15 bp, Homo sapiens
tataaccaaacaaat

SEQ ID NO: 137683 - DNA, 15 bp, Homo sapiens
ctataaccaaacaaa

SEQ ID NO: 137684 - DNA, 15 bp, Homo sapiens
actataaccaaacaa

SEQ ID NO: 137685 - DNA, 15 bp, Homo sapiens
cactataaccaaaca

SEQ ID NO: 137686 - DNA, 15 bp, Homo sapiens
gcactataaccaaac

SEQ ID NO: 137687 - DNA, 15 bp, Homo sapiens
tgcactataaccaaa

SEQ ID NO: 137688 - DNA, 15 bp, Homo sapiens
ttgcactataaccaa

SEQ ID NO: 137689 - DNA, 15 bp, Homo sapiens
attgcactataacca

SEQ ID NO: 137690 - DNA, 15 bp, Homo sapiens
tattgcactataacc

SEQ ID NO: 137691 - DNA, 15 bp, Homo sapiens
atattgcactataac

SEQ ID NO: 137692 - DNA, 15 bp, Homo sapiens
tatattgcactataa

SEQ ID NO: 137693 - DNA, 15 bp, Homo sapiens
atatattgcactata

SEQ ID NO: 137694 - DNA, 15 bp, Homo sapiens
aatatattgcactat

SEQ ID NO: 137695 - DNA, 15 bp, Homo sapiens
aaatatattgcacta

SEQ ID NO: 137696 - DNA, 15 bp, Homo sapiens
aaaatatattgcact

SEQ ID NO: 137697 - DNA, 15 bp, Homo sapiens
caaaatatattgcac

SEQ ID NO: 137698 - DNA, 15 bp, Homo sapiens
acaaaatatattgca

SEQ ID NO: 137699 - DNA, 15 bp, Homo sapiens
tacaaaatatattgc

SEQ ID NO: 137700 - DNA, 15 bp, Homo sapiens
atacaaaatatattg

SEQ ID NO: 137701 - DNA, 15 bp, Homo sapiens
catacaaaatatatt

SEQ ID NO: 137702 - DNA, 15 bp, Homo sapiens
gcatacaaaatatat

SEQ ID NO: 137703 - DNA, 15 bp, Homo sapiens
tgcatacaaaatata

SEQ ID NO: 137704 - DNA, 15 bp, Homo sapiens
ttgcatacaaaatat

SEQ ID NO: 137705 - DNA, 15 bp, Homo sapiens
cttgcatacaaaata

SEQ ID NO: 137706 - DNA, 15 bp, Homo sapiens
gcttgcatacaaaat

SEQ ID NO: 137707 - DNA, 15 bp, Homo sapiens
tgcttgcatacaaaa

SEQ ID NO: 137708 - DNA, 15 bp, Homo sapiens
ctgcttgcatacaaa

SEQ ID NO: 137709 - DNA, 15 bp, Homo sapiens
actgcttgcatacaa

SEQ ID NO: 137710 - DNA, 15 bp, Homo sapiens
aactgcttgcataca

SEQ ID NO: 137711 - DNA, 15 bp, Homo sapiens
aaactgcttgcatac

SEQ ID NO: 137712 - DNA, 15 bp, Homo sapiens
gaaactgcttgcata

SEQ ID NO: 137713 - DNA, 15 bp, Homo sapiens
tgaaactgcttgcat

SEQ ID NO: 137714 - DNA, 15 bp, Homo sapiens
ttgaaactgcttgca

SEQ ID NO: 137715 - DNA, 15 bp, Homo sapiens
attgaaactgcttgc

SEQ ID NO: 137716 - DNA, 15 bp, Homo sapiens
tattgaaactgcttg

SEQ ID NO: 137717 - DNA, 15 bp, Homo sapiens
ttattgaaactgctt

SEQ ID NO: 137718 - DNA, 15 bp, Homo sapiens
tttattgaaactgct

SEQ ID NO: 137719 - DNA, 15 bp, Homo sapiens
ctttattgaaactgc

SEQ ID NO: 137720 - DNA, 15 bp, Homo sapiens
actttattgaaactg

SEQ ID NO: 137721 - DNA, 15 bp, Homo sapiens
aactttattgaaact

SEQ ID NO: 137722 - DNA, 15 bp, Homo sapiens
aaactttattgaaac

SEQ ID NO: 137723 - DNA, 15 bp, Homo sapiens
caaactttattgaaa

SEQ ID NO: 137724 - DNA, 15 bp, Homo sapiens
tcaaactttattgaa

SEQ ID NO: 137725 - DNA, 15 bp, Homo sapiens
atcaaactttattga

SEQ ID NO: 137726 - DNA, 15 bp, Homo sapiens
gatcaaactttattg

SEQ ID NO: 137727 - DNA, 15 bp, Homo sapiens
agatcaaactttatt

SEQ ID NO: 137728 - DNA, 15 bp, Homo sapiens
aagatcaaactttat

SEQ ID NO: 137729 - DNA, 15 bp, Homo sapiens
gaagatcaaacttta

SEQ ID NO: 137730 - DNA, 15 bp, Homo sapiens
ggaagatcaaacttt

SEQ ID NO: 137731 - DNA, 15 bp, Homo sapiens
aggaagatcaaactt

SEQ ID NO: 137732 - DNA, 15 bp, Homo sapiens
gaggaagatcaaact

SEQ ID NO: 137733 - DNA, 15 bp, Homo sapiens
agaggaagatcaaac

SEQ ID NO: 137734 - DNA, 15 bp, Homo sapiens
cagaggaagatcaaa

SEQ ID NO: 137735 - DNA, 15 bp, Homo sapiens
gcagaggaagatcaa

SEQ ID NO: 137736 - DNA, 15 bp, Homo sapiens
agcagaggaagatca

SEQ ID NO: 137737 - DNA, 15 bp, Homo sapiens
tagcagaggaagatc

SEQ ID NO: 137738 - DNA, 15 bp, Homo sapiens
ttagcagaggaagat

SEQ ID NO: 137739 - DNA, 15 bp, Homo sapiens
tttagcagaggaaga

SEQ ID NO: 137740 - DNA, 15 bp, Homo sapiens
atttagcagaggaag

SEQ ID NO: 137741 - DNA, 15 bp, Homo sapiens
aatttagcagaggaa

SEQ ID NO: 137742 - DNA, 15 bp, Homo sapiens
caatttagcagagga

SEQ ID NO: 137743 - DNA, 15 bp, Homo sapiens
tcaatttagcagagg

SEQ ID NO: 137744 - DNA, 15 bp, Homo sapiens
atcaatttagcagag

SEQ ID NO: 137745 - DNA, 15 bp, Homo sapiens
catcaatttagcaga

SEQ ID NO: 137746 - DNA, 15 bp, Homo sapiens
acatcaatttagcag

SEQ ID NO: 137747 - DNA, 15 bp, Homo sapiens
aacatcaatttagca

SEQ ID NO: 137748 - DNA, 15 bp, Homo sapiens
caacatcaatttagc

SEQ ID NO: 137749 - DNA, 15 bp, Homo sapiens
tcaacatcaatttag

SEQ ID NO: 137750 - DNA, 15 bp, Homo sapiens
atcaacatcaattta

SEQ ID NO: 137751 - DNA, 15 bp, Homo sapiens
catcaacatcaattt

SEQ ID NO: 137752 - DNA, 15 bp, Homo sapiens
gcatcaacatcaatt

SEQ ID NO: 137753 - DNA, 15 bp, Homo sapiens
tgcatcaacatcaat

SEQ ID NO: 137754 - DNA, 15 bp, Homo sapiens
ttgcatcaacatcaa

SEQ ID NO: 137755 - DNA, 15 bp, Homo sapiens
attgcatcaacatca

SEQ ID NO: 137756 - DNA, 15 bp, Homo sapiens
gattgcatcaacatc

SEQ ID NO: 137757 - DNA, 15 bp, Homo sapiens
ggattgcatcaacat

SEQ ID NO: 137758 - DNA, 15 bp, Homo sapiens
aggattgcatcaaca

SEQ ID NO: 137759 - DNA, 15 bp, Homo sapiens
aaggattgcatcaac

SEQ ID NO: 137760 - DNA, 15 bp, Homo sapiens
taaggattgcatcaa

SEQ ID NO: 137761 - DNA, 15 bp, Homo sapiens
gtaaggattgcatca

SEQ ID NO: 137762 - DNA, 15 bp, Homo sapiens
tgtaaggattgcatc

SEQ ID NO: 137763 - DNA, 15 bp, Homo sapiens
ttgtaaggattgcat

SEQ ID NO: 137764 - DNA, 15 bp, Homo sapiens
tttgtaaggattgca

SEQ ID NO: 137765 - DNA, 15 bp, Homo sapiens
atttgtaaggattgc

SEQ ID NO: 137766 - DNA, 15 bp, Homo sapiens
catttgtaaggattg

SEQ ID NO: 137767 - DNA, 15 bp, Homo sapiens
tcatttgtaaggatt

SEQ ID NO: 137768 - DNA, 15 bp, Homo sapiens
atcatttgtaaggat

SEQ ID NO: 137769 - DNA, 15 bp, Homo sapiens
aatcatttgtaagga

SEQ ID NO: 137770 - DNA, 15 bp, Homo sapiens
caatcatttgtaagg

SEQ ID NO: 137771 - DNA, 15 bp, Homo sapiens
gcaatcatttgtaag

SEQ ID NO: 137772 - DNA, 15 bp, Homo sapiens
agcaatcatttgtaa

SEQ ID NO: 137773 - DNA, 15 bp, Homo sapiens
aagcaatcatttgta

SEQ ID NO: 137774 - DNA, 15 bp, Homo sapiens
aaagcaatcatttgt

SEQ ID NO: 137775 - DNA, 15 bp, Homo sapiens
aaaagcaatcatttg

SEQ ID NO: 137776 - DNA, 15 bp, Homo sapiens
taaaagcaatcattt

SEQ ID NO: 137777 - DNA, 15 bp, Homo sapiens
ttaaaagcaatcatt

SEQ ID NO: 137778 - DNA, 15 bp, Homo sapiens
tttaaaagcaatcat

SEQ ID NO: 137779 - DNA, 15 bp, Homo sapiens
ttttaaaagcaatca

SEQ ID NO: 137780 - DNA, 15 bp, Homo sapiens
attttaaaagcaatc

SEQ ID NO: 137781 - DNA, 15 bp, Homo sapiens
aattttaaaagcaat

SEQ ID NO: 137782 - DNA, 15 bp, Homo sapiens
aaattttaaaagcaa

SEQ ID NO: 137783 - DNA, 15 bp, Homo sapiens
aaaattttaaaagca

SEQ ID NO: 137784 - DNA, 15 bp, Homo sapiens
taaaattttaaaagc

SEQ ID NO: 137785 - DNA, 15 bp, Homo sapiens
ttaaaattttaaaag

SEQ ID NO: 137786 - DNA, 15 bp, Homo sapiens
cttaaaattttaaaa

SEQ ID NO: 137787 - DNA, 15 bp, Homo sapiens
gcttaaaattttaaa

SEQ ID NO: 137788 - DNA, 15 bp, Homo sapiens
agcttaaaattttaa

SEQ ID NO: 137789 - DNA, 15 bp, Homo sapiens
tagcttaaaatttta

SEQ ID NO: 137790 - DNA, 15 bp, Homo sapiens
ctagcttaaaatttt

SEQ ID NO: 137791 - DNA, 15 bp, Homo sapiens
cctagcttaaaattt

SEQ ID NO: 137792 - DNA, 15 bp, Homo sapiens
tcctagcttaaaatt

SEQ ID NO: 137793 - DNA, 15 bp, Homo sapiens
ttcctagcttaaaat

SEQ ID NO: 137794 - DNA, 15 bp, Homo sapiens
tttcctagcttaaaa

SEQ ID NO: 137795 - DNA, 15 bp, Homo sapiens
ttttcctagcttaaa

SEQ ID NO: 137796 - DNA, 15 bp, Homo sapiens
cttttcctagcttaa

SEQ ID NO: 137797 - DNA, 15 bp, Homo sapiens
tcttttcctagctta

SEQ ID NO: 137798 - DNA, 15 bp, Homo sapiens
ttcttttcctagctt

SEQ ID NO: 137799 - DNA, 15 bp, Homo sapiens
tttcttttcctagct

SEQ ID NO: 137800 - DNA, 15 bp, Homo sapiens
atttcttttcctagc

SEQ ID NO: 137801 - DNA, 15 bp, Homo sapiens
gatttcttttcctag

SEQ ID NO: 137802 - DNA, 15 bp, Homo sapiens
agatttcttttccta

SEQ ID NO: 137803 - DNA, 15 bp, Homo sapiens
tagatttcttttcct

SEQ ID NO: 137804 - DNA, 15 bp, Homo sapiens
atagatttcttttcc

SEQ ID NO: 137805 - DNA, 15 bp, Homo sapiens
tatagatttcttttc

SEQ ID NO: 137806 - DNA, 15 bp, Homo sapiens
ctatagatttctttt

SEQ ID NO: 137807 - DNA, 15 bp, Homo sapiens
tctatagatttcttt

SEQ ID NO: 137808 - DNA, 15 bp, Homo sapiens
ttctatagatttctt

SEQ ID NO: 137809 - DNA, 15 bp, Homo sapiens
tttctatagatttct

SEQ ID NO: 137810 - DNA, 15 bp, Homo sapiens
ctttctatagatttc

SEQ ID NO: 137811 - DNA, 15 bp, Homo sapiens
actttctatagattt

SEQ ID NO: 137812 - DNA, 15 bp, Homo sapiens
cactttctatagatt

SEQ ID NO: 137813 - DNA, 15 bp, Homo sapiens
acactttctatagat

SEQ ID NO: 137814 - DNA, 15 bp, Homo sapiens
aacactttctataga

SEQ ID NO: 137815 - DNA, 15 bp, Homo sapiens
gaacactttctatag

SEQ ID NO: 137816 - DNA, 15 bp, Homo sapiens
agaacactttctata

SEQ ID NO: 137817 - DNA, 15 bp, Homo sapiens
cagaacactttctat

SEQ ID NO: 137818 - DNA, 15 bp, Homo sapiens
acagaacactttcta

SEQ ID NO: 137819 - DNA, 15 bp, Homo sapiens
aacagaacactttct

SEQ ID NO: 137820 - DNA, 15 bp, Homo sapiens
taacagaacactttc

SEQ ID NO: 137821 - DNA, 15 bp, Homo sapiens
gtaacagaacacttt

SEQ ID NO: 137822 - DNA, 15 bp, Homo sapiens
tgtaacagaacactt

SEQ ID NO: 137823 - DNA, 15 bp, Homo sapiens
ttgtaacagaacact

SEQ ID NO: 137824 - DNA, 15 bp, Homo sapiens
tttgtaacagaacac

SEQ ID NO: 137825 - DNA, 15 bp, Homo sapiens
ttttgtaacagaaca

SEQ ID NO: 137826 - DNA, 15 bp, Homo sapiens
attttgtaacagaac

SEQ ID NO: 137827 - DNA, 15 bp, Homo sapiens
cattttgtaacagaa

SEQ ID NO: 137828 - DNA, 15 bp, Homo sapiens
acattttgtaacaga

SEQ ID NO: 137829 - DNA, 15 bp, Homo sapiens
tacattttgtaacag

SEQ ID NO: 137830 - DNA, 15 bp, Homo sapiens
ttacattttgtaaca

SEQ ID NO: 137831 - DNA, 15 bp, Homo sapiens
gttacattttgtaac

SEQ ID NO: 137832 - DNA, 15 bp, Homo sapiens
agttacattttgtaa

SEQ ID NO: 137833 - DNA, 15 bp, Homo sapiens
cagttacattttgta

SEQ ID NO: 137834 - DNA, 15 bp, Homo sapiens
acagttacattttgt

SEQ ID NO: 137835 - DNA, 15 bp, Homo sapiens
aacagttacattttg

SEQ ID NO: 137836 - DNA, 15 bp, Homo sapiens
taacagttacatttt

SEQ ID NO: 137837 - DNA, 15 bp, Homo sapiens
gtaacagttacattt

SEQ ID NO: 137838 - DNA, 15 bp, Homo sapiens
ggtaacagttacatt

SEQ ID NO: 137839 - DNA, 15 bp, Homo sapiens
tggtaacagttacat

SEQ ID NO: 137840 - DNA, 15 bp, Homo sapiens
atggtaacagttaca

SEQ ID NO: 137841 - DNA, 15 bp, Homo sapiens
aatggtaacagttac

SEQ ID NO: 137842 - DNA, 15 bp, Homo sapiens
caatggtaacagtta

SEQ ID NO: 137843 - DNA, 15 bp, Homo sapiens
ccaatggtaacagtt

SEQ ID NO: 137844 - DNA, 15 bp, Homo sapiens
tccaatggtaacagt

SEQ ID NO: 137845 - DNA, 15 bp, Homo sapiens
ttccaatggtaacag

SEQ ID NO: 137846 - DNA, 15 bp, Homo sapiens
tttccaatggtaaca

SEQ ID NO: 137847 - DNA, 15 bp, Homo sapiens
atttccaatggtaac

SEQ ID NO: 137848 - DNA, 15 bp, Homo sapiens
aatttccaatggtaa

SEQ ID NO: 137849 - DNA, 15 bp, Homo sapiens
aaatttccaatggta

SEQ ID NO: 137850 - DNA, 15 bp, Homo sapiens
gaaatttccaatggt

SEQ ID NO: 137851 - DNA, 15 bp, Homo sapiens
tgaaatttccaatgg

SEQ ID NO: 137852 - DNA, 15 bp, Homo sapiens
gtgaaatttccaatg

SEQ ID NO: 137853 - DNA, 15 bp, Homo sapiens
cgtgaaatttccaat

SEQ ID NO: 137854 - DNA, 15 bp, Homo sapiens
acgtgaaatttccaa

SEQ ID NO: 137855 - DNA, 15 bp, Homo sapiens
gacgtgaaatttcca

SEQ ID NO: 137856 - DNA, 15 bp, Homo sapiens
tgacgtgaaatttcc

SEQ ID NO: 137857 - DNA, 15 bp, Homo sapiens
atgacgtgaaatttc

SEQ ID NO: 137858 - DNA, 15 bp, Homo sapiens
tatgacgtgaaattt

SEQ ID NO: 137859 - DNA, 15 bp, Homo sapiens
ctatgacgtgaaatt

SEQ ID NO: 137860 - DNA, 15 bp, Homo sapiens
cctatgacgtgaaat

SEQ ID NO: 137861 - DNA, 15 bp, Homo sapiens
tcctatgacgtgaaa

SEQ ID NO: 137862 - DNA, 15 bp, Homo sapiens
ttcctatgacgtgaa

SEQ ID NO: 137863 - DNA, 15 bp, Homo sapiens
cttcctatgacgtga

SEQ ID NO: 137864 - DNA, 15 bp, Homo sapiens
acttcctatgacgtg

SEQ ID NO: 137865 - DNA, 15 bp, Homo sapiens
aacttcctatgacgt

SEQ ID NO: 137866 - DNA, 15 bp, Homo sapiens
taacttcctatgacg

SEQ ID NO: 137867 - DNA, 15 bp, Homo sapiens
ctaacttcctatgac

SEQ ID NO: 137868 - DNA, 15 bp, Homo sapiens
gctaacttcctatga

SEQ ID NO: 137869 - DNA, 15 bp, Homo sapiens
ggctaacttcctatg

SEQ ID NO: 137870 - DNA, 15 bp, Homo sapiens
aggctaacttcctat

SEQ ID NO: 137871 - DNA, 15 bp, Homo sapiens
aaggctaacttccta

SEQ ID NO: 137872 - DNA, 15 bp, Homo sapiens
aaaggctaacttcct

SEQ ID NO: 137873 - DNA, 15 bp, Homo sapiens
taaaggctaacttcc

SEQ ID NO: 137874 - DNA, 15 bp, Homo sapiens
ataaaggctaacttc

SEQ ID NO: 137875 - DNA, 15 bp, Homo sapiens
gataaaggctaactt

SEQ ID NO: 137876 - DNA, 15 bp, Homo sapiens
agataaaggctaact

SEQ ID NO: 137877 - DNA, 15 bp, Homo sapiens
tagataaaggctaac

SEQ ID NO: 137878 - DNA, 15 bp, Homo sapiens
gtagataaaggctaa

SEQ ID NO: 137879 - DNA, 15 bp, Homo sapiens
ggtagataaaggcta

SEQ ID NO: 137880 - DNA, 15 bp, Homo sapiens
tggtagataaaggct

SEQ ID NO: 137881 - DNA, 15 bp, Homo sapiens
ttggtagataaaggc

SEQ ID NO: 137882 - DNA, 15 bp, Homo sapiens
gttggtagataaagg

SEQ ID NO: 137883 - DNA, 15 bp, Homo sapiens
agttggtagataaag

SEQ ID NO: 137884 - DNA, 15 bp, Homo sapiens
aagttggtagataaa

SEQ ID NO: 137885 - DNA, 15 bp, Homo sapiens
aaagttggtagataa

SEQ ID NO: 137886 - DNA, 15 bp, Homo sapiens
gaaagttggtagata

SEQ ID NO: 137887 - DNA, 15 bp, Homo sapiens
tgaaagttggtagat

SEQ ID NO: 137888 - DNA, 15 bp, Homo sapiens
ttgaaagttggtaga

SEQ ID NO: 137889 - DNA, 15 bp, Homo sapiens
cttgaaagttggtag

SEQ ID NO: 137890 - DNA, 15 bp, Homo sapiens
tcttgaaagttggta

SEQ ID NO: 137891 - DNA, 15 bp, Homo sapiens
ttcttgaaagttggt

SEQ ID NO: 137892 - DNA, 15 bp, Homo sapiens
gttcttgaaagttgg

SEQ ID NO: 137893 - DNA, 15 bp, Homo sapiens
agttcttgaaagttg

SEQ ID NO: 137894 - DNA, 15 bp, Homo sapiens
aagttcttgaaagtt

SEQ ID NO: 137895 - DNA, 15 bp, Homo sapiens
caagttcttgaaagt

SEQ ID NO: 137896 - DNA, 15 bp, Homo sapiens
acaagttcttgaaag

SEQ ID NO: 137897 - DNA, 15 bp, Homo sapiens
aacaagttcttgaaa

SEQ ID NO: 137898 - DNA, 15 bp, Homo sapiens
aaacaagttcttgaa

SEQ ID NO: 137899 - DNA, 15 bp, Homo sapiens
taaacaagttcttga

SEQ ID NO: 137900 - DNA, 15 bp, Homo sapiens
ttaaacaagttcttg

SEQ ID NO: 137901 - DNA, 15 bp, Homo sapiens
attaaacaagttctt

SEQ ID NO: 137902 - DNA, 15 bp, Homo sapiens
tattaaacaagttct

SEQ ID NO: 137903 - DNA, 15 bp, Homo sapiens
ttattaaacaagttc

SEQ ID NO: 137904 - DNA, 15 bp, Homo sapiens
tttattaaacaagtt

SEQ ID NO: 137905 - DNA, 15 bp, Homo sapiens
ctttattaaacaagt

SEQ ID NO: 137906 - DNA, 15 bp, Homo sapiens
gctttattaaacaag

SEQ ID NO: 137907 - DNA, 15 bp, Homo sapiens
cgctttattaaacaa

SEQ ID NO: 137908 - DNA, 15 bp, Homo sapiens
tcgctttattaaaca

SEQ ID NO: 137909 - DNA, 15 bp, Homo sapiens
ttcgctttattaaac

SEQ ID NO: 137910 - DNA, 15 bp, Homo sapiens
tttcgctttattaaa

SEQ ID NO: 137911 - DNA, 15 bp, Homo sapiens
ttttcgctttattaa

SEQ ID NO: 137912 - DNA, 15 bp, Homo sapiens
tttttcgctttatta

SEQ ID NO: 137913 - DNA, 15 bp, Homo sapiens
gtttttcgctttatt

SEQ ID NO: 137914 - DNA, 15 bp, Homo sapiens
agtttttcgctttat

SEQ ID NO: 137915 - DNA, 15 bp, Homo sapiens
gagtttttcgcttta

SEQ ID NO: 137916 - DNA, 15 bp, Homo sapiens
tgagtttttcgcttt

SEQ ID NO: 137917 - DNA, 15 bp, Homo sapiens
ttgagtttttcgctt

SEQ ID NO: 137918 - DNA, 15 bp, Homo sapiens
gttgagtttttcgct

SEQ ID NO: 137919 - DNA, 15 bp, Homo sapiens
ggttgagtttttcgc

SEQ ID NO: 137920 - DNA, 15 bp, Homo sapiens
tggttgagtttttcg

SEQ ID NO: 137921 - DNA, 15 bp, Homo sapiens
ttggttgagtttttc

SEQ ID NO: 137922 - DNA, 15 bp, Homo sapiens
tttggttgagttttt

SEQ ID NO: 137923 - DNA, 15 bp, Homo sapiens
atttggttgagtttt

SEQ ID NO: 137924 - DNA, 15 bp, Homo sapiens
catttggttgagttt

SEQ ID NO: 137925 - DNA, 15 bp, Homo sapiens
ccatttggttgagtt

SEQ ID NO: 137926 - DNA, 15 bp, Homo sapiens
accatttggttgagt

SEQ ID NO: 137927 - DNA, 15 bp, Homo sapiens
taccatttggttgag

SEQ ID NO: 137928 - DNA, 15 bp, Homo sapiens
gtaccatttggttga

SEQ ID NO: 137929 - DNA, 15 bp, Homo sapiens
tgtaccatttggttg

SEQ ID NO: 137930 - DNA, 15 bp, Homo sapiens
ttgtaccatttggtt

SEQ ID NO: 137931 - DNA, 15 bp, Homo sapiens
tttgtaccatttggt

SEQ ID NO: 137932 - DNA, 15 bp, Homo sapiens
ttttgtaccatttgg

SEQ ID NO: 137933 - DNA, 15 bp, Homo sapiens
gttttgtaccatttg

SEQ ID NO: 137934 - DNA, 15 bp, Homo sapiens
ggttttgtaccattt

SEQ ID NO: 137935 - DNA, 15 bp, Homo sapiens
tggttttgtaccatt

SEQ ID NO: 137936 - DNA, 15 bp, Homo sapiens
gtggttttgtaccat

SEQ ID NO: 137937 - DNA, 15 bp, Homo sapiens
tgtggttttgtacca

SEQ ID NO: 137938 - DNA, 15 bp, Homo sapiens
ctgtggttttgtacc

SEQ ID NO: 137939 - DNA, 15 bp, Homo sapiens
actgtggttttgtac

SEQ ID NO: 137940 - DNA, 15 bp, Homo sapiens
cactgtggttttgta

SEQ ID NO: 137941 - DNA, 15 bp, Homo sapiens
acactgtggttttgt

SEQ ID NO: 137942 - DNA, 15 bp, Homo sapiens
tacactgtggttttg

SEQ ID NO: 137943 - DNA, 15 bp, Homo sapiens
gtacactgtggtttt

SEQ ID NO: 137944 - DNA, 15 bp, Homo sapiens
ggtacactgtggttt

SEQ ID NO: 137945 - DNA, 15 bp, Homo sapiens
tggtacactgtggtt

SEQ ID NO: 137946 - DNA, 15 bp, Homo sapiens
atggtacactgtggt

SEQ ID NO: 137947 - DNA, 15 bp, Homo sapiens
aatggtacactgtgg

SEQ ID NO: 137948 - DNA, 15 bp, Homo sapiens
taatggtacactgtg

SEQ ID NO: 137949 - DNA, 15 bp, Homo sapiens
ttaatggtacactgt

SEQ ID NO: 137950 - DNA, 15 bp, Homo sapiens
tttaatggtacactg

SEQ ID NO: 137951 - DNA, 15 bp, Homo sapiens
ttttaatggtacact

SEQ ID NO: 137952 - DNA, 15 bp, Homo sapiens
attttaatggtacac

SEQ ID NO: 137953 - DNA, 15 bp, Homo sapiens
tattttaatggtaca

SEQ ID NO: 137954 - DNA, 15 bp, Homo sapiens
atattttaatggtac

SEQ ID NO: 137955 - DNA, 15 bp, Homo sapiens
catattttaatggta

SEQ ID NO: 137956 - DNA, 15 bp, Homo sapiens
gcatattttaatggt

SEQ ID NO: 137957 - DNA, 15 bp, Homo sapiens
tgcatattttaatgg

SEQ ID NO: 137958 - DNA, 15 bp, Homo sapiens
gtgcatattttaatg

SEQ ID NO: 137959 - DNA, 15 bp, Homo sapiens
agtgcatattttaat

SEQ ID NO: 137960 - DNA, 15 bp, Homo sapiens
tagtgcatattttaa

SEQ ID NO: 137961 - DNA, 15 bp, Homo sapiens
ttagtgcatatttta

SEQ ID NO: 137962 - DNA, 15 bp, Homo sapiens
cttagtgcatatttt

SEQ ID NO: 137963 - DNA, 15 bp, Homo sapiens
acttagtgcatattt

SEQ ID NO: 137964 - DNA, 15 bp, Homo sapiens
gacttagtgcatatt

SEQ ID NO: 137965 - DNA, 15 bp, Homo sapiens
agacttagtgcatat

SEQ ID NO: 137966 - DNA, 15 bp, Homo sapiens
gagacttagtgcata

SEQ ID NO: 137967 - DNA, 15 bp, Homo sapiens
agagacttagtgcat

SEQ ID NO: 137968 - DNA, 15 bp, Homo sapiens
aagagacttagtgca

SEQ ID NO: 137969 - DNA, 15 bp, Homo sapiens
aaagagacttagtgc

SEQ ID NO: 137970 - DNA, 15 bp, Homo sapiens
aaaagagacttagtg

SEQ ID NO: 137971 - DNA, 15 bp, Homo sapiens
aaaaagagacttagt

SEQ ID NO: 137972 - DNA, 15 bp, Homo sapiens
aaaaaagagacttag

SEQ ID NO: 137973 - DNA, 15 bp, Homo sapiens
taaaaaagagactta

SEQ ID NO: 137974 - DNA, 15 bp, Homo sapiens
gtaaaaaagagactt

SEQ ID NO: 137975 - DNA, 15 bp, Homo sapiens
tgtaaaaaagagact

SEQ ID NO: 137976 - DNA, 15 bp, Homo sapiens
ttgtaaaaaagagac

SEQ ID NO: 137977 - DNA, 15 bp, Homo sapiens
tttgtaaaaaagaga

SEQ ID NO: 137978 - DNA, 15 bp, Homo sapiens
ctttgtaaaaaagag

SEQ ID NO: 137979 - DNA, 15 bp, Homo sapiens
cctttgtaaaaaaga

SEQ ID NO: 137980 - DNA, 15 bp, Homo sapiens
gcctttgtaaaaaag

SEQ ID NO: 137981 - DNA, 15 bp, Homo sapiens
agcctttgtaaaaaa

SEQ ID NO: 137982 - DNA, 15 bp, Homo sapiens
cagcctttgtaaaaa

SEQ ID NO: 137983 - DNA, 15 bp, Homo sapiens
acagcctttgtaaaa

SEQ ID NO: 137984 - DNA, 15 bp, Homo sapiens
tacagcctttgtaaa

SEQ ID NO: 137985 - DNA, 15 bp, Homo sapiens
atacagcctttgtaa

SEQ ID NO: 137986 - DNA, 15 bp, Homo sapiens
aatacagcctttgta

SEQ ID NO: 137987 - DNA, 15 bp, Homo sapiens
gaatacagcctttgt

SEQ ID NO: 137988 - DNA, 15 bp, Homo sapiens
tgaatacagcctttg

SEQ ID NO: 137989 - DNA, 15 bp, Homo sapiens
ctgaatacagccttt

SEQ ID NO: 137990 - DNA, 15 bp, Homo sapiens
gctgaatacagcctt

SEQ ID NO: 137991 - DNA, 15 bp, Homo sapiens
tgctgaatacagcct

SEQ ID NO: 137992 - DNA, 15 bp, Homo sapiens
ttgctgaatacagcc

SEQ ID NO: 137993 - DNA, 15 bp, Homo sapiens
cttgctgaatacagc

SEQ ID NO: 137994 - DNA, 15 bp, Homo sapiens
ccttgctgaatacag

SEQ ID NO: 137995 - DNA, 15 bp, Homo sapiens
gccttgctgaataca

SEQ ID NO: 137996 - DNA, 15 bp, Homo sapiens
cgccttgctgaatac

SEQ ID NO: 137997 - DNA, 15 bp, Homo sapiens
gcgccttgctgaata

SEQ ID NO: 137998 - DNA, 15 bp, Homo sapiens
agcgccttgctgaat

SEQ ID NO: 137999 - DNA, 15 bp, Homo sapiens
tagcgccttgctgaa

SEQ ID NO: 138000 - DNA, 15 bp, Homo sapiens
ttagcgccttgctga

SEQ ID NO: 138001 - DNA, 15 bp, Homo sapiens
gttagcgccttgctg

SEQ ID NO: 138002 - DNA, 15 bp, Homo sapiens
agttagcgccttgct

SEQ ID NO: 138003 - DNA, 15 bp, Homo sapiens
aagttagcgccttgc

SEQ ID NO: 138004 - DNA, 15 bp, Homo sapiens
caagttagcgccttg

SEQ ID NO: 138005 - DNA, 15 bp, Homo sapiens
gcaagttagcgcctt

SEQ ID NO: 138006 - DNA, 15 bp, Homo sapiens
agcaagttagcgcct

SEQ ID NO: 138007 - DNA, 15 bp, Homo sapiens
aagcaagttagcgcc

SEQ ID NO: 138008 - DNA, 15 bp, Homo sapiens
taagcaagttagcgc

SEQ ID NO: 138009 - DNA, 15 bp, Homo sapiens
ttaagcaagttagcg

SEQ ID NO: 138010 - DNA, 15 bp, Homo sapiens
tttaagcaagttagc

SEQ ID NO: 138011 - DNA, 15 bp, Homo sapiens
atttaagcaagttag

SEQ ID NO: 138012 - DNA, 15 bp, Homo sapiens
catttaagcaagtta

SEQ ID NO: 138013 - DNA, 15 bp, Homo sapiens
acatttaagcaagtt

SEQ ID NO: 138014 - DNA, 15 bp, Homo sapiens
cacatttaagcaagt

SEQ ID NO: 138015 - DNA, 15 bp, Homo sapiens
tcacatttaagcaag

SEQ ID NO: 138016 - DNA, 15 bp, Homo sapiens
ttcacatttaagcaa

SEQ ID NO: 138017 - DNA, 15 bp, Homo sapiens
attcacatttaagca

SEQ ID NO: 138018 - DNA, 15 bp, Homo sapiens
aattcacatttaagc

SEQ ID NO: 138019 - DNA, 15 bp, Homo sapiens
taattcacatttaag

SEQ ID NO: 138020 - DNA, 15 bp, Homo sapiens
gtaattcacatttaa

SEQ ID NO: 138021 - DNA, 15 bp, Homo sapiens
agtaattcacattta

SEQ ID NO: 138022 - DNA, 15 bp, Homo sapiens
tagtaattcacattt

SEQ ID NO: 138023 - DNA, 15 bp, Homo sapiens
ttagtaattcacatt

SEQ ID NO: 138024 - DNA, 15 bp, Homo sapiens
gttagtaattcacat

SEQ ID NO: 138025 - DNA, 15 bp, Homo sapiens
agttagtaattcaca

SEQ ID NO: 138026 - DNA, 15 bp, Homo sapiens
aagttagtaattcac

SEQ ID NO: 138027 - DNA, 15 bp, Homo sapiens
gaagttagtaattca

SEQ ID NO: 138028 - DNA, 15 bp, Homo sapiens
agaagttagtaattc

SEQ ID NO: 138029 - DNA, 15 bp, Homo sapiens
tagaagttagtaatt

SEQ ID NO: 138030 - DNA, 15 bp, Homo sapiens
ttagaagttagtaat

SEQ ID NO: 138031 - DNA, 15 bp, Homo sapiens
tttagaagttagtaa

SEQ ID NO: 138032 - DNA, 15 bp, Homo sapiens
ttttagaagttagta

SEQ ID NO: 138033 - DNA, 15 bp, Homo sapiens
gttttagaagttagt

SEQ ID NO: 138034 - DNA, 15 bp, Homo sapiens
agttttagaagttag

SEQ ID NO: 138035 - DNA, 15 bp, Homo sapiens
cagttttagaagtta

SEQ ID NO: 138036 - DNA, 15 bp, Homo sapiens
acagttttagaagtt

SEQ ID NO: 138037 - DNA, 15 bp, Homo sapiens
tacagttttagaagt

SEQ ID NO: 138038 - DNA, 15 bp, Homo sapiens
gtacagttttagaag

SEQ ID NO: 138039 - DNA, 15 bp, Homo sapiens
agtacagttttagaa

SEQ ID NO: 138040 - DNA, 15 bp, Homo sapiens
aagtacagttttaga

SEQ ID NO: 138041 - DNA, 15 bp, Homo sapiens
aaagtacagttttag

SEQ ID NO: 138042 - DNA, 15 bp, Homo sapiens
caaagtacagtttta

SEQ ID NO: 138043 - DNA, 15 bp, Homo sapiens
tcaaagtacagtttt

SEQ ID NO: 138044 - DNA, 15 bp, Homo sapiens
atcaaagtacagttt

SEQ ID NO: 138045 - DNA, 15 bp, Homo sapiens
aatcaaagtacagtt

SEQ ID NO: 138046 - DNA, 15 bp, Homo sapiens
gaatcaaagtacagt

SEQ ID NO: 138047 - DNA, 15 bp, Homo sapiens
tgaatcaaagtacag

SEQ ID NO: 138048 - DNA, 15 bp, Homo sapiens
gtgaatcaaagtaca

SEQ ID NO: 138049 - DNA, 15 bp, Homo sapiens
tgtgaatcaaagtac

SEQ ID NO: 138050 - DNA, 15 bp, Homo sapiens
atgtgaatcaaagta

SEQ ID NO: 138051 - DNA, 15 bp, Homo sapiens
catgtgaatcaaagt

SEQ ID NO: 138052 - DNA, 15 bp, Homo sapiens
acatgtgaatcaaag

SEQ ID NO: 138053 - DNA, 15 bp, Homo sapiens
aacatgtgaatcaaa

SEQ ID NO: 138054 - DNA, 15 bp, Homo sapiens
aaacatgtgaatcaa

SEQ ID NO: 138055 - DNA, 15 bp, Homo sapiens
aaaacatgtgaatca

SEQ ID NO: 138056 - DNA, 15 bp, Homo sapiens
gaaaacatgtgaatc

SEQ ID NO: 138057 - DNA, 15 bp, Homo sapiens
tgaaaacatgtgaat

SEQ ID NO: 138058 - DNA, 15 bp, Homo sapiens
ttgaaaacatgtgaa

SEQ ID NO: 138059 - DNA, 15 bp, Homo sapiens
tttgaaaacatgtga

SEQ ID NO: 138060 - DNA, 15 bp, Homo sapiens
atttgaaaacatgtg

SEQ ID NO: 138061 - DNA, 15 bp, Homo sapiens
catttgaaaacatgt

SEQ ID NO: 138062 - DNA, 15 bp, Homo sapiens
ccatttgaaaacatg

SEQ ID NO: 138063 - DNA, 15 bp, Homo sapiens
tccatttgaaaacat

SEQ ID NO: 138064 - DNA, 15 bp, Homo sapiens
ctccatttgaaaaca

SEQ ID NO: 138065 - DNA, 15 bp, Homo sapiens
actccatttgaaaac

SEQ ID NO: 138066 - DNA, 15 bp, Homo sapiens
aactccatttgaaaa

SEQ ID NO: 138067 - DNA, 15 bp, Homo sapiens
caactccatttgaaa

SEQ ID NO: 138068 - DNA, 15 bp, Homo sapiens
ccaactccatttgaa

SEQ ID NO: 138069 - DNA, 15 bp, Homo sapiens
tccaactccatttga

SEQ ID NO: 138070 - DNA, 15 bp, Homo sapiens
ctccaactccatttg

SEQ ID NO: 138071 - DNA, 15 bp, Homo sapiens
actccaactccattt

SEQ ID NO: 138072 - DNA, 15 bp, Homo sapiens
aactccaactccatt

SEQ ID NO: 138073 - DNA, 15 bp, Homo sapiens
gaactccaactccat

SEQ ID NO: 138074 - DNA, 15 bp, Homo sapiens
tgaactccaactcca

SEQ ID NO: 138075 - DNA, 15 bp, Homo sapiens
atgaactccaactcc

SEQ ID NO: 138076 - DNA, 15 bp, Homo sapiens
aatgaactccaactc

SEQ ID NO: 138077 - DNA, 15 bp, Homo sapiens
gaatgaactccaact

SEQ ID NO: 138078 - DNA, 15 bp, Homo sapiens
tgaatgaactccaac

SEQ ID NO: 138079 - DNA, 15 bp, Homo sapiens
atgaatgaactccaa

SEQ ID NO: 138080 - DNA, 15 bp, Homo sapiens
tatgaatgaactcca

SEQ ID NO: 138081 - DNA, 15 bp, Homo sapiens
atatgaatgaactcc

SEQ ID NO: 138082 - DNA, 15 bp, Homo sapiens
aatatgaatgaactc

SEQ ID NO: 138083 - DNA, 15 bp, Homo sapiens
taatatgaatgaact

SEQ ID NO: 138084 - DNA, 15 bp, Homo sapiens
gtaatatgaatgaac

SEQ ID NO: 138085 - DNA, 15 bp, Homo sapiens
tgtaatatgaatgaa

SEQ ID NO: 138086 - DNA, 15 bp, Homo sapiens
ttgtaatatgaatga

SEQ ID NO: 138087 - DNA, 15 bp, Homo sapiens
attgtaatatgaatg

SEQ ID NO: 138088 - DNA, 15 bp, Homo sapiens
tattgtaatatgaat

SEQ ID NO: 138089 - DNA, 15 bp, Homo sapiens
atattgtaatatgaa

SEQ ID NO: 138090 - DNA, 15 bp, Homo sapiens
aatattgtaatatga

SEQ ID NO: 138091 - DNA, 15 bp, Homo sapiens
aaatattgtaatatg

SEQ ID NO: 138092 - DNA, 15 bp, Homo sapiens
caaatattgtaatat

SEQ ID NO: 138093 - DNA, 15 bp, Homo sapiens
acaaatattgtaata

SEQ ID NO: 138094 - DNA, 15 bp, Homo sapiens
cacaaatattgtaat

SEQ ID NO: 138095 - DNA, 15 bp, Homo sapiens
acacaaatattgtaa

SEQ ID NO: 138096 - DNA, 15 bp, Homo sapiens
cacacaaatattgta

SEQ ID NO: 138097 - DNA, 15 bp, Homo sapiens
gcacacaaatattgt

SEQ ID NO: 138098 - DNA, 15 bp, Homo sapiens
agcacacaaatattg

SEQ ID NO: 138099 - DNA, 15 bp, Homo sapiens
tagcacacaaatatt

SEQ ID NO: 138100 - DNA, 15 bp, Homo sapiens
ttagcacacaaatat

SEQ ID NO: 138101 - DNA, 15 bp, Homo sapiens
tttagcacacaaata

SEQ ID NO: 138102 - DNA, 15 bp, Homo sapiens
gtttagcacacaaat

SEQ ID NO: 138103 - DNA, 15 bp, Homo sapiens
cgtttagcacacaaa

SEQ ID NO: 138104 - DNA, 15 bp, Homo sapiens
acgtttagcacacaa

SEQ ID NO: 138105 - DNA, 15 bp, Homo sapiens
cacgtttagcacaca

SEQ ID NO: 138106 - DNA, 15 bp, Homo sapiens
acacgtttagcacac

SEQ ID NO: 138107 - DNA, 15 bp, Homo sapiens
tacacgtttagcaca

SEQ ID NO: 138108 - DNA, 15 bp, Homo sapiens
atacacgtttagcac

SEQ ID NO: 138109 - DNA, 15 bp, Homo sapiens
catacacgtttagca

SEQ ID NO: 138110 - DNA, 15 bp, Homo sapiens
acatacacgtttagc

SEQ ID NO: 138111 - DNA, 15 bp, Homo sapiens
aacatacacgtttag

SEQ ID NO: 138112 - DNA, 15 bp, Homo sapiens
aaacatacacgttta

SEQ ID NO: 138113 - DNA, 15 bp, Homo sapiens
aaaacatacacgttt

SEQ ID NO: 138114 - DNA, 15 bp, Homo sapiens
aaaaacatacacgtt

SEQ ID NO: 138115 - DNA, 15 bp, Homo sapiens
gaaaaacatacacgt

SEQ ID NO: 138116 - DNA, 15 bp, Homo sapiens
tgaaaaacatacacg

SEQ ID NO: 138117 - DNA, 15 bp, Homo sapiens
ctgaaaaacatacac

SEQ ID NO: 138118 - DNA, 15 bp, Homo sapiens
actgaaaaacataca

SEQ ID NO: 138119 - DNA, 15 bp, Homo sapiens
aactgaaaaacatac

SEQ ID NO: 138120 - DNA, 15 bp, Homo sapiens
gaactgaaaaacata

SEQ ID NO: 138121 - DNA, 15 bp, Homo sapiens
tgaactgaaaaacat

SEQ ID NO: 138122 - DNA, 15 bp, Homo sapiens
ttgaactgaaaaaca

SEQ ID NO: 138123 - DNA, 15 bp, Homo sapiens
tttgaactgaaaaac

SEQ ID NO: 138124 - DNA, 15 bp, Homo sapiens
ctttgaactgaaaaa

SEQ ID NO: 138125 - DNA, 15 bp, Homo sapiens
actttgaactgaaaa

SEQ ID NO: 138126 - DNA, 15 bp, Homo sapiens
gactttgaactgaaa

SEQ ID NO: 138127 - DNA, 15 bp, Homo sapiens
tgactttgaactgaa

SEQ ID NO: 138128 - DNA, 15 bp, Homo sapiens
atgactttgaactga

SEQ ID NO: 138129 - DNA, 15 bp, Homo sapiens
catgactttgaactg

SEQ ID NO: 138130 - DNA, 15 bp, Homo sapiens
tcatgactttgaact

SEQ ID NO: 138131 - DNA, 15 bp, Homo sapiens
atcatgactttgaac

SEQ ID NO: 138132 - DNA, 15 bp, Homo sapiens
catcatgactttgaa

SEQ ID NO: 138133 - DNA, 15 bp, Homo sapiens
acatcatgactttga

SEQ ID NO: 138134 - DNA, 15 bp, Homo sapiens
aacatcatgactttg

SEQ ID NO: 138135 - DNA, 15 bp, Homo sapiens
aaacatcatgacttt

SEQ ID NO: 138136 - DNA, 15 bp, Homo sapiens
aaaacatcatgactt

SEQ ID NO: 138137 - DNA, 15 bp, Homo sapiens
aaaaacatcatgact

SEQ ID NO: 138138 - DNA, 15 bp, Homo sapiens
taaaaacatcatgac

SEQ ID NO: 138139 - DNA, 15 bp, Homo sapiens
ttaaaaacatcatga

SEQ ID NO: 138140 - DNA, 15 bp, Homo sapiens
tttaaaaacatcatg

SEQ ID NO: 138141 - DNA, 15 bp, Homo sapiens
ttttaaaaacatcat

SEQ ID NO: 138142 - DNA, 15 bp, Homo sapiens
attttaaaaacatca

SEQ ID NO: 138143 - DNA, 15 bp, Homo sapiens
gattttaaaaacatc

SEQ ID NO: 138144 - DNA, 15 bp, Homo sapiens
agattttaaaaacat

SEQ ID NO: 138145 - DNA, 15 bp, Homo sapiens
aagattttaaaaaca

SEQ ID NO: 138146 - DNA, 15 bp, Homo sapiens
taagattttaaaaac

SEQ ID NO: 138147 - DNA, 15 bp, Homo sapiens
ataagattttaaaaa

SEQ ID NO: 138148 - DNA, 15 bp, Homo sapiens
aataagattttaaaa

SEQ ID NO: 138149 - DNA, 15 bp, Homo sapiens
taataagattttaaa

SEQ ID NO: 138150 - DNA, 15 bp, Homo sapiens
ttaataagattttaa

SEQ ID NO: 138151 - DNA, 15 bp, Homo sapiens
tttaataagatttta

SEQ ID NO: 138152 - DNA, 15 bp, Homo sapiens
ctttaataagatttt

SEQ ID NO: 138153 - DNA, 15 bp, Homo sapiens
actttaataagattt

SEQ ID NO: 138154 - DNA, 15 bp, Homo sapiens
aactttaataagatt

SEQ ID NO: 138155 - DNA, 15 bp, Homo sapiens
aaactttaataagat

SEQ ID NO: 138156 - DNA, 15 bp, Homo sapiens
gaaactttaataaga

SEQ ID NO: 138157 - DNA, 15 bp, Homo sapiens
tgaaactttaataag

SEQ ID NO: 138158 - DNA, 15 bp, Homo sapiens
ttgaaactttaataa

SEQ ID NO: 138159 - DNA, 15 bp, Homo sapiens
tttgaaactttaata

SEQ ID NO: 138160 - DNA, 15 bp, Homo sapiens
ttttgaaactttaat

SEQ ID NO: 138161 - DNA, 15 bp, Homo sapiens
tttttgaaactttaa

SEQ ID NO: 138162 - DNA, 15 bp, Homo sapiens
atttttgaaacttta

SEQ ID NO: 138163 - DNA, 15 bp, Homo sapiens
gatttttgaaacttt

SEQ ID NO: 138164 - DNA, 15 bp, Homo sapiens
agatttttgaaactt

SEQ ID NO: 138165 - DNA, 15 bp, Homo sapiens
cagatttttgaaact

SEQ ID NO: 138166 - DNA, 15 bp, Homo sapiens
tcagatttttgaaac

SEQ ID NO: 138167 - DNA, 15 bp, Homo sapiens
ttcagatttttgaaa

SEQ ID NO: 138168 - DNA, 15 bp, Homo sapiens
cttcagatttttgaa

SEQ ID NO: 138169 - DNA, 15 bp, Homo sapiens
tcttcagatttttga

SEQ ID NO: 138170 - DNA, 15 bp, Homo sapiens
atcttcagatttttg

SEQ ID NO: 138171 - DNA, 15 bp, Homo sapiens
aatcttcagattttt

SEQ ID NO: 138172 - DNA, 15 bp, Homo sapiens
caatcttcagatttt

SEQ ID NO: 138173 - DNA, 15 bp, Homo sapiens
acaatcttcagattt

SEQ ID NO: 138174 - DNA, 15 bp, Homo sapiens
aacaatcttcagatt

SEQ ID NO: 138175 - DNA, 15 bp, Homo sapiens
aaacaatcttcagat

SEQ ID NO: 138176 - DNA, 15 bp, Homo sapiens
taaacaatcttcaga

SEQ ID NO: 138177 - DNA, 15 bp, Homo sapiens
ataaacaatcttcag

SEQ ID NO: 138178 - DNA, 15 bp, Homo sapiens
gataaacaatcttca

SEQ ID NO: 138179 - DNA, 15 bp, Homo sapiens
agataaacaatcttc

SEQ ID NO: 138180 - DNA, 15 bp, Homo sapiens
tagataaacaatctt

SEQ ID NO: 138181 - DNA, 15 bp, Homo sapiens
ctagataaacaatct

SEQ ID NO: 138182 - DNA, 15 bp, Homo sapiens
tctagataaacaatc

SEQ ID NO: 138183 - DNA, 15 bp, Homo sapiens
atctagataaacaat

SEQ ID NO: 138184 - DNA, 15 bp, Homo sapiens
catctagataaacaa

SEQ ID NO: 138185 - DNA, 15 bp, Homo sapiens
acatctagataaaca

SEQ ID NO: 138186 - DNA, 15 bp, Homo sapiens
tacatctagataaac

SEQ ID NO: 138187 - DNA, 15 bp, Homo sapiens
ttacatctagataaa

SEQ ID NO: 138188 - DNA, 15 bp, Homo sapiens
tttacatctagataa

SEQ ID NO: 138189 - DNA, 15 bp, Homo sapiens
atttacatctagata

SEQ ID NO: 138190 - DNA, 15 bp, Homo sapiens
aatttacatctagat

SEQ ID NO: 138191 - DNA, 15 bp, Homo sapiens
aaatttacatctaga

SEQ ID NO: 138192 - DNA, 15 bp, Homo sapiens
aaaatttacatctag

SEQ ID NO: 138193 - DNA, 15 bp, Homo sapiens
aaaaatttacatcta

SEQ ID NO: 138194 - DNA, 15 bp, Homo sapiens
taaaaatttacatct

SEQ ID NO: 138195 - DNA, 15 bp, Homo sapiens
ataaaaatttacatc

SEQ ID NO: 138196 - DNA, 15 bp, Homo sapiens
aataaaaatttacat

SEQ ID NO: 138197 - DNA, 15 bp, Homo sapiens
taataaaaatttaca

SEQ ID NO: 138198 - DNA, 15 bp, Homo sapiens
ttaataaaaatttac

SEQ ID NO: 138199 - DNA, 15 bp, Homo sapiens
tttaataaaaattta

SEQ ID NO: 138200 - DNA, 15 bp, Homo sapiens
ttttaataaaaattt

SEQ ID NO: 138201 - DNA, 15 bp, Homo sapiens
tttttaataaaaatt

SEQ ID NO: 138202 - DNA, 15 bp, Homo sapiens
ctttttaataaaaat

SEQ ID NO: 138203 - DNA, 15 bp, Homo sapiens
actttttaataaaaa

SEQ ID NO: 138204 - DNA, 15 bp, Homo sapiens
aactttttaataaaa

SEQ ID NO: 138205 - DNA, 15 bp, Homo sapiens
caactttttaataaa

SEQ ID NO: 138206 - DNA, 15 bp, Homo sapiens
gcaactttttaataa

SEQ ID NO: 138207 - DNA, 15 bp, Homo sapiens
tgcaactttttaata

SEQ ID NO: 138208 - DNA, 15 bp, Homo sapiens
gtgcaactttttaat

SEQ ID NO: 138209 - DNA, 15 bp, Homo sapiens
agtgcaactttttaa

SEQ ID NO: 138210 - DNA, 15 bp, Homo sapiens
aagtgcaacttttta

SEQ ID NO: 138211 - DNA, 15 bp, Homo sapiens
taagtgcaacttttt

SEQ ID NO: 138212 - DNA, 15 bp, Homo sapiens
ataagtgcaactttt

SEQ ID NO: 138213 - DNA, 15 bp, Homo sapiens
cataagtgcaacttt

SEQ ID NO: 138214 - DNA, 15 bp, Homo sapiens
tcataagtgcaactt

SEQ ID NO: 138215 - DNA, 15 bp, Homo sapiens
ttcataagtgcaact

SEQ ID NO: 138216 - DNA, 15 bp, Homo sapiens
tttcataagtgcaac

SEQ ID NO: 138217 - DNA, 15 bp, Homo sapiens
ttttcataagtgcaa

SEQ ID NO: 138218 - DNA, 15 bp, Homo sapiens
tttttcataagtgca

SEQ ID NO: 138219 - DNA, 15 bp, Homo sapiens
ctttttcataagtgc

SEQ ID NO: 138220 - DNA, 15 bp, Homo sapiens
gctttttcataagtg

SEQ ID NO: 138221 - DNA, 15 bp, Homo sapiens
tgctttttcataagt

SEQ ID NO: 138222 - DNA, 15 bp, Homo sapiens
ttgctttttcataag

SEQ ID NO: 138223 - DNA, 15 bp, Homo sapiens
tttgctttttcataa

SEQ ID NO: 138224 - DNA, 15 bp, Homo sapiens
ttttgctttttcata

SEQ ID NO: 138225 - DNA, 15 bp, Homo sapiens
tttttgctttttcat

SEQ ID NO: 138226 - DNA, 15 bp, Homo sapiens
ttttttgctttttca

SEQ ID NO: 138227 - DNA, 15 bp, Homo sapiens
attttttgctttttc

SEQ ID NO: 138228 - DNA, 15 bp, Homo sapiens
aattttttgcttttt

SEQ ID NO: 138229 - DNA, 15 bp, Homo sapiens
taattttttgctttt

SEQ ID NO: 138230 - DNA, 15 bp, Homo sapiens
ctaattttttgcttt

SEQ ID NO: 138231 - DNA, 15 bp, Homo sapiens
actaattttttgctt

SEQ ID NO: 138232 - DNA, 15 bp, Homo sapiens
gactaattttttgct

SEQ ID NO: 138233 - DNA, 15 bp, Homo sapiens
agactaattttttgc

SEQ ID NO: 138234 - DNA, 15 bp, Homo sapiens
cagactaattttttg

SEQ ID NO: 138235 - DNA, 15 bp, Homo sapiens
tcagactaatttttt

SEQ ID NO: 138236 - DNA, 15 bp, Homo sapiens
gtcagactaattttt

SEQ ID NO: 138237 - DNA, 15 bp, Homo sapiens
tgtcagactaatttt

SEQ ID NO: 138238 - DNA, 15 bp, Homo sapiens
ctgtcagactaattt

SEQ ID NO: 138239 - DNA, 15 bp, Homo sapiens
tctgtcagactaatt

SEQ ID NO: 138240 - DNA, 15 bp, Homo sapiens
atctgtcagactaat

SEQ ID NO: 138241 - DNA, 15 bp, Homo sapiens
catctgtcagactaa

SEQ ID NO: 138242 - DNA, 15 bp, Homo sapiens
acatctgtcagacta

SEQ ID NO: 138243 - DNA, 15 bp, Homo sapiens
aacatctgtcagact

SEQ ID NO: 138244 - DNA, 15 bp, Homo sapiens
aaacatctgtcagac

SEQ ID NO: 138245 - DNA, 15 bp, Homo sapiens
caaacatctgtcaga

SEQ ID NO: 138246 - DNA, 15 bp, Homo sapiens
gcaaacatctgtcag

SEQ ID NO: 138247 - DNA, 15 bp, Homo sapiens
agcaaacatctgtca

SEQ ID NO: 138248 - DNA, 15 bp, Homo sapiens
gagcaaacatctgtc

SEQ ID NO: 138249 - DNA, 15 bp, Homo sapiens
ggagcaaacatctgt

SEQ ID NO: 138250 - DNA, 15 bp, Homo sapiens
aggagcaaacatctg

SEQ ID NO: 138251 - DNA, 15 bp, Homo sapiens
caggagcaaacatct

SEQ ID NO: 138252 - DNA, 15 bp, Homo sapiens
ccaggagcaaacatc

SEQ ID NO: 138253 - DNA, 15 bp, Homo sapiens
accaggagcaaacat

SEQ ID NO: 138254 - DNA, 15 bp, Homo sapiens
aaccaggagcaaaca

SEQ ID NO: 138255 - DNA, 15 bp, Homo sapiens
aaaccaggagcaaac

SEQ ID NO: 138256 - DNA, 15 bp, Homo sapiens
aaaaccaggagcaaa

SEQ ID NO: 138257 - DNA, 15 bp, Homo sapiens
taaaaccaggagcaa

SEQ ID NO: 138258 - DNA, 15 bp, Homo sapiens
ttaaaaccaggagca

SEQ ID NO: 138259 - DNA, 15 bp, Homo sapiens
tttaaaaccaggagc

SEQ ID NO: 138260 - DNA, 15 bp, Homo sapiens
atttaaaaccaggag

SEQ ID NO: 138261 - DNA, 15 bp, Homo sapiens
aatttaaaaccagga

SEQ ID NO: 138262 - DNA, 15 bp, Homo sapiens
aaatttaaaaccagg

SEQ ID NO: 138263 - DNA, 15 bp, Homo sapiens
gaaatttaaaaccag

SEQ ID NO: 138264 - DNA, 15 bp, Homo sapiens
agaaatttaaaacca

SEQ ID NO: 138265 - DNA, 15 bp, Homo sapiens
tagaaatttaaaacc

SEQ ID NO: 138266 - DNA, 15 bp, Homo sapiens
gtagaaatttaaaac

SEQ ID NO: 138267 - DNA, 15 bp, Homo sapiens
tgtagaaatttaaaa

SEQ ID NO: 138268 - DNA, 15 bp, Homo sapiens
atgtagaaatttaaa

SEQ ID NO: 138269 - DNA, 15 bp, Homo sapiens
aatgtagaaatttaa

SEQ ID NO: 138270 - DNA, 15 bp, Homo sapiens
aaatgtagaaattta

SEQ ID NO: 138271 - DNA, 15 bp, Homo sapiens
caaatgtagaaattt

SEQ ID NO: 138272 - DNA, 15 bp, Homo sapiens
tcaaatgtagaaatt

SEQ ID NO: 138273 - DNA, 15 bp, Homo sapiens
gtcaaatgtagaaat

SEQ ID NO: 138274 - DNA, 15 bp, Homo sapiens
tgtcaaatgtagaaa

SEQ ID NO: 138275 - DNA, 15 bp, Homo sapiens
ttgtcaaatgtagaa

SEQ ID NO: 138276 - DNA, 15 bp, Homo sapiens
tttgtcaaatgtaga

SEQ ID NO: 138277 - DNA, 15 bp, Homo sapiens
ttttgtcaaatgtag

SEQ ID NO: 138278 - DNA, 15 bp, Homo sapiens
tttttgtcaaatgta

SEQ ID NO: 138279 - DNA, 15 bp, Homo sapiens
gtttttgtcaaatgt

SEQ ID NO: 138280 - DNA, 15 bp, Homo sapiens
agtttttgtcaaatg

SEQ ID NO: 138281 - DNA, 15 bp, Homo sapiens
tagtttttgtcaaat

SEQ ID NO: 138282 - DNA, 15 bp, Homo sapiens
ttagtttttgtcaaa

SEQ ID NO: 138283 - DNA, 15 bp, Homo sapiens
attagtttttgtcaa

SEQ ID NO: 138284 - DNA, 15 bp, Homo sapiens
cattagtttttgtca

SEQ ID NO: 138285 - DNA, 15 bp, Homo sapiens
tcattagtttttgtc

SEQ ID NO: 138286 - DNA, 15 bp, Homo sapiens
atcattagtttttgt

SEQ ID NO: 138287 - DNA, 15 bp, Homo sapiens
tatcattagtttttg

SEQ ID NO: 138288 - DNA, 15 bp, Homo sapiens
atatcattagttttt

SEQ ID NO: 138289 - DNA, 15 bp, Homo sapiens
catatcattagtttt

SEQ ID NO: 138290 - DNA, 15 bp, Homo sapiens
acatatcattagttt

SEQ ID NO: 138291 - DNA, 15 bp, Homo sapiens
cacatatcattagtt

SEQ ID NO: 138292 - DNA, 15 bp, Homo sapiens
ccacatatcattagt

SEQ ID NO: 138293 - DNA, 15 bp, Homo sapiens
cccacatatcattag

SEQ ID NO: 138294 - DNA, 15 bp, Homo sapiens
ccccacatatcatta

SEQ ID NO: 138295 - DNA, 15 bp, Homo sapiens
cccccacatatcatt

SEQ ID NO: 138296 - DNA, 15 bp, Homo sapiens
ccccccacatatcat

SEQ ID NO: 138297 - DNA, 15 bp, Homo sapiens
tccccccacatatca

SEQ ID NO: 138298 - DNA, 15 bp, Homo sapiens
ttccccccacatatc

SEQ ID NO: 138299 - DNA, 15 bp, Homo sapiens
tttccccccacatat

SEQ ID NO: 138300 - DNA, 15 bp, Homo sapiens
ctttccccccacata

SEQ ID NO: 138301 - DNA, 15 bp, Homo sapiens
actttccccccacat

SEQ ID NO: 138302 - DNA, 15 bp, Homo sapiens
aactttccccccaca

SEQ ID NO: 138303 - DNA, 15 bp, Homo sapiens
caactttccccccac

SEQ ID NO: 138304 - DNA, 15 bp, Homo sapiens
acaactttcccccca

SEQ ID NO: 138305 - DNA, 15 bp, Homo sapiens
cacaactttcccccc

SEQ ID NO: 138306 - DNA, 15 bp, Homo sapiens
gcacaactttccccc

SEQ ID NO: 138307 - DNA, 15 bp, Homo sapiens
tgcacaactttcccc

SEQ ID NO: 138308 - DNA, 15 bp, Homo sapiens
ttgcacaactttccc

SEQ ID NO: 138309 - DNA, 15 bp, Homo sapiens
tttgcacaactttcc

SEQ ID NO: 138310 - DNA, 15 bp, Homo sapiens
ctttgcacaactttc

SEQ ID NO: 138311 - DNA, 15 bp, Homo sapiens
actttgcacaacttt

SEQ ID NO: 138312 - DNA, 15 bp, Homo sapiens
tactttgcacaactt

SEQ ID NO: 138313 - DNA, 15 bp, Homo sapiens
ttactttgcacaact

SEQ ID NO: 138314 - DNA, 15 bp, Homo sapiens
tttactttgcacaac

SEQ ID NO: 138315 - DNA, 15 bp, Homo sapiens
atttactttgcacaa

SEQ ID NO: 138316 - DNA, 15 bp, Homo sapiens
catttactttgcaca

SEQ ID NO: 138317 - DNA, 15 bp, Homo sapiens
acatttactttgcac

SEQ ID NO: 138318 - DNA, 15 bp, Homo sapiens
tacatttactttgca

SEQ ID NO: 138319 - DNA, 15 bp, Homo sapiens
atacatttactttgc

SEQ ID NO: 138320 - DNA, 15 bp, Homo sapiens
catacatttactttg

SEQ ID NO: 138321 - DNA, 15 bp, Homo sapiens
acatacatttacttt

SEQ ID NO: 138322 - DNA, 15 bp, Homo sapiens
aacatacatttactt

SEQ ID NO: 138323 - DNA, 15 bp, Homo sapiens
caacatacatttact

SEQ ID NO: 138324 - DNA, 15 bp, Homo sapiens
gcaacatacatttac

SEQ ID NO: 138325 - DNA, 15 bp, Homo sapiens
tgcaacatacattta

SEQ ID NO: 138326 - DNA, 15 bp, Homo sapiens
ttgcaacatacattt

SEQ ID NO: 138327 - DNA, 15 bp, Homo sapiens
tttgcaacatacatt

SEQ ID NO: 138328 - DNA, 15 bp, Homo sapiens
atttgcaacatacat

SEQ ID NO: 138329 - DNA, 15 bp, Homo sapiens
tatttgcaacataca

SEQ ID NO: 138330 - DNA, 15 bp, Homo sapiens
ttatttgcaacatac

SEQ ID NO: 138331 - DNA, 15 bp, Homo sapiens
attatttgcaacata

SEQ ID NO: 138332 - DNA, 15 bp, Homo sapiens
gattatttgcaacat

SEQ ID NO: 138333 - DNA, 15 bp, Homo sapiens
agattatttgcaaca

SEQ ID NO: 138334 - DNA, 15 bp, Homo sapiens
aagattatttgcaac

SEQ ID NO: 138335 - DNA, 15 bp, Homo sapiens
aaagattatttgcaa

SEQ ID NO: 138336 - DNA, 15 bp, Homo sapiens
aaaagattatttgca

SEQ ID NO: 138337 - DNA, 15 bp, Homo sapiens
taaaagattatttgc

SEQ ID NO: 138338 - DNA, 15 bp, Homo sapiens
ataaaagattatttg

SEQ ID NO: 138339 - DNA, 15 bp, Homo sapiens
cataaaagattattt

SEQ ID NO: 138340 - DNA, 15 bp, Homo sapiens
tcataaaagattatt

SEQ ID NO: 138341 - DNA, 15 bp, Homo sapiens
ctcataaaagattat

SEQ ID NO: 138342 - DNA, 15 bp, Homo sapiens
gctcataaaagatta

SEQ ID NO: 138343 - DNA, 15 bp, Homo sapiens
ggctcataaaagatt

SEQ ID NO: 138344 - DNA, 15 bp, Homo sapiens
gggctcataaaagat

SEQ ID NO: 138345 - DNA, 15 bp, Homo sapiens
agggctcataaaaga

SEQ ID NO: 138346 - DNA, 15 bp, Homo sapiens
aagggctcataaaag

SEQ ID NO: 138347 - DNA, 15 bp, Homo sapiens
taagggctcataaaa

SEQ ID NO: 138348 - DNA, 15 bp, Homo sapiens
ttaagggctcataaa

SEQ ID NO: 138349 - DNA, 15 bp, Homo sapiens
tttaagggctcataa

SEQ ID NO: 138350 - DNA, 15 bp, Homo sapiens
ttttaagggctcata

SEQ ID NO: 138351 - DNA, 15 bp, Homo sapiens
cttttaagggctcat

SEQ ID NO: 138352 - DNA, 15 bp, Homo sapiens
ccttttaagggctca

SEQ ID NO: 138353 - DNA, 15 bp, Homo sapiens
gccttttaagggctc

SEQ ID NO: 138354 - DNA, 15 bp, Homo sapiens
tgccttttaagggct

SEQ ID NO: 138355 - DNA, 15 bp, Homo sapiens
ttgccttttaagggc

SEQ ID NO: 138356 - DNA, 15 bp, Homo sapiens
tttgccttttaaggg

SEQ ID NO: 138357 - DNA, 15 bp, Homo sapiens
ttttgccttttaagg

SEQ ID NO: 138358 - DNA, 15 bp, Homo sapiens
tttttgccttttaag

SEQ ID NO: 138359 - DNA, 15 bp, Homo sapiens
gtttttgccttttaa

SEQ ID NO: 138360 - DNA, 15 bp, Homo sapiens
cgtttttgcctttta

SEQ ID NO: 138361 - DNA, 15 bp, Homo sapiens
tcgtttttgcctttt

SEQ ID NO: 138362 - DNA, 15 bp, Homo sapiens
ttcgtttttgccttt

SEQ ID NO: 138363 - DNA, 15 bp, Homo sapiens
cttcgtttttgcctt

SEQ ID NO: 138364 - DNA, 15 bp, Homo sapiens
tcttcgtttttgcct

SEQ ID NO: 138365 - DNA, 15 bp, Homo sapiens
gtcttcgtttttgcc

SEQ ID NO: 138366 - DNA, 15 bp, Homo sapiens
tgtcttcgtttttgc

SEQ ID NO: 138367 - DNA, 15 bp, Homo sapiens
gtgtcttcgtttttg

SEQ ID NO: 138368 - DNA, 15 bp, Homo sapiens
agtgtcttcgttttt

SEQ ID NO: 138369 - DNA, 15 bp, Homo sapiens
aagtgtcttcgtttt

SEQ ID NO: 138370 - DNA, 15 bp, Homo sapiens
caagtgtcttcgttt

SEQ ID NO: 138371 - DNA, 15 bp, Homo sapiens
tcaagtgtcttcgtt

SEQ ID NO: 138372 - DNA, 15 bp, Homo sapiens
ttcaagtgtcttcgt

SEQ ID NO: 138373 - DNA, 15 bp, Homo sapiens
tttcaagtgtcttcg

SEQ ID NO: 138374 - DNA, 15 bp, Homo sapiens
ttttcaagtgtcttc

SEQ ID NO: 138375 - DNA, 15 bp, Homo sapiens
attttcaagtgtctt

SEQ ID NO: 138376 - DNA, 15 bp, Homo sapiens
tattttcaagtgtct

SEQ ID NO: 138377 - DNA, 15 bp, Homo sapiens
ttattttcaagtgtc

SEQ ID NO: 138378 - DNA, 15 bp, Homo sapiens
attattttcaagtgt

SEQ ID NO: 138379 - DNA, 15 bp, Homo sapiens
aattattttcaagtg

SEQ ID NO: 138380 - DNA, 15 bp, Homo sapiens
gaattattttcaagt

SEQ ID NO: 138381 - DNA, 15 bp, Homo sapiens
agaattattttcaag

SEQ ID NO: 138382 - DNA, 15 bp, Homo sapiens
gagaattattttcaa

SEQ ID NO: 138383 - DNA, 15 bp, Homo sapiens
ggagaattattttca

SEQ ID NO: 138384 - DNA, 15 bp, Homo sapiens
tggagaattattttc

SEQ ID NO: 138385 - DNA, 15 bp, Homo sapiens
atggagaattatttt

SEQ ID NO: 138386 - DNA, 15 bp, Homo sapiens
tatggagaattattt

SEQ ID NO: 138387 - DNA, 15 bp, Homo sapiens
atatggagaattatt

SEQ ID NO: 138388 - DNA, 15 bp, Homo sapiens
aatatggagaattat

SEQ ID NO: 138389 - DNA, 15 bp, Homo sapiens
gaatatggagaatta

SEQ ID NO: 138390 - DNA, 15 bp, Homo sapiens
ggaatatggagaatt

SEQ ID NO: 138391 - DNA, 15 bp, Homo sapiens
gggaatatggagaat

SEQ ID NO: 138392 - DNA, 15 bp, Homo sapiens
tgggaatatggagaa

SEQ ID NO: 138393 - DNA, 15 bp, Homo sapiens
ctgggaatatggaga

SEQ ID NO: 138394 - DNA, 15 bp, Homo sapiens
tctgggaatatggag

SEQ ID NO: 138395 - DNA, 15 bp, Homo sapiens
gtctgggaatatgga

SEQ ID NO: 138396 - DNA, 15 bp, Homo sapiens
tgtctgggaatatgg

SEQ ID NO: 138397 - DNA, 15 bp, Homo sapiens
atgtctgggaatatg

SEQ ID NO: 138398 - DNA, 15 bp, Homo sapiens
tatgtctgggaatat

SEQ ID NO: 138399 - DNA, 15 bp, Homo sapiens
ttatgtctgggaata

SEQ ID NO: 138400 - DNA, 15 bp, Homo sapiens
tttatgtctgggaat

SEQ ID NO: 138401 - DNA, 15 bp, Homo sapiens
ttttatgtctgggaa

SEQ ID NO: 138402 - DNA, 15 bp, Homo sapiens
attttatgtctggga

SEQ ID NO: 138403 - DNA, 15 bp, Homo sapiens
aattttatgtctggg

SEQ ID NO: 138404 - DNA, 15 bp, Homo sapiens
aaattttatgtctgg

SEQ ID NO: 138405 - DNA, 15 bp, Homo sapiens
gaaattttatgtctg

SEQ ID NO: 138406 - DNA, 15 bp, Homo sapiens
tgaaattttatgtct

SEQ ID NO: 138407 - DNA, 15 bp, Homo sapiens
ttgaaattttatgtc

SEQ ID NO: 138408 - DNA, 15 bp, Homo sapiens
gttgaaattttatgt

SEQ ID NO: 138409 - DNA, 15 bp, Homo sapiens
tgttgaaattttatg

SEQ ID NO: 138410 - DNA, 15 bp, Homo sapiens
gtgttgaaattttat

SEQ ID NO: 138411 - DNA, 15 bp, Homo sapiens
tgtgttgaaatttta

SEQ ID NO: 138412 - DNA, 15 bp, Homo sapiens
atgtgttgaaatttt

SEQ ID NO: 138413 - DNA, 15 bp, Homo sapiens
aatgtgttgaaattt

SEQ ID NO: 138414 - DNA, 15 bp, Homo sapiens
aaatgtgttgaaatt

SEQ ID NO: 138415 - DNA, 15 bp, Homo sapiens
taaatgtgttgaaat

SEQ ID NO: 138416 - DNA, 15 bp, Homo sapiens
ataaatgtgttgaaa

SEQ ID NO: 138417 - DNA, 15 bp, Homo sapiens
aataaatgtgttgaa

SEQ ID NO: 138418 - DNA, 15 bp, Homo sapiens
taataaatgtgttga

SEQ ID NO: 138419 - DNA, 15 bp, Homo sapiens
gtaataaatgtgttg

SEQ ID NO: 138420 - DNA, 15 bp, Homo sapiens
tgtaataaatgtgtt

SEQ ID NO: 138421 - DNA, 15 bp, Homo sapiens
atgtaataaatgtgt

SEQ ID NO: 138422 - DNA, 15 bp, Homo sapiens
tatgtaataaatgtg

SEQ ID NO: 138423 - DNA, 15 bp, Homo sapiens
ctatgtaataaatgt

SEQ ID NO: 138424 - DNA, 15 bp, Homo sapiens
cctatgtaataaatg

SEQ ID NO: 138425 - DNA, 15 bp, Homo sapiens
ccctatgtaataaat

SEQ ID NO: 138426 - DNA, 15 bp, Homo sapiens
accctatgtaataaa

SEQ ID NO: 138427 - DNA, 15 bp, Homo sapiens
caccctatgtaataa

SEQ ID NO: 138428 - DNA, 15 bp, Homo sapiens
gcaccctatgtaata

SEQ ID NO: 138429 - DNA, 15 bp, Homo sapiens
ggcaccctatgtaat

SEQ ID NO: 138430 - DNA, 15 bp, Homo sapiens
tggcaccctatgtaa

SEQ ID NO: 138431 - DNA, 15 bp, Homo sapiens
gtggcaccctatgta

SEQ ID NO: 138432 - DNA, 15 bp, Homo sapiens
agtggcaccctatgt

SEQ ID NO: 138433 - DNA, 15 bp, Homo sapiens
tagtggcaccctatg

SEQ ID NO: 138434 - DNA, 15 bp, Homo sapiens
ttagtggcaccctat

SEQ ID NO: 138435 - DNA, 15 bp, Homo sapiens
tttagtggcacccta

SEQ ID NO: 138436 - DNA, 15 bp, Homo sapiens
gtttagtggcaccct

SEQ ID NO: 138437 - DNA, 15 bp, Homo sapiens
ggtttagtggcaccc

SEQ ID NO: 138438 - DNA, 15 bp, Homo sapiens
tggtttagtggcacc

SEQ ID NO: 138439 - DNA, 15 bp, Homo sapiens
atggtttagtggcac

SEQ ID NO: 138440 - DNA, 15 bp, Homo sapiens
tatggtttagtggca

SEQ ID NO: 138441 - DNA, 15 bp, Homo sapiens
atatggtttagtggc

SEQ ID NO: 138442 - DNA, 15 bp, Homo sapiens
aatatggtttagtgg

SEQ ID NO: 138443 - DNA, 15 bp, Homo sapiens
taatatggtttagtg

SEQ ID NO: 138444 - DNA, 15 bp, Homo sapiens
ttaatatggtttagt

SEQ ID NO: 138445 - DNA, 15 bp, Homo sapiens
tttaatatggtttag

SEQ ID NO: 138446 - DNA, 15 bp, Homo sapiens
gtttaatatggttta

SEQ ID NO: 138447 - DNA, 15 bp, Homo sapiens
tgtttaatatggttt

SEQ ID NO: 138448 - DNA, 15 bp, Homo sapiens
atgtttaatatggtt

SEQ ID NO: 138449 - DNA, 15 bp, Homo sapiens
tatgtttaatatggt

SEQ ID NO: 138450 - DNA, 15 bp, Homo sapiens
atatgtttaatatgg

SEQ ID NO: 138451 - DNA, 15 bp, Homo sapiens
tatatgtttaatatg

SEQ ID NO: 138452 - DNA, 15 bp, Homo sapiens
gtatatgtttaatat

SEQ ID NO: 138453 - DNA, 15 bp, Homo sapiens
agtatatgtttaata

SEQ ID NO: 138454 - DNA, 15 bp, Homo sapiens
gagtatatgtttaat

SEQ ID NO: 138455 - DNA, 15 bp, Homo sapiens
ggagtatatgtttaa

SEQ ID NO: 138456 - DNA, 15 bp, Homo sapiens
aggagtatatgttta

SEQ ID NO: 138457 - DNA, 15 bp, Homo sapiens
taggagtatatgttt

SEQ ID NO: 138458 - DNA, 15 bp, Homo sapiens
ataggagtatatgtt

SEQ ID NO: 138459 - DNA, 15 bp, Homo sapiens
aataggagtatatgt

SEQ ID NO: 138460 - DNA, 15 bp, Homo sapiens
aaataggagtatatg

SEQ ID NO: 138461 - DNA, 15 bp, Homo sapiens
caaataggagtatat

SEQ ID NO: 138462 - DNA, 15 bp, Homo sapiens
acaaataggagtata

SEQ ID NO: 138463 - DNA, 15 bp, Homo sapiens
cacaaataggagtat

SEQ ID NO: 138464 - DNA, 15 bp, Homo sapiens
gcacaaataggagta

SEQ ID NO: 138465 - DNA, 15 bp, Homo sapiens
tgcacaaataggagt

SEQ ID NO: 138466 - DNA, 15 bp, Homo sapiens
gtgcacaaataggag

SEQ ID NO: 138467 - DNA, 15 bp, Homo sapiens
tgtgcacaaatagga

SEQ ID NO: 138468 - DNA, 15 bp, Homo sapiens
gtgtgcacaaatagg

SEQ ID NO: 138469 - DNA, 15 bp, Homo sapiens
tgtgtgcacaaatag

SEQ ID NO: 138470 - DNA, 15 bp, Homo sapiens
atgtgtgcacaaata

SEQ ID NO: 138471 - DNA, 15 bp, Homo sapiens
catgtgtgcacaaat

SEQ ID NO: 138472 - DNA, 15 bp, Homo sapiens
tcatgtgtgcacaaa

SEQ ID NO: 138473 - DNA, 15 bp, Homo sapiens
ttcatgtgtgcacaa

SEQ ID NO: 138474 - DNA, 15 bp, Homo sapiens
gttcatgtgtgcaca

SEQ ID NO: 138475 - DNA, 15 bp, Homo sapiens
tgttcatgtgtgcac

SEQ ID NO: 138476 - DNA, 15 bp, Homo sapiens
atgttcatgtgtgca

SEQ ID NO: 138477 - DNA, 15 bp, Homo sapiens
tatgttcatgtgtgc

SEQ ID NO: 138478 - DNA, 15 bp, Homo sapiens
gtatgttcatgtgtg

SEQ ID NO: 138479 - DNA, 15 bp, Homo sapiens
ggtatgttcatgtgt

SEQ ID NO: 138480 - DNA, 15 bp, Homo sapiens
gggtatgttcatgtg

SEQ ID NO: 138481 - DNA, 15 bp, Homo sapiens
agggtatgttcatgt

SEQ ID NO: 138482 - DNA, 15 bp, Homo sapiens
cagggtatgttcatg

SEQ ID NO: 138483 - DNA, 15 bp, Homo sapiens
gcagggtatgttcat

SEQ ID NO: 138484 - DNA, 15 bp, Homo sapiens
ggcagggtatgttca

SEQ ID NO: 138485 - DNA, 15 bp, Homo sapiens
gggcagggtatgttc

SEQ ID NO: 138486 - DNA, 15 bp, Homo sapiens
agggcagggtatgtt

SEQ ID NO: 138487 - DNA, 15 bp, Homo sapiens
aagggcagggtatgt

SEQ ID NO: 138488 - DNA, 15 bp, Homo sapiens
aaagggcagggtatg

SEQ ID NO: 138489 - DNA, 15 bp, Homo sapiens
caaagggcagggtat

SEQ ID NO: 138490 - DNA, 15 bp, Homo sapiens
ccaaagggcagggta

SEQ ID NO: 138491 - DNA, 15 bp, Homo sapiens
tccaaagggcagggt

SEQ ID NO: 138492 - DNA, 15 bp, Homo sapiens
ttccaaagggcaggg

SEQ ID NO: 138493 - DNA, 15 bp, Homo sapiens
tttccaaagggcagg

SEQ ID NO: 138494 - DNA, 15 bp, Homo sapiens
ttttccaaagggcag

SEQ ID NO: 138495 - DNA, 15 bp, Homo sapiens
tttttccaaagggca

SEQ ID NO: 138496 - DNA, 15 bp, Homo sapiens
ttttttccaaagggc

SEQ ID NO: 138497 - DNA, 15 bp, Homo sapiens
cttttttccaaaggg

SEQ ID NO: 138498 - DNA, 15 bp, Homo sapiens
acttttttccaaagg

SEQ ID NO: 138499 - DNA, 15 bp, Homo sapiens
tacttttttccaaag

SEQ ID NO: 138500 - DNA, 15 bp, Homo sapiens
atacttttttccaaa

SEQ ID NO: 138501 - DNA, 15 bp, Homo sapiens
catacttttttccaa

SEQ ID NO: 138502 - DNA, 15 bp, Homo sapiens
acatacttttttcca

SEQ ID NO: 138503 - DNA, 15 bp, Homo sapiens
gacatacttttttcc

SEQ ID NO: 138504 - DNA, 15 bp, Homo sapiens
agacatacttttttc

SEQ ID NO: 138505 - DNA, 15 bp, Homo sapiens
tagacatactttttt

SEQ ID NO: 138506 - DNA, 15 bp, Homo sapiens
atagacatacttttt

SEQ ID NO: 138507 - DNA, 15 bp, Homo sapiens
catagacatactttt

SEQ ID NO: 138508 - DNA, 15 bp, Homo sapiens
tcatagacatacttt

SEQ ID NO: 138509 - DNA, 15 bp, Homo sapiens
ttcatagacatactt

SEQ ID NO: 138510 - DNA, 15 bp, Homo sapiens
cttcatagacatact

SEQ ID NO: 138511 - DNA, 15 bp, Homo sapiens
acttcatagacatac

SEQ ID NO: 138512 - DNA, 15 bp, Homo sapiens
tacttcatagacata

SEQ ID NO: 138513 - DNA, 15 bp, Homo sapiens
ttacttcatagacat

SEQ ID NO: 138514 - DNA, 15 bp, Homo sapiens
tttacttcatagaca

SEQ ID NO: 138515 - DNA, 15 bp, Homo sapiens
ttttacttcatagac

SEQ ID NO: 138516 - DNA, 15 bp, Homo sapiens
tttttacttcataga

SEQ ID NO: 138517 - DNA, 15 bp, Homo sapiens
ttttttacttcatag

SEQ ID NO: 138518 - DNA, 15 bp, Homo sapiens
tttttttacttcata

SEQ ID NO: 138519 - DNA, 15 bp, Homo sapiens
ttttttttacttcat

SEQ ID NO: 138520 - DNA, 15 bp, Homo sapiens
tttttttttacttca

SEQ ID NO: 138521 - DNA, 15 bp, Homo sapiens
ttttttttttacttc

SEQ ID NO: 138522 - DNA, 15 bp, Homo sapiens
attttttttttttac

SEQ ID NO: 138523 - DNA, 15 bp, Homo sapiens
aatttttttttttta

SEQ ID NO: 138524 - DNA, 15 bp, Homo sapiens
caatttttttttttt

SEQ ID NO: 138525 - DNA, 15 bp, Homo sapiens
tcaattttttttttt

SEQ ID NO: 138526 - DNA, 15 bp, Homo sapiens
atcaatttttttttt

SEQ ID NO: 138527 - DNA, 15 bp, Homo sapiens
aatcaattttttttt

SEQ ID NO: 138528 - DNA, 15 bp, Homo sapiens
aaatcaatttttttt

SEQ ID NO: 138529 - DNA, 15 bp, Homo sapiens
taaatcaattttttt

SEQ ID NO: 138530 - DNA, 15 bp, Homo sapiens
ttaaatcaatttttt

SEQ ID NO: 138531 - DNA, 15 bp, Homo sapiens
tttaaatcaattttt

SEQ ID NO: 138532 - DNA, 15 bp, Homo sapiens
gtttaaatcaatttt

SEQ ID NO: 138533 - DNA, 15 bp, Homo sapiens
cgtttaaatcaattt

SEQ ID NO: 138534 - DNA, 15 bp, Homo sapiens
acgtttaaatcaatt

SEQ ID NO: 138535 - DNA, 15 bp, Homo sapiens
gacgtttaaatcaat

SEQ ID NO: 138536 - DNA, 15 bp, Homo sapiens
agacgtttaaatcaa

SEQ ID NO: 138537 - DNA, 15 bp, Homo sapiens
gagacgtttaaatca

SEQ ID NO: 138538 - DNA, 15 bp, Homo sapiens
tgagacgtttaaatc

SEQ ID NO: 138539 - DNA, 15 bp, Homo sapiens
ctgagacgtttaaat

SEQ ID NO: 138540 - DNA, 15 bp, Homo sapiens
actgagacgtttaaa

SEQ ID NO: 138541 - DNA, 15 bp, Homo sapiens
tactgagacgtttaa

SEQ ID NO: 138542 - DNA, 15 bp, Homo sapiens
ttactgagacgttta

SEQ ID NO: 138543 - DNA, 15 bp, Homo sapiens
attactgagacgttt

SEQ ID NO: 138544 - DNA, 15 bp, Homo sapiens
tattactgagacgtt

SEQ ID NO: 138545 - DNA, 15 bp, Homo sapiens
ttattactgagacgt

SEQ ID NO: 138546 - DNA, 15 bp, Homo sapiens
tttattactgagacg

SEQ ID NO: 138547 - DNA, 15 bp, Homo sapiens
ttttattactgagac

SEQ ID NO: 138548 - DNA, 15 bp, Homo sapiens
attttattactgaga

SEQ ID NO: 138549 - DNA, 15 bp, Homo sapiens
tattttattactgag

SEQ ID NO: 138550 - DNA, 15 bp, Homo sapiens
ttattttattactga

SEQ ID NO: 138551 - DNA, 15 bp, Homo sapiens
tttattttattactg

SEQ ID NO: 138552 - DNA, 15 bp, Homo sapiens
atttattttattact

SEQ ID NO: 138553 - DNA, 15 bp, Homo sapiens
catttattttattac

SEQ ID NO: 138554 - DNA, 15 bp, Homo sapiens
tcatttattttatta

SEQ ID NO: 138555 - DNA, 15 bp, Homo sapiens
ctcatttattttatt

SEQ ID NO: 138556 - DNA, 15 bp, Homo sapiens
tctcatttattttat

SEQ ID NO: 138557 - DNA, 15 bp, Homo sapiens
ctctcatttatttta

SEQ ID NO: 138558 - DNA, 15 bp, Homo sapiens
cctctcatttatttt

SEQ ID NO: 138559 - DNA, 15 bp, Homo sapiens
acctctcatttattt

SEQ ID NO: 138560 - DNA, 15 bp, Homo sapiens
aacctctcatttatt

SEQ ID NO: 138561 - DNA, 15 bp, Homo sapiens
aaacctctcatttat

SEQ ID NO: 138562 - DNA, 15 bp, Homo sapiens
caaacctctcattta

SEQ ID NO: 138563 - DNA, 15 bp, Homo sapiens
acaaacctctcattt

SEQ ID NO: 138564 - DNA, 15 bp, Homo sapiens
tacaaacctctcatt

SEQ ID NO: 138565 - DNA, 15 bp, Homo sapiens
ctacaaacctctcat

SEQ ID NO: 138566 - DNA, 15 bp, Homo sapiens
cctacaaacctctca

SEQ ID NO: 138567 - DNA, 15 bp, Homo sapiens
acctacaaacctctc

SEQ ID NO: 138568 - DNA, 15 bp, Homo sapiens
tacctacaaacctct

SEQ ID NO: 138569 - DNA, 15 bp, Homo sapiens
ctacctacaaacctc

SEQ ID NO: 138570 - DNA, 15 bp, Homo sapiens
tctacctacaaacct

SEQ ID NO: 138571 - DNA, 15 bp, Homo sapiens
ttctacctacaaacc

SEQ ID NO: 138572 - DNA, 15 bp, Homo sapiens
attctacctacaaac

SEQ ID NO: 138573 - DNA, 15 bp, Homo sapiens
cattctacctacaaa

SEQ ID NO: 138574 - DNA, 15 bp, Homo sapiens
acattctacctacaa

SEQ ID NO: 138575 - DNA, 15 bp, Homo sapiens
cacattctacctaca

SEQ ID NO: 138576 - DNA, 15 bp, Homo sapiens
gcacattctacctac

SEQ ID NO: 138577 - DNA, 15 bp, Homo sapiens
ggcacattctaccta

SEQ ID NO: 138578 - DNA, 15 bp, Homo sapiens
aggcacattctacct

SEQ ID NO: 138579 - DNA, 15 bp, Homo sapiens
caggcacattctacc

SEQ ID NO: 138580 - DNA, 15 bp, Homo sapiens
ccaggcacattctac

SEQ ID NO: 138581 - DNA, 15 bp, Homo sapiens
cccaggcacattcta

SEQ ID NO: 138582 - DNA, 15 bp, Homo sapiens
tcccaggcacattct

SEQ ID NO: 138583 - DNA, 15 bp, Homo sapiens
ttcccaggcacattc

SEQ ID NO: 138584 - DNA, 15 bp, Homo sapiens
attcccaggcacatt

SEQ ID NO: 138585 - DNA, 15 bp, Homo sapiens
aattcccaggcacat

SEQ ID NO: 138586 - DNA, 15 bp, Homo sapiens
caattcccaggcaca

SEQ ID NO: 138587 - DNA, 15 bp, Homo sapiens
tcaattcccaggcac

SEQ ID NO: 138588 - DNA, 15 bp, Homo sapiens
gtcaattcccaggca

SEQ ID NO: 138589 - DNA, 15 bp, Homo sapiens
agtcaattcccaggc

SEQ ID NO: 138590 - DNA, 15 bp, Homo sapiens
tagtcaattcccagg

SEQ ID NO: 138591 - DNA, 15 bp, Homo sapiens
gtagtcaattcccag

SEQ ID NO: 138592 - DNA, 15 bp, Homo sapiens
agtagtcaattccca

SEQ ID NO: 138593 - DNA, 15 bp, Homo sapiens
cagtagtcaattccc

SEQ ID NO: 138594 - DNA, 15 bp, Homo sapiens
acagtagtcaattcc

SEQ ID NO: 138595 - DNA, 15 bp, Homo sapiens
tacagtagtcaattc

SEQ ID NO: 138596 - DNA, 15 bp, Homo sapiens
ttacagtagtcaatt

SEQ ID NO: 138597 - DNA, 15 bp, Homo sapiens
attacagtagtcaat

SEQ ID NO: 138598 - DNA, 15 bp, Homo sapiens
gattacagtagtcaa

SEQ ID NO: 138599 - DNA, 15 bp, Homo sapiens
tgattacagtagtca

SEQ ID NO: 138600 - DNA, 15 bp, Homo sapiens
gtgattacagtagtc

SEQ ID NO: 138601 - DNA, 15 bp, Homo sapiens
agtgattacagtagt

SEQ ID NO: 138602 - DNA, 15 bp, Homo sapiens
aagtgattacagtag

SEQ ID NO: 138603 - DNA, 15 bp, Homo sapiens
gaagtgattacagta

SEQ ID NO: 138604 - DNA, 15 bp, Homo sapiens
tgaagtgattacagt

SEQ ID NO: 138605 - DNA, 15 bp, Homo sapiens
ttgaagtgattacag

SEQ ID NO: 138606 - DNA, 15 bp, Homo sapiens
cttgaagtgattaca

SEQ ID NO: 138607 - DNA, 15 bp, Homo sapiens
ccttgaagtgattac

SEQ ID NO: 138608 - DNA, 15 bp, Homo sapiens
tccttgaagtgatta

SEQ ID NO: 138609 - DNA, 15 bp, Homo sapiens
ttccttgaagtgatt

SEQ ID NO: 138610 - DNA, 15 bp, Homo sapiens
gttccttgaagtgat

SEQ ID NO: 138611 - DNA, 15 bp, Homo sapiens
agttccttgaagtga

SEQ ID NO: 138612 - DNA, 15 bp, Homo sapiens
gagttccttgaagtg

SEQ ID NO: 138613 - DNA, 15 bp, Homo sapiens
agagttccttgaagt

SEQ ID NO: 138614 - DNA, 15 bp, Homo sapiens
cagagttccttgaag

SEQ ID NO: 138615 - DNA, 15 bp, Homo sapiens
ccagagttccttgaa

SEQ ID NO: 138616 - DNA, 15 bp, Homo sapiens
gccagagttccttga

SEQ ID NO: 138617 - DNA, 15 bp, Homo sapiens
tgccagagttccttg

SEQ ID NO: 138618 - DNA, 15 bp, Homo sapiens
gtgccagagttcctt

SEQ ID NO: 138619 - DNA, 15 bp, Homo sapiens
tgtgccagagttcct

SEQ ID NO: 138620 - DNA, 15 bp, Homo sapiens
ctgtgccagagttcc

SEQ ID NO: 138621 - DNA, 15 bp, Homo sapiens
gctgtgccagagttc

SEQ ID NO: 138622 - DNA, 15 bp, Homo sapiens
ggctgtgccagagtt

SEQ ID NO: 138623 - DNA, 15 bp, Homo sapiens
aggctgtgccagagt

SEQ ID NO: 138624 - DNA, 15 bp, Homo sapiens
taggctgtgccagag

SEQ ID NO: 138625 - DNA, 15 bp, Homo sapiens
gtaggctgtgccaga

SEQ ID NO: 138626 - DNA, 15 bp, Homo sapiens
ggtaggctgtgccag

SEQ ID NO: 138627 - DNA, 15 bp, Homo sapiens
gggtaggctgtgcca

SEQ ID NO: 138628 - DNA, 15 bp, Homo sapiens
cgggtaggctgtgcc

SEQ ID NO: 138629 - DNA, 15 bp, Homo sapiens
gcgggtaggctgtgc

SEQ ID NO: 138630 - DNA, 15 bp, Homo sapiens
ggcgggtaggctgtg

SEQ ID NO: 138631 - DNA, 15 bp, Homo sapiens
aggcgggtaggctgt

SEQ ID NO: 138632 - DNA, 15 bp, Homo sapiens
taggcgggtaggctg

SEQ ID NO: 138633 - DNA, 15 bp, Homo sapiens
ttaggcgggtaggct

SEQ ID NO: 138634 - DNA, 15 bp, Homo sapiens
tttaggcgggtaggc

SEQ ID NO: 138635 - DNA, 15 bp, Homo sapiens
ttttaggcgggtagg

SEQ ID NO: 138636 - DNA, 15 bp, Homo sapiens
cttttaggcgggtag

SEQ ID NO: 138637 - DNA, 15 bp, Homo sapiens
ccttttaggcgggta

SEQ ID NO: 138638 - DNA, 15 bp, Homo sapiens
accttttaggcgggt

SEQ ID NO: 138639 - DNA, 15 bp, Homo sapiens
taccttttaggcggg

SEQ ID NO: 138640 - DNA, 15 bp, Homo sapiens
gtaccttttaggcgg

SEQ ID NO: 138641 - DNA, 15 bp, Homo sapiens
tgtaccttttaggcg

SEQ ID NO: 138642 - DNA, 15 bp, Homo sapiens
ttgtaccttttaggc

SEQ ID NO: 138643 - DNA, 15 bp, Homo sapiens
tttgtaccttttagg

SEQ ID NO: 138644 - DNA, 15 bp, Homo sapiens
atttgtaccttttag

SEQ ID NO: 138645 - DNA, 15 bp, Homo sapiens
catttgtacctttta

SEQ ID NO: 138646 - DNA, 15 bp, Homo sapiens
ccatttgtacctttt

SEQ ID NO: 138647 - DNA, 15 bp, Homo sapiens
tccatttgtaccttt

SEQ ID NO: 138648 - DNA, 15 bp, Homo sapiens
ctccatttgtacctt

SEQ ID NO: 138649 - DNA, 15 bp, Homo sapiens
tctccatttgtacct

SEQ ID NO: 138650 - DNA, 15 bp, Homo sapiens
ctctccatttgtacc

SEQ ID NO: 138651 - DNA, 15 bp, Homo sapiens
cctctccatttgtac

SEQ ID NO: 138652 - DNA, 15 bp, Homo sapiens
acctctccatttgta

SEQ ID NO: 138653 - DNA, 15 bp, Homo sapiens
cacctctccatttgt

SEQ ID NO: 138654 - DNA, 15 bp, Homo sapiens
tcacctctccatttg

SEQ ID NO: 138655 - DNA, 15 bp, Homo sapiens
gtcacctctccattt

SEQ ID NO: 138656 - DNA, 15 bp, Homo sapiens
tgtcacctctccatt

SEQ ID NO: 138657 - DNA, 15 bp, Homo sapiens
ctgtcacctctccat

SEQ ID NO: 138658 - DNA, 15 bp, Homo sapiens
actgtcacctctcca

SEQ ID NO: 138659 - DNA, 15 bp, Homo sapiens
cactgtcacctctcc

SEQ ID NO: 138660 - DNA, 15 bp, Homo sapiens
acactgtcacctctc

SEQ ID NO: 138661 - DNA, 15 bp, Homo sapiens
gacactgtcacctct

SEQ ID NO: 138662 - DNA, 15 bp, Homo sapiens
tgacactgtcacctc

SEQ ID NO: 138663 - DNA, 15 bp, Homo sapiens
ctgacactgtcacct

SEQ ID NO: 138664 - DNA, 15 bp, Homo sapiens
actgacactgtcacc

SEQ ID NO: 138665 - DNA, 15 bp, Homo sapiens
cactgacactgtcac

SEQ ID NO: 138666 - DNA, 15 bp, Homo sapiens
acactgacactgtca

SEQ ID NO: 138667 - DNA, 15 bp, Homo sapiens
aacactgacactgtc

SEQ ID NO: 138668 - DNA, 15 bp, Homo sapiens
gaacactgacactgt

SEQ ID NO: 138669 - DNA, 15 bp, Homo sapiens
agaacactgacactg

SEQ ID NO: 138670 - DNA, 15 bp, Homo sapiens
tagaacactgacact

SEQ ID NO: 138671 - DNA, 15 bp, Homo sapiens
gtagaacactgacac

SEQ ID NO: 138672 - DNA, 15 bp, Homo sapiens
ggtagaacactgaca

SEQ ID NO: 138673 - DNA, 15 bp, Homo sapiens
gggtagaacactgac

SEQ ID NO: 138674 - DNA, 15 bp, Homo sapiens
tgggtagaacactga

SEQ ID NO: 138675 - DNA, 15 bp, Homo sapiens
ctgggtagaacactg

SEQ ID NO: 138676 - DNA, 15 bp, Homo sapiens
cctgggtagaacact

SEQ ID NO: 138677 - DNA, 15 bp, Homo sapiens
ccctgggtagaacac

SEQ ID NO: 138678 - DNA, 15 bp, Homo sapiens
accctgggtagaaca

SEQ ID NO: 138679 - DNA, 15 bp, Homo sapiens
aaccctgggtagaac

SEQ ID NO: 138680 - DNA, 15 bp, Homo sapiens
taaccctgggtagaa

SEQ ID NO: 138681 - DNA, 15 bp, Homo sapiens
ctaaccctgggtaga

SEQ ID NO: 138682 - DNA, 15 bp, Homo sapiens
tctaaccctgggtag

SEQ ID NO: 138683 - DNA, 15 bp, Homo sapiens
ttctaaccctgggta

SEQ ID NO: 138684 - DNA, 15 bp, Homo sapiens
attctaaccctgggt

SEQ ID NO: 138685 - DNA, 15 bp, Homo sapiens
gattctaaccctggg

SEQ ID NO: 138686 - DNA, 15 bp, Homo sapiens
ggattctaaccctgg

SEQ ID NO: 138687 - DNA, 15 bp, Homo sapiens
tggattctaaccctg

SEQ ID NO: 138688 - DNA, 15 bp, Homo sapiens
ttggattctaaccct

SEQ ID NO: 138689 - DNA, 15 bp, Homo sapiens
tttggattctaaccc

SEQ ID NO: 138690 - DNA, 15 bp, Homo sapiens
ttttggattctaacc

SEQ ID NO: 138691 - DNA, 15 bp, Homo sapiens
attttggattctaac

SEQ ID NO: 138692 - DNA, 15 bp, Homo sapiens
cattttggattctaa

SEQ ID NO: 138693 - DNA, 15 bp, Homo sapiens
tcattttggattcta

SEQ ID NO: 138694 - DNA, 15 bp, Homo sapiens
atcattttggattct

SEQ ID NO: 138695 - DNA, 15 bp, Homo sapiens
catcattttggattc

SEQ ID NO: 138696 - DNA, 15 bp, Homo sapiens
gcatcattttggatt

SEQ ID NO: 138697 - DNA, 15 bp, Homo sapiens
agcatcattttggat

SEQ ID NO: 138698 - DNA, 15 bp, Homo sapiens
tagcatcattttgga

SEQ ID NO: 138699 - DNA, 15 bp, Homo sapiens
ctagcatcattttgg

SEQ ID NO: 138700 - DNA, 15 bp, Homo sapiens
tctagcatcattttg

SEQ ID NO: 138701 - DNA, 15 bp, Homo sapiens
gtctagcatcatttt

SEQ ID NO: 138702 - DNA, 15 bp, Homo sapiens
tgtctagcatcattt

SEQ ID NO: 138703 - DNA, 15 bp, Homo sapiens
ctgtctagcatcatt

SEQ ID NO: 138704 - DNA, 15 bp, Homo sapiens
gctgtctagcatcat

SEQ ID NO: 138705 - DNA, 15 bp, Homo sapiens
ggctgtctagcatca

SEQ ID NO: 138706 - DNA, 15 bp, Homo sapiens
aggctgtctagcatc

SEQ ID NO: 138707 - DNA, 15 bp, Homo sapiens
gaggctgtctagcat

SEQ ID NO: 138708 - DNA, 15 bp, Homo sapiens
ggaggctgtctagca

SEQ ID NO: 138709 - DNA, 15 bp, Homo sapiens
aggaggctgtctagc

SEQ ID NO: 138710 - DNA, 15 bp, Homo sapiens
gaggaggctgtctag

SEQ ID NO: 138711 - DNA, 15 bp, Homo sapiens
agaggaggctgtcta

SEQ ID NO: 138712 - DNA, 15 bp, Homo sapiens
cagaggaggctgtct

SEQ ID NO: 138713 - DNA, 15 bp, Homo sapiens
gcagaggaggctgtc

SEQ ID NO: 138714 - DNA, 15 bp, Homo sapiens
tgcagaggaggctgt

SEQ ID NO: 138715 - DNA, 15 bp, Homo sapiens
atgcagaggaggctg

SEQ ID NO: 138716 - DNA, 15 bp, Homo sapiens
aatgcagaggaggct

SEQ ID NO: 138717 - DNA, 15 bp, Homo sapiens
caatgcagaggaggc

SEQ ID NO: 138718 - DNA, 15 bp, Homo sapiens
tcaatgcagaggagg

SEQ ID NO: 138719 - DNA, 15 bp, Homo sapiens
atcaatgcagaggag

SEQ ID NO: 138720 - DNA, 15 bp, Homo sapiens
catcaatgcagagga

SEQ ID NO: 138721 - DNA, 15 bp, Homo sapiens
tcatcaatgcagagg

SEQ ID NO: 138722 - DNA, 15 bp, Homo sapiens
ctcatcaatgcagag

SEQ ID NO: 138723 - DNA, 15 bp, Homo sapiens
actcatcaatgcaga

SEQ ID NO: 138724 - DNA, 15 bp, Homo sapiens
aactcatcaatgcag

SEQ ID NO: 138725 - DNA, 15 bp, Homo sapiens
aaactcatcaatgca

SEQ ID NO: 138726 - DNA, 15 bp, Homo sapiens
aaaactcatcaatgc

SEQ ID NO: 138727 - DNA, 15 bp, Homo sapiens
aaaaactcatcaatg

SEQ ID NO: 138728 - DNA, 15 bp, Homo sapiens
aaaaaactcatcaat

SEQ ID NO: 138729 - DNA, 15 bp, Homo sapiens
aaaaaaactcatcaa

SEQ ID NO: 138730 - DNA, 15 bp, Homo sapiens
gaaaaaaactcatca

SEQ ID NO: 138731 - DNA, 15 bp, Homo sapiens
ggaaaaaaactcatc

SEQ ID NO: 138732 - DNA, 15 bp, Homo sapiens
gggaaaaaaactcat

SEQ ID NO: 138733 - DNA, 15 bp, Homo sapiens
ggggaaaaaaactca

SEQ ID NO: 138734 - DNA, 15 bp, Homo sapiens
tggggaaaaaaactc

SEQ ID NO: 138735 - DNA, 15 bp, Homo sapiens
ctggggaaaaaaact

SEQ ID NO: 138736 - DNA, 15 bp, Homo sapiens
tctggggaaaaaaac

SEQ ID NO: 138737 - DNA, 15 bp, Homo sapiens
ttctggggaaaaaaa

SEQ ID NO: 138738 - DNA, 15 bp, Homo sapiens
tttctggggaaaaaa

SEQ ID NO: 138739 - DNA, 15 bp, Homo sapiens
ttttctggggaaaaa

SEQ ID NO: 138740 - DNA, 15 bp, Homo sapiens
tttttctggggaaaa

SEQ ID NO: 138741 - DNA, 15 bp, Homo sapiens
atttttctggggaaa

SEQ ID NO: 138742 - DNA, 15 bp, Homo sapiens
tatttttctggggaa

SEQ ID NO: 138743 - DNA, 15 bp, Homo sapiens
ttatttttctgggga

SEQ ID NO: 138744 - DNA, 15 bp, Homo sapiens
gttatttttctgggg

SEQ ID NO: 138745 - DNA, 15 bp, Homo sapiens
agttatttttctggg

SEQ ID NO: 138746 - DNA, 15 bp, Homo sapiens
tagttatttttctgg

SEQ ID NO: 138747 - DNA, 15 bp, Homo sapiens
atagttatttttctg

SEQ ID NO: 138748 - DNA, 15 bp, Homo sapiens
aatagttatttttct

SEQ ID NO: 138749 - DNA, 15 bp, Homo sapiens
aaatagttatttttc

SEQ ID NO: 138750 - DNA, 15 bp, Homo sapiens
aaaatagttattttt

SEQ ID NO: 138751 - DNA, 15 bp, Homo sapiens
gaaaatagttatttt

SEQ ID NO: 138752 - DNA, 15 bp, Homo sapiens
agaaaatagttattt

SEQ ID NO: 138753 - DNA, 15 bp, Homo sapiens
cagaaaatagttatt

SEQ ID NO: 138754 - DNA, 15 bp, Homo sapiens
gcagaaaatagttat

SEQ ID NO: 138755 - DNA, 15 bp, Homo sapiens
agcagaaaatagtta

SEQ ID NO: 138756 - DNA, 15 bp, Homo sapiens
aagcagaaaatagtt

SEQ ID NO: 138757 - DNA, 15 bp, Homo sapiens
aaagcagaaaatagt

SEQ ID NO: 138758 - DNA, 15 bp, Homo sapiens
aaaagcagaaaatag

SEQ ID NO: 138759 - DNA, 15 bp, Homo sapiens
gaaaagcagaaaata

SEQ ID NO: 138760 - DNA, 15 bp, Homo sapiens
agaaaagcagaaaat

SEQ ID NO: 138761 - DNA, 15 bp, Homo sapiens
aagaaaagcagaaaa

SEQ ID NO: 138762 - DNA, 15 bp, Homo sapiens
caagaaaagcagaaa

SEQ ID NO: 138763 - DNA, 15 bp, Homo sapiens
acaagaaaagcagaa

SEQ ID NO: 138764 - DNA, 15 bp, Homo sapiens
aacaagaaaagcaga

SEQ ID NO: 138765 - DNA, 15 bp, Homo sapiens
aaacaagaaaagcag

SEQ ID NO: 138766 - DNA, 15 bp, Homo sapiens
aaaacaagaaaagca

SEQ ID NO: 138767 - DNA, 15 bp, Homo sapiens
aaaaacaagaaaagc

SEQ ID NO: 138768 - DNA, 15 bp, Homo sapiens
gaaaaacaagaaaag

SEQ ID NO: 138769 - DNA, 15 bp, Homo sapiens
tgaaaaacaagaaaa

SEQ ID NO: 138770 - DNA, 15 bp, Homo sapiens
atgaaaaacaagaaa

SEQ ID NO: 138771 - DNA, 15 bp, Homo sapiens
aatgaaaaacaagaa

SEQ ID NO: 138772 - DNA, 15 bp, Homo sapiens
gaatgaaaaacaaga

SEQ ID NO: 138773 - DNA, 15 bp, Homo sapiens
agaatgaaaaacaag

SEQ ID NO: 138774 - DNA, 15 bp, Homo sapiens
cagaatgaaaaacaa

SEQ ID NO: 138775 - DNA, 15 bp, Homo sapiens
tcagaatgaaaaaca

SEQ ID NO: 138776 - DNA, 15 bp, Homo sapiens
atcagaatgaaaaac

SEQ ID NO: 138777 - DNA, 15 bp, Homo sapiens
catcagaatgaaaaa

SEQ ID NO: 138778 - DNA, 15 bp, Homo sapiens
gcatcagaatgaaaa

SEQ ID NO: 138779 - DNA, 15 bp, Homo sapiens
agcatcagaatgaaa

SEQ ID NO: 138780 - DNA, 15 bp, Homo sapiens
aagcatcagaatgaa

SEQ ID NO: 138781 - DNA, 15 bp, Homo sapiens
aaagcatcagaatga

SEQ ID NO: 138782 - DNA, 15 bp, Homo sapiens
aaaagcatcagaatg

SEQ ID NO: 138783 - DNA, 15 bp, Homo sapiens
caaaagcatcagaat

SEQ ID NO: 138784 - DNA, 15 bp, Homo sapiens
acaaaagcatcagaa

SEQ ID NO: 138785 - DNA, 15 bp, Homo sapiens
cacaaaagcatcaga

SEQ ID NO: 138786 - DNA, 15 bp, Homo sapiens
ccacaaaagcatcag

SEQ ID NO: 138787 - DNA, 15 bp, Homo sapiens
accacaaaagcatca

SEQ ID NO: 138788 - DNA, 15 bp, Homo sapiens
aaccacaaaagcatc

SEQ ID NO: 138789 - DNA, 15 bp, Homo sapiens
gaaccacaaaagcat

SEQ ID NO: 138790 - DNA, 15 bp, Homo sapiens
agaaccacaaaagca

SEQ ID NO: 138791 - DNA, 15 bp, Homo sapiens
aagaaccacaaaagc

SEQ ID NO: 138792 - DNA, 15 bp, Homo sapiens
aaagaaccacaaaag

SEQ ID NO: 138793 - DNA, 15 bp, Homo sapiens
caaagaaccacaaaa

SEQ ID NO: 138794 - DNA, 15 bp, Homo sapiens
gcaaagaaccacaaa

SEQ ID NO: 138795 - DNA, 15 bp, Homo sapiens
agcaaagaaccacaa

SEQ ID NO: 138796 - DNA, 15 bp, Homo sapiens
tagcaaagaaccaca

SEQ ID NO: 138797 - DNA, 15 bp, Homo sapiens
gtagcaaagaaccac

SEQ ID NO: 138798 - DNA, 15 bp, Homo sapiens
ggtagcaaagaacca

SEQ ID NO: 138799 - DNA, 15 bp, Homo sapiens
gggtagcaaagaacc

SEQ ID NO: 138800 - DNA, 15 bp, Homo sapiens
tgggtagcaaagaac

SEQ ID NO: 138801 - DNA, 15 bp, Homo sapiens
atgggtagcaaagaa

SEQ ID NO: 138802 - DNA, 15 bp, Homo sapiens
aatgggtagcaaaga

SEQ ID NO: 138803 - DNA, 15 bp, Homo sapiens
gaatgggtagcaaag

SEQ ID NO: 138804 - DNA, 15 bp, Homo sapiens
agaatgggtagcaaa

SEQ ID NO: 138805 - DNA, 15 bp, Homo sapiens
cagaatgggtagcaa

SEQ ID NO: 138806 - DNA, 15 bp, Homo sapiens
acagaatgggtagca

SEQ ID NO: 138807 - DNA, 15 bp, Homo sapiens
gacagaatgggtagc

SEQ ID NO: 138808 - DNA, 15 bp, Homo sapiens
agacagaatgggtag

SEQ ID NO: 138809 - DNA, 15 bp, Homo sapiens
tagacagaatgggta

SEQ ID NO: 138810 - DNA, 15 bp, Homo sapiens
ttagacagaatgggt

SEQ ID NO: 138811 - DNA, 15 bp, Homo sapiens
gttagacagaatggg

SEQ ID NO: 138812 - DNA, 15 bp, Homo sapiens
agttagacagaatgg

SEQ ID NO: 138813 - DNA, 15 bp, Homo sapiens
cagttagacagaatg

SEQ ID NO: 138814 - DNA, 15 bp, Homo sapiens
ccagttagacagaat

SEQ ID NO: 138815 - DNA, 15 bp, Homo sapiens
cccagttagacagaa

SEQ ID NO: 138816 - DNA, 15 bp, Homo sapiens
gcccagttagacaga

SEQ ID NO: 138817 - DNA, 15 bp, Homo sapiens
tgcccagttagacag

SEQ ID NO: 138818 - DNA, 15 bp, Homo sapiens
atgcccagttagaca

SEQ ID NO: 138819 - DNA, 15 bp, Homo sapiens
gatgcccagttagac

SEQ ID NO: 138820 - DNA, 15 bp, Homo sapiens
tgatgcccagttaga

SEQ ID NO: 138821 - DNA, 15 bp, Homo sapiens
atgatgcccagttag

SEQ ID NO: 138822 - DNA, 15 bp, Homo sapiens
aatgatgcccagtta

SEQ ID NO: 138823 - DNA, 15 bp, Homo sapiens
taatgatgcccagtt

SEQ ID NO: 138824 - DNA, 15 bp, Homo sapiens
ctaatgatgcccagt

SEQ ID NO: 138825 - DNA, 15 bp, Homo sapiens
actaatgatgcccag

SEQ ID NO: 138826 - DNA, 15 bp, Homo sapiens
cactaatgatgccca

SEQ ID NO: 138827 - DNA, 15 bp, Homo sapiens
ccactaatgatgccc

SEQ ID NO: 138828 - DNA, 15 bp, Homo sapiens
accactaatgatgcc

SEQ ID NO: 138829 - DNA, 15 bp, Homo sapiens
caccactaatgatgc

SEQ ID NO: 138830 - DNA, 15 bp, Homo sapiens
ccaccactaatgatg

SEQ ID NO: 138831 - DNA, 15 bp, Homo sapiens
cccaccactaatgat

SEQ ID NO: 138832 - DNA, 15 bp, Homo sapiens
acccaccactaatga

SEQ ID NO: 138833 - DNA, 15 bp, Homo sapiens
tacccaccactaatg

SEQ ID NO: 138834 - DNA, 15 bp, Homo sapiens
ctacccaccactaat

SEQ ID NO: 138835 - DNA, 15 bp, Homo sapiens
cctacccaccactaa

SEQ ID NO: 138836 - DNA, 15 bp, Homo sapiens
gcctacccaccacta

SEQ ID NO: 138837 - DNA, 15 bp, Homo sapiens
agcctacccaccact

SEQ ID NO: 138838 - DNA, 15 bp, Homo sapiens
cagcctacccaccac

SEQ ID NO: 138839 - DNA, 15 bp, Homo sapiens
tcagcctacccacca

SEQ ID NO: 138840 - DNA, 15 bp, Homo sapiens
ttcagcctacccacc

SEQ ID NO: 138841 - DNA, 15 bp, Homo sapiens
tttcagcctacccac

SEQ ID NO: 138842 - DNA, 15 bp, Homo sapiens
gtttcagcctaccca

SEQ ID NO: 138843 - DNA, 15 bp, Homo sapiens
ggtttcagcctaccc

SEQ ID NO: 138844 - DNA, 15 bp, Homo sapiens
tggtttcagcctacc

SEQ ID NO: 138845 - DNA, 15 bp, Homo sapiens
atggtttcagcctac

SEQ ID NO: 138846 - DNA, 15 bp, Homo sapiens
tatggtttcagccta

SEQ ID NO: 138847 - DNA, 15 bp, Homo sapiens
gtatggtttcagcct

SEQ ID NO: 138848 - DNA, 15 bp, Homo sapiens
agtatggtttcagcc

SEQ ID NO: 138849 - DNA, 15 bp, Homo sapiens
gagtatggtttcagc

SEQ ID NO: 138850 - DNA, 15 bp, Homo sapiens
tgagtatggtttcag

SEQ ID NO: 138851 - DNA, 15 bp, Homo sapiens
ttgagtatggtttca

SEQ ID NO: 138852 - DNA, 15 bp, Homo sapiens
cttgagtatggtttc

SEQ ID NO: 138853 - DNA, 15 bp, Homo sapiens
acttgagtatggttt

SEQ ID NO: 138854 - DNA, 15 bp, Homo sapiens
tacttgagtatggtt

SEQ ID NO: 138855 - DNA, 15 bp, Homo sapiens
ttacttgagtatggt

SEQ ID NO: 138856 - DNA, 15 bp, Homo sapiens
gttacttgagtatgg

SEQ ID NO: 138857 - DNA, 15 bp, Homo sapiens
agttacttgagtatg

SEQ ID NO: 138858 - DNA, 15 bp, Homo sapiens
aagttacttgagtat

SEQ ID NO: 138859 - DNA, 15 bp, Homo sapiens
caagttacttgagta

SEQ ID NO: 138860 - DNA, 15 bp, Homo sapiens
acaagttacttgagt

SEQ ID NO: 138861 - DNA, 15 bp, Homo sapiens
aacaagttacttgag

SEQ ID NO: 138862 - DNA, 15 bp, Homo sapiens
aaacaagttacttga

SEQ ID NO: 138863 - DNA, 15 bp, Homo sapiens
caaacaagttacttg

SEQ ID NO: 138864 - DNA, 15 bp, Homo sapiens
ccaaacaagttactt

SEQ ID NO: 138865 - DNA, 15 bp, Homo sapiens
tccaaacaagttact

SEQ ID NO: 138866 - DNA, 15 bp, Homo sapiens
atccaaacaagttac

SEQ ID NO: 138867 - DNA, 15 bp, Homo sapiens
aatccaaacaagtta

SEQ ID NO: 138868 - DNA, 15 bp, Homo sapiens
aaatccaaacaagtt

SEQ ID NO: 138869 - DNA, 15 bp, Homo sapiens
aaaatccaaacaagt

SEQ ID NO: 138870 - DNA, 15 bp, Homo sapiens
gaaaatccaaacaag

SEQ ID NO: 138871 - DNA, 15 bp, Homo sapiens
ggaaaatccaaacaa

SEQ ID NO: 138872 - DNA, 15 bp, Homo sapiens
aggaaaatccaaaca

SEQ ID NO: 138873 - DNA, 15 bp, Homo sapiens
aaggaaaatccaaac

SEQ ID NO: 138874 - DNA, 15 bp, Homo sapiens
caaggaaaatccaaa

SEQ ID NO: 138875 - DNA, 15 bp, Homo sapiens
acaaggaaaatccaa

SEQ ID NO: 138876 - DNA, 15 bp, Homo sapiens
aacaaggaaaatcca

SEQ ID NO: 138877 - DNA, 15 bp, Homo sapiens
aaacaaggaaaatcc

SEQ ID NO: 138878 - DNA, 15 bp, Homo sapiens
gaaacaaggaaaatc

SEQ ID NO: 138879 - DNA, 15 bp, Homo sapiens
tgaaacaaggaaaat

SEQ ID NO: 138880 - DNA, 15 bp, Homo sapiens
gtgaaacaaggaaaa

SEQ ID NO: 138881 - DNA, 15 bp, Homo sapiens
tgtgaaacaaggaaa

SEQ ID NO: 138882 - DNA, 15 bp, Homo sapiens
ctgtgaaacaaggaa

SEQ ID NO: 138883 - DNA, 15 bp, Homo sapiens
actgtgaaacaagga

SEQ ID NO: 138884 - DNA, 15 bp, Homo sapiens
tactgtgaaacaagg

SEQ ID NO: 138885 - DNA, 15 bp, Homo sapiens
ctactgtgaaacaag

SEQ ID NO: 138886 - DNA, 15 bp, Homo sapiens
actactgtgaaacaa

SEQ ID NO: 138887 - DNA, 15 bp, Homo sapiens
aactactgtgaaaca

SEQ ID NO: 138888 - DNA, 15 bp, Homo sapiens
aaactactgtgaaac

SEQ ID NO: 138889 - DNA, 15 bp, Homo sapiens
aaaactactgtgaaa

SEQ ID NO: 138890 - DNA, 15 bp, Homo sapiens
gaaaactactgtgaa

SEQ ID NO: 138891 - DNA, 15 bp, Homo sapiens
tgaaaactactgtga

SEQ ID NO: 138892 - DNA, 15 bp, Homo sapiens
ctgaaaactactgtg

SEQ ID NO: 138893 - DNA, 15 bp, Homo sapiens
gctgaaaactactgt

SEQ ID NO: 138894 - DNA, 15 bp, Homo sapiens
tgctgaaaactactg

SEQ ID NO: 138895 - DNA, 15 bp, Homo sapiens
gtgctgaaaactact

SEQ ID NO: 138896 - DNA, 15 bp, Homo sapiens
agtgctgaaaactac

SEQ ID NO: 138897 - DNA, 15 bp, Homo sapiens
tagtgctgaaaacta

SEQ ID NO: 138898 - DNA, 15 bp, Homo sapiens
gtagtgctgaaaact

SEQ ID NO: 138899 - DNA, 15 bp, Homo sapiens
tgtagtgctgaaaac

SEQ ID NO: 138900 - DNA, 15 bp, Homo sapiens
gtgtagtgctgaaaa

SEQ ID NO: 138901 - DNA, 15 bp, Homo sapiens
tgtgtagtgctgaaa

SEQ ID NO: 138902 - DNA, 15 bp, Homo sapiens
atgtgtagtgctgaa

SEQ ID NO: 138903 - DNA, 15 bp, Homo sapiens
catgtgtagtgctga

SEQ ID NO: 138904 - DNA, 15 bp, Homo sapiens
tcatgtgtagtgctg

SEQ ID NO: 138905 - DNA, 15 bp, Homo sapiens
ttcatgtgtagtgct

SEQ ID NO: 138906 - DNA, 15 bp, Homo sapiens
gttcatgtgtagtgc

SEQ ID NO: 138907 - DNA, 15 bp, Homo sapiens
tgttcatgtgtagtg

SEQ ID NO: 138908 - DNA, 15 bp, Homo sapiens
ctgttcatgtgtagt

SEQ ID NO: 138909 - DNA, 15 bp, Homo sapiens
gctgttcatgtgtag

SEQ ID NO: 138910 - DNA, 15 bp, Homo sapiens
ggctgttcatgtgta

SEQ ID NO: 138911 - DNA, 15 bp, Homo sapiens
aggctgttcatgtgt

SEQ ID NO: 138912 - DNA, 15 bp, Homo sapiens
caggctgttcatgtg

SEQ ID NO: 138913 - DNA, 15 bp, Homo sapiens
acaggctgttcatgt

SEQ ID NO: 138914 - DNA, 15 bp, Homo sapiens
aacaggctgttcatg

SEQ ID NO: 138915 - DNA, 15 bp, Homo sapiens
caacaggctgttcat

SEQ ID NO: 138916 - DNA, 15 bp, Homo sapiens
ccaacaggctgttca

SEQ ID NO: 138917 - DNA, 15 bp, Homo sapiens
tccaacaggctgttc

SEQ ID NO: 138918 - DNA, 15 bp, Homo sapiens
ctccaacaggctgtt

SEQ ID NO: 138919 - DNA, 15 bp, Homo sapiens
cctccaacaggctgt

SEQ ID NO: 138920 - DNA, 15 bp, Homo sapiens
gcctccaacaggctg

SEQ ID NO: 138921 - DNA, 15 bp, Homo sapiens
tgcctccaacaggct

SEQ ID NO: 138922 - DNA, 15 bp, Homo sapiens
ctgcctccaacaggc

SEQ ID NO: 138923 - DNA, 15 bp, Homo sapiens
gctgcctccaacagg

SEQ ID NO: 138924 - DNA, 15 bp, Homo sapiens
ggctgcctccaacag

SEQ ID NO: 138925 - DNA, 15 bp, Homo sapiens
tggctgcctccaaca

SEQ ID NO: 138926 - DNA, 15 bp, Homo sapiens
ctggctgcctccaac

SEQ ID NO: 138927 - DNA, 15 bp, Homo sapiens
gctggctgcctccaa

SEQ ID NO: 138928 - DNA, 15 bp, Homo sapiens
agctggctgcctcca

SEQ ID NO: 138929 - DNA, 15 bp, Homo sapiens
aagctggctgcctcc

SEQ ID NO: 138930 - DNA, 15 bp, Homo sapiens
taagctggctgcctc

SEQ ID NO: 138931 - DNA, 15 bp, Homo sapiens
ttaagctggctgcct

SEQ ID NO: 138932 - DNA, 15 bp, Homo sapiens
gttaagctggctgcc

SEQ ID NO: 138933 - DNA, 15 bp, Homo sapiens
tgttaagctggctgc

SEQ ID NO: 138934 - DNA, 15 bp, Homo sapiens
gtgttaagctggctg

SEQ ID NO: 138935 - DNA, 15 bp, Homo sapiens
agtgttaagctggct

SEQ ID NO: 138936 - DNA, 15 bp, Homo sapiens
gagtgttaagctggc

SEQ ID NO: 138937 - DNA, 15 bp, Homo sapiens
tgagtgttaagctgg

SEQ ID NO: 138938 - DNA, 15 bp, Homo sapiens
ttgagtgttaagctg

SEQ ID NO: 138939 - DNA, 15 bp, Homo sapiens
gttgagtgttaagct

SEQ ID NO: 138940 - DNA, 15 bp, Homo sapiens
agttgagtgttaagc

SEQ ID NO: 138941 - DNA, 15 bp, Homo sapiens
aagttgagtgttaag

SEQ ID NO: 138942 - DNA, 15 bp, Homo sapiens
caagttgagtgttaa

SEQ ID NO: 138943 - DNA, 15 bp, Homo sapiens
ccaagttgagtgtta

SEQ ID NO: 138944 - DNA, 15 bp, Homo sapiens
gccaagttgagtgtt

SEQ ID NO: 138945 - DNA, 15 bp, Homo sapiens
agccaagttgagtgt

SEQ ID NO: 138946 - DNA, 15 bp, Homo sapiens
gagccaagttgagtg

SEQ ID NO: 138947 - DNA, 15 bp, Homo sapiens
agagccaagttgagt

SEQ ID NO: 138948 - DNA, 15 bp, Homo sapiens
gagagccaagttgag

SEQ ID NO: 138949 - DNA, 15 bp, Homo sapiens
agagagccaagttga

SEQ ID NO: 138950 - DNA, 15 bp, Homo sapiens
gagagagccaagttg

SEQ ID NO: 138951 - DNA, 15 bp, Homo sapiens
tgagagagccaagtt

SEQ ID NO: 138952 - DNA, 15 bp, Homo sapiens
ctgagagagccaagt

SEQ ID NO: 138953 - DNA, 15 bp, Homo sapiens
tctgagagagccaag

SEQ ID NO: 138954 - DNA, 15 bp, Homo sapiens
ctctgagagagccaa

SEQ ID NO: 138955 - DNA, 15 bp, Homo sapiens
gctctgagagagcca

SEQ ID NO: 138956 - DNA, 15 bp, Homo sapiens
ggctctgagagagcc

SEQ ID NO: 138957 - DNA, 15 bp, Homo sapiens
tggctctgagagagc

SEQ ID NO: 138958 - DNA, 15 bp, Homo sapiens
atggctctgagagag

SEQ ID NO: 138959 - DNA, 15 bp, Homo sapiens
gatggctctgagaga

SEQ ID NO: 138960 - DNA, 15 bp, Homo sapiens
agatggctctgagag

SEQ ID NO: 138961 - DNA, 15 bp, Homo sapiens
gagatggctctgaga

SEQ ID NO: 138962 - DNA, 15 bp, Homo sapiens
agagatggctctgag

SEQ ID NO: 138963 - DNA, 15 bp, Homo sapiens
gagagatggctctga

SEQ ID NO: 138964 - DNA, 15 bp, Homo sapiens
agagagatggctctg

SEQ ID NO: 138965 - DNA, 15 bp, Homo sapiens
gagagagatggctct

SEQ ID NO: 138966 - DNA, 15 bp, Homo sapiens
tgagagagatggctc

SEQ ID NO: 138967 - DNA, 15 bp, Homo sapiens
atgagagagatggct

SEQ ID NO: 138968 - DNA, 15 bp, Homo sapiens
gatgagagagatggc

SEQ ID NO: 138969 - DNA, 15 bp, Homo sapiens
agatgagagagatgg

SEQ ID NO: 138970 - DNA, 15 bp, Homo sapiens
cagatgagagagatg

SEQ ID NO: 138971 - DNA, 15 bp, Homo sapiens
tcagatgagagagat

SEQ ID NO: 138972 - DNA, 15 bp, Homo sapiens
atcagatgagagaga

SEQ ID NO: 138973 - DNA, 15 bp, Homo sapiens
catcagatgagagag

SEQ ID NO: 138974 - DNA, 15 bp, Homo sapiens
tcatcagatgagaga

SEQ ID NO: 138975 - DNA, 15 bp, Homo sapiens
atcatcagatgagag

SEQ ID NO: 138976 - DNA, 15 bp, Homo sapiens
catcatcagatgaga

SEQ ID NO: 138977 - DNA, 15 bp, Homo sapiens
ccatcatcagatgag

SEQ ID NO: 138978 - DNA, 15 bp, Homo sapiens
accatcatcagatga

SEQ ID NO: 138979 - DNA, 15 bp, Homo sapiens
gaccatcatcagatg

SEQ ID NO: 138980 - DNA, 15 bp, Homo sapiens
agaccatcatcagat

SEQ ID NO: 138981 - DNA, 15 bp, Homo sapiens
aagaccatcatcaga

SEQ ID NO: 138982 - DNA, 15 bp, Homo sapiens
taagaccatcatcag

SEQ ID NO: 138983 - DNA, 15 bp, Homo sapiens
ctaagaccatcatca

SEQ ID NO: 138984 - DNA, 15 bp, Homo sapiens
tctaagaccatcatc

SEQ ID NO: 138985 - DNA, 15 bp, Homo sapiens
ttctaagaccatcat

SEQ ID NO: 138986 - DNA, 15 bp, Homo sapiens
attctaagaccatca

SEQ ID NO: 138987 - DNA, 15 bp, Homo sapiens
aattctaagaccatc

SEQ ID NO: 138988 - DNA, 15 bp, Homo sapiens
gaattctaagaccat

SEQ ID NO: 138989 - DNA, 15 bp, Homo sapiens
ggaattctaagacca

SEQ ID NO: 138990 - DNA, 15 bp, Homo sapiens
aggaattctaagacc

SEQ ID NO: 138991 - DNA, 15 bp, Homo sapiens
caggaattctaagac

SEQ ID NO: 138992 - DNA, 15 bp, Homo sapiens
ccaggaattctaaga

SEQ ID NO: 138993 - DNA, 15 bp, Homo sapiens
accaggaattctaag

SEQ ID NO: 138994 - DNA, 15 bp, Homo sapiens
caccaggaattctaa

SEQ ID NO: 138995 - DNA, 15 bp, Homo sapiens
ccaccaggaattcta

SEQ ID NO: 138996 - DNA, 15 bp, Homo sapiens
gccaccaggaattct

SEQ ID NO: 138997 - DNA, 15 bp, Homo sapiens
agccaccaggaattc

SEQ ID NO: 138998 - DNA, 15 bp, Homo sapiens
gagccaccaggaatt

SEQ ID NO: 138999 - DNA, 15 bp, Homo sapiens
cgagccaccaggaat

SEQ ID NO: 139000 - DNA, 15 bp, Homo sapiens
ccgagccaccaggaa

SEQ ID NO: 139001 - DNA, 15 bp, Homo sapiens
tccgagccaccagga

SEQ ID NO: 139002 - DNA, 15 bp, Homo sapiens
ttccgagccaccagg

SEQ ID NO: 139003 - DNA, 15 bp, Homo sapiens
attccgagccaccag

SEQ ID NO: 139004 - DNA, 15 bp, Homo sapiens
tattccgagccacca

SEQ ID NO: 139005 - DNA, 15 bp, Homo sapiens
atattccgagccacc

SEQ ID NO: 139006 - DNA, 15 bp, Homo sapiens
tatattccgagccac

SEQ ID NO: 139007 - DNA, 15 bp, Homo sapiens
gtatattccgagcca

SEQ ID NO: 139008 - DNA, 15 bp, Homo sapiens
cgtatattccgagcc

SEQ ID NO: 139009 - DNA, 15 bp, Homo sapiens
acgtatattccgagc

SEQ ID NO: 139010 - DNA, 15 bp, Homo sapiens
gacgtatattccgag

SEQ ID NO: 139011 - DNA, 15 bp, Homo sapiens
agacgtatattccga

SEQ ID NO: 139012 - DNA, 15 bp, Homo sapiens
aagacgtatattccg

SEQ ID NO: 139013 - DNA, 15 bp, Homo sapiens
aaagacgtatattcc

SEQ ID NO: 139014 - DNA, 15 bp, Homo sapiens
aaaagacgtatattc

SEQ ID NO: 139015 - DNA, 15 bp, Homo sapiens
taaaagacgtatatt

SEQ ID NO: 139016 - DNA, 15 bp, Homo sapiens
ctaaaagacgtatat

SEQ ID NO: 139017 - DNA, 15 bp, Homo sapiens
tctaaaagacgtata

SEQ ID NO: 139018 - DNA, 15 bp, Homo sapiens
ctctaaaagacgtat

SEQ ID NO: 139019 - DNA, 15 bp, Homo sapiens
cctctaaaagacgta

SEQ ID NO: 139020 - DNA, 15 bp, Homo sapiens
gcctctaaaagacgt

SEQ ID NO: 139021 - DNA, 15 bp, Homo sapiens
tgcctctaaaagacg

SEQ ID NO: 139022 - DNA, 15 bp, Homo sapiens
ctgcctctaaaagac

SEQ ID NO: 139023 - DNA, 15 bp, Homo sapiens
gctgcctctaaaaga

SEQ ID NO: 139024 - DNA, 15 bp, Homo sapiens
tgctgcctctaaaag

SEQ ID NO: 139025 - DNA, 15 bp, Homo sapiens
ttgctgcctctaaaa

SEQ ID NO: 139026 - DNA, 15 bp, Homo sapiens
tttgctgcctctaaa

SEQ ID NO: 139027 - DNA, 15 bp, Homo sapiens
ttttgctgcctctaa

SEQ ID NO: 139028 - DNA, 15 bp, Homo sapiens
attttgctgcctcta

SEQ ID NO: 139029 - DNA, 15 bp, Homo sapiens
cattttgctgcctct

SEQ ID NO: 139030 - DNA, 15 bp, Homo sapiens
tcattttgctgcctc

SEQ ID NO: 139031 - DNA, 15 bp, Homo sapiens
atcattttgctgcct

SEQ ID NO: 139032 - DNA, 15 bp, Homo sapiens
aatcattttgctgcc

SEQ ID NO: 139033 - DNA, 15 bp, Homo sapiens
gaatcattttgctgc

SEQ ID NO: 139034 - DNA, 15 bp, Homo sapiens
agaatcattttgctg

SEQ ID NO: 139035 - DNA, 15 bp, Homo sapiens
cagaatcattttgct

SEQ ID NO: 139036 - DNA, 15 bp, Homo sapiens
tcagaatcattttgc

SEQ ID NO: 139037 - DNA, 15 bp, Homo sapiens
gtcagaatcattttg

SEQ ID NO: 139038 - DNA, 15 bp, Homo sapiens
ggtcagaatcatttt

SEQ ID NO: 139039 - DNA, 15 bp, Homo sapiens
gggtcagaatcattt

SEQ ID NO: 139040 - DNA, 15 bp, Homo sapiens
agggtcagaatcatt

SEQ ID NO: 139041 - DNA, 15 bp, Homo sapiens
aagggtcagaatcat

SEQ ID NO: 139042 - DNA, 15 bp, Homo sapiens
aaagggtcagaatca

SEQ ID NO: 139043 - DNA, 15 bp, Homo sapiens
aaaagggtcagaatc

SEQ ID NO: 139044 - DNA, 15 bp, Homo sapiens
caaaagggtcagaat

SEQ ID NO: 139045 - DNA, 15 bp, Homo sapiens
tcaaaagggtcagaa

SEQ ID NO: 139046 - DNA, 15 bp, Homo sapiens
ctcaaaagggtcaga

SEQ ID NO: 139047 - DNA, 15 bp, Homo sapiens
gctcaaaagggtcag

SEQ ID NO: 139048 - DNA, 15 bp, Homo sapiens
ggctcaaaagggtca

SEQ ID NO: 139049 - DNA, 15 bp, Homo sapiens
tggctcaaaagggtc

SEQ ID NO: 139050 - DNA, 15 bp, Homo sapiens
ctggctcaaaagggt

SEQ ID NO: 139051 - DNA, 15 bp, Homo sapiens
actggctcaaaaggg

SEQ ID NO: 139052 - DNA, 15 bp, Homo sapiens
aactggctcaaaagg

SEQ ID NO: 139053 - DNA, 15 bp, Homo sapiens
aaactggctcaaaag

SEQ ID NO: 139054 - DNA, 15 bp, Homo sapiens
gaaactggctcaaaa

SEQ ID NO: 139055 - DNA, 15 bp, Homo sapiens
tgaaactggctcaaa

SEQ ID NO: 139056 - DNA, 15 bp, Homo sapiens
ctgaaactggctcaa

SEQ ID NO: 139057 - DNA, 15 bp, Homo sapiens
actgaaactggctca

SEQ ID NO: 139058 - DNA, 15 bp, Homo sapiens
aactgaaactggctc

SEQ ID NO: 139059 - DNA, 15 bp, Homo sapiens
aaactgaaactggct

SEQ ID NO: 139060 - DNA, 15 bp, Homo sapiens
gaaactgaaactggc

SEQ ID NO: 139061 - DNA, 15 bp, Homo sapiens
tgaaactgaaactgg

SEQ ID NO: 139062 - DNA, 15 bp, Homo sapiens
atgaaactgaaactg

SEQ ID NO: 139063 - DNA, 15 bp, Homo sapiens
catgaaactgaaact

SEQ ID NO: 139064 - DNA, 15 bp, Homo sapiens
ccatgaaactgaaac

SEQ ID NO: 139065 - DNA, 15 bp, Homo sapiens
gccatgaaactgaaa

SEQ ID NO: 139066 - DNA, 15 bp, Homo sapiens
ggccatgaaactgaa

SEQ ID NO: 139067 - DNA, 15 bp, Homo sapiens
tggccatgaaactga

SEQ ID NO: 139068 - DNA, 15 bp, Homo sapiens
atggccatgaaactg

SEQ ID NO: 139069 - DNA, 15 bp, Homo sapiens
tatggccatgaaact

SEQ ID NO: 139070 - DNA, 15 bp, Homo sapiens
ttatggccatgaaac

SEQ ID NO: 139071 - DNA, 15 bp, Homo sapiens
tttatggccatgaaa

SEQ ID NO: 139072 - DNA, 15 bp, Homo sapiens
gtttatggccatgaa

SEQ ID NO: 139073 - DNA, 15 bp, Homo sapiens
tgtttatggccatga

SEQ ID NO: 139074 - DNA, 15 bp, Homo sapiens
ctgtttatggccatg

SEQ ID NO: 139075 - DNA, 15 bp, Homo sapiens
gctgtttatggccat

SEQ ID NO: 139076 - DNA, 15 bp, Homo sapiens
ggctgtttatggcca

SEQ ID NO: 139077 - DNA, 15 bp, Homo sapiens
aggctgtttatggcc

SEQ ID NO: 139078 - DNA, 15 bp, Homo sapiens
aaggctgtttatggc

SEQ ID NO: 139079 - DNA, 15 bp, Homo sapiens
caaggctgtttatgg

SEQ ID NO: 139080 - DNA, 15 bp, Homo sapiens
acaaggctgtttatg

SEQ ID NO: 139081 - DNA, 15 bp, Homo sapiens
cacaaggctgtttat

SEQ ID NO: 139082 - DNA, 15 bp, Homo sapiens
tcacaaggctgttta

SEQ ID NO: 139083 - DNA, 15 bp, Homo sapiens
ttcacaaggctgttt

SEQ ID NO: 139084 - DNA, 15 bp, Homo sapiens
gttcacaaggctgtt

SEQ ID NO: 139085 - DNA, 15 bp, Homo sapiens
ggttcacaaggctgt

SEQ ID NO: 139086 - DNA, 15 bp, Homo sapiens
aggttcacaaggctg

SEQ ID NO: 139087 - DNA, 15 bp, Homo sapiens
gaggttcacaaggct

SEQ ID NO: 139088 - DNA, 15 bp, Homo sapiens
agaggttcacaaggc

SEQ ID NO: 139089 - DNA, 15 bp, Homo sapiens
tagaggttcacaagg

SEQ ID NO: 139090 - DNA, 15 bp, Homo sapiens
atagaggttcacaag

SEQ ID NO: 139091 - DNA, 15 bp, Homo sapiens
catagaggttcacaa

SEQ ID NO: 139092 - DNA, 15 bp, Homo sapiens
gcatagaggttcaca

SEQ ID NO: 139093 - DNA, 15 bp, Homo sapiens
ggcatagaggttcac

SEQ ID NO: 139094 - DNA, 15 bp, Homo sapiens
aggcatagaggttca

SEQ ID NO: 139095 - DNA, 15 bp, Homo sapiens
gaggcatagaggttc

SEQ ID NO: 139096 - DNA, 15 bp, Homo sapiens
agaggcatagaggtt

SEQ ID NO: 139097 - DNA, 15 bp, Homo sapiens
cagaggcatagaggt

SEQ ID NO: 139098 - DNA, 15 bp, Homo sapiens
tcagaggcatagagg

SEQ ID NO: 139099 - DNA, 15 bp, Homo sapiens
atcagaggcatagag

SEQ ID NO: 139100 - DNA, 15 bp, Homo sapiens
tatcagaggcataga

SEQ ID NO: 139101 - DNA, 15 bp, Homo sapiens
ttatcagaggcatag

SEQ ID NO: 139102 - DNA, 15 bp, Homo sapiens
gttatcagaggcata

SEQ ID NO: 139103 - DNA, 15 bp, Homo sapiens
ggttatcagaggcat

SEQ ID NO: 139104 - DNA, 15 bp, Homo sapiens
tggttatcagaggca

SEQ ID NO: 139105 - DNA, 15 bp, Homo sapiens
ctggttatcagaggc

SEQ ID NO: 139106 - DNA, 15 bp, Homo sapiens
actggttatcagagg

SEQ ID NO: 139107 - DNA, 15 bp, Homo sapiens
aactggttatcagag

SEQ ID NO: 139108 - DNA, 15 bp, Homo sapiens
taactggttatcaga

SEQ ID NO: 139109 - DNA, 15 bp, Homo sapiens
ataactggttatcag

SEQ ID NO: 139110 - DNA, 15 bp, Homo sapiens
aataactggttatca

SEQ ID NO: 139111 - DNA, 15 bp, Homo sapiens
gaataactggttatc

SEQ ID NO: 139112 - DNA, 15 bp, Homo sapiens
agaataactggttat

SEQ ID NO: 139113 - DNA, 15 bp, Homo sapiens
cagaataactggtta

SEQ ID NO: 139114 - DNA, 15 bp, Homo sapiens
tcagaataactggtt

SEQ ID NO: 139115 - DNA, 15 bp, Homo sapiens
ttcagaataactggt

SEQ ID NO: 139116 - DNA, 15 bp, Homo sapiens
tttcagaataactgg

SEQ ID NO: 139117 - DNA, 15 bp, Homo sapiens
atttcagaataactg

SEQ ID NO: 139118 - DNA, 15 bp, Homo sapiens
tatttcagaataact

SEQ ID NO: 139119 - DNA, 15 bp, Homo sapiens
ctatttcagaataac

SEQ ID NO: 139120 - DNA, 15 bp, Homo sapiens
actatttcagaataa

SEQ ID NO: 139121 - DNA, 15 bp, Homo sapiens
gactatttcagaata

SEQ ID NO: 139122 - DNA, 15 bp, Homo sapiens
tgactatttcagaat

SEQ ID NO: 139123 - DNA, 15 bp, Homo sapiens
atgactatttcagaa

SEQ ID NO: 139124 - DNA, 15 bp, Homo sapiens
aatgactatttcaga

SEQ ID NO: 139125 - DNA, 15 bp, Homo sapiens
taatgactatttcag

SEQ ID NO: 139126 - DNA, 15 bp, Homo sapiens
gtaatgactatttca

SEQ ID NO: 139127 - DNA, 15 bp, Homo sapiens
ggtaatgactatttc

SEQ ID NO: 139128 - DNA, 15 bp, Homo sapiens
tggtaatgactattt

SEQ ID NO: 139129 - DNA, 15 bp, Homo sapiens
atggtaatgactatt

SEQ ID NO: 139130 - DNA, 15 bp, Homo sapiens
catggtaatgactat

SEQ ID NO: 139131 - DNA, 15 bp, Homo sapiens
acatggtaatgacta

SEQ ID NO: 139132 - DNA, 15 bp, Homo sapiens
cacatggtaatgact

SEQ ID NO: 139133 - DNA, 15 bp, Homo sapiens
gcacatggtaatgac

SEQ ID NO: 139134 - DNA, 15 bp, Homo sapiens
agcacatggtaatga

SEQ ID NO: 139135 - DNA, 15 bp, Homo sapiens
tagcacatggtaatg

SEQ ID NO: 139136 - DNA, 15 bp, Homo sapiens
ctagcacatggtaat

SEQ ID NO: 139137 - DNA, 15 bp, Homo sapiens
actagcacatggtaa

SEQ ID NO: 139138 - DNA, 15 bp, Homo sapiens
gactagcacatggta

SEQ ID NO: 139139 - DNA, 15 bp, Homo sapiens
agactagcacatggt

SEQ ID NO: 139140 - DNA, 15 bp, Homo sapiens
aagactagcacatgg

SEQ ID NO: 139141 - DNA, 15 bp, Homo sapiens
caagactagcacatg

SEQ ID NO: 139142 - DNA, 15 bp, Homo sapiens
tcaagactagcacat

SEQ ID NO: 139143 - DNA, 15 bp, Homo sapiens
atcaagactagcaca

SEQ ID NO: 139144 - DNA, 15 bp, Homo sapiens
aatcaagactagcac

SEQ ID NO: 139145 - DNA, 15 bp, Homo sapiens
caatcaagactagca

SEQ ID NO: 139146 - DNA, 15 bp, Homo sapiens
acaatcaagactagc

SEQ ID NO: 139147 - DNA, 15 bp, Homo sapiens
aacaatcaagactag

SEQ ID NO: 139148 - DNA, 15 bp, Homo sapiens
gaacaatcaagacta

SEQ ID NO: 139149 - DNA, 15 bp, Homo sapiens
tgaacaatcaagact

SEQ ID NO: 139150 - DNA, 15 bp, Homo sapiens
atgaacaatcaagac

SEQ ID NO: 139151 - DNA, 15 bp, Homo sapiens
tatgaacaatcaaga

SEQ ID NO: 139152 - DNA, 15 bp, Homo sapiens
ttatgaacaatcaag

SEQ ID NO: 139153 - DNA, 15 bp, Homo sapiens
cttatgaacaatcaa

SEQ ID NO: 139154 - DNA, 15 bp, Homo sapiens
ccttatgaacaatca

SEQ ID NO: 139155 - DNA, 15 bp, Homo sapiens
gccttatgaacaatc

SEQ ID NO: 139156 - DNA, 15 bp, Homo sapiens
agccttatgaacaat

SEQ ID NO: 139157 - DNA, 15 bp, Homo sapiens
aagccttatgaacaa

SEQ ID NO: 139158 - DNA, 15 bp, Homo sapiens
taagccttatgaaca

SEQ ID NO: 139159 - DNA, 15 bp, Homo sapiens
ttaagccttatgaac

SEQ ID NO: 139160 - DNA, 15 bp, Homo sapiens
attaagccttatgaa

SEQ ID NO: 139161 - DNA, 15 bp, Homo sapiens
cattaagccttatga

SEQ ID NO: 139162 - DNA, 15 bp, Homo sapiens
acattaagccttatg

SEQ ID NO: 139163 - DNA, 15 bp, Homo sapiens
tacattaagccttat

SEQ ID NO: 139164 - DNA, 15 bp, Homo sapiens
gtacattaagcctta

SEQ ID NO: 139165 - DNA, 15 bp, Homo sapiens
ggtacattaagcctt

SEQ ID NO: 139166 - DNA, 15 bp, Homo sapiens
tggtacattaagcct

SEQ ID NO: 139167 - DNA, 15 bp, Homo sapiens
ctggtacattaagcc

SEQ ID NO: 139168 - DNA, 15 bp, Homo sapiens
tctggtacattaagc

SEQ ID NO: 139169 - DNA, 15 bp, Homo sapiens
ttctggtacattaag

SEQ ID NO: 139170 - DNA, 15 bp, Homo sapiens
attctggtacattaa

SEQ ID NO: 139171 - DNA, 15 bp, Homo sapiens
aattctggtacatta

SEQ ID NO: 139172 - DNA, 15 bp, Homo sapiens
aaattctggtacatt

SEQ ID NO: 139173 - DNA, 15 bp, Homo sapiens
taaattctggtacat

SEQ ID NO: 139174 - DNA, 15 bp, Homo sapiens
ttaaattctggtaca

SEQ ID NO: 139175 - DNA, 15 bp, Homo sapiens
tttaaattctggtac

SEQ ID NO: 139176 - DNA, 15 bp, Homo sapiens
atttaaattctggta

SEQ ID NO: 139177 - DNA, 15 bp, Homo sapiens
gatttaaattctggt

SEQ ID NO: 139178 - DNA, 15 bp, Homo sapiens
agatttaaattctgg

SEQ ID NO: 139179 - DNA, 15 bp, Homo sapiens
aagatttaaattctg

SEQ ID NO: 139180 - DNA, 15 bp, Homo sapiens
caagatttaaattct

SEQ ID NO: 139181 - DNA, 15 bp, Homo sapiens
tcaagatttaaattc

SEQ ID NO: 139182 - DNA, 15 bp, Homo sapiens
ctcaagatttaaatt

SEQ ID NO: 139183 - DNA, 15 bp, Homo sapiens
gctcaagatttaaat

SEQ ID NO: 139184 - DNA, 15 bp, Homo sapiens
tgctcaagatttaaa

SEQ ID NO: 139185 - DNA, 15 bp, Homo sapiens
atgctcaagatttaa

SEQ ID NO: 139186 - DNA, 15 bp, Homo sapiens
gatgctcaagattta

SEQ ID NO: 139187 - DNA, 15 bp, Homo sapiens
agatgctcaagattt

SEQ ID NO: 139188 - DNA, 15 bp, Homo sapiens
aagatgctcaagatt

SEQ ID NO: 139189 - DNA, 15 bp, Homo sapiens
caagatgctcaagat

SEQ ID NO: 139190 - DNA, 15 bp, Homo sapiens
acaagatgctcaaga

SEQ ID NO: 139191 - DNA, 15 bp, Homo sapiens
aacaagatgctcaag

SEQ ID NO: 139192 - DNA, 15 bp, Homo sapiens
aaacaagatgctcaa

SEQ ID NO: 139193 - DNA, 15 bp, Homo sapiens
aaaacaagatgctca

SEQ ID NO: 139194 - DNA, 15 bp, Homo sapiens
gaaaacaagatgctc

SEQ ID NO: 139195 - DNA, 15 bp, Homo sapiens
agaaaacaagatgct

SEQ ID NO: 139196 - DNA, 15 bp, Homo sapiens
gagaaaacaagatgc

SEQ ID NO: 139197 - DNA, 15 bp, Homo sapiens
agagaaaacaagatg

SEQ ID NO: 139198 - DNA, 15 bp, Homo sapiens
cagagaaaacaagat

SEQ ID NO: 139199 - DNA, 15 bp, Homo sapiens
acagagaaaacaaga

SEQ ID NO: 139200 - DNA, 15 bp, Homo sapiens
aacagagaaaacaag

SEQ ID NO: 139201 - DNA, 15 bp, Homo sapiens
aaacagagaaaacaa

SEQ ID NO: 139202 - DNA, 15 bp, Homo sapiens
taaacagagaaaaca

SEQ ID NO: 139203 - DNA, 15 bp, Homo sapiens
ataaacagagaaaac

SEQ ID NO: 139204 - DNA, 15 bp, Homo sapiens
gataaacagagaaaa

SEQ ID NO: 139205 - DNA, 15 bp, Homo sapiens
agataaacagagaaa

SEQ ID NO: 139206 - DNA, 15 bp, Homo sapiens
cagataaacagagaa

SEQ ID NO: 139207 - DNA, 15 bp, Homo sapiens
tcagataaacagaga

SEQ ID NO: 139208 - DNA, 15 bp, Homo sapiens
ctcagataaacagag

SEQ ID NO: 139209 - DNA, 15 bp, Homo sapiens
cctcagataaacaga

SEQ ID NO: 139210 - DNA, 15 bp, Homo sapiens
acctcagataaacag

SEQ ID NO: 139211 - DNA, 15 bp, Homo sapiens
gacctcagataaaca

SEQ ID NO: 139212 - DNA, 15 bp, Homo sapiens
tgacctcagataaac

SEQ ID NO: 139213 - DNA, 15 bp, Homo sapiens
atgacctcagataaa

SEQ ID NO: 139214 - DNA, 15 bp, Homo sapiens
aatgacctcagataa

SEQ ID NO: 139215 - DNA, 15 bp, Homo sapiens
aaatgacctcagata

SEQ ID NO: 139216 - DNA, 15 bp, Homo sapiens
taaatgacctcagat

SEQ ID NO: 139217 - DNA, 15 bp, Homo sapiens
ttaaatgacctcaga

SEQ ID NO: 139218 - DNA, 15 bp, Homo sapiens
tttaaatgacctcag

SEQ ID NO: 139219 - DNA, 15 bp, Homo sapiens
ttttaaatgacctca

SEQ ID NO: 139220 - DNA, 15 bp, Homo sapiens
tttttaaatgacctc

SEQ ID NO: 139221 - DNA, 15 bp, Homo sapiens
ctttttaaatgacct

SEQ ID NO: 139222 - DNA, 15 bp, Homo sapiens
actttttaaatgacc

SEQ ID NO: 139223 - DNA, 15 bp, Homo sapiens
aactttttaaatgac

SEQ ID NO: 139224 - DNA, 15 bp, Homo sapiens
aaactttttaaatga

SEQ ID NO: 139225 - DNA, 15 bp, Homo sapiens
aaaactttttaaatg

SEQ ID NO: 139226 - DNA, 15 bp, Homo sapiens
taaaactttttaaat

SEQ ID NO: 139227 - DNA, 15 bp, Homo sapiens
ataaaactttttaaa

SEQ ID NO: 139228 - DNA, 15 bp, Homo sapiens
aataaaactttttaa

SEQ ID NO: 139229 - DNA, 15 bp, Homo sapiens
aaataaaacttttta

SEQ ID NO: 139230 - DNA, 15 bp, Homo sapiens
gaaataaaacttttt

SEQ ID NO: 139231 - DNA, 15 bp, Homo sapiens
tgaaataaaactttt

SEQ ID NO: 139232 - DNA, 15 bp, Homo sapiens
ttgaaataaaacttt

SEQ ID NO: 139233 - DNA, 15 bp, Homo sapiens
attgaaataaaactt

SEQ ID NO: 139234 - DNA, 15 bp, Homo sapiens
aattgaaataaaact

SEQ ID NO: 139235 - DNA, 15 bp, Homo sapiens
aaattgaaataaaac

SEQ ID NO: 139236 - DNA, 15 bp, Homo sapiens
gaaattgaaataaaa

SEQ ID NO: 139237 - DNA, 15 bp, Homo sapiens
agaaattgaaataaa

SEQ ID NO: 139238 - DNA, 15 bp, Homo sapiens
gagaaattgaaataa

SEQ ID NO: 139239 - DNA, 15 bp, Homo sapiens
agagaaattgaaata

SEQ ID NO: 139240 - DNA, 15 bp, Homo sapiens
gagagaaattgaaat

SEQ ID NO: 139241 - DNA, 15 bp, Homo sapiens
agagagaaattgaaa

SEQ ID NO: 139242 - DNA, 15 bp, Homo sapiens
tagagagaaattgaa

SEQ ID NO: 139243 - DNA, 15 bp, Homo sapiens
atagagagaaattga

SEQ ID NO: 139244 - DNA, 15 bp, Homo sapiens
catagagagaaattg

SEQ ID NO: 139245 - DNA, 15 bp, Homo sapiens
acatagagagaaatt

SEQ ID NO: 139246 - DNA, 15 bp, Homo sapiens
tacatagagagaaat

SEQ ID NO: 139247 - DNA, 15 bp, Homo sapiens
gtacatagagagaaa

SEQ ID NO: 139248 - DNA, 15 bp, Homo sapiens
ggtacatagagagaa

SEQ ID NO: 139249 - DNA, 15 bp, Homo sapiens
tggtacatagagaga

SEQ ID NO: 139250 - DNA, 15 bp, Homo sapiens
atggtacatagagag

SEQ ID NO: 139251 - DNA, 15 bp, Homo sapiens
tatggtacatagaga

SEQ ID NO: 139252 - DNA, 15 bp, Homo sapiens
ttatggtacatagag

SEQ ID NO: 139253 - DNA, 15 bp, Homo sapiens
attatggtacataga

SEQ ID NO: 139254 - DNA, 15 bp, Homo sapiens
cattatggtacatag

SEQ ID NO: 139255 - DNA, 15 bp, Homo sapiens
tcattatggtacata

SEQ ID NO: 139256 - DNA, 15 bp, Homo sapiens
ttcattatggtacat

SEQ ID NO: 139257 - DNA, 15 bp, Homo sapiens
tttcattatggtaca

SEQ ID NO: 139258 - DNA, 15 bp, Homo sapiens
gtttcattatggtac

SEQ ID NO: 139259 - DNA, 15 bp, Homo sapiens
agtttcattatggta

SEQ ID NO: 139260 - DNA, 15 bp, Homo sapiens
cagtttcattatggt

SEQ ID NO: 139261 - DNA, 15 bp, Homo sapiens
ccagtttcattatgg

SEQ ID NO: 139262 - DNA, 15 bp, Homo sapiens
cccagtttcattatg

SEQ ID NO: 139263 - DNA, 15 bp, Homo sapiens
tcccagtttcattat

SEQ ID NO: 139264 - DNA, 15 bp, Homo sapiens
ttcccagtttcatta

SEQ ID NO: 139265 - DNA, 15 bp, Homo sapiens
tttcccagtttcatt

SEQ ID NO: 139266 - DNA, 15 bp, Homo sapiens
ttttcccagtttcat

SEQ ID NO: 139267 - DNA, 15 bp, Homo sapiens
attttcccagtttca

SEQ ID NO: 139268 - DNA, 15 bp, Homo sapiens
gattttcccagtttc

SEQ ID NO: 139269 - DNA, 15 bp, Homo sapiens
ggattttcccagttt

SEQ ID NO: 139270 - DNA, 15 bp, Homo sapiens
tggattttcccagtt

SEQ ID NO: 139271 - DNA, 15 bp, Homo sapiens
atggattttcccagt

SEQ ID NO: 139272 - DNA, 15 bp, Homo sapiens
aatggattttcccag

SEQ ID NO: 139273 - DNA, 15 bp, Homo sapiens
aaatggattttccca

SEQ ID NO: 139274 - DNA, 15 bp, Homo sapiens
aaaatggattttccc

SEQ ID NO: 139275 - DNA, 15 bp, Homo sapiens
taaaatggattttcc

SEQ ID NO: 139276 - DNA, 15 bp, Homo sapiens
ataaaatggattttc

SEQ ID NO: 139277 - DNA, 15 bp, Homo sapiens
aataaaatggatttt

SEQ ID NO: 139278 - DNA, 15 bp, Homo sapiens
aaataaaatggattt

SEQ ID NO: 139279 - DNA, 15 bp, Homo sapiens
aaaataaaatggatt

SEQ ID NO: 139280 - DNA, 15 bp, Homo sapiens
taaaataaaatggat

SEQ ID NO: 139281 - DNA, 15 bp, Homo sapiens
ttaaaataaaatgga

SEQ ID NO: 139282 - DNA, 15 bp, Homo sapiens
attaaaataaaatgg

SEQ ID NO: 139283 - DNA, 15 bp, Homo sapiens
aattaaaataaaatg

SEQ ID NO: 139284 - DNA, 15 bp, Homo sapiens
aaattaaaataaaat

SEQ ID NO: 139285 - DNA, 15 bp, Homo sapiens
aaaattaaaataaaa

SEQ ID NO: 139286 - DNA, 15 bp, Homo sapiens
aaaaattaaaataaa

SEQ ID NO: 139287 - DNA, 15 bp, Homo sapiens
aaaaaattaaaataa

SEQ ID NO: 139288 - DNA, 15 bp, Homo sapiens
aaaaaaattaaaata

SEQ ID NO: 139289 - DNA, 15 bp, Homo sapiens
aaaaaaaattaaaat

SEQ ID NO: 139290 - DNA, 15 bp, Homo sapiens
taaaaaaaattaaaa

SEQ ID NO: 139291 - DNA, 15 bp, Homo sapiens
ctaaaaaaaattaaa

SEQ ID NO: 139292 - DNA, 15 bp, Homo sapiens
actaaaaaaaattaa

SEQ ID NO: 139293 - DNA, 15 bp, Homo sapiens
tactaaaaaaaatta

SEQ ID NO: 139294 - DNA, 15 bp, Homo sapiens
atactaaaaaaaatt

SEQ ID NO: 139295 - DNA, 15 bp, Homo sapiens
tatactaaaaaaaat

SEQ ID NO: 139296 - DNA, 15 bp, Homo sapiens
gtatactaaaaaaaa

SEQ ID NO: 139297 - DNA, 15 bp, Homo sapiens
agtatactaaaaaaa

SEQ ID NO: 139298 - DNA, 15 bp, Homo sapiens
tagtatactaaaaaa

SEQ ID NO: 139299 - DNA, 15 bp, Homo sapiens
ttagtatactaaaaa

SEQ ID NO: 139300 - DNA, 15 bp, Homo sapiens
cttagtatactaaaa

SEQ ID NO: 139301 - DNA, 15 bp, Homo sapiens
ccttagtatactaaa

SEQ ID NO: 139302 - DNA, 15 bp, Homo sapiens
cccttagtatactaa

SEQ ID NO: 139303 - DNA, 15 bp, Homo sapiens
ccccttagtatacta

SEQ ID NO: 139304 - DNA, 15 bp, Homo sapiens
accccttagtatact

SEQ ID NO: 139305 - DNA, 15 bp, Homo sapiens
aaccccttagtatac

SEQ ID NO: 139306 - DNA, 15 bp, Homo sapiens
aaaccccttagtata

SEQ ID NO: 139307 - DNA, 15 bp, Homo sapiens
aaaaccccttagtat

SEQ ID NO: 139308 - DNA, 15 bp, Homo sapiens
gaaaaccccttagta

SEQ ID NO: 139309 - DNA, 15 bp, Homo sapiens
agaaaaccccttagt

SEQ ID NO: 139310 - DNA, 15 bp, Homo sapiens
cagaaaaccccttag

SEQ ID NO: 139311 - DNA, 15 bp, Homo sapiens
acagaaaacccctta

SEQ ID NO: 139312 - DNA, 15 bp, Homo sapiens
aacagaaaacccctt

SEQ ID NO: 139313 - DNA, 15 bp, Homo sapiens
taacagaaaacccct

SEQ ID NO: 139314 - DNA, 15 bp, Homo sapiens
ctaacagaaaacccc

SEQ ID NO: 139315 - DNA, 15 bp, Homo sapiens
actaacagaaaaccc

SEQ ID NO: 139316 - DNA, 15 bp, Homo sapiens
cactaacagaaaacc

SEQ ID NO: 139317 - DNA, 15 bp, Homo sapiens
tcactaacagaaaac

SEQ ID NO: 139318 - DNA, 15 bp, Homo sapiens
ctcactaacagaaaa

SEQ ID NO: 139319 - DNA, 15 bp, Homo sapiens
tctcactaacagaaa

SEQ ID NO: 139320 - DNA, 15 bp, Homo sapiens
ctctcactaacagaa

SEQ ID NO: 139321 - DNA, 15 bp, Homo sapiens
tctctcactaacaga

SEQ ID NO: 139322 - DNA, 15 bp, Homo sapiens
ctctctcactaacag

SEQ ID NO: 139323 - DNA, 15 bp, Homo sapiens
cctctctcactaaca

SEQ ID NO: 139324 - DNA, 15 bp, Homo sapiens
gcctctctcactaac

SEQ ID NO: 139325 - DNA, 15 bp, Homo sapiens
agcctctctcactaa

SEQ ID NO: 139326 - DNA, 15 bp, Homo sapiens
aagcctctctcacta

SEQ ID NO: 139327 - DNA, 15 bp, Homo sapiens
caagcctctctcact

SEQ ID NO: 139328 - DNA, 15 bp, Homo sapiens
gcaagcctctctcac

SEQ ID NO: 139329 - DNA, 15 bp, Homo sapiens
agcaagcctctctca

SEQ ID NO: 139330 - DNA, 15 bp, Homo sapiens
gagcaagcctctctc

SEQ ID NO: 139331 - DNA, 15 bp, Homo sapiens
agagcaagcctctct

SEQ ID NO: 139332 - DNA, 15 bp, Homo sapiens
cagagcaagcctctc

SEQ ID NO: 139333 - DNA, 15 bp, Homo sapiens
acagagcaagcctct

SEQ ID NO: 139334 - DNA, 15 bp, Homo sapiens
cacagagcaagcctc

SEQ ID NO: 139335 - DNA, 15 bp, Homo sapiens
acacagagcaagcct

SEQ ID NO: 139336 - DNA, 15 bp, Homo sapiens
aacacagagcaagcc

SEQ ID NO: 139337 - DNA, 15 bp, Homo sapiens
taacacagagcaagc

SEQ ID NO: 139338 - DNA, 15 bp, Homo sapiens
ttaacacagagcaag

SEQ ID NO: 139339 - DNA, 15 bp, Homo sapiens
tttaacacagagcaa

SEQ ID NO: 139340 - DNA, 15 bp, Homo sapiens
gtttaacacagagca

SEQ ID NO: 139341 - DNA, 15 bp, Homo sapiens
agtttaacacagagc

SEQ ID NO: 139342 - DNA, 15 bp, Homo sapiens
gagtttaacacagag

SEQ ID NO: 139343 - DNA, 15 bp, Homo sapiens
tgagtttaacacaga

SEQ ID NO: 139344 - DNA, 15 bp, Homo sapiens
gtgagtttaacacag

SEQ ID NO: 139345 - DNA, 15 bp, Homo sapiens
tgtgagtttaacaca

SEQ ID NO: 139346 - DNA, 15 bp, Homo sapiens
ctgtgagtttaacac

SEQ ID NO: 139347 - DNA, 15 bp, Homo sapiens
cctgtgagtttaaca

SEQ ID NO: 139348 - DNA, 15 bp, Homo sapiens
ccctgtgagtttaac

SEQ ID NO: 139349 - DNA, 15 bp, Homo sapiens
tccctgtgagtttaa

SEQ ID NO: 139350 - DNA, 15 bp, Homo sapiens
ttccctgtgagttta

SEQ ID NO: 139351 - DNA, 15 bp, Homo sapiens
cttccctgtgagttt

SEQ ID NO: 139352 - DNA, 15 bp, Homo sapiens
tcttccctgtgagtt

SEQ ID NO: 139353 - DNA, 15 bp, Homo sapiens
ttcttccctgtgagt

SEQ ID NO: 139354 - DNA, 15 bp, Homo sapiens
attcttccctgtgag

SEQ ID NO: 139355 - DNA, 15 bp, Homo sapiens
aattcttccctgtga

SEQ ID NO: 139356 - DNA, 15 bp, Homo sapiens
taattcttccctgtg

SEQ ID NO: 139357 - DNA, 15 bp, Homo sapiens
ataattcttccctgt

SEQ ID NO: 139358 - DNA, 15 bp, Homo sapiens
gataattcttccctg

SEQ ID NO: 139359 - DNA, 15 bp, Homo sapiens
ggataattcttccct

SEQ ID NO: 139360 - DNA, 15 bp, Homo sapiens
aggataattcttccc

SEQ ID NO: 139361 - DNA, 15 bp, Homo sapiens
aaggataattcttcc

SEQ ID NO: 139362 - DNA, 15 bp, Homo sapiens
gaaggataattcttc

SEQ ID NO: 139363 - DNA, 15 bp, Homo sapiens
ggaaggataattctt

SEQ ID NO: 139364 - DNA, 15 bp, Homo sapiens
gggaaggataattct

SEQ ID NO: 139365 - DNA, 15 bp, Homo sapiens
ggggaaggataattc

SEQ ID NO: 139366 - DNA, 15 bp, Homo sapiens
aggggaaggataatt

SEQ ID NO: 139367 - DNA, 15 bp, Homo sapiens
caggggaaggataat

SEQ ID NO: 139368 - DNA, 15 bp, Homo sapiens
ccaggggaaggataa

SEQ ID NO: 139369 - DNA, 15 bp, Homo sapiens
tccaggggaaggata

SEQ ID NO: 139370 - DNA, 15 bp, Homo sapiens
ttccaggggaaggat

SEQ ID NO: 139371 - DNA, 15 bp, Homo sapiens
attccaggggaagga

SEQ ID NO: 139372 - DNA, 15 bp, Homo sapiens
tattccaggggaagg

SEQ ID NO: 139373 - DNA, 15 bp, Homo sapiens
gtattccaggggaag

SEQ ID NO: 139374 - DNA, 15 bp, Homo sapiens
tgtattccaggggaa

SEQ ID NO: 139375 - DNA, 15 bp, Homo sapiens
ctgtattccagggga

SEQ ID NO: 139376 - DNA, 15 bp, Homo sapiens
tctgtattccagggg

SEQ ID NO: 139377 - DNA, 15 bp, Homo sapiens
gtctgtattccaggg

SEQ ID NO: 139378 - DNA, 15 bp, Homo sapiens
ggtctgtattccagg

SEQ ID NO: 139379 - DNA, 15 bp, Homo sapiens
gggtctgtattccag

SEQ ID NO: 139380 - DNA, 15 bp, Homo sapiens
tgggtctgtattcca

SEQ ID NO: 139381 - DNA, 15 bp, Homo sapiens
ctgggtctgtattcc

SEQ ID NO: 139382 - DNA, 15 bp, Homo sapiens
cctgggtctgtattc

SEQ ID NO: 139383 - DNA, 15 bp, Homo sapiens
ccctgggtctgtatt

SEQ ID NO: 139384 - DNA, 15 bp, Homo sapiens
accctgggtctgtat

SEQ ID NO: 139385 - DNA, 15 bp, Homo sapiens
caccctgggtctgta

SEQ ID NO: 139386 - DNA, 15 bp, Homo sapiens
gcaccctgggtctgt

SEQ ID NO: 139387 - DNA, 15 bp, Homo sapiens
tgcaccctgggtctg

SEQ ID NO: 139388 - DNA, 15 bp, Homo sapiens
ctgcaccctgggtct

SEQ ID NO: 139389 - DNA, 15 bp, Homo sapiens
gctgcaccctgggtc

SEQ ID NO: 139390 - DNA, 15 bp, Homo sapiens
agctgcaccctgggt

SEQ ID NO: 139391 - DNA, 15 bp, Homo sapiens
tagctgcaccctggg

SEQ ID NO: 139392 - DNA, 15 bp, Homo sapiens
ctagctgcaccctgg

SEQ ID NO: 139393 - DNA, 15 bp, Homo sapiens
gctagctgcaccctg

SEQ ID NO: 139394 - DNA, 15 bp, Homo sapiens
tgctagctgcaccct

SEQ ID NO: 139395 - DNA, 15 bp, Homo sapiens
ctgctagctgcaccc

SEQ ID NO: 139396 - DNA, 15 bp, Homo sapiens
actgctagctgcacc

SEQ ID NO: 139397 - DNA, 15 bp, Homo sapiens
cactgctagctgcac

SEQ ID NO: 139398 - DNA, 15 bp, Homo sapiens
gcactgctagctgca

SEQ ID NO: 139399 - DNA, 15 bp, Homo sapiens
agcactgctagctgc

SEQ ID NO: 139400 - DNA, 15 bp, Homo sapiens
gagcactgctagctg

SEQ ID NO: 139401 - DNA, 15 bp, Homo sapiens
agagcactgctagct

SEQ ID NO: 139402 - DNA, 15 bp, Homo sapiens
cagagcactgctagc

SEQ ID NO: 139403 - DNA, 15 bp, Homo sapiens
ccagagcactgctag

SEQ ID NO: 139404 - DNA, 15 bp, Homo sapiens
gccagagcactgcta

SEQ ID NO: 139405 - DNA, 15 bp, Homo sapiens
ggccagagcactgct

SEQ ID NO: 139406 - DNA, 15 bp, Homo sapiens
aggccagagcactgc

SEQ ID NO: 139407 - DNA, 15 bp, Homo sapiens
aaggccagagcactg

SEQ ID NO: 139408 - DNA, 15 bp, Homo sapiens
aaaggccagagcact

SEQ ID NO: 139409 - DNA, 15 bp, Homo sapiens
caaaggccagagcac

SEQ ID NO: 139410 - DNA, 15 bp, Homo sapiens
gcaaaggccagagca

SEQ ID NO: 139411 - DNA, 15 bp, Homo sapiens
tgcaaaggccagagc

SEQ ID NO: 139412 - DNA, 15 bp, Homo sapiens
atgcaaaggccagag

SEQ ID NO: 139413 - DNA, 15 bp, Homo sapiens
catgcaaaggccaga

SEQ ID NO: 139414 - DNA, 15 bp, Homo sapiens
tcatgcaaaggccag

SEQ ID NO: 139415 - DNA, 15 bp, Homo sapiens
ctcatgcaaaggcca

SEQ ID NO: 139416 - DNA, 15 bp, Homo sapiens
tctcatgcaaaggcc

SEQ ID NO: 139417 - DNA, 15 bp, Homo sapiens
ctctcatgcaaaggc

SEQ ID NO: 139418 - DNA, 15 bp, Homo sapiens
tctctcatgcaaagg

SEQ ID NO: 139419 - DNA, 15 bp, Homo sapiens
ttctctcatgcaaag

SEQ ID NO: 139420 - DNA, 15 bp, Homo sapiens
attctctcatgcaaa

SEQ ID NO: 139421 - DNA, 15 bp, Homo sapiens
tattctctcatgcaa

SEQ ID NO: 139422 - DNA, 15 bp, Homo sapiens
ttattctctcatgca

SEQ ID NO: 139423 - DNA, 15 bp, Homo sapiens
attattctctcatgc

SEQ ID NO: 139424 - DNA, 15 bp, Homo sapiens
tattattctctcatg

SEQ ID NO: 139425 - DNA, 15 bp, Homo sapiens
atattattctctcat

SEQ ID NO: 139426 - DNA, 15 bp, Homo sapiens
gatattattctctca

SEQ ID NO: 139427 - DNA, 15 bp, Homo sapiens
ggatattattctctc

SEQ ID NO: 139428 - DNA, 15 bp, Homo sapiens
tggatattattctct

SEQ ID NO: 139429 - DNA, 15 bp, Homo sapiens
atggatattattctc

SEQ ID NO: 139430 - DNA, 15 bp, Homo sapiens
catggatattattct

SEQ ID NO: 139431 - DNA, 15 bp, Homo sapiens
acatggatattattc

SEQ ID NO: 139432 - DNA, 15 bp, Homo sapiens
cacatggatattatt

SEQ ID NO: 139433 - DNA, 15 bp, Homo sapiens
acacatggatattat

SEQ ID NO: 139434 - DNA, 15 bp, Homo sapiens
gacacatggatatta

SEQ ID NO: 139435 - DNA, 15 bp, Homo sapiens
agacacatggatatt

SEQ ID NO: 139436 - DNA, 15 bp, Homo sapiens
gagacacatggatat

SEQ ID NO: 139437 - DNA, 15 bp, Homo sapiens
agagacacatggata

SEQ ID NO: 139438 - DNA, 15 bp, Homo sapiens
aagagacacatggat

SEQ ID NO: 139439 - DNA, 15 bp, Homo sapiens
gaagagacacatgga

SEQ ID NO: 139440 - DNA, 15 bp, Homo sapiens
ggaagagacacatgg

SEQ ID NO: 139441 - DNA, 15 bp, Homo sapiens
aggaagagacacatg

SEQ ID NO: 139442 - DNA, 15 bp, Homo sapiens
caggaagagacacat

SEQ ID NO: 139443 - DNA, 15 bp, Homo sapiens
tcaggaagagacaca

SEQ ID NO: 139444 - DNA, 15 bp, Homo sapiens
gtcaggaagagacac

SEQ ID NO: 139445 - DNA, 15 bp, Homo sapiens
ggtcaggaagagaca

SEQ ID NO: 139446 - DNA, 15 bp, Homo sapiens
aggtcaggaagagac

SEQ ID NO: 139447 - DNA, 15 bp, Homo sapiens
aaggtcaggaagaga

SEQ ID NO: 139448 - DNA, 15 bp, Homo sapiens
aaaggtcaggaagag

SEQ ID NO: 139449 - DNA, 15 bp, Homo sapiens
aaaaggtcaggaaga

SEQ ID NO: 139450 - DNA, 15 bp, Homo sapiens
caaaaggtcaggaag

SEQ ID NO: 139451 - DNA, 15 bp, Homo sapiens
gcaaaaggtcaggaa

SEQ ID NO: 139452 - DNA, 15 bp, Homo sapiens
agcaaaaggtcagga

SEQ ID NO: 139453 - DNA, 15 bp, Homo sapiens
cagcaaaaggtcagg

SEQ ID NO: 139454 - DNA, 15 bp, Homo sapiens
tcagcaaaaggtcag

SEQ ID NO: 139455 - DNA, 15 bp, Homo sapiens
gtcagcaaaaggtca

SEQ ID NO: 139456 - DNA, 15 bp, Homo sapiens
tgtcagcaaaaggtc

SEQ ID NO: 139457 - DNA, 15 bp, Homo sapiens
ttgtcagcaaaaggt

SEQ ID NO: 139458 - DNA, 15 bp, Homo sapiens
cttgtcagcaaaagg

SEQ ID NO: 139459 - DNA, 15 bp, Homo sapiens
acttgtcagcaaaag

SEQ ID NO: 139460 - DNA, 15 bp, Homo sapiens
aacttgtcagcaaaa

SEQ ID NO: 139461 - DNA, 15 bp, Homo sapiens
aaacttgtcagcaaa

SEQ ID NO: 139462 - DNA, 15 bp, Homo sapiens
gaaacttgtcagcaa

SEQ ID NO: 139463 - DNA, 15 bp, Homo sapiens
ggaaacttgtcagca

SEQ ID NO: 139464 - DNA, 15 bp, Homo sapiens
gggaaacttgtcagc

SEQ ID NO: 139465 - DNA, 15 bp, Homo sapiens
agggaaacttgtcag

SEQ ID NO: 139466 - DNA, 15 bp, Homo sapiens
gagggaaacttgtca

SEQ ID NO: 139467 - DNA, 15 bp, Homo sapiens
tgagggaaacttgtc

SEQ ID NO: 139468 - DNA, 15 bp, Homo sapiens
atgagggaaacttgt

SEQ ID NO: 139469 - DNA, 15 bp, Homo sapiens
aatgagggaaacttg

SEQ ID NO: 139470 - DNA, 15 bp, Homo sapiens
taatgagggaaactt

SEQ ID NO: 139471 - DNA, 15 bp, Homo sapiens
ttaatgagggaaact

SEQ ID NO: 139472 - DNA, 15 bp, Homo sapiens
tttaatgagggaaac

SEQ ID NO: 139473 - DNA, 15 bp, Homo sapiens
ttttaatgagggaaa

SEQ ID NO: 139474 - DNA, 15 bp, Homo sapiens
gttttaatgagggaa

SEQ ID NO: 139475 - DNA, 15 bp, Homo sapiens
ggttttaatgaggga

SEQ ID NO: 139476 - DNA, 15 bp, Homo sapiens
tggttttaatgaggg

SEQ ID NO: 139477 - DNA, 15 bp, Homo sapiens
gtggttttaatgagg

SEQ ID NO: 139478 - DNA, 15 bp, Homo sapiens
agtggttttaatgag

SEQ ID NO: 139479 - DNA, 15 bp, Homo sapiens
aagtggttttaatga

SEQ ID NO: 139480 - DNA, 15 bp, Homo sapiens
aaagtggttttaatg

SEQ ID NO: 139481 - DNA, 15 bp, Homo sapiens
gaaagtggttttaat

SEQ ID NO: 139482 - DNA, 15 bp, Homo sapiens
agaaagtggttttaa

SEQ ID NO: 139483 - DNA, 15 bp, Homo sapiens
aagaaagtggtttta

SEQ ID NO: 139484 - DNA, 15 bp, Homo sapiens
gaagaaagtggtttt

SEQ ID NO: 139485 - DNA, 15 bp, Homo sapiens
agaagaaagtggttt

SEQ ID NO: 139486 - DNA, 15 bp, Homo sapiens
cagaagaaagtggtt

SEQ ID NO: 139487 - DNA, 15 bp, Homo sapiens
acagaagaaagtggt

SEQ ID NO: 139488 - DNA, 15 bp, Homo sapiens
cacagaagaaagtgg

SEQ ID NO: 139489 - DNA, 15 bp, Homo sapiens
acacagaagaaagtg

SEQ ID NO: 139490 - DNA, 15 bp, Homo sapiens
cacacagaagaaagt

SEQ ID NO: 139491 - DNA, 15 bp, Homo sapiens
ccacacagaagaaag

SEQ ID NO: 139492 - DNA, 15 bp, Homo sapiens
gccacacagaagaaa

SEQ ID NO: 139493 - DNA, 15 bp, Homo sapiens
agccacacagaagaa

SEQ ID NO: 139494 - DNA, 15 bp, Homo sapiens
aagccacacagaaga

SEQ ID NO: 139495 - DNA, 15 bp, Homo sapiens
aaagccacacagaag

SEQ ID NO: 139496 - DNA, 15 bp, Homo sapiens
caaagccacacagaa

SEQ ID NO: 139497 - DNA, 15 bp, Homo sapiens
acaaagccacacaga

SEQ ID NO: 139498 - DNA, 15 bp, Homo sapiens
cacaaagccacacag

SEQ ID NO: 139499 - DNA, 15 bp, Homo sapiens
gcacaaagccacaca

SEQ ID NO: 139500 - DNA, 15 bp, Homo sapiens
tgcacaaagccacac

SEQ ID NO: 139501 - DNA, 15 bp, Homo sapiens
ctgcacaaagccaca

SEQ ID NO: 139502 - DNA, 15 bp, Homo sapiens
actgcacaaagccac

SEQ ID NO: 139503 - DNA, 15 bp, Homo sapiens
aactgcacaaagcca

SEQ ID NO: 139504 - DNA, 15 bp, Homo sapiens
aaactgcacaaagcc

SEQ ID NO: 139505 - DNA, 15 bp, Homo sapiens
caaactgcacaaagc

SEQ ID NO: 139506 - DNA, 15 bp, Homo sapiens
gcaaactgcacaaag

SEQ ID NO: 139507 - DNA, 15 bp, Homo sapiens
ggcaaactgcacaaa

SEQ ID NO: 139508 - DNA, 15 bp, Homo sapiens
tggcaaactgcacaa

SEQ ID NO: 139509 - DNA, 15 bp, Homo sapiens
atggcaaactgcaca

SEQ ID NO: 139510 - DNA, 15 bp, Homo sapiens
tatggcaaactgcac

SEQ ID NO: 139511 - DNA, 15 bp, Homo sapiens
ttatggcaaactgca

SEQ ID NO: 139512 - DNA, 15 bp, Homo sapiens
gttatggcaaactgc

SEQ ID NO: 139513 - DNA, 15 bp, Homo sapiens
ggttatggcaaactg

SEQ ID NO: 139514 - DNA, 15 bp, Homo sapiens
gggttatggcaaact

SEQ ID NO: 139515 - DNA, 15 bp, Homo sapiens
tgggttatggcaaac

SEQ ID NO: 139516 - DNA, 15 bp, Homo sapiens
atgggttatggcaaa

SEQ ID NO: 139517 - DNA, 15 bp, Homo sapiens
aatgggttatggcaa

SEQ ID NO: 139518 - DNA, 15 bp, Homo sapiens
taatgggttatggca

SEQ ID NO: 139519 - DNA, 15 bp, Homo sapiens
gtaatgggttatggc

SEQ ID NO: 139520 - DNA, 15 bp, Homo sapiens
ggtaatgggttatgg

SEQ ID NO: 139521 - DNA, 15 bp, Homo sapiens
aggtaatgggttatg

SEQ ID NO: 139522 - DNA, 15 bp, Homo sapiens
gaggtaatgggttat

SEQ ID NO: 139523 - DNA, 15 bp, Homo sapiens
tgaggtaatgggtta

SEQ ID NO: 139524 - DNA, 15 bp, Homo sapiens
ttgaggtaatgggtt

SEQ ID NO: 139525 - DNA, 15 bp, Homo sapiens
tttgaggtaatgggt

SEQ ID NO: 139526 - DNA, 15 bp, Homo sapiens
ttttgaggtaatggg

SEQ ID NO: 139527 - DNA, 15 bp, Homo sapiens
tttttgaggtaatgg

SEQ ID NO: 139528 - DNA, 15 bp, Homo sapiens
atttttgaggtaatg

SEQ ID NO: 139529 - DNA, 15 bp, Homo sapiens
catttttgaggtaat

SEQ ID NO: 139530 - DNA, 15 bp, Homo sapiens
ccatttttgaggtaa

SEQ ID NO: 139531 - DNA, 15 bp, Homo sapiens
accatttttgaggta

SEQ ID NO: 139532 - DNA, 15 bp, Homo sapiens
caccatttttgaggt

SEQ ID NO: 139533 - DNA, 15 bp, Homo sapiens
gcaccatttttgagg

SEQ ID NO: 139534 - DNA, 15 bp, Homo sapiens
ggcaccatttttgag

SEQ ID NO: 139535 - DNA, 15 bp, Homo sapiens
gggcaccatttttga

SEQ ID NO: 139536 - DNA, 15 bp, Homo sapiens
tgggcaccatttttg

SEQ ID NO: 139537 - DNA, 15 bp, Homo sapiens
ttgggcaccattttt

SEQ ID NO: 139538 - DNA, 15 bp, Homo sapiens
gttgggcaccatttt

SEQ ID NO: 139539 - DNA, 15 bp, Homo sapiens
tgttgggcaccattt

SEQ ID NO: 139540 - DNA, 15 bp, Homo sapiens
atgttgggcaccatt

SEQ ID NO: 139541 - DNA, 15 bp, Homo sapiens
catgttgggcaccat

SEQ ID NO: 139542 - DNA, 15 bp, Homo sapiens
tcatgttgggcacca

SEQ ID NO: 139543 - DNA, 15 bp, Homo sapiens
ctcatgttgggcacc

SEQ ID NO: 139544 - DNA, 15 bp, Homo sapiens
cctcatgttgggcac

SEQ ID NO: 139545 - DNA, 15 bp, Homo sapiens
acctcatgttgggca

SEQ ID NO: 139546 - DNA, 15 bp, Homo sapiens
tacctcatgttgggc

SEQ ID NO: 139547 - DNA, 15 bp, Homo sapiens
ttacctcatgttggg

SEQ ID NO: 139548 - DNA, 15 bp, Homo sapiens
tttacctcatgttgg

SEQ ID NO: 139549 - DNA, 15 bp, Homo sapiens
ttttacctcatgttg

SEQ ID NO: 139550 - DNA, 15 bp, Homo sapiens
attttacctcatgtt

SEQ ID NO: 139551 - DNA, 15 bp, Homo sapiens
gattttacctcatgt

SEQ ID NO: 139552 - DNA, 15 bp, Homo sapiens
ggattttacctcatg

SEQ ID NO: 139553 - DNA, 15 bp, Homo sapiens
cggattttacctcat

SEQ ID NO: 139554 - DNA, 15 bp, Homo sapiens
gcggattttacctca

SEQ ID NO: 139555 - DNA, 15 bp, Homo sapiens
agcggattttacctc

SEQ ID NO: 139556 - DNA, 15 bp, Homo sapiens
aagcggattttacct

SEQ ID NO: 139557 - DNA, 15 bp, Homo sapiens
taagcggattttacc

SEQ ID NO: 139558 - DNA, 15 bp, Homo sapiens
ataagcggattttac

SEQ ID NO: 139559 - DNA, 15 bp, Homo sapiens
aataagcggatttta

SEQ ID NO: 139560 - DNA, 15 bp, Homo sapiens
aaataagcggatttt

SEQ ID NO: 139561 - DNA, 15 bp, Homo sapiens
gaaataagcggattt

SEQ ID NO: 139562 - DNA, 15 bp, Homo sapiens
tgaaataagcggatt

SEQ ID NO: 139563 - DNA, 15 bp, Homo sapiens
gtgaaataagcggat

SEQ ID NO: 139564 - DNA, 15 bp, Homo sapiens
ggtgaaataagcgga

SEQ ID NO: 139565 - DNA, 15 bp, Homo sapiens
aggtgaaataagcgg

SEQ ID NO: 139566 - DNA, 15 bp, Homo sapiens
gaggtgaaataagcg

SEQ ID NO: 139567 - DNA, 15 bp, Homo sapiens
agaggtgaaataagc

SEQ ID NO: 139568 - DNA, 15 bp, Homo sapiens
cagaggtgaaataag

SEQ ID NO: 139569 - DNA, 15 bp, Homo sapiens
ccagaggtgaaataa

SEQ ID NO: 139570 - DNA, 15 bp, Homo sapiens
gccagaggtgaaata

SEQ ID NO: 139571 - DNA, 15 bp, Homo sapiens
agccagaggtgaaat

SEQ ID NO: 139572 - DNA, 15 bp, Homo sapiens
aagccagaggtgaaa

SEQ ID NO: 139573 - DNA, 15 bp, Homo sapiens
aaagccagaggtgaa

SEQ ID NO: 139574 - DNA, 15 bp, Homo sapiens
aaaagccagaggtga

SEQ ID NO: 139575 - DNA, 15 bp, Homo sapiens
aaaaagccagaggtg

SEQ ID NO: 139576 - DNA, 15 bp, Homo sapiens
caaaaagccagaggt

SEQ ID NO: 139577 - DNA, 15 bp, Homo sapiens
ccaaaaagccagagg

SEQ ID NO: 139578 - DNA, 15 bp, Homo sapiens
tccaaaaagccagag

SEQ ID NO: 139579 - DNA, 15 bp, Homo sapiens
ttccaaaaagccaga

SEQ ID NO: 139580 - DNA, 15 bp, Homo sapiens
tttccaaaaagccag

SEQ ID NO: 139581 - DNA, 15 bp, Homo sapiens
gtttccaaaaagcca

SEQ ID NO: 139582 - DNA, 15 bp, Homo sapiens
agtttccaaaaagcc

SEQ ID NO: 139583 - DNA, 15 bp, Homo sapiens
cagtttccaaaaagc

SEQ ID NO: 139584 - DNA, 15 bp, Homo sapiens
gcagtttccaaaaag

SEQ ID NO: 139585 - DNA, 15 bp, Homo sapiens
tgcagtttccaaaaa

SEQ ID NO: 139586 - DNA, 15 bp, Homo sapiens
ttgcagtttccaaaa

SEQ ID NO: 139587 - DNA, 15 bp, Homo sapiens
tttgcagtttccaaa

SEQ ID NO: 139588 - DNA, 15 bp, Homo sapiens
ttttgcagtttccaa

SEQ ID NO: 139589 - DNA, 15 bp, Homo sapiens
cttttgcagtttcca

SEQ ID NO: 139590 - DNA, 15 bp, Homo sapiens
ccttttgcagtttcc

SEQ ID NO: 139591 - DNA, 15 bp, Homo sapiens
cccttttgcagtttc

SEQ ID NO: 139592 - DNA, 15 bp, Homo sapiens
tcccttttgcagttt

SEQ ID NO: 139593 - DNA, 15 bp, Homo sapiens
atcccttttgcagtt

SEQ ID NO: 139594 - DNA, 15 bp, Homo sapiens
gatcccttttgcagt

SEQ ID NO: 139595 - DNA, 15 bp, Homo sapiens
tgatcccttttgcag

SEQ ID NO: 139596 - DNA, 15 bp, Homo sapiens
ttgatcccttttgca

SEQ ID NO: 139597 - DNA, 15 bp, Homo sapiens
gttgatcccttttgc

SEQ ID NO: 139598 - DNA, 15 bp, Homo sapiens
agttgatcccttttg

SEQ ID NO: 139599 - DNA, 15 bp, Homo sapiens
tagttgatccctttt

SEQ ID NO: 139600 - DNA, 15 bp, Homo sapiens
ttagttgatcccttt

SEQ ID NO: 139601 - DNA, 15 bp, Homo sapiens
cttagttgatccctt

SEQ ID NO: 139602 - DNA, 15 bp, Homo sapiens
gcttagttgatccct

SEQ ID NO: 139603 - DNA, 15 bp, Homo sapiens
agcttagttgatccc

SEQ ID NO: 139604 - DNA, 15 bp, Homo sapiens
tagcttagttgatcc

SEQ ID NO: 139605 - DNA, 15 bp, Homo sapiens
atagcttagttgatc

SEQ ID NO: 139606 - DNA, 15 bp, Homo sapiens
tatagcttagttgat

SEQ ID NO: 139607 - DNA, 15 bp, Homo sapiens
gtatagcttagttga

SEQ ID NO: 139608 - DNA, 15 bp, Homo sapiens
agtatagcttagttg

SEQ ID NO: 139609 - DNA, 15 bp, Homo sapiens
tagtatagcttagtt

SEQ ID NO: 139610 - DNA, 15 bp, Homo sapiens
ctagtatagcttagt

SEQ ID NO: 139611 - DNA, 15 bp, Homo sapiens
cctagtatagcttag

SEQ ID NO: 139612 - DNA, 15 bp, Homo sapiens
ccctagtatagctta

SEQ ID NO: 139613 - DNA, 15 bp, Homo sapiens
tccctagtatagctt

SEQ ID NO: 139614 - DNA, 15 bp, Homo sapiens
atccctagtatagct

SEQ ID NO: 139615 - DNA, 15 bp, Homo sapiens
catccctagtatagc

SEQ ID NO: 139616 - DNA, 15 bp, Homo sapiens
ccatccctagtatag

SEQ ID NO: 139617 - DNA, 15 bp, Homo sapiens
tccatccctagtata

SEQ ID NO: 139618 - DNA, 15 bp, Homo sapiens
gtccatccctagtat

SEQ ID NO: 139619 - DNA, 15 bp, Homo sapiens
tgtccatccctagta

SEQ ID NO: 139620 - DNA, 15 bp, Homo sapiens
ctgtccatccctagt

SEQ ID NO: 139621 - DNA, 15 bp, Homo sapiens
gctgtccatccctag

SEQ ID NO: 139622 - DNA, 15 bp, Homo sapiens
tgctgtccatcccta

SEQ ID NO: 139623 - DNA, 15 bp, Homo sapiens
atgctgtccatccct

SEQ ID NO: 139624 - DNA, 15 bp, Homo sapiens
gatgctgtccatccc

SEQ ID NO: 139625 - DNA, 15 bp, Homo sapiens
ggatgctgtccatcc

SEQ ID NO: 139626 - DNA, 15 bp, Homo sapiens
gggatgctgtccatc

SEQ ID NO: 139627 - DNA, 15 bp, Homo sapiens
agggatgctgtccat

SEQ ID NO: 139628 - DNA, 15 bp, Homo sapiens
cagggatgctgtcca

SEQ ID NO: 139629 - DNA, 15 bp, Homo sapiens
gcagggatgctgtcc

SEQ ID NO: 139630 - DNA, 15 bp, Homo sapiens
agcagggatgctgtc

SEQ ID NO: 139631 - DNA, 15 bp, Homo sapiens
cagcagggatgctgt

SEQ ID NO: 139632 - DNA, 15 bp, Homo sapiens
ccagcagggatgctg

SEQ ID NO: 139633 - DNA, 15 bp, Homo sapiens
cccagcagggatgct

SEQ ID NO: 139634 - DNA, 15 bp, Homo sapiens
ccccagcagggatgc

SEQ ID NO: 139635 - DNA, 15 bp, Homo sapiens
gccccagcagggatg

SEQ ID NO: 139636 - DNA, 15 bp, Homo sapiens
agccccagcagggat

SEQ ID NO: 139637 - DNA, 15 bp, Homo sapiens
cagccccagcaggga

SEQ ID NO: 139638 - DNA, 15 bp, Homo sapiens
ccagccccagcaggg

SEQ ID NO: 139639 - DNA, 15 bp, Homo sapiens
accagccccagcagg

SEQ ID NO: 139640 - DNA, 15 bp, Homo sapiens
caccagccccagcag

SEQ ID NO: 139641 - DNA, 15 bp, Homo sapiens
tcaccagccccagca

SEQ ID NO: 139642 - DNA, 15 bp, Homo sapiens
atcaccagccccagc

SEQ ID NO: 139643 - DNA, 15 bp, Homo sapiens
catcaccagccccag

SEQ ID NO: 139644 - DNA, 15 bp, Homo sapiens
ccatcaccagcccca

SEQ ID NO: 139645 - DNA, 15 bp, Homo sapiens
cccatcaccagcccc

SEQ ID NO: 139646 - DNA, 15 bp, Homo sapiens
tcccatcaccagccc

SEQ ID NO: 139647 - DNA, 15 bp, Homo sapiens
ttcccatcaccagcc

SEQ ID NO: 139648 - DNA, 15 bp, Homo sapiens
tttcccatcaccagc

SEQ ID NO: 139649 - DNA, 15 bp, Homo sapiens
gtttcccatcaccag

SEQ ID NO: 139650 - DNA, 15 bp, Homo sapiens
ggtttcccatcacca

SEQ ID NO: 139651 - DNA, 15 bp, Homo sapiens
gggtttcccatcacc

SEQ ID NO: 139652 - DNA, 15 bp, Homo sapiens
tgggtttcccatcac

SEQ ID NO: 139653 - DNA, 15 bp, Homo sapiens
ctgggtttcccatca

SEQ ID NO: 139654 - DNA, 15 bp, Homo sapiens
gctgggtttcccatc

SEQ ID NO: 139655 - DNA, 15 bp, Homo sapiens
ggctgggtttcccat

SEQ ID NO: 139656 - DNA, 15 bp, Homo sapiens
tggctgggtttccca

SEQ ID NO: 139657 - DNA, 15 bp, Homo sapiens
ttggctgggtttccc

SEQ ID NO: 139658 - DNA, 15 bp, Homo sapiens
cttggctgggtttcc

SEQ ID NO: 139659 - DNA, 15 bp, Homo sapiens
gcttggctgggtttc

SEQ ID NO: 139660 - DNA, 15 bp, Homo sapiens
agcttggctgggttt

SEQ ID NO: 139661 - DNA, 15 bp, Homo sapiens
tagcttggctgggtt

SEQ ID NO: 139662 - DNA, 15 bp, Homo sapiens
ttagcttggctgggt

SEQ ID NO: 139663 - DNA, 15 bp, Homo sapiens
gttagcttggctggg

SEQ ID NO: 139664 - DNA, 15 bp, Homo sapiens
tgttagcttggctgg

SEQ ID NO: 139665 - DNA, 15 bp, Homo sapiens
atgttagcttggctg

SEQ ID NO: 139666 - DNA, 15 bp, Homo sapiens
gatgttagcttggct

SEQ ID NO: 139667 - DNA, 15 bp, Homo sapiens
agatgttagcttggc

SEQ ID NO: 139668 - DNA, 15 bp, Homo sapiens
cagatgttagcttgg

SEQ ID NO: 139669 - DNA, 15 bp, Homo sapiens
gcagatgttagcttg

SEQ ID NO: 139670 - DNA, 15 bp, Homo sapiens
tgcagatgttagctt

SEQ ID NO: 139671 - DNA, 15 bp, Homo sapiens
ttgcagatgttagct

SEQ ID NO: 139672 - DNA, 15 bp, Homo sapiens
tttgcagatgttagc

SEQ ID NO: 139673 - DNA, 15 bp, Homo sapiens
ctttgcagatgttag

SEQ ID NO: 139674 - DNA, 15 bp, Homo sapiens
gctttgcagatgtta

SEQ ID NO: 139675 - DNA, 15 bp, Homo sapiens
tgctttgcagatgtt

SEQ ID NO: 139676 - DNA, 15 bp, Homo sapiens
atgctttgcagatgt

SEQ ID NO: 139677 - DNA, 15 bp, Homo sapiens
catgctttgcagatg

SEQ ID NO: 139678 - DNA, 15 bp, Homo sapiens
gcatgctttgcagat

SEQ ID NO: 139679 - DNA, 15 bp, Homo sapiens
agcatgctttgcaga

SEQ ID NO: 139680 - DNA, 15 bp, Homo sapiens
tagcatgctttgcag

SEQ ID NO: 139681 - DNA, 15 bp, Homo sapiens
ctagcatgctttgca

SEQ ID NO: 139682 - DNA, 15 bp, Homo sapiens
actagcatgctttgc

SEQ ID NO: 139683 - DNA, 15 bp, Homo sapiens
cactagcatgctttg

SEQ ID NO: 139684 - DNA, 15 bp, Homo sapiens
acactagcatgcttt

SEQ ID NO: 139685 - DNA, 15 bp, Homo sapiens
cacactagcatgctt

SEQ ID NO: 139686 - DNA, 15 bp, Homo sapiens
ccacactagcatgct

SEQ ID NO: 139687 - DNA, 15 bp, Homo sapiens
accacactagcatgc

SEQ ID NO: 139688 - DNA, 15 bp, Homo sapiens
caccacactagcatg

SEQ ID NO: 139689 - DNA, 15 bp, Homo sapiens
gcaccacactagcat

SEQ ID NO: 139690 - DNA, 15 bp, Homo sapiens
agcaccacactagca

SEQ ID NO: 139691 - DNA, 15 bp, Homo sapiens
aagcaccacactagc

SEQ ID NO: 139692 - DNA, 15 bp, Homo sapiens
taagcaccacactag

SEQ ID NO: 139693 - DNA, 15 bp, Homo sapiens
ataagcaccacacta

SEQ ID NO: 139694 - DNA, 15 bp, Homo sapiens
aataagcaccacact

SEQ ID NO: 139695 - DNA, 15 bp, Homo sapiens
caataagcaccacac

SEQ ID NO: 139696 - DNA, 15 bp, Homo sapiens
ccaataagcaccaca

SEQ ID NO: 139697 - DNA, 15 bp, Homo sapiens
accaataagcaccac

SEQ ID NO: 139698 - DNA, 15 bp, Homo sapiens
caccaataagcacca

SEQ ID NO: 139699 - DNA, 15 bp, Homo sapiens
acaccaataagcacc

SEQ ID NO: 139700 - DNA, 15 bp, Homo sapiens
aacaccaataagcac

SEQ ID NO: 139701 - DNA, 15 bp, Homo sapiens
gaacaccaataagca

SEQ ID NO: 139702 - DNA, 15 bp, Homo sapiens
tgaacaccaataagc

SEQ ID NO: 139703 - DNA, 15 bp, Homo sapiens
atgaacaccaataag

SEQ ID NO: 139704 - DNA, 15 bp, Homo sapiens
catgaacaccaataa

SEQ ID NO: 139705 - DNA, 15 bp, Homo sapiens
acatgaacaccaata

SEQ ID NO: 139706 - DNA, 15 bp, Homo sapiens
cacatgaacaccaat

SEQ ID NO: 139707 - DNA, 15 bp, Homo sapiens
gcacatgaacaccaa

SEQ ID NO: 139708 - DNA, 15 bp, Homo sapiens
ggcacatgaacacca

SEQ ID NO: 139709 - DNA, 15 bp, Homo sapiens
tggcacatgaacacc

SEQ ID NO: 139710 - DNA, 15 bp, Homo sapiens
gtggcacatgaacac

SEQ ID NO: 139711 - DNA, 15 bp, Homo sapiens
tgtggcacatgaaca

SEQ ID NO: 139712 - DNA, 15 bp, Homo sapiens
ctgtggcacatgaac

SEQ ID NO: 139713 - DNA, 15 bp, Homo sapiens
tctgtggcacatgaa

SEQ ID NO: 139714 - DNA, 15 bp, Homo sapiens
ctctgtggcacatga

SEQ ID NO: 139715 - DNA, 15 bp, Homo sapiens
cctctgtggcacatg

SEQ ID NO: 139716 - DNA, 15 bp, Homo sapiens
acctctgtggcacat

SEQ ID NO: 139717 - DNA, 15 bp, Homo sapiens
gacctctgtggcaca

SEQ ID NO: 139718 - DNA, 15 bp, Homo sapiens
ggacctctgtggcac

SEQ ID NO: 139719 - DNA, 15 bp, Homo sapiens
aggacctctgtggca

SEQ ID NO: 139720 - DNA, 15 bp, Homo sapiens
caggacctctgtggc

SEQ ID NO: 139721 - DNA, 15 bp, Homo sapiens
ccaggacctctgtgg

SEQ ID NO: 139722 - DNA, 15 bp, Homo sapiens
cccaggacctctgtg

SEQ ID NO: 139723 - DNA, 15 bp, Homo sapiens
tcccaggacctctgt

SEQ ID NO: 139724 - DNA, 15 bp, Homo sapiens
ttcccaggacctctg

SEQ ID NO: 139725 - DNA, 15 bp, Homo sapiens
cttcccaggacctct

SEQ ID NO: 139726 - DNA, 15 bp, Homo sapiens
acttcccaggacctc

SEQ ID NO: 139727 - DNA, 15 bp, Homo sapiens
aacttcccaggacct

SEQ ID NO: 139728 - DNA, 15 bp, Homo sapiens
aaacttcccaggacc

SEQ ID NO: 139729 - DNA, 15 bp, Homo sapiens
caaacttcccaggac

SEQ ID NO: 139730 - DNA, 15 bp, Homo sapiens
acaaacttcccagga

SEQ ID NO: 139731 - DNA, 15 bp, Homo sapiens
cacaaacttcccagg

SEQ ID NO: 139732 - DNA, 15 bp, Homo sapiens
acacaaacttcccag

SEQ ID NO: 139733 - DNA, 15 bp, Homo sapiens
tacacaaacttccca

SEQ ID NO: 139734 - DNA, 15 bp, Homo sapiens
ttacacaaacttccc

SEQ ID NO: 139735 - DNA, 15 bp, Homo sapiens
cttacacaaacttcc

SEQ ID NO: 139736 - DNA, 15 bp, Homo sapiens
ccttacacaaacttc

SEQ ID NO: 139737 - DNA, 15 bp, Homo sapiens
cccttacacaaactt

SEQ ID NO: 139738 - DNA, 15 bp, Homo sapiens
tcccttacacaaact

SEQ ID NO: 139739 - DNA, 15 bp, Homo sapiens
ctcccttacacaaac

SEQ ID NO: 139740 - DNA, 15 bp, Homo sapiens
tctcccttacacaaa

SEQ ID NO: 139741 - DNA, 15 bp, Homo sapiens
atctcccttacacaa

SEQ ID NO: 139742 - DNA, 15 bp, Homo sapiens
aatctcccttacaca

SEQ ID NO: 139743 - DNA, 15 bp, Homo sapiens
caatctcccttacac

SEQ ID NO: 139744 - DNA, 15 bp, Homo sapiens
tcaatctcccttaca

SEQ ID NO: 139745 - DNA, 15 bp, Homo sapiens
ctcaatctcccttac

SEQ ID NO: 139746 - DNA, 15 bp, Homo sapiens
tctcaatctccctta

SEQ ID NO: 139747 - DNA, 15 bp, Homo sapiens
gtctcaatctccctt

SEQ ID NO: 139748 - DNA, 15 bp, Homo sapiens
tgtctcaatctccct

SEQ ID NO: 139749 - DNA, 15 bp, Homo sapiens
ttgtctcaatctccc

SEQ ID NO: 139750 - DNA, 15 bp, Homo sapiens
attgtctcaatctcc

SEQ ID NO: 139751 - DNA, 15 bp, Homo sapiens
aattgtctcaatctc

SEQ ID NO: 139752 - DNA, 15 bp, Homo sapiens
taattgtctcaatct

SEQ ID NO: 139753 - DNA, 15 bp, Homo sapiens
ttaattgtctcaatc

SEQ ID NO: 139754 - DNA, 15 bp, Homo sapiens
tttaattgtctcaat

SEQ ID NO: 139755 - DNA, 15 bp, Homo sapiens
atttaattgtctcaa

SEQ ID NO: 139756 - DNA, 15 bp, Homo sapiens
gatttaattgtctca

SEQ ID NO: 139757 - DNA, 15 bp, Homo sapiens
ggatttaattgtctc

SEQ ID NO: 139758 - DNA, 15 bp, Homo sapiens
aggatttaattgtct

SEQ ID NO: 139759 - DNA, 15 bp, Homo sapiens
aaggatttaattgtc

SEQ ID NO: 139760 - DNA, 15 bp, Homo sapiens
aaaggatttaattgt

SEQ ID NO: 139761 - DNA, 15 bp, Homo sapiens
caaaggatttaattg

SEQ ID NO: 139762 - DNA, 15 bp, Homo sapiens
ccaaaggatttaatt

SEQ ID NO: 139763 - DNA, 15 bp, Homo sapiens
gccaaaggatttaat

SEQ ID NO: 139764 - DNA, 15 bp, Homo sapiens
tgccaaaggatttaa

SEQ ID NO: 139765 - DNA, 15 bp, Homo sapiens
gtgccaaaggattta

SEQ ID NO: 139766 - DNA, 15 bp, Homo sapiens
agtgccaaaggattt

SEQ ID NO: 139767 - DNA, 15 bp, Homo sapiens
gagtgccaaaggatt

SEQ ID NO: 139768 - DNA, 15 bp, Homo sapiens
ggagtgccaaaggat

SEQ ID NO: 139769 - DNA, 15 bp, Homo sapiens
tggagtgccaaagga

SEQ ID NO: 139770 - DNA, 15 bp, Homo sapiens
ttggagtgccaaagg

SEQ ID NO: 139771 - DNA, 15 bp, Homo sapiens
cttggagtgccaaag

SEQ ID NO: 139772 - DNA, 15 bp, Homo sapiens
acttggagtgccaaa

SEQ ID NO: 139773 - DNA, 15 bp, Homo sapiens
gacttggagtgccaa

SEQ ID NO: 139774 - DNA, 15 bp, Homo sapiens
agacttggagtgcca

SEQ ID NO: 139775 - DNA, 15 bp, Homo sapiens
cagacttggagtgcc

SEQ ID NO: 139776 - DNA, 15 bp, Homo sapiens
ccagacttggagtgc

SEQ ID NO: 139777 - DNA, 15 bp, Homo sapiens
gccagacttggagtg

SEQ ID NO: 139778 - DNA, 15 bp, Homo sapiens
tgccagacttggagt

SEQ ID NO: 139779 - DNA, 15 bp, Homo sapiens
ctgccagacttggag

SEQ ID NO: 139780 - DNA, 15 bp, Homo sapiens
gctgccagacttgga

SEQ ID NO: 139781 - DNA, 15 bp, Homo sapiens
ggctgccagacttgg

SEQ ID NO: 139782 - DNA, 15 bp, Homo sapiens
aggctgccagacttg

SEQ ID NO: 139783 - DNA, 15 bp, Homo sapiens
gaggctgccagactt

SEQ ID NO: 139784 - DNA, 15 bp, Homo sapiens
agaggctgccagact

SEQ ID NO: 139785 - DNA, 15 bp, Homo sapiens
cagaggctgccagac

SEQ ID NO: 139786 - DNA, 15 bp, Homo sapiens
acagaggctgccaga

SEQ ID NO: 139787 - DNA, 15 bp, Homo sapiens
cacagaggctgccag

SEQ ID NO: 139788 - DNA, 15 bp, Homo sapiens
tcacagaggctgcca

SEQ ID NO: 139789 - DNA, 15 bp, Homo sapiens
ctcacagaggctgcc

SEQ ID NO: 139790 - DNA, 15 bp, Homo sapiens
tctcacagaggctgc

SEQ ID NO: 139791 - DNA, 15 bp, Homo sapiens
gtctcacagaggctg

SEQ ID NO: 139792 - DNA, 15 bp, Homo sapiens
ggtctcacagaggct

SEQ ID NO: 139793 - DNA, 15 bp, Homo sapiens
aggtctcacagaggc

SEQ ID NO: 139794 - DNA, 15 bp, Homo sapiens
taggtctcacagagg

SEQ ID NO: 139795 - DNA, 15 bp, Homo sapiens
ttaggtctcacagag

SEQ ID NO: 139796 - DNA, 15 bp, Homo sapiens
cttaggtctcacaga

SEQ ID NO: 139797 - DNA, 15 bp, Homo sapiens
ccttaggtctcacag

SEQ ID NO: 139798 - DNA, 15 bp, Homo sapiens
tccttaggtctcaca

SEQ ID NO: 139799 - DNA, 15 bp, Homo sapiens
ttccttaggtctcac

SEQ ID NO: 139800 - DNA, 15 bp, Homo sapiens
tttccttaggtctca

SEQ ID NO: 139801 - DNA, 15 bp, Homo sapiens
ttttccttaggtctc

SEQ ID NO: 139802 - DNA, 15 bp, Homo sapiens
tttttccttaggtct

SEQ ID NO: 139803 - DNA, 15 bp, Homo sapiens
ctttttccttaggtc

SEQ ID NO: 139804 - DNA, 15 bp, Homo sapiens
tctttttccttaggt

SEQ ID NO: 139805 - DNA, 15 bp, Homo sapiens
ttctttttccttagg

SEQ ID NO: 139806 - DNA, 15 bp, Homo sapiens
cttctttttccttag

SEQ ID NO: 139807 - DNA, 15 bp, Homo sapiens
acttctttttcctta

SEQ ID NO: 139808 - DNA, 15 bp, Homo sapiens
aacttctttttcctt

SEQ ID NO: 139809 - DNA, 15 bp, Homo sapiens
caacttctttttcct

SEQ ID NO: 139810 - DNA, 15 bp, Homo sapiens
ccaacttctttttcc

SEQ ID NO: 139811 - DNA, 15 bp, Homo sapiens
cccaacttctttttc

SEQ ID NO: 139812 - DNA, 15 bp, Homo sapiens
tcccaacttcttttt

SEQ ID NO: 139813 - DNA, 15 bp, Homo sapiens
ctcccaacttctttt

SEQ ID NO: 139814 - DNA, 15 bp, Homo sapiens
tctcccaacttcttt

SEQ ID NO: 139815 - DNA, 15 bp, Homo sapiens
ttctcccaacttctt

SEQ ID NO: 139816 - DNA, 15 bp, Homo sapiens
tttctcccaacttct

SEQ ID NO: 139817 - DNA, 15 bp, Homo sapiens
ttttctcccaacttc

SEQ ID NO: 139818 - DNA, 15 bp, Homo sapiens
gttttctcccaactt

SEQ ID NO: 139819 - DNA, 15 bp, Homo sapiens
ggttttctcccaact

SEQ ID NO: 139820 - DNA, 15 bp, Homo sapiens
gggttttctcccaac

SEQ ID NO: 139821 - DNA, 15 bp, Homo sapiens
agggttttctcccaa

SEQ ID NO: 139822 - DNA, 15 bp, Homo sapiens
gagggttttctccca

SEQ ID NO: 139823 - DNA, 15 bp, Homo sapiens
tgagggttttctccc

SEQ ID NO: 139824 - DNA, 15 bp, Homo sapiens
ctgagggttttctcc

SEQ ID NO: 139825 - DNA, 15 bp, Homo sapiens
gctgagggttttctc

SEQ ID NO: 139826 - DNA, 15 bp, Homo sapiens
tgctgagggttttct

SEQ ID NO: 139827 - DNA, 15 bp, Homo sapiens
gtgctgagggttttc

SEQ ID NO: 139828 - DNA, 15 bp, Homo sapiens
ggtgctgagggtttt

SEQ ID NO: 139829 - DNA, 15 bp, Homo sapiens
aggtgctgagggttt

SEQ ID NO: 139830 - DNA, 15 bp, Homo sapiens
taggtgctgagggtt

SEQ ID NO: 139831 - DNA, 15 bp, Homo sapiens
ttaggtgctgagggt

SEQ ID NO: 139832 - DNA, 15 bp, Homo sapiens
cttaggtgctgaggg

SEQ ID NO: 139833 - DNA, 15 bp, Homo sapiens
acttaggtgctgagg

SEQ ID NO: 139834 - DNA, 15 bp, Homo sapiens
cacttaggtgctgag

SEQ ID NO: 139835 - DNA, 15 bp, Homo sapiens
gcacttaggtgctga

SEQ ID NO: 139836 - DNA, 15 bp, Homo sapiens
ggcacttaggtgctg

SEQ ID NO: 139837 - DNA, 15 bp, Homo sapiens
tggcacttaggtgct

SEQ ID NO: 139838 - DNA, 15 bp, Homo sapiens
atggcacttaggtgc

SEQ ID NO: 139839 - DNA, 15 bp, Homo sapiens
aatggcacttaggtg

SEQ ID NO: 139840 - DNA, 15 bp, Homo sapiens
taatggcacttaggt

SEQ ID NO: 139841 - DNA, 15 bp, Homo sapiens
ctaatggcacttagg

SEQ ID NO: 139842 - DNA, 15 bp, Homo sapiens
tctaatggcacttag

SEQ ID NO: 139843 - DNA, 15 bp, Homo sapiens
ttctaatggcactta

SEQ ID NO: 139844 - DNA, 15 bp, Homo sapiens
attctaatggcactt

SEQ ID NO: 139845 - DNA, 15 bp, Homo sapiens
tattctaatggcact

SEQ ID NO: 139846 - DNA, 15 bp, Homo sapiens
ctattctaatggcac

SEQ ID NO: 139847 - DNA, 15 bp, Homo sapiens
actattctaatggca

SEQ ID NO: 139848 - DNA, 15 bp, Homo sapiens
aactattctaatggc

SEQ ID NO: 139849 - DNA, 15 bp, Homo sapiens
caactattctaatgg

SEQ ID NO: 139850 - DNA, 15 bp, Homo sapiens
tcaactattctaatg

SEQ ID NO: 139851 - DNA, 15 bp, Homo sapiens
atcaactattctaat

SEQ ID NO: 139852 - DNA, 15 bp, Homo sapiens
catcaactattctaa

SEQ ID NO: 139853 - DNA, 15 bp, Homo sapiens
gcatcaactattcta

SEQ ID NO: 139854 - DNA, 15 bp, Homo sapiens
tgcatcaactattct

SEQ ID NO: 139855 - DNA, 15 bp, Homo sapiens
ctgcatcaactattc

SEQ ID NO: 139856 - DNA, 15 bp, Homo sapiens
actgcatcaactatt

SEQ ID NO: 139857 - DNA, 15 bp, Homo sapiens
gactgcatcaactat

SEQ ID NO: 139858 - DNA, 15 bp, Homo sapiens
agactgcatcaacta

SEQ ID NO: 139859 - DNA, 15 bp, Homo sapiens
tagactgcatcaact

SEQ ID NO: 139860 - DNA, 15 bp, Homo sapiens
ttagactgcatcaac

SEQ ID NO: 139861 - DNA, 15 bp, Homo sapiens
tttagactgcatcaa

SEQ ID NO: 139862 - DNA, 15 bp, Homo sapiens
gtttagactgcatca

SEQ ID NO: 139863 - DNA, 15 bp, Homo sapiens
cgtttagactgcatc

SEQ ID NO: 139864 - DNA, 15 bp, Homo sapiens
acgtttagactgcat

SEQ ID NO: 139865 - DNA, 15 bp, Homo sapiens
aacgtttagactgca

SEQ ID NO: 139866 - DNA, 15 bp, Homo sapiens
aaacgtttagactgc

SEQ ID NO: 139867 - DNA, 15 bp, Homo sapiens
aaaacgtttagactg

SEQ ID NO: 139868 - DNA, 15 bp, Homo sapiens
aaaaacgtttagact

SEQ ID NO: 139869 - DNA, 15 bp, Homo sapiens
aaaaaacgtttagac

SEQ ID NO: 139870 - DNA, 15 bp, Homo sapiens
aaaaaaacgtttaga

SEQ ID NO: 139871 - DNA, 15 bp, Homo sapiens
caaaaaaacgtttag

SEQ ID NO: 139872 - DNA, 15 bp, Homo sapiens
acaaaaaaacgttta

SEQ ID NO: 139873 - DNA, 15 bp, Homo sapiens
aacaaaaaaacgttt

SEQ ID NO: 139874 - DNA, 15 bp, Homo sapiens
aaacaaaaaaacgtt

SEQ ID NO: 139875 - DNA, 15 bp, Homo sapiens
caaacaaaaaaacgt

SEQ ID NO: 139876 - DNA, 15 bp, Homo sapiens
acaaacaaaaaaacg

SEQ ID NO: 139877 - DNA, 15 bp, Homo sapiens
aacaaacaaaaaaac

SEQ ID NO: 139878 - DNA, 15 bp, Homo sapiens
aaacaaacaaaaaaa

SEQ ID NO: 139879 - DNA, 15 bp, Homo sapiens
aaaacaaacaaaaaa

SEQ ID NO: 139880 - DNA, 15 bp, Homo sapiens
caaaacaaacaaaaa

SEQ ID NO: 139881 - DNA, 15 bp, Homo sapiens
ccaaaacaaacaaaa

SEQ ID NO: 139882 - DNA, 15 bp, Homo sapiens
accaaaacaaacaaa

SEQ ID NO: 139883 - DNA, 15 bp, Homo sapiens
aaccaaaacaaacaa

SEQ ID NO: 139884 - DNA, 15 bp, Homo sapiens
aaaccaaaacaaaca

SEQ ID NO: 139885 - DNA, 15 bp, Homo sapiens
aaaaccaaaacaaac

SEQ ID NO: 139886 - DNA, 15 bp, Homo sapiens
aaaaaccaaaacaaa

SEQ ID NO: 139887 - DNA, 15 bp, Homo sapiens
aaaaaaccaaaacaa

SEQ ID NO: 139888 - DNA, 15 bp, Homo sapiens
aaaaaaaccaaaaca

SEQ ID NO: 139889 - DNA, 15 bp, Homo sapiens
aaaaaaaaccaaaac

SEQ ID NO: 139890 - DNA, 15 bp, Homo sapiens
aaaaaaaaaccaaaa

SEQ ID NO: 139891 - DNA, 15 bp, Homo sapiens
aaaaaaaaaaccaaa

SEQ ID NO: 139892 - DNA, 15 bp, Homo sapiens
aaaaaaaaaaaccaa

SEQ ID NO: 139893 - DNA, 15 bp, Homo sapiens
aaaaaaaaaaaacca

SEQ ID NO: 139894 - DNA, 15 bp, Homo sapiens
aaaaaaaaaaaaacc

SEQ ID NO: 139895 - DNA, 15 bp, Homo sapiens
aaaaaaaaaaaaaac

SEQ ID NO: 139896 - DNA, 15 bp, Homo sapiens
ctcaaaaaaaaaaaa

SEQ ID NO: 139897 - DNA, 15 bp, Homo sapiens
tctcaaaaaaaaaaa

SEQ ID NO: 139898 - DNA, 15 bp, Homo sapiens
gtctcaaaaaaaaaa

SEQ ID NO: 139899 - DNA, 15 bp, Homo sapiens
tgtctcaaaaaaaaa

SEQ ID NO: 139900 - DNA, 15 bp, Homo sapiens
ctgtctcaaaaaaaa

SEQ ID NO: 139901 - DNA, 15 bp, Homo sapiens
cctgtctcaaaaaaa

SEQ ID NO: 139902 - DNA, 15 bp, Homo sapiens
ccctgtctcaaaaaa

SEQ ID NO: 139903 - DNA, 15 bp, Homo sapiens
accctgtctcaaaaa

SEQ ID NO: 139904 - DNA, 15 bp, Homo sapiens
gaccctgtctcaaaa

SEQ ID NO: 139905 - DNA, 15 bp, Homo sapiens
agaccctgtctcaaa

SEQ ID NO: 139906 - DNA, 15 bp, Homo sapiens
gagaccctgtctcaa

SEQ ID NO: 139907 - DNA, 15 bp, Homo sapiens
agagaccctgtctca

SEQ ID NO: 139908 - DNA, 15 bp, Homo sapiens
cagagaccctgtctc

SEQ ID NO: 139909 - DNA, 15 bp, Homo sapiens
acagagaccctgtct

SEQ ID NO: 139910 - DNA, 15 bp, Homo sapiens
gacagagaccctgtc

SEQ ID NO: 139911 - DNA, 15 bp, Homo sapiens
tgacagagaccctgt

SEQ ID NO: 139912 - DNA, 15 bp, Homo sapiens
gtgacagagaccctg

SEQ ID NO: 139913 - DNA, 15 bp, Homo sapiens
ggtgacagagaccct

SEQ ID NO: 139914 - DNA, 15 bp, Homo sapiens
gggtgacagagaccc

SEQ ID NO: 139915 - DNA, 15 bp, Homo sapiens
tgggtgacagagacc

SEQ ID NO: 139916 - DNA, 15 bp, Homo sapiens
ctgggtgacagagac

SEQ ID NO: 139917 - DNA, 15 bp, Homo sapiens
cctgggtgacagaga

SEQ ID NO: 139918 - DNA, 15 bp, Homo sapiens
gcctgggtgacagag

SEQ ID NO: 139919 - DNA, 15 bp, Homo sapiens
agcctgggtgacaga

SEQ ID NO: 139920 - DNA, 15 bp, Homo sapiens
cagcctgggtgacag

SEQ ID NO: 139921 - DNA, 15 bp, Homo sapiens
ccagcctgggtgaca

SEQ ID NO: 139922 - DNA, 15 bp, Homo sapiens
tccagcctgggtgac

SEQ ID NO: 139923 - DNA, 15 bp, Homo sapiens
ctccagcctgggtga

SEQ ID NO: 139924 - DNA, 15 bp, Homo sapiens
actccagcctgggtg

SEQ ID NO: 139925 - DNA, 15 bp, Homo sapiens
cactccagcctgggt

SEQ ID NO: 139926 - DNA, 15 bp, Homo sapiens
ctgcactccagcctg

SEQ ID NO: 139927 - DNA, 15 bp, Homo sapiens
agatcatgccactgc

SEQ ID NO: 139928 - DNA, 15 bp, Homo sapiens
gagatcatgccactg

SEQ ID NO: 139929 - DNA, 15 bp, Homo sapiens
tgagatcatgccact

SEQ ID NO: 139930 - DNA, 15 bp, Homo sapiens
ctgagatcatgccac

SEQ ID NO: 139931 - DNA, 15 bp, Homo sapiens
gctgagatcatgcca

SEQ ID NO: 139932 - DNA, 15 bp, Homo sapiens
agctgagatcatgcc

SEQ ID NO: 139933 - DNA, 15 bp, Homo sapiens
gagctgagatcatgc

SEQ ID NO: 139934 - DNA, 15 bp, Homo sapiens
tgagctgagatcatg

SEQ ID NO: 139935 - DNA, 15 bp, Homo sapiens
gtgagctgagatcat

SEQ ID NO: 139936 - DNA, 15 bp, Homo sapiens
agtgagctgagatca

SEQ ID NO: 139937 - DNA, 15 bp, Homo sapiens
acagtgagctgagat

SEQ ID NO: 139938 - DNA, 15 bp, Homo sapiens
cacagtgagctgaga

SEQ ID NO: 139939 - DNA, 15 bp, Homo sapiens
ccacagtgagctgag

SEQ ID NO: 139940 - DNA, 15 bp, Homo sapiens
gccacagtgagctga

SEQ ID NO: 139941 - DNA, 15 bp, Homo sapiens
ggccacagtgagctg

SEQ ID NO: 139942 - DNA, 15 bp, Homo sapiens
aggccacagtgagct

SEQ ID NO: 139943 - DNA, 15 bp, Homo sapiens
gaggccacagtgagc

SEQ ID NO: 139944 - DNA, 15 bp, Homo sapiens
ggaggccacagtgag

SEQ ID NO: 139945 - DNA, 15 bp, Homo sapiens
cggaggccacagtga

SEQ ID NO: 139946 - DNA, 15 bp, Homo sapiens
gcggaggccacagtg

SEQ ID NO: 139947 - DNA, 15 bp, Homo sapiens
ggcggaggccacagt

SEQ ID NO: 139948 - DNA, 15 bp, Homo sapiens
aggcggaggccacag

SEQ ID NO: 139949 - DNA, 15 bp, Homo sapiens
gaggcggaggccaca

SEQ ID NO: 139950 - DNA, 15 bp, Homo sapiens
ggaggcggaggccac

SEQ ID NO: 139951 - DNA, 15 bp, Homo sapiens
gggaggcggaggcca

SEQ ID NO: 139952 - DNA, 15 bp, Homo sapiens
tgggaggcggaggcc

SEQ ID NO: 139953 - DNA, 15 bp, Homo sapiens
ctgggaggcggaggc

SEQ ID NO: 139954 - DNA, 15 bp, Homo sapiens
cctgggaggcggagg

SEQ ID NO: 139955 - DNA, 15 bp, Homo sapiens
acctgggaggcggag

SEQ ID NO: 139956 - DNA, 15 bp, Homo sapiens
aacctgggaggcgga

SEQ ID NO: 139957 - DNA, 15 bp, Homo sapiens
gaacctgggaggcgg

SEQ ID NO: 139958 - DNA, 15 bp, Homo sapiens
tgaacctgggaggcg

SEQ ID NO: 139959 - DNA, 15 bp, Homo sapiens
ttgaacctgggaggc

SEQ ID NO: 139960 - DNA, 15 bp, Homo sapiens
cttgaacctgggagg

SEQ ID NO: 139961 - DNA, 15 bp, Homo sapiens
gcttgaacctgggag

SEQ ID NO: 139962 - DNA, 15 bp, Homo sapiens
cgcttgaacctggga

SEQ ID NO: 139963 - DNA, 15 bp, Homo sapiens
tcgcttgaacctggg

SEQ ID NO: 139964 - DNA, 15 bp, Homo sapiens
atcgcttgaacctgg

SEQ ID NO: 139965 - DNA, 15 bp, Homo sapiens
aatcgcttgaacctg

SEQ ID NO: 139966 - DNA, 15 bp, Homo sapiens
gaatcgcttgaacct

SEQ ID NO: 139967 - DNA, 15 bp, Homo sapiens
ggaatcgcttgaacc

SEQ ID NO: 139968 - DNA, 15 bp, Homo sapiens
aggaatcgcttgaac

SEQ ID NO: 139969 - DNA, 15 bp, Homo sapiens
caggaatcgcttgaa

SEQ ID NO: 139970 - DNA, 15 bp, Homo sapiens
acaggaatcgcttga

SEQ ID NO: 139971 - DNA, 15 bp, Homo sapiens
cacaggaatcgcttg

SEQ ID NO: 139972 - DNA, 15 bp, Homo sapiens
gcacaggaatcgctt

SEQ ID NO: 139973 - DNA, 15 bp, Homo sapiens
ggcacaggaatcgct

SEQ ID NO: 139974 - DNA, 15 bp, Homo sapiens
aggcacaggaatcgc

SEQ ID NO: 139975 - DNA, 15 bp, Homo sapiens
gaggcacaggaatcg

SEQ ID NO: 139976 - DNA, 15 bp, Homo sapiens
tgaggcacaggaatc

SEQ ID NO: 139977 - DNA, 15 bp, Homo sapiens
ctgaggcacaggaat

SEQ ID NO: 139978 - DNA, 15 bp, Homo sapiens
gctgaggcacaggaa

SEQ ID NO: 139979 - DNA, 15 bp, Homo sapiens
ggctgaggcacagga

SEQ ID NO: 139980 - DNA, 15 bp, Homo sapiens
aggctgaggcacagg

SEQ ID NO: 139981 - DNA, 15 bp, Homo sapiens
gaggctgaggcacag

SEQ ID NO: 139982 - DNA, 15 bp, Homo sapiens
ggaggctgaggcaca

SEQ ID NO: 139983 - DNA, 15 bp, Homo sapiens
gggaggctgaggcac

SEQ ID NO: 139984 - DNA, 15 bp, Homo sapiens
agggaggctgaggca

SEQ ID NO: 139985 - DNA, 15 bp, Homo sapiens
tagggaggctgaggc

SEQ ID NO: 139986 - DNA, 15 bp, Homo sapiens
ctagggaggctgagg

SEQ ID NO: 139987 - DNA, 15 bp, Homo sapiens
actagggaggctgag

SEQ ID NO: 139988 - DNA, 15 bp, Homo sapiens
tactagggaggctga

SEQ ID NO: 139989 - DNA, 15 bp, Homo sapiens
ctactagggaggctg

SEQ ID NO: 139990 - DNA, 15 bp, Homo sapiens
gctactagggaggct

SEQ ID NO: 139991 - DNA, 15 bp, Homo sapiens
agctactagggaggc

SEQ ID NO: 139992 - DNA, 15 bp, Homo sapiens
cagctactagggagg

SEQ ID NO: 139993 - DNA, 15 bp, Homo sapiens
ccagctactagggag

SEQ ID NO: 139994 - DNA, 15 bp, Homo sapiens
cccagctactaggga

SEQ ID NO: 139995 - DNA, 15 bp, Homo sapiens
tcccagctactaggg

SEQ ID NO: 139996 - DNA, 15 bp, Homo sapiens
gtcccagctactagg

SEQ ID NO: 139997 - DNA, 15 bp, Homo sapiens
agtcccagctactag

SEQ ID NO: 139998 - DNA, 15 bp, Homo sapiens
tagtcccagctacta

SEQ ID NO: 139999 - DNA, 15 bp, Homo sapiens
gtagtcccagctact

SEQ ID NO: 140000 - DNA, 15 bp, Homo sapiens
tgtagtcccagctac

SEQ ID NO: 140001 - DNA, 15 bp, Homo sapiens
ctgtagtcccagcta

SEQ ID NO: 140002 - DNA, 15 bp, Homo sapiens
cctgtagtcccagct

SEQ ID NO: 140003 - DNA, 15 bp, Homo sapiens
gcctgtagtcccagc

SEQ ID NO: 140004 - DNA, 15 bp, Homo sapiens
tgcctgtagtcccag

SEQ ID NO: 140005 - DNA, 15 bp, Homo sapiens
gtgcctgtagtccca

SEQ ID NO: 140006 - DNA, 15 bp, Homo sapiens
ggtgcctgtagtccc

SEQ ID NO: 140007 - DNA, 15 bp, Homo sapiens
aggtgcctgtagtcc

SEQ ID NO: 140008 - DNA, 15 bp, Homo sapiens
caggtgcctgtagtc

SEQ ID NO: 140009 - DNA, 15 bp, Homo sapiens
acaggtgcctgtagt

SEQ ID NO: 140010 - DNA, 15 bp, Homo sapiens
gacaggtgcctgtag

SEQ ID NO: 140011 - DNA, 15 bp, Homo sapiens
tgacaggtgcctgta

SEQ ID NO: 140012 - DNA, 15 bp, Homo sapiens
gtgacaggtgcctgt

SEQ ID NO: 140013 - DNA, 15 bp, Homo sapiens
ggtgacaggtgcctg

SEQ ID NO: 140014 - DNA, 15 bp, Homo sapiens
tggtgacaggtgcct

SEQ ID NO: 140015 - DNA, 15 bp, Homo sapiens
atggtgacaggtgcc

SEQ ID NO: 140016 - DNA, 15 bp, Homo sapiens
catggtgacaggtgc

SEQ ID NO: 140017 - DNA, 15 bp, Homo sapiens
gcatggtgacaggtg

SEQ ID NO: 140018 - DNA, 15 bp, Homo sapiens
ggcatggtgacaggt

SEQ ID NO: 140019 - DNA, 15 bp, Homo sapiens
gggcatggtgacagg

SEQ ID NO: 140020 - DNA, 15 bp, Homo sapiens
tgggcatggtgacag

SEQ ID NO: 140021 - DNA, 15 bp, Homo sapiens
ttgggcatggtgaca

SEQ ID NO: 140022 - DNA, 15 bp, Homo sapiens
gttgggcatggtgac

SEQ ID NO: 140023 - DNA, 15 bp, Homo sapiens
agttgggcatggtga

SEQ ID NO: 140024 - DNA, 15 bp, Homo sapiens
tagttgggcatggtg

SEQ ID NO: 140025 - DNA, 15 bp, Homo sapiens
ttagttgggcatggt

SEQ ID NO: 140026 - DNA, 15 bp, Homo sapiens
attagttgggcatgg

SEQ ID NO: 140027 - DNA, 15 bp, Homo sapiens
aattagttgggcatg

SEQ ID NO: 140028 - DNA, 15 bp, Homo sapiens
aaattagttgggcat

SEQ ID NO: 140029 - DNA, 15 bp, Homo sapiens
aaaattagttgggca

SEQ ID NO: 140030 - DNA, 15 bp, Homo sapiens
aaaaattagttgggc

SEQ ID NO: 140031 - DNA, 15 bp, Homo sapiens
caaaaattagttggg

SEQ ID NO: 140032 - DNA, 15 bp, Homo sapiens
acaaaaattagttgg

SEQ ID NO: 140033 - DNA, 15 bp, Homo sapiens
tacaaaaattagttg

SEQ ID NO: 140034 - DNA, 15 bp, Homo sapiens
atacaaaaattagtt

SEQ ID NO: 140035 - DNA, 15 bp, Homo sapiens
aatacaaaaattagt

SEQ ID NO: 140036 - DNA, 15 bp, Homo sapiens
aaaaaatacaaaaat

SEQ ID NO: 140037 - DNA, 15 bp, Homo sapiens
aaaaaaatacaaaaa

SEQ ID NO: 140038 - DNA, 15 bp, Homo sapiens
caaaaaaatacaaaa

SEQ ID NO: 140039 - DNA, 15 bp, Homo sapiens
acaaaaaaatacaaa

SEQ ID NO: 140040 - DNA, 15 bp, Homo sapiens
tacaaaaaaatacaa

SEQ ID NO: 140041 - DNA, 15 bp, Homo sapiens
ctacaaaaaaataca

SEQ ID NO: 140042 - DNA, 15 bp, Homo sapiens
tctacaaaaaaatac

SEQ ID NO: 140043 - DNA, 15 bp, Homo sapiens
ctctacaaaaaaata

SEQ ID NO: 140044 - DNA, 15 bp, Homo sapiens
tctctacaaaaaaat

SEQ ID NO: 140045 - DNA, 15 bp, Homo sapiens
atctctacaaaaaaa

SEQ ID NO: 140046 - DNA, 15 bp, Homo sapiens
catctctacaaaaaa

SEQ ID NO: 140047 - DNA, 15 bp, Homo sapiens
gcatctctacaaaaa

SEQ ID NO: 140048 - DNA, 15 bp, Homo sapiens
tgcatctctacaaaa

SEQ ID NO: 140049 - DNA, 15 bp, Homo sapiens
ctgcatctctacaaa

SEQ ID NO: 140050 - DNA, 15 bp, Homo sapiens
actgcatctctacaa

SEQ ID NO: 140051 - DNA, 15 bp, Homo sapiens
aactgcatctctaca

SEQ ID NO: 140052 - DNA, 15 bp, Homo sapiens
aaactgcatctctac

SEQ ID NO: 140053 - DNA, 15 bp, Homo sapiens
gaaactgcatctcta

SEQ ID NO: 140054 - DNA, 15 bp, Homo sapiens
cgaaactgcatctct

SEQ ID NO: 140055 - DNA, 15 bp, Homo sapiens
gcgaaactgcatctc

SEQ ID NO: 140056 - DNA, 15 bp, Homo sapiens
ggcgaaactgcatct

SEQ ID NO: 140057 - DNA, 15 bp, Homo sapiens
tggcgaaactgcatc

SEQ ID NO: 140058 - DNA, 15 bp, Homo sapiens
atggcgaaactgcat

SEQ ID NO: 140059 - DNA, 15 bp, Homo sapiens
catggcgaaactgca

SEQ ID NO: 140060 - DNA, 15 bp, Homo sapiens
acatggcgaaactgc

SEQ ID NO: 140061 - DNA, 15 bp, Homo sapiens
aacatggcgaaactg

SEQ ID NO: 140062 - DNA, 15 bp, Homo sapiens
caacatggcgaaact

SEQ ID NO: 140063 - DNA, 15 bp, Homo sapiens
aagaccagcctggcc

SEQ ID NO: 140064 - DNA, 15 bp, Homo sapiens
taagaccagcctggc

SEQ ID NO: 140065 - DNA, 15 bp, Homo sapiens
ttaagaccagcctgg

SEQ ID NO: 140066 - DNA, 15 bp, Homo sapiens
tttaagaccagcctg

SEQ ID NO: 140067 - DNA, 15 bp, Homo sapiens
gtttaagaccagcct

SEQ ID NO: 140068 - DNA, 15 bp, Homo sapiens
agtttaagaccagcc

SEQ ID NO: 140069 - DNA, 15 bp, Homo sapiens
gagtttaagaccagc

SEQ ID NO: 140070 - DNA, 15 bp, Homo sapiens
ggagtttaagaccag

SEQ ID NO: 140071 - DNA, 15 bp, Homo sapiens
aggagtttaagacca

SEQ ID NO: 140072 - DNA, 15 bp, Homo sapiens
taggagtttaagacc

SEQ ID NO: 140073 - DNA, 15 bp, Homo sapiens
ttaggagtttaagac

SEQ ID NO: 140074 - DNA, 15 bp, Homo sapiens
gttaggagtttaaga

SEQ ID NO: 140075 - DNA, 15 bp, Homo sapiens
ggttaggagtttaag

SEQ ID NO: 140076 - DNA, 15 bp, Homo sapiens
aggttaggagtttaa

SEQ ID NO: 140077 - DNA, 15 bp, Homo sapiens
gaggttaggagttta

SEQ ID NO: 140078 - DNA, 15 bp, Homo sapiens
tgaggttaggagttt

SEQ ID NO: 140079 - DNA, 15 bp, Homo sapiens
ctgaggttaggagtt

SEQ ID NO: 140080 - DNA, 15 bp, Homo sapiens
cctgaggttaggagt

SEQ ID NO: 140081 - DNA, 15 bp, Homo sapiens
acctgaggttaggag

SEQ ID NO: 140082 - DNA, 15 bp, Homo sapiens
cacctgaggttagga

SEQ ID NO: 140083 - DNA, 15 bp, Homo sapiens
tcacctgaggttagg

SEQ ID NO: 140084 - DNA, 15 bp, Homo sapiens
atcacctgaggttag

SEQ ID NO: 140085 - DNA, 15 bp, Homo sapiens
gatcacctgaggtta

SEQ ID NO: 140086 - DNA, 15 bp, Homo sapiens
acagatcacctgagg

SEQ ID NO: 140087 - DNA, 15 bp, Homo sapiens
gacagatcacctgag

SEQ ID NO: 140088 - DNA, 15 bp, Homo sapiens
agacagatcacctga

SEQ ID NO: 140089 - DNA, 15 bp, Homo sapiens
cagacagatcacctg

SEQ ID NO: 140090 - DNA, 15 bp, Homo sapiens
gcagacagatcacct

SEQ ID NO: 140091 - DNA, 15 bp, Homo sapiens
ggcagacagatcacc

SEQ ID NO: 140092 - DNA, 15 bp, Homo sapiens
aggcagacagatcac

SEQ ID NO: 140093 - DNA, 15 bp, Homo sapiens
aaggcagacagatca

SEQ ID NO: 140094 - DNA, 15 bp, Homo sapiens
caaggcagacagatc

SEQ ID NO: 140095 - DNA, 15 bp, Homo sapiens
ccaaggcagacagat

SEQ ID NO: 140096 - DNA, 15 bp, Homo sapiens
gccaaggcagacaga

SEQ ID NO: 140097 - DNA, 15 bp, Homo sapiens
ggccaaggcagacag

SEQ ID NO: 140098 - DNA, 15 bp, Homo sapiens
aggccaaggcagaca

SEQ ID NO: 140099 - DNA, 15 bp, Homo sapiens
gaggccaaggcagac

SEQ ID NO: 140100 - DNA, 15 bp, Homo sapiens
ggaggccaaggcaga

SEQ ID NO: 140101 - DNA, 15 bp, Homo sapiens
gggaggccaaggcag

SEQ ID NO: 140102 - DNA, 15 bp, Homo sapiens
tgggaggccaaggca

SEQ ID NO: 140103 - DNA, 15 bp, Homo sapiens
ttgggaggccaaggc

SEQ ID NO: 140104 - DNA, 15 bp, Homo sapiens
cactttgggaggcca

SEQ ID NO: 140105 - DNA, 15 bp, Homo sapiens
ggcctgtaatcccag

SEQ ID NO: 140106 - DNA, 15 bp, Homo sapiens
aggcctgtaatccca

SEQ ID NO: 140107 - DNA, 15 bp, Homo sapiens
caggcctgtaatccc

SEQ ID NO: 140108 - DNA, 15 bp, Homo sapiens
tcaggcctgtaatcc

SEQ ID NO: 140109 - DNA, 15 bp, Homo sapiens
ctcaggcctgtaatc

SEQ ID NO: 140110 - DNA, 15 bp, Homo sapiens
gctcaggcctgtaat

SEQ ID NO: 140111 - DNA, 15 bp, Homo sapiens
ggctcaggcctgtaa

SEQ ID NO: 140112 - DNA, 15 bp, Homo sapiens
tggctcaggcctgta

SEQ ID NO: 140113 - DNA, 15 bp, Homo sapiens
gtggctcaggcctgt

SEQ ID NO: 140114 - DNA, 15 bp, Homo sapiens
agtggctcaggcctg

SEQ ID NO: 140115 - DNA, 15 bp, Homo sapiens
cagtggctcaggcct

SEQ ID NO: 140116 - DNA, 15 bp, Homo sapiens
gcagtggctcaggcc

SEQ ID NO: 140117 - DNA, 15 bp, Homo sapiens
tgcagtggctcaggc

SEQ ID NO: 140118 - DNA, 15 bp, Homo sapiens
gtgcagtggctcagg

SEQ ID NO: 140119 - DNA, 15 bp, Homo sapiens
tgtgcagtggctcag

SEQ ID NO: 140120 - DNA, 15 bp, Homo sapiens
gtgtgcagtggctca

SEQ ID NO: 140121 - DNA, 15 bp, Homo sapiens
tgtgtgcagtggctc

SEQ ID NO: 140122 - DNA, 15 bp, Homo sapiens
ctgtgtgcagtggct

SEQ ID NO: 140123 - DNA, 15 bp, Homo sapiens
gctgtgtgcagtggc

SEQ ID NO: 140124 - DNA, 15 bp, Homo sapiens
ggctgtgtgcagtgg

SEQ ID NO: 140125 - DNA, 15 bp, Homo sapiens
tggctgtgtgcagtg

SEQ ID NO: 140126 - DNA, 15 bp, Homo sapiens
gtggctgtgtgcagt

SEQ ID NO: 140127 - DNA, 15 bp, Homo sapiens
tgtggctgtgtgcag

SEQ ID NO: 140128 - DNA, 15 bp, Homo sapiens
ttgtggctgtgtgca

SEQ ID NO: 140129 - DNA, 15 bp, Homo sapiens
gttgtggctgtgtgc

SEQ ID NO: 140130 - DNA, 15 bp, Homo sapiens
ggcctctttgggtaa

SEQ ID NO: 140131 - DNA, 15 bp, Homo sapiens
tggcctctttgggta

SEQ ID NO: 140132 - DNA, 15 bp, Homo sapiens
ctggcctctttgggt

SEQ ID NO: 140133 - DNA, 15 bp, Homo sapiens
gctggcctctttggg

SEQ ID NO: 140134 - DNA, 15 bp, Homo sapiens
tgctggcctctttgg

SEQ ID NO: 140135 - DNA, 15 bp, Homo sapiens
ctgctggcctctttg

SEQ ID NO: 140136 - DNA, 15 bp, Homo sapiens
tctgctggcctcttt

SEQ ID NO: 140137 - DNA, 15 bp, Homo sapiens
atctgctggcctctt

SEQ ID NO: 140138 - DNA, 15 bp, Homo sapiens
catctgctggcctct

SEQ ID NO: 140139 - DNA, 15 bp, Homo sapiens
ccatctgctggcctc

SEQ ID NO: 140140 - DNA, 15 bp, Homo sapiens
gccatctgctggcct

SEQ ID NO: 140141 - DNA, 15 bp, Homo sapiens
cgccatctgctggcc

SEQ ID NO: 140142 - DNA, 15 bp, Homo sapiens
gcgccatctgctggc

SEQ ID NO: 140143 - DNA, 15 bp, Homo sapiens
ggcgccatctgctgg

SEQ ID NO: 140144 - DNA, 15 bp, Homo sapiens
tggcgccatctgctg

SEQ ID NO: 140145 - DNA, 15 bp, Homo sapiens
ttggcgccatctgct

SEQ ID NO: 140146 - DNA, 15 bp, Homo sapiens
cttggcgccatctgc

SEQ ID NO: 140147 - DNA, 15 bp, Homo sapiens
ccttggcgccatctg

SEQ ID NO: 140148 - DNA, 15 bp, Homo sapiens
accttggcgccatct

SEQ ID NO: 140149 - DNA, 15 bp, Homo sapiens
aaccttggcgccatc

SEQ ID NO: 140150 - DNA, 15 bp, Homo sapiens
gaaccttggcgccat

SEQ ID NO: 140151 - DNA, 15 bp, Homo sapiens
ggaaccttggcgcca

SEQ ID NO: 140152 - DNA, 15 bp, Homo sapiens
gggaaccttggcgcc

SEQ ID NO: 140153 - DNA, 15 bp, Homo sapiens
ggggaaccttggcgc

SEQ ID NO: 140154 - DNA, 15 bp, Homo sapiens
aggggaaccttggcg

SEQ ID NO: 140155 - DNA, 15 bp, Homo sapiens
aaggggaaccttggc

SEQ ID NO: 140156 - DNA, 15 bp, Homo sapiens
aaaggggaaccttgg

SEQ ID NO: 140157 - DNA, 15 bp, Homo sapiens
gaaaggggaaccttg

SEQ ID NO: 140158 - DNA, 15 bp, Homo sapiens
ggaaaggggaacctt

SEQ ID NO: 140159 - DNA, 15 bp, Homo sapiens
gggaaaggggaacct

SEQ ID NO: 140160 - DNA, 15 bp, Homo sapiens
ggggaaaggggaacc

SEQ ID NO: 140161 - DNA, 15 bp, Homo sapiens
tggggaaaggggaac

SEQ ID NO: 140162 - DNA, 15 bp, Homo sapiens
ctggggaaaggggaa

SEQ ID NO: 140163 - DNA, 15 bp, Homo sapiens
gctggggaaagggga

SEQ ID NO: 140164 - DNA, 15 bp, Homo sapiens
cgctggggaaagggg

SEQ ID NO: 140165 - DNA, 15 bp, Homo sapiens
gcgctggggaaaggg

SEQ ID NO: 140166 - DNA, 15 bp, Homo sapiens
agcgctggggaaagg

SEQ ID NO: 140167 - DNA, 15 bp, Homo sapiens
cagcgctggggaaag

SEQ ID NO: 140168 - DNA, 15 bp, Homo sapiens
ccagcgctggggaaa

SEQ ID NO: 140169 - DNA, 15 bp, Homo sapiens
tccagcgctggggaa

SEQ ID NO: 140170 - DNA, 15 bp, Homo sapiens
gtccagcgctgggga

SEQ ID NO: 140171 - DNA, 15 bp, Homo sapiens
agtccagcgctgggg

SEQ ID NO: 140172 - DNA, 15 bp, Homo sapiens
cagtccagcgctggg

SEQ ID NO: 140173 - DNA, 15 bp, Homo sapiens
ccagtccagcgctgg

SEQ ID NO: 140174 - DNA, 15 bp, Homo sapiens
tccagtccagcgctg

SEQ ID NO: 140175 - DNA, 15 bp, Homo sapiens
ctccagtccagcgct

SEQ ID NO: 140176 - DNA, 15 bp, Homo sapiens
cctccagtccagcgc

SEQ ID NO: 140177 - DNA, 15 bp, Homo sapiens
gcctccagtccagcg

SEQ ID NO: 140178 - DNA, 15 bp, Homo sapiens
ggcctccagtccagc

SEQ ID NO: 140179 - DNA, 15 bp, Homo sapiens
tggcctccagtccag

SEQ ID NO: 140180 - DNA, 15 bp, Homo sapiens
ttggcctccagtcca

SEQ ID NO: 140181 - DNA, 15 bp, Homo sapiens
cttggcctccagtcc

SEQ ID NO: 140182 - DNA, 15 bp, Homo sapiens
tcttggcctccagtc

SEQ ID NO: 140183 - DNA, 15 bp, Homo sapiens
gtcttggcctccagt

SEQ ID NO: 140184 - DNA, 15 bp, Homo sapiens
ggtcttggcctccag

SEQ ID NO: 140185 - DNA, 15 bp, Homo sapiens
gggtcttggcctcca

SEQ ID NO: 140186 - DNA, 15 bp, Homo sapiens
ggggtcttggcctcc

SEQ ID NO: 140187 - DNA, 15 bp, Homo sapiens
tggggtcttggcctc

SEQ ID NO: 140188 - DNA, 15 bp, Homo sapiens
gtggggtcttggcct

SEQ ID NO: 140189 - DNA, 15 bp, Homo sapiens
ggtggggtcttggcc

SEQ ID NO: 140190 - DNA, 15 bp, Homo sapiens
tggtggggtcttggc

SEQ ID NO: 140191 - DNA, 15 bp, Homo sapiens
ctggtggggtcttgg

SEQ ID NO: 140192 - DNA, 15 bp, Homo sapiens
cctggtggggtcttg

SEQ ID NO: 140193 - DNA, 15 bp, Homo sapiens
tcctggtggggtctt

SEQ ID NO: 140194 - DNA, 15 bp, Homo sapiens
gtcctggtggggtct

SEQ ID NO: 140195 - DNA, 15 bp, Homo sapiens
ggtcctggtggggtc

SEQ ID NO: 140196 - DNA, 15 bp, Homo sapiens
gggtcctggtggggt

SEQ ID NO: 140197 - DNA, 15 bp, Homo sapiens
agggtcctggtgggg

SEQ ID NO: 140198 - DNA, 15 bp, Homo sapiens
gagggtcctggtggg

SEQ ID NO: 140199 - DNA, 15 bp, Homo sapiens
ggagggtcctggtgg

SEQ ID NO: 140200 - DNA, 15 bp, Homo sapiens
gggagggtcctggtg

SEQ ID NO: 140201 - DNA, 15 bp, Homo sapiens
agggagggtcctggt

SEQ ID NO: 140202 - DNA, 15 bp, Homo sapiens
gagggagggtcctgg

SEQ ID NO: 140203 - DNA, 15 bp, Homo sapiens
ggagggagggtcctg

SEQ ID NO: 140204 - DNA, 15 bp, Homo sapiens
aggagggagggtcct

SEQ ID NO: 140205 - DNA, 15 bp, Homo sapiens
aaggagggagggtcc

SEQ ID NO: 140206 - DNA, 15 bp, Homo sapiens
aaaggagggagggtc

SEQ ID NO: 140207 - DNA, 15 bp, Homo sapiens
aaaaggagggagggt

SEQ ID NO: 140208 - DNA, 15 bp, Homo sapiens
gaaaaggagggaggg

SEQ ID NO: 140209 - DNA, 15 bp, Homo sapiens
agaaaaggagggagg

SEQ ID NO: 140210 - DNA, 15 bp, Homo sapiens
gagaaaaggagggag

SEQ ID NO: 140211 - DNA, 15 bp, Homo sapiens
ggagaaaaggaggga

SEQ ID NO: 140212 - DNA, 15 bp, Homo sapiens
gggagaaaaggaggg

SEQ ID NO: 140213 - DNA, 15 bp, Homo sapiens
ggggagaaaaggagg

SEQ ID NO: 140214 - DNA, 15 bp, Homo sapiens
aggggagaaaaggag

SEQ ID NO: 140215 - DNA, 15 bp, Homo sapiens
caggggagaaaagga

SEQ ID NO: 140216 - DNA, 15 bp, Homo sapiens
gcaggggagaaaagg

SEQ ID NO: 140217 - DNA, 15 bp, Homo sapiens
tgcaggggagaaaag

SEQ ID NO: 140218 - DNA, 15 bp, Homo sapiens
ctgcaggggagaaaa

SEQ ID NO: 140219 - DNA, 15 bp, Homo sapiens
cctgcaggggagaaa

SEQ ID NO: 140220 - DNA, 15 bp, Homo sapiens
ccctgcaggggagaa

SEQ ID NO: 140221 - DNA, 15 bp, Homo sapiens
tccctgcaggggaga

SEQ ID NO: 140222 - DNA, 15 bp, Homo sapiens
gtccctgcaggggag

SEQ ID NO: 140223 - DNA, 15 bp, Homo sapiens
cgtccctgcagggga

SEQ ID NO: 140224 - DNA, 15 bp, Homo sapiens
ccgtccctgcagggg

SEQ ID NO: 140225 - DNA, 15 bp, Homo sapiens
cccgtccctgcaggg

SEQ ID NO: 140226 - DNA, 15 bp, Homo sapiens
tcccgtccctgcagg

SEQ ID NO: 140227 - DNA, 15 bp, Homo sapiens
ctcccgtccctgcag

SEQ ID NO: 140228 - DNA, 15 bp, Homo sapiens
actcccgtccctgca

SEQ ID NO: 140229 - DNA, 15 bp, Homo sapiens
tactcccgtccctgc

SEQ ID NO: 140230 - DNA, 15 bp, Homo sapiens
ctactcccgtccctg

SEQ ID NO: 140231 - DNA, 15 bp, Homo sapiens
tctactcccgtccct

SEQ ID NO: 140232 - DNA, 15 bp, Homo sapiens
atctactcccgtccc

SEQ ID NO: 140233 - DNA, 15 bp, Homo sapiens
aatctactcccgtcc

SEQ ID NO: 140234 - DNA, 15 bp, Homo sapiens
gaatctactcccgtc

SEQ ID NO: 140235 - DNA, 15 bp, Homo sapiens
agaatctactcccgt

SEQ ID NO: 140236 - DNA, 15 bp, Homo sapiens
cagaatctactcccg

SEQ ID NO: 140237 - DNA, 15 bp, Homo sapiens
acagaatctactccc

SEQ ID NO: 140238 - DNA, 15 bp, Homo sapiens
cacagaatctactcc

SEQ ID NO: 140239 - DNA, 15 bp, Homo sapiens
acacagaatctactc

SEQ ID NO: 140240 - DNA, 15 bp, Homo sapiens
gacacagaatctact

SEQ ID NO: 140241 - DNA, 15 bp, Homo sapiens
ggacacagaatctac

SEQ ID NO: 140242 - DNA, 15 bp, Homo sapiens
aggacacagaatcta

SEQ ID NO: 140243 - DNA, 15 bp, Homo sapiens
gaggacacagaatct

SEQ ID NO: 140244 - DNA, 15 bp, Homo sapiens
agaggacacagaatc

SEQ ID NO: 140245 - DNA, 15 bp, Homo sapiens
tagaggacacagaat

SEQ ID NO: 140246 - DNA, 15 bp, Homo sapiens
ttagaggacacagaa

SEQ ID NO: 140247 - DNA, 15 bp, Homo sapiens
gttagaggacacaga

SEQ ID NO: 140248 - DNA, 15 bp, Homo sapiens
agttagaggacacag

SEQ ID NO: 140249 - DNA, 15 bp, Homo sapiens
cagttagaggacaca

SEQ ID NO: 140250 - DNA, 15 bp, Homo sapiens
tcagttagaggacac

SEQ ID NO: 140251 - DNA, 15 bp, Homo sapiens
ttcagttagaggaca

SEQ ID NO: 140252 - DNA, 15 bp, Homo sapiens
gttcagttagaggac

SEQ ID NO: 140253 - DNA, 15 bp, Homo sapiens
ggttcagttagagga

SEQ ID NO: 140254 - DNA, 15 bp, Homo sapiens
gggttcagttagagg

SEQ ID NO: 140255 - DNA, 15 bp, Homo sapiens
agggttcagttagag

SEQ ID NO: 140256 - DNA, 15 bp, Homo sapiens
gagggttcagttaga

SEQ ID NO: 140257 - DNA, 15 bp, Homo sapiens
agagggttcagttag

SEQ ID NO: 140258 - DNA, 15 bp, Homo sapiens
gagagggttcagtta

SEQ ID NO: 140259 - DNA, 15 bp, Homo sapiens
ggagagggttcagtt

SEQ ID NO: 140260 - DNA, 15 bp, Homo sapiens
aggagagggttcagt

SEQ ID NO: 140261 - DNA, 15 bp, Homo sapiens
aaggagagggttcag

SEQ ID NO: 140262 - DNA, 15 bp, Homo sapiens
gaaggagagggttca

SEQ ID NO: 140263 - DNA, 15 bp, Homo sapiens
ggaaggagagggttc

SEQ ID NO: 140264 - DNA, 15 bp, Homo sapiens
aggaaggagagggtt

SEQ ID NO: 140265 - DNA, 15 bp, Homo sapiens
caggaaggagagggt

SEQ ID NO: 140266 - DNA, 15 bp, Homo sapiens
gcaggaaggagaggg

SEQ ID NO: 140267 - DNA, 15 bp, Homo sapiens
agcaggaaggagagg

SEQ ID NO: 140268 - DNA, 15 bp, Homo sapiens
cagcaggaaggagag

SEQ ID NO: 140269 - DNA, 15 bp, Homo sapiens
ccagcaggaaggaga

SEQ ID NO: 140270 - DNA, 15 bp, Homo sapiens
accagcaggaaggag

SEQ ID NO: 140271 - DNA, 15 bp, Homo sapiens
aaccagcaggaagga

SEQ ID NO: 140272 - DNA, 15 bp, Homo sapiens
gaaccagcaggaagg

SEQ ID NO: 140273 - DNA, 15 bp, Homo sapiens
ggaaccagcaggaag

SEQ ID NO: 140274 - DNA, 15 bp, Homo sapiens
aggaaccagcaggaa

SEQ ID NO: 140275 - DNA, 15 bp, Homo sapiens
caggaaccagcagga

SEQ ID NO: 140276 - DNA, 15 bp, Homo sapiens
acaggaaccagcagg

SEQ ID NO: 140277 - DNA, 15 bp, Homo sapiens
cacaggaaccagcag

SEQ ID NO: 140278 - DNA, 15 bp, Homo sapiens
gcacaggaaccagca

SEQ ID NO: 140279 - DNA, 15 bp, Homo sapiens
agcacaggaaccagc

SEQ ID NO: 140280 - DNA, 15 bp, Homo sapiens
cagcacaggaaccag

SEQ ID NO: 140281 - DNA, 15 bp, Homo sapiens
ccagcacaggaacca

SEQ ID NO: 140282 - DNA, 15 bp, Homo sapiens
tccagcacaggaacc

SEQ ID NO: 140283 - DNA, 15 bp, Homo sapiens
ctccagcacaggaac

SEQ ID NO: 140284 - DNA, 15 bp, Homo sapiens
cctccagcacaggaa

SEQ ID NO: 140285 - DNA, 15 bp, Homo sapiens
gcctccagcacagga

SEQ ID NO: 140286 - DNA, 15 bp, Homo sapiens
ggcctccagcacagg

SEQ ID NO: 140287 - DNA, 15 bp, Homo sapiens
aggcctccagcacag

SEQ ID NO: 140288 - DNA, 15 bp, Homo sapiens
caggcctccagcaca

SEQ ID NO: 140289 - DNA, 15 bp, Homo sapiens
tcaggcctccagcac

SEQ ID NO: 140290 - DNA, 15 bp, Homo sapiens
ttcaggcctccagca

SEQ ID NO: 140291 - DNA, 15 bp, Homo sapiens
cttcaggcctccagc

SEQ ID NO: 140292 - DNA, 15 bp, Homo sapiens
tcttcaggcctccag

SEQ ID NO: 140293 - DNA, 15 bp, Homo sapiens
ctcttcaggcctcca

SEQ ID NO: 140294 - DNA, 15 bp, Homo sapiens
cctcttcaggcctcc

SEQ ID NO: 140295 - DNA, 15 bp, Homo sapiens
gcctcttcaggcctc

SEQ ID NO: 140296 - DNA, 15 bp, Homo sapiens
agcctcttcaggcct

SEQ ID NO: 140297 - DNA, 15 bp, Homo sapiens
gagcctcttcaggcc

SEQ ID NO: 140298 - DNA, 15 bp, Homo sapiens
ggagcctcttcaggc

SEQ ID NO: 140299 - DNA, 15 bp, Homo sapiens
tggagcctcttcagg

SEQ ID NO: 140300 - DNA, 15 bp, Homo sapiens
ctggagcctcttcag

SEQ ID NO: 140301 - DNA, 15 bp, Homo sapiens
actggagcctcttca

SEQ ID NO: 140302 - DNA, 15 bp, Homo sapiens
aactggagcctcttc

SEQ ID NO: 140303 - DNA, 15 bp, Homo sapiens
caactggagcctctt

SEQ ID NO: 140304 - DNA, 15 bp, Homo sapiens
gcaactggagcctct

SEQ ID NO: 140305 - DNA, 15 bp, Homo sapiens
agcaactggagcctc

SEQ ID NO: 140306 - DNA, 15 bp, Homo sapiens
gagcaactggagcct

SEQ ID NO: 140307 - DNA, 15 bp, Homo sapiens
ggagcaactggagcc

SEQ ID NO: 140308 - DNA, 15 bp, Homo sapiens
aggagcaactggagc

SEQ ID NO: 140309 - DNA, 15 bp, Homo sapiens
caggagcaactggag

SEQ ID NO: 140310 - DNA, 15 bp, Homo sapiens
gcaggagcaactgga

SEQ ID NO: 140311 - DNA, 15 bp, Homo sapiens
cgcaggagcaactgg

SEQ ID NO: 140312 - DNA, 15 bp, Homo sapiens
ccgcaggagcaactg

SEQ ID NO: 140313 - DNA, 15 bp, Homo sapiens
cccgcaggagcaact

SEQ ID NO: 140314 - DNA, 15 bp, Homo sapiens
gcccgcaggagcaac

SEQ ID NO: 140315 - DNA, 15 bp, Homo sapiens
ggcccgcaggagcaa

SEQ ID NO: 140316 - DNA, 15 bp, Homo sapiens
aggcccgcaggagca

SEQ ID NO: 140317 - DNA, 15 bp, Homo sapiens
gaggcccgcaggagc

SEQ ID NO: 140318 - DNA, 15 bp, Homo sapiens
ggaggcccgcaggag

SEQ ID NO: 140319 - DNA, 15 bp, Homo sapiens
aggaggcccgcagga

SEQ ID NO: 140320 - DNA, 15 bp, Homo sapiens
caggaggcccgcagg

SEQ ID NO: 140321 - DNA, 15 bp, Homo sapiens
ccaggaggcccgcag

SEQ ID NO: 140322 - DNA, 15 bp, Homo sapiens
accaggaggcccgca

SEQ ID NO: 140323 - DNA, 15 bp, Homo sapiens
aaccaggaggcccgc

SEQ ID NO: 140324 - DNA, 15 bp, Homo sapiens
caaccaggaggcccg

SEQ ID NO: 140325 - DNA, 15 bp, Homo sapiens
acaaccaggaggccc

SEQ ID NO: 140326 - DNA, 15 bp, Homo sapiens
gacaaccaggaggcc

SEQ ID NO: 140327 - DNA, 15 bp, Homo sapiens
agacaaccaggaggc

SEQ ID NO: 140328 - DNA, 15 bp, Homo sapiens
aagacaaccaggagg

SEQ ID NO: 140329 - DNA, 15 bp, Homo sapiens
gaagacaaccaggag

SEQ ID NO: 140330 - DNA, 15 bp, Homo sapiens
ggaagacaaccagga

SEQ ID NO: 140331 - DNA, 15 bp, Homo sapiens
aggaagacaaccagg

SEQ ID NO: 140332 - DNA, 15 bp, Homo sapiens
caggaagacaaccag

SEQ ID NO: 140333 - DNA, 15 bp, Homo sapiens
acaggaagacaacca

SEQ ID NO: 140334 - DNA, 15 bp, Homo sapiens
gacaggaagacaacc

SEQ ID NO: 140335 - DNA, 15 bp, Homo sapiens
agacaggaagacaac

SEQ ID NO: 140336 - DNA, 15 bp, Homo sapiens
cagacaggaagacaa

SEQ ID NO: 140337 - DNA, 15 bp, Homo sapiens
tcagacaggaagaca

SEQ ID NO: 140338 - DNA, 15 bp, Homo sapiens
atcagacaggaagac

SEQ ID NO: 140339 - DNA, 15 bp, Homo sapiens
catcagacaggaaga

SEQ ID NO: 140340 - DNA, 15 bp, Homo sapiens
ccatcagacaggaag

SEQ ID NO: 140341 - DNA, 15 bp, Homo sapiens
tccatcagacaggaa

SEQ ID NO: 140342 - DNA, 15 bp, Homo sapiens
atccatcagacagga

SEQ ID NO: 140343 - DNA, 15 bp, Homo sapiens
catccatcagacagg

SEQ ID NO: 140344 - DNA, 15 bp, Homo sapiens
ccatccatcagacag

SEQ ID NO: 140345 - DNA, 15 bp, Homo sapiens
cccatccatcagaca

SEQ ID NO: 140346 - DNA, 15 bp, Homo sapiens
ccccatccatcagac

SEQ ID NO: 140347 - DNA, 15 bp, Homo sapiens
cccccatccatcaga

SEQ ID NO: 140348 - DNA, 15 bp, Homo sapiens
ccccccatccatcag

SEQ ID NO: 140349 - DNA, 15 bp, Homo sapiens
accccccatccatca

SEQ ID NO: 140350 - DNA, 15 bp, Homo sapiens
caccccccatccatc

SEQ ID NO: 140351 - DNA, 15 bp, Homo sapiens
ccaccccccatccat

SEQ ID NO: 140352 - DNA, 15 bp, Homo sapiens
cccaccccccatcca

SEQ ID NO: 140353 - DNA, 15 bp, Homo sapiens
ccccaccccccatcc

SEQ ID NO: 140354 - DNA, 15 bp, Homo sapiens
cccccaccccccatc

SEQ ID NO: 140355 - DNA, 15 bp, Homo sapiens
ccccccaccccccat

SEQ ID NO: 140356 - DNA, 15 bp, Homo sapiens
accccccacccccca

SEQ ID NO: 140357 - DNA, 15 bp, Homo sapiens
gaccccccacccccc

SEQ ID NO: 140358 - DNA, 15 bp, Homo sapiens
ggaccccccaccccc

SEQ ID NO: 140359 - DNA, 15 bp, Homo sapiens
gggaccccccacccc

SEQ ID NO: 140360 - DNA, 15 bp, Homo sapiens
agggaccccccaccc

SEQ ID NO: 140361 - DNA, 15 bp, Homo sapiens
tagggaccccccacc

SEQ ID NO: 140362 - DNA, 15 bp, Homo sapiens
ctagggaccccccac

SEQ ID NO: 140363 - DNA, 15 bp, Homo sapiens
cctagggacccccca

SEQ ID NO: 140364 - DNA, 15 bp, Homo sapiens
ccctagggacccccc

SEQ ID NO: 140365 - DNA, 15 bp, Homo sapiens
cccctagggaccccc

SEQ ID NO: 140366 - DNA, 15 bp, Homo sapiens
gcccctagggacccc

SEQ ID NO: 140367 - DNA, 15 bp, Homo sapiens
agcccctagggaccc

SEQ ID NO: 140368 - DNA, 15 bp, Homo sapiens
tagcccctagggacc

SEQ ID NO: 140369 - DNA, 15 bp, Homo sapiens
ttagcccctagggac

SEQ ID NO: 140370 - DNA, 15 bp, Homo sapiens
cttagcccctaggga

SEQ ID NO: 140371 - DNA, 15 bp, Homo sapiens
gcttagcccctaggg

SEQ ID NO: 140372 - DNA, 15 bp, Homo sapiens
agcttagcccctagg

SEQ ID NO: 140373 - DNA, 15 bp, Homo sapiens
cagcttagcccctag

SEQ ID NO: 140374 - DNA, 15 bp, Homo sapiens
gcagcttagccccta

SEQ ID NO: 140375 - DNA, 15 bp, Homo sapiens
tgcagcttagcccct

SEQ ID NO: 140376 - DNA, 15 bp, Homo sapiens
ctgcagcttagcccc

SEQ ID NO: 140377 - DNA, 15 bp, Homo sapiens
gctgcagcttagccc

SEQ ID NO: 140378 - DNA, 15 bp, Homo sapiens
agctgcagcttagcc

SEQ ID NO: 140379 - DNA, 15 bp, Homo sapiens
cagctgcagcttagc

SEQ ID NO: 140380 - DNA, 15 bp, Homo sapiens
ccagctgcagcttag

SEQ ID NO: 140381 - DNA, 15 bp, Homo sapiens
accagctgcagctta

SEQ ID NO: 140382 - DNA, 15 bp, Homo sapiens
caccagctgcagctt

SEQ ID NO: 140383 - DNA, 15 bp, Homo sapiens
ccaccagctgcagct

SEQ ID NO: 140384 - DNA, 15 bp, Homo sapiens
cccaccagctgcagc

SEQ ID NO: 140385 - DNA, 15 bp, Homo sapiens
ccccaccagctgcag

SEQ ID NO: 140386 - DNA, 15 bp, Homo sapiens
gccccaccagctgca

SEQ ID NO: 140387 - DNA, 15 bp, Homo sapiens
cgccccaccagctgc

SEQ ID NO: 140388 - DNA, 15 bp, Homo sapiens
ccgccccaccagctg

SEQ ID NO: 140389 - DNA, 15 bp, Homo sapiens
cccgccccaccagct

SEQ ID NO: 140390 - DNA, 15 bp, Homo sapiens
ccccgccccaccagc

SEQ ID NO: 140391 - DNA, 15 bp, Homo sapiens
gccccgccccaccag

SEQ ID NO: 140392 - DNA, 15 bp, Homo sapiens
ggccccgccccacca

SEQ ID NO: 140393 - DNA, 15 bp, Homo sapiens
cggccccgccccacc

SEQ ID NO: 140394 - DNA, 15 bp, Homo sapiens
ccggccccgccccac

SEQ ID NO: 140395 - DNA, 15 bp, Homo sapiens
cccggccccgcccca

SEQ ID NO: 140396 - DNA, 15 bp, Homo sapiens
acccggccccgcccc

SEQ ID NO: 140397 - DNA, 15 bp, Homo sapiens
cacccggccccgccc

SEQ ID NO: 140398 - DNA, 15 bp, Homo sapiens
ccacccggccccgcc

SEQ ID NO: 140399 - DNA, 15 bp, Homo sapiens
cccacccggccccgc

SEQ ID NO: 140400 - DNA, 15 bp, Homo sapiens
ccccacccggccccg

SEQ ID NO: 140401 - DNA, 15 bp, Homo sapiens
accccacccggcccc

SEQ ID NO: 140402 - DNA, 15 bp, Homo sapiens
caccccacccggccc

SEQ ID NO: 140403 - DNA, 15 bp, Homo sapiens
ccaccccacccggcc

SEQ ID NO: 140404 - DNA, 15 bp, Homo sapiens
cccaccccacccggc

SEQ ID NO: 140405 - DNA, 15 bp, Homo sapiens
ccccaccccacccgg

SEQ ID NO: 140406 - DNA, 15 bp, Homo sapiens
gccccaccccacccg

SEQ ID NO: 140407 - DNA, 15 bp, Homo sapiens
tgccccaccccaccc

SEQ ID NO: 140408 - DNA, 15 bp, Homo sapiens
ctgccccaccccacc

SEQ ID NO: 140409 - DNA, 15 bp, Homo sapiens
cctgccccaccccac

SEQ ID NO: 140410 - DNA, 15 bp, Homo sapiens
gcctgccccacccca

SEQ ID NO: 140411 - DNA, 15 bp, Homo sapiens
tgcctgccccacccc

SEQ ID NO: 140412 - DNA, 15 bp, Homo sapiens
ctgcctgccccaccc

SEQ ID NO: 140413 - DNA, 15 bp, Homo sapiens
gctgcctgccccacc

SEQ ID NO: 140414 - DNA, 15 bp, Homo sapiens
tgctgcctgccccac

SEQ ID NO: 140415 - DNA, 15 bp, Homo sapiens
ctgctgcctgcccca

SEQ ID NO: 140416 - DNA, 15 bp, Homo sapiens
gctgctgcctgcccc

SEQ ID NO: 140417 - DNA, 15 bp, Homo sapiens
agctgctgcctgccc

SEQ ID NO: 140418 - DNA, 15 bp, Homo sapiens
cagctgctgcctgcc

SEQ ID NO: 140419 - DNA, 15 bp, Homo sapiens
gcagctgctgcctgc

SEQ ID NO: 140420 - DNA, 15 bp, Homo sapiens
cgcagctgctgcctg

SEQ ID NO: 140421 - DNA, 15 bp, Homo sapiens
ccgcagctgctgcct

SEQ ID NO: 140422 - DNA, 15 bp, Homo sapiens
cccgcagctgctgcc

SEQ ID NO: 140423 - DNA, 15 bp, Homo sapiens
ccccgcagctgctgc

SEQ ID NO: 140424 - DNA, 15 bp, Homo sapiens
tccccgcagctgctg

SEQ ID NO: 140425 - DNA, 15 bp, Homo sapiens
ctccccgcagctgct

SEQ ID NO: 140426 - DNA, 15 bp, Homo sapiens
tctccccgcagctgc

SEQ ID NO: 140427 - DNA, 15 bp, Homo sapiens
ttctccccgcagctg

SEQ ID NO: 140428 - DNA, 15 bp, Homo sapiens
tttctccccgcagct

SEQ ID NO: 140429 - DNA, 15 bp, Homo sapiens
ctttctccccgcagc

SEQ ID NO: 140430 - DNA, 15 bp, Homo sapiens
tctttctccccgcag

SEQ ID NO: 140431 - DNA, 15 bp, Homo sapiens
ctctttctccccgca

SEQ ID NO: 140432 - DNA, 15 bp, Homo sapiens
tctctttctccccgc

SEQ ID NO: 140433 - DNA, 15 bp, Homo sapiens
ctctctttctccccg

SEQ ID NO: 140434 - DNA, 15 bp, Homo sapiens
tctctctttctcccc

SEQ ID NO: 140435 - DNA, 15 bp, Homo sapiens
ctctctctttctccc

SEQ ID NO: 140436 - DNA, 15 bp, Homo sapiens
tctctctctttctcc

SEQ ID NO: 140437 - DNA, 15 bp, Homo sapiens
ttctctctctttctc

SEQ ID NO: 140438 - DNA, 15 bp, Homo sapiens
cttctctctctttct

SEQ ID NO: 140439 - DNA, 15 bp, Homo sapiens
tcttctctctctttc

SEQ ID NO: 140440 - DNA, 15 bp, Homo sapiens
atcttctctctcttt

SEQ ID NO: 140441 - DNA, 15 bp, Homo sapiens
tatcttctctctctt

SEQ ID NO: 140442 - DNA, 15 bp, Homo sapiens
ttatcttctctctct

SEQ ID NO: 140443 - DNA, 15 bp, Homo sapiens
attatcttctctctc

SEQ ID NO: 140444 - DNA, 15 bp, Homo sapiens
tattatcttctctct

SEQ ID NO: 140445 - DNA, 15 bp, Homo sapiens
ttattatcttctctc

SEQ ID NO: 140446 - DNA, 15 bp, Homo sapiens
cttattatcttctct

SEQ ID NO: 140447 - DNA, 15 bp, Homo sapiens
ccttattatcttctc

SEQ ID NO: 140448 - DNA, 15 bp, Homo sapiens
cccttattatcttct

SEQ ID NO: 140449 - DNA, 15 bp, Homo sapiens
ccccttattatcttc

SEQ ID NO: 140450 - DNA, 15 bp, Homo sapiens
tccccttattatctt

SEQ ID NO: 140451 - DNA, 15 bp, Homo sapiens
ctccccttattatct

SEQ ID NO: 140452 - DNA, 15 bp, Homo sapiens
tctccccttattatc

SEQ ID NO: 140453 - DNA, 15 bp, Homo sapiens
ctctccccttattat

SEQ ID NO: 140454 - DNA, 15 bp, Homo sapiens
tctctccccttatta

SEQ ID NO: 140455 - DNA, 15 bp, Homo sapiens
ttctctccccttatt

SEQ ID NO: 140456 - DNA, 15 bp, Homo sapiens
tttctctccccttat

SEQ ID NO: 140457 - DNA, 15 bp, Homo sapiens
ctttctctcccctta

SEQ ID NO: 140458 - DNA, 15 bp, Homo sapiens
tctttctctcccctt

SEQ ID NO: 140459 - DNA, 15 bp, Homo sapiens
ctctttctctcccct

SEQ ID NO: 140460 - DNA, 15 bp, Homo sapiens
tctctttctctcccc

SEQ ID NO: 140461 - DNA, 15 bp, Homo sapiens
ttctctttctctccc

SEQ ID NO: 140462 - DNA, 15 bp, Homo sapiens
tttctctttctctcc

SEQ ID NO: 140463 - DNA, 15 bp, Homo sapiens
ctttctctttctctc

SEQ ID NO: 140464 - DNA, 15 bp, Homo sapiens
tctttctctttctct

SEQ ID NO: 140465 - DNA, 15 bp, Homo sapiens
ctctttctctttctc

SEQ ID NO: 140466 - DNA, 15 bp, Homo sapiens
tctctttctctttct

SEQ ID NO: 140467 - DNA, 15 bp, Homo sapiens
ctctctttctctttc

SEQ ID NO: 140468 - DNA, 15 bp, Homo sapiens
gctctctttctcttt

SEQ ID NO: 140469 - DNA, 15 bp, Homo sapiens
tgctctctttctctt

SEQ ID NO: 140470 - DNA, 15 bp, Homo sapiens
ttgctctctttctct

SEQ ID NO: 140471 - DNA, 15 bp, Homo sapiens
tttgctctctttctc

SEQ ID NO: 140472 - DNA, 15 bp, Homo sapiens
ctttgctctctttct

SEQ ID NO: 140473 - DNA, 15 bp, Homo sapiens
tctttgctctctttc

SEQ ID NO: 140474 - DNA, 15 bp, Homo sapiens
ctctttgctctcttt

SEQ ID NO: 140475 - DNA, 15 bp, Homo sapiens
tctctttgctctctt

SEQ ID NO: 140476 - DNA, 15 bp, Homo sapiens
ttctctttgctctct

SEQ ID NO: 140477 - DNA, 15 bp, Homo sapiens
tttctctttgctctc

SEQ ID NO: 140478 - DNA, 15 bp, Homo sapiens
ttttctctttgctct

SEQ ID NO: 140479 - DNA, 15 bp, Homo sapiens
cttttctctttgctc

SEQ ID NO: 140480 - DNA, 15 bp, Homo sapiens
tcttttctctttgct

SEQ ID NO: 140481 - DNA, 15 bp, Homo sapiens
ctcttttctctttgc

SEQ ID NO: 140482 - DNA, 15 bp, Homo sapiens
tctcttttctctttg

SEQ ID NO: 140483 - DNA, 15 bp, Homo sapiens
ctctcttttctcttt

SEQ ID NO: 140484 - DNA, 15 bp, Homo sapiens
tctctcttttctctt

SEQ ID NO: 140485 - DNA, 15 bp, Homo sapiens
ctctctcttttctct

SEQ ID NO: 140486 - DNA, 15 bp, Homo sapiens
tctctctcttttctc

SEQ ID NO: 140487 - DNA, 15 bp, Homo sapiens
ctctctctcttttct

SEQ ID NO: 140488 - DNA, 15 bp, Homo sapiens
tctctctctcttttc

SEQ ID NO: 140489 - DNA, 15 bp, Homo sapiens
ctctctctctctttt

SEQ ID NO: 140490 - DNA, 15 bp, Homo sapiens
cctctctctctcttt

SEQ ID NO: 140491 - DNA, 15 bp, Homo sapiens
acctctctctctctt

SEQ ID NO: 140492 - DNA, 15 bp, Homo sapiens
cacctctctctctct

SEQ ID NO: 140493 - DNA, 15 bp, Homo sapiens
gcacctctctctctc

SEQ ID NO: 140494 - DNA, 15 bp, Homo sapiens
agcacctctctctct

SEQ ID NO: 140495 - DNA, 15 bp, Homo sapiens
gagcacctctctctc

SEQ ID NO: 140496 - DNA, 15 bp, Homo sapiens
agagcacctctctct

SEQ ID NO: 140497 - DNA, 15 bp, Homo sapiens
cagagcacctctctc

SEQ ID NO: 140498 - DNA, 15 bp, Homo sapiens
ccagagcacctctct

SEQ ID NO: 140499 - DNA, 15 bp, Homo sapiens
gccagagcacctctc

SEQ ID NO: 140500 - DNA, 15 bp, Homo sapiens
agccagagcacctct

SEQ ID NO: 140501 - DNA, 15 bp, Homo sapiens
gagccagagcacctc

SEQ ID NO: 140502 - DNA, 15 bp, Homo sapiens
ggagccagagcacct

SEQ ID NO: 140503 - DNA, 15 bp, Homo sapiens
cggagccagagcacc

SEQ ID NO: 140504 - DNA, 15 bp, Homo sapiens
ccggagccagagcac

SEQ ID NO: 140505 - DNA, 15 bp, Homo sapiens
cccggagccagagca

SEQ ID NO: 140506 - DNA, 15 bp, Homo sapiens
ccccggagccagagc

SEQ ID NO: 140507 - DNA, 15 bp, Homo sapiens
gccccggagccagag

SEQ ID NO: 140508 - DNA, 15 bp, Homo sapiens
agccccggagccaga

SEQ ID NO: 140509 - DNA, 15 bp, Homo sapiens
gagccccggagccag

SEQ ID NO: 140510 - DNA, 15 bp, Homo sapiens
agagccccggagcca

SEQ ID NO: 140511 - DNA, 15 bp, Homo sapiens
aagagccccggagcc

SEQ ID NO: 140512 - DNA, 15 bp, Homo sapiens
gaagagccccggagc

SEQ ID NO: 140513 - DNA, 15 bp, Homo sapiens
agaagagccccggag

SEQ ID NO: 140514 - DNA, 15 bp, Homo sapiens
gagaagagccccgga

SEQ ID NO: 140515 - DNA, 15 bp, Homo sapiens
ggagaagagccccgg

SEQ ID NO: 140516 - DNA, 15 bp, Homo sapiens
gggagaagagccccg

SEQ ID NO: 140517 - DNA, 15 bp, Homo sapiens
tgggagaagagcccc

SEQ ID NO: 140518 - DNA, 15 bp, Homo sapiens
ttgggagaagagccc

SEQ ID NO: 140519 - DNA, 15 bp, Homo sapiens
tttgggagaagagcc

SEQ ID NO: 140520 - DNA, 15 bp, Homo sapiens
gtttgggagaagagc

SEQ ID NO: 140521 - DNA, 15 bp, Homo sapiens
cgtttgggagaagag

SEQ ID NO: 140522 - DNA, 15 bp, Homo sapiens
ccgtttgggagaaga

SEQ ID NO: 140523 - DNA, 15 bp, Homo sapiens
cccgtttgggagaag

SEQ ID NO: 140524 - DNA, 15 bp, Homo sapiens
acccgtttgggagaa

SEQ ID NO: 140525 - DNA, 15 bp, Homo sapiens
gacccgtttgggaga

SEQ ID NO: 140526 - DNA, 15 bp, Homo sapiens
cgacccgtttgggag

SEQ ID NO: 140527 - DNA, 15 bp, Homo sapiens
tcgacccgtttggga

SEQ ID NO: 140528 - DNA, 15 bp, Homo sapiens
ctcgacccgtttggg

SEQ ID NO: 140529 - DNA, 15 bp, Homo sapiens
cctcgacccgtttgg

SEQ ID NO: 140530 - DNA, 15 bp, Homo sapiens
acctcgacccgtttg

SEQ ID NO: 140531 - DNA, 15 bp, Homo sapiens
gacctcgacccgttt

SEQ ID NO: 140532 - DNA, 15 bp, Homo sapiens
ggacctcgacccgtt

SEQ ID NO: 140533 - DNA, 15 bp, Homo sapiens
gggacctcgacccgt

SEQ ID NO: 140534 - DNA, 15 bp, Homo sapiens
tgggacctcgacccg

SEQ ID NO: 140535 - DNA, 15 bp, Homo sapiens
ctgggacctcgaccc

SEQ ID NO: 140536 - DNA, 15 bp, Homo sapiens
gctgggacctcgacc

SEQ ID NO: 140537 - DNA, 15 bp, Homo sapiens
agctgggacctcgac

SEQ ID NO: 140538 - DNA, 15 bp, Homo sapiens
cagctgggacctcga

SEQ ID NO: 140539 - DNA, 15 bp, Homo sapiens
tcagctgggacctcg

SEQ ID NO: 140540 - DNA, 15 bp, Homo sapiens
ctcagctgggacctc

SEQ ID NO: 140541 - DNA, 15 bp, Homo sapiens
cctcagctgggacct

SEQ ID NO: 140542 - DNA, 15 bp, Homo sapiens
gcctcagctgggacc

SEQ ID NO: 140543 - DNA, 15 bp, Homo sapiens
agcctcagctgggac

SEQ ID NO: 140544 - DNA, 15 bp, Homo sapiens
gagcctcagctggga

SEQ ID NO: 140545 - DNA, 15 bp, Homo sapiens
agagcctcagctggg

SEQ ID NO: 140546 - DNA, 15 bp, Homo sapiens
gagagcctcagctgg

SEQ ID NO: 140547 - DNA, 15 bp, Homo sapiens
ggagagcctcagctg

SEQ ID NO: 140548 - DNA, 15 bp, Homo sapiens
gggagagcctcagct

SEQ ID NO: 140549 - DNA, 15 bp, Homo sapiens
tgggagagcctcagc

SEQ ID NO: 140550 - DNA, 15 bp, Homo sapiens
ctgggagagcctcag

SEQ ID NO: 140551 - DNA, 15 bp, Homo sapiens
cctgggagagcctca

SEQ ID NO: 140552 - DNA, 15 bp, Homo sapiens
tcctgggagagcctc

SEQ ID NO: 140553 - DNA, 15 bp, Homo sapiens
gtcctgggagagcct

SEQ ID NO: 140554 - DNA, 15 bp, Homo sapiens
tgtcctgggagagcc

SEQ ID NO: 140555 - DNA, 15 bp, Homo sapiens
ttgtcctgggagagc

SEQ ID NO: 140556 - DNA, 15 bp, Homo sapiens
cttgtcctgggagag

SEQ ID NO: 140557 - DNA, 15 bp, Homo sapiens
ccttgtcctgggaga

SEQ ID NO: 140558 - DNA, 15 bp, Homo sapiens
accttgtcctgggag

SEQ ID NO: 140559 - DNA, 15 bp, Homo sapiens
taccttgtcctggga

SEQ ID NO: 140560 - DNA, 15 bp, Homo sapiens
ataccttgtcctggg

SEQ ID NO: 140561 - DNA, 15 bp, Homo sapiens
cataccttgtcctgg

SEQ ID NO: 140562 - DNA, 15 bp, Homo sapiens
acataccttgtcctg

SEQ ID NO: 140563 - DNA, 15 bp, Homo sapiens
cacataccttgtcct

SEQ ID NO: 140564 - DNA, 15 bp, Homo sapiens
ccacataccttgtcc

SEQ ID NO: 140565 - DNA, 15 bp, Homo sapiens
gccacataccttgtc

SEQ ID NO: 140566 - DNA, 15 bp, Homo sapiens
cgccacataccttgt

SEQ ID NO: 140567 - DNA, 15 bp, Homo sapiens
ccgccacataccttg

SEQ ID NO: 140568 - DNA, 15 bp, Homo sapiens
cccgccacatacctt

SEQ ID NO: 140569 - DNA, 15 bp, Homo sapiens
ccccgccacatacct

SEQ ID NO: 140570 - DNA, 15 bp, Homo sapiens
cccccgccacatacc

SEQ ID NO: 140571 - DNA, 15 bp, Homo sapiens
tcccccgccacatac

SEQ ID NO: 140572 - DNA, 15 bp, Homo sapiens
ttcccccgccacata

SEQ ID NO: 140573 - DNA, 15 bp, Homo sapiens
tttcccccgccacat

SEQ ID NO: 140574 - DNA, 15 bp, Homo sapiens
atttcccccgccaca

SEQ ID NO: 140575 - DNA, 15 bp, Homo sapiens
catttcccccgccac

SEQ ID NO: 140576 - DNA, 15 bp, Homo sapiens
tcatttcccccgcca

SEQ ID NO: 140577 - DNA, 15 bp, Homo sapiens
atcatttcccccgcc

SEQ ID NO: 140578 - DNA, 15 bp, Homo sapiens
tatcatttcccccgc

SEQ ID NO: 140579 - DNA, 15 bp, Homo sapiens
ctatcatttcccccg

SEQ ID NO: 140580 - DNA, 15 bp, Homo sapiens
cctatcatttccccc

SEQ ID NO: 140581 - DNA, 15 bp, Homo sapiens
ccctatcatttcccc

SEQ ID NO: 140582 - DNA, 15 bp, Homo sapiens
gccctatcatttccc

SEQ ID NO: 140583 - DNA, 15 bp, Homo sapiens
agccctatcatttcc

SEQ ID NO: 140584 - DNA, 15 bp, Homo sapiens
cagccctatcatttc

SEQ ID NO: 140585 - DNA, 15 bp, Homo sapiens
ccagccctatcattt

SEQ ID NO: 140586 - DNA, 15 bp, Homo sapiens
cccagccctatcatt

SEQ ID NO: 140587 - DNA, 15 bp, Homo sapiens
gcccagccctatcat

SEQ ID NO: 140588 - DNA, 15 bp, Homo sapiens
tgcccagccctatca

SEQ ID NO: 140589 - DNA, 15 bp, Homo sapiens
ctgcccagccctatc

SEQ ID NO: 140590 - DNA, 15 bp, Homo sapiens
actgcccagccctat

SEQ ID NO: 140591 - DNA, 15 bp, Homo sapiens
cactgcccagcccta

SEQ ID NO: 140592 - DNA, 15 bp, Homo sapiens
acactgcccagccct

SEQ ID NO: 140593 - DNA, 15 bp, Homo sapiens
gacactgcccagccc

SEQ ID NO: 140594 - DNA, 15 bp, Homo sapiens
tgacactgcccagcc

SEQ ID NO: 140595 - DNA, 15 bp, Homo sapiens
gtgacactgcccagc

SEQ ID NO: 140596 - DNA, 15 bp, Homo sapiens
ggtgacactgcccag

SEQ ID NO: 140597 - DNA, 15 bp, Homo sapiens
gggtgacactgccca

SEQ ID NO: 140598 - DNA, 15 bp, Homo sapiens
agggtgacactgccc

SEQ ID NO: 140599 - DNA, 15 bp, Homo sapiens
cagggtgacactgcc

SEQ ID NO: 140600 - DNA, 15 bp, Homo sapiens
gcagggtgacactgc

SEQ ID NO: 140601 - DNA, 15 bp, Homo sapiens
ggcagggtgacactg

SEQ ID NO: 140602 - DNA, 15 bp, Homo sapiens
cggcagggtgacact

SEQ ID NO: 140603 - DNA, 15 bp, Homo sapiens
tcggcagggtgacac

SEQ ID NO: 140604 - DNA, 15 bp, Homo sapiens
ctcggcagggtgaca

SEQ ID NO: 140605 - DNA, 15 bp, Homo sapiens
actcggcagggtgac

SEQ ID NO: 140606 - DNA, 15 bp, Homo sapiens
cactcggcagggtga

SEQ ID NO: 140607 - DNA, 15 bp, Homo sapiens
ccactcggcagggtg

SEQ ID NO: 140608 - DNA, 15 bp, Homo sapiens
cccactcggcagggt

SEQ ID NO: 140609 - DNA, 15 bp, Homo sapiens
ccccactcggcaggg

SEQ ID NO: 140610 - DNA, 15 bp, Homo sapiens
gccccactcggcagg

SEQ ID NO: 140611 - DNA, 15 bp, Homo sapiens
tgccccactcggcag

SEQ ID NO: 140612 - DNA, 15 bp, Homo sapiens
ctgccccactcggca

SEQ ID NO: 140613 - DNA, 15 bp, Homo sapiens
cctgccccactcggc

SEQ ID NO: 140614 - DNA, 15 bp, Homo sapiens
acctgccccactcgg

SEQ ID NO: 140615 - DNA, 15 bp, Homo sapiens
gacctgccccactcg

SEQ ID NO: 140616 - DNA, 15 bp, Homo sapiens
agacctgccccactc

SEQ ID NO: 140617 - DNA, 15 bp, Homo sapiens
cagacctgccccact

SEQ ID NO: 140618 - DNA, 15 bp, Homo sapiens
ccagacctgccccac

SEQ ID NO: 140619 - DNA, 15 bp, Homo sapiens
cccagacctgcccca

SEQ ID NO: 140620 - DNA, 15 bp, Homo sapiens
ccccagacctgcccc

SEQ ID NO: 140621 - DNA, 15 bp, Homo sapiens
cccccagacctgccc

SEQ ID NO: 140622 - DNA, 15 bp, Homo sapiens
gcccccagacctgcc

SEQ ID NO: 140623 - DNA, 15 bp, Homo sapiens
tgcccccagacctgc

SEQ ID NO: 140624 - DNA, 15 bp, Homo sapiens
gtgcccccagacctg

SEQ ID NO: 140625 - DNA, 15 bp, Homo sapiens
agtgcccccagacct

SEQ ID NO: 140626 - DNA, 15 bp, Homo sapiens
cagtgcccccagacc

SEQ ID NO: 140627 - DNA, 15 bp, Homo sapiens
tcagtgcccccagac

SEQ ID NO: 140628 - DNA, 15 bp, Homo sapiens
ctcagtgcccccaga

SEQ ID NO: 140629 - DNA, 15 bp, Homo sapiens
cctcagtgcccccag

SEQ ID NO: 140630 - DNA, 15 bp, Homo sapiens
ccctcagtgccccca

SEQ ID NO: 140631 - DNA, 15 bp, Homo sapiens
cccctcagtgccccc

SEQ ID NO: 140632 - DNA, 15 bp, Homo sapiens
tcccctcagtgcccc

SEQ ID NO: 140633 - DNA, 15 bp, Homo sapiens
atcccctcagtgccc

SEQ ID NO: 140634 - DNA, 15 bp, Homo sapiens
catcccctcagtgcc

SEQ ID NO: 140635 - DNA, 15 bp, Homo sapiens
ccatcccctcagtgc

SEQ ID NO: 140636 - DNA, 15 bp, Homo sapiens
cccatcccctcagtg

SEQ ID NO: 140637 - DNA, 15 bp, Homo sapiens
gcccatcccctcagt

SEQ ID NO: 140638 - DNA, 15 bp, Homo sapiens
tgcccatcccctcag

SEQ ID NO: 140639 - DNA, 15 bp, Homo sapiens
ctgcccatcccctca

SEQ ID NO: 140640 - DNA, 15 bp, Homo sapiens
cctgcccatcccctc

SEQ ID NO: 140641 - DNA, 15 bp, Homo sapiens
tcctgcccatcccct

SEQ ID NO: 140642 - DNA, 15 bp, Homo sapiens
ttcctgcccatcccc

SEQ ID NO: 140643 - DNA, 15 bp, Homo sapiens
tttcctgcccatccc

SEQ ID NO: 140644 - DNA, 15 bp, Homo sapiens
ttttcctgcccatcc

SEQ ID NO: 140645 - DNA, 15 bp, Homo sapiens
attttcctgcccatc

SEQ ID NO: 140646 - DNA, 15 bp, Homo sapiens
aattttcctgcccat

SEQ ID NO: 140647 - DNA, 15 bp, Homo sapiens
gaattttcctgccca

SEQ ID NO: 140648 - DNA, 15 bp, Homo sapiens
agaattttcctgccc

SEQ ID NO: 140649 - DNA, 15 bp, Homo sapiens
cagaattttcctgcc

SEQ ID NO: 140650 - DNA, 15 bp, Homo sapiens
gcagaattttcctgc

SEQ ID NO: 140651 - DNA, 15 bp, Homo sapiens
agcagaattttcctg

SEQ ID NO: 140652 - DNA, 15 bp, Homo sapiens
cagcagaattttcct

SEQ ID NO: 140653 - DNA, 15 bp, Homo sapiens
gcagcagaattttcc

SEQ ID NO: 140654 - DNA, 15 bp, Homo sapiens
agcagcagaattttc

SEQ ID NO: 140655 - DNA, 15 bp, Homo sapiens
gagcagcagaatttt

SEQ ID NO: 140656 - DNA, 15 bp, Homo sapiens
tgagcagcagaattt

SEQ ID NO: 140657 - DNA, 15 bp, Homo sapiens
ttgagcagcagaatt

SEQ ID NO: 140658 - DNA, 15 bp, Homo sapiens
gttgagcagcagaat

SEQ ID NO: 140659 - DNA, 15 bp, Homo sapiens
tgttgagcagcagaa

SEQ ID NO: 140660 - DNA, 15 bp, Homo sapiens
ttgttgagcagcaga

SEQ ID NO: 140661 - DNA, 15 bp, Homo sapiens
cttgttgagcagcag

SEQ ID NO: 140662 - DNA, 15 bp, Homo sapiens
tcttgttgagcagca

SEQ ID NO: 140663 - DNA, 15 bp, Homo sapiens
ctcttgttgagcagc

SEQ ID NO: 140664 - DNA, 15 bp, Homo sapiens
gctcttgttgagcag

SEQ ID NO: 140665 - DNA, 15 bp, Homo sapiens
ggctcttgttgagca

SEQ ID NO: 140666 - DNA, 15 bp, Homo sapiens
gggctcttgttgagc

SEQ ID NO: 140667 - DNA, 15 bp, Homo sapiens
ggggctcttgttgag

SEQ ID NO: 140668 - DNA, 15 bp, Homo sapiens
aggggctcttgttga

SEQ ID NO: 140669 - DNA, 15 bp, Homo sapiens
taggggctcttgttg

SEQ ID NO: 140670 - DNA, 15 bp, Homo sapiens
ttaggggctcttgtt

SEQ ID NO: 140671 - DNA, 15 bp, Homo sapiens
cttaggggctcttgt

SEQ ID NO: 140672 - DNA, 15 bp, Homo sapiens
gcttaggggctcttg

SEQ ID NO: 140673 - DNA, 15 bp, Homo sapiens
agcttaggggctctt

SEQ ID NO: 140674 - DNA, 15 bp, Homo sapiens
gagcttaggggctct

SEQ ID NO: 140675 - DNA, 15 bp, Homo sapiens
cgagcttaggggctc

SEQ ID NO: 140676 - DNA, 15 bp, Homo sapiens
gcgagcttaggggct

SEQ ID NO: 140677 - DNA, 15 bp, Homo sapiens
agcgagcttaggggc

SEQ ID NO: 140678 - DNA, 15 bp, Homo sapiens
aagcgagcttagggg

SEQ ID NO: 140679 - DNA, 15 bp, Homo sapiens
gaagcgagcttaggg

SEQ ID NO: 140680 - DNA, 15 bp, Homo sapiens
ggaagcgagcttagg

SEQ ID NO: 140681 - DNA, 15 bp, Homo sapiens
tggaagcgagcttag

SEQ ID NO: 140682 - DNA, 15 bp, Homo sapiens
atggaagcgagctta

SEQ ID NO: 140683 - DNA, 15 bp, Homo sapiens
gatggaagcgagctt

SEQ ID NO: 140684 - DNA, 15 bp, Homo sapiens
agatggaagcgagct

SEQ ID NO: 140685 - DNA, 15 bp, Homo sapiens
gagatggaagcgagc

SEQ ID NO: 140686 - DNA, 15 bp, Homo sapiens
tgagatggaagcgag

SEQ ID NO: 140687 - DNA, 15 bp, Homo sapiens
gtgagatggaagcga

SEQ ID NO: 140688 - DNA, 15 bp, Homo sapiens
ggtgagatggaagcg

SEQ ID NO: 140689 - DNA, 15 bp, Homo sapiens
gggtgagatggaagc

SEQ ID NO: 140690 - DNA, 15 bp, Homo sapiens
ggggtgagatggaag

SEQ ID NO: 140691 - DNA, 15 bp, Homo sapiens
aggggtgagatggaa

SEQ ID NO: 140692 - DNA, 15 bp, Homo sapiens
aaggggtgagatgga

SEQ ID NO: 140693 - DNA, 15 bp, Homo sapiens
gaaggggtgagatgg

SEQ ID NO: 140694 - DNA, 15 bp, Homo sapiens
ggaaggggtgagatg

SEQ ID NO: 140695 - DNA, 15 bp, Homo sapiens
tggaaggggtgagat

SEQ ID NO: 140696 - DNA, 15 bp, Homo sapiens
ttggaaggggtgaga

SEQ ID NO: 140697 - DNA, 15 bp, Homo sapiens
cttggaaggggtgag

SEQ ID NO: 140698 - DNA, 15 bp, Homo sapiens
ccttggaaggggtga

SEQ ID NO: 140699 - DNA, 15 bp, Homo sapiens
accttggaaggggtg

SEQ ID NO: 140700 - DNA, 15 bp, Homo sapiens
caccttggaaggggt

SEQ ID NO: 140701 - DNA, 15 bp, Homo sapiens
tcaccttggaagggg

SEQ ID NO: 140702 - DNA, 15 bp, Homo sapiens
gtcaccttggaaggg

SEQ ID NO: 140703 - DNA, 15 bp, Homo sapiens
ggtcaccttggaagg

SEQ ID NO: 140704 - DNA, 15 bp, Homo sapiens
tggtcaccttggaag

SEQ ID NO: 140705 - DNA, 15 bp, Homo sapiens
ttggtcaccttggaa

SEQ ID NO: 140706 - DNA, 15 bp, Homo sapiens
cttggtcaccttgga

SEQ ID NO: 140707 - DNA, 15 bp, Homo sapiens
ccttggtcaccttgg

SEQ ID NO: 140708 - DNA, 15 bp, Homo sapiens
tccttggtcaccttg

SEQ ID NO: 140709 - DNA, 15 bp, Homo sapiens
ctccttggtcacctt

SEQ ID NO: 140710 - DNA, 15 bp, Homo sapiens
cctccttggtcacct

SEQ ID NO: 140711 - DNA, 15 bp, Homo sapiens
tcctccttggtcacc

SEQ ID NO: 140712 - DNA, 15 bp, Homo sapiens
ttcctccttggtcac

SEQ ID NO: 140713 - DNA, 15 bp, Homo sapiens
gttcctccttggtca

SEQ ID NO: 140714 - DNA, 15 bp, Homo sapiens
tgttcctccttggtc

SEQ ID NO: 140715 - DNA, 15 bp, Homo sapiens
gtgttcctccttggt

SEQ ID NO: 140716 - DNA, 15 bp, Homo sapiens
tgtgttcctccttgg

SEQ ID NO: 140717 - DNA, 15 bp, Homo sapiens
ctgtgttcctccttg

SEQ ID NO: 140718 - DNA, 15 bp, Homo sapiens
cctgtgttcctcctt

SEQ ID NO: 140719 - DNA, 15 bp, Homo sapiens
ccctgtgttcctcct

SEQ ID NO: 140720 - DNA, 15 bp, Homo sapiens
gccctgtgttcctcc

SEQ ID NO: 140721 - DNA, 15 bp, Homo sapiens
ggccctgtgttcctc

SEQ ID NO: 140722 - DNA, 15 bp, Homo sapiens
tggccctgtgttcct

SEQ ID NO: 140723 - DNA, 15 bp, Homo sapiens
ctggccctgtgttcc

SEQ ID NO: 140724 - DNA, 15 bp, Homo sapiens
gctggccctgtgttc

SEQ ID NO: 140725 - DNA, 15 bp, Homo sapiens
cgctggccctgtgtt

SEQ ID NO: 140726 - DNA, 15 bp, Homo sapiens
tcgctggccctgtgt

SEQ ID NO: 140727 - DNA, 15 bp, Homo sapiens
ttcgctggccctgtg

SEQ ID NO: 140728 - DNA, 15 bp, Homo sapiens
cttcgctggccctgt

SEQ ID NO: 140729 - DNA, 15 bp, Homo sapiens
ccttcgctggccctg

SEQ ID NO: 140730 - DNA, 15 bp, Homo sapiens
tccttcgctggccct

SEQ ID NO: 140731 - DNA, 15 bp, Homo sapiens
ctccttcgctggccc

SEQ ID NO: 140732 - DNA, 15 bp, Homo sapiens
actccttcgctggcc

SEQ ID NO: 140733 - DNA, 15 bp, Homo sapiens
gactccttcgctggc

SEQ ID NO: 140734 - DNA, 15 bp, Homo sapiens
ggactccttcgctgg

SEQ ID NO: 140735 - DNA, 15 bp, Homo sapiens
aggactccttcgctg

SEQ ID NO: 140736 - DNA, 15 bp, Homo sapiens
caggactccttcgct

SEQ ID NO: 140737 - DNA, 15 bp, Homo sapiens
ccaggactccttcgc

SEQ ID NO: 140738 - DNA, 15 bp, Homo sapiens
cccaggactccttcg

SEQ ID NO: 140739 - DNA, 15 bp, Homo sapiens
acccaggactccttc

SEQ ID NO: 140740 - DNA, 15 bp, Homo sapiens
cacccaggactcctt

SEQ ID NO: 140741 - DNA, 15 bp, Homo sapiens
ccacccaggactcct

SEQ ID NO: 140742 - DNA, 15 bp, Homo sapiens
cccacccaggactcc

SEQ ID NO: 140743 - DNA, 15 bp, Homo sapiens
gcccacccaggactc

SEQ ID NO: 140744 - DNA, 15 bp, Homo sapiens
tgcccacccaggact

SEQ ID NO: 140745 - DNA, 15 bp, Homo sapiens
atgcccacccaggac

SEQ ID NO: 140746 - DNA, 15 bp, Homo sapiens
tatgcccacccagga

SEQ ID NO: 140747 - DNA, 15 bp, Homo sapiens
ttatgcccacccagg

SEQ ID NO: 140748 - DNA, 15 bp, Homo sapiens
cttatgcccacccag

SEQ ID NO: 140749 - DNA, 15 bp, Homo sapiens
ccttatgcccaccca

SEQ ID NO: 140750 - DNA, 15 bp, Homo sapiens
tccttatgcccaccc

SEQ ID NO: 140751 - DNA, 15 bp, Homo sapiens
ctccttatgcccacc

SEQ ID NO: 140752 - DNA, 15 bp, Homo sapiens
tctccttatgcccac

SEQ ID NO: 140753 - DNA, 15 bp, Homo sapiens
ctctccttatgccca

SEQ ID NO: 140754 - DNA, 15 bp, Homo sapiens
cctctccttatgccc

SEQ ID NO: 140755 - DNA, 15 bp, Homo sapiens
tcctctccttatgcc

SEQ ID NO: 140756 - DNA, 15 bp, Homo sapiens
ctcctctccttatgc

SEQ ID NO: 140757 - DNA, 15 bp, Homo sapiens
cctcctctccttatg

SEQ ID NO: 140758 - DNA, 15 bp, Homo sapiens
ccctcctctccttat

SEQ ID NO: 140759 - DNA, 15 bp, Homo sapiens
accctcctctcctta

SEQ ID NO: 140760 - DNA, 15 bp, Homo sapiens
aaccctcctctcctt

SEQ ID NO: 140761 - DNA, 15 bp, Homo sapiens
caaccctcctctcct

SEQ ID NO: 140762 - DNA, 15 bp, Homo sapiens
acaaccctcctctcc

SEQ ID NO: 140763 - DNA, 15 bp, Homo sapiens
gacaaccctcctctc

SEQ ID NO: 140764 - DNA, 15 bp, Homo sapiens
agacaaccctcctct

SEQ ID NO: 140765 - DNA, 15 bp, Homo sapiens
tagacaaccctcctc

SEQ ID NO: 140766 - DNA, 15 bp, Homo sapiens
atagacaaccctcct

SEQ ID NO: 140767 - DNA, 15 bp, Homo sapiens
gatagacaaccctcc

SEQ ID NO: 140768 - DNA, 15 bp, Homo sapiens
cgatagacaaccctc

SEQ ID NO: 140769 - DNA, 15 bp, Homo sapiens
gcgatagacaaccct

SEQ ID NO: 140770 - DNA, 15 bp, Homo sapiens
agcgatagacaaccc

SEQ ID NO: 140771 - DNA, 15 bp, Homo sapiens
gagcgatagacaacc

SEQ ID NO: 140772 - DNA, 15 bp, Homo sapiens
ggagcgatagacaac

SEQ ID NO: 140773 - DNA, 15 bp, Homo sapiens
aggagcgatagacaa

SEQ ID NO: 140774 - DNA, 15 bp, Homo sapiens
gaggagcgatagaca

SEQ ID NO: 140775 - DNA, 15 bp, Homo sapiens
agaggagcgatagac

SEQ ID NO: 140776 - DNA, 15 bp, Homo sapiens
aagaggagcgataga

SEQ ID NO: 140777 - DNA, 15 bp, Homo sapiens
caagaggagcgatag

SEQ ID NO: 140778 - DNA, 15 bp, Homo sapiens
tcaagaggagcgata

SEQ ID NO: 140779 - DNA, 15 bp, Homo sapiens
gtcaagaggagcgat

SEQ ID NO: 140780 - DNA, 15 bp, Homo sapiens
ggtcaagaggagcga

SEQ ID NO: 140781 - DNA, 15 bp, Homo sapiens
gggtcaagaggagcg

SEQ ID NO: 140782 - DNA, 15 bp, Homo sapiens
tgggtcaagaggagc

SEQ ID NO: 140783 - DNA, 15 bp, Homo sapiens
gtgggtcaagaggag

SEQ ID NO: 140784 - DNA, 15 bp, Homo sapiens
agtgggtcaagagga

SEQ ID NO: 140785 - DNA, 15 bp, Homo sapiens
cagtgggtcaagagg

SEQ ID NO: 140786 - DNA, 15 bp, Homo sapiens
acagtgggtcaagag

SEQ ID NO: 140787 - DNA, 15 bp, Homo sapiens
cacagtgggtcaaga

SEQ ID NO: 140788 - DNA, 15 bp, Homo sapiens
acacagtgggtcaag

SEQ ID NO: 140789 - DNA, 15 bp, Homo sapiens
cacacagtgggtcaa

SEQ ID NO: 140790 - DNA, 15 bp, Homo sapiens
tcacacagtgggtca

SEQ ID NO: 140791 - DNA, 15 bp, Homo sapiens
ttcacacagtgggtc

SEQ ID NO: 140792 - DNA, 15 bp, Homo sapiens
attcacacagtgggt

SEQ ID NO: 140793 - DNA, 15 bp, Homo sapiens
gattcacacagtggg

SEQ ID NO: 140794 - DNA, 15 bp, Homo sapiens
agattcacacagtgg

SEQ ID NO: 140795 - DNA, 15 bp, Homo sapiens
cagattcacacagtg

SEQ ID NO: 140796 - DNA, 15 bp, Homo sapiens
gcagattcacacagt

SEQ ID NO: 140797 - DNA, 15 bp, Homo sapiens
tgcagattcacacag

SEQ ID NO: 140798 - DNA, 15 bp, Homo sapiens
gtgcagattcacaca

SEQ ID NO: 140799 - DNA, 15 bp, Homo sapiens
ggtgcagattcacac

SEQ ID NO: 140800 - DNA, 15 bp, Homo sapiens
tggtgcagattcaca

SEQ ID NO: 140801 - DNA, 15 bp, Homo sapiens
ttggtgcagattcac

SEQ ID NO: 140802 - DNA, 15 bp, Homo sapiens
cttggtgcagattca

SEQ ID NO: 140803 - DNA, 15 bp, Homo sapiens
gcttggtgcagattc

SEQ ID NO: 140804 - DNA, 15 bp, Homo sapiens
agcttggtgcagatt

SEQ ID NO: 140805 - DNA, 15 bp, Homo sapiens
gagcttggtgcagat

SEQ ID NO: 140806 - DNA, 15 bp, Homo sapiens
agagcttggtgcaga

SEQ ID NO: 140807 - DNA, 15 bp, Homo sapiens
aagagcttggtgcag

SEQ ID NO: 140808 - DNA, 15 bp, Homo sapiens
gaagagcttggtgca

SEQ ID NO: 140809 - DNA, 15 bp, Homo sapiens
ggaagagcttggtgc

SEQ ID NO: 140810 - DNA, 15 bp, Homo sapiens
gggaagagcttggtg

SEQ ID NO: 140811 - DNA, 15 bp, Homo sapiens
tgggaagagcttggt

SEQ ID NO: 140812 - DNA, 15 bp, Homo sapiens
atgggaagagcttgg

SEQ ID NO: 140813 - DNA, 15 bp, Homo sapiens
gatgggaagagcttg

SEQ ID NO: 140814 - DNA, 15 bp, Homo sapiens
cgatgggaagagctt

SEQ ID NO: 140815 - DNA, 15 bp, Homo sapiens
ccgatgggaagagct

SEQ ID NO: 140816 - DNA, 15 bp, Homo sapiens
accgatgggaagagc

SEQ ID NO: 140817 - DNA, 15 bp, Homo sapiens
taccgatgggaagag

SEQ ID NO: 140818 - DNA, 15 bp, Homo sapiens
ctaccgatgggaaga

SEQ ID NO: 140819 - DNA, 15 bp, Homo sapiens
tctaccgatgggaag

SEQ ID NO: 140820 - DNA, 15 bp, Homo sapiens
gtctaccgatgggaa

SEQ ID NO: 140821 - DNA, 15 bp, Homo sapiens
ggtctaccgatggga

SEQ ID NO: 140822 - DNA, 15 bp, Homo sapiens
aggtctaccgatggg

SEQ ID NO: 140823 - DNA, 15 bp, Homo sapiens
gaggtctaccgatgg

SEQ ID NO: 140824 - DNA, 15 bp, Homo sapiens
tgaggtctaccgatg

SEQ ID NO: 140825 - DNA, 15 bp, Homo sapiens
gtgaggtctaccgat

SEQ ID NO: 140826 - DNA, 15 bp, Homo sapiens
agtgaggtctaccga

SEQ ID NO: 140827 - DNA, 15 bp, Homo sapiens
aagtgaggtctaccg

SEQ ID NO: 140828 - DNA, 15 bp, Homo sapiens
gaagtgaggtctacc

SEQ ID NO: 140829 - DNA, 15 bp, Homo sapiens
ggaagtgaggtctac

SEQ ID NO: 140830 - DNA, 15 bp, Homo sapiens
aggaagtgaggtcta

SEQ ID NO: 140831 - DNA, 15 bp, Homo sapiens
aaggaagtgaggtct

SEQ ID NO: 140832 - DNA, 15 bp, Homo sapiens
taaggaagtgaggtc

SEQ ID NO: 140833 - DNA, 15 bp, Homo sapiens
ttaaggaagtgaggt

SEQ ID NO: 140834 - DNA, 15 bp, Homo sapiens
attaaggaagtgagg

SEQ ID NO: 140835 - DNA, 15 bp, Homo sapiens
cattaaggaagtgag

SEQ ID NO: 140836 - DNA, 15 bp, Homo sapiens
acattaaggaagtga

SEQ ID NO: 140837 - DNA, 15 bp, Homo sapiens
tacattaaggaagtg

SEQ ID NO: 140838 - DNA, 15 bp, Homo sapiens
ttacattaaggaagt

SEQ ID NO: 140839 - DNA, 15 bp, Homo sapiens
tttacattaaggaag

SEQ ID NO: 140840 - DNA, 15 bp, Homo sapiens
ttttacattaaggaa

SEQ ID NO: 140841 - DNA, 15 bp, Homo sapiens
gttttacattaagga

SEQ ID NO: 140842 - DNA, 15 bp, Homo sapiens
ggttttacattaagg

SEQ ID NO: 140843 - DNA, 15 bp, Homo sapiens
tggttttacattaag

SEQ ID NO: 140844 - DNA, 15 bp, Homo sapiens
ctggttttacattaa

SEQ ID NO: 140845 - DNA, 15 bp, Homo sapiens
cctggttttacatta

SEQ ID NO: 140846 - DNA, 15 bp, Homo sapiens
ccctggttttacatt

SEQ ID NO: 140847 - DNA, 15 bp, Homo sapiens
cccctggttttacat

SEQ ID NO: 140848 - DNA, 15 bp, Homo sapiens
ccccctggttttaca

SEQ ID NO: 140849 - DNA, 15 bp, Homo sapiens
tccccctggttttac

SEQ ID NO: 140850 - DNA, 15 bp, Homo sapiens
atccccctggtttta

SEQ ID NO: 140851 - DNA, 15 bp, Homo sapiens
catccccctggtttt

SEQ ID NO: 140852 - DNA, 15 bp, Homo sapiens
ccatccccctggttt

SEQ ID NO: 140853 - DNA, 15 bp, Homo sapiens
tccatccccctggtt

SEQ ID NO: 140854 - DNA, 15 bp, Homo sapiens
ctccatccccctggt

SEQ ID NO: 140855 - DNA, 15 bp, Homo sapiens
tctccatccccctgg

SEQ ID NO: 140856 - DNA, 15 bp, Homo sapiens
ctctccatccccctg

SEQ ID NO: 140857 - DNA, 15 bp, Homo sapiens
cctctccatccccct

SEQ ID NO: 140858 - DNA, 15 bp, Homo sapiens
tcctctccatccccc

SEQ ID NO: 140859 - DNA, 15 bp, Homo sapiens
ttcctctccatcccc

SEQ ID NO: 140860 - DNA, 15 bp, Homo sapiens
cttcctctccatccc

SEQ ID NO: 140861 - DNA, 15 bp, Homo sapiens
tcttcctctccatcc

SEQ ID NO: 140862 - DNA, 15 bp, Homo sapiens
gtcttcctctccatc

SEQ ID NO: 140863 - DNA, 15 bp, Homo sapiens
ggtcttcctctccat

SEQ ID NO: 140864 - DNA, 15 bp, Homo sapiens
gggtcttcctctcca

SEQ ID NO: 140865 - DNA, 15 bp, Homo sapiens
agggtcttcctctcc

SEQ ID NO: 140866 - DNA, 15 bp, Homo sapiens
cagggtcttcctctc

SEQ ID NO: 140867 - DNA, 15 bp, Homo sapiens
tcagggtcttcctct

SEQ ID NO: 140868 - DNA, 15 bp, Homo sapiens
ttcagggtcttcctc

SEQ ID NO: 140869 - DNA, 15 bp, Homo sapiens
cttcagggtcttcct

SEQ ID NO: 140870 - DNA, 15 bp, Homo sapiens
tcttcagggtcttcc

SEQ ID NO: 140871 - DNA, 15 bp, Homo sapiens
gtcttcagggtcttc

SEQ ID NO: 140872 - DNA, 15 bp, Homo sapiens
cgtcttcagggtctt

SEQ ID NO: 140873 - DNA, 15 bp, Homo sapiens
acgtcttcagggtct

SEQ ID NO: 140874 - DNA, 15 bp, Homo sapiens
aacgtcttcagggtc

SEQ ID NO: 140875 - DNA, 15 bp, Homo sapiens
aaacgtcttcagggt

SEQ ID NO: 140876 - DNA, 15 bp, Homo sapiens
gaaacgtcttcaggg

SEQ ID NO: 140877 - DNA, 15 bp, Homo sapiens
agaaacgtcttcagg

SEQ ID NO: 140878 - DNA, 15 bp, Homo sapiens
cagaaacgtcttcag

SEQ ID NO: 140879 - DNA, 15 bp, Homo sapiens
acagaaacgtcttca

SEQ ID NO: 140880 - DNA, 15 bp, Homo sapiens
cacagaaacgtcttc

SEQ ID NO: 140881 - DNA, 15 bp, Homo sapiens
ccacagaaacgtctt

SEQ ID NO: 140882 - DNA, 15 bp, Homo sapiens
gccacagaaacgtct

SEQ ID NO: 140883 - DNA, 15 bp, Homo sapiens
tgccacagaaacgtc

SEQ ID NO: 140884 - DNA, 15 bp, Homo sapiens
ctgccacagaaacgt

SEQ ID NO: 140885 - DNA, 15 bp, Homo sapiens
tctgccacagaaacg

SEQ ID NO: 140886 - DNA, 15 bp, Homo sapiens
ttctgccacagaaac

SEQ ID NO: 140887 - DNA, 15 bp, Homo sapiens
gttctgccacagaaa

SEQ ID NO: 140888 - DNA, 15 bp, Homo sapiens
agttctgccacagaa

SEQ ID NO: 140889 - DNA, 15 bp, Homo sapiens
aagttctgccacaga

SEQ ID NO: 140890 - DNA, 15 bp, Homo sapiens
aaagttctgccacag

SEQ ID NO: 140891 - DNA, 15 bp, Homo sapiens
caaagttctgccaca

SEQ ID NO: 140892 - DNA, 15 bp, Homo sapiens
gcaaagttctgccac

SEQ ID NO: 140893 - DNA, 15 bp, Homo sapiens
tgcaaagttctgcca

SEQ ID NO: 140894 - DNA, 15 bp, Homo sapiens
ttgcaaagttctgcc

SEQ ID NO: 140895 - DNA, 15 bp, Homo sapiens
cttgcaaagttctgc

SEQ ID NO: 140896 - DNA, 15 bp, Homo sapiens
tcttgcaaagttctg

SEQ ID NO: 140897 - DNA, 15 bp, Homo sapiens
gtcttgcaaagttct

SEQ ID NO: 140898 - DNA, 15 bp, Homo sapiens
cgtcttgcaaagttc

SEQ ID NO: 140899 - DNA, 15 bp, Homo sapiens
acgtcttgcaaagtt

SEQ ID NO: 140900 - DNA, 15 bp, Homo sapiens
gacgtcttgcaaagt

SEQ ID NO: 140901 - DNA, 15 bp, Homo sapiens
agacgtcttgcaaag

SEQ ID NO: 140902 - DNA, 15 bp, Homo sapiens
gagacgtcttgcaaa

SEQ ID NO: 140903 - DNA, 15 bp, Homo sapiens
ggagacgtcttgcaa

SEQ ID NO: 140904 - DNA, 15 bp, Homo sapiens
aggagacgtcttgca

SEQ ID NO: 140905 - DNA, 15 bp, Homo sapiens
aaggagacgtcttgc

SEQ ID NO: 140906 - DNA, 15 bp, Homo sapiens
aaaggagacgtcttg

SEQ ID NO: 140907 - DNA, 15 bp, Homo sapiens
gaaaggagacgtctt

SEQ ID NO: 140908 - DNA, 15 bp, Homo sapiens
ggaaaggagacgtct

SEQ ID NO: 140909 - DNA, 15 bp, Homo sapiens
tggaaaggagacgtc

SEQ ID NO: 140910 - DNA, 15 bp, Homo sapiens
ttggaaaggagacgt

SEQ ID NO: 140911 - DNA, 15 bp, Homo sapiens
tttggaaaggagacg

SEQ ID NO: 140912 - DNA, 15 bp, Homo sapiens
ctttggaaaggagac

SEQ ID NO: 140913 - DNA, 15 bp, Homo sapiens
tctttggaaaggaga

SEQ ID NO: 140914 - DNA, 15 bp, Homo sapiens
ttctttggaaaggag

SEQ ID NO: 140915 - DNA, 15 bp, Homo sapiens
tttctttggaaagga

SEQ ID NO: 140916 - DNA, 15 bp, Homo sapiens
ttttctttggaaagg

SEQ ID NO: 140917 - DNA, 15 bp, Homo sapiens
attttctttggaaag

SEQ ID NO: 140918 - DNA, 15 bp, Homo sapiens
aattttctttggaaa

SEQ ID NO: 140919 - DNA, 15 bp, Homo sapiens
taattttctttggaa

SEQ ID NO: 140920 - DNA, 15 bp, Homo sapiens
ctaattttctttgga

SEQ ID NO: 140921 - DNA, 15 bp, Homo sapiens
gctaattttctttgg

SEQ ID NO: 140922 - DNA, 15 bp, Homo sapiens
ggctaattttctttg

SEQ ID NO: 140923 - DNA, 15 bp, Homo sapiens
gggctaattttcttt

SEQ ID NO: 140924 - DNA, 15 bp, Homo sapiens
agggctaattttctt

SEQ ID NO: 140925 - DNA, 15 bp, Homo sapiens
aagggctaattttct

SEQ ID NO: 140926 - DNA, 15 bp, Homo sapiens
gaagggctaattttc

SEQ ID NO: 140927 - DNA, 15 bp, Homo sapiens
ggaagggctaatttt

SEQ ID NO: 140928 - DNA, 15 bp, Homo sapiens
tggaagggctaattt

SEQ ID NO: 140929 - DNA, 15 bp, Homo sapiens
ctggaagggctaatt

SEQ ID NO: 140930 - DNA, 15 bp, Homo sapiens
cctggaagggctaat

SEQ ID NO: 140931 - DNA, 15 bp, Homo sapiens
ccctggaagggctaa

SEQ ID NO: 140932 - DNA, 15 bp, Homo sapiens
gccctggaagggcta

SEQ ID NO: 140933 - DNA, 15 bp, Homo sapiens
agccctggaagggct

SEQ ID NO: 140934 - DNA, 15 bp, Homo sapiens
aagccctggaagggc

SEQ ID NO: 140935 - DNA, 15 bp, Homo sapiens
gaagccctggaaggg

SEQ ID NO: 140936 - DNA, 15 bp, Homo sapiens
agaagccctggaagg

SEQ ID NO: 140937 - DNA, 15 bp, Homo sapiens
cagaagccctggaag

SEQ ID NO: 140938 - DNA, 15 bp, Homo sapiens
ccagaagccctggaa

SEQ ID NO: 140939 - DNA, 15 bp, Homo sapiens
tccagaagccctgga

SEQ ID NO: 140940 - DNA, 15 bp, Homo sapiens
ttccagaagccctgg

SEQ ID NO: 140941 - DNA, 15 bp, Homo sapiens
tttccagaagccctg

SEQ ID NO: 140942 - DNA, 15 bp, Homo sapiens
ttttccagaagccct

SEQ ID NO: 140943 - DNA, 15 bp, Homo sapiens
gttttccagaagccc

SEQ ID NO: 140944 - DNA, 15 bp, Homo sapiens
ggttttccagaagcc

SEQ ID NO: 140945 - DNA, 15 bp, Homo sapiens
aggttttccagaagc

SEQ ID NO: 140946 - DNA, 15 bp, Homo sapiens
aaggttttccagaag

SEQ ID NO: 140947 - DNA, 15 bp, Homo sapiens
aaaggttttccagaa

SEQ ID NO: 140948 - DNA, 15 bp, Homo sapiens
taaaggttttccaga

SEQ ID NO: 140949 - DNA, 15 bp, Homo sapiens
ttaaaggttttccag

SEQ ID NO: 140950 - DNA, 15 bp, Homo sapiens
cttaaaggttttcca

SEQ ID NO: 140951 - DNA, 15 bp, Homo sapiens
tcttaaaggttttcc

SEQ ID NO: 140952 - DNA, 15 bp, Homo sapiens
gtcttaaaggttttc

SEQ ID NO: 140953 - DNA, 15 bp, Homo sapiens
ggtcttaaaggtttt

SEQ ID NO: 140954 - DNA, 15 bp, Homo sapiens
gggtcttaaaggttt

SEQ ID NO: 140955 - DNA, 15 bp, Homo sapiens
tgggtcttaaaggtt

SEQ ID NO: 140956 - DNA, 15 bp, Homo sapiens
ttgggtcttaaaggt

SEQ ID NO: 140957 - DNA, 15 bp, Homo sapiens
tttgggtcttaaagg

SEQ ID NO: 140958 - DNA, 15 bp, Homo sapiens
ctttgggtcttaaag

SEQ ID NO: 140959 - DNA, 15 bp, Homo sapiens
cctttgggtcttaaa

SEQ ID NO: 140960 - DNA, 15 bp, Homo sapiens
tcctttgggtcttaa

SEQ ID NO: 140961 - DNA, 15 bp, Homo sapiens
ttcctttgggtctta

SEQ ID NO: 140962 - DNA, 15 bp, Homo sapiens
attcctttgggtctt

SEQ ID NO: 140963 - DNA, 15 bp, Homo sapiens
cattcctttgggtct

SEQ ID NO: 140964 - DNA, 15 bp, Homo sapiens
gcattcctttgggtc

SEQ ID NO: 140965 - DNA, 15 bp, Homo sapiens
ggcattcctttgggt

SEQ ID NO: 140966 - DNA, 15 bp, Homo sapiens
gggcattcctttggg

SEQ ID NO: 140967 - DNA, 15 bp, Homo sapiens
ggggcattcctttgg

SEQ ID NO: 140968 - DNA, 15 bp, Homo sapiens
cggggcattcctttg

SEQ ID NO: 140969 - DNA, 15 bp, Homo sapiens
gcggggcattccttt

SEQ ID NO: 140970 - DNA, 15 bp, Homo sapiens
agcggggcattcctt

SEQ ID NO: 140971 - DNA, 15 bp, Homo sapiens
tagcggggcattcct

SEQ ID NO: 140972 - DNA, 15 bp, Homo sapiens
ctagcggggcattcc

SEQ ID NO: 140973 - DNA, 15 bp, Homo sapiens
actagcggggcattc

SEQ ID NO: 140974 - DNA, 15 bp, Homo sapiens
tactagcggggcatt

SEQ ID NO: 140975 - DNA, 15 bp, Homo sapiens
ctactagcggggcat

SEQ ID NO: 140976 - DNA, 15 bp, Homo sapiens
actactagcggggca

SEQ ID NO: 140977 - DNA, 15 bp, Homo sapiens
cactactagcggggc

SEQ ID NO: 140978 - DNA, 15 bp, Homo sapiens
ccactactagcgggg

SEQ ID NO: 140979 - DNA, 15 bp, Homo sapiens
tccactactagcggg

SEQ ID NO: 140980 - DNA, 15 bp, Homo sapiens
ttccactactagcgg

SEQ ID NO: 140981 - DNA, 15 bp, Homo sapiens
attccactactagcg

SEQ ID NO: 140982 - DNA, 15 bp, Homo sapiens
aattccactactagc

SEQ ID NO: 140983 - DNA, 15 bp, Homo sapiens
aaattccactactag

SEQ ID NO: 140984 - DNA, 15 bp, Homo sapiens
gaaattccactacta

SEQ ID NO: 140985 - DNA, 15 bp, Homo sapiens
cgaaattccactact

SEQ ID NO: 140986 - DNA, 15 bp, Homo sapiens
ccgaaattccactac

SEQ ID NO: 140987 - DNA, 15 bp, Homo sapiens
tccgaaattccacta

SEQ ID NO: 140988 - DNA, 15 bp, Homo sapiens
atccgaaattccact

SEQ ID NO: 140989 - DNA, 15 bp, Homo sapiens
tatccgaaattccac

SEQ ID NO: 140990 - DNA, 15 bp, Homo sapiens
ctatccgaaattcca

SEQ ID NO: 140991 - DNA, 15 bp, Homo sapiens
actatccgaaattcc

SEQ ID NO: 140992 - DNA, 15 bp, Homo sapiens
gactatccgaaattc

SEQ ID NO: 140993 - DNA, 15 bp, Homo sapiens
cgactatccgaaatt

SEQ ID NO: 140994 - DNA, 15 bp, Homo sapiens
acgactatccgaaat

SEQ ID NO: 140995 - DNA, 15 bp, Homo sapiens
cacgactatccgaaa

SEQ ID NO: 140996 - DNA, 15 bp, Homo sapiens
ccacgactatccgaa

SEQ ID NO: 140997 - DNA, 15 bp, Homo sapiens
cccacgactatccga

SEQ ID NO: 140998 - DNA, 15 bp, Homo sapiens
tcccacgactatccg

SEQ ID NO: 140999 - DNA, 15 bp, Homo sapiens
ctcccacgactatcc

SEQ ID NO: 141000 - DNA, 15 bp, Homo sapiens
cctcccacgactatc

SEQ ID NO: 141001 - DNA, 15 bp, Homo sapiens
ccctcccacgactat

SEQ ID NO: 141002 - DNA, 15 bp, Homo sapiens
cccctcccacgacta

SEQ ID NO: 141003 - DNA, 15 bp, Homo sapiens
ccccctcccacgact

SEQ ID NO: 141004 - DNA, 15 bp, Homo sapiens
gccccctcccacgac

SEQ ID NO: 141005 - DNA, 15 bp, Homo sapiens
agccccctcccacga

SEQ ID NO: 141006 - DNA, 15 bp, Homo sapiens
gagccccctcccacg

SEQ ID NO: 141007 - DNA, 15 bp, Homo sapiens
tgagccccctcccac

SEQ ID NO: 141008 - DNA, 15 bp, Homo sapiens
ctgagccccctccca

SEQ ID NO: 141009 - DNA, 15 bp, Homo sapiens
cctgagccccctccc

SEQ ID NO: 141010 - DNA, 15 bp, Homo sapiens
ccctgagccccctcc

SEQ ID NO: 141011 - DNA, 15 bp, Homo sapiens
cccctgagccccctc

SEQ ID NO: 141012 - DNA, 15 bp, Homo sapiens
acccctgagccccct

SEQ ID NO: 141013 - DNA, 15 bp, Homo sapiens
aacccctgagccccc

SEQ ID NO: 141014 - DNA, 15 bp, Homo sapiens
gaacccctgagcccc

SEQ ID NO: 141015 - DNA, 15 bp, Homo sapiens
agaacccctgagccc

SEQ ID NO: 141016 - DNA, 15 bp, Homo sapiens
aagaacccctgagcc

SEQ ID NO: 141017 - DNA, 15 bp, Homo sapiens
caagaacccctgagc

SEQ ID NO: 141018 - DNA, 15 bp, Homo sapiens
gcaagaacccctgag

SEQ ID NO: 141019 - DNA, 15 bp, Homo sapiens
agcaagaacccctga

SEQ ID NO: 141020 - DNA, 15 bp, Homo sapiens
cagcaagaacccctg

SEQ ID NO: 141021 - DNA, 15 bp, Homo sapiens
tcagcaagaacccct

SEQ ID NO: 141022 - DNA, 15 bp, Homo sapiens
ctcagcaagaacccc

SEQ ID NO: 141023 - DNA, 15 bp, Homo sapiens
tctcagcaagaaccc

SEQ ID NO: 141024 - DNA, 15 bp, Homo sapiens
gtctcagcaagaacc

SEQ ID NO: 141025 - DNA, 15 bp, Homo sapiens
tgtctcagcaagaac

SEQ ID NO: 141026 - DNA, 15 bp, Homo sapiens
ttgtctcagcaagaa

SEQ ID NO: 141027 - DNA, 15 bp, Homo sapiens
tttgtctcagcaaga

SEQ ID NO: 141028 - DNA, 15 bp, Homo sapiens
ttttgtctcagcaag

SEQ ID NO: 141029 - DNA, 15 bp, Homo sapiens
cttttgtctcagcaa

SEQ ID NO: 141030 - DNA, 15 bp, Homo sapiens
ccttttgtctcagca

SEQ ID NO: 141031 - DNA, 15 bp, Homo sapiens
gccttttgtctcagc

SEQ ID NO: 141032 - DNA, 15 bp, Homo sapiens
ggccttttgtctcag

SEQ ID NO: 141033 - DNA, 15 bp, Homo sapiens
gggccttttgtctca

SEQ ID NO: 141034 - DNA, 15 bp, Homo sapiens
agggccttttgtctc

SEQ ID NO: 141035 - DNA, 15 bp, Homo sapiens
cagggccttttgtct

SEQ ID NO: 141036 - DNA, 15 bp, Homo sapiens
tcagggccttttgtc

SEQ ID NO: 141037 - DNA, 15 bp, Homo sapiens
ctcagggccttttgt

SEQ ID NO: 141038 - DNA, 15 bp, Homo sapiens
gctcagggccttttg

SEQ ID NO: 141039 - DNA, 15 bp, Homo sapiens
ggctcagggcctttt

SEQ ID NO: 141040 - DNA, 15 bp, Homo sapiens
gggctcagggccttt

SEQ ID NO: 141041 - DNA, 15 bp, Homo sapiens
agggctcagggcctt

SEQ ID NO: 141042 - DNA, 15 bp, Homo sapiens
cagggctcagggcct

SEQ ID NO: 141043 - DNA, 15 bp, Homo sapiens
ccagggctcagggcc

SEQ ID NO: 141044 - DNA, 15 bp, Homo sapiens
accagggctcagggc

SEQ ID NO: 141045 - DNA, 15 bp, Homo sapiens
gaccagggctcaggg

SEQ ID NO: 141046 - DNA, 15 bp, Homo sapiens
ggaccagggctcagg

SEQ ID NO: 141047 - DNA, 15 bp, Homo sapiens
tggaccagggctcag

SEQ ID NO: 141048 - DNA, 15 bp, Homo sapiens
atggaccagggctca

SEQ ID NO: 141049 - DNA, 15 bp, Homo sapiens
catggaccagggctc

SEQ ID NO: 141050 - DNA, 15 bp, Homo sapiens
gcatggaccagggct

SEQ ID NO: 141051 - DNA, 15 bp, Homo sapiens
ggcatggaccagggc

SEQ ID NO: 141052 - DNA, 15 bp, Homo sapiens
aggcatggaccaggg

SEQ ID NO: 141053 - DNA, 15 bp, Homo sapiens
gaggcatggaccagg

SEQ ID NO: 141054 - DNA, 15 bp, Homo sapiens
agaggcatggaccag

SEQ ID NO: 141055 - DNA, 15 bp, Homo sapiens
gagaggcatggacca

SEQ ID NO: 141056 - DNA, 15 bp, Homo sapiens
agagaggcatggacc

SEQ ID NO: 141057 - DNA, 15 bp, Homo sapiens
gagagaggcatggac

SEQ ID NO: 141058 - DNA, 15 bp, Homo sapiens
ggagagaggcatgga

SEQ ID NO: 141059 - DNA, 15 bp, Homo sapiens
aggagagaggcatgg

SEQ ID NO: 141060 - DNA, 15 bp, Homo sapiens
gaggagagaggcatg

SEQ ID NO: 141061 - DNA, 15 bp, Homo sapiens
ggaggagagaggcat

SEQ ID NO: 141062 - DNA, 15 bp, Homo sapiens
tggaggagagaggca

SEQ ID NO: 141063 - DNA, 15 bp, Homo sapiens
gtggaggagagaggc

SEQ ID NO: 141064 - DNA, 15 bp, Homo sapiens
ggtggaggagagagg

SEQ ID NO: 141065 - DNA, 15 bp, Homo sapiens
aggtggaggagagag

SEQ ID NO: 141066 - DNA, 15 bp, Homo sapiens
aaggtggaggagaga

SEQ ID NO: 141067 - DNA, 15 bp, Homo sapiens
caaggtggaggagag

SEQ ID NO: 141068 - DNA, 15 bp, Homo sapiens
acaaggtggaggaga

SEQ ID NO: 141069 - DNA, 15 bp, Homo sapiens
aacaaggtggaggag

SEQ ID NO: 141070 - DNA, 15 bp, Homo sapiens
aaacaaggtggagga

SEQ ID NO: 141071 - DNA, 15 bp, Homo sapiens
gaaacaaggtggagg

SEQ ID NO: 141072 - DNA, 15 bp, Homo sapiens
agaaacaaggtggag

SEQ ID NO: 141073 - DNA, 15 bp, Homo sapiens
gagaaacaaggtgga

SEQ ID NO: 141074 - DNA, 15 bp, Homo sapiens
agagaaacaaggtgg

SEQ ID NO: 141075 - DNA, 15 bp, Homo sapiens
cagagaaacaaggtg

SEQ ID NO: 141076 - DNA, 15 bp, Homo sapiens
ccagagaaacaaggt

SEQ ID NO: 141077 - DNA, 15 bp, Homo sapiens
gccagagaaacaagg

SEQ ID NO: 141078 - DNA, 15 bp, Homo sapiens
agccagagaaacaag

SEQ ID NO: 141079 - DNA, 15 bp, Homo sapiens
cagccagagaaacaa

SEQ ID NO: 141080 - DNA, 15 bp, Homo sapiens
tcagccagagaaaca

SEQ ID NO: 141081 - DNA, 15 bp, Homo sapiens
ctcagccagagaaac

SEQ ID NO: 141082 - DNA, 15 bp, Homo sapiens
tctcagccagagaaa

SEQ ID NO: 141083 - DNA, 15 bp, Homo sapiens
atctcagccagagaa

SEQ ID NO: 141084 - DNA, 15 bp, Homo sapiens
catctcagccagaga

SEQ ID NO: 141085 - DNA, 15 bp, Homo sapiens
tcatctcagccagag

SEQ ID NO: 141086 - DNA, 15 bp, Homo sapiens
ctcatctcagccaga

SEQ ID NO: 141087 - DNA, 15 bp, Homo sapiens
cctcatctcagccag

SEQ ID NO: 141088 - DNA, 15 bp, Homo sapiens
ccctcatctcagcca

SEQ ID NO: 141089 - DNA, 15 bp, Homo sapiens
tccctcatctcagcc

SEQ ID NO: 141090 - DNA, 15 bp, Homo sapiens
ttccctcatctcagc

SEQ ID NO: 141091 - DNA, 15 bp, Homo sapiens
cttccctcatctcag

SEQ ID NO: 141092 - DNA, 15 bp, Homo sapiens
ccttccctcatctca

SEQ ID NO: 141093 - DNA, 15 bp, Homo sapiens
cccttccctcatctc

SEQ ID NO: 141094 - DNA, 15 bp, Homo sapiens
ccccttccctcatct

SEQ ID NO: 141095 - DNA, 15 bp, Homo sapiens
cccccttccctcatc

SEQ ID NO: 141096 - DNA, 15 bp, Homo sapiens
gcccccttccctcat

SEQ ID NO: 141097 - DNA, 15 bp, Homo sapiens
agcccccttccctca

SEQ ID NO: 141098 - DNA, 15 bp, Homo sapiens
cagcccccttccctc

SEQ ID NO: 141099 - DNA, 15 bp, Homo sapiens
ccagcccccttccct

SEQ ID NO: 141100 - DNA, 15 bp, Homo sapiens
tccagcccccttccc

SEQ ID NO: 141101 - DNA, 15 bp, Homo sapiens
ctccagcccccttcc

SEQ ID NO: 141102 - DNA, 15 bp, Homo sapiens
gctccagcccccttc

SEQ ID NO: 141103 - DNA, 15 bp, Homo sapiens
ggctccagccccctt

SEQ ID NO: 141104 - DNA, 15 bp, Homo sapiens
tggctccagccccct

SEQ ID NO: 141105 - DNA, 15 bp, Homo sapiens
gtggctccagccccc

SEQ ID NO: 141106 - DNA, 15 bp, Homo sapiens
agtggctccagcccc

SEQ ID NO: 141107 - DNA, 15 bp, Homo sapiens
gagtggctccagccc

SEQ ID NO: 141108 - DNA, 15 bp, Homo sapiens
ggagtggctccagcc

SEQ ID NO: 141109 - DNA, 15 bp, Homo sapiens
gggagtggctccagc

SEQ ID NO: 141110 - DNA, 15 bp, Homo sapiens
ggggagtggctccag

SEQ ID NO: 141111 - DNA, 15 bp, Homo sapiens
aggggagtggctcca

SEQ ID NO: 141112 - DNA, 15 bp, Homo sapiens
aaggggagtggctcc

SEQ ID NO: 141113 - DNA, 15 bp, Homo sapiens
gaaggggagtggctc

SEQ ID NO: 141114 - DNA, 15 bp, Homo sapiens
agaaggggagtggct

SEQ ID NO: 141115 - DNA, 15 bp, Homo sapiens
gagaaggggagtggc

SEQ ID NO: 141116 - DNA, 15 bp, Homo sapiens
tgagaaggggagtgg

SEQ ID NO: 141117 - DNA, 15 bp, Homo sapiens
ctgagaaggggagtg

SEQ ID NO: 141118 - DNA, 15 bp, Homo sapiens
tctgagaaggggagt

SEQ ID NO: 141119 - DNA, 15 bp, Homo sapiens
ctctgagaaggggag

SEQ ID NO: 141120 - DNA, 15 bp, Homo sapiens
tctctgagaagggga

SEQ ID NO: 141121 - DNA, 15 bp, Homo sapiens
atctctgagaagggg

SEQ ID NO: 141122 - DNA, 15 bp, Homo sapiens
catctctgagaaggg

SEQ ID NO: 141123 - DNA, 15 bp, Homo sapiens
gcatctctgagaagg

SEQ ID NO: 141124 - DNA, 15 bp, Homo sapiens
agcatctctgagaag

SEQ ID NO: 141125 - DNA, 15 bp, Homo sapiens
gagcatctctgagaa

SEQ ID NO: 141126 - DNA, 15 bp, Homo sapiens
agagcatctctgaga

SEQ ID NO: 141127 - DNA, 15 bp, Homo sapiens
aagagcatctctgag

SEQ ID NO: 141128 - DNA, 15 bp, Homo sapiens
taagagcatctctga

SEQ ID NO: 141129 - DNA, 15 bp, Homo sapiens
ctaagagcatctctg

SEQ ID NO: 141130 - DNA, 15 bp, Homo sapiens
tctaagagcatctct

SEQ ID NO: 141131 - DNA, 15 bp, Homo sapiens
ctctaagagcatctc

SEQ ID NO: 141132 - DNA, 15 bp, Homo sapiens
tctctaagagcatct

SEQ ID NO: 141133 - DNA, 15 bp, Homo sapiens
atctctaagagcatc

SEQ ID NO: 141134 - DNA, 15 bp, Homo sapiens
aatctctaagagcat

SEQ ID NO: 141135 - DNA, 15 bp, Homo sapiens
caatctctaagagca

SEQ ID NO: 141136 - DNA, 15 bp, Homo sapiens
gcaatctctaagagc

SEQ ID NO: 141137 - DNA, 15 bp, Homo sapiens
agcaatctctaagag

SEQ ID NO: 141138 - DNA, 15 bp, Homo sapiens
cagcaatctctaaga

SEQ ID NO: 141139 - DNA, 15 bp, Homo sapiens
gcagcaatctctaag

SEQ ID NO: 141140 - DNA, 15 bp, Homo sapiens
tgcagcaatctctaa

SEQ ID NO: 141141 - DNA, 15 bp, Homo sapiens
ctgcagcaatctcta

SEQ ID NO: 141142 - DNA, 15 bp, Homo sapiens
tctgcagcaatctct

SEQ ID NO: 141143 - DNA, 15 bp, Homo sapiens
gtctgcagcaatctc

SEQ ID NO: 141144 - DNA, 15 bp, Homo sapiens
agtctgcagcaatct

SEQ ID NO: 141145 - DNA, 15 bp, Homo sapiens
cagtctgcagcaatc

SEQ ID NO: 141146 - DNA, 15 bp, Homo sapiens
acagtctgcagcaat

SEQ ID NO: 141147 - DNA, 15 bp, Homo sapiens
aacagtctgcagcaa

SEQ ID NO: 141148 - DNA, 15 bp, Homo sapiens
aaacagtctgcagca

SEQ ID NO: 141149 - DNA, 15 bp, Homo sapiens
aaaacagtctgcagc

SEQ ID NO: 141150 - DNA, 15 bp, Homo sapiens
gaaaacagtctgcag

SEQ ID NO: 141151 - DNA, 15 bp, Homo sapiens
agaaaacagtctgca

SEQ ID NO: 141152 - DNA, 15 bp, Homo sapiens
cagaaaacagtctgc

SEQ ID NO: 141153 - DNA, 15 bp, Homo sapiens
ccagaaaacagtctg

SEQ ID NO: 141154 - DNA, 15 bp, Homo sapiens
gccagaaaacagtct

SEQ ID NO: 141155 - DNA, 15 bp, Homo sapiens
agccagaaaacagtc

SEQ ID NO: 141156 - DNA, 15 bp, Homo sapiens
cagccagaaaacagt

SEQ ID NO: 141157 - DNA, 15 bp, Homo sapiens
ccagccagaaaacag

SEQ ID NO: 141158 - DNA, 15 bp, Homo sapiens
cccagccagaaaaca

SEQ ID NO: 141159 - DNA, 15 bp, Homo sapiens
ccccagccagaaaac

SEQ ID NO: 141160 - DNA, 15 bp, Homo sapiens
tccccagccagaaaa

SEQ ID NO: 141161 - DNA, 15 bp, Homo sapiens
ctccccagccagaaa

SEQ ID NO: 141162 - DNA, 15 bp, Homo sapiens
cctccccagccagaa

SEQ ID NO: 141163 - DNA, 15 bp, Homo sapiens
tcctccccagccaga

SEQ ID NO: 141164 - DNA, 15 bp, Homo sapiens
ctcctccccagccag

SEQ ID NO: 141165 - DNA, 15 bp, Homo sapiens
gctcctccccagcca

SEQ ID NO: 141166 - DNA, 15 bp, Homo sapiens
agctcctccccagcc

SEQ ID NO: 141167 - DNA, 15 bp, Homo sapiens
cagctcctccccagc

SEQ ID NO: 141168 - DNA, 15 bp, Homo sapiens
ccagctcctccccag

SEQ ID NO: 141169 - DNA, 15 bp, Homo sapiens
gccagctcctcccca

SEQ ID NO: 141170 - DNA, 15 bp, Homo sapiens
ggccagctcctcccc

SEQ ID NO: 141171 - DNA, 15 bp, Homo sapiens
gggccagctcctccc

SEQ ID NO: 141172 - DNA, 15 bp, Homo sapiens
ggggccagctcctcc

SEQ ID NO: 141173 - DNA, 15 bp, Homo sapiens
cggggccagctcctc

SEQ ID NO: 141174 - DNA, 15 bp, Homo sapiens
ccggggccagctcct

SEQ ID NO: 141175 - DNA, 15 bp, Homo sapiens
gccggggccagctcc

SEQ ID NO: 141176 - DNA, 15 bp, Homo sapiens
ggccggggccagctc

SEQ ID NO: 141177 - DNA, 15 bp, Homo sapiens
tggccggggccagct

SEQ ID NO: 141178 - DNA, 15 bp, Homo sapiens
ttggccggggccagc

SEQ ID NO: 141179 - DNA, 15 bp, Homo sapiens
attggccggggccag

SEQ ID NO: 141180 - DNA, 15 bp, Homo sapiens
aattggccggggcca

SEQ ID NO: 141181 - DNA, 15 bp, Homo sapiens
gaattggccggggcc

SEQ ID NO: 141182 - DNA, 15 bp, Homo sapiens
agaattggccggggc

SEQ ID NO: 141183 - DNA, 15 bp, Homo sapiens
tagaattggccgggg

SEQ ID NO: 141184 - DNA, 15 bp, Homo sapiens
ctagaattggccggg

SEQ ID NO: 141185 - DNA, 15 bp, Homo sapiens
tctagaattggccgg

SEQ ID NO: 141186 - DNA, 15 bp, Homo sapiens
ctctagaattggccg

SEQ ID NO: 141187 - DNA, 15 bp, Homo sapiens
actctagaattggcc

SEQ ID NO: 141188 - DNA, 15 bp, Homo sapiens
gactctagaattggc

SEQ ID NO: 141189 - DNA, 15 bp, Homo sapiens
agactctagaattgg

SEQ ID NO: 141190 - DNA, 15 bp, Homo sapiens
gagactctagaattg

SEQ ID NO: 141191 - DNA, 15 bp, Homo sapiens
tgagactctagaatt

SEQ ID NO: 141192 - DNA, 15 bp, Homo sapiens
gtgagactctagaat

SEQ ID NO: 141193 - DNA, 15 bp, Homo sapiens
cgtgagactctagaa

SEQ ID NO: 141194 - DNA, 15 bp, Homo sapiens
tcgtgagactctaga

SEQ ID NO: 141195 - DNA, 15 bp, Homo sapiens
ttcgtgagactctag

SEQ ID NO: 141196 - DNA, 15 bp, Homo sapiens
attcgtgagactcta

SEQ ID NO: 141197 - DNA, 15 bp, Homo sapiens
gattcgtgagactct

SEQ ID NO: 141198 - DNA, 15 bp, Homo sapiens
agattcgtgagactc

SEQ ID NO: 141199 - DNA, 15 bp, Homo sapiens
gagattcgtgagact

SEQ ID NO: 141200 - DNA, 15 bp, Homo sapiens
ggagattcgtgagac

SEQ ID NO: 141201 - DNA, 15 bp, Homo sapiens
cggagattcgtgaga

SEQ ID NO: 141202 - DNA, 15 bp, Homo sapiens
ccggagattcgtgag

SEQ ID NO: 141203 - DNA, 15 bp, Homo sapiens
tccggagattcgtga

SEQ ID NO: 141204 - DNA, 15 bp, Homo sapiens
atccggagattcgtg

SEQ ID NO: 141205 - DNA, 15 bp, Homo sapiens
catccggagattcgt

SEQ ID NO: 141206 - DNA, 15 bp, Homo sapiens
ccatccggagattcg

SEQ ID NO: 141207 - DNA, 15 bp, Homo sapiens
cccatccggagattc

SEQ ID NO: 141208 - DNA, 15 bp, Homo sapiens
acccatccggagatt

SEQ ID NO: 141209 - DNA, 15 bp, Homo sapiens
cacccatccggagat

SEQ ID NO: 141210 - DNA, 15 bp, Homo sapiens
tcacccatccggaga

SEQ ID NO: 141211 - DNA, 15 bp, Homo sapiens
ttcacccatccggag

SEQ ID NO: 141212 - DNA, 15 bp, Homo sapiens
cttcacccatccgga

SEQ ID NO: 141213 - DNA, 15 bp, Homo sapiens
acttcacccatccgg

SEQ ID NO: 141214 - DNA, 15 bp, Homo sapiens
gacttcacccatccg

SEQ ID NO: 141215 - DNA, 15 bp, Homo sapiens
tgacttcacccatcc

SEQ ID NO: 141216 - DNA, 15 bp, Homo sapiens
gtgacttcacccatc

SEQ ID NO: 141217 - DNA, 15 bp, Homo sapiens
agtgacttcacccat

SEQ ID NO: 141218 - DNA, 15 bp, Homo sapiens
gagtgacttcaccca

SEQ ID NO: 141219 - DNA, 15 bp, Homo sapiens
agagtgacttcaccc

SEQ ID NO: 141220 - DNA, 15 bp, Homo sapiens
cagagtgacttcacc

SEQ ID NO: 141221 - DNA, 15 bp, Homo sapiens
ccagagtgacttcac

SEQ ID NO: 141222 - DNA, 15 bp, Homo sapiens
cccagagtgacttca

SEQ ID NO: 141223 - DNA, 15 bp, Homo sapiens
acccagagtgacttc

SEQ ID NO: 141224 - DNA, 15 bp, Homo sapiens
cacccagagtgactt

SEQ ID NO: 141225 - DNA, 15 bp, Homo sapiens
ccacccagagtgact

SEQ ID NO: 141226 - DNA, 15 bp, Homo sapiens
cccacccagagtgac

SEQ ID NO: 141227 - DNA, 15 bp, Homo sapiens
ccccacccagagtga

SEQ ID NO: 141228 - DNA, 15 bp, Homo sapiens
tccccacccagagtg

SEQ ID NO: 141229 - DNA, 15 bp, Homo sapiens
ctccccacccagagt

SEQ ID NO: 141230 - DNA, 15 bp, Homo sapiens
tctccccacccagag

SEQ ID NO: 141231 - DNA, 15 bp, Homo sapiens
gtctccccacccaga

SEQ ID NO: 141232 - DNA, 15 bp, Homo sapiens
tgtctccccacccag

SEQ ID NO: 141233 - DNA, 15 bp, Homo sapiens
ctgtctccccaccca

SEQ ID NO: 141234 - DNA, 15 bp, Homo sapiens
actgtctccccaccc

SEQ ID NO: 141235 - DNA, 15 bp, Homo sapiens
aactgtctccccacc

SEQ ID NO: 141236 - DNA, 15 bp, Homo sapiens
gaactgtctccccac

SEQ ID NO: 141237 - DNA, 15 bp, Homo sapiens
tgaactgtctcccca

SEQ ID NO: 141238 - DNA, 15 bp, Homo sapiens
ctgaactgtctcccc

SEQ ID NO: 141239 - DNA, 15 bp, Homo sapiens
actgaactgtctccc

SEQ ID NO: 141240 - DNA, 15 bp, Homo sapiens
aactgaactgtctcc

SEQ ID NO: 141241 - DNA, 15 bp, Homo sapiens
taactgaactgtctc

SEQ ID NO: 141242 - DNA, 15 bp, Homo sapiens
ttaactgaactgtct

SEQ ID NO: 141243 - DNA, 15 bp, Homo sapiens
cttaactgaactgtc

SEQ ID NO: 141244 - DNA, 15 bp, Homo sapiens
gcttaactgaactgt

SEQ ID NO: 141245 - DNA, 15 bp, Homo sapiens
tgcttaactgaactg

SEQ ID NO: 141246 - DNA, 15 bp, Homo sapiens
gtgcttaactgaact

SEQ ID NO: 141247 - DNA, 15 bp, Homo sapiens
tgtgcttaactgaac

SEQ ID NO: 141248 - DNA, 15 bp, Homo sapiens
ctgtgcttaactgaa

SEQ ID NO: 141249 - DNA, 15 bp, Homo sapiens
gctgtgcttaactga

SEQ ID NO: 141250 - DNA, 15 bp, Homo sapiens
agctgtgcttaactg

SEQ ID NO: 141251 - DNA, 15 bp, Homo sapiens
aagctgtgcttaact

SEQ ID NO: 141252 - DNA, 15 bp, Homo sapiens
aaagctgtgcttaac

SEQ ID NO: 141253 - DNA, 15 bp, Homo sapiens
caaagctgtgcttaa

SEQ ID NO: 141254 - DNA, 15 bp, Homo sapiens
ccaaagctgtgctta

SEQ ID NO: 141255 - DNA, 15 bp, Homo sapiens
cccaaagctgtgctt

SEQ ID NO: 141256 - DNA, 15 bp, Homo sapiens
tcccaaagctgtgct

SEQ ID NO: 141257 - DNA, 15 bp, Homo sapiens
ctcccaaagctgtgc

SEQ ID NO: 141258 - DNA, 15 bp, Homo sapiens
actcccaaagctgtg

SEQ ID NO: 141259 - DNA, 15 bp, Homo sapiens
gactcccaaagctgt

SEQ ID NO: 141260 - DNA, 15 bp, Homo sapiens
tgactcccaaagctg

SEQ ID NO: 141261 - DNA, 15 bp, Homo sapiens
ctgactcccaaagct

SEQ ID NO: 141262 - DNA, 15 bp, Homo sapiens
tctgactcccaaagc

SEQ ID NO: 141263 - DNA, 15 bp, Homo sapiens
atctgactcccaaag

SEQ ID NO: 141264 - DNA, 15 bp, Homo sapiens
gatctgactcccaaa

SEQ ID NO: 141265 - DNA, 15 bp, Homo sapiens
tgatctgactcccaa

SEQ ID NO: 141266 - DNA, 15 bp, Homo sapiens
ctgatctgactccca

SEQ ID NO: 141267 - DNA, 15 bp, Homo sapiens
gctgatctgactccc

SEQ ID NO: 141268 - DNA, 15 bp, Homo sapiens
ggctgatctgactcc

SEQ ID NO: 141269 - DNA, 15 bp, Homo sapiens
aggctgatctgactc

SEQ ID NO: 141270 - DNA, 15 bp, Homo sapiens
caggctgatctgact

SEQ ID NO: 141271 - DNA, 15 bp, Homo sapiens
acaggctgatctgac

SEQ ID NO: 141272 - DNA, 15 bp, Homo sapiens
cacaggctgatctga

SEQ ID NO: 141273 - DNA, 15 bp, Homo sapiens
acacaggctgatctg

SEQ ID NO: 141274 - DNA, 15 bp, Homo sapiens
aacacaggctgatct

SEQ ID NO: 141275 - DNA, 15 bp, Homo sapiens
gaacacaggctgatc

SEQ ID NO: 141276 - DNA, 15 bp, Homo sapiens
tgaacacaggctgat

SEQ ID NO: 141277 - DNA, 15 bp, Homo sapiens
ttgaacacaggctga

SEQ ID NO: 141278 - DNA, 15 bp, Homo sapiens
tttgaacacaggctg

SEQ ID NO: 141279 - DNA, 15 bp, Homo sapiens
atttgaacacaggct

SEQ ID NO: 141280 - DNA, 15 bp, Homo sapiens
gatttgaacacaggc

SEQ ID NO: 141281 - DNA, 15 bp, Homo sapiens
ggatttgaacacagg

SEQ ID NO: 141282 - DNA, 15 bp, Homo sapiens
aggatttgaacacag

SEQ ID NO: 141283 - DNA, 15 bp, Homo sapiens
caggatttgaacaca

SEQ ID NO: 141284 - DNA, 15 bp, Homo sapiens
ccaggatttgaacac

SEQ ID NO: 141285 - DNA, 15 bp, Homo sapiens
gccaggatttgaaca

SEQ ID NO: 141286 - DNA, 15 bp, Homo sapiens
agccaggatttgaac

SEQ ID NO: 141287 - DNA, 15 bp, Homo sapiens
gagccaggatttgaa

SEQ ID NO: 141288 - DNA, 15 bp, Homo sapiens
agagccaggatttga

SEQ ID NO: 141289 - DNA, 15 bp, Homo sapiens
cagagccaggatttg

SEQ ID NO: 141290 - DNA, 15 bp, Homo sapiens
gcagagccaggattt

SEQ ID NO: 141291 - DNA, 15 bp, Homo sapiens
agcagagccaggatt

SEQ ID NO: 141292 - DNA, 15 bp, Homo sapiens
cagcagagccaggat

SEQ ID NO: 141293 - DNA, 15 bp, Homo sapiens
gcagcagagccagga

SEQ ID NO: 141294 - DNA, 15 bp, Homo sapiens
cgcagcagagccagg

SEQ ID NO: 141295 - DNA, 15 bp, Homo sapiens
ccgcagcagagccag

SEQ ID NO: 141296 - DNA, 15 bp, Homo sapiens
cccgcagcagagcca

SEQ ID NO: 141297 - DNA, 15 bp, Homo sapiens
acccgcagcagagcc

SEQ ID NO: 141298 - DNA, 15 bp, Homo sapiens
gacccgcagcagagc

SEQ ID NO: 141299 - DNA, 15 bp, Homo sapiens
ggacccgcagcagag

SEQ ID NO: 141300 - DNA, 15 bp, Homo sapiens
gggacccgcagcaga

SEQ ID NO: 141301 - DNA, 15 bp, Homo sapiens
agggacccgcagcag

SEQ ID NO: 141302 - DNA, 15 bp, Homo sapiens
cagggacccgcagca

SEQ ID NO: 141303 - DNA, 15 bp, Homo sapiens
ccagggacccgcagc

SEQ ID NO: 141304 - DNA, 15 bp, Homo sapiens
tccagggacccgcag

SEQ ID NO: 141305 - DNA, 15 bp, Homo sapiens
gtccagggacccgca

SEQ ID NO: 141306 - DNA, 15 bp, Homo sapiens
tgtccagggacccgc

SEQ ID NO: 141307 - DNA, 15 bp, Homo sapiens
ttgtccagggacccg

SEQ ID NO: 141308 - DNA, 15 bp, Homo sapiens
cttgtccagggaccc

SEQ ID NO: 141309 - DNA, 15 bp, Homo sapiens
acttgtccagggacc

SEQ ID NO: 141310 - DNA, 15 bp, Homo sapiens
gacttgtccagggac

SEQ ID NO: 141311 - DNA, 15 bp, Homo sapiens
tgacttgtccaggga

SEQ ID NO: 141312 - DNA, 15 bp, Homo sapiens
ttgacttgtccaggg

SEQ ID NO: 141313 - DNA, 15 bp, Homo sapiens
cttgacttgtccagg

SEQ ID NO: 141314 - DNA, 15 bp, Homo sapiens
acttgacttgtccag

SEQ ID NO: 141315 - DNA, 15 bp, Homo sapiens
tacttgacttgtcca

SEQ ID NO: 141316 - DNA, 15 bp, Homo sapiens
ctacttgacttgtcc

SEQ ID NO: 141317 - DNA, 15 bp, Homo sapiens
gctacttgacttgtc

SEQ ID NO: 141318 - DNA, 15 bp, Homo sapiens
ggctacttgacttgt

SEQ ID NO: 141319 - DNA, 15 bp, Homo sapiens
aggctacttgacttg

SEQ ID NO: 141320 - DNA, 15 bp, Homo sapiens
caggctacttgactt

SEQ ID NO: 141321 - DNA, 15 bp, Homo sapiens
acaggctacttgact

SEQ ID NO: 141322 - DNA, 15 bp, Homo sapiens
gacaggctacttgac

SEQ ID NO: 141323 - DNA, 15 bp, Homo sapiens
ggacaggctacttga

SEQ ID NO: 141324 - DNA, 15 bp, Homo sapiens
tggacaggctacttg

SEQ ID NO: 141325 - DNA, 15 bp, Homo sapiens
ttggacaggctactt

SEQ ID NO: 141326 - DNA, 15 bp, Homo sapiens
cttggacaggctact

SEQ ID NO: 141327 - DNA, 15 bp, Homo sapiens
gcttggacaggctac

SEQ ID NO: 141328 - DNA, 15 bp, Homo sapiens
agcttggacaggcta

SEQ ID NO: 141329 - DNA, 15 bp, Homo sapiens
cagcttggacaggct

SEQ ID NO: 141330 - DNA, 15 bp, Homo sapiens
gcagcttggacaggc

SEQ ID NO: 141331 - DNA, 15 bp, Homo sapiens
tgcagcttggacagg

SEQ ID NO: 141332 - DNA, 15 bp, Homo sapiens
ctgcagcttggacag

SEQ ID NO: 141333 - DNA, 15 bp, Homo sapiens
cctgcagcttggaca

SEQ ID NO: 141334 - DNA, 15 bp, Homo sapiens
gcctgcagcttggac

SEQ ID NO: 141335 - DNA, 15 bp, Homo sapiens
agcctgcagcttgga

SEQ ID NO: 141336 - DNA, 15 bp, Homo sapiens
gagcctgcagcttgg

SEQ ID NO: 141337 - DNA, 15 bp, Homo sapiens
ggagcctgcagcttg

SEQ ID NO: 141338 - DNA, 15 bp, Homo sapiens
aggagcctgcagctt

SEQ ID NO: 141339 - DNA, 15 bp, Homo sapiens
gaggagcctgcagct

SEQ ID NO: 141340 - DNA, 15 bp, Homo sapiens
ggaggagcctgcagc

SEQ ID NO: 141341 - DNA, 15 bp, Homo sapiens
aggaggagcctgcag

SEQ ID NO: 141342 - DNA, 15 bp, Homo sapiens
caggaggagcctgca

SEQ ID NO: 141343 - DNA, 15 bp, Homo sapiens
acaggaggagcctgc

SEQ ID NO: 141344 - DNA, 15 bp, Homo sapiens
cacaggaggagcctg

SEQ ID NO: 141345 - DNA, 15 bp, Homo sapiens
gcacaggaggagcct

SEQ ID NO: 141346 - DNA, 15 bp, Homo sapiens
tgcacaggaggagcc

SEQ ID NO: 141347 - DNA, 15 bp, Homo sapiens
ttgcacaggaggagc

SEQ ID NO: 141348 - DNA, 15 bp, Homo sapiens
tttgcacaggaggag

SEQ ID NO: 141349 - DNA, 15 bp, Homo sapiens
ctttgcacaggagga

SEQ ID NO: 141350 - DNA, 15 bp, Homo sapiens
actttgcacaggagg

SEQ ID NO: 141351 - DNA, 15 bp, Homo sapiens
cactttgcacaggag

SEQ ID NO: 141352 - DNA, 15 bp, Homo sapiens
acactttgcacagga

SEQ ID NO: 141353 - DNA, 15 bp, Homo sapiens
cacactttgcacagg

SEQ ID NO: 141354 - DNA, 15 bp, Homo sapiens
gcacactttgcacag

SEQ ID NO: 141355 - DNA, 15 bp, Homo sapiens
tgcacactttgcaca

SEQ ID NO: 141356 - DNA, 15 bp, Homo sapiens
ctgcacactttgcac

SEQ ID NO: 141357 - DNA, 15 bp, Homo sapiens
tctgcacactttgca

SEQ ID NO: 141358 - DNA, 15 bp, Homo sapiens
ctctgcacactttgc

SEQ ID NO: 141359 - DNA, 15 bp, Homo sapiens
actctgcacactttg

SEQ ID NO: 141360 - DNA, 15 bp, Homo sapiens
tactctgcacacttt

SEQ ID NO: 141361 - DNA, 15 bp, Homo sapiens
atactctgcacactt

SEQ ID NO: 141362 - DNA, 15 bp, Homo sapiens
catactctgcacact

SEQ ID NO: 141363 - DNA, 15 bp, Homo sapiens
tcatactctgcacac

SEQ ID NO: 141364 - DNA, 15 bp, Homo sapiens
gtcatactctgcaca

SEQ ID NO: 141365 - DNA, 15 bp, Homo sapiens
agtcatactctgcac

SEQ ID NO: 141366 - DNA, 15 bp, Homo sapiens
aagtcatactctgca

SEQ ID NO: 141367 - DNA, 15 bp, Homo sapiens
aaagtcatactctgc

SEQ ID NO: 141368 - DNA, 15 bp, Homo sapiens
taaagtcatactctg

SEQ ID NO: 141369 - DNA, 15 bp, Homo sapiens
gtaaagtcatactct

SEQ ID NO: 141370 - DNA, 15 bp, Homo sapiens
tgtaaagtcatactc

SEQ ID NO: 141371 - DNA, 15 bp, Homo sapiens
ctgtaaagtcatact

SEQ ID NO: 141372 - DNA, 15 bp, Homo sapiens
cctgtaaagtcatac

SEQ ID NO: 141373 - DNA, 15 bp, Homo sapiens
ccctgtaaagtcata

SEQ ID NO: 141374 - DNA, 15 bp, Homo sapiens
accctgtaaagtcat

SEQ ID NO: 141375 - DNA, 15 bp, Homo sapiens
aaccctgtaaagtca

SEQ ID NO: 141376 - DNA, 15 bp, Homo sapiens
caaccctgtaaagtc

SEQ ID NO: 141377 - DNA, 15 bp, Homo sapiens
gcaaccctgtaaagt

SEQ ID NO: 141378 - DNA, 15 bp, Homo sapiens
ggcaaccctgtaaag

SEQ ID NO: 141379 - DNA, 15 bp, Homo sapiens
gggcaaccctgtaaa

SEQ ID NO: 141380 - DNA, 15 bp, Homo sapiens
agggcaaccctgtaa

SEQ ID NO: 141381 - DNA, 15 bp, Homo sapiens
cagggcaaccctgta

SEQ ID NO: 141382 - DNA, 15 bp, Homo sapiens
tcagggcaaccctgt

SEQ ID NO: 141383 - DNA, 15 bp, Homo sapiens
ctcagggcaaccctg

SEQ ID NO: 141384 - DNA, 15 bp, Homo sapiens
tctcagggcaaccct

SEQ ID NO: 141385 - DNA, 15 bp, Homo sapiens
ttctcagggcaaccc

SEQ ID NO: 141386 - DNA, 15 bp, Homo sapiens
attctcagggcaacc

SEQ ID NO: 141387 - DNA, 15 bp, Homo sapiens
aattctcagggcaac

SEQ ID NO: 141388 - DNA, 15 bp, Homo sapiens
taattctcagggcaa

SEQ ID NO: 141389 - DNA, 15 bp, Homo sapiens
ttaattctcagggca

SEQ ID NO: 141390 - DNA, 15 bp, Homo sapiens
cttaattctcagggc

SEQ ID NO: 141391 - DNA, 15 bp, Homo sapiens
gcttaattctcaggg

SEQ ID NO: 141392 - DNA, 15 bp, Homo sapiens
ggcttaattctcagg

SEQ ID NO: 141393 - DNA, 15 bp, Homo sapiens
tggcttaattctcag

SEQ ID NO: 141394 - DNA, 15 bp, Homo sapiens
gtggcttaattctca

SEQ ID NO: 141395 - DNA, 15 bp, Homo sapiens
tgtggcttaattctc

SEQ ID NO: 141396 - DNA, 15 bp, Homo sapiens
atgtggcttaattct

SEQ ID NO: 141397 - DNA, 15 bp, Homo sapiens
tatgtggcttaattc

SEQ ID NO: 141398 - DNA, 15 bp, Homo sapiens
ttatgtggcttaatt

SEQ ID NO: 141399 - DNA, 15 bp, Homo sapiens
attatgtggcttaat

SEQ ID NO: 141400 - DNA, 15 bp, Homo sapiens
cattatgtggcttaa

SEQ ID NO: 141401 - DNA, 15 bp, Homo sapiens
gcattatgtggctta

SEQ ID NO: 141402 - DNA, 15 bp, Homo sapiens
tgcattatgtggctt

SEQ ID NO: 141403 - DNA, 15 bp, Homo sapiens
ttgcattatgtggct

SEQ ID NO: 141404 - DNA, 15 bp, Homo sapiens
tttgcattatgtggc

SEQ ID NO: 141405 - DNA, 15 bp, Homo sapiens
ctttgcattatgtgg

SEQ ID NO: 141406 - DNA, 15 bp, Homo sapiens
tctttgcattatgtg

SEQ ID NO: 141407 - DNA, 15 bp, Homo sapiens
ttctttgcattatgt

SEQ ID NO: 141408 - DNA, 15 bp, Homo sapiens
tttctttgcattatg

SEQ ID NO: 141409 - DNA, 15 bp, Homo sapiens
ctttctttgcattat

SEQ ID NO: 141410 - DNA, 15 bp, Homo sapiens
gctttctttgcatta

SEQ ID NO: 141411 - DNA, 15 bp, Homo sapiens
agctttctttgcatt

SEQ ID NO: 141412 - DNA, 15 bp, Homo sapiens
gagctttctttgcat

SEQ ID NO: 141413 - DNA, 15 bp, Homo sapiens
tgagctttctttgca

SEQ ID NO: 141414 - DNA, 15 bp, Homo sapiens
ctgagctttctttgc

SEQ ID NO: 141415 - DNA, 15 bp, Homo sapiens
gctgagctttctttg

SEQ ID NO: 141416 - DNA, 15 bp, Homo sapiens
tgctgagctttcttt

SEQ ID NO: 141417 - DNA, 15 bp, Homo sapiens
atgctgagctttctt

SEQ ID NO: 141418 - DNA, 15 bp, Homo sapiens
tatgctgagctttct

SEQ ID NO: 141419 - DNA, 15 bp, Homo sapiens
ctatgctgagctttc

SEQ ID NO: 141420 - DNA, 15 bp, Homo sapiens
actatgctgagcttt

SEQ ID NO: 141421 - DNA, 15 bp, Homo sapiens
tactatgctgagctt

SEQ ID NO: 141422 - DNA, 15 bp, Homo sapiens
atactatgctgagct

SEQ ID NO: 141423 - DNA, 15 bp, Homo sapiens
gatactatgctgagc

SEQ ID NO: 141424 - DNA, 15 bp, Homo sapiens
agatactatgctgag

SEQ ID NO: 141425 - DNA, 15 bp, Homo sapiens
cagatactatgctga

SEQ ID NO: 141426 - DNA, 15 bp, Homo sapiens
ccagatactatgctg

SEQ ID NO: 141427 - DNA, 15 bp, Homo sapiens
gccagatactatgct

SEQ ID NO: 141428 - DNA, 15 bp, Homo sapiens
ggccagatactatgc

SEQ ID NO: 141429 - DNA, 15 bp, Homo sapiens
gggccagatactatg

SEQ ID NO: 141430 - DNA, 15 bp, Homo sapiens
ggggccagatactat

SEQ ID NO: 141431 - DNA, 15 bp, Homo sapiens
aggggccagatacta

SEQ ID NO: 141432 - DNA, 15 bp, Homo sapiens
caggggccagatact

SEQ ID NO: 141433 - DNA, 15 bp, Homo sapiens
ccaggggccagatac

SEQ ID NO: 141434 - DNA, 15 bp, Homo sapiens
accaggggccagata

SEQ ID NO: 141435 - DNA, 15 bp, Homo sapiens
taccaggggccagat

SEQ ID NO: 141436 - DNA, 15 bp, Homo sapiens
ctaccaggggccaga

SEQ ID NO: 141437 - DNA, 15 bp, Homo sapiens
tctaccaggggccag

SEQ ID NO: 141438 - DNA, 15 bp, Homo sapiens
gtctaccaggggcca

SEQ ID NO: 141439 - DNA, 15 bp, Homo sapiens
cgtctaccaggggcc

SEQ ID NO: 141440 - DNA, 15 bp, Homo sapiens
gcgtctaccaggggc

SEQ ID NO: 141441 - DNA, 15 bp, Homo sapiens
agcgtctaccagggg

SEQ ID NO: 141442 - DNA, 15 bp, Homo sapiens
gagcgtctaccaggg

SEQ ID NO: 141443 - DNA, 15 bp, Homo sapiens
tgagcgtctaccagg

SEQ ID NO: 141444 - DNA, 15 bp, Homo sapiens
atgagcgtctaccag

SEQ ID NO: 141445 - DNA, 15 bp, Homo sapiens
aatgagcgtctacca

SEQ ID NO: 141446 - DNA, 15 bp, Homo sapiens
taatgagcgtctacc

SEQ ID NO: 141447 - DNA, 15 bp, Homo sapiens
gtaatgagcgtctac

SEQ ID NO: 141448 - DNA, 15 bp, Homo sapiens
agtaatgagcgtcta

SEQ ID NO: 141449 - DNA, 15 bp, Homo sapiens
cagtaatgagcgtct

SEQ ID NO: 141450 - DNA, 15 bp, Homo sapiens
gcagtaatgagcgtc

SEQ ID NO: 141451 - DNA, 15 bp, Homo sapiens
ggcagtaatgagcgt

SEQ ID NO: 141452 - DNA, 15 bp, Homo sapiens
gggcagtaatgagcg

SEQ ID NO: 141453 - DNA, 15 bp, Homo sapiens
agggcagtaatgagc

SEQ ID NO: 141454 - DNA, 15 bp, Homo sapiens
gagggcagtaatgag

SEQ ID NO: 141455 - DNA, 15 bp, Homo sapiens
tgagggcagtaatga

SEQ ID NO: 141456 - DNA, 15 bp, Homo sapiens
gtgagggcagtaatg

SEQ ID NO: 141457 - DNA, 15 bp, Homo sapiens
agtgagggcagtaat

SEQ ID NO: 141458 - DNA, 15 bp, Homo sapiens
tagtgagggcagtaa

SEQ ID NO: 141459 - DNA, 15 bp, Homo sapiens
atagtgagggcagta

SEQ ID NO: 141460 - DNA, 15 bp, Homo sapiens
catagtgagggcagt

SEQ ID NO: 141461 - DNA, 15 bp, Homo sapiens
ccatagtgagggcag

SEQ ID NO: 141462 - DNA, 15 bp, Homo sapiens
cccatagtgagggca

SEQ ID NO: 141463 - DNA, 15 bp, Homo sapiens
ccccatagtgagggc

SEQ ID NO: 141464 - DNA, 15 bp, Homo sapiens
tccccatagtgaggg

SEQ ID NO: 141465 - DNA, 15 bp, Homo sapiens
atccccatagtgagg

SEQ ID NO: 141466 - DNA, 15 bp, Homo sapiens
catccccatagtgag

SEQ ID NO: 141467 - DNA, 15 bp, Homo sapiens
tcatccccatagtga

SEQ ID NO: 141468 - DNA, 15 bp, Homo sapiens
ttcatccccatagtg

SEQ ID NO: 141469 - DNA, 15 bp, Homo sapiens
tttcatccccatagt

SEQ ID NO: 141470 - DNA, 15 bp, Homo sapiens
ttttcatccccatag

SEQ ID NO: 141471 - DNA, 15 bp, Homo sapiens
attttcatccccata

SEQ ID NO: 141472 - DNA, 15 bp, Homo sapiens
cattttcatccccat

SEQ ID NO: 141473 - DNA, 15 bp, Homo sapiens
tcattttcatcccca

SEQ ID NO: 141474 - DNA, 15 bp, Homo sapiens
ttcattttcatcccc

SEQ ID NO: 141475 - DNA, 15 bp, Homo sapiens
cttcattttcatccc

SEQ ID NO: 141476 - DNA, 15 bp, Homo sapiens
ccttcattttcatcc

SEQ ID NO: 141477 - DNA, 15 bp, Homo sapiens
tccttcattttcatc

SEQ ID NO: 141478 - DNA, 15 bp, Homo sapiens
ttccttcattttcat

SEQ ID NO: 141479 - DNA, 15 bp, Homo sapiens
tttccttcattttca

SEQ ID NO: 141480 - DNA, 15 bp, Homo sapiens
ttttccttcattttc

SEQ ID NO: 141481 - DNA, 15 bp, Homo sapiens
cttttccttcatttt

SEQ ID NO: 141482 - DNA, 15 bp, Homo sapiens
ccttttccttcattt

SEQ ID NO: 141483 - DNA, 15 bp, Homo sapiens
tccttttccttcatt

SEQ ID NO: 141484 - DNA, 15 bp, Homo sapiens
gtccttttccttcat

SEQ ID NO: 141485 - DNA, 15 bp, Homo sapiens
agtccttttccttca

SEQ ID NO: 141486 - DNA, 15 bp, Homo sapiens
cagtccttttccttc

SEQ ID NO: 141487 - DNA, 15 bp, Homo sapiens
ccagtccttttcctt

SEQ ID NO: 141488 - DNA, 15 bp, Homo sapiens
gccagtccttttcct

SEQ ID NO: 141489 - DNA, 15 bp, Homo sapiens
ggccagtccttttcc

SEQ ID NO: 141490 - DNA, 15 bp, Homo sapiens
aggccagtccttttc

SEQ ID NO: 141491 - DNA, 15 bp, Homo sapiens
caggccagtcctttt

SEQ ID NO: 141492 - DNA, 15 bp, Homo sapiens
ccaggccagtccttt

SEQ ID NO: 141493 - DNA, 15 bp, Homo sapiens
cccaggccagtcctt

SEQ ID NO: 141494 - DNA, 15 bp, Homo sapiens
ccccaggccagtcct

SEQ ID NO: 141495 - DNA, 15 bp, Homo sapiens
accccaggccagtcc

SEQ ID NO: 141496 - DNA, 15 bp, Homo sapiens
gaccccaggccagtc

SEQ ID NO: 141497 - DNA, 15 bp, Homo sapiens
tgaccccaggccagt

SEQ ID NO: 141498 - DNA, 15 bp, Homo sapiens
gtgaccccaggccag

SEQ ID NO: 141499 - DNA, 15 bp, Homo sapiens
tgtgaccccaggcca

SEQ ID NO: 141500 - DNA, 15 bp, Homo sapiens
ctgtgaccccaggcc

SEQ ID NO: 141501 - DNA, 15 bp, Homo sapiens
tctgtgaccccaggc

SEQ ID NO: 141502 - DNA, 15 bp, Homo sapiens
ctctgtgaccccagg

SEQ ID NO: 141503 - DNA, 15 bp, Homo sapiens
gctctgtgaccccag

SEQ ID NO: 141504 - DNA, 15 bp, Homo sapiens
agctctgtgacccca

SEQ ID NO: 141505 - DNA, 15 bp, Homo sapiens
cagctctgtgacccc

SEQ ID NO: 141506 - DNA, 15 bp, Homo sapiens
ccagctctgtgaccc

SEQ ID NO: 141507 - DNA, 15 bp, Homo sapiens
tccagctctgtgacc

SEQ ID NO: 141508 - DNA, 15 bp, Homo sapiens
gtccagctctgtgac

SEQ ID NO: 141509 - DNA, 15 bp, Homo sapiens
agtccagctctgtga

SEQ ID NO: 141510 - DNA, 15 bp, Homo sapiens
gagtccagctctgtg

SEQ ID NO: 141511 - DNA, 15 bp, Homo sapiens
agagtccagctctgt

SEQ ID NO: 141512 - DNA, 15 bp, Homo sapiens
gagagtccagctctg

SEQ ID NO: 141513 - DNA, 15 bp, Homo sapiens
ggagagtccagctct

SEQ ID NO: 141514 - DNA, 15 bp, Homo sapiens
tggagagtccagctc

SEQ ID NO: 141515 - DNA, 15 bp, Homo sapiens
ctggagagtccagct

SEQ ID NO: 141516 - DNA, 15 bp, Homo sapiens
actggagagtccagc

SEQ ID NO: 141517 - DNA, 15 bp, Homo sapiens
cactggagagtccag

SEQ ID NO: 141518 - DNA, 15 bp, Homo sapiens
tcactggagagtcca

SEQ ID NO: 141519 - DNA, 15 bp, Homo sapiens
ctcactggagagtcc

SEQ ID NO: 141520 - DNA, 15 bp, Homo sapiens
tctcactggagagtc

SEQ ID NO: 141521 - DNA, 15 bp, Homo sapiens
gtctcactggagagt

SEQ ID NO: 141522 - DNA, 15 bp, Homo sapiens
tgtctcactggagag

SEQ ID NO: 141523 - DNA, 15 bp, Homo sapiens
ctgtctcactggaga

SEQ ID NO: 141524 - DNA, 15 bp, Homo sapiens
tctgtctcactggag

SEQ ID NO: 141525 - DNA, 15 bp, Homo sapiens
ctctgtctcactgga

SEQ ID NO: 141526 - DNA, 15 bp, Homo sapiens
gctctgtctcactgg

SEQ ID NO: 141527 - DNA, 15 bp, Homo sapiens
tgctctgtctcactg

SEQ ID NO: 141528 - DNA, 15 bp, Homo sapiens
ctgctctgtctcact

SEQ ID NO: 141529 - DNA, 15 bp, Homo sapiens
gctgctctgtctcac

SEQ ID NO: 141530 - DNA, 15 bp, Homo sapiens
ggctgctctgtctca

SEQ ID NO: 141531 - DNA, 15 bp, Homo sapiens
aggctgctctgtctc

SEQ ID NO: 141532 - DNA, 15 bp, Homo sapiens
gaggctgctctgtct

SEQ ID NO: 141533 - DNA, 15 bp, Homo sapiens
agaggctgctctgtc

SEQ ID NO: 141534 - DNA, 15 bp, Homo sapiens
aagaggctgctctgt

SEQ ID NO: 141535 - DNA, 15 bp, Homo sapiens
gaagaggctgctctg

SEQ ID NO: 141536 - DNA, 15 bp, Homo sapiens
ggaagaggctgctct

SEQ ID NO: 141537 - DNA, 15 bp, Homo sapiens
gggaagaggctgctc

SEQ ID NO: 141538 - DNA, 15 bp, Homo sapiens
tgggaagaggctgct

SEQ ID NO: 141539 - DNA, 15 bp, Homo sapiens
ttgggaagaggctgc

SEQ ID NO: 141540 - DNA, 15 bp, Homo sapiens
gttgggaagaggctg

SEQ ID NO: 141541 - DNA, 15 bp, Homo sapiens
ggttgggaagaggct

SEQ ID NO: 141542 - DNA, 15 bp, Homo sapiens
gggttgggaagaggc

SEQ ID NO: 141543 - DNA, 15 bp, Homo sapiens
ggggttgggaagagg

SEQ ID NO: 141544 - DNA, 15 bp, Homo sapiens
tggggttgggaagag

SEQ ID NO: 141545 - DNA, 15 bp, Homo sapiens
gtggggttgggaaga

SEQ ID NO: 141546 - DNA, 15 bp, Homo sapiens
agtggggttgggaag

SEQ ID NO: 141547 - DNA, 15 bp, Homo sapiens
cagtggggttgggaa

SEQ ID NO: 141548 - DNA, 15 bp, Homo sapiens
ccagtggggttggga

SEQ ID NO: 141549 - DNA, 15 bp, Homo sapiens
tccagtggggttggg

SEQ ID NO: 141550 - DNA, 15 bp, Homo sapiens
ttccagtggggttgg

SEQ ID NO: 141551 - DNA, 15 bp, Homo sapiens
tttccagtggggttg

SEQ ID NO: 141552 - DNA, 15 bp, Homo sapiens
gtttccagtggggtt

SEQ ID NO: 141553 - DNA, 15 bp, Homo sapiens
tgtttccagtggggt

SEQ ID NO: 141554 - DNA, 15 bp, Homo sapiens
gtgtttccagtgggg

SEQ ID NO: 141555 - DNA, 15 bp, Homo sapiens
cgtgtttccagtggg

SEQ ID NO: 141556 - DNA, 15 bp, Homo sapiens
ccgtgtttccagtgg

SEQ ID NO: 141557 - DNA, 15 bp, Homo sapiens
tccgtgtttccagtg

SEQ ID NO: 141558 - DNA, 15 bp, Homo sapiens
ctccgtgtttccagt

SEQ ID NO: 141559 - DNA, 15 bp, Homo sapiens
gctccgtgtttccag

SEQ ID NO: 141560 - DNA, 15 bp, Homo sapiens
ggctccgtgtttcca

SEQ ID NO: 141561 - DNA, 15 bp, Homo sapiens
gggctccgtgtttcc

SEQ ID NO: 141562 - DNA, 15 bp, Homo sapiens
agggctccgtgtttc

SEQ ID NO: 141563 - DNA, 15 bp, Homo sapiens
tagggctccgtgttt

SEQ ID NO: 141564 - DNA, 15 bp, Homo sapiens
ctagggctccgtgtt

SEQ ID NO: 141565 - DNA, 15 bp, Homo sapiens
actagggctccgtgt

SEQ ID NO: 141566 - DNA, 15 bp, Homo sapiens
cactagggctccgtg

SEQ ID NO: 141567 - DNA, 15 bp, Homo sapiens
acactagggctccgt

SEQ ID NO: 141568 - DNA, 15 bp, Homo sapiens
gacactagggctccg

SEQ ID NO: 141569 - DNA, 15 bp, Homo sapiens
ggacactagggctcc

SEQ ID NO: 141570 - DNA, 15 bp, Homo sapiens
tggacactagggctc

SEQ ID NO: 141571 - DNA, 15 bp, Homo sapiens
gtggacactagggct

SEQ ID NO: 141572 - DNA, 15 bp, Homo sapiens
agtggacactagggc

SEQ ID NO: 141573 - DNA, 15 bp, Homo sapiens
aagtggacactaggg

SEQ ID NO: 141574 - DNA, 15 bp, Homo sapiens
taagtggacactagg

SEQ ID NO: 141575 - DNA, 15 bp, Homo sapiens
ctaagtggacactag

SEQ ID NO: 141576 - DNA, 15 bp, Homo sapiens
gctaagtggacacta

SEQ ID NO: 141577 - DNA, 15 bp, Homo sapiens
tgctaagtggacact

SEQ ID NO: 141578 - DNA, 15 bp, Homo sapiens
gtgctaagtggacac

SEQ ID NO: 141579 - DNA, 15 bp, Homo sapiens
agtgctaagtggaca

SEQ ID NO: 141580 - DNA, 15 bp, Homo sapiens
gagtgctaagtggac

SEQ ID NO: 141581 - DNA, 15 bp, Homo sapiens
agagtgctaagtgga

SEQ ID NO: 141582 - DNA, 15 bp, Homo sapiens
gagagtgctaagtgg

SEQ ID NO: 141583 - DNA, 15 bp, Homo sapiens
agagagtgctaagtg

SEQ ID NO: 141584 - DNA, 15 bp, Homo sapiens
cagagagtgctaagt

SEQ ID NO: 141585 - DNA, 15 bp, Homo sapiens
gcagagagtgctaag

SEQ ID NO: 141586 - DNA, 15 bp, Homo sapiens
agcagagagtgctaa

SEQ ID NO: 141587 - DNA, 15 bp, Homo sapiens
gagcagagagtgcta

SEQ ID NO: 141588 - DNA, 15 bp, Homo sapiens
tgagcagagagtgct

SEQ ID NO: 141589 - DNA, 15 bp, Homo sapiens
gtgagcagagagtgc

SEQ ID NO: 141590 - DNA, 15 bp, Homo sapiens
ggtgagcagagagtg

SEQ ID NO: 141591 - DNA, 15 bp, Homo sapiens
gggtgagcagagagt

SEQ ID NO: 141592 - DNA, 15 bp, Homo sapiens
ggggtgagcagagag

SEQ ID NO: 141593 - DNA, 15 bp, Homo sapiens
tggggtgagcagaga

SEQ ID NO: 141594 - DNA, 15 bp, Homo sapiens
ctggggtgagcagag

SEQ ID NO: 141595 - DNA, 15 bp, Homo sapiens
gctggggtgagcaga

SEQ ID NO: 141596 - DNA, 15 bp, Homo sapiens
ggctggggtgagcag

SEQ ID NO: 141597 - DNA, 15 bp, Homo sapiens
aggctggggtgagca

SEQ ID NO: 141598 - DNA, 15 bp, Homo sapiens
aaggctggggtgagc

SEQ ID NO: 141599 - DNA, 15 bp, Homo sapiens
taaggctggggtgag

SEQ ID NO: 141600 - DNA, 15 bp, Homo sapiens
gtaaggctggggtga

SEQ ID NO: 141601 - DNA, 15 bp, Homo sapiens
agtaaggctggggtg

SEQ ID NO: 141602 - DNA, 15 bp, Homo sapiens
cagtaaggctggggt

SEQ ID NO: 141603 - DNA, 15 bp, Homo sapiens
acagtaaggctgggg

SEQ ID NO: 141604 - DNA, 15 bp, Homo sapiens
cacagtaaggctggg

SEQ ID NO: 141605 - DNA, 15 bp, Homo sapiens
tcacagtaaggctgg

SEQ ID NO: 141606 - DNA, 15 bp, Homo sapiens
atcacagtaaggctg

SEQ ID NO: 141607 - DNA, 15 bp, Homo sapiens
gatcacagtaaggct

SEQ ID NO: 141608 - DNA, 15 bp, Homo sapiens
agatcacagtaaggc

SEQ ID NO: 141609 - DNA, 15 bp, Homo sapiens
gagatcacagtaagg

SEQ ID NO: 141610 - DNA, 15 bp, Homo sapiens
agagatcacagtaag

SEQ ID NO: 141611 - DNA, 15 bp, Homo sapiens
gagagatcacagtaa

SEQ ID NO: 141612 - DNA, 15 bp, Homo sapiens
ggagagatcacagta

SEQ ID NO: 141613 - DNA, 15 bp, Homo sapiens
gggagagatcacagt

SEQ ID NO: 141614 - DNA, 15 bp, Homo sapiens
ggggagagatcacag

SEQ ID NO: 141615 - DNA, 15 bp, Homo sapiens
aggggagagatcaca

SEQ ID NO: 141616 - DNA, 15 bp, Homo sapiens
gaggggagagatcac

SEQ ID NO: 141617 - DNA, 15 bp, Homo sapiens
agaggggagagatca

SEQ ID NO: 141618 - DNA, 15 bp, Homo sapiens
cagaggggagagatc

SEQ ID NO: 141619 - DNA, 15 bp, Homo sapiens
gcagaggggagagat

SEQ ID NO: 141620 - DNA, 15 bp, Homo sapiens
agcagaggggagaga

SEQ ID NO: 141621 - DNA, 15 bp, Homo sapiens
gagcagaggggagag

SEQ ID NO: 141622 - DNA, 15 bp, Homo sapiens
ggagcagaggggaga

SEQ ID NO: 141623 - DNA, 15 bp, Homo sapiens
gggagcagaggggag

SEQ ID NO: 141624 - DNA, 15 bp, Homo sapiens
cgggagcagagggga

SEQ ID NO: 141625 - DNA, 15 bp, Homo sapiens
acgggagcagagggg

SEQ ID NO: 141626 - DNA, 15 bp, Homo sapiens
gacgggagcagaggg

SEQ ID NO: 141627 - DNA, 15 bp, Homo sapiens
agacgggagcagagg

SEQ ID NO: 141628 - DNA, 15 bp, Homo sapiens
cagacgggagcagag

SEQ ID NO: 141629 - DNA, 15 bp, Homo sapiens
gcagacgggagcaga

SEQ ID NO: 141630 - DNA, 15 bp, Homo sapiens
ggcagacgggagcag

SEQ ID NO: 141631 - DNA, 15 bp, Homo sapiens
gggcagacgggagca

SEQ ID NO: 141632 - DNA, 15 bp, Homo sapiens
ggggcagacgggagc

SEQ ID NO: 141633 - DNA, 15 bp, Homo sapiens
tggggcagacgggag

SEQ ID NO: 141634 - DNA, 15 bp, Homo sapiens
ctggggcagacggga

SEQ ID NO: 141635 - DNA, 15 bp, Homo sapiens
gctggggcagacggg

SEQ ID NO: 141636 - DNA, 15 bp, Homo sapiens
ggctggggcagacgg

SEQ ID NO: 141637 - DNA, 15 bp, Homo sapiens
cggctggggcagacg

SEQ ID NO: 141638 - DNA, 15 bp, Homo sapiens
gcggctggggcagac

SEQ ID NO: 141639 - DNA, 15 bp, Homo sapiens
tgcggctggggcaga

SEQ ID NO: 141640 - DNA, 15 bp, Homo sapiens
ttgcggctggggcag

SEQ ID NO: 141641 - DNA, 15 bp, Homo sapiens
cttgcggctggggca

SEQ ID NO: 141642 - DNA, 15 bp, Homo sapiens
ccttgcggctggggc

SEQ ID NO: 141643 - DNA, 15 bp, Homo sapiens
gccttgcggctgggg

SEQ ID NO: 141644 - DNA, 15 bp, Homo sapiens
ggccttgcggctggg

SEQ ID NO: 141645 - DNA, 15 bp, Homo sapiens
aggccttgcggctgg

SEQ ID NO: 141646 - DNA, 15 bp, Homo sapiens
gaggccttgcggctg

SEQ ID NO: 141647 - DNA, 15 bp, Homo sapiens
cgaggccttgcggct

SEQ ID NO: 141648 - DNA, 15 bp, Homo sapiens
ccgaggccttgcggc

SEQ ID NO: 141649 - DNA, 15 bp, Homo sapiens
cccgaggccttgcgg

SEQ ID NO: 141650 - DNA, 15 bp, Homo sapiens
acccgaggccttgcg

SEQ ID NO: 141651 - DNA, 15 bp, Homo sapiens
gacccgaggccttgc

SEQ ID NO: 141652 - DNA, 15 bp, Homo sapiens
agacccgaggccttg

SEQ ID NO: 141653 - DNA, 15 bp, Homo sapiens
tagacccgaggcctt

SEQ ID NO: 141654 - DNA, 15 bp, Homo sapiens
gtagacccgaggcct

SEQ ID NO: 141655 - DNA, 15 bp, Homo sapiens
ggtagacccgaggcc

SEQ ID NO: 141656 - DNA, 15 bp, Homo sapiens
cggtagacccgaggc

SEQ ID NO: 141657 - DNA, 15 bp, Homo sapiens
acggtagacccgagg

SEQ ID NO: 141658 - DNA, 15 bp, Homo sapiens
cacggtagacccgag

SEQ ID NO: 141659 - DNA, 15 bp, Homo sapiens
ccacggtagacccga

SEQ ID NO: 141660 - DNA, 15 bp, Homo sapiens
tccacggtagacccg

SEQ ID NO: 141661 - DNA, 15 bp, Homo sapiens
ttccacggtagaccc

SEQ ID NO: 141662 - DNA, 15 bp, Homo sapiens
attccacggtagacc

SEQ ID NO: 141663 - DNA, 15 bp, Homo sapiens
cattccacggtagac

SEQ ID NO: 141664 - DNA, 15 bp, Homo sapiens
tcattccacggtaga

SEQ ID NO: 141665 - DNA, 15 bp, Homo sapiens
ctcattccacggtag

SEQ ID NO: 141666 - DNA, 15 bp, Homo sapiens
cctcattccacggta

SEQ ID NO: 141667 - DNA, 15 bp, Homo sapiens
ccctcattccacggt

SEQ ID NO: 141668 - DNA, 15 bp, Homo sapiens
cccctcattccacgg

SEQ ID NO: 141669 - DNA, 15 bp, Homo sapiens
tcccctcattccacg

SEQ ID NO: 141670 - DNA, 15 bp, Homo sapiens
atcccctcattccac

SEQ ID NO: 141671 - DNA, 15 bp, Homo sapiens
gatcccctcattcca

SEQ ID NO: 141672 - DNA, 15 bp, Homo sapiens
ggatcccctcattcc

SEQ ID NO: 141673 - DNA, 15 bp, Homo sapiens
gggatcccctcattc

SEQ ID NO: 141674 - DNA, 15 bp, Homo sapiens
agggatcccctcatt

SEQ ID NO: 141675 - DNA, 15 bp, Homo sapiens
tagggatcccctcat

SEQ ID NO: 141676 - DNA, 15 bp, Homo sapiens
ctagggatcccctca

SEQ ID NO: 141677 - DNA, 15 bp, Homo sapiens
cctagggatcccctc

SEQ ID NO: 141678 - DNA, 15 bp, Homo sapiens
gcctagggatcccct

SEQ ID NO: 141679 - DNA, 15 bp, Homo sapiens
ggcctagggatcccc

SEQ ID NO: 141680 - DNA, 15 bp, Homo sapiens
gggcctagggatccc

SEQ ID NO: 141681 - DNA, 15 bp, Homo sapiens
tgggcctagggatcc

SEQ ID NO: 141682 - DNA, 15 bp, Homo sapiens
ctgggcctagggatc

SEQ ID NO: 141683 - DNA, 15 bp, Homo sapiens
cctgggcctagggat

SEQ ID NO: 141684 - DNA, 15 bp, Homo sapiens
ccctgggcctaggga

SEQ ID NO: 141685 - DNA, 15 bp, Homo sapiens
tccctgggcctaggg

SEQ ID NO: 141686 - DNA, 15 bp, Homo sapiens
ttccctgggcctagg

SEQ ID NO: 141687 - DNA, 15 bp, Homo sapiens
cttccctgggcctag

SEQ ID NO: 141688 - DNA, 15 bp, Homo sapiens
ccttccctgggccta

SEQ ID NO: 141689 - DNA, 15 bp, Homo sapiens
cccttccctgggcct

SEQ ID NO: 141690 - DNA, 15 bp, Homo sapiens
tcccttccctgggcc

SEQ ID NO: 141691 - DNA, 15 bp, Homo sapiens
ctcccttccctgggc

SEQ ID NO: 141692 - DNA, 15 bp, Homo sapiens
cctcccttccctggg

SEQ ID NO: 141693 - DNA, 15 bp, Homo sapiens
gcctcccttccctgg

SEQ ID NO: 141694 - DNA, 15 bp, Homo sapiens
cgcctcccttccctg

SEQ ID NO: 141695 - DNA, 15 bp, Homo sapiens
gcgcctcccttccct

SEQ ID NO: 141696 - DNA, 15 bp, Homo sapiens
cgcgcctcccttccc

SEQ ID NO: 141697 - DNA, 15 bp, Homo sapiens
gcgcgcctcccttcc

SEQ ID NO: 141698 - DNA, 15 bp, Homo sapiens
agcgcgcctcccttc

SEQ ID NO: 141699 - DNA, 15 bp, Homo sapiens
aagcgcgcctccctt

SEQ ID NO: 141700 - DNA, 15 bp, Homo sapiens
taagcgcgcctccct

SEQ ID NO: 141701 - DNA, 15 bp, Homo sapiens
ctaagcgcgcctccc

SEQ ID NO: 141702 - DNA, 15 bp, Homo sapiens
cctaagcgcgcctcc

SEQ ID NO: 141703 - DNA, 15 bp, Homo sapiens
ccctaagcgcgcctc

SEQ ID NO: 141704 - DNA, 15 bp, Homo sapiens
cccctaagcgcgcct

SEQ ID NO: 141705 - DNA, 15 bp, Homo sapiens
acccctaagcgcgcc

SEQ ID NO: 141706 - DNA, 15 bp, Homo sapiens
cacccctaagcgcgc

SEQ ID NO: 141707 - DNA, 15 bp, Homo sapiens
ccacccctaagcgcg

SEQ ID NO: 141708 - DNA, 15 bp, Homo sapiens
cccacccctaagcgc

SEQ ID NO: 141709 - DNA, 15 bp, Homo sapiens
ccccacccctaagcg

SEQ ID NO: 141710 - DNA, 15 bp, Homo sapiens
cccccacccctaagc

SEQ ID NO: 141711 - DNA, 15 bp, Homo sapiens
gcccccacccctaag

SEQ ID NO: 141712 - DNA, 15 bp, Homo sapiens
tgcccccacccctaa

SEQ ID NO: 141713 - DNA, 15 bp, Homo sapiens
gtgcccccaccccta

SEQ ID NO: 141714 - DNA, 15 bp, Homo sapiens
tgtgcccccacccct

SEQ ID NO: 141715 - DNA, 15 bp, Homo sapiens
ttgtgcccccacccc

SEQ ID NO: 141716 - DNA, 15 bp, Homo sapiens
tttgtgcccccaccc

SEQ ID NO: 141717 - DNA, 15 bp, Homo sapiens
gtttgtgcccccacc

SEQ ID NO: 141718 - DNA, 15 bp, Homo sapiens
cgtttgtgcccccac

SEQ ID NO: 141719 - DNA, 15 bp, Homo sapiens
ccgtttgtgccccca

SEQ ID NO: 141720 - DNA, 15 bp, Homo sapiens
cccgtttgtgccccc

SEQ ID NO: 141721 - DNA, 15 bp, Homo sapiens
gcccgtttgtgcccc

SEQ ID NO: 141722 - DNA, 15 bp, Homo sapiens
tgcccgtttgtgccc

SEQ ID NO: 141723 - DNA, 15 bp, Homo sapiens
atgcccgtttgtgcc

SEQ ID NO: 141724 - DNA, 15 bp, Homo sapiens
gatgcccgtttgtgc

SEQ ID NO: 141725 - DNA, 15 bp, Homo sapiens
agatgcccgtttgtg

SEQ ID NO: 141726 - DNA, 15 bp, Homo sapiens
gagatgcccgtttgt

SEQ ID NO: 141727 - DNA, 15 bp, Homo sapiens
cgagatgcccgtttg

SEQ ID NO: 141728 - DNA, 15 bp, Homo sapiens
ccgagatgcccgttt

SEQ ID NO: 141729 - DNA, 15 bp, Homo sapiens
accgagatgcccgtt

SEQ ID NO: 141730 - DNA, 15 bp, Homo sapiens
caccgagatgcccgt

SEQ ID NO: 141731 - DNA, 15 bp, Homo sapiens
ccaccgagatgcccg

SEQ ID NO: 141732 - DNA, 15 bp, Homo sapiens
gccaccgagatgccc

SEQ ID NO: 141733 - DNA, 15 bp, Homo sapiens
tgccaccgagatgcc

SEQ ID NO: 141734 - DNA, 15 bp, Homo sapiens
gtgccaccgagatgc

SEQ ID NO: 141735 - DNA, 15 bp, Homo sapiens
agtgccaccgagatg

SEQ ID NO: 141736 - DNA, 15 bp, Homo sapiens
aagtgccaccgagat

SEQ ID NO: 141737 - DNA, 15 bp, Homo sapiens
caagtgccaccgaga

SEQ ID NO: 141738 - DNA, 15 bp, Homo sapiens
acaagtgccaccgag

SEQ ID NO: 141739 - DNA, 15 bp, Homo sapiens
gacaagtgccaccga

SEQ ID NO: 141740 - DNA, 15 bp, Homo sapiens
ggacaagtgccaccg

SEQ ID NO: 141741 - DNA, 15 bp, Homo sapiens
aggacaagtgccacc

SEQ ID NO: 141742 - DNA, 15 bp, Homo sapiens
gaggacaagtgccac

SEQ ID NO: 141743 - DNA, 15 bp, Homo sapiens
agaggacaagtgcca

SEQ ID NO: 141744 - DNA, 15 bp, Homo sapiens
gagaggacaagtgcc

SEQ ID NO: 141745 - DNA, 15 bp, Homo sapiens
agagaggacaagtgc

SEQ ID NO: 141746 - DNA, 15 bp, Homo sapiens
gagagaggacaagtg

SEQ ID NO: 141747 - DNA, 15 bp, Homo sapiens
agagagaggacaagt

SEQ ID NO: 141748 - DNA, 15 bp, Homo sapiens
tagagagaggacaag

SEQ ID NO: 141749 - DNA, 15 bp, Homo sapiens
gtagagagaggacaa

SEQ ID NO: 141750 - DNA, 15 bp, Homo sapiens
ggtagagagaggaca

SEQ ID NO: 141751 - DNA, 15 bp, Homo sapiens
gggtagagagaggac

SEQ ID NO: 141752 - DNA, 15 bp, Homo sapiens
agggtagagagagga

SEQ ID NO: 141753 - DNA, 15 bp, Homo sapiens
cagggtagagagagg

SEQ ID NO: 141754 - DNA, 15 bp, Homo sapiens
ccagggtagagagag

SEQ ID NO: 141755 - DNA, 15 bp, Homo sapiens
cccagggtagagaga

SEQ ID NO: 141756 - DNA, 15 bp, Homo sapiens
tcccagggtagagag

SEQ ID NO: 141757 - DNA, 15 bp, Homo sapiens
ttcccagggtagaga

SEQ ID NO: 141758 - DNA, 15 bp, Homo sapiens
tttcccagggtagag

SEQ ID NO: 141759 - DNA, 15 bp, Homo sapiens
ctttcccagggtaga

SEQ ID NO: 141760 - DNA, 15 bp, Homo sapiens
cctttcccagggtag

SEQ ID NO: 141761 - DNA, 15 bp, Homo sapiens
ccctttcccagggta

SEQ ID NO: 141762 - DNA, 15 bp, Homo sapiens
gccctttcccagggt

SEQ ID NO: 141763 - DNA, 15 bp, Homo sapiens
tgccctttcccaggg

SEQ ID NO: 141764 - DNA, 15 bp, Homo sapiens
ctgccctttcccagg

SEQ ID NO: 141765 - DNA, 15 bp, Homo sapiens
tctgccctttcccag

SEQ ID NO: 141766 - DNA, 15 bp, Homo sapiens
ttctgccctttccca

SEQ ID NO: 141767 - DNA, 15 bp, Homo sapiens
tttctgccctttccc

SEQ ID NO: 141768 - DNA, 15 bp, Homo sapiens
ctttctgccctttcc

SEQ ID NO: 141769 - DNA, 15 bp, Homo sapiens
gctttctgccctttc

SEQ ID NO: 141770 - DNA, 15 bp, Homo sapiens
cgctttctgcccttt

SEQ ID NO: 141771 - DNA, 15 bp, Homo sapiens
ccgctttctgccctt

SEQ ID NO: 141772 - DNA, 15 bp, Homo sapiens
gccgctttctgccct

SEQ ID NO: 141773 - DNA, 15 bp, Homo sapiens
tgccgctttctgccc

SEQ ID NO: 141774 - DNA, 15 bp, Homo sapiens
ctgccgctttctgcc

SEQ ID NO: 141775 - DNA, 15 bp, Homo sapiens
gctgccgctttctgc

SEQ ID NO: 141776 - DNA, 15 bp, Homo sapiens
ggctgccgctttctg

SEQ ID NO: 141777 - DNA, 15 bp, Homo sapiens
tggctgccgctttct

SEQ ID NO: 141778 - DNA, 15 bp, Homo sapiens
ttggctgccgctttc

SEQ ID NO: 141779 - DNA, 15 bp, Homo sapiens
cttggctgccgcttt

SEQ ID NO: 141780 - DNA, 15 bp, Homo sapiens
acttggctgccgctt

SEQ ID NO: 141781 - DNA, 15 bp, Homo sapiens
gacttggctgccgct

SEQ ID NO: 141782 - DNA, 15 bp, Homo sapiens
tgacttggctgccgc

SEQ ID NO: 141783 - DNA, 15 bp, Homo sapiens
ctgacttggctgccg

SEQ ID NO: 141784 - DNA, 15 bp, Homo sapiens
cctgacttggctgcc

SEQ ID NO: 141785 - DNA, 15 bp, Homo sapiens
ccctgacttggctgc

SEQ ID NO: 141786 - DNA, 15 bp, Homo sapiens
gccctgacttggctg

SEQ ID NO: 141787 - DNA, 15 bp, Homo sapiens
agccctgacttggct

SEQ ID NO: 141788 - DNA, 15 bp, Homo sapiens
cagccctgacttggc

SEQ ID NO: 141789 - DNA, 15 bp, Homo sapiens
acagccctgacttgg

SEQ ID NO: 141790 - DNA, 15 bp, Homo sapiens
cacagccctgacttg

SEQ ID NO: 141791 - DNA, 15 bp, Homo sapiens
gcacagccctgactt

SEQ ID NO: 141792 - DNA, 15 bp, Homo sapiens
tgcacagccctgact

SEQ ID NO: 141793 - DNA, 15 bp, Homo sapiens
gtgcacagccctgac

SEQ ID NO: 141794 - DNA, 15 bp, Homo sapiens
cgtgcacagccctga

SEQ ID NO: 141795 - DNA, 15 bp, Homo sapiens
ccgtgcacagccctg

SEQ ID NO: 141796 - DNA, 15 bp, Homo sapiens
cccgtgcacagccct

SEQ ID NO: 141797 - DNA, 15 bp, Homo sapiens
tcccgtgcacagccc

SEQ ID NO: 141798 - DNA, 15 bp, Homo sapiens
ctcccgtgcacagcc

SEQ ID NO: 141799 - DNA, 15 bp, Homo sapiens
tctcccgtgcacagc

SEQ ID NO: 141800 - DNA, 15 bp, Homo sapiens
ctctcccgtgcacag

SEQ ID NO: 141801 - DNA, 15 bp, Homo sapiens
tctctcccgtgcaca

SEQ ID NO: 141802 - DNA, 15 bp, Homo sapiens
ctctctcccgtgcac

SEQ ID NO: 141803 - DNA, 15 bp, Homo sapiens
tctctctcccgtgca

SEQ ID NO: 141804 - DNA, 15 bp, Homo sapiens
ctctctctcccgtgc

SEQ ID NO: 141805 - DNA, 15 bp, Homo sapiens
actctctctcccgtg

SEQ ID NO: 141806 - DNA, 15 bp, Homo sapiens
cactctctctcccgt

SEQ ID NO: 141807 - DNA, 15 bp, Homo sapiens
tcactctctctcccg

SEQ ID NO: 141808 - DNA, 15 bp, Homo sapiens
gtcactctctctccc

SEQ ID NO: 141809 - DNA, 15 bp, Homo sapiens
ggtcactctctctcc

SEQ ID NO: 141810 - DNA, 15 bp, Homo sapiens
cggtcactctctctc

SEQ ID NO: 141811 - DNA, 15 bp, Homo sapiens
gcggtcactctctct

SEQ ID NO: 141812 - DNA, 15 bp, Homo sapiens
cgcggtcactctctc

SEQ ID NO: 141813 - DNA, 15 bp, Homo sapiens
ccgcggtcactctct

SEQ ID NO: 141814 - DNA, 15 bp, Homo sapiens
gccgcggtcactctc

SEQ ID NO: 141815 - DNA, 15 bp, Homo sapiens
cgccgcggtcactct

SEQ ID NO: 141816 - DNA, 15 bp, Homo sapiens
ccgccgcggtcactc

SEQ ID NO: 141817 - DNA, 15 bp, Homo sapiens
cccgccgcggtcact

SEQ ID NO: 141818 - DNA, 15 bp, Homo sapiens
ccccgccgcggtcac

SEQ ID NO: 141819 - DNA, 15 bp, Homo sapiens
cccccgccgcggtca

SEQ ID NO: 141820 - DNA, 15 bp, Homo sapiens
gcccccgccgcggtc

SEQ ID NO: 141821 - DNA, 15 bp, Homo sapiens
cgcccccgccgcggt

SEQ ID NO: 141822 - DNA, 15 bp, Homo sapiens
gcgcccccgccgcgg

SEQ ID NO: 141823 - DNA, 15 bp, Homo sapiens
cgcgcccccgccgcg

SEQ ID NO: 141824 - DNA, 15 bp, Homo sapiens
ccgcgcccccgccgc

SEQ ID NO: 141825 - DNA, 15 bp, Homo sapiens
tccgcgcccccgccg

SEQ ID NO: 141826 - DNA, 15 bp, Homo sapiens
ctccgcgcccccgcc

SEQ ID NO: 141827 - DNA, 15 bp, Homo sapiens
tctccgcgcccccgc

SEQ ID NO: 141828 - DNA, 15 bp, Homo sapiens
ttctccgcgcccccg

SEQ ID NO: 141829 - DNA, 15 bp, Homo sapiens
gttctccgcgccccc

SEQ ID NO: 141830 - DNA, 15 bp, Homo sapiens
ggttctccgcgcccc

SEQ ID NO: 141831 - DNA, 15 bp, Homo sapiens
gggttctccgcgccc

SEQ ID NO: 141832 - DNA, 15 bp, Homo sapiens
ggggttctccgcgcc

SEQ ID NO: 141833 - DNA, 15 bp, Homo sapiens
cggggttctccgcgc

SEQ ID NO: 141834 - DNA, 15 bp, Homo sapiens
gcggggttctccgcg

SEQ ID NO: 141835 - DNA, 15 bp, Homo sapiens
agcggggttctccgc

SEQ ID NO: 141836 - DNA, 15 bp, Homo sapiens
cagcggggttctccg

SEQ ID NO: 141837 - DNA, 15 bp, Homo sapiens
ccagcggggttctcc

SEQ ID NO: 141838 - DNA, 15 bp, Homo sapiens
cccagcggggttctc

SEQ ID NO: 141839 - DNA, 15 bp, Homo sapiens
gcccagcggggttct

SEQ ID NO: 141840 - DNA, 15 bp, Homo sapiens
agcccagcggggttc

SEQ ID NO: 141841 - DNA, 15 bp, Homo sapiens
gagcccagcggggtt

SEQ ID NO: 141842 - DNA, 15 bp, Homo sapiens
ggagcccagcggggt

SEQ ID NO: 141843 - DNA, 15 bp, Homo sapiens
gggagcccagcgggg

SEQ ID NO: 141844 - DNA, 15 bp, Homo sapiens
cgggagcccagcggg

SEQ ID NO: 141845 - DNA, 15 bp, Homo sapiens
gcgggagcccagcgg

SEQ ID NO: 141846 - DNA, 15 bp, Homo sapiens
agcgggagcccagcg

SEQ ID NO: 141847 - DNA, 15 bp, Homo sapiens
gagcgggagcccagc

SEQ ID NO: 141848 - DNA, 15 bp, Homo sapiens
cgagcgggagcccag

SEQ ID NO: 141849 - DNA, 15 bp, Homo sapiens
ccgagcgggagccca

SEQ ID NO: 141850 - DNA, 15 bp, Homo sapiens
accgagcgggagccc

SEQ ID NO: 141851 - DNA, 15 bp, Homo sapiens
caccgagcgggagcc

SEQ ID NO: 141852 - DNA, 15 bp, Homo sapiens
tcaccgagcgggagc

SEQ ID NO: 141853 - DNA, 15 bp, Homo sapiens
ctcaccgagcgggag

SEQ ID NO: 141854 - DNA, 15 bp, Homo sapiens
tctcaccgagcggga

SEQ ID NO: 141855 - DNA, 15 bp, Homo sapiens
ctctcaccgagcggg

SEQ ID NO: 141856 - DNA, 15 bp, Homo sapiens
cctctcaccgagcgg

SEQ ID NO: 141857 - DNA, 15 bp, Homo sapiens
ccctctcaccgagcg

SEQ ID NO: 141858 - DNA, 15 bp, Homo sapiens
gccctctcaccgagc

SEQ ID NO: 141859 - DNA, 15 bp, Homo sapiens
cgccctctcaccgag

SEQ ID NO: 141860 - DNA, 15 bp, Homo sapiens
ccgccctctcaccga

SEQ ID NO: 141861 - DNA, 15 bp, Homo sapiens
cccgccctctcaccg

SEQ ID NO: 141862 - DNA, 15 bp, Homo sapiens
tcccgccctctcacc

SEQ ID NO: 141863 - DNA, 15 bp, Homo sapiens
ctcccgccctctcac

SEQ ID NO: 141864 - DNA, 15 bp, Homo sapiens
gctcccgccctctca

SEQ ID NO: 141865 - DNA, 15 bp, Homo sapiens
ggctcccgccctctc

SEQ ID NO: 141866 - DNA, 15 bp, Homo sapiens
cggctcccgccctct

SEQ ID NO: 141867 - DNA, 15 bp, Homo sapiens
acggctcccgccctc

SEQ ID NO: 141868 - DNA, 15 bp, Homo sapiens
cacggctcccgccct

SEQ ID NO: 141869 - DNA, 15 bp, Homo sapiens
ccacggctcccgccc

SEQ ID NO: 141870 - DNA, 15 bp, Homo sapiens
cccacggctcccgcc

SEQ ID NO: 141871 - DNA, 15 bp, Homo sapiens
acccacggctcccgc

SEQ ID NO: 141872 - DNA, 15 bp, Homo sapiens
gacccacggctcccg

SEQ ID NO: 141873 - DNA, 15 bp, Homo sapiens
ggacccacggctccc

SEQ ID NO: 141874 - DNA, 15 bp, Homo sapiens
cggacccacggctcc

SEQ ID NO: 141875 - DNA, 15 bp, Homo sapiens
gcggacccacggctc

SEQ ID NO: 141876 - DNA, 15 bp, Homo sapiens
cgcggacccacggct

SEQ ID NO: 141877 - DNA, 15 bp, Homo sapiens
tcgcggacccacggc

SEQ ID NO: 141878 - DNA, 15 bp, Homo sapiens
ttcgcggacccacgg

SEQ ID NO: 141879 - DNA, 15 bp, Homo sapiens
cttcgcggacccacg

SEQ ID NO: 141880 - DNA, 15 bp, Homo sapiens
gcttcgcggacccac

SEQ ID NO: 141881 - DNA, 15 bp, Homo sapiens
ggcttcgcggaccca

SEQ ID NO: 141882 - DNA, 15 bp, Homo sapiens
gggcttcgcggaccc

SEQ ID NO: 141883 - DNA, 15 bp, Homo sapiens
ggggcttcgcggacc

SEQ ID NO: 141884 - DNA, 15 bp, Homo sapiens
aggggcttcgcggac

SEQ ID NO: 141885 - DNA, 15 bp, Homo sapiens
aaggggcttcgcgga

SEQ ID NO: 141886 - DNA, 15 bp, Homo sapiens
gaaggggcttcgcgg

SEQ ID NO: 141887 - DNA, 15 bp, Homo sapiens
ggaaggggcttcgcg

SEQ ID NO: 141888 - DNA, 15 bp, Homo sapiens
aggaaggggcttcgc

SEQ ID NO: 141889 - DNA, 15 bp, Homo sapiens
gaggaaggggcttcg

SEQ ID NO: 141890 - DNA, 15 bp, Homo sapiens
ggaggaaggggcttc

SEQ ID NO: 141891 - DNA, 15 bp, Homo sapiens
gggaggaaggggctt

SEQ ID NO: 141892 - DNA, 15 bp, Homo sapiens
ggggaggaaggggct

SEQ ID NO: 141893 - DNA, 15 bp, Homo sapiens
cggggaggaaggggc

SEQ ID NO: 141894 - DNA, 15 bp, Homo sapiens
ccggggaggaagggg

SEQ ID NO: 141895 - DNA, 15 bp, Homo sapiens
gccggggaggaaggg

SEQ ID NO: 141896 - DNA, 15 bp, Homo sapiens
tgccggggaggaagg

SEQ ID NO: 141897 - DNA, 15 bp, Homo sapiens
ctgccggggaggaag

SEQ ID NO: 141898 - DNA, 15 bp, Homo sapiens
tctgccggggaggaa

SEQ ID NO: 141899 - DNA, 15 bp, Homo sapiens
ctctgccggggagga

SEQ ID NO: 141900 - DNA, 15 bp, Homo sapiens
cctctgccggggagg

SEQ ID NO: 141901 - DNA, 15 bp, Homo sapiens
tcctctgccggggag

SEQ ID NO: 141902 - DNA, 15 bp, Homo sapiens
gtcctctgccgggga

SEQ ID NO: 141903 - DNA, 15 bp, Homo sapiens
ggtcctctgccgggg

SEQ ID NO: 141904 - DNA, 15 bp, Homo sapiens
aggtcctctgccggg

SEQ ID NO: 141905 - DNA, 15 bp, Homo sapiens
taggtcctctgccgg

SEQ ID NO: 141906 - DNA, 15 bp, Homo sapiens
ttaggtcctctgccg

SEQ ID NO: 141907 - DNA, 15 bp, Homo sapiens
attaggtcctctgcc

SEQ ID NO: 141908 - DNA, 15 bp, Homo sapiens
tattaggtcctctgc

SEQ ID NO: 141909 - DNA, 15 bp, Homo sapiens
ctattaggtcctctg

SEQ ID NO: 141910 - DNA, 15 bp, Homo sapiens
cctattaggtcctct

SEQ ID NO: 141911 - DNA, 15 bp, Homo sapiens
gcctattaggtcctc

SEQ ID NO: 141912 - DNA, 15 bp, Homo sapiens
tgcctattaggtcct

SEQ ID NO: 141913 - DNA, 15 bp, Homo sapiens
ctgcctattaggtcc

SEQ ID NO: 141914 - DNA, 15 bp, Homo sapiens
gctgcctattaggtc

SEQ ID NO: 141915 - DNA, 15 bp, Homo sapiens
cgctgcctattaggt

SEQ ID NO: 141916 - DNA, 15 bp, Homo sapiens
ccgctgcctattagg

SEQ ID NO: 141917 - DNA, 15 bp, Homo sapiens
cccgctgcctattag

SEQ ID NO: 141918 - DNA, 15 bp, Homo sapiens
ccccgctgcctatta

SEQ ID NO: 141919 - DNA, 15 bp, Homo sapiens
cccccgctgcctatt

SEQ ID NO: 141920 - DNA, 15 bp, Homo sapiens
gcccccgctgcctat

SEQ ID NO: 141921 - DNA, 15 bp, Homo sapiens
cgcccccgctgccta

SEQ ID NO: 141922 - DNA, 15 bp, Homo sapiens
ccgcccccgctgcct

SEQ ID NO: 141923 - DNA, 15 bp, Homo sapiens
cccgcccccgctgcc

SEQ ID NO: 141924 - DNA, 15 bp, Homo sapiens
tcccgcccccgctgc

SEQ ID NO: 141925 - DNA, 15 bp, Homo sapiens
ctcccgcccccgctg

SEQ ID NO: 141926 - DNA, 15 bp, Homo sapiens
actcccgcccccgct

SEQ ID NO: 141927 - DNA, 15 bp, Homo sapiens
cactcccgcccccgc

SEQ ID NO: 141928 - DNA, 15 bp, Homo sapiens
ccactcccgcccccg

SEQ ID NO: 141929 - DNA, 15 bp, Homo sapiens
cccactcccgccccc

SEQ ID NO: 141930 - DNA, 15 bp, Homo sapiens
ccccactcccgcccc

SEQ ID NO: 141931 - DNA, 15 bp, Homo sapiens
cccccactcccgccc

SEQ ID NO: 141932 - DNA, 15 bp, Homo sapiens
gcccccactcccgcc

SEQ ID NO: 141933 - DNA, 15 bp, Homo sapiens
cgcccccactcccgc

SEQ ID NO: 141934 - DNA, 15 bp, Homo sapiens
gcgcccccactcccg

SEQ ID NO: 141935 - DNA, 15 bp, Homo sapiens
ggcgcccccactccc

SEQ ID NO: 141936 - DNA, 15 bp, Homo sapiens
gggcgcccccactcc

SEQ ID NO: 141937 - DNA, 15 bp, Homo sapiens
agggcgcccccactc

SEQ ID NO: 141938 - DNA, 15 bp, Homo sapiens
gagggcgcccccact

SEQ ID NO: 141939 - DNA, 15 bp, Homo sapiens
ggagggcgcccccac

SEQ ID NO: 141940 - DNA, 15 bp, Homo sapiens
cggagggcgccccca

SEQ ID NO: 141941 - DNA, 15 bp, Homo sapiens
ccggagggcgccccc

SEQ ID NO: 141942 - DNA, 15 bp, Homo sapiens
accggagggcgcccc

SEQ ID NO: 141943 - DNA, 15 bp, Homo sapiens
gaccggagggcgccc

SEQ ID NO: 141944 - DNA, 15 bp, Homo sapiens
ggaccggagggcgcc

SEQ ID NO: 141945 - DNA, 15 bp, Homo sapiens
aggaccggagggcgc

SEQ ID NO: 141946 - DNA, 15 bp, Homo sapiens
gaggaccggagggcg

SEQ ID NO: 141947 - DNA, 15 bp, Homo sapiens
tgaggaccggagggc

SEQ ID NO: 141948 - DNA, 15 bp, Homo sapiens
gtgaggaccggaggg

SEQ ID NO: 141949 - DNA, 15 bp, Homo sapiens
ggtgaggaccggagg

SEQ ID NO: 141950 - DNA, 15 bp, Homo sapiens
gggtgaggaccggag

SEQ ID NO: 141951 - DNA, 15 bp, Homo sapiens
ggggtgaggaccgga

SEQ ID NO: 141952 - DNA, 15 bp, Homo sapiens
cggggtgaggaccgg

SEQ ID NO: 141953 - DNA, 15 bp, Homo sapiens
gcggggtgaggaccg

SEQ ID NO: 141954 - DNA, 15 bp, Homo sapiens
ggcggggtgaggacc

SEQ ID NO: 141955 - DNA, 15 bp, Homo sapiens
gggcggggtgaggac

SEQ ID NO: 141956 - DNA, 15 bp, Homo sapiens
ggggcggggtgagga

SEQ ID NO: 141957 - DNA, 15 bp, Homo sapiens
gggggcggggtgagg

SEQ ID NO: 141958 - DNA, 15 bp, Homo sapiens
cgggggcggggtgag

SEQ ID NO: 141959 - DNA, 15 bp, Homo sapiens
gcgggggcggggtga

SEQ ID NO: 141960 - DNA, 15 bp, Homo sapiens
tgcgggggcggggtg

SEQ ID NO: 141961 - DNA, 15 bp, Homo sapiens
gtgcgggggcggggt

SEQ ID NO: 141962 - DNA, 15 bp, Homo sapiens
ggtgcgggggcgggg

SEQ ID NO: 141963 - DNA, 15 bp, Homo sapiens
aggtgcgggggcggg

SEQ ID NO: 141964 - DNA, 15 bp, Homo sapiens
gaggtgcgggggcgg

SEQ ID NO: 141965 - DNA, 15 bp, Homo sapiens
agaggtgcgggggcg

SEQ ID NO: 141966 - DNA, 15 bp, Homo sapiens
gagaggtgcgggggc

SEQ ID NO: 141967 - DNA, 15 bp, Homo sapiens
ggagaggtgcggggg

SEQ ID NO: 141968 - DNA, 15 bp, Homo sapiens
gggagaggtgcgggg

SEQ ID NO: 141969 - DNA, 15 bp, Homo sapiens
ggggagaggtgcggg

SEQ ID NO: 141970 - DNA, 15 bp, Homo sapiens
cggggagaggtgcgg

SEQ ID NO: 141971 - DNA, 15 bp, Homo sapiens
gcggggagaggtgcg

SEQ ID NO: 141972 - DNA, 15 bp, Homo sapiens
tgcggggagaggtgc

SEQ ID NO: 141973 - DNA, 15 bp, Homo sapiens
ctgcggggagaggtg

SEQ ID NO: 141974 - DNA, 15 bp, Homo sapiens
gctgcggggagaggt

SEQ ID NO: 141975 - DNA, 15 bp, Homo sapiens
cgctgcggggagagg

SEQ ID NO: 141976 - DNA, 15 bp, Homo sapiens
ccgctgcggggagag

SEQ ID NO: 141977 - DNA, 15 bp, Homo sapiens
cccgctgcggggaga

SEQ ID NO: 141978 - DNA, 15 bp, Homo sapiens
ccccgctgcggggag

SEQ ID NO: 141979 - DNA, 15 bp, Homo sapiens
cccccgctgcgggga

SEQ ID NO: 141980 - DNA, 15 bp, Homo sapiens
gcccccgctgcgggg

SEQ ID NO: 141981 - DNA, 15 bp, Homo sapiens
cgcccccgctgcggg

SEQ ID NO: 141982 - DNA, 15 bp, Homo sapiens
gcgcccccgctgcgg

SEQ ID NO: 141983 - DNA, 15 bp, Homo sapiens
ggcgcccccgctgcg

SEQ ID NO: 141984 - DNA, 15 bp, Homo sapiens
gggcgcccccgctgc

SEQ ID NO: 141985 - DNA, 15 bp, Homo sapiens
ggggcgcccccgctg

SEQ ID NO: 141986 - DNA, 15 bp, Homo sapiens
cggggcgcccccgct

SEQ ID NO: 141987 - DNA, 15 bp, Homo sapiens
gcggggcgcccccgc

SEQ ID NO: 141988 - DNA, 15 bp, Homo sapiens
ggcggggcgcccccg

SEQ ID NO: 141989 - DNA, 15 bp, Homo sapiens
gggcggggcgccccc

SEQ ID NO: 141990 - DNA, 15 bp, Homo sapiens
ggggcggggcgcccc

SEQ ID NO: 141991 - DNA, 15 bp, Homo sapiens
gggggcggggcgccc

SEQ ID NO: 141992 - DNA, 15 bp, Homo sapiens
ggggggcggggcgcc

SEQ ID NO: 141993 - DNA, 15 bp, Homo sapiens
cggggggcggggcgc

SEQ ID NO: 141994 - DNA, 15 bp, Homo sapiens
ccggggggcggggcg

SEQ ID NO: 141995 - DNA, 15 bp, Homo sapiens
cccggggggcggggc

SEQ ID NO: 141996 - DNA, 15 bp, Homo sapiens
gcccggggggcgggg

SEQ ID NO: 141997 - DNA, 15 bp, Homo sapiens
cgcccggggggcggg

SEQ ID NO: 141998 - DNA, 15 bp, Homo sapiens
gcgcccggggggcgg

SEQ ID NO: 141999 - DNA, 15 bp, Homo sapiens
ggcgcccggggggcg

SEQ ID NO: 142000 - DNA, 15 bp, Homo sapiens
gggcgcccggggggc

SEQ ID NO: 142001 - DNA, 15 bp, Homo sapiens
cgggcgcccgggggg

SEQ ID NO: 142002 - DNA, 15 bp, Homo sapiens
tcgggcgcccggggg

SEQ ID NO: 142003 - DNA, 15 bp, Homo sapiens
gtcgggcgcccgggg

SEQ ID NO: 142004 - DNA, 15 bp, Homo sapiens
cgtcgggcgcccggg

SEQ ID NO: 142005 - DNA, 15 bp, Homo sapiens
acgtcgggcgcccgg

SEQ ID NO: 142006 - DNA, 15 bp, Homo sapiens
cacgtcgggcgcccg

SEQ ID NO: 142007 - DNA, 15 bp, Homo sapiens
ccacgtcgggcgccc

SEQ ID NO: 142008 - DNA, 15 bp, Homo sapiens
tccacgtcgggcgcc

SEQ ID NO: 142009 - DNA, 15 bp, Homo sapiens
gtccacgtcgggcgc

SEQ ID NO: 142010 - DNA, 15 bp, Homo sapiens
cgtccacgtcgggcg

SEQ ID NO: 142011 - DNA, 15 bp, Homo sapiens
gcgtccacgtcgggc

SEQ ID NO: 142012 - DNA, 15 bp, Homo sapiens
cgcgtccacgtcggg

SEQ ID NO: 142013 - DNA, 15 bp, Homo sapiens
ccgcgtccacgtcgg

SEQ ID NO: 142014 - DNA, 15 bp, Homo sapiens
gccgcgtccacgtcg

SEQ ID NO: 142015 - DNA, 15 bp, Homo sapiens
ggccgcgtccacgtc

SEQ ID NO: 142016 - DNA, 15 bp, Homo sapiens
cggccgcgtccacgt

SEQ ID NO: 142017 - DNA, 15 bp, Homo sapiens
gcggccgcgtccacg

SEQ ID NO: 142018 - DNA, 15 bp, Homo sapiens
ggcggccgcgtccac

SEQ ID NO: 142019 - DNA, 15 bp, Homo sapiens
cggcggccgcgtcca

SEQ ID NO: 142020 - DNA, 15 bp, Homo sapiens
gcggcggccgcgtcc

SEQ ID NO: 142021 - DNA, 15 bp, Homo sapiens
ggcggcggccgcgtc

SEQ ID NO: 142022 - DNA, 15 bp, Homo sapiens
tggcggcggccgcgt

SEQ ID NO: 142023 - DNA, 15 bp, Homo sapiens
gtggcggcggccgcg

SEQ ID NO: 142024 - DNA, 15 bp, Homo sapiens
ggtggcggcggccgc

SEQ ID NO: 142025 - DNA, 15 bp, Homo sapiens
cggtggcggcggccg

SEQ ID NO: 142026 - DNA, 15 bp, Homo sapiens
gcggtggcggcggcc

SEQ ID NO: 142027 - DNA, 15 bp, Homo sapiens
ggcggtggcggcggc

SEQ ID NO: 142028 - DNA, 15 bp, Homo sapiens
cggcggtggcggcgg

SEQ ID NO: 142029 - DNA, 15 bp, Homo sapiens
gcggcggtggcggcg

SEQ ID NO: 142030 - DNA, 15 bp, Homo sapiens
ggcggcggtggcggc

SEQ ID NO: 142031 - DNA, 15 bp, Homo sapiens
cggcggcggtggcgg

SEQ ID NO: 142032 - DNA, 15 bp, Homo sapiens
gcggcggcggtggcg

SEQ ID NO: 142033 - DNA, 15 bp, Homo sapiens
cgcggcggcggtggc

SEQ ID NO: 142034 - DNA, 15 bp, Homo sapiens
gcgcggcggcggtgg

SEQ ID NO: 142035 - DNA, 15 bp, Homo sapiens
cgcgcggcggcggtg

SEQ ID NO: 142036 - DNA, 15 bp, Homo sapiens
ccgcgcggcggcggt

SEQ ID NO: 142037 - DNA, 15 bp, Homo sapiens
cccgcgcggcggcgg

SEQ ID NO: 142038 - DNA, 15 bp, Homo sapiens
tcccgcgcggcggcg

SEQ ID NO: 142039 - DNA, 15 bp, Homo sapiens
ctcccgcgcggcggc

SEQ ID NO: 142040 - DNA, 15 bp, Homo sapiens
actcccgcgcggcgg

SEQ ID NO: 142041 - DNA, 15 bp, Homo sapiens
gactcccgcgcggcg

SEQ ID NO: 142042 - DNA, 15 bp, Homo sapiens
cgactcccgcgcggc

SEQ ID NO: 142043 - DNA, 15 bp, Homo sapiens
gcgactcccgcgcgg

SEQ ID NO: 142044 - DNA, 15 bp, Homo sapiens
agcgactcccgcgcg

SEQ ID NO: 142045 - DNA, 15 bp, Homo sapiens
cagcgactcccgcgc

SEQ ID NO: 142046 - DNA, 15 bp, Homo sapiens
acagcgactcccgcg

SEQ ID NO: 142047 - DNA, 15 bp, Homo sapiens
gacagcgactcccgc

SEQ ID NO: 142048 - DNA, 15 bp, Homo sapiens
ggacagcgactcccg

SEQ ID NO: 142049 - DNA, 15 bp, Homo sapiens
cggacagcgactccc

SEQ ID NO: 142050 - DNA, 15 bp, Homo sapiens
gcggacagcgactcc

SEQ ID NO: 142051 - DNA, 15 bp, Homo sapiens
cgcggacagcgactc

SEQ ID NO: 142052 - DNA, 15 bp, Homo sapiens
ccgcggacagcgact

SEQ ID NO: 142053 - DNA, 15 bp, Homo sapiens
tccgcggacagcgac

SEQ ID NO: 142054 - DNA, 15 bp, Homo sapiens
ctccgcggacagcga

SEQ ID NO: 142055 - DNA, 15 bp, Homo sapiens
gctccgcggacagcg

SEQ ID NO: 142056 - DNA, 15 bp, Homo sapiens
ggctccgcggacagc

SEQ ID NO: 142057 - DNA, 15 bp, Homo sapiens
cggctccgcggacag

SEQ ID NO: 142058 - DNA, 15 bp, Homo sapiens
tcggctccgcggaca

SEQ ID NO: 142059 - DNA, 15 bp, Homo sapiens
gtcggctccgcggac

SEQ ID NO: 142060 - DNA, 15 bp, Homo sapiens
tgtcggctccgcgga

SEQ ID NO: 142061 - DNA, 15 bp, Homo sapiens
atgtcggctccgcgg

SEQ ID NO: 142062 - DNA, 15 bp, Homo sapiens
catgtcggctccgcg

SEQ ID NO: 142063 - DNA, 15 bp, Homo sapiens
gcatgtcggctccgc

SEQ ID NO: 142064 - DNA, 15 bp, Homo sapiens
tgcatgtcggctccg

SEQ ID NO: 142065 - DNA, 15 bp, Homo sapiens
ctgcatgtcggctcc

SEQ ID NO: 142066 - DNA, 15 bp, Homo sapiens
cctgcatgtcggctc

SEQ ID NO: 142067 - DNA, 15 bp, Homo sapiens
gcctgcatgtcggct

SEQ ID NO: 142068 - DNA, 15 bp, Homo sapiens
cgcctgcatgtcggc

SEQ ID NO: 142069 - DNA, 15 bp, Homo sapiens
ccgcctgcatgtcgg

SEQ ID NO: 142070 - DNA, 15 bp, Homo sapiens
gccgcctgcatgtcg

SEQ ID NO: 142071 - DNA, 15 bp, Homo sapiens
agccgcctgcatgtc

SEQ ID NO: 142072 - DNA, 15 bp, Homo sapiens
gagccgcctgcatgt

SEQ ID NO: 142073 - DNA, 15 bp, Homo sapiens
cgagccgcctgcatg

SEQ ID NO: 142074 - DNA, 15 bp, Homo sapiens
ccgagccgcctgcat

SEQ ID NO: 142075 - DNA, 15 bp, Homo sapiens
cccgagccgcctgca

SEQ ID NO: 142076 - DNA, 15 bp, Homo sapiens
ccccgagccgcctgc

SEQ ID NO: 142077 - DNA, 15 bp, Homo sapiens
gccccgagccgcctg

SEQ ID NO: 142078 - DNA, 15 bp, Homo sapiens
cgccccgagccgcct

SEQ ID NO: 142079 - DNA, 15 bp, Homo sapiens
ccgccccgagccgcc

SEQ ID NO: 142080 - DNA, 15 bp, Homo sapiens
gccgccccgagccgc

SEQ ID NO: 142081 - DNA, 15 bp, Homo sapiens
cgccgccccgagccg

SEQ ID NO: 142082 - DNA, 15 bp, Homo sapiens
gcgccgccccgagcc

SEQ ID NO: 142083 - DNA, 15 bp, Homo sapiens
tgcgccgccccgagc

SEQ ID NO: 142084 - DNA, 15 bp, Homo sapiens
ctgcgccgccccgag

SEQ ID NO: 142085 - DNA, 15 bp, Homo sapiens
cctgcgccgccccga

SEQ ID NO: 142086 - DNA, 15 bp, Homo sapiens
ccctgcgccgccccg

SEQ ID NO: 142087 - DNA, 15 bp, Homo sapiens
gccctgcgccgcccc

SEQ ID NO: 142088 - DNA, 15 bp, Homo sapiens
cgccctgcgccgccc

SEQ ID NO: 142089 - DNA, 15 bp, Homo sapiens
ccgccctgcgccgcc

SEQ ID NO: 142090 - DNA, 15 bp, Homo sapiens
gccgccctgcgccgc

SEQ ID NO: 142091 - DNA, 15 bp, Homo sapiens
ggccgccctgcgccg

SEQ ID NO: 142092 - DNA, 15 bp, Homo sapiens
cggccgccctgcgcc

SEQ ID NO: 142093 - DNA, 15 bp, Homo sapiens
ccggccgccctgcgc

SEQ ID NO: 142094 - DNA, 15 bp, Homo sapiens
tccggccgccctgcg

SEQ ID NO: 142095 - DNA, 15 bp, Homo sapiens
ctccggccgccctgc

SEQ ID NO: 142096 - DNA, 15 bp, Homo sapiens
gctccggccgccctg

SEQ ID NO: 142097 - DNA, 15 bp, Homo sapiens
cgctccggccgccct

SEQ ID NO: 142098 - DNA, 15 bp, Homo sapiens
ccgctccggccgccc

SEQ ID NO: 142099 - DNA, 15 bp, Homo sapiens
gccgctccggccgcc

SEQ ID NO: 142100 - DNA, 15 bp, Homo sapiens
ggccgctccggccgc

SEQ ID NO: 142101 - DNA, 15 bp, Homo sapiens
cggccgctccggccg

SEQ ID NO: 142102 - DNA, 15 bp, Homo sapiens
ccggccgctccggcc

SEQ ID NO: 142103 - DNA, 15 bp, Homo sapiens
cccggccgctccggc

SEQ ID NO: 142104 - DNA, 15 bp, Homo sapiens
gcccggccgctccgg

SEQ ID NO: 142105 - DNA, 15 bp, Homo sapiens
ggcccggccgctccg

SEQ ID NO: 142106 - DNA, 15 bp, Homo sapiens
cggcccggccgctcc

SEQ ID NO: 142107 - DNA, 15 bp, Homo sapiens
ccggcccggccgctc

SEQ ID NO: 142108 - DNA, 15 bp, Homo sapiens
gccggcccggccgct

SEQ ID NO: 142109 - DNA, 15 bp, Homo sapiens
ggccggcccggccgc

SEQ ID NO: 142110 - DNA, 15 bp, Homo sapiens
cggccggcccggccg

SEQ ID NO: 142111 - DNA, 15 bp, Homo sapiens
ccggccggcccggcc

SEQ ID NO: 142112 - DNA, 15 bp, Homo sapiens
cccggccggcccggc

SEQ ID NO: 142113 - DNA, 15 bp, Homo sapiens
gcccggccggcccgg

SEQ ID NO: 142114 - DNA, 15 bp, Homo sapiens
ggcccggccggcccg

SEQ ID NO: 142115 - DNA, 15 bp, Homo sapiens
cggcccggccggccc

SEQ ID NO: 142116 - DNA, 15 bp, Homo sapiens
ccggcccggccggcc

SEQ ID NO: 142117 - DNA, 15 bp, Homo sapiens
cccggcccggccggc

SEQ ID NO: 142118 - DNA, 15 bp, Homo sapiens
ccccggcccggccgg

SEQ ID NO: 142119 - DNA, 15 bp, Homo sapiens
cccccggcccggccg

SEQ ID NO: 142120 - DNA, 15 bp, Homo sapiens
gcccccggcccggcc

SEQ ID NO: 142121 - DNA, 15 bp, Homo sapiens
ggcccccggcccggc

SEQ ID NO: 142122 - DNA, 15 bp, Homo sapiens
cggcccccggcccgg

SEQ ID NO: 142123 - DNA, 15 bp, Homo sapiens
ccggcccccggcccg

SEQ ID NO: 142124 - DNA, 15 bp, Homo sapiens
tccggcccccggccc

SEQ ID NO: 142125 - DNA, 15 bp, Homo sapiens
ctccggcccccggcc

SEQ ID NO: 142126 - DNA, 15 bp, Homo sapiens
gctccggcccccggc

SEQ ID NO: 142127 - DNA, 15 bp, Homo sapiens
cgctccggcccccgg

SEQ ID NO: 142128 - DNA, 15 bp, Homo sapiens
gcgctccggcccccg

SEQ ID NO: 142129 - DNA, 15 bp, Homo sapiens
cgcgctccggccccc

SEQ ID NO: 142130 - DNA, 15 bp, Homo sapiens
tcgcgctccggcccc

SEQ ID NO: 142131 - DNA, 15 bp, Homo sapiens
ctcgcgctccggccc

SEQ ID NO: 142132 - DNA, 15 bp, Homo sapiens
gctcgcgctccggcc

SEQ ID NO: 142133 - DNA, 15 bp, Homo sapiens
cgctcgcgctccggc

SEQ ID NO: 142134 - DNA, 15 bp, Homo sapiens
gcgctcgcgctccgg

SEQ ID NO: 142135 - DNA, 15 bp, Homo sapiens
cgcgctcgcgctccg

SEQ ID NO: 142136 - DNA, 15 bp, Homo sapiens
tcgcgctcgcgctcc

SEQ ID NO: 142137 - DNA, 15 bp, Homo sapiens
ctcgcgctcgcgctc

SEQ ID NO: 142138 - DNA, 15 bp, Homo sapiens
gctcgcgctcgcgct

SEQ ID NO: 142139 - DNA, 15 bp, Homo sapiens
cgctcgcgctcgcgc

SEQ ID NO: 142140 - DNA, 15 bp, Homo sapiens
ccgctcgcgctcgcg

SEQ ID NO: 142141 - DNA, 15 bp, Homo sapiens
gccgctcgcgctcgc

SEQ ID NO: 142142 - DNA, 15 bp, Homo sapiens
ggccgctcgcgctcg

SEQ ID NO: 142143 - DNA, 15 bp, Homo sapiens
cggccgctcgcgctc

SEQ ID NO: 142144 - DNA, 15 bp, Homo sapiens
gcggccgctcgcgct

SEQ ID NO: 142145 - DNA, 15 bp, Homo sapiens
ggcggccgctcgcgc

SEQ ID NO: 142146 - DNA, 15 bp, Homo sapiens
cggcggccgctcgcg

SEQ ID NO: 142147 - DNA, 15 bp, Homo sapiens
ccggcggccgctcgc

SEQ ID NO: 142148 - DNA, 15 bp, Homo sapiens
cccggcggccgctcg

SEQ ID NO: 142149 - DNA, 15 bp, Homo sapiens
gcccggcggccgctc

SEQ ID NO: 142150 - DNA, 15 bp, Homo sapiens
cgcccggcggccgct

SEQ ID NO: 142151 - DNA, 15 bp, Homo sapiens
gcgcccggcggccgc

SEQ ID NO: 142152 - DNA, 15 bp, Homo sapiens
ggcgcccggcggccg

SEQ ID NO: 142153 - DNA, 15 bp, Homo sapiens
cggcgcccggcggcc

SEQ ID NO: 142154 - DNA, 15 bp, Homo sapiens
ccggcgcccggcggc

SEQ ID NO: 142155 - DNA, 15 bp, Homo sapiens
tccggcgcccggcgg

SEQ ID NO: 142156 - DNA, 15 bp, Homo sapiens
ctccggcgcccggcg

SEQ ID NO: 142157 - DNA, 15 bp, Homo sapiens
gctccggcgcccggc

SEQ ID NO: 142158 - DNA, 15 bp, Homo sapiens
ggctccggcgcccgg

SEQ ID NO: 142159 - DNA, 15 bp, Homo sapiens
cggctccggcgcccg

SEQ ID NO: 142160 - DNA, 15 bp, Homo sapiens
gcggctccggcgccc

SEQ ID NO: 142161 - DNA, 15 bp, Homo sapiens
cgcggctccggcgcc

SEQ ID NO: 142162 - DNA, 15 bp, Homo sapiens
acgcggctccggcgc

SEQ ID NO: 142163 - DNA, 15 bp, Homo sapiens
gacgcggctccggcg

SEQ ID NO: 142164 - DNA, 15 bp, Homo sapiens
ggacgcggctccggc

SEQ ID NO: 142165 - DNA, 15 bp, Homo sapiens
gggacgcggctccgg

SEQ ID NO: 142166 - DNA, 15 bp, Homo sapiens
ggggacgcggctccg

SEQ ID NO: 142167 - DNA, 15 bp, Homo sapiens
gggggacgcggctcc

SEQ ID NO: 142168 - DNA, 15 bp, Homo sapiens
agggggacgcggctc

SEQ ID NO: 142169 - DNA, 15 bp, Homo sapiens
cagggggacgcggct

SEQ ID NO: 142170 - DNA, 15 bp, Homo sapiens
gcagggggacgcggc

SEQ ID NO: 142171 - DNA, 15 bp, Homo sapiens
cgcagggggacgcgg

SEQ ID NO: 142172 - DNA, 15 bp, Homo sapiens
gcgcagggggacgcg

SEQ ID NO: 142173 - DNA, 15 bp, Homo sapiens
ggcgcagggggacgc

SEQ ID NO: 142174 - DNA, 15 bp, Homo sapiens
cggcgcagggggacg

SEQ ID NO: 142175 - DNA, 15 bp, Homo sapiens
gcggcgcagggggac

SEQ ID NO: 142176 - DNA, 15 bp, Homo sapiens
ggcggcgcaggggga

SEQ ID NO: 142177 - DNA, 15 bp, Homo sapiens
gggcggcgcaggggg

SEQ ID NO: 142178 - DNA, 15 bp, Homo sapiens
ggggcggcgcagggg

SEQ ID NO: 142179 - DNA, 15 bp, Homo sapiens
cggggcggcgcaggg

SEQ ID NO: 142180 - DNA, 15 bp, Homo sapiens
ccggggcggcgcagg

SEQ ID NO: 142181 - DNA, 15 bp, Homo sapiens
cccggggcggcgcag

SEQ ID NO: 142182 - DNA, 15 bp, Homo sapiens
gcccggggcggcgca

SEQ ID NO: 142183 - DNA, 15 bp, Homo sapiens
ggcccggggcggcgc

SEQ ID NO: 142184 - DNA, 15 bp, Homo sapiens
aggcccggggcggcg

SEQ ID NO: 142185 - DNA, 15 bp, Homo sapiens
caggcccggggcggc

SEQ ID NO: 142186 - DNA, 15 bp, Homo sapiens
gcaggcccggggcgg

SEQ ID NO: 142187 - DNA, 15 bp, Homo sapiens
ggcaggcccggggcg

SEQ ID NO: 142188 - DNA, 15 bp, Homo sapiens
cggcaggcccggggc

SEQ ID NO: 142189 - DNA, 15 bp, Homo sapiens
ccggcaggcccgggg

SEQ ID NO: 142190 - DNA, 15 bp, Homo sapiens
gccggcaggcccggg

SEQ ID NO: 142191 - DNA, 15 bp, Homo sapiens
ggccggcaggcccgg

SEQ ID NO: 142192 - DNA, 15 bp, Homo sapiens
cggccggcaggcccg

SEQ ID NO: 142193 - DNA, 15 bp, Homo sapiens
ccggccggcaggccc

SEQ ID NO: 142194 - DNA, 15 bp, Homo sapiens
tccggccggcaggcc

SEQ ID NO: 142195 - DNA, 15 bp, Homo sapiens
ctccggccggcaggc

SEQ ID NO: 142196 - DNA, 15 bp, Homo sapiens
cctccggccggcagg

SEQ ID NO: 142197 - DNA, 15 bp, Homo sapiens
tcctccggccggcag

SEQ ID NO: 142198 - DNA, 15 bp, Homo sapiens
ctcctccggccggca

SEQ ID NO: 142199 - DNA, 15 bp, Homo sapiens
gctcctccggccggc

SEQ ID NO: 142200 - DNA, 15 bp, Homo sapiens
ggctcctccggccgg

SEQ ID NO: 142201 - DNA, 15 bp, Homo sapiens
tggctcctccggccg

SEQ ID NO: 142202 - DNA, 15 bp, Homo sapiens
gtggctcctccggcc

SEQ ID NO: 142203 - DNA, 15 bp, Homo sapiens
ggtggctcctccggc

SEQ ID NO: 142204 - DNA, 15 bp, Homo sapiens
tggtggctcctccgg

SEQ ID NO: 142205 - DNA, 15 bp, Homo sapiens
atggtggctcctccg

SEQ ID NO: 142206 - DNA, 15 bp, Homo sapiens
tatggtggctcctcc

SEQ ID NO: 142207 - DNA, 15 bp, Homo sapiens
gtatggtggctcctc

SEQ ID NO: 142208 - DNA, 15 bp, Homo sapiens
tgtatggtggctcct

SEQ ID NO: 142209 - DNA, 15 bp, Homo sapiens
gtgtatggtggctcc

SEQ ID NO: 142210 - DNA, 15 bp, Homo sapiens
ggtgtatggtggctc

SEQ ID NO: 142211 - DNA, 15 bp, Homo sapiens
gggtgtatggtggct

SEQ ID NO: 142212 - DNA, 15 bp, Homo sapiens
ggggtgtatggtggc

SEQ ID NO: 142213 - DNA, 15 bp, Homo sapiens
cggggtgtatggtgg

SEQ ID NO: 142214 - DNA, 15 bp, Homo sapiens
ccggggtgtatggtg

SEQ ID NO: 142215 - DNA, 15 bp, Homo sapiens
cccggggtgtatggt

SEQ ID NO: 142216 - DNA, 15 bp, Homo sapiens
acccggggtgtatgg

SEQ ID NO: 142217 - DNA, 15 bp, Homo sapiens
gacccggggtgtatg

SEQ ID NO: 142218 - DNA, 15 bp, Homo sapiens
cgacccggggtgtat

SEQ ID NO: 142219 - DNA, 15 bp, Homo sapiens
gcgacccggggtgta

SEQ ID NO: 142220 - DNA, 15 bp, Homo sapiens
ggcgacccggggtgt

SEQ ID NO: 142221 - DNA, 15 bp, Homo sapiens
cggcgacccggggtg

SEQ ID NO: 142222 - DNA, 15 bp, Homo sapiens
tcggcgacccggggt

SEQ ID NO: 142223 - DNA, 15 bp, Homo sapiens
ctcggcgacccgggg

SEQ ID NO: 142224 - DNA, 15 bp, Homo sapiens
gctcggcgacccggg

SEQ ID NO: 142225 - DNA, 15 bp, Homo sapiens
cgctcggcgacccgg

SEQ ID NO: 142226 - DNA, 15 bp, Homo sapiens
gcgctcggcgacccg

SEQ ID NO: 142227 - DNA, 15 bp, Homo sapiens
ggcgctcggcgaccc

SEQ ID NO: 142228 - DNA, 15 bp, Homo sapiens
aggcgctcggcgacc

SEQ ID NO: 142229 - DNA, 15 bp, Homo sapiens
caggcgctcggcgac

SEQ ID NO: 142230 - DNA, 15 bp, Homo sapiens
ccaggcgctcggcga

SEQ ID NO: 142231 - DNA, 15 bp, Homo sapiens
gccaggcgctcggcg

SEQ ID NO: 142232 - DNA, 15 bp, Homo sapiens
ggccaggcgctcggc

SEQ ID NO: 142233 - DNA, 15 bp, Homo sapiens
cggccaggcgctcgg

SEQ ID NO: 142234 - DNA, 15 bp, Homo sapiens
gcggccaggcgctcg

SEQ ID NO: 142235 - DNA, 15 bp, Homo sapiens
ggcggccaggcgctc

SEQ ID NO: 142236 - DNA, 15 bp, Homo sapiens
gggcggccaggcgct

SEQ ID NO: 142237 - DNA, 15 bp, Homo sapiens
ggggcggccaggcgc

SEQ ID NO: 142238 - DNA, 15 bp, Homo sapiens
cggggcggccaggcg

SEQ ID NO: 142239 - DNA, 15 bp, Homo sapiens
gcggggcggccaggc

SEQ ID NO: 142240 - DNA, 15 bp, Homo sapiens
cgcggggcggccagg

SEQ ID NO: 142241 - DNA, 15 bp, Homo sapiens
gcgcggggcggccag

SEQ ID NO: 142242 - DNA, 15 bp, Homo sapiens
ggcgcggggcggcca

SEQ ID NO: 142243 - DNA, 15 bp, Homo sapiens
gggcgcggggcggcc

SEQ ID NO: 142244 - DNA, 15 bp, Homo sapiens
cgggcgcggggcggc

SEQ ID NO: 142245 - DNA, 15 bp, Homo sapiens
gcgggcgcggggcgg

SEQ ID NO: 142246 - DNA, 15 bp, Homo sapiens
cgcgggcgcggggcg

SEQ ID NO: 142247 - DNA, 15 bp, Homo sapiens
gcgcgggcgcggggc

SEQ ID NO: 142248 - DNA, 15 bp, Homo sapiens
ggcgcgggcgcgggg

SEQ ID NO: 142249 - DNA, 15 bp, Homo sapiens
cggcgcgggcgcggg

SEQ ID NO: 142250 - DNA, 15 bp, Homo sapiens
gcggcgcgggcgcgg

SEQ ID NO: 142251 - DNA, 15 bp, Homo sapiens
cgcggcgcgggcgcg

SEQ ID NO: 142252 - DNA, 15 bp, Homo sapiens
gcgcggcgcgggcgc

SEQ ID NO: 142253 - DNA, 15 bp, Homo sapiens
agcgcggcgcgggcg

SEQ ID NO: 142254 - DNA, 15 bp, Homo sapiens
gagcgcggcgcgggc

SEQ ID NO: 142255 - DNA, 15 bp, Homo sapiens
ggagcgcggcgcggg

SEQ ID NO: 142256 - DNA, 15 bp, Homo sapiens
cggagcgcggcgcgg

SEQ ID NO: 142257 - DNA, 15 bp, Homo sapiens
gcggagcgcggcgcg

SEQ ID NO: 142258 - DNA, 15 bp, Homo sapiens
ggcggagcgcggcgc

SEQ ID NO: 142259 - DNA, 15 bp, Homo sapiens
aggcggagcgcggcg

SEQ ID NO: 142260 - DNA, 15 bp, Homo sapiens
caggcggagcgcggc

SEQ ID NO: 142261 - DNA, 15 bp, Homo sapiens
acaggcggagcgcgg

SEQ ID NO: 142262 - DNA, 15 bp, Homo sapiens
cacaggcggagcgcg

SEQ ID NO: 142263 - DNA, 15 bp, Homo sapiens
ccacaggcggagcgc

SEQ ID NO: 142264 - DNA, 15 bp, Homo sapiens
gccacaggcggagcg

SEQ ID NO: 142265 - DNA, 15 bp, Homo sapiens
agccacaggcggagc

SEQ ID NO: 142266 - DNA, 15 bp, Homo sapiens
cagccacaggcggag

SEQ ID NO: 142267 - DNA, 15 bp, Homo sapiens
ccagccacaggcgga

SEQ ID NO: 142268 - DNA, 15 bp, Homo sapiens
cccagccacaggcgg

SEQ ID NO: 142269 - DNA, 15 bp, Homo sapiens
gcccagccacaggcg

SEQ ID NO: 142270 - DNA, 15 bp, Homo sapiens
agcccagccacaggc

SEQ ID NO: 142271 - DNA, 15 bp, Homo sapiens
cagcccagccacagg

SEQ ID NO: 142272 - DNA, 15 bp, Homo sapiens
gcagcccagccacag

SEQ ID NO: 142273 - DNA, 15 bp, Homo sapiens
cgcagcccagccaca

SEQ ID NO: 142274 - DNA, 15 bp, Homo sapiens
acgcagcccagccac

SEQ ID NO: 142275 - DNA, 15 bp, Homo sapiens
gacgcagcccagcca

SEQ ID NO: 142276 - DNA, 15 bp, Homo sapiens
agacgcagcccagcc

SEQ ID NO: 142277 - DNA, 15 bp, Homo sapiens
cagacgcagcccagc

SEQ ID NO: 142278 - DNA, 15 bp, Homo sapiens
gcagacgcagcccag

SEQ ID NO: 142279 - DNA, 15 bp, Homo sapiens
agcagacgcagccca

SEQ ID NO: 142280 - DNA, 15 bp, Homo sapiens
aagcagacgcagccc

SEQ ID NO: 142281 - DNA, 15 bp, Homo sapiens
gaagcagacgcagcc

SEQ ID NO: 142282 - DNA, 15 bp, Homo sapiens
cgaagcagacgcagc

SEQ ID NO: 142283 - DNA, 15 bp, Homo sapiens
gcgaagcagacgcag

SEQ ID NO: 142284 - DNA, 15 bp, Homo sapiens
cgcgaagcagacgca

SEQ ID NO: 142285 - DNA, 15 bp, Homo sapiens
gcgcgaagcagacgc

SEQ ID NO: 142286 - DNA, 15 bp, Homo sapiens
agcgcgaagcagacg

SEQ ID NO: 142287 - DNA, 15 bp, Homo sapiens
cagcgcgaagcagac

SEQ ID NO: 142288 - DNA, 15 bp, Homo sapiens
ccagcgcgaagcaga

SEQ ID NO: 142289 - DNA, 15 bp, Homo sapiens
accagcgcgaagcag

SEQ ID NO: 142290 - DNA, 15 bp, Homo sapiens
caccagcgcgaagca

SEQ ID NO: 142291 - DNA, 15 bp, Homo sapiens
gcaccagcgcgaagc

SEQ ID NO: 142292 - DNA, 15 bp, Homo sapiens
tgcaccagcgcgaag

SEQ ID NO: 142293 - DNA, 15 bp, Homo sapiens
ctgcaccagcgcgaa

SEQ ID NO: 142294 - DNA, 15 bp, Homo sapiens
cctgcaccagcgcga

SEQ ID NO: 142295 - DNA, 15 bp, Homo sapiens
gcctgcaccagcgcg

SEQ ID NO: 142296 - DNA, 15 bp, Homo sapiens
cgcctgcaccagcgc

SEQ ID NO: 142297 - DNA, 15 bp, Homo sapiens
ccgcctgcaccagcg

SEQ ID NO: 142298 - DNA, 15 bp, Homo sapiens
cccgcctgcaccagc

SEQ ID NO: 142299 - DNA, 15 bp, Homo sapiens
acccgcctgcaccag

SEQ ID NO: 142300 - DNA, 15 bp, Homo sapiens
tacccgcctgcacca

SEQ ID NO: 142301 - DNA, 15 bp, Homo sapiens
ttacccgcctgcacc

SEQ ID NO: 142302 - DNA, 15 bp, Homo sapiens
cttacccgcctgcac

SEQ ID NO: 142303 - DNA, 15 bp, Homo sapiens
ccttacccgcctgca

SEQ ID NO: 142304 - DNA, 15 bp, Homo sapiens
cccttacccgcctgc

SEQ ID NO: 142305 - DNA, 15 bp, Homo sapiens
ccccttacccgcctg

SEQ ID NO: 142306 - DNA, 15 bp, Homo sapiens
cccccttacccgcct

SEQ ID NO: 142307 - DNA, 15 bp, Homo sapiens
gcccccttacccgcc

SEQ ID NO: 142308 - DNA, 15 bp, Homo sapiens
ggcccccttacccgc

SEQ ID NO: 142309 - DNA, 15 bp, Homo sapiens
gggcccccttacccg

SEQ ID NO: 142310 - DNA, 15 bp, Homo sapiens
cgggcccccttaccc

SEQ ID NO: 142311 - DNA, 15 bp, Homo sapiens
ccgggcccccttacc

SEQ ID NO: 142312 - DNA, 15 bp, Homo sapiens
cccgggcccccttac

SEQ ID NO: 142313 - DNA, 15 bp, Homo sapiens
ccccgggccccctta

SEQ ID NO: 142314 - DNA, 15 bp, Homo sapiens
gccccgggccccctt

SEQ ID NO: 142315 - DNA, 15 bp, Homo sapiens
cgccccgggccccct

SEQ ID NO: 142316 - DNA, 15 bp, Homo sapiens
ccgccccgggccccc

SEQ ID NO: 142317 - DNA, 15 bp, Homo sapiens
cccgccccgggcccc

SEQ ID NO: 142318 - DNA, 15 bp, Homo sapiens
ccccgccccgggccc

SEQ ID NO: 142319 - DNA, 15 bp, Homo sapiens
cccccgccccgggcc

SEQ ID NO: 142320 - DNA, 15 bp, Homo sapiens
ccccccgccccgggc

SEQ ID NO: 142321 - DNA, 15 bp, Homo sapiens
gccccccgccccggg

SEQ ID NO: 142322 - DNA, 15 bp, Homo sapiens
ggccccccgccccgg

SEQ ID NO: 142323 - DNA, 15 bp, Homo sapiens
cggccccccgccccg

SEQ ID NO: 142324 - DNA, 15 bp, Homo sapiens
ccggccccccgcccc

SEQ ID NO: 142325 - DNA, 15 bp, Homo sapiens
gccggccccccgccc

SEQ ID NO: 142326 - DNA, 15 bp, Homo sapiens
cgccggccccccgcc

SEQ ID NO: 142327 - DNA, 15 bp, Homo sapiens
gcgccggccccccgc

SEQ ID NO: 142328 - DNA, 15 bp, Homo sapiens
ggcgccggccccccg

SEQ ID NO: 142329 - DNA, 15 bp, Homo sapiens
cggcgccggcccccc

SEQ ID NO: 142330 - DNA, 15 bp, Homo sapiens
ccggcgccggccccc

SEQ ID NO: 142331 - DNA, 15 bp, Homo sapiens
cccggcgccggcccc

SEQ ID NO: 142332 - DNA, 15 bp, Homo sapiens
ccccggcgccggccc

SEQ ID NO: 142333 - DNA, 15 bp, Homo sapiens
gccccggcgccggcc

SEQ ID NO: 142334 - DNA, 15 bp, Homo sapiens
tgccccggcgccggc

SEQ ID NO: 142335 - DNA, 15 bp, Homo sapiens
ctgccccggcgccgg

SEQ ID NO: 142336 - DNA, 15 bp, Homo sapiens
cctgccccggcgccg

SEQ ID NO: 142337 - DNA, 15 bp, Homo sapiens
gcctgccccggcgcc

SEQ ID NO: 142338 - DNA, 15 bp, Homo sapiens
agcctgccccggcgc

SEQ ID NO: 142339 - DNA, 15 bp, Homo sapiens
gagcctgccccggcg

SEQ ID NO: 142340 - DNA, 15 bp, Homo sapiens
ggagcctgccccggc

SEQ ID NO: 142341 - DNA, 15 bp, Homo sapiens
aggagcctgccccgg

SEQ ID NO: 142342 - DNA, 15 bp, Homo sapiens
gaggagcctgccccg

SEQ ID NO: 142343 - DNA, 15 bp, Homo sapiens
agaggagcctgcccc

SEQ ID NO: 142344 - DNA, 15 bp, Homo sapiens
gagaggagcctgccc

SEQ ID NO: 142345 - DNA, 15 bp, Homo sapiens
cgagaggagcctgcc

SEQ ID NO: 142346 - DNA, 15 bp, Homo sapiens
tcgagaggagcctgc

SEQ ID NO: 142347 - DNA, 15 bp, Homo sapiens
ctcgagaggagcctg

SEQ ID NO: 142348 - DNA, 15 bp, Homo sapiens
gctcgagaggagcct

SEQ ID NO: 142349 - DNA, 15 bp, Homo sapiens
ggctcgagaggagcc

SEQ ID NO: 142350 - DNA, 15 bp, Homo sapiens
gggctcgagaggagc

SEQ ID NO: 142351 - DNA, 15 bp, Homo sapiens
tgggctcgagaggag

SEQ ID NO: 142352 - DNA, 15 bp, Homo sapiens
ctgggctcgagagga

SEQ ID NO: 142353 - DNA, 15 bp, Homo sapiens
gctgggctcgagagg

SEQ ID NO: 142354 - DNA, 15 bp, Homo sapiens
agctgggctcgagag

SEQ ID NO: 142355 - DNA, 15 bp, Homo sapiens
tagctgggctcgaga

SEQ ID NO: 142356 - DNA, 15 bp, Homo sapiens
gtagctgggctcgag

SEQ ID NO: 142357 - DNA, 15 bp, Homo sapiens
ggtagctgggctcga

SEQ ID NO: 142358 - DNA, 15 bp, Homo sapiens
aggtagctgggctcg

SEQ ID NO: 142359 - DNA, 15 bp, Homo sapiens
caggtagctgggctc

SEQ ID NO: 142360 - DNA, 15 bp, Homo sapiens
ccaggtagctgggct

SEQ ID NO: 142361 - DNA, 15 bp, Homo sapiens
cccaggtagctgggc

SEQ ID NO: 142362 - DNA, 15 bp, Homo sapiens
tcccaggtagctggg

SEQ ID NO: 142363 - DNA, 15 bp, Homo sapiens
ctcccaggtagctgg

SEQ ID NO: 142364 - DNA, 15 bp, Homo sapiens
actcccaggtagctg

SEQ ID NO: 142365 - DNA, 15 bp, Homo sapiens
gactcccaggtagct

SEQ ID NO: 142366 - DNA, 15 bp, Homo sapiens
ggactcccaggtagc

SEQ ID NO: 142367 - DNA, 15 bp, Homo sapiens
gggactcccaggtag

SEQ ID NO: 142368 - DNA, 15 bp, Homo sapiens
ggggactcccaggta

SEQ ID NO: 142369 - DNA, 15 bp, Homo sapiens
aggggactcccaggt

SEQ ID NO: 142370 - DNA, 15 bp, Homo sapiens
caggggactcccagg

SEQ ID NO: 142371 - DNA, 15 bp, Homo sapiens
ccaggggactcccag

SEQ ID NO: 142372 - DNA, 15 bp, Homo sapiens
accaggggactccca

SEQ ID NO: 142373 - DNA, 15 bp, Homo sapiens
gaccaggggactccc

SEQ ID NO: 142374 - DNA, 15 bp, Homo sapiens
ggaccaggggactcc

SEQ ID NO: 142375 - DNA, 15 bp, Homo sapiens
aggaccaggggactc

SEQ ID NO: 142376 - DNA, 15 bp, Homo sapiens
aaggaccaggggact

SEQ ID NO: 142377 - DNA, 15 bp, Homo sapiens
aaaggaccaggggac

SEQ ID NO: 142378 - DNA, 15 bp, Homo sapiens
gaaaggaccagggga

SEQ ID NO: 142379 - DNA, 15 bp, Homo sapiens
agaaaggaccagggg

SEQ ID NO: 142380 - DNA, 15 bp, Homo sapiens
gagaaaggaccaggg

SEQ ID NO: 142381 - DNA, 15 bp, Homo sapiens
agagaaaggaccagg

SEQ ID NO: 142382 - DNA, 15 bp, Homo sapiens
cagagaaaggaccag

SEQ ID NO: 142383 - DNA, 15 bp, Homo sapiens
gcagagaaaggacca

SEQ ID NO: 142384 - DNA, 15 bp, Homo sapiens
ggcagagaaaggacc

SEQ ID NO: 142385 - DNA, 15 bp, Homo sapiens
gggcagagaaaggac

SEQ ID NO: 142386 - DNA, 15 bp, Homo sapiens
ggggcagagaaagga

SEQ ID NO: 142387 - DNA, 15 bp, Homo sapiens
gggggcagagaaagg

SEQ ID NO: 142388 - DNA, 15 bp, Homo sapiens
agggggcagagaaag

SEQ ID NO: 142389 - DNA, 15 bp, Homo sapiens
tagggggcagagaaa

SEQ ID NO: 142390 - DNA, 15 bp, Homo sapiens
ctagggggcagagaa

SEQ ID NO: 142391 - DNA, 15 bp, Homo sapiens
cctagggggcagaga

SEQ ID NO: 142392 - DNA, 15 bp, Homo sapiens
ccctagggggcagag

SEQ ID NO: 142393 - DNA, 15 bp, Homo sapiens
tccctagggggcaga

SEQ ID NO: 142394 - DNA, 15 bp, Homo sapiens
gtccctagggggcag

SEQ ID NO: 142395 - DNA, 15 bp, Homo sapiens
agtccctagggggca

SEQ ID NO: 142396 - DNA, 15 bp, Homo sapiens
gagtccctagggggc

SEQ ID NO: 142397 - DNA, 15 bp, Homo sapiens
ggagtccctaggggg

SEQ ID NO: 142398 - DNA, 15 bp, Homo sapiens
aggagtccctagggg

SEQ ID NO: 142399 - DNA, 15 bp, Homo sapiens
caggagtccctaggg

SEQ ID NO: 142400 - DNA, 15 bp, Homo sapiens
acaggagtccctagg

SEQ ID NO: 142401 - DNA, 15 bp, Homo sapiens
gacaggagtccctag

SEQ ID NO: 142402 - DNA, 15 bp, Homo sapiens
agacaggagtcccta

SEQ ID NO: 142403 - DNA, 15 bp, Homo sapiens
gagacaggagtccct

SEQ ID NO: 142404 - DNA, 15 bp, Homo sapiens
cgagacaggagtccc

SEQ ID NO: 142405 - DNA, 15 bp, Homo sapiens
ccgagacaggagtcc

SEQ ID NO: 142406 - DNA, 15 bp, Homo sapiens
gccgagacaggagtc

SEQ ID NO: 142407 - DNA, 15 bp, Homo sapiens
ggccgagacaggagt

SEQ ID NO: 142408 - DNA, 15 bp, Homo sapiens
gggccgagacaggag

SEQ ID NO: 142409 - DNA, 15 bp, Homo sapiens
tgggccgagacagga

SEQ ID NO: 142410 - DNA, 15 bp, Homo sapiens
ttgggccgagacagg

SEQ ID NO: 142411 - DNA, 15 bp, Homo sapiens
tttgggccgagacag

SEQ ID NO: 142412 - DNA, 15 bp, Homo sapiens
gtttgggccgagaca

SEQ ID NO: 142413 - DNA, 15 bp, Homo sapiens
tgtttgggccgagac

SEQ ID NO: 142414 - DNA, 15 bp, Homo sapiens
gtgtttgggccgaga

SEQ ID NO: 142415 - DNA, 15 bp, Homo sapiens
agtgtttgggccgag

SEQ ID NO: 142416 - DNA, 15 bp, Homo sapiens
cagtgtttgggccga

SEQ ID NO: 142417 - DNA, 15 bp, Homo sapiens
gcagtgtttgggccg

SEQ ID NO: 142418 - DNA, 15 bp, Homo sapiens
agcagtgtttgggcc

SEQ ID NO: 142419 - DNA, 15 bp, Homo sapiens
gagcagtgtttgggc

SEQ ID NO: 142420 - DNA, 15 bp, Homo sapiens
ggagcagtgtttggg

SEQ ID NO: 142421 - DNA, 15 bp, Homo sapiens
gggagcagtgtttgg

SEQ ID NO: 142422 - DNA, 15 bp, Homo sapiens
ggggagcagtgtttg

SEQ ID NO: 142423 - DNA, 15 bp, Homo sapiens
aggggagcagtgttt

SEQ ID NO: 142424 - DNA, 15 bp, Homo sapiens
taggggagcagtgtt

SEQ ID NO: 142425 - DNA, 15 bp, Homo sapiens
ttaggggagcagtgt

SEQ ID NO: 142426 - DNA, 15 bp, Homo sapiens
gttaggggagcagtg

SEQ ID NO: 142427 - DNA, 15 bp, Homo sapiens
ggttaggggagcagt

SEQ ID NO: 142428 - DNA, 15 bp, Homo sapiens
gggttaggggagcag

SEQ ID NO: 142429 - DNA, 15 bp, Homo sapiens
tgggttaggggagca

SEQ ID NO: 142430 - DNA, 15 bp, Homo sapiens
ctgggttaggggagc

SEQ ID NO: 142431 - DNA, 15 bp, Homo sapiens
gctgggttaggggag

SEQ ID NO: 142432 - DNA, 15 bp, Homo sapiens
ggctgggttagggga

SEQ ID NO: 142433 - DNA, 15 bp, Homo sapiens
gggctgggttagggg

SEQ ID NO: 142434 - DNA, 15 bp, Homo sapiens
ggggctgggttaggg

SEQ ID NO: 142435 - DNA, 15 bp, Homo sapiens
gggggctgggttagg

SEQ ID NO: 142436 - DNA, 15 bp, Homo sapiens
tgggggctgggttag

SEQ ID NO: 142437 - DNA, 15 bp, Homo sapiens
ctgggggctgggtta

SEQ ID NO: 142438 - DNA, 15 bp, Homo sapiens
gctgggggctgggtt

SEQ ID NO: 142439 - DNA, 15 bp, Homo sapiens
cgctgggggctgggt

SEQ ID NO: 142440 - DNA, 15 bp, Homo sapiens
acgctgggggctggg

SEQ ID NO: 142441 - DNA, 15 bp, Homo sapiens
gacgctgggggctgg

SEQ ID NO: 142442 - DNA, 15 bp, Homo sapiens
agacgctgggggctg

SEQ ID NO: 142443 - DNA, 15 bp, Homo sapiens
aagacgctgggggct

SEQ ID NO: 142444 - DNA, 15 bp, Homo sapiens
gaagacgctgggggc

SEQ ID NO: 142445 - DNA, 15 bp, Homo sapiens
ggaagacgctggggg

SEQ ID NO: 142446 - DNA, 15 bp, Homo sapiens
aggaagacgctgggg

SEQ ID NO: 142447 - DNA, 15 bp, Homo sapiens
taggaagacgctggg

SEQ ID NO: 142448 - DNA, 15 bp, Homo sapiens
gtaggaagacgctgg

SEQ ID NO: 142449 - DNA, 15 bp, Homo sapiens
ggtaggaagacgctg

SEQ ID NO: 142450 - DNA, 15 bp, Homo sapiens
aggtaggaagacgct

SEQ ID NO: 142451 - DNA, 15 bp, Homo sapiens
gaggtaggaagacgc

SEQ ID NO: 142452 - DNA, 15 bp, Homo sapiens
ggaggtaggaagacg

SEQ ID NO: 142453 - DNA, 15 bp, Homo sapiens
aggaggtaggaagac

SEQ ID NO: 142454 - DNA, 15 bp, Homo sapiens
aaggaggtaggaaga

SEQ ID NO: 142455 - DNA, 15 bp, Homo sapiens
caaggaggtaggaag

SEQ ID NO: 142456 - DNA, 15 bp, Homo sapiens
tcaaggaggtaggaa

SEQ ID NO: 142457 - DNA, 15 bp, Homo sapiens
gtcaaggaggtagga

SEQ ID NO: 142458 - DNA, 15 bp, Homo sapiens
ggtcaaggaggtagg

SEQ ID NO: 142459 - DNA, 15 bp, Homo sapiens
gggtcaaggaggtag

SEQ ID NO: 142460 - DNA, 15 bp, Homo sapiens
ggggtcaaggaggta

SEQ ID NO: 142461 - DNA, 15 bp, Homo sapiens
gggggtcaaggaggt

SEQ ID NO: 142462 - DNA, 15 bp, Homo sapiens
tgggggtcaaggagg

SEQ ID NO: 142463 - DNA, 15 bp, Homo sapiens
ctgggggtcaaggag

SEQ ID NO: 142464 - DNA, 15 bp, Homo sapiens
tctgggggtcaagga

SEQ ID NO: 142465 - DNA, 15 bp, Homo sapiens
gtctgggggtcaagg

SEQ ID NO: 142466 - DNA, 15 bp, Homo sapiens
ggtctgggggtcaag

SEQ ID NO: 142467 - DNA, 15 bp, Homo sapiens
aggtctgggggtcaa

SEQ ID NO: 142468 - DNA, 15 bp, Homo sapiens
caggtctgggggtca

SEQ ID NO: 142469 - DNA, 15 bp, Homo sapiens
acaggtctgggggtc

SEQ ID NO: 142470 - DNA, 15 bp, Homo sapiens
gacaggtctgggggt

SEQ ID NO: 142471 - DNA, 15 bp, Homo sapiens
ggacaggtctggggg

SEQ ID NO: 142472 - DNA, 15 bp, Homo sapiens
aggacaggtctgggg

SEQ ID NO: 142473 - DNA, 15 bp, Homo sapiens
aaggacaggtctggg

SEQ ID NO: 142474 - DNA, 15 bp, Homo sapiens
gaaggacaggtctgg

SEQ ID NO: 142475 - DNA, 15 bp, Homo sapiens
tgaaggacaggtctg

SEQ ID NO: 142476 - DNA, 15 bp, Homo sapiens
ctgaaggacaggtct

SEQ ID NO: 142477 - DNA, 15 bp, Homo sapiens
actgaaggacaggtc

SEQ ID NO: 142478 - DNA, 15 bp, Homo sapiens
aactgaaggacaggt

SEQ ID NO: 142479 - DNA, 15 bp, Homo sapiens
aaactgaaggacagg

SEQ ID NO: 142480 - DNA, 15 bp, Homo sapiens
gaaactgaaggacag

SEQ ID NO: 142481 - DNA, 15 bp, Homo sapiens
ggaaactgaaggaca

SEQ ID NO: 142482 - DNA, 15 bp, Homo sapiens
tggaaactgaaggac

SEQ ID NO: 142483 - DNA, 15 bp, Homo sapiens
ttggaaactgaagga

SEQ ID NO: 142484 - DNA, 15 bp, Homo sapiens
tttggaaactgaagg

SEQ ID NO: 142485 - DNA, 15 bp, Homo sapiens
atttggaaactgaag

SEQ ID NO: 142486 - DNA, 15 bp, Homo sapiens
gatttggaaactgaa

SEQ ID NO: 142487 - DNA, 15 bp, Homo sapiens
agatttggaaactga

SEQ ID NO: 142488 - DNA, 15 bp, Homo sapiens
gagatttggaaactg

SEQ ID NO: 142489 - DNA, 15 bp, Homo sapiens
ggagatttggaaact

SEQ ID NO: 142490 - DNA, 15 bp, Homo sapiens
gggagatttggaaac

SEQ ID NO: 142491 - DNA, 15 bp, Homo sapiens
ggggagatttggaaa

SEQ ID NO: 142492 - DNA, 15 bp, Homo sapiens
aggggagatttggaa

SEQ ID NO: 142493 - DNA, 15 bp, Homo sapiens
caggggagatttgga

SEQ ID NO: 142494 - DNA, 15 bp, Homo sapiens
acaggggagatttgg

SEQ ID NO: 142495 - DNA, 15 bp, Homo sapiens
gacaggggagatttg

SEQ ID NO: 142496 - DNA, 15 bp, Homo sapiens
tgacaggggagattt

SEQ ID NO: 142497 - DNA, 15 bp, Homo sapiens
gtgacaggggagatt

SEQ ID NO: 142498 - DNA, 15 bp, Homo sapiens
ggtgacaggggagat

SEQ ID NO: 142499 - DNA, 15 bp, Homo sapiens
aggtgacaggggaga

SEQ ID NO: 142500 - DNA, 15 bp, Homo sapiens
gaggtgacaggggag

SEQ ID NO: 142501 - DNA, 15 bp, Homo sapiens
tgaggtgacagggga

SEQ ID NO: 142502 - DNA, 15 bp, Homo sapiens
ctgaggtgacagggg

SEQ ID NO: 142503 - DNA, 15 bp, Homo sapiens
gctgaggtgacaggg

SEQ ID NO: 142504 - DNA, 15 bp, Homo sapiens
ggctgaggtgacagg

SEQ ID NO: 142505 - DNA, 15 bp, Homo sapiens
gggctgaggtgacag

SEQ ID NO: 142506 - DNA, 15 bp, Homo sapiens
agggctgaggtgaca

SEQ ID NO: 142507 - DNA, 15 bp, Homo sapiens
cagggctgaggtgac

SEQ ID NO: 142508 - DNA, 15 bp, Homo sapiens
ccagggctgaggtga

SEQ ID NO: 142509 - DNA, 15 bp, Homo sapiens
cccagggctgaggtg

SEQ ID NO: 142510 - DNA, 15 bp, Homo sapiens
acccagggctgaggt

SEQ ID NO: 142511 - DNA, 15 bp, Homo sapiens
aacccagggctgagg

SEQ ID NO: 142512 - DNA, 15 bp, Homo sapiens
aaacccagggctgag

SEQ ID NO: 142513 - DNA, 15 bp, Homo sapiens
gaaacccagggctga

SEQ ID NO: 142514 - DNA, 15 bp, Homo sapiens
ggaaacccagggctg

SEQ ID NO: 142515 - DNA, 15 bp, Homo sapiens
aggaaacccagggct

SEQ ID NO: 142516 - DNA, 15 bp, Homo sapiens
taggaaacccagggc

SEQ ID NO: 142517 - DNA, 15 bp, Homo sapiens
ctaggaaacccaggg

SEQ ID NO: 142518 - DNA, 15 bp, Homo sapiens
cctaggaaacccagg

SEQ ID NO: 142519 - DNA, 15 bp, Homo sapiens
ccctaggaaacccag

SEQ ID NO: 142520 - DNA, 15 bp, Homo sapiens
accctaggaaaccca

SEQ ID NO: 142521 - DNA, 15 bp, Homo sapiens
gaccctaggaaaccc

SEQ ID NO: 142522 - DNA, 15 bp, Homo sapiens
agaccctaggaaacc

SEQ ID NO: 142523 - DNA, 15 bp, Homo sapiens
aagaccctaggaaac

SEQ ID NO: 142524 - DNA, 15 bp, Homo sapiens
caagaccctaggaaa

SEQ ID NO: 142525 - DNA, 15 bp, Homo sapiens
acaagaccctaggaa

SEQ ID NO: 142526 - DNA, 15 bp, Homo sapiens
cacaagaccctagga

SEQ ID NO: 142527 - DNA, 15 bp, Homo sapiens
ccacaagaccctagg

SEQ ID NO: 142528 - DNA, 15 bp, Homo sapiens
accacaagaccctag

SEQ ID NO: 142529 - DNA, 15 bp, Homo sapiens
gaccacaagacccta

SEQ ID NO: 142530 - DNA, 15 bp, Homo sapiens
ggaccacaagaccct

SEQ ID NO: 142531 - DNA, 15 bp, Homo sapiens
gggaccacaagaccc

SEQ ID NO: 142532 - DNA, 15 bp, Homo sapiens
ggggaccacaagacc

SEQ ID NO: 142533 - DNA, 15 bp, Homo sapiens
tggggaccacaagac

SEQ ID NO: 142534 - DNA, 15 bp, Homo sapiens
ctggggaccacaaga

SEQ ID NO: 142535 - DNA, 15 bp, Homo sapiens
actggggaccacaag

SEQ ID NO: 142536 - DNA, 15 bp, Homo sapiens
gactggggaccacaa

SEQ ID NO: 142537 - DNA, 15 bp, Homo sapiens
ggactggggaccaca

SEQ ID NO: 142538 - DNA, 15 bp, Homo sapiens
gggactggggaccac

SEQ ID NO: 142539 - DNA, 15 bp, Homo sapiens
ggggactggggacca

SEQ ID NO: 142540 - DNA, 15 bp, Homo sapiens
aggggactggggacc

SEQ ID NO: 142541 - DNA, 15 bp, Homo sapiens
taggggactggggac

SEQ ID NO: 142542 - DNA, 15 bp, Homo sapiens
ttaggggactgggga

SEQ ID NO: 142543 - DNA, 15 bp, Homo sapiens
attaggggactgggg

SEQ ID NO: 142544 - DNA, 15 bp, Homo sapiens
gattaggggactggg

SEQ ID NO: 142545 - DNA, 15 bp, Homo sapiens
ggattaggggactgg

SEQ ID NO: 142546 - DNA, 15 bp, Homo sapiens
gggattaggggactg

SEQ ID NO: 142547 - DNA, 15 bp, Homo sapiens
tgggattaggggact

SEQ ID NO: 142548 - DNA, 15 bp, Homo sapiens
atgggattaggggac

SEQ ID NO: 142549 - DNA, 15 bp, Homo sapiens
aatgggattagggga

SEQ ID NO: 142550 - DNA, 15 bp, Homo sapiens
gaatgggattagggg

SEQ ID NO: 142551 - DNA, 15 bp, Homo sapiens
ggaatgggattaggg

SEQ ID NO: 142552 - DNA, 15 bp, Homo sapiens
gggaatgggattagg

SEQ ID NO: 142553 - DNA, 15 bp, Homo sapiens
ggggaatgggattag

SEQ ID NO: 142554 - DNA, 15 bp, Homo sapiens
aggggaatgggatta

SEQ ID NO: 142555 - DNA, 15 bp, Homo sapiens
taggggaatgggatt

SEQ ID NO: 142556 - DNA, 15 bp, Homo sapiens
ttaggggaatgggat

SEQ ID NO: 142557 - DNA, 15 bp, Homo sapiens
gttaggggaatggga

SEQ ID NO: 142558 - DNA, 15 bp, Homo sapiens
ggttaggggaatggg

SEQ ID NO: 142559 - DNA, 15 bp, Homo sapiens
gggttaggggaatgg

SEQ ID NO: 142560 - DNA, 15 bp, Homo sapiens
ggggttaggggaatg

SEQ ID NO: 142561 - DNA, 15 bp, Homo sapiens
tggggttaggggaat

SEQ ID NO: 142562 - DNA, 15 bp, Homo sapiens
ctggggttaggggaa

SEQ ID NO: 142563 - DNA, 15 bp, Homo sapiens
cctggggttagggga

SEQ ID NO: 142564 - DNA, 15 bp, Homo sapiens
acctggggttagggg

SEQ ID NO: 142565 - DNA, 15 bp, Homo sapiens
gacctggggttaggg

SEQ ID NO: 142566 - DNA, 15 bp, Homo sapiens
agacctggggttagg

SEQ ID NO: 142567 - DNA, 15 bp, Homo sapiens
aagacctggggttag

SEQ ID NO: 142568 - DNA, 15 bp, Homo sapiens
aaagacctggggtta

SEQ ID NO: 142569 - DNA, 15 bp, Homo sapiens
caaagacctggggtt

SEQ ID NO: 142570 - DNA, 15 bp, Homo sapiens
gcaaagacctggggt

SEQ ID NO: 142571 - DNA, 15 bp, Homo sapiens
ggcaaagacctgggg

SEQ ID NO: 142572 - DNA, 15 bp, Homo sapiens
aggcaaagacctggg

SEQ ID NO: 142573 - DNA, 15 bp, Homo sapiens
gaggcaaagacctgg

SEQ ID NO: 142574 - DNA, 15 bp, Homo sapiens
tgaggcaaagacctg

SEQ ID NO: 142575 - DNA, 15 bp, Homo sapiens
ctgaggcaaagacct

SEQ ID NO: 142576 - DNA, 15 bp, Homo sapiens
gctgaggcaaagacc

SEQ ID NO: 142577 - DNA, 15 bp, Homo sapiens
agctgaggcaaagac

SEQ ID NO: 142578 - DNA, 15 bp, Homo sapiens
aagctgaggcaaaga

SEQ ID NO: 142579 - DNA, 15 bp, Homo sapiens
gaagctgaggcaaag

SEQ ID NO: 142580 - DNA, 15 bp, Homo sapiens
ggaagctgaggcaaa

SEQ ID NO: 142581 - DNA, 15 bp, Homo sapiens
gggaagctgaggcaa

SEQ ID NO: 142582 - DNA, 15 bp, Homo sapiens
agggaagctgaggca

SEQ ID NO: 142583 - DNA, 15 bp, Homo sapiens
tagggaagctgaggc

SEQ ID NO: 142584 - DNA, 15 bp, Homo sapiens
ctagggaagctgagg

SEQ ID NO: 142585 - DNA, 15 bp, Homo sapiens
gctagggaagctgag

SEQ ID NO: 142586 - DNA, 15 bp, Homo sapiens
agctagggaagctga

SEQ ID NO: 142587 - DNA, 15 bp, Homo sapiens
gagctagggaagctg

SEQ ID NO: 142588 - DNA, 15 bp, Homo sapiens
ggagctagggaagct

SEQ ID NO: 142589 - DNA, 15 bp, Homo sapiens
gggagctagggaagc

SEQ ID NO: 142590 - DNA, 15 bp, Homo sapiens
agggagctagggaag

SEQ ID NO: 142591 - DNA, 15 bp, Homo sapiens
aagggagctagggaa

SEQ ID NO: 142592 - DNA, 15 bp, Homo sapiens
gaagggagctaggga

SEQ ID NO: 142593 - DNA, 15 bp, Homo sapiens
agaagggagctaggg

SEQ ID NO: 142594 - DNA, 15 bp, Homo sapiens
aagaagggagctagg

SEQ ID NO: 142595 - DNA, 15 bp, Homo sapiens
aaagaagggagctag

SEQ ID NO: 142596 - DNA, 15 bp, Homo sapiens
caaagaagggagcta

SEQ ID NO: 142597 - DNA, 15 bp, Homo sapiens
tcaaagaagggagct

SEQ ID NO: 142598 - DNA, 15 bp, Homo sapiens
gtcaaagaagggagc

SEQ ID NO: 142599 - DNA, 15 bp, Homo sapiens
ggtcaaagaagggag

SEQ ID NO: 142600 - DNA, 15 bp, Homo sapiens
gggtcaaagaaggga

SEQ ID NO: 142601 - DNA, 15 bp, Homo sapiens
tgggtcaaagaaggg

SEQ ID NO: 142602 - DNA, 15 bp, Homo sapiens
ctgggtcaaagaagg

SEQ ID NO: 142603 - DNA, 15 bp, Homo sapiens
cctgggtcaaagaag

SEQ ID NO: 142604 - DNA, 15 bp, Homo sapiens
ccctgggtcaaagaa

SEQ ID NO: 142605 - DNA, 15 bp, Homo sapiens
tccctgggtcaaaga

SEQ ID NO: 142606 - DNA, 15 bp, Homo sapiens
ctccctgggtcaaag

SEQ ID NO: 142607 - DNA, 15 bp, Homo sapiens
gctccctgggtcaaa

SEQ ID NO: 142608 - DNA, 15 bp, Homo sapiens
tgctccctgggtcaa

SEQ ID NO: 142609 - DNA, 15 bp, Homo sapiens
ctgctccctgggtca

SEQ ID NO: 142610 - DNA, 15 bp, Homo sapiens
gctgctccctgggtc

SEQ ID NO: 142611 - DNA, 15 bp, Homo sapiens
agctgctccctgggt

SEQ ID NO: 142612 - DNA, 15 bp, Homo sapiens
cagctgctccctggg

SEQ ID NO: 142613 - DNA, 15 bp, Homo sapiens
tcagctgctccctgg

SEQ ID NO: 142614 - DNA, 15 bp, Homo sapiens
ctcagctgctccctg

SEQ ID NO: 142615 - DNA, 15 bp, Homo sapiens
cctcagctgctccct

SEQ ID NO: 142616 - DNA, 15 bp, Homo sapiens
tcctcagctgctccc

SEQ ID NO: 142617 - DNA, 15 bp, Homo sapiens
gtcctcagctgctcc

SEQ ID NO: 142618 - DNA, 15 bp, Homo sapiens
tgtcctcagctgctc

SEQ ID NO: 142619 - DNA, 15 bp, Homo sapiens
gtgtcctcagctgct

SEQ ID NO: 142620 - DNA, 15 bp, Homo sapiens
ggtgtcctcagctgc

SEQ ID NO: 142621 - DNA, 15 bp, Homo sapiens
tggtgtcctcagctg

SEQ ID NO: 142622 - DNA, 15 bp, Homo sapiens
ctggtgtcctcagct

SEQ ID NO: 142623 - DNA, 15 bp, Homo sapiens
actggtgtcctcagc

SEQ ID NO: 142624 - DNA, 15 bp, Homo sapiens
aactggtgtcctcag

SEQ ID NO: 142625 - DNA, 15 bp, Homo sapiens
gaactggtgtcctca

SEQ ID NO: 142626 - DNA, 15 bp, Homo sapiens
ggaactggtgtcctc

SEQ ID NO: 142627 - DNA, 15 bp, Homo sapiens
gggaactggtgtcct

SEQ ID NO: 142628 - DNA, 15 bp, Homo sapiens
ggggaactggtgtcc

SEQ ID NO: 142629 - DNA, 15 bp, Homo sapiens
gggggaactggtgtc

SEQ ID NO: 142630 - DNA, 15 bp, Homo sapiens
tgggggaactggtgt

SEQ ID NO: 142631 - DNA, 15 bp, Homo sapiens
gtgggggaactggtg

SEQ ID NO: 142632 - DNA, 15 bp, Homo sapiens
ggtgggggaactggt

SEQ ID NO: 142633 - DNA, 15 bp, Homo sapiens
aggtgggggaactgg

SEQ ID NO: 142634 - DNA, 15 bp, Homo sapiens
caggtgggggaactg

SEQ ID NO: 142635 - DNA, 15 bp, Homo sapiens
ccaggtgggggaact

SEQ ID NO: 142636 - DNA, 15 bp, Homo sapiens
cccaggtgggggaac

SEQ ID NO: 142637 - DNA, 15 bp, Homo sapiens
gcccaggtgggggaa

SEQ ID NO: 142638 - DNA, 15 bp, Homo sapiens
ggcccaggtggggga

SEQ ID NO: 142639 - DNA, 15 bp, Homo sapiens
aggcccaggtggggg

SEQ ID NO: 142640 - DNA, 15 bp, Homo sapiens
gaggcccaggtgggg

SEQ ID NO: 142641 - DNA, 15 bp, Homo sapiens
agaggcccaggtggg

SEQ ID NO: 142642 - DNA, 15 bp, Homo sapiens
gagaggcccaggtgg

SEQ ID NO: 142643 - DNA, 15 bp, Homo sapiens
agagaggcccaggtg

SEQ ID NO: 142644 - DNA, 15 bp, Homo sapiens
gagagaggcccaggt

SEQ ID NO: 142645 - DNA, 15 bp, Homo sapiens
agagagaggcccagg

SEQ ID NO: 142646 - DNA, 15 bp, Homo sapiens
cagagagaggcccag

SEQ ID NO: 142647 - DNA, 15 bp, Homo sapiens
acagagagaggccca

SEQ ID NO: 142648 - DNA, 15 bp, Homo sapiens
cacagagagaggccc

SEQ ID NO: 142649 - DNA, 15 bp, Homo sapiens
acacagagagaggcc

SEQ ID NO: 142650 - DNA, 15 bp, Homo sapiens
gacacagagagaggc

SEQ ID NO: 142651 - DNA, 15 bp, Homo sapiens
ggacacagagagagg

SEQ ID NO: 142652 - DNA, 15 bp, Homo sapiens
gggacacagagagag

SEQ ID NO: 142653 - DNA, 15 bp, Homo sapiens
ggggacacagagaga

SEQ ID NO: 142654 - DNA, 15 bp, Homo sapiens
tggggacacagagag

SEQ ID NO: 142655 - DNA, 15 bp, Homo sapiens
ctggggacacagaga

SEQ ID NO: 142656 - DNA, 15 bp, Homo sapiens
cctggggacacagag

SEQ ID NO: 142657 - DNA, 15 bp, Homo sapiens
tcctggggacacaga

SEQ ID NO: 142658 - DNA, 15 bp, Homo sapiens
gtcctggggacacag

SEQ ID NO: 142659 - DNA, 15 bp, Homo sapiens
ggtcctggggacaca

SEQ ID NO: 142660 - DNA, 15 bp, Homo sapiens
aggtcctggggacac

SEQ ID NO: 142661 - DNA, 15 bp, Homo sapiens
gaggtcctggggaca

SEQ ID NO: 142662 - DNA, 15 bp, Homo sapiens
agaggtcctggggac

SEQ ID NO: 142663 - DNA, 15 bp, Homo sapiens
gagaggtcctgggga

SEQ ID NO: 142664 - DNA, 15 bp, Homo sapiens
tgagaggtcctgggg

SEQ ID NO: 142665 - DNA, 15 bp, Homo sapiens
ttgagaggtcctggg

SEQ ID NO: 142666 - DNA, 15 bp, Homo sapiens
tttgagaggtcctgg

SEQ ID NO: 142667 - DNA, 15 bp, Homo sapiens
ctttgagaggtcctg

SEQ ID NO: 142668 - DNA, 15 bp, Homo sapiens
gctttgagaggtcct

SEQ ID NO: 142669 - DNA, 15 bp, Homo sapiens
ggctttgagaggtcc

SEQ ID NO: 142670 - DNA, 15 bp, Homo sapiens
gggctttgagaggtc

SEQ ID NO: 142671 - DNA, 15 bp, Homo sapiens
agggctttgagaggt

SEQ ID NO: 142672 - DNA, 15 bp, Homo sapiens
cagggctttgagagg

SEQ ID NO: 142673 - DNA, 15 bp, Homo sapiens
gcagggctttgagag

SEQ ID NO: 142674 - DNA, 15 bp, Homo sapiens
tgcagggctttgaga

SEQ ID NO: 142675 - DNA, 15 bp, Homo sapiens
ttgcagggctttgag

SEQ ID NO: 142676 - DNA, 15 bp, Homo sapiens
cttgcagggctttga

SEQ ID NO: 142677 - DNA, 15 bp, Homo sapiens
gcttgcagggctttg

SEQ ID NO: 142678 - DNA, 15 bp, Homo sapiens
ggcttgcagggcttt

SEQ ID NO: 142679 - DNA, 15 bp, Homo sapiens
tggcttgcagggctt

SEQ ID NO: 142680 - DNA, 15 bp, Homo sapiens
ttggcttgcagggct

SEQ ID NO: 142681 - DNA, 15 bp, Homo sapiens
gttggcttgcagggc

SEQ ID NO: 142682 - DNA, 15 bp, Homo sapiens
agttggcttgcaggg

SEQ ID NO: 142683 - DNA, 15 bp, Homo sapiens
gagttggcttgcagg

SEQ ID NO: 142684 - DNA, 15 bp, Homo sapiens
agagttggcttgcag

SEQ ID NO: 142685 - DNA, 15 bp, Homo sapiens
cagagttggcttgca

SEQ ID NO: 142686 - DNA, 15 bp, Homo sapiens
gcagagttggcttgc

SEQ ID NO: 142687 - DNA, 15 bp, Homo sapiens
tgcagagttggcttg

SEQ ID NO: 142688 - DNA, 15 bp, Homo sapiens
ctgcagagttggctt

SEQ ID NO: 142689 - DNA, 15 bp, Homo sapiens
cctgcagagttggct

SEQ ID NO: 142690 - DNA, 15 bp, Homo sapiens
ccctgcagagttggc

SEQ ID NO: 142691 - DNA, 15 bp, Homo sapiens
cccctgcagagttgg

SEQ ID NO: 142692 - DNA, 15 bp, Homo sapiens
gcccctgcagagttg

SEQ ID NO: 142693 - DNA, 15 bp, Homo sapiens
tgcccctgcagagtt

SEQ ID NO: 142694 - DNA, 15 bp, Homo sapiens
ctgcccctgcagagt

SEQ ID NO: 142695 - DNA, 15 bp, Homo sapiens
tctgcccctgcagag

SEQ ID NO: 142696 - DNA, 15 bp, Homo sapiens
atctgcccctgcaga

SEQ ID NO: 142697 - DNA, 15 bp, Homo sapiens
catctgcccctgcag

SEQ ID NO: 142698 - DNA, 15 bp, Homo sapiens
ccatctgcccctgca

SEQ ID NO: 142699 - DNA, 15 bp, Homo sapiens
cccatctgcccctgc

SEQ ID NO: 142700 - DNA, 15 bp, Homo sapiens
ccccatctgcccctg

SEQ ID NO: 142701 - DNA, 15 bp, Homo sapiens
accccatctgcccct

SEQ ID NO: 142702 - DNA, 15 bp, Homo sapiens
gaccccatctgcccc

SEQ ID NO: 142703 - DNA, 15 bp, Homo sapiens
ggaccccatctgccc

SEQ ID NO: 142704 - DNA, 15 bp, Homo sapiens
gggaccccatctgcc

SEQ ID NO: 142705 - DNA, 15 bp, Homo sapiens
cgggaccccatctgc

SEQ ID NO: 142706 - DNA, 15 bp, Homo sapiens
gcgggaccccatctg

SEQ ID NO: 142707 - DNA, 15 bp, Homo sapiens
agcgggaccccatct

SEQ ID NO: 142708 - DNA, 15 bp, Homo sapiens
cagacaagcgccggt

SEQ ID NO: 142709 - DNA, 15 bp, Homo sapiens
gcagacaagcgccgg

SEQ ID NO: 142710 - DNA, 15 bp, Homo sapiens
tgcagacaagcgccg

SEQ ID NO: 142711 - DNA, 15 bp, Homo sapiens
ctgcagacaagcgcc

SEQ ID NO: 142712 - DNA, 15 bp, Homo sapiens
tctgcagacaagcgc

SEQ ID NO: 142713 - DNA, 15 bp, Homo sapiens
ttctgcagacaagcg

SEQ ID NO: 142714 - DNA, 15 bp, Homo sapiens
cttctgcagacaagc

SEQ ID NO: 142715 - DNA, 15 bp, Homo sapiens
tcttctgcagacaag

SEQ ID NO: 142716 - DNA, 15 bp, Homo sapiens
ttcttctgcagacaa

SEQ ID NO: 142717 - DNA, 15 bp, Homo sapiens
cttcttctgcagaca

SEQ ID NO: 142718 - DNA, 15 bp, Homo sapiens
ccttcttctgcagac

SEQ ID NO: 142719 - DNA, 15 bp, Homo sapiens
tccttcttctgcaga

SEQ ID NO: 142720 - DNA, 15 bp, Homo sapiens
atccttcttctgcag

SEQ ID NO: 142721 - DNA, 15 bp, Homo sapiens
catccttcttctgca

SEQ ID NO: 142722 - DNA, 15 bp, Homo sapiens
acatccttcttctgc

SEQ ID NO: 142723 - DNA, 15 bp, Homo sapiens
cacatccttcttctg

SEQ ID NO: 142724 - DNA, 15 bp, Homo sapiens
gcacatccttcttct

SEQ ID NO: 142725 - DNA, 15 bp, Homo sapiens
cgcacatccttcttc

SEQ ID NO: 142726 - DNA, 15 bp, Homo sapiens
ccgcacatccttctt

SEQ ID NO: 142727 - DNA, 15 bp, Homo sapiens
tccgcacatccttct

SEQ ID NO: 142728 - DNA, 15 bp, Homo sapiens
atccgcacatccttc

SEQ ID NO: 142729 - DNA, 15 bp, Homo sapiens
catccgcacatcctt

SEQ ID NO: 142730 - DNA, 15 bp, Homo sapiens
gcatccgcacatcct

SEQ ID NO: 142731 - DNA, 15 bp, Homo sapiens
agcatccgcacatcc

SEQ ID NO: 142732 - DNA, 15 bp, Homo sapiens
cagcatccgcacatc

SEQ ID NO: 142733 - DNA, 15 bp, Homo sapiens
gcagcatccgcacat

SEQ ID NO: 142734 - DNA, 15 bp, Homo sapiens
cgcagcatccgcaca

SEQ ID NO: 142735 - DNA, 15 bp, Homo sapiens
gcgcagcatccgcac

SEQ ID NO: 142736 - DNA, 15 bp, Homo sapiens
agcgcagcatccgca

SEQ ID NO: 142737 - DNA, 15 bp, Homo sapiens
aagcgcagcatccgc

SEQ ID NO: 142738 - DNA, 15 bp, Homo sapiens
gaagcgcagcatccg

SEQ ID NO: 142739 - DNA, 15 bp, Homo sapiens
tgaagcgcagcatcc

SEQ ID NO: 142740 - DNA, 15 bp, Homo sapiens
atgaagcgcagcatc

SEQ ID NO: 142741 - DNA, 15 bp, Homo sapiens
gatgaagcgcagcat

SEQ ID NO: 142742 - DNA, 15 bp, Homo sapiens
ggatgaagcgcagca

SEQ ID NO: 142743 - DNA, 15 bp, Homo sapiens
tggatgaagcgcagc

SEQ ID NO: 142744 - DNA, 15 bp, Homo sapiens
ctggatgaagcgcag

SEQ ID NO: 142745 - DNA, 15 bp, Homo sapiens
cctggatgaagcgca

SEQ ID NO: 142746 - DNA, 15 bp, Homo sapiens
tcctggatgaagcgc

SEQ ID NO: 142747 - DNA, 15 bp, Homo sapiens
ctcctggatgaagcg

SEQ ID NO: 142748 - DNA, 15 bp, Homo sapiens
cctcctggatgaagc

SEQ ID NO: 142749 - DNA, 15 bp, Homo sapiens
acctcctggatgaag

SEQ ID NO: 142750 - DNA, 15 bp, Homo sapiens
cacctcctggatgaa

SEQ ID NO: 142751 - DNA, 15 bp, Homo sapiens
tcacctcctggatga

SEQ ID NO: 142752 - DNA, 15 bp, Homo sapiens
ttcacctcctggatg

SEQ ID NO: 142753 - DNA, 15 bp, Homo sapiens
gttcacctcctggat

SEQ ID NO: 142754 - DNA, 15 bp, Homo sapiens
tgttcacctcctgga

SEQ ID NO: 142755 - DNA, 15 bp, Homo sapiens
gtgttcacctcctgg

SEQ ID NO: 142756 - DNA, 15 bp, Homo sapiens
ggtgttcacctcctg

SEQ ID NO: 142757 - DNA, 15 bp, Homo sapiens
tggtgttcacctcct

SEQ ID NO: 142758 - DNA, 15 bp, Homo sapiens
gtggtgttcacctcc

SEQ ID NO: 142759 - DNA, 15 bp, Homo sapiens
ggtggtgttcacctc

SEQ ID NO: 142760 - DNA, 15 bp, Homo sapiens
tggtggtgttcacct

SEQ ID NO: 142761 - DNA, 15 bp, Homo sapiens
gtggtggtgttcacc

SEQ ID NO: 142762 - DNA, 15 bp, Homo sapiens
ggtggtggtgttcac

SEQ ID NO: 142763 - DNA, 15 bp, Homo sapiens
gggtggtggtgttca

SEQ ID NO: 142764 - DNA, 15 bp, Homo sapiens
cgggtggtggtgttc

SEQ ID NO: 142765 - DNA, 15 bp, Homo sapiens
gcgggtggtggtgtt

SEQ ID NO: 142766 - DNA, 15 bp, Homo sapiens
agcgggtggtggtgt

SEQ ID NO: 142767 - DNA, 15 bp, Homo sapiens
gagcgggtggtggtg

SEQ ID NO: 142768 - DNA, 15 bp, Homo sapiens
tgagcgggtggtggt

SEQ ID NO: 142769 - DNA, 15 bp, Homo sapiens
atgagcgggtggtgg

SEQ ID NO: 142770 - DNA, 15 bp, Homo sapiens
catgagcgggtggtg

SEQ ID NO: 142771 - DNA, 15 bp, Homo sapiens
acatgagcgggtggt

SEQ ID NO: 142772 - DNA, 15 bp, Homo sapiens
cacatgagcgggtgg

SEQ ID NO: 142773 - DNA, 15 bp, Homo sapiens
gcacatgagcgggtg

SEQ ID NO: 142774 - DNA, 15 bp, Homo sapiens
ggcacatgagcgggt

SEQ ID NO: 142775 - DNA, 15 bp, Homo sapiens
gggcacatgagcggg

SEQ ID NO: 142776 - DNA, 15 bp, Homo sapiens
agggcacatgagcgg

SEQ ID NO: 142777 - DNA, 15 bp, Homo sapiens
gagggcacatgagcg

SEQ ID NO: 142778 - DNA, 15 bp, Homo sapiens
agagggcacatgagc

SEQ ID NO: 142779 - DNA, 15 bp, Homo sapiens
cagagggcacatgag

SEQ ID NO: 142780 - DNA, 15 bp, Homo sapiens
ccagagggcacatga

SEQ ID NO: 142781 - DNA, 15 bp, Homo sapiens
cccagagggcacatg

SEQ ID NO: 142782 - DNA, 15 bp, Homo sapiens
tcccagagggcacat

SEQ ID NO: 142783 - DNA, 15 bp, Homo sapiens
gtcccagagggcaca

SEQ ID NO: 142784 - DNA, 15 bp, Homo sapiens
ggtcccagagggcac

SEQ ID NO: 142785 - DNA, 15 bp, Homo sapiens
aggtcccagagggca

SEQ ID NO: 142786 - DNA, 15 bp, Homo sapiens
caggtcccagagggc

SEQ ID NO: 142787 - DNA, 15 bp, Homo sapiens
ccaggtcccagaggg

SEQ ID NO: 142788 - DNA, 15 bp, Homo sapiens
tccaggtcccagagg

SEQ ID NO: 142789 - DNA, 15 bp, Homo sapiens
ctccaggtcccagag

SEQ ID NO: 142790 - DNA, 15 bp, Homo sapiens
cctccaggtcccaga

SEQ ID NO: 142791 - DNA, 15 bp, Homo sapiens
tcctccaggtcccag

SEQ ID NO: 142792 - DNA, 15 bp, Homo sapiens
ctcctccaggtccca

SEQ ID NO: 142793 - DNA, 15 bp, Homo sapiens
cctcctccaggtccc

SEQ ID NO: 142794 - DNA, 15 bp, Homo sapiens
tcctcctccaggtcc

SEQ ID NO: 142795 - DNA, 15 bp, Homo sapiens
atcctcctccaggtc

SEQ ID NO: 142796 - DNA, 15 bp, Homo sapiens
tatcctcctccaggt

SEQ ID NO: 142797 - DNA, 15 bp, Homo sapiens
gtatcctcctccagg

SEQ ID NO: 142798 - DNA, 15 bp, Homo sapiens
cgtatcctcctccag

SEQ ID NO: 142799 - DNA, 15 bp, Homo sapiens
ccgtatcctcctcca

SEQ ID NO: 142800 - DNA, 15 bp, Homo sapiens
tccgtatcctcctcc

SEQ ID NO: 142801 - DNA, 15 bp, Homo sapiens
ctccgtatcctcctc

SEQ ID NO: 142802 - DNA, 15 bp, Homo sapiens
actccgtatcctcct

SEQ ID NO: 142803 - DNA, 15 bp, Homo sapiens
tactccgtatcctcc

SEQ ID NO: 142804 - DNA, 15 bp, Homo sapiens
gtactccgtatcctc

SEQ ID NO: 142805 - DNA, 15 bp, Homo sapiens
tgtactccgtatcct

SEQ ID NO: 142806 - DNA, 15 bp, Homo sapiens
atgtactccgtatcc

SEQ ID NO: 142807 - DNA, 15 bp, Homo sapiens
tatgtactccgtatc

SEQ ID NO: 142808 - DNA, 15 bp, Homo sapiens
ctatgtactccgtat

SEQ ID NO: 142809 - DNA, 15 bp, Homo sapiens
actatgtactccgta

SEQ ID NO: 142810 - DNA, 15 bp, Homo sapiens
gactatgtactccgt

SEQ ID NO: 142811 - DNA, 15 bp, Homo sapiens
ggactatgtactccg

SEQ ID NO: 142812 - DNA, 15 bp, Homo sapiens
tggactatgtactcc

SEQ ID NO: 142813 - DNA, 15 bp, Homo sapiens
gtggactatgtactc

SEQ ID NO: 142814 - DNA, 15 bp, Homo sapiens
cgtggactatgtact

SEQ ID NO: 142815 - DNA, 15 bp, Homo sapiens
acgtggactatgtac

SEQ ID NO: 142816 - DNA, 15 bp, Homo sapiens
cacgtggactatgta

SEQ ID NO: 142817 - DNA, 15 bp, Homo sapiens
gcacgtggactatgt

SEQ ID NO: 142818 - DNA, 15 bp, Homo sapiens
tgcacgtggactatg

SEQ ID NO: 142819 - DNA, 15 bp, Homo sapiens
ctgcacgtggactat

SEQ ID NO: 142820 - DNA, 15 bp, Homo sapiens
cctgcacgtggacta

SEQ ID NO: 142821 - DNA, 15 bp, Homo sapiens
gcctgcacgtggact

SEQ ID NO: 142822 - DNA, 15 bp, Homo sapiens
ggcctgcacgtggac

SEQ ID NO: 142823 - DNA, 15 bp, Homo sapiens
tggcctgcacgtgga

SEQ ID NO: 142824 - DNA, 15 bp, Homo sapiens
atggcctgcacgtgg

SEQ ID NO: 142825 - DNA, 15 bp, Homo sapiens
gatggcctgcacgtg

SEQ ID NO: 142826 - DNA, 15 bp, Homo sapiens
agatggcctgcacgt

SEQ ID NO: 142827 - DNA, 15 bp, Homo sapiens
gagatggcctgcacg

SEQ ID NO: 142828 - DNA, 15 bp, Homo sapiens
ggagatggcctgcac

SEQ ID NO: 142829 - DNA, 15 bp, Homo sapiens
tggagatggcctgca

SEQ ID NO: 142830 - DNA, 15 bp, Homo sapiens
atggagatggcctgc

SEQ ID NO: 142831 - DNA, 15 bp, Homo sapiens
aatggagatggcctg

SEQ ID NO: 142832 - DNA, 15 bp, Homo sapiens
gaatggagatggcct

SEQ ID NO: 142833 - DNA, 15 bp, Homo sapiens
tgaatggagatggcc

SEQ ID NO: 142834 - DNA, 15 bp, Homo sapiens
ctgaatggagatggc

SEQ ID NO: 142835 - DNA, 15 bp, Homo sapiens
cctgaatggagatgg

SEQ ID NO: 142836 - DNA, 15 bp, Homo sapiens
ccctgaatggagatg

SEQ ID NO: 142837 - DNA, 15 bp, Homo sapiens
gccctgaatggagat

SEQ ID NO: 142838 - DNA, 15 bp, Homo sapiens
ggccctgaatggaga

SEQ ID NO: 142839 - DNA, 15 bp, Homo sapiens
tggccctgaatggag

SEQ ID NO: 142840 - DNA, 15 bp, Homo sapiens
ctggccctgaatgga

SEQ ID NO: 142841 - DNA, 15 bp, Homo sapiens
tctggccctgaatgg

SEQ ID NO: 142842 - DNA, 15 bp, Homo sapiens
ctctggccctgaatg

SEQ ID NO: 142843 - DNA, 15 bp, Homo sapiens
gctctggccctgaat

SEQ ID NO: 142844 - DNA, 15 bp, Homo sapiens
ggctctggccctgaa

SEQ ID NO: 142845 - DNA, 15 bp, Homo sapiens
gggctctggccctga

SEQ ID NO: 142846 - DNA, 15 bp, Homo sapiens
tgggctctggccctg

SEQ ID NO: 142847 - DNA, 15 bp, Homo sapiens
ctgggctctggccct

SEQ ID NO: 142848 - DNA, 15 bp, Homo sapiens
gctgggctctggccc

SEQ ID NO: 142849 - DNA, 15 bp, Homo sapiens
ggctgggctctggcc

SEQ ID NO: 142850 - DNA, 15 bp, Homo sapiens
tggctgggctctggc

SEQ ID NO: 142851 - DNA, 15 bp, Homo sapiens
ctggctgggctctgg

SEQ ID NO: 142852 - DNA, 15 bp, Homo sapiens
gctggctgggctctg

SEQ ID NO: 142853 - DNA, 15 bp, Homo sapiens
cgctggctgggctct

SEQ ID NO: 142854 - DNA, 15 bp, Homo sapiens
tcgctggctgggctc

SEQ ID NO: 142855 - DNA, 15 bp, Homo sapiens
ctcgctggctgggct

SEQ ID NO: 142856 - DNA, 15 bp, Homo sapiens
gctcgctggctgggc

SEQ ID NO: 142857 - DNA, 15 bp, Homo sapiens
ggctcgctggctggg

SEQ ID NO: 142858 - DNA, 15 bp, Homo sapiens
aggctcgctggctgg

SEQ ID NO: 142859 - DNA, 15 bp, Homo sapiens
caggctcgctggctg

SEQ ID NO: 142860 - DNA, 15 bp, Homo sapiens
acaggctcgctggct

SEQ ID NO: 142861 - DNA, 15 bp, Homo sapiens
cacaggctcgctggc

SEQ ID NO: 142862 - DNA, 15 bp, Homo sapiens
gcacaggctcgctgg

SEQ ID NO: 142863 - DNA, 15 bp, Homo sapiens
agcacaggctcgctg

SEQ ID NO: 142864 - DNA, 15 bp, Homo sapiens
gagcacaggctcgct

SEQ ID NO: 142865 - DNA, 15 bp, Homo sapiens
agagcacaggctcgc

SEQ ID NO: 142866 - DNA, 15 bp, Homo sapiens
aagagcacaggctcg

SEQ ID NO: 142867 - DNA, 15 bp, Homo sapiens
gaagagcacaggctc

SEQ ID NO: 142868 - DNA, 15 bp, Homo sapiens
tgaagagcacaggct

SEQ ID NO: 142869 - DNA, 15 bp, Homo sapiens
ttgaagagcacaggc

SEQ ID NO: 142870 - DNA, 15 bp, Homo sapiens
cttgaagagcacagg

SEQ ID NO: 142871 - DNA, 15 bp, Homo sapiens
tcttgaagagcacag

SEQ ID NO: 142872 - DNA, 15 bp, Homo sapiens
gtcttgaagagcaca

SEQ ID NO: 142873 - DNA, 15 bp, Homo sapiens
ggtcttgaagagcac

SEQ ID NO: 142874 - DNA, 15 bp, Homo sapiens
gggtcttgaagagca

SEQ ID NO: 142875 - DNA, 15 bp, Homo sapiens
ggggtcttgaagagc

SEQ ID NO: 142876 - DNA, 15 bp, Homo sapiens
cggggtcttgaagag

SEQ ID NO: 142877 - DNA, 15 bp, Homo sapiens
gcggggtcttgaaga

SEQ ID NO: 142878 - DNA, 15 bp, Homo sapiens
cgcggggtcttgaag

SEQ ID NO: 142879 - DNA, 15 bp, Homo sapiens
acgcggggtcttgaa

SEQ ID NO: 142880 - DNA, 15 bp, Homo sapiens
cacgcggggtcttga

SEQ ID NO: 142881 - DNA, 15 bp, Homo sapiens
tcacgcggggtcttg

SEQ ID NO: 142882 - DNA, 15 bp, Homo sapiens
ctcacgcggggtctt

SEQ ID NO: 142883 - DNA, 15 bp, Homo sapiens
cctcacgcggggtct

SEQ ID NO: 142884 - DNA, 15 bp, Homo sapiens
gcctcacgcggggtc

SEQ ID NO: 142885 - DNA, 15 bp, Homo sapiens
agcctcacgcggggt

SEQ ID NO: 142886 - DNA, 15 bp, Homo sapiens
cagcctcacgcgggg

SEQ ID NO: 142887 - DNA, 15 bp, Homo sapiens
tcagcctcacgcggg

SEQ ID NO: 142888 - DNA, 15 bp, Homo sapiens
ctcagcctcacgcgg

SEQ ID NO: 142889 - DNA, 15 bp, Homo sapiens
tctcagcctcacgcg

SEQ ID NO: 142890 - DNA, 15 bp, Homo sapiens
ttctcagcctcacgc

SEQ ID NO: 142891 - DNA, 15 bp, Homo sapiens
cttctcagcctcacg

SEQ ID NO: 142892 - DNA, 15 bp, Homo sapiens
tcttctcagcctcac

SEQ ID NO: 142893 - DNA, 15 bp, Homo sapiens
atcttctcagcctca

SEQ ID NO: 142894 - DNA, 15 bp, Homo sapiens
catcttctcagcctc

SEQ ID NO: 142895 - DNA, 15 bp, Homo sapiens
ccatcttctcagcct

SEQ ID NO: 142896 - DNA, 15 bp, Homo sapiens
gccatcttctcagcc

SEQ ID NO: 142897 - DNA, 15 bp, Homo sapiens
ggccatcttctcagc

SEQ ID NO: 142898 - DNA, 15 bp, Homo sapiens
aggccatcttctcag

SEQ ID NO: 142899 - DNA, 15 bp, Homo sapiens
gaggccatcttctca

SEQ ID NO: 142900 - DNA, 15 bp, Homo sapiens
ggaggccatcttctc

SEQ ID NO: 142901 - DNA, 15 bp, Homo sapiens
tggaggccatcttct

SEQ ID NO: 142902 - DNA, 15 bp, Homo sapiens
ttggaggccatcttc

SEQ ID NO: 142903 - DNA, 15 bp, Homo sapiens
cttggaggccatctt

SEQ ID NO: 142904 - DNA, 15 bp, Homo sapiens
tcttggaggccatct

SEQ ID NO: 142905 - DNA, 15 bp, Homo sapiens
ttcttggaggccatc

SEQ ID NO: 142906 - DNA, 15 bp, Homo sapiens
gttcttggaggccat

SEQ ID NO: 142907 - DNA, 15 bp, Homo sapiens
tgttcttggaggcca

SEQ ID NO: 142908 - DNA, 15 bp, Homo sapiens
ttgttcttggaggcc

SEQ ID NO: 142909 - DNA, 15 bp, Homo sapiens
tttgttcttggaggc

SEQ ID NO: 142910 - DNA, 15 bp, Homo sapiens
ctttgttcttggagg

SEQ ID NO: 142911 - DNA, 15 bp, Homo sapiens
cctttgttcttggag

SEQ ID NO: 142912 - DNA, 15 bp, Homo sapiens
gcctttgttcttgga

SEQ ID NO: 142913 - DNA, 15 bp, Homo sapiens
tgcctttgttcttgg

SEQ ID NO: 142914 - DNA, 15 bp, Homo sapiens
ctgcctttgttcttg

SEQ ID NO: 142915 - DNA, 15 bp, Homo sapiens
cctgcctttgttctt

SEQ ID NO: 142916 - DNA, 15 bp, Homo sapiens
gcctgcctttgttct

SEQ ID NO: 142917 - DNA, 15 bp, Homo sapiens
ggcctgcctttgttc

SEQ ID NO: 142918 - DNA, 15 bp, Homo sapiens
gggcctgcctttgtt

SEQ ID NO: 142919 - DNA, 15 bp, Homo sapiens
cgggcctgcctttgt

SEQ ID NO: 142920 - DNA, 15 bp, Homo sapiens
ccgggcctgcctttg

SEQ ID NO: 142921 - DNA, 15 bp, Homo sapiens
cccgggcctgccttt

SEQ ID NO: 142922 - DNA, 15 bp, Homo sapiens
acccgggcctgcctt

SEQ ID NO: 142923 - DNA, 15 bp, Homo sapiens
gacccgggcctgcct

SEQ ID NO: 142924 - DNA, 15 bp, Homo sapiens
tgacccgggcctgcc

SEQ ID NO: 142925 - DNA, 15 bp, Homo sapiens
gtgacccgggcctgc

SEQ ID NO: 142926 - DNA, 15 bp, Homo sapiens
agtgacccgggcctg

SEQ ID NO: 142927 - DNA, 15 bp, Homo sapiens
cagtgacccgggcct

SEQ ID NO: 142928 - DNA, 15 bp, Homo sapiens
acagtgacccgggcc

SEQ ID NO: 142929 - DNA, 15 bp, Homo sapiens
aacagtgacccgggc

SEQ ID NO: 142930 - DNA, 15 bp, Homo sapiens
taacagtgacccggg

SEQ ID NO: 142931 - DNA, 15 bp, Homo sapiens
ttaacagtgacccgg

SEQ ID NO: 142932 - DNA, 15 bp, Homo sapiens
cttaacagtgacccg

SEQ ID NO: 142933 - DNA, 15 bp, Homo sapiens
tcttaacagtgaccc

SEQ ID NO: 142934 - DNA, 15 bp, Homo sapiens
ctcttaacagtgacc

SEQ ID NO: 142935 - DNA, 15 bp, Homo sapiens
cctcttaacagtgac

SEQ ID NO: 142936 - DNA, 15 bp, Homo sapiens
tcctcttaacagtga

SEQ ID NO: 142937 - DNA, 15 bp, Homo sapiens
ttcctcttaacagtg

SEQ ID NO: 142938 - DNA, 15 bp, Homo sapiens
attcctcttaacagt

SEQ ID NO: 142939 - DNA, 15 bp, Homo sapiens
cattcctcttaacag

SEQ ID NO: 142940 - DNA, 15 bp, Homo sapiens
ccattcctcttaaca

SEQ ID NO: 142941 - DNA, 15 bp, Homo sapiens
cccattcctcttaac

SEQ ID NO: 142942 - DNA, 15 bp, Homo sapiens
ccccattcctcttaa

SEQ ID NO: 142943 - DNA, 15 bp, Homo sapiens
accccattcctctta

SEQ ID NO: 142944 - DNA, 15 bp, Homo sapiens
caccccattcctctt

SEQ ID NO: 142945 - DNA, 15 bp, Homo sapiens
ccaccccattcctct

SEQ ID NO: 142946 - DNA, 15 bp, Homo sapiens
cccaccccattcctc

SEQ ID NO: 142947 - DNA, 15 bp, Homo sapiens
ccccaccccattcct

SEQ ID NO: 142948 - DNA, 15 bp, Homo sapiens
accccaccccattcc

SEQ ID NO: 142949 - DNA, 15 bp, Homo sapiens
caccccaccccattc

SEQ ID NO: 142950 - DNA, 15 bp, Homo sapiens
tcaccccaccccatt

SEQ ID NO: 142951 - DNA, 15 bp, Homo sapiens
ctcaccccaccccat

SEQ ID NO: 142952 - DNA, 15 bp, Homo sapiens
cctcaccccacccca

SEQ ID NO: 142953 - DNA, 15 bp, Homo sapiens
ccctcaccccacccc

SEQ ID NO: 142954 - DNA, 15 bp, Homo sapiens
cccctcaccccaccc

SEQ ID NO: 142955 - DNA, 15 bp, Homo sapiens
acccctcaccccacc

SEQ ID NO: 142956 - DNA, 15 bp, Homo sapiens
ccacccctcacccca

SEQ ID NO: 142957 - DNA, 15 bp, Homo sapiens
accacccctcacccc

SEQ ID NO: 142958 - DNA, 15 bp, Homo sapiens
gaccacccctcaccc

SEQ ID NO: 142959 - DNA, 15 bp, Homo sapiens
tgaccacccctcacc

SEQ ID NO: 142960 - DNA, 15 bp, Homo sapiens
ctgaccacccctcac

SEQ ID NO: 142961 - DNA, 15 bp, Homo sapiens
cctgaccacccctca

SEQ ID NO: 142962 - DNA, 15 bp, Homo sapiens
tcctgaccacccctc

SEQ ID NO: 142963 - DNA, 15 bp, Homo sapiens
gtcctgaccacccct

SEQ ID NO: 142964 - DNA, 15 bp, Homo sapiens
ggtcctgaccacccc

SEQ ID NO: 142965 - DNA, 15 bp, Homo sapiens
tggtcctgaccaccc

SEQ ID NO: 142966 - DNA, 15 bp, Homo sapiens
ctggtcctgaccacc

SEQ ID NO: 142967 - DNA, 15 bp, Homo sapiens
tctggtcctgaccac

SEQ ID NO: 142968 - DNA, 15 bp, Homo sapiens
gtctggtcctgacca

SEQ ID NO: 142969 - DNA, 15 bp, Homo sapiens
ggtctggtcctgacc

SEQ ID NO: 142970 - DNA, 15 bp, Homo sapiens
tggtctggtcctgac

SEQ ID NO: 142971 - DNA, 15 bp, Homo sapiens
ctggtctggtcctga

SEQ ID NO: 142972 - DNA, 15 bp, Homo sapiens
actggtctggtcctg

SEQ ID NO: 142973 - DNA, 15 bp, Homo sapiens
cactggtctggtcct

SEQ ID NO: 142974 - DNA, 15 bp, Homo sapiens
ccactggtctggtcc

SEQ ID NO: 142975 - DNA, 15 bp, Homo sapiens
cccactggtctggtc

SEQ ID NO: 142976 - DNA, 15 bp, Homo sapiens
acccactggtctggt

SEQ ID NO: 142977 - DNA, 15 bp, Homo sapiens
cacccactggtctgg

SEQ ID NO: 142978 - DNA, 15 bp, Homo sapiens
ccacccactggtctg

SEQ ID NO: 142979 - DNA, 15 bp, Homo sapiens
gccacccactggtct

SEQ ID NO: 142980 - DNA, 15 bp, Homo sapiens
agccacccactggtc

SEQ ID NO: 142981 - DNA, 15 bp, Homo sapiens
aagccacccactggt

SEQ ID NO: 142982 - DNA, 15 bp, Homo sapiens
caagccacccactgg

SEQ ID NO: 142983 - DNA, 15 bp, Homo sapiens
tcaagccacccactg

SEQ ID NO: 142984 - DNA, 15 bp, Homo sapiens
ctcaagccacccact

SEQ ID NO: 142985 - DNA, 15 bp, Homo sapiens
cctcaagccacccac

SEQ ID NO: 142986 - DNA, 15 bp, Homo sapiens
tcctcaagccaccca

SEQ ID NO: 142987 - DNA, 15 bp, Homo sapiens
ttcctcaagccaccc

SEQ ID NO: 142988 - DNA, 15 bp, Homo sapiens
tttcctcaagccacc

SEQ ID NO: 142989 - DNA, 15 bp, Homo sapiens
ctttcctcaagccac

SEQ ID NO: 142990 - DNA, 15 bp, Homo sapiens
gctttcctcaagcca

SEQ ID NO: 142991 - DNA, 15 bp, Homo sapiens
agctttcctcaagcc

SEQ ID NO: 142992 - DNA, 15 bp, Homo sapiens
gagctttcctcaagc

SEQ ID NO: 142993 - DNA, 15 bp, Homo sapiens
agagctttcctcaag

SEQ ID NO: 142994 - DNA, 15 bp, Homo sapiens
cagagctttcctcaa

SEQ ID NO: 142995 - DNA, 15 bp, Homo sapiens
acagagctttcctca

SEQ ID NO: 142996 - DNA, 15 bp, Homo sapiens
gacagagctttcctc

SEQ ID NO: 142997 - DNA, 15 bp, Homo sapiens
agacagagctttcct

SEQ ID NO: 142998 - DNA, 15 bp, Homo sapiens
gagacagagctttcc

SEQ ID NO: 142999 - DNA, 15 bp, Homo sapiens
ggagacagagctttc

SEQ ID NO: 143000 - DNA, 15 bp, Homo sapiens
aggagacagagcttt

SEQ ID NO: 143001 - DNA, 15 bp, Homo sapiens
gaggagacagagctt

SEQ ID NO: 143002 - DNA, 15 bp, Homo sapiens
ggaggagacagagct

SEQ ID NO: 143003 - DNA, 15 bp, Homo sapiens
gggaggagacagagc

SEQ ID NO: 143004 - DNA, 15 bp, Homo sapiens
ggggaggagacagag

SEQ ID NO: 143005 - DNA, 15 bp, Homo sapiens
gggggaggagacaga

SEQ ID NO: 143006 - DNA, 15 bp, Homo sapiens
agggggaggagacag

SEQ ID NO: 143007 - DNA, 15 bp, Homo sapiens
aagggggaggagaca

SEQ ID NO: 143008 - DNA, 15 bp, Homo sapiens
taagggggaggagac

SEQ ID NO: 143009 - DNA, 15 bp, Homo sapiens
ataagggggaggaga

SEQ ID NO: 143010 - DNA, 15 bp, Homo sapiens
gataagggggaggag

SEQ ID NO: 143011 - DNA, 15 bp, Homo sapiens
ggataagggggagga

SEQ ID NO: 143012 - DNA, 15 bp, Homo sapiens
gggataagggggagg

SEQ ID NO: 143013 - DNA, 15 bp, Homo sapiens
ggggataagggggag

SEQ ID NO: 143014 - DNA, 15 bp, Homo sapiens
aggggataaggggga

SEQ ID NO: 143015 - DNA, 15 bp, Homo sapiens
caggggataaggggg

SEQ ID NO: 143016 - DNA, 15 bp, Homo sapiens
gcaggggataagggg

SEQ ID NO: 143017 - DNA, 15 bp, Homo sapiens
agcaggggataaggg

SEQ ID NO: 143018 - DNA, 15 bp, Homo sapiens
cagcaggggataagg

SEQ ID NO: 143019 - DNA, 15 bp, Homo sapiens
ccagcaggggataag

SEQ ID NO: 143020 - DNA, 15 bp, Homo sapiens
gccagcaggggataa

SEQ ID NO: 143021 - DNA, 15 bp, Homo sapiens
tgccagcaggggata

SEQ ID NO: 143022 - DNA, 15 bp, Homo sapiens
ttgccagcaggggat

SEQ ID NO: 143023 - DNA, 15 bp, Homo sapiens
cttgccagcagggga

SEQ ID NO: 143024 - DNA, 15 bp, Homo sapiens
acttgccagcagggg

SEQ ID NO: 143025 - DNA, 15 bp, Homo sapiens
tacttgccagcaggg

SEQ ID NO: 143026 - DNA, 15 bp, Homo sapiens
ttacttgccagcagg

SEQ ID NO: 143027 - DNA, 15 bp, Homo sapiens
tttacttgccagcag

SEQ ID NO: 143028 - DNA, 15 bp, Homo sapiens
ctttacttgccagca

SEQ ID NO: 143029 - DNA, 15 bp, Homo sapiens
gctttacttgccagc

SEQ ID NO: 143030 - DNA, 15 bp, Homo sapiens
tgctttacttgccag

SEQ ID NO: 143031 - DNA, 15 bp, Homo sapiens
ctgctttacttgcca

SEQ ID NO: 143032 - DNA, 15 bp, Homo sapiens
actgctttacttgcc

SEQ ID NO: 143033 - DNA, 15 bp, Homo sapiens
tactgctttacttgc

SEQ ID NO: 143034 - DNA, 15 bp, Homo sapiens
gtactgctttacttg

SEQ ID NO: 143035 - DNA, 15 bp, Homo sapiens
ggtactgctttactt

SEQ ID NO: 143036 - DNA, 15 bp, Homo sapiens
aggtactgctttact

SEQ ID NO: 143037 - DNA, 15 bp, Homo sapiens
caggtactgctttac

SEQ ID NO: 143038 - DNA, 15 bp, Homo sapiens
tcaggtactgcttta

SEQ ID NO: 143039 - DNA, 15 bp, Homo sapiens
ctcaggtactgcttt

SEQ ID NO: 143040 - DNA, 15 bp, Homo sapiens
tctcaggtactgctt

SEQ ID NO: 143041 - DNA, 15 bp, Homo sapiens
ctctcaggtactgct

SEQ ID NO: 143042 - DNA, 15 bp, Homo sapiens
tctctcaggtactgc

SEQ ID NO: 143043 - DNA, 15 bp, Homo sapiens
ctctctcaggtactg

SEQ ID NO: 143044 - DNA, 15 bp, Homo sapiens
cctctctcaggtact

SEQ ID NO: 143045 - DNA, 15 bp, Homo sapiens
ccctctctcaggtac

SEQ ID NO: 143046 - DNA, 15 bp, Homo sapiens
accctctctcaggta

SEQ ID NO: 143047 - DNA, 15 bp, Homo sapiens
aaccctctctcaggt

SEQ ID NO: 143048 - DNA, 15 bp, Homo sapiens
gaaccctctctcagg

SEQ ID NO: 143049 - DNA, 15 bp, Homo sapiens
tgaaccctctctcag

SEQ ID NO: 143050 - DNA, 15 bp, Homo sapiens
gtgaaccctctctca

SEQ ID NO: 143051 - DNA, 15 bp, Homo sapiens
cgtgaaccctctctc

SEQ ID NO: 143052 - DNA, 15 bp, Homo sapiens
gcgtgaaccctctct

SEQ ID NO: 143053 - DNA, 15 bp, Homo sapiens
agcgtgaaccctctc

SEQ ID NO: 143054 - DNA, 15 bp, Homo sapiens
tagcgtgaaccctct

SEQ ID NO: 143055 - DNA, 15 bp, Homo sapiens
ctagcgtgaaccctc

SEQ ID NO: 143056 - DNA, 15 bp, Homo sapiens
actagcgtgaaccct

SEQ ID NO: 143057 - DNA, 15 bp, Homo sapiens
gactagcgtgaaccc

SEQ ID NO: 143058 - DNA, 15 bp, Homo sapiens
ggactagcgtgaacc

SEQ ID NO: 143059 - DNA, 15 bp, Homo sapiens
gggactagcgtgaac

SEQ ID NO: 143060 - DNA, 15 bp, Homo sapiens
agggactagcgtgaa

SEQ ID NO: 143061 - DNA, 15 bp, Homo sapiens
cagggactagcgtga

SEQ ID NO: 143062 - DNA, 15 bp, Homo sapiens
tcagggactagcgtg

SEQ ID NO: 143063 - DNA, 15 bp, Homo sapiens
gtcagggactagcgt

SEQ ID NO: 143064 - DNA, 15 bp, Homo sapiens
tgtcagggactagcg

SEQ ID NO: 143065 - DNA, 15 bp, Homo sapiens
ttgtcagggactagc

SEQ ID NO: 143066 - DNA, 15 bp, Homo sapiens
cttgtcagggactag

SEQ ID NO: 143067 - DNA, 15 bp, Homo sapiens
tcttgtcagggacta

SEQ ID NO: 143068 - DNA, 15 bp, Homo sapiens
gtcttgtcagggact

SEQ ID NO: 143069 - DNA, 15 bp, Homo sapiens
cgtcttgtcagggac

SEQ ID NO: 143070 - DNA, 15 bp, Homo sapiens
gcgtcttgtcaggga

SEQ ID NO: 143071 - DNA, 15 bp, Homo sapiens
agcgtcttgtcaggg

SEQ ID NO: 143072 - DNA, 15 bp, Homo sapiens
cagcgtcttgtcagg

SEQ ID NO: 143073 - DNA, 15 bp, Homo sapiens
tcagcgtcttgtcag

SEQ ID NO: 143074 - DNA, 15 bp, Homo sapiens
ctcagcgtcttgtca

SEQ ID NO: 143075 - DNA, 15 bp, Homo sapiens
gctcagcgtcttgtc

SEQ ID NO: 143076 - DNA, 15 bp, Homo sapiens
tgctcagcgtcttgt

SEQ ID NO: 143077 - DNA, 15 bp, Homo sapiens
atgctcagcgtcttg

SEQ ID NO: 143078 - DNA, 15 bp, Homo sapiens
tatgctcagcgtctt

SEQ ID NO: 143079 - DNA, 15 bp, Homo sapiens
atatgctcagcgtct

SEQ ID NO: 143080 - DNA, 15 bp, Homo sapiens
tatatgctcagcgtc

SEQ ID NO: 143081 - DNA, 15 bp, Homo sapiens
ttatatgctcagcgt

SEQ ID NO: 143082 - DNA, 15 bp, Homo sapiens
tttatatgctcagcg

SEQ ID NO: 143083 - DNA, 15 bp, Homo sapiens
gtttatatgctcagc

SEQ ID NO: 143084 - DNA, 15 bp, Homo sapiens
agtttatatgctcag

SEQ ID NO: 143085 - DNA, 15 bp, Homo sapiens
gagtttatatgctca

SEQ ID NO: 143086 - DNA, 15 bp, Homo sapiens
ggagtttatatgctc

SEQ ID NO: 143087 - DNA, 15 bp, Homo sapiens
gggagtttatatgct

SEQ ID NO: 143088 - DNA, 15 bp, Homo sapiens
agggagtttatatgc

SEQ ID NO: 143089 - DNA, 15 bp, Homo sapiens
aagggagtttatatg

SEQ ID NO: 143090 - DNA, 15 bp, Homo sapiens
aaagggagtttatat

SEQ ID NO: 143091 - DNA, 15 bp, Homo sapiens
taaagggagtttata

SEQ ID NO: 143092 - DNA, 15 bp, Homo sapiens
ctaaagggagtttat

SEQ ID NO: 143093 - DNA, 15 bp, Homo sapiens
tctaaagggagttta

SEQ ID NO: 143094 - DNA, 15 bp, Homo sapiens
gtctaaagggagttt

SEQ ID NO: 143095 - DNA, 15 bp, Homo sapiens
agtctaaagggagtt

SEQ ID NO: 143096 - DNA, 15 bp, Homo sapiens
aagtctaaagggagt

SEQ ID NO: 143097 - DNA, 15 bp, Homo sapiens
caagtctaaagggag

SEQ ID NO: 143098 - DNA, 15 bp, Homo sapiens
ccaagtctaaaggga

SEQ ID NO: 143099 - DNA, 15 bp, Homo sapiens
accaagtctaaaggg

SEQ ID NO: 143100 - DNA, 15 bp, Homo sapiens
gaccaagtctaaagg

SEQ ID NO: 143101 - DNA, 15 bp, Homo sapiens
ggaccaagtctaaag

SEQ ID NO: 143102 - DNA, 15 bp, Homo sapiens
aggaccaagtctaaa

SEQ ID NO: 143103 - DNA, 15 bp, Homo sapiens
taggaccaagtctaa

SEQ ID NO: 143104 - DNA, 15 bp, Homo sapiens
ataggaccaagtcta

SEQ ID NO: 143105 - DNA, 15 bp, Homo sapiens
gataggaccaagtct

SEQ ID NO: 143106 - DNA, 15 bp, Homo sapiens
tgataggaccaagtc

SEQ ID NO: 143107 - DNA, 15 bp, Homo sapiens
gtgataggaccaagt

SEQ ID NO: 143108 - DNA, 15 bp, Homo sapiens
agtgataggaccaag

SEQ ID NO: 143109 - DNA, 15 bp, Homo sapiens
cagtgataggaccaa

SEQ ID NO: 143110 - DNA, 15 bp, Homo sapiens
gcagtgataggacca

SEQ ID NO: 143111 - DNA, 15 bp, Homo sapiens
ggcagtgataggacc

SEQ ID NO: 143112 - DNA, 15 bp, Homo sapiens
tggcagtgataggac

SEQ ID NO: 143113 - DNA, 15 bp, Homo sapiens
gtggcagtgatagga

SEQ ID NO: 143114 - DNA, 15 bp, Homo sapiens
ggtggcagtgatagg

SEQ ID NO: 143115 - DNA, 15 bp, Homo sapiens
gggtggcagtgatag

SEQ ID NO: 143116 - DNA, 15 bp, Homo sapiens
ggggtggcagtgata

SEQ ID NO: 143117 - DNA, 15 bp, Homo sapiens
tggggtggcagtgat

SEQ ID NO: 143118 - DNA, 15 bp, Homo sapiens
ttggggtggcagtga

SEQ ID NO: 143119 - DNA, 15 bp, Homo sapiens
cttggggtggcagtg

SEQ ID NO: 143120 - DNA, 15 bp, Homo sapiens
acttggggtggcagt

SEQ ID NO: 143121 - DNA, 15 bp, Homo sapiens
tacttggggtggcag

SEQ ID NO: 143122 - DNA, 15 bp, Homo sapiens
ctacttggggtggca

SEQ ID NO: 143123 - DNA, 15 bp, Homo sapiens
gctacttggggtggc

SEQ ID NO: 143124 - DNA, 15 bp, Homo sapiens
ggctacttggggtgg

SEQ ID NO: 143125 - DNA, 15 bp, Homo sapiens
tggctacttggggtg

SEQ ID NO: 143126 - DNA, 15 bp, Homo sapiens
atggctacttggggt

SEQ ID NO: 143127 - DNA, 15 bp, Homo sapiens
gatggctacttgggg

SEQ ID NO: 143128 - DNA, 15 bp, Homo sapiens
tgatggctacttggg

SEQ ID NO: 143129 - DNA, 15 bp, Homo sapiens
ctgatggctacttgg

SEQ ID NO: 143130 - DNA, 15 bp, Homo sapiens
actgatggctacttg

SEQ ID NO: 143131 - DNA, 15 bp, Homo sapiens
cactgatggctactt

SEQ ID NO: 143132 - DNA, 15 bp, Homo sapiens
gcactgatggctact

SEQ ID NO: 143133 - DNA, 15 bp, Homo sapiens
tgcactgatggctac

SEQ ID NO: 143134 - DNA, 15 bp, Homo sapiens
atgcactgatggcta

SEQ ID NO: 143135 - DNA, 15 bp, Homo sapiens
aatgcactgatggct

SEQ ID NO: 143136 - DNA, 15 bp, Homo sapiens
gaatgcactgatggc

SEQ ID NO: 143137 - DNA, 15 bp, Homo sapiens
agaatgcactgatgg

SEQ ID NO: 143138 - DNA, 15 bp, Homo sapiens
tagaatgcactgatg

SEQ ID NO: 143139 - DNA, 15 bp, Homo sapiens
ctagaatgcactgat

SEQ ID NO: 143140 - DNA, 15 bp, Homo sapiens
tctagaatgcactga

SEQ ID NO: 143141 - DNA, 15 bp, Homo sapiens
ttctagaatgcactg

SEQ ID NO: 143142 - DNA, 15 bp, Homo sapiens
attctagaatgcact

SEQ ID NO: 143143 - DNA, 15 bp, Homo sapiens
cattctagaatgcac

SEQ ID NO: 143144 - DNA, 15 bp, Homo sapiens
acattctagaatgca

SEQ ID NO: 143145 - DNA, 15 bp, Homo sapiens
tacattctagaatgc

SEQ ID NO: 143146 - DNA, 15 bp, Homo sapiens
atacattctagaatg

SEQ ID NO: 143147 - DNA, 15 bp, Homo sapiens
catacattctagaat

SEQ ID NO: 143148 - DNA, 15 bp, Homo sapiens
acatacattctagaa

SEQ ID NO: 143149 - DNA, 15 bp, Homo sapiens
aacatacattctaga

SEQ ID NO: 143150 - DNA, 15 bp, Homo sapiens
taacatacattctag

SEQ ID NO: 143151 - DNA, 15 bp, Homo sapiens
ctaacatacattcta

SEQ ID NO: 143152 - DNA, 15 bp, Homo sapiens
tctaacatacattct

SEQ ID NO: 143153 - DNA, 15 bp, Homo sapiens
atctaacatacattc

SEQ ID NO: 143154 - DNA, 15 bp, Homo sapiens
catctaacatacatt

SEQ ID NO: 143155 - DNA, 15 bp, Homo sapiens
acatctaacatacat

SEQ ID NO: 143156 - DNA, 15 bp, Homo sapiens
cacatctaacataca

SEQ ID NO: 143157 - DNA, 15 bp, Homo sapiens
acacatctaacatac

SEQ ID NO: 143158 - DNA, 15 bp, Homo sapiens
cacacatctaacata

SEQ ID NO: 143159 - DNA, 15 bp, Homo sapiens
ccacacatctaacat

SEQ ID NO: 143160 - DNA, 15 bp, Homo sapiens
cccacacatctaaca

SEQ ID NO: 143161 - DNA, 15 bp, Homo sapiens
gcccacacatctaac

SEQ ID NO: 143162 - DNA, 15 bp, Homo sapiens
tgcccacacatctaa

SEQ ID NO: 143163 - DNA, 15 bp, Homo sapiens
gtgcccacacatcta

SEQ ID NO: 143164 - DNA, 15 bp, Homo sapiens
ggtgcccacacatct

SEQ ID NO: 143165 - DNA, 15 bp, Homo sapiens
aggtgcccacacatc

SEQ ID NO: 143166 - DNA, 15 bp, Homo sapiens
caggtgcccacacat

SEQ ID NO: 143167 - DNA, 15 bp, Homo sapiens
acaggtgcccacaca

SEQ ID NO: 143168 - DNA, 15 bp, Homo sapiens
tacaggtgcccacac

SEQ ID NO: 143169 - DNA, 15 bp, Homo sapiens
ctacaggtgcccaca

SEQ ID NO: 143170 - DNA, 15 bp, Homo sapiens
tctacaggtgcccac

SEQ ID NO: 143171 - DNA, 15 bp, Homo sapiens
ttctacaggtgccca

SEQ ID NO: 143172 - DNA, 15 bp, Homo sapiens
tttctacaggtgccc

SEQ ID NO: 143173 - DNA, 15 bp, Homo sapiens
atttctacaggtgcc

SEQ ID NO: 143174 - DNA, 15 bp, Homo sapiens
gatttctacaggtgc

SEQ ID NO: 143175 - DNA, 15 bp, Homo sapiens
tgatttctacaggtg

SEQ ID NO: 143176 - DNA, 15 bp, Homo sapiens
ctgatttctacaggt

SEQ ID NO: 143177 - DNA, 15 bp, Homo sapiens
gctgatttctacagg

SEQ ID NO: 143178 - DNA, 15 bp, Homo sapiens
tgctgatttctacag

SEQ ID NO: 143179 - DNA, 15 bp, Homo sapiens
gtgctgatttctaca

SEQ ID NO: 143180 - DNA, 15 bp, Homo sapiens
agtgctgatttctac

SEQ ID NO: 143181 - DNA, 15 bp, Homo sapiens
cagtgctgatttcta

SEQ ID NO: 143182 - DNA, 15 bp, Homo sapiens
acagtgctgatttct

SEQ ID NO: 143183 - DNA, 15 bp, Homo sapiens
aacagtgctgatttc

SEQ ID NO: 143184 - DNA, 15 bp, Homo sapiens
caacagtgctgattt

SEQ ID NO: 143185 - DNA, 15 bp, Homo sapiens
acaacagtgctgatt

SEQ ID NO: 143186 - DNA, 15 bp, Homo sapiens
gacaacagtgctgat

SEQ ID NO: 143187 - DNA, 15 bp, Homo sapiens
agacaacagtgctga

SEQ ID NO: 143188 - DNA, 15 bp, Homo sapiens
aagacaacagtgctg

SEQ ID NO: 143189 - DNA, 15 bp, Homo sapiens
caagacaacagtgct

SEQ ID NO: 143190 - DNA, 15 bp, Homo sapiens
ccaagacaacagtgc

SEQ ID NO: 143191 - DNA, 15 bp, Homo sapiens
cccaagacaacagtg

SEQ ID NO: 143192 - DNA, 15 bp, Homo sapiens
gcccaagacaacagt

SEQ ID NO: 143193 - DNA, 15 bp, Homo sapiens
agcccaagacaacag

SEQ ID NO: 143194 - DNA, 15 bp, Homo sapiens
aagcccaagacaaca

SEQ ID NO: 143195 - DNA, 15 bp, Homo sapiens
caagcccaagacaac

SEQ ID NO: 143196 - DNA, 15 bp, Homo sapiens
ccaagcccaagacaa

SEQ ID NO: 143197 - DNA, 15 bp, Homo sapiens
gccaagcccaagaca

SEQ ID NO: 143198 - DNA, 15 bp, Homo sapiens
ggccaagcccaagac

SEQ ID NO: 143199 - DNA, 15 bp, Homo sapiens
gggccaagcccaaga

SEQ ID NO: 143200 - DNA, 15 bp, Homo sapiens
agggccaagcccaag

SEQ ID NO: 143201 - DNA, 15 bp, Homo sapiens
tagggccaagcccaa

SEQ ID NO: 143202 - DNA, 15 bp, Homo sapiens
ctagggccaagccca

SEQ ID NO: 143203 - DNA, 15 bp, Homo sapiens
tctagggccaagccc

SEQ ID NO: 143204 - DNA, 15 bp, Homo sapiens
ctctagggccaagcc

SEQ ID NO: 143205 - DNA, 15 bp, Homo sapiens
cctctagggccaagc

SEQ ID NO: 143206 - DNA, 15 bp, Homo sapiens
tcctctagggccaag

SEQ ID NO: 143207 - DNA, 15 bp, Homo sapiens
ctcctctagggccaa

SEQ ID NO: 143208 - DNA, 15 bp, Homo sapiens
actcctctagggcca

SEQ ID NO: 143209 - DNA, 15 bp, Homo sapiens
cactcctctagggcc

SEQ ID NO: 143210 - DNA, 15 bp, Homo sapiens
ccactcctctagggc

SEQ ID NO: 143211 - DNA, 15 bp, Homo sapiens
gccactcctctaggg

SEQ ID NO: 143212 - DNA, 15 bp, Homo sapiens
agccactcctctagg

SEQ ID NO: 143213 - DNA, 15 bp, Homo sapiens
cagccactcctctag

SEQ ID NO: 143214 - DNA, 15 bp, Homo sapiens
tcagccactcctcta

SEQ ID NO: 143215 - DNA, 15 bp, Homo sapiens
ctcagccactcctct

SEQ ID NO: 143216 - DNA, 15 bp, Homo sapiens
cctcagccactcctc

SEQ ID NO: 143217 - DNA, 15 bp, Homo sapiens
ccctcagccactcct

SEQ ID NO: 143218 - DNA, 15 bp, Homo sapiens
tccctcagccactcc

SEQ ID NO: 143219 - DNA, 15 bp, Homo sapiens
ctccctcagccactc

SEQ ID NO: 143220 - DNA, 15 bp, Homo sapiens
cctccctcagccact

SEQ ID NO: 143221 - DNA, 15 bp, Homo sapiens
tcctccctcagccac

SEQ ID NO: 143222 - DNA, 15 bp, Homo sapiens
ttcctccctcagcca

SEQ ID NO: 143223 - DNA, 15 bp, Homo sapiens
tttcctccctcagcc

SEQ ID NO: 143224 - DNA, 15 bp, Homo sapiens
ctttcctccctcagc

SEQ ID NO: 143225 - DNA, 15 bp, Homo sapiens
cctttcctccctcag

SEQ ID NO: 143226 - DNA, 15 bp, Homo sapiens
tcctttcctccctca

SEQ ID NO: 143227 - DNA, 15 bp, Homo sapiens
ctcctttcctccctc

SEQ ID NO: 143228 - DNA, 15 bp, Homo sapiens
actcctttcctccct

SEQ ID NO: 143229 - DNA, 15 bp, Homo sapiens
cactcctttcctccc

SEQ ID NO: 143230 - DNA, 15 bp, Homo sapiens
gcactcctttcctcc

SEQ ID NO: 143231 - DNA, 15 bp, Homo sapiens
agcactcctttcctc

SEQ ID NO: 143232 - DNA, 15 bp, Homo sapiens
cagcactcctttcct

SEQ ID NO: 143233 - DNA, 15 bp, Homo sapiens
ccagcactcctttcc

SEQ ID NO: 143234 - DNA, 15 bp, Homo sapiens
tccagcactcctttc

SEQ ID NO: 143235 - DNA, 15 bp, Homo sapiens
atccagcactccttt

SEQ ID NO: 143236 - DNA, 15 bp, Homo sapiens
gatccagcactcctt

SEQ ID NO: 143237 - DNA, 15 bp, Homo sapiens
agatccagcactcct

SEQ ID NO: 143238 - DNA, 15 bp, Homo sapiens
tagatccagcactcc

SEQ ID NO: 143239 - DNA, 15 bp, Homo sapiens
ctagatccagcactc

SEQ ID NO: 143240 - DNA, 15 bp, Homo sapiens
actagatccagcact

SEQ ID NO: 143241 - DNA, 15 bp, Homo sapiens
cactagatccagcac

SEQ ID NO: 143242 - DNA, 15 bp, Homo sapiens
acactagatccagca

SEQ ID NO: 143243 - DNA, 15 bp, Homo sapiens
gacactagatccagc

SEQ ID NO: 143244 - DNA, 15 bp, Homo sapiens
agacactagatccag

SEQ ID NO: 143245 - DNA, 15 bp, Homo sapiens
gagacactagatcca

SEQ ID NO: 143246 - DNA, 15 bp, Homo sapiens
agagacactagatcc

SEQ ID NO: 143247 - DNA, 15 bp, Homo sapiens
gagagacactagatc

SEQ ID NO: 143248 - DNA, 15 bp, Homo sapiens
agagagacactagat

SEQ ID NO: 143249 - DNA, 15 bp, Homo sapiens
gagagagacactaga

SEQ ID NO: 143250 - DNA, 15 bp, Homo sapiens
ggagagagacactag

SEQ ID NO: 143251 - DNA, 15 bp, Homo sapiens
gggagagagacacta

SEQ ID NO: 143252 - DNA, 15 bp, Homo sapiens
agggagagagacact

SEQ ID NO: 143253 - DNA, 15 bp, Homo sapiens
cagggagagagacac

SEQ ID NO: 143254 - DNA, 15 bp, Homo sapiens
gcagggagagagaca

SEQ ID NO: 143255 - DNA, 15 bp, Homo sapiens
tgcagggagagagac

SEQ ID NO: 143256 - DNA, 15 bp, Homo sapiens
ctgcagggagagaga

SEQ ID NO: 143257 - DNA, 15 bp, Homo sapiens
tctgcagggagagag

SEQ ID NO: 143258 - DNA, 15 bp, Homo sapiens
atctgcagggagaga

SEQ ID NO: 143259 - DNA, 15 bp, Homo sapiens
catctgcagggagag

SEQ ID NO: 143260 - DNA, 15 bp, Homo sapiens
tcatctgcagggaga

SEQ ID NO: 143261 - DNA, 15 bp, Homo sapiens
ctcatctgcagggag

SEQ ID NO: 143262 - DNA, 15 bp, Homo sapiens
cctcatctgcaggga

SEQ ID NO: 143263 - DNA, 15 bp, Homo sapiens
acctcatctgcaggg

SEQ ID NO: 143264 - DNA, 15 bp, Homo sapiens
tacctcatctgcagg

SEQ ID NO: 143265 - DNA, 15 bp, Homo sapiens
ttacctcatctgcag

SEQ ID NO: 143266 - DNA, 15 bp, Homo sapiens
gttacctcatctgca

SEQ ID NO: 143267 - DNA, 15 bp, Homo sapiens
ggttacctcatctgc

SEQ ID NO: 143268 - DNA, 15 bp, Homo sapiens
tggttacctcatctg

SEQ ID NO: 143269 - DNA, 15 bp, Homo sapiens
atggttacctcatct

SEQ ID NO: 143270 - DNA, 15 bp, Homo sapiens
catggttacctcatc

SEQ ID NO: 143271 - DNA, 15 bp, Homo sapiens
tcatggttacctcat

SEQ ID NO: 143272 - DNA, 15 bp, Homo sapiens
ttcatggttacctca

SEQ ID NO: 143273 - DNA, 15 bp, Homo sapiens
tttcatggttacctc

SEQ ID NO: 143274 - DNA, 15 bp, Homo sapiens
ctttcatggttacct

SEQ ID NO: 143275 - DNA, 15 bp, Homo sapiens
tctttcatggttacc

SEQ ID NO: 143276 - DNA, 15 bp, Homo sapiens
ctctttcatggttac

SEQ ID NO: 143277 - DNA, 15 bp, Homo sapiens
tctctttcatggtta

SEQ ID NO: 143278 - DNA, 15 bp, Homo sapiens
atctctttcatggtt

SEQ ID NO: 143279 - DNA, 15 bp, Homo sapiens
catctctttcatggt

SEQ ID NO: 143280 - DNA, 15 bp, Homo sapiens
ccatctctttcatgg

SEQ ID NO: 143281 - DNA, 15 bp, Homo sapiens
cccatctctttcatg

SEQ ID NO: 143282 - DNA, 15 bp, Homo sapiens
ccccatctctttcat

SEQ ID NO: 143283 - DNA, 15 bp, Homo sapiens
tccccatctctttca

SEQ ID NO: 143284 - DNA, 15 bp, Homo sapiens
ctccccatctctttc

SEQ ID NO: 143285 - DNA, 15 bp, Homo sapiens
cctccccatctcttt

SEQ ID NO: 143286 - DNA, 15 bp, Homo sapiens
tcctccccatctctt

SEQ ID NO: 143287 - DNA, 15 bp, Homo sapiens
ttcctccccatctct

SEQ ID NO: 143288 - DNA, 15 bp, Homo sapiens
gttcctccccatctc

SEQ ID NO: 143289 - DNA, 15 bp, Homo sapiens
ggttcctccccatct

SEQ ID NO: 143290 - DNA, 15 bp, Homo sapiens
tggttcctccccatc

SEQ ID NO: 143291 - DNA, 15 bp, Homo sapiens
ttggttcctccccat

SEQ ID NO: 143292 - DNA, 15 bp, Homo sapiens
gttggttcctcccca

SEQ ID NO: 143293 - DNA, 15 bp, Homo sapiens
tgttggttcctcccc

SEQ ID NO: 143294 - DNA, 15 bp, Homo sapiens
ctgttggttcctccc

SEQ ID NO: 143295 - DNA, 15 bp, Homo sapiens
gctgttggttcctcc

SEQ ID NO: 143296 - DNA, 15 bp, Homo sapiens
agctgttggttcctc

SEQ ID NO: 143297 - DNA, 15 bp, Homo sapiens
cagctgttggttcct

SEQ ID NO: 143298 - DNA, 15 bp, Homo sapiens
gcagctgttggttcc

SEQ ID NO: 143299 - DNA, 15 bp, Homo sapiens
cgcagctgttggttc

SEQ ID NO: 143300 - DNA, 15 bp, Homo sapiens
ccgcagctgttggtt

SEQ ID NO: 143301 - DNA, 15 bp, Homo sapiens
tccgcagctgttggt

SEQ ID NO: 143302 - DNA, 15 bp, Homo sapiens
gtccgcagctgttgg

SEQ ID NO: 143303 - DNA, 15 bp, Homo sapiens
tgtccgcagctgttg

SEQ ID NO: 143304 - DNA, 15 bp, Homo sapiens
ctgtccgcagctgtt

SEQ ID NO: 143305 - DNA, 15 bp, Homo sapiens
cctgtccgcagctgt

SEQ ID NO: 143306 - DNA, 15 bp, Homo sapiens
gcctgtccgcagctg

SEQ ID NO: 143307 - DNA, 15 bp, Homo sapiens
cgcctgtccgcagct

SEQ ID NO: 143308 - DNA, 15 bp, Homo sapiens
tcgcctgtccgcagc

SEQ ID NO: 143309 - DNA, 15 bp, Homo sapiens
ctcgcctgtccgcag

SEQ ID NO: 143310 - DNA, 15 bp, Homo sapiens
cctcgcctgtccgca

SEQ ID NO: 143311 - DNA, 15 bp, Homo sapiens
acctcgcctgtccgc

SEQ ID NO: 143312 - DNA, 15 bp, Homo sapiens
cacctcgcctgtccg

SEQ ID NO: 143313 - DNA, 15 bp, Homo sapiens
gcacctcgcctgtcc

SEQ ID NO: 143314 - DNA, 15 bp, Homo sapiens
agcacctcgcctgtc

SEQ ID NO: 143315 - DNA, 15 bp, Homo sapiens
cagcacctcgcctgt

SEQ ID NO: 143316 - DNA, 15 bp, Homo sapiens
tcagcacctcgcctg

SEQ ID NO: 143317 - DNA, 15 bp, Homo sapiens
atcagcacctcgcct

SEQ ID NO: 143318 - DNA, 15 bp, Homo sapiens
gatcagcacctcgcc

SEQ ID NO: 143319 - DNA, 15 bp, Homo sapiens
tgatcagcacctcgc

SEQ ID NO: 143320 - DNA, 15 bp, Homo sapiens
atgatcagcacctcg

SEQ ID NO: 143321 - DNA, 15 bp, Homo sapiens
gatgatcagcacctc

SEQ ID NO: 143322 - DNA, 15 bp, Homo sapiens
cgatgatcagcacct

SEQ ID NO: 143323 - DNA, 15 bp, Homo sapiens
acgatgatcagcacc

SEQ ID NO: 143324 - DNA, 15 bp, Homo sapiens
gacgatgatcagcac

SEQ ID NO: 143325 - DNA, 15 bp, Homo sapiens
cgacgatgatcagca

SEQ ID NO: 143326 - DNA, 15 bp, Homo sapiens
acgacgatgatcagc

SEQ ID NO: 143327 - DNA, 15 bp, Homo sapiens
cacgacgatgatcag

SEQ ID NO: 143328 - DNA, 15 bp, Homo sapiens
ccacgacgatgatca

SEQ ID NO: 143329 - DNA, 15 bp, Homo sapiens
accacgacgatgatc

SEQ ID NO: 143330 - DNA, 15 bp, Homo sapiens
gaccacgacgatgat

SEQ ID NO: 143331 - DNA, 15 bp, Homo sapiens
ggaccacgacgatga

SEQ ID NO: 143332 - DNA, 15 bp, Homo sapiens
aggaccacgacgatg

SEQ ID NO: 143333 - DNA, 15 bp, Homo sapiens
caggaccacgacgat

SEQ ID NO: 143334 - DNA, 15 bp, Homo sapiens
acaggaccacgacga

SEQ ID NO: 143335 - DNA, 15 bp, Homo sapiens
aacaggaccacgacg

SEQ ID NO: 143336 - DNA, 15 bp, Homo sapiens
gaacaggaccacgac

SEQ ID NO: 143337 - DNA, 15 bp, Homo sapiens
tgaacaggaccacga

SEQ ID NO: 143338 - DNA, 15 bp, Homo sapiens
atgaacaggaccacg

SEQ ID NO: 143339 - DNA, 15 bp, Homo sapiens
catgaacaggaccac

SEQ ID NO: 143340 - DNA, 15 bp, Homo sapiens
acatgaacaggacca

SEQ ID NO: 143341 - DNA, 15 bp, Homo sapiens
cacatgaacaggacc

SEQ ID NO: 143342 - DNA, 15 bp, Homo sapiens
ccacatgaacaggac

SEQ ID NO: 143343 - DNA, 15 bp, Homo sapiens
cccacatgaacagga

SEQ ID NO: 143344 - DNA, 15 bp, Homo sapiens
gcccacatgaacagg

SEQ ID NO: 143345 - DNA, 15 bp, Homo sapiens
tgcccacatgaacag

SEQ ID NO: 143346 - DNA, 15 bp, Homo sapiens
ctgcccacatgaaca

SEQ ID NO: 143347 - DNA, 15 bp, Homo sapiens
cctgcccacatgaac

SEQ ID NO: 143348 - DNA, 15 bp, Homo sapiens
acctgcccacatgaa

SEQ ID NO: 143349 - DNA, 15 bp, Homo sapiens
cacctgcccacatga

SEQ ID NO: 143350 - DNA, 15 bp, Homo sapiens
tcacctgcccacatg

SEQ ID NO: 143351 - DNA, 15 bp, Homo sapiens
ctcacctgcccacat

SEQ ID NO: 143352 - DNA, 15 bp, Homo sapiens
actcacctgcccaca

SEQ ID NO: 143353 - DNA, 15 bp, Homo sapiens
gactcacctgcccac

SEQ ID NO: 143354 - DNA, 15 bp, Homo sapiens
agactcacctgccca

SEQ ID NO: 143355 - DNA, 15 bp, Homo sapiens
cagactcacctgccc

SEQ ID NO: 143356 - DNA, 15 bp, Homo sapiens
ccagactcacctgcc

SEQ ID NO: 143357 - DNA, 15 bp, Homo sapiens
gccagactcacctgc

SEQ ID NO: 143358 - DNA, 15 bp, Homo sapiens
ggccagactcacctg

SEQ ID NO: 143359 - DNA, 15 bp, Homo sapiens
aggccagactcacct

SEQ ID NO: 143360 - DNA, 15 bp, Homo sapiens
gaggccagactcacc

SEQ ID NO: 143361 - DNA, 15 bp, Homo sapiens
ggaggccagactcac

SEQ ID NO: 143362 - DNA, 15 bp, Homo sapiens
cggaggccagactca

SEQ ID NO: 143363 - DNA, 15 bp, Homo sapiens
tcggaggccagactc

SEQ ID NO: 143364 - DNA, 15 bp, Homo sapiens
ctcggaggccagact

SEQ ID NO: 143365 - DNA, 15 bp, Homo sapiens
tctcggaggccagac

SEQ ID NO: 143366 - DNA, 15 bp, Homo sapiens
gtctcggaggccaga

SEQ ID NO: 143367 - DNA, 15 bp, Homo sapiens
ggtctcggaggccag

SEQ ID NO: 143368 - DNA, 15 bp, Homo sapiens
aggtctcggaggcca

SEQ ID NO: 143369 - DNA, 15 bp, Homo sapiens
aaggtctcggaggcc

SEQ ID NO: 143370 - DNA, 15 bp, Homo sapiens
gaaggtctcggaggc

SEQ ID NO: 143371 - DNA, 15 bp, Homo sapiens
agaaggtctcggagg

SEQ ID NO: 143372 - DNA, 15 bp, Homo sapiens
aagaaggtctcggag

SEQ ID NO: 143373 - DNA, 15 bp, Homo sapiens
gaagaaggtctcgga

SEQ ID NO: 143374 - DNA, 15 bp, Homo sapiens
gtcccgcgccaacca

SEQ ID NO: 143375 - DNA, 15 bp, Homo sapiens
tgtcccgcgccaacc

SEQ ID NO: 143376 - DNA, 15 bp, Homo sapiens
ttgtcccgcgccaac

SEQ ID NO: 143377 - DNA, 15 bp, Homo sapiens
attgtcccgcgccaa

SEQ ID NO: 143378 - DNA, 15 bp, Homo sapiens
tattgtcccgcgcca

SEQ ID NO: 143379 - DNA, 15 bp, Homo sapiens
ctattgtcccgcgcc

SEQ ID NO: 143380 - DNA, 15 bp, Homo sapiens
cctattgtcccgcgc

SEQ ID NO: 143381 - DNA, 15 bp, Homo sapiens
tcctattgtcccgcg

SEQ ID NO: 143382 - DNA, 15 bp, Homo sapiens
ctcctattgtcccgc

SEQ ID NO: 143383 - DNA, 15 bp, Homo sapiens
actcctattgtcccg

SEQ ID NO: 143384 - DNA, 15 bp, Homo sapiens
cactcctattgtccc

SEQ ID NO: 143385 - DNA, 15 bp, Homo sapiens
ccactcctattgtcc

SEQ ID NO: 143386 - DNA, 15 bp, Homo sapiens
cccactcctattgtc

SEQ ID NO: 143387 - DNA, 15 bp, Homo sapiens
ccccactcctattgt

SEQ ID NO: 143388 - DNA, 15 bp, Homo sapiens
accccactcctattg

SEQ ID NO: 143389 - DNA, 15 bp, Homo sapiens
caccccactcctatt

SEQ ID NO: 143390 - DNA, 15 bp, Homo sapiens
acaccccactcctat

SEQ ID NO: 143391 - DNA, 15 bp, Homo sapiens
gacaccccactccta

SEQ ID NO: 143392 - DNA, 15 bp, Homo sapiens
agacaccccactcct

SEQ ID NO: 143393 - DNA, 15 bp, Homo sapiens
cagacaccccactcc

SEQ ID NO: 143394 - DNA, 15 bp, Homo sapiens
ccagacaccccactc

SEQ ID NO: 143395 - DNA, 15 bp, Homo sapiens
gccagacaccccact

SEQ ID NO: 143396 - DNA, 15 bp, Homo sapiens
ggccagacaccccac

SEQ ID NO: 143397 - DNA, 15 bp, Homo sapiens
gggccagacacccca

SEQ ID NO: 143398 - DNA, 15 bp, Homo sapiens
tgggccagacacccc

SEQ ID NO: 143399 - DNA, 15 bp, Homo sapiens
atgggccagacaccc

SEQ ID NO: 143400 - DNA, 15 bp, Homo sapiens
aatgggccagacacc

SEQ ID NO: 143401 - DNA, 15 bp, Homo sapiens
gaatgggccagacac

SEQ ID NO: 143402 - DNA, 15 bp, Homo sapiens
ggaatgggccagaca

SEQ ID NO: 143403 - DNA, 15 bp, Homo sapiens
aggaatgggccagac

SEQ ID NO: 143404 - DNA, 15 bp, Homo sapiens
caggaatgggccaga

SEQ ID NO: 143405 - DNA, 15 bp, Homo sapiens
gcaggaatgggccag

SEQ ID NO: 143406 - DNA, 15 bp, Homo sapiens
agcaggaatgggcca

SEQ ID NO: 143407 - DNA, 15 bp, Homo sapiens
gagcaggaatgggcc

SEQ ID NO: 143408 - DNA, 15 bp, Homo sapiens
ggagcaggaatgggc

SEQ ID NO: 143409 - DNA, 15 bp, Homo sapiens
aggagcaggaatggg

SEQ ID NO: 143410 - DNA, 15 bp, Homo sapiens
caggagcaggaatgg

SEQ ID NO: 143411 - DNA, 15 bp, Homo sapiens
gcaggagcaggaatg

SEQ ID NO: 143412 - DNA, 15 bp, Homo sapiens
agcaggagcaggaat

SEQ ID NO: 143413 - DNA, 15 bp, Homo sapiens
cagcaggagcaggaa

SEQ ID NO: 143414 - DNA, 15 bp, Homo sapiens
acagcaggagcagga

SEQ ID NO: 143415 - DNA, 15 bp, Homo sapiens
cacagcaggagcagg

SEQ ID NO: 143416 - DNA, 15 bp, Homo sapiens
gcacagcaggagcag

SEQ ID NO: 143417 - DNA, 15 bp, Homo sapiens
ggcacagcaggagca

SEQ ID NO: 143418 - DNA, 15 bp, Homo sapiens
aggcacagcaggagc

SEQ ID NO: 143419 - DNA, 15 bp, Homo sapiens
aaggcacagcaggag

SEQ ID NO: 143420 - DNA, 15 bp, Homo sapiens
caaggcacagcagga

SEQ ID NO: 143421 - DNA, 15 bp, Homo sapiens
acaaggcacagcagg

SEQ ID NO: 143422 - DNA, 15 bp, Homo sapiens
cacaaggcacagcag

SEQ ID NO: 143423 - DNA, 15 bp, Homo sapiens
tcacaaggcacagca

SEQ ID NO: 143424 - DNA, 15 bp, Homo sapiens
gtcacaaggcacagc

SEQ ID NO: 143425 - DNA, 15 bp, Homo sapiens
ggtcacaaggcacag

SEQ ID NO: 143426 - DNA, 15 bp, Homo sapiens
aggtcacaaggcaca

SEQ ID NO: 143427 - DNA, 15 bp, Homo sapiens
aaggtcacaaggcac

SEQ ID NO: 143428 - DNA, 15 bp, Homo sapiens
caaggtcacaaggca

SEQ ID NO: 143429 - DNA, 15 bp, Homo sapiens
ccaaggtcacaaggc

SEQ ID NO: 143430 - DNA, 15 bp, Homo sapiens
cccaaggtcacaagg

SEQ ID NO: 143431 - DNA, 15 bp, Homo sapiens
gcccaaggtcacaag

SEQ ID NO: 143432 - DNA, 15 bp, Homo sapiens
tgcccaaggtcacaa

SEQ ID NO: 143433 - DNA, 15 bp, Homo sapiens
ctgcccaaggtcaca

SEQ ID NO: 143434 - DNA, 15 bp, Homo sapiens
cctgcccaaggtcac

SEQ ID NO: 143435 - DNA, 15 bp, Homo sapiens
acctgcccaaggtca

SEQ ID NO: 143436 - DNA, 15 bp, Homo sapiens
cacctgcccaaggtc

SEQ ID NO: 143437 - DNA, 15 bp, Homo sapiens
gcacctgcccaaggt

SEQ ID NO: 143438 - DNA, 15 bp, Homo sapiens
agcacctgcccaagg

SEQ ID NO: 143439 - DNA, 15 bp, Homo sapiens
aagcacctgcccaag

SEQ ID NO: 143440 - DNA, 15 bp, Homo sapiens
aaagcacctgcccaa

SEQ ID NO: 143441 - DNA, 15 bp, Homo sapiens
taaagcacctgccca

SEQ ID NO: 143442 - DNA, 15 bp, Homo sapiens
gtaaagcacctgccc

SEQ ID NO: 143443 - DNA, 15 bp, Homo sapiens
ggtaaagcacctgcc

SEQ ID NO: 143444 - DNA, 15 bp, Homo sapiens
cggtaaagcacctgc

SEQ ID NO: 143445 - DNA, 15 bp, Homo sapiens
gcggtaaagcacctg

SEQ ID NO: 143446 - DNA, 15 bp, Homo sapiens
agcggtaaagcacct

SEQ ID NO: 143447 - DNA, 15 bp, Homo sapiens
cagcggtaaagcacc

SEQ ID NO: 143448 - DNA, 15 bp, Homo sapiens
acagcggtaaagcac

SEQ ID NO: 143449 - DNA, 15 bp, Homo sapiens
tacagcggtaaagca

SEQ ID NO: 143450 - DNA, 15 bp, Homo sapiens
gtacagcggtaaagc

SEQ ID NO: 143451 - DNA, 15 bp, Homo sapiens
ggtacagcggtaaag

SEQ ID NO: 143452 - DNA, 15 bp, Homo sapiens
aggtacagcggtaaa

SEQ ID NO: 143453 - DNA, 15 bp, Homo sapiens
aaggtacagcggtaa

SEQ ID NO: 143454 - DNA, 15 bp, Homo sapiens
gaaggtacagcggta

SEQ ID NO: 143455 - DNA, 15 bp, Homo sapiens
tgaaggtacagcggt

SEQ ID NO: 143456 - DNA, 15 bp, Homo sapiens
atgaaggtacagcgg

SEQ ID NO: 143457 - DNA, 15 bp, Homo sapiens
aatgaaggtacagcg

SEQ ID NO: 143458 - DNA, 15 bp, Homo sapiens
aaatgaaggtacagc

SEQ ID NO: 143459 - DNA, 15 bp, Homo sapiens
gaaatgaaggtacag

SEQ ID NO: 143460 - DNA, 15 bp, Homo sapiens
ggaaatgaaggtaca

SEQ ID NO: 143461 - DNA, 15 bp, Homo sapiens
aggaaatgaaggtac

SEQ ID NO: 143462 - DNA, 15 bp, Homo sapiens
gaggaaatgaaggta

SEQ ID NO: 143463 - DNA, 15 bp, Homo sapiens
agaggaaatgaaggt

SEQ ID NO: 143464 - DNA, 15 bp, Homo sapiens
aagaggaaatgaagg

SEQ ID NO: 143465 - DNA, 15 bp, Homo sapiens
gaagaggaaatgaag

SEQ ID NO: 143466 - DNA, 15 bp, Homo sapiens
agaagaggaaatgaa

SEQ ID NO: 143467 - DNA, 15 bp, Homo sapiens
cagaagaggaaatga

SEQ ID NO: 143468 - DNA, 15 bp, Homo sapiens
acagaagaggaaatg

SEQ ID NO: 143469 - DNA, 15 bp, Homo sapiens
tacagaagaggaaat

SEQ ID NO: 143470 - DNA, 15 bp, Homo sapiens
ttacagaagaggaaa

SEQ ID NO: 143471 - DNA, 15 bp, Homo sapiens
tttacagaagaggaa

SEQ ID NO: 143472 - DNA, 15 bp, Homo sapiens
ttttacagaagagga

SEQ ID NO: 143473 - DNA, 15 bp, Homo sapiens
gttttacagaagagg

SEQ ID NO: 143474 - DNA, 15 bp, Homo sapiens
tgttttacagaagag

SEQ ID NO: 143475 - DNA, 15 bp, Homo sapiens
ctgttttacagaaga

SEQ ID NO: 143476 - DNA, 15 bp, Homo sapiens
tctgttttacagaag

SEQ ID NO: 143477 - DNA, 15 bp, Homo sapiens
atctgttttacagaa

SEQ ID NO: 143478 - DNA, 15 bp, Homo sapiens
tatctgttttacaga

SEQ ID NO: 143479 - DNA, 15 bp, Homo sapiens
atatctgttttacag

SEQ ID NO: 143480 - DNA, 15 bp, Homo sapiens
catatctgttttaca

SEQ ID NO: 143481 - DNA, 15 bp, Homo sapiens
tcatatctgttttac

SEQ ID NO: 143482 - DNA, 15 bp, Homo sapiens
ttcatatctgtttta

SEQ ID NO: 143483 - DNA, 15 bp, Homo sapiens
tttcatatctgtttt

SEQ ID NO: 143484 - DNA, 15 bp, Homo sapiens
ttttcatatctgttt

SEQ ID NO: 143485 - DNA, 15 bp, Homo sapiens
gttttcatatctgtt

SEQ ID NO: 143486 - DNA, 15 bp, Homo sapiens
ggttttcatatctgt

SEQ ID NO: 143487 - DNA, 15 bp, Homo sapiens
aggttttcatatctg

SEQ ID NO: 143488 - DNA, 15 bp, Homo sapiens
aaggttttcatatct

SEQ ID NO: 143489 - DNA, 15 bp, Homo sapiens
aaaggttttcatatc

SEQ ID NO: 143490 - DNA, 15 bp, Homo sapiens
aaaaggttttcatat

SEQ ID NO: 143491 - DNA, 15 bp, Homo sapiens
gaaaaggttttcata

SEQ ID NO: 143492 - DNA, 15 bp, Homo sapiens
tgaaaaggttttcat

SEQ ID NO: 143493 - DNA, 15 bp, Homo sapiens
ctgaaaaggttttca

SEQ ID NO: 143494 - DNA, 15 bp, Homo sapiens
actgaaaaggttttc

SEQ ID NO: 143495 - DNA, 15 bp, Homo sapiens
cactgaaaaggtttt

SEQ ID NO: 143496 - DNA, 15 bp, Homo sapiens
gcactgaaaaggttt

SEQ ID NO: 143497 - DNA, 15 bp, Homo sapiens
agcactgaaaaggtt

SEQ ID NO: 143498 - DNA, 15 bp, Homo sapiens
aagcactgaaaaggt

SEQ ID NO: 143499 - DNA, 15 bp, Homo sapiens
caagcactgaaaagg

SEQ ID NO: 143500 - DNA, 15 bp, Homo sapiens
gcaagcactgaaaag

SEQ ID NO: 143501 - DNA, 15 bp, Homo sapiens
ggcaagcactgaaaa

SEQ ID NO: 143502 - DNA, 15 bp, Homo sapiens
gggcaagcactgaaa

SEQ ID NO: 143503 - DNA, 15 bp, Homo sapiens
agggcaagcactgaa

SEQ ID NO: 143504 - DNA, 15 bp, Homo sapiens
gagggcaagcactga

SEQ ID NO: 143505 - DNA, 15 bp, Homo sapiens
tgagggcaagcactg

SEQ ID NO: 143506 - DNA, 15 bp, Homo sapiens
ctgagggcaagcact

SEQ ID NO: 143507 - DNA, 15 bp, Homo sapiens
gctgagggcaagcac

SEQ ID NO: 143508 - DNA, 15 bp, Homo sapiens
tgctgagggcaagca

SEQ ID NO: 143509 - DNA, 15 bp, Homo sapiens
ctgctgagggcaagc

SEQ ID NO: 143510 - DNA, 15 bp, Homo sapiens
gctgctgagggcaag

SEQ ID NO: 143511 - DNA, 15 bp, Homo sapiens
agctgctgagggcaa

SEQ ID NO: 143512 - DNA, 15 bp, Homo sapiens
tagctgctgagggca

SEQ ID NO: 143513 - DNA, 15 bp, Homo sapiens
ttagctgctgagggc

SEQ ID NO: 143514 - DNA, 15 bp, Homo sapiens
cttagctgctgaggg

SEQ ID NO: 143515 - DNA, 15 bp, Homo sapiens
tcttagctgctgagg

SEQ ID NO: 143516 - DNA, 15 bp, Homo sapiens
ttcttagctgctgag

SEQ ID NO: 143517 - DNA, 15 bp, Homo sapiens
cttcttagctgctga

SEQ ID NO: 143518 - DNA, 15 bp, Homo sapiens
tcttcttagctgctg

SEQ ID NO: 143519 - DNA, 15 bp, Homo sapiens
gtcttcttagctgct

SEQ ID NO: 143520 - DNA, 15 bp, Homo sapiens
tgtcttcttagctgc

SEQ ID NO: 143521 - DNA, 15 bp, Homo sapiens
ctgtcttcttagctg

SEQ ID NO: 143522 - DNA, 15 bp, Homo sapiens
tctgtcttcttagct

SEQ ID NO: 143523 - DNA, 15 bp, Homo sapiens
gtctgtcttcttagc

SEQ ID NO: 143524 - DNA, 15 bp, Homo sapiens
tgtctgtcttcttag

SEQ ID NO: 143525 - DNA, 15 bp, Homo sapiens
ctgtctgtcttctta

SEQ ID NO: 143526 - DNA, 15 bp, Homo sapiens
actgtctgtcttctt

SEQ ID NO: 143527 - DNA, 15 bp, Homo sapiens
tactgtctgtcttct

SEQ ID NO: 143528 - DNA, 15 bp, Homo sapiens
ctactgtctgtcttc

SEQ ID NO: 143529 - DNA, 15 bp, Homo sapiens
tctactgtctgtctt

SEQ ID NO: 143530 - DNA, 15 bp, Homo sapiens
ctctactgtctgtct

SEQ ID NO: 143531 - DNA, 15 bp, Homo sapiens
tctctactgtctgtc

SEQ ID NO: 143532 - DNA, 15 bp, Homo sapiens
ttctctactgtctgt

SEQ ID NO: 143533 - DNA, 15 bp, Homo sapiens
attctctactgtctg

SEQ ID NO: 143534 - DNA, 15 bp, Homo sapiens
cattctctactgtct

SEQ ID NO: 143535 - DNA, 15 bp, Homo sapiens
acattctctactgtc

SEQ ID NO: 143536 - DNA, 15 bp, Homo sapiens
cacattctctactgt

SEQ ID NO: 143537 - DNA, 15 bp, Homo sapiens
tcacattctctactg

SEQ ID NO: 143538 - DNA, 15 bp, Homo sapiens
ctcacattctctact

SEQ ID NO: 143539 - DNA, 15 bp, Homo sapiens
tctcacattctctac

SEQ ID NO: 143540 - DNA, 15 bp, Homo sapiens
ctctcacattctcta

SEQ ID NO: 143541 - DNA, 15 bp, Homo sapiens
cctctcacattctct

SEQ ID NO: 143542 - DNA, 15 bp, Homo sapiens
tcctctcacattctc

SEQ ID NO: 143543 - DNA, 15 bp, Homo sapiens
atcctctcacattct

SEQ ID NO: 143544 - DNA, 15 bp, Homo sapiens
gatcctctcacattc

SEQ ID NO: 143545 - DNA, 15 bp, Homo sapiens
agatcctctcacatt

SEQ ID NO: 143546 - DNA, 15 bp, Homo sapiens
gagatcctctcacat

SEQ ID NO: 143547 - DNA, 15 bp, Homo sapiens
tgagatcctctcaca

SEQ ID NO: 143548 - DNA, 15 bp, Homo sapiens
atgagatcctctcac

SEQ ID NO: 143549 - DNA, 15 bp, Homo sapiens
catgagatcctctca

SEQ ID NO: 143550 - DNA, 15 bp, Homo sapiens
ccatgagatcctctc

SEQ ID NO: 143551 - DNA, 15 bp, Homo sapiens
accatgagatcctct

SEQ ID NO: 143552 - DNA, 15 bp, Homo sapiens
aaccatgagatcctc

SEQ ID NO: 143553 - DNA, 15 bp, Homo sapiens
gaaccatgagatcct

SEQ ID NO: 143554 - DNA, 15 bp, Homo sapiens
agaaccatgagatcc

SEQ ID NO: 143555 - DNA, 15 bp, Homo sapiens
cagaaccatgagatc

SEQ ID NO: 143556 - DNA, 15 bp, Homo sapiens
tcagaaccatgagat

SEQ ID NO: 143557 - DNA, 15 bp, Homo sapiens
atcagaaccatgaga

SEQ ID NO: 143558 - DNA, 15 bp, Homo sapiens
catcagaaccatgag

SEQ ID NO: 143559 - DNA, 15 bp, Homo sapiens
tcatcagaaccatga

SEQ ID NO: 143560 - DNA, 15 bp, Homo sapiens
atcatcagaaccatg

SEQ ID NO: 143561 - DNA, 15 bp, Homo sapiens
catcatcagaaccat

SEQ ID NO: 143562 - DNA, 15 bp, Homo sapiens
tcatcatcagaacca

SEQ ID NO: 143563 - DNA, 15 bp, Homo sapiens
atcatcatcagaacc

SEQ ID NO: 143564 - DNA, 15 bp, Homo sapiens
aatcatcatcagaac

SEQ ID NO: 143565 - DNA, 15 bp, Homo sapiens
taatcatcatcagaa

SEQ ID NO: 143566 - DNA, 15 bp, Homo sapiens
ataatcatcatcaga

SEQ ID NO: 143567 - DNA, 15 bp, Homo sapiens
gataatcatcatcag

SEQ ID NO: 143568 - DNA, 15 bp, Homo sapiens
ggataatcatcatca

SEQ ID NO: 143569 - DNA, 15 bp, Homo sapiens
tggataatcatcatc

SEQ ID NO: 143570 - DNA, 15 bp, Homo sapiens
ttggataatcatcat

SEQ ID NO: 143571 - DNA, 15 bp, Homo sapiens
gttggataatcatca

SEQ ID NO: 143572 - DNA, 15 bp, Homo sapiens
tgttggataatcatc

SEQ ID NO: 143573 - DNA, 15 bp, Homo sapiens
ttgttggataatcat

SEQ ID NO: 143574 - DNA, 15 bp, Homo sapiens
tttgttggataatca

SEQ ID NO: 143575 - DNA, 15 bp, Homo sapiens
gtttgttggataatc

SEQ ID NO: 143576 - DNA, 15 bp, Homo sapiens
tgtttgttggataat

SEQ ID NO: 143577 - DNA, 15 bp, Homo sapiens
atgtttgttggataa

SEQ ID NO: 143578 - DNA, 15 bp, Homo sapiens
gatgtttgttggata

SEQ ID NO: 143579 - DNA, 15 bp, Homo sapiens
agatgtttgttggat

SEQ ID NO: 143580 - DNA, 15 bp, Homo sapiens
cagatgtttgttgga

SEQ ID NO: 143581 - DNA, 15 bp, Homo sapiens
ccagatgtttgttgg

SEQ ID NO: 143582 - DNA, 15 bp, Homo sapiens
gccagatgtttgttg

SEQ ID NO: 143583 - DNA, 15 bp, Homo sapiens
ggccagatgtttgtt

SEQ ID NO: 143584 - DNA, 15 bp, Homo sapiens
gggccagatgtttgt

SEQ ID NO: 143585 - DNA, 15 bp, Homo sapiens
agggccagatgtttg

SEQ ID NO: 143586 - DNA, 15 bp, Homo sapiens
gagggccagatgttt

SEQ ID NO: 143587 - DNA, 15 bp, Homo sapiens
agagggccagatgtt

SEQ ID NO: 143588 - DNA, 15 bp, Homo sapiens
gagagggccagatgt

SEQ ID NO: 143589 - DNA, 15 bp, Homo sapiens
agagagggccagatg

SEQ ID NO: 143590 - DNA, 15 bp, Homo sapiens
tagagagggccagat

SEQ ID NO: 143591 - DNA, 15 bp, Homo sapiens
gtagagagggccaga

SEQ ID NO: 143592 - DNA, 15 bp, Homo sapiens
tgtagagagggccag

SEQ ID NO: 143593 - DNA, 15 bp, Homo sapiens
atgtagagagggcca

SEQ ID NO: 143594 - DNA, 15 bp, Homo sapiens
gatgtagagagggcc

SEQ ID NO: 143595 - DNA, 15 bp, Homo sapiens
agatgtagagagggc

SEQ ID NO: 143596 - DNA, 15 bp, Homo sapiens
gagatgtagagaggg

SEQ ID NO: 143597 - DNA, 15 bp, Homo sapiens
agagatgtagagagg

SEQ ID NO: 143598 - DNA, 15 bp, Homo sapiens
aagagatgtagagag

SEQ ID NO: 143599 - DNA, 15 bp, Homo sapiens
gaagagatgtagaga

SEQ ID NO: 143600 - DNA, 15 bp, Homo sapiens
ggaagagatgtagag

SEQ ID NO: 143601 - DNA, 15 bp, Homo sapiens
gggaagagatgtaga

SEQ ID NO: 143602 - DNA, 15 bp, Homo sapiens
agggaagagatgtag

SEQ ID NO: 143603 - DNA, 15 bp, Homo sapiens
gagggaagagatgta

SEQ ID NO: 143604 - DNA, 15 bp, Homo sapiens
ggagggaagagatgt

SEQ ID NO: 143605 - DNA, 15 bp, Homo sapiens
tggagggaagagatg

SEQ ID NO: 143606 - DNA, 15 bp, Homo sapiens
atggagggaagagat

SEQ ID NO: 143607 - DNA, 15 bp, Homo sapiens
gatggagggaagaga

SEQ ID NO: 143608 - DNA, 15 bp, Homo sapiens
agatggagggaagag

SEQ ID NO: 143609 - DNA, 15 bp, Homo sapiens
gagatggagggaaga

SEQ ID NO: 143610 - DNA, 15 bp, Homo sapiens
ggagatggagggaag

SEQ ID NO: 143611 - DNA, 15 bp, Homo sapiens
aggagatggagggaa

SEQ ID NO: 143612 - DNA, 15 bp, Homo sapiens
aaggagatggaggga

SEQ ID NO: 143613 - DNA, 15 bp, Homo sapiens
caaggagatggaggg

SEQ ID NO: 143614 - DNA, 15 bp, Homo sapiens
acaaggagatggagg

SEQ ID NO: 143615 - DNA, 15 bp, Homo sapiens
tacaaggagatggag

SEQ ID NO: 143616 - DNA, 15 bp, Homo sapiens
gtacaaggagatgga

SEQ ID NO: 143617 - DNA, 15 bp, Homo sapiens
ggtacaaggagatgg

SEQ ID NO: 143618 - DNA, 15 bp, Homo sapiens
gggtacaaggagatg

SEQ ID NO: 143619 - DNA, 15 bp, Homo sapiens
agggtacaaggagat

SEQ ID NO: 143620 - DNA, 15 bp, Homo sapiens
gagggtacaaggaga

SEQ ID NO: 143621 - DNA, 15 bp, Homo sapiens
agagggtacaaggag

SEQ ID NO: 143622 - DNA, 15 bp, Homo sapiens
cagagggtacaagga

SEQ ID NO: 143623 - DNA, 15 bp, Homo sapiens
ccagagggtacaagg

SEQ ID NO: 143624 - DNA, 15 bp, Homo sapiens
gccagagggtacaag

SEQ ID NO: 143625 - DNA, 15 bp, Homo sapiens
agccagagggtacaa

SEQ ID NO: 143626 - DNA, 15 bp, Homo sapiens
aagccagagggtaca

SEQ ID NO: 143627 - DNA, 15 bp, Homo sapiens
taagccagagggtac

SEQ ID NO: 143628 - DNA, 15 bp, Homo sapiens
gtaagccagagggta

SEQ ID NO: 143629 - DNA, 15 bp, Homo sapiens
agtaagccagagggt

SEQ ID NO: 143630 - DNA, 15 bp, Homo sapiens
cagtaagccagaggg

SEQ ID NO: 143631 - DNA, 15 bp, Homo sapiens
acagtaagccagagg

SEQ ID NO: 143632 - DNA, 15 bp, Homo sapiens
gacagtaagccagag

SEQ ID NO: 143633 - DNA, 15 bp, Homo sapiens
ggacagtaagccaga

SEQ ID NO: 143634 - DNA, 15 bp, Homo sapiens
aggacagtaagccag

SEQ ID NO: 143635 - DNA, 15 bp, Homo sapiens
gaggacagtaagcca

SEQ ID NO: 143636 - DNA, 15 bp, Homo sapiens
agaggacagtaagcc

SEQ ID NO: 143637 - DNA, 15 bp, Homo sapiens
gagaggacagtaagc

SEQ ID NO: 143638 - DNA, 15 bp, Homo sapiens
agagaggacagtaag

SEQ ID NO: 143639 - DNA, 15 bp, Homo sapiens
gagagaggacagtaa

SEQ ID NO: 143640 - DNA, 15 bp, Homo sapiens
agagagaggacagta

SEQ ID NO: 143641 - DNA, 15 bp, Homo sapiens
cagagagaggacagt

SEQ ID NO: 143642 - DNA, 15 bp, Homo sapiens
ccagagagaggacag

SEQ ID NO: 143643 - DNA, 15 bp, Homo sapiens
gccagagagaggaca

SEQ ID NO: 143644 - DNA, 15 bp, Homo sapiens
cgccagagagaggac

SEQ ID NO: 143645 - DNA, 15 bp, Homo sapiens
gcgccagagagagga

SEQ ID NO: 143646 - DNA, 15 bp, Homo sapiens
tgcgccagagagagg

SEQ ID NO: 143647 - DNA, 15 bp, Homo sapiens
gtgcgccagagagag

SEQ ID NO: 143648 - DNA, 15 bp, Homo sapiens
agtgcgccagagaga

SEQ ID NO: 143649 - DNA, 15 bp, Homo sapiens
aagtgcgccagagag

SEQ ID NO: 143650 - DNA, 15 bp, Homo sapiens
aaagtgcgccagaga

SEQ ID NO: 143651 - DNA, 15 bp, Homo sapiens
gaaagtgcgccagag

SEQ ID NO: 143652 - DNA, 15 bp, Homo sapiens
ggaaagtgcgccaga

SEQ ID NO: 143653 - DNA, 15 bp, Homo sapiens
aggaaagtgcgccag

SEQ ID NO: 143654 - DNA, 15 bp, Homo sapiens
caggaaagtgcgcca

SEQ ID NO: 143655 - DNA, 15 bp, Homo sapiens
tcaggaaagtgcgcc

SEQ ID NO: 143656 - DNA, 15 bp, Homo sapiens
ttcaggaaagtgcgc

SEQ ID NO: 143657 - DNA, 15 bp, Homo sapiens
cttcaggaaagtgcg

SEQ ID NO: 143658 - DNA, 15 bp, Homo sapiens
gcttcaggaaagtgc

SEQ ID NO: 143659 - DNA, 15 bp, Homo sapiens
ggcttcaggaaagtg

SEQ ID NO: 143660 - DNA, 15 bp, Homo sapiens
aggcttcaggaaagt

SEQ ID NO: 143661 - DNA, 15 bp, Homo sapiens
gaggcttcaggaaag

SEQ ID NO: 143662 - DNA, 15 bp, Homo sapiens
agaggcttcaggaaa

SEQ ID NO: 143663 - DNA, 15 bp, Homo sapiens
aagaggcttcaggaa

SEQ ID NO: 143664 - DNA, 15 bp, Homo sapiens
taagaggcttcagga

SEQ ID NO: 143665 - DNA, 15 bp, Homo sapiens
ataagaggcttcagg

SEQ ID NO: 143666 - DNA, 15 bp, Homo sapiens
aataagaggcttcag

SEQ ID NO: 143667 - DNA, 15 bp, Homo sapiens
taataagaggcttca

SEQ ID NO: 143668 - DNA, 15 bp, Homo sapiens
ttaataagaggcttc

SEQ ID NO: 143669 - DNA, 15 bp, Homo sapiens
gttaataagaggctt

SEQ ID NO: 143670 - DNA, 15 bp, Homo sapiens
agttaataagaggct

SEQ ID NO: 143671 - DNA, 15 bp, Homo sapiens
gagttaataagaggc

SEQ ID NO: 143672 - DNA, 15 bp, Homo sapiens
ggagttaataagagg

SEQ ID NO: 143673 - DNA, 15 bp, Homo sapiens
gggagttaataagag

SEQ ID NO: 143674 - DNA, 15 bp, Homo sapiens
tgggagttaataaga

SEQ ID NO: 143675 - DNA, 15 bp, Homo sapiens
atgggagttaataag

SEQ ID NO: 143676 - DNA, 15 bp, Homo sapiens
gatgggagttaataa

SEQ ID NO: 143677 - DNA, 15 bp, Homo sapiens
agatgggagttaata

SEQ ID NO: 143678 - DNA, 15 bp, Homo sapiens
gagatgggagttaat

SEQ ID NO: 143679 - DNA, 15 bp, Homo sapiens
ggagatgggagttaa

SEQ ID NO: 143680 - DNA, 15 bp, Homo sapiens
tggagatgggagtta

SEQ ID NO: 143681 - DNA, 15 bp, Homo sapiens
ctggagatgggagtt

SEQ ID NO: 143682 - DNA, 15 bp, Homo sapiens
tctggagatgggagt

SEQ ID NO: 143683 - DNA, 15 bp, Homo sapiens
ttctggagatgggag

SEQ ID NO: 143684 - DNA, 15 bp, Homo sapiens
cttctggagatggga

SEQ ID NO: 143685 - DNA, 15 bp, Homo sapiens
gcttctggagatggg

SEQ ID NO: 143686 - DNA, 15 bp, Homo sapiens
tgcttctggagatgg

SEQ ID NO: 143687 - DNA, 15 bp, Homo sapiens
gtgcttctggagatg

SEQ ID NO: 143688 - DNA, 15 bp, Homo sapiens
ggtgcttctggagat

SEQ ID NO: 143689 - DNA, 15 bp, Homo sapiens
aggtgcttctggaga

SEQ ID NO: 143690 - DNA, 15 bp, Homo sapiens
gaggtgcttctggag

SEQ ID NO: 143691 - DNA, 15 bp, Homo sapiens
tgaggtgcttctgga

SEQ ID NO: 143692 - DNA, 15 bp, Homo sapiens
ttgaggtgcttctgg

SEQ ID NO: 143693 - DNA, 15 bp, Homo sapiens
gttgaggtgcttctg

SEQ ID NO: 143694 - DNA, 15 bp, Homo sapiens
tgttgaggtgcttct

SEQ ID NO: 143695 - DNA, 15 bp, Homo sapiens
ttgttgaggtgcttc

SEQ ID NO: 143696 - DNA, 15 bp, Homo sapiens
attgttgaggtgctt

SEQ ID NO: 143697 - DNA, 15 bp, Homo sapiens
cattgttgaggtgct

SEQ ID NO: 143698 - DNA, 15 bp, Homo sapiens
acattgttgaggtgc

SEQ ID NO: 143699 - DNA, 15 bp, Homo sapiens
gacattgttgaggtg

SEQ ID NO: 143700 - DNA, 15 bp, Homo sapiens
tgacattgttgaggt

SEQ ID NO: 143701 - DNA, 15 bp, Homo sapiens
ctgacattgttgagg

SEQ ID NO: 143702 - DNA, 15 bp, Homo sapiens
actgacattgttgag

SEQ ID NO: 143703 - DNA, 15 bp, Homo sapiens
cactgacattgttga

SEQ ID NO: 143704 - DNA, 15 bp, Homo sapiens
ccactgacattgttg

SEQ ID NO: 143705 - DNA, 15 bp, Homo sapiens
gccactgacattgtt

SEQ ID NO: 143706 - DNA, 15 bp, Homo sapiens
agccactgacattgt

SEQ ID NO: 143707 - DNA, 15 bp, Homo sapiens
cagccactgacattg

SEQ ID NO: 143708 - DNA, 15 bp, Homo sapiens
tcagccactgacatt

SEQ ID NO: 143709 - DNA, 15 bp, Homo sapiens
ctcagccactgacat

SEQ ID NO: 143710 - DNA, 15 bp, Homo sapiens
cctcagccactgaca

SEQ ID NO: 143711 - DNA, 15 bp, Homo sapiens
gcctcagccactgac

SEQ ID NO: 143712 - DNA, 15 bp, Homo sapiens
agcctcagccactga

SEQ ID NO: 143713 - DNA, 15 bp, Homo sapiens
cagcctcagccactg

SEQ ID NO: 143714 - DNA, 15 bp, Homo sapiens
gcagcctcagccact

SEQ ID NO: 143715 - DNA, 15 bp, Homo sapiens
tgcagcctcagccac

SEQ ID NO: 143716 - DNA, 15 bp, Homo sapiens
gtgcagcctcagcca

SEQ ID NO: 143717 - DNA, 15 bp, Homo sapiens
agtgcagcctcagcc

SEQ ID NO: 143718 - DNA, 15 bp, Homo sapiens
gagtgcagcctcagc

SEQ ID NO: 143719 - DNA, 15 bp, Homo sapiens
tgagtgcagcctcag

SEQ ID NO: 143720 - DNA, 15 bp, Homo sapiens
ctgagtgcagcctca

SEQ ID NO: 143721 - DNA, 15 bp, Homo sapiens
tctgagtgcagcctc

SEQ ID NO: 143722 - DNA, 15 bp, Homo sapiens
ctctgagtgcagcct

SEQ ID NO: 143723 - DNA, 15 bp, Homo sapiens
cctctgagtgcagcc

SEQ ID NO: 143724 - DNA, 15 bp, Homo sapiens
ccctctgagtgcagc

SEQ ID NO: 143725 - DNA, 15 bp, Homo sapiens
tccctctgagtgcag

SEQ ID NO: 143726 - DNA, 15 bp, Homo sapiens
atccctctgagtgca

SEQ ID NO: 143727 - DNA, 15 bp, Homo sapiens
catccctctgagtgc

SEQ ID NO: 143728 - DNA, 15 bp, Homo sapiens
tcatccctctgagtg

SEQ ID NO: 143729 - DNA, 15 bp, Homo sapiens
gtcatccctctgagt

SEQ ID NO: 143730 - DNA, 15 bp, Homo sapiens
agtcatccctctgag

SEQ ID NO: 143731 - DNA, 15 bp, Homo sapiens
cagtcatccctctga

SEQ ID NO: 143732 - DNA, 15 bp, Homo sapiens
gcagtcatccctctg

SEQ ID NO: 143733 - DNA, 15 bp, Homo sapiens
agcagtcatccctct

SEQ ID NO: 143734 - DNA, 15 bp, Homo sapiens
cagcagtcatccctc

SEQ ID NO: 143735 - DNA, 15 bp, Homo sapiens
ccagcagtcatccct

SEQ ID NO: 143736 - DNA, 15 bp, Homo sapiens
cccagcagtcatccc

SEQ ID NO: 143737 - DNA, 15 bp, Homo sapiens
ccccagcagtcatcc

SEQ ID NO: 143738 - DNA, 15 bp, Homo sapiens
cccccagcagtcatc

SEQ ID NO: 143739 - DNA, 15 bp, Homo sapiens
acccccagcagtcat

SEQ ID NO: 143740 - DNA, 15 bp, Homo sapiens
tacccccagcagtca

SEQ ID NO: 143741 - DNA, 15 bp, Homo sapiens
ctacccccagcagtc

SEQ ID NO: 143742 - DNA, 15 bp, Homo sapiens
tctacccccagcagt

SEQ ID NO: 143743 - DNA, 15 bp, Homo sapiens
gtctacccccagcag

SEQ ID NO: 143744 - DNA, 15 bp, Homo sapiens
agtctacccccagca

SEQ ID NO: 143745 - DNA, 15 bp, Homo sapiens
cagtctacccccagc

SEQ ID NO: 143746 - DNA, 15 bp, Homo sapiens
ccagtctacccccag

SEQ ID NO: 143747 - DNA, 15 bp, Homo sapiens
cccagtctaccccca

SEQ ID NO: 143748 - DNA, 15 bp, Homo sapiens
acccagtctaccccc

SEQ ID NO: 143749 - DNA, 15 bp, Homo sapiens
cacccagtctacccc

SEQ ID NO: 143750 - DNA, 15 bp, Homo sapiens
gcacccagtctaccc

SEQ ID NO: 143751 - DNA, 15 bp, Homo sapiens
ggcacccagtctacc

SEQ ID NO: 143752 - DNA, 15 bp, Homo sapiens
tggcacccagtctac

SEQ ID NO: 143753 - DNA, 15 bp, Homo sapiens
ctggcacccagtcta

SEQ ID NO: 143754 - DNA, 15 bp, Homo sapiens
cctggcacccagtct

SEQ ID NO: 143755 - DNA, 15 bp, Homo sapiens
ccctggcacccagtc

SEQ ID NO: 143756 - DNA, 15 bp, Homo sapiens
cccctggcacccagt

SEQ ID NO: 143757 - DNA, 15 bp, Homo sapiens
gcccctggcacccag

SEQ ID NO: 143758 - DNA, 15 bp, Homo sapiens
ggcccctggcaccca

SEQ ID NO: 143759 - DNA, 15 bp, Homo sapiens
atggcccctggcacc

SEQ ID NO: 143760 - DNA, 15 bp, Homo sapiens
catggcccctggcac

SEQ ID NO: 143761 - DNA, 15 bp, Homo sapiens
ccatggcccctggca

SEQ ID NO: 143762 - DNA, 15 bp, Homo sapiens
cccatggcccctggc

SEQ ID NO: 143763 - DNA, 15 bp, Homo sapiens
gcccatggcccctgg

SEQ ID NO: 143764 - DNA, 15 bp, Homo sapiens
ggcccatggcccctg

SEQ ID NO: 143765 - DNA, 15 bp, Homo sapiens
gggcccatggcccct

SEQ ID NO: 143766 - DNA, 15 bp, Homo sapiens
tgggcccatggcccc

SEQ ID NO: 143767 - DNA, 15 bp, Homo sapiens
ctgggcccatggccc

SEQ ID NO: 143768 - DNA, 15 bp, Homo sapiens
cctgggcccatggcc

SEQ ID NO: 143769 - DNA, 15 bp, Homo sapiens
tcctgggcccatggc

SEQ ID NO: 143770 - DNA, 15 bp, Homo sapiens
gtcctgggcccatgg

SEQ ID NO: 143771 - DNA, 15 bp, Homo sapiens
ggtcctgggcccatg

SEQ ID NO: 143772 - DNA, 15 bp, Homo sapiens
gggtcctgggcccat

SEQ ID NO: 143773 - DNA, 15 bp, Homo sapiens
tgggtcctgggccca

SEQ ID NO: 143774 - DNA, 15 bp, Homo sapiens
ctgggtcctgggccc

SEQ ID NO: 143775 - DNA, 15 bp, Homo sapiens
actgggtcctgggcc

SEQ ID NO: 143776 - DNA, 15 bp, Homo sapiens
gactgggtcctgggc

SEQ ID NO: 143777 - DNA, 15 bp, Homo sapiens
agactgggtcctggg

SEQ ID NO: 143778 - DNA, 15 bp, Homo sapiens
aagactgggtcctgg

SEQ ID NO: 143779 - DNA, 15 bp, Homo sapiens
caagactgggtcctg

SEQ ID NO: 143780 - DNA, 15 bp, Homo sapiens
ccaagactgggtcct

SEQ ID NO: 143781 - DNA, 15 bp, Homo sapiens
gccaagactgggtcc

SEQ ID NO: 143782 - DNA, 15 bp, Homo sapiens
ggccaagactgggtc

SEQ ID NO: 143783 - DNA, 15 bp, Homo sapiens
tggccaagactgggt

SEQ ID NO: 143784 - DNA, 15 bp, Homo sapiens
atggccaagactggg

SEQ ID NO: 143785 - DNA, 15 bp, Homo sapiens
aatggccaagactgg

SEQ ID NO: 143786 - DNA, 15 bp, Homo sapiens
gaatggccaagactg

SEQ ID NO: 143787 - DNA, 15 bp, Homo sapiens
tgaatggccaagact

SEQ ID NO: 143788 - DNA, 15 bp, Homo sapiens
ctgaatggccaagac

SEQ ID NO: 143789 - DNA, 15 bp, Homo sapiens
actgaatggccaaga

SEQ ID NO: 143790 - DNA, 15 bp, Homo sapiens
aactgaatggccaag

SEQ ID NO: 143791 - DNA, 15 bp, Homo sapiens
caactgaatggccaa

SEQ ID NO: 143792 - DNA, 15 bp, Homo sapiens
tcaactgaatggcca

SEQ ID NO: 143793 - DNA, 15 bp, Homo sapiens
ctcaactgaatggcc

SEQ ID NO: 143794 - DNA, 15 bp, Homo sapiens
actcaactgaatggc

SEQ ID NO: 143795 - DNA, 15 bp, Homo sapiens
cactcaactgaatgg

SEQ ID NO: 143796 - DNA, 15 bp, Homo sapiens
tcactcaactgaatg

SEQ ID NO: 143797 - DNA, 15 bp, Homo sapiens
ctcactcaactgaat

SEQ ID NO: 143798 - DNA, 15 bp, Homo sapiens
cctcactcaactgaa

SEQ ID NO: 143799 - DNA, 15 bp, Homo sapiens
gcctcactcaactga

SEQ ID NO: 143800 - DNA, 15 bp, Homo sapiens
agcctcactcaactg

SEQ ID NO: 143801 - DNA, 15 bp, Homo sapiens
cagcctcactcaact

SEQ ID NO: 143802 - DNA, 15 bp, Homo sapiens
tcagcctcactcaac

SEQ ID NO: 143803 - DNA, 15 bp, Homo sapiens
ttcagcctcactcaa

SEQ ID NO: 143804 - DNA, 15 bp, Homo sapiens
cttcagcctcactca

SEQ ID NO: 143805 - DNA, 15 bp, Homo sapiens
ccttcagcctcactc

SEQ ID NO: 143806 - DNA, 15 bp, Homo sapiens
gccttcagcctcact

SEQ ID NO: 143807 - DNA, 15 bp, Homo sapiens
agccttcagcctcac

SEQ ID NO: 143808 - DNA, 15 bp, Homo sapiens
cagccttcagcctca

SEQ ID NO: 143809 - DNA, 15 bp, Homo sapiens
ccagccttcagcctc

SEQ ID NO: 143810 - DNA, 15 bp, Homo sapiens
cccagccttcagcct

SEQ ID NO: 143811 - DNA, 15 bp, Homo sapiens
acccagccttcagcc

SEQ ID NO: 143812 - DNA, 15 bp, Homo sapiens
aacccagccttcagc

SEQ ID NO: 143813 - DNA, 15 bp, Homo sapiens
aaacccagccttcag

SEQ ID NO: 143814 - DNA, 15 bp, Homo sapiens
caaacccagccttca

SEQ ID NO: 143815 - DNA, 15 bp, Homo sapiens
tcaaacccagccttc

SEQ ID NO: 143816 - DNA, 15 bp, Homo sapiens
ttcaaacccagcctt

SEQ ID NO: 143817 - DNA, 15 bp, Homo sapiens
tttcaaacccagcct

SEQ ID NO: 143818 - DNA, 15 bp, Homo sapiens
ttttcaaacccagcc

SEQ ID NO: 143819 - DNA, 15 bp, Homo sapiens
cttttcaaacccagc

SEQ ID NO: 143820 - DNA, 15 bp, Homo sapiens
ccttttcaaacccag

SEQ ID NO: 143821 - DNA, 15 bp, Homo sapiens
gccttttcaaaccca

SEQ ID NO: 143822 - DNA, 15 bp, Homo sapiens
tgccttttcaaaccc

SEQ ID NO: 143823 - DNA, 15 bp, Homo sapiens
ttgccttttcaaacc

SEQ ID NO: 143824 - DNA, 15 bp, Homo sapiens
tttgccttttcaaac

SEQ ID NO: 143825 - DNA, 15 bp, Homo sapiens
ttttgccttttcaaa

SEQ ID NO: 143826 - DNA, 15 bp, Homo sapiens
tttttgccttttcaa

SEQ ID NO: 143827 - DNA, 15 bp, Homo sapiens
ctttttgccttttca

SEQ ID NO: 143828 - DNA, 15 bp, Homo sapiens
tctttttgccttttc

SEQ ID NO: 143829 - DNA, 15 bp, Homo sapiens
gtctttttgcctttt

SEQ ID NO: 143830 - DNA, 15 bp, Homo sapiens
tgtctttttgccttt

SEQ ID NO: 143831 - DNA, 15 bp, Homo sapiens
ttgtctttttgcctt

SEQ ID NO: 143832 - DNA, 15 bp, Homo sapiens
cttgtctttttgcct

SEQ ID NO: 143833 - DNA, 15 bp, Homo sapiens
tcttgtctttttgcc

SEQ ID NO: 143834 - DNA, 15 bp, Homo sapiens
gtcttgtctttttgc

SEQ ID NO: 143835 - DNA, 15 bp, Homo sapiens
tgtcttgtctttttg

SEQ ID NO: 143836 - DNA, 15 bp, Homo sapiens
atgtcttgtcttttt

SEQ ID NO: 143837 - DNA, 15 bp, Homo sapiens
gatgtcttgtctttt

SEQ ID NO: 143838 - DNA, 15 bp, Homo sapiens
ggatgtcttgtcttt

SEQ ID NO: 143839 - DNA, 15 bp, Homo sapiens
tggatgtcttgtctt

SEQ ID NO: 143840 - DNA, 15 bp, Homo sapiens
ctggatgtcttgtct

SEQ ID NO: 143841 - DNA, 15 bp, Homo sapiens
cctggatgtcttgtc

SEQ ID NO: 143842 - DNA, 15 bp, Homo sapiens
gcctggatgtcttgt

SEQ ID NO: 143843 - DNA, 15 bp, Homo sapiens
tgcctggatgtcttg

SEQ ID NO: 143844 - DNA, 15 bp, Homo sapiens
ctgcctggatgtctt

SEQ ID NO: 143845 - DNA, 15 bp, Homo sapiens
cctgcctggatgtct

SEQ ID NO: 143846 - DNA, 15 bp, Homo sapiens
ccctgcctggatgtc

SEQ ID NO: 143847 - DNA, 15 bp, Homo sapiens
gccctgcctggatgt

SEQ ID NO: 143848 - DNA, 15 bp, Homo sapiens
agccctgcctggatg

SEQ ID NO: 143849 - DNA, 15 bp, Homo sapiens
aagccctgcctggat

SEQ ID NO: 143850 - DNA, 15 bp, Homo sapiens
gaagccctgcctgga

SEQ ID NO: 143851 - DNA, 15 bp, Homo sapiens
agaagccctgcctgg

SEQ ID NO: 143852 - DNA, 15 bp, Homo sapiens
gagaagccctgcctg

SEQ ID NO: 143853 - DNA, 15 bp, Homo sapiens
agagaagccctgcct

SEQ ID NO: 143854 - DNA, 15 bp, Homo sapiens
aagagaagccctgcc

SEQ ID NO: 143855 - DNA, 15 bp, Homo sapiens
aaagagaagccctgc

SEQ ID NO: 143856 - DNA, 15 bp, Homo sapiens
aaaagagaagccctg

SEQ ID NO: 143857 - DNA, 15 bp, Homo sapiens
gaaaagagaagccct

SEQ ID NO: 143858 - DNA, 15 bp, Homo sapiens
agaaaagagaagccc

SEQ ID NO: 143859 - DNA, 15 bp, Homo sapiens
aagaaaagagaagcc

SEQ ID NO: 143860 - DNA, 15 bp, Homo sapiens
aaagaaaagagaagc

SEQ ID NO: 143861 - DNA, 15 bp, Homo sapiens
gaaagaaaagagaag

SEQ ID NO: 143862 - DNA, 15 bp, Homo sapiens
ggaaagaaaagagaa

SEQ ID NO: 143863 - DNA, 15 bp, Homo sapiens
tggaaagaaaagaga

SEQ ID NO: 143864 - DNA, 15 bp, Homo sapiens
gtggaaagaaaagag

SEQ ID NO: 143865 - DNA, 15 bp, Homo sapiens
tgtggaaagaaaaga

SEQ ID NO: 143866 - DNA, 15 bp, Homo sapiens
ttgtggaaagaaaag

SEQ ID NO: 143867 - DNA, 15 bp, Homo sapiens
cttgtggaaagaaaa

SEQ ID NO: 143868 - DNA, 15 bp, Homo sapiens
ccttgtggaaagaaa

SEQ ID NO: 143869 - DNA, 15 bp, Homo sapiens
cccttgtggaaagaa

SEQ ID NO: 143870 - DNA, 15 bp, Homo sapiens
tcccttgtggaaaga

SEQ ID NO: 143871 - DNA, 15 bp, Homo sapiens
gtcccttgtggaaag

SEQ ID NO: 143872 - DNA, 15 bp, Homo sapiens
tgtcccttgtggaaa

SEQ ID NO: 143873 - DNA, 15 bp, Homo sapiens
ttgtcccttgtggaa

SEQ ID NO: 143874 - DNA, 15 bp, Homo sapiens
cttgtcccttgtgga

SEQ ID NO: 143875 - DNA, 15 bp, Homo sapiens
tcttgtcccttgtgg

SEQ ID NO: 143876 - DNA, 15 bp, Homo sapiens
ctcttgtcccttgtg

SEQ ID NO: 143877 - DNA, 15 bp, Homo sapiens
gctcttgtcccttgt

SEQ ID NO: 143878 - DNA, 15 bp, Homo sapiens
agctcttgtcccttg

SEQ ID NO: 143879 - DNA, 15 bp, Homo sapiens
aagctcttgtccctt

SEQ ID NO: 143880 - DNA, 15 bp, Homo sapiens
caagctcttgtccct

SEQ ID NO: 143881 - DNA, 15 bp, Homo sapiens
ccaagctcttgtccc

SEQ ID NO: 143882 - DNA, 15 bp, Homo sapiens
gccaagctcttgtcc

SEQ ID NO: 143883 - DNA, 15 bp, Homo sapiens
agccaagctcttgtc

SEQ ID NO: 143884 - DNA, 15 bp, Homo sapiens
aagccaagctcttgt

SEQ ID NO: 143885 - DNA, 15 bp, Homo sapiens
taagccaagctcttg

SEQ ID NO: 143886 - DNA, 15 bp, Homo sapiens
ataagccaagctctt

SEQ ID NO: 143887 - DNA, 15 bp, Homo sapiens
aataagccaagctct

SEQ ID NO: 143888 - DNA, 15 bp, Homo sapiens
aaataagccaagctc

SEQ ID NO: 143889 - DNA, 15 bp, Homo sapiens
taaataagccaagct

SEQ ID NO: 143890 - DNA, 15 bp, Homo sapiens
ctaaataagccaagc

SEQ ID NO: 143891 - DNA, 15 bp, Homo sapiens
cctaaataagccaag

SEQ ID NO: 143892 - DNA, 15 bp, Homo sapiens
gcctaaataagccaa

SEQ ID NO: 143893 - DNA, 15 bp, Homo sapiens
agcctaaataagcca

SEQ ID NO: 143894 - DNA, 15 bp, Homo sapiens
tagcctaaataagcc

SEQ ID NO: 143895 - DNA, 15 bp, Homo sapiens
gtagcctaaataagc

SEQ ID NO: 143896 - DNA, 15 bp, Homo sapiens
tgtagcctaaataag

SEQ ID NO: 143897 - DNA, 15 bp, Homo sapiens
ctgtagcctaaataa

SEQ ID NO: 143898 - DNA, 15 bp, Homo sapiens
gctgtagcctaaata

SEQ ID NO: 143899 - DNA, 15 bp, Homo sapiens
ggctgtagcctaaat

SEQ ID NO: 143900 - DNA, 15 bp, Homo sapiens
gggctgtagcctaaa

SEQ ID NO: 143901 - DNA, 15 bp, Homo sapiens
agggctgtagcctaa

SEQ ID NO: 143902 - DNA, 15 bp, Homo sapiens
cagggctgtagccta

SEQ ID NO: 143903 - DNA, 15 bp, Homo sapiens
gcagggctgtagcct

SEQ ID NO: 143904 - DNA, 15 bp, Homo sapiens
agcagggctgtagcc

SEQ ID NO: 143905 - DNA, 15 bp, Homo sapiens
cagcagggctgtagc

SEQ ID NO: 143906 - DNA, 15 bp, Homo sapiens
gcagcagggctgtag

SEQ ID NO: 143907 - DNA, 15 bp, Homo sapiens
agcagcagggctgta

SEQ ID NO: 143908 - DNA, 15 bp, Homo sapiens
cagcagcagggctgt

SEQ ID NO: 143909 - DNA, 15 bp, Homo sapiens
gcagcagcagggctg

SEQ ID NO: 143910 - DNA, 15 bp, Homo sapiens
agcagcagcagggct

SEQ ID NO: 143911 - DNA, 15 bp, Homo sapiens
gagcagcagcagggc

SEQ ID NO: 143912 - DNA, 15 bp, Homo sapiens
ggagcagcagcaggg

SEQ ID NO: 143913 - DNA, 15 bp, Homo sapiens
gggagcagcagcagg

SEQ ID NO: 143914 - DNA, 15 bp, Homo sapiens
agggagcagcagcag

SEQ ID NO: 143915 - DNA, 15 bp, Homo sapiens
aagggagcagcagca

SEQ ID NO: 143916 - DNA, 15 bp, Homo sapiens
gaagggagcagcagc

SEQ ID NO: 143917 - DNA, 15 bp, Homo sapiens
ggaagggagcagcag

SEQ ID NO: 143918 - DNA, 15 bp, Homo sapiens
aggaagggagcagca

SEQ ID NO: 143919 - DNA, 15 bp, Homo sapiens
aaggaagggagcagc

SEQ ID NO: 143920 - DNA, 15 bp, Homo sapiens
gaaggaagggagcag

SEQ ID NO: 143921 - DNA, 15 bp, Homo sapiens
agaaggaagggagca

SEQ ID NO: 143922 - DNA, 15 bp, Homo sapiens
aagaaggaagggagc

SEQ ID NO: 143923 - DNA, 15 bp, Homo sapiens
gaagaaggaagggag

SEQ ID NO: 143924 - DNA, 15 bp, Homo sapiens
agaagaaggaaggga

SEQ ID NO: 143925 - DNA, 15 bp, Homo sapiens
cagaagaaggaaggg

SEQ ID NO: 143926 - DNA, 15 bp, Homo sapiens
acagaagaaggaagg

SEQ ID NO: 143927 - DNA, 15 bp, Homo sapiens
gacagaagaaggaag

SEQ ID NO: 143928 - DNA, 15 bp, Homo sapiens
ggacagaagaaggaa

SEQ ID NO: 143929 - DNA, 15 bp, Homo sapiens
aggacagaagaagga

SEQ ID NO: 143930 - DNA, 15 bp, Homo sapiens
caggacagaagaagg

SEQ ID NO: 143931 - DNA, 15 bp, Homo sapiens
acaggacagaagaag

SEQ ID NO: 143932 - DNA, 15 bp, Homo sapiens
aacaggacagaagaa

SEQ ID NO: 143933 - DNA, 15 bp, Homo sapiens
aaacaggacagaaga

SEQ ID NO: 143934 - DNA, 15 bp, Homo sapiens
gaaacaggacagaag

SEQ ID NO: 143935 - DNA, 15 bp, Homo sapiens
ggaaacaggacagaa

SEQ ID NO: 143936 - DNA, 15 bp, Homo sapiens
tggaaacaggacaga

SEQ ID NO: 143937 - DNA, 15 bp, Homo sapiens
ctggaaacaggacag

SEQ ID NO: 143938 - DNA, 15 bp, Homo sapiens
gctggaaacaggaca

SEQ ID NO: 143939 - DNA, 15 bp, Homo sapiens
ggctggaaacaggac

SEQ ID NO: 143940 - DNA, 15 bp, Homo sapiens
aggctggaaacagga

SEQ ID NO: 143941 - DNA, 15 bp, Homo sapiens
aaggctggaaacagg

SEQ ID NO: 143942 - DNA, 15 bp, Homo sapiens
caaggctggaaacag

SEQ ID NO: 143943 - DNA, 15 bp, Homo sapiens
gcaaggctggaaaca

SEQ ID NO: 143944 - DNA, 15 bp, Homo sapiens
tgcaaggctggaaac

SEQ ID NO: 143945 - DNA, 15 bp, Homo sapiens
ttgcaaggctggaaa

SEQ ID NO: 143946 - DNA, 15 bp, Homo sapiens
cttgcaaggctggaa

SEQ ID NO: 143947 - DNA, 15 bp, Homo sapiens
tcttgcaaggctgga

SEQ ID NO: 143948 - DNA, 15 bp, Homo sapiens
ttcttgcaaggctgg

SEQ ID NO: 143949 - DNA, 15 bp, Homo sapiens
cttcttgcaaggctg

SEQ ID NO: 143950 - DNA, 15 bp, Homo sapiens
ccttcttgcaaggct

SEQ ID NO: 143951 - DNA, 15 bp, Homo sapiens
gccttcttgcaaggc

SEQ ID NO: 143952 - DNA, 15 bp, Homo sapiens
agccttcttgcaagg

SEQ ID NO: 143953 - DNA, 15 bp, Homo sapiens
tagccttcttgcaag

SEQ ID NO: 143954 - DNA, 15 bp, Homo sapiens
atagccttcttgcaa

SEQ ID NO: 143955 - DNA, 15 bp, Homo sapiens
aatagccttcttgca

SEQ ID NO: 143956 - DNA, 15 bp, Homo sapiens
gaatagccttcttgc

SEQ ID NO: 143957 - DNA, 15 bp, Homo sapiens
tgaatagccttcttg

SEQ ID NO: 143958 - DNA, 15 bp, Homo sapiens
gtgaatagccttctt

SEQ ID NO: 143959 - DNA, 15 bp, Homo sapiens
tgtgaatagccttct

SEQ ID NO: 143960 - DNA, 15 bp, Homo sapiens
ttgtgaatagccttc

SEQ ID NO: 143961 - DNA, 15 bp, Homo sapiens
attgtgaatagcctt

SEQ ID NO: 143962 - DNA, 15 bp, Homo sapiens
aattgtgaatagcct

SEQ ID NO: 143963 - DNA, 15 bp, Homo sapiens
taattgtgaatagcc

SEQ ID NO: 143964 - DNA, 15 bp, Homo sapiens
ctaattgtgaatagc

SEQ ID NO: 143965 - DNA, 15 bp, Homo sapiens
cctaattgtgaatag

SEQ ID NO: 143966 - DNA, 15 bp, Homo sapiens
gcctaattgtgaata

SEQ ID NO: 143967 - DNA, 15 bp, Homo sapiens
ggcctaattgtgaat

SEQ ID NO: 143968 - DNA, 15 bp, Homo sapiens
aggcctaattgtgaa

SEQ ID NO: 143969 - DNA, 15 bp, Homo sapiens
caggcctaattgtga

SEQ ID NO: 143970 - DNA, 15 bp, Homo sapiens
ccaggcctaattgtg

SEQ ID NO: 143971 - DNA, 15 bp, Homo sapiens
gccaggcctaattgt

SEQ ID NO: 143972 - DNA, 15 bp, Homo sapiens
agccaggcctaattg

SEQ ID NO: 143973 - DNA, 15 bp, Homo sapiens
cagccaggcctaatt

SEQ ID NO: 143974 - DNA, 15 bp, Homo sapiens
gcagccaggcctaat

SEQ ID NO: 143975 - DNA, 15 bp, Homo sapiens
agcagccaggcctaa

SEQ ID NO: 143976 - DNA, 15 bp, Homo sapiens
aagcagccaggccta

SEQ ID NO: 143977 - DNA, 15 bp, Homo sapiens
gaagcagccaggcct

SEQ ID NO: 143978 - DNA, 15 bp, Homo sapiens
agaagcagccaggcc

SEQ ID NO: 143979 - DNA, 15 bp, Homo sapiens
gagaagcagccaggc

SEQ ID NO: 143980 - DNA, 15 bp, Homo sapiens
agagaagcagccagg

SEQ ID NO: 143981 - DNA, 15 bp, Homo sapiens
gagagaagcagccag

SEQ ID NO: 143982 - DNA, 15 bp, Homo sapiens
tgagagaagcagcca

SEQ ID NO: 143983 - DNA, 15 bp, Homo sapiens
atgagagaagcagcc

SEQ ID NO: 143984 - DNA, 15 bp, Homo sapiens
aatgagagaagcagc

SEQ ID NO: 143985 - DNA, 15 bp, Homo sapiens
aaatgagagaagcag

SEQ ID NO: 143986 - DNA, 15 bp, Homo sapiens
aaaatgagagaagca

SEQ ID NO: 143987 - DNA, 15 bp, Homo sapiens
aaaaatgagagaagc

SEQ ID NO: 143988 - DNA, 15 bp, Homo sapiens
aaaaaatgagagaag

SEQ ID NO: 143989 - DNA, 15 bp, Homo sapiens
aaaaaaatgagagaa

SEQ ID NO: 143990 - DNA, 15 bp, Homo sapiens
gaaaaaaatgagaga

SEQ ID NO: 143991 - DNA, 15 bp, Homo sapiens
ggaaaaaaatgagag

SEQ ID NO: 143992 - DNA, 15 bp, Homo sapiens
aggaaaaaaatgaga

SEQ ID NO: 143993 - DNA, 15 bp, Homo sapiens
gaggaaaaaaatgag

SEQ ID NO: 143994 - DNA, 15 bp, Homo sapiens
ggaggaaaaaaatga

SEQ ID NO: 143995 - DNA, 15 bp, Homo sapiens
gggaggaaaaaaatg

SEQ ID NO: 143996 - DNA, 15 bp, Homo sapiens
tgggaggaaaaaaat

SEQ ID NO: 143997 - DNA, 15 bp, Homo sapiens
ctgggaggaaaaaaa

SEQ ID NO: 143998 - DNA, 15 bp, Homo sapiens
actgggaggaaaaaa

SEQ ID NO: 143999 - DNA, 15 bp, Homo sapiens
aactgggaggaaaaa

SEQ ID NO: 144000 - DNA, 15 bp, Homo sapiens
aaactgggaggaaaa

SEQ ID NO: 144001 - DNA, 15 bp, Homo sapiens
gaaactgggaggaaa

SEQ ID NO: 144002 - DNA, 15 bp, Homo sapiens
ggaaactgggaggaa

SEQ ID NO: 144003 - DNA, 15 bp, Homo sapiens
tggaaactgggagga

SEQ ID NO: 144004 - DNA, 15 bp, Homo sapiens
ttggaaactgggagg

SEQ ID NO: 144005 - DNA, 15 bp, Homo sapiens
tttggaaactgggag

SEQ ID NO: 144006 - DNA, 15 bp, Homo sapiens
gtttggaaactggga

SEQ ID NO: 144007 - DNA, 15 bp, Homo sapiens
tgtttggaaactggg

SEQ ID NO: 144008 - DNA, 15 bp, Homo sapiens
ttgtttggaaactgg

SEQ ID NO: 144009 - DNA, 15 bp, Homo sapiens
cttgtttggaaactg

SEQ ID NO: 144010 - DNA, 15 bp, Homo sapiens
gcttgtttggaaact

SEQ ID NO: 144011 - DNA, 15 bp, Homo sapiens
ggcttgtttggaaac

SEQ ID NO: 144012 - DNA, 15 bp, Homo sapiens
gggcttgtttggaaa

SEQ ID NO: 144013 - DNA, 15 bp, Homo sapiens
agggcttgtttggaa

SEQ ID NO: 144014 - DNA, 15 bp, Homo sapiens
gagggcttgtttgga

SEQ ID NO: 144015 - DNA, 15 bp, Homo sapiens
tgagggcttgtttgg

SEQ ID NO: 144016 - DNA, 15 bp, Homo sapiens
ctgagggcttgtttg

SEQ ID NO: 144017 - DNA, 15 bp, Homo sapiens
actgagggcttgttt

SEQ ID NO: 144018 - DNA, 15 bp, Homo sapiens
cactgagggcttgtt

SEQ ID NO: 144019 - DNA, 15 bp, Homo sapiens
tcactgagggcttgt

SEQ ID NO: 144020 - DNA, 15 bp, Homo sapiens
ttcactgagggcttg

SEQ ID NO: 144021 - DNA, 15 bp, Homo sapiens
gttcactgagggctt

SEQ ID NO: 144022 - DNA, 15 bp, Homo sapiens
tgttcactgagggct

SEQ ID NO: 144023 - DNA, 15 bp, Homo sapiens
atgttcactgagggc

SEQ ID NO: 144024 - DNA, 15 bp, Homo sapiens
gatgttcactgaggg

SEQ ID NO: 144025 - DNA, 15 bp, Homo sapiens
tgatgttcactgagg

SEQ ID NO: 144026 - DNA, 15 bp, Homo sapiens
atgatgttcactgag

SEQ ID NO: 144027 - DNA, 15 bp, Homo sapiens
aatgatgttcactga

SEQ ID NO: 144028 - DNA, 15 bp, Homo sapiens
caatgatgttcactg

SEQ ID NO: 144029 - DNA, 15 bp, Homo sapiens
tcaatgatgttcact

SEQ ID NO: 144030 - DNA, 15 bp, Homo sapiens
ttcaatgatgttcac

SEQ ID NO: 144031 - DNA, 15 bp, Homo sapiens
cttcaatgatgttca

SEQ ID NO: 144032 - DNA, 15 bp, Homo sapiens
gcttcaatgatgttc

SEQ ID NO: 144033 - DNA, 15 bp, Homo sapiens
cgcttcaatgatgtt

SEQ ID NO: 144034 - DNA, 15 bp, Homo sapiens
acgcttcaatgatgt

SEQ ID NO: 144035 - DNA, 15 bp, Homo sapiens
cacgcttcaatgatg

SEQ ID NO: 144036 - DNA, 15 bp, Homo sapiens
tcacgcttcaatgat

SEQ ID NO: 144037 - DNA, 15 bp, Homo sapiens
gtcacgcttcaatga

SEQ ID NO: 144038 - DNA, 15 bp, Homo sapiens
agtcacgcttcaatg

SEQ ID NO: 144039 - DNA, 15 bp, Homo sapiens
cagtcacgcttcaat

SEQ ID NO: 144040 - DNA, 15 bp, Homo sapiens
gcagtcacgcttcaa

SEQ ID NO: 144041 - DNA, 15 bp, Homo sapiens
ggcagtcacgcttca

SEQ ID NO: 144042 - DNA, 15 bp, Homo sapiens
aggcagtcacgcttc

SEQ ID NO: 144043 - DNA, 15 bp, Homo sapiens
caggcagtcacgctt

SEQ ID NO: 144044 - DNA, 15 bp, Homo sapiens
acaggcagtcacgct

SEQ ID NO: 144045 - DNA, 15 bp, Homo sapiens
gacaggcagtcacgc

SEQ ID NO: 144046 - DNA, 15 bp, Homo sapiens
agacaggcagtcacg

SEQ ID NO: 144047 - DNA, 15 bp, Homo sapiens
cagacaggcagtcac

SEQ ID NO: 144048 - DNA, 15 bp, Homo sapiens
gcagacaggcagtca

SEQ ID NO: 144049 - DNA, 15 bp, Homo sapiens
tgcagacaggcagtc

SEQ ID NO: 144050 - DNA, 15 bp, Homo sapiens
ctgcagacaggcagt

SEQ ID NO: 144051 - DNA, 15 bp, Homo sapiens
cctgcagacaggcag

SEQ ID NO: 144052 - DNA, 15 bp, Homo sapiens
ccctgcagacaggca

SEQ ID NO: 144053 - DNA, 15 bp, Homo sapiens
tccctgcagacaggc

SEQ ID NO: 144054 - DNA, 15 bp, Homo sapiens
ctccctgcagacagg

SEQ ID NO: 144055 - DNA, 15 bp, Homo sapiens
tctccctgcagacag

SEQ ID NO: 144056 - DNA, 15 bp, Homo sapiens
ttctccctgcagaca

SEQ ID NO: 144057 - DNA, 15 bp, Homo sapiens
cttctccctgcagac

SEQ ID NO: 144058 - DNA, 15 bp, Homo sapiens
ccttctccctgcaga

SEQ ID NO: 144059 - DNA, 15 bp, Homo sapiens
tccttctccctgcag

SEQ ID NO: 144060 - DNA, 15 bp, Homo sapiens
atccttctccctgca

SEQ ID NO: 144061 - DNA, 15 bp, Homo sapiens
aatccttctccctgc

SEQ ID NO: 144062 - DNA, 15 bp, Homo sapiens
gaatccttctccctg

SEQ ID NO: 144063 - DNA, 15 bp, Homo sapiens
ggaatccttctccct

SEQ ID NO: 144064 - DNA, 15 bp, Homo sapiens
tggaatccttctccc

SEQ ID NO: 144065 - DNA, 15 bp, Homo sapiens
atggaatccttctcc

SEQ ID NO: 144066 - DNA, 15 bp, Homo sapiens
aatggaatccttctc

SEQ ID NO: 144067 - DNA, 15 bp, Homo sapiens
aaatggaatccttct

SEQ ID NO: 144068 - DNA, 15 bp, Homo sapiens
aaaatggaatccttc

SEQ ID NO: 144069 - DNA, 15 bp, Homo sapiens
aaaaatggaatcctt

SEQ ID NO: 144070 - DNA, 15 bp, Homo sapiens
gaaaaatggaatcct

SEQ ID NO: 144071 - DNA, 15 bp, Homo sapiens
agaaaaatggaatcc

SEQ ID NO: 144072 - DNA, 15 bp, Homo sapiens
aagaaaaatggaatc

SEQ ID NO: 144073 - DNA, 15 bp, Homo sapiens
gaagaaaaatggaat

SEQ ID NO: 144074 - DNA, 15 bp, Homo sapiens
agaagaaaaatggaa

SEQ ID NO: 144075 - DNA, 15 bp, Homo sapiens
gagaagaaaaatgga

SEQ ID NO: 144076 - DNA, 15 bp, Homo sapiens
tgagaagaaaaatgg

SEQ ID NO: 144077 - DNA, 15 bp, Homo sapiens
ctgagaagaaaaatg

SEQ ID NO: 144078 - DNA, 15 bp, Homo sapiens
gctgagaagaaaaat

SEQ ID NO: 144079 - DNA, 15 bp, Homo sapiens
agctgagaagaaaaa

SEQ ID NO: 144080 - DNA, 15 bp, Homo sapiens
cagctgagaagaaaa

SEQ ID NO: 144081 - DNA, 15 bp, Homo sapiens
ccagctgagaagaaa

SEQ ID NO: 144082 - DNA, 15 bp, Homo sapiens
accagctgagaagaa

SEQ ID NO: 144083 - DNA, 15 bp, Homo sapiens
gaccagctgagaaga

SEQ ID NO: 144084 - DNA, 15 bp, Homo sapiens
ggaccagctgagaag

SEQ ID NO: 144085 - DNA, 15 bp, Homo sapiens
gggaccagctgagaa

SEQ ID NO: 144086 - DNA, 15 bp, Homo sapiens
ggggaccagctgaga

SEQ ID NO: 144087 - DNA, 15 bp, Homo sapiens
tggggaccagctgag

SEQ ID NO: 144088 - DNA, 15 bp, Homo sapiens
ctggggaccagctga

SEQ ID NO: 144089 - DNA, 15 bp, Homo sapiens
cctggggaccagctg

SEQ ID NO: 144090 - DNA, 15 bp, Homo sapiens
gcctggggaccagct

SEQ ID NO: 144091 - DNA, 15 bp, Homo sapiens
ggcctggggaccagc

SEQ ID NO: 144092 - DNA, 15 bp, Homo sapiens
gggcctggggaccag

SEQ ID NO: 144093 - DNA, 15 bp, Homo sapiens
tgggcctggggacca

SEQ ID NO: 144094 - DNA, 15 bp, Homo sapiens
gtgggcctggggacc

SEQ ID NO: 144095 - DNA, 15 bp, Homo sapiens
cgtgggcctggggac

SEQ ID NO: 144096 - DNA, 15 bp, Homo sapiens
ccgtgggcctgggga

SEQ ID NO: 144097 - DNA, 15 bp, Homo sapiens
cccgtgggcctgggg

SEQ ID NO: 144098 - DNA, 15 bp, Homo sapiens
gcccgtgggcctggg

SEQ ID NO: 144099 - DNA, 15 bp, Homo sapiens
tgcccgtgggcctgg

SEQ ID NO: 144100 - DNA, 15 bp, Homo sapiens
gtgcccgtgggcctg

SEQ ID NO: 144101 - DNA, 15 bp, Homo sapiens
tgtgcccgtgggcct

SEQ ID NO: 144102 - DNA, 15 bp, Homo sapiens
ctgtgcccgtgggcc

SEQ ID NO: 144103 - DNA, 15 bp, Homo sapiens
cctgtgcccgtgggc

SEQ ID NO: 144104 - DNA, 15 bp, Homo sapiens
ccctgtgcccgtggg

SEQ ID NO: 144105 - DNA, 15 bp, Homo sapiens
tccctgtgcccgtgg

SEQ ID NO: 144106 - DNA, 15 bp, Homo sapiens
ctccctgtgcccgtg

SEQ ID NO: 144107 - DNA, 15 bp, Homo sapiens
tctccctgtgcccgt

SEQ ID NO: 144108 - DNA, 15 bp, Homo sapiens
ctctccctgtgcccg

SEQ ID NO: 144109 - DNA, 15 bp, Homo sapiens
cctctccctgtgccc

SEQ ID NO: 144110 - DNA, 15 bp, Homo sapiens
ccctctccctgtgcc

SEQ ID NO: 144111 - DNA, 15 bp, Homo sapiens
tccctctccctgtgc

SEQ ID NO: 144112 - DNA, 15 bp, Homo sapiens
gtccctctccctgtg

SEQ ID NO: 144113 - DNA, 15 bp, Homo sapiens
tgtccctctccctgt

SEQ ID NO: 144114 - DNA, 15 bp, Homo sapiens
ttgtccctctccctg

SEQ ID NO: 144115 - DNA, 15 bp, Homo sapiens
gttgtccctctccct

SEQ ID NO: 144116 - DNA, 15 bp, Homo sapiens
agttgtccctctccc

SEQ ID NO: 144117 - DNA, 15 bp, Homo sapiens
cagttgtccctctcc

SEQ ID NO: 144118 - DNA, 15 bp, Homo sapiens
gcagttgtccctctc

SEQ ID NO: 144119 - DNA, 15 bp, Homo sapiens
tgcagttgtccctct

SEQ ID NO: 144120 - DNA, 15 bp, Homo sapiens
ctgcagttgtccctc

SEQ ID NO: 144121 - DNA, 15 bp, Homo sapiens
gctgcagttgtccct

SEQ ID NO: 144122 - DNA, 15 bp, Homo sapiens
tgctgcagttgtccc

SEQ ID NO: 144123 - DNA, 15 bp, Homo sapiens
ctgctgcagttgtcc

SEQ ID NO: 144124 - DNA, 15 bp, Homo sapiens
actgctgcagttgtc

SEQ ID NO: 144125 - DNA, 15 bp, Homo sapiens
cactgctgcagttgt

SEQ ID NO: 144126 - DNA, 15 bp, Homo sapiens
ccactgctgcagttg

SEQ ID NO: 144127 - DNA, 15 bp, Homo sapiens
cccactgctgcagtt

SEQ ID NO: 144128 - DNA, 15 bp, Homo sapiens
ccccactgctgcagt

SEQ ID NO: 144129 - DNA, 15 bp, Homo sapiens
tccccactgctgcag

SEQ ID NO: 144130 - DNA, 15 bp, Homo sapiens
ctccccactgctgca

SEQ ID NO: 144131 - DNA, 15 bp, Homo sapiens
cctccccactgctgc

SEQ ID NO: 144132 - DNA, 15 bp, Homo sapiens
tcctccccactgctg

SEQ ID NO: 144133 - DNA, 15 bp, Homo sapiens
ctcctccccactgct

SEQ ID NO: 144134 - DNA, 15 bp, Homo sapiens
cctcctccccactgc

SEQ ID NO: 144135 - DNA, 15 bp, Homo sapiens
gcctcctccccactg

SEQ ID NO: 144136 - DNA, 15 bp, Homo sapiens
tgcctcctccccact

SEQ ID NO: 144137 - DNA, 15 bp, Homo sapiens
gtgcctcctccccac

SEQ ID NO: 144138 - DNA, 15 bp, Homo sapiens
tgtgcctcctcccca

SEQ ID NO: 144139 - DNA, 15 bp, Homo sapiens
ctgtgcctcctcccc

SEQ ID NO: 144140 - DNA, 15 bp, Homo sapiens
gctgtgcctcctccc

SEQ ID NO: 144141 - DNA, 15 bp, Homo sapiens
agctgtgcctcctcc

SEQ ID NO: 144142 - DNA, 15 bp, Homo sapiens
tagctgtgcctcctc

SEQ ID NO: 144143 - DNA, 15 bp, Homo sapiens
ctagctgtgcctcct

SEQ ID NO: 144144 - DNA, 15 bp, Homo sapiens
gctagctgtgcctcc

SEQ ID NO: 144145 - DNA, 15 bp, Homo sapiens
agctagctgtgcctc

SEQ ID NO: 144146 - DNA, 15 bp, Homo sapiens
cagctagctgtgcct

SEQ ID NO: 144147 - DNA, 15 bp, Homo sapiens
gcagctagctgtgcc

SEQ ID NO: 144148 - DNA, 15 bp, Homo sapiens
tgcagctagctgtgc

SEQ ID NO: 144149 - DNA, 15 bp, Homo sapiens
gtgcagctagctgtg

SEQ ID NO: 144150 - DNA, 15 bp, Homo sapiens
tgtgcagctagctgt

SEQ ID NO: 144151 - DNA, 15 bp, Homo sapiens
ctgtgcagctagctg

SEQ ID NO: 144152 - DNA, 15 bp, Homo sapiens
actgtgcagctagct

SEQ ID NO: 144153 - DNA, 15 bp, Homo sapiens
aactgtgcagctagc

SEQ ID NO: 144154 - DNA, 15 bp, Homo sapiens
gaactgtgcagctag

SEQ ID NO: 144155 - DNA, 15 bp, Homo sapiens
agaactgtgcagcta

SEQ ID NO: 144156 - DNA, 15 bp, Homo sapiens
gagaactgtgcagct

SEQ ID NO: 144157 - DNA, 15 bp, Homo sapiens
agagaactgtgcagc

SEQ ID NO: 144158 - DNA, 15 bp, Homo sapiens
gagagaactgtgcag

SEQ ID NO: 144159 - DNA, 15 bp, Homo sapiens
agagagaactgtgca

SEQ ID NO: 144160 - DNA, 15 bp, Homo sapiens
aagagagaactgtgc

SEQ ID NO: 144161 - DNA, 15 bp, Homo sapiens
gaagagagaactgtg

SEQ ID NO: 144162 - DNA, 15 bp, Homo sapiens
agaagagagaactgt

SEQ ID NO: 144163 - DNA, 15 bp, Homo sapiens
gagaagagagaactg

SEQ ID NO: 144164 - DNA, 15 bp, Homo sapiens
ggagaagagagaact

SEQ ID NO: 144165 - DNA, 15 bp, Homo sapiens
aggagaagagagaac

SEQ ID NO: 144166 - DNA, 15 bp, Homo sapiens
aaggagaagagagaa

SEQ ID NO: 144167 - DNA, 15 bp, Homo sapiens
caaggagaagagaga

SEQ ID NO: 144168 - DNA, 15 bp, Homo sapiens
acaaggagaagagag

SEQ ID NO: 144169 - DNA, 15 bp, Homo sapiens
gacaaggagaagaga

SEQ ID NO: 144170 - DNA, 15 bp, Homo sapiens
ggacaaggagaagag

SEQ ID NO: 144171 - DNA, 15 bp, Homo sapiens
aggacaaggagaaga

SEQ ID NO: 144172 - DNA, 15 bp, Homo sapiens
taggacaaggagaag

SEQ ID NO: 144173 - DNA, 15 bp, Homo sapiens
ctaggacaaggagaa

SEQ ID NO: 144174 - DNA, 15 bp, Homo sapiens
actaggacaaggaga

SEQ ID NO: 144175 - DNA, 15 bp, Homo sapiens
gactaggacaaggag

SEQ ID NO: 144176 - DNA, 15 bp, Homo sapiens
tgactaggacaagga

SEQ ID NO: 144177 - DNA, 15 bp, Homo sapiens
ctgactaggacaagg

SEQ ID NO: 144178 - DNA, 15 bp, Homo sapiens
tctgactaggacaag

SEQ ID NO: 144179 - DNA, 15 bp, Homo sapiens
atctgactaggacaa

SEQ ID NO: 144180 - DNA, 15 bp, Homo sapiens
catctgactaggaca

SEQ ID NO: 144181 - DNA, 15 bp, Homo sapiens
tcatctgactaggac

SEQ ID NO: 144182 - DNA, 15 bp, Homo sapiens
ttcatctgactagga

SEQ ID NO: 144183 - DNA, 15 bp, Homo sapiens
cttcatctgactagg

SEQ ID NO: 144184 - DNA, 15 bp, Homo sapiens
ccttcatctgactag

SEQ ID NO: 144185 - DNA, 15 bp, Homo sapiens
tccttcatctgacta

SEQ ID NO: 144186 - DNA, 15 bp, Homo sapiens
ctccttcatctgact

SEQ ID NO: 144187 - DNA, 15 bp, Homo sapiens
cctccttcatctgac

SEQ ID NO: 144188 - DNA, 15 bp, Homo sapiens
gcctccttcatctga

SEQ ID NO: 144189 - DNA, 15 bp, Homo sapiens
agcctccttcatctg

SEQ ID NO: 144190 - DNA, 15 bp, Homo sapiens
cagcctccttcatct

SEQ ID NO: 144191 - DNA, 15 bp, Homo sapiens
gcagcctccttcatc

SEQ ID NO: 144192 - DNA, 15 bp, Homo sapiens
tgcagcctccttcat

SEQ ID NO: 144193 - DNA, 15 bp, Homo sapiens
gtgcagcctccttca

SEQ ID NO: 144194 - DNA, 15 bp, Homo sapiens
agtgcagcctccttc

SEQ ID NO: 144195 - DNA, 15 bp, Homo sapiens
tagtgcagcctcctt

SEQ ID NO: 144196 - DNA, 15 bp, Homo sapiens
gtagtgcagcctcct

SEQ ID NO: 144197 - DNA, 15 bp, Homo sapiens
tgtagtgcagcctcc

SEQ ID NO: 144198 - DNA, 15 bp, Homo sapiens
ttgtagtgcagcctc

SEQ ID NO: 144199 - DNA, 15 bp, Homo sapiens
tttgtagtgcagcct

SEQ ID NO: 144200 - DNA, 15 bp, Homo sapiens
gtttgtagtgcagcc

SEQ ID NO: 144201 - DNA, 15 bp, Homo sapiens
ggtttgtagtgcagc

SEQ ID NO: 144202 - DNA, 15 bp, Homo sapiens
gggtttgtagtgcag

SEQ ID NO: 144203 - DNA, 15 bp, Homo sapiens
tgggtttgtagtgca

SEQ ID NO: 144204 - DNA, 15 bp, Homo sapiens
ttgggtttgtagtgc

SEQ ID NO: 144205 - DNA, 15 bp, Homo sapiens
tttgggtttgtagtg

SEQ ID NO: 144206 - DNA, 15 bp, Homo sapiens
atttgggtttgtagt

SEQ ID NO: 144207 - DNA, 15 bp, Homo sapiens
aatttgggtttgtag

SEQ ID NO: 144208 - DNA, 15 bp, Homo sapiens
gaatttgggtttgta

SEQ ID NO: 144209 - DNA, 15 bp, Homo sapiens
agaatttgggtttgt

SEQ ID NO: 144210 - DNA, 15 bp, Homo sapiens
cagaatttgggtttg

SEQ ID NO: 144211 - DNA, 15 bp, Homo sapiens
gcagaatttgggttt

SEQ ID NO: 144212 - DNA, 15 bp, Homo sapiens
tgcagaatttgggtt

SEQ ID NO: 144213 - DNA, 15 bp, Homo sapiens
ttgcagaatttgggt

SEQ ID NO: 144214 - DNA, 15 bp, Homo sapiens
tttgcagaatttggg

SEQ ID NO: 144215 - DNA, 15 bp, Homo sapiens
ttttgcagaatttgg

SEQ ID NO: 144216 - DNA, 15 bp, Homo sapiens
tttttgcagaatttg

SEQ ID NO: 144217 - DNA, 15 bp, Homo sapiens
ttttttgcagaattt

SEQ ID NO: 144218 - DNA, 15 bp, Homo sapiens
tttttttgcagaatt

SEQ ID NO: 144219 - DNA, 15 bp, Homo sapiens
atttttttgcagaat

SEQ ID NO: 144220 - DNA, 15 bp, Homo sapiens
tatttttttgcagaa

SEQ ID NO: 144221 - DNA, 15 bp, Homo sapiens
ttatttttttgcaga

SEQ ID NO: 144222 - DNA, 15 bp, Homo sapiens
tttatttttttgcag

SEQ ID NO: 144223 - DNA, 15 bp, Homo sapiens
ttttatttttttgca

SEQ ID NO: 144224 - DNA, 15 bp, Homo sapiens
tttttatttttttgc

SEQ ID NO: 144225 - DNA, 15 bp, Homo sapiens
atttttatttttttg

SEQ ID NO: 144226 - DNA, 15 bp, Homo sapiens
tatttttattttttt

SEQ ID NO: 144227 - DNA, 15 bp, Homo sapiens
ttatttttatttttt

SEQ ID NO: 144228 - DNA, 15 bp, Homo sapiens
cttatttttattttt

SEQ ID NO: 144229 - DNA, 15 bp, Homo sapiens
gcttatttttatttt

SEQ ID NO: 144230 - DNA, 15 bp, Homo sapiens
ggcttatttttattt

SEQ ID NO: 144231 - DNA, 15 bp, Homo sapiens
tggcttatttttatt

SEQ ID NO: 144232 - DNA, 15 bp, Homo sapiens
gtggcttatttttat

SEQ ID NO: 144233 - DNA, 15 bp, Homo sapiens
tgtggcttattttta

SEQ ID NO: 144234 - DNA, 15 bp, Homo sapiens
ttgtggcttattttt

SEQ ID NO: 144235 - DNA, 15 bp, Homo sapiens
tttgtggcttatttt

SEQ ID NO: 144236 - DNA, 15 bp, Homo sapiens
ttttgtggcttattt

SEQ ID NO: 144237 - DNA, 15 bp, Homo sapiens
gttttgtggcttatt

SEQ ID NO: 144238 - DNA, 15 bp, Homo sapiens
agttttgtggcttat

SEQ ID NO: 144239 - DNA, 15 bp, Homo sapiens
tagttttgtggctta

SEQ ID NO: 144240 - DNA, 15 bp, Homo sapiens
ttagttttgtggctt

SEQ ID NO: 144241 - DNA, 15 bp, Homo sapiens
tttagttttgtggct

SEQ ID NO: 144242 - DNA, 15 bp, Homo sapiens
ttttagttttgtggc

SEQ ID NO: 144243 - DNA, 15 bp, Homo sapiens
cttttagttttgtgg

SEQ ID NO: 144244 - DNA, 15 bp, Homo sapiens
ccttttagttttgtg

SEQ ID NO: 144245 - DNA, 15 bp, Homo sapiens
gccttttagttttgt

SEQ ID NO: 144246 - DNA, 15 bp, Homo sapiens
ggccttttagttttg

SEQ ID NO: 144247 - DNA, 15 bp, Homo sapiens
aggccttttagtttt

SEQ ID NO: 144248 - DNA, 15 bp, Homo sapiens
caggccttttagttt

SEQ ID NO: 144249 - DNA, 15 bp, Homo sapiens
ccaggccttttagtt

SEQ ID NO: 144250 - DNA, 15 bp, Homo sapiens
gccaggccttttagt

SEQ ID NO: 144251 - DNA, 15 bp, Homo sapiens
ggccaggccttttag

SEQ ID NO: 144252 - DNA, 15 bp, Homo sapiens
gggccaggcctttta

SEQ ID NO: 144253 - DNA, 15 bp, Homo sapiens
ggggccaggcctttt

SEQ ID NO: 144254 - DNA, 15 bp, Homo sapiens
tggggccaggccttt

SEQ ID NO: 144255 - DNA, 15 bp, Homo sapiens
atggggccaggcctt

SEQ ID NO: 144256 - DNA, 15 bp, Homo sapiens
aatggggccaggcct

SEQ ID NO: 144257 - DNA, 15 bp, Homo sapiens
gaatggggccaggcc

SEQ ID NO: 144258 - DNA, 15 bp, Homo sapiens
agaatggggccaggc

SEQ ID NO: 144259 - DNA, 15 bp, Homo sapiens
cagaatggggccagg

SEQ ID NO: 144260 - DNA, 15 bp, Homo sapiens
ccagaatggggccag

SEQ ID NO: 144261 - DNA, 15 bp, Homo sapiens
tccagaatggggcca

SEQ ID NO: 144262 - DNA, 15 bp, Homo sapiens
ttccagaatggggcc

SEQ ID NO: 144263 - DNA, 15 bp, Homo sapiens
tttccagaatggggc

SEQ ID NO: 144264 - DNA, 15 bp, Homo sapiens
ttttccagaatgggg

SEQ ID NO: 144265 - DNA, 15 bp, Homo sapiens
cttttccagaatggg

SEQ ID NO: 144266 - DNA, 15 bp, Homo sapiens
ccttttccagaatgg

SEQ ID NO: 144267 - DNA, 15 bp, Homo sapiens
gccttttccagaatg

SEQ ID NO: 144268 - DNA, 15 bp, Homo sapiens
tgccttttccagaat

SEQ ID NO: 144269 - DNA, 15 bp, Homo sapiens
ttgccttttccagaa

SEQ ID NO: 144270 - DNA, 15 bp, Homo sapiens
tttgccttttccaga

SEQ ID NO: 144271 - DNA, 15 bp, Homo sapiens
ctttgccttttccag

SEQ ID NO: 144272 - DNA, 15 bp, Homo sapiens
gctttgccttttcca

SEQ ID NO: 144273 - DNA, 15 bp, Homo sapiens
agctttgccttttcc

SEQ ID NO: 144274 - DNA, 15 bp, Homo sapiens
cagctttgccttttc

SEQ ID NO: 144275 - DNA, 15 bp, Homo sapiens
gcagctttgcctttt

SEQ ID NO: 144276 - DNA, 15 bp, Homo sapiens
tgcagctttgccttt

SEQ ID NO: 144277 - DNA, 15 bp, Homo sapiens
atgcagctttgcctt

SEQ ID NO: 144278 - DNA, 15 bp, Homo sapiens
catgcagctttgcct

SEQ ID NO: 144279 - DNA, 15 bp, Homo sapiens
tcatgcagctttgcc

SEQ ID NO: 144280 - DNA, 15 bp, Homo sapiens
ctcatgcagctttgc

SEQ ID NO: 144281 - DNA, 15 bp, Homo sapiens
tctcatgcagctttg

SEQ ID NO: 144282 - DNA, 15 bp, Homo sapiens
gtctcatgcagcttt

SEQ ID NO: 144283 - DNA, 15 bp, Homo sapiens
tgtctcatgcagctt

SEQ ID NO: 144284 - DNA, 15 bp, Homo sapiens
gtgtctcatgcagct

SEQ ID NO: 144285 - DNA, 15 bp, Homo sapiens
tgtgtctcatgcagc

SEQ ID NO: 144286 - DNA, 15 bp, Homo sapiens
ctgtgtctcatgcag

SEQ ID NO: 144287 - DNA, 15 bp, Homo sapiens
gctgtgtctcatgca

SEQ ID NO: 144288 - DNA, 15 bp, Homo sapiens
ggctgtgtctcatgc

SEQ ID NO: 144289 - DNA, 15 bp, Homo sapiens
aggctgtgtctcatg

SEQ ID NO: 144290 - DNA, 15 bp, Homo sapiens
aaggctgtgtctcat

SEQ ID NO: 144291 - DNA, 15 bp, Homo sapiens
gaaggctgtgtctca

SEQ ID NO: 144292 - DNA, 15 bp, Homo sapiens
agaaggctgtgtctc

SEQ ID NO: 144293 - DNA, 15 bp, Homo sapiens
cagaaggctgtgtct

SEQ ID NO: 144294 - DNA, 15 bp, Homo sapiens
gcagaaggctgtgtc

SEQ ID NO: 144295 - DNA, 15 bp, Homo sapiens
ggcagaaggctgtgt

SEQ ID NO: 144296 - DNA, 15 bp, Homo sapiens
aggcagaaggctgtg

SEQ ID NO: 144297 - DNA, 15 bp, Homo sapiens
gaggcagaaggctgt

SEQ ID NO: 144298 - DNA, 15 bp, Homo sapiens
ggaggcagaaggctg

SEQ ID NO: 144299 - DNA, 15 bp, Homo sapiens
aggaggcagaaggct

SEQ ID NO: 144300 - DNA, 15 bp, Homo sapiens
gaggaggcagaaggc

SEQ ID NO: 144301 - DNA, 15 bp, Homo sapiens
cgaggaggcagaagg

SEQ ID NO: 144302 - DNA, 15 bp, Homo sapiens
gcgaggaggcagaag

SEQ ID NO: 144303 - DNA, 15 bp, Homo sapiens
ggcgaggaggcagaa

SEQ ID NO: 144304 - DNA, 15 bp, Homo sapiens
aggcgaggaggcaga

SEQ ID NO: 144305 - DNA, 15 bp, Homo sapiens
gaggcgaggaggcag

SEQ ID NO: 144306 - DNA, 15 bp, Homo sapiens
agaggcgaggaggca

SEQ ID NO: 144307 - DNA, 15 bp, Homo sapiens
gagaggcgaggaggc

SEQ ID NO: 144308 - DNA, 15 bp, Homo sapiens
ggagaggcgaggagg

SEQ ID NO: 144309 - DNA, 15 bp, Homo sapiens
aggagaggcgaggag

SEQ ID NO: 144310 - DNA, 15 bp, Homo sapiens
caggagaggcgagga

SEQ ID NO: 144311 - DNA, 15 bp, Homo sapiens
ccaggagaggcgagg

SEQ ID NO: 144312 - DNA, 15 bp, Homo sapiens
tccaggagaggcgag

SEQ ID NO: 144313 - DNA, 15 bp, Homo sapiens
gtccaggagaggcga

SEQ ID NO: 144314 - DNA, 15 bp, Homo sapiens
agtccaggagaggcg

SEQ ID NO: 144315 - DNA, 15 bp, Homo sapiens
cagtccaggagaggc

SEQ ID NO: 144316 - DNA, 15 bp, Homo sapiens
ccagtccaggagagg

SEQ ID NO: 144317 - DNA, 15 bp, Homo sapiens
gccagtccaggagag

SEQ ID NO: 144318 - DNA, 15 bp, Homo sapiens
agccagtccaggaga

SEQ ID NO: 144319 - DNA, 15 bp, Homo sapiens
aagccagtccaggag

SEQ ID NO: 144320 - DNA, 15 bp, Homo sapiens
gaagccagtccagga

SEQ ID NO: 144321 - DNA, 15 bp, Homo sapiens
ggaagccagtccagg

SEQ ID NO: 144322 - DNA, 15 bp, Homo sapiens
aggaagccagtccag

SEQ ID NO: 144323 - DNA, 15 bp, Homo sapiens
gaggaagccagtcca

SEQ ID NO: 144324 - DNA, 15 bp, Homo sapiens
agaggaagccagtcc

SEQ ID NO: 144325 - DNA, 15 bp, Homo sapiens
aagaggaagccagtc

SEQ ID NO: 144326 - DNA, 15 bp, Homo sapiens
aaagaggaagccagt

SEQ ID NO: 144327 - DNA, 15 bp, Homo sapiens
caaagaggaagccag

SEQ ID NO: 144328 - DNA, 15 bp, Homo sapiens
tcaaagaggaagcca

SEQ ID NO: 144329 - DNA, 15 bp, Homo sapiens
ctcaaagaggaagcc

SEQ ID NO: 144330 - DNA, 15 bp, Homo sapiens
tctcaaagaggaagc

SEQ ID NO: 144331 - DNA, 15 bp, Homo sapiens
ttctcaaagaggaag

SEQ ID NO: 144332 - DNA, 15 bp, Homo sapiens
tttctcaaagaggaa

SEQ ID NO: 144333 - DNA, 15 bp, Homo sapiens
ttttctcaaagagga

SEQ ID NO: 144334 - DNA, 15 bp, Homo sapiens
attttctcaaagagg

SEQ ID NO: 144335 - DNA, 15 bp, Homo sapiens
cattttctcaaagag

SEQ ID NO: 144336 - DNA, 15 bp, Homo sapiens
gcattttctcaaaga

SEQ ID NO: 144337 - DNA, 15 bp, Homo sapiens
tgcattttctcaaag

SEQ ID NO: 144338 - DNA, 15 bp, Homo sapiens
gtgcattttctcaaa

SEQ ID NO: 144339 - DNA, 15 bp, Homo sapiens
tgtgcattttctcaa

SEQ ID NO: 144340 - DNA, 15 bp, Homo sapiens
ttgtgcattttctca

SEQ ID NO: 144341 - DNA, 15 bp, Homo sapiens
tttgtgcattttctc

SEQ ID NO: 144342 - DNA, 15 bp, Homo sapiens
ctttgtgcattttct

SEQ ID NO: 144343 - DNA, 15 bp, Homo sapiens
gctttgtgcattttc

SEQ ID NO: 144344 - DNA, 15 bp, Homo sapiens
ggctttgtgcatttt

SEQ ID NO: 144345 - DNA, 15 bp, Homo sapiens
gggctttgtgcattt

SEQ ID NO: 144346 - DNA, 15 bp, Homo sapiens
agggctttgtgcatt

SEQ ID NO: 144347 - DNA, 15 bp, Homo sapiens
cagggctttgtgcat

SEQ ID NO: 144348 - DNA, 15 bp, Homo sapiens
ccagggctttgtgca

SEQ ID NO: 144349 - DNA, 15 bp, Homo sapiens
cccagggctttgtgc

SEQ ID NO: 144350 - DNA, 15 bp, Homo sapiens
tcccagggctttgtg

SEQ ID NO: 144351 - DNA, 15 bp, Homo sapiens
ctcccagggctttgt

SEQ ID NO: 144352 - DNA, 15 bp, Homo sapiens
tctcccagggctttg

SEQ ID NO: 144353 - DNA, 15 bp, Homo sapiens
atctcccagggcttt

SEQ ID NO: 144354 - DNA, 15 bp, Homo sapiens
catctcccagggctt

SEQ ID NO: 144355 - DNA, 15 bp, Homo sapiens
tcatctcccagggct

SEQ ID NO: 144356 - DNA, 15 bp, Homo sapiens
gtcatctcccagggc

SEQ ID NO: 144357 - DNA, 15 bp, Homo sapiens
tgtcatctcccaggg

SEQ ID NO: 144358 - DNA, 15 bp, Homo sapiens
ttgtcatctcccagg

SEQ ID NO: 144359 - DNA, 15 bp, Homo sapiens
cttgtcatctcccag

SEQ ID NO: 144360 - DNA, 15 bp, Homo sapiens
gcttgtcatctccca

SEQ ID NO: 144361 - DNA, 15 bp, Homo sapiens
tgcttgtcatctccc

SEQ ID NO: 144362 - DNA, 15 bp, Homo sapiens
gtgcttgtcatctcc

SEQ ID NO: 144363 - DNA, 15 bp, Homo sapiens
tgtgcttgtcatctc

SEQ ID NO: 144364 - DNA, 15 bp, Homo sapiens
ttgtgcttgtcatct

SEQ ID NO: 144365 - DNA, 15 bp, Homo sapiens
cttgtgcttgtcatc

SEQ ID NO: 144366 - DNA, 15 bp, Homo sapiens
ccttgtgcttgtcat

SEQ ID NO: 144367 - DNA, 15 bp, Homo sapiens
tccttgtgcttgtca

SEQ ID NO: 144368 - DNA, 15 bp, Homo sapiens
gtccttgtgcttgtc

SEQ ID NO: 144369 - DNA, 15 bp, Homo sapiens
agtccttgtgcttgt

SEQ ID NO: 144370 - DNA, 15 bp, Homo sapiens
cagtccttgtgcttg

SEQ ID NO: 144371 - DNA, 15 bp, Homo sapiens
tcagtccttgtgctt

SEQ ID NO: 144372 - DNA, 15 bp, Homo sapiens
gtcagtccttgtgct

SEQ ID NO: 144373 - DNA, 15 bp, Homo sapiens
agtcagtccttgtgc

SEQ ID NO: 144374 - DNA, 15 bp, Homo sapiens
gagtcagtccttgtg

SEQ ID NO: 144375 - DNA, 15 bp, Homo sapiens
tgagtcagtccttgt

SEQ ID NO: 144376 - DNA, 15 bp, Homo sapiens
ttgagtcagtccttg

SEQ ID NO: 144377 - DNA, 15 bp, Homo sapiens
cttgagtcagtcctt

SEQ ID NO: 144378 - DNA, 15 bp, Homo sapiens
gcttgagtcagtcct

SEQ ID NO: 144379 - DNA, 15 bp, Homo sapiens
agcttgagtcagtcc

SEQ ID NO: 144380 - DNA, 15 bp, Homo sapiens
cagcttgagtcagtc

SEQ ID NO: 144381 - DNA, 15 bp, Homo sapiens
acagcttgagtcagt

SEQ ID NO: 144382 - DNA, 15 bp, Homo sapiens
cacagcttgagtcag

SEQ ID NO: 144383 - DNA, 15 bp, Homo sapiens
acacagcttgagtca

SEQ ID NO: 144384 - DNA, 15 bp, Homo sapiens
gacacagcttgagtc

SEQ ID NO: 144385 - DNA, 15 bp, Homo sapiens
agacacagcttgagt

SEQ ID NO: 144386 - DNA, 15 bp, Homo sapiens
aagacacagcttgag

SEQ ID NO: 144387 - DNA, 15 bp, Homo sapiens
aaagacacagcttga

SEQ ID NO: 144388 - DNA, 15 bp, Homo sapiens
gaaagacacagcttg

SEQ ID NO: 144389 - DNA, 15 bp, Homo sapiens
tgaaagacacagctt

SEQ ID NO: 144390 - DNA, 15 bp, Homo sapiens
ctgaaagacacagct

SEQ ID NO: 144391 - DNA, 15 bp, Homo sapiens
tctgaaagacacagc

SEQ ID NO: 144392 - DNA, 15 bp, Homo sapiens
gtctgaaagacacag

SEQ ID NO: 144393 - DNA, 15 bp, Homo sapiens
ggtctgaaagacaca

SEQ ID NO: 144394 - DNA, 15 bp, Homo sapiens
tggtctgaaagacac

SEQ ID NO: 144395 - DNA, 15 bp, Homo sapiens
ttggtctgaaagaca

SEQ ID NO: 144396 - DNA, 15 bp, Homo sapiens
cttggtctgaaagac

SEQ ID NO: 144397 - DNA, 15 bp, Homo sapiens
ccttggtctgaaaga

SEQ ID NO: 144398 - DNA, 15 bp, Homo sapiens
tccttggtctgaaag

SEQ ID NO: 144399 - DNA, 15 bp, Homo sapiens
ttccttggtctgaaa

SEQ ID NO: 144400 - DNA, 15 bp, Homo sapiens
gttccttggtctgaa

SEQ ID NO: 144401 - DNA, 15 bp, Homo sapiens
tgttccttggtctga

SEQ ID NO: 144402 - DNA, 15 bp, Homo sapiens
atgttccttggtctg

SEQ ID NO: 144403 - DNA, 15 bp, Homo sapiens
gatgttccttggtct

SEQ ID NO: 144404 - DNA, 15 bp, Homo sapiens
tgatgttccttggtc

SEQ ID NO: 144405 - DNA, 15 bp, Homo sapiens
ctgatgttccttggt

SEQ ID NO: 144406 - DNA, 15 bp, Homo sapiens
tctgatgttccttgg

SEQ ID NO: 144407 - DNA, 15 bp, Homo sapiens
ctctgatgttccttg

SEQ ID NO: 144408 - DNA, 15 bp, Homo sapiens
tctctgatgttcctt

SEQ ID NO: 144409 - DNA, 15 bp, Homo sapiens
ttctctgatgttcct

SEQ ID NO: 144410 - DNA, 15 bp, Homo sapiens
cttctctgatgttcc

SEQ ID NO: 144411 - DNA, 15 bp, Homo sapiens
gcttctctgatgttc

SEQ ID NO: 144412 - DNA, 15 bp, Homo sapiens
agcttctctgatgtt

SEQ ID NO: 144413 - DNA, 15 bp, Homo sapiens
cagcttctctgatgt

SEQ ID NO: 144414 - DNA, 15 bp, Homo sapiens
acagcttctctgatg

SEQ ID NO: 144415 - DNA, 15 bp, Homo sapiens
cacagcttctctgat

SEQ ID NO: 144416 - DNA, 15 bp, Homo sapiens
ccacagcttctctga

SEQ ID NO: 144417 - DNA, 15 bp, Homo sapiens
cccacagcttctctg

SEQ ID NO: 144418 - DNA, 15 bp, Homo sapiens
ccccacagcttctct

SEQ ID NO: 144419 - DNA, 15 bp, Homo sapiens
gccccacagcttctc

SEQ ID NO: 144420 - DNA, 15 bp, Homo sapiens
agccccacagcttct

SEQ ID NO: 144421 - DNA, 15 bp, Homo sapiens
cagccccacagcttc

SEQ ID NO: 144422 - DNA, 15 bp, Homo sapiens
gcagccccacagctt

SEQ ID NO: 144423 - DNA, 15 bp, Homo sapiens
ggcagccccacagct

SEQ ID NO: 144424 - DNA, 15 bp, Homo sapiens
aggcagccccacagc

SEQ ID NO: 144425 - DNA, 15 bp, Homo sapiens
caggcagccccacag

SEQ ID NO: 144426 - DNA, 15 bp, Homo sapiens
gcaggcagccccaca

SEQ ID NO: 144427 - DNA, 15 bp, Homo sapiens
ggcaggcagccccac

SEQ ID NO: 144428 - DNA, 15 bp, Homo sapiens
tggcaggcagcccca

SEQ ID NO: 144429 - DNA, 15 bp, Homo sapiens
ctggcaggcagcccc

SEQ ID NO: 144430 - DNA, 15 bp, Homo sapiens
cctggcaggcagccc

SEQ ID NO: 144431 - DNA, 15 bp, Homo sapiens
gcctggcaggcagcc

SEQ ID NO: 144432 - DNA, 15 bp, Homo sapiens
tgcctggcaggcagc

SEQ ID NO: 144433 - DNA, 15 bp, Homo sapiens
ctgcctggcaggcag

SEQ ID NO: 144434 - DNA, 15 bp, Homo sapiens
cctgcctggcaggca

SEQ ID NO: 144435 - DNA, 15 bp, Homo sapiens
tcctgcctggcaggc

SEQ ID NO: 144436 - DNA, 15 bp, Homo sapiens
atcctgcctggcagg

SEQ ID NO: 144437 - DNA, 15 bp, Homo sapiens
gatcctgcctggcag

SEQ ID NO: 144438 - DNA, 15 bp, Homo sapiens
tgatcctgcctggca

SEQ ID NO: 144439 - DNA, 15 bp, Homo sapiens
atgatcctgcctggc

SEQ ID NO: 144440 - DNA, 15 bp, Homo sapiens
catgatcctgcctgg

SEQ ID NO: 144441 - DNA, 15 bp, Homo sapiens
ccatgatcctgcctg

SEQ ID NO: 144442 - DNA, 15 bp, Homo sapiens
gccatgatcctgcct

SEQ ID NO: 144443 - DNA, 15 bp, Homo sapiens
agccatgatcctgcc

SEQ ID NO: 144444 - DNA, 15 bp, Homo sapiens
cagccatgatcctgc

SEQ ID NO: 144445 - DNA, 15 bp, Homo sapiens
gcagccatgatcctg

SEQ ID NO: 144446 - DNA, 15 bp, Homo sapiens
ggcagccatgatcct

SEQ ID NO: 144447 - DNA, 15 bp, Homo sapiens
tggcagccatgatcc

SEQ ID NO: 144448 - DNA, 15 bp, Homo sapiens
atggcagccatgatc

SEQ ID NO: 144449 - DNA, 15 bp, Homo sapiens
gatggcagccatgat

SEQ ID NO: 144450 - DNA, 15 bp, Homo sapiens
tgatggcagccatga

SEQ ID NO: 144451 - DNA, 15 bp, Homo sapiens
ttgatggcagccatg

SEQ ID NO: 144452 - DNA, 15 bp, Homo sapiens
cttgatggcagccat

SEQ ID NO: 144453 - DNA, 15 bp, Homo sapiens
gcttgatggcagcca

SEQ ID NO: 144454 - DNA, 15 bp, Homo sapiens
ggcttgatggcagcc

SEQ ID NO: 144455 - DNA, 15 bp, Homo sapiens
aggcttgatggcagc

SEQ ID NO: 144456 - DNA, 15 bp, Homo sapiens
aaggcttgatggcag

SEQ ID NO: 144457 - DNA, 15 bp, Homo sapiens
aaaggcttgatggca

SEQ ID NO: 144458 - DNA, 15 bp, Homo sapiens
aaaaggcttgatggc

SEQ ID NO: 144459 - DNA, 15 bp, Homo sapiens
gaaaaggcttgatgg

SEQ ID NO: 144460 - DNA, 15 bp, Homo sapiens
agaaaaggcttgatg

SEQ ID NO: 144461 - DNA, 15 bp, Homo sapiens
cagaaaaggcttgat

SEQ ID NO: 144462 - DNA, 15 bp, Homo sapiens
ccagaaaaggcttga

SEQ ID NO: 144463 - DNA, 15 bp, Homo sapiens
tccagaaaaggcttg

SEQ ID NO: 144464 - DNA, 15 bp, Homo sapiens
atccagaaaaggctt

SEQ ID NO: 144465 - DNA, 15 bp, Homo sapiens
gatccagaaaaggct

SEQ ID NO: 144466 - DNA, 15 bp, Homo sapiens
ggatccagaaaaggc

SEQ ID NO: 144467 - DNA, 15 bp, Homo sapiens
tggatccagaaaagg

SEQ ID NO: 144468 - DNA, 15 bp, Homo sapiens
ctggatccagaaaag

SEQ ID NO: 144469 - DNA, 15 bp, Homo sapiens
gctggatccagaaaa

SEQ ID NO: 144470 - DNA, 15 bp, Homo sapiens
ggctggatccagaaa

SEQ ID NO: 144471 - DNA, 15 bp, Homo sapiens
tggctggatccagaa

SEQ ID NO: 144472 - DNA, 15 bp, Homo sapiens
atggctggatccaga

SEQ ID NO: 144473 - DNA, 15 bp, Homo sapiens
gatggctggatccag

SEQ ID NO: 144474 - DNA, 15 bp, Homo sapiens
tgatggctggatcca

SEQ ID NO: 144475 - DNA, 15 bp, Homo sapiens
ttgatggctggatcc

SEQ ID NO: 144476 - DNA, 15 bp, Homo sapiens
cttgatggctggatc

SEQ ID NO: 144477 - DNA, 15 bp, Homo sapiens
ccttgatggctggat

SEQ ID NO: 144478 - DNA, 15 bp, Homo sapiens
tccttgatggctgga

SEQ ID NO: 144479 - DNA, 15 bp, Homo sapiens
gtccttgatggctgg

SEQ ID NO: 144480 - DNA, 15 bp, Homo sapiens
tgtccttgatggctg

SEQ ID NO: 144481 - DNA, 15 bp, Homo sapiens
atgtccttgatggct

SEQ ID NO: 144482 - DNA, 15 bp, Homo sapiens
catgtccttgatggc

SEQ ID NO: 144483 - DNA, 15 bp, Homo sapiens
acatgtccttgatgg

SEQ ID NO: 144484 - DNA, 15 bp, Homo sapiens
aacatgtccttgatg

SEQ ID NO: 144485 - DNA, 15 bp, Homo sapiens
aaacatgtccttgat

SEQ ID NO: 144486 - DNA, 15 bp, Homo sapiens
caaacatgtccttga

SEQ ID NO: 144487 - DNA, 15 bp, Homo sapiens
acaaacatgtccttg

SEQ ID NO: 144488 - DNA, 15 bp, Homo sapiens
cacaaacatgtcctt

SEQ ID NO: 144489 - DNA, 15 bp, Homo sapiens
ccacaaacatgtcct

SEQ ID NO: 144490 - DNA, 15 bp, Homo sapiens
accacaaacatgtcc

SEQ ID NO: 144491 - DNA, 15 bp, Homo sapiens
caccacaaacatgtc

SEQ ID NO: 144492 - DNA, 15 bp, Homo sapiens
acaccacaaacatgt

SEQ ID NO: 144493 - DNA, 15 bp, Homo sapiens
cacaccacaaacatg

SEQ ID NO: 144494 - DNA, 15 bp, Homo sapiens
tcacaccacaaacat

SEQ ID NO: 144495 - DNA, 15 bp, Homo sapiens
atcacaccacaaaca

SEQ ID NO: 144496 - DNA, 15 bp, Homo sapiens
catcacaccacaaac

SEQ ID NO: 144497 - DNA, 15 bp, Homo sapiens
gcatcacaccacaaa

SEQ ID NO: 144498 - DNA, 15 bp, Homo sapiens
tgcatcacaccacaa

SEQ ID NO: 144499 - DNA, 15 bp, Homo sapiens
gtgcatcacaccaca

SEQ ID NO: 144500 - DNA, 15 bp, Homo sapiens
tgtgcatcacaccac

SEQ ID NO: 144501 - DNA, 15 bp, Homo sapiens
gtgtgcatcacacca

SEQ ID NO: 144502 - DNA, 15 bp, Homo sapiens
agtgtgcatcacacc

SEQ ID NO: 144503 - DNA, 15 bp, Homo sapiens
aagtgtgcatcacac

SEQ ID NO: 144504 - DNA, 15 bp, Homo sapiens
aaagtgtgcatcaca

SEQ ID NO: 144505 - DNA, 15 bp, Homo sapiens
aaaagtgtgcatcac

SEQ ID NO: 144506 - DNA, 15 bp, Homo sapiens
caaaagtgtgcatca

SEQ ID NO: 144507 - DNA, 15 bp, Homo sapiens
gcaaaagtgtgcatc

SEQ ID NO: 144508 - DNA, 15 bp, Homo sapiens
tgcaaaagtgtgcat

SEQ ID NO: 144509 - DNA, 15 bp, Homo sapiens
ttgcaaaagtgtgca

SEQ ID NO: 144510 - DNA, 15 bp, Homo sapiens
cttgcaaaagtgtgc

SEQ ID NO: 144511 - DNA, 15 bp, Homo sapiens
gcttgcaaaagtgtg

SEQ ID NO: 144512 - DNA, 15 bp, Homo sapiens
cgcttgcaaaagtgt

SEQ ID NO: 144513 - DNA, 15 bp, Homo sapiens
acgcttgcaaaagtg

SEQ ID NO: 144514 - DNA, 15 bp, Homo sapiens
cacgcttgcaaaagt

SEQ ID NO: 144515 - DNA, 15 bp, Homo sapiens
acacgcttgcaaaag

SEQ ID NO: 144516 - DNA, 15 bp, Homo sapiens
tacacgcttgcaaaa

SEQ ID NO: 144517 - DNA, 15 bp, Homo sapiens
ttacacgcttgcaaa

SEQ ID NO: 144518 - DNA, 15 bp, Homo sapiens
cttacacgcttgcaa

SEQ ID NO: 144519 - DNA, 15 bp, Homo sapiens
tcttacacgcttgca

SEQ ID NO: 144520 - DNA, 15 bp, Homo sapiens
atcttacacgcttgc

SEQ ID NO: 144521 - DNA, 15 bp, Homo sapiens
catcttacacgcttg

SEQ ID NO: 144522 - DNA, 15 bp, Homo sapiens
acatcttacacgctt

SEQ ID NO: 144523 - DNA, 15 bp, Homo sapiens
aacatcttacacgct

SEQ ID NO: 144524 - DNA, 15 bp, Homo sapiens
taacatcttacacgc

SEQ ID NO: 144525 - DNA, 15 bp, Homo sapiens
gtaacatcttacacg

SEQ ID NO: 144526 - DNA, 15 bp, Homo sapiens
ggtaacatcttacac

SEQ ID NO: 144527 - DNA, 15 bp, Homo sapiens
aggtaacatcttaca

SEQ ID NO: 144528 - DNA, 15 bp, Homo sapiens
caggtaacatcttac

SEQ ID NO: 144529 - DNA, 15 bp, Homo sapiens
ccaggtaacatctta

SEQ ID NO: 144530 - DNA, 15 bp, Homo sapiens
accaggtaacatctt

SEQ ID NO: 144531 - DNA, 15 bp, Homo sapiens
aaccaggtaacatct

SEQ ID NO: 144532 - DNA, 15 bp, Homo sapiens
aaaccaggtaacatc

SEQ ID NO: 144533 - DNA, 15 bp, Homo sapiens
caaaccaggtaacat

SEQ ID NO: 144534 - DNA, 15 bp, Homo sapiens
acaaaccaggtaaca

SEQ ID NO: 144535 - DNA, 15 bp, Homo sapiens
gacaaaccaggtaac

SEQ ID NO: 144536 - DNA, 15 bp, Homo sapiens
agacaaaccaggtaa

SEQ ID NO: 144537 - DNA, 15 bp, Homo sapiens
gagacaaaccaggta

SEQ ID NO: 144538 - DNA, 15 bp, Homo sapiens
agagacaaaccaggt

SEQ ID NO: 144539 - DNA, 15 bp, Homo sapiens
aagagacaaaccagg

SEQ ID NO: 144540 - DNA, 15 bp, Homo sapiens
aaagagacaaaccag

SEQ ID NO: 144541 - DNA, 15 bp, Homo sapiens
aaaagagacaaacca

SEQ ID NO: 144542 - DNA, 15 bp, Homo sapiens
caaaagagacaaacc

SEQ ID NO: 144543 - DNA, 15 bp, Homo sapiens
ccaaaagagacaaac

SEQ ID NO: 144544 - DNA, 15 bp, Homo sapiens
tccaaaagagacaaa

SEQ ID NO: 144545 - DNA, 15 bp, Homo sapiens
ttccaaaagagacaa

SEQ ID NO: 144546 - DNA, 15 bp, Homo sapiens
tttccaaaagagaca

SEQ ID NO: 144547 - DNA, 15 bp, Homo sapiens
ttttccaaaagagac

SEQ ID NO: 144548 - DNA, 15 bp, Homo sapiens
gttttccaaaagaga

SEQ ID NO: 144549 - DNA, 15 bp, Homo sapiens
tgttttccaaaagag

SEQ ID NO: 144550 - DNA, 15 bp, Homo sapiens
ttgttttccaaaaga

SEQ ID NO: 144551 - DNA, 15 bp, Homo sapiens
tttgttttccaaaag

SEQ ID NO: 144552 - DNA, 15 bp, Homo sapiens
ttttgttttccaaaa

SEQ ID NO: 144553 - DNA, 15 bp, Homo sapiens
tttttgttttccaaa

SEQ ID NO: 144554 - DNA, 15 bp, Homo sapiens
atttttgttttccaa

SEQ ID NO: 144555 - DNA, 15 bp, Homo sapiens
gatttttgttttcca

SEQ ID NO: 144556 - DNA, 15 bp, Homo sapiens
tgatttttgttttcc

SEQ ID NO: 144557 - DNA, 15 bp, Homo sapiens
ctgatttttgttttc

SEQ ID NO: 144558 - DNA, 15 bp, Homo sapiens
tctgatttttgtttt

SEQ ID NO: 144559 - DNA, 15 bp, Homo sapiens
ttctgatttttgttt

SEQ ID NO: 144560 - DNA, 15 bp, Homo sapiens
cttctgatttttgtt

SEQ ID NO: 144561 - DNA, 15 bp, Homo sapiens
ccttctgatttttgt

SEQ ID NO: 144562 - DNA, 15 bp, Homo sapiens
gccttctgatttttg

SEQ ID NO: 144563 - DNA, 15 bp, Homo sapiens
agccttctgattttt

SEQ ID NO: 144564 - DNA, 15 bp, Homo sapiens
cagccttctgatttt

SEQ ID NO: 144565 - DNA, 15 bp, Homo sapiens
gcagccttctgattt

SEQ ID NO: 144566 - DNA, 15 bp, Homo sapiens
tgcagccttctgatt

SEQ ID NO: 144567 - DNA, 15 bp, Homo sapiens
atgcagccttctgat

SEQ ID NO: 144568 - DNA, 15 bp, Homo sapiens
aatgcagccttctga

SEQ ID NO: 144569 - DNA, 15 bp, Homo sapiens
gaatgcagccttctg

SEQ ID NO: 144570 - DNA, 15 bp, Homo sapiens
agaatgcagccttct

SEQ ID NO: 144571 - DNA, 15 bp, Homo sapiens
tagaatgcagccttc

SEQ ID NO: 144572 - DNA, 15 bp, Homo sapiens
ctagaatgcagcctt

SEQ ID NO: 144573 - DNA, 15 bp, Homo sapiens
tctagaatgcagcct

SEQ ID NO: 144574 - DNA, 15 bp, Homo sapiens
ctctagaatgcagcc

SEQ ID NO: 144575 - DNA, 15 bp, Homo sapiens
cctctagaatgcagc

SEQ ID NO: 144576 - DNA, 15 bp, Homo sapiens
ccctctagaatgcag

SEQ ID NO: 144577 - DNA, 15 bp, Homo sapiens
gccctctagaatgca

SEQ ID NO: 144578 - DNA, 15 bp, Homo sapiens
tgccctctagaatgc

SEQ ID NO: 144579 - DNA, 15 bp, Homo sapiens
ctgccctctagaatg

SEQ ID NO: 144580 - DNA, 15 bp, Homo sapiens
tctgccctctagaat

SEQ ID NO: 144581 - DNA, 15 bp, Homo sapiens
ctctgccctctagaa

SEQ ID NO: 144582 - DNA, 15 bp, Homo sapiens
tctctgccctctaga

SEQ ID NO: 144583 - DNA, 15 bp, Homo sapiens
ttctctgccctctag

SEQ ID NO: 144584 - DNA, 15 bp, Homo sapiens
tttctctgccctcta

SEQ ID NO: 144585 - DNA, 15 bp, Homo sapiens
atttctctgccctct

SEQ ID NO: 144586 - DNA, 15 bp, Homo sapiens
aatttctctgccctc

SEQ ID NO: 144587 - DNA, 15 bp, Homo sapiens
gaatttctctgccct

SEQ ID NO: 144588 - DNA, 15 bp, Homo sapiens
ggaatttctctgccc

SEQ ID NO: 144589 - DNA, 15 bp, Homo sapiens
gggaatttctctgcc

SEQ ID NO: 144590 - DNA, 15 bp, Homo sapiens
ggggaatttctctgc

SEQ ID NO: 144591 - DNA, 15 bp, Homo sapiens
gggggaatttctctg

SEQ ID NO: 144592 - DNA, 15 bp, Homo sapiens
cgggggaatttctct

SEQ ID NO: 144593 - DNA, 15 bp, Homo sapiens
tcgggggaatttctc

SEQ ID NO: 144594 - DNA, 15 bp, Homo sapiens
ttcgggggaatttct

SEQ ID NO: 144595 - DNA, 15 bp, Homo sapiens
cttcgggggaatttc

SEQ ID NO: 144596 - DNA, 15 bp, Homo sapiens
tcttcgggggaattt

SEQ ID NO: 144597 - DNA, 15 bp, Homo sapiens
gtcttcgggggaatt

SEQ ID NO: 144598 - DNA, 15 bp, Homo sapiens
agtcttcgggggaat

SEQ ID NO: 144599 - DNA, 15 bp, Homo sapiens
cagtcttcgggggaa

SEQ ID NO: 144600 - DNA, 15 bp, Homo sapiens
tcagtcttcggggga

SEQ ID NO: 144601 - DNA, 15 bp, Homo sapiens
ctcagtcttcggggg

SEQ ID NO: 144602 - DNA, 15 bp, Homo sapiens
gctcagtcttcgggg

SEQ ID NO: 144603 - DNA, 15 bp, Homo sapiens
agctcagtcttcggg

SEQ ID NO: 144604 - DNA, 15 bp, Homo sapiens
cagctcagtcttcgg

SEQ ID NO: 144605 - DNA, 15 bp, Homo sapiens
ccagctcagtcttcg

SEQ ID NO: 144606 - DNA, 15 bp, Homo sapiens
accagctcagtcttc

SEQ ID NO: 144607 - DNA, 15 bp, Homo sapiens
aaccagctcagtctt

SEQ ID NO: 144608 - DNA, 15 bp, Homo sapiens
caaccagctcagtct

SEQ ID NO: 144609 - DNA, 15 bp, Homo sapiens
gcaaccagctcagtc

SEQ ID NO: 144610 - DNA, 15 bp, Homo sapiens
ggcaaccagctcagt

SEQ ID NO: 144611 - DNA, 15 bp, Homo sapiens
aggcaaccagctcag

SEQ ID NO: 144612 - DNA, 15 bp, Homo sapiens
caggcaaccagctca

SEQ ID NO: 144613 - DNA, 15 bp, Homo sapiens
gcaggcaaccagctc

SEQ ID NO: 144614 - DNA, 15 bp, Homo sapiens
tgcaggcaaccagct

SEQ ID NO: 144615 - DNA, 15 bp, Homo sapiens
atgcaggcaaccagc

SEQ ID NO: 144616 - DNA, 15 bp, Homo sapiens
gatgcaggcaaccag

SEQ ID NO: 144617 - DNA, 15 bp, Homo sapiens
ggatgcaggcaacca

SEQ ID NO: 144618 - DNA, 15 bp, Homo sapiens
aggatgcaggcaacc

SEQ ID NO: 144619 - DNA, 15 bp, Homo sapiens
gaggatgcaggcaac

SEQ ID NO: 144620 - DNA, 15 bp, Homo sapiens
agaggatgcaggcaa

SEQ ID NO: 144621 - DNA, 15 bp, Homo sapiens
tagaggatgcaggca

SEQ ID NO: 144622 - DNA, 15 bp, Homo sapiens
atagaggatgcaggc

SEQ ID NO: 144623 - DNA, 15 bp, Homo sapiens
gatagaggatgcagg

SEQ ID NO: 144624 - DNA, 15 bp, Homo sapiens
agatagaggatgcag

SEQ ID NO: 144625 - DNA, 15 bp, Homo sapiens
aagatagaggatgca

SEQ ID NO: 144626 - DNA, 15 bp, Homo sapiens
gaagatagaggatgc

SEQ ID NO: 144627 - DNA, 15 bp, Homo sapiens
agaagatagaggatg

SEQ ID NO: 144628 - DNA, 15 bp, Homo sapiens
aagaagatagaggat

SEQ ID NO: 144629 - DNA, 15 bp, Homo sapiens
aaagaagatagagga

SEQ ID NO: 144630 - DNA, 15 bp, Homo sapiens
caaagaagatagagg

SEQ ID NO: 144631 - DNA, 15 bp, Homo sapiens
tcaaagaagatagag

SEQ ID NO: 144632 - DNA, 15 bp, Homo sapiens
gtcaaagaagataga

SEQ ID NO: 144633 - DNA, 15 bp, Homo sapiens
ggtcaaagaagatag

SEQ ID NO: 144634 - DNA, 15 bp, Homo sapiens
gggtcaaagaagata

SEQ ID NO: 144635 - DNA, 15 bp, Homo sapiens
agggtcaaagaagat

SEQ ID NO: 144636 - DNA, 15 bp, Homo sapiens
aagggtcaaagaaga

SEQ ID NO: 144637 - DNA, 15 bp, Homo sapiens
taagggtcaaagaag

SEQ ID NO: 144638 - DNA, 15 bp, Homo sapiens
ataagggtcaaagaa

SEQ ID NO: 144639 - DNA, 15 bp, Homo sapiens
cataagggtcaaaga

SEQ ID NO: 144640 - DNA, 15 bp, Homo sapiens
tcataagggtcaaag

SEQ ID NO: 144641 - DNA, 15 bp, Homo sapiens
gtcataagggtcaaa

SEQ ID NO: 144642 - DNA, 15 bp, Homo sapiens
agtcataagggtcaa

SEQ ID NO: 144643 - DNA, 15 bp, Homo sapiens
cagtcataagggtca

SEQ ID NO: 144644 - DNA, 15 bp, Homo sapiens
tcagtcataagggtc

SEQ ID NO: 144645 - DNA, 15 bp, Homo sapiens
ttcagtcataagggt

SEQ ID NO: 144646 - DNA, 15 bp, Homo sapiens
tttcagtcataaggg

SEQ ID NO: 144647 - DNA, 15 bp, Homo sapiens
ctttcagtcataagg

SEQ ID NO: 144648 - DNA, 15 bp, Homo sapiens
tctttcagtcataag

SEQ ID NO: 144649 - DNA, 15 bp, Homo sapiens
atctttcagtcataa

SEQ ID NO: 144650 - DNA, 15 bp, Homo sapiens
gatctttcagtcata

SEQ ID NO: 144651 - DNA, 15 bp, Homo sapiens
tgatctttcagtcat

SEQ ID NO: 144652 - DNA, 15 bp, Homo sapiens
atgatctttcagtca

SEQ ID NO: 144653 - DNA, 15 bp, Homo sapiens
gatgatctttcagtc

SEQ ID NO: 144654 - DNA, 15 bp, Homo sapiens
tgatgatctttcagt

SEQ ID NO: 144655 - DNA, 15 bp, Homo sapiens
ctgatgatctttcag

SEQ ID NO: 144656 - DNA, 15 bp, Homo sapiens
actgatgatctttca

SEQ ID NO: 144657 - DNA, 15 bp, Homo sapiens
aactgatgatctttc

SEQ ID NO: 144658 - DNA, 15 bp, Homo sapiens
aaactgatgatcttt

SEQ ID NO: 144659 - DNA, 15 bp, Homo sapiens
caaactgatgatctt

SEQ ID NO: 144660 - DNA, 15 bp, Homo sapiens
ccaaactgatgatct

SEQ ID NO: 144661 - DNA, 15 bp, Homo sapiens
tccaaactgatgatc

SEQ ID NO: 144662 - DNA, 15 bp, Homo sapiens
ttccaaactgatgat

SEQ ID NO: 144663 - DNA, 15 bp, Homo sapiens
cttccaaactgatga

SEQ ID NO: 144664 - DNA, 15 bp, Homo sapiens
ccttccaaactgatg

SEQ ID NO: 144665 - DNA, 15 bp, Homo sapiens
accttccaaactgat

SEQ ID NO: 144666 - DNA, 15 bp, Homo sapiens
taccttccaaactga

SEQ ID NO: 144667 - DNA, 15 bp, Homo sapiens
gtaccttccaaactg

SEQ ID NO: 144668 - DNA, 15 bp, Homo sapiens
agtaccttccaaact

SEQ ID NO: 144669 - DNA, 15 bp, Homo sapiens
cagtaccttccaaac

SEQ ID NO: 144670 - DNA, 15 bp, Homo sapiens
ccagtaccttccaaa

SEQ ID NO: 144671 - DNA, 15 bp, Homo sapiens
accagtaccttccaa

SEQ ID NO: 144672 - DNA, 15 bp, Homo sapiens
gaccagtaccttcca

SEQ ID NO: 144673 - DNA, 15 bp, Homo sapiens
ggaccagtaccttcc

SEQ ID NO: 144674 - DNA, 15 bp, Homo sapiens
tggaccagtaccttc

SEQ ID NO: 144675 - DNA, 15 bp, Homo sapiens
ttggaccagtacctt

SEQ ID NO: 144676 - DNA, 15 bp, Homo sapiens
attggaccagtacct

SEQ ID NO: 144677 - DNA, 15 bp, Homo sapiens
aattggaccagtacc

SEQ ID NO: 144678 - DNA, 15 bp, Homo sapiens
aaattggaccagtac

SEQ ID NO: 144679 - DNA, 15 bp, Homo sapiens
taaattggaccagta

SEQ ID NO: 144680 - DNA, 15 bp, Homo sapiens
ataaattggaccagt

SEQ ID NO: 144681 - DNA, 15 bp, Homo sapiens
aataaattggaccag

SEQ ID NO: 144682 - DNA, 15 bp, Homo sapiens
aaataaattggacca

SEQ ID NO: 144683 - DNA, 15 bp, Homo sapiens
taaataaattggacc

SEQ ID NO: 144684 - DNA, 15 bp, Homo sapiens
ctaaataaattggac

SEQ ID NO: 144685 - DNA, 15 bp, Homo sapiens
cctaaataaattgga

SEQ ID NO: 144686 - DNA, 15 bp, Homo sapiens
tcctaaataaattgg

SEQ ID NO: 144687 - DNA, 15 bp, Homo sapiens
ttcctaaataaattg

SEQ ID NO: 144688 - DNA, 15 bp, Homo sapiens
cttcctaaataaatt

SEQ ID NO: 144689 - DNA, 15 bp, Homo sapiens
acttcctaaataaat

SEQ ID NO: 144690 - DNA, 15 bp, Homo sapiens
tacttcctaaataaa

SEQ ID NO: 144691 - DNA, 15 bp, Homo sapiens
atacttcctaaataa

SEQ ID NO: 144692 - DNA, 15 bp, Homo sapiens
gatacttcctaaata

SEQ ID NO: 144693 - DNA, 15 bp, Homo sapiens
agatacttcctaaat

SEQ ID NO: 144694 - DNA, 15 bp, Homo sapiens
gagatacttcctaaa

SEQ ID NO: 144695 - DNA, 15 bp, Homo sapiens
agagatacttcctaa

SEQ ID NO: 144696 - DNA, 15 bp, Homo sapiens
aagagatacttccta

SEQ ID NO: 144697 - DNA, 15 bp, Homo sapiens
caagagatacttcct

SEQ ID NO: 144698 - DNA, 15 bp, Homo sapiens
ccaagagatacttcc

SEQ ID NO: 144699 - DNA, 15 bp, Homo sapiens
tccaagagatacttc

SEQ ID NO: 144700 - DNA, 15 bp, Homo sapiens
ctccaagagatactt

SEQ ID NO: 144701 - DNA, 15 bp, Homo sapiens
actccaagagatact

SEQ ID NO: 144702 - DNA, 15 bp, Homo sapiens
aactccaagagatac

SEQ ID NO: 144703 - DNA, 15 bp, Homo sapiens
aaactccaagagata

SEQ ID NO: 144704 - DNA, 15 bp, Homo sapiens
gaaactccaagagat

SEQ ID NO: 144705 - DNA, 15 bp, Homo sapiens
tgaaactccaagaga

SEQ ID NO: 144706 - DNA, 15 bp, Homo sapiens
ctgaaactccaagag

SEQ ID NO: 144707 - DNA, 15 bp, Homo sapiens
tctgaaactccaaga

SEQ ID NO: 144708 - DNA, 15 bp, Homo sapiens
ttctgaaactccaag

SEQ ID NO: 144709 - DNA, 15 bp, Homo sapiens
tttctgaaactccaa

SEQ ID NO: 144710 - DNA, 15 bp, Homo sapiens
atttctgaaactcca

SEQ ID NO: 144711 - DNA, 15 bp, Homo sapiens
catttctgaaactcc

SEQ ID NO: 144712 - DNA, 15 bp, Homo sapiens
gcatttctgaaactc

SEQ ID NO: 144713 - DNA, 15 bp, Homo sapiens
agcatttctgaaact

SEQ ID NO: 144714 - DNA, 15 bp, Homo sapiens
tagcatttctgaaac

SEQ ID NO: 144715 - DNA, 15 bp, Homo sapiens
ctagcatttctgaaa

SEQ ID NO: 144716 - DNA, 15 bp, Homo sapiens
gctagcatttctgaa

SEQ ID NO: 144717 - DNA, 15 bp, Homo sapiens
agctagcatttctga

SEQ ID NO: 144718 - DNA, 15 bp, Homo sapiens
aagctagcatttctg

SEQ ID NO: 144719 - DNA, 15 bp, Homo sapiens
caagctagcatttct

SEQ ID NO: 144720 - DNA, 15 bp, Homo sapiens
ccaagctagcatttc

SEQ ID NO: 144721 - DNA, 15 bp, Homo sapiens
tccaagctagcattt

SEQ ID NO: 144722 - DNA, 15 bp, Homo sapiens
gtccaagctagcatt

SEQ ID NO: 144723 - DNA, 15 bp, Homo sapiens
tgtccaagctagcat

SEQ ID NO: 144724 - DNA, 15 bp, Homo sapiens
ttgtccaagctagca

SEQ ID NO: 144725 - DNA, 15 bp, Homo sapiens
gttgtccaagctagc

SEQ ID NO: 144726 - DNA, 15 bp, Homo sapiens
agttgtccaagctag

SEQ ID NO: 144727 - DNA, 15 bp, Homo sapiens
cagttgtccaagcta

SEQ ID NO: 144728 - DNA, 15 bp, Homo sapiens
tcagttgtccaagct

SEQ ID NO: 144729 - DNA, 15 bp, Homo sapiens
ttcagttgtccaagc

SEQ ID NO: 144730 - DNA, 15 bp, Homo sapiens
tttcagttgtccaag

SEQ ID NO: 144731 - DNA, 15 bp, Homo sapiens
ttttcagttgtccaa

SEQ ID NO: 144732 - DNA, 15 bp, Homo sapiens
cttttcagttgtcca

SEQ ID NO: 144733 - DNA, 15 bp, Homo sapiens
acttttcagttgtcc

SEQ ID NO: 144734 - DNA, 15 bp, Homo sapiens
gacttttcagttgtc

SEQ ID NO: 144735 - DNA, 15 bp, Homo sapiens
tgacttttcagttgt

SEQ ID NO: 144736 - DNA, 15 bp, Homo sapiens
gtgacttttcagttg

SEQ ID NO: 144737 - DNA, 15 bp, Homo sapiens
tgtgacttttcagtt

SEQ ID NO: 144738 - DNA, 15 bp, Homo sapiens
atgtgacttttcagt

SEQ ID NO: 144739 - DNA, 15 bp, Homo sapiens
gatgtgacttttcag

SEQ ID NO: 144740 - DNA, 15 bp, Homo sapiens
tgatgtgacttttca

SEQ ID NO: 144741 - DNA, 15 bp, Homo sapiens
gtgatgtgacttttc

SEQ ID NO: 144742 - DNA, 15 bp, Homo sapiens
tgtgatgtgactttt

SEQ ID NO: 144743 - DNA, 15 bp, Homo sapiens
ctgtgatgtgacttt

SEQ ID NO: 144744 - DNA, 15 bp, Homo sapiens
gctgtgatgtgactt

SEQ ID NO: 144745 - DNA, 15 bp, Homo sapiens
agctgtgatgtgact

SEQ ID NO: 144746 - DNA, 15 bp, Homo sapiens
cagctgtgatgtgac

SEQ ID NO: 144747 - DNA, 15 bp, Homo sapiens
ccagctgtgatgtga

SEQ ID NO: 144748 - DNA, 15 bp, Homo sapiens
gccagctgtgatgtg

SEQ ID NO: 144749 - DNA, 15 bp, Homo sapiens
tgccagctgtgatgt

SEQ ID NO: 144750 - DNA, 15 bp, Homo sapiens
atgccagctgtgatg

SEQ ID NO: 144751 - DNA, 15 bp, Homo sapiens
aatgccagctgtgat

SEQ ID NO: 144752 - DNA, 15 bp, Homo sapiens
gaatgccagctgtga

SEQ ID NO: 144753 - DNA, 15 bp, Homo sapiens
agaatgccagctgtg

SEQ ID NO: 144754 - DNA, 15 bp, Homo sapiens
cagaatgccagctgt

SEQ ID NO: 144755 - DNA, 15 bp, Homo sapiens
ccagaatgccagctg

SEQ ID NO: 144756 - DNA, 15 bp, Homo sapiens
cccagaatgccagct

SEQ ID NO: 144757 - DNA, 15 bp, Homo sapiens
ccccagaatgccagc

SEQ ID NO: 144758 - DNA, 15 bp, Homo sapiens
cccccagaatgccag

SEQ ID NO: 144759 - DNA, 15 bp, Homo sapiens
gcccccagaatgcca

SEQ ID NO: 144760 - DNA, 15 bp, Homo sapiens
agcccccagaatgcc

SEQ ID NO: 144761 - DNA, 15 bp, Homo sapiens
tagcccccagaatgc

SEQ ID NO: 144762 - DNA, 15 bp, Homo sapiens
gtagcccccagaatg

SEQ ID NO: 144763 - DNA, 15 bp, Homo sapiens
ggtagcccccagaat

SEQ ID NO: 144764 - DNA, 15 bp, Homo sapiens
tggtagcccccagaa

SEQ ID NO: 144765 - DNA, 15 bp, Homo sapiens
ttggtagcccccaga

SEQ ID NO: 144766 - DNA, 15 bp, Homo sapiens
tttggtagcccccag

SEQ ID NO: 144767 - DNA, 15 bp, Homo sapiens
ttttggtagccccca

SEQ ID NO: 144768 - DNA, 15 bp, Homo sapiens
gttttggtagccccc

SEQ ID NO: 144769 - DNA, 15 bp, Homo sapiens
tgttttggtagcccc

SEQ ID NO: 144770 - DNA, 15 bp, Homo sapiens
gtgttttggtagccc

SEQ ID NO: 144771 - DNA, 15 bp, Homo sapiens
ggtgttttggtagcc

SEQ ID NO: 144772 - DNA, 15 bp, Homo sapiens
gggtgttttggtagc

SEQ ID NO: 144773 - DNA, 15 bp, Homo sapiens
ggggtgttttggtag

SEQ ID NO: 144774 - DNA, 15 bp, Homo sapiens
aggggtgttttggta

SEQ ID NO: 144775 - DNA, 15 bp, Homo sapiens
aaggggtgttttggt

SEQ ID NO: 144776 - DNA, 15 bp, Homo sapiens
gaaggggtgttttgg

SEQ ID NO: 144777 - DNA, 15 bp, Homo sapiens
agaaggggtgttttg

SEQ ID NO: 144778 - DNA, 15 bp, Homo sapiens
cagaaggggtgtttt

SEQ ID NO: 144779 - DNA, 15 bp, Homo sapiens
ccagaaggggtgttt

SEQ ID NO: 144780 - DNA, 15 bp, Homo sapiens
tccagaaggggtgtt

SEQ ID NO: 144781 - DNA, 15 bp, Homo sapiens
ctccagaaggggtgt

SEQ ID NO: 144782 - DNA, 15 bp, Homo sapiens
actccagaaggggtg

SEQ ID NO: 144783 - DNA, 15 bp, Homo sapiens
tactccagaaggggt

SEQ ID NO: 144784 - DNA, 15 bp, Homo sapiens
ctactccagaagggg

SEQ ID NO: 144785 - DNA, 15 bp, Homo sapiens
tctactccagaaggg

SEQ ID NO: 144786 - DNA, 15 bp, Homo sapiens
ttctactccagaagg

SEQ ID NO: 144787 - DNA, 15 bp, Homo sapiens
cttctactccagaag

SEQ ID NO: 144788 - DNA, 15 bp, Homo sapiens
gcttctactccagaa

SEQ ID NO: 144789 - DNA, 15 bp, Homo sapiens
agcttctactccaga

SEQ ID NO: 144790 - DNA, 15 bp, Homo sapiens
cagcttctactccag

SEQ ID NO: 144791 - DNA, 15 bp, Homo sapiens
gcagcttctactcca

SEQ ID NO: 144792 - DNA, 15 bp, Homo sapiens
agcagcttctactcc

SEQ ID NO: 144793 - DNA, 15 bp, Homo sapiens
cagcagcttctactc

SEQ ID NO: 144794 - DNA, 15 bp, Homo sapiens
ccagcagcttctact

SEQ ID NO: 144795 - DNA, 15 bp, Homo sapiens
tccagcagcttctac

SEQ ID NO: 144796 - DNA, 15 bp, Homo sapiens
ttccagcagcttcta

SEQ ID NO: 144797 - DNA, 15 bp, Homo sapiens
cttccagcagcttct

SEQ ID NO: 144798 - DNA, 15 bp, Homo sapiens
ccttccagcagcttc

SEQ ID NO: 144799 - DNA, 15 bp, Homo sapiens
gccttccagcagctt

SEQ ID NO: 144800 - DNA, 15 bp, Homo sapiens
tgccttccagcagct

SEQ ID NO: 144801 - DNA, 15 bp, Homo sapiens
ctgccttccagcagc

SEQ ID NO: 144802 - DNA, 15 bp, Homo sapiens
cctgccttccagcag

SEQ ID NO: 144803 - DNA, 15 bp, Homo sapiens
gcctgccttccagca

SEQ ID NO: 144804 - DNA, 15 bp, Homo sapiens
ggcctgccttccagc

SEQ ID NO: 144805 - DNA, 15 bp, Homo sapiens
aggcctgccttccag

SEQ ID NO: 144806 - DNA, 15 bp, Homo sapiens
caggcctgccttcca

SEQ ID NO: 144807 - DNA, 15 bp, Homo sapiens
tcaggcctgccttcc

SEQ ID NO: 144808 - DNA, 15 bp, Homo sapiens
ctcaggcctgccttc

SEQ ID NO: 144809 - DNA, 15 bp, Homo sapiens
gctcaggcctgcctt

SEQ ID NO: 144810 - DNA, 15 bp, Homo sapiens
ggctcaggcctgcct

SEQ ID NO: 144811 - DNA, 15 bp, Homo sapiens
tggctcaggcctgcc

SEQ ID NO: 144812 - DNA, 15 bp, Homo sapiens
atggctcaggcctgc

SEQ ID NO: 144813 - DNA, 15 bp, Homo sapiens
aatggctcaggcctg

SEQ ID NO: 144814 - DNA, 15 bp, Homo sapiens
gaatggctcaggcct

SEQ ID NO: 144815 - DNA, 15 bp, Homo sapiens
tgaatggctcaggcc

SEQ ID NO: 144816 - DNA, 15 bp, Homo sapiens
gtgaatggctcaggc

SEQ ID NO: 144817 - DNA, 15 bp, Homo sapiens
ggtgaatggctcagg

SEQ ID NO: 144818 - DNA, 15 bp, Homo sapiens
tggtgaatggctcag

SEQ ID NO: 144819 - DNA, 15 bp, Homo sapiens
gtggtgaatggctca

SEQ ID NO: 144820 - DNA, 15 bp, Homo sapiens
cgtggtgaatggctc

SEQ ID NO: 144821 - DNA, 15 bp, Homo sapiens
ccgtggtgaatggct

SEQ ID NO: 144822 - DNA, 15 bp, Homo sapiens
tccgtggtgaatggc

SEQ ID NO: 144823 - DNA, 15 bp, Homo sapiens
gtccgtggtgaatgg

SEQ ID NO: 144824 - DNA, 15 bp, Homo sapiens
tgtccgtggtgaatg

SEQ ID NO: 144825 - DNA, 15 bp, Homo sapiens
ctgtccgtggtgaat

SEQ ID NO: 144826 - DNA, 15 bp, Homo sapiens
cctgtccgtggtgaa

SEQ ID NO: 144827 - DNA, 15 bp, Homo sapiens
tcctgtccgtggtga

SEQ ID NO: 144828 - DNA, 15 bp, Homo sapiens
ttcctgtccgtggtg

SEQ ID NO: 144829 - DNA, 15 bp, Homo sapiens
cttcctgtccgtggt

SEQ ID NO: 144830 - DNA, 15 bp, Homo sapiens
tcttcctgtccgtgg

SEQ ID NO: 144831 - DNA, 15 bp, Homo sapiens
ctcttcctgtccgtg

SEQ ID NO: 144832 - DNA, 15 bp, Homo sapiens
gctcttcctgtccgt

SEQ ID NO: 144833 - DNA, 15 bp, Homo sapiens
tgctcttcctgtccg

SEQ ID NO: 144834 - DNA, 15 bp, Homo sapiens
ctgctcttcctgtcc

SEQ ID NO: 144835 - DNA, 15 bp, Homo sapiens
gctgctcttcctgtc

SEQ ID NO: 144836 - DNA, 15 bp, Homo sapiens
agctgctcttcctgt

SEQ ID NO: 144837 - DNA, 15 bp, Homo sapiens
gagctgctcttcctg

SEQ ID NO: 144838 - DNA, 15 bp, Homo sapiens
agagctgctcttcct

SEQ ID NO: 144839 - DNA, 15 bp, Homo sapiens
cagagctgctcttcc

SEQ ID NO: 144840 - DNA, 15 bp, Homo sapiens
ccagagctgctcttc

SEQ ID NO: 144841 - DNA, 15 bp, Homo sapiens
gccagagctgctctt

SEQ ID NO: 144842 - DNA, 15 bp, Homo sapiens
agccagagctgctct

SEQ ID NO: 144843 - DNA, 15 bp, Homo sapiens
tagccagagctgctc

SEQ ID NO: 144844 - DNA, 15 bp, Homo sapiens
atagccagagctgct

SEQ ID NO: 144845 - DNA, 15 bp, Homo sapiens
gatagccagagctgc

SEQ ID NO: 144846 - DNA, 15 bp, Homo sapiens
tgatagccagagctg

SEQ ID NO: 144847 - DNA, 15 bp, Homo sapiens
gtgatagccagagct

SEQ ID NO: 144848 - DNA, 15 bp, Homo sapiens
ggtgatagccagagc

SEQ ID NO: 144849 - DNA, 15 bp, Homo sapiens
tggtgatagccagag

SEQ ID NO: 144850 - DNA, 15 bp, Homo sapiens
gtggtgatagccaga

SEQ ID NO: 144851 - DNA, 15 bp, Homo sapiens
agtggtgatagccag

SEQ ID NO: 144852 - DNA, 15 bp, Homo sapiens
cagtggtgatagcca

SEQ ID NO: 144853 - DNA, 15 bp, Homo sapiens
ccagtggtgatagcc

SEQ ID NO: 144854 - DNA, 15 bp, Homo sapiens
gccagtggtgatagc

SEQ ID NO: 144855 - DNA, 15 bp, Homo sapiens
ggccagtggtgatag

SEQ ID NO: 144856 - DNA, 15 bp, Homo sapiens
aggccagtggtgata

SEQ ID NO: 144857 - DNA, 15 bp, Homo sapiens
gaggccagtggtgat

SEQ ID NO: 144858 - DNA, 15 bp, Homo sapiens
agaggccagtggtga

SEQ ID NO: 144859 - DNA, 15 bp, Homo sapiens
cagaggccagtggtg

SEQ ID NO: 144860 - DNA, 15 bp, Homo sapiens
ccagaggccagtggt

SEQ ID NO: 144861 - DNA, 15 bp, Homo sapiens
cccagaggccagtgg

SEQ ID NO: 144862 - DNA, 15 bp, Homo sapiens
ccccagaggccagtg

SEQ ID NO: 144863 - DNA, 15 bp, Homo sapiens
accccagaggccagt

SEQ ID NO: 144864 - DNA, 15 bp, Homo sapiens
gaccccagaggccag

SEQ ID NO: 144865 - DNA, 15 bp, Homo sapiens
agaccccagaggcca

SEQ ID NO: 144866 - DNA, 15 bp, Homo sapiens
aagaccccagaggcc

SEQ ID NO: 144867 - DNA, 15 bp, Homo sapiens
gaagaccccagaggc

SEQ ID NO: 144868 - DNA, 15 bp, Homo sapiens
tgaagaccccagagg

SEQ ID NO: 144869 - DNA, 15 bp, Homo sapiens
atgaagaccccagag

SEQ ID NO: 144870 - DNA, 15 bp, Homo sapiens
tatgaagaccccaga

SEQ ID NO: 144871 - DNA, 15 bp, Homo sapiens
atatgaagaccccag

SEQ ID NO: 144872 - DNA, 15 bp, Homo sapiens
gatatgaagacccca

SEQ ID NO: 144873 - DNA, 15 bp, Homo sapiens
agatatgaagacccc

SEQ ID NO: 144874 - DNA, 15 bp, Homo sapiens
aagatatgaagaccc

SEQ ID NO: 144875 - DNA, 15 bp, Homo sapiens
caagatatgaagacc

SEQ ID NO: 144876 - DNA, 15 bp, Homo sapiens
gcaagatatgaagac

SEQ ID NO: 144877 - DNA, 15 bp, Homo sapiens
ggcaagatatgaaga

SEQ ID NO: 144878 - DNA, 15 bp, Homo sapiens
tggcaagatatgaag

SEQ ID NO: 144879 - DNA, 15 bp, Homo sapiens
atggcaagatatgaa

SEQ ID NO: 144880 - DNA, 15 bp, Homo sapiens
gatggcaagatatga

SEQ ID NO: 144881 - DNA, 15 bp, Homo sapiens
agatggcaagatatg

SEQ ID NO: 144882 - DNA, 15 bp, Homo sapiens
gagatggcaagatat

SEQ ID NO: 144883 - DNA, 15 bp, Homo sapiens
tgagatggcaagata

SEQ ID NO: 144884 - DNA, 15 bp, Homo sapiens
atgagatggcaagat

SEQ ID NO: 144885 - DNA, 15 bp, Homo sapiens
gatgagatggcaaga

SEQ ID NO: 144886 - DNA, 15 bp, Homo sapiens
ggatgagatggcaag

SEQ ID NO: 144887 - DNA, 15 bp, Homo sapiens
tggatgagatggcaa

SEQ ID NO: 144888 - DNA, 15 bp, Homo sapiens
ctggatgagatggca

SEQ ID NO: 144889 - DNA, 15 bp, Homo sapiens
cctggatgagatggc

SEQ ID NO: 144890 - DNA, 15 bp, Homo sapiens
ccctggatgagatgg

SEQ ID NO: 144891 - DNA, 15 bp, Homo sapiens
accctggatgagatg

SEQ ID NO: 144892 - DNA, 15 bp, Homo sapiens
aaccctggatgagat

SEQ ID NO: 144893 - DNA, 15 bp, Homo sapiens
gaaccctggatgaga

SEQ ID NO: 144894 - DNA, 15 bp, Homo sapiens
ggaaccctggatgag

SEQ ID NO: 144895 - DNA, 15 bp, Homo sapiens
tggaaccctggatga

SEQ ID NO: 144896 - DNA, 15 bp, Homo sapiens
atggaaccctggatg

SEQ ID NO: 144897 - DNA, 15 bp, Homo sapiens
catggaaccctggat

SEQ ID NO: 144898 - DNA, 15 bp, Homo sapiens
tcatggaaccctgga

SEQ ID NO: 144899 - DNA, 15 bp, Homo sapiens
ttcatggaaccctgg

SEQ ID NO: 144900 - DNA, 15 bp, Homo sapiens
tttcatggaaccctg

SEQ ID NO: 144901 - DNA, 15 bp, Homo sapiens
ctttcatggaaccct

SEQ ID NO: 144902 - DNA, 15 bp, Homo sapiens
actttcatggaaccc

SEQ ID NO: 144903 - DNA, 15 bp, Homo sapiens
aactttcatggaacc

SEQ ID NO: 144904 - DNA, 15 bp, Homo sapiens
taactttcatggaac

SEQ ID NO: 144905 - DNA, 15 bp, Homo sapiens
gtaactttcatggaa

SEQ ID NO: 144906 - DNA, 15 bp, Homo sapiens
ggtaactttcatgga

SEQ ID NO: 144907 - DNA, 15 bp, Homo sapiens
gggtaactttcatgg

SEQ ID NO: 144908 - DNA, 15 bp, Homo sapiens
tgggtaactttcatg

SEQ ID NO: 144909 - DNA, 15 bp, Homo sapiens
ctgggtaactttcat

SEQ ID NO: 144910 - DNA, 15 bp, Homo sapiens
cctgggtaactttca

SEQ ID NO: 144911 - DNA, 15 bp, Homo sapiens
ccctgggtaactttc

SEQ ID NO: 144912 - DNA, 15 bp, Homo sapiens
accctgggtaacttt

SEQ ID NO: 144913 - DNA, 15 bp, Homo sapiens
gaccctgggtaactt

SEQ ID NO: 144914 - DNA, 15 bp, Homo sapiens
ggaccctgggtaact

SEQ ID NO: 144915 - DNA, 15 bp, Homo sapiens
aggaccctgggtaac

SEQ ID NO: 144916 - DNA, 15 bp, Homo sapiens
gaggaccctgggtaa

SEQ ID NO: 144917 - DNA, 15 bp, Homo sapiens
tgaggaccctgggta

SEQ ID NO: 144918 - DNA, 15 bp, Homo sapiens
atgaggaccctgggt

SEQ ID NO: 144919 - DNA, 15 bp, Homo sapiens
catgaggaccctggg

SEQ ID NO: 144920 - DNA, 15 bp, Homo sapiens
acatgaggaccctgg

SEQ ID NO: 144921 - DNA, 15 bp, Homo sapiens
gacatgaggaccctg

SEQ ID NO: 144922 - DNA, 15 bp, Homo sapiens
ggacatgaggaccct

SEQ ID NO: 144923 - DNA, 15 bp, Homo sapiens
aggacatgaggaccc

SEQ ID NO: 144924 - DNA, 15 bp, Homo sapiens
aaggacatgaggacc

SEQ ID NO: 144925 - DNA, 15 bp, Homo sapiens
gaaggacatgaggac

SEQ ID NO: 144926 - DNA, 15 bp, Homo sapiens
ggaaggacatgagga

SEQ ID NO: 144927 - DNA, 15 bp, Homo sapiens
aggaaggacatgagg

SEQ ID NO: 144928 - DNA, 15 bp, Homo sapiens
aaggaaggacatgag

SEQ ID NO: 144929 - DNA, 15 bp, Homo sapiens
taaggaaggacatga

SEQ ID NO: 144930 - DNA, 15 bp, Homo sapiens
ctaaggaaggacatg

SEQ ID NO: 144931 - DNA, 15 bp, Homo sapiens
tctaaggaaggacat

SEQ ID NO: 144932 - DNA, 15 bp, Homo sapiens
ctctaaggaaggaca

SEQ ID NO: 144933 - DNA, 15 bp, Homo sapiens
gctctaaggaaggac

SEQ ID NO: 144934 - DNA, 15 bp, Homo sapiens
ggctctaaggaagga

SEQ ID NO: 144935 - DNA, 15 bp, Homo sapiens
aggctctaaggaagg

SEQ ID NO: 144936 - DNA, 15 bp, Homo sapiens
caggctctaaggaag

SEQ ID NO: 144937 - DNA, 15 bp, Homo sapiens
tcaggctctaaggaa

SEQ ID NO: 144938 - DNA, 15 bp, Homo sapiens
ctcaggctctaagga

SEQ ID NO: 144939 - DNA, 15 bp, Homo sapiens
actcaggctctaagg

SEQ ID NO: 144940 - DNA, 15 bp, Homo sapiens
cactcaggctctaag

SEQ ID NO: 144941 - DNA, 15 bp, Homo sapiens
ccactcaggctctaa

SEQ ID NO: 144942 - DNA, 15 bp, Homo sapiens
accactcaggctcta

SEQ ID NO: 144943 - DNA, 15 bp, Homo sapiens
caccactcaggctct

SEQ ID NO: 144944 - DNA, 15 bp, Homo sapiens
acaccactcaggctc

SEQ ID NO: 144945 - DNA, 15 bp, Homo sapiens
cacaccactcaggct

SEQ ID NO: 144946 - DNA, 15 bp, Homo sapiens
tcacaccactcaggc

SEQ ID NO: 144947 - DNA, 15 bp, Homo sapiens
ctcacaccactcagg

SEQ ID NO: 144948 - DNA, 15 bp, Homo sapiens
cctcacaccactcag

SEQ ID NO: 144949 - DNA, 15 bp, Homo sapiens
acctcacaccactca

SEQ ID NO: 144950 - DNA, 15 bp, Homo sapiens
cacctcacaccactc

SEQ ID NO: 144951 - DNA, 15 bp, Homo sapiens
tcacctcacaccact

SEQ ID NO: 144952 - DNA, 15 bp, Homo sapiens
gtcacctcacaccac

SEQ ID NO: 144953 - DNA, 15 bp, Homo sapiens
tgtcacctcacacca

SEQ ID NO: 144954 - DNA, 15 bp, Homo sapiens
ctgtcacctcacacc

SEQ ID NO: 144955 - DNA, 15 bp, Homo sapiens
cctgtcacctcacac

SEQ ID NO: 144956 - DNA, 15 bp, Homo sapiens
acctgtcacctcaca

SEQ ID NO: 144957 - DNA, 15 bp, Homo sapiens
gacctgtcacctcac

SEQ ID NO: 144958 - DNA, 15 bp, Homo sapiens
agacctgtcacctca

SEQ ID NO: 144959 - DNA, 15 bp, Homo sapiens
gagacctgtcacctc

SEQ ID NO: 144960 - DNA, 15 bp, Homo sapiens
agagacctgtcacct

SEQ ID NO: 144961 - DNA, 15 bp, Homo sapiens
gagagacctgtcacc

SEQ ID NO: 144962 - DNA, 15 bp, Homo sapiens
agagagacctgtcac

SEQ ID NO: 144963 - DNA, 15 bp, Homo sapiens
gagagagacctgtca

SEQ ID NO: 144964 - DNA, 15 bp, Homo sapiens
agagagagacctgtc

SEQ ID NO: 144965 - DNA, 15 bp, Homo sapiens
gagagagagacctgt

SEQ ID NO: 144966 - DNA, 15 bp, Homo sapiens
ggagagagagacctg

SEQ ID NO: 144967 - DNA, 15 bp, Homo sapiens
tggagagagagacct

SEQ ID NO: 144968 - DNA, 15 bp, Homo sapiens
gtggagagagagacc

SEQ ID NO: 144969 - DNA, 15 bp, Homo sapiens
agtggagagagagac

SEQ ID NO: 144970 - DNA, 15 bp, Homo sapiens
cagtggagagagaga

SEQ ID NO: 144971 - DNA, 15 bp, Homo sapiens
gcagtggagagagag

SEQ ID NO: 144972 - DNA, 15 bp, Homo sapiens
ggcagtggagagaga

SEQ ID NO: 144973 - DNA, 15 bp, Homo sapiens
gggcagtggagagag

SEQ ID NO: 144974 - DNA, 15 bp, Homo sapiens
ggggcagtggagaga

SEQ ID NO: 144975 - DNA, 15 bp, Homo sapiens
aggggcagtggagag

SEQ ID NO: 144976 - DNA, 15 bp, Homo sapiens
aaggggcagtggaga

SEQ ID NO: 144977 - DNA, 15 bp, Homo sapiens
aaaggggcagtggag

SEQ ID NO: 144978 - DNA, 15 bp, Homo sapiens
gaaaggggcagtgga

SEQ ID NO: 144979 - DNA, 15 bp, Homo sapiens
agaaaggggcagtgg

SEQ ID NO: 144980 - DNA, 15 bp, Homo sapiens
cagaaaggggcagtg

SEQ ID NO: 144981 - DNA, 15 bp, Homo sapiens
ccagaaaggggcagt

SEQ ID NO: 144982 - DNA, 15 bp, Homo sapiens
accagaaaggggcag

SEQ ID NO: 144983 - DNA, 15 bp, Homo sapiens
aaccagaaaggggca

SEQ ID NO: 144984 - DNA, 15 bp, Homo sapiens
aaaccagaaaggggc

SEQ ID NO: 144985 - DNA, 15 bp, Homo sapiens
taaaccagaaagggg

SEQ ID NO: 144986 - DNA, 15 bp, Homo sapiens
ttaaaccagaaaggg

SEQ ID NO: 144987 - DNA, 15 bp, Homo sapiens
tttaaaccagaaagg

SEQ ID NO: 144988 - DNA, 15 bp, Homo sapiens
ttttaaaccagaaag

SEQ ID NO: 144989 - DNA, 15 bp, Homo sapiens
tttttaaaccagaaa

SEQ ID NO: 144990 - DNA, 15 bp, Homo sapiens
ttttttaaaccagaa

SEQ ID NO: 144991 - DNA, 15 bp, Homo sapiens
tttttttaaaccaga

SEQ ID NO: 144992 - DNA, 15 bp, Homo sapiens
atttttttaaaccag

SEQ ID NO: 144993 - DNA, 15 bp, Homo sapiens
catttttttaaacca

SEQ ID NO: 144994 - DNA, 15 bp, Homo sapiens
ccatttttttaaacc

SEQ ID NO: 144995 - DNA, 15 bp, Homo sapiens
accatttttttaaac

SEQ ID NO: 144996 - DNA, 15 bp, Homo sapiens
caccatttttttaaa

SEQ ID NO: 144997 - DNA, 15 bp, Homo sapiens
gcaccatttttttaa

SEQ ID NO: 144998 - DNA, 15 bp, Homo sapiens
agcaccattttttta

SEQ ID NO: 144999 - DNA, 15 bp, Homo sapiens
aagcaccattttttt

SEQ ID NO: 145000 - DNA, 15 bp, Homo sapiens
caagcaccatttttt

SEQ ID NO: 145001 - DNA, 15 bp, Homo sapiens
tcaagcaccattttt

SEQ ID NO: 145002 - DNA, 15 bp, Homo sapiens
atcaagcaccatttt

SEQ ID NO: 145003 - DNA, 15 bp, Homo sapiens
catcaagcaccattt

SEQ ID NO: 145004 - DNA, 15 bp, Homo sapiens
tcatcaagcaccatt

SEQ ID NO: 145005 - DNA, 15 bp, Homo sapiens
ctcatcaagcaccat

SEQ ID NO: 145006 - DNA, 15 bp, Homo sapiens
cctcatcaagcacca

SEQ ID NO: 145007 - DNA, 15 bp, Homo sapiens
ccctcatcaagcacc

SEQ ID NO: 145008 - DNA, 15 bp, Homo sapiens
tccctcatcaagcac

SEQ ID NO: 145009 - DNA, 15 bp, Homo sapiens
ttccctcatcaagca

SEQ ID NO: 145010 - DNA, 15 bp, Homo sapiens
cttccctcatcaagc

SEQ ID NO: 145011 - DNA, 15 bp, Homo sapiens
ccttccctcatcaag

SEQ ID NO: 145012 - DNA, 15 bp, Homo sapiens
accttccctcatcaa

SEQ ID NO: 145013 - DNA, 15 bp, Homo sapiens
taccttccctcatca

SEQ ID NO: 145014 - DNA, 15 bp, Homo sapiens
ctaccttccctcatc

SEQ ID NO: 145015 - DNA, 15 bp, Homo sapiens
tctaccttccctcat

SEQ ID NO: 145016 - DNA, 15 bp, Homo sapiens
gtctaccttccctca

SEQ ID NO: 145017 - DNA, 15 bp, Homo sapiens
agtctaccttccctc

SEQ ID NO: 145018 - DNA, 15 bp, Homo sapiens
gagtctaccttccct

SEQ ID NO: 145019 - DNA, 15 bp, Homo sapiens
agagtctaccttccc

SEQ ID NO: 145020 - DNA, 15 bp, Homo sapiens
aagagtctaccttcc

SEQ ID NO: 145021 - DNA, 15 bp, Homo sapiens
gaagagtctaccttc

SEQ ID NO: 145022 - DNA, 15 bp, Homo sapiens
ggaagagtctacctt

SEQ ID NO: 145023 - DNA, 15 bp, Homo sapiens
gggaagagtctacct

SEQ ID NO: 145024 - DNA, 15 bp, Homo sapiens
agggaagagtctacc

SEQ ID NO: 145025 - DNA, 15 bp, Homo sapiens
tagggaagagtctac

SEQ ID NO: 145026 - DNA, 15 bp, Homo sapiens
ctagggaagagtcta

SEQ ID NO: 145027 - DNA, 15 bp, Homo sapiens
cctagggaagagtct

SEQ ID NO: 145028 - DNA, 15 bp, Homo sapiens
tcctagggaagagtc

SEQ ID NO: 145029 - DNA, 15 bp, Homo sapiens
gtcctagggaagagt

SEQ ID NO: 145030 - DNA, 15 bp, Homo sapiens
agtcctagggaagag

SEQ ID NO: 145031 - DNA, 15 bp, Homo sapiens
cagtcctagggaaga

SEQ ID NO: 145032 - DNA, 15 bp, Homo sapiens
tcagtcctagggaag

SEQ ID NO: 145033 - DNA, 15 bp, Homo sapiens
gtcagtcctagggaa

SEQ ID NO: 145034 - DNA, 15 bp, Homo sapiens
cgtcagtcctaggga

SEQ ID NO: 145035 - DNA, 15 bp, Homo sapiens
tcgtcagtcctaggg

SEQ ID NO: 145036 - DNA, 15 bp, Homo sapiens
ctcgtcagtcctagg

SEQ ID NO: 145037 - DNA, 15 bp, Homo sapiens
actcgtcagtcctag

SEQ ID NO: 145038 - DNA, 15 bp, Homo sapiens
aactcgtcagtccta

SEQ ID NO: 145039 - DNA, 15 bp, Homo sapiens
taactcgtcagtcct

SEQ ID NO: 145040 - DNA, 15 bp, Homo sapiens
gtaactcgtcagtcc

SEQ ID NO: 145041 - DNA, 15 bp, Homo sapiens
cgtaactcgtcagtc

SEQ ID NO: 145042 - DNA, 15 bp, Homo sapiens
ccgtaactcgtcagt

SEQ ID NO: 145043 - DNA, 15 bp, Homo sapiens
gccgtaactcgtcag

SEQ ID NO: 145044 - DNA, 15 bp, Homo sapiens
agccgtaactcgtca

SEQ ID NO: 145045 - DNA, 15 bp, Homo sapiens
cagccgtaactcgtc

SEQ ID NO: 145046 - DNA, 15 bp, Homo sapiens
gcagccgtaactcgt

SEQ ID NO: 145047 - DNA, 15 bp, Homo sapiens
ggcagccgtaactcg

SEQ ID NO: 145048 - DNA, 15 bp, Homo sapiens
tggcagccgtaactc

SEQ ID NO: 145049 - DNA, 15 bp, Homo sapiens
ctggcagccgtaact

SEQ ID NO: 145050 - DNA, 15 bp, Homo sapiens
tctggcagccgtaac

SEQ ID NO: 145051 - DNA, 15 bp, Homo sapiens
atctggcagccgtaa

SEQ ID NO: 145052 - DNA, 15 bp, Homo sapiens
catctggcagccgta

SEQ ID NO: 145053 - DNA, 15 bp, Homo sapiens
gcatctggcagccgt

SEQ ID NO: 145054 - DNA, 15 bp, Homo sapiens
ggcatctggcagccg

SEQ ID NO: 145055 - DNA, 15 bp, Homo sapiens
aggcatctggcagcc

SEQ ID NO: 145056 - DNA, 15 bp, Homo sapiens
caggcatctggcagc

SEQ ID NO: 145057 - DNA, 15 bp, Homo sapiens
gcaggcatctggcag

SEQ ID NO: 145058 - DNA, 15 bp, Homo sapiens
tgcaggcatctggca

SEQ ID NO: 145059 - DNA, 15 bp, Homo sapiens
atgcaggcatctggc

SEQ ID NO: 145060 - DNA, 15 bp, Homo sapiens
catgcaggcatctgg

SEQ ID NO: 145061 - DNA, 15 bp, Homo sapiens
ccatgcaggcatctg

SEQ ID NO: 145062 - DNA, 15 bp, Homo sapiens
cccatgcaggcatct

SEQ ID NO: 145063 - DNA, 15 bp, Homo sapiens
tcccatgcaggcatc

SEQ ID NO: 145064 - DNA, 15 bp, Homo sapiens
ttcccatgcaggcat

SEQ ID NO: 145065 - DNA, 15 bp, Homo sapiens
cttcccatgcaggca

SEQ ID NO: 145066 - DNA, 15 bp, Homo sapiens
tcttcccatgcaggc

SEQ ID NO: 145067 - DNA, 15 bp, Homo sapiens
ctcttcccatgcagg

SEQ ID NO: 145068 - DNA, 15 bp, Homo sapiens
cctcttcccatgcag

SEQ ID NO: 145069 - DNA, 15 bp, Homo sapiens
acctcttcccatgca

SEQ ID NO: 145070 - DNA, 15 bp, Homo sapiens
cacctcttcccatgc

SEQ ID NO: 145071 - DNA, 15 bp, Homo sapiens
ccacctcttcccatg

SEQ ID NO: 145072 - DNA, 15 bp, Homo sapiens
tccacctcttcccat

SEQ ID NO: 145073 - DNA, 15 bp, Homo sapiens
gtccacctcttccca

SEQ ID NO: 145074 - DNA, 15 bp, Homo sapiens
tgtccacctcttccc

SEQ ID NO: 145075 - DNA, 15 bp, Homo sapiens
atgtccacctcttcc

SEQ ID NO: 145076 - DNA, 15 bp, Homo sapiens
gatgtccacctcttc

SEQ ID NO: 145077 - DNA, 15 bp, Homo sapiens
agatgtccacctctt

SEQ ID NO: 145078 - DNA, 15 bp, Homo sapiens
cagatgtccacctct

SEQ ID NO: 145079 - DNA, 15 bp, Homo sapiens
gcagatgtccacctc

SEQ ID NO: 145080 - DNA, 15 bp, Homo sapiens
tgcagatgtccacct

SEQ ID NO: 145081 - DNA, 15 bp, Homo sapiens
atgcagatgtccacc

SEQ ID NO: 145082 - DNA, 15 bp, Homo sapiens
gatgcagatgtccac

SEQ ID NO: 145083 - DNA, 15 bp, Homo sapiens
agatgcagatgtcca

SEQ ID NO: 145084 - DNA, 15 bp, Homo sapiens
aagatgcagatgtcc

SEQ ID NO: 145085 - DNA, 15 bp, Homo sapiens
gaagatgcagatgtc

SEQ ID NO: 145086 - DNA, 15 bp, Homo sapiens
ggaagatgcagatgt

SEQ ID NO: 145087 - DNA, 15 bp, Homo sapiens
tggaagatgcagatg

SEQ ID NO: 145088 - DNA, 15 bp, Homo sapiens
atggaagatgcagat

SEQ ID NO: 145089 - DNA, 15 bp, Homo sapiens
aatggaagatgcaga

SEQ ID NO: 145090 - DNA, 15 bp, Homo sapiens
caatggaagatgcag

SEQ ID NO: 145091 - DNA, 15 bp, Homo sapiens
ccaatggaagatgca

SEQ ID NO: 145092 - DNA, 15 bp, Homo sapiens
accaatggaagatgc

SEQ ID NO: 145093 - DNA, 15 bp, Homo sapiens
caccaatggaagatg

SEQ ID NO: 145094 - DNA, 15 bp, Homo sapiens
ccaccaatggaagat

SEQ ID NO: 145095 - DNA, 15 bp, Homo sapiens
accaccaatggaaga

SEQ ID NO: 145096 - DNA, 15 bp, Homo sapiens
gaccaccaatggaag

SEQ ID NO: 145097 - DNA, 15 bp, Homo sapiens
tgaccaccaatggaa

SEQ ID NO: 145098 - DNA, 15 bp, Homo sapiens
ttgaccaccaatgga

SEQ ID NO: 145099 - DNA, 15 bp, Homo sapiens
cttgaccaccaatgg

SEQ ID NO: 145100 - DNA, 15 bp, Homo sapiens
ccttgaccaccaatg

SEQ ID NO: 145101 - DNA, 15 bp, Homo sapiens
tccttgaccaccaat

SEQ ID NO: 145102 - DNA, 15 bp, Homo sapiens
atccttgaccaccaa

SEQ ID NO: 145103 - DNA, 15 bp, Homo sapiens
catccttgaccacca

SEQ ID NO: 145104 - DNA, 15 bp, Homo sapiens
ccatccttgaccacc

SEQ ID NO: 145105 - DNA, 15 bp, Homo sapiens
cccatccttgaccac

SEQ ID NO: 145106 - DNA, 15 bp, Homo sapiens
acccatccttgacca

SEQ ID NO: 145107 - DNA, 15 bp, Homo sapiens
cacccatccttgacc

SEQ ID NO: 145108 - DNA, 15 bp, Homo sapiens
acacccatccttgac

SEQ ID NO: 145109 - DNA, 15 bp, Homo sapiens
cacacccatccttga

SEQ ID NO: 145110 - DNA, 15 bp, Homo sapiens
ccacacccatccttg

SEQ ID NO: 145111 - DNA, 15 bp, Homo sapiens
cccacacccatcctt

SEQ ID NO: 145112 - DNA, 15 bp, Homo sapiens
tcccacacccatcct

SEQ ID NO: 145113 - DNA, 15 bp, Homo sapiens
ctcccacacccatcc

SEQ ID NO: 145114 - DNA, 15 bp, Homo sapiens
tctcccacacccatc

SEQ ID NO: 145115 - DNA, 15 bp, Homo sapiens
ttctcccacacccat

SEQ ID NO: 145116 - DNA, 15 bp, Homo sapiens
gttctcccacaccca

SEQ ID NO: 145117 - DNA, 15 bp, Homo sapiens
ggttctcccacaccc

SEQ ID NO: 145118 - DNA, 15 bp, Homo sapiens
tggttctcccacacc

SEQ ID NO: 145119 - DNA, 15 bp, Homo sapiens
gtggttctcccacac

SEQ ID NO: 145120 - DNA, 15 bp, Homo sapiens
tgtggttctcccaca

SEQ ID NO: 145121 - DNA, 15 bp, Homo sapiens
gtgtggttctcccac

SEQ ID NO: 145122 - DNA, 15 bp, Homo sapiens
ggtgtggttctccca

SEQ ID NO: 145123 - DNA, 15 bp, Homo sapiens
aggtgtggttctccc

SEQ ID NO: 145124 - DNA, 15 bp, Homo sapiens
taggtgtggttctcc

SEQ ID NO: 145125 - DNA, 15 bp, Homo sapiens
ctaggtgtggttctc

SEQ ID NO: 145126 - DNA, 15 bp, Homo sapiens
actaggtgtggttct

SEQ ID NO: 145127 - DNA, 15 bp, Homo sapiens
cactaggtgtggttc

SEQ ID NO: 145128 - DNA, 15 bp, Homo sapiens
gcactaggtgtggtt

SEQ ID NO: 145129 - DNA, 15 bp, Homo sapiens
tgcactaggtgtggt

SEQ ID NO: 145130 - DNA, 15 bp, Homo sapiens
ttgcactaggtgtgg

SEQ ID NO: 145131 - DNA, 15 bp, Homo sapiens
cttgcactaggtgtg

SEQ ID NO: 145132 - DNA, 15 bp, Homo sapiens
gcttgcactaggtgt

SEQ ID NO: 145133 - DNA, 15 bp, Homo sapiens
ggcttgcactaggtg

SEQ ID NO: 145134 - DNA, 15 bp, Homo sapiens
aggcttgcactaggt

SEQ ID NO: 145135 - DNA, 15 bp, Homo sapiens
caggcttgcactagg

SEQ ID NO: 145136 - DNA, 15 bp, Homo sapiens
ccaggcttgcactag

SEQ ID NO: 145137 - DNA, 15 bp, Homo sapiens
accaggcttgcacta

SEQ ID NO: 145138 - DNA, 15 bp, Homo sapiens
taccaggcttgcact

SEQ ID NO: 145139 - DNA, 15 bp, Homo sapiens
gtaccaggcttgcac

SEQ ID NO: 145140 - DNA, 15 bp, Homo sapiens
agtaccaggcttgca

SEQ ID NO: 145141 - DNA, 15 bp, Homo sapiens
gagtaccaggcttgc

SEQ ID NO: 145142 - DNA, 15 bp, Homo sapiens
tgagtaccaggcttg

SEQ ID NO: 145143 - DNA, 15 bp, Homo sapiens
ctgagtaccaggctt

SEQ ID NO: 145144 - DNA, 15 bp, Homo sapiens
actgagtaccaggct

SEQ ID NO: 145145 - DNA, 15 bp, Homo sapiens
tactgagtaccaggc

SEQ ID NO: 145146 - DNA, 15 bp, Homo sapiens
ttactgagtaccagg

SEQ ID NO: 145147 - DNA, 15 bp, Homo sapiens
tttactgagtaccag

SEQ ID NO: 145148 - DNA, 15 bp, Homo sapiens
atttactgagtacca

SEQ ID NO: 145149 - DNA, 15 bp, Homo sapiens
tatttactgagtacc

SEQ ID NO: 145150 - DNA, 15 bp, Homo sapiens
atatttactgagtac

SEQ ID NO: 145151 - DNA, 15 bp, Homo sapiens
aatatttactgagta

SEQ ID NO: 145152 - DNA, 15 bp, Homo sapiens
aaatatttactgagt

SEQ ID NO: 145153 - DNA, 15 bp, Homo sapiens
caaatatttactgag

SEQ ID NO: 145154 - DNA, 15 bp, Homo sapiens
acaaatatttactga

SEQ ID NO: 145155 - DNA, 15 bp, Homo sapiens
aacaaatatttactg

SEQ ID NO: 145156 - DNA, 15 bp, Homo sapiens
caacaaatatttact

SEQ ID NO: 145157 - DNA, 15 bp, Homo sapiens
tcaacaaatatttac

SEQ ID NO: 145158 - DNA, 15 bp, Homo sapiens
ttcaacaaatattta

SEQ ID NO: 145159 - DNA, 15 bp, Homo sapiens
tttcaacaaatattt

SEQ ID NO: 145160 - DNA, 15 bp, Homo sapiens
atttcaacaaatatt

SEQ ID NO: 145161 - DNA, 15 bp, Homo sapiens
catttcaacaaatat

SEQ ID NO: 145162 - DNA, 15 bp, Homo sapiens
tcatttcaacaaata

SEQ ID NO: 145163 - DNA, 15 bp, Homo sapiens
ttcatttcaacaaat

SEQ ID NO: 145164 - DNA, 15 bp, Homo sapiens
attcatttcaacaaa

SEQ ID NO: 145165 - DNA, 15 bp, Homo sapiens
cattcatttcaacaa

SEQ ID NO: 145166 - DNA, 15 bp, Homo sapiens
tcattcatttcaaca

SEQ ID NO: 145167 - DNA, 15 bp, Homo sapiens
atcattcatttcaac

SEQ ID NO: 145168 - DNA, 15 bp, Homo sapiens
tatcattcatttcaa

SEQ ID NO: 145169 - DNA, 15 bp, Homo sapiens
ttatcattcatttca

SEQ ID NO: 145170 - DNA, 15 bp, Homo sapiens
cttatcattcatttc

SEQ ID NO: 145171 - DNA, 15 bp, Homo sapiens
tcttatcattcattt

SEQ ID NO: 145172 - DNA, 15 bp, Homo sapiens
ctcttatcattcatt

SEQ ID NO: 145173 - DNA, 15 bp, Homo sapiens
gctcttatcattcat

SEQ ID NO: 145174 - DNA, 15 bp, Homo sapiens
tgctcttatcattca

SEQ ID NO: 145175 - DNA, 15 bp, Homo sapiens
atgctcttatcattc

SEQ ID NO: 145176 - DNA, 15 bp, Homo sapiens
aatgctcttatcatt

SEQ ID NO: 145177 - DNA, 15 bp, Homo sapiens
caatgctcttatcat

SEQ ID NO: 145178 - DNA, 15 bp, Homo sapiens
ccaatgctcttatca

SEQ ID NO: 145179 - DNA, 15 bp, Homo sapiens
accaatgctcttatc

SEQ ID NO: 145180 - DNA, 15 bp, Homo sapiens
gaccaatgctcttat

SEQ ID NO: 145181 - DNA, 15 bp, Homo sapiens
ggaccaatgctctta

SEQ ID NO: 145182 - DNA, 15 bp, Homo sapiens
gggaccaatgctctt

SEQ ID NO: 145183 - DNA, 15 bp, Homo sapiens
ggggaccaatgctct

SEQ ID NO: 145184 - DNA, 15 bp, Homo sapiens
tggggaccaatgctc

SEQ ID NO: 145185 - DNA, 15 bp, Homo sapiens
ttggggaccaatgct

SEQ ID NO: 145186 - DNA, 15 bp, Homo sapiens
cttggggaccaatgc

SEQ ID NO: 145187 - DNA, 15 bp, Homo sapiens
gcttggggaccaatg

SEQ ID NO: 145188 - DNA, 15 bp, Homo sapiens
ggcttggggaccaat

SEQ ID NO: 145189 - DNA, 15 bp, Homo sapiens
tggcttggggaccaa

SEQ ID NO: 145190 - DNA, 15 bp, Homo sapiens
ctggcttggggacca

SEQ ID NO: 145191 - DNA, 15 bp, Homo sapiens
tctggcttggggacc

SEQ ID NO: 145192 - DNA, 15 bp, Homo sapiens
ctctggcttggggac

SEQ ID NO: 145193 - DNA, 15 bp, Homo sapiens
tctctggcttgggga

SEQ ID NO: 145194 - DNA, 15 bp, Homo sapiens
ctctctggcttgggg

SEQ ID NO: 145195 - DNA, 15 bp, Homo sapiens
gctctctggcttggg

SEQ ID NO: 145196 - DNA, 15 bp, Homo sapiens
ggctctctggcttgg

SEQ ID NO: 145197 - DNA, 15 bp, Homo sapiens
tggctctctggcttg

SEQ ID NO: 145198 - DNA, 15 bp, Homo sapiens
ctggctctctggctt

SEQ ID NO: 145199 - DNA, 15 bp, Homo sapiens
tctggctctctggct

SEQ ID NO: 145200 - DNA, 15 bp, Homo sapiens
ttctggctctctggc

SEQ ID NO: 145201 - DNA, 15 bp, Homo sapiens
cttctggctctctgg

SEQ ID NO: 145202 - DNA, 15 bp, Homo sapiens
gcttctggctctctg

SEQ ID NO: 145203 - DNA, 15 bp, Homo sapiens
ggcttctggctctct

SEQ ID NO: 145204 - DNA, 15 bp, Homo sapiens
tggcttctggctctc

SEQ ID NO: 145205 - DNA, 15 bp, Homo sapiens
atggcttctggctct

SEQ ID NO: 145206 - DNA, 15 bp, Homo sapiens
gatggcttctggctc

SEQ ID NO: 145207 - DNA, 15 bp, Homo sapiens
tgatggcttctggct

SEQ ID NO: 145208 - DNA, 15 bp, Homo sapiens
gtgatggcttctggc

SEQ ID NO: 145209 - DNA, 15 bp, Homo sapiens
ggtgatggcttctgg

SEQ ID NO: 145210 - DNA, 15 bp, Homo sapiens
gggtgatggcttctg

SEQ ID NO: 145211 - DNA, 15 bp, Homo sapiens
tgggtgatggcttct

SEQ ID NO: 145212 - DNA, 15 bp, Homo sapiens
ttgggtgatggcttc

SEQ ID NO: 145213 - DNA, 15 bp, Homo sapiens
attgggtgatggctt

SEQ ID NO: 145214 - DNA, 15 bp, Homo sapiens
cattgggtgatggct

SEQ ID NO: 145215 - DNA, 15 bp, Homo sapiens
tcattgggtgatggc

SEQ ID NO: 145216 - DNA, 15 bp, Homo sapiens
gtcattgggtgatgg

SEQ ID NO: 145217 - DNA, 15 bp, Homo sapiens
ggtcattgggtgatg

SEQ ID NO: 145218 - DNA, 15 bp, Homo sapiens
cggtcattgggtgat

SEQ ID NO: 145219 - DNA, 15 bp, Homo sapiens
gcggtcattgggtga

SEQ ID NO: 145220 - DNA, 15 bp, Homo sapiens
ggcggtcattgggtg

SEQ ID NO: 145221 - DNA, 15 bp, Homo sapiens
gggcggtcattgggt

SEQ ID NO: 145222 - DNA, 15 bp, Homo sapiens
ggggcggtcattggg

SEQ ID NO: 145223 - DNA, 15 bp, Homo sapiens
aggggcggtcattgg

SEQ ID NO: 145224 - DNA, 15 bp, Homo sapiens
aaggggcggtcattg

SEQ ID NO: 145225 - DNA, 15 bp, Homo sapiens
gaaggggcggtcatt

SEQ ID NO: 145226 - DNA, 15 bp, Homo sapiens
ggaaggggcggtcat

SEQ ID NO: 145227 - DNA, 15 bp, Homo sapiens
aggaaggggcggtca

SEQ ID NO: 145228 - DNA, 15 bp, Homo sapiens
aaggaaggggcggtc

SEQ ID NO: 145229 - DNA, 15 bp, Homo sapiens
gaaggaaggggcggt

SEQ ID NO: 145230 - DNA, 15 bp, Homo sapiens
ggaaggaaggggcgg

SEQ ID NO: 145231 - DNA, 15 bp, Homo sapiens
cggaaggaaggggcg

SEQ ID NO: 145232 - DNA, 15 bp, Homo sapiens
ccggaaggaaggggc

SEQ ID NO: 145233 - DNA, 15 bp, Homo sapiens
accggaaggaagggg

SEQ ID NO: 145234 - DNA, 15 bp, Homo sapiens
gaccggaaggaaggg

SEQ ID NO: 145235 - DNA, 15 bp, Homo sapiens
agaccggaaggaagg

SEQ ID NO: 145236 - DNA, 15 bp, Homo sapiens
tagaccggaaggaag

SEQ ID NO: 145237 - DNA, 15 bp, Homo sapiens
gtagaccggaaggaa

SEQ ID NO: 145238 - DNA, 15 bp, Homo sapiens
tgtagaccggaagga

SEQ ID NO: 145239 - DNA, 15 bp, Homo sapiens
ttgtagaccggaagg

SEQ ID NO: 145240 - DNA, 15 bp, Homo sapiens
cttgtagaccggaag

SEQ ID NO: 145241 - DNA, 15 bp, Homo sapiens
tcttgtagaccggaa

SEQ ID NO: 145242 - DNA, 15 bp, Homo sapiens
ctcttgtagaccgga

SEQ ID NO: 145243 - DNA, 15 bp, Homo sapiens
gctcttgtagaccgg

SEQ ID NO: 145244 - DNA, 15 bp, Homo sapiens
agctcttgtagaccg

SEQ ID NO: 145245 - DNA, 15 bp, Homo sapiens
gagctcttgtagacc

SEQ ID NO: 145246 - DNA, 15 bp, Homo sapiens
agagctcttgtagac

SEQ ID NO: 145247 - DNA, 15 bp, Homo sapiens
gagagctcttgtaga

SEQ ID NO: 145248 - DNA, 15 bp, Homo sapiens
tgagagctcttgtag

SEQ ID NO: 145249 - DNA, 15 bp, Homo sapiens
ttgagagctcttgta

SEQ ID NO: 145250 - DNA, 15 bp, Homo sapiens
cttgagagctcttgt

SEQ ID NO: 145251 - DNA, 15 bp, Homo sapiens
ccttgagagctcttg

SEQ ID NO: 145252 - DNA, 15 bp, Homo sapiens
gccttgagagctctt

SEQ ID NO: 145253 - DNA, 15 bp, Homo sapiens
agccttgagagctct

SEQ ID NO: 145254 - DNA, 15 bp, Homo sapiens
cagccttgagagctc

SEQ ID NO: 145255 - DNA, 15 bp, Homo sapiens
ccagccttgagagct

SEQ ID NO: 145256 - DNA, 15 bp, Homo sapiens
cccagccttgagagc

SEQ ID NO: 145257 - DNA, 15 bp, Homo sapiens
acccagccttgagag

SEQ ID NO: 145258 - DNA, 15 bp, Homo sapiens
gacccagccttgaga

SEQ ID NO: 145259 - DNA, 15 bp, Homo sapiens
agacccagccttgag

SEQ ID NO: 145260 - DNA, 15 bp, Homo sapiens
cagacccagccttga

SEQ ID NO: 145261 - DNA, 15 bp, Homo sapiens
gcagacccagccttg

SEQ ID NO: 145262 - DNA, 15 bp, Homo sapiens
ggcagacccagcctt

SEQ ID NO: 145263 - DNA, 15 bp, Homo sapiens
tggcagacccagcct

SEQ ID NO: 145264 - DNA, 15 bp, Homo sapiens
gtggcagacccagcc

SEQ ID NO: 145265 - DNA, 15 bp, Homo sapiens
ggtggcagacccagc

SEQ ID NO: 145266 - DNA, 15 bp, Homo sapiens
tggtggcagacccag

SEQ ID NO: 145267 - DNA, 15 bp, Homo sapiens
gtggtggcagaccca

SEQ ID NO: 145268 - DNA, 15 bp, Homo sapiens
agtggtggcagaccc

SEQ ID NO: 145269 - DNA, 15 bp, Homo sapiens
gagtggtggcagacc

SEQ ID NO: 145270 - DNA, 15 bp, Homo sapiens
agagtggtggcagac

SEQ ID NO: 145271 - DNA, 15 bp, Homo sapiens
cagagtggtggcaga

SEQ ID NO: 145272 - DNA, 15 bp, Homo sapiens
gcagagtggtggcag

SEQ ID NO: 145273 - DNA, 15 bp, Homo sapiens
agcagagtggtggca

SEQ ID NO: 145274 - DNA, 15 bp, Homo sapiens
aagcagagtggtggc

SEQ ID NO: 145275 - DNA, 15 bp, Homo sapiens
aaagcagagtggtgg

SEQ ID NO: 145276 - DNA, 15 bp, Homo sapiens
caaagcagagtggtg

SEQ ID NO: 145277 - DNA, 15 bp, Homo sapiens
gcaaagcagagtggt

SEQ ID NO: 145278 - DNA, 15 bp, Homo sapiens
ggcaaagcagagtgg

SEQ ID NO: 145279 - DNA, 15 bp, Homo sapiens
gggcaaagcagagtg

SEQ ID NO: 145280 - DNA, 15 bp, Homo sapiens
tgggcaaagcagagt

SEQ ID NO: 145281 - DNA, 15 bp, Homo sapiens
ttgggcaaagcagag

SEQ ID NO: 145282 - DNA, 15 bp, Homo sapiens
cttgggcaaagcaga

SEQ ID NO: 145283 - DNA, 15 bp, Homo sapiens
acttgggcaaagcag

SEQ ID NO: 145284 - DNA, 15 bp, Homo sapiens
cacttgggcaaagca

SEQ ID NO: 145285 - DNA, 15 bp, Homo sapiens
acacttgggcaaagc

SEQ ID NO: 145286 - DNA, 15 bp, Homo sapiens
cacacttgggcaaag

SEQ ID NO: 145287 - DNA, 15 bp, Homo sapiens
tcacacttgggcaaa

SEQ ID NO: 145288 - DNA, 15 bp, Homo sapiens
gtcacacttgggcaa

SEQ ID NO: 145289 - DNA, 15 bp, Homo sapiens
tgtcacacttgggca

SEQ ID NO: 145290 - DNA, 15 bp, Homo sapiens
ctgtcacacttgggc

SEQ ID NO: 145291 - DNA, 15 bp, Homo sapiens
gctgtcacacttggg

SEQ ID NO: 145292 - DNA, 15 bp, Homo sapiens
tgctgtcacacttgg

SEQ ID NO: 145293 - DNA, 15 bp, Homo sapiens
gtgctgtcacacttg

SEQ ID NO: 145294 - DNA, 15 bp, Homo sapiens
agtgctgtcacactt

SEQ ID NO: 145295 - DNA, 15 bp, Homo sapiens
cagtgctgtcacact

SEQ ID NO: 145296 - DNA, 15 bp, Homo sapiens
ccagtgctgtcacac

SEQ ID NO: 145297 - DNA, 15 bp, Homo sapiens
cccagtgctgtcaca

SEQ ID NO: 145298 - DNA, 15 bp, Homo sapiens
ccccagtgctgtcac

SEQ ID NO: 145299 - DNA, 15 bp, Homo sapiens
tccccagtgctgtca

SEQ ID NO: 145300 - DNA, 15 bp, Homo sapiens
ctccccagtgctgtc

SEQ ID NO: 145301 - DNA, 15 bp, Homo sapiens
cctccccagtgctgt

SEQ ID NO: 145302 - DNA, 15 bp, Homo sapiens
tcctccccagtgctg

SEQ ID NO: 145303 - DNA, 15 bp, Homo sapiens
ctcctccccagtgct

SEQ ID NO: 145304 - DNA, 15 bp, Homo sapiens
tctcctccccagtgc

SEQ ID NO: 145305 - DNA, 15 bp, Homo sapiens
ctctcctccccagtg

SEQ ID NO: 145306 - DNA, 15 bp, Homo sapiens
tctctcctccccagt

SEQ ID NO: 145307 - DNA, 15 bp, Homo sapiens
gtctctcctccccag

SEQ ID NO: 145308 - DNA, 15 bp, Homo sapiens
tgtctctcctcccca

SEQ ID NO: 145309 - DNA, 15 bp, Homo sapiens
ctgtctctcctcccc

SEQ ID NO: 145310 - DNA, 15 bp, Homo sapiens
cctgtctctcctccc

SEQ ID NO: 145311 - DNA, 15 bp, Homo sapiens
tcctgtctctcctcc

SEQ ID NO: 145312 - DNA, 15 bp, Homo sapiens
atcctgtctctcctc

SEQ ID NO: 145313 - DNA, 15 bp, Homo sapiens
tatcctgtctctcct

SEQ ID NO: 145314 - DNA, 15 bp, Homo sapiens
ttatcctgtctctcc

SEQ ID NO: 145315 - DNA, 15 bp, Homo sapiens
tttatcctgtctctc

SEQ ID NO: 145316 - DNA, 15 bp, Homo sapiens
ctttatcctgtctct

SEQ ID NO: 145317 - DNA, 15 bp, Homo sapiens
cctttatcctgtctc

SEQ ID NO: 145318 - DNA, 15 bp, Homo sapiens
ccctttatcctgtct

SEQ ID NO: 145319 - DNA, 15 bp, Homo sapiens
gccctttatcctgtc

SEQ ID NO: 145320 - DNA, 15 bp, Homo sapiens
tgccctttatcctgt

SEQ ID NO: 145321 - DNA, 15 bp, Homo sapiens
ctgccctttatcctg

SEQ ID NO: 145322 - DNA, 15 bp, Homo sapiens
tctgccctttatcct

SEQ ID NO: 145323 - DNA, 15 bp, Homo sapiens
atctgccctttatcc

SEQ ID NO: 145324 - DNA, 15 bp, Homo sapiens
catctgccctttatc

SEQ ID NO: 145325 - DNA, 15 bp, Homo sapiens
acatctgccctttat

SEQ ID NO: 145326 - DNA, 15 bp, Homo sapiens
gacatctgcccttta

SEQ ID NO: 145327 - DNA, 15 bp, Homo sapiens
tgacatctgcccttt

SEQ ID NO: 145328 - DNA, 15 bp, Homo sapiens
ctgacatctgccctt

SEQ ID NO: 145329 - DNA, 15 bp, Homo sapiens
gctgacatctgccct

SEQ ID NO: 145330 - DNA, 15 bp, Homo sapiens
tgctgacatctgccc

SEQ ID NO: 145331 - DNA, 15 bp, Homo sapiens
ttgctgacatctgcc

SEQ ID NO: 145332 - DNA, 15 bp, Homo sapiens
attgctgacatctgc

SEQ ID NO: 145333 - DNA, 15 bp, Homo sapiens
tattgctgacatctg

SEQ ID NO: 145334 - DNA, 15 bp, Homo sapiens
gtattgctgacatct

SEQ ID NO: 145335 - DNA, 15 bp, Homo sapiens
agtattgctgacatc

SEQ ID NO: 145336 - DNA, 15 bp, Homo sapiens
tagtattgctgacat

SEQ ID NO: 145337 - DNA, 15 bp, Homo sapiens
ttagtattgctgaca

SEQ ID NO: 145338 - DNA, 15 bp, Homo sapiens
cttagtattgctgac

SEQ ID NO: 145339 - DNA, 15 bp, Homo sapiens
ccttagtattgctga

SEQ ID NO: 145340 - DNA, 15 bp, Homo sapiens
cccttagtattgctg

SEQ ID NO: 145341 - DNA, 15 bp, Homo sapiens
gcccttagtattgct

SEQ ID NO: 145342 - DNA, 15 bp, Homo sapiens
agcccttagtattgc

SEQ ID NO: 145343 - DNA, 15 bp, Homo sapiens
aagcccttagtattg

SEQ ID NO: 145344 - DNA, 15 bp, Homo sapiens
gaagcccttagtatt

SEQ ID NO: 145345 - DNA, 15 bp, Homo sapiens
ggaagcccttagtat

SEQ ID NO: 145346 - DNA, 15 bp, Homo sapiens
aggaagcccttagta

SEQ ID NO: 145347 - DNA, 15 bp, Homo sapiens
gaggaagcccttagt

SEQ ID NO: 145348 - DNA, 15 bp, Homo sapiens
tgaggaagcccttag

SEQ ID NO: 145349 - DNA, 15 bp, Homo sapiens
atgaggaagccctta

SEQ ID NO: 145350 - DNA, 15 bp, Homo sapiens
catgaggaagccctt

SEQ ID NO: 145351 - DNA, 15 bp, Homo sapiens
ccatgaggaagccct

SEQ ID NO: 145352 - DNA, 15 bp, Homo sapiens
cccatgaggaagccc

SEQ ID NO: 145353 - DNA, 15 bp, Homo sapiens
tcccatgaggaagcc

SEQ ID NO: 145354 - DNA, 15 bp, Homo sapiens
ctcccatgaggaagc

SEQ ID NO: 145355 - DNA, 15 bp, Homo sapiens
cctcccatgaggaag

SEQ ID NO: 145356 - DNA, 15 bp, Homo sapiens
ccctcccatgaggaa

SEQ ID NO: 145357 - DNA, 15 bp, Homo sapiens
gccctcccatgagga

SEQ ID NO: 145358 - DNA, 15 bp, Homo sapiens
tgccctcccatgagg

SEQ ID NO: 145359 - DNA, 15 bp, Homo sapiens
atgccctcccatgag

SEQ ID NO: 145360 - DNA, 15 bp, Homo sapiens
catgccctcccatga

SEQ ID NO: 145361 - DNA, 15 bp, Homo sapiens
tcatgccctcccatg

SEQ ID NO: 145362 - DNA, 15 bp, Homo sapiens
ctcatgccctcccat

SEQ ID NO: 145363 - DNA, 15 bp, Homo sapiens
cctcatgccctccca

SEQ ID NO: 145364 - DNA, 15 bp, Homo sapiens
gcctcatgccctccc

SEQ ID NO: 145365 - DNA, 15 bp, Homo sapiens
agcctcatgccctcc

SEQ ID NO: 145366 - DNA, 15 bp, Homo sapiens
gagcctcatgccctc

SEQ ID NO: 145367 - DNA, 15 bp, Homo sapiens
ggagcctcatgccct

SEQ ID NO: 145368 - DNA, 15 bp, Homo sapiens
tggagcctcatgccc

SEQ ID NO: 145369 - DNA, 15 bp, Homo sapiens
gtggagcctcatgcc

SEQ ID NO: 145370 - DNA, 15 bp, Homo sapiens
agtggagcctcatgc

SEQ ID NO: 145371 - DNA, 15 bp, Homo sapiens
gagtggagcctcatg

SEQ ID NO: 145372 - DNA, 15 bp, Homo sapiens
tgagtggagcctcat

SEQ ID NO: 145373 - DNA, 15 bp, Homo sapiens
atgagtggagcctca

SEQ ID NO: 145374 - DNA, 15 bp, Homo sapiens
aatgagtggagcctc

SEQ ID NO: 145375 - DNA, 15 bp, Homo sapiens
caatgagtggagcct

SEQ ID NO: 145376 - DNA, 15 bp, Homo sapiens
acaatgagtggagcc

SEQ ID NO: 145377 - DNA, 15 bp, Homo sapiens
gacaatgagtggagc

SEQ ID NO: 145378 - DNA, 15 bp, Homo sapiens
agacaatgagtggag

SEQ ID NO: 145379 - DNA, 15 bp, Homo sapiens
aagacaatgagtgga

SEQ ID NO: 145380 - DNA, 15 bp, Homo sapiens
caagacaatgagtgg

SEQ ID NO: 145381 - DNA, 15 bp, Homo sapiens
acaagacaatgagtg

SEQ ID NO: 145382 - DNA, 15 bp, Homo sapiens
cacaagacaatgagt

SEQ ID NO: 145383 - DNA, 15 bp, Homo sapiens
tcacaagacaatgag

SEQ ID NO: 145384 - DNA, 15 bp, Homo sapiens
gtcacaagacaatga

SEQ ID NO: 145385 - DNA, 15 bp, Homo sapiens
agtcacaagacaatg

SEQ ID NO: 145386 - DNA, 15 bp, Homo sapiens
aagtcacaagacaat

SEQ ID NO: 145387 - DNA, 15 bp, Homo sapiens
gaagtcacaagacaa

SEQ ID NO: 145388 - DNA, 15 bp, Homo sapiens
ggaagtcacaagaca

SEQ ID NO: 145389 - DNA, 15 bp, Homo sapiens
tggaagtcacaagac

SEQ ID NO: 145390 - DNA, 15 bp, Homo sapiens
atggaagtcacaaga

SEQ ID NO: 145391 - DNA, 15 bp, Homo sapiens
gatggaagtcacaag

SEQ ID NO: 145392 - DNA, 15 bp, Homo sapiens
ggatggaagtcacaa

SEQ ID NO: 145393 - DNA, 15 bp, Homo sapiens
gggatggaagtcaca

SEQ ID NO: 145394 - DNA, 15 bp, Homo sapiens
agggatggaagtcac

SEQ ID NO: 145395 - DNA, 15 bp, Homo sapiens
cagggatggaagtca

SEQ ID NO: 145396 - DNA, 15 bp, Homo sapiens
gcagggatggaagtc

SEQ ID NO: 145397 - DNA, 15 bp, Homo sapiens
agcagggatggaagt

SEQ ID NO: 145398 - DNA, 15 bp, Homo sapiens
cagcagggatggaag

SEQ ID NO: 145399 - DNA, 15 bp, Homo sapiens
tcagcagggatggaa

SEQ ID NO: 145400 - DNA, 15 bp, Homo sapiens
ttcagcagggatgga

SEQ ID NO: 145401 - DNA, 15 bp, Homo sapiens
attcagcagggatgg

SEQ ID NO: 145402 - DNA, 15 bp, Homo sapiens
cattcagcagggatg

SEQ ID NO: 145403 - DNA, 15 bp, Homo sapiens
ccattcagcagggat

SEQ ID NO: 145404 - DNA, 15 bp, Homo sapiens
cccattcagcaggga

SEQ ID NO: 145405 - DNA, 15 bp, Homo sapiens
ccccattcagcaggg

SEQ ID NO: 145406 - DNA, 15 bp, Homo sapiens
gccccattcagcagg

SEQ ID NO: 145407 - DNA, 15 bp, Homo sapiens
agccccattcagcag

SEQ ID NO: 145408 - DNA, 15 bp, Homo sapiens
cagccccattcagca

SEQ ID NO: 145409 - DNA, 15 bp, Homo sapiens
gcagccccattcagc

SEQ ID NO: 145410 - DNA, 15 bp, Homo sapiens
tgcagccccattcag

SEQ ID NO: 145411 - DNA, 15 bp, Homo sapiens
ttgcagccccattca

SEQ ID NO: 145412 - DNA, 15 bp, Homo sapiens
cttgcagccccattc

SEQ ID NO: 145413 - DNA, 15 bp, Homo sapiens
ccttgcagccccatt

SEQ ID NO: 145414 - DNA, 15 bp, Homo sapiens
gccttgcagccccat

SEQ ID NO: 145415 - DNA, 15 bp, Homo sapiens
ggccttgcagcccca

SEQ ID NO: 145416 - DNA, 15 bp, Homo sapiens
tggccttgcagcccc

SEQ ID NO: 145417 - DNA, 15 bp, Homo sapiens
ttggccttgcagccc

SEQ ID NO: 145418 - DNA, 15 bp, Homo sapiens
cttggccttgcagcc

SEQ ID NO: 145419 - DNA, 15 bp, Homo sapiens
ccttggccttgcagc

SEQ ID NO: 145420 - DNA, 15 bp, Homo sapiens
gccttggccttgcag

SEQ ID NO: 145421 - DNA, 15 bp, Homo sapiens
agccttggccttgca

SEQ ID NO: 145422 - DNA, 15 bp, Homo sapiens
gagccttggccttgc

SEQ ID NO: 145423 - DNA, 15 bp, Homo sapiens
ggagccttggccttg

SEQ ID NO: 145424 - DNA, 15 bp, Homo sapiens
aggagccttggcctt

SEQ ID NO: 145425 - DNA, 15 bp, Homo sapiens
aaggagccttggcct

SEQ ID NO: 145426 - DNA, 15 bp, Homo sapiens
taaggagccttggcc

SEQ ID NO: 145427 - DNA, 15 bp, Homo sapiens
ctaaggagccttggc

SEQ ID NO: 145428 - DNA, 15 bp, Homo sapiens
cctaaggagccttgg

SEQ ID NO: 145429 - DNA, 15 bp, Homo sapiens
ccctaaggagccttg

SEQ ID NO: 145430 - DNA, 15 bp, Homo sapiens
cccctaaggagcctt

SEQ ID NO: 145431 - DNA, 15 bp, Homo sapiens
tcccctaaggagcct

SEQ ID NO: 145432 - DNA, 15 bp, Homo sapiens
ctcccctaaggagcc

SEQ ID NO: 145433 - DNA, 15 bp, Homo sapiens
tctcccctaaggagc

SEQ ID NO: 145434 - DNA, 15 bp, Homo sapiens
ctctcccctaaggag

SEQ ID NO: 145435 - DNA, 15 bp, Homo sapiens
cctctcccctaagga

SEQ ID NO: 145436 - DNA, 15 bp, Homo sapiens
acctctcccctaagg

SEQ ID NO: 145437 - DNA, 15 bp, Homo sapiens
gacctctcccctaag

SEQ ID NO: 145438 - DNA, 15 bp, Homo sapiens
ggacctctcccctaa

SEQ ID NO: 145439 - DNA, 15 bp, Homo sapiens
aggacctctccccta

SEQ ID NO: 145440 - DNA, 15 bp, Homo sapiens
aaggacctctcccct

SEQ ID NO: 145441 - DNA, 15 bp, Homo sapiens
taaggacctctcccc

SEQ ID NO: 145442 - DNA, 15 bp, Homo sapiens
gtaaggacctctccc

SEQ ID NO: 145443 - DNA, 15 bp, Homo sapiens
ggtaaggacctctcc

SEQ ID NO: 145444 - DNA, 15 bp, Homo sapiens
aggtaaggacctctc

SEQ ID NO: 145445 - DNA, 15 bp, Homo sapiens
gaggtaaggacctct

SEQ ID NO: 145446 - DNA, 15 bp, Homo sapiens
agaggtaaggacctc

SEQ ID NO: 145447 - DNA, 15 bp, Homo sapiens
cagaggtaaggacct

SEQ ID NO: 145448 - DNA, 15 bp, Homo sapiens
tcagaggtaaggacc

SEQ ID NO: 145449 - DNA, 15 bp, Homo sapiens
atcagaggtaaggac

SEQ ID NO: 145450 - DNA, 15 bp, Homo sapiens
gatcagaggtaagga

SEQ ID NO: 145451 - DNA, 15 bp, Homo sapiens
ggatcagaggtaagg

SEQ ID NO: 145452 - DNA, 15 bp, Homo sapiens
tggatcagaggtaag

SEQ ID NO: 145453 - DNA, 15 bp, Homo sapiens
gtggatcagaggtaa

SEQ ID NO: 145454 - DNA, 15 bp, Homo sapiens
agtggatcagaggta

SEQ ID NO: 145455 - DNA, 15 bp, Homo sapiens
aagtggatcagaggt

SEQ ID NO: 145456 - DNA, 15 bp, Homo sapiens
taagtggatcagagg

SEQ ID NO: 145457 - DNA, 15 bp, Homo sapiens
ctaagtggatcagag

SEQ ID NO: 145458 - DNA, 15 bp, Homo sapiens
tctaagtggatcaga

SEQ ID NO: 145459 - DNA, 15 bp, Homo sapiens
ctctaagtggatcag

SEQ ID NO: 145460 - DNA, 15 bp, Homo sapiens
gctctaagtggatca

SEQ ID NO: 145461 - DNA, 15 bp, Homo sapiens
tgctctaagtggatc

SEQ ID NO: 145462 - DNA, 15 bp, Homo sapiens
ttgctctaagtggat

SEQ ID NO: 145463 - DNA, 15 bp, Homo sapiens
attgctctaagtgga

SEQ ID NO: 145464 - DNA, 15 bp, Homo sapiens
tattgctctaagtgg

SEQ ID NO: 145465 - DNA, 15 bp, Homo sapiens
ttattgctctaagtg

SEQ ID NO: 145466 - DNA, 15 bp, Homo sapiens
gttattgctctaagt

SEQ ID NO: 145467 - DNA, 15 bp, Homo sapiens
ggttattgctctaag

SEQ ID NO: 145468 - DNA, 15 bp, Homo sapiens
tggttattgctctaa

SEQ ID NO: 145469 - DNA, 15 bp, Homo sapiens
gtggttattgctcta

SEQ ID NO: 145470 - DNA, 15 bp, Homo sapiens
agtggttattgctct

SEQ ID NO: 145471 - DNA, 15 bp, Homo sapiens
aagtggttattgctc

SEQ ID NO: 145472 - DNA, 15 bp, Homo sapiens
aaagtggttattgct

SEQ ID NO: 145473 - DNA, 15 bp, Homo sapiens
aaaagtggttattgc

SEQ ID NO: 145474 - DNA, 15 bp, Homo sapiens
aaaaagtggttattg

SEQ ID NO: 145475 - DNA, 15 bp, Homo sapiens
taaaaagtggttatt

SEQ ID NO: 145476 - DNA, 15 bp, Homo sapiens
ttaaaaagtggttat

SEQ ID NO: 145477 - DNA, 15 bp, Homo sapiens
tttaaaaagtggtta

SEQ ID NO: 145478 - DNA, 15 bp, Homo sapiens
atttaaaaagtggtt

SEQ ID NO: 145479 - DNA, 15 bp, Homo sapiens
catttaaaaagtggt

SEQ ID NO: 145480 - DNA, 15 bp, Homo sapiens
acatttaaaaagtgg

SEQ ID NO: 145481 - DNA, 15 bp, Homo sapiens
tacatttaaaaagtg

SEQ ID NO: 145482 - DNA, 15 bp, Homo sapiens
ttacatttaaaaagt

SEQ ID NO: 145483 - DNA, 15 bp, Homo sapiens
tttacatttaaaaag

SEQ ID NO: 145484 - DNA, 15 bp, Homo sapiens
ttttacatttaaaaa

SEQ ID NO: 145485 - DNA, 15 bp, Homo sapiens
attttacatttaaaa

SEQ ID NO: 145486 - DNA, 15 bp, Homo sapiens
tattttacatttaaa

SEQ ID NO: 145487 - DNA, 15 bp, Homo sapiens
ttattttacatttaa

SEQ ID NO: 145488 - DNA, 15 bp, Homo sapiens
tttattttacattta

SEQ ID NO: 145489 - DNA, 15 bp, Homo sapiens
ttttattttacattt

SEQ ID NO: 145490 - DNA, 15 bp, Homo sapiens
tttttattttacatt

SEQ ID NO: 145491 - DNA, 15 bp, Homo sapiens
ctttttattttacat

SEQ ID NO: 145492 - DNA, 15 bp, Homo sapiens
tctttttattttaca

SEQ ID NO: 145493 - DNA, 15 bp, Homo sapiens
gtctttttattttac

SEQ ID NO: 145494 - DNA, 15 bp, Homo sapiens
tgtctttttatttta

SEQ ID NO: 145495 - DNA, 15 bp, Homo sapiens
ttgtctttttatttt

SEQ ID NO: 145496 - DNA, 15 bp, Homo sapiens
tttgtctttttattt

SEQ ID NO: 145497 - DNA, 15 bp, Homo sapiens
atttgtctttttatt

SEQ ID NO: 145498 - DNA, 15 bp, Homo sapiens
catttgtctttttat

SEQ ID NO: 145499 - DNA, 15 bp, Homo sapiens
tcatttgtcttttta

SEQ ID NO: 145500 - DNA, 15 bp, Homo sapiens
ttcatttgtcttttt

SEQ ID NO: 145501 - DNA, 15 bp, Homo sapiens
tttcatttgtctttt

SEQ ID NO: 145502 - DNA, 15 bp, Homo sapiens
ttttcatttgtcttt

SEQ ID NO: 145503 - DNA, 15 bp, Homo sapiens
cttttcatttgtctt

SEQ ID NO: 145504 - DNA, 15 bp, Homo sapiens
ccttttcatttgtct

SEQ ID NO: 145505 - DNA, 15 bp, Homo sapiens
gccttttcatttgtc

SEQ ID NO: 145506 - DNA, 15 bp, Homo sapiens
tgccttttcatttgt

SEQ ID NO: 145507 - DNA, 15 bp, Homo sapiens
gtgccttttcatttg

SEQ ID NO: 145508 - DNA, 15 bp, Homo sapiens
tgtgccttttcattt

SEQ ID NO: 145509 - DNA, 15 bp, Homo sapiens
atgtgccttttcatt

SEQ ID NO: 145510 - DNA, 15 bp, Homo sapiens
gatgtgccttttcat

SEQ ID NO: 145511 - DNA, 15 bp, Homo sapiens
ggatgtgccttttca

SEQ ID NO: 145512 - DNA, 15 bp, Homo sapiens
aggatgtgccttttc

SEQ ID NO: 145513 - DNA, 15 bp, Homo sapiens
aaggatgtgcctttt

SEQ ID NO: 145514 - DNA, 15 bp, Homo sapiens
caaggatgtgccttt

SEQ ID NO: 145515 - DNA, 15 bp, Homo sapiens
acaaggatgtgcctt

SEQ ID NO: 145516 - DNA, 15 bp, Homo sapiens
gacaaggatgtgcct

SEQ ID NO: 145517 - DNA, 15 bp, Homo sapiens
agacaaggatgtgcc

SEQ ID NO: 145518 - DNA, 15 bp, Homo sapiens
aagacaaggatgtgc

SEQ ID NO: 145519 - DNA, 15 bp, Homo sapiens
gaagacaaggatgtg

SEQ ID NO: 145520 - DNA, 15 bp, Homo sapiens
agaagacaaggatgt

SEQ ID NO: 145521 - DNA, 15 bp, Homo sapiens
cagaagacaaggatg

SEQ ID NO: 145522 - DNA, 15 bp, Homo sapiens
ccagaagacaaggat

SEQ ID NO: 145523 - DNA, 15 bp, Homo sapiens
accagaagacaagga

SEQ ID NO: 145524 - DNA, 15 bp, Homo sapiens
taccagaagacaagg

SEQ ID NO: 145525 - DNA, 15 bp, Homo sapiens
ttaccagaagacaag

SEQ ID NO: 145526 - DNA, 15 bp, Homo sapiens
tttaccagaagacaa

SEQ ID NO: 145527 - DNA, 15 bp, Homo sapiens
atttaccagaagaca

SEQ ID NO: 145528 - DNA, 15 bp, Homo sapiens
catttaccagaagac

SEQ ID NO: 145529 - DNA, 15 bp, Homo sapiens
gcatttaccagaaga

SEQ ID NO: 145530 - DNA, 15 bp, Homo sapiens
ggcatttaccagaag

SEQ ID NO: 145531 - DNA, 15 bp, Homo sapiens
gggcatttaccagaa

SEQ ID NO: 145532 - DNA, 15 bp, Homo sapiens
tgggcatttaccaga

SEQ ID NO: 145533 - DNA, 15 bp, Homo sapiens
ttgggcatttaccag

SEQ ID NO: 145534 - DNA, 15 bp, Homo sapiens
tttgggcatttacca

SEQ ID NO: 145535 - DNA, 15 bp, Homo sapiens
atttgggcatttacc

SEQ ID NO: 145536 - DNA, 15 bp, Homo sapiens
catttgggcatttac

SEQ ID NO: 145537 - DNA, 15 bp, Homo sapiens
acatttgggcattta

SEQ ID NO: 145538 - DNA, 15 bp, Homo sapiens
aacatttgggcattt

SEQ ID NO: 145539 - DNA, 15 bp, Homo sapiens
caacatttgggcatt

SEQ ID NO: 145540 - DNA, 15 bp, Homo sapiens
gcaacatttgggcat

SEQ ID NO: 145541 - DNA, 15 bp, Homo sapiens
ggcaacatttgggca

SEQ ID NO: 145542 - DNA, 15 bp, Homo sapiens
gggcaacatttgggc

SEQ ID NO: 145543 - DNA, 15 bp, Homo sapiens
agggcaacatttggg

SEQ ID NO: 145544 - DNA, 15 bp, Homo sapiens
gagggcaacatttgg

SEQ ID NO: 145545 - DNA, 15 bp, Homo sapiens
agagggcaacatttg

SEQ ID NO: 145546 - DNA, 15 bp, Homo sapiens
aagagggcaacattt

SEQ ID NO: 145547 - DNA, 15 bp, Homo sapiens
aaagagggcaacatt

SEQ ID NO: 145548 - DNA, 15 bp, Homo sapiens
aaaagagggcaacat

SEQ ID NO: 145549 - DNA, 15 bp, Homo sapiens
aaaaagagggcaaca

SEQ ID NO: 145550 - DNA, 15 bp, Homo sapiens
gaaaaagagggcaac

SEQ ID NO: 145551 - DNA, 15 bp, Homo sapiens
agaaaaagagggcaa

SEQ ID NO: 145552 - DNA, 15 bp, Homo sapiens
cagaaaaagagggca

SEQ ID NO: 145553 - DNA, 15 bp, Homo sapiens
ccagaaaaagagggc

SEQ ID NO: 145554 - DNA, 15 bp, Homo sapiens
gccagaaaaagaggg

SEQ ID NO: 145555 - DNA, 15 bp, Homo sapiens
tgccagaaaaagagg

SEQ ID NO: 145556 - DNA, 15 bp, Homo sapiens
ttgccagaaaaagag

SEQ ID NO: 145557 - DNA, 15 bp, Homo sapiens
attgccagaaaaaga

SEQ ID NO: 145558 - DNA, 15 bp, Homo sapiens
aattgccagaaaaag

SEQ ID NO: 145559 - DNA, 15 bp, Homo sapiens
caattgccagaaaaa

SEQ ID NO: 145560 - DNA, 15 bp, Homo sapiens
ccaattgccagaaaa

SEQ ID NO: 145561 - DNA, 15 bp, Homo sapiens
gccaattgccagaaa

SEQ ID NO: 145562 - DNA, 15 bp, Homo sapiens
tgccaattgccagaa

SEQ ID NO: 145563 - DNA, 15 bp, Homo sapiens
ctgccaattgccaga

SEQ ID NO: 145564 - DNA, 15 bp, Homo sapiens
gctgccaattgccag

SEQ ID NO: 145565 - DNA, 15 bp, Homo sapiens
tgctgccaattgcca

SEQ ID NO: 145566 - DNA, 15 bp, Homo sapiens
ttgctgccaattgcc

SEQ ID NO: 145567 - DNA, 15 bp, Homo sapiens
cttgctgccaattgc

SEQ ID NO: 145568 - DNA, 15 bp, Homo sapiens
acttgctgccaattg

SEQ ID NO: 145569 - DNA, 15 bp, Homo sapiens
gacttgctgccaatt

SEQ ID NO: 145570 - DNA, 15 bp, Homo sapiens
tgacttgctgccaat

SEQ ID NO: 145571 - DNA, 15 bp, Homo sapiens
ctgacttgctgccaa

SEQ ID NO: 145572 - DNA, 15 bp, Homo sapiens
cctgacttgctgcca

SEQ ID NO: 145573 - DNA, 15 bp, Homo sapiens
tcctgacttgctgcc

SEQ ID NO: 145574 - DNA, 15 bp, Homo sapiens
atcctgacttgctgc

SEQ ID NO: 145575 - DNA, 15 bp, Homo sapiens
catcctgacttgctg

SEQ ID NO: 145576 - DNA, 15 bp, Homo sapiens
acatcctgacttgct

SEQ ID NO: 145577 - DNA, 15 bp, Homo sapiens
cacatcctgacttgc

SEQ ID NO: 145578 - DNA, 15 bp, Homo sapiens
acacatcctgacttg

SEQ ID NO: 145579 - DNA, 15 bp, Homo sapiens
cacacatcctgactt

SEQ ID NO: 145580 - DNA, 15 bp, Homo sapiens
ccacacatcctgact

SEQ ID NO: 145581 - DNA, 15 bp, Homo sapiens
tccacacatcctgac

SEQ ID NO: 145582 - DNA, 15 bp, Homo sapiens
ctccacacatcctga

SEQ ID NO: 145583 - DNA, 15 bp, Homo sapiens
cctccacacatcctg

SEQ ID NO: 145584 - DNA, 15 bp, Homo sapiens
tcctccacacatcct

SEQ ID NO: 145585 - DNA, 15 bp, Homo sapiens
ctcctccacacatcc

SEQ ID NO: 145586 - DNA, 15 bp, Homo sapiens
cctcctccacacatc

SEQ ID NO: 145587 - DNA, 15 bp, Homo sapiens
ccctcctccacacat

SEQ ID NO: 145588 - DNA, 15 bp, Homo sapiens
tccctcctccacaca

SEQ ID NO: 145589 - DNA, 15 bp, Homo sapiens
ctccctcctccacac

SEQ ID NO: 145590 - DNA, 15 bp, Homo sapiens
actccctcctccaca

SEQ ID NO: 145591 - DNA, 15 bp, Homo sapiens
gactccctcctccac

SEQ ID NO: 145592 - DNA, 15 bp, Homo sapiens
tgactccctcctcca

SEQ ID NO: 145593 - DNA, 15 bp, Homo sapiens
ctgactccctcctcc

SEQ ID NO: 145594 - DNA, 15 bp, Homo sapiens
actgactccctcctc

SEQ ID NO: 145595 - DNA, 15 bp, Homo sapiens
aactgactccctcct

SEQ ID NO: 145596 - DNA, 15 bp, Homo sapiens
aaactgactccctcc

SEQ ID NO: 145597 - DNA, 15 bp, Homo sapiens
gaaactgactccctc

SEQ ID NO: 145598 - DNA, 15 bp, Homo sapiens
agaaactgactccct

SEQ ID NO: 145599 - DNA, 15 bp, Homo sapiens
gagaaactgactccc

SEQ ID NO: 145600 - DNA, 15 bp, Homo sapiens
agagaaactgactcc

SEQ ID NO: 145601 - DNA, 15 bp, Homo sapiens
gagagaaactgactc

SEQ ID NO: 145602 - DNA, 15 bp, Homo sapiens
ggagagaaactgact

SEQ ID NO: 145603 - DNA, 15 bp, Homo sapiens
tggagagaaactgac

SEQ ID NO: 145604 - DNA, 15 bp, Homo sapiens
atggagagaaactga

SEQ ID NO: 145605 - DNA, 15 bp, Homo sapiens
aatggagagaaactg

SEQ ID NO: 145606 - DNA, 15 bp, Homo sapiens
aaatggagagaaact

SEQ ID NO: 145607 - DNA, 15 bp, Homo sapiens
aaaatggagagaaac

SEQ ID NO: 145608 - DNA, 15 bp, Homo sapiens
caaaatggagagaaa

SEQ ID NO: 145609 - DNA, 15 bp, Homo sapiens
ccaaaatggagagaa

SEQ ID NO: 145610 - DNA, 15 bp, Homo sapiens
gccaaaatggagaga

SEQ ID NO: 145611 - DNA, 15 bp, Homo sapiens
ggccaaaatggagag

SEQ ID NO: 145612 - DNA, 15 bp, Homo sapiens
aggccaaaatggaga

SEQ ID NO: 145613 - DNA, 15 bp, Homo sapiens
caggccaaaatggag

SEQ ID NO: 145614 - DNA, 15 bp, Homo sapiens
gcaggccaaaatgga

SEQ ID NO: 145615 - DNA, 15 bp, Homo sapiens
tgcaggccaaaatgg

SEQ ID NO: 145616 - DNA, 15 bp, Homo sapiens
ctgcaggccaaaatg

SEQ ID NO: 145617 - DNA, 15 bp, Homo sapiens
gctgcaggccaaaat

SEQ ID NO: 145618 - DNA, 15 bp, Homo sapiens
agctgcaggccaaaa

SEQ ID NO: 145619 - DNA, 15 bp, Homo sapiens
aagctgcaggccaaa

SEQ ID NO: 145620 - DNA, 15 bp, Homo sapiens
gaagctgcaggccaa

SEQ ID NO: 145621 - DNA, 15 bp, Homo sapiens
agaagctgcaggcca

SEQ ID NO: 145622 - DNA, 15 bp, Homo sapiens
aagaagctgcaggcc

SEQ ID NO: 145623 - DNA, 15 bp, Homo sapiens
taagaagctgcaggc

SEQ ID NO: 145624 - DNA, 15 bp, Homo sapiens
ctaagaagctgcagg

SEQ ID NO: 145625 - DNA, 15 bp, Homo sapiens
cctaagaagctgcag

SEQ ID NO: 145626 - DNA, 15 bp, Homo sapiens
ccctaagaagctgca

SEQ ID NO: 145627 - DNA, 15 bp, Homo sapiens
tccctaagaagctgc

SEQ ID NO: 145628 - DNA, 15 bp, Homo sapiens
gtccctaagaagctg

SEQ ID NO: 145629 - DNA, 15 bp, Homo sapiens
tgtccctaagaagct

SEQ ID NO: 145630 - DNA, 15 bp, Homo sapiens
atgtccctaagaagc

SEQ ID NO: 145631 - DNA, 15 bp, Homo sapiens
catgtccctaagaag

SEQ ID NO: 145632 - DNA, 15 bp, Homo sapiens
gcatgtccctaagaa

SEQ ID NO: 145633 - DNA, 15 bp, Homo sapiens
ggcatgtccctaaga

SEQ ID NO: 145634 - DNA, 15 bp, Homo sapiens
aggcatgtccctaag

SEQ ID NO: 145635 - DNA, 15 bp, Homo sapiens
caggcatgtccctaa

SEQ ID NO: 145636 - DNA, 15 bp, Homo sapiens
gcaggcatgtcccta

SEQ ID NO: 145637 - DNA, 15 bp, Homo sapiens
ggcaggcatgtccct

SEQ ID NO: 145638 - DNA, 15 bp, Homo sapiens
tggcaggcatgtccc

SEQ ID NO: 145639 - DNA, 15 bp, Homo sapiens
ctggcaggcatgtcc

SEQ ID NO: 145640 - DNA, 15 bp, Homo sapiens
gctggcaggcatgtc

SEQ ID NO: 145641 - DNA, 15 bp, Homo sapiens
ggctggcaggcatgt

SEQ ID NO: 145642 - DNA, 15 bp, Homo sapiens
tggctggcaggcatg

SEQ ID NO: 145643 - DNA, 15 bp, Homo sapiens
ttggctggcaggcat

SEQ ID NO: 145644 - DNA, 15 bp, Homo sapiens
cttggctggcaggca

SEQ ID NO: 145645 - DNA, 15 bp, Homo sapiens
gcttggctggcaggc

SEQ ID NO: 145646 - DNA, 15 bp, Homo sapiens
agcttggctggcagg

SEQ ID NO: 145647 - DNA, 15 bp, Homo sapiens
cagcttggctggcag

SEQ ID NO: 145648 - DNA, 15 bp, Homo sapiens
ccagcttggctggca

SEQ ID NO: 145649 - DNA, 15 bp, Homo sapiens
tccagcttggctggc

SEQ ID NO: 145650 - DNA, 15 bp, Homo sapiens
ctccagcttggctgg

SEQ ID NO: 145651 - DNA, 15 bp, Homo sapiens
actccagcttggctg

SEQ ID NO: 145652 - DNA, 15 bp, Homo sapiens
aactccagcttggct

SEQ ID NO: 145653 - DNA, 15 bp, Homo sapiens
caactccagcttggc

SEQ ID NO: 145654 - DNA, 15 bp, Homo sapiens
ccaactccagcttgg

SEQ ID NO: 145655 - DNA, 15 bp, Homo sapiens
tccaactccagcttg

SEQ ID NO: 145656 - DNA, 15 bp, Homo sapiens
ttccaactccagctt

SEQ ID NO: 145657 - DNA, 15 bp, Homo sapiens
cttccaactccagct

SEQ ID NO: 145658 - DNA, 15 bp, Homo sapiens
ccttccaactccagc

SEQ ID NO: 145659 - DNA, 15 bp, Homo sapiens
cccttccaactccag

SEQ ID NO: 145660 - DNA, 15 bp, Homo sapiens
tcccttccaactcca

SEQ ID NO: 145661 - DNA, 15 bp, Homo sapiens
ttcccttccaactcc

SEQ ID NO: 145662 - DNA, 15 bp, Homo sapiens
tttcccttccaactc

SEQ ID NO: 145663 - DNA, 15 bp, Homo sapiens
atttcccttccaact

SEQ ID NO: 145664 - DNA, 15 bp, Homo sapiens
gatttcccttccaac

SEQ ID NO: 145665 - DNA, 15 bp, Homo sapiens
agatttcccttccaa

SEQ ID NO: 145666 - DNA, 15 bp, Homo sapiens
gagatttcccttcca

SEQ ID NO: 145667 - DNA, 15 bp, Homo sapiens
tgagatttcccttcc

SEQ ID NO: 145668 - DNA, 15 bp, Homo sapiens
ttgagatttcccttc

SEQ ID NO: 145669 - DNA, 15 bp, Homo sapiens
tttgagatttccctt

SEQ ID NO: 145670 - DNA, 15 bp, Homo sapiens
gtttgagatttccct

SEQ ID NO: 145671 - DNA, 15 bp, Homo sapiens
tgtttgagatttccc

SEQ ID NO: 145672 - DNA, 15 bp, Homo sapiens
ctgtttgagatttcc

SEQ ID NO: 145673 - DNA, 15 bp, Homo sapiens
tctgtttgagatttc

SEQ ID NO: 145674 - DNA, 15 bp, Homo sapiens
atctgtttgagattt

SEQ ID NO: 145675 - DNA, 15 bp, Homo sapiens
catctgtttgagatt

SEQ ID NO: 145676 - DNA, 15 bp, Homo sapiens
ccatctgtttgagat

SEQ ID NO: 145677 - DNA, 15 bp, Homo sapiens
cccatctgtttgaga

SEQ ID NO: 145678 - DNA, 15 bp, Homo sapiens
ccccatctgtttgag

SEQ ID NO: 145679 - DNA, 15 bp, Homo sapiens
cccccatctgtttga

SEQ ID NO: 145680 - DNA, 15 bp, Homo sapiens
acccccatctgtttg

SEQ ID NO: 145681 - DNA, 15 bp, Homo sapiens
cacccccatctgttt

SEQ ID NO: 145682 - DNA, 15 bp, Homo sapiens
gcacccccatctgtt

SEQ ID NO: 145683 - DNA, 15 bp, Homo sapiens
tgcacccccatctgt

SEQ ID NO: 145684 - DNA, 15 bp, Homo sapiens
gtgcacccccatctg

SEQ ID NO: 145685 - DNA, 15 bp, Homo sapiens
cgtgcacccccatct

SEQ ID NO: 145686 - DNA, 15 bp, Homo sapiens
acgtgcacccccatc

SEQ ID NO: 145687 - DNA, 15 bp, Homo sapiens
cacgtgcacccccat

SEQ ID NO: 145688 - DNA, 15 bp, Homo sapiens
acacgtgcaccccca

SEQ ID NO: 145689 - DNA, 15 bp, Homo sapiens
tacacgtgcaccccc

SEQ ID NO: 145690 - DNA, 15 bp, Homo sapiens
ctacacgtgcacccc

SEQ ID NO: 145691 - DNA, 15 bp, Homo sapiens
cctacacgtgcaccc

SEQ ID NO: 145692 - DNA, 15 bp, Homo sapiens
tcctacacgtgcacc

SEQ ID NO: 145693 - DNA, 15 bp, Homo sapiens
ctcctacacgtgcac

SEQ ID NO: 145694 - DNA, 15 bp, Homo sapiens
tctcctacacgtgca

SEQ ID NO: 145695 - DNA, 15 bp, Homo sapiens
ttctcctacacgtgc

SEQ ID NO: 145696 - DNA, 15 bp, Homo sapiens
cttctcctacacgtg

SEQ ID NO: 145697 - DNA, 15 bp, Homo sapiens
tcttctcctacacgt

SEQ ID NO: 145698 - DNA, 15 bp, Homo sapiens
ttcttctcctacacg

SEQ ID NO: 145699 - DNA, 15 bp, Homo sapiens
tttcttctcctacac

SEQ ID NO: 145700 - DNA, 15 bp, Homo sapiens
ttttcttctcctaca

SEQ ID NO: 145701 - DNA, 15 bp, Homo sapiens
attttcttctcctac

SEQ ID NO: 145702 - DNA, 15 bp, Homo sapiens
tattttcttctccta

SEQ ID NO: 145703 - DNA, 15 bp, Homo sapiens
ctattttcttctcct

SEQ ID NO: 145704 - DNA, 15 bp, Homo sapiens
gctattttcttctcc

SEQ ID NO: 145705 - DNA, 15 bp, Homo sapiens
agctattttcttctc

SEQ ID NO: 145706 - DNA, 15 bp, Homo sapiens
cagctattttcttct

SEQ ID NO: 145707 - DNA, 15 bp, Homo sapiens
gcagctattttcttc

SEQ ID NO: 145708 - DNA, 15 bp, Homo sapiens
agcagctattttctt

SEQ ID NO: 145709 - DNA, 15 bp, Homo sapiens
gagcagctattttct

SEQ ID NO: 145710 - DNA, 15 bp, Homo sapiens
ggagcagctattttc

SEQ ID NO: 145711 - DNA, 15 bp, Homo sapiens
tggagcagctatttt

SEQ ID NO: 145712 - DNA, 15 bp, Homo sapiens
atggagcagctattt

SEQ ID NO: 145713 - DNA, 15 bp, Homo sapiens
gatggagcagctatt

SEQ ID NO: 145714 - DNA, 15 bp, Homo sapiens
tgatggagcagctat

SEQ ID NO: 145715 - DNA, 15 bp, Homo sapiens
atgatggagcagcta

SEQ ID NO: 145716 - DNA, 15 bp, Homo sapiens
gatgatggagcagct

SEQ ID NO: 145717 - DNA, 15 bp, Homo sapiens
ggatgatggagcagc

SEQ ID NO: 145718 - DNA, 15 bp, Homo sapiens
aggatgatggagcag

SEQ ID NO: 145719 - DNA, 15 bp, Homo sapiens
taggatgatggagca

SEQ ID NO: 145720 - DNA, 15 bp, Homo sapiens
ataggatgatggagc

SEQ ID NO: 145721 - DNA, 15 bp, Homo sapiens
aataggatgatggag

SEQ ID NO: 145722 - DNA, 15 bp, Homo sapiens
taataggatgatgga

SEQ ID NO: 145723 - DNA, 15 bp, Homo sapiens
gtaataggatgatgg

SEQ ID NO: 145724 - DNA, 15 bp, Homo sapiens
agtaataggatgatg

SEQ ID NO: 145725 - DNA, 15 bp, Homo sapiens
cagtaataggatgat

SEQ ID NO: 145726 - DNA, 15 bp, Homo sapiens
tcagtaataggatga

SEQ ID NO: 145727 - DNA, 15 bp, Homo sapiens
ctcagtaataggatg

SEQ ID NO: 145728 - DNA, 15 bp, Homo sapiens
cctcagtaataggat

SEQ ID NO: 145729 - DNA, 15 bp, Homo sapiens
gcctcagtaatagga

SEQ ID NO: 145730 - DNA, 15 bp, Homo sapiens
agcctcagtaatagg

SEQ ID NO: 145731 - DNA, 15 bp, Homo sapiens
gagcctcagtaatag

SEQ ID NO: 145732 - DNA, 15 bp, Homo sapiens
ggagcctcagtaata

SEQ ID NO: 145733 - DNA, 15 bp, Homo sapiens
gggagcctcagtaat

SEQ ID NO: 145734 - DNA, 15 bp, Homo sapiens
ggggagcctcagtaa

SEQ ID NO: 145735 - DNA, 15 bp, Homo sapiens
gggggagcctcagta

SEQ ID NO: 145736 - DNA, 15 bp, Homo sapiens
tgggggagcctcagt

SEQ ID NO: 145737 - DNA, 15 bp, Homo sapiens
ttgggggagcctcag

SEQ ID NO: 145738 - DNA, 15 bp, Homo sapiens
tttgggggagcctca

SEQ ID NO: 145739 - DNA, 15 bp, Homo sapiens
gtttgggggagcctc

SEQ ID NO: 145740 - DNA, 15 bp, Homo sapiens
ggtttgggggagcct

SEQ ID NO: 145741 - DNA, 15 bp, Homo sapiens
tggtttgggggagcc

SEQ ID NO: 145742 - DNA, 15 bp, Homo sapiens
ttggtttgggggagc

SEQ ID NO: 145743 - DNA, 15 bp, Homo sapiens
cttggtttgggggag

SEQ ID NO: 145744 - DNA, 15 bp, Homo sapiens
gcttggtttggggga

SEQ ID NO: 145745 - DNA, 15 bp, Homo sapiens
agcttggtttggggg

SEQ ID NO: 145746 - DNA, 15 bp, Homo sapiens
aagcttggtttgggg

SEQ ID NO: 145747 - DNA, 15 bp, Homo sapiens
caagcttggtttggg

SEQ ID NO: 145748 - DNA, 15 bp, Homo sapiens
ccaagcttggtttgg

SEQ ID NO: 145749 - DNA, 15 bp, Homo sapiens
cccaagcttggtttg

SEQ ID NO: 145750 - DNA, 15 bp, Homo sapiens
gcccaagcttggttt

SEQ ID NO: 145751 - DNA, 15 bp, Homo sapiens
agcccaagcttggtt

SEQ ID NO: 145752 - DNA, 15 bp, Homo sapiens
cagcccaagcttggt

SEQ ID NO: 145753 - DNA, 15 bp, Homo sapiens
gcagcccaagcttgg

SEQ ID NO: 145754 - DNA, 15 bp, Homo sapiens
ggcagcccaagcttg

SEQ ID NO: 145755 - DNA, 15 bp, Homo sapiens
aggcagcccaagctt

SEQ ID NO: 145756 - DNA, 15 bp, Homo sapiens
gaggcagcccaagct

SEQ ID NO: 145757 - DNA, 15 bp, Homo sapiens
tgaggcagcccaagc

SEQ ID NO: 145758 - DNA, 15 bp, Homo sapiens
gtgaggcagcccaag

SEQ ID NO: 145759 - DNA, 15 bp, Homo sapiens
agtgaggcagcccaa

SEQ ID NO: 145760 - DNA, 15 bp, Homo sapiens
tagtgaggcagccca

SEQ ID NO: 145761 - DNA, 15 bp, Homo sapiens
ctagtgaggcagccc

SEQ ID NO: 145762 - DNA, 15 bp, Homo sapiens
tctagtgaggcagcc

SEQ ID NO: 145763 - DNA, 15 bp, Homo sapiens
atctagtgaggcagc

SEQ ID NO: 145764 - DNA, 15 bp, Homo sapiens
tatctagtgaggcag

SEQ ID NO: 145765 - DNA, 15 bp, Homo sapiens
ctatctagtgaggca

SEQ ID NO: 145766 - DNA, 15 bp, Homo sapiens
cctatctagtgaggc

SEQ ID NO: 145767 - DNA, 15 bp, Homo sapiens
acctatctagtgagg

SEQ ID NO: 145768 - DNA, 15 bp, Homo sapiens
tacctatctagtgag

SEQ ID NO: 145769 - DNA, 15 bp, Homo sapiens
atacctatctagtga

SEQ ID NO: 145770 - DNA, 15 bp, Homo sapiens
catacctatctagtg

SEQ ID NO: 145771 - DNA, 15 bp, Homo sapiens
gcatacctatctagt

SEQ ID NO: 145772 - DNA, 15 bp, Homo sapiens
tgcatacctatctag

SEQ ID NO: 145773 - DNA, 15 bp, Homo sapiens
ctgcatacctatcta

SEQ ID NO: 145774 - DNA, 15 bp, Homo sapiens
cctgcatacctatct

SEQ ID NO: 145775 - DNA, 15 bp, Homo sapiens
gcctgcatacctatc

SEQ ID NO: 145776 - DNA, 15 bp, Homo sapiens
agcctgcatacctat

SEQ ID NO: 145777 - DNA, 15 bp, Homo sapiens
cagcctgcataccta

SEQ ID NO: 145778 - DNA, 15 bp, Homo sapiens
ccagcctgcatacct

SEQ ID NO: 145779 - DNA, 15 bp, Homo sapiens
accagcctgcatacc

SEQ ID NO: 145780 - DNA, 15 bp, Homo sapiens
taccagcctgcatac

SEQ ID NO: 145781 - DNA, 15 bp, Homo sapiens
gtaccagcctgcata

SEQ ID NO: 145782 - DNA, 15 bp, Homo sapiens
agtaccagcctgcat

SEQ ID NO: 145783 - DNA, 15 bp, Homo sapiens
aagtaccagcctgca

SEQ ID NO: 145784 - DNA, 15 bp, Homo sapiens
taagtaccagcctgc

SEQ ID NO: 145785 - DNA, 15 bp, Homo sapiens
ctaagtaccagcctg

SEQ ID NO: 145786 - DNA, 15 bp, Homo sapiens
actaagtaccagcct

SEQ ID NO: 145787 - DNA, 15 bp, Homo sapiens
aactaagtaccagcc

SEQ ID NO: 145788 - DNA, 15 bp, Homo sapiens
aaactaagtaccagc

SEQ ID NO: 145789 - DNA, 15 bp, Homo sapiens
aaaactaagtaccag

SEQ ID NO: 145790 - DNA, 15 bp, Homo sapiens
aaaaactaagtacca

SEQ ID NO: 145791 - DNA, 15 bp, Homo sapiens
taaaaactaagtacc

SEQ ID NO: 145792 - DNA, 15 bp, Homo sapiens
ttaaaaactaagtac

SEQ ID NO: 145793 - DNA, 15 bp, Homo sapiens
tttaaaaactaagta

SEQ ID NO: 145794 - DNA, 15 bp, Homo sapiens
ttttaaaaactaagt

SEQ ID NO: 145795 - DNA, 15 bp, Homo sapiens
gttttaaaaactaag

SEQ ID NO: 145796 - DNA, 15 bp, Homo sapiens
tgttttaaaaactaa

SEQ ID NO: 145797 - DNA, 15 bp, Homo sapiens
ttgttttaaaaacta

SEQ ID NO: 145798 - DNA, 15 bp, Homo sapiens
tttgttttaaaaact

SEQ ID NO: 145799 - DNA, 15 bp, Homo sapiens
ctttgttttaaaaac

SEQ ID NO: 145800 - DNA, 15 bp, Homo sapiens
cctttgttttaaaaa

SEQ ID NO: 145801 - DNA, 15 bp, Homo sapiens
ccctttgttttaaaa

SEQ ID NO: 145802 - DNA, 15 bp, Homo sapiens
accctttgttttaaa

SEQ ID NO: 145803 - DNA, 15 bp, Homo sapiens
aaccctttgttttaa

SEQ ID NO: 145804 - DNA, 15 bp, Homo sapiens
aaaccctttgtttta

SEQ ID NO: 145805 - DNA, 15 bp, Homo sapiens
aaaaccctttgtttt

SEQ ID NO: 145806 - DNA, 15 bp, Homo sapiens
gaaaaccctttgttt

SEQ ID NO: 145807 - DNA, 15 bp, Homo sapiens
ggaaaaccctttgtt

SEQ ID NO: 145808 - DNA, 15 bp, Homo sapiens
gggaaaaccctttgt

SEQ ID NO: 145809 - DNA, 15 bp, Homo sapiens
ggggaaaaccctttg

SEQ ID NO: 145810 - DNA, 15 bp, Homo sapiens
aggggaaaacccttt

SEQ ID NO: 145811 - DNA, 15 bp, Homo sapiens
gaggggaaaaccctt

SEQ ID NO: 145812 - DNA, 15 bp, Homo sapiens
agaggggaaaaccct

SEQ ID NO: 145813 - DNA, 15 bp, Homo sapiens
cagaggggaaaaccc

SEQ ID NO: 145814 - DNA, 15 bp, Homo sapiens
ccagaggggaaaacc

SEQ ID NO: 145815 - DNA, 15 bp, Homo sapiens
tccagaggggaaaac

SEQ ID NO: 145816 - DNA, 15 bp, Homo sapiens
atccagaggggaaaa

SEQ ID NO: 145817 - DNA, 15 bp, Homo sapiens
catccagaggggaaa

SEQ ID NO: 145818 - DNA, 15 bp, Homo sapiens
ccatccagaggggaa

SEQ ID NO: 145819 - DNA, 15 bp, Homo sapiens
cccatccagagggga

SEQ ID NO: 145820 - DNA, 15 bp, Homo sapiens
ccccatccagagggg

SEQ ID NO: 145821 - DNA, 15 bp, Homo sapiens
gccccatccagaggg

SEQ ID NO: 145822 - DNA, 15 bp, Homo sapiens
agccccatccagagg

SEQ ID NO: 145823 - DNA, 15 bp, Homo sapiens
cagccccatccagag

SEQ ID NO: 145824 - DNA, 15 bp, Homo sapiens
ccagccccatccaga

SEQ ID NO: 145825 - DNA, 15 bp, Homo sapiens
cccagccccatccag

SEQ ID NO: 145826 - DNA, 15 bp, Homo sapiens
acccagccccatcca

SEQ ID NO: 145827 - DNA, 15 bp, Homo sapiens
cacccagccccatcc

SEQ ID NO: 145828 - DNA, 15 bp, Homo sapiens
gcacccagccccatc

SEQ ID NO: 145829 - DNA, 15 bp, Homo sapiens
agcacccagccccat

SEQ ID NO: 145830 - DNA, 15 bp, Homo sapiens
aagcacccagcccca

SEQ ID NO: 145831 - DNA, 15 bp, Homo sapiens
aaagcacccagcccc

SEQ ID NO: 145832 - DNA, 15 bp, Homo sapiens
aaaagcacccagccc

SEQ ID NO: 145833 - DNA, 15 bp, Homo sapiens
gaaaagcacccagcc

SEQ ID NO: 145834 - DNA, 15 bp, Homo sapiens
ggaaaagcacccagc

SEQ ID NO: 145835 - DNA, 15 bp, Homo sapiens
aggaaaagcacccag

SEQ ID NO: 145836 - DNA, 15 bp, Homo sapiens
caggaaaagcaccca

SEQ ID NO: 145837 - DNA, 15 bp, Homo sapiens
ccaggaaaagcaccc

SEQ ID NO: 145838 - DNA, 15 bp, Homo sapiens
gccaggaaaagcacc

SEQ ID NO: 145839 - DNA, 15 bp, Homo sapiens
ggccaggaaaagcac

SEQ ID NO: 145840 - DNA, 15 bp, Homo sapiens
tggccaggaaaagca

SEQ ID NO: 145841 - DNA, 15 bp, Homo sapiens
ttggccaggaaaagc

SEQ ID NO: 145842 - DNA, 15 bp, Homo sapiens
tttggccaggaaaag

SEQ ID NO: 145843 - DNA, 15 bp, Homo sapiens
ctttggccaggaaaa

SEQ ID NO: 145844 - DNA, 15 bp, Homo sapiens
cctttggccaggaaa

SEQ ID NO: 145845 - DNA, 15 bp, Homo sapiens
tcctttggccaggaa

SEQ ID NO: 145846 - DNA, 15 bp, Homo sapiens
ttcctttggccagga

SEQ ID NO: 145847 - DNA, 15 bp, Homo sapiens
attcctttggccagg

SEQ ID NO: 145848 - DNA, 15 bp, Homo sapiens
tattcctttggccag

SEQ ID NO: 145849 - DNA, 15 bp, Homo sapiens
gtattcctttggcca

SEQ ID NO: 145850 - DNA, 15 bp, Homo sapiens
tgtattcctttggcc

SEQ ID NO: 145851 - DNA, 15 bp, Homo sapiens
ttgtattcctttggc

SEQ ID NO: 145852 - DNA, 15 bp, Homo sapiens
attgtattcctttgg

SEQ ID NO: 145853 - DNA, 15 bp, Homo sapiens
aattgtattcctttg

SEQ ID NO: 145854 - DNA, 15 bp, Homo sapiens
gaattgtattccttt

SEQ ID NO: 145855 - DNA, 15 bp, Homo sapiens
agaattgtattcctt

SEQ ID NO: 145856 - DNA, 15 bp, Homo sapiens
aagaattgtattcct

SEQ ID NO: 145857 - DNA, 15 bp, Homo sapiens
caagaattgtattcc

SEQ ID NO: 145858 - DNA, 15 bp, Homo sapiens
acaagaattgtattc

SEQ ID NO: 145859 - DNA, 15 bp, Homo sapiens
aacaagaattgtatt

SEQ ID NO: 145860 - DNA, 15 bp, Homo sapiens
aaacaagaattgtat

SEQ ID NO: 145861 - DNA, 15 bp, Homo sapiens
gaaacaagaattgta

SEQ ID NO: 145862 - DNA, 15 bp, Homo sapiens
agaaacaagaattgt

SEQ ID NO: 145863 - DNA, 15 bp, Homo sapiens
gagaaacaagaattg

SEQ ID NO: 145864 - DNA, 15 bp, Homo sapiens
ggagaaacaagaatt

SEQ ID NO: 145865 - DNA, 15 bp, Homo sapiens
gggagaaacaagaat

SEQ ID NO: 145866 - DNA, 15 bp, Homo sapiens
ggggagaaacaagaa

SEQ ID NO: 145867 - DNA, 15 bp, Homo sapiens
tggggagaaacaaga

SEQ ID NO: 145868 - DNA, 15 bp, Homo sapiens
ctggggagaaacaag

SEQ ID NO: 145869 - DNA, 15 bp, Homo sapiens
cctggggagaaacaa

SEQ ID NO: 145870 - DNA, 15 bp, Homo sapiens
ccctggggagaaaca

SEQ ID NO: 145871 - DNA, 15 bp, Homo sapiens
accctggggagaaac

SEQ ID NO: 145872 - DNA, 15 bp, Homo sapiens
taccctggggagaaa

SEQ ID NO: 145873 - DNA, 15 bp, Homo sapiens
ttaccctggggagaa

SEQ ID NO: 145874 - DNA, 15 bp, Homo sapiens
cttaccctggggaga

SEQ ID NO: 145875 - DNA, 15 bp, Homo sapiens
ccttaccctggggag

SEQ ID NO: 145876 - DNA, 15 bp, Homo sapiens
tccttaccctgggga

SEQ ID NO: 145877 - DNA, 15 bp, Homo sapiens
ttccttaccctgggg

SEQ ID NO: 145878 - DNA, 15 bp, Homo sapiens
cttccttaccctggg

SEQ ID NO: 145879 - DNA, 15 bp, Homo sapiens
ccttccttaccctgg

SEQ ID NO: 145880 - DNA, 15 bp, Homo sapiens
tccttccttaccctg

SEQ ID NO: 145881 - DNA, 15 bp, Homo sapiens
ttccttccttaccct

SEQ ID NO: 145882 - DNA, 15 bp, Homo sapiens
cttccttccttaccc

SEQ ID NO: 145883 - DNA, 15 bp, Homo sapiens
acttccttccttacc

SEQ ID NO: 145884 - DNA, 15 bp, Homo sapiens
cacttccttccttac

SEQ ID NO: 145885 - DNA, 15 bp, Homo sapiens
tcacttccttcctta

SEQ ID NO: 145886 - DNA, 15 bp, Homo sapiens
ttcacttccttcctt

SEQ ID NO: 145887 - DNA, 15 bp, Homo sapiens
cttcacttccttcct

SEQ ID NO: 145888 - DNA, 15 bp, Homo sapiens
ccttcacttccttcc

SEQ ID NO: 145889 - DNA, 15 bp, Homo sapiens
cccttcacttccttc

SEQ ID NO: 145890 - DNA, 15 bp, Homo sapiens
ccccttcacttcctt

SEQ ID NO: 145891 - DNA, 15 bp, Homo sapiens
tccccttcacttcct

SEQ ID NO: 145892 - DNA, 15 bp, Homo sapiens
ttccccttcacttcc

SEQ ID NO: 145893 - DNA, 15 bp, Homo sapiens
gttccccttcacttc

SEQ ID NO: 145894 - DNA, 15 bp, Homo sapiens
tgttccccttcactt

SEQ ID NO: 145895 - DNA, 15 bp, Homo sapiens
ctgttccccttcact

SEQ ID NO: 145896 - DNA, 15 bp, Homo sapiens
gctgttccccttcac

SEQ ID NO: 145897 - DNA, 15 bp, Homo sapiens
tgctgttccccttca

SEQ ID NO: 145898 - DNA, 15 bp, Homo sapiens
ttgctgttccccttc

SEQ ID NO: 145899 - DNA, 15 bp, Homo sapiens
tttgctgttcccctt

SEQ ID NO: 145900 - DNA, 15 bp, Homo sapiens
ttttgctgttcccct

SEQ ID NO: 145901 - DNA, 15 bp, Homo sapiens
cttttgctgttcccc

SEQ ID NO: 145902 - DNA, 15 bp, Homo sapiens
gcttttgctgttccc

SEQ ID NO: 145903 - DNA, 15 bp, Homo sapiens
agcttttgctgttcc

SEQ ID NO: 145904 - DNA, 15 bp, Homo sapiens
cagcttttgctgttc

SEQ ID NO: 145905 - DNA, 15 bp, Homo sapiens
gcagcttttgctgtt

SEQ ID NO: 145906 - DNA, 15 bp, Homo sapiens
agcagcttttgctgt

SEQ ID NO: 145907 - DNA, 15 bp, Homo sapiens
aagcagcttttgctg

SEQ ID NO: 145908 - DNA, 15 bp, Homo sapiens
aaagcagcttttgct

SEQ ID NO: 145909 - DNA, 15 bp, Homo sapiens
gaaagcagcttttgc

SEQ ID NO: 145910 - DNA, 15 bp, Homo sapiens
agaaagcagcttttg

SEQ ID NO: 145911 - DNA, 15 bp, Homo sapiens
cagaaagcagctttt

SEQ ID NO: 145912 - DNA, 15 bp, Homo sapiens
gcagaaagcagcttt

SEQ ID NO: 145913 - DNA, 15 bp, Homo sapiens
tgcagaaagcagctt

SEQ ID NO: 145914 - DNA, 15 bp, Homo sapiens
ctgcagaaagcagct

SEQ ID NO: 145915 - DNA, 15 bp, Homo sapiens
gctgcagaaagcagc

SEQ ID NO: 145916 - DNA, 15 bp, Homo sapiens
agctgcagaaagcag

SEQ ID NO: 145917 - DNA, 15 bp, Homo sapiens
gagctgcagaaagca

SEQ ID NO: 145918 - DNA, 15 bp, Homo sapiens
tgagctgcagaaagc

SEQ ID NO: 145919 - DNA, 15 bp, Homo sapiens
ctgagctgcagaaag

SEQ ID NO: 145920 - DNA, 15 bp, Homo sapiens
actgagctgcagaaa

SEQ ID NO: 145921 - DNA, 15 bp, Homo sapiens
tactgagctgcagaa

SEQ ID NO: 145922 - DNA, 15 bp, Homo sapiens
atactgagctgcaga

SEQ ID NO: 145923 - DNA, 15 bp, Homo sapiens
aatactgagctgcag

SEQ ID NO: 145924 - DNA, 15 bp, Homo sapiens
gaatactgagctgca

SEQ ID NO: 145925 - DNA, 15 bp, Homo sapiens
tgaatactgagctgc

SEQ ID NO: 145926 - DNA, 15 bp, Homo sapiens
gtgaatactgagctg

SEQ ID NO: 145927 - DNA, 15 bp, Homo sapiens
tgtgaatactgagct

SEQ ID NO: 145928 - DNA, 15 bp, Homo sapiens
ctgtgaatactgagc

SEQ ID NO: 145929 - DNA, 15 bp, Homo sapiens
gctgtgaatactgag

SEQ ID NO: 145930 - DNA, 15 bp, Homo sapiens
cgctgtgaatactga

SEQ ID NO: 145931 - DNA, 15 bp, Homo sapiens
acgctgtgaatactg

SEQ ID NO: 145932 - DNA, 15 bp, Homo sapiens
cacgctgtgaatact

SEQ ID NO: 145933 - DNA, 15 bp, Homo sapiens
gcacgctgtgaatac

SEQ ID NO: 145934 - DNA, 15 bp, Homo sapiens
agcacgctgtgaata

SEQ ID NO: 145935 - DNA, 15 bp, Homo sapiens
cagcacgctgtgaat

SEQ ID NO: 145936 - DNA, 15 bp, Homo sapiens
acagcacgctgtgaa

SEQ ID NO: 145937 - DNA, 15 bp, Homo sapiens
aacagcacgctgtga

SEQ ID NO: 145938 - DNA, 15 bp, Homo sapiens
gaacagcacgctgtg

SEQ ID NO: 145939 - DNA, 15 bp, Homo sapiens
agaacagcacgctgt

SEQ ID NO: 145940 - DNA, 15 bp, Homo sapiens
tagaacagcacgctg

SEQ ID NO: 145941 - DNA, 15 bp, Homo sapiens
ctagaacagcacgct

SEQ ID NO: 145942 - DNA, 15 bp, Homo sapiens
cctagaacagcacgc

SEQ ID NO: 145943 - DNA, 15 bp, Homo sapiens
gcctagaacagcacg

SEQ ID NO: 145944 - DNA, 15 bp, Homo sapiens
agcctagaacagcac

SEQ ID NO: 145945 - DNA, 15 bp, Homo sapiens
cagcctagaacagca

SEQ ID NO: 145946 - DNA, 15 bp, Homo sapiens
acagcctagaacagc

SEQ ID NO: 145947 - DNA, 15 bp, Homo sapiens
aacagcctagaacag

SEQ ID NO: 145948 - DNA, 15 bp, Homo sapiens
taacagcctagaaca

SEQ ID NO: 145949 - DNA, 15 bp, Homo sapiens
ttaacagcctagaac

SEQ ID NO: 145950 - DNA, 15 bp, Homo sapiens
tttaacagcctagaa

SEQ ID NO: 145951 - DNA, 15 bp, Homo sapiens
ctttaacagcctaga

SEQ ID NO: 145952 - DNA, 15 bp, Homo sapiens
cctttaacagcctag

SEQ ID NO: 145953 - DNA, 15 bp, Homo sapiens
tcctttaacagccta

SEQ ID NO: 145954 - DNA, 15 bp, Homo sapiens
ttcctttaacagcct

SEQ ID NO: 145955 - DNA, 15 bp, Homo sapiens
gttcctttaacagcc

SEQ ID NO: 145956 - DNA, 15 bp, Homo sapiens
tgttcctttaacagc

SEQ ID NO: 145957 - DNA, 15 bp, Homo sapiens
gtgttcctttaacag

SEQ ID NO: 145958 - DNA, 15 bp, Homo sapiens
ggtgttcctttaaca

SEQ ID NO: 145959 - DNA, 15 bp, Homo sapiens
tggtgttcctttaac

SEQ ID NO: 145960 - DNA, 15 bp, Homo sapiens
atggtgttcctttaa

SEQ ID NO: 145961 - DNA, 15 bp, Homo sapiens
aatggtgttccttta

SEQ ID NO: 145962 - DNA, 15 bp, Homo sapiens
taatggtgttccttt

SEQ ID NO: 145963 - DNA, 15 bp, Homo sapiens
ataatggtgttcctt

SEQ ID NO: 145964 - DNA, 15 bp, Homo sapiens
cataatggtgttcct

SEQ ID NO: 145965 - DNA, 15 bp, Homo sapiens
tcataatggtgttcc

SEQ ID NO: 145966 - DNA, 15 bp, Homo sapiens
atcataatggtgttc

SEQ ID NO: 145967 - DNA, 15 bp, Homo sapiens
gatcataatggtgtt

SEQ ID NO: 145968 - DNA, 15 bp, Homo sapiens
ggatcataatggtgt

SEQ ID NO: 145969 - DNA, 15 bp, Homo sapiens
gggatcataatggtg

SEQ ID NO: 145970 - DNA, 15 bp, Homo sapiens
tgggatcataatggt

SEQ ID NO: 145971 - DNA, 15 bp, Homo sapiens
ttgggatcataatgg

SEQ ID NO: 145972 - DNA, 15 bp, Homo sapiens
gttgggatcataatg

SEQ ID NO: 145973 - DNA, 15 bp, Homo sapiens
tgttgggatcataat

SEQ ID NO: 145974 - DNA, 15 bp, Homo sapiens
ctgttgggatcataa

SEQ ID NO: 145975 - DNA, 15 bp, Homo sapiens
actgttgggatcata

SEQ ID NO: 145976 - DNA, 15 bp, Homo sapiens
tactgttgggatcat

SEQ ID NO: 145977 - DNA, 15 bp, Homo sapiens
ctactgttgggatca

SEQ ID NO: 145978 - DNA, 15 bp, Homo sapiens
cctactgttgggatc

SEQ ID NO: 145979 - DNA, 15 bp, Homo sapiens
gcctactgttgggat

SEQ ID NO: 145980 - DNA, 15 bp, Homo sapiens
agcctactgttggga

SEQ ID NO: 145981 - DNA, 15 bp, Homo sapiens
cagcctactgttggg

SEQ ID NO: 145982 - DNA, 15 bp, Homo sapiens
tcagcctactgttgg

SEQ ID NO: 145983 - DNA, 15 bp, Homo sapiens
ttcagcctactgttg

SEQ ID NO: 145984 - DNA, 15 bp, Homo sapiens
tttcagcctactgtt

SEQ ID NO: 145985 - DNA, 15 bp, Homo sapiens
ctttcagcctactgt

SEQ ID NO: 145986 - DNA, 15 bp, Homo sapiens
tctttcagcctactg

SEQ ID NO: 145987 - DNA, 15 bp, Homo sapiens
ctctttcagcctact

SEQ ID NO: 145988 - DNA, 15 bp, Homo sapiens
actctttcagcctac

SEQ ID NO: 145989 - DNA, 15 bp, Homo sapiens
tactctttcagccta

SEQ ID NO: 145990 - DNA, 15 bp, Homo sapiens
ttactctttcagcct

SEQ ID NO: 145991 - DNA, 15 bp, Homo sapiens
attactctttcagcc

SEQ ID NO: 145992 - DNA, 15 bp, Homo sapiens
cattactctttcagc

SEQ ID NO: 145993 - DNA, 15 bp, Homo sapiens
tcattactctttcag

SEQ ID NO: 145994 - DNA, 15 bp, Homo sapiens
atcattactctttca

SEQ ID NO: 145995 - DNA, 15 bp, Homo sapiens
catcattactctttc

SEQ ID NO: 145996 - DNA, 15 bp, Homo sapiens
tcatcattactcttt

SEQ ID NO: 145997 - DNA, 15 bp, Homo sapiens
gtcatcattactctt

SEQ ID NO: 145998 - DNA, 15 bp, Homo sapiens
tgtcatcattactct

SEQ ID NO: 145999 - DNA, 15 bp, Homo sapiens
atgtcatcattactc

SEQ ID NO: 146000 - DNA, 15 bp, Homo sapiens
aatgtcatcattact

SEQ ID NO: 146001 - DNA, 15 bp, Homo sapiens
taatgtcatcattac

SEQ ID NO: 146002 - DNA, 15 bp, Homo sapiens
ctaatgtcatcatta

SEQ ID NO: 146003 - DNA, 15 bp, Homo sapiens
gctaatgtcatcatt

SEQ ID NO: 146004 - DNA, 15 bp, Homo sapiens
ggctaatgtcatcat

SEQ ID NO: 146005 - DNA, 15 bp, Homo sapiens
tggctaatgtcatca

SEQ ID NO: 146006 - DNA, 15 bp, Homo sapiens
ttggctaatgtcatc

SEQ ID NO: 146007 - DNA, 15 bp, Homo sapiens
cttggctaatgtcat

SEQ ID NO: 146008 - DNA, 15 bp, Homo sapiens
ccttggctaatgtca

SEQ ID NO: 146009 - DNA, 15 bp, Homo sapiens
tccttggctaatgtc

SEQ ID NO: 146010 - DNA, 15 bp, Homo sapiens
ctccttggctaatgt

SEQ ID NO: 146011 - DNA, 15 bp, Homo sapiens
gctccttggctaatg

SEQ ID NO: 146012 - DNA, 15 bp, Homo sapiens
tgctccttggctaat

SEQ ID NO: 146013 - DNA, 15 bp, Homo sapiens
ttgctccttggctaa

SEQ ID NO: 146014 - DNA, 15 bp, Homo sapiens
tttgctccttggcta

SEQ ID NO: 146015 - DNA, 15 bp, Homo sapiens
ttttgctccttggct

SEQ ID NO: 146016 - DNA, 15 bp, Homo sapiens
tttttgctccttggc

SEQ ID NO: 146017 - DNA, 15 bp, Homo sapiens
gtttttgctccttgg

SEQ ID NO: 146018 - DNA, 15 bp, Homo sapiens
ggtttttgctccttg

SEQ ID NO: 146019 - DNA, 15 bp, Homo sapiens
tggtttttgctcctt

SEQ ID NO: 146020 - DNA, 15 bp, Homo sapiens
ctggtttttgctcct

SEQ ID NO: 146021 - DNA, 15 bp, Homo sapiens
actggtttttgctcc

SEQ ID NO: 146022 - DNA, 15 bp, Homo sapiens
tactggtttttgctc

SEQ ID NO: 146023 - DNA, 15 bp, Homo sapiens
ttactggtttttgct

SEQ ID NO: 146024 - DNA, 15 bp, Homo sapiens
tttactggtttttgc

SEQ ID NO: 146025 - DNA, 15 bp, Homo sapiens
atttactggtttttg

SEQ ID NO: 146026 - DNA, 15 bp, Homo sapiens
catttactggttttt

SEQ ID NO: 146027 - DNA, 15 bp, Homo sapiens
ccatttactggtttt

SEQ ID NO: 146028 - DNA, 15 bp, Homo sapiens
cccatttactggttt

SEQ ID NO: 146029 - DNA, 15 bp, Homo sapiens
ccccatttactggtt

SEQ ID NO: 146030 - DNA, 15 bp, Homo sapiens
accccatttactggt

SEQ ID NO: 146031 - DNA, 15 bp, Homo sapiens
taccccatttactgg

SEQ ID NO: 146032 - DNA, 15 bp, Homo sapiens
gtaccccatttactg

SEQ ID NO: 146033 - DNA, 15 bp, Homo sapiens
ggtaccccatttact

SEQ ID NO: 146034 - DNA, 15 bp, Homo sapiens
aggtaccccatttac

SEQ ID NO: 146035 - DNA, 15 bp, Homo sapiens
gaggtaccccattta

SEQ ID NO: 146036 - DNA, 15 bp, Homo sapiens
cgaggtaccccattt

SEQ ID NO: 146037 - DNA, 15 bp, Homo sapiens
tcgaggtaccccatt

SEQ ID NO: 146038 - DNA, 15 bp, Homo sapiens
ttcgaggtaccccat

SEQ ID NO: 146039 - DNA, 15 bp, Homo sapiens
gttcgaggtacccca

SEQ ID NO: 146040 - DNA, 15 bp, Homo sapiens
tgttcgaggtacccc

SEQ ID NO: 146041 - DNA, 15 bp, Homo sapiens
atgttcgaggtaccc

SEQ ID NO: 146042 - DNA, 15 bp, Homo sapiens
aatgttcgaggtacc

SEQ ID NO: 146043 - DNA, 15 bp, Homo sapiens
gaatgttcgaggtac

SEQ ID NO: 146044 - DNA, 15 bp, Homo sapiens
ggaatgttcgaggta

SEQ ID NO: 146045 - DNA, 15 bp, Homo sapiens
aggaatgttcgaggt

SEQ ID NO: 146046 - DNA, 15 bp, Homo sapiens
caggaatgttcgagg

SEQ ID NO: 146047 - DNA, 15 bp, Homo sapiens
acaggaatgttcgag

SEQ ID NO: 146048 - DNA, 15 bp, Homo sapiens
gacaggaatgttcga

SEQ ID NO: 146049 - DNA, 15 bp, Homo sapiens
ggacaggaatgttcg

SEQ ID NO: 146050 - DNA, 15 bp, Homo sapiens
tggacaggaatgttc

SEQ ID NO: 146051 - DNA, 15 bp, Homo sapiens
ctggacaggaatgtt

SEQ ID NO: 146052 - DNA, 15 bp, Homo sapiens
tctggacaggaatgt

SEQ ID NO: 146053 - DNA, 15 bp, Homo sapiens
ctctggacaggaatg

SEQ ID NO: 146054 - DNA, 15 bp, Homo sapiens
gctctggacaggaat

SEQ ID NO: 146055 - DNA, 15 bp, Homo sapiens
ggctctggacaggaa

SEQ ID NO: 146056 - DNA, 15 bp, Homo sapiens
tggctctggacagga

SEQ ID NO: 146057 - DNA, 15 bp, Homo sapiens
ctggctctggacagg

SEQ ID NO: 146058 - DNA, 15 bp, Homo sapiens
cctggctctggacag

SEQ ID NO: 146059 - DNA, 15 bp, Homo sapiens
tcctggctctggaca

SEQ ID NO: 146060 - DNA, 15 bp, Homo sapiens
ttcctggctctggac

SEQ ID NO: 146061 - DNA, 15 bp, Homo sapiens
cttcctggctctgga

SEQ ID NO: 146062 - DNA, 15 bp, Homo sapiens
tcttcctggctctgg

SEQ ID NO: 146063 - DNA, 15 bp, Homo sapiens
ttcttcctggctctg

SEQ ID NO: 146064 - DNA, 15 bp, Homo sapiens
cttcttcctggctct

SEQ ID NO: 146065 - DNA, 15 bp, Homo sapiens
gcttcttcctggctc

SEQ ID NO: 146066 - DNA, 15 bp, Homo sapiens
agcttcttcctggct

SEQ ID NO: 146067 - DNA, 15 bp, Homo sapiens
aagcttcttcctggc

SEQ ID NO: 146068 - DNA, 15 bp, Homo sapiens
caagcttcttcctgg

SEQ ID NO: 146069 - DNA, 15 bp, Homo sapiens
ccaagcttcttcctg

SEQ ID NO: 146070 - DNA, 15 bp, Homo sapiens
tccaagcttcttcct

SEQ ID NO: 146071 - DNA, 15 bp, Homo sapiens
ctccaagcttcttcc

SEQ ID NO: 146072 - DNA, 15 bp, Homo sapiens
tctccaagcttcttc

SEQ ID NO: 146073 - DNA, 15 bp, Homo sapiens
ctctccaagcttctt

SEQ ID NO: 146074 - DNA, 15 bp, Homo sapiens
tctctccaagcttct

SEQ ID NO: 146075 - DNA, 15 bp, Homo sapiens
ttctctccaagcttc

SEQ ID NO: 146076 - DNA, 15 bp, Homo sapiens
tttctctccaagctt

SEQ ID NO: 146077 - DNA, 15 bp, Homo sapiens
ttttctctccaagct

SEQ ID NO: 146078 - DNA, 15 bp, Homo sapiens
attttctctccaagc

SEQ ID NO: 146079 - DNA, 15 bp, Homo sapiens
cattttctctccaag

SEQ ID NO: 146080 - DNA, 15 bp, Homo sapiens
acattttctctccaa

SEQ ID NO: 146081 - DNA, 15 bp, Homo sapiens
gacattttctctcca

SEQ ID NO: 146082 - DNA, 15 bp, Homo sapiens
ggacattttctctcc

SEQ ID NO: 146083 - DNA, 15 bp, Homo sapiens
cggacattttctctc

SEQ ID NO: 146084 - DNA, 15 bp, Homo sapiens
ccggacattttctct

SEQ ID NO: 146085 - DNA, 15 bp, Homo sapiens
accggacattttctc

SEQ ID NO: 146086 - DNA, 15 bp, Homo sapiens
caccggacattttct

SEQ ID NO: 146087 - DNA, 15 bp, Homo sapiens
tcaccggacattttc

SEQ ID NO: 146088 - DNA, 15 bp, Homo sapiens
ctcaccggacatttt

SEQ ID NO: 146089 - DNA, 15 bp, Homo sapiens
gctcaccggacattt

SEQ ID NO: 146090 - DNA, 15 bp, Homo sapiens
tgctcaccggacatt

SEQ ID NO: 146091 - DNA, 15 bp, Homo sapiens
ctgctcaccggacat

SEQ ID NO: 146092 - DNA, 15 bp, Homo sapiens
cctgctcaccggaca

SEQ ID NO: 146093 - DNA, 15 bp, Homo sapiens
ccctgctcaccggac

SEQ ID NO: 146094 - DNA, 15 bp, Homo sapiens
gccctgctcaccgga

SEQ ID NO: 146095 - DNA, 15 bp, Homo sapiens
agccctgctcaccgg

SEQ ID NO: 146096 - DNA, 15 bp, Homo sapiens
aagccctgctcaccg

SEQ ID NO: 146097 - DNA, 15 bp, Homo sapiens
taagccctgctcacc

SEQ ID NO: 146098 - DNA, 15 bp, Homo sapiens
ctaagccctgctcac

SEQ ID NO: 146099 - DNA, 15 bp, Homo sapiens
tctaagccctgctca

SEQ ID NO: 146100 - DNA, 15 bp, Homo sapiens
ctctaagccctgctc

SEQ ID NO: 146101 - DNA, 15 bp, Homo sapiens
actctaagccctgct

SEQ ID NO: 146102 - DNA, 15 bp, Homo sapiens
aactctaagccctgc

SEQ ID NO: 146103 - DNA, 15 bp, Homo sapiens
caactctaagccctg

SEQ ID NO: 146104 - DNA, 15 bp, Homo sapiens
tcaactctaagccct

SEQ ID NO: 146105 - DNA, 15 bp, Homo sapiens
gtcaactctaagccc

SEQ ID NO: 146106 - DNA, 15 bp, Homo sapiens
agtcaactctaagcc

SEQ ID NO: 146107 - DNA, 15 bp, Homo sapiens
cagtcaactctaagc

SEQ ID NO: 146108 - DNA, 15 bp, Homo sapiens
gcagtcaactctaag

SEQ ID NO: 146109 - DNA, 15 bp, Homo sapiens
agcagtcaactctaa

SEQ ID NO: 146110 - DNA, 15 bp, Homo sapiens
cagcagtcaactcta

SEQ ID NO: 146111 - DNA, 15 bp, Homo sapiens
acagcagtcaactct

SEQ ID NO: 146112 - DNA, 15 bp, Homo sapiens
tacagcagtcaactc

SEQ ID NO: 146113 - DNA, 15 bp, Homo sapiens
ctacagcagtcaact

SEQ ID NO: 146114 - DNA, 15 bp, Homo sapiens
cctacagcagtcaac

SEQ ID NO: 146115 - DNA, 15 bp, Homo sapiens
acctacagcagtcaa

SEQ ID NO: 146116 - DNA, 15 bp, Homo sapiens
aacctacagcagtca

SEQ ID NO: 146117 - DNA, 15 bp, Homo sapiens
aaacctacagcagtc

SEQ ID NO: 146118 - DNA, 15 bp, Homo sapiens
aaaacctacagcagt

SEQ ID NO: 146119 - DNA, 15 bp, Homo sapiens
caaaacctacagcag

SEQ ID NO: 146120 - DNA, 15 bp, Homo sapiens
tcaaaacctacagca

SEQ ID NO: 146121 - DNA, 15 bp, Homo sapiens
ttcaaaacctacagc

SEQ ID NO: 146122 - DNA, 15 bp, Homo sapiens
tttcaaaacctacag

SEQ ID NO: 146123 - DNA, 15 bp, Homo sapiens
ctttcaaaacctaca

SEQ ID NO: 146124 - DNA, 15 bp, Homo sapiens
gctttcaaaacctac

SEQ ID NO: 146125 - DNA, 15 bp, Homo sapiens
tgctttcaaaaccta

SEQ ID NO: 146126 - DNA, 15 bp, Homo sapiens
ctgctttcaaaacct

SEQ ID NO: 146127 - DNA, 15 bp, Homo sapiens
tctgctttcaaaacc

SEQ ID NO: 146128 - DNA, 15 bp, Homo sapiens
ctctgctttcaaaac

SEQ ID NO: 146129 - DNA, 15 bp, Homo sapiens
cctctgctttcaaaa

SEQ ID NO: 146130 - DNA, 15 bp, Homo sapiens
ccctctgctttcaaa

SEQ ID NO: 146131 - DNA, 15 bp, Homo sapiens
tccctctgctttcaa

SEQ ID NO: 146132 - DNA, 15 bp, Homo sapiens
ttccctctgctttca

SEQ ID NO: 146133 - DNA, 15 bp, Homo sapiens
tttccctctgctttc

SEQ ID NO: 146134 - DNA, 15 bp, Homo sapiens
ctttccctctgcttt

SEQ ID NO: 146135 - DNA, 15 bp, Homo sapiens
tctttccctctgctt

SEQ ID NO: 146136 - DNA, 15 bp, Homo sapiens
ttctttccctctgct

SEQ ID NO: 146137 - DNA, 15 bp, Homo sapiens
cttctttccctctgc

SEQ ID NO: 146138 - DNA, 15 bp, Homo sapiens
ccttctttccctctg

SEQ ID NO: 146139 - DNA, 15 bp, Homo sapiens
accttctttccctct

SEQ ID NO: 146140 - DNA, 15 bp, Homo sapiens
aaccttctttccctc

SEQ ID NO: 146141 - DNA, 15 bp, Homo sapiens
aaaccttctttccct

SEQ ID NO: 146142 - DNA, 15 bp, Homo sapiens
taaaccttctttccc

SEQ ID NO: 146143 - DNA, 15 bp, Homo sapiens
ctaaaccttctttcc

SEQ ID NO: 146144 - DNA, 15 bp, Homo sapiens
tctaaaccttctttc

SEQ ID NO: 146145 - DNA, 15 bp, Homo sapiens
ctctaaaccttcttt

SEQ ID NO: 146146 - DNA, 15 bp, Homo sapiens
cctctaaaccttctt

SEQ ID NO: 146147 - DNA, 15 bp, Homo sapiens
gcctctaaaccttct

SEQ ID NO: 146148 - DNA, 15 bp, Homo sapiens
agcctctaaaccttc

SEQ ID NO: 146149 - DNA, 15 bp, Homo sapiens
cagcctctaaacctt

SEQ ID NO: 146150 - DNA, 15 bp, Homo sapiens
gcagcctctaaacct

SEQ ID NO: 146151 - DNA, 15 bp, Homo sapiens
tgcagcctctaaacc

SEQ ID NO: 146152 - DNA, 15 bp, Homo sapiens
gtgcagcctctaaac

SEQ ID NO: 146153 - DNA, 15 bp, Homo sapiens
tgtgcagcctctaaa

SEQ ID NO: 146154 - DNA, 15 bp, Homo sapiens
ctgtgcagcctctaa

SEQ ID NO: 146155 - DNA, 15 bp, Homo sapiens
gctgtgcagcctcta

SEQ ID NO: 146156 - DNA, 15 bp, Homo sapiens
tgctgtgcagcctct

SEQ ID NO: 146157 - DNA, 15 bp, Homo sapiens
ttgctgtgcagcctc

SEQ ID NO: 146158 - DNA, 15 bp, Homo sapiens
tttgctgtgcagcct

SEQ ID NO: 146159 - DNA, 15 bp, Homo sapiens
ctttgctgtgcagcc

SEQ ID NO: 146160 - DNA, 15 bp, Homo sapiens
actttgctgtgcagc

SEQ ID NO: 146161 - DNA, 15 bp, Homo sapiens
tactttgctgtgcag

SEQ ID NO: 146162 - DNA, 15 bp, Homo sapiens
ctactttgctgtgca

SEQ ID NO: 146163 - DNA, 15 bp, Homo sapiens
cctactttgctgtgc

SEQ ID NO: 146164 - DNA, 15 bp, Homo sapiens
tcctactttgctgtg

SEQ ID NO: 146165 - DNA, 15 bp, Homo sapiens
ttcctactttgctgt

SEQ ID NO: 146166 - DNA, 15 bp, Homo sapiens
tttcctactttgctg

SEQ ID NO: 146167 - DNA, 15 bp, Homo sapiens
gtttcctactttgct

SEQ ID NO: 146168 - DNA, 15 bp, Homo sapiens
agtttcctactttgc

SEQ ID NO: 146169 - DNA, 15 bp, Homo sapiens
aagtttcctactttg

SEQ ID NO: 146170 - DNA, 15 bp, Homo sapiens
caagtttcctacttt

SEQ ID NO: 146171 - DNA, 15 bp, Homo sapiens
tcaagtttcctactt

SEQ ID NO: 146172 - DNA, 15 bp, Homo sapiens
ctcaagtttcctact

SEQ ID NO: 146173 - DNA, 15 bp, Homo sapiens
actcaagtttcctac

SEQ ID NO: 146174 - DNA, 15 bp, Homo sapiens
aactcaagtttccta

SEQ ID NO: 146175 - DNA, 15 bp, Homo sapiens
caactcaagtttcct

SEQ ID NO: 146176 - DNA, 15 bp, Homo sapiens
gcaactcaagtttcc

SEQ ID NO: 146177 - DNA, 15 bp, Homo sapiens
tgcaactcaagtttc

SEQ ID NO: 146178 - DNA, 15 bp, Homo sapiens
gtgcaactcaagttt

SEQ ID NO: 146179 - DNA, 15 bp, Homo sapiens
tgtgcaactcaagtt

SEQ ID NO: 146180 - DNA, 15 bp, Homo sapiens
gtgtgcaactcaagt

SEQ ID NO: 146181 - DNA, 15 bp, Homo sapiens
ggtgtgcaactcaag

SEQ ID NO: 146182 - DNA, 15 bp, Homo sapiens
cggtgtgcaactcaa

SEQ ID NO: 146183 - DNA, 15 bp, Homo sapiens
tcggtgtgcaactca

SEQ ID NO: 146184 - DNA, 15 bp, Homo sapiens
gtcggtgtgcaactc

SEQ ID NO: 146185 - DNA, 15 bp, Homo sapiens
agtcggtgtgcaact

SEQ ID NO: 146186 - DNA, 15 bp, Homo sapiens
gagtcggtgtgcaac

SEQ ID NO: 146187 - DNA, 15 bp, Homo sapiens
agagtcggtgtgcaa

SEQ ID NO: 146188 - DNA, 15 bp, Homo sapiens
tagagtcggtgtgca

SEQ ID NO: 146189 - DNA, 15 bp, Homo sapiens
ttagagtcggtgtgc

SEQ ID NO: 146190 - DNA, 15 bp, Homo sapiens
cttagagtcggtgtg

SEQ ID NO: 146191 - DNA, 15 bp, Homo sapiens
gcttagagtcggtgt

SEQ ID NO: 146192 - DNA, 15 bp, Homo sapiens
ggcttagagtcggtg

SEQ ID NO: 146193 - DNA, 15 bp, Homo sapiens
tggcttagagtcggt

SEQ ID NO: 146194 - DNA, 15 bp, Homo sapiens
ttggcttagagtcgg

SEQ ID NO: 146195 - DNA, 15 bp, Homo sapiens
tttggcttagagtcg

SEQ ID NO: 146196 - DNA, 15 bp, Homo sapiens
gtttggcttagagtc

SEQ ID NO: 146197 - DNA, 15 bp, Homo sapiens
ggtttggcttagagt

SEQ ID NO: 146198 - DNA, 15 bp, Homo sapiens
aggtttggcttagag

SEQ ID NO: 146199 - DNA, 15 bp, Homo sapiens
gaggtttggcttaga

SEQ ID NO: 146200 - DNA, 15 bp, Homo sapiens
tgaggtttggcttag

SEQ ID NO: 146201 - DNA, 15 bp, Homo sapiens
ctgaggtttggctta

SEQ ID NO: 146202 - DNA, 15 bp, Homo sapiens
tctgaggtttggctt

SEQ ID NO: 146203 - DNA, 15 bp, Homo sapiens
ctctgaggtttggct

SEQ ID NO: 146204 - DNA, 15 bp, Homo sapiens
tctctgaggtttggc

SEQ ID NO: 146205 - DNA, 15 bp, Homo sapiens
ctctctgaggtttgg

SEQ ID NO: 146206 - DNA, 15 bp, Homo sapiens
cctctctgaggtttg

SEQ ID NO: 146207 - DNA, 15 bp, Homo sapiens
acctctctgaggttt

SEQ ID NO: 146208 - DNA, 15 bp, Homo sapiens
tacctctctgaggtt

SEQ ID NO: 146209 - DNA, 15 bp, Homo sapiens
gtacctctctgaggt

SEQ ID NO: 146210 - DNA, 15 bp, Homo sapiens
agtacctctctgagg

SEQ ID NO: 146211 - DNA, 15 bp, Homo sapiens
aagtacctctctgag

SEQ ID NO: 146212 - DNA, 15 bp, Homo sapiens
gaagtacctctctga

SEQ ID NO: 146213 - DNA, 15 bp, Homo sapiens
ggaagtacctctctg

SEQ ID NO: 146214 - DNA, 15 bp, Homo sapiens
aggaagtacctctct

SEQ ID NO: 146215 - DNA, 15 bp, Homo sapiens
taggaagtacctctc

SEQ ID NO: 146216 - DNA, 15 bp, Homo sapiens
ctaggaagtacctct

SEQ ID NO: 146217 - DNA, 15 bp, Homo sapiens
cctaggaagtacctc

SEQ ID NO: 146218 - DNA, 15 bp, Homo sapiens
gcctaggaagtacct

SEQ ID NO: 146219 - DNA, 15 bp, Homo sapiens
ggcctaggaagtacc

SEQ ID NO: 146220 - DNA, 15 bp, Homo sapiens
gggcctaggaagtac

SEQ ID NO: 146221 - DNA, 15 bp, Homo sapiens
agggcctaggaagta

SEQ ID NO: 146222 - DNA, 15 bp, Homo sapiens
gagggcctaggaagt

SEQ ID NO: 146223 - DNA, 15 bp, Homo sapiens
agagggcctaggaag

SEQ ID NO: 146224 - DNA, 15 bp, Homo sapiens
cagagggcctaggaa

SEQ ID NO: 146225 - DNA, 15 bp, Homo sapiens
acagagggcctagga

SEQ ID NO: 146226 - DNA, 15 bp, Homo sapiens
tacagagggcctagg

SEQ ID NO: 146227 - DNA, 15 bp, Homo sapiens
gtacagagggcctag

SEQ ID NO: 146228 - DNA, 15 bp, Homo sapiens
ggtacagagggccta

SEQ ID NO: 146229 - DNA, 15 bp, Homo sapiens
gggtacagagggcct

SEQ ID NO: 146230 - DNA, 15 bp, Homo sapiens
tgggtacagagggcc

SEQ ID NO: 146231 - DNA, 15 bp, Homo sapiens
atgggtacagagggc

SEQ ID NO: 146232 - DNA, 15 bp, Homo sapiens
gatgggtacagaggg

SEQ ID NO: 146233 - DNA, 15 bp, Homo sapiens
agatgggtacagagg

SEQ ID NO: 146234 - DNA, 15 bp, Homo sapiens
tagatgggtacagag

SEQ ID NO: 146235 - DNA, 15 bp, Homo sapiens
ctagatgggtacaga

SEQ ID NO: 146236 - DNA, 15 bp, Homo sapiens
actagatgggtacag

SEQ ID NO: 146237 - DNA, 15 bp, Homo sapiens
cactagatgggtaca

SEQ ID NO: 146238 - DNA, 15 bp, Homo sapiens
gcactagatgggtac

SEQ ID NO: 146239 - DNA, 15 bp, Homo sapiens
ggcactagatgggta

SEQ ID NO: 146240 - DNA, 15 bp, Homo sapiens
tggcactagatgggt

SEQ ID NO: 146241 - DNA, 15 bp, Homo sapiens
ttggcactagatggg

SEQ ID NO: 146242 - DNA, 15 bp, Homo sapiens
tttggcactagatgg

SEQ ID NO: 146243 - DNA, 15 bp, Homo sapiens
atttggcactagatg

SEQ ID NO: 146244 - DNA, 15 bp, Homo sapiens
catttggcactagat

SEQ ID NO: 146245 - DNA, 15 bp, Homo sapiens
tcatttggcactaga

SEQ ID NO: 146246 - DNA, 15 bp, Homo sapiens
atcatttggcactag

SEQ ID NO: 146247 - DNA, 15 bp, Homo sapiens
catcatttggcacta

SEQ ID NO: 146248 - DNA, 15 bp, Homo sapiens
ccatcatttggcact

SEQ ID NO: 146249 - DNA, 15 bp, Homo sapiens
tccatcatttggcac

SEQ ID NO: 146250 - DNA, 15 bp, Homo sapiens
ttccatcatttggca

SEQ ID NO: 146251 - DNA, 15 bp, Homo sapiens
tttccatcatttggc

SEQ ID NO: 146252 - DNA, 15 bp, Homo sapiens
ttttccatcatttgg

SEQ ID NO: 146253 - DNA, 15 bp, Homo sapiens
cttttccatcatttg

SEQ ID NO: 146254 - DNA, 15 bp, Homo sapiens
gcttttccatcattt

SEQ ID NO: 146255 - DNA, 15 bp, Homo sapiens
ggcttttccatcatt

SEQ ID NO: 146256 - DNA, 15 bp, Homo sapiens
gggcttttccatcat

SEQ ID NO: 146257 - DNA, 15 bp, Homo sapiens
ggggcttttccatca

SEQ ID NO: 146258 - DNA, 15 bp, Homo sapiens
gggggcttttccatc

SEQ ID NO: 146259 - DNA, 15 bp, Homo sapiens
tgggggcttttccat

SEQ ID NO: 146260 - DNA, 15 bp, Homo sapiens
ttgggggcttttcca

SEQ ID NO: 146261 - DNA, 15 bp, Homo sapiens
tttgggggcttttcc

SEQ ID NO: 146262 - DNA, 15 bp, Homo sapiens
atttgggggcttttc

SEQ ID NO: 146263 - DNA, 15 bp, Homo sapiens
gatttgggggctttt

SEQ ID NO: 146264 - DNA, 15 bp, Homo sapiens
tgatttgggggcttt

SEQ ID NO: 146265 - DNA, 15 bp, Homo sapiens
ctgatttgggggctt

SEQ ID NO: 146266 - DNA, 15 bp, Homo sapiens
gctgatttgggggct

SEQ ID NO: 146267 - DNA, 15 bp, Homo sapiens
tgctgatttgggggc

SEQ ID NO: 146268 - DNA, 15 bp, Homo sapiens
gtgctgatttggggg

SEQ ID NO: 146269 - DNA, 15 bp, Homo sapiens
agtgctgatttgggg

SEQ ID NO: 146270 - DNA, 15 bp, Homo sapiens
tagtgctgatttggg

SEQ ID NO: 146271 - DNA, 15 bp, Homo sapiens
ctagtgctgatttgg

SEQ ID NO: 146272 - DNA, 15 bp, Homo sapiens
cctagtgctgatttg

SEQ ID NO: 146273 - DNA, 15 bp, Homo sapiens
acctagtgctgattt

SEQ ID NO: 146274 - DNA, 15 bp, Homo sapiens
tacctagtgctgatt

SEQ ID NO: 146275 - DNA, 15 bp, Homo sapiens
atacctagtgctgat

SEQ ID NO: 146276 - DNA, 15 bp, Homo sapiens
tatacctagtgctga

SEQ ID NO: 146277 - DNA, 15 bp, Homo sapiens
ctatacctagtgctg

SEQ ID NO: 146278 - DNA, 15 bp, Homo sapiens
actatacctagtgct

SEQ ID NO: 146279 - DNA, 15 bp, Homo sapiens
tactatacctagtgc

SEQ ID NO: 146280 - DNA, 15 bp, Homo sapiens
atactatacctagtg

SEQ ID NO: 146281 - DNA, 15 bp, Homo sapiens
tatactatacctagt

SEQ ID NO: 146282 - DNA, 15 bp, Homo sapiens
ctatactatacctag

SEQ ID NO: 146283 - DNA, 15 bp, Homo sapiens
actatactataccta

SEQ ID NO: 146284 - DNA, 15 bp, Homo sapiens
gactatactatacct

SEQ ID NO: 146285 - DNA, 15 bp, Homo sapiens
tgactatactatacc

SEQ ID NO: 146286 - DNA, 15 bp, Homo sapiens
ctgactatactatac

SEQ ID NO: 146287 - DNA, 15 bp, Homo sapiens
actgactatactata

SEQ ID NO: 146288 - DNA, 15 bp, Homo sapiens
cactgactatactat

SEQ ID NO: 146289 - DNA, 15 bp, Homo sapiens
ccactgactatacta

SEQ ID NO: 146290 - DNA, 15 bp, Homo sapiens
cccactgactatact

SEQ ID NO: 146291 - DNA, 15 bp, Homo sapiens
ccccactgactatac

SEQ ID NO: 146292 - DNA, 15 bp, Homo sapiens
gccccactgactata

SEQ ID NO: 146293 - DNA, 15 bp, Homo sapiens
agccccactgactat

SEQ ID NO: 146294 - DNA, 15 bp, Homo sapiens
gagccccactgacta

SEQ ID NO: 146295 - DNA, 15 bp, Homo sapiens
tgagccccactgact

SEQ ID NO: 146296 - DNA, 15 bp, Homo sapiens
ctgagccccactgac

SEQ ID NO: 146297 - DNA, 15 bp, Homo sapiens
cctgagccccactga

SEQ ID NO: 146298 - DNA, 15 bp, Homo sapiens
ccctgagccccactg

SEQ ID NO: 146299 - DNA, 15 bp, Homo sapiens
tccctgagccccact

SEQ ID NO: 146300 - DNA, 15 bp, Homo sapiens
ctccctgagccccac

SEQ ID NO: 146301 - DNA, 15 bp, Homo sapiens
gctccctgagcccca

SEQ ID NO: 146302 - DNA, 15 bp, Homo sapiens
agctccctgagcccc

SEQ ID NO: 146303 - DNA, 15 bp, Homo sapiens
gagctccctgagccc

SEQ ID NO: 146304 - DNA, 15 bp, Homo sapiens
agagctccctgagcc

SEQ ID NO: 146305 - DNA, 15 bp, Homo sapiens
cagagctccctgagc

SEQ ID NO: 146306 - DNA, 15 bp, Homo sapiens
gcagagctccctgag

SEQ ID NO: 146307 - DNA, 15 bp, Homo sapiens
agcagagctccctga

SEQ ID NO: 146308 - DNA, 15 bp, Homo sapiens
tagcagagctccctg

SEQ ID NO: 146309 - DNA, 15 bp, Homo sapiens
ttagcagagctccct

SEQ ID NO: 146310 - DNA, 15 bp, Homo sapiens
attagcagagctccc

SEQ ID NO: 146311 - DNA, 15 bp, Homo sapiens
cattagcagagctcc

SEQ ID NO: 146312 - DNA, 15 bp, Homo sapiens
ccattagcagagctc

SEQ ID NO: 146313 - DNA, 15 bp, Homo sapiens
cccattagcagagct

SEQ ID NO: 146314 - DNA, 15 bp, Homo sapiens
ccccattagcagagc

SEQ ID NO: 146315 - DNA, 15 bp, Homo sapiens
cccccattagcagag

SEQ ID NO: 146316 - DNA, 15 bp, Homo sapiens
acccccattagcaga

SEQ ID NO: 146317 - DNA, 15 bp, Homo sapiens
aacccccattagcag

SEQ ID NO: 146318 - DNA, 15 bp, Homo sapiens
aaacccccattagca

SEQ ID NO: 146319 - DNA, 15 bp, Homo sapiens
gaaacccccattagc

SEQ ID NO: 146320 - DNA, 15 bp, Homo sapiens
ggaaacccccattag

SEQ ID NO: 146321 - DNA, 15 bp, Homo sapiens
tggaaacccccatta

SEQ ID NO: 146322 - DNA, 15 bp, Homo sapiens
ctggaaacccccatt

SEQ ID NO: 146323 - DNA, 15 bp, Homo sapiens
actggaaacccccat

SEQ ID NO: 146324 - DNA, 15 bp, Homo sapiens
gactggaaaccccca

SEQ ID NO: 146325 - DNA, 15 bp, Homo sapiens
agactggaaaccccc

SEQ ID NO: 146326 - DNA, 15 bp, Homo sapiens
aagactggaaacccc

SEQ ID NO: 146327 - DNA, 15 bp, Homo sapiens
gaagactggaaaccc

SEQ ID NO: 146328 - DNA, 15 bp, Homo sapiens
tgaagactggaaacc

SEQ ID NO: 146329 - DNA, 15 bp, Homo sapiens
ttgaagactggaaac

SEQ ID NO: 146330 - DNA, 15 bp, Homo sapiens
gttgaagactggaaa

SEQ ID NO: 146331 - DNA, 15 bp, Homo sapiens
agttgaagactggaa

SEQ ID NO: 146332 - DNA, 15 bp, Homo sapiens
aagttgaagactgga

SEQ ID NO: 146333 - DNA, 15 bp, Homo sapiens
taagttgaagactgg

SEQ ID NO: 146334 - DNA, 15 bp, Homo sapiens
ttaagttgaagactg

SEQ ID NO: 146335 - DNA, 15 bp, Homo sapiens
attaagttgaagact

SEQ ID NO: 146336 - DNA, 15 bp, Homo sapiens
gattaagttgaagac

SEQ ID NO: 146337 - DNA, 15 bp, Homo sapiens
agattaagttgaaga

SEQ ID NO: 146338 - DNA, 15 bp, Homo sapiens
cagattaagttgaag

SEQ ID NO: 146339 - DNA, 15 bp, Homo sapiens
acagattaagttgaa

SEQ ID NO: 146340 - DNA, 15 bp, Homo sapiens
cacagattaagttga

SEQ ID NO: 146341 - DNA, 15 bp, Homo sapiens
gcacagattaagttg

SEQ ID NO: 146342 - DNA, 15 bp, Homo sapiens
ggcacagattaagtt

SEQ ID NO: 146343 - DNA, 15 bp, Homo sapiens
aggcacagattaagt

SEQ ID NO: 146344 - DNA, 15 bp, Homo sapiens
caggcacagattaag

SEQ ID NO: 146345 - DNA, 15 bp, Homo sapiens
acaggcacagattaa

SEQ ID NO: 146346 - DNA, 15 bp, Homo sapiens
cacaggcacagatta

SEQ ID NO: 146347 - DNA, 15 bp, Homo sapiens
ccacaggcacagatt

SEQ ID NO: 146348 - DNA, 15 bp, Homo sapiens
accacaggcacagat

SEQ ID NO: 146349 - DNA, 15 bp, Homo sapiens
taccacaggcacaga

SEQ ID NO: 146350 - DNA, 15 bp, Homo sapiens
gtaccacaggcacag

SEQ ID NO: 146351 - DNA, 15 bp, Homo sapiens
tgtaccacaggcaca

SEQ ID NO: 146352 - DNA, 15 bp, Homo sapiens
atgtaccacaggcac

SEQ ID NO: 146353 - DNA, 15 bp, Homo sapiens
gatgtaccacaggca

SEQ ID NO: 146354 - DNA, 15 bp, Homo sapiens
tgatgtaccacaggc

SEQ ID NO: 146355 - DNA, 15 bp, Homo sapiens
atgatgtaccacagg

SEQ ID NO: 146356 - DNA, 15 bp, Homo sapiens
tatgatgtaccacag

SEQ ID NO: 146357 - DNA, 15 bp, Homo sapiens
ttatgatgtaccaca

SEQ ID NO: 146358 - DNA, 15 bp, Homo sapiens
tttatgatgtaccac

SEQ ID NO: 146359 - DNA, 15 bp, Homo sapiens
ctttatgatgtacca

SEQ ID NO: 146360 - DNA, 15 bp, Homo sapiens
cctttatgatgtacc

SEQ ID NO: 146361 - DNA, 15 bp, Homo sapiens
ccctttatgatgtac

SEQ ID NO: 146362 - DNA, 15 bp, Homo sapiens
accctttatgatgta

SEQ ID NO: 146363 - DNA, 15 bp, Homo sapiens
taccctttatgatgt

SEQ ID NO: 146364 - DNA, 15 bp, Homo sapiens
ataccctttatgatg

SEQ ID NO: 146365 - DNA, 15 bp, Homo sapiens
cataccctttatgat

SEQ ID NO: 146366 - DNA, 15 bp, Homo sapiens
tcataccctttatga

SEQ ID NO: 146367 - DNA, 15 bp, Homo sapiens
ctcataccctttatg

SEQ ID NO: 146368 - DNA, 15 bp, Homo sapiens
tctcataccctttat

SEQ ID NO: 146369 - DNA, 15 bp, Homo sapiens
ctctcatacccttta

SEQ ID NO: 146370 - DNA, 15 bp, Homo sapiens
tctctcatacccttt

SEQ ID NO: 146371 - DNA, 15 bp, Homo sapiens
ttctctcataccctt

SEQ ID NO: 146372 - DNA, 15 bp, Homo sapiens
tttctctcataccct

SEQ ID NO: 146373 - DNA, 15 bp, Homo sapiens
ttttctctcataccc

SEQ ID NO: 146374 - DNA, 15 bp, Homo sapiens
cttttctctcatacc

SEQ ID NO: 146375 - DNA, 15 bp, Homo sapiens
ccttttctctcatac

SEQ ID NO: 146376 - DNA, 15 bp, Homo sapiens
tccttttctctcata

SEQ ID NO: 146377 - DNA, 15 bp, Homo sapiens
ctccttttctctcat

SEQ ID NO: 146378 - DNA, 15 bp, Homo sapiens
cctccttttctctca

SEQ ID NO: 146379 - DNA, 15 bp, Homo sapiens
acctccttttctctc

SEQ ID NO: 146380 - DNA, 15 bp, Homo sapiens
tacctccttttctct

SEQ ID NO: 146381 - DNA, 15 bp, Homo sapiens
ttacctccttttctc

SEQ ID NO: 146382 - DNA, 15 bp, Homo sapiens
gttacctccttttct

SEQ ID NO: 146383 - DNA, 15 bp, Homo sapiens
tgttacctccttttc

SEQ ID NO: 146384 - DNA, 15 bp, Homo sapiens
gtgttacctcctttt

SEQ ID NO: 146385 - DNA, 15 bp, Homo sapiens
agtgttacctccttt

SEQ ID NO: 146386 - DNA, 15 bp, Homo sapiens
gagtgttacctcctt

SEQ ID NO: 146387 - DNA, 15 bp, Homo sapiens
agagtgttacctcct

SEQ ID NO: 146388 - DNA, 15 bp, Homo sapiens
aagagtgttacctcc

SEQ ID NO: 146389 - DNA, 15 bp, Homo sapiens
caagagtgttacctc

SEQ ID NO: 146390 - DNA, 15 bp, Homo sapiens
ccaagagtgttacct

SEQ ID NO: 146391 - DNA, 15 bp, Homo sapiens
gccaagagtgttacc

SEQ ID NO: 146392 - DNA, 15 bp, Homo sapiens
agccaagagtgttac

SEQ ID NO: 146393 - DNA, 15 bp, Homo sapiens
aagccaagagtgtta

SEQ ID NO: 146394 - DNA, 15 bp, Homo sapiens
taagccaagagtgtt

SEQ ID NO: 146395 - DNA, 15 bp, Homo sapiens
ctaagccaagagtgt

SEQ ID NO: 146396 - DNA, 15 bp, Homo sapiens
tctaagccaagagtg

SEQ ID NO: 146397 - DNA, 15 bp, Homo sapiens
atctaagccaagagt

SEQ ID NO: 146398 - DNA, 15 bp, Homo sapiens
tatctaagccaagag

SEQ ID NO: 146399 - DNA, 15 bp, Homo sapiens
ttatctaagccaaga

SEQ ID NO: 146400 - DNA, 15 bp, Homo sapiens
tttatctaagccaag

SEQ ID NO: 146401 - DNA, 15 bp, Homo sapiens
ttttatctaagccaa

SEQ ID NO: 146402 - DNA, 15 bp, Homo sapiens
gttttatctaagcca

SEQ ID NO: 146403 - DNA, 15 bp, Homo sapiens
agttttatctaagcc

SEQ ID NO: 146404 - DNA, 15 bp, Homo sapiens
gagttttatctaagc

SEQ ID NO: 146405 - DNA, 15 bp, Homo sapiens
ggagttttatctaag

SEQ ID NO: 146406 - DNA, 15 bp, Homo sapiens
tggagttttatctaa

SEQ ID NO: 146407 - DNA, 15 bp, Homo sapiens
atggagttttatcta

SEQ ID NO: 146408 - DNA, 15 bp, Homo sapiens
aatggagttttatct

SEQ ID NO: 146409 - DNA, 15 bp, Homo sapiens
gaatggagttttatc

SEQ ID NO: 146410 - DNA, 15 bp, Homo sapiens
ggaatggagttttat

SEQ ID NO: 146411 - DNA, 15 bp, Homo sapiens
gggaatggagtttta

SEQ ID NO: 146412 - DNA, 15 bp, Homo sapiens
agggaatggagtttt

SEQ ID NO: 146413 - DNA, 15 bp, Homo sapiens
aagggaatggagttt

SEQ ID NO: 146414 - DNA, 15 bp, Homo sapiens
aaagggaatggagtt

SEQ ID NO: 146415 - DNA, 15 bp, Homo sapiens
taaagggaatggagt

SEQ ID NO: 146416 - DNA, 15 bp, Homo sapiens
ttaaagggaatggag

SEQ ID NO: 146417 - DNA, 15 bp, Homo sapiens
attaaagggaatgga

SEQ ID NO: 146418 - DNA, 15 bp, Homo sapiens
aattaaagggaatgg

SEQ ID NO: 146419 - DNA, 15 bp, Homo sapiens
taattaaagggaatg

SEQ ID NO: 146420 - DNA, 15 bp, Homo sapiens
gtaattaaagggaat

SEQ ID NO: 146421 - DNA, 15 bp, Homo sapiens
ggtaattaaagggaa

SEQ ID NO: 146422 - DNA, 15 bp, Homo sapiens
aggtaattaaaggga

SEQ ID NO: 146423 - DNA, 15 bp, Homo sapiens
gaggtaattaaaggg

SEQ ID NO: 146424 - DNA, 15 bp, Homo sapiens
ggaggtaattaaagg

SEQ ID NO: 146425 - DNA, 15 bp, Homo sapiens
gggaggtaattaaag

SEQ ID NO: 146426 - DNA, 15 bp, Homo sapiens
agggaggtaattaaa

SEQ ID NO: 146427 - DNA, 15 bp, Homo sapiens
tagggaggtaattaa

SEQ ID NO: 146428 - DNA, 15 bp, Homo sapiens
ttagggaggtaatta

SEQ ID NO: 146429 - DNA, 15 bp, Homo sapiens
tttagggaggtaatt

SEQ ID NO: 146430 - DNA, 15 bp, Homo sapiens
gtttagggaggtaat

SEQ ID NO: 146431 - DNA, 15 bp, Homo sapiens
agtttagggaggtaa

SEQ ID NO: 146432 - DNA, 15 bp, Homo sapiens
gagtttagggaggta

SEQ ID NO: 146433 - DNA, 15 bp, Homo sapiens
ggagtttagggaggt

SEQ ID NO: 146434 - DNA, 15 bp, Homo sapiens
gggagtttagggagg

SEQ ID NO: 146435 - DNA, 15 bp, Homo sapiens
tgggagtttagggag

SEQ ID NO: 146436 - DNA, 15 bp, Homo sapiens
ttgggagtttaggga

SEQ ID NO: 146437 - DNA, 15 bp, Homo sapiens
attgggagtttaggg

SEQ ID NO: 146438 - DNA, 15 bp, Homo sapiens
aattgggagtttagg

SEQ ID NO: 146439 - DNA, 15 bp, Homo sapiens
caattgggagtttag

SEQ ID NO: 146440 - DNA, 15 bp, Homo sapiens
acaattgggagttta

SEQ ID NO: 146441 - DNA, 15 bp, Homo sapiens
tacaattgggagttt

SEQ ID NO: 146442 - DNA, 15 bp, Homo sapiens
atacaattgggagtt

SEQ ID NO: 146443 - DNA, 15 bp, Homo sapiens
tatacaattgggagt

SEQ ID NO: 146444 - DNA, 15 bp, Homo sapiens
ttatacaattgggag

SEQ ID NO: 146445 - DNA, 15 bp, Homo sapiens
gttatacaattggga

SEQ ID NO: 146446 - DNA, 15 bp, Homo sapiens
tgttatacaattggg

SEQ ID NO: 146447 - DNA, 15 bp, Homo sapiens
ttgttatacaattgg

SEQ ID NO: 146448 - DNA, 15 bp, Homo sapiens
attgttatacaattg

SEQ ID NO: 146449 - DNA, 15 bp, Homo sapiens
aattgttatacaatt

SEQ ID NO: 146450 - DNA, 15 bp, Homo sapiens
caattgttatacaat

SEQ ID NO: 146451 - DNA, 15 bp, Homo sapiens
tcaattgttatacaa

SEQ ID NO: 146452 - DNA, 15 bp, Homo sapiens
ctcaattgttataca

SEQ ID NO: 146453 - DNA, 15 bp, Homo sapiens
gctcaattgttatac

SEQ ID NO: 146454 - DNA, 15 bp, Homo sapiens
ggctcaattgttata

SEQ ID NO: 146455 - DNA, 15 bp, Homo sapiens
aggctcaattgttat

SEQ ID NO: 146456 - DNA, 15 bp, Homo sapiens
aaggctcaattgtta

SEQ ID NO: 146457 - DNA, 15 bp, Homo sapiens
gaaggctcaattgtt

SEQ ID NO: 146458 - DNA, 15 bp, Homo sapiens
ggaaggctcaattgt

SEQ ID NO: 146459 - DNA, 15 bp, Homo sapiens
gggaaggctcaattg

SEQ ID NO: 146460 - DNA, 15 bp, Homo sapiens
agggaaggctcaatt

SEQ ID NO: 146461 - DNA, 15 bp, Homo sapiens
cagggaaggctcaat

SEQ ID NO: 146462 - DNA, 15 bp, Homo sapiens
tcagggaaggctcaa

SEQ ID NO: 146463 - DNA, 15 bp, Homo sapiens
ttcagggaaggctca

SEQ ID NO: 146464 - DNA, 15 bp, Homo sapiens
attcagggaaggctc

SEQ ID NO: 146465 - DNA, 15 bp, Homo sapiens
gattcagggaaggct

SEQ ID NO: 146466 - DNA, 15 bp, Homo sapiens
ggattcagggaaggc

SEQ ID NO: 146467 - DNA, 15 bp, Homo sapiens
tggattcagggaagg

SEQ ID NO: 146468 - DNA, 15 bp, Homo sapiens
gtggattcagggaag

SEQ ID NO: 146469 - DNA, 15 bp, Homo sapiens
agtggattcagggaa

SEQ ID NO: 146470 - DNA, 15 bp, Homo sapiens
cagtggattcaggga

SEQ ID NO: 146471 - DNA, 15 bp, Homo sapiens
acagtggattcaggg

SEQ ID NO: 146472 - DNA, 15 bp, Homo sapiens
tacagtggattcagg

SEQ ID NO: 146473 - DNA, 15 bp, Homo sapiens
ctacagtggattcag

SEQ ID NO: 146474 - DNA, 15 bp, Homo sapiens
actacagtggattca

SEQ ID NO: 146475 - DNA, 15 bp, Homo sapiens
aactacagtggattc

SEQ ID NO: 146476 - DNA, 15 bp, Homo sapiens
caactacagtggatt

SEQ ID NO: 146477 - DNA, 15 bp, Homo sapiens
gcaactacagtggat

SEQ ID NO: 146478 - DNA, 15 bp, Homo sapiens
tgcaactacagtgga

SEQ ID NO: 146479 - DNA, 15 bp, Homo sapiens
ttgcaactacagtgg

SEQ ID NO: 146480 - DNA, 15 bp, Homo sapiens
tttgcaactacagtg

SEQ ID NO: 146481 - DNA, 15 bp, Homo sapiens
ctttgcaactacagt

SEQ ID NO: 146482 - DNA, 15 bp, Homo sapiens
actttgcaactacag

SEQ ID NO: 146483 - DNA, 15 bp, Homo sapiens
gactttgcaactaca

SEQ ID NO: 146484 - DNA, 15 bp, Homo sapiens
cgactttgcaactac

SEQ ID NO: 146485 - DNA, 15 bp, Homo sapiens
tcgactttgcaacta

SEQ ID NO: 146486 - DNA, 15 bp, Homo sapiens
ttcgactttgcaact

SEQ ID NO: 146487 - DNA, 15 bp, Homo sapiens
gttcgactttgcaac

SEQ ID NO: 146488 - DNA, 15 bp, Homo sapiens
ggttcgactttgcaa

SEQ ID NO: 146489 - DNA, 15 bp, Homo sapiens
gggttcgactttgca

SEQ ID NO: 146490 - DNA, 15 bp, Homo sapiens
agggttcgactttgc

SEQ ID NO: 146491 - DNA, 15 bp, Homo sapiens
tagggttcgactttg

SEQ ID NO: 146492 - DNA, 15 bp, Homo sapiens
gtagggttcgacttt

SEQ ID NO: 146493 - DNA, 15 bp, Homo sapiens
tgtagggttcgactt

SEQ ID NO: 146494 - DNA, 15 bp, Homo sapiens
gtgtagggttcgact

SEQ ID NO: 146495 - DNA, 15 bp, Homo sapiens
tgtgtagggttcgac

SEQ ID NO: 146496 - DNA, 15 bp, Homo sapiens
ctgtgtagggttcga

SEQ ID NO: 146497 - DNA, 15 bp, Homo sapiens
gctgtgtagggttcg

SEQ ID NO: 146498 - DNA, 15 bp, Homo sapiens
agctgtgtagggttc

SEQ ID NO: 146499 - DNA, 15 bp, Homo sapiens
tagctgtgtagggtt

SEQ ID NO: 146500 - DNA, 15 bp, Homo sapiens
ctagctgtgtagggt

SEQ ID NO: 146501 - DNA, 15 bp, Homo sapiens
tctagctgtgtaggg

SEQ ID NO: 146502 - DNA, 15 bp, Homo sapiens
gtctagctgtgtagg

SEQ ID NO: 146503 - DNA, 15 bp, Homo sapiens
agtctagctgtgtag

SEQ ID NO: 146504 - DNA, 15 bp, Homo sapiens
aagtctagctgtgta

SEQ ID NO: 146505 - DNA, 15 bp, Homo sapiens
caagtctagctgtgt

SEQ ID NO: 146506 - DNA, 15 bp, Homo sapiens
ccaagtctagctgtg

SEQ ID NO: 146507 - DNA, 15 bp, Homo sapiens
cccaagtctagctgt

SEQ ID NO: 146508 - DNA, 15 bp, Homo sapiens
tcccaagtctagctg

SEQ ID NO: 146509 - DNA, 15 bp, Homo sapiens
atcccaagtctagct

SEQ ID NO: 146510 - DNA, 15 bp, Homo sapiens
catcccaagtctagc

SEQ ID NO: 146511 - DNA, 15 bp, Homo sapiens
acatcccaagtctag

SEQ ID NO: 146512 - DNA, 15 bp, Homo sapiens
cacatcccaagtcta

SEQ ID NO: 146513 - DNA, 15 bp, Homo sapiens
tcacatcccaagtct

SEQ ID NO: 146514 - DNA, 15 bp, Homo sapiens
atcacatcccaagtc

SEQ ID NO: 146515 - DNA, 15 bp, Homo sapiens
gatcacatcccaagt

SEQ ID NO: 146516 - DNA, 15 bp, Homo sapiens
ggatcacatcccaag

SEQ ID NO: 146517 - DNA, 15 bp, Homo sapiens
aggatcacatcccaa

SEQ ID NO: 146518 - DNA, 15 bp, Homo sapiens
aaggatcacatccca

SEQ ID NO: 146519 - DNA, 15 bp, Homo sapiens
aaaggatcacatccc

SEQ ID NO: 146520 - DNA, 15 bp, Homo sapiens
gaaaggatcacatcc

SEQ ID NO: 146521 - DNA, 15 bp, Homo sapiens
tgaaaggatcacatc

SEQ ID NO: 146522 - DNA, 15 bp, Homo sapiens
gtgaaaggatcacat

SEQ ID NO: 146523 - DNA, 15 bp, Homo sapiens
ggtgaaaggatcaca

SEQ ID NO: 146524 - DNA, 15 bp, Homo sapiens
tggtgaaaggatcac

SEQ ID NO: 146525 - DNA, 15 bp, Homo sapiens
gtggtgaaaggatca

SEQ ID NO: 146526 - DNA, 15 bp, Homo sapiens
ggtggtgaaaggatc

SEQ ID NO: 146527 - DNA, 15 bp, Homo sapiens
tggtggtgaaaggat

SEQ ID NO: 146528 - DNA, 15 bp, Homo sapiens
atggtggtgaaagga

SEQ ID NO: 146529 - DNA, 15 bp, Homo sapiens
gatggtggtgaaagg

SEQ ID NO: 146530 - DNA, 15 bp, Homo sapiens
tgatggtggtgaaag

SEQ ID NO: 146531 - DNA, 15 bp, Homo sapiens
gtgatggtggtgaaa

SEQ ID NO: 146532 - DNA, 15 bp, Homo sapiens
tgtgatggtggtgaa

SEQ ID NO: 146533 - DNA, 15 bp, Homo sapiens
atgtgatggtggtga

SEQ ID NO: 146534 - DNA, 15 bp, Homo sapiens
tatgtgatggtggtg

SEQ ID NO: 146535 - DNA, 15 bp, Homo sapiens
ctatgtgatggtggt

SEQ ID NO: 146536 - DNA, 15 bp, Homo sapiens
tctatgtgatggtgg

SEQ ID NO: 146537 - DNA, 15 bp, Homo sapiens
atctatgtgatggtg

SEQ ID NO: 146538 - DNA, 15 bp, Homo sapiens
gatctatgtgatggt

SEQ ID NO: 146539 - DNA, 15 bp, Homo sapiens
ggatctatgtgatgg

SEQ ID NO: 146540 - DNA, 15 bp, Homo sapiens
tggatctatgtgatg

SEQ ID NO: 146541 - DNA, 15 bp, Homo sapiens
atggatctatgtgat

SEQ ID NO: 146542 - DNA, 15 bp, Homo sapiens
catggatctatgtga

SEQ ID NO: 146543 - DNA, 15 bp, Homo sapiens
ccatggatctatgtg

SEQ ID NO: 146544 - DNA, 15 bp, Homo sapiens
tccatggatctatgt

SEQ ID NO: 146545 - DNA, 15 bp, Homo sapiens
gtccatggatctatg

SEQ ID NO: 146546 - DNA, 15 bp, Homo sapiens
tgtccatggatctat

SEQ ID NO: 146547 - DNA, 15 bp, Homo sapiens
atgtccatggatcta

SEQ ID NO: 146548 - DNA, 15 bp, Homo sapiens
aatgtccatggatct

SEQ ID NO: 146549 - DNA, 15 bp, Homo sapiens
aaatgtccatggatc

SEQ ID NO: 146550 - DNA, 15 bp, Homo sapiens
aaaatgtccatggat

SEQ ID NO: 146551 - DNA, 15 bp, Homo sapiens
gaaaatgtccatgga

SEQ ID NO: 146552 - DNA, 15 bp, Homo sapiens
agaaaatgtccatgg

SEQ ID NO: 146553 - DNA, 15 bp, Homo sapiens
gagaaaatgtccatg

SEQ ID NO: 146554 - DNA, 15 bp, Homo sapiens
tgagaaaatgtccat

SEQ ID NO: 146555 - DNA, 15 bp, Homo sapiens
gtgagaaaatgtcca

SEQ ID NO: 146556 - DNA, 15 bp, Homo sapiens
tgtgagaaaatgtcc

SEQ ID NO: 146557 - DNA, 15 bp, Homo sapiens
ttgtgagaaaatgtc

SEQ ID NO: 146558 - DNA, 15 bp, Homo sapiens
gttgtgagaaaatgt

SEQ ID NO: 146559 - DNA, 15 bp, Homo sapiens
agttgtgagaaaatg

SEQ ID NO: 146560 - DNA, 15 bp, Homo sapiens
cagttgtgagaaaat

SEQ ID NO: 146561 - DNA, 15 bp, Homo sapiens
acagttgtgagaaaa

SEQ ID NO: 146562 - DNA, 15 bp, Homo sapiens
cacagttgtgagaaa

SEQ ID NO: 146563 - DNA, 15 bp, Homo sapiens
ccacagttgtgagaa

SEQ ID NO: 146564 - DNA, 15 bp, Homo sapiens
tccacagttgtgaga

SEQ ID NO: 146565 - DNA, 15 bp, Homo sapiens
ttccacagttgtgag

SEQ ID NO: 146566 - DNA, 15 bp, Homo sapiens
tttccacagttgtga

SEQ ID NO: 146567 - DNA, 15 bp, Homo sapiens
ctttccacagttgtg

SEQ ID NO: 146568 - DNA, 15 bp, Homo sapiens
cctttccacagttgt

SEQ ID NO: 146569 - DNA, 15 bp, Homo sapiens
gcctttccacagttg

SEQ ID NO: 146570 - DNA, 15 bp, Homo sapiens
tgcctttccacagtt

SEQ ID NO: 146571 - DNA, 15 bp, Homo sapiens
gtgcctttccacagt

SEQ ID NO: 146572 - DNA, 15 bp, Homo sapiens
tgtgcctttccacag

SEQ ID NO: 146573 - DNA, 15 bp, Homo sapiens
ctgtgcctttccaca

SEQ ID NO: 146574 - DNA, 15 bp, Homo sapiens
cctgtgcctttccac

SEQ ID NO: 146575 - DNA, 15 bp, Homo sapiens
gcctgtgcctttcca

SEQ ID NO: 146576 - DNA, 15 bp, Homo sapiens
tgcctgtgcctttcc

SEQ ID NO: 146577 - DNA, 15 bp, Homo sapiens
ctgcctgtgcctttc

SEQ ID NO: 146578 - DNA, 15 bp, Homo sapiens
cctgcctgtgccttt

SEQ ID NO: 146579 - DNA, 15 bp, Homo sapiens
acctgcctgtgcctt

SEQ ID NO: 146580 - DNA, 15 bp, Homo sapiens
gacctgcctgtgcct

SEQ ID NO: 146581 - DNA, 15 bp, Homo sapiens
agacctgcctgtgcc

SEQ ID NO: 146582 - DNA, 15 bp, Homo sapiens
aagacctgcctgtgc

SEQ ID NO: 146583 - DNA, 15 bp, Homo sapiens
aaagacctgcctgtg

SEQ ID NO: 146584 - DNA, 15 bp, Homo sapiens
caaagacctgcctgt

SEQ ID NO: 146585 - DNA, 15 bp, Homo sapiens
tcaaagacctgcctg

SEQ ID NO: 146586 - DNA, 15 bp, Homo sapiens
ctcaaagacctgcct

SEQ ID NO: 146587 - DNA, 15 bp, Homo sapiens
tctcaaagacctgcc

SEQ ID NO: 146588 - DNA, 15 bp, Homo sapiens
gtctcaaagacctgc

SEQ ID NO: 146589 - DNA, 15 bp, Homo sapiens
ggtctcaaagacctg

SEQ ID NO: 146590 - DNA, 15 bp, Homo sapiens
tggtctcaaagacct

SEQ ID NO: 146591 - DNA, 15 bp, Homo sapiens
ttggtctcaaagacc

SEQ ID NO: 146592 - DNA, 15 bp, Homo sapiens
cttggtctcaaagac

SEQ ID NO: 146593 - DNA, 15 bp, Homo sapiens
tcttggtctcaaaga

SEQ ID NO: 146594 - DNA, 15 bp, Homo sapiens
ctcttggtctcaaag

SEQ ID NO: 146595 - DNA, 15 bp, Homo sapiens
tctcttggtctcaaa

SEQ ID NO: 146596 - DNA, 15 bp, Homo sapiens
gtctcttggtctcaa

SEQ ID NO: 146597 - DNA, 15 bp, Homo sapiens
ggtctcttggtctca

SEQ ID NO: 146598 - DNA, 15 bp, Homo sapiens
aggtctcttggtctc

SEQ ID NO: 146599 - DNA, 15 bp, Homo sapiens
gaggtctcttggtct

SEQ ID NO: 146600 - DNA, 15 bp, Homo sapiens
tgaggtctcttggtc

SEQ ID NO: 146601 - DNA, 15 bp, Homo sapiens
gtgaggtctcttggt

SEQ ID NO: 146602 - DNA, 15 bp, Homo sapiens
agtgaggtctcttgg

SEQ ID NO: 146603 - DNA, 15 bp, Homo sapiens
aagtgaggtctcttg

SEQ ID NO: 146604 - DNA, 15 bp, Homo sapiens
caagtgaggtctctt

SEQ ID NO: 146605 - DNA, 15 bp, Homo sapiens
ccaagtgaggtctct

SEQ ID NO: 146606 - DNA, 15 bp, Homo sapiens
tccaagtgaggtctc

SEQ ID NO: 146607 - DNA, 15 bp, Homo sapiens
ctccaagtgaggtct

SEQ ID NO: 146608 - DNA, 15 bp, Homo sapiens
tctccaagtgaggtc

SEQ ID NO: 146609 - DNA, 15 bp, Homo sapiens
gtctccaagtgaggt

SEQ ID NO: 146610 - DNA, 15 bp, Homo sapiens
agtctccaagtgagg

SEQ ID NO: 146611 - DNA, 15 bp, Homo sapiens
tagtctccaagtgag

SEQ ID NO: 146612 - DNA, 15 bp, Homo sapiens
gtagtctccaagtga

SEQ ID NO: 146613 - DNA, 15 bp, Homo sapiens
ggtagtctccaagtg

SEQ ID NO: 146614 - DNA, 15 bp, Homo sapiens
tggtagtctccaagt

SEQ ID NO: 146615 - DNA, 15 bp, Homo sapiens
gtggtagtctccaag

SEQ ID NO: 146616 - DNA, 15 bp, Homo sapiens
tgtggtagtctccaa

SEQ ID NO: 146617 - DNA, 15 bp, Homo sapiens
ctgtggtagtctcca

SEQ ID NO: 146618 - DNA, 15 bp, Homo sapiens
cctgtggtagtctcc

SEQ ID NO: 146619 - DNA, 15 bp, Homo sapiens
gcctgtggtagtctc

SEQ ID NO: 146620 - DNA, 15 bp, Homo sapiens
ggcctgtggtagtct

SEQ ID NO: 146621 - DNA, 15 bp, Homo sapiens
aggcctgtggtagtc

SEQ ID NO: 146622 - DNA, 15 bp, Homo sapiens
caggcctgtggtagt

SEQ ID NO: 146623 - DNA, 15 bp, Homo sapiens
acaggcctgtggtag

SEQ ID NO: 146624 - DNA, 15 bp, Homo sapiens
cacaggcctgtggta

SEQ ID NO: 146625 - DNA, 15 bp, Homo sapiens
ccacaggcctgtggt

SEQ ID NO: 146626 - DNA, 15 bp, Homo sapiens
cccacaggcctgtgg

SEQ ID NO: 146627 - DNA, 15 bp, Homo sapiens
tcccacaggcctgtg

SEQ ID NO: 146628 - DNA, 15 bp, Homo sapiens
ctcccacaggcctgt

SEQ ID NO: 146629 - DNA, 15 bp, Homo sapiens
tctcccacaggcctg

SEQ ID NO: 146630 - DNA, 15 bp, Homo sapiens
ttctcccacaggcct

SEQ ID NO: 146631 - DNA, 15 bp, Homo sapiens
tttctcccacaggcc

SEQ ID NO: 146632 - DNA, 15 bp, Homo sapiens
atttctcccacaggc

SEQ ID NO: 146633 - DNA, 15 bp, Homo sapiens
catttctcccacagg

SEQ ID NO: 146634 - DNA, 15 bp, Homo sapiens
gcatttctcccacag

SEQ ID NO: 146635 - DNA, 15 bp, Homo sapiens
agcatttctcccaca

SEQ ID NO: 146636 - DNA, 15 bp, Homo sapiens
cagcatttctcccac

SEQ ID NO: 146637 - DNA, 15 bp, Homo sapiens
ccagcatttctccca

SEQ ID NO: 146638 - DNA, 15 bp, Homo sapiens
accagcatttctccc

SEQ ID NO: 146639 - DNA, 15 bp, Homo sapiens
gaccagcatttctcc

SEQ ID NO: 146640 - DNA, 15 bp, Homo sapiens
agaccagcatttctc

SEQ ID NO: 146641 - DNA, 15 bp, Homo sapiens
cagaccagcatttct

SEQ ID NO: 146642 - DNA, 15 bp, Homo sapiens
tcagaccagcatttc

SEQ ID NO: 146643 - DNA, 15 bp, Homo sapiens
ctcagaccagcattt

SEQ ID NO: 146644 - DNA, 15 bp, Homo sapiens
tctcagaccagcatt

SEQ ID NO: 146645 - DNA, 15 bp, Homo sapiens
ctctcagaccagcat

SEQ ID NO: 146646 - DNA, 15 bp, Homo sapiens
tctctcagaccagca

SEQ ID NO: 146647 - DNA, 15 bp, Homo sapiens
gtctctcagaccagc

SEQ ID NO: 146648 - DNA, 15 bp, Homo sapiens
tgtctctcagaccag

SEQ ID NO: 146649 - DNA, 15 bp, Homo sapiens
ctgtctctcagacca

SEQ ID NO: 146650 - DNA, 15 bp, Homo sapiens
cctgtctctcagacc

SEQ ID NO: 146651 - DNA, 15 bp, Homo sapiens
tcctgtctctcagac

SEQ ID NO: 146652 - DNA, 15 bp, Homo sapiens
ctcctgtctctcaga

SEQ ID NO: 146653 - DNA, 15 bp, Homo sapiens
tctcctgtctctcag

SEQ ID NO: 146654 - DNA, 15 bp, Homo sapiens
gtctcctgtctctca

SEQ ID NO: 146655 - DNA, 15 bp, Homo sapiens
ggtctcctgtctctc

SEQ ID NO: 146656 - DNA, 15 bp, Homo sapiens
gggtctcctgtctct

SEQ ID NO: 146657 - DNA, 15 bp, Homo sapiens
agggtctcctgtctc

SEQ ID NO: 146658 - DNA, 15 bp, Homo sapiens
cagggtctcctgtct

SEQ ID NO: 146659 - DNA, 15 bp, Homo sapiens
gcagggtctcctgtc

SEQ ID NO: 146660 - DNA, 15 bp, Homo sapiens
ggcagggtctcctgt

SEQ ID NO: 146661 - DNA, 15 bp, Homo sapiens
aggcagggtctcctg

SEQ ID NO: 146662 - DNA, 15 bp, Homo sapiens
aaggcagggtctcct

SEQ ID NO: 146663 - DNA, 15 bp, Homo sapiens
caaggcagggtctcc

SEQ ID NO: 146664 - DNA, 15 bp, Homo sapiens
acaaggcagggtctc

SEQ ID NO: 146665 - DNA, 15 bp, Homo sapiens
tacaaggcagggtct

SEQ ID NO: 146666 - DNA, 15 bp, Homo sapiens
ttacaaggcagggtc

SEQ ID NO: 146667 - DNA, 15 bp, Homo sapiens
attacaaggcagggt

SEQ ID NO: 146668 - DNA, 15 bp, Homo sapiens
gattacaaggcaggg

SEQ ID NO: 146669 - DNA, 15 bp, Homo sapiens
tgattacaaggcagg

SEQ ID NO: 146670 - DNA, 15 bp, Homo sapiens
gtgattacaaggcag

SEQ ID NO: 146671 - DNA, 15 bp, Homo sapiens
ggtgattacaaggca

SEQ ID NO: 146672 - DNA, 15 bp, Homo sapiens
aggtgattacaaggc

SEQ ID NO: 146673 - DNA, 15 bp, Homo sapiens
taggtgattacaagg

SEQ ID NO: 146674 - DNA, 15 bp, Homo sapiens
ttaggtgattacaag

SEQ ID NO: 146675 - DNA, 15 bp, Homo sapiens
gttaggtgattacaa

SEQ ID NO: 146676 - DNA, 15 bp, Homo sapiens
tgttaggtgattaca

SEQ ID NO: 146677 - DNA, 15 bp, Homo sapiens
gtgttaggtgattac

SEQ ID NO: 146678 - DNA, 15 bp, Homo sapiens
ggtgttaggtgatta

SEQ ID NO: 146679 - DNA, 15 bp, Homo sapiens
aggtgttaggtgatt

SEQ ID NO: 146680 - DNA, 15 bp, Homo sapiens
gaggtgttaggtgat

SEQ ID NO: 146681 - DNA, 15 bp, Homo sapiens
tgaggtgttaggtga

SEQ ID NO: 146682 - DNA, 15 bp, Homo sapiens
ctgaggtgttaggtg

SEQ ID NO: 146683 - DNA, 15 bp, Homo sapiens
cctgaggtgttaggt

SEQ ID NO: 146684 - DNA, 15 bp, Homo sapiens
gcctgaggtgttagg

SEQ ID NO: 146685 - DNA, 15 bp, Homo sapiens
tgcctgaggtgttag

SEQ ID NO: 146686 - DNA, 15 bp, Homo sapiens
ttgcctgaggtgtta

SEQ ID NO: 146687 - DNA, 15 bp, Homo sapiens
cttgcctgaggtgtt

SEQ ID NO: 146688 - DNA, 15 bp, Homo sapiens
acttgcctgaggtgt

SEQ ID NO: 146689 - DNA, 15 bp, Homo sapiens
aacttgcctgaggtg

SEQ ID NO: 146690 - DNA, 15 bp, Homo sapiens
taacttgcctgaggt

SEQ ID NO: 146691 - DNA, 15 bp, Homo sapiens
ttaacttgcctgagg

SEQ ID NO: 146692 - DNA, 15 bp, Homo sapiens
attaacttgcctgag

SEQ ID NO: 146693 - DNA, 15 bp, Homo sapiens
aattaacttgcctga

SEQ ID NO: 146694 - DNA, 15 bp, Homo sapiens
gaattaacttgcctg

SEQ ID NO: 146695 - DNA, 15 bp, Homo sapiens
agaattaacttgcct

SEQ ID NO: 146696 - DNA, 15 bp, Homo sapiens
gagaattaacttgcc

SEQ ID NO: 146697 - DNA, 15 bp, Homo sapiens
agagaattaacttgc

SEQ ID NO: 146698 - DNA, 15 bp, Homo sapiens
cagagaattaacttg

SEQ ID NO: 146699 - DNA, 15 bp, Homo sapiens
tcagagaattaactt

SEQ ID NO: 146700 - DNA, 15 bp, Homo sapiens
ctcagagaattaact

SEQ ID NO: 146701 - DNA, 15 bp, Homo sapiens
cctcagagaattaac

SEQ ID NO: 146702 - DNA, 15 bp, Homo sapiens
acctcagagaattaa

SEQ ID NO: 146703 - DNA, 15 bp, Homo sapiens
aacctcagagaatta

SEQ ID NO: 146704 - DNA, 15 bp, Homo sapiens
taacctcagagaatt

SEQ ID NO: 146705 - DNA, 15 bp, Homo sapiens
ctaacctcagagaat

SEQ ID NO: 146706 - DNA, 15 bp, Homo sapiens
cctaacctcagagaa

SEQ ID NO: 146707 - DNA, 15 bp, Homo sapiens
acctaacctcagaga

SEQ ID NO: 146708 - DNA, 15 bp, Homo sapiens
gacctaacctcagag

SEQ ID NO: 146709 - DNA, 15 bp, Homo sapiens
cgacctaacctcaga

SEQ ID NO: 146710 - DNA, 15 bp, Homo sapiens
acgacctaacctcag

SEQ ID NO: 146711 - DNA, 15 bp, Homo sapiens
cacgacctaacctca

SEQ ID NO: 146712 - DNA, 15 bp, Homo sapiens
ccacgacctaacctc

SEQ ID NO: 146713 - DNA, 15 bp, Homo sapiens
accacgacctaacct

SEQ ID NO: 146714 - DNA, 15 bp, Homo sapiens
caccacgacctaacc

SEQ ID NO: 146715 - DNA, 15 bp, Homo sapiens
acaccacgacctaac

SEQ ID NO: 146716 - DNA, 15 bp, Homo sapiens
gacaccacgacctaa

SEQ ID NO: 146717 - DNA, 15 bp, Homo sapiens
ggacaccacgaccta

SEQ ID NO: 146718 - DNA, 15 bp, Homo sapiens
aggacaccacgacct

SEQ ID NO: 146719 - DNA, 15 bp, Homo sapiens
aaggacaccacgacc

SEQ ID NO: 146720 - DNA, 15 bp, Homo sapiens
taaggacaccacgac

SEQ ID NO: 146721 - DNA, 15 bp, Homo sapiens
ataaggacaccacga

SEQ ID NO: 146722 - DNA, 15 bp, Homo sapiens
gataaggacaccacg

SEQ ID NO: 146723 - DNA, 15 bp, Homo sapiens
agataaggacaccac

SEQ ID NO: 146724 - DNA, 15 bp, Homo sapiens
cagataaggacacca

SEQ ID NO: 146725 - DNA, 15 bp, Homo sapiens
gcagataaggacacc

SEQ ID NO: 146726 - DNA, 15 bp, Homo sapiens
ggcagataaggacac

SEQ ID NO: 146727 - DNA, 15 bp, Homo sapiens
tggcagataaggaca

SEQ ID NO: 146728 - DNA, 15 bp, Homo sapiens
ttggcagataaggac

SEQ ID NO: 146729 - DNA, 15 bp, Homo sapiens
tttggcagataagga

SEQ ID NO: 146730 - DNA, 15 bp, Homo sapiens
ttttggcagataagg

SEQ ID NO: 146731 - DNA, 15 bp, Homo sapiens
tttttggcagataag

SEQ ID NO: 146732 - DNA, 15 bp, Homo sapiens
gtttttggcagataa

SEQ ID NO: 146733 - DNA, 15 bp, Homo sapiens
tgtttttggcagata

SEQ ID NO: 146734 - DNA, 15 bp, Homo sapiens
ctgtttttggcagat

SEQ ID NO: 146735 - DNA, 15 bp, Homo sapiens
tctgtttttggcaga

SEQ ID NO: 146736 - DNA, 15 bp, Homo sapiens
ttctgtttttggcag

SEQ ID NO: 146737 - DNA, 15 bp, Homo sapiens
attctgtttttggca

SEQ ID NO: 146738 - DNA, 15 bp, Homo sapiens
aattctgtttttggc

SEQ ID NO: 146739 - DNA, 15 bp, Homo sapiens
aaattctgtttttgg

SEQ ID NO: 146740 - DNA, 15 bp, Homo sapiens
taaattctgtttttg

SEQ ID NO: 146741 - DNA, 15 bp, Homo sapiens
ctaaattctgttttt

SEQ ID NO: 146742 - DNA, 15 bp, Homo sapiens
tctaaattctgtttt

SEQ ID NO: 146743 - DNA, 15 bp, Homo sapiens
ttctaaattctgttt

SEQ ID NO: 146744 - DNA, 15 bp, Homo sapiens
cttctaaattctgtt

SEQ ID NO: 146745 - DNA, 15 bp, Homo sapiens
tcttctaaattctgt

SEQ ID NO: 146746 - DNA, 15 bp, Homo sapiens
atcttctaaattctg

SEQ ID NO: 146747 - DNA, 15 bp, Homo sapiens
aatcttctaaattct

SEQ ID NO: 146748 - DNA, 15 bp, Homo sapiens
gaatcttctaaattc

SEQ ID NO: 146749 - DNA, 15 bp, Homo sapiens
ggaatcttctaaatt

SEQ ID NO: 146750 - DNA, 15 bp, Homo sapiens
gggaatcttctaaat

SEQ ID NO: 146751 - DNA, 15 bp, Homo sapiens
tgggaatcttctaaa

SEQ ID NO: 146752 - DNA, 15 bp, Homo sapiens
ctgggaatcttctaa

SEQ ID NO: 146753 - DNA, 15 bp, Homo sapiens
tctgggaatcttcta

SEQ ID NO: 146754 - DNA, 15 bp, Homo sapiens
gtctgggaatcttct

SEQ ID NO: 146755 - DNA, 15 bp, Homo sapiens
agtctgggaatcttc

SEQ ID NO: 146756 - DNA, 15 bp, Homo sapiens
gagtctgggaatctt

SEQ ID NO: 146757 - DNA, 15 bp, Homo sapiens
agagtctgggaatct

SEQ ID NO: 146758 - DNA, 15 bp, Homo sapiens
tagagtctgggaatc

SEQ ID NO: 146759 - DNA, 15 bp, Homo sapiens
gtagagtctgggaat

SEQ ID NO: 146760 - DNA, 15 bp, Homo sapiens
ggtagagtctgggaa

SEQ ID NO: 146761 - DNA, 15 bp, Homo sapiens
aggtagagtctggga

SEQ ID NO: 146762 - DNA, 15 bp, Homo sapiens
taggtagagtctggg

SEQ ID NO: 146763 - DNA, 15 bp, Homo sapiens
gtaggtagagtctgg

SEQ ID NO: 146764 - DNA, 15 bp, Homo sapiens
agtaggtagagtctg

SEQ ID NO: 146765 - DNA, 15 bp, Homo sapiens
aagtaggtagagtct

SEQ ID NO: 146766 - DNA, 15 bp, Homo sapiens
gaagtaggtagagtc

SEQ ID NO: 146767 - DNA, 15 bp, Homo sapiens
ggaagtaggtagagt

SEQ ID NO: 146768 - DNA, 15 bp, Homo sapiens
aggaagtaggtagag

SEQ ID NO: 146769 - DNA, 15 bp, Homo sapiens
taggaagtaggtaga

SEQ ID NO: 146770 - DNA, 15 bp, Homo sapiens
gtaggaagtaggtag

SEQ ID NO: 146771 - DNA, 15 bp, Homo sapiens
tgtaggaagtaggta

SEQ ID NO: 146772 - DNA, 15 bp, Homo sapiens
ttgtaggaagtaggt

SEQ ID NO: 146773 - DNA, 15 bp, Homo sapiens
attgtaggaagtagg

SEQ ID NO: 146774 - DNA, 15 bp, Homo sapiens
tattgtaggaagtag

SEQ ID NO: 146775 - DNA, 15 bp, Homo sapiens
ctattgtaggaagta

SEQ ID NO: 146776 - DNA, 15 bp, Homo sapiens
cctattgtaggaagt

SEQ ID NO: 146777 - DNA, 15 bp, Homo sapiens
tcctattgtaggaag

SEQ ID NO: 146778 - DNA, 15 bp, Homo sapiens
ctcctattgtaggaa

SEQ ID NO: 146779 - DNA, 15 bp, Homo sapiens
gctcctattgtagga

SEQ ID NO: 146780 - DNA, 15 bp, Homo sapiens
ggctcctattgtagg

SEQ ID NO: 146781 - DNA, 15 bp, Homo sapiens
tggctcctattgtag

SEQ ID NO: 146782 - DNA, 15 bp, Homo sapiens
ttggctcctattgta

SEQ ID NO: 146783 - DNA, 15 bp, Homo sapiens
cttggctcctattgt

SEQ ID NO: 146784 - DNA, 15 bp, Homo sapiens
ccttggctcctattg

SEQ ID NO: 146785 - DNA, 15 bp, Homo sapiens
accttggctcctatt

SEQ ID NO: 146786 - DNA, 15 bp, Homo sapiens
caccttggctcctat

SEQ ID NO: 146787 - DNA, 15 bp, Homo sapiens
gcaccttggctccta

SEQ ID NO: 146788 - DNA, 15 bp, Homo sapiens
tgcaccttggctcct

SEQ ID NO: 146789 - DNA, 15 bp, Homo sapiens
atgcaccttggctcc

SEQ ID NO: 146790 - DNA, 15 bp, Homo sapiens
gatgcaccttggctc

SEQ ID NO: 146791 - DNA, 15 bp, Homo sapiens
ggatgcaccttggct

SEQ ID NO: 146792 - DNA, 15 bp, Homo sapiens
aggatgcaccttggc

SEQ ID NO: 146793 - DNA, 15 bp, Homo sapiens
gaggatgcaccttgg

SEQ ID NO: 146794 - DNA, 15 bp, Homo sapiens
ggaggatgcaccttg

SEQ ID NO: 146795 - DNA, 15 bp, Homo sapiens
aggaggatgcacctt

SEQ ID NO: 146796 - DNA, 15 bp, Homo sapiens
taggaggatgcacct

SEQ ID NO: 146797 - DNA, 15 bp, Homo sapiens
ctaggaggatgcacc

SEQ ID NO: 146798 - DNA, 15 bp, Homo sapiens
cctaggaggatgcac

SEQ ID NO: 146799 - DNA, 15 bp, Homo sapiens
tcctaggaggatgca

SEQ ID NO: 146800 - DNA, 15 bp, Homo sapiens
ctcctaggaggatgc

SEQ ID NO: 146801 - DNA, 15 bp, Homo sapiens
gctcctaggaggatg

SEQ ID NO: 146802 - DNA, 15 bp, Homo sapiens
tgctcctaggaggat

SEQ ID NO: 146803 - DNA, 15 bp, Homo sapiens
gtgctcctaggagga

SEQ ID NO: 146804 - DNA, 15 bp, Homo sapiens
cgtgctcctaggagg

SEQ ID NO: 146805 - DNA, 15 bp, Homo sapiens
tcgtgctcctaggag

SEQ ID NO: 146806 - DNA, 15 bp, Homo sapiens
ctcgtgctcctagga

SEQ ID NO: 146807 - DNA, 15 bp, Homo sapiens
cctcgtgctcctagg

SEQ ID NO: 146808 - DNA, 15 bp, Homo sapiens
ccctcgtgctcctag

SEQ ID NO: 146809 - DNA, 15 bp, Homo sapiens
tccctcgtgctccta

SEQ ID NO: 146810 - DNA, 15 bp, Homo sapiens
ttccctcgtgctcct

SEQ ID NO: 146811 - DNA, 15 bp, Homo sapiens
tttccctcgtgctcc

SEQ ID NO: 146812 - DNA, 15 bp, Homo sapiens
gtttccctcgtgctc

SEQ ID NO: 146813 - DNA, 15 bp, Homo sapiens
ggtttccctcgtgct

SEQ ID NO: 146814 - DNA, 15 bp, Homo sapiens
aggtttccctcgtgc

SEQ ID NO: 146815 - DNA, 15 bp, Homo sapiens
gaggtttccctcgtg

SEQ ID NO: 146816 - DNA, 15 bp, Homo sapiens
tgaggtttccctcgt

SEQ ID NO: 146817 - DNA, 15 bp, Homo sapiens
ctgaggtttccctcg

SEQ ID NO: 146818 - DNA, 15 bp, Homo sapiens
cctgaggtttccctc

SEQ ID NO: 146819 - DNA, 15 bp, Homo sapiens
ccctgaggtttccct

SEQ ID NO: 146820 - DNA, 15 bp, Homo sapiens
accctgaggtttccc

SEQ ID NO: 146821 - DNA, 15 bp, Homo sapiens
gaccctgaggtttcc

SEQ ID NO: 146822 - DNA, 15 bp, Homo sapiens
agaccctgaggtttc

SEQ ID NO: 146823 - DNA, 15 bp, Homo sapiens
cagaccctgaggttt

SEQ ID NO: 146824 - DNA, 15 bp, Homo sapiens
tcagaccctgaggtt

SEQ ID NO: 146825 - DNA, 15 bp, Homo sapiens
ctcagaccctgaggt

SEQ ID NO: 146826 - DNA, 15 bp, Homo sapiens
cctcagaccctgagg

SEQ ID NO: 146827 - DNA, 15 bp, Homo sapiens
ccctcagaccctgag

SEQ ID NO: 146828 - DNA, 15 bp, Homo sapiens
tccctcagaccctga

SEQ ID NO: 146829 - DNA, 15 bp, Homo sapiens
ttccctcagaccctg

SEQ ID NO: 146830 - DNA, 15 bp, Homo sapiens
cttccctcagaccct

SEQ ID NO: 146831 - DNA, 15 bp, Homo sapiens
ccttccctcagaccc

SEQ ID NO: 146832 - DNA, 15 bp, Homo sapiens
tccttccctcagacc

SEQ ID NO: 146833 - DNA, 15 bp, Homo sapiens
ttccttccctcagac

SEQ ID NO: 146834 - DNA, 15 bp, Homo sapiens
cttccttccctcaga

SEQ ID NO: 146835 - DNA, 15 bp, Homo sapiens
tcttccttccctcag

SEQ ID NO: 146836 - DNA, 15 bp, Homo sapiens
gtcttccttccctca

SEQ ID NO: 146837 - DNA, 15 bp, Homo sapiens
tgtcttccttccctc

SEQ ID NO: 146838 - DNA, 15 bp, Homo sapiens
ctgtcttccttccct

SEQ ID NO: 146839 - DNA, 15 bp, Homo sapiens
tctgtcttccttccc

SEQ ID NO: 146840 - DNA, 15 bp, Homo sapiens
gtctgtcttccttcc

SEQ ID NO: 146841 - DNA, 15 bp, Homo sapiens
agtctgtcttccttc

SEQ ID NO: 146842 - DNA, 15 bp, Homo sapiens
cagtctgtcttcctt

SEQ ID NO: 146843 - DNA, 15 bp, Homo sapiens
ccagtctgtcttcct

SEQ ID NO: 146844 - DNA, 15 bp, Homo sapiens
accagtctgtcttcc

SEQ ID NO: 146845 - DNA, 15 bp, Homo sapiens
caccagtctgtcttc

SEQ ID NO: 146846 - DNA, 15 bp, Homo sapiens
tcaccagtctgtctt

SEQ ID NO: 146847 - DNA, 15 bp, Homo sapiens
ctcaccagtctgtct

SEQ ID NO: 146848 - DNA, 15 bp, Homo sapiens
actcaccagtctgtc

SEQ ID NO: 146849 - DNA, 15 bp, Homo sapiens
cactcaccagtctgt

SEQ ID NO: 146850 - DNA, 15 bp, Homo sapiens
acactcaccagtctg

SEQ ID NO: 146851 - DNA, 15 bp, Homo sapiens
aacactcaccagtct

SEQ ID NO: 146852 - DNA, 15 bp, Homo sapiens
aaacactcaccagtc

SEQ ID NO: 146853 - DNA, 15 bp, Homo sapiens
gaaacactcaccagt

SEQ ID NO: 146854 - DNA, 15 bp, Homo sapiens
agaaacactcaccag

SEQ ID NO: 146855 - DNA, 15 bp, Homo sapiens
tagaaacactcacca

SEQ ID NO: 146856 - DNA, 15 bp, Homo sapiens
atagaaacactcacc

SEQ ID NO: 146857 - DNA, 15 bp, Homo sapiens
catagaaacactcac

SEQ ID NO: 146858 - DNA, 15 bp, Homo sapiens
tcatagaaacactca

SEQ ID NO: 146859 - DNA, 15 bp, Homo sapiens
ctcatagaaacactc

SEQ ID NO: 146860 - DNA, 15 bp, Homo sapiens
cctcatagaaacact

SEQ ID NO: 146861 - DNA, 15 bp, Homo sapiens
gcctcatagaaacac

SEQ ID NO: 146862 - DNA, 15 bp, Homo sapiens
tgcctcatagaaaca

SEQ ID NO: 146863 - DNA, 15 bp, Homo sapiens
ttgcctcatagaaac

SEQ ID NO: 146864 - DNA, 15 bp, Homo sapiens
cttgcctcatagaaa

SEQ ID NO: 146865 - DNA, 15 bp, Homo sapiens
tcttgcctcatagaa

SEQ ID NO: 146866 - DNA, 15 bp, Homo sapiens
ctcttgcctcataga

SEQ ID NO: 146867 - DNA, 15 bp, Homo sapiens
actcttgcctcatag

SEQ ID NO: 146868 - DNA, 15 bp, Homo sapiens
gactcttgcctcata

SEQ ID NO: 146869 - DNA, 15 bp, Homo sapiens
ggactcttgcctcat

SEQ ID NO: 146870 - DNA, 15 bp, Homo sapiens
aggactcttgcctca

SEQ ID NO: 146871 - DNA, 15 bp, Homo sapiens
aaggactcttgcctc

SEQ ID NO: 146872 - DNA, 15 bp, Homo sapiens
aaaggactcttgcct

SEQ ID NO: 146873 - DNA, 15 bp, Homo sapiens
aaaaggactcttgcc

SEQ ID NO: 146874 - DNA, 15 bp, Homo sapiens
gaaaaggactcttgc

SEQ ID NO: 146875 - DNA, 15 bp, Homo sapiens
agaaaaggactcttg

SEQ ID NO: 146876 - DNA, 15 bp, Homo sapiens
gagaaaaggactctt

SEQ ID NO: 146877 - DNA, 15 bp, Homo sapiens
ggagaaaaggactct

SEQ ID NO: 146878 - DNA, 15 bp, Homo sapiens
aggagaaaaggactc

SEQ ID NO: 146879 - DNA, 15 bp, Homo sapiens
gaggagaaaaggact

SEQ ID NO: 146880 - DNA, 15 bp, Homo sapiens
ggaggagaaaaggac

SEQ ID NO: 146881 - DNA, 15 bp, Homo sapiens
aggaggagaaaagga

SEQ ID NO: 146882 - DNA, 15 bp, Homo sapiens
taggaggagaaaagg

SEQ ID NO: 146883 - DNA, 15 bp, Homo sapiens
gtaggaggagaaaag

SEQ ID NO: 146884 - DNA, 15 bp, Homo sapiens
agtaggaggagaaaa

SEQ ID NO: 146885 - DNA, 15 bp, Homo sapiens
gagtaggaggagaaa

SEQ ID NO: 146886 - DNA, 15 bp, Homo sapiens
agagtaggaggagaa

SEQ ID NO: 146887 - DNA, 15 bp, Homo sapiens
aagagtaggaggaga

SEQ ID NO: 146888 - DNA, 15 bp, Homo sapiens
caagagtaggaggag

SEQ ID NO: 146889 - DNA, 15 bp, Homo sapiens
acaagagtaggagga

SEQ ID NO: 146890 - DNA, 15 bp, Homo sapiens
gacaagagtaggagg

SEQ ID NO: 146891 - DNA, 15 bp, Homo sapiens
ggacaagagtaggag

SEQ ID NO: 146892 - DNA, 15 bp, Homo sapiens
gggacaagagtagga

SEQ ID NO: 146893 - DNA, 15 bp, Homo sapiens
ggggacaagagtagg

SEQ ID NO: 146894 - DNA, 15 bp, Homo sapiens
aggggacaagagtag

SEQ ID NO: 146895 - DNA, 15 bp, Homo sapiens
taggggacaagagta

SEQ ID NO: 146896 - DNA, 15 bp, Homo sapiens
ctaggggacaagagt

SEQ ID NO: 146897 - DNA, 15 bp, Homo sapiens
actaggggacaagag

SEQ ID NO: 146898 - DNA, 15 bp, Homo sapiens
aactaggggacaaga

SEQ ID NO: 146899 - DNA, 15 bp, Homo sapiens
aaactaggggacaag

SEQ ID NO: 146900 - DNA, 15 bp, Homo sapiens
aaaactaggggacaa

SEQ ID NO: 146901 - DNA, 15 bp, Homo sapiens
aaaaactaggggaca

SEQ ID NO: 146902 - DNA, 15 bp, Homo sapiens
gaaaaactaggggac

SEQ ID NO: 146903 - DNA, 15 bp, Homo sapiens
tgaaaaactagggga

SEQ ID NO: 146904 - DNA, 15 bp, Homo sapiens
ctgaaaaactagggg

SEQ ID NO: 146905 - DNA, 15 bp, Homo sapiens
tctgaaaaactaggg

SEQ ID NO: 146906 - DNA, 15 bp, Homo sapiens
ttctgaaaaactagg

SEQ ID NO: 146907 - DNA, 15 bp, Homo sapiens
attctgaaaaactag

SEQ ID NO: 146908 - DNA, 15 bp, Homo sapiens
cattctgaaaaacta

SEQ ID NO: 146909 - DNA, 15 bp, Homo sapiens
ccattctgaaaaact

SEQ ID NO: 146910 - DNA, 15 bp, Homo sapiens
cccattctgaaaaac

SEQ ID NO: 146911 - DNA, 15 bp, Homo sapiens
gcccattctgaaaaa

SEQ ID NO: 146912 - DNA, 15 bp, Homo sapiens
ggcccattctgaaaa

SEQ ID NO: 146913 - DNA, 15 bp, Homo sapiens
aggcccattctgaaa

SEQ ID NO: 146914 - DNA, 15 bp, Homo sapiens
aaggcccattctgaa

SEQ ID NO: 146915 - DNA, 15 bp, Homo sapiens
gaaggcccattctga

SEQ ID NO: 146916 - DNA, 15 bp, Homo sapiens
agaaggcccattctg

SEQ ID NO: 146917 - DNA, 15 bp, Homo sapiens
gagaaggcccattct

SEQ ID NO: 146918 - DNA, 15 bp, Homo sapiens
tgagaaggcccattc

SEQ ID NO: 146919 - DNA, 15 bp, Homo sapiens
ttgagaaggcccatt

SEQ ID NO: 146920 - DNA, 15 bp, Homo sapiens
cttgagaaggcccat

SEQ ID NO: 146921 - DNA, 15 bp, Homo sapiens
tcttgagaaggccca

SEQ ID NO: 146922 - DNA, 15 bp, Homo sapiens
ttcttgagaaggccc

SEQ ID NO: 146923 - DNA, 15 bp, Homo sapiens
attcttgagaaggcc

SEQ ID NO: 146924 - DNA, 15 bp, Homo sapiens
cattcttgagaaggc

SEQ ID NO: 146925 - DNA, 15 bp, Homo sapiens
gcattcttgagaagg

SEQ ID NO: 146926 - DNA, 15 bp, Homo sapiens
tgcattcttgagaag

SEQ ID NO: 146927 - DNA, 15 bp, Homo sapiens
atgcattcttgagaa

SEQ ID NO: 146928 - DNA, 15 bp, Homo sapiens
aatgcattcttgaga

SEQ ID NO: 146929 - DNA, 15 bp, Homo sapiens
aaatgcattcttgag

SEQ ID NO: 146930 - DNA, 15 bp, Homo sapiens
aaaatgcattcttga

SEQ ID NO: 146931 - DNA, 15 bp, Homo sapiens
aaaaatgcattcttg

SEQ ID NO: 146932 - DNA, 15 bp, Homo sapiens
taaaaatgcattctt

SEQ ID NO: 146933 - DNA, 15 bp, Homo sapiens
ttaaaaatgcattct

SEQ ID NO: 146934 - DNA, 15 bp, Homo sapiens
cttaaaaatgcattc

SEQ ID NO: 146935 - DNA, 15 bp, Homo sapiens
tcttaaaaatgcatt

SEQ ID NO: 146936 - DNA, 15 bp, Homo sapiens
ctcttaaaaatgcat

SEQ ID NO: 146937 - DNA, 15 bp, Homo sapiens
actcttaaaaatgca

SEQ ID NO: 146938 - DNA, 15 bp, Homo sapiens
aactcttaaaaatgc

SEQ ID NO: 146939 - DNA, 15 bp, Homo sapiens
aaactcttaaaaatg

SEQ ID NO: 146940 - DNA, 15 bp, Homo sapiens
aaaactcttaaaaat

SEQ ID NO: 146941 - DNA, 15 bp, Homo sapiens
caaaactcttaaaaa

SEQ ID NO: 146942 - DNA, 15 bp, Homo sapiens
ccaaaactcttaaaa

SEQ ID NO: 146943 - DNA, 15 bp, Homo sapiens
accaaaactcttaaa

SEQ ID NO: 146944 - DNA, 15 bp, Homo sapiens
aaccaaaactcttaa

SEQ ID NO: 146945 - DNA, 15 bp, Homo sapiens
gaaccaaaactctta

SEQ ID NO: 146946 - DNA, 15 bp, Homo sapiens
tgaaccaaaactctt

SEQ ID NO: 146947 - DNA, 15 bp, Homo sapiens
ttgaaccaaaactct

SEQ ID NO: 146948 - DNA, 15 bp, Homo sapiens
gttgaaccaaaactc

SEQ ID NO: 146949 - DNA, 15 bp, Homo sapiens
ggttgaaccaaaact

SEQ ID NO: 146950 - DNA, 15 bp, Homo sapiens
gggttgaaccaaaac

SEQ ID NO: 146951 - DNA, 15 bp, Homo sapiens
agggttgaaccaaaa

SEQ ID NO: 146952 - DNA, 15 bp, Homo sapiens
aagggttgaaccaaa

SEQ ID NO: 146953 - DNA, 15 bp, Homo sapiens
aaagggttgaaccaa

SEQ ID NO: 146954 - DNA, 15 bp, Homo sapiens
taaagggttgaacca

SEQ ID NO: 146955 - DNA, 15 bp, Homo sapiens
gtaaagggttgaacc

SEQ ID NO: 146956 - DNA, 15 bp, Homo sapiens
tgtaaagggttgaac

SEQ ID NO: 146957 - DNA, 15 bp, Homo sapiens
ttgtaaagggttgaa

SEQ ID NO: 146958 - DNA, 15 bp, Homo sapiens
tttgtaaagggttga

SEQ ID NO: 146959 - DNA, 15 bp, Homo sapiens
ttttgtaaagggttg

SEQ ID NO: 146960 - DNA, 15 bp, Homo sapiens
tttttgtaaagggtt

SEQ ID NO: 146961 - DNA, 15 bp, Homo sapiens
atttttgtaaagggt

SEQ ID NO: 146962 - DNA, 15 bp, Homo sapiens
catttttgtaaaggg

SEQ ID NO: 146963 - DNA, 15 bp, Homo sapiens
acatttttgtaaagg

SEQ ID NO: 146964 - DNA, 15 bp, Homo sapiens
cacatttttgtaaag

SEQ ID NO: 146965 - DNA, 15 bp, Homo sapiens
gcacatttttgtaaa

SEQ ID NO: 146966 - DNA, 15 bp, Homo sapiens
tgcacatttttgtaa

SEQ ID NO: 146967 - DNA, 15 bp, Homo sapiens
ttgcacatttttgta

SEQ ID NO: 146968 - DNA, 15 bp, Homo sapiens
tttgcacatttttgt

SEQ ID NO: 146969 - DNA, 15 bp, Homo sapiens
ttttgcacatttttg

SEQ ID NO: 146970 - DNA, 15 bp, Homo sapiens
attttgcacattttt

SEQ ID NO: 146971 - DNA, 15 bp, Homo sapiens
gattttgcacatttt

SEQ ID NO: 146972 - DNA, 15 bp, Homo sapiens
agattttgcacattt

SEQ ID NO: 146973 - DNA, 15 bp, Homo sapiens
gagattttgcacatt

SEQ ID NO: 146974 - DNA, 15 bp, Homo sapiens
tgagattttgcacat

SEQ ID NO: 146975 - DNA, 15 bp, Homo sapiens
gtgagattttgcaca

SEQ ID NO: 146976 - DNA, 15 bp, Homo sapiens
ggtgagattttgcac

SEQ ID NO: 146977 - DNA, 15 bp, Homo sapiens
tggtgagattttgca

SEQ ID NO: 146978 - DNA, 15 bp, Homo sapiens
ttggtgagattttgc

SEQ ID NO: 146979 - DNA, 15 bp, Homo sapiens
gttggtgagattttg

SEQ ID NO: 146980 - DNA, 15 bp, Homo sapiens
ggttggtgagatttt

SEQ ID NO: 146981 - DNA, 15 bp, Homo sapiens
gggttggtgagattt

SEQ ID NO: 146982 - DNA, 15 bp, Homo sapiens
tgggttggtgagatt

SEQ ID NO: 146983 - DNA, 15 bp, Homo sapiens
atgggttggtgagat

SEQ ID NO: 146984 - DNA, 15 bp, Homo sapiens
aatgggttggtgaga

SEQ ID NO: 146985 - DNA, 15 bp, Homo sapiens
taatgggttggtgag

SEQ ID NO: 146986 - DNA, 15 bp, Homo sapiens
ttaatgggttggtga

SEQ ID NO: 146987 - DNA, 15 bp, Homo sapiens
gttaatgggttggtg

SEQ ID NO: 146988 - DNA, 15 bp, Homo sapiens
tgttaatgggttggt

SEQ ID NO: 146989 - DNA, 15 bp, Homo sapiens
atgttaatgggttgg

SEQ ID NO: 146990 - DNA, 15 bp, Homo sapiens
catgttaatgggttg

SEQ ID NO: 146991 - DNA, 15 bp, Homo sapiens
tcatgttaatgggtt

SEQ ID NO: 146992 - DNA, 15 bp, Homo sapiens
ctcatgttaatgggt

SEQ ID NO: 146993 - DNA, 15 bp, Homo sapiens
gctcatgttaatggg

SEQ ID NO: 146994 - DNA, 15 bp, Homo sapiens
agctcatgttaatgg

SEQ ID NO: 146995 - DNA, 15 bp, Homo sapiens
aagctcatgttaatg

SEQ ID NO: 146996 - DNA, 15 bp, Homo sapiens
aaagctcatgttaat

SEQ ID NO: 146997 - DNA, 15 bp, Homo sapiens
taaagctcatgttaa

SEQ ID NO: 146998 - DNA, 15 bp, Homo sapiens
ctaaagctcatgtta

SEQ ID NO: 146999 - DNA, 15 bp, Homo sapiens
tctaaagctcatgtt

SEQ ID NO: 147000 - DNA, 15 bp, Homo sapiens
atctaaagctcatgt

SEQ ID NO: 147001 - DNA, 15 bp, Homo sapiens
aatctaaagctcatg

SEQ ID NO: 147002 - DNA, 15 bp, Homo sapiens
aaatctaaagctcat

SEQ ID NO: 147003 - DNA, 15 bp, Homo sapiens
gaaatctaaagctca

SEQ ID NO: 147004 - DNA, 15 bp, Homo sapiens
agaaatctaaagctc

SEQ ID NO: 147005 - DNA, 15 bp, Homo sapiens
cagaaatctaaagct

SEQ ID NO: 147006 - DNA, 15 bp, Homo sapiens
tcagaaatctaaagc

SEQ ID NO: 147007 - DNA, 15 bp, Homo sapiens
gtcagaaatctaaag

SEQ ID NO: 147008 - DNA, 15 bp, Homo sapiens
agtcagaaatctaaa

SEQ ID NO: 147009 - DNA, 15 bp, Homo sapiens
gagtcagaaatctaa

SEQ ID NO: 147010 - DNA, 15 bp, Homo sapiens
agagtcagaaatcta

SEQ ID NO: 147011 - DNA, 15 bp, Homo sapiens
gagagtcagaaatct

SEQ ID NO: 147012 - DNA, 15 bp, Homo sapiens
agagagtcagaaatc

SEQ ID NO: 147013 - DNA, 15 bp, Homo sapiens
aagagagtcagaaat

SEQ ID NO: 147014 - DNA, 15 bp, Homo sapiens
aaagagagtcagaaa

SEQ ID NO: 147015 - DNA, 15 bp, Homo sapiens
taaagagagtcagaa

SEQ ID NO: 147016 - DNA, 15 bp, Homo sapiens
ttaaagagagtcaga

SEQ ID NO: 147017 - DNA, 15 bp, Homo sapiens
tttaaagagagtcag

SEQ ID NO: 147018 - DNA, 15 bp, Homo sapiens
gtttaaagagagtca

SEQ ID NO: 147019 - DNA, 15 bp, Homo sapiens
ggtttaaagagagtc

SEQ ID NO: 147020 - DNA, 15 bp, Homo sapiens
aggtttaaagagagt

SEQ ID NO: 147021 - DNA, 15 bp, Homo sapiens
taggtttaaagagag

SEQ ID NO: 147022 - DNA, 15 bp, Homo sapiens
ataggtttaaagaga

SEQ ID NO: 147023 - DNA, 15 bp, Homo sapiens
aataggtttaaagag

SEQ ID NO: 147024 - DNA, 15 bp, Homo sapiens
aaataggtttaaaga

SEQ ID NO: 147025 - DNA, 15 bp, Homo sapiens
caaataggtttaaag

SEQ ID NO: 147026 - DNA, 15 bp, Homo sapiens
tcaaataggtttaaa

SEQ ID NO: 147027 - DNA, 15 bp, Homo sapiens
atcaaataggtttaa

SEQ ID NO: 147028 - DNA, 15 bp, Homo sapiens
catcaaataggttta

SEQ ID NO: 147029 - DNA, 15 bp, Homo sapiens
ccatcaaataggttt

SEQ ID NO: 147030 - DNA, 15 bp, Homo sapiens
accatcaaataggtt

SEQ ID NO: 147031 - DNA, 15 bp, Homo sapiens
aaccatcaaataggt

SEQ ID NO: 147032 - DNA, 15 bp, Homo sapiens
taaccatcaaatagg

SEQ ID NO: 147033 - DNA, 15 bp, Homo sapiens
gtaaccatcaaatag

SEQ ID NO: 147034 - DNA, 15 bp, Homo sapiens
agtaaccatcaaata

SEQ ID NO: 147035 - DNA, 15 bp, Homo sapiens
cagtaaccatcaaat

SEQ ID NO: 147036 - DNA, 15 bp, Homo sapiens
ccagtaaccatcaaa

SEQ ID NO: 147037 - DNA, 15 bp, Homo sapiens
tccagtaaccatcaa

SEQ ID NO: 147038 - DNA, 15 bp, Homo sapiens
ttccagtaaccatca

SEQ ID NO: 147039 - DNA, 15 bp, Homo sapiens
attccagtaaccatc

SEQ ID NO: 147040 - DNA, 15 bp, Homo sapiens
cattccagtaaccat

SEQ ID NO: 147041 - DNA, 15 bp, Homo sapiens
acattccagtaacca

SEQ ID NO: 147042 - DNA, 15 bp, Homo sapiens
cacattccagtaacc

SEQ ID NO: 147043 - DNA, 15 bp, Homo sapiens
gcacattccagtaac

SEQ ID NO: 147044 - DNA, 15 bp, Homo sapiens
tgcacattccagtaa

SEQ ID NO: 147045 - DNA, 15 bp, Homo sapiens
atgcacattccagta

SEQ ID NO: 147046 - DNA, 15 bp, Homo sapiens
aatgcacattccagt

SEQ ID NO: 147047 - DNA, 15 bp, Homo sapiens
aaatgcacattccag

SEQ ID NO: 147048 - DNA, 15 bp, Homo sapiens
taaatgcacattcca

SEQ ID NO: 147049 - DNA, 15 bp, Homo sapiens
ttaaatgcacattcc

SEQ ID NO: 147050 - DNA, 15 bp, Homo sapiens
cttaaatgcacattc

SEQ ID NO: 147051 - DNA, 15 bp, Homo sapiens
acttaaatgcacatt

SEQ ID NO: 147052 - DNA, 15 bp, Homo sapiens
tacttaaatgcacat

SEQ ID NO: 147053 - DNA, 15 bp, Homo sapiens
ctacttaaatgcaca

SEQ ID NO: 147054 - DNA, 15 bp, Homo sapiens
gctacttaaatgcac

SEQ ID NO: 147055 - DNA, 15 bp, Homo sapiens
ggctacttaaatgca

SEQ ID NO: 147056 - DNA, 15 bp, Homo sapiens
aggctacttaaatgc

SEQ ID NO: 147057 - DNA, 15 bp, Homo sapiens
gaggctacttaaatg

SEQ ID NO: 147058 - DNA, 15 bp, Homo sapiens
ggaggctacttaaat

SEQ ID NO: 147059 - DNA, 15 bp, Homo sapiens
tggaggctacttaaa

SEQ ID NO: 147060 - DNA, 15 bp, Homo sapiens
ttggaggctacttaa

SEQ ID NO: 147061 - DNA, 15 bp, Homo sapiens
cttggaggctactta

SEQ ID NO: 147062 - DNA, 15 bp, Homo sapiens
tcttggaggctactt

SEQ ID NO: 147063 - DNA, 15 bp, Homo sapiens
ttcttggaggctact

SEQ ID NO: 147064 - DNA, 15 bp, Homo sapiens
gttcttggaggctac

SEQ ID NO: 147065 - DNA, 15 bp, Homo sapiens
tgttcttggaggcta

SEQ ID NO: 147066 - DNA, 15 bp, Homo sapiens
ttgttcttggaggct

SEQ ID NO: 147067 - DNA, 15 bp, Homo sapiens
atttgttcttggagg

SEQ ID NO: 147068 - DNA, 15 bp, Homo sapiens
aatttgttcttggag

SEQ ID NO: 147069 - DNA, 15 bp, Homo sapiens
caatttgttcttgga

SEQ ID NO: 147070 - DNA, 15 bp, Homo sapiens
gcaatttgttcttgg

SEQ ID NO: 147071 - DNA, 15 bp, Homo sapiens
agcaatttgttcttg

SEQ ID NO: 147072 - DNA, 15 bp, Homo sapiens
aagcaatttgttctt

SEQ ID NO: 147073 - DNA, 15 bp, Homo sapiens
gaagcaatttgttct

SEQ ID NO: 147074 - DNA, 15 bp, Homo sapiens
agaagcaatttgttc

SEQ ID NO: 147075 - DNA, 15 bp, Homo sapiens
tagaagcaatttgtt

SEQ ID NO: 147076 - DNA, 15 bp, Homo sapiens
atagaagcaatttgt

SEQ ID NO: 147077 - DNA, 15 bp, Homo sapiens
tatagaagcaatttg

SEQ ID NO: 147078 - DNA, 15 bp, Homo sapiens
ttatagaagcaattt

SEQ ID NO: 147079 - DNA, 15 bp, Homo sapiens
tttatagaagcaatt

SEQ ID NO: 147080 - DNA, 15 bp, Homo sapiens
atttatagaagcaat

SEQ ID NO: 147081 - DNA, 15 bp, Homo sapiens
catttatagaagcaa

SEQ ID NO: 147082 - DNA, 15 bp, Homo sapiens
ccatttatagaagca

SEQ ID NO: 147083 - DNA, 15 bp, Homo sapiens
cccatttatagaagc

SEQ ID NO: 147084 - DNA, 15 bp, Homo sapiens
tcccatttatagaag

SEQ ID NO: 147085 - DNA, 15 bp, Homo sapiens
gtcccatttatagaa

SEQ ID NO: 147086 - DNA, 15 bp, Homo sapiens
tgtcccatttataga

SEQ ID NO: 147087 - DNA, 15 bp, Homo sapiens
gtgtcccatttatag

SEQ ID NO: 147088 - DNA, 15 bp, Homo sapiens
ggtgtcccatttata

SEQ ID NO: 147089 - DNA, 15 bp, Homo sapiens
gggtgtcccatttat

SEQ ID NO: 147090 - DNA, 15 bp, Homo sapiens
agggtgtcccattta

SEQ ID NO: 147091 - DNA, 15 bp, Homo sapiens
cagggtgtcccattt

SEQ ID NO: 147092 - DNA, 15 bp, Homo sapiens
gcagggtgtcccatt

SEQ ID NO: 147093 - DNA, 15 bp, Homo sapiens
agcagggtgtcccat

SEQ ID NO: 147094 - DNA, 15 bp, Homo sapiens
gagcagggtgtccca

SEQ ID NO: 147095 - DNA, 15 bp, Homo sapiens
tgagcagggtgtccc

SEQ ID NO: 147096 - DNA, 15 bp, Homo sapiens
gtgagcagggtgtcc

SEQ ID NO: 147097 - DNA, 15 bp, Homo sapiens
ggtgagcagggtgtc

SEQ ID NO: 147098 - DNA, 15 bp, Homo sapiens
gggtgagcagggtgt

SEQ ID NO: 147099 - DNA, 15 bp, Homo sapiens
agggtgagcagggtg

SEQ ID NO: 147100 - DNA, 15 bp, Homo sapiens
gagggtgagcagggt

SEQ ID NO: 147101 - DNA, 15 bp, Homo sapiens
ggagggtgagcaggg

SEQ ID NO: 147102 - DNA, 15 bp, Homo sapiens
aggagggtgagcagg

SEQ ID NO: 147103 - DNA, 15 bp, Homo sapiens
gaggagggtgagcag

SEQ ID NO: 147104 - DNA, 15 bp, Homo sapiens
ggaggagggtgagca

SEQ ID NO: 147105 - DNA, 15 bp, Homo sapiens
gggaggagggtgagc

SEQ ID NO: 147106 - DNA, 15 bp, Homo sapiens
agggaggagggtgag

SEQ ID NO: 147107 - DNA, 15 bp, Homo sapiens
aagggaggagggtga

SEQ ID NO: 147108 - DNA, 15 bp, Homo sapiens
caagggaggagggtg

SEQ ID NO: 147109 - DNA, 15 bp, Homo sapiens
gcaagggaggagggt

SEQ ID NO: 147110 - DNA, 15 bp, Homo sapiens
ggcaagggaggaggg

SEQ ID NO: 147111 - DNA, 15 bp, Homo sapiens
gggcaagggaggagg

SEQ ID NO: 147112 - DNA, 15 bp, Homo sapiens
tgggcaagggaggag

SEQ ID NO: 147113 - DNA, 15 bp, Homo sapiens
ctgggcaagggagga

SEQ ID NO: 147114 - DNA, 15 bp, Homo sapiens
gctgggcaagggagg

SEQ ID NO: 147115 - DNA, 15 bp, Homo sapiens
agctgggcaagggag

SEQ ID NO: 147116 - DNA, 15 bp, Homo sapiens
gagctgggcaaggga

SEQ ID NO: 147117 - DNA, 15 bp, Homo sapiens
ggagctgggcaaggg

SEQ ID NO: 147118 - DNA, 15 bp, Homo sapiens
tggagctgggcaagg

SEQ ID NO: 147119 - DNA, 15 bp, Homo sapiens
atggagctgggcaag

SEQ ID NO: 147120 - DNA, 15 bp, Homo sapiens
gatggagctgggcaa

SEQ ID NO: 147121 - DNA, 15 bp, Homo sapiens
tgatggagctgggca

SEQ ID NO: 147122 - DNA, 15 bp, Homo sapiens
ttgatggagctgggc

SEQ ID NO: 147123 - DNA, 15 bp, Homo sapiens
cttgatggagctggg

SEQ ID NO: 147124 - DNA, 15 bp, Homo sapiens
gcttgatggagctgg

SEQ ID NO: 147125 - DNA, 15 bp, Homo sapiens
agcttgatggagctg

SEQ ID NO: 147126 - DNA, 15 bp, Homo sapiens
gagcttgatggagct

SEQ ID NO: 147127 - DNA, 15 bp, Homo sapiens
ggagcttgatggagc

SEQ ID NO: 147128 - DNA, 15 bp, Homo sapiens
tggagcttgatggag

SEQ ID NO: 147129 - DNA, 15 bp, Homo sapiens
atggagcttgatgga

SEQ ID NO: 147130 - DNA, 15 bp, Homo sapiens
gatggagcttgatgg

SEQ ID NO: 147131 - DNA, 15 bp, Homo sapiens
ggatggagcttgatg

SEQ ID NO: 147132 - DNA, 15 bp, Homo sapiens
tggatggagcttgat

SEQ ID NO: 147133 - DNA, 15 bp, Homo sapiens
atggatggagcttga

SEQ ID NO: 147134 - DNA, 15 bp, Homo sapiens
tatggatggagcttg

SEQ ID NO: 147135 - DNA, 15 bp, Homo sapiens
gtatggatggagctt

SEQ ID NO: 147136 - DNA, 15 bp, Homo sapiens
tgtatggatggagct

SEQ ID NO: 147137 - DNA, 15 bp, Homo sapiens
ttgtatggatggagc

SEQ ID NO: 147138 - DNA, 15 bp, Homo sapiens
tttgtatggatggag

SEQ ID NO: 147139 - DNA, 15 bp, Homo sapiens
ttttgtatggatgga

SEQ ID NO: 147140 - DNA, 15 bp, Homo sapiens
attttgtatggatgg

SEQ ID NO: 147141 - DNA, 15 bp, Homo sapiens
tattttgtatggatg

SEQ ID NO: 147142 - DNA, 15 bp, Homo sapiens
atattttgtatggat

SEQ ID NO: 147143 - DNA, 15 bp, Homo sapiens
aatattttgtatgga

SEQ ID NO: 147144 - DNA, 15 bp, Homo sapiens
taatattttgtatgg

SEQ ID NO: 147145 - DNA, 15 bp, Homo sapiens
gtaatattttgtatg

SEQ ID NO: 147146 - DNA, 15 bp, Homo sapiens
ggtaatattttgtat

SEQ ID NO: 147147 - DNA, 15 bp, Homo sapiens
tggtaatattttgta

SEQ ID NO: 147148 - DNA, 15 bp, Homo sapiens
ttggtaatattttgt

SEQ ID NO: 147149 - DNA, 15 bp, Homo sapiens
tttggtaatattttg

SEQ ID NO: 147150 - DNA, 15 bp, Homo sapiens
gtttggtaatatttt

SEQ ID NO: 147151 - DNA, 15 bp, Homo sapiens
ggtttggtaatattt

SEQ ID NO: 147152 - DNA, 15 bp, Homo sapiens
aggtttggtaatatt

SEQ ID NO: 147153 - DNA, 15 bp, Homo sapiens
aaggtttggtaatat

SEQ ID NO: 147154 - DNA, 15 bp, Homo sapiens
gaaggtttggtaata

SEQ ID NO: 147155 - DNA, 15 bp, Homo sapiens
tgaaggtttggtaat

SEQ ID NO: 147156 - DNA, 15 bp, Homo sapiens
ttgaaggtttggtaa

SEQ ID NO: 147157 - DNA, 15 bp, Homo sapiens
tttgaaggtttggta

SEQ ID NO: 147158 - DNA, 15 bp, Homo sapiens
atttgaaggtttggt

SEQ ID NO: 147159 - DNA, 15 bp, Homo sapiens
catttgaaggtttgg

SEQ ID NO: 147160 - DNA, 15 bp, Homo sapiens
acatttgaaggtttg

SEQ ID NO: 147161 - DNA, 15 bp, Homo sapiens
cacatttgaaggttt

SEQ ID NO: 147162 - DNA, 15 bp, Homo sapiens
tcacatttgaaggtt

SEQ ID NO: 147163 - DNA, 15 bp, Homo sapiens
gtcacatttgaaggt

SEQ ID NO: 147164 - DNA, 15 bp, Homo sapiens
agtcacatttgaagg

SEQ ID NO: 147165 - DNA, 15 bp, Homo sapiens
aagtcacatttgaag

SEQ ID NO: 147166 - DNA, 15 bp, Homo sapiens
tgtcagttgatattt

SEQ ID NO: 147167 - DNA, 15 bp, Homo sapiens
gtgtcagttgatatt

SEQ ID NO: 147168 - DNA, 15 bp, Homo sapiens
ggtgtcagttgatat

SEQ ID NO: 147169 - DNA, 15 bp, Homo sapiens
tggtgtcagttgata

SEQ ID NO: 147170 - DNA, 15 bp, Homo sapiens
gtggtgtcagttgat

SEQ ID NO: 147171 - DNA, 15 bp, Homo sapiens
tgtggtgtcagttga

SEQ ID NO: 147172 - DNA, 15 bp, Homo sapiens
ttgtggtgtcagttg

SEQ ID NO: 147173 - DNA, 15 bp, Homo sapiens
attgtggtgtcagtt

SEQ ID NO: 147174 - DNA, 15 bp, Homo sapiens
tattgtggtgtcagt

SEQ ID NO: 147175 - DNA, 15 bp, Homo sapiens
ctattgtggtgtcag

SEQ ID NO: 147176 - DNA, 15 bp, Homo sapiens
gctattgtggtgtca

SEQ ID NO: 147177 - DNA, 15 bp, Homo sapiens
tgctattgtggtgtc

SEQ ID NO: 147178 - DNA, 15 bp, Homo sapiens
gtgctattgtggtgt

SEQ ID NO: 147179 - DNA, 15 bp, Homo sapiens
agtgctattgtggtg

SEQ ID NO: 147180 - DNA, 15 bp, Homo sapiens
tagtgctattgtggt

SEQ ID NO: 147181 - DNA, 15 bp, Homo sapiens
ctagtgctattgtgg

SEQ ID NO: 147182 - DNA, 15 bp, Homo sapiens
gctagtgctattgtg

SEQ ID NO: 147183 - DNA, 15 bp, Homo sapiens
ggctagtgctattgt

SEQ ID NO: 147184 - DNA, 15 bp, Homo sapiens
aggctagtgctattg

SEQ ID NO: 147185 - DNA, 15 bp, Homo sapiens
caggctagtgctatt

SEQ ID NO: 147186 - DNA, 15 bp, Homo sapiens
gcaggctagtgctat

SEQ ID NO: 147187 - DNA, 15 bp, Homo sapiens
ggcaggctagtgcta

SEQ ID NO: 147188 - DNA, 15 bp, Homo sapiens
gggcaggctagtgct

SEQ ID NO: 147189 - DNA, 15 bp, Homo sapiens
agggcaggctagtgc

SEQ ID NO: 147190 - DNA, 15 bp, Homo sapiens
tagggcaggctagtg

SEQ ID NO: 147191 - DNA, 15 bp, Homo sapiens
ctagggcaggctagt

SEQ ID NO: 147192 - DNA, 15 bp, Homo sapiens
tctagggcaggctag

SEQ ID NO: 147193 - DNA, 15 bp, Homo sapiens
ctctagggcaggcta

SEQ ID NO: 147194 - DNA, 15 bp, Homo sapiens
actctagggcaggct

SEQ ID NO: 147195 - DNA, 15 bp, Homo sapiens
gactctagggcaggc

SEQ ID NO: 147196 - DNA, 15 bp, Homo sapiens
tgactctagggcagg

SEQ ID NO: 147197 - DNA, 15 bp, Homo sapiens
ttgactctagggcag

SEQ ID NO: 147198 - DNA, 15 bp, Homo sapiens
cttgactctagggca

SEQ ID NO: 147199 - DNA, 15 bp, Homo sapiens
tcttgactctagggc

SEQ ID NO: 147200 - DNA, 15 bp, Homo sapiens
gtcttgactctaggg

SEQ ID NO: 147201 - DNA, 15 bp, Homo sapiens
agtcttgactctagg

SEQ ID NO: 147202 - DNA, 15 bp, Homo sapiens
gagtcttgactctag

SEQ ID NO: 147203 - DNA, 15 bp, Homo sapiens
agagtcttgactcta

SEQ ID NO: 147204 - DNA, 15 bp, Homo sapiens
cagagtcttgactct

SEQ ID NO: 147205 - DNA, 15 bp, Homo sapiens
ccagagtcttgactc

SEQ ID NO: 147206 - DNA, 15 bp, Homo sapiens
cccagagtcttgact

SEQ ID NO: 147207 - DNA, 15 bp, Homo sapiens
acccagagtcttgac

SEQ ID NO: 147208 - DNA, 15 bp, Homo sapiens
cacccagagtcttga

SEQ ID NO: 147209 - DNA, 15 bp, Homo sapiens
ccacccagagtcttg

SEQ ID NO: 147210 - DNA, 15 bp, Homo sapiens
cccacccagagtctt

SEQ ID NO: 147211 - DNA, 15 bp, Homo sapiens
gcccacccagagtct

SEQ ID NO: 147212 - DNA, 15 bp, Homo sapiens
tgcccacccagagtc

SEQ ID NO: 147213 - DNA, 15 bp, Homo sapiens
ctgcccacccagagt

SEQ ID NO: 147214 - DNA, 15 bp, Homo sapiens
gctgcccacccagag

SEQ ID NO: 147215 - DNA, 15 bp, Homo sapiens
agctgcccacccaga

SEQ ID NO: 147216 - DNA, 15 bp, Homo sapiens
gagctgcccacccag

SEQ ID NO: 147217 - DNA, 15 bp, Homo sapiens
agagctgcccaccca

SEQ ID NO: 147218 - DNA, 15 bp, Homo sapiens
aagagctgcccaccc

SEQ ID NO: 147219 - DNA, 15 bp, Homo sapiens
gaagagctgcccacc

SEQ ID NO: 147220 - DNA, 15 bp, Homo sapiens
tgaagagctgcccac

SEQ ID NO: 147221 - DNA, 15 bp, Homo sapiens
ttgaagagctgccca

SEQ ID NO: 147222 - DNA, 15 bp, Homo sapiens
attgaagagctgccc

SEQ ID NO: 147223 - DNA, 15 bp, Homo sapiens
tattgaagagctgcc

SEQ ID NO: 147224 - DNA, 15 bp, Homo sapiens
ttattgaagagctgc

SEQ ID NO: 147225 - DNA, 15 bp, Homo sapiens
tttattgaagagctg

SEQ ID NO: 147226 - DNA, 15 bp, Homo sapiens
ctttattgaagagct

SEQ ID NO: 147227 - DNA, 15 bp, Homo sapiens
tctttattgaagagc

SEQ ID NO: 147228 - DNA, 15 bp, Homo sapiens
gtctttattgaagag

SEQ ID NO: 147229 - DNA, 15 bp, Homo sapiens
tgtctttattgaaga

SEQ ID NO: 147230 - DNA, 15 bp, Homo sapiens
ctgtctttattgaag

SEQ ID NO: 147231 - DNA, 15 bp, Homo sapiens
gctgtctttattgaa

SEQ ID NO: 147232 - DNA, 15 bp, Homo sapiens
tgctgtctttattga

SEQ ID NO: 147233 - DNA, 15 bp, Homo sapiens
ttgctgtctttattg

SEQ ID NO: 147234 - DNA, 15 bp, Homo sapiens
cttgctgtctttatt

SEQ ID NO: 147235 - DNA, 15 bp, Homo sapiens
ccttgctgtctttat

SEQ ID NO: 147236 - DNA, 15 bp, Homo sapiens
tccttgctgtcttta

SEQ ID NO: 147237 - DNA, 15 bp, Homo sapiens
ctccttgctgtcttt

SEQ ID NO: 147238 - DNA, 15 bp, Homo sapiens
cctccttgctgtctt

SEQ ID NO: 147239 - DNA, 15 bp, Homo sapiens
gcctccttgctgtct

SEQ ID NO: 147240 - DNA, 15 bp, Homo sapiens
ggcctccttgctgtc

SEQ ID NO: 147241 - DNA, 15 bp, Homo sapiens
tggcctccttgctgt

SEQ ID NO: 147242 - DNA, 15 bp, Homo sapiens
atggcctccttgctg

SEQ ID NO: 147243 - DNA, 15 bp, Homo sapiens
gatggcctccttgct

SEQ ID NO: 147244 - DNA, 15 bp, Homo sapiens
ggatggcctccttgc

SEQ ID NO: 147245 - DNA, 15 bp, Homo sapiens
aggatggcctccttg

SEQ ID NO: 147246 - DNA, 15 bp, Homo sapiens
caggatggcctcctt

SEQ ID NO: 147247 - DNA, 15 bp, Homo sapiens
tcaggatggcctcct

SEQ ID NO: 147248 - DNA, 15 bp, Homo sapiens
ttcaggatggcctcc

SEQ ID NO: 147249 - DNA, 15 bp, Homo sapiens
cttcaggatggcctc

SEQ ID NO: 147250 - DNA, 15 bp, Homo sapiens
tcttcaggatggcct

SEQ ID NO: 147251 - DNA, 15 bp, Homo sapiens
ctcttcaggatggcc

SEQ ID NO: 147252 - DNA, 15 bp, Homo sapiens
cctcttcaggatggc

SEQ ID NO: 147253 - DNA, 15 bp, Homo sapiens
acctcttcaggatgg

SEQ ID NO: 147254 - DNA, 15 bp, Homo sapiens
tacctcttcaggatg

SEQ ID NO: 147255 - DNA, 15 bp, Homo sapiens
atacctcttcaggat

SEQ ID NO: 147256 - DNA, 15 bp, Homo sapiens
tatacctcttcagga

SEQ ID NO: 147257 - DNA, 15 bp, Homo sapiens
atatacctcttcagg

SEQ ID NO: 147258 - DNA, 15 bp, Homo sapiens
gatatacctcttcag

SEQ ID NO: 147259 - DNA, 15 bp, Homo sapiens
ggatatacctcttca

SEQ ID NO: 147260 - DNA, 15 bp, Homo sapiens
tggatatacctcttc

SEQ ID NO: 147261 - DNA, 15 bp, Homo sapiens
gtggatatacctctt

SEQ ID NO: 147262 - DNA, 15 bp, Homo sapiens
cgtggatatacctct

SEQ ID NO: 147263 - DNA, 15 bp, Homo sapiens
acgtggatatacctc

SEQ ID NO: 147264 - DNA, 15 bp, Homo sapiens
gacgtggatatacct

SEQ ID NO: 147265 - DNA, 15 bp, Homo sapiens
agacgtggatatacc

SEQ ID NO: 147266 - DNA, 15 bp, Homo sapiens
tagacgtggatatac

SEQ ID NO: 147267 - DNA, 15 bp, Homo sapiens
ttagacgtggatata

SEQ ID NO: 147268 - DNA, 15 bp, Homo sapiens
gttagacgtggatat

SEQ ID NO: 147269 - DNA, 15 bp, Homo sapiens
tgttagacgtggata

SEQ ID NO: 147270 - DNA, 15 bp, Homo sapiens
ctgttagacgtggat

SEQ ID NO: 147271 - DNA, 15 bp, Homo sapiens
cctgttagacgtgga

SEQ ID NO: 147272 - DNA, 15 bp, Homo sapiens
acctgttagacgtgg

SEQ ID NO: 147273 - DNA, 15 bp, Homo sapiens
aacctgttagacgtg

SEQ ID NO: 147274 - DNA, 15 bp, Homo sapiens
taacctgttagacgt

SEQ ID NO: 147275 - DNA, 15 bp, Homo sapiens
gtaacctgttagacg

SEQ ID NO: 147276 - DNA, 15 bp, Homo sapiens
tgtaacctgttagac

SEQ ID NO: 147277 - DNA, 15 bp, Homo sapiens
ttgtaacctgttaga

SEQ ID NO: 147278 - DNA, 15 bp, Homo sapiens
cttgtaacctgttag

SEQ ID NO: 147279 - DNA, 15 bp, Homo sapiens
tcttgtaacctgtta

SEQ ID NO: 147280 - DNA, 15 bp, Homo sapiens
ttcttgtaacctgtt

SEQ ID NO: 147281 - DNA, 15 bp, Homo sapiens
attcttgtaacctgt

SEQ ID NO: 147282 - DNA, 15 bp, Homo sapiens
tattcttgtaacctg

SEQ ID NO: 147283 - DNA, 15 bp, Homo sapiens
gtattcttgtaacct

SEQ ID NO: 147284 - DNA, 15 bp, Homo sapiens
agtattcttgtaacc

SEQ ID NO: 147285 - DNA, 15 bp, Homo sapiens
cagtattcttgtaac

SEQ ID NO: 147286 - DNA, 15 bp, Homo sapiens
gcagtattcttgtaa

SEQ ID NO: 147287 - DNA, 15 bp, Homo sapiens
ggcagtattcttgta

SEQ ID NO: 147288 - DNA, 15 bp, Homo sapiens
tggcagtattcttgt

SEQ ID NO: 147289 - DNA, 15 bp, Homo sapiens
gtggcagtattcttg

SEQ ID NO: 147290 - DNA, 15 bp, Homo sapiens
agtggcagtattctt

SEQ ID NO: 147291 - DNA, 15 bp, Homo sapiens
tagtggcagtattct

SEQ ID NO: 147292 - DNA, 15 bp, Homo sapiens
ctagtggcagtattc

SEQ ID NO: 147293 - DNA, 15 bp, Homo sapiens
tctagtggcagtatt

SEQ ID NO: 147294 - DNA, 15 bp, Homo sapiens
ttctagtggcagtat

SEQ ID NO: 147295 - DNA, 15 bp, Homo sapiens
attctagtggcagta

SEQ ID NO: 147296 - DNA, 15 bp, Homo sapiens
gattctagtggcagt

SEQ ID NO: 147297 - DNA, 15 bp, Homo sapiens
ggattctagtggcag

SEQ ID NO: 147298 - DNA, 15 bp, Homo sapiens
aggattctagtggca

SEQ ID NO: 147299 - DNA, 15 bp, Homo sapiens
taggattctagtggc

SEQ ID NO: 147300 - DNA, 15 bp, Homo sapiens
ttaggattctagtgg

SEQ ID NO: 147301 - DNA, 15 bp, Homo sapiens
tttaggattctagtg

SEQ ID NO: 147302 - DNA, 15 bp, Homo sapiens
ctttaggattctagt

SEQ ID NO: 147303 - DNA, 15 bp, Homo sapiens
tctttaggattctag

SEQ ID NO: 147304 - DNA, 15 bp, Homo sapiens
ctctttaggattcta

SEQ ID NO: 147305 - DNA, 15 bp, Homo sapiens
gctctttaggattct

SEQ ID NO: 147306 - DNA, 15 bp, Homo sapiens
tgctctttaggattc

SEQ ID NO: 147307 - DNA, 15 bp, Homo sapiens
ctgctctttaggatt

SEQ ID NO: 147308 - DNA, 15 bp, Homo sapiens
tctgctctttaggat

SEQ ID NO: 147309 - DNA, 15 bp, Homo sapiens
ctctgctctttagga

SEQ ID NO: 147310 - DNA, 15 bp, Homo sapiens
actctgctctttagg

SEQ ID NO: 147311 - DNA, 15 bp, Homo sapiens
cactctgctctttag

SEQ ID NO: 147312 - DNA, 15 bp, Homo sapiens
ccactctgctcttta

SEQ ID NO: 147313 - DNA, 15 bp, Homo sapiens
accactctgctcttt

SEQ ID NO: 147314 - DNA, 15 bp, Homo sapiens
gaccactctgctctt

SEQ ID NO: 147315 - DNA, 15 bp, Homo sapiens
tgaccactctgctct

SEQ ID NO: 147316 - DNA, 15 bp, Homo sapiens
gtgaccactctgctc

SEQ ID NO: 147317 - DNA, 15 bp, Homo sapiens
agtgaccactctgct

SEQ ID NO: 147318 - DNA, 15 bp, Homo sapiens
cagtgaccactctgc

SEQ ID NO: 147319 - DNA, 15 bp, Homo sapiens
ccagtgaccactctg

SEQ ID NO: 147320 - DNA, 15 bp, Homo sapiens
cccagtgaccactct

SEQ ID NO: 147321 - DNA, 15 bp, Homo sapiens
ccccagtgaccactc

SEQ ID NO: 147322 - DNA, 15 bp, Homo sapiens
cccccagtgaccact

SEQ ID NO: 147323 - DNA, 15 bp, Homo sapiens
ccccccagtgaccac

SEQ ID NO: 147324 - DNA, 15 bp, Homo sapiens
accccccagtgacca

SEQ ID NO: 147325 - DNA, 15 bp, Homo sapiens
taccccccagtgacc

SEQ ID NO: 147326 - DNA, 15 bp, Homo sapiens
ttaccccccagtgac

SEQ ID NO: 147327 - DNA, 15 bp, Homo sapiens
tttaccccccagtga

SEQ ID NO: 147328 - DNA, 15 bp, Homo sapiens
ttttaccccccagtg

SEQ ID NO: 147329 - DNA, 15 bp, Homo sapiens
tttttaccccccagt

SEQ ID NO: 147330 - DNA, 15 bp, Homo sapiens
ctttttaccccccag

SEQ ID NO: 147331 - DNA, 15 bp, Homo sapiens
tctttttacccccca

SEQ ID NO: 147332 - DNA, 15 bp, Homo sapiens
ttctttttacccccc

SEQ ID NO: 147333 - DNA, 15 bp, Homo sapiens
tttctttttaccccc

SEQ ID NO: 147334 - DNA, 15 bp, Homo sapiens
ttttctttttacccc

SEQ ID NO: 147335 - DNA, 15 bp, Homo sapiens
tttttctttttaccc

SEQ ID NO: 147336 - DNA, 15 bp, Homo sapiens
ctttttctttttacc

SEQ ID NO: 147337 - DNA, 15 bp, Homo sapiens
cctttttctttttac

SEQ ID NO: 147338 - DNA, 15 bp, Homo sapiens
tcctttttcttttta

SEQ ID NO: 147339 - DNA, 15 bp, Homo sapiens
ttcctttttcttttt

SEQ ID NO: 147340 - DNA, 15 bp, Homo sapiens
tttcctttttctttt

SEQ ID NO: 147341 - DNA, 15 bp, Homo sapiens
ttttcctttttcttt

SEQ ID NO: 147342 - DNA, 15 bp, Homo sapiens
attttcctttttctt

SEQ ID NO: 147343 - DNA, 15 bp, Homo sapiens
gattttcctttttct

SEQ ID NO: 147344 - DNA, 15 bp, Homo sapiens
ggattttcctttttc

SEQ ID NO: 147345 - DNA, 15 bp, Homo sapiens
aggattttccttttt

SEQ ID NO: 147346 - DNA, 15 bp, Homo sapiens
aaggattttcctttt

SEQ ID NO: 147347 - DNA, 15 bp, Homo sapiens
caaggattttccttt

SEQ ID NO: 147348 - DNA, 15 bp, Homo sapiens
tcaaggattttcctt

SEQ ID NO: 147349 - DNA, 15 bp, Homo sapiens
ttcaaggattttcct

SEQ ID NO: 147350 - DNA, 15 bp, Homo sapiens
cttcaaggattttcc

SEQ ID NO: 147351 - DNA, 15 bp, Homo sapiens
tcttcaaggattttc

SEQ ID NO: 147352 - DNA, 15 bp, Homo sapiens
ttcttcaaggatttt

SEQ ID NO: 147353 - DNA, 15 bp, Homo sapiens
tttcttcaaggattt

SEQ ID NO: 147354 - DNA, 15 bp, Homo sapiens
ctttcttcaaggatt

SEQ ID NO: 147355 - DNA, 15 bp, Homo sapiens
cctttcttcaaggat

SEQ ID NO: 147356 - DNA, 15 bp, Homo sapiens
gcctttcttcaagga

SEQ ID NO: 147357 - DNA, 15 bp, Homo sapiens
tgcctttcttcaagg

SEQ ID NO: 147358 - DNA, 15 bp, Homo sapiens
ttgcctttcttcaag

SEQ ID NO: 147359 - DNA, 15 bp, Homo sapiens
tttgcctttcttcaa

SEQ ID NO: 147360 - DNA, 15 bp, Homo sapiens
ctttgcctttcttca

SEQ ID NO: 147361 - DNA, 15 bp, Homo sapiens
cctttgcctttcttc

SEQ ID NO: 147362 - DNA, 15 bp, Homo sapiens
tcctttgcctttctt

SEQ ID NO: 147363 - DNA, 15 bp, Homo sapiens
ctcctttgcctttct

SEQ ID NO: 147364 - DNA, 15 bp, Homo sapiens
tctcctttgcctttc

SEQ ID NO: 147365 - DNA, 15 bp, Homo sapiens
gtctcctttgccttt

SEQ ID NO: 147366 - DNA, 15 bp, Homo sapiens
tgtctcctttgcctt

SEQ ID NO: 147367 - DNA, 15 bp, Homo sapiens
ttgtctcctttgcct

SEQ ID NO: 147368 - DNA, 15 bp, Homo sapiens
gttgtctcctttgcc

SEQ ID NO: 147369 - DNA, 15 bp, Homo sapiens
ggttgtctcctttgc

SEQ ID NO: 147370 - DNA, 15 bp, Homo sapiens
tggttgtctcctttg

SEQ ID NO: 147371 - DNA, 15 bp, Homo sapiens
ctggttgtctccttt

SEQ ID NO: 147372 - DNA, 15 bp, Homo sapiens
actggttgtctcctt

SEQ ID NO: 147373 - DNA, 15 bp, Homo sapiens
gactggttgtctcct

SEQ ID NO: 147374 - DNA, 15 bp, Homo sapiens
agactggttgtctcc

SEQ ID NO: 147375 - DNA, 15 bp, Homo sapiens
gagactggttgtctc

SEQ ID NO: 147376 - DNA, 15 bp, Homo sapiens
tgagactggttgtct

SEQ ID NO: 147377 - DNA, 15 bp, Homo sapiens
ttgagactggttgtc

SEQ ID NO: 147378 - DNA, 15 bp, Homo sapiens
cttgagactggttgt

SEQ ID NO: 147379 - DNA, 15 bp, Homo sapiens
tcttgagactggttg

SEQ ID NO: 147380 - DNA, 15 bp, Homo sapiens
gtcttgagactggtt

SEQ ID NO: 147381 - DNA, 15 bp, Homo sapiens
ggtcttgagactggt

SEQ ID NO: 147382 - DNA, 15 bp, Homo sapiens
tggtcttgagactgg

SEQ ID NO: 147383 - DNA, 15 bp, Homo sapiens
gtggtcttgagactg

SEQ ID NO: 147384 - DNA, 15 bp, Homo sapiens
tgtggtcttgagact

SEQ ID NO: 147385 - DNA, 15 bp, Homo sapiens
ttgtggtcttgagac

SEQ ID NO: 147386 - DNA, 15 bp, Homo sapiens
cttgtggtcttgaga

SEQ ID NO: 147387 - DNA, 15 bp, Homo sapiens
ccttgtggtcttgag

SEQ ID NO: 147388 - DNA, 15 bp, Homo sapiens
accttgtggtcttga

SEQ ID NO: 147389 - DNA, 15 bp, Homo sapiens
taccttgtggtcttg

SEQ ID NO: 147390 - DNA, 15 bp, Homo sapiens
ataccttgtggtctt

SEQ ID NO: 147391 - DNA, 15 bp, Homo sapiens
aataccttgtggtct

SEQ ID NO: 147392 - DNA, 15 bp, Homo sapiens
taataccttgtggtc

SEQ ID NO: 147393 - DNA, 15 bp, Homo sapiens
ataataccttgtggt

SEQ ID NO: 147394 - DNA, 15 bp, Homo sapiens
tataataccttgtgg

SEQ ID NO: 147395 - DNA, 15 bp, Homo sapiens
ttataataccttgtg

SEQ ID NO: 147396 - DNA, 15 bp, Homo sapiens
cttataataccttgt

SEQ ID NO: 147397 - DNA, 15 bp, Homo sapiens
acttataataccttg

SEQ ID NO: 147398 - DNA, 15 bp, Homo sapiens
gacttataatacctt

SEQ ID NO: 147399 - DNA, 15 bp, Homo sapiens
agacttataatacct

SEQ ID NO: 147400 - DNA, 15 bp, Homo sapiens
aagacttataatacc

SEQ ID NO: 147401 - DNA, 15 bp, Homo sapiens
gaagacttataatac

SEQ ID NO: 147402 - DNA, 15 bp, Homo sapiens
agaagacttataata

SEQ ID NO: 147403 - DNA, 15 bp, Homo sapiens
cagaagacttataat

SEQ ID NO: 147404 - DNA, 15 bp, Homo sapiens
acagaagacttataa

SEQ ID NO: 147405 - DNA, 15 bp, Homo sapiens
gacagaagacttata

SEQ ID NO: 147406 - DNA, 15 bp, Homo sapiens
tgacagaagacttat

SEQ ID NO: 147407 - DNA, 15 bp, Homo sapiens
ttgacagaagactta

SEQ ID NO: 147408 - DNA, 15 bp, Homo sapiens
tttgacagaagactt

SEQ ID NO: 147409 - DNA, 15 bp, Homo sapiens
ctttgacagaagact

SEQ ID NO: 147410 - DNA, 15 bp, Homo sapiens
actttgacagaagac

SEQ ID NO: 147411 - DNA, 15 bp, Homo sapiens
tactttgacagaaga

SEQ ID NO: 147412 - DNA, 15 bp, Homo sapiens
ttactttgacagaag

SEQ ID NO: 147413 - DNA, 15 bp, Homo sapiens
cttactttgacagaa

SEQ ID NO: 147414 - DNA, 15 bp, Homo sapiens
tcttactttgacaga

SEQ ID NO: 147415 - DNA, 15 bp, Homo sapiens
atcttactttgacag

SEQ ID NO: 147416 - DNA, 15 bp, Homo sapiens
catcttactttgaca

SEQ ID NO: 147417 - DNA, 15 bp, Homo sapiens
acatcttactttgac

SEQ ID NO: 147418 - DNA, 15 bp, Homo sapiens
tacatcttactttga

SEQ ID NO: 147419 - DNA, 15 bp, Homo sapiens
atacatcttactttg

SEQ ID NO: 147420 - DNA, 15 bp, Homo sapiens
tatacatcttacttt

SEQ ID NO: 147421 - DNA, 15 bp, Homo sapiens
ttatacatcttactt

SEQ ID NO: 147422 - DNA, 15 bp, Homo sapiens
cttatacatcttact

SEQ ID NO: 147423 - DNA, 15 bp, Homo sapiens
tcttatacatcttac

SEQ ID NO: 147424 - DNA, 15 bp, Homo sapiens
atcttatacatctta

SEQ ID NO: 147425 - DNA, 15 bp, Homo sapiens
aatcttatacatctt

SEQ ID NO: 147426 - DNA, 15 bp, Homo sapiens
aaatcttatacatct

SEQ ID NO: 147427 - DNA, 15 bp, Homo sapiens
caaatcttatacatc

SEQ ID NO: 147428 - DNA, 15 bp, Homo sapiens
acaaatcttatacat

SEQ ID NO: 147429 - DNA, 15 bp, Homo sapiens
tacaaatcttataca

SEQ ID NO: 147430 - DNA, 15 bp, Homo sapiens
ttacaaatcttatac

SEQ ID NO: 147431 - DNA, 15 bp, Homo sapiens
tttacaaatcttata

SEQ ID NO: 147432 - DNA, 15 bp, Homo sapiens
gtttacaaatcttat

SEQ ID NO: 147433 - DNA, 15 bp, Homo sapiens
tgtttacaaatctta

SEQ ID NO: 147434 - DNA, 15 bp, Homo sapiens
gtgtttacaaatctt

SEQ ID NO: 147435 - DNA, 15 bp, Homo sapiens
agtgtttacaaatct

SEQ ID NO: 147436 - DNA, 15 bp, Homo sapiens
tagtgtttacaaatc

SEQ ID NO: 147437 - DNA, 15 bp, Homo sapiens
atagtgtttacaaat

SEQ ID NO: 147438 - DNA, 15 bp, Homo sapiens
aatagtgtttacaaa

SEQ ID NO: 147439 - DNA, 15 bp, Homo sapiens
caatagtgtttacaa

SEQ ID NO: 147440 - DNA, 15 bp, Homo sapiens
acaatagtgtttaca

SEQ ID NO: 147441 - DNA, 15 bp, Homo sapiens
cacaatagtgtttac

SEQ ID NO: 147442 - DNA, 15 bp, Homo sapiens
gcacaatagtgttta

SEQ ID NO: 147443 - DNA, 15 bp, Homo sapiens
tgcacaatagtgttt

SEQ ID NO: 147444 - DNA, 15 bp, Homo sapiens
ttgcacaatagtgtt

SEQ ID NO: 147445 - DNA, 15 bp, Homo sapiens
tttgcacaatagtgt

SEQ ID NO: 147446 - DNA, 15 bp, Homo sapiens
ttttgcacaatagtg

SEQ ID NO: 147447 - DNA, 15 bp, Homo sapiens
attttgcacaatagt

SEQ ID NO: 147448 - DNA, 15 bp, Homo sapiens
tattttgcacaatag

SEQ ID NO: 147449 - DNA, 15 bp, Homo sapiens
ttattttgcacaata

SEQ ID NO: 147450 - DNA, 15 bp, Homo sapiens
cttattttgcacaat

SEQ ID NO: 147451 - DNA, 15 bp, Homo sapiens
acttattttgcacaa

SEQ ID NO: 147452 - DNA, 15 bp, Homo sapiens
aacttattttgcaca

SEQ ID NO: 147453 - DNA, 15 bp, Homo sapiens
gaacttattttgcac

SEQ ID NO: 147454 - DNA, 15 bp, Homo sapiens
tgaacttattttgca

SEQ ID NO: 147455 - DNA, 15 bp, Homo sapiens
ttgaacttattttgc

SEQ ID NO: 147456 - DNA, 15 bp, Homo sapiens
attgaacttattttg

SEQ ID NO: 147457 - DNA, 15 bp, Homo sapiens
tattgaacttatttt

SEQ ID NO: 147458 - DNA, 15 bp, Homo sapiens
ttattgaacttattt

SEQ ID NO: 147459 - DNA, 15 bp, Homo sapiens
cttattgaacttatt

SEQ ID NO: 147460 - DNA, 15 bp, Homo sapiens
ccttattgaacttat

SEQ ID NO: 147461 - DNA, 15 bp, Homo sapiens
tccttattgaactta

SEQ ID NO: 147462 - DNA, 15 bp, Homo sapiens
ttccttattgaactt

SEQ ID NO: 147463 - DNA, 15 bp, Homo sapiens
attccttattgaact

SEQ ID NO: 147464 - DNA, 15 bp, Homo sapiens
cattccttattgaac

SEQ ID NO: 147465 - DNA, 15 bp, Homo sapiens
tcattccttattgaa

SEQ ID NO: 147466 - DNA, 15 bp, Homo sapiens
ttcattccttattga

SEQ ID NO: 147467 - DNA, 15 bp, Homo sapiens
tttcattccttattg

SEQ ID NO: 147468 - DNA, 15 bp, Homo sapiens
ttttcattccttatt

SEQ ID NO: 147469 - DNA, 15 bp, Homo sapiens
tttttcattccttat

SEQ ID NO: 147470 - DNA, 15 bp, Homo sapiens
ttttttcattcctta

SEQ ID NO: 147471 - DNA, 15 bp, Homo sapiens
attttttcattcctt

SEQ ID NO: 147472 - DNA, 15 bp, Homo sapiens
gattttttcattcct

SEQ ID NO: 147473 - DNA, 15 bp, Homo sapiens
ggattttttcattcc

SEQ ID NO: 147474 - DNA, 15 bp, Homo sapiens
gggattttttcattc

SEQ ID NO: 147475 - DNA, 15 bp, Homo sapiens
ggggattttttcatt

SEQ ID NO: 147476 - DNA, 15 bp, Homo sapiens
gggggattttttcat

SEQ ID NO: 147477 - DNA, 15 bp, Homo sapiens
ggggggattttttca

SEQ ID NO: 147478 - DNA, 15 bp, Homo sapiens
gggggggattttttc

SEQ ID NO: 147479 - DNA, 15 bp, Homo sapiens
tgggggggatttttt

SEQ ID NO: 147480 - DNA, 15 bp, Homo sapiens
gtgggggggattttt

SEQ ID NO: 147481 - DNA, 15 bp, Homo sapiens
ggtgggggggatttt

SEQ ID NO: 147482 - DNA, 15 bp, Homo sapiens
gggtgggggggattt

SEQ ID NO: 147483 - DNA, 15 bp, Homo sapiens
tgggtgggggggatt

SEQ ID NO: 147484 - DNA, 15 bp, Homo sapiens
gtgggtgggggggat

SEQ ID NO: 147485 - DNA, 15 bp, Homo sapiens
tgtgggtggggggga

SEQ ID NO: 147486 - DNA, 15 bp, Homo sapiens
ttgtgggtggggggg

SEQ ID NO: 147487 - DNA, 15 bp, Homo sapiens
tttgtgggtgggggg

SEQ ID NO: 147488 - DNA, 15 bp, Homo sapiens
ttttgtgggtggggg

SEQ ID NO: 147489 - DNA, 15 bp, Homo sapiens
tttttgtgggtgggg

SEQ ID NO: 147490 - DNA, 15 bp, Homo sapiens
ttttttgtgggtggg

SEQ ID NO: 147491 - DNA, 15 bp, Homo sapiens
tttttttgtgggtgg

SEQ ID NO: 147492 - DNA, 15 bp, Homo sapiens
ttttttttgtgggtg

SEQ ID NO: 147493 - DNA, 15 bp, Homo sapiens
tttttttttgtgggt

SEQ ID NO: 147494 - DNA, 15 bp, Homo sapiens
atttttttttgtggg

SEQ ID NO: 147495 - DNA, 15 bp, Homo sapiens
gatttttttttgtgg

SEQ ID NO: 147496 - DNA, 15 bp, Homo sapiens
tgatttttttttgtg

SEQ ID NO: 147497 - DNA, 15 bp, Homo sapiens
ttgatttttttttgt

SEQ ID NO: 147498 - DNA, 15 bp, Homo sapiens
cttgatttttttttg

SEQ ID NO: 147499 - DNA, 15 bp, Homo sapiens
ccttgattttttttt

SEQ ID NO: 147500 - DNA, 15 bp, Homo sapiens
gccttgatttttttt

SEQ ID NO: 147501 - DNA, 15 bp, Homo sapiens
tgccttgattttttt

SEQ ID NO: 147502 - DNA, 15 bp, Homo sapiens
ctgccttgatttttt

SEQ ID NO: 147503 - DNA, 15 bp, Homo sapiens
gctgccttgattttt

SEQ ID NO: 147504 - DNA, 15 bp, Homo sapiens
agctgccttgatttt

SEQ ID NO: 147505 - DNA, 15 bp, Homo sapiens
tagctgccttgattt

SEQ ID NO: 147506 - DNA, 15 bp, Homo sapiens
ctagctgccttgatt

SEQ ID NO: 147507 - DNA, 15 bp, Homo sapiens
actagctgccttgat

SEQ ID NO: 147508 - DNA, 15 bp, Homo sapiens
tactagctgccttga

SEQ ID NO: 147509 - DNA, 15 bp, Homo sapiens
gtactagctgccttg

SEQ ID NO: 147510 - DNA, 15 bp, Homo sapiens
ggtactagctgcctt

SEQ ID NO: 147511 - DNA, 15 bp, Homo sapiens
aggtactagctgcct

SEQ ID NO: 147512 - DNA, 15 bp, Homo sapiens
taggtactagctgcc

SEQ ID NO: 147513 - DNA, 15 bp, Homo sapiens
gtaggtactagctgc

SEQ ID NO: 147514 - DNA, 15 bp, Homo sapiens
tgtaggtactagctg

SEQ ID NO: 147515 - DNA, 15 bp, Homo sapiens
ctgtaggtactagct

SEQ ID NO: 147516 - DNA, 15 bp, Homo sapiens
tctgtaggtactagc

SEQ ID NO: 147517 - DNA, 15 bp, Homo sapiens
ttctgtaggtactag

SEQ ID NO: 147518 - DNA, 15 bp, Homo sapiens
cttctgtaggtacta

SEQ ID NO: 147519 - DNA, 15 bp, Homo sapiens
ccttctgtaggtact

SEQ ID NO: 147520 - DNA, 15 bp, Homo sapiens
cccttctgtaggtac

SEQ ID NO: 147521 - DNA, 15 bp, Homo sapiens
tcccttctgtaggta

SEQ ID NO: 147522 - DNA, 15 bp, Homo sapiens
ctcccttctgtaggt

SEQ ID NO: 147523 - DNA, 15 bp, Homo sapiens
tctcccttctgtagg

SEQ ID NO: 147524 - DNA, 15 bp, Homo sapiens
ctctcccttctgtag

SEQ ID NO: 147525 - DNA, 15 bp, Homo sapiens
cctctcccttctgta

SEQ ID NO: 147526 - DNA, 15 bp, Homo sapiens
tcctctcccttctgt

SEQ ID NO: 147527 - DNA, 15 bp, Homo sapiens
ctcctctcccttctg

SEQ ID NO: 147528 - DNA, 15 bp, Homo sapiens
tctcctctcccttct

SEQ ID NO: 147529 - DNA, 15 bp, Homo sapiens
ctctcctctcccttc

SEQ ID NO: 147530 - DNA, 15 bp, Homo sapiens
cctctcctctccctt

SEQ ID NO: 147531 - DNA, 15 bp, Homo sapiens
tcctctcctctccct

SEQ ID NO: 147532 - DNA, 15 bp, Homo sapiens
atcctctcctctccc

SEQ ID NO: 147533 - DNA, 15 bp, Homo sapiens
aatcctctcctctcc

SEQ ID NO: 147534 - DNA, 15 bp, Homo sapiens
aaatcctctcctctc

SEQ ID NO: 147535 - DNA, 15 bp, Homo sapiens
taaatcctctcctct

SEQ ID NO: 147536 - DNA, 15 bp, Homo sapiens
gtaaatcctctcctc

SEQ ID NO: 147537 - DNA, 15 bp, Homo sapiens
agtaaatcctctcct

SEQ ID NO: 147538 - DNA, 15 bp, Homo sapiens
tagtaaatcctctcc

SEQ ID NO: 147539 - DNA, 15 bp, Homo sapiens
atagtaaatcctctc

SEQ ID NO: 147540 - DNA, 15 bp, Homo sapiens
aatagtaaatcctct

SEQ ID NO: 147541 - DNA, 15 bp, Homo sapiens
aaatagtaaatcctc

SEQ ID NO: 147542 - DNA, 15 bp, Homo sapiens
aaaatagtaaatcct

SEQ ID NO: 147543 - DNA, 15 bp, Homo sapiens
taaaatagtaaatcc

SEQ ID NO: 147544 - DNA, 15 bp, Homo sapiens
ttaaaatagtaaatc

SEQ ID NO: 147545 - DNA, 15 bp, Homo sapiens
attaaaatagtaaat

SEQ ID NO: 147546 - DNA, 15 bp, Homo sapiens
aattaaaatagtaaa

SEQ ID NO: 147547 - DNA, 15 bp, Homo sapiens
aaattaaaatagtaa

SEQ ID NO: 147548 - DNA, 15 bp, Homo sapiens
caaattaaaatagta

SEQ ID NO: 147549 - DNA, 15 bp, Homo sapiens
acaaattaaaatagt

SEQ ID NO: 147550 - DNA, 15 bp, Homo sapiens
gacaaattaaaatag

SEQ ID NO: 147551 - DNA, 15 bp, Homo sapiens
ggacaaattaaaata

SEQ ID NO: 147552 - DNA, 15 bp, Homo sapiens
aggacaaattaaaat

SEQ ID NO: 147553 - DNA, 15 bp, Homo sapiens
aaggacaaattaaaa

SEQ ID NO: 147554 - DNA, 15 bp, Homo sapiens
aaaggacaaattaaa

SEQ ID NO: 147555 - DNA, 15 bp, Homo sapiens
gaaaggacaaattaa

SEQ ID NO: 147556 - DNA, 15 bp, Homo sapiens
tgaaaggacaaatta

SEQ ID NO: 147557 - DNA, 15 bp, Homo sapiens
ttgaaaggacaaatt

SEQ ID NO: 147558 - DNA, 15 bp, Homo sapiens
attgaaaggacaaat

SEQ ID NO: 147559 - DNA, 15 bp, Homo sapiens
tattgaaaggacaaa

SEQ ID NO: 147560 - DNA, 15 bp, Homo sapiens
ctattgaaaggacaa

SEQ ID NO: 147561 - DNA, 15 bp, Homo sapiens
cctattgaaaggaca

SEQ ID NO: 147562 - DNA, 15 bp, Homo sapiens
tcctattgaaaggac

SEQ ID NO: 147563 - DNA, 15 bp, Homo sapiens
atcctattgaaagga

SEQ ID NO: 147564 - DNA, 15 bp, Homo sapiens
aatcctattgaaagg

SEQ ID NO: 147565 - DNA, 15 bp, Homo sapiens
gaatcctattgaaag

SEQ ID NO: 147566 - DNA, 15 bp, Homo sapiens
agaatcctattgaaa

SEQ ID NO: 147567 - DNA, 15 bp, Homo sapiens
aagaatcctattgaa

SEQ ID NO: 147568 - DNA, 15 bp, Homo sapiens
gaagaatcctattga

SEQ ID NO: 147569 - DNA, 15 bp, Homo sapiens
agaagaatcctattg

SEQ ID NO: 147570 - DNA, 15 bp, Homo sapiens
gagaagaatcctatt

SEQ ID NO: 147571 - DNA, 15 bp, Homo sapiens
ggagaagaatcctat

SEQ ID NO: 147572 - DNA, 15 bp, Homo sapiens
aggagaagaatccta

SEQ ID NO: 147573 - DNA, 15 bp, Homo sapiens
caggagaagaatcct

SEQ ID NO: 147574 - DNA, 15 bp, Homo sapiens
gcaggagaagaatcc

SEQ ID NO: 147575 - DNA, 15 bp, Homo sapiens
agcaggagaagaatc

SEQ ID NO: 147576 - DNA, 15 bp, Homo sapiens
gagcaggagaagaat

SEQ ID NO: 147577 - DNA, 15 bp, Homo sapiens
ggagcaggagaagaa

SEQ ID NO: 147578 - DNA, 15 bp, Homo sapiens
tggagcaggagaaga

SEQ ID NO: 147579 - DNA, 15 bp, Homo sapiens
atggagcaggagaag

SEQ ID NO: 147580 - DNA, 15 bp, Homo sapiens
gatggagcaggagaa

SEQ ID NO: 147581 - DNA, 15 bp, Homo sapiens
ggatggagcaggaga

SEQ ID NO: 147582 - DNA, 15 bp, Homo sapiens
aggatggagcaggag

SEQ ID NO: 147583 - DNA, 15 bp, Homo sapiens
taggatggagcagga

SEQ ID NO: 147584 - DNA, 15 bp, Homo sapiens
gtaggatggagcagg

SEQ ID NO: 147585 - DNA, 15 bp, Homo sapiens
agtaggatggagcag

SEQ ID NO: 147586 - DNA, 15 bp, Homo sapiens
aagtaggatggagca

SEQ ID NO: 147587 - DNA, 15 bp, Homo sapiens
taagtaggatggagc

SEQ ID NO: 147588 - DNA, 15 bp, Homo sapiens
ataagtaggatggag

SEQ ID NO: 147589 - DNA, 15 bp, Homo sapiens
tataagtaggatgga

SEQ ID NO: 147590 - DNA, 15 bp, Homo sapiens
ttataagtaggatgg

SEQ ID NO: 147591 - DNA, 15 bp, Homo sapiens
attataagtaggatg

SEQ ID NO: 147592 - DNA, 15 bp, Homo sapiens
cattataagtaggat

SEQ ID NO: 147593 - DNA, 15 bp, Homo sapiens
acattataagtagga

SEQ ID NO: 147594 - DNA, 15 bp, Homo sapiens
gacattataagtagg

SEQ ID NO: 147595 - DNA, 15 bp, Homo sapiens
ggacattataagtag

SEQ ID NO: 147596 - DNA, 15 bp, Homo sapiens
aggacattataagta

SEQ ID NO: 147597 - DNA, 15 bp, Homo sapiens
caggacattataagt

SEQ ID NO: 147598 - DNA, 15 bp, Homo sapiens
ccaggacattataag

SEQ ID NO: 147599 - DNA, 15 bp, Homo sapiens
tccaggacattataa

SEQ ID NO: 147600 - DNA, 15 bp, Homo sapiens
atccaggacattata

SEQ ID NO: 147601 - DNA, 15 bp, Homo sapiens
aatccaggacattat

SEQ ID NO: 147602 - DNA, 15 bp, Homo sapiens
caatccaggacatta

SEQ ID NO: 147603 - DNA, 15 bp, Homo sapiens
gcaatccaggacatt

SEQ ID NO: 147604 - DNA, 15 bp, Homo sapiens
ggcaatccaggacat

SEQ ID NO: 147605 - DNA, 15 bp, Homo sapiens
tggcaatccaggaca

SEQ ID NO: 147606 - DNA, 15 bp, Homo sapiens
ttggcaatccaggac

SEQ ID NO: 147607 - DNA, 15 bp, Homo sapiens
gttggcaatccagga

SEQ ID NO: 147608 - DNA, 15 bp, Homo sapiens
agttggcaatccagg

SEQ ID NO: 147609 - DNA, 15 bp, Homo sapiens
aagttggcaatccag

SEQ ID NO: 147610 - DNA, 15 bp, Homo sapiens
aaagttggcaatcca

SEQ ID NO: 147611 - DNA, 15 bp, Homo sapiens
taaagttggcaatcc

SEQ ID NO: 147612 - DNA, 15 bp, Homo sapiens
ttaaagttggcaatc

SEQ ID NO: 147613 - DNA, 15 bp, Homo sapiens
tttaaagttggcaat

SEQ ID NO: 147614 - DNA, 15 bp, Homo sapiens
ttttaaagttggcaa

SEQ ID NO: 147615 - DNA, 15 bp, Homo sapiens
attttaaagttggca

SEQ ID NO: 147616 - DNA, 15 bp, Homo sapiens
tattttaaagttggc

SEQ ID NO: 147617 - DNA, 15 bp, Homo sapiens
gtattttaaagttgg

SEQ ID NO: 147618 - DNA, 15 bp, Homo sapiens
agtattttaaagttg

SEQ ID NO: 147619 - DNA, 15 bp, Homo sapiens
cagtattttaaagtt

SEQ ID NO: 147620 - DNA, 15 bp, Homo sapiens
tcagtattttaaagt

SEQ ID NO: 147621 - DNA, 15 bp, Homo sapiens
gtcagtattttaaag

SEQ ID NO: 147622 - DNA, 15 bp, Homo sapiens
tgtcagtattttaaa

SEQ ID NO: 147623 - DNA, 15 bp, Homo sapiens
ctgtcagtattttaa

SEQ ID NO: 147624 - DNA, 15 bp, Homo sapiens
cctgtcagtatttta

SEQ ID NO: 147625 - DNA, 15 bp, Homo sapiens
acctgtcagtatttt

SEQ ID NO: 147626 - DNA, 15 bp, Homo sapiens
tacctgtcagtattt

SEQ ID NO: 147627 - DNA, 15 bp, Homo sapiens
atacctgtcagtatt

SEQ ID NO: 147628 - DNA, 15 bp, Homo sapiens
aatacctgtcagtat

SEQ ID NO: 147629 - DNA, 15 bp, Homo sapiens
gaatacctgtcagta

SEQ ID NO: 147630 - DNA, 15 bp, Homo sapiens
tgaatacctgtcagt

SEQ ID NO: 147631 - DNA, 15 bp, Homo sapiens
ctgaatacctgtcag

SEQ ID NO: 147632 - DNA, 15 bp, Homo sapiens
tctgaatacctgtca

SEQ ID NO: 147633 - DNA, 15 bp, Homo sapiens
ctctgaatacctgtc

SEQ ID NO: 147634 - DNA, 15 bp, Homo sapiens
cctctgaatacctgt

SEQ ID NO: 147635 - DNA, 15 bp, Homo sapiens
tcctctgaatacctg

SEQ ID NO: 147636 - DNA, 15 bp, Homo sapiens
atcctctgaatacct

SEQ ID NO: 147637 - DNA, 15 bp, Homo sapiens
aatcctctgaatacc

SEQ ID NO: 147638 - DNA, 15 bp, Homo sapiens
gaatcctctgaatac

SEQ ID NO: 147639 - DNA, 15 bp, Homo sapiens
tgaatcctctgaata

SEQ ID NO: 147640 - DNA, 15 bp, Homo sapiens
ttgaatcctctgaat

SEQ ID NO: 147641 - DNA, 15 bp, Homo sapiens
tttgaatcctctgaa

SEQ ID NO: 147642 - DNA, 15 bp, Homo sapiens
atttgaatcctctga

SEQ ID NO: 147643 - DNA, 15 bp, Homo sapiens
tatttgaatcctctg

SEQ ID NO: 147644 - DNA, 15 bp, Homo sapiens
ttatttgaatcctct

SEQ ID NO: 147645 - DNA, 15 bp, Homo sapiens
tttatttgaatcctc

SEQ ID NO: 147646 - DNA, 15 bp, Homo sapiens
ttttatttgaatcct

SEQ ID NO: 147647 - DNA, 15 bp, Homo sapiens
tttttatttgaatcc

SEQ ID NO: 147648 - DNA, 15 bp, Homo sapiens
ttttttatttgaatc

SEQ ID NO: 147649 - DNA, 15 bp, Homo sapiens
cttttttatttgaat

SEQ ID NO: 147650 - DNA, 15 bp, Homo sapiens
acttttttatttgaa

SEQ ID NO: 147651 - DNA, 15 bp, Homo sapiens
tacttttttatttga

SEQ ID NO: 147652 - DNA, 15 bp, Homo sapiens
ttacttttttatttg

SEQ ID NO: 147653 - DNA, 15 bp, Homo sapiens
cttacttttttattt

SEQ ID NO: 147654 - DNA, 15 bp, Homo sapiens
tcttacttttttatt

SEQ ID NO: 147655 - DNA, 15 bp, Homo sapiens
ctcttacttttttat

SEQ ID NO: 147656 - DNA, 15 bp, Homo sapiens
cctcttactttttta

SEQ ID NO: 147657 - DNA, 15 bp, Homo sapiens
ccctcttactttttt

SEQ ID NO: 147658 - DNA, 15 bp, Homo sapiens
cccctcttacttttt

SEQ ID NO: 147659 - DNA, 15 bp, Homo sapiens
acccctcttactttt

SEQ ID NO: 147660 - DNA, 15 bp, Homo sapiens
aacccctcttacttt

SEQ ID NO: 147661 - DNA, 15 bp, Homo sapiens
caacccctcttactt

SEQ ID NO: 147662 - DNA, 15 bp, Homo sapiens
acaacccctcttact

SEQ ID NO: 147663 - DNA, 15 bp, Homo sapiens
aacaacccctcttac

SEQ ID NO: 147664 - DNA, 15 bp, Homo sapiens
taacaacccctctta

SEQ ID NO: 147665 - DNA, 15 bp, Homo sapiens
ttaacaacccctctt

SEQ ID NO: 147666 - DNA, 15 bp, Homo sapiens
tttaacaacccctct

SEQ ID NO: 147667 - DNA, 15 bp, Homo sapiens
ttttaacaacccctc

SEQ ID NO: 147668 - DNA, 15 bp, Homo sapiens
cttttaacaacccct

SEQ ID NO: 147669 - DNA, 15 bp, Homo sapiens
acttttaacaacccc

SEQ ID NO: 147670 - DNA, 15 bp, Homo sapiens
tacttttaacaaccc

SEQ ID NO: 147671 - DNA, 15 bp, Homo sapiens
ttacttttaacaacc

SEQ ID NO: 147672 - DNA, 15 bp, Homo sapiens
gttacttttaacaac

SEQ ID NO: 147673 - DNA, 15 bp, Homo sapiens
agttacttttaacaa

SEQ ID NO: 147674 - DNA, 15 bp, Homo sapiens
aagttacttttaaca

SEQ ID NO: 147675 - DNA, 15 bp, Homo sapiens
taagttacttttaac

SEQ ID NO: 147676 - DNA, 15 bp, Homo sapiens
ataagttacttttaa

SEQ ID NO: 147677 - DNA, 15 bp, Homo sapiens
tataagttactttta

SEQ ID NO: 147678 - DNA, 15 bp, Homo sapiens
atataagttactttt

SEQ ID NO: 147679 - DNA, 15 bp, Homo sapiens
gatataagttacttt

SEQ ID NO: 147680 - DNA, 15 bp, Homo sapiens
ggatataagttactt

SEQ ID NO: 147681 - DNA, 15 bp, Homo sapiens
tggatataagttact

SEQ ID NO: 147682 - DNA, 15 bp, Homo sapiens
atggatataagttac

SEQ ID NO: 147683 - DNA, 15 bp, Homo sapiens
aatggatataagtta

SEQ ID NO: 147684 - DNA, 15 bp, Homo sapiens
gaatggatataagtt

SEQ ID NO: 147685 - DNA, 15 bp, Homo sapiens
tgaatggatataagt

SEQ ID NO: 147686 - DNA, 15 bp, Homo sapiens
gtgaatggatataag

SEQ ID NO: 147687 - DNA, 15 bp, Homo sapiens
tgtgaatggatataa

SEQ ID NO: 147688 - DNA, 15 bp, Homo sapiens
ttgtgaatggatata

SEQ ID NO: 147689 - DNA, 15 bp, Homo sapiens
cttgtgaatggatat

SEQ ID NO: 147690 - DNA, 15 bp, Homo sapiens
acttgtgaatggata

SEQ ID NO: 147691 - DNA, 15 bp, Homo sapiens
aacttgtgaatggat

SEQ ID NO: 147692 - DNA, 15 bp, Homo sapiens
taacttgtgaatgga

SEQ ID NO: 147693 - DNA, 15 bp, Homo sapiens
ataacttgtgaatgg

SEQ ID NO: 147694 - DNA, 15 bp, Homo sapiens
gataacttgtgaatg

SEQ ID NO: 147695 - DNA, 15 bp, Homo sapiens
agataacttgtgaat

SEQ ID NO: 147696 - DNA, 15 bp, Homo sapiens
tagataacttgtgaa

SEQ ID NO: 147697 - DNA, 15 bp, Homo sapiens
ttagataacttgtga

SEQ ID NO: 147698 - DNA, 15 bp, Homo sapiens
gttagataacttgtg

SEQ ID NO: 147699 - DNA, 15 bp, Homo sapiens
tgttagataacttgt

SEQ ID NO: 147700 - DNA, 15 bp, Homo sapiens
gtgttagataacttg

SEQ ID NO: 147701 - DNA, 15 bp, Homo sapiens
agtgttagataactt

SEQ ID NO: 147702 - DNA, 15 bp, Homo sapiens
cagtgttagataact

SEQ ID NO: 147703 - DNA, 15 bp, Homo sapiens
ccagtgttagataac

SEQ ID NO: 147704 - DNA, 15 bp, Homo sapiens
gccagtgttagataa

SEQ ID NO: 147705 - DNA, 15 bp, Homo sapiens
agccagtgttagata

SEQ ID NO: 147706 - DNA, 15 bp, Homo sapiens
gagccagtgttagat

SEQ ID NO: 147707 - DNA, 15 bp, Homo sapiens
tgagccagtgttaga

SEQ ID NO: 147708 - DNA, 15 bp, Homo sapiens
gtgagccagtgttag

SEQ ID NO: 147709 - DNA, 15 bp, Homo sapiens
tgtgagccagtgtta

SEQ ID NO: 147710 - DNA, 15 bp, Homo sapiens
ctgtgagccagtgtt

SEQ ID NO: 147711 - DNA, 15 bp, Homo sapiens
gctgtgagccagtgt

SEQ ID NO: 147712 - DNA, 15 bp, Homo sapiens
ggctgtgagccagtg

SEQ ID NO: 147713 - DNA, 15 bp, Homo sapiens
aggctgtgagccagt

SEQ ID NO: 147714 - DNA, 15 bp, Homo sapiens
caggctgtgagccag

SEQ ID NO: 147715 - DNA, 15 bp, Homo sapiens
ccaggctgtgagcca

SEQ ID NO: 147716 - DNA, 15 bp, Homo sapiens
accaggctgtgagcc

SEQ ID NO: 147717 - DNA, 15 bp, Homo sapiens
taccaggctgtgagc

SEQ ID NO: 147718 - DNA, 15 bp, Homo sapiens
ttaccaggctgtgag

SEQ ID NO: 147719 - DNA, 15 bp, Homo sapiens
tttaccaggctgtga

SEQ ID NO: 147720 - DNA, 15 bp, Homo sapiens
ctttaccaggctgtg

SEQ ID NO: 147721 - DNA, 15 bp, Homo sapiens
tctttaccaggctgt

SEQ ID NO: 147722 - DNA, 15 bp, Homo sapiens
ttctttaccaggctg

SEQ ID NO: 147723 - DNA, 15 bp, Homo sapiens
attctttaccaggct

SEQ ID NO: 147724 - DNA, 15 bp, Homo sapiens
gattctttaccaggc

SEQ ID NO: 147725 - DNA, 15 bp, Homo sapiens
agattctttaccagg

SEQ ID NO: 147726 - DNA, 15 bp, Homo sapiens
gagattctttaccag

SEQ ID NO: 147727 - DNA, 15 bp, Homo sapiens
agagattctttacca

SEQ ID NO: 147728 - DNA, 15 bp, Homo sapiens
aagagattctttacc

SEQ ID NO: 147729 - DNA, 15 bp, Homo sapiens
gaagagattctttac

SEQ ID NO: 147730 - DNA, 15 bp, Homo sapiens
ggaagagattcttta

SEQ ID NO: 147731 - DNA, 15 bp, Homo sapiens
aggaagagattcttt

SEQ ID NO: 147732 - DNA, 15 bp, Homo sapiens
aaggaagagattctt

SEQ ID NO: 147733 - DNA, 15 bp, Homo sapiens
taaggaagagattct

SEQ ID NO: 147734 - DNA, 15 bp, Homo sapiens
ataaggaagagattc

SEQ ID NO: 147735 - DNA, 15 bp, Homo sapiens
cataaggaagagatt

SEQ ID NO: 147736 - DNA, 15 bp, Homo sapiens
ccataaggaagagat

SEQ ID NO: 147737 - DNA, 15 bp, Homo sapiens
tccataaggaagaga

SEQ ID NO: 147738 - DNA, 15 bp, Homo sapiens
ttccataaggaagag

SEQ ID NO: 147739 - DNA, 15 bp, Homo sapiens
cttccataaggaaga

SEQ ID NO: 147740 - DNA, 15 bp, Homo sapiens
tcttccataaggaag

SEQ ID NO: 147741 - DNA, 15 bp, Homo sapiens
atcttccataaggaa

SEQ ID NO: 147742 - DNA, 15 bp, Homo sapiens
aatcttccataagga

SEQ ID NO: 147743 - DNA, 15 bp, Homo sapiens
caatcttccataagg

SEQ ID NO: 147744 - DNA, 15 bp, Homo sapiens
tcaatcttccataag

SEQ ID NO: 147745 - DNA, 15 bp, Homo sapiens
ttcaatcttccataa

SEQ ID NO: 147746 - DNA, 15 bp, Homo sapiens
gttcaatcttccata

SEQ ID NO: 147747 - DNA, 15 bp, Homo sapiens
tgttcaatcttccat

SEQ ID NO: 147748 - DNA, 15 bp, Homo sapiens
ttgttcaatcttcca

SEQ ID NO: 147749 - DNA, 15 bp, Homo sapiens
attgttcaatcttcc

SEQ ID NO: 147750 - DNA, 15 bp, Homo sapiens
cattgttcaatcttc

SEQ ID NO: 147751 - DNA, 15 bp, Homo sapiens
tcattgttcaatctt

SEQ ID NO: 147752 - DNA, 15 bp, Homo sapiens
atcattgttcaatct

SEQ ID NO: 147753 - DNA, 15 bp, Homo sapiens
aatcattgttcaatc

SEQ ID NO: 147754 - DNA, 15 bp, Homo sapiens
aaatcattgttcaat

SEQ ID NO: 147755 - DNA, 15 bp, Homo sapiens
gaaatcattgttcaa

SEQ ID NO: 147756 - DNA, 15 bp, Homo sapiens
agaaatcattgttca

SEQ ID NO: 147757 - DNA, 15 bp, Homo sapiens
aagaaatcattgttc

SEQ ID NO: 147758 - DNA, 15 bp, Homo sapiens
aaagaaatcattgtt

SEQ ID NO: 147759 - DNA, 15 bp, Homo sapiens
caaagaaatcattgt

SEQ ID NO: 147760 - DNA, 15 bp, Homo sapiens
tcaaagaaatcattg

SEQ ID NO: 147761 - DNA, 15 bp, Homo sapiens
ctcaaagaaatcatt

SEQ ID NO: 147762 - DNA, 15 bp, Homo sapiens
cctcaaagaaatcat

SEQ ID NO: 147763 - DNA, 15 bp, Homo sapiens
acctcaaagaaatca

SEQ ID NO: 147764 - DNA, 15 bp, Homo sapiens
tacctcaaagaaatc

SEQ ID NO: 147765 - DNA, 15 bp, Homo sapiens
gtacctcaaagaaat

SEQ ID NO: 147766 - DNA, 15 bp, Homo sapiens
ggtacctcaaagaaa

SEQ ID NO: 147767 - DNA, 15 bp, Homo sapiens
tggtacctcaaagaa

SEQ ID NO: 147768 - DNA, 15 bp, Homo sapiens
ctggtacctcaaaga

SEQ ID NO: 147769 - DNA, 15 bp, Homo sapiens
tctggtacctcaaag

SEQ ID NO: 147770 - DNA, 15 bp, Homo sapiens
ttctggtacctcaaa

SEQ ID NO: 147771 - DNA, 15 bp, Homo sapiens
tttctggtacctcaa

SEQ ID NO: 147772 - DNA, 15 bp, Homo sapiens
ctttctggtacctca

SEQ ID NO: 147773 - DNA, 15 bp, Homo sapiens
actttctggtacctc

SEQ ID NO: 147774 - DNA, 15 bp, Homo sapiens
tactttctggtacct

SEQ ID NO: 147775 - DNA, 15 bp, Homo sapiens
ctactttctggtacc

SEQ ID NO: 147776 - DNA, 15 bp, Homo sapiens
tctactttctggtac

SEQ ID NO: 147777 - DNA, 15 bp, Homo sapiens
gtctactttctggta

SEQ ID NO: 147778 - DNA, 15 bp, Homo sapiens
agtctactttctggt

SEQ ID NO: 147779 - DNA, 15 bp, Homo sapiens
aagtctactttctgg

SEQ ID NO: 147780 - DNA, 15 bp, Homo sapiens
aaagtctactttctg

SEQ ID NO: 147781 - DNA, 15 bp, Homo sapiens
caaagtctactttct

SEQ ID NO: 147782 - DNA, 15 bp, Homo sapiens
gcaaagtctactttc

SEQ ID NO: 147783 - DNA, 15 bp, Homo sapiens
ggcaaagtctacttt

SEQ ID NO: 147784 - DNA, 15 bp, Homo sapiens
aggcaaagtctactt

SEQ ID NO: 147785 - DNA, 15 bp, Homo sapiens
gaggcaaagtctact

SEQ ID NO: 147786 - DNA, 15 bp, Homo sapiens
agaggcaaagtctac

SEQ ID NO: 147787 - DNA, 15 bp, Homo sapiens
cagaggcaaagtcta

SEQ ID NO: 147788 - DNA, 15 bp, Homo sapiens
gcagaggcaaagtct

SEQ ID NO: 147789 - DNA, 15 bp, Homo sapiens
tgcagaggcaaagtc

SEQ ID NO: 147790 - DNA, 15 bp, Homo sapiens
ctgcagaggcaaagt

SEQ ID NO: 147791 - DNA, 15 bp, Homo sapiens
tctgcagaggcaaag

SEQ ID NO: 147792 - DNA, 15 bp, Homo sapiens
ctctgcagaggcaaa

SEQ ID NO: 147793 - DNA, 15 bp, Homo sapiens
tctctgcagaggcaa

SEQ ID NO: 147794 - DNA, 15 bp, Homo sapiens
ctctctgcagaggca

SEQ ID NO: 147795 - DNA, 15 bp, Homo sapiens
cctctctgcagaggc

SEQ ID NO: 147796 - DNA, 15 bp, Homo sapiens
acctctctgcagagg

SEQ ID NO: 147797 - DNA, 15 bp, Homo sapiens
cacctctctgcagag

SEQ ID NO: 147798 - DNA, 15 bp, Homo sapiens
ccacctctctgcaga

SEQ ID NO: 147799 - DNA, 15 bp, Homo sapiens
cccacctctctgcag

SEQ ID NO: 147800 - DNA, 15 bp, Homo sapiens
acccacctctctgca

SEQ ID NO: 147801 - DNA, 15 bp, Homo sapiens
gacccacctctctgc

SEQ ID NO: 147802 - DNA, 15 bp, Homo sapiens
agacccacctctctg

SEQ ID NO: 147803 - DNA, 15 bp, Homo sapiens
aagacccacctctct

SEQ ID NO: 147804 - DNA, 15 bp, Homo sapiens
aaagacccacctctc

SEQ ID NO: 147805 - DNA, 15 bp, Homo sapiens
aaaagacccacctct

SEQ ID NO: 147806 - DNA, 15 bp, Homo sapiens
caaaagacccacctc

SEQ ID NO: 147807 - DNA, 15 bp, Homo sapiens
gcaaaagacccacct

SEQ ID NO: 147808 - DNA, 15 bp, Homo sapiens
agcaaaagacccacc

SEQ ID NO: 147809 - DNA, 15 bp, Homo sapiens
aagcaaaagacccac

SEQ ID NO: 147810 - DNA, 15 bp, Homo sapiens
caagcaaaagaccca

SEQ ID NO: 147811 - DNA, 15 bp, Homo sapiens
tcaagcaaaagaccc

SEQ ID NO: 147812 - DNA, 15 bp, Homo sapiens
ttcaagcaaaagacc

SEQ ID NO: 147813 - DNA, 15 bp, Homo sapiens
gttcaagcaaaagac

SEQ ID NO: 147814 - DNA, 15 bp, Homo sapiens
ggttcaagcaaaaga

SEQ ID NO: 147815 - DNA, 15 bp, Homo sapiens
aggttcaagcaaaag

SEQ ID NO: 147816 - DNA, 15 bp, Homo sapiens
caggttcaagcaaaa

SEQ ID NO: 147817 - DNA, 15 bp, Homo sapiens
ccaggttcaagcaaa

SEQ ID NO: 147818 - DNA, 15 bp, Homo sapiens
cccaggttcaagcaa

SEQ ID NO: 147819 - DNA, 15 bp, Homo sapiens
acccaggttcaagca

SEQ ID NO: 147820 - DNA, 15 bp, Homo sapiens
cacccaggttcaagc

SEQ ID NO: 147821 - DNA, 15 bp, Homo sapiens
acacccaggttcaag

SEQ ID NO: 147822 - DNA, 15 bp, Homo sapiens
aacacccaggttcaa

SEQ ID NO: 147823 - DNA, 15 bp, Homo sapiens
gaacacccaggttca

SEQ ID NO: 147824 - DNA, 15 bp, Homo sapiens
agaacacccaggttc

SEQ ID NO: 147825 - DNA, 15 bp, Homo sapiens
cagaacacccaggtt

SEQ ID NO: 147826 - DNA, 15 bp, Homo sapiens
ccagaacacccaggt

SEQ ID NO: 147827 - DNA, 15 bp, Homo sapiens
gccagaacacccagg

SEQ ID NO: 147828 - DNA, 15 bp, Homo sapiens
agccagaacacccag

SEQ ID NO: 147829 - DNA, 15 bp, Homo sapiens
aagccagaacaccca

SEQ ID NO: 147830 - DNA, 15 bp, Homo sapiens
taagccagaacaccc

SEQ ID NO: 147831 - DNA, 15 bp, Homo sapiens
ttaagccagaacacc

SEQ ID NO: 147832 - DNA, 15 bp, Homo sapiens
attaagccagaacac

SEQ ID NO: 147833 - DNA, 15 bp, Homo sapiens
cattaagccagaaca

SEQ ID NO: 147834 - DNA, 15 bp, Homo sapiens
gcattaagccagaac

SEQ ID NO: 147835 - DNA, 15 bp, Homo sapiens
agcattaagccagaa

SEQ ID NO: 147836 - DNA, 15 bp, Homo sapiens
cagcattaagccaga

SEQ ID NO: 147837 - DNA, 15 bp, Homo sapiens
ccagcattaagccag

SEQ ID NO: 147838 - DNA, 15 bp, Homo sapiens
gccagcattaagcca

SEQ ID NO: 147839 - DNA, 15 bp, Homo sapiens
agccagcattaagcc

SEQ ID NO: 147840 - DNA, 15 bp, Homo sapiens
aagccagcattaagc

SEQ ID NO: 147841 - DNA, 15 bp, Homo sapiens
aaagccagcattaag

SEQ ID NO: 147842 - DNA, 15 bp, Homo sapiens
gaaagccagcattaa

SEQ ID NO: 147843 - DNA, 15 bp, Homo sapiens
tgaaagccagcatta

SEQ ID NO: 147844 - DNA, 15 bp, Homo sapiens
ctgaaagccagcatt

SEQ ID NO: 147845 - DNA, 15 bp, Homo sapiens
cctgaaagccagcat

SEQ ID NO: 147846 - DNA, 15 bp, Homo sapiens
tcctgaaagccagca

SEQ ID NO: 147847 - DNA, 15 bp, Homo sapiens
ctcctgaaagccagc

SEQ ID NO: 147848 - DNA, 15 bp, Homo sapiens
cctcctgaaagccag

SEQ ID NO: 147849 - DNA, 15 bp, Homo sapiens
gcctcctgaaagcca

SEQ ID NO: 147850 - DNA, 15 bp, Homo sapiens
tgcctcctgaaagcc

SEQ ID NO: 147851 - DNA, 15 bp, Homo sapiens
ctgcctcctgaaagc

SEQ ID NO: 147852 - DNA, 15 bp, Homo sapiens
gctgcctcctgaaag

SEQ ID NO: 147853 - DNA, 15 bp, Homo sapiens
agctgcctcctgaaa

SEQ ID NO: 147854 - DNA, 15 bp, Homo sapiens
tagctgcctcctgaa

SEQ ID NO: 147855 - DNA, 15 bp, Homo sapiens
gtagctgcctcctga

SEQ ID NO: 147856 - DNA, 15 bp, Homo sapiens
ggtagctgcctcctg

SEQ ID NO: 147857 - DNA, 15 bp, Homo sapiens
aggtagctgcctcct

SEQ ID NO: 147858 - DNA, 15 bp, Homo sapiens
aaggtagctgcctcc

SEQ ID NO: 147859 - DNA, 15 bp, Homo sapiens
gaaggtagctgcctc

SEQ ID NO: 147860 - DNA, 15 bp, Homo sapiens
tgaaggtagctgcct

SEQ ID NO: 147861 - DNA, 15 bp, Homo sapiens
ttgaaggtagctgcc

SEQ ID NO: 147862 - DNA, 15 bp, Homo sapiens
attgaaggtagctgc

SEQ ID NO: 147863 - DNA, 15 bp, Homo sapiens
aattgaaggtagctg

SEQ ID NO: 147864 - DNA, 15 bp, Homo sapiens
aaattgaaggtagct

SEQ ID NO: 147865 - DNA, 15 bp, Homo sapiens
taaattgaaggtagc

SEQ ID NO: 147866 - DNA, 15 bp, Homo sapiens
ttaaattgaaggtag

SEQ ID NO: 147867 - DNA, 15 bp, Homo sapiens
tttaaattgaaggta

SEQ ID NO: 147868 - DNA, 15 bp, Homo sapiens
atttaaattgaaggt

SEQ ID NO: 147869 - DNA, 15 bp, Homo sapiens
aatttaaattgaagg

SEQ ID NO: 147870 - DNA, 15 bp, Homo sapiens
taatttaaattgaag

SEQ ID NO: 147871 - DNA, 15 bp, Homo sapiens
ttaatttaaattgaa

SEQ ID NO: 147872 - DNA, 15 bp, Homo sapiens
tttaatttaaattga

SEQ ID NO: 147873 - DNA, 15 bp, Homo sapiens
ttttaatttaaattg

SEQ ID NO: 147874 - DNA, 15 bp, Homo sapiens
tttttaatttaaatt

SEQ ID NO: 147875 - DNA, 15 bp, Homo sapiens
ttttttaatttaaat

SEQ ID NO: 147876 - DNA, 15 bp, Homo sapiens
tttttttaatttaaa

SEQ ID NO: 147877 - DNA, 15 bp, Homo sapiens
gtttttttaatttaa

SEQ ID NO: 147878 - DNA, 15 bp, Homo sapiens
tgtttttttaattta

SEQ ID NO: 147879 - DNA, 15 bp, Homo sapiens
ttgtttttttaattt

SEQ ID NO: 147880 - DNA, 15 bp, Homo sapiens
tttgtttttttaatt

SEQ ID NO: 147881 - DNA, 15 bp, Homo sapiens
ttttgtttttttaat

SEQ ID NO: 147882 - DNA, 15 bp, Homo sapiens
tttttgtttttttaa

SEQ ID NO: 147883 - DNA, 15 bp, Homo sapiens
ttttttgttttttta

SEQ ID NO: 147884 - DNA, 15 bp, Homo sapiens
tttttttgttttttt

SEQ ID NO: 147885 - DNA, 15 bp, Homo sapiens
ttttttttgtttttt

SEQ ID NO: 147886 - DNA, 15 bp, Homo sapiens
tttttttttgttttt

SEQ ID NO: 147887 - DNA, 15 bp, Homo sapiens
gtttttttttgtttt

SEQ ID NO: 147888 - DNA, 15 bp, Homo sapiens
agtttttttttgttt

SEQ ID NO: 147889 - DNA, 15 bp, Homo sapiens
tagtttttttttgtt

SEQ ID NO: 147890 - DNA, 15 bp, Homo sapiens
atagtttttttttgt

SEQ ID NO: 147891 - DNA, 15 bp, Homo sapiens
tatagtttttttttg

SEQ ID NO: 147892 - DNA, 15 bp, Homo sapiens
gtatagttttttttt

SEQ ID NO: 147893 - DNA, 15 bp, Homo sapiens
ggtatagtttttttt

SEQ ID NO: 147894 - DNA, 15 bp, Homo sapiens
tggtatagttttttt

SEQ ID NO: 147895 - DNA, 15 bp, Homo sapiens
ttggtatagtttttt

SEQ ID NO: 147896 - DNA, 15 bp, Homo sapiens
gttggtatagttttt

SEQ ID NO: 147897 - DNA, 15 bp, Homo sapiens
ggttggtatagtttt

SEQ ID NO: 147898 - DNA, 15 bp, Homo sapiens
cggttggtatagttt

SEQ ID NO: 147899 - DNA, 15 bp, Homo sapiens
tcggttggtatagtt

SEQ ID NO: 147900 - DNA, 15 bp, Homo sapiens
ttcggttggtatagt

SEQ ID NO: 147901 - DNA, 15 bp, Homo sapiens
gttcggttggtatag

SEQ ID NO: 147902 - DNA, 15 bp, Homo sapiens
cgttcggttggtata

SEQ ID NO: 147903 - DNA, 15 bp, Homo sapiens
gcgttcggttggtat

SEQ ID NO: 147904 - DNA, 15 bp, Homo sapiens
agcgttcggttggta

SEQ ID NO: 147905 - DNA, 15 bp, Homo sapiens
aagcgttcggttggt

SEQ ID NO: 147906 - DNA, 15 bp, Homo sapiens
caagcgttcggttgg

SEQ ID NO: 147907 - DNA, 15 bp, Homo sapiens
gcaagcgttcggttg

SEQ ID NO: 147908 - DNA, 15 bp, Homo sapiens
agcaagcgttcggtt

SEQ ID NO: 147909 - DNA, 15 bp, Homo sapiens
aagcaagcgttcggt

SEQ ID NO: 147910 - DNA, 15 bp, Homo sapiens
taagcaagcgttcgg

SEQ ID NO: 147911 - DNA, 15 bp, Homo sapiens
ttaagcaagcgttcg

SEQ ID NO: 147912 - DNA, 15 bp, Homo sapiens
tttaagcaagcgttc

SEQ ID NO: 147913 - DNA, 15 bp, Homo sapiens
gtttaagcaagcgtt

SEQ ID NO: 147914 - DNA, 15 bp, Homo sapiens
tgtttaagcaagcgt

SEQ ID NO: 147915 - DNA, 15 bp, Homo sapiens
gtgtttaagcaagcg

SEQ ID NO: 147916 - DNA, 15 bp, Homo sapiens
tgtgtttaagcaagc

SEQ ID NO: 147917 - DNA, 15 bp, Homo sapiens
ctgtgtttaagcaag

SEQ ID NO: 147918 - DNA, 15 bp, Homo sapiens
tctgtgtttaagcaa

SEQ ID NO: 147919 - DNA, 15 bp, Homo sapiens
gtctgtgtttaagca

SEQ ID NO: 147920 - DNA, 15 bp, Homo sapiens
tgtctgtgtttaagc

SEQ ID NO: 147921 - DNA, 15 bp, Homo sapiens
gtgtctgtgtttaag

SEQ ID NO: 147922 - DNA, 15 bp, Homo sapiens
tgtgtctgtgtttaa

SEQ ID NO: 147923 - DNA, 15 bp, Homo sapiens
gtgtgtctgtgttta

SEQ ID NO: 147924 - DNA, 15 bp, Homo sapiens
tgtgtgtctgtgttt

SEQ ID NO: 147925 - DNA, 15 bp, Homo sapiens
gtgtgtgtctgtgtt

SEQ ID NO: 147926 - DNA, 15 bp, Homo sapiens
tgtgtgtgtctgtgt

SEQ ID NO: 147927 - DNA, 15 bp, Homo sapiens
gtgtgtgtgtctgtg

SEQ ID NO: 147928 - DNA, 15 bp, Homo sapiens
tgtgtgtgtgtctgt

SEQ ID NO: 147929 - DNA, 15 bp, Homo sapiens
gtgtgtgtgtgtctg

SEQ ID NO: 147930 - DNA, 15 bp, Homo sapiens
tgtgtgtgtgtgtct

SEQ ID NO: 147931 - DNA, 15 bp, Homo sapiens
ttgtgtgtgtgtgtc

SEQ ID NO: 147932 - DNA, 15 bp, Homo sapiens
tttgtgtgtgtgtgt

SEQ ID NO: 147933 - DNA, 15 bp, Homo sapiens
ttttgtgtgtgtgtg

SEQ ID NO: 147934 - DNA, 15 bp, Homo sapiens
attttgtgtgtgtgt

SEQ ID NO: 147935 - DNA, 15 bp, Homo sapiens
gattttgtgtgtgtg

SEQ ID NO: 147936 - DNA, 15 bp, Homo sapiens
tgattttgtgtgtgt

SEQ ID NO: 147937 - DNA, 15 bp, Homo sapiens
ctgattttgtgtgtg

SEQ ID NO: 147938 - DNA, 15 bp, Homo sapiens
cctgattttgtgtgt

SEQ ID NO: 147939 - DNA, 15 bp, Homo sapiens
tcctgattttgtgtg

SEQ ID NO: 147940 - DNA, 15 bp, Homo sapiens
ctcctgattttgtgt

SEQ ID NO: 147941 - DNA, 15 bp, Homo sapiens
cctcctgattttgtg

SEQ ID NO: 147942 - DNA, 15 bp, Homo sapiens
ccctcctgattttgt

SEQ ID NO: 147943 - DNA, 15 bp, Homo sapiens
tccctcctgattttg

SEQ ID NO: 147944 - DNA, 15 bp, Homo sapiens
gtccctcctgatttt

SEQ ID NO: 147945 - DNA, 15 bp, Homo sapiens
agtccctcctgattt

SEQ ID NO: 147946 - DNA, 15 bp, Homo sapiens
aagtccctcctgatt

SEQ ID NO: 147947 - DNA, 15 bp, Homo sapiens
gaagtccctcctgat

SEQ ID NO: 147948 - DNA, 15 bp, Homo sapiens
tgaagtccctcctga

SEQ ID NO: 147949 - DNA, 15 bp, Homo sapiens
atgaagtccctcctg

SEQ ID NO: 147950 - DNA, 15 bp, Homo sapiens
tatgaagtccctcct

SEQ ID NO: 147951 - DNA, 15 bp, Homo sapiens
gtatgaagtccctcc

SEQ ID NO: 147952 - DNA, 15 bp, Homo sapiens
tgtatgaagtccctc

SEQ ID NO: 147953 - DNA, 15 bp, Homo sapiens
ttgtatgaagtccct

SEQ ID NO: 147954 - DNA, 15 bp, Homo sapiens
tttgtatgaagtccc

SEQ ID NO: 147955 - DNA, 15 bp, Homo sapiens
ttttgtatgaagtcc

SEQ ID NO: 147956 - DNA, 15 bp, Homo sapiens
tttttgtatgaagtc

SEQ ID NO: 147957 - DNA, 15 bp, Homo sapiens
ttttttgtatgaagt

SEQ ID NO: 147958 - DNA, 15 bp, Homo sapiens
tttttttgtatgaag

SEQ ID NO: 147959 - DNA, 15 bp, Homo sapiens
atttttttgtatgaa

SEQ ID NO: 147960 - DNA, 15 bp, Homo sapiens
aatttttttgtatga

SEQ ID NO: 147961 - DNA, 15 bp, Homo sapiens
gaatttttttgtatg

SEQ ID NO: 147962 - DNA, 15 bp, Homo sapiens
tgaatttttttgtat

SEQ ID NO: 147963 - DNA, 15 bp, Homo sapiens
ttgaatttttttgta

SEQ ID NO: 147964 - DNA, 15 bp, Homo sapiens
cttgaatttttttgt

SEQ ID NO: 147965 - DNA, 15 bp, Homo sapiens
acttgaatttttttg

SEQ ID NO: 147966 - DNA, 15 bp, Homo sapiens
gacttgaattttttt

SEQ ID NO: 147967 - DNA, 15 bp, Homo sapiens
cgacttgaatttttt

SEQ ID NO: 147968 - DNA, 15 bp, Homo sapiens
ccgacttgaattttt

SEQ ID NO: 147969 - DNA, 15 bp, Homo sapiens
gccgacttgaatttt

SEQ ID NO: 147970 - DNA, 15 bp, Homo sapiens
tgccgacttgaattt

SEQ ID NO: 147971 - DNA, 15 bp, Homo sapiens
ttgccgacttgaatt

SEQ ID NO: 147972 - DNA, 15 bp, Homo sapiens
attgccgacttgaat

SEQ ID NO: 147973 - DNA, 15 bp, Homo sapiens
cattgccgacttgaa

SEQ ID NO: 147974 - DNA, 15 bp, Homo sapiens
ccattgccgacttga

SEQ ID NO: 147975 - DNA, 15 bp, Homo sapiens
cccattgccgacttg

SEQ ID NO: 147976 - DNA, 15 bp, Homo sapiens
gcccattgccgactt

SEQ ID NO: 147977 - DNA, 15 bp, Homo sapiens
tgcccattgccgact

SEQ ID NO: 147978 - DNA, 15 bp, Homo sapiens
atgcccattgccgac

SEQ ID NO: 147979 - DNA, 15 bp, Homo sapiens
aatgcccattgccga

SEQ ID NO: 147980 - DNA, 15 bp, Homo sapiens
aaatgcccattgccg

SEQ ID NO: 147981 - DNA, 15 bp, Homo sapiens
gaaatgcccattgcc

SEQ ID NO: 147982 - DNA, 15 bp, Homo sapiens
ggaaatgcccattgc

SEQ ID NO: 147983 - DNA, 15 bp, Homo sapiens
tggaaatgcccattg

SEQ ID NO: 147984 - DNA, 15 bp, Homo sapiens
ttggaaatgcccatt

SEQ ID NO: 147985 - DNA, 15 bp, Homo sapiens
tttggaaatgcccat

SEQ ID NO: 147986 - DNA, 15 bp, Homo sapiens
ttttggaaatgccca

SEQ ID NO: 147987 - DNA, 15 bp, Homo sapiens
cttttggaaatgccc

SEQ ID NO: 147988 - DNA, 15 bp, Homo sapiens
ccttttggaaatgcc

SEQ ID NO: 147989 - DNA, 15 bp, Homo sapiens
accttttggaaatgc

SEQ ID NO: 147990 - DNA, 15 bp, Homo sapiens
caccttttggaaatg

SEQ ID NO: 147991 - DNA, 15 bp, Homo sapiens
tcaccttttggaaat

SEQ ID NO: 147992 - DNA, 15 bp, Homo sapiens
gtcaccttttggaaa

SEQ ID NO: 147993 - DNA, 15 bp, Homo sapiens
cgtcaccttttggaa

SEQ ID NO: 147994 - DNA, 15 bp, Homo sapiens
tcgtcaccttttgga

SEQ ID NO: 147995 - DNA, 15 bp, Homo sapiens
ctcgtcaccttttgg

SEQ ID NO: 147996 - DNA, 15 bp, Homo sapiens
actcgtcaccttttg

SEQ ID NO: 147997 - DNA, 15 bp, Homo sapiens
aactcgtcacctttt

SEQ ID NO: 147998 - DNA, 15 bp, Homo sapiens
aaactcgtcaccttt

SEQ ID NO: 147999 - DNA, 15 bp, Homo sapiens
aaaactcgtcacctt

SEQ ID NO: 148000 - DNA, 15 bp, Homo sapiens
aaaaactcgtcacct

SEQ ID NO: 148001 - DNA, 15 bp, Homo sapiens
aaaaaactcgtcacc

SEQ ID NO: 148002 - DNA, 15 bp, Homo sapiens
taaaaaactcgtcac

SEQ ID NO: 148003 - DNA, 15 bp, Homo sapiens
ttaaaaaactcgtca

SEQ ID NO: 148004 - DNA, 15 bp, Homo sapiens
tttaaaaaactcgtc

SEQ ID NO: 148005 - DNA, 15 bp, Homo sapiens
atttaaaaaactcgt

SEQ ID NO: 148006 - DNA, 15 bp, Homo sapiens
tatttaaaaaactcg

SEQ ID NO: 148007 - DNA, 15 bp, Homo sapiens
ttatttaaaaaactc

SEQ ID NO: 148008 - DNA, 15 bp, Homo sapiens
tttatttaaaaaact

SEQ ID NO: 148009 - DNA, 15 bp, Homo sapiens
ttttatttaaaaaac

SEQ ID NO: 148010 - DNA, 15 bp, Homo sapiens
tttttatttaaaaaa

SEQ ID NO: 148011 - DNA, 15 bp, Homo sapiens
atttttatttaaaaa

SEQ ID NO: 148012 - DNA, 15 bp, Homo sapiens
aatttttatttaaaa

SEQ ID NO: 148013 - DNA, 15 bp, Homo sapiens
aaatttttatttaaa

SEQ ID NO: 148014 - DNA, 15 bp, Homo sapiens
aaaatttttatttaa

SEQ ID NO: 148015 - DNA, 15 bp, Homo sapiens
caaaatttttattta

SEQ ID NO: 148016 - DNA, 15 bp, Homo sapiens
acaaaatttttattt

SEQ ID NO: 148017 - DNA, 15 bp, Homo sapiens
cacaaaatttttatt

SEQ ID NO: 148018 - DNA, 15 bp, Homo sapiens
tcacaaaatttttat

SEQ ID NO: 148019 - DNA, 15 bp, Homo sapiens
ttcacaaaattttta

SEQ ID NO: 148020 - DNA, 15 bp, Homo sapiens
tttcacaaaattttt

SEQ ID NO: 148021 - DNA, 15 bp, Homo sapiens
ttttcacaaaatttt

SEQ ID NO: 148022 - DNA, 15 bp, Homo sapiens
tttttcacaaaattt

SEQ ID NO: 148023 - DNA, 15 bp, Homo sapiens
atttttcacaaaatt

SEQ ID NO: 148024 - DNA, 15 bp, Homo sapiens
tatttttcacaaaat

SEQ ID NO: 148025 - DNA, 15 bp, Homo sapiens
ttatttttcacaaaa

SEQ ID NO: 148026 - DNA, 15 bp, Homo sapiens
tttatttttcacaaa

SEQ ID NO: 148027 - DNA, 15 bp, Homo sapiens
ttttatttttcacaa

SEQ ID NO: 148028 - DNA, 15 bp, Homo sapiens
attttatttttcaca

SEQ ID NO: 148029 - DNA, 15 bp, Homo sapiens
gattttatttttcac

SEQ ID NO: 148030 - DNA, 15 bp, Homo sapiens
ggattttatttttca

SEQ ID NO: 148031 - DNA, 15 bp, Homo sapiens
tggattttatttttc

SEQ ID NO: 148032 - DNA, 15 bp, Homo sapiens
ttggattttattttt

SEQ ID NO: 148033 - DNA, 15 bp, Homo sapiens
tttggattttatttt

SEQ ID NO: 148034 - DNA, 15 bp, Homo sapiens
ttttggattttattt

SEQ ID NO: 148035 - DNA, 15 bp, Homo sapiens
attttggattttatt

SEQ ID NO: 148036 - DNA, 15 bp, Homo sapiens
gattttggattttat

SEQ ID NO: 148037 - DNA, 15 bp, Homo sapiens
cgattttggatttta

SEQ ID NO: 148038 - DNA, 15 bp, Homo sapiens
ccgattttggatttt

SEQ ID NO: 148039 - DNA, 15 bp, Homo sapiens
gccgattttggattt

SEQ ID NO: 148040 - DNA, 15 bp, Homo sapiens
tgccgattttggatt

SEQ ID NO: 148041 - DNA, 15 bp, Homo sapiens
ttgccgattttggat

SEQ ID NO: 148042 - DNA, 15 bp, Homo sapiens
tttgccgattttgga

SEQ ID NO: 148043 - DNA, 15 bp, Homo sapiens
ctttgccgattttgg

SEQ ID NO: 148044 - DNA, 15 bp, Homo sapiens
gctttgccgattttg

SEQ ID NO: 148045 - DNA, 15 bp, Homo sapiens
tgctttgccgatttt

SEQ ID NO: 148046 - DNA, 15 bp, Homo sapiens
gtgctttgccgattt

SEQ ID NO: 148047 - DNA, 15 bp, Homo sapiens
tgtgctttgccgatt

SEQ ID NO: 148048 - DNA, 15 bp, Homo sapiens
ttgtgctttgccgat

SEQ ID NO: 148049 - DNA, 15 bp, Homo sapiens
tttgtgctttgccga

SEQ ID NO: 148050 - DNA, 15 bp, Homo sapiens
ttttgtgctttgccg

SEQ ID NO: 148051 - DNA, 15 bp, Homo sapiens
gttttgtgctttgcc

SEQ ID NO: 148052 - DNA, 15 bp, Homo sapiens
tgttttgtgctttgc

SEQ ID NO: 148053 - DNA, 15 bp, Homo sapiens
ctgttttgtgctttg

SEQ ID NO: 148054 - DNA, 15 bp, Homo sapiens
gctgttttgtgcttt

SEQ ID NO: 148055 - DNA, 15 bp, Homo sapiens
tgctgttttgtgctt

SEQ ID NO: 148056 - DNA, 15 bp, Homo sapiens
ttgctgttttgtgct

SEQ ID NO: 148057 - DNA, 15 bp, Homo sapiens
tttgctgttttgtgc

SEQ ID NO: 148058 - DNA, 15 bp, Homo sapiens
ttttgctgttttgtg

SEQ ID NO: 148059 - DNA, 15 bp, Homo sapiens
cttttgctgttttgt

SEQ ID NO: 148060 - DNA, 15 bp, Homo sapiens
tcttttgctgttttg

SEQ ID NO: 148061 - DNA, 15 bp, Homo sapiens
ttcttttgctgtttt

SEQ ID NO: 148062 - DNA, 15 bp, Homo sapiens
gttcttttgctgttt

SEQ ID NO: 148063 - DNA, 15 bp, Homo sapiens
tgttcttttgctgtt

SEQ ID NO: 148064 - DNA, 15 bp, Homo sapiens
atgttcttttgctgt

SEQ ID NO: 148065 - DNA, 15 bp, Homo sapiens
catgttcttttgctg

SEQ ID NO: 148066 - DNA, 15 bp, Homo sapiens
tcatgttcttttgct

SEQ ID NO: 148067 - DNA, 15 bp, Homo sapiens
ttcatgttcttttgc

SEQ ID NO: 148068 - DNA, 15 bp, Homo sapiens
tttcatgttcttttg

SEQ ID NO: 148069 - DNA, 15 bp, Homo sapiens
atttcatgttctttt

SEQ ID NO: 148070 - DNA, 15 bp, Homo sapiens
catttcatgttcttt

SEQ ID NO: 148071 - DNA, 15 bp, Homo sapiens
gcatttcatgttctt

SEQ ID NO: 148072 - DNA, 15 bp, Homo sapiens
agcatttcatgttct

SEQ ID NO: 148073 - DNA, 15 bp, Homo sapiens
cagcatttcatgttc

SEQ ID NO: 148074 - DNA, 15 bp, Homo sapiens
gcagcatttcatgtt

SEQ ID NO: 148075 - DNA, 15 bp, Homo sapiens
agcagcatttcatgt

SEQ ID NO: 148076 - DNA, 15 bp, Homo sapiens
gagcagcatttcatg

SEQ ID NO: 148077 - DNA, 15 bp, Homo sapiens
ggagcagcatttcat

SEQ ID NO: 148078 - DNA, 15 bp, Homo sapiens
tggagcagcatttca

SEQ ID NO: 148079 - DNA, 15 bp, Homo sapiens
ttggagcagcatttc

SEQ ID NO: 148080 - DNA, 15 bp, Homo sapiens
cttggagcagcattt

SEQ ID NO: 148081 - DNA, 15 bp, Homo sapiens
gcttggagcagcatt

SEQ ID NO: 148082 - DNA, 15 bp, Homo sapiens
tgcttggagcagcat

SEQ ID NO: 148083 - DNA, 15 bp, Homo sapiens
ctgcttggagcagca

SEQ ID NO: 148084 - DNA, 15 bp, Homo sapiens
cctgcttggagcagc

SEQ ID NO: 148085 - DNA, 15 bp, Homo sapiens
tcctgcttggagcag

SEQ ID NO: 148086 - DNA, 15 bp, Homo sapiens
gtcctgcttggagca

SEQ ID NO: 148087 - DNA, 15 bp, Homo sapiens
ggtcctgcttggagc

SEQ ID NO: 148088 - DNA, 15 bp, Homo sapiens
gggtcctgcttggag

SEQ ID NO: 148089 - DNA, 15 bp, Homo sapiens
agggtcctgcttgga

SEQ ID NO: 148090 - DNA, 15 bp, Homo sapiens
cagggtcctgcttgg

SEQ ID NO: 148091 - DNA, 15 bp, Homo sapiens
ccagggtcctgcttg

SEQ ID NO: 148092 - DNA, 15 bp, Homo sapiens
tccagggtcctgctt

SEQ ID NO: 148093 - DNA, 15 bp, Homo sapiens
atccagggtcctgct

SEQ ID NO: 148094 - DNA, 15 bp, Homo sapiens
tatccagggtcctgc

SEQ ID NO: 148095 - DNA, 15 bp, Homo sapiens
ctatccagggtcctg

SEQ ID NO: 148096 - DNA, 15 bp, Homo sapiens
cctatccagggtcct

SEQ ID NO: 148097 - DNA, 15 bp, Homo sapiens
ccctatccagggtcc

SEQ ID NO: 148098 - DNA, 15 bp, Homo sapiens
tccctatccagggtc

SEQ ID NO: 148099 - DNA, 15 bp, Homo sapiens
gtccctatccagggt

SEQ ID NO: 148100 - DNA, 15 bp, Homo sapiens
ggtccctatccaggg

SEQ ID NO: 148101 - DNA, 15 bp, Homo sapiens
aggtccctatccagg

SEQ ID NO: 148102 - DNA, 15 bp, Homo sapiens
aaggtccctatccag

SEQ ID NO: 148103 - DNA, 15 bp, Homo sapiens
gaaggtccctatcca

SEQ ID NO: 148104 - DNA, 15 bp, Homo sapiens
tgaaggtccctatcc

SEQ ID NO: 148105 - DNA, 15 bp, Homo sapiens
atgaaggtccctatc

SEQ ID NO: 148106 - DNA, 15 bp, Homo sapiens
aatgaaggtccctat

SEQ ID NO: 148107 - DNA, 15 bp, Homo sapiens
caatgaaggtcccta

SEQ ID NO: 148108 - DNA, 15 bp, Homo sapiens
gcaatgaaggtccct

SEQ ID NO: 148109 - DNA, 15 bp, Homo sapiens
agcaatgaaggtccc

SEQ ID NO: 148110 - DNA, 15 bp, Homo sapiens
cagcaatgaaggtcc

SEQ ID NO: 148111 - DNA, 15 bp, Homo sapiens
tcagcaatgaaggtc

SEQ ID NO: 148112 - DNA, 15 bp, Homo sapiens
atcagcaatgaaggt

SEQ ID NO: 148113 - DNA, 15 bp, Homo sapiens
catcagcaatgaagg

SEQ ID NO: 148114 - DNA, 15 bp, Homo sapiens
ccatcagcaatgaag

SEQ ID NO: 148115 - DNA, 15 bp, Homo sapiens
cccatcagcaatgaa

SEQ ID NO: 148116 - DNA, 15 bp, Homo sapiens
tcccatcagcaatga

SEQ ID NO: 148117 - DNA, 15 bp, Homo sapiens
atcccatcagcaatg

SEQ ID NO: 148118 - DNA, 15 bp, Homo sapiens
catcccatcagcaat

SEQ ID NO: 148119 - DNA, 15 bp, Homo sapiens
tcatcccatcagcaa

SEQ ID NO: 148120 - DNA, 15 bp, Homo sapiens
gtcatcccatcagca

SEQ ID NO: 148121 - DNA, 15 bp, Homo sapiens
tgtcatcccatcagc

SEQ ID NO: 148122 - DNA, 15 bp, Homo sapiens
gtgtcatcccatcag

SEQ ID NO: 148123 - DNA, 15 bp, Homo sapiens
tgtgtcatcccatca

SEQ ID NO: 148124 - DNA, 15 bp, Homo sapiens
ttgtgtcatcccatc

SEQ ID NO: 148125 - DNA, 15 bp, Homo sapiens
tttgtgtcatcccat

SEQ ID NO: 148126 - DNA, 15 bp, Homo sapiens
atttgtgtcatccca

SEQ ID NO: 148127 - DNA, 15 bp, Homo sapiens
aatttgtgtcatccc

SEQ ID NO: 148128 - DNA, 15 bp, Homo sapiens
taatttgtgtcatcc

SEQ ID NO: 148129 - DNA, 15 bp, Homo sapiens
ttaatttgtgtcatc

SEQ ID NO: 148130 - DNA, 15 bp, Homo sapiens
gttaatttgtgtcat

SEQ ID NO: 148131 - DNA, 15 bp, Homo sapiens
agttaatttgtgtca

SEQ ID NO: 148132 - DNA, 15 bp, Homo sapiens
cagttaatttgtgtc

SEQ ID NO: 148133 - DNA, 15 bp, Homo sapiens
acagttaatttgtgt

SEQ ID NO: 148134 - DNA, 15 bp, Homo sapiens
tacagttaatttgtg

SEQ ID NO: 148135 - DNA, 15 bp, Homo sapiens
gtacagttaatttgt

SEQ ID NO: 148136 - DNA, 15 bp, Homo sapiens
cgtacagttaatttg

SEQ ID NO: 148137 - DNA, 15 bp, Homo sapiens
tcgtacagttaattt

SEQ ID NO: 148138 - DNA, 15 bp, Homo sapiens
ctcgtacagttaatt

SEQ ID NO: 148139 - DNA, 15 bp, Homo sapiens
tctcgtacagttaat

SEQ ID NO: 148140 - DNA, 15 bp, Homo sapiens
ttctcgtacagttaa

SEQ ID NO: 148141 - DNA, 15 bp, Homo sapiens
cttctcgtacagtta

SEQ ID NO: 148142 - DNA, 15 bp, Homo sapiens
acttctcgtacagtt

SEQ ID NO: 148143 - DNA, 15 bp, Homo sapiens
gacttctcgtacagt

SEQ ID NO: 148144 - DNA, 15 bp, Homo sapiens
agacttctcgtacag

SEQ ID NO: 148145 - DNA, 15 bp, Homo sapiens
cagacttctcgtaca

SEQ ID NO: 148146 - DNA, 15 bp, Homo sapiens
ccagacttctcgtac

SEQ ID NO: 148147 - DNA, 15 bp, Homo sapiens
cccagacttctcgta

SEQ ID NO: 148148 - DNA, 15 bp, Homo sapiens
tcccagacttctcgt

SEQ ID NO: 148149 - DNA, 15 bp, Homo sapiens
ctcccagacttctcg

SEQ ID NO: 148150 - DNA, 15 bp, Homo sapiens
tctcccagacttctc

SEQ ID NO: 148151 - DNA, 15 bp, Homo sapiens
gtctcccagacttct

SEQ ID NO: 148152 - DNA, 15 bp, Homo sapiens
cgtctcccagacttc

SEQ ID NO: 148153 - DNA, 15 bp, Homo sapiens
gcgtctcccagactt

SEQ ID NO: 148154 - DNA, 15 bp, Homo sapiens
agcgtctcccagact

SEQ ID NO: 148155 - DNA, 15 bp, Homo sapiens
cagcgtctcccagac

SEQ ID NO: 148156 - DNA, 15 bp, Homo sapiens
ccagcgtctcccaga

SEQ ID NO: 148157 - DNA, 15 bp, Homo sapiens
tccagcgtctcccag

SEQ ID NO: 148158 - DNA, 15 bp, Homo sapiens
ttccagcgtctccca

SEQ ID NO: 148159 - DNA, 15 bp, Homo sapiens
gttccagcgtctccc

SEQ ID NO: 148160 - DNA, 15 bp, Homo sapiens
ggttccagcgtctcc

SEQ ID NO: 148161 - DNA, 15 bp, Homo sapiens
cggttccagcgtctc

SEQ ID NO: 148162 - DNA, 15 bp, Homo sapiens
tcggttccagcgtct

SEQ ID NO: 148163 - DNA, 15 bp, Homo sapiens
atcggttccagcgtc

SEQ ID NO: 148164 - DNA, 15 bp, Homo sapiens
catcggttccagcgt

SEQ ID NO: 148165 - DNA, 15 bp, Homo sapiens
ccatcggttccagcg

SEQ ID NO: 148166 - DNA, 15 bp, Homo sapiens
accatcggttccagc

SEQ ID NO: 148167 - DNA, 15 bp, Homo sapiens
caccatcggttccag

SEQ ID NO: 148168 - DNA, 15 bp, Homo sapiens
ccaccatcggttcca

SEQ ID NO: 148169 - DNA, 15 bp, Homo sapiens
gccaccatcggttcc

SEQ ID NO: 148170 - DNA, 15 bp, Homo sapiens
agccaccatcggttc

SEQ ID NO: 148171 - DNA, 15 bp, Homo sapiens
aagccaccatcggtt

SEQ ID NO: 148172 - DNA, 15 bp, Homo sapiens
gaagccaccatcggt

SEQ ID NO: 148173 - DNA, 15 bp, Homo sapiens
cgaagccaccatcgg

SEQ ID NO: 148174 - DNA, 15 bp, Homo sapiens
gcgaagccaccatcg

SEQ ID NO: 148175 - DNA, 15 bp, Homo sapiens
tgcgaagccaccatc

SEQ ID NO: 148176 - DNA, 15 bp, Homo sapiens
atgcgaagccaccat

SEQ ID NO: 148177 - DNA, 15 bp, Homo sapiens
catgcgaagccacca

SEQ ID NO: 148178 - DNA, 15 bp, Homo sapiens
acatgcgaagccacc

SEQ ID NO: 148179 - DNA, 15 bp, Homo sapiens
aacatgcgaagccac

SEQ ID NO: 148180 - DNA, 15 bp, Homo sapiens
gaacatgcgaagcca

SEQ ID NO: 148181 - DNA, 15 bp, Homo sapiens
ggaacatgcgaagcc

SEQ ID NO: 148182 - DNA, 15 bp, Homo sapiens
aggaacatgcgaagc

SEQ ID NO: 148183 - DNA, 15 bp, Homo sapiens
caggaacatgcgaag

SEQ ID NO: 148184 - DNA, 15 bp, Homo sapiens
acaggaacatgcgaa

SEQ ID NO: 148185 - DNA, 15 bp, Homo sapiens
gacaggaacatgcga

SEQ ID NO: 148186 - DNA, 15 bp, Homo sapiens
tgacaggaacatgcg

SEQ ID NO: 148187 - DNA, 15 bp, Homo sapiens
ttgacaggaacatgc

SEQ ID NO: 148188 - DNA, 15 bp, Homo sapiens
gttgacaggaacatg

SEQ ID NO: 148189 - DNA, 15 bp, Homo sapiens
ggttgacaggaacat

SEQ ID NO: 148190 - DNA, 15 bp, Homo sapiens
gggttgacaggaaca

SEQ ID NO: 148191 - DNA, 15 bp, Homo sapiens
tgggttgacaggaac

SEQ ID NO: 148192 - DNA, 15 bp, Homo sapiens
gtgggttgacaggaa

SEQ ID NO: 148193 - DNA, 15 bp, Homo sapiens
agtgggttgacagga

SEQ ID NO: 148194 - DNA, 15 bp, Homo sapiens
cagtgggttgacagg

SEQ ID NO: 148195 - DNA, 15 bp, Homo sapiens
tcagtgggttgacag

SEQ ID NO: 148196 - DNA, 15 bp, Homo sapiens
ctcagtgggttgaca

SEQ ID NO: 148197 - DNA, 15 bp, Homo sapiens
actcagtgggttgac

SEQ ID NO: 148198 - DNA, 15 bp, Homo sapiens
gactcagtgggttga

SEQ ID NO: 148199 - DNA, 15 bp, Homo sapiens
tgactcagtgggttg

SEQ ID NO: 148200 - DNA, 15 bp, Homo sapiens
ctgactcagtgggtt

SEQ ID NO: 148201 - DNA, 15 bp, Homo sapiens
tctgactcagtgggt

SEQ ID NO: 148202 - DNA, 15 bp, Homo sapiens
gtctgactcagtggg

SEQ ID NO: 148203 - DNA, 15 bp, Homo sapiens
agtctgactcagtgg

SEQ ID NO: 148204 - DNA, 15 bp, Homo sapiens
cagtctgactcagtg

SEQ ID NO: 148205 - DNA, 15 bp, Homo sapiens
acagtctgactcagt

SEQ ID NO: 148206 - DNA, 15 bp, Homo sapiens
tacagtctgactcag

SEQ ID NO: 148207 - DNA, 15 bp, Homo sapiens
atacagtctgactca

SEQ ID NO: 148208 - DNA, 15 bp, Homo sapiens
gatacagtctgactc

SEQ ID NO: 148209 - DNA, 15 bp, Homo sapiens
agatacagtctgact

SEQ ID NO: 148210 - DNA, 15 bp, Homo sapiens
aagatacagtctgac

SEQ ID NO: 148211 - DNA, 15 bp, Homo sapiens
aaagatacagtctga

SEQ ID NO: 148212 - DNA, 15 bp, Homo sapiens
caaagatacagtctg

SEQ ID NO: 148213 - DNA, 15 bp, Homo sapiens
gcaaagatacagtct

SEQ ID NO: 148214 - DNA, 15 bp, Homo sapiens
tgcaaagatacagtc

SEQ ID NO: 148215 - DNA, 15 bp, Homo sapiens
ctgcaaagatacagt

SEQ ID NO: 148216 - DNA, 15 bp, Homo sapiens
tctgcaaagatacag

SEQ ID NO: 148217 - DNA, 15 bp, Homo sapiens
atctgcaaagataca

SEQ ID NO: 148218 - DNA, 15 bp, Homo sapiens
catctgcaaagatac

SEQ ID NO: 148219 - DNA, 15 bp, Homo sapiens
acatctgcaaagata

SEQ ID NO: 148220 - DNA, 15 bp, Homo sapiens
aacatctgcaaagat

SEQ ID NO: 148221 - DNA, 15 bp, Homo sapiens
aaacatctgcaaaga

SEQ ID NO: 148222 - DNA, 15 bp, Homo sapiens
gaaacatctgcaaag

SEQ ID NO: 148223 - DNA, 15 bp, Homo sapiens
agaaacatctgcaaa

SEQ ID NO: 148224 - DNA, 15 bp, Homo sapiens
cagaaacatctgcaa

SEQ ID NO: 148225 - DNA, 15 bp, Homo sapiens
acagaaacatctgca

SEQ ID NO: 148226 - DNA, 15 bp, Homo sapiens
gacagaaacatctgc

SEQ ID NO: 148227 - DNA, 15 bp, Homo sapiens
cgacagaaacatctg

SEQ ID NO: 148228 - DNA, 15 bp, Homo sapiens
ccgacagaaacatct

SEQ ID NO: 148229 - DNA, 15 bp, Homo sapiens
gccgacagaaacatc

SEQ ID NO: 148230 - DNA, 15 bp, Homo sapiens
cgccgacagaaacat

SEQ ID NO: 148231 - DNA, 15 bp, Homo sapiens
ccgccgacagaaaca

SEQ ID NO: 148232 - DNA, 15 bp, Homo sapiens
cccgccgacagaaac

SEQ ID NO: 148233 - DNA, 15 bp, Homo sapiens
gcccgccgacagaaa

SEQ ID NO: 148234 - DNA, 15 bp, Homo sapiens
cgcccgccgacagaa

SEQ ID NO: 148235 - DNA, 15 bp, Homo sapiens
acgcccgccgacaga

SEQ ID NO: 148236 - DNA, 15 bp, Homo sapiens
tacgcccgccgacag

SEQ ID NO: 148237 - DNA, 15 bp, Homo sapiens
ctacgcccgccgaca

SEQ ID NO: 148238 - DNA, 15 bp, Homo sapiens
actacgcccgccgac

SEQ ID NO: 148239 - DNA, 15 bp, Homo sapiens
aactacgcccgccga

SEQ ID NO: 148240 - DNA, 15 bp, Homo sapiens
aaactacgcccgccg

SEQ ID NO: 148241 - DNA, 15 bp, Homo sapiens
gaaactacgcccgcc

SEQ ID NO: 148242 - DNA, 15 bp, Homo sapiens
agaaactacgcccgc

SEQ ID NO: 148243 - DNA, 15 bp, Homo sapiens
tagaaactacgcccg

SEQ ID NO: 148244 - DNA, 15 bp, Homo sapiens
atagaaactacgccc

SEQ ID NO: 148245 - DNA, 15 bp, Homo sapiens
gatagaaactacgcc

SEQ ID NO: 148246 - DNA, 15 bp, Homo sapiens
cgatagaaactacgc

SEQ ID NO: 148247 - DNA, 15 bp, Homo sapiens
tcgatagaaactacg

SEQ ID NO: 148248 - DNA, 15 bp, Homo sapiens
ctcgatagaaactac

SEQ ID NO: 148249 - DNA, 15 bp, Homo sapiens
tctcgatagaaacta

SEQ ID NO: 148250 - DNA, 15 bp, Homo sapiens
ctctcgatagaaact

SEQ ID NO: 148251 - DNA, 15 bp, Homo sapiens
tctctcgatagaaac

SEQ ID NO: 148252 - DNA, 15 bp, Homo sapiens
ctctctcgatagaaa

SEQ ID NO: 148253 - DNA, 15 bp, Homo sapiens
cctctctcgatagaa

SEQ ID NO: 148254 - DNA, 15 bp, Homo sapiens
ccctctctcgataga

SEQ ID NO: 148255 - DNA, 15 bp, Homo sapiens
tccctctctcgatag

SEQ ID NO: 148256 - DNA, 15 bp, Homo sapiens
ctccctctctcgata

SEQ ID NO: 148257 - DNA, 15 bp, Homo sapiens
tctccctctctcgat

SEQ ID NO: 148258 - DNA, 15 bp, Homo sapiens
ctctccctctctcga

SEQ ID NO: 148259 - DNA, 15 bp, Homo sapiens
actctccctctctcg

SEQ ID NO: 148260 - DNA, 15 bp, Homo sapiens
tactctccctctctc

SEQ ID NO: 148261 - DNA, 15 bp, Homo sapiens
gtactctccctctct

SEQ ID NO: 148262 - DNA, 15 bp, Homo sapiens
tgtactctccctctc

SEQ ID NO: 148263 - DNA, 15 bp, Homo sapiens
ttgtactctccctct

SEQ ID NO: 148264 - DNA, 15 bp, Homo sapiens
tttgtactctccctc

SEQ ID NO: 148265 - DNA, 15 bp, Homo sapiens
gtttgtactctccct

SEQ ID NO: 148266 - DNA, 15 bp, Homo sapiens
tgtttgtactctccc

SEQ ID NO: 148267 - DNA, 15 bp, Homo sapiens
ctgtttgtactctcc

SEQ ID NO: 148268 - DNA, 15 bp, Homo sapiens
cctgtttgtactctc

SEQ ID NO: 148269 - DNA, 15 bp, Homo sapiens
tcctgtttgtactct

SEQ ID NO: 148270 - DNA, 15 bp, Homo sapiens
ttcctgtttgtactc

SEQ ID NO: 148271 - DNA, 15 bp, Homo sapiens
cttcctgtttgtact

SEQ ID NO: 148272 - DNA, 15 bp, Homo sapiens
ccttcctgtttgtac

SEQ ID NO: 148273 - DNA, 15 bp, Homo sapiens
gccttcctgtttgta

SEQ ID NO: 148274 - DNA, 15 bp, Homo sapiens
agccttcctgtttgt

SEQ ID NO: 148275 - DNA, 15 bp, Homo sapiens
tagccttcctgtttg

SEQ ID NO: 148276 - DNA, 15 bp, Homo sapiens
atagccttcctgttt

SEQ ID NO: 148277 - DNA, 15 bp, Homo sapiens
aatagccttcctgtt

SEQ ID NO: 148278 - DNA, 15 bp, Homo sapiens
aaatagccttcctgt

SEQ ID NO: 148279 - DNA, 15 bp, Homo sapiens
gaaatagccttcctg

SEQ ID NO: 148280 - DNA, 15 bp, Homo sapiens
tgaaatagccttcct

SEQ ID NO: 148281 - DNA, 15 bp, Homo sapiens
ttgaaatagccttcc

SEQ ID NO: 148282 - DNA, 15 bp, Homo sapiens
gttgaaatagccttc

SEQ ID NO: 148283 - DNA, 15 bp, Homo sapiens
agttgaaatagcctt

SEQ ID NO: 148284 - DNA, 15 bp, Homo sapiens
tagttgaaatagcct

SEQ ID NO: 148285 - DNA, 15 bp, Homo sapiens
ctagttgaaatagcc

SEQ ID NO: 148286 - DNA, 15 bp, Homo sapiens
tctagttgaaatagc

SEQ ID NO: 148287 - DNA, 15 bp, Homo sapiens
ttctagttgaaatag

SEQ ID NO: 148288 - DNA, 15 bp, Homo sapiens
attctagttgaaata

SEQ ID NO: 148289 - DNA, 15 bp, Homo sapiens
cattctagttgaaat

SEQ ID NO: 148290 - DNA, 15 bp, Homo sapiens
ccattctagttgaaa

SEQ ID NO: 148291 - DNA, 15 bp, Homo sapiens
gccattctagttgaa

SEQ ID NO: 148292 - DNA, 15 bp, Homo sapiens
agccattctagttga

SEQ ID NO: 148293 - DNA, 15 bp, Homo sapiens
tagccattctagttg

SEQ ID NO: 148294 - DNA, 15 bp, Homo sapiens
atagccattctagtt

SEQ ID NO: 148295 - DNA, 15 bp, Homo sapiens
aatagccattctagt

SEQ ID NO: 148296 - DNA, 15 bp, Homo sapiens
aaatagccattctag

SEQ ID NO: 148297 - DNA, 15 bp, Homo sapiens
caaatagccattcta

SEQ ID NO: 148298 - DNA, 15 bp, Homo sapiens
acaaatagccattct

SEQ ID NO: 148299 - DNA, 15 bp, Homo sapiens
tacaaatagccattc

SEQ ID NO: 148300 - DNA, 15 bp, Homo sapiens
gtacaaatagccatt

SEQ ID NO: 148301 - DNA, 15 bp, Homo sapiens
tgtacaaatagccat

SEQ ID NO: 148302 - DNA, 15 bp, Homo sapiens
gtgtacaaatagcca

SEQ ID NO: 148303 - DNA, 15 bp, Homo sapiens
tgtgtacaaatagcc

SEQ ID NO: 148304 - DNA, 15 bp, Homo sapiens
ttgtgtacaaatagc

SEQ ID NO: 148305 - DNA, 15 bp, Homo sapiens
tttgtgtacaaatag

SEQ ID NO: 148306 - DNA, 15 bp, Homo sapiens
ttttgtgtacaaata

SEQ ID NO: 148307 - DNA, 15 bp, Homo sapiens
tttttgtgtacaaat

SEQ ID NO: 148308 - DNA, 15 bp, Homo sapiens
ttttttgtgtacaaa

SEQ ID NO: 148309 - DNA, 15 bp, Homo sapiens
tttttttgtgtacaa

SEQ ID NO: 148310 - DNA, 15 bp, Homo sapiens
ctttttttgtgtaca

SEQ ID NO: 148311 - DNA, 15 bp, Homo sapiens
cctttttttgtgtac

SEQ ID NO: 148312 - DNA, 15 bp, Homo sapiens
gcctttttttgtgta

SEQ ID NO: 148313 - DNA, 15 bp, Homo sapiens
ggcctttttttgtgt

SEQ ID NO: 148314 - DNA, 15 bp, Homo sapiens
tggcctttttttgtg

SEQ ID NO: 148315 - DNA, 15 bp, Homo sapiens
ctggcctttttttgt

SEQ ID NO: 148316 - DNA, 15 bp, Homo sapiens
gctggcctttttttg

SEQ ID NO: 148317 - DNA, 15 bp, Homo sapiens
tgctggccttttttt

SEQ ID NO: 148318 - DNA, 15 bp, Homo sapiens
gtgctggcctttttt

SEQ ID NO: 148319 - DNA, 15 bp, Homo sapiens
tgtgctggccttttt

SEQ ID NO: 148320 - DNA, 15 bp, Homo sapiens
ttgtgctggcctttt

SEQ ID NO: 148321 - DNA, 15 bp, Homo sapiens
gttgtgctggccttt

SEQ ID NO: 148322 - DNA, 15 bp, Homo sapiens
tgttgtgctggcctt

SEQ ID NO: 148323 - DNA, 15 bp, Homo sapiens
ttgttgtgctggcct

SEQ ID NO: 148324 - DNA, 15 bp, Homo sapiens
attgttgtgctggcc

SEQ ID NO: 148325 - DNA, 15 bp, Homo sapiens
aattgttgtgctggc

SEQ ID NO: 148326 - DNA, 15 bp, Homo sapiens
aaattgttgtgctgg

SEQ ID NO: 148327 - DNA, 15 bp, Homo sapiens
aaaattgttgtgctg

SEQ ID NO: 148328 - DNA, 15 bp, Homo sapiens
taaaattgttgtgct

SEQ ID NO: 148329 - DNA, 15 bp, Homo sapiens
ttaaaattgttgtgc

SEQ ID NO: 148330 - DNA, 15 bp, Homo sapiens
cttaaaattgttgtg

SEQ ID NO: 148331 - DNA, 15 bp, Homo sapiens
tcttaaaattgttgt

SEQ ID NO: 148332 - DNA, 15 bp, Homo sapiens
ttcttaaaattgttg

SEQ ID NO: 148333 - DNA, 15 bp, Homo sapiens
cttcttaaaattgtt

SEQ ID NO: 148334 - DNA, 15 bp, Homo sapiens
tcttcttaaaattgt

SEQ ID NO: 148335 - DNA, 15 bp, Homo sapiens
atcttcttaaaattg

SEQ ID NO: 148336 - DNA, 15 bp, Homo sapiens
gatcttcttaaaatt

SEQ ID NO: 148337 - DNA, 15 bp, Homo sapiens
agatcttcttaaaat

SEQ ID NO: 148338 - DNA, 15 bp, Homo sapiens
aagatcttcttaaaa

SEQ ID NO: 148339 - DNA, 15 bp, Homo sapiens
aaagatcttcttaaa

SEQ ID NO: 148340 - DNA, 15 bp, Homo sapiens
taaagatcttcttaa

SEQ ID NO: 148341 - DNA, 15 bp, Homo sapiens
gtaaagatcttctta

SEQ ID NO: 148342 - DNA, 15 bp, Homo sapiens
agtaaagatcttctt

SEQ ID NO: 148343 - DNA, 15 bp, Homo sapiens
aagtaaagatcttct

SEQ ID NO: 148344 - DNA, 15 bp, Homo sapiens
aaagtaaagatcttc

SEQ ID NO: 148345 - DNA, 15 bp, Homo sapiens
aaaagtaaagatctt

SEQ ID NO: 148346 - DNA, 15 bp, Homo sapiens
caaaagtaaagatct

SEQ ID NO: 148347 - DNA, 15 bp, Homo sapiens
ccaaaagtaaagatc

SEQ ID NO: 148348 - DNA, 15 bp, Homo sapiens
tccaaaagtaaagat

SEQ ID NO: 148349 - DNA, 15 bp, Homo sapiens
ttccaaaagtaaaga

SEQ ID NO: 148350 - DNA, 15 bp, Homo sapiens
tttccaaaagtaaag

SEQ ID NO: 148351 - DNA, 15 bp, Homo sapiens
atttccaaaagtaaa

SEQ ID NO: 148352 - DNA, 15 bp, Homo sapiens
gatttccaaaagtaa

SEQ ID NO: 148353 - DNA, 15 bp, Homo sapiens
tgatttccaaaagta

SEQ ID NO: 148354 - DNA, 15 bp, Homo sapiens
ctgatttccaaaagt

SEQ ID NO: 148355 - DNA, 15 bp, Homo sapiens
tctgatttccaaaag

SEQ ID NO: 148356 - DNA, 15 bp, Homo sapiens
atctgatttccaaaa

SEQ ID NO: 148357 - DNA, 15 bp, Homo sapiens
tatctgatttccaaa

SEQ ID NO: 148358 - DNA, 15 bp, Homo sapiens
atatctgatttccaa

SEQ ID NO: 148359 - DNA, 15 bp, Homo sapiens
aatatctgatttcca

SEQ ID NO: 148360 - DNA, 15 bp, Homo sapiens
taatatctgatttcc

SEQ ID NO: 148361 - DNA, 15 bp, Homo sapiens
ttaatatctgatttc

SEQ ID NO: 148362 - DNA, 15 bp, Homo sapiens
attaatatctgattt

SEQ ID NO: 148363 - DNA, 15 bp, Homo sapiens
aattaatatctgatt

SEQ ID NO: 148364 - DNA, 15 bp, Homo sapiens
aaattaatatctgat

SEQ ID NO: 148365 - DNA, 15 bp, Homo sapiens
aaaattaatatctga

SEQ ID NO: 148366 - DNA, 15 bp, Homo sapiens
taaaattaatatctg

SEQ ID NO: 148367 - DNA, 15 bp, Homo sapiens
ataaaattaatatct

SEQ ID NO: 148368 - DNA, 15 bp, Homo sapiens
tataaaattaatatc

SEQ ID NO: 148369 - DNA, 15 bp, Homo sapiens
atataaaattaatat

SEQ ID NO: 148370 - DNA, 15 bp, Homo sapiens
aatataaaattaata

SEQ ID NO: 148371 - DNA, 15 bp, Homo sapiens
aaatataaaattaat

SEQ ID NO: 148372 - DNA, 15 bp, Homo sapiens
gaaatataaaattaa

SEQ ID NO: 148373 - DNA, 15 bp, Homo sapiens
tgaaatataaaatta

SEQ ID NO: 148374 - DNA, 15 bp, Homo sapiens
ttgaaatataaaatt

SEQ ID NO: 148375 - DNA, 15 bp, Homo sapiens
attgaaatataaaat

SEQ ID NO: 148376 - DNA, 15 bp, Homo sapiens
aattgaaatataaaa

SEQ ID NO: 148377 - DNA, 15 bp, Homo sapiens
gaattgaaatataaa

SEQ ID NO: 148378 - DNA, 15 bp, Homo sapiens
agaattgaaatataa

SEQ ID NO: 148379 - DNA, 15 bp, Homo sapiens
gagaattgaaatata

SEQ ID NO: 148380 - DNA, 15 bp, Homo sapiens
tgagaattgaaatat

SEQ ID NO: 148381 - DNA, 15 bp, Homo sapiens
gtgagaattgaaata

SEQ ID NO: 148382 - DNA, 15 bp, Homo sapiens
tgtgagaattgaaat

SEQ ID NO: 148383 - DNA, 15 bp, Homo sapiens
ttgtgagaattgaaa

SEQ ID NO: 148384 - DNA, 15 bp, Homo sapiens
attgtgagaattgaa

SEQ ID NO: 148385 - DNA, 15 bp, Homo sapiens
aattgtgagaattga

SEQ ID NO: 148386 - DNA, 15 bp, Homo sapiens
aaattgtgagaattg

SEQ ID NO: 148387 - DNA, 15 bp, Homo sapiens
aaaattgtgagaatt

SEQ ID NO: 148388 - DNA, 15 bp, Homo sapiens
taaaattgtgagaat

SEQ ID NO: 148389 - DNA, 15 bp, Homo sapiens
ctaaaattgtgagaa

SEQ ID NO: 148390 - DNA, 15 bp, Homo sapiens
tctaaaattgtgaga

SEQ ID NO: 148391 - DNA, 15 bp, Homo sapiens
ttctaaaattgtgag

SEQ ID NO: 148392 - DNA, 15 bp, Homo sapiens
tttctaaaattgtga

SEQ ID NO: 148393 - DNA, 15 bp, Homo sapiens
atttctaaaattgtg

SEQ ID NO: 148394 - DNA, 15 bp, Homo sapiens
aatttctaaaattgt

SEQ ID NO: 148395 - DNA, 15 bp, Homo sapiens
aaatttctaaaattg

SEQ ID NO: 148396 - DNA, 15 bp, Homo sapiens
aaaatttctaaaatt

SEQ ID NO: 148397 - DNA, 15 bp, Homo sapiens
taaaatttctaaaat

SEQ ID NO: 148398 - DNA, 15 bp, Homo sapiens
ataaaatttctaaaa

SEQ ID NO: 148399 - DNA, 15 bp, Homo sapiens
tataaaatttctaaa

SEQ ID NO: 148400 - DNA, 15 bp, Homo sapiens
gtataaaatttctaa

SEQ ID NO: 148401 - DNA, 15 bp, Homo sapiens
agtataaaatttcta

SEQ ID NO: 148402 - DNA, 15 bp, Homo sapiens
tagtataaaatttct

SEQ ID NO: 148403 - DNA, 15 bp, Homo sapiens
atagtataaaatttc

SEQ ID NO: 148404 - DNA, 15 bp, Homo sapiens
aatagtataaaattt

SEQ ID NO: 148405 - DNA, 15 bp, Homo sapiens
aaatagtataaaatt

SEQ ID NO: 148406 - DNA, 15 bp, Homo sapiens
gaaatagtataaaat

SEQ ID NO: 148407 - DNA, 15 bp, Homo sapiens
tgaaatagtataaaa

SEQ ID NO: 148408 - DNA, 15 bp, Homo sapiens
atgaaatagtataaa

SEQ ID NO: 148409 - DNA, 15 bp, Homo sapiens
aatgaaatagtataa

SEQ ID NO: 148410 - DNA, 15 bp, Homo sapiens
aaatgaaatagtata

SEQ ID NO: 148411 - DNA, 15 bp, Homo sapiens
taaatgaaatagtat

SEQ ID NO: 148412 - DNA, 15 bp, Homo sapiens
ataaatgaaatagta

SEQ ID NO: 148413 - DNA, 15 bp, Homo sapiens
tataaatgaaatagt

SEQ ID NO: 148414 - DNA, 15 bp, Homo sapiens
atataaatgaaatag

SEQ ID NO: 148415 - DNA, 15 bp, Homo sapiens
catataaatgaaata

SEQ ID NO: 148416 - DNA, 15 bp, Homo sapiens
tcatataaatgaaat

SEQ ID NO: 148417 - DNA, 15 bp, Homo sapiens
ttcatataaatgaaa

SEQ ID NO: 148418 - DNA, 15 bp, Homo sapiens
gttcatataaatgaa

SEQ ID NO: 148419 - DNA, 15 bp, Homo sapiens
tgttcatataaatga

SEQ ID NO: 148420 - DNA, 15 bp, Homo sapiens
gtgttcatataaatg

SEQ ID NO: 148421 - DNA, 15 bp, Homo sapiens
ggtgttcatataaat

SEQ ID NO: 148422 - DNA, 15 bp, Homo sapiens
tggtgttcatataaa

SEQ ID NO: 148423 - DNA, 15 bp, Homo sapiens
gtggtgttcatataa

SEQ ID NO: 148424 - DNA, 15 bp, Homo sapiens
tgtggtgttcatata

SEQ ID NO: 148425 - DNA, 15 bp, Homo sapiens
gtgtggtgttcatat

SEQ ID NO: 148426 - DNA, 15 bp, Homo sapiens
ggtgtggtgttcata

SEQ ID NO: 148427 - DNA, 15 bp, Homo sapiens
cggtgtggtgttcat

SEQ ID NO: 148428 - DNA, 15 bp, Homo sapiens
acggtgtggtgttca

SEQ ID NO: 148429 - DNA, 15 bp, Homo sapiens
tacggtgtggtgttc

SEQ ID NO: 148430 - DNA, 15 bp, Homo sapiens
ttacggtgtggtgtt

SEQ ID NO: 148431 - DNA, 15 bp, Homo sapiens
cttacggtgtggtgt

SEQ ID NO: 148432 - DNA, 15 bp, Homo sapiens
acttacggtgtggtg

SEQ ID NO: 148433 - DNA, 15 bp, Homo sapiens
cacttacggtgtggt

SEQ ID NO: 148434 - DNA, 15 bp, Homo sapiens
gcacttacggtgtgg

SEQ ID NO: 148435 - DNA, 15 bp, Homo sapiens
agcacttacggtgtg

SEQ ID NO: 148436 - DNA, 15 bp, Homo sapiens
tagcacttacggtgt

SEQ ID NO: 148437 - DNA, 15 bp, Homo sapiens
atagcacttacggtg

SEQ ID NO: 148438 - DNA, 15 bp, Homo sapiens
aatagcacttacggt

SEQ ID NO: 148439 - DNA, 15 bp, Homo sapiens
aaatagcacttacgg

SEQ ID NO: 148440 - DNA, 15 bp, Homo sapiens
gaaatagcacttacg

SEQ ID NO: 148441 - DNA, 15 bp, Homo sapiens
agaaatagcacttac

SEQ ID NO: 148442 - DNA, 15 bp, Homo sapiens
aagaaatagcactta

SEQ ID NO: 148443 - DNA, 15 bp, Homo sapiens
aaagaaatagcactt

SEQ ID NO: 148444 - DNA, 15 bp, Homo sapiens
gaaagaaatagcact

SEQ ID NO: 148445 - DNA, 15 bp, Homo sapiens
ggaaagaaatagcac

SEQ ID NO: 148446 - DNA, 15 bp, Homo sapiens
tggaaagaaatagca

SEQ ID NO: 148447 - DNA, 15 bp, Homo sapiens
ttggaaagaaatagc

SEQ ID NO: 148448 - DNA, 15 bp, Homo sapiens
gttggaaagaaatag

SEQ ID NO: 148449 - DNA, 15 bp, Homo sapiens
agttggaaagaaata

SEQ ID NO: 148450 - DNA, 15 bp, Homo sapiens
gagttggaaagaaat

SEQ ID NO: 148451 - DNA, 15 bp, Homo sapiens
ggagttggaaagaaa

SEQ ID NO: 148452 - DNA, 15 bp, Homo sapiens
gggagttggaaagaa

SEQ ID NO: 148453 - DNA, 15 bp, Homo sapiens
tgggagttggaaaga

SEQ ID NO: 148454 - DNA, 15 bp, Homo sapiens
ttgggagttggaaag

SEQ ID NO: 148455 - DNA, 15 bp, Homo sapiens
tttgggagttggaaa

SEQ ID NO: 148456 - DNA, 15 bp, Homo sapiens
ctttgggagttggaa

SEQ ID NO: 148457 - DNA, 15 bp, Homo sapiens
gctttgggagttgga

SEQ ID NO: 148458 - DNA, 15 bp, Homo sapiens
ggctttgggagttgg

SEQ ID NO: 148459 - DNA, 15 bp, Homo sapiens
tggctttgggagttg

SEQ ID NO: 148460 - DNA, 15 bp, Homo sapiens
gtggctttgggagtt

SEQ ID NO: 148461 - DNA, 15 bp, Homo sapiens
ggtggctttgggagt

SEQ ID NO: 148462 - DNA, 15 bp, Homo sapiens
aggtggctttgggag

SEQ ID NO: 148463 - DNA, 15 bp, Homo sapiens
taggtggctttggga

SEQ ID NO: 148464 - DNA, 15 bp, Homo sapiens
ttaggtggctttggg

SEQ ID NO: 148465 - DNA, 15 bp, Homo sapiens
attaggtggctttgg

SEQ ID NO: 148466 - DNA, 15 bp, Homo sapiens
aattaggtggctttg

SEQ ID NO: 148467 - DNA, 15 bp, Homo sapiens
gaattaggtggcttt

SEQ ID NO: 148468 - DNA, 15 bp, Homo sapiens
ggaattaggtggctt

SEQ ID NO: 148469 - DNA, 15 bp, Homo sapiens
gggaattaggtggct

SEQ ID NO: 148470 - DNA, 15 bp, Homo sapiens
tgggaattaggtggc

SEQ ID NO: 148471 - DNA, 15 bp, Homo sapiens
atgggaattaggtgg

SEQ ID NO: 148472 - DNA, 15 bp, Homo sapiens
tatgggaattaggtg

SEQ ID NO: 148473 - DNA, 15 bp, Homo sapiens
ctatgggaattaggt

SEQ ID NO: 148474 - DNA, 15 bp, Homo sapiens
cctatgggaattagg

SEQ ID NO: 148475 - DNA, 15 bp, Homo sapiens
acctatgggaattag

SEQ ID NO: 148476 - DNA, 15 bp, Homo sapiens
tacctatgggaatta

SEQ ID NO: 148477 - DNA, 15 bp, Homo sapiens
atacctatgggaatt

SEQ ID NO: 148478 - DNA, 15 bp, Homo sapiens
aatacctatgggaat

SEQ ID NO: 148479 - DNA, 15 bp, Homo sapiens
taatacctatgggaa

SEQ ID NO: 148480 - DNA, 15 bp, Homo sapiens
ataatacctatggga

SEQ ID NO: 148481 - DNA, 15 bp, Homo sapiens
cataatacctatggg

SEQ ID NO: 148482 - DNA, 15 bp, Homo sapiens
ccataatacctatgg

SEQ ID NO: 148483 - DNA, 15 bp, Homo sapiens
accataatacctatg

SEQ ID NO: 148484 - DNA, 15 bp, Homo sapiens
caccataatacctat

SEQ ID NO: 148485 - DNA, 15 bp, Homo sapiens
tcaccataataccta

SEQ ID NO: 148486 - DNA, 15 bp, Homo sapiens
atcaccataatacct

SEQ ID NO: 148487 - DNA, 15 bp, Homo sapiens
tatcaccataatacc

SEQ ID NO: 148488 - DNA, 15 bp, Homo sapiens
atatcaccataatac

SEQ ID NO: 148489 - DNA, 15 bp, Homo sapiens
catatcaccataata

SEQ ID NO: 148490 - DNA, 15 bp, Homo sapiens
acatatcaccataat

SEQ ID NO: 148491 - DNA, 15 bp, Homo sapiens
cacatatcaccataa

SEQ ID NO: 148492 - DNA, 15 bp, Homo sapiens
gcacatatcaccata

SEQ ID NO: 148493 - DNA, 15 bp, Homo sapiens
ggcacatatcaccat

SEQ ID NO: 148494 - DNA, 15 bp, Homo sapiens
tggcacatatcacca

SEQ ID NO: 148495 - DNA, 15 bp, Homo sapiens
atggcacatatcacc

SEQ ID NO: 148496 - DNA, 15 bp, Homo sapiens
tatggcacatatcac

SEQ ID NO: 148497 - DNA, 15 bp, Homo sapiens
atatggcacatatca

SEQ ID NO: 148498 - DNA, 15 bp, Homo sapiens
tatatggcacatatc

SEQ ID NO: 148499 - DNA, 15 bp, Homo sapiens
gtatatggcacatat

SEQ ID NO: 148500 - DNA, 15 bp, Homo sapiens
tgtatatggcacata

SEQ ID NO: 148501 - DNA, 15 bp, Homo sapiens
gtgtatatggcacat

SEQ ID NO: 148502 - DNA, 15 bp, Homo sapiens
tgtgtatatggcaca

SEQ ID NO: 148503 - DNA, 15 bp, Homo sapiens
ttgtgtatatggcac

SEQ ID NO: 148504 - DNA, 15 bp, Homo sapiens
attgtgtatatggca

SEQ ID NO: 148505 - DNA, 15 bp, Homo sapiens
tattgtgtatatggc

SEQ ID NO: 148506 - DNA, 15 bp, Homo sapiens
atattgtgtatatgg

SEQ ID NO: 148507 - DNA, 15 bp, Homo sapiens
aatattgtgtatatg

SEQ ID NO: 148508 - DNA, 15 bp, Homo sapiens
gaatattgtgtatat

SEQ ID NO: 148509 - DNA, 15 bp, Homo sapiens
agaatattgtgtata

SEQ ID NO: 148510 - DNA, 15 bp, Homo sapiens
tagaatattgtgtat

SEQ ID NO: 148511 - DNA, 15 bp, Homo sapiens
ttagaatattgtgta

SEQ ID NO: 148512 - DNA, 15 bp, Homo sapiens
cttagaatattgtgt

SEQ ID NO: 148513 - DNA, 15 bp, Homo sapiens
ccttagaatattgtg

SEQ ID NO: 148514 - DNA, 15 bp, Homo sapiens
tccttagaatattgt

SEQ ID NO: 148515 - DNA, 15 bp, Homo sapiens
ttccttagaatattg

SEQ ID NO: 148516 - DNA, 15 bp, Homo sapiens
tttccttagaatatt

SEQ ID NO: 148517 - DNA, 15 bp, Homo sapiens
ttttccttagaatat

SEQ ID NO: 148518 - DNA, 15 bp, Homo sapiens
gttttccttagaata

SEQ ID NO: 148519 - DNA, 15 bp, Homo sapiens
agttttccttagaat

SEQ ID NO: 148520 - DNA, 15 bp, Homo sapiens
tagttttccttagaa

SEQ ID NO: 148521 - DNA, 15 bp, Homo sapiens
ttagttttccttaga

SEQ ID NO: 148522 - DNA, 15 bp, Homo sapiens
attagttttccttag

SEQ ID NO: 148523 - DNA, 15 bp, Homo sapiens
cattagttttcctta

SEQ ID NO: 148524 - DNA, 15 bp, Homo sapiens
acattagttttcctt

SEQ ID NO: 148525 - DNA, 15 bp, Homo sapiens
tacattagttttcct

SEQ ID NO: 148526 - DNA, 15 bp, Homo sapiens
ctacattagttttcc

SEQ ID NO: 148527 - DNA, 15 bp, Homo sapiens
tctacattagttttc

SEQ ID NO: 148528 - DNA, 15 bp, Homo sapiens
ttctacattagtttt

SEQ ID NO: 148529 - DNA, 15 bp, Homo sapiens
attctacattagttt

SEQ ID NO: 148530 - DNA, 15 bp, Homo sapiens
tattctacattagtt

SEQ ID NO: 148531 - DNA, 15 bp, Homo sapiens
ttattctacattagt

SEQ ID NO: 148532 - DNA, 15 bp, Homo sapiens
attattctacattag

SEQ ID NO: 148533 - DNA, 15 bp, Homo sapiens
cattattctacatta

SEQ ID NO: 148534 - DNA, 15 bp, Homo sapiens
acattattctacatt

SEQ ID NO: 148535 - DNA, 15 bp, Homo sapiens
aacattattctacat

SEQ ID NO: 148536 - DNA, 15 bp, Homo sapiens
aaacattattctaca

SEQ ID NO: 148537 - DNA, 15 bp, Homo sapiens
taaacattattctac

SEQ ID NO: 148538 - DNA, 15 bp, Homo sapiens
ttaaacattattcta

SEQ ID NO: 148539 - DNA, 15 bp, Homo sapiens
cttaaacattattct

SEQ ID NO: 148540 - DNA, 15 bp, Homo sapiens
acttaaacattattc

SEQ ID NO: 148541 - DNA, 15 bp, Homo sapiens
tacttaaacattatt

SEQ ID NO: 148542 - DNA, 15 bp, Homo sapiens
ctacttaaacattat

SEQ ID NO: 148543 - DNA, 15 bp, Homo sapiens
cctacttaaacatta

SEQ ID NO: 148544 - DNA, 15 bp, Homo sapiens
ccctacttaaacatt

SEQ ID NO: 148545 - DNA, 15 bp, Homo sapiens
cccctacttaaacat

SEQ ID NO: 148546 - DNA, 15 bp, Homo sapiens
tcccctacttaaaca

SEQ ID NO: 148547 - DNA, 15 bp, Homo sapiens
ctcccctacttaaac

SEQ ID NO: 148548 - DNA, 15 bp, Homo sapiens
tctcccctacttaaa

SEQ ID NO: 148549 - DNA, 15 bp, Homo sapiens
ttctcccctacttaa

SEQ ID NO: 148550 - DNA, 15 bp, Homo sapiens
tttctcccctactta

SEQ ID NO: 148551 - DNA, 15 bp, Homo sapiens
ttttctcccctactt

SEQ ID NO: 148552 - DNA, 15 bp, Homo sapiens
tttttctcccctact

SEQ ID NO: 148553 - DNA, 15 bp, Homo sapiens
ttttttctcccctac

SEQ ID NO: 148554 - DNA, 15 bp, Homo sapiens
tttttttctccccta

SEQ ID NO: 148555 - DNA, 15 bp, Homo sapiens
ttttttttctcccct

SEQ ID NO: 148556 - DNA, 15 bp, Homo sapiens
tttttttttctcccc

SEQ ID NO: 148557 - DNA, 15 bp, Homo sapiens
ttttttttttctccc

SEQ ID NO: 148558 - DNA, 15 bp, Homo sapiens
gttttttttttctcc

SEQ ID NO: 148559 - DNA, 15 bp, Homo sapiens
ggttttttttttctc

SEQ ID NO: 148560 - DNA, 15 bp, Homo sapiens
tggttttttttttct

SEQ ID NO: 148561 - DNA, 15 bp, Homo sapiens
atggttttttttttc

SEQ ID NO: 148562 - DNA, 15 bp, Homo sapiens
aatggtttttttttt

SEQ ID NO: 148563 - DNA, 15 bp, Homo sapiens
aaatggttttttttt

SEQ ID NO: 148564 - DNA, 15 bp, Homo sapiens
aaaatggtttttttt

SEQ ID NO: 148565 - DNA, 15 bp, Homo sapiens
taaaatggttttttt

SEQ ID NO: 148566 - DNA, 15 bp, Homo sapiens
ataaaatggtttttt

SEQ ID NO: 148567 - DNA, 15 bp, Homo sapiens
aataaaatggttttt

SEQ ID NO: 148568 - DNA, 15 bp, Homo sapiens
gaataaaatggtttt

SEQ ID NO: 148569 - DNA, 15 bp, Homo sapiens
ggaataaaatggttt

SEQ ID NO: 148570 - DNA, 15 bp, Homo sapiens
aggaataaaatggtt

SEQ ID NO: 148571 - DNA, 15 bp, Homo sapiens
gaggaataaaatggt

SEQ ID NO: 148572 - DNA, 15 bp, Homo sapiens
ggaggaataaaatgg

SEQ ID NO: 148573 - DNA, 15 bp, Homo sapiens
tggaggaataaaatg

SEQ ID NO: 148574 - DNA, 15 bp, Homo sapiens
ctggaggaataaaat

SEQ ID NO: 148575 - DNA, 15 bp, Homo sapiens
tctggaggaataaaa

SEQ ID NO: 148576 - DNA, 15 bp, Homo sapiens
ttctggaggaataaa

SEQ ID NO: 148577 - DNA, 15 bp, Homo sapiens
cttctggaggaataa

SEQ ID NO: 148578 - DNA, 15 bp, Homo sapiens
tcttctggaggaata

SEQ ID NO: 148579 - DNA, 15 bp, Homo sapiens
ttcttctggaggaat

SEQ ID NO: 148580 - DNA, 15 bp, Homo sapiens
attcttctggaggaa

SEQ ID NO: 148581 - DNA, 15 bp, Homo sapiens
aattcttctggagga

SEQ ID NO: 148582 - DNA, 15 bp, Homo sapiens
aaattcttctggagg

SEQ ID NO: 148583 - DNA, 15 bp, Homo sapiens
taaattcttctggag

SEQ ID NO: 148584 - DNA, 15 bp, Homo sapiens
ctaaattcttctgga

SEQ ID NO: 148585 - DNA, 15 bp, Homo sapiens
cctaaattcttctgg

SEQ ID NO: 148586 - DNA, 15 bp, Homo sapiens
tcctaaattcttctg

SEQ ID NO: 148587 - DNA, 15 bp, Homo sapiens
atcctaaattcttct

SEQ ID NO: 148588 - DNA, 15 bp, Homo sapiens
tatcctaaattcttc

SEQ ID NO: 148589 - DNA, 15 bp, Homo sapiens
ctatcctaaattctt

SEQ ID NO: 148590 - DNA, 15 bp, Homo sapiens
cctatcctaaattct

SEQ ID NO: 148591 - DNA, 15 bp, Homo sapiens
tcctatcctaaattc

SEQ ID NO: 148592 - DNA, 15 bp, Homo sapiens
atcctatcctaaatt

SEQ ID NO: 148593 - DNA, 15 bp, Homo sapiens
gatcctatcctaaat

SEQ ID NO: 148594 - DNA, 15 bp, Homo sapiens
agatcctatcctaaa

SEQ ID NO: 148595 - DNA, 15 bp, Homo sapiens
tagatcctatcctaa

SEQ ID NO: 148596 - DNA, 15 bp, Homo sapiens
atagatcctatccta

SEQ ID NO: 148597 - DNA, 15 bp, Homo sapiens
tatagatcctatcct

SEQ ID NO: 148598 - DNA, 15 bp, Homo sapiens
atatagatcctatcc

SEQ ID NO: 148599 - DNA, 15 bp, Homo sapiens
aatatagatcctatc

SEQ ID NO: 148600 - DNA, 15 bp, Homo sapiens
aaatatagatcctat

SEQ ID NO: 148601 - DNA, 15 bp, Homo sapiens
aaaatatagatccta

SEQ ID NO: 148602 - DNA, 15 bp, Homo sapiens
taaaatatagatcct

SEQ ID NO: 148603 - DNA, 15 bp, Homo sapiens
ataaaatatagatcc

SEQ ID NO: 148604 - DNA, 15 bp, Homo sapiens
aataaaatatagatc

SEQ ID NO: 148605 - DNA, 15 bp, Homo sapiens
caataaaatatagat

SEQ ID NO: 148606 - DNA, 15 bp, Homo sapiens
acaataaaatataga

SEQ ID NO: 148607 - DNA, 15 bp, Homo sapiens
aacaataaaatatag

SEQ ID NO: 148608 - DNA, 15 bp, Homo sapiens
aaacaataaaatata

SEQ ID NO: 148609 - DNA, 15 bp, Homo sapiens
caaacaataaaatat

SEQ ID NO: 148610 - DNA, 15 bp, Homo sapiens
gcaaacaataaaata

SEQ ID NO: 148611 - DNA, 15 bp, Homo sapiens
tgcaaacaataaaat

SEQ ID NO: 148612 - DNA, 15 bp, Homo sapiens
atgcaaacaataaaa

SEQ ID NO: 148613 - DNA, 15 bp, Homo sapiens
gatgcaaacaataaa

SEQ ID NO: 148614 - DNA, 15 bp, Homo sapiens
tgatgcaaacaataa

SEQ ID NO: 148615 - DNA, 15 bp, Homo sapiens
gtgatgcaaacaata

SEQ ID NO: 148616 - DNA, 15 bp, Homo sapiens
tgtgatgcaaacaat

SEQ ID NO: 148617 - DNA, 15 bp, Homo sapiens
gtgtgatgcaaacaa

SEQ ID NO: 148618 - DNA, 15 bp, Homo sapiens
ggtgtgatgcaaaca

SEQ ID NO: 148619 - DNA, 15 bp, Homo sapiens
aggtgtgatgcaaac

SEQ ID NO: 148620 - DNA, 15 bp, Homo sapiens
caggtgtgatgcaaa

SEQ ID NO: 148621 - DNA, 15 bp, Homo sapiens
acaggtgtgatgcaa

SEQ ID NO: 148622 - DNA, 15 bp, Homo sapiens
tacaggtgtgatgca

SEQ ID NO: 148623 - DNA, 15 bp, Homo sapiens
gtacaggtgtgatgc

SEQ ID NO: 148624 - DNA, 15 bp, Homo sapiens
ggtacaggtgtgatg

SEQ ID NO: 148625 - DNA, 15 bp, Homo sapiens
aggtacaggtgtgat

SEQ ID NO: 148626 - DNA, 15 bp, Homo sapiens
gaggtacaggtgtga

SEQ ID NO: 148627 - DNA, 15 bp, Homo sapiens
ggaggtacaggtgtg

SEQ ID NO: 148628 - DNA, 15 bp, Homo sapiens
tggaggtacaggtgt

SEQ ID NO: 148629 - DNA, 15 bp, Homo sapiens
ttggaggtacaggtg

SEQ ID NO: 148630 - DNA, 15 bp, Homo sapiens
tttggaggtacaggt

SEQ ID NO: 148631 - DNA, 15 bp, Homo sapiens
ttttggaggtacagg

SEQ ID NO: 148632 - DNA, 15 bp, Homo sapiens
cttttggaggtacag

SEQ ID NO: 148633 - DNA, 15 bp, Homo sapiens
ccttttggaggtaca

SEQ ID NO: 148634 - DNA, 15 bp, Homo sapiens
tccttttggaggtac

SEQ ID NO: 148635 - DNA, 15 bp, Homo sapiens
gtccttttggaggta

SEQ ID NO: 148636 - DNA, 15 bp, Homo sapiens
ggtccttttggaggt

SEQ ID NO: 148637 - DNA, 15 bp, Homo sapiens
aggtccttttggagg

SEQ ID NO: 148638 - DNA, 15 bp, Homo sapiens
gaggtccttttggag

SEQ ID NO: 148639 - DNA, 15 bp, Homo sapiens
tgaggtccttttgga

SEQ ID NO: 148640 - DNA, 15 bp, Homo sapiens
atgaggtccttttgg

SEQ ID NO: 148641 - DNA, 15 bp, Homo sapiens
aatgaggtccttttg

SEQ ID NO: 148642 - DNA, 15 bp, Homo sapiens
caatgaggtcctttt

SEQ ID NO: 148643 - DNA, 15 bp, Homo sapiens
acaatgaggtccttt

SEQ ID NO: 148644 - DNA, 15 bp, Homo sapiens
gacaatgaggtcctt

SEQ ID NO: 148645 - DNA, 15 bp, Homo sapiens
agacaatgaggtcct

SEQ ID NO: 148646 - DNA, 15 bp, Homo sapiens
cagacaatgaggtcc

SEQ ID NO: 148647 - DNA, 15 bp, Homo sapiens
tcagacaatgaggtc

SEQ ID NO: 148648 - DNA, 15 bp, Homo sapiens
gtcagacaatgaggt

SEQ ID NO: 148649 - DNA, 15 bp, Homo sapiens
tgtcagacaatgagg

SEQ ID NO: 148650 - DNA, 15 bp, Homo sapiens
gtgtcagacaatgag

SEQ ID NO: 148651 - DNA, 15 bp, Homo sapiens
tgtgtcagacaatga

SEQ ID NO: 148652 - DNA, 15 bp, Homo sapiens
ctgtgtcagacaatg

SEQ ID NO: 148653 - DNA, 15 bp, Homo sapiens
gctgtgtcagacaat

SEQ ID NO: 148654 - DNA, 15 bp, Homo sapiens
agctgtgtcagacaa

SEQ ID NO: 148655 - DNA, 15 bp, Homo sapiens
gagctgtgtcagaca

SEQ ID NO: 148656 - DNA, 15 bp, Homo sapiens
tgagctgtgtcagac

SEQ ID NO: 148657 - DNA, 15 bp, Homo sapiens
ttgagctgtgtcaga

SEQ ID NO: 148658 - DNA, 15 bp, Homo sapiens
cttgagctgtgtcag

SEQ ID NO: 148659 - DNA, 15 bp, Homo sapiens
ccttgagctgtgtca

SEQ ID NO: 148660 - DNA, 15 bp, Homo sapiens
accttgagctgtgtc

SEQ ID NO: 148661 - DNA, 15 bp, Homo sapiens
aaccttgagctgtgt

SEQ ID NO: 148662 - DNA, 15 bp, Homo sapiens
caaccttgagctgtg

SEQ ID NO: 148663 - DNA, 15 bp, Homo sapiens
gcaaccttgagctgt

SEQ ID NO: 148664 - DNA, 15 bp, Homo sapiens
agcaaccttgagctg

SEQ ID NO: 148665 - DNA, 15 bp, Homo sapiens
gagcaaccttgagct

SEQ ID NO: 148666 - DNA, 15 bp, Homo sapiens
tgagcaaccttgagc

SEQ ID NO: 148667 - DNA, 15 bp, Homo sapiens
ctgagcaaccttgag

SEQ ID NO: 148668 - DNA, 15 bp, Homo sapiens
cctgagcaaccttga

SEQ ID NO: 148669 - DNA, 15 bp, Homo sapiens
tcctgagcaaccttg

SEQ ID NO: 148670 - DNA, 15 bp, Homo sapiens
gtcctgagcaacctt

SEQ ID NO: 148671 - DNA, 15 bp, Homo sapiens
tgtcctgagcaacct

SEQ ID NO: 148672 - DNA, 15 bp, Homo sapiens
gtgtcctgagcaacc

SEQ ID NO: 148673 - DNA, 15 bp, Homo sapiens
tgtgtcctgagcaac

SEQ ID NO: 148674 - DNA, 15 bp, Homo sapiens
ctgtgtcctgagcaa

SEQ ID NO: 148675 - DNA, 15 bp, Homo sapiens
gctgtgtcctgagca

SEQ ID NO: 148676 - DNA, 15 bp, Homo sapiens
tgctgtgtcctgagc

SEQ ID NO: 148677 - DNA, 15 bp, Homo sapiens
ctgctgtgtcctgag

SEQ ID NO: 148678 - DNA, 15 bp, Homo sapiens
actgctgtgtcctga

SEQ ID NO: 148679 - DNA, 15 bp, Homo sapiens
aactgctgtgtcctg

SEQ ID NO: 148680 - DNA, 15 bp, Homo sapiens
taactgctgtgtcct

SEQ ID NO: 148681 - DNA, 15 bp, Homo sapiens
ttaactgctgtgtcc

SEQ ID NO: 148682 - DNA, 15 bp, Homo sapiens
tttaactgctgtgtc

SEQ ID NO: 148683 - DNA, 15 bp, Homo sapiens
ttttaactgctgtgt

SEQ ID NO: 148684 - DNA, 15 bp, Homo sapiens
attttaactgctgtg

SEQ ID NO: 148685 - DNA, 15 bp, Homo sapiens
aattttaactgctgt

SEQ ID NO: 148686 - DNA, 15 bp, Homo sapiens
taattttaactgctg

SEQ ID NO: 148687 - DNA, 15 bp, Homo sapiens
ctaattttaactgct

SEQ ID NO: 148688 - DNA, 15 bp, Homo sapiens
tctaattttaactgc

SEQ ID NO: 148689 - DNA, 15 bp, Homo sapiens
ttctaattttaactg

SEQ ID NO: 148690 - DNA, 15 bp, Homo sapiens
attctaattttaact

SEQ ID NO: 148691 - DNA, 15 bp, Homo sapiens
tattctaattttaac

SEQ ID NO: 148692 - DNA, 15 bp, Homo sapiens
ttattctaattttaa

SEQ ID NO: 148693 - DNA, 15 bp, Homo sapiens
tttattctaatttta

SEQ ID NO: 148694 - DNA, 15 bp, Homo sapiens
atttattctaatttt

SEQ ID NO: 148695 - DNA, 15 bp, Homo sapiens
aatttattctaattt

SEQ ID NO: 148696 - DNA, 15 bp, Homo sapiens
gaatttattctaatt

SEQ ID NO: 148697 - DNA, 15 bp, Homo sapiens
ggaatttattctaat

SEQ ID NO: 148698 - DNA, 15 bp, Homo sapiens
gggaatttattctaa

SEQ ID NO: 148699 - DNA, 15 bp, Homo sapiens
tgggaatttattcta

SEQ ID NO: 148700 - DNA, 15 bp, Homo sapiens
ctgggaatttattct

SEQ ID NO: 148701 - DNA, 15 bp, Homo sapiens
tctgggaatttattc

SEQ ID NO: 148702 - DNA, 15 bp, Homo sapiens
ttctgggaatttatt

SEQ ID NO: 148703 - DNA, 15 bp, Homo sapiens
tttctgggaatttat

SEQ ID NO: 148704 - DNA, 15 bp, Homo sapiens
ctttctgggaattta

SEQ ID NO: 148705 - DNA, 15 bp, Homo sapiens
cctttctgggaattt

SEQ ID NO: 148706 - DNA, 15 bp, Homo sapiens
acctttctgggaatt

SEQ ID NO: 148707 - DNA, 15 bp, Homo sapiens
tacctttctgggaat

SEQ ID NO: 148708 - DNA, 15 bp, Homo sapiens
ttacctttctgggaa

SEQ ID NO: 148709 - DNA, 15 bp, Homo sapiens
cttacctttctggga

SEQ ID NO: 148710 - DNA, 15 bp, Homo sapiens
acttacctttctggg

SEQ ID NO: 148711 - DNA, 15 bp, Homo sapiens
gacttacctttctgg

SEQ ID NO: 148712 - DNA, 15 bp, Homo sapiens
tgacttacctttctg

SEQ ID NO: 148713 - DNA, 15 bp, Homo sapiens
atgacttacctttct

SEQ ID NO: 148714 - DNA, 15 bp, Homo sapiens
gatgacttacctttc

SEQ ID NO: 148715 - DNA, 15 bp, Homo sapiens
tgatgacttaccttt

SEQ ID NO: 148716 - DNA, 15 bp, Homo sapiens
atgatgacttacctt

SEQ ID NO: 148717 - DNA, 15 bp, Homo sapiens
catgatgacttacct

SEQ ID NO: 148718 - DNA, 15 bp, Homo sapiens
acatgatgacttacc

SEQ ID NO: 148719 - DNA, 15 bp, Homo sapiens
cacatgatgacttac

SEQ ID NO: 148720 - DNA, 15 bp, Homo sapiens
tcacatgatgactta

SEQ ID NO: 148721 - DNA, 15 bp, Homo sapiens
ctcacatgatgactt

SEQ ID NO: 148722 - DNA, 15 bp, Homo sapiens
actcacatgatgact

SEQ ID NO: 148723 - DNA, 15 bp, Homo sapiens
aactcacatgatgac

SEQ ID NO: 148724 - DNA, 15 bp, Homo sapiens
aaactcacatgatga

SEQ ID NO: 148725 - DNA, 15 bp, Homo sapiens
taaactcacatgatg

SEQ ID NO: 148726 - DNA, 15 bp, Homo sapiens
ctaaactcacatgat

SEQ ID NO: 148727 - DNA, 15 bp, Homo sapiens
tctaaactcacatga

SEQ ID NO: 148728 - DNA, 15 bp, Homo sapiens
ctctaaactcacatg

SEQ ID NO: 148729 - DNA, 15 bp, Homo sapiens
tctctaaactcacat

SEQ ID NO: 148730 - DNA, 15 bp, Homo sapiens
gtctctaaactcaca

SEQ ID NO: 148731 - DNA, 15 bp, Homo sapiens
agtctctaaactcac

SEQ ID NO: 148732 - DNA, 15 bp, Homo sapiens
cagtctctaaactca

SEQ ID NO: 148733 - DNA, 15 bp, Homo sapiens
tcagtctctaaactc

SEQ ID NO: 148734 - DNA, 15 bp, Homo sapiens
ttcagtctctaaact

SEQ ID NO: 148735 - DNA, 15 bp, Homo sapiens
tttcagtctctaaac

SEQ ID NO: 148736 - DNA, 15 bp, Homo sapiens
ttttcagtctctaaa

SEQ ID NO: 148737 - DNA, 15 bp, Homo sapiens
tttttcagtctctaa

SEQ ID NO: 148738 - DNA, 15 bp, Homo sapiens
atttttcagtctcta

SEQ ID NO: 148739 - DNA, 15 bp, Homo sapiens
aatttttcagtctct

SEQ ID NO: 148740 - DNA, 15 bp, Homo sapiens
taatttttcagtctc

SEQ ID NO: 148741 - DNA, 15 bp, Homo sapiens
ttaatttttcagtct

SEQ ID NO: 148742 - DNA, 15 bp, Homo sapiens
gttaatttttcagtc

SEQ ID NO: 148743 - DNA, 15 bp, Homo sapiens
tgttaatttttcagt

SEQ ID NO: 148744 - DNA, 15 bp, Homo sapiens
ctgttaatttttcag

SEQ ID NO: 148745 - DNA, 15 bp, Homo sapiens
gctgttaatttttca

SEQ ID NO: 148746 - DNA, 15 bp, Homo sapiens
tgctgttaatttttc

SEQ ID NO: 148747 - DNA, 15 bp, Homo sapiens
gtgctgttaattttt

SEQ ID NO: 148748 - DNA, 15 bp, Homo sapiens
tgtgctgttaatttt

SEQ ID NO: 148749 - DNA, 15 bp, Homo sapiens
ctgtgctgttaattt

SEQ ID NO: 148750 - DNA, 15 bp, Homo sapiens
tctgtgctgttaatt

SEQ ID NO: 148751 - DNA, 15 bp, Homo sapiens
gtctgtgctgttaat

SEQ ID NO: 148752 - DNA, 15 bp, Homo sapiens
agtctgtgctgttaa

SEQ ID NO: 148753 - DNA, 15 bp, Homo sapiens
gagtctgtgctgtta

SEQ ID NO: 148754 - DNA, 15 bp, Homo sapiens
tgagtctgtgctgtt

SEQ ID NO: 148755 - DNA, 15 bp, Homo sapiens
gtgagtctgtgctgt

SEQ ID NO: 148756 - DNA, 15 bp, Homo sapiens
tgtgagtctgtgctg

SEQ ID NO: 148757 - DNA, 15 bp, Homo sapiens
ctgtgagtctgtgct

SEQ ID NO: 148758 - DNA, 15 bp, Homo sapiens
actgtgagtctgtgc

SEQ ID NO: 148759 - DNA, 15 bp, Homo sapiens
tactgtgagtctgtg

SEQ ID NO: 148760 - DNA, 15 bp, Homo sapiens
ttactgtgagtctgt

SEQ ID NO: 148761 - DNA, 15 bp, Homo sapiens
tttactgtgagtctg

SEQ ID NO: 148762 - DNA, 15 bp, Homo sapiens
ttttactgtgagtct

SEQ ID NO: 148763 - DNA, 15 bp, Homo sapiens
attttactgtgagtc

SEQ ID NO: 148764 - DNA, 15 bp, Homo sapiens
aattttactgtgagt

SEQ ID NO: 148765 - DNA, 15 bp, Homo sapiens
aaattttactgtgag

SEQ ID NO: 148766 - DNA, 15 bp, Homo sapiens
gaaattttactgtga

SEQ ID NO: 148767 - DNA, 15 bp, Homo sapiens
agaaattttactgtg

SEQ ID NO: 148768 - DNA, 15 bp, Homo sapiens
aagaaattttactgt

SEQ ID NO: 148769 - DNA, 15 bp, Homo sapiens
taagaaattttactg

SEQ ID NO: 148770 - DNA, 15 bp, Homo sapiens
ttaagaaattttact

SEQ ID NO: 148771 - DNA, 15 bp, Homo sapiens
tttaagaaattttac

SEQ ID NO: 148772 - DNA, 15 bp, Homo sapiens
ttttaagaaatttta

SEQ ID NO: 148773 - DNA, 15 bp, Homo sapiens
cttttaagaaatttt

SEQ ID NO: 148774 - DNA, 15 bp, Homo sapiens
acttttaagaaattt

SEQ ID NO: 148775 - DNA, 15 bp, Homo sapiens
gacttttaagaaatt

SEQ ID NO: 148776 - DNA, 15 bp, Homo sapiens
agacttttaagaaat

SEQ ID NO: 148777 - DNA, 15 bp, Homo sapiens
gagacttttaagaaa

SEQ ID NO: 148778 - DNA, 15 bp, Homo sapiens
tgagacttttaagaa

SEQ ID NO: 148779 - DNA, 15 bp, Homo sapiens
atgagacttttaaga

SEQ ID NO: 148780 - DNA, 15 bp, Homo sapiens
aatgagacttttaag

SEQ ID NO: 148781 - DNA, 15 bp, Homo sapiens
aaatgagacttttaa

SEQ ID NO: 148782 - DNA, 15 bp, Homo sapiens
taaatgagactttta

SEQ ID NO: 148783 - DNA, 15 bp, Homo sapiens
ctaaatgagactttt

SEQ ID NO: 148784 - DNA, 15 bp, Homo sapiens
actaaatgagacttt

SEQ ID NO: 148785 - DNA, 15 bp, Homo sapiens
aactaaatgagactt

SEQ ID NO: 148786 - DNA, 15 bp, Homo sapiens
taactaaatgagact

SEQ ID NO: 148787 - DNA, 15 bp, Homo sapiens
ataactaaatgagac

SEQ ID NO: 148788 - DNA, 15 bp, Homo sapiens
cataactaaatgaga

SEQ ID NO: 148789 - DNA, 15 bp, Homo sapiens
acataactaaatgag

SEQ ID NO: 148790 - DNA, 15 bp, Homo sapiens
cacataactaaatga

SEQ ID NO: 148791 - DNA, 15 bp, Homo sapiens
gcacataactaaatg

SEQ ID NO: 148792 - DNA, 15 bp, Homo sapiens
agcacataactaaat

SEQ ID NO: 148793 - DNA, 15 bp, Homo sapiens
cagcacataactaaa

SEQ ID NO: 148794 - DNA, 15 bp, Homo sapiens
ccagcacataactaa

SEQ ID NO: 148795 - DNA, 15 bp, Homo sapiens
cccagcacataacta

SEQ ID NO: 148796 - DNA, 15 bp, Homo sapiens
gcccagcacataact

SEQ ID NO: 148797 - DNA, 15 bp, Homo sapiens
agcccagcacataac

SEQ ID NO: 148798 - DNA, 15 bp, Homo sapiens
cagcccagcacataa

SEQ ID NO: 148799 - DNA, 15 bp, Homo sapiens
gcagcccagcacata

SEQ ID NO: 148800 - DNA, 15 bp, Homo sapiens
tgcagcccagcacat

SEQ ID NO: 148801 - DNA, 15 bp, Homo sapiens
ctgcagcccagcaca

SEQ ID NO: 148802 - DNA, 15 bp, Homo sapiens
actgcagcccagcac

SEQ ID NO: 148803 - DNA, 15 bp, Homo sapiens
aactgcagcccagca

SEQ ID NO: 148804 - DNA, 15 bp, Homo sapiens
gaactgcagcccagc

SEQ ID NO: 148805 - DNA, 15 bp, Homo sapiens
agaactgcagcccag

SEQ ID NO: 148806 - DNA, 15 bp, Homo sapiens
cagaactgcagccca

SEQ ID NO: 148807 - DNA, 15 bp, Homo sapiens
tcagaactgcagccc

SEQ ID NO: 148808 - DNA, 15 bp, Homo sapiens
ctcagaactgcagcc

SEQ ID NO: 148809 - DNA, 15 bp, Homo sapiens
gctcagaactgcagc

SEQ ID NO: 148810 - DNA, 15 bp, Homo sapiens
tgctcagaactgcag

SEQ ID NO: 148811 - DNA, 15 bp, Homo sapiens
ttgctcagaactgca

SEQ ID NO: 148812 - DNA, 15 bp, Homo sapiens
cttgctcagaactgc

SEQ ID NO: 148813 - DNA, 15 bp, Homo sapiens
tcttgctcagaactg

SEQ ID NO: 148814 - DNA, 15 bp, Homo sapiens
gtcttgctcagaact

SEQ ID NO: 148815 - DNA, 15 bp, Homo sapiens
cgtcttgctcagaac

SEQ ID NO: 148816 - DNA, 15 bp, Homo sapiens
gcgtcttgctcagaa

SEQ ID NO: 148817 - DNA, 15 bp, Homo sapiens
agcgtcttgctcaga

SEQ ID NO: 148818 - DNA, 15 bp, Homo sapiens
gagcgtcttgctcag

SEQ ID NO: 148819 - DNA, 15 bp, Homo sapiens
agagcgtcttgctca

SEQ ID NO: 148820 - DNA, 15 bp, Homo sapiens
cagagcgtcttgctc

SEQ ID NO: 148821 - DNA, 15 bp, Homo sapiens
tcagagcgtcttgct

SEQ ID NO: 148822 - DNA, 15 bp, Homo sapiens
ctcagagcgtcttgc

SEQ ID NO: 148823 - DNA, 15 bp, Homo sapiens
tctcagagcgtcttg

SEQ ID NO: 148824 - DNA, 15 bp, Homo sapiens
atctcagagcgtctt

SEQ ID NO: 148825 - DNA, 15 bp, Homo sapiens
tatctcagagcgtct

SEQ ID NO: 148826 - DNA, 15 bp, Homo sapiens
ttatctcagagcgtc

SEQ ID NO: 148827 - DNA, 15 bp, Homo sapiens
attatctcagagcgt

SEQ ID NO: 148828 - DNA, 15 bp, Homo sapiens
gattatctcagagcg

SEQ ID NO: 148829 - DNA, 15 bp, Homo sapiens
agattatctcagagc

SEQ ID NO: 148830 - DNA, 15 bp, Homo sapiens
cagattatctcagag

SEQ ID NO: 148831 - DNA, 15 bp, Homo sapiens
tcagattatctcaga

SEQ ID NO: 148832 - DNA, 15 bp, Homo sapiens
atcagattatctcag

SEQ ID NO: 148833 - DNA, 15 bp, Homo sapiens
gatcagattatctca

SEQ ID NO: 148834 - DNA, 15 bp, Homo sapiens
ggatcagattatctc

SEQ ID NO: 148835 - DNA, 15 bp, Homo sapiens
gggatcagattatct

SEQ ID NO: 148836 - DNA, 15 bp, Homo sapiens
tgggatcagattatc

SEQ ID NO: 148837 - DNA, 15 bp, Homo sapiens
atgggatcagattat

SEQ ID NO: 148838 - DNA, 15 bp, Homo sapiens
aatgggatcagatta

SEQ ID NO: 148839 - DNA, 15 bp, Homo sapiens
aaatgggatcagatt

SEQ ID NO: 148840 - DNA, 15 bp, Homo sapiens
aaaatgggatcagat

SEQ ID NO: 148841 - DNA, 15 bp, Homo sapiens
aaaaatgggatcaga

SEQ ID NO: 148842 - DNA, 15 bp, Homo sapiens
caaaaatgggatcag

SEQ ID NO: 148843 - DNA, 15 bp, Homo sapiens
tcaaaaatgggatca

SEQ ID NO: 148844 - DNA, 15 bp, Homo sapiens
gtcaaaaatgggatc

SEQ ID NO: 148845 - DNA, 15 bp, Homo sapiens
agtcaaaaatgggat

SEQ ID NO: 148846 - DNA, 15 bp, Homo sapiens
gagtcaaaaatggga

SEQ ID NO: 148847 - DNA, 15 bp, Homo sapiens
agagtcaaaaatggg

SEQ ID NO: 148848 - DNA, 15 bp, Homo sapiens
cagagtcaaaaatgg

SEQ ID NO: 148849 - DNA, 15 bp, Homo sapiens
tcagagtcaaaaatg

SEQ ID NO: 148850 - DNA, 15 bp, Homo sapiens
ttcagagtcaaaaat

SEQ ID NO: 148851 - DNA, 15 bp, Homo sapiens
tttcagagtcaaaaa

SEQ ID NO: 148852 - DNA, 15 bp, Homo sapiens
ctttcagagtcaaaa

SEQ ID NO: 148853 - DNA, 15 bp, Homo sapiens
actttcagagtcaaa

SEQ ID NO: 148854 - DNA, 15 bp, Homo sapiens
cactttcagagtcaa

SEQ ID NO: 148855 - DNA, 15 bp, Homo sapiens
gcactttcagagtca

SEQ ID NO: 148856 - DNA, 15 bp, Homo sapiens
agcactttcagagtc

SEQ ID NO: 148857 - DNA, 15 bp, Homo sapiens
gagcactttcagagt

SEQ ID NO: 148858 - DNA, 15 bp, Homo sapiens
ggagcactttcagag

SEQ ID NO: 148859 - DNA, 15 bp, Homo sapiens
aggagcactttcaga

SEQ ID NO: 148860 - DNA, 15 bp, Homo sapiens
taggagcactttcag

SEQ ID NO: 148861 - DNA, 15 bp, Homo sapiens
ttaggagcactttca

SEQ ID NO: 148862 - DNA, 15 bp, Homo sapiens
attaggagcactttc

SEQ ID NO: 148863 - DNA, 15 bp, Homo sapiens
tattaggagcacttt

SEQ ID NO: 148864 - DNA, 15 bp, Homo sapiens
ttattaggagcactt

SEQ ID NO: 148865 - DNA, 15 bp, Homo sapiens
attattaggagcact

SEQ ID NO: 148866 - DNA, 15 bp, Homo sapiens
gattattaggagcac

SEQ ID NO: 148867 - DNA, 15 bp, Homo sapiens
agattattaggagca

SEQ ID NO: 148868 - DNA, 15 bp, Homo sapiens
tagattattaggagc

SEQ ID NO: 148869 - DNA, 15 bp, Homo sapiens
ctagattattaggag

SEQ ID NO: 148870 - DNA, 15 bp, Homo sapiens
cctagattattagga

SEQ ID NO: 148871 - DNA, 15 bp, Homo sapiens
tcctagattattagg

SEQ ID NO: 148872 - DNA, 15 bp, Homo sapiens
ttcctagattattag

SEQ ID NO: 148873 - DNA, 15 bp, Homo sapiens
cttcctagattatta

SEQ ID NO: 148874 - DNA, 15 bp, Homo sapiens
gcttcctagattatt

SEQ ID NO: 148875 - DNA, 15 bp, Homo sapiens
agcttcctagattat

SEQ ID NO: 148876 - DNA, 15 bp, Homo sapiens
aagcttcctagatta

SEQ ID NO: 148877 - DNA, 15 bp, Homo sapiens
aaagcttcctagatt

SEQ ID NO: 148878 - DNA, 15 bp, Homo sapiens
gaaagcttcctagat

SEQ ID NO: 148879 - DNA, 15 bp, Homo sapiens
agaaagcttcctaga

SEQ ID NO: 148880 - DNA, 15 bp, Homo sapiens
cagaaagcttcctag

SEQ ID NO: 148881 - DNA, 15 bp, Homo sapiens
tcagaaagcttccta

SEQ ID NO: 148882 - DNA, 15 bp, Homo sapiens
ttcagaaagcttcct

SEQ ID NO: 148883 - DNA, 15 bp, Homo sapiens
cttcagaaagcttcc

SEQ ID NO: 148884 - DNA, 15 bp, Homo sapiens
tcttcagaaagcttc

SEQ ID NO: 148885 - DNA, 15 bp, Homo sapiens
atcttcagaaagctt

SEQ ID NO: 148886 - DNA, 15 bp, Homo sapiens
tatcttcagaaagct

SEQ ID NO: 148887 - DNA, 15 bp, Homo sapiens
gtatcttcagaaagc

SEQ ID NO: 148888 - DNA, 15 bp, Homo sapiens
cgtatcttcagaaag

SEQ ID NO: 148889 - DNA, 15 bp, Homo sapiens
gcgtatcttcagaaa

SEQ ID NO: 148890 - DNA, 15 bp, Homo sapiens
tgcgtatcttcagaa

SEQ ID NO: 148891 - DNA, 15 bp, Homo sapiens
atgcgtatcttcaga

SEQ ID NO: 148892 - DNA, 15 bp, Homo sapiens
aatgcgtatcttcag

SEQ ID NO: 148893 - DNA, 15 bp, Homo sapiens
gaatgcgtatcttca

SEQ ID NO: 148894 - DNA, 15 bp, Homo sapiens
agaatgcgtatcttc

SEQ ID NO: 148895 - DNA, 15 bp, Homo sapiens
tagaatgcgtatctt

SEQ ID NO: 148896 - DNA, 15 bp, Homo sapiens
ttagaatgcgtatct

SEQ ID NO: 148897 - DNA, 15 bp, Homo sapiens
tttagaatgcgtatc

SEQ ID NO: 148898 - DNA, 15 bp, Homo sapiens
ttttagaatgcgtat

SEQ ID NO: 148899 - DNA, 15 bp, Homo sapiens
attttagaatgcgta

SEQ ID NO: 148900 - DNA, 15 bp, Homo sapiens
aattttagaatgcgt

SEQ ID NO: 148901 - DNA, 15 bp, Homo sapiens
aaattttagaatgcg

SEQ ID NO: 148902 - DNA, 15 bp, Homo sapiens
taaattttagaatgc

SEQ ID NO: 148903 - DNA, 15 bp, Homo sapiens
ttaaattttagaatg

SEQ ID NO: 148904 - DNA, 15 bp, Homo sapiens
tttaaattttagaat

SEQ ID NO: 148905 - DNA, 15 bp, Homo sapiens
ttttaaattttagaa

SEQ ID NO: 148906 - DNA, 15 bp, Homo sapiens
tttttaaattttaga

SEQ ID NO: 148907 - DNA, 15 bp, Homo sapiens
ttttttaaattttag

SEQ ID NO: 148908 - DNA, 15 bp, Homo sapiens
tttttttaaatttta

SEQ ID NO: 148909 - DNA, 15 bp, Homo sapiens
ctttttttaaatttt

SEQ ID NO: 148910 - DNA, 15 bp, Homo sapiens
tctttttttaaattt

SEQ ID NO: 148911 - DNA, 15 bp, Homo sapiens
ttctttttttaaatt

SEQ ID NO: 148912 - DNA, 15 bp, Homo sapiens
tttctttttttaaat

SEQ ID NO: 148913 - DNA, 15 bp, Homo sapiens
ttttctttttttaaa

SEQ ID NO: 148914 - DNA, 15 bp, Homo sapiens
tttttctttttttaa

SEQ ID NO: 148915 - DNA, 15 bp, Homo sapiens
ctttttcttttttta

SEQ ID NO: 148916 - DNA, 15 bp, Homo sapiens
tctttttcttttttt

SEQ ID NO: 148917 - DNA, 15 bp, Homo sapiens
ttctttttctttttt

SEQ ID NO: 148918 - DNA, 15 bp, Homo sapiens
tttctttttcttttt

SEQ ID NO: 148919 - DNA, 15 bp, Homo sapiens
ttttctttttctttt

SEQ ID NO: 148920 - DNA, 15 bp, Homo sapiens
tttttctttttcttt

SEQ ID NO: 148921 - DNA, 15 bp, Homo sapiens
ttttttctttttctt

SEQ ID NO: 148922 - DNA, 15 bp, Homo sapiens
gttttttctttttct

SEQ ID NO: 148923 - DNA, 15 bp, Homo sapiens
tgttttttctttttc

SEQ ID NO: 148924 - DNA, 15 bp, Homo sapiens
ttgttttttcttttt

SEQ ID NO: 148925 - DNA, 15 bp, Homo sapiens
tttgttttttctttt

SEQ ID NO: 148926 - DNA, 15 bp, Homo sapiens
atttgttttttcttt

SEQ ID NO: 148927 - DNA, 15 bp, Homo sapiens
tatttgttttttctt

SEQ ID NO: 148928 - DNA, 15 bp, Homo sapiens
gtatttgttttttct

SEQ ID NO: 148929 - DNA, 15 bp, Homo sapiens
tgtatttgttttttc

SEQ ID NO: 148930 - DNA, 15 bp, Homo sapiens
ctgtatttgtttttt

SEQ ID NO: 148931 - DNA, 15 bp, Homo sapiens
tctgtatttgttttt

SEQ ID NO: 148932 - DNA, 15 bp, Homo sapiens
atctgtatttgtttt

SEQ ID NO: 148933 - DNA, 15 bp, Homo sapiens
tatctgtatttgttt

SEQ ID NO: 148934 - DNA, 15 bp, Homo sapiens
atatctgtatttgtt

SEQ ID NO: 148935 - DNA, 15 bp, Homo sapiens
catatctgtatttgt

SEQ ID NO: 148936 - DNA, 15 bp, Homo sapiens
ccatatctgtatttg

SEQ ID NO: 148937 - DNA, 15 bp, Homo sapiens
tccatatctgtattt

SEQ ID NO: 148938 - DNA, 15 bp, Homo sapiens
atccatatctgtatt

SEQ ID NO: 148939 - DNA, 15 bp, Homo sapiens
aatccatatctgtat

SEQ ID NO: 148940 - DNA, 15 bp, Homo sapiens
gaatccatatctgta

SEQ ID NO: 148941 - DNA, 15 bp, Homo sapiens
agaatccatatctgt

SEQ ID NO: 148942 - DNA, 15 bp, Homo sapiens
aagaatccatatctg

SEQ ID NO: 148943 - DNA, 15 bp, Homo sapiens
caagaatccatatct

SEQ ID NO: 148944 - DNA, 15 bp, Homo sapiens
ccaagaatccatatc

SEQ ID NO: 148945 - DNA, 15 bp, Homo sapiens
gccaagaatccatat

SEQ ID NO: 148946 - DNA, 15 bp, Homo sapiens
ggccaagaatccata

SEQ ID NO: 148947 - DNA, 15 bp, Homo sapiens
aggccaagaatccat

SEQ ID NO: 148948 - DNA, 15 bp, Homo sapiens
gaggccaagaatcca

SEQ ID NO: 148949 - DNA, 15 bp, Homo sapiens
agaggccaagaatcc

SEQ ID NO: 148950 - DNA, 15 bp, Homo sapiens
gagaggccaagaatc

SEQ ID NO: 148951 - DNA, 15 bp, Homo sapiens
ggagaggccaagaat

SEQ ID NO: 148952 - DNA, 15 bp, Homo sapiens
gggagaggccaagaa

SEQ ID NO: 148953 - DNA, 15 bp, Homo sapiens
agggagaggccaaga

SEQ ID NO: 148954 - DNA, 15 bp, Homo sapiens
gagggagaggccaag

SEQ ID NO: 148955 - DNA, 15 bp, Homo sapiens
ggagggagaggccaa

SEQ ID NO: 148956 - DNA, 15 bp, Homo sapiens
aggagggagaggcca

SEQ ID NO: 148957 - DNA, 15 bp, Homo sapiens
gaggagggagaggcc

SEQ ID NO: 148958 - DNA, 15 bp, Homo sapiens
ggaggagggagaggc

SEQ ID NO: 148959 - DNA, 15 bp, Homo sapiens
gggaggagggagagg

SEQ ID NO: 148960 - DNA, 15 bp, Homo sapiens
tgggaggagggagag

SEQ ID NO: 148961 - DNA, 15 bp, Homo sapiens
ctgggaggagggaga

SEQ ID NO: 148962 - DNA, 15 bp, Homo sapiens
tctgggaggagggag

SEQ ID NO: 148963 - DNA, 15 bp, Homo sapiens
gtctgggaggaggga

SEQ ID NO: 148964 - DNA, 15 bp, Homo sapiens
agtctgggaggaggg

SEQ ID NO: 148965 - DNA, 15 bp, Homo sapiens
aagtctgggaggagg

SEQ ID NO: 148966 - DNA, 15 bp, Homo sapiens
taagtctgggaggag

SEQ ID NO: 148967 - DNA, 15 bp, Homo sapiens
ttaagtctgggagga

SEQ ID NO: 148968 - DNA, 15 bp, Homo sapiens
attaagtctgggagg

SEQ ID NO: 148969 - DNA, 15 bp, Homo sapiens
cattaagtctgggag

SEQ ID NO: 148970 - DNA, 15 bp, Homo sapiens
tcattaagtctggga

SEQ ID NO: 148971 - DNA, 15 bp, Homo sapiens
gtcattaagtctggg

SEQ ID NO: 148972 - DNA, 15 bp, Homo sapiens
agtcattaagtctgg

SEQ ID NO: 148973 - DNA, 15 bp, Homo sapiens
aagtcattaagtctg

SEQ ID NO: 148974 - DNA, 15 bp, Homo sapiens
taagtcattaagtct

SEQ ID NO: 148975 - DNA, 15 bp, Homo sapiens
ctaagtcattaagtc

SEQ ID NO: 148976 - DNA, 15 bp, Homo sapiens
tctaagtcattaagt

SEQ ID NO: 148977 - DNA, 15 bp, Homo sapiens
ttctaagtcattaag

SEQ ID NO: 148978 - DNA, 15 bp, Homo sapiens
attctaagtcattaa

SEQ ID NO: 148979 - DNA, 15 bp, Homo sapiens
tattctaagtcatta

SEQ ID NO: 148980 - DNA, 15 bp, Homo sapiens
gtattctaagtcatt

SEQ ID NO: 148981 - DNA, 15 bp, Homo sapiens
ggtattctaagtcat

SEQ ID NO: 148982 - DNA, 15 bp, Homo sapiens
aggtattctaagtca

SEQ ID NO: 148983 - DNA, 15 bp, Homo sapiens
caggtattctaagtc

SEQ ID NO: 148984 - DNA, 15 bp, Homo sapiens
ccaggtattctaagt

SEQ ID NO: 148985 - DNA, 15 bp, Homo sapiens
tccaggtattctaag

SEQ ID NO: 148986 - DNA, 15 bp, Homo sapiens
ttccaggtattctaa

SEQ ID NO: 148987 - DNA, 15 bp, Homo sapiens
attccaggtattcta

SEQ ID NO: 148988 - DNA, 15 bp, Homo sapiens
gattccaggtattct

SEQ ID NO: 148989 - DNA, 15 bp, Homo sapiens
tgattccaggtattc

SEQ ID NO: 148990 - DNA, 15 bp, Homo sapiens
ctgattccaggtatt

SEQ ID NO: 148991 - DNA, 15 bp, Homo sapiens
cctgattccaggtat

SEQ ID NO: 148992 - DNA, 15 bp, Homo sapiens
tcctgattccaggta

SEQ ID NO: 148993 - DNA, 15 bp, Homo sapiens
atcctgattccaggt

SEQ ID NO: 148994 - DNA, 15 bp, Homo sapiens
tatcctgattccagg

SEQ ID NO: 148995 - DNA, 15 bp, Homo sapiens
gtatcctgattccag

SEQ ID NO: 148996 - DNA, 15 bp, Homo sapiens
tgtatcctgattcca

SEQ ID NO: 148997 - DNA, 15 bp, Homo sapiens
ttgtatcctgattcc

SEQ ID NO: 148998 - DNA, 15 bp, Homo sapiens
tttgtatcctgattc

SEQ ID NO: 148999 - DNA, 15 bp, Homo sapiens
gtttgtatcctgatt

SEQ ID NO: 149000 - DNA, 15 bp, Homo sapiens
tgtttgtatcctgat

SEQ ID NO: 149001 - DNA, 15 bp, Homo sapiens
atgtttgtatcctga

SEQ ID NO: 149002 - DNA, 15 bp, Homo sapiens
gatgtttgtatcctg

SEQ ID NO: 149003 - DNA, 15 bp, Homo sapiens
agatgtttgtatcct

SEQ ID NO: 149004 - DNA, 15 bp, Homo sapiens
cagatgtttgtatcc

SEQ ID NO: 149005 - DNA, 15 bp, Homo sapiens
acagatgtttgtatc

SEQ ID NO: 149006 - DNA, 15 bp, Homo sapiens
tacagatgtttgtat

SEQ ID NO: 149007 - DNA, 15 bp, Homo sapiens
atacagatgtttgta

SEQ ID NO: 149008 - DNA, 15 bp, Homo sapiens
aatacagatgtttgt

SEQ ID NO: 149009 - DNA, 15 bp, Homo sapiens
aaatacagatgtttg

SEQ ID NO: 149010 - DNA, 15 bp, Homo sapiens
aaaatacagatgttt

SEQ ID NO: 149011 - DNA, 15 bp, Homo sapiens
aaaaatacagatgtt

SEQ ID NO: 149012 - DNA, 15 bp, Homo sapiens
taaaaatacagatgt

SEQ ID NO: 149013 - DNA, 15 bp, Homo sapiens
ctaaaaatacagatg

SEQ ID NO: 149014 - DNA, 15 bp, Homo sapiens
tctaaaaatacagat

SEQ ID NO: 149015 - DNA, 15 bp, Homo sapiens
atctaaaaatacaga

SEQ ID NO: 149016 - DNA, 15 bp, Homo sapiens
tatctaaaaatacag

SEQ ID NO: 149017 - DNA, 15 bp, Homo sapiens
atatctaaaaataca

SEQ ID NO: 149018 - DNA, 15 bp, Homo sapiens
gatatctaaaaatac

SEQ ID NO: 149019 - DNA, 15 bp, Homo sapiens
agatatctaaaaata

SEQ ID NO: 149020 - DNA, 15 bp, Homo sapiens
gagatatctaaaaat

SEQ ID NO: 149021 - DNA, 15 bp, Homo sapiens
ggagatatctaaaaa

SEQ ID NO: 149022 - DNA, 15 bp, Homo sapiens
tggagatatctaaaa

SEQ ID NO: 149023 - DNA, 15 bp, Homo sapiens
gtggagatatctaaa

SEQ ID NO: 149024 - DNA, 15 bp, Homo sapiens
tgtggagatatctaa

SEQ ID NO: 149025 - DNA, 15 bp, Homo sapiens
ctgtggagatatcta

SEQ ID NO: 149026 - DNA, 15 bp, Homo sapiens
cctgtggagatatct

SEQ ID NO: 149027 - DNA, 15 bp, Homo sapiens
acctgtggagatatc

SEQ ID NO: 149028 - DNA, 15 bp, Homo sapiens
tacctgtggagatat

SEQ ID NO: 149029 - DNA, 15 bp, Homo sapiens
ttacctgtggagata

SEQ ID NO: 149030 - DNA, 15 bp, Homo sapiens
attacctgtggagat

SEQ ID NO: 149031 - DNA, 15 bp, Homo sapiens
aattacctgtggaga

SEQ ID NO: 149032 - DNA, 15 bp, Homo sapiens
taattacctgtggag

SEQ ID NO: 149033 - DNA, 15 bp, Homo sapiens
ataattacctgtgga

SEQ ID NO: 149034 - DNA, 15 bp, Homo sapiens
cataattacctgtgg

SEQ ID NO: 149035 - DNA, 15 bp, Homo sapiens
tcataattacctgtg

SEQ ID NO: 149036 - DNA, 15 bp, Homo sapiens
ctcataattacctgt

SEQ ID NO: 149037 - DNA, 15 bp, Homo sapiens
actcataattacctg

SEQ ID NO: 149038 - DNA, 15 bp, Homo sapiens
tactcataattacct

SEQ ID NO: 149039 - DNA, 15 bp, Homo sapiens
ctactcataattacc

SEQ ID NO: 149040 - DNA, 15 bp, Homo sapiens
actactcataattac

SEQ ID NO: 149041 - DNA, 15 bp, Homo sapiens
gactactcataatta

SEQ ID NO: 149042 - DNA, 15 bp, Homo sapiens
cgactactcataatt

SEQ ID NO: 149043 - DNA, 15 bp, Homo sapiens
gcgactactcataat

SEQ ID NO: 149044 - DNA, 15 bp, Homo sapiens
ggcgactactcataa

SEQ ID NO: 149045 - DNA, 15 bp, Homo sapiens
tggcgactactcata

SEQ ID NO: 149046 - DNA, 15 bp, Homo sapiens
ctggcgactactcat

SEQ ID NO: 149047 - DNA, 15 bp, Homo sapiens
cctggcgactactca

SEQ ID NO: 149048 - DNA, 15 bp, Homo sapiens
ccctggcgactactc

SEQ ID NO: 149049 - DNA, 15 bp, Homo sapiens
accctggcgactact

SEQ ID NO: 149050 - DNA, 15 bp, Homo sapiens
aaccctggcgactac

SEQ ID NO: 149051 - DNA, 15 bp, Homo sapiens
caaccctggcgacta

SEQ ID NO: 149052 - DNA, 15 bp, Homo sapiens
tcaaccctggcgact

SEQ ID NO: 149053 - DNA, 15 bp, Homo sapiens
ttcaaccctggcgac

SEQ ID NO: 149054 - DNA, 15 bp, Homo sapiens
tttcaaccctggcga

SEQ ID NO: 149055 - DNA, 15 bp, Homo sapiens
ttttcaaccctggcg

SEQ ID NO: 149056 - DNA, 15 bp, Homo sapiens
attttcaaccctggc

SEQ ID NO: 149057 - DNA, 15 bp, Homo sapiens
tattttcaaccctgg

SEQ ID NO: 149058 - DNA, 15 bp, Homo sapiens
ttattttcaaccctg

SEQ ID NO: 149059 - DNA, 15 bp, Homo sapiens
gttattttcaaccct

SEQ ID NO: 149060 - DNA, 15 bp, Homo sapiens
agttattttcaaccc

SEQ ID NO: 149061 - DNA, 15 bp, Homo sapiens
cagttattttcaacc

SEQ ID NO: 149062 - DNA, 15 bp, Homo sapiens
acagttattttcaac

SEQ ID NO: 149063 - DNA, 15 bp, Homo sapiens
tacagttattttcaa

SEQ ID NO: 149064 - DNA, 15 bp, Homo sapiens
ttacagttattttca

SEQ ID NO: 149065 - DNA, 15 bp, Homo sapiens
gttacagttattttc

SEQ ID NO: 149066 - DNA, 15 bp, Homo sapiens
tgttacagttatttt

SEQ ID NO: 149067 - DNA, 15 bp, Homo sapiens
ctgttacagttattt

SEQ ID NO: 149068 - DNA, 15 bp, Homo sapiens
actgttacagttatt

SEQ ID NO: 149069 - DNA, 15 bp, Homo sapiens
tactgttacagttat

SEQ ID NO: 149070 - DNA, 15 bp, Homo sapiens
gtactgttacagtta

SEQ ID NO: 149071 - DNA, 15 bp, Homo sapiens
ggtactgttacagtt

SEQ ID NO: 149072 - DNA, 15 bp, Homo sapiens
aggtactgttacagt

SEQ ID NO: 149073 - DNA, 15 bp, Homo sapiens
caggtactgttacag

SEQ ID NO: 149074 - DNA, 15 bp, Homo sapiens
tcaggtactgttaca

SEQ ID NO: 149075 - DNA, 15 bp, Homo sapiens
gtcaggtactgttac

SEQ ID NO: 149076 - DNA, 15 bp, Homo sapiens
tgtcaggtactgtta

SEQ ID NO: 149077 - DNA, 15 bp, Homo sapiens
atgtcaggtactgtt

SEQ ID NO: 149078 - DNA, 15 bp, Homo sapiens
aatgtcaggtactgt

SEQ ID NO: 149079 - DNA, 15 bp, Homo sapiens
aaatgtcaggtactg

SEQ ID NO: 149080 - DNA, 15 bp, Homo sapiens
taaatgtcaggtact

SEQ ID NO: 149081 - DNA, 15 bp, Homo sapiens
ataaatgtcaggtac

SEQ ID NO: 149082 - DNA, 15 bp, Homo sapiens
gataaatgtcaggta

SEQ ID NO: 149083 - DNA, 15 bp, Homo sapiens
agataaatgtcaggt

SEQ ID NO: 149084 - DNA, 15 bp, Homo sapiens
tagataaatgtcagg

SEQ ID NO: 149085 - DNA, 15 bp, Homo sapiens
atagataaatgtcag

SEQ ID NO: 149086 - DNA, 15 bp, Homo sapiens
gatagataaatgtca

SEQ ID NO: 149087 - DNA, 15 bp, Homo sapiens
ggatagataaatgtc

SEQ ID NO: 149088 - DNA, 15 bp, Homo sapiens
gggatagataaatgt

SEQ ID NO: 149089 - DNA, 15 bp, Homo sapiens
agggatagataaatg

SEQ ID NO: 149090 - DNA, 15 bp, Homo sapiens
tagggatagataaat

SEQ ID NO: 149091 - DNA, 15 bp, Homo sapiens
atagggatagataaa

SEQ ID NO: 149092 - DNA, 15 bp, Homo sapiens
tatagggatagataa

SEQ ID NO: 149093 - DNA, 15 bp, Homo sapiens
atatagggatagata

SEQ ID NO: 149094 - DNA, 15 bp, Homo sapiens
catatagggatagat

SEQ ID NO: 149095 - DNA, 15 bp, Homo sapiens
gcatatagggataga

SEQ ID NO: 149096 - DNA, 15 bp, Homo sapiens
tgcatatagggatag

SEQ ID NO: 149097 - DNA, 15 bp, Homo sapiens
ttgcatatagggata

SEQ ID NO: 149098 - DNA, 15 bp, Homo sapiens
cttgcatatagggat

SEQ ID NO: 149099 - DNA, 15 bp, Homo sapiens
acttgcatataggga

SEQ ID NO: 149100 - DNA, 15 bp, Homo sapiens
tacttgcatataggg

SEQ ID NO: 149101 - DNA, 15 bp, Homo sapiens
gtacttgcatatagg

SEQ ID NO: 149102 - DNA, 15 bp, Homo sapiens
agtacttgcatatag

SEQ ID NO: 149103 - DNA, 15 bp, Homo sapiens
aagtacttgcatata

SEQ ID NO: 149104 - DNA, 15 bp, Homo sapiens
caagtacttgcatat

SEQ ID NO: 149105 - DNA, 15 bp, Homo sapiens
gcaagtacttgcata

SEQ ID NO: 149106 - DNA, 15 bp, Homo sapiens
agcaagtacttgcat

SEQ ID NO: 149107 - DNA, 15 bp, Homo sapiens
cagcaagtacttgca

SEQ ID NO: 149108 - DNA, 15 bp, Homo sapiens
tcagcaagtacttgc

SEQ ID NO: 149109 - DNA, 15 bp, Homo sapiens
ttcagcaagtacttg

SEQ ID NO: 149110 - DNA, 15 bp, Homo sapiens
attcagcaagtactt

SEQ ID NO: 149111 - DNA, 15 bp, Homo sapiens
aattcagcaagtact

SEQ ID NO: 149112 - DNA, 15 bp, Homo sapiens
gaattcagcaagtac

SEQ ID NO: 149113 - DNA, 15 bp, Homo sapiens
agaattcagcaagta

SEQ ID NO: 149114 - DNA, 15 bp, Homo sapiens
aagaattcagcaagt

SEQ ID NO: 149115 - DNA, 15 bp, Homo sapiens
aaagaattcagcaag

SEQ ID NO: 149116 - DNA, 15 bp, Homo sapiens
taaagaattcagcaa

SEQ ID NO: 149117 - DNA, 15 bp, Homo sapiens
ttaaagaattcagca

SEQ ID NO: 149118 - DNA, 15 bp, Homo sapiens
tttaaagaattcagc

SEQ ID NO: 149119 - DNA, 15 bp, Homo sapiens
atttaaagaattcag

SEQ ID NO: 149120 - DNA, 15 bp, Homo sapiens
tatttaaagaattca

SEQ ID NO: 149121 - DNA, 15 bp, Homo sapiens
gtatttaaagaattc

SEQ ID NO: 149122 - DNA, 15 bp, Homo sapiens
ggtatttaaagaatt

SEQ ID NO: 149123 - DNA, 15 bp, Homo sapiens
aggtatttaaagaat

SEQ ID NO: 149124 - DNA, 15 bp, Homo sapiens
gaggtatttaaagaa

SEQ ID NO: 149125 - DNA, 15 bp, Homo sapiens
agaggtatttaaaga

SEQ ID NO: 149126 - DNA, 15 bp, Homo sapiens
gagaggtatttaaag

SEQ ID NO: 149127 - DNA, 15 bp, Homo sapiens
ggagaggtatttaaa

SEQ ID NO: 149128 - DNA, 15 bp, Homo sapiens
aggagaggtatttaa

SEQ ID NO: 149129 - DNA, 15 bp, Homo sapiens
gaggagaggtattta

SEQ ID NO: 149130 - DNA, 15 bp, Homo sapiens
tgaggagaggtattt

SEQ ID NO: 149131 - DNA, 15 bp, Homo sapiens
gtgaggagaggtatt

SEQ ID NO: 149132 - DNA, 15 bp, Homo sapiens
agtgaggagaggtat

SEQ ID NO: 149133 - DNA, 15 bp, Homo sapiens
aagtgaggagaggta

SEQ ID NO: 149134 - DNA, 15 bp, Homo sapiens
taagtgaggagaggt

SEQ ID NO: 149135 - DNA, 15 bp, Homo sapiens
ttaagtgaggagagg

SEQ ID NO: 149136 - DNA, 15 bp, Homo sapiens
attaagtgaggagag

SEQ ID NO: 149137 - DNA, 15 bp, Homo sapiens
tattaagtgaggaga

SEQ ID NO: 149138 - DNA, 15 bp, Homo sapiens
gtattaagtgaggag

SEQ ID NO: 149139 - DNA, 15 bp, Homo sapiens
agtattaagtgagga

SEQ ID NO: 149140 - DNA, 15 bp, Homo sapiens
cagtattaagtgagg

SEQ ID NO: 149141 - DNA, 15 bp, Homo sapiens
acagtattaagtgag

SEQ ID NO: 149142 - DNA, 15 bp, Homo sapiens
cacagtattaagtga

SEQ ID NO: 149143 - DNA, 15 bp, Homo sapiens
tcacagtattaagtg

SEQ ID NO: 149144 - DNA, 15 bp, Homo sapiens
gtcacagtattaagt

SEQ ID NO: 149145 - DNA, 15 bp, Homo sapiens
tgtcacagtattaag

SEQ ID NO: 149146 - DNA, 15 bp, Homo sapiens
ttgtcacagtattaa

SEQ ID NO: 149147 - DNA, 15 bp, Homo sapiens
attgtcacagtatta

SEQ ID NO: 149148 - DNA, 15 bp, Homo sapiens
gattgtcacagtatt

SEQ ID NO: 149149 - DNA, 15 bp, Homo sapiens
ggattgtcacagtat

SEQ ID NO: 149150 - DNA, 15 bp, Homo sapiens
aggattgtcacagta

SEQ ID NO: 149151 - DNA, 15 bp, Homo sapiens
taggattgtcacagt

SEQ ID NO: 149152 - DNA, 15 bp, Homo sapiens
gtaggattgtcacag

SEQ ID NO: 149153 - DNA, 15 bp, Homo sapiens
agtaggattgtcaca

SEQ ID NO: 149154 - DNA, 15 bp, Homo sapiens
tagtaggattgtcac

SEQ ID NO: 149155 - DNA, 15 bp, Homo sapiens
ctagtaggattgtca

SEQ ID NO: 149156 - DNA, 15 bp, Homo sapiens
actagtaggattgtc

SEQ ID NO: 149157 - DNA, 15 bp, Homo sapiens
tactagtaggattgt

SEQ ID NO: 149158 - DNA, 15 bp, Homo sapiens
atactagtaggattg

SEQ ID NO: 149159 - DNA, 15 bp, Homo sapiens
aatactagtaggatt

SEQ ID NO: 149160 - DNA, 15 bp, Homo sapiens
aaatactagtaggat

SEQ ID NO: 149161 - DNA, 15 bp, Homo sapiens
aaaatactagtagga

SEQ ID NO: 149162 - DNA, 15 bp, Homo sapiens
gaaaatactagtagg

SEQ ID NO: 149163 - DNA, 15 bp, Homo sapiens
tgaaaatactagtag

SEQ ID NO: 149164 - DNA, 15 bp, Homo sapiens
atgaaaatactagta

SEQ ID NO: 149165 - DNA, 15 bp, Homo sapiens
aatgaaaatactagt

SEQ ID NO: 149166 - DNA, 15 bp, Homo sapiens
taatgaaaatactag

SEQ ID NO: 149167 - DNA, 15 bp, Homo sapiens
ttaatgaaaatacta

SEQ ID NO: 149168 - DNA, 15 bp, Homo sapiens
cttaatgaaaatact

SEQ ID NO: 149169 - DNA, 15 bp, Homo sapiens
acttaatgaaaatac

SEQ ID NO: 149170 - DNA, 15 bp, Homo sapiens
gacttaatgaaaata

SEQ ID NO: 149171 - DNA, 15 bp, Homo sapiens
ggacttaatgaaaat

SEQ ID NO: 149172 - DNA, 15 bp, Homo sapiens
aggacttaatgaaaa

SEQ ID NO: 149173 - DNA, 15 bp, Homo sapiens
aaggacttaatgaaa

SEQ ID NO: 149174 - DNA, 15 bp, Homo sapiens
caaggacttaatgaa

SEQ ID NO: 149175 - DNA, 15 bp, Homo sapiens
acaaggacttaatga

SEQ ID NO: 149176 - DNA, 15 bp, Homo sapiens
tacaaggacttaatg

SEQ ID NO: 149177 - DNA, 15 bp, Homo sapiens
atacaaggacttaat

SEQ ID NO: 149178 - DNA, 15 bp, Homo sapiens
tatacaaggacttaa

SEQ ID NO: 149179 - DNA, 15 bp, Homo sapiens
ctatacaaggactta

SEQ ID NO: 149180 - DNA, 15 bp, Homo sapiens
cctatacaaggactt

SEQ ID NO: 149181 - DNA, 15 bp, Homo sapiens
acctatacaaggact

SEQ ID NO: 149182 - DNA, 15 bp, Homo sapiens
tacctatacaaggac

SEQ ID NO: 149183 - DNA, 15 bp, Homo sapiens
ttacctatacaagga

SEQ ID NO: 149184 - DNA, 15 bp, Homo sapiens
cttacctatacaagg

SEQ ID NO: 149185 - DNA, 15 bp, Homo sapiens
ccttacctatacaag

SEQ ID NO: 149186 - DNA, 15 bp, Homo sapiens
tccttacctatacaa

SEQ ID NO: 149187 - DNA, 15 bp, Homo sapiens
ttccttacctataca

SEQ ID NO: 149188 - DNA, 15 bp, Homo sapiens
tttccttacctatac

SEQ ID NO: 149189 - DNA, 15 bp, Homo sapiens
atttccttacctata

SEQ ID NO: 149190 - DNA, 15 bp, Homo sapiens
aatttccttacctat

SEQ ID NO: 149191 - DNA, 15 bp, Homo sapiens
caatttccttaccta

SEQ ID NO: 149192 - DNA, 15 bp, Homo sapiens
tcaatttccttacct

SEQ ID NO: 149193 - DNA, 15 bp, Homo sapiens
atcaatttccttacc

SEQ ID NO: 149194 - DNA, 15 bp, Homo sapiens
aatcaatttccttac

SEQ ID NO: 149195 - DNA, 15 bp, Homo sapiens
caatcaatttcctta

SEQ ID NO: 149196 - DNA, 15 bp, Homo sapiens
tcaatcaatttcctt

SEQ ID NO: 149197 - DNA, 15 bp, Homo sapiens
ctcaatcaatttcct

SEQ ID NO: 149198 - DNA, 15 bp, Homo sapiens
gctcaatcaatttcc

SEQ ID NO: 149199 - DNA, 15 bp, Homo sapiens
ggctcaatcaatttc

SEQ ID NO: 149200 - DNA, 15 bp, Homo sapiens
aggctcaatcaattt

SEQ ID NO: 149201 - DNA, 15 bp, Homo sapiens
gaggctcaatcaatt

SEQ ID NO: 149202 - DNA, 15 bp, Homo sapiens
tgaggctcaatcaat

SEQ ID NO: 149203 - DNA, 15 bp, Homo sapiens
ctgaggctcaatcaa

SEQ ID NO: 149204 - DNA, 15 bp, Homo sapiens
cctgaggctcaatca

SEQ ID NO: 149205 - DNA, 15 bp, Homo sapiens
acctgaggctcaatc

SEQ ID NO: 149206 - DNA, 15 bp, Homo sapiens
aacctgaggctcaat

SEQ ID NO: 149207 - DNA, 15 bp, Homo sapiens
taacctgaggctcaa

SEQ ID NO: 149208 - DNA, 15 bp, Homo sapiens
ttaacctgaggctca

SEQ ID NO: 149209 - DNA, 15 bp, Homo sapiens
attaacctgaggctc

SEQ ID NO: 149210 - DNA, 15 bp, Homo sapiens
tattaacctgaggct

SEQ ID NO: 149211 - DNA, 15 bp, Homo sapiens
ttattaacctgaggc

SEQ ID NO: 149212 - DNA, 15 bp, Homo sapiens
attattaacctgagg

SEQ ID NO: 149213 - DNA, 15 bp, Homo sapiens
aattattaacctgag

SEQ ID NO: 149214 - DNA, 15 bp, Homo sapiens
aaattattaacctga

SEQ ID NO: 149215 - DNA, 15 bp, Homo sapiens
taaattattaacctg

SEQ ID NO: 149216 - DNA, 15 bp, Homo sapiens
gtaaattattaacct

SEQ ID NO: 149217 - DNA, 15 bp, Homo sapiens
ggtaaattattaacc

SEQ ID NO: 149218 - DNA, 15 bp, Homo sapiens
gggtaaattattaac

SEQ ID NO: 149219 - DNA, 15 bp, Homo sapiens
tgggtaaattattaa

SEQ ID NO: 149220 - DNA, 15 bp, Homo sapiens
ttgggtaaattatta

SEQ ID NO: 149221 - DNA, 15 bp, Homo sapiens
cttgggtaaattatt

SEQ ID NO: 149222 - DNA, 15 bp, Homo sapiens
ccttgggtaaattat

SEQ ID NO: 149223 - DNA, 15 bp, Homo sapiens
accttgggtaaatta

SEQ ID NO: 149224 - DNA, 15 bp, Homo sapiens
gaccttgggtaaatt

SEQ ID NO: 149225 - DNA, 15 bp, Homo sapiens
tgaccttgggtaaat

SEQ ID NO: 149226 - DNA, 15 bp, Homo sapiens
atgaccttgggtaaa

SEQ ID NO: 149227 - DNA, 15 bp, Homo sapiens
tatgaccttgggtaa

SEQ ID NO: 149228 - DNA, 15 bp, Homo sapiens
ctatgaccttgggta

SEQ ID NO: 149229 - DNA, 15 bp, Homo sapiens
tctatgaccttgggt

SEQ ID NO: 149230 - DNA, 15 bp, Homo sapiens
ctctatgaccttggg

SEQ ID NO: 149231 - DNA, 15 bp, Homo sapiens
actctatgaccttgg

SEQ ID NO: 149232 - DNA, 15 bp, Homo sapiens
tactctatgaccttg

SEQ ID NO: 149233 - DNA, 15 bp, Homo sapiens
ctactctatgacctt

SEQ ID NO: 149234 - DNA, 15 bp, Homo sapiens
tctactctatgacct

SEQ ID NO: 149235 - DNA, 15 bp, Homo sapiens
ctctactctatgacc

SEQ ID NO: 149236 - DNA, 15 bp, Homo sapiens
actctactctatgac

SEQ ID NO: 149237 - DNA, 15 bp, Homo sapiens
tactctactctatga

SEQ ID NO: 149238 - DNA, 15 bp, Homo sapiens
ttactctactctatg

SEQ ID NO: 149239 - DNA, 15 bp, Homo sapiens
cttactctactctat

SEQ ID NO: 149240 - DNA, 15 bp, Homo sapiens
gcttactctactcta

SEQ ID NO: 149241 - DNA, 15 bp, Homo sapiens
tgcttactctactct

SEQ ID NO: 149242 - DNA, 15 bp, Homo sapiens
ctgcttactctactc

SEQ ID NO: 149243 - DNA, 15 bp, Homo sapiens
tctgcttactctact

SEQ ID NO: 149244 - DNA, 15 bp, Homo sapiens
ttctgcttactctac

SEQ ID NO: 149245 - DNA, 15 bp, Homo sapiens
gttctgcttactcta

SEQ ID NO: 149246 - DNA, 15 bp, Homo sapiens
agttctgcttactct

SEQ ID NO: 149247 - DNA, 15 bp, Homo sapiens
cagttctgcttactc

SEQ ID NO: 149248 - DNA, 15 bp, Homo sapiens
ccagttctgcttact

SEQ ID NO: 149249 - DNA, 15 bp, Homo sapiens
tccagttctgcttac

SEQ ID NO: 149250 - DNA, 15 bp, Homo sapiens
atccagttctgctta

SEQ ID NO: 149251 - DNA, 15 bp, Homo sapiens
aatccagttctgctt

SEQ ID NO: 149252 - DNA, 15 bp, Homo sapiens
aaatccagttctgct

SEQ ID NO: 149253 - DNA, 15 bp, Homo sapiens
caaatccagttctgc

SEQ ID NO: 149254 - DNA, 15 bp, Homo sapiens
tcaaatccagttctg

SEQ ID NO: 149255 - DNA, 15 bp, Homo sapiens
ttcaaatccagttct

SEQ ID NO: 149256 - DNA, 15 bp, Homo sapiens
attcaaatccagttc

SEQ ID NO: 149257 - DNA, 15 bp, Homo sapiens
aattcaaatccagtt

SEQ ID NO: 149258 - DNA, 15 bp, Homo sapiens
gaattcaaatccagt

SEQ ID NO: 149259 - DNA, 15 bp, Homo sapiens
tgaattcaaatccag

SEQ ID NO: 149260 - DNA, 15 bp, Homo sapiens
gtgaattcaaatcca

SEQ ID NO: 149261 - DNA, 15 bp, Homo sapiens
tgtgaattcaaatcc

SEQ ID NO: 149262 - DNA, 15 bp, Homo sapiens
atgtgaattcaaatc

SEQ ID NO: 149263 - DNA, 15 bp, Homo sapiens
gatgtgaattcaaat

SEQ ID NO: 149264 - DNA, 15 bp, Homo sapiens
agatgtgaattcaaa

SEQ ID NO: 149265 - DNA, 15 bp, Homo sapiens
cagatgtgaattcaa

SEQ ID NO: 149266 - DNA, 15 bp, Homo sapiens
tcagatgtgaattca

SEQ ID NO: 149267 - DNA, 15 bp, Homo sapiens
gtcagatgtgaattc

SEQ ID NO: 149268 - DNA, 15 bp, Homo sapiens
agtcagatgtgaatt

SEQ ID NO: 149269 - DNA, 15 bp, Homo sapiens
gagtcagatgtgaat

SEQ ID NO: 149270 - DNA, 15 bp, Homo sapiens
ggagtcagatgtgaa

SEQ ID NO: 149271 - DNA, 15 bp, Homo sapiens
tggagtcagatgtga

SEQ ID NO: 149272 - DNA, 15 bp, Homo sapiens
ctggagtcagatgtg

SEQ ID NO: 149273 - DNA, 15 bp, Homo sapiens
tctggagtcagatgt

SEQ ID NO: 149274 - DNA, 15 bp, Homo sapiens
ttctggagtcagatg

SEQ ID NO: 149275 - DNA, 15 bp, Homo sapiens
attctggagtcagat

SEQ ID NO: 149276 - DNA, 15 bp, Homo sapiens
aattctggagtcaga

SEQ ID NO: 149277 - DNA, 15 bp, Homo sapiens
aaattctggagtcag

SEQ ID NO: 149278 - DNA, 15 bp, Homo sapiens
taaattctggagtca

SEQ ID NO: 149279 - DNA, 15 bp, Homo sapiens
ataaattctggagtc

SEQ ID NO: 149280 - DNA, 15 bp, Homo sapiens
gataaattctggagt

SEQ ID NO: 149281 - DNA, 15 bp, Homo sapiens
agataaattctggag

SEQ ID NO: 149282 - DNA, 15 bp, Homo sapiens
tagataaattctgga

SEQ ID NO: 149283 - DNA, 15 bp, Homo sapiens
atagataaattctgg

SEQ ID NO: 149284 - DNA, 15 bp, Homo sapiens
aatagataaattctg

SEQ ID NO: 149285 - DNA, 15 bp, Homo sapiens
taatagataaattct

SEQ ID NO: 149286 - DNA, 15 bp, Homo sapiens
ttaatagataaattc

SEQ ID NO: 149287 - DNA, 15 bp, Homo sapiens
gttaatagataaatt

SEQ ID NO: 149288 - DNA, 15 bp, Homo sapiens
tgttaatagataaat

SEQ ID NO: 149289 - DNA, 15 bp, Homo sapiens
ttgttaatagataaa

SEQ ID NO: 149290 - DNA, 15 bp, Homo sapiens
attgttaatagataa

SEQ ID NO: 149291 - DNA, 15 bp, Homo sapiens
aattgttaatagata

SEQ ID NO: 149292 - DNA, 15 bp, Homo sapiens
taattgttaatagat

SEQ ID NO: 149293 - DNA, 15 bp, Homo sapiens
gtaattgttaataga

SEQ ID NO: 149294 - DNA, 15 bp, Homo sapiens
tgtaattgttaatag

SEQ ID NO: 149295 - DNA, 15 bp, Homo sapiens
gtgtaattgttaata

SEQ ID NO: 149296 - DNA, 15 bp, Homo sapiens
agtgtaattgttaat

SEQ ID NO: 149297 - DNA, 15 bp, Homo sapiens
tagtgtaattgttaa

SEQ ID NO: 149298 - DNA, 15 bp, Homo sapiens
gtagtgtaattgtta

SEQ ID NO: 149299 - DNA, 15 bp, Homo sapiens
tgtagtgtaattgtt

SEQ ID NO: 149300 - DNA, 15 bp, Homo sapiens
gtgtagtgtaattgt

SEQ ID NO: 149301 - DNA, 15 bp, Homo sapiens
agtgtagtgtaattg

SEQ ID NO: 149302 - DNA, 15 bp, Homo sapiens
cagtgtagtgtaatt

SEQ ID NO: 149303 - DNA, 15 bp, Homo sapiens
gcagtgtagtgtaat

SEQ ID NO: 149304 - DNA, 15 bp, Homo sapiens
ggcagtgtagtgtaa

SEQ ID NO: 149305 - DNA, 15 bp, Homo sapiens
aggcagtgtagtgta

SEQ ID NO: 149306 - DNA, 15 bp, Homo sapiens
aaggcagtgtagtgt

SEQ ID NO: 149307 - DNA, 15 bp, Homo sapiens
aaaggcagtgtagtg

SEQ ID NO: 149308 - DNA, 15 bp, Homo sapiens
gaaaggcagtgtagt

SEQ ID NO: 149309 - DNA, 15 bp, Homo sapiens
ggaaaggcagtgtag

SEQ ID NO: 149310 - DNA, 15 bp, Homo sapiens
aggaaaggcagtgta

SEQ ID NO: 149311 - DNA, 15 bp, Homo sapiens
aaggaaaggcagtgt

SEQ ID NO: 149312 - DNA, 15 bp, Homo sapiens
gaaggaaaggcagtg

SEQ ID NO: 149313 - DNA, 15 bp, Homo sapiens
agaaggaaaggcagt

SEQ ID NO: 149314 - DNA, 15 bp, Homo sapiens
cagaaggaaaggcag

SEQ ID NO: 149315 - DNA, 15 bp, Homo sapiens
tcagaaggaaaggca

SEQ ID NO: 149316 - DNA, 15 bp, Homo sapiens
ctcagaaggaaaggc

SEQ ID NO: 149317 - DNA, 15 bp, Homo sapiens
tctcagaaggaaagg

SEQ ID NO: 149318 - DNA, 15 bp, Homo sapiens
ttctcagaaggaaag

SEQ ID NO: 149319 - DNA, 15 bp, Homo sapiens
tttctcagaaggaaa

SEQ ID NO: 149320 - DNA, 15 bp, Homo sapiens
atttctcagaaggaa

SEQ ID NO: 149321 - DNA, 15 bp, Homo sapiens
catttctcagaagga

SEQ ID NO: 149322 - DNA, 15 bp, Homo sapiens
gcatttctcagaagg

SEQ ID NO: 149323 - DNA, 15 bp, Homo sapiens
agcatttctcagaag

SEQ ID NO: 149324 - DNA, 15 bp, Homo sapiens
tagcatttctcagaa

SEQ ID NO: 149325 - DNA, 15 bp, Homo sapiens
atagcatttctcaga

SEQ ID NO: 149326 - DNA, 15 bp, Homo sapiens
catagcatttctcag

SEQ ID NO: 149327 - DNA, 15 bp, Homo sapiens
tcatagcatttctca

SEQ ID NO: 149328 - DNA, 15 bp, Homo sapiens
atcatagcatttctc

SEQ ID NO: 149329 - DNA, 15 bp, Homo sapiens
aatcatagcatttct

SEQ ID NO: 149330 - DNA, 15 bp, Homo sapiens
aaatcatagcatttc

SEQ ID NO: 149331 - DNA, 15 bp, Homo sapiens
aaaatcatagcattt

SEQ ID NO: 149332 - DNA, 15 bp, Homo sapiens
caaaatcatagcatt

SEQ ID NO: 149333 - DNA, 15 bp, Homo sapiens
tcaaaatcatagcat

SEQ ID NO: 149334 - DNA, 15 bp, Homo sapiens
gtcaaaatcatagca

SEQ ID NO: 149335 - DNA, 15 bp, Homo sapiens
tgtcaaaatcatagc

SEQ ID NO: 149336 - DNA, 15 bp, Homo sapiens
ttgtcaaaatcatag

SEQ ID NO: 149337 - DNA, 15 bp, Homo sapiens
gttgtcaaaatcata

SEQ ID NO: 149338 - DNA, 15 bp, Homo sapiens
agttgtcaaaatcat

SEQ ID NO: 149339 - DNA, 15 bp, Homo sapiens
tagttgtcaaaatca

SEQ ID NO: 149340 - DNA, 15 bp, Homo sapiens
gtagttgtcaaaatc

SEQ ID NO: 149341 - DNA, 15 bp, Homo sapiens
tgtagttgtcaaaat

SEQ ID NO: 149342 - DNA, 15 bp, Homo sapiens
ctgtagttgtcaaaa

SEQ ID NO: 149343 - DNA, 15 bp, Homo sapiens
tctgtagttgtcaaa

SEQ ID NO: 149344 - DNA, 15 bp, Homo sapiens
ctctgtagttgtcaa

SEQ ID NO: 149345 - DNA, 15 bp, Homo sapiens
cctctgtagttgtca

SEQ ID NO: 149346 - DNA, 15 bp, Homo sapiens
ccctctgtagttgtc

SEQ ID NO: 149347 - DNA, 15 bp, Homo sapiens
tccctctgtagttgt

SEQ ID NO: 149348 - DNA, 15 bp, Homo sapiens
ttccctctgtagttg

SEQ ID NO: 149349 - DNA, 15 bp, Homo sapiens
attccctctgtagtt

SEQ ID NO: 149350 - DNA, 15 bp, Homo sapiens
tattccctctgtagt

SEQ ID NO: 149351 - DNA, 15 bp, Homo sapiens
atattccctctgtag

SEQ ID NO: 149352 - DNA, 15 bp, Homo sapiens
catattccctctgta

SEQ ID NO: 149353 - DNA, 15 bp, Homo sapiens
tcatattccctctgt

SEQ ID NO: 149354 - DNA, 15 bp, Homo sapiens
gtcatattccctctg

SEQ ID NO: 149355 - DNA, 15 bp, Homo sapiens
agtcatattccctct

SEQ ID NO: 149356 - DNA, 15 bp, Homo sapiens
cagtcatattccctc

SEQ ID NO: 149357 - DNA, 15 bp, Homo sapiens
acagtcatattccct

SEQ ID NO: 149358 - DNA, 15 bp, Homo sapiens
tacagtcatattccc

SEQ ID NO: 149359 - DNA, 15 bp, Homo sapiens
ttacagtcatattcc

SEQ ID NO: 149360 - DNA, 15 bp, Homo sapiens
tttacagtcatattc

SEQ ID NO: 149361 - DNA, 15 bp, Homo sapiens
ctttacagtcatatt

SEQ ID NO: 149362 - DNA, 15 bp, Homo sapiens
cctttacagtcatat

SEQ ID NO: 149363 - DNA, 15 bp, Homo sapiens
gcctttacagtcata

SEQ ID NO: 149364 - DNA, 15 bp, Homo sapiens
ggcctttacagtcat

SEQ ID NO: 149365 - DNA, 15 bp, Homo sapiens
gggcctttacagtca

SEQ ID NO: 149366 - DNA, 15 bp, Homo sapiens
agggcctttacagtc

SEQ ID NO: 149367 - DNA, 15 bp, Homo sapiens
cagggcctttacagt

SEQ ID NO: 149368 - DNA, 15 bp, Homo sapiens
tcagggcctttacag

SEQ ID NO: 149369 - DNA, 15 bp, Homo sapiens
ttcagggcctttaca

SEQ ID NO: 149370 - DNA, 15 bp, Homo sapiens
cttcagggcctttac

SEQ ID NO: 149371 - DNA, 15 bp, Homo sapiens
gcttcagggccttta

SEQ ID NO: 149372 - DNA, 15 bp, Homo sapiens
tgcttcagggccttt

SEQ ID NO: 149373 - DNA, 15 bp, Homo sapiens
ttgcttcagggcctt

SEQ ID NO: 149374 - DNA, 15 bp, Homo sapiens
cttgcttcagggcct

SEQ ID NO: 149375 - DNA, 15 bp, Homo sapiens
tcttgcttcagggcc

SEQ ID NO: 149376 - DNA, 15 bp, Homo sapiens
ctcttgcttcagggc

SEQ ID NO: 149377 - DNA, 15 bp, Homo sapiens
cctcttgcttcaggg

SEQ ID NO: 149378 - DNA, 15 bp, Homo sapiens
tcctcttgcttcagg

SEQ ID NO: 149379 - DNA, 15 bp, Homo sapiens
ttcctcttgcttcag

SEQ ID NO: 149380 - DNA, 15 bp, Homo sapiens
cttcctcttgcttca

SEQ ID NO: 149381 - DNA, 15 bp, Homo sapiens
tcttcctcttgcttc

SEQ ID NO: 149382 - DNA, 15 bp, Homo sapiens
ctcttcctcttgctt

SEQ ID NO: 149383 - DNA, 15 bp, Homo sapiens
actcttcctcttgct

SEQ ID NO: 149384 - DNA, 15 bp, Homo sapiens
tactcttcctcttgc

SEQ ID NO: 149385 - DNA, 15 bp, Homo sapiens
atactcttcctcttg

SEQ ID NO: 149386 - DNA, 15 bp, Homo sapiens
aatactcttcctctt

SEQ ID NO: 149387 - DNA, 15 bp, Homo sapiens
taatactcttcctct

SEQ ID NO: 149388 - DNA, 15 bp, Homo sapiens
ctaatactcttcctc

SEQ ID NO: 149389 - DNA, 15 bp, Homo sapiens
cctaatactcttcct

SEQ ID NO: 149390 - DNA, 15 bp, Homo sapiens
tcctaatactcttcc

SEQ ID NO: 149391 - DNA, 15 bp, Homo sapiens
ctcctaatactcttc

SEQ ID NO: 149392 - DNA, 15 bp, Homo sapiens
tctcctaatactctt

SEQ ID NO: 149393 - DNA, 15 bp, Homo sapiens
atctcctaatactct

SEQ ID NO: 149394 - DNA, 15 bp, Homo sapiens
catctcctaatactc

SEQ ID NO: 149395 - DNA, 15 bp, Homo sapiens
tcatctcctaatact

SEQ ID NO: 149396 - DNA, 15 bp, Homo sapiens
ctcatctcctaatac

SEQ ID NO: 149397 - DNA, 15 bp, Homo sapiens
cctcatctcctaata

SEQ ID NO: 149398 - DNA, 15 bp, Homo sapiens
acctcatctcctaat

SEQ ID NO: 149399 - DNA, 15 bp, Homo sapiens
gacctcatctcctaa

SEQ ID NO: 149400 - DNA, 15 bp, Homo sapiens
cgacctcatctccta

SEQ ID NO: 149401 - DNA, 15 bp, Homo sapiens
ccgacctcatctcct

SEQ ID NO: 149402 - DNA, 15 bp, Homo sapiens
accgacctcatctcc

SEQ ID NO: 149403 - DNA, 15 bp, Homo sapiens
caccgacctcatctc

SEQ ID NO: 149404 - DNA, 15 bp, Homo sapiens
tcaccgacctcatct

SEQ ID NO: 149405 - DNA, 15 bp, Homo sapiens
ctcaccgacctcatc

SEQ ID NO: 149406 - DNA, 15 bp, Homo sapiens
gctcaccgacctcat

SEQ ID NO: 149407 - DNA, 15 bp, Homo sapiens
tgctcaccgacctca

SEQ ID NO: 149408 - DNA, 15 bp, Homo sapiens
atgctcaccgacctc

SEQ ID NO: 149409 - DNA, 15 bp, Homo sapiens
tatgctcaccgacct

SEQ ID NO: 149410 - DNA, 15 bp, Homo sapiens
ctatgctcaccgacc

SEQ ID NO: 149411 - DNA, 15 bp, Homo sapiens
cctatgctcaccgac

SEQ ID NO: 149412 - DNA, 15 bp, Homo sapiens
gcctatgctcaccga

SEQ ID NO: 149413 - DNA, 15 bp, Homo sapiens
ggcctatgctcaccg

SEQ ID NO: 149414 - DNA, 15 bp, Homo sapiens
tggcctatgctcacc

SEQ ID NO: 149415 - DNA, 15 bp, Homo sapiens
ttggcctatgctcac

SEQ ID NO: 149416 - DNA, 15 bp, Homo sapiens
tttggcctatgctca

SEQ ID NO: 149417 - DNA, 15 bp, Homo sapiens
ctttggcctatgctc

SEQ ID NO: 149418 - DNA, 15 bp, Homo sapiens
gctttggcctatgct

SEQ ID NO: 149419 - DNA, 15 bp, Homo sapiens
tgctttggcctatgc

SEQ ID NO: 149420 - DNA, 15 bp, Homo sapiens
atgctttggcctatg

SEQ ID NO: 149421 - DNA, 15 bp, Homo sapiens
tatgctttggcctat

SEQ ID NO: 149422 - DNA, 15 bp, Homo sapiens
atatgctttggccta

SEQ ID NO: 149423 - DNA, 15 bp, Homo sapiens
tatatgctttggcct

SEQ ID NO: 149424 - DNA, 15 bp, Homo sapiens
ctatatgctttggcc

SEQ ID NO: 149425 - DNA, 15 bp, Homo sapiens
cctatatgctttggc

SEQ ID NO: 149426 - DNA, 15 bp, Homo sapiens
gcctatatgctttgg

SEQ ID NO: 149427 - DNA, 15 bp, Homo sapiens
ggcctatatgctttg

SEQ ID NO: 149428 - DNA, 15 bp, Homo sapiens
aggcctatatgcttt

SEQ ID NO: 149429 - DNA, 15 bp, Homo sapiens
aaggcctatatgctt

SEQ ID NO: 149430 - DNA, 15 bp, Homo sapiens
aaaggcctatatgct

SEQ ID NO: 149431 - DNA, 15 bp, Homo sapiens
caaaggcctatatgc

SEQ ID NO: 149432 - DNA, 15 bp, Homo sapiens
acaaaggcctatatg

SEQ ID NO: 149433 - DNA, 15 bp, Homo sapiens
tacaaaggcctatat

SEQ ID NO: 149434 - DNA, 15 bp, Homo sapiens
ctacaaaggcctata

SEQ ID NO: 149435 - DNA, 15 bp, Homo sapiens
cctacaaaggcctat

SEQ ID NO: 149436 - DNA, 15 bp, Homo sapiens
ccctacaaaggccta

SEQ ID NO: 149437 - DNA, 15 bp, Homo sapiens
cccctacaaaggcct

SEQ ID NO: 149438 - DNA, 15 bp, Homo sapiens
tcccctacaaaggcc

SEQ ID NO: 149439 - DNA, 15 bp, Homo sapiens
atcccctacaaaggc

SEQ ID NO: 149440 - DNA, 15 bp, Homo sapiens
aatcccctacaaagg

SEQ ID NO: 149441 - DNA, 15 bp, Homo sapiens
taatcccctacaaag

SEQ ID NO: 149442 - DNA, 15 bp, Homo sapiens
gtaatcccctacaaa

SEQ ID NO: 149443 - DNA, 15 bp, Homo sapiens
cgtaatcccctacaa

SEQ ID NO: 149444 - DNA, 15 bp, Homo sapiens
tcgtaatcccctaca

SEQ ID NO: 149445 - DNA, 15 bp, Homo sapiens
ctcgtaatcccctac

SEQ ID NO: 149446 - DNA, 15 bp, Homo sapiens
tctcgtaatccccta

SEQ ID NO: 149447 - DNA, 15 bp, Homo sapiens
ttctcgtaatcccct

SEQ ID NO: 149448 - DNA, 15 bp, Homo sapiens
attctcgtaatcccc

SEQ ID NO: 149449 - DNA, 15 bp, Homo sapiens
cattctcgtaatccc

SEQ ID NO: 149450 - DNA, 15 bp, Homo sapiens
ccattctcgtaatcc

SEQ ID NO: 149451 - DNA, 15 bp, Homo sapiens
cccattctcgtaatc

SEQ ID NO: 149452 - DNA, 15 bp, Homo sapiens
tcccattctcgtaat

SEQ ID NO: 149453 - DNA, 15 bp, Homo sapiens
ttcccattctcgtaa

SEQ ID NO: 149454 - DNA, 15 bp, Homo sapiens
cttcccattctcgta

SEQ ID NO: 149455 - DNA, 15 bp, Homo sapiens
tcttcccattctcgt

SEQ ID NO: 149456 - DNA, 15 bp, Homo sapiens
atcttcccattctcg

SEQ ID NO: 149457 - DNA, 15 bp, Homo sapiens
catcttcccattctc

SEQ ID NO: 149458 - DNA, 15 bp, Homo sapiens
acatcttcccattct

SEQ ID NO: 149459 - DNA, 15 bp, Homo sapiens
cacatcttcccattc

SEQ ID NO: 149460 - DNA, 15 bp, Homo sapiens
tcacatcttcccatt

SEQ ID NO: 149461 - DNA, 15 bp, Homo sapiens
ctcacatcttcccat

SEQ ID NO: 149462 - DNA, 15 bp, Homo sapiens
tctcacatcttccca

SEQ ID NO: 149463 - DNA, 15 bp, Homo sapiens
atctcacatcttccc

SEQ ID NO: 149464 - DNA, 15 bp, Homo sapiens
catctcacatcttcc

SEQ ID NO: 149465 - DNA, 15 bp, Homo sapiens
ccatctcacatcttc

SEQ ID NO: 149466 - DNA, 15 bp, Homo sapiens
cccatctcacatctt

SEQ ID NO: 149467 - DNA, 15 bp, Homo sapiens
tcccatctcacatct

SEQ ID NO: 149468 - DNA, 15 bp, Homo sapiens
ttcccatctcacatc

SEQ ID NO: 149469 - DNA, 15 bp, Homo sapiens
cttcccatctcacat

SEQ ID NO: 149470 - DNA, 15 bp, Homo sapiens
gcttcccatctcaca

SEQ ID NO: 149471 - DNA, 15 bp, Homo sapiens
ggcttcccatctcac

SEQ ID NO: 149472 - DNA, 15 bp, Homo sapiens
tggcttcccatctca

SEQ ID NO: 149473 - DNA, 15 bp, Homo sapiens
gtggcttcccatctc

SEQ ID NO: 149474 - DNA, 15 bp, Homo sapiens
agtggcttcccatct

SEQ ID NO: 149475 - DNA, 15 bp, Homo sapiens
cagtggcttcccatc

SEQ ID NO: 149476 - DNA, 15 bp, Homo sapiens
ccagtggcttcccat

SEQ ID NO: 149477 - DNA, 15 bp, Homo sapiens
cccagtggcttccca

SEQ ID NO: 149478 - DNA, 15 bp, Homo sapiens
tcccagtggcttccc

SEQ ID NO: 149479 - DNA, 15 bp, Homo sapiens
ttcccagtggcttcc

SEQ ID NO: 149480 - DNA, 15 bp, Homo sapiens
tttcccagtggcttc

SEQ ID NO: 149481 - DNA, 15 bp, Homo sapiens
atttcccagtggctt

SEQ ID NO: 149482 - DNA, 15 bp, Homo sapiens
tatttcccagtggct

SEQ ID NO: 149483 - DNA, 15 bp, Homo sapiens
atatttcccagtggc

SEQ ID NO: 149484 - DNA, 15 bp, Homo sapiens
aatatttcccagtgg

SEQ ID NO: 149485 - DNA, 15 bp, Homo sapiens
caatatttcccagtg

SEQ ID NO: 149486 - DNA, 15 bp, Homo sapiens
tcaatatttcccagt

SEQ ID NO: 149487 - DNA, 15 bp, Homo sapiens
ctcaatatttcccag

SEQ ID NO: 149488 - DNA, 15 bp, Homo sapiens
gctcaatatttccca

SEQ ID NO: 149489 - DNA, 15 bp, Homo sapiens
tgctcaatatttccc

SEQ ID NO: 149490 - DNA, 15 bp, Homo sapiens
ttgctcaatatttcc

SEQ ID NO: 149491 - DNA, 15 bp, Homo sapiens
tttgctcaatatttc

SEQ ID NO: 149492 - DNA, 15 bp, Homo sapiens
atttgctcaatattt

SEQ ID NO: 149493 - DNA, 15 bp, Homo sapiens
catttgctcaatatt

SEQ ID NO: 149494 - DNA, 15 bp, Homo sapiens
acatttgctcaatat

SEQ ID NO: 149495 - DNA, 15 bp, Homo sapiens
cacatttgctcaata

SEQ ID NO: 149496 - DNA, 15 bp, Homo sapiens
tcacatttgctcaat

SEQ ID NO: 149497 - DNA, 15 bp, Homo sapiens
atcacatttgctcaa

SEQ ID NO: 149498 - DNA, 15 bp, Homo sapiens
aatcacatttgctca

SEQ ID NO: 149499 - DNA, 15 bp, Homo sapiens
aaatcacatttgctc

SEQ ID NO: 149500 - DNA, 15 bp, Homo sapiens
taaatcacatttgct

SEQ ID NO: 149501 - DNA, 15 bp, Homo sapiens
ataaatcacatttgc

SEQ ID NO: 149502 - DNA, 15 bp, Homo sapiens
cataaatcacatttg

SEQ ID NO: 149503 - DNA, 15 bp, Homo sapiens
gcataaatcacattt

SEQ ID NO: 149504 - DNA, 15 bp, Homo sapiens
agcataaatcacatt

SEQ ID NO: 149505 - DNA, 15 bp, Homo sapiens
aagcataaatcacat

SEQ ID NO: 149506 - DNA, 15 bp, Homo sapiens
aaagcataaatcaca

SEQ ID NO: 149507 - DNA, 15 bp, Homo sapiens
taaagcataaatcac

SEQ ID NO: 149508 - DNA, 15 bp, Homo sapiens
ttaaagcataaatca

SEQ ID NO: 149509 - DNA, 15 bp, Homo sapiens
tttaaagcataaatc

SEQ ID NO: 149510 - DNA, 15 bp, Homo sapiens
ttttaaagcataaat

SEQ ID NO: 149511 - DNA, 15 bp, Homo sapiens
cttttaaagcataaa

SEQ ID NO: 149512 - DNA, 15 bp, Homo sapiens
tcttttaaagcataa

SEQ ID NO: 149513 - DNA, 15 bp, Homo sapiens
ttcttttaaagcata

SEQ ID NO: 149514 - DNA, 15 bp, Homo sapiens
attcttttaaagcat

SEQ ID NO: 149515 - DNA, 15 bp, Homo sapiens
gattcttttaaagca

SEQ ID NO: 149516 - DNA, 15 bp, Homo sapiens
agattcttttaaagc

SEQ ID NO: 149517 - DNA, 15 bp, Homo sapiens
gagattcttttaaag

SEQ ID NO: 149518 - DNA, 15 bp, Homo sapiens
agagattcttttaaa

SEQ ID NO: 149519 - DNA, 15 bp, Homo sapiens
aagagattcttttaa

SEQ ID NO: 149520 - DNA, 15 bp, Homo sapiens
aaagagattctttta

SEQ ID NO: 149521 - DNA, 15 bp, Homo sapiens
gaaagagattctttt

SEQ ID NO: 149522 - DNA, 15 bp, Homo sapiens
agaaagagattcttt

SEQ ID NO: 149523 - DNA, 15 bp, Homo sapiens
aagaaagagattctt

SEQ ID NO: 149524 - DNA, 15 bp, Homo sapiens
aaagaaagagattct

SEQ ID NO: 149525 - DNA, 15 bp, Homo sapiens
caaagaaagagattc

SEQ ID NO: 149526 - DNA, 15 bp, Homo sapiens
ccaaagaaagagatt

SEQ ID NO: 149527 - DNA, 15 bp, Homo sapiens
gccaaagaaagagat

SEQ ID NO: 149528 - DNA, 15 bp, Homo sapiens
agccaaagaaagaga

SEQ ID NO: 149529 - DNA, 15 bp, Homo sapiens
cagccaaagaaagag

SEQ ID NO: 149530 - DNA, 15 bp, Homo sapiens
gcagccaaagaaaga

SEQ ID NO: 149531 - DNA, 15 bp, Homo sapiens
agcagccaaagaaag

SEQ ID NO: 149532 - DNA, 15 bp, Homo sapiens
cagcagccaaagaaa

SEQ ID NO: 149533 - DNA, 15 bp, Homo sapiens
tcagcagccaaagaa

SEQ ID NO: 149534 - DNA, 15 bp, Homo sapiens
ctcagcagccaaaga

SEQ ID NO: 149535 - DNA, 15 bp, Homo sapiens
actcagcagccaaag

SEQ ID NO: 149536 - DNA, 15 bp, Homo sapiens
aactcagcagccaaa

SEQ ID NO: 149537 - DNA, 15 bp, Homo sapiens
caactcagcagccaa

SEQ ID NO: 149538 - DNA, 15 bp, Homo sapiens
acaactcagcagcca

SEQ ID NO: 149539 - DNA, 15 bp, Homo sapiens
cacaactcagcagcc

SEQ ID NO: 149540 - DNA, 15 bp, Homo sapiens
tcacaactcagcagc

SEQ ID NO: 149541 - DNA, 15 bp, Homo sapiens
ttcacaactcagcag

SEQ ID NO: 149542 - DNA, 15 bp, Homo sapiens
gttcacaactcagca

SEQ ID NO: 149543 - DNA, 15 bp, Homo sapiens
tgttcacaactcagc

SEQ ID NO: 149544 - DNA, 15 bp, Homo sapiens
ctgttcacaactcag

SEQ ID NO: 149545 - DNA, 15 bp, Homo sapiens
actgttcacaactca

SEQ ID NO: 149546 - DNA, 15 bp, Homo sapiens
cactgttcacaactc

SEQ ID NO: 149547 - DNA, 15 bp, Homo sapiens
gcactgttcacaact

SEQ ID NO: 149548 - DNA, 15 bp, Homo sapiens
tgcactgttcacaac

SEQ ID NO: 149549 - DNA, 15 bp, Homo sapiens
gtgcactgttcacaa

SEQ ID NO: 149550 - DNA, 15 bp, Homo sapiens
agtgcactgttcaca

SEQ ID NO: 149551 - DNA, 15 bp, Homo sapiens
cagtgcactgttcac

SEQ ID NO: 149552 - DNA, 15 bp, Homo sapiens
ccagtgcactgttca

SEQ ID NO: 149553 - DNA, 15 bp, Homo sapiens
gccagtgcactgttc

SEQ ID NO: 149554 - DNA, 15 bp, Homo sapiens
tgccagtgcactgtt

SEQ ID NO: 149555 - DNA, 15 bp, Homo sapiens
ttgccagtgcactgt

SEQ ID NO: 149556 - DNA, 15 bp, Homo sapiens
cttgccagtgcactg

SEQ ID NO: 149557 - DNA, 15 bp, Homo sapiens
ccttgccagtgcact

SEQ ID NO: 149558 - DNA, 15 bp, Homo sapiens
cccttgccagtgcac

SEQ ID NO: 149559 - DNA, 15 bp, Homo sapiens
gcccttgccagtgca

SEQ ID NO: 149560 - DNA, 15 bp, Homo sapiens
tgcccttgccagtgc

SEQ ID NO: 149561 - DNA, 15 bp, Homo sapiens
ctgcccttgccagtg

SEQ ID NO: 149562 - DNA, 15 bp, Homo sapiens
tctgcccttgccagt

SEQ ID NO: 149563 - DNA, 15 bp, Homo sapiens
ttctgcccttgccag

SEQ ID NO: 149564 - DNA, 15 bp, Homo sapiens
cttctgcccttgcca

SEQ ID NO: 149565 - DNA, 15 bp, Homo sapiens
gcttctgcccttgcc

SEQ ID NO: 149566 - DNA, 15 bp, Homo sapiens
tgcttctgcccttgc

SEQ ID NO: 149567 - DNA, 15 bp, Homo sapiens
ctgcttctgcccttg

SEQ ID NO: 149568 - DNA, 15 bp, Homo sapiens
cctgcttctgccctt

SEQ ID NO: 149569 - DNA, 15 bp, Homo sapiens
ccctgcttctgccct

SEQ ID NO: 149570 - DNA, 15 bp, Homo sapiens
tccctgcttctgccc

SEQ ID NO: 149571 - DNA, 15 bp, Homo sapiens
ctccctgcttctgcc

SEQ ID NO: 149572 - DNA, 15 bp, Homo sapiens
cctccctgcttctgc

SEQ ID NO: 149573 - DNA, 15 bp, Homo sapiens
gcctccctgcttctg

SEQ ID NO: 149574 - DNA, 15 bp, Homo sapiens
ggcctccctgcttct

SEQ ID NO: 149575 - DNA, 15 bp, Homo sapiens
tggcctccctgcttc

SEQ ID NO: 149576 - DNA, 15 bp, Homo sapiens
atggcctccctgctt

SEQ ID NO: 149577 - DNA, 15 bp, Homo sapiens
aatggcctccctgct

SEQ ID NO: 149578 - DNA, 15 bp, Homo sapiens
aaatggcctccctgc

SEQ ID NO: 149579 - DNA, 15 bp, Homo sapiens
taaatggcctccctg

SEQ ID NO: 149580 - DNA, 15 bp, Homo sapiens
ctaaatggcctccct

SEQ ID NO: 149581 - DNA, 15 bp, Homo sapiens
cctaaatggcctccc

SEQ ID NO: 149582 - DNA, 15 bp, Homo sapiens
tcctaaatggcctcc

SEQ ID NO: 149583 - DNA, 15 bp, Homo sapiens
ctcctaaatggcctc

SEQ ID NO: 149584 - DNA, 15 bp, Homo sapiens
tctcctaaatggcct

SEQ ID NO: 149585 - DNA, 15 bp, Homo sapiens
gtctcctaaatggcc

SEQ ID NO: 149586 - DNA, 15 bp, Homo sapiens
agtctcctaaatggc

SEQ ID NO: 149587 - DNA, 15 bp, Homo sapiens
aagtctcctaaatgg

SEQ ID NO: 149588 - DNA, 15 bp, Homo sapiens
caagtctcctaaatg

SEQ ID NO: 149589 - DNA, 15 bp, Homo sapiens
gcaagtctcctaaat

SEQ ID NO: 149590 - DNA, 15 bp, Homo sapiens
tgcaagtctcctaaa

SEQ ID NO: 149591 - DNA, 15 bp, Homo sapiens
ttgcaagtctcctaa

SEQ ID NO: 149592 - DNA, 15 bp, Homo sapiens
gttgcaagtctccta

SEQ ID NO: 149593 - DNA, 15 bp, Homo sapiens
tgttgcaagtctcct

SEQ ID NO: 149594 - DNA, 15 bp, Homo sapiens
ttgttgcaagtctcc

SEQ ID NO: 149595 - DNA, 15 bp, Homo sapiens
attgttgcaagtctc

SEQ ID NO: 149596 - DNA, 15 bp, Homo sapiens
gattgttgcaagtct

SEQ ID NO: 149597 - DNA, 15 bp, Homo sapiens
ggattgttgcaagtc

SEQ ID NO: 149598 - DNA, 15 bp, Homo sapiens
tggattgttgcaagt

SEQ ID NO: 149599 - DNA, 15 bp, Homo sapiens
ctggattgttgcaag

SEQ ID NO: 149600 - DNA, 15 bp, Homo sapiens
cctggattgttgcaa

SEQ ID NO: 149601 - DNA, 15 bp, Homo sapiens
acctggattgttgca

SEQ ID NO: 149602 - DNA, 15 bp, Homo sapiens
gacctggattgttgc

SEQ ID NO: 149603 - DNA, 15 bp, Homo sapiens
tgacctggattgttg

SEQ ID NO: 149604 - DNA, 15 bp, Homo sapiens
ttgacctggattgtt

SEQ ID NO: 149605 - DNA, 15 bp, Homo sapiens
tttgacctggattgt

SEQ ID NO: 149606 - DNA, 15 bp, Homo sapiens
atttgacctggattg

SEQ ID NO: 149607 - DNA, 15 bp, Homo sapiens
catttgacctggatt

SEQ ID NO: 149608 - DNA, 15 bp, Homo sapiens
tcatttgacctggat

SEQ ID NO: 149609 - DNA, 15 bp, Homo sapiens
atcatttgacctgga

SEQ ID NO: 149610 - DNA, 15 bp, Homo sapiens
catcatttgacctgg

SEQ ID NO: 149611 - DNA, 15 bp, Homo sapiens
tcatcatttgacctg

SEQ ID NO: 149612 - DNA, 15 bp, Homo sapiens
ctcatcatttgacct

SEQ ID NO: 149613 - DNA, 15 bp, Homo sapiens
tctcatcatttgacc

SEQ ID NO: 149614 - DNA, 15 bp, Homo sapiens
ttctcatcatttgac

SEQ ID NO: 149615 - DNA, 15 bp, Homo sapiens
tttctcatcatttga

SEQ ID NO: 149616 - DNA, 15 bp, Homo sapiens
atttctcatcatttg

SEQ ID NO: 149617 - DNA, 15 bp, Homo sapiens
tatttctcatcattt

SEQ ID NO: 149618 - DNA, 15 bp, Homo sapiens
ctatttctcatcatt

SEQ ID NO: 149619 - DNA, 15 bp, Homo sapiens
actatttctcatcat

SEQ ID NO: 149620 - DNA, 15 bp, Homo sapiens
aactatttctcatca

SEQ ID NO: 149621 - DNA, 15 bp, Homo sapiens
taactatttctcatc

SEQ ID NO: 149622 - DNA, 15 bp, Homo sapiens
ctaactatttctcat

SEQ ID NO: 149623 - DNA, 15 bp, Homo sapiens
cctaactatttctca

SEQ ID NO: 149624 - DNA, 15 bp, Homo sapiens
gcctaactatttctc

SEQ ID NO: 149625 - DNA, 15 bp, Homo sapiens
agcctaactatttct

SEQ ID NO: 149626 - DNA, 15 bp, Homo sapiens
aagcctaactatttc

SEQ ID NO: 149627 - DNA, 15 bp, Homo sapiens
aaagcctaactattt

SEQ ID NO: 149628 - DNA, 15 bp, Homo sapiens
caaagcctaactatt

SEQ ID NO: 149629 - DNA, 15 bp, Homo sapiens
ccaaagcctaactat

SEQ ID NO: 149630 - DNA, 15 bp, Homo sapiens
tccaaagcctaacta

SEQ ID NO: 149631 - DNA, 15 bp, Homo sapiens
atccaaagcctaact

SEQ ID NO: 149632 - DNA, 15 bp, Homo sapiens
tatccaaagcctaac

SEQ ID NO: 149633 - DNA, 15 bp, Homo sapiens
tcagaggagagtctg

SEQ ID NO: 149634 - DNA, 15 bp, Homo sapiens
ttcagaggagagtct

SEQ ID NO: 149635 - DNA, 15 bp, Homo sapiens
gttcagaggagagtc

SEQ ID NO: 149636 - DNA, 15 bp, Homo sapiens
agttcagaggagagt

SEQ ID NO: 149637 - DNA, 15 bp, Homo sapiens
gagttcagaggagag

SEQ ID NO: 149638 - DNA, 15 bp, Homo sapiens
cgagttcagaggaga

SEQ ID NO: 149639 - DNA, 15 bp, Homo sapiens
ccgagttcagaggag

SEQ ID NO: 149640 - DNA, 15 bp, Homo sapiens
cccgagttcagagga

SEQ ID NO: 149641 - DNA, 15 bp, Homo sapiens
gcccgagttcagagg

SEQ ID NO: 149642 - DNA, 15 bp, Homo sapiens
ggcccgagttcagag

SEQ ID NO: 149643 - DNA, 15 bp, Homo sapiens
aggcccgagttcaga

SEQ ID NO: 149644 - DNA, 15 bp, Homo sapiens
gaggcccgagttcag

SEQ ID NO: 149645 - DNA, 15 bp, Homo sapiens
tgaggcccgagttca

SEQ ID NO: 149646 - DNA, 15 bp, Homo sapiens
gtgaggcccgagttc

SEQ ID NO: 149647 - DNA, 15 bp, Homo sapiens
tgtgaggcccgagtt

SEQ ID NO: 149648 - DNA, 15 bp, Homo sapiens
atgtgaggcccgagt

SEQ ID NO: 149649 - DNA, 15 bp, Homo sapiens
catgtgaggcccgag

SEQ ID NO: 149650 - DNA, 15 bp, Homo sapiens
ccatgtgaggcccga

SEQ ID NO: 149651 - DNA, 15 bp, Homo sapiens
gccatgtgaggcccg

SEQ ID NO: 149652 - DNA, 15 bp, Homo sapiens
ggccatgtgaggccc

SEQ ID NO: 149653 - DNA, 15 bp, Homo sapiens
tggccatgtgaggcc

SEQ ID NO: 149654 - DNA, 15 bp, Homo sapiens
ttggccatgtgaggc

SEQ ID NO: 149655 - DNA, 15 bp, Homo sapiens
gttggccatgtgagg

SEQ ID NO: 149656 - DNA, 15 bp, Homo sapiens
agttggccatgtgag

SEQ ID NO: 149657 - DNA, 15 bp, Homo sapiens
cagttggccatgtga

SEQ ID NO: 149658 - DNA, 15 bp, Homo sapiens
gcagttggccatgtg

SEQ ID NO: 149659 - DNA, 15 bp, Homo sapiens
agcagttggccatgt

SEQ ID NO: 149660 - DNA, 15 bp, Homo sapiens
tagcagttggccatg

SEQ ID NO: 149661 - DNA, 15 bp, Homo sapiens
gtagcagttggccat

SEQ ID NO: 149662 - DNA, 15 bp, Homo sapiens
agtagcagttggcca

SEQ ID NO: 149663 - DNA, 15 bp, Homo sapiens
aagtagcagttggcc

SEQ ID NO: 149664 - DNA, 15 bp, Homo sapiens
caagtagcagttggc

SEQ ID NO: 149665 - DNA, 15 bp, Homo sapiens
ccaagtagcagttgg

SEQ ID NO: 149666 - DNA, 15 bp, Homo sapiens
tccaagtagcagttg

SEQ ID NO: 149667 - DNA, 15 bp, Homo sapiens
ttccaagtagcagtt

SEQ ID NO: 149668 - DNA, 15 bp, Homo sapiens
gttccaagtagcagt

SEQ ID NO: 149669 - DNA, 15 bp, Homo sapiens
tgttccaagtagcag

SEQ ID NO: 149670 - DNA, 15 bp, Homo sapiens
ttgttccaagtagca

SEQ ID NO: 149671 - DNA, 15 bp, Homo sapiens
tttgttccaagtagc

SEQ ID NO: 149672 - DNA, 15 bp, Homo sapiens
atttgttccaagtag

SEQ ID NO: 149673 - DNA, 15 bp, Homo sapiens
gatttgttccaagta

SEQ ID NO: 149674 - DNA, 15 bp, Homo sapiens
cgatttgttccaagt

SEQ ID NO: 149675 - DNA, 15 bp, Homo sapiens
gcgatttgttccaag

SEQ ID NO: 149676 - DNA, 15 bp, Homo sapiens
ggcgatttgttccaa

SEQ ID NO: 149677 - DNA, 15 bp, Homo sapiens
gggcgatttgttcca

SEQ ID NO: 149678 - DNA, 15 bp, Homo sapiens
ggggcgatttgttcc

SEQ ID NO: 149679 - DNA, 15 bp, Homo sapiens
aggggcgatttgttc

SEQ ID NO: 149680 - DNA, 15 bp, Homo sapiens
aaggggcgatttgtt

SEQ ID NO: 149681 - DNA, 15 bp, Homo sapiens
caaggggcgatttgt

SEQ ID NO: 149682 - DNA, 15 bp, Homo sapiens
ccaaggggcgatttg

SEQ ID NO: 149683 - DNA, 15 bp, Homo sapiens
gccaaggggcgattt

SEQ ID NO: 149684 - DNA, 15 bp, Homo sapiens
agccaaggggcgatt

SEQ ID NO: 149685 - DNA, 15 bp, Homo sapiens
cagccaaggggcgat

SEQ ID NO: 149686 - DNA, 15 bp, Homo sapiens
ccagccaaggggcga

SEQ ID NO: 149687 - DNA, 15 bp, Homo sapiens
gccagccaaggggcg

SEQ ID NO: 149688 - DNA, 15 bp, Homo sapiens
tgccagccaaggggc

SEQ ID NO: 149689 - DNA, 15 bp, Homo sapiens
ctgccagccaagggg

SEQ ID NO: 149690 - DNA, 15 bp, Homo sapiens
tctgccagccaaggg

SEQ ID NO: 149691 - DNA, 15 bp, Homo sapiens
atctgccagccaagg

SEQ ID NO: 149692 - DNA, 15 bp, Homo sapiens
catctgccagccaag

SEQ ID NO: 149693 - DNA, 15 bp, Homo sapiens
acatctgccagccaa

SEQ ID NO: 149694 - DNA, 15 bp, Homo sapiens
cacatctgccagcca

SEQ ID NO: 149695 - DNA, 15 bp, Homo sapiens
acacatctgccagcc

SEQ ID NO: 149696 - DNA, 15 bp, Homo sapiens
aacacatctgccagc

SEQ ID NO: 149697 - DNA, 15 bp, Homo sapiens
taacacatctgccag

SEQ ID NO: 149698 - DNA, 15 bp, Homo sapiens
ttaacacatctgcca

SEQ ID NO: 149699 - DNA, 15 bp, Homo sapiens
gttaacacatctgcc

SEQ ID NO: 149700 - DNA, 15 bp, Homo sapiens
tgttaacacatctgc

SEQ ID NO: 149701 - DNA, 15 bp, Homo sapiens
atgttaacacatctg

SEQ ID NO: 149702 - DNA, 15 bp, Homo sapiens
catgttaacacatct

SEQ ID NO: 149703 - DNA, 15 bp, Homo sapiens
gcatgttaacacatc

SEQ ID NO: 149704 - DNA, 15 bp, Homo sapiens
ggcatgttaacacat

SEQ ID NO: 149705 - DNA, 15 bp, Homo sapiens
gggcatgttaacaca

SEQ ID NO: 149706 - DNA, 15 bp, Homo sapiens
tgggcatgttaacac

SEQ ID NO: 149707 - DNA, 15 bp, Homo sapiens
ctgggcatgttaaca

SEQ ID NO: 149708 - DNA, 15 bp, Homo sapiens
tctgggcatgttaac

SEQ ID NO: 149709 - DNA, 15 bp, Homo sapiens
gtctgggcatgttaa

SEQ ID NO: 149710 - DNA, 15 bp, Homo sapiens
ggtctgggcatgtta

SEQ ID NO: 149711 - DNA, 15 bp, Homo sapiens
tggtctgggcatgtt

SEQ ID NO: 149712 - DNA, 15 bp, Homo sapiens
ttggtctgggcatgt

SEQ ID NO: 149713 - DNA, 15 bp, Homo sapiens
cttggtctgggcatg

SEQ ID NO: 149714 - DNA, 15 bp, Homo sapiens
tcttggtctgggcat

SEQ ID NO: 149715 - DNA, 15 bp, Homo sapiens
atcttggtctgggca

SEQ ID NO: 149716 - DNA, 15 bp, Homo sapiens
gatcttggtctgggc

SEQ ID NO: 149717 - DNA, 15 bp, Homo sapiens
ggatcttggtctggg

SEQ ID NO: 149718 - DNA, 15 bp, Homo sapiens
gggatcttggtctgg

SEQ ID NO: 149719 - DNA, 15 bp, Homo sapiens
tgggatcttggtctg

SEQ ID NO: 149720 - DNA, 15 bp, Homo sapiens
ttgggatcttggtct

SEQ ID NO: 149721 - DNA, 15 bp, Homo sapiens
gttgggatcttggtc

SEQ ID NO: 149722 - DNA, 15 bp, Homo sapiens
agttgggatcttggt

SEQ ID NO: 149723 - DNA, 15 bp, Homo sapiens
gagttgggatcttgg

SEQ ID NO: 149724 - DNA, 15 bp, Homo sapiens
ggagttgggatcttg

SEQ ID NO: 149725 - DNA, 15 bp, Homo sapiens
gggagttgggatctt

SEQ ID NO: 149726 - DNA, 15 bp, Homo sapiens
tgggagttgggatct

SEQ ID NO: 149727 - DNA, 15 bp, Homo sapiens
gtgggagttgggatc

SEQ ID NO: 149728 - DNA, 15 bp, Homo sapiens
tgtgggagttgggat

SEQ ID NO: 149729 - DNA, 15 bp, Homo sapiens
ttgtgggagttggga

SEQ ID NO: 149730 - DNA, 15 bp, Homo sapiens
gttgtgggagttggg

SEQ ID NO: 149731 - DNA, 15 bp, Homo sapiens
ggttgtgggagttgg

SEQ ID NO: 149732 - DNA, 15 bp, Homo sapiens
gggttgtgggagttg

SEQ ID NO: 149733 - DNA, 15 bp, Homo sapiens
tgggttgtgggagtt

SEQ ID NO: 149734 - DNA, 15 bp, Homo sapiens
ttgggttgtgggagt

SEQ ID NO: 149735 - DNA, 15 bp, Homo sapiens
gttgggttgtgggag

SEQ ID NO: 149736 - DNA, 15 bp, Homo sapiens
agttgggttgtggga

SEQ ID NO: 149737 - DNA, 15 bp, Homo sapiens
gagttgggttgtggg

SEQ ID NO: 149738 - DNA, 15 bp, Homo sapiens
ggagttgggttgtgg

SEQ ID NO: 149739 - DNA, 15 bp, Homo sapiens
gggagttgggttgtg

SEQ ID NO: 149740 - DNA, 15 bp, Homo sapiens
tgggagttgggttgt

SEQ ID NO: 149741 - DNA, 15 bp, Homo sapiens
ctgggagttgggttg

SEQ ID NO: 149742 - DNA, 15 bp, Homo sapiens
cctgggagttgggtt

SEQ ID NO: 149743 - DNA, 15 bp, Homo sapiens
acctgggagttgggt

SEQ ID NO: 149744 - DNA, 15 bp, Homo sapiens
gacctgggagttggg

SEQ ID NO: 149745 - DNA, 15 bp, Homo sapiens
tgacctgggagttgg

SEQ ID NO: 149746 - DNA, 15 bp, Homo sapiens
ctgacctgggagttg

SEQ ID NO: 149747 - DNA, 15 bp, Homo sapiens
tctgacctgggagtt

SEQ ID NO: 149748 - DNA, 15 bp, Homo sapiens
atctgacctgggagt

SEQ ID NO: 149749 - DNA, 15 bp, Homo sapiens
catctgacctgggag

SEQ ID NO: 149750 - DNA, 15 bp, Homo sapiens
ccatctgacctggga

SEQ ID NO: 149751 - DNA, 15 bp, Homo sapiens
tccatctgacctggg

SEQ ID NO: 149752 - DNA, 15 bp, Homo sapiens
ttccatctgacctgg

SEQ ID NO: 149753 - DNA, 15 bp, Homo sapiens
gttccatctgacctg

SEQ ID NO: 149754 - DNA, 15 bp, Homo sapiens
ggttccatctgacct

SEQ ID NO: 149755 - DNA, 15 bp, Homo sapiens
aggttccatctgacc

SEQ ID NO: 149756 - DNA, 15 bp, Homo sapiens
gaggttccatctgac

SEQ ID NO: 149757 - DNA, 15 bp, Homo sapiens
agaggttccatctga

SEQ ID NO: 149758 - DNA, 15 bp, Homo sapiens
aagaggttccatctg

SEQ ID NO: 149759 - DNA, 15 bp, Homo sapiens
gaagaggttccatct

SEQ ID NO: 149760 - DNA, 15 bp, Homo sapiens
agaagaggttccatc

SEQ ID NO: 149761 - DNA, 15 bp, Homo sapiens
aagaagaggttccat

SEQ ID NO: 149762 - DNA, 15 bp, Homo sapiens
gaagaagaggttcca

SEQ ID NO: 149763 - DNA, 15 bp, Homo sapiens
ggaagaagaggttcc

SEQ ID NO: 149764 - DNA, 15 bp, Homo sapiens
gggaagaagaggttc

SEQ ID NO: 149765 - DNA, 15 bp, Homo sapiens
tgggaagaagaggtt

SEQ ID NO: 149766 - DNA, 15 bp, Homo sapiens
ctgggaagaagaggt

SEQ ID NO: 149767 - DNA, 15 bp, Homo sapiens
cctgggaagaagagg

SEQ ID NO: 149768 - DNA, 15 bp, Homo sapiens
gcctgggaagaagag

SEQ ID NO: 149769 - DNA, 15 bp, Homo sapiens
ggcctgggaagaaga

SEQ ID NO: 149770 - DNA, 15 bp, Homo sapiens
gggcctgggaagaag

SEQ ID NO: 149771 - DNA, 15 bp, Homo sapiens
agggcctgggaagaa

SEQ ID NO: 149772 - DNA, 15 bp, Homo sapiens
aagggcctgggaaga

SEQ ID NO: 149773 - DNA, 15 bp, Homo sapiens
gaagggcctgggaag

SEQ ID NO: 149774 - DNA, 15 bp, Homo sapiens
agaagggcctgggaa

SEQ ID NO: 149775 - DNA, 15 bp, Homo sapiens
cagaagggcctggga

SEQ ID NO: 149776 - DNA, 15 bp, Homo sapiens
acagaagggcctggg

SEQ ID NO: 149777 - DNA, 15 bp, Homo sapiens
aacagaagggcctgg

SEQ ID NO: 149778 - DNA, 15 bp, Homo sapiens
gaacagaagggcctg

SEQ ID NO: 149779 - DNA, 15 bp, Homo sapiens
ggaacagaagggcct

SEQ ID NO: 149780 - DNA, 15 bp, Homo sapiens
aggaacagaagggcc

SEQ ID NO: 149781 - DNA, 15 bp, Homo sapiens
gaggaacagaagggc

SEQ ID NO: 149782 - DNA, 15 bp, Homo sapiens
agaggaacagaaggg

SEQ ID NO: 149783 - DNA, 15 bp, Homo sapiens
gagaggaacagaagg

SEQ ID NO: 149784 - DNA, 15 bp, Homo sapiens
ggagaggaacagaag

SEQ ID NO: 149785 - DNA, 15 bp, Homo sapiens
aggagaggaacagaa

SEQ ID NO: 149786 - DNA, 15 bp, Homo sapiens
gaggagaggaacaga

SEQ ID NO: 149787 - DNA, 15 bp, Homo sapiens
tgaggagaggaacag

SEQ ID NO: 149788 - DNA, 15 bp, Homo sapiens
ctgaggagaggaaca

SEQ ID NO: 149789 - DNA, 15 bp, Homo sapiens
gctgaggagaggaac

SEQ ID NO: 149790 - DNA, 15 bp, Homo sapiens
ggctgaggagaggaa

SEQ ID NO: 149791 - DNA, 15 bp, Homo sapiens
gggctgaggagagga

SEQ ID NO: 149792 - DNA, 15 bp, Homo sapiens
ggggctgaggagagg

SEQ ID NO: 149793 - DNA, 15 bp, Homo sapiens
aggggctgaggagag

SEQ ID NO: 149794 - DNA, 15 bp, Homo sapiens
gaggggctgaggaga

SEQ ID NO: 149795 - DNA, 15 bp, Homo sapiens
ggaggggctgaggag

SEQ ID NO: 149796 - DNA, 15 bp, Homo sapiens
gggaggggctgagga

SEQ ID NO: 149797 - DNA, 15 bp, Homo sapiens
tgggaggggctgagg

SEQ ID NO: 149798 - DNA, 15 bp, Homo sapiens
gtgggaggggctgag

SEQ ID NO: 149799 - DNA, 15 bp, Homo sapiens
ggtgggaggggctga

SEQ ID NO: 149800 - DNA, 15 bp, Homo sapiens
aggtgggaggggctg

SEQ ID NO: 149801 - DNA, 15 bp, Homo sapiens
gaggtgggaggggct

SEQ ID NO: 149802 - DNA, 15 bp, Homo sapiens
ggaggtgggaggggc

SEQ ID NO: 149803 - DNA, 15 bp, Homo sapiens
gggaggtgggagggg

SEQ ID NO: 149804 - DNA, 15 bp, Homo sapiens
agggaggtgggaggg

SEQ ID NO: 149805 - DNA, 15 bp, Homo sapiens
aagggaggtgggagg

SEQ ID NO: 149806 - DNA, 15 bp, Homo sapiens
gaagggaggtgggag

SEQ ID NO: 149807 - DNA, 15 bp, Homo sapiens
tgaagggaggtggga

SEQ ID NO: 149808 - DNA, 15 bp, Homo sapiens
ctgaagggaggtggg

SEQ ID NO: 149809 - DNA, 15 bp, Homo sapiens
tctgaagggaggtgg

SEQ ID NO: 149810 - DNA, 15 bp, Homo sapiens
ttctgaagggaggtg

SEQ ID NO: 149811 - DNA, 15 bp, Homo sapiens
attctgaagggaggt

SEQ ID NO: 149812 - DNA, 15 bp, Homo sapiens
tattctgaagggagg

SEQ ID NO: 149813 - DNA, 15 bp, Homo sapiens
ttattctgaagggag

SEQ ID NO: 149814 - DNA, 15 bp, Homo sapiens
cttattctgaaggga

SEQ ID NO: 149815 - DNA, 15 bp, Homo sapiens
acttattctgaaggg

SEQ ID NO: 149816 - DNA, 15 bp, Homo sapiens
gacttattctgaagg

SEQ ID NO: 149817 - DNA, 15 bp, Homo sapiens
agacttattctgaag

SEQ ID NO: 149818 - DNA, 15 bp, Homo sapiens
tagacttattctgaa

SEQ ID NO: 149819 - DNA, 15 bp, Homo sapiens
ctagacttattctga

SEQ ID NO: 149820 - DNA, 15 bp, Homo sapiens
tctagacttattctg

SEQ ID NO: 149821 - DNA, 15 bp, Homo sapiens
gtctagacttattct

SEQ ID NO: 149822 - DNA, 15 bp, Homo sapiens
agtctagacttattc

SEQ ID NO: 149823 - DNA, 15 bp, Homo sapiens
gagtctagacttatt

SEQ ID NO: 149824 - DNA, 15 bp, Homo sapiens
agagtctagacttat

SEQ ID NO: 149825 - DNA, 15 bp, Homo sapiens
aagagtctagactta

SEQ ID NO: 149826 - DNA, 15 bp, Homo sapiens
taagagtctagactt

SEQ ID NO: 149827 - DNA, 15 bp, Homo sapiens
ataagagtctagact

SEQ ID NO: 149828 - DNA, 15 bp, Homo sapiens
gataagagtctagac

SEQ ID NO: 149829 - DNA, 15 bp, Homo sapiens
cgataagagtctaga

SEQ ID NO: 149830 - DNA, 15 bp, Homo sapiens
gcgataagagtctag

SEQ ID NO: 149831 - DNA, 15 bp, Homo sapiens
agcgataagagtcta

SEQ ID NO: 149832 - DNA, 15 bp, Homo sapiens
aagcgataagagtct

SEQ ID NO: 149833 - DNA, 15 bp, Homo sapiens
aaagcgataagagtc

SEQ ID NO: 149834 - DNA, 15 bp, Homo sapiens
gaaagcgataagagt

SEQ ID NO: 149835 - DNA, 15 bp, Homo sapiens
tgaaagcgataagag

SEQ ID NO: 149836 - DNA, 15 bp, Homo sapiens
gtgaaagcgataaga

SEQ ID NO: 149837 - DNA, 15 bp, Homo sapiens
ggtgaaagcgataag

SEQ ID NO: 149838 - DNA, 15 bp, Homo sapiens
tggtgaaagcgataa

SEQ ID NO: 149839 - DNA, 15 bp, Homo sapiens
ttggtgaaagcgata

SEQ ID NO: 149840 - DNA, 15 bp, Homo sapiens
cttggtgaaagcgat

SEQ ID NO: 149841 - DNA, 15 bp, Homo sapiens
gcttggtgaaagcga

SEQ ID NO: 149842 - DNA, 15 bp, Homo sapiens
ggcttggtgaaagcg

SEQ ID NO: 149843 - DNA, 15 bp, Homo sapiens
aggcttggtgaaagc

SEQ ID NO: 149844 - DNA, 15 bp, Homo sapiens
caggcttggtgaaag

SEQ ID NO: 149845 - DNA, 15 bp, Homo sapiens
gcaggcttggtgaaa

SEQ ID NO: 149846 - DNA, 15 bp, Homo sapiens
cgcaggcttggtgaa

SEQ ID NO: 149847 - DNA, 15 bp, Homo sapiens
gcgcaggcttggtga

SEQ ID NO: 149848 - DNA, 15 bp, Homo sapiens
ggcgcaggcttggtg

SEQ ID NO: 149849 - DNA, 15 bp, Homo sapiens
gggcgcaggcttggt

SEQ ID NO: 149850 - DNA, 15 bp, Homo sapiens
tgggcgcaggcttgg

SEQ ID NO: 149851 - DNA, 15 bp, Homo sapiens
ctgggcgcaggcttg

SEQ ID NO: 149852 - DNA, 15 bp, Homo sapiens
gctgggcgcaggctt

SEQ ID NO: 149853 - DNA, 15 bp, Homo sapiens
tgctgggcgcaggct

SEQ ID NO: 149854 - DNA, 15 bp, Homo sapiens
atgctgggcgcaggc

SEQ ID NO: 149855 - DNA, 15 bp, Homo sapiens
gatgctgggcgcagg

SEQ ID NO: 149856 - DNA, 15 bp, Homo sapiens
ggatgctgggcgcag

SEQ ID NO: 149857 - DNA, 15 bp, Homo sapiens
gggatgctgggcgca

SEQ ID NO: 149858 - DNA, 15 bp, Homo sapiens
agggatgctgggcgc

SEQ ID NO: 149859 - DNA, 15 bp, Homo sapiens
cagggatgctgggcg

SEQ ID NO: 149860 - DNA, 15 bp, Homo sapiens
gcagggatgctgggc

SEQ ID NO: 149861 - DNA, 15 bp, Homo sapiens
tgcagggatgctggg

SEQ ID NO: 149862 - DNA, 15 bp, Homo sapiens
gtgcagggatgctgg

SEQ ID NO: 149863 - DNA, 15 bp, Homo sapiens
tgtgcagggatgctg

SEQ ID NO: 149864 - DNA, 15 bp, Homo sapiens
ctgtgcagggatgct

SEQ ID NO: 149865 - DNA, 15 bp, Homo sapiens
cctgtgcagggatgc

SEQ ID NO: 149866 - DNA, 15 bp, Homo sapiens
ccctgtgcagggatg

SEQ ID NO: 149867 - DNA, 15 bp, Homo sapiens
tccctgtgcagggat

SEQ ID NO: 149868 - DNA, 15 bp, Homo sapiens
atccctgtgcaggga

SEQ ID NO: 149869 - DNA, 15 bp, Homo sapiens
aatccctgtgcaggg

SEQ ID NO: 149870 - DNA, 15 bp, Homo sapiens
caatccctgtgcagg

SEQ ID NO: 149871 - DNA, 15 bp, Homo sapiens
acaatccctgtgcag

SEQ ID NO: 149872 - DNA, 15 bp, Homo sapiens
aacaatccctgtgca

SEQ ID NO: 149873 - DNA, 15 bp, Homo sapiens
taacaatccctgtgc

SEQ ID NO: 149874 - DNA, 15 bp, Homo sapiens
ctaacaatccctgtg

SEQ ID NO: 149875 - DNA, 15 bp, Homo sapiens
cctaacaatccctgt

SEQ ID NO: 149876 - DNA, 15 bp, Homo sapiens
tcctaacaatccctg

SEQ ID NO: 149877 - DNA, 15 bp, Homo sapiens
gtcctaacaatccct

SEQ ID NO: 149878 - DNA, 15 bp, Homo sapiens
tgtcctaacaatccc

SEQ ID NO: 149879 - DNA, 15 bp, Homo sapiens
ctgtcctaacaatcc

SEQ ID NO: 149880 - DNA, 15 bp, Homo sapiens
gctgtcctaacaatc

SEQ ID NO: 149881 - DNA, 15 bp, Homo sapiens
ggctgtcctaacaat

SEQ ID NO: 149882 - DNA, 15 bp, Homo sapiens
aggctgtcctaacaa

SEQ ID NO: 149883 - DNA, 15 bp, Homo sapiens
caggctgtcctaaca

SEQ ID NO: 149884 - DNA, 15 bp, Homo sapiens
tcaggctgtcctaac

SEQ ID NO: 149885 - DNA, 15 bp, Homo sapiens
gtcaggctgtcctaa

SEQ ID NO: 149886 - DNA, 15 bp, Homo sapiens
cgtcaggctgtccta

SEQ ID NO: 149887 - DNA, 15 bp, Homo sapiens
gcgtcaggctgtcct

SEQ ID NO: 149888 - DNA, 15 bp, Homo sapiens
ggcgtcaggctgtcc

SEQ ID NO: 149889 - DNA, 15 bp, Homo sapiens
gggcgtcaggctgtc

SEQ ID NO: 149890 - DNA, 15 bp, Homo sapiens
agggcgtcaggctgt

SEQ ID NO: 149891 - DNA, 15 bp, Homo sapiens
cagggcgtcaggctg

SEQ ID NO: 149892 - DNA, 15 bp, Homo sapiens
gcagggcgtcaggct

SEQ ID NO: 149893 - DNA, 15 bp, Homo sapiens
agcagggcgtcaggc

SEQ ID NO: 149894 - DNA, 15 bp, Homo sapiens
aagcagggcgtcagg

SEQ ID NO: 149895 - DNA, 15 bp, Homo sapiens
gaagcagggcgtcag

SEQ ID NO: 149896 - DNA, 15 bp, Homo sapiens
ggaagcagggcgtca

SEQ ID NO: 149897 - DNA, 15 bp, Homo sapiens
tggaagcagggcgtc

SEQ ID NO: 149898 - DNA, 15 bp, Homo sapiens
gtggaagcagggcgt

SEQ ID NO: 149899 - DNA, 15 bp, Homo sapiens
ggtggaagcagggcg

SEQ ID NO: 149900 - DNA, 15 bp, Homo sapiens
gggtggaagcagggc

SEQ ID NO: 149901 - DNA, 15 bp, Homo sapiens
agggtggaagcaggg

SEQ ID NO: 149902 - DNA, 15 bp, Homo sapiens
cagggtggaagcagg

SEQ ID NO: 149903 - DNA, 15 bp, Homo sapiens
gcagggtggaagcag

SEQ ID NO: 149904 - DNA, 15 bp, Homo sapiens
ggcagggtggaagca

SEQ ID NO: 149905 - DNA, 15 bp, Homo sapiens
gggcagggtggaagc

SEQ ID NO: 149906 - DNA, 15 bp, Homo sapiens
ggggcagggtggaag

SEQ ID NO: 149907 - DNA, 15 bp, Homo sapiens
tggggcagggtggaa

SEQ ID NO: 149908 - DNA, 15 bp, Homo sapiens
ttggggcagggtgga

SEQ ID NO: 149909 - DNA, 15 bp, Homo sapiens
cttggggcagggtgg

SEQ ID NO: 149910 - DNA, 15 bp, Homo sapiens
tcttggggcagggtg

SEQ ID NO: 149911 - DNA, 15 bp, Homo sapiens
atcttggggcagggt

SEQ ID NO: 149912 - DNA, 15 bp, Homo sapiens
catcttggggcaggg

SEQ ID NO: 149913 - DNA, 15 bp, Homo sapiens
gcatcttggggcagg

SEQ ID NO: 149914 - DNA, 15 bp, Homo sapiens
ggcatcttggggcag

SEQ ID NO: 149915 - DNA, 15 bp, Homo sapiens
gggcatcttggggca

SEQ ID NO: 149916 - DNA, 15 bp, Homo sapiens
ggggcatcttggggc

SEQ ID NO: 149917 - DNA, 15 bp, Homo sapiens
aggggcatcttgggg

SEQ ID NO: 149918 - DNA, 15 bp, Homo sapiens
caggggcatcttggg

SEQ ID NO: 149919 - DNA, 15 bp, Homo sapiens
gcaggggcatcttgg

SEQ ID NO: 149920 - DNA, 15 bp, Homo sapiens
agcaggggcatcttg

SEQ ID NO: 149921 - DNA, 15 bp, Homo sapiens
gagcaggggcatctt

SEQ ID NO: 149922 - DNA, 15 bp, Homo sapiens
agagcaggggcatct

SEQ ID NO: 149923 - DNA, 15 bp, Homo sapiens
cagagcaggggcatc

SEQ ID NO: 149924 - DNA, 15 bp, Homo sapiens
gcagagcaggggcat

SEQ ID NO: 149925 - DNA, 15 bp, Homo sapiens
tgcagagcaggggca

SEQ ID NO: 149926 - DNA, 15 bp, Homo sapiens
ctgcagagcaggggc

SEQ ID NO: 149927 - DNA, 15 bp, Homo sapiens
gctgcagagcagggg

SEQ ID NO: 149928 - DNA, 15 bp, Homo sapiens
ggctgcagagcaggg

SEQ ID NO: 149929 - DNA, 15 bp, Homo sapiens
gggctgcagagcagg

SEQ ID NO: 149930 - DNA, 15 bp, Homo sapiens
cgggctgcagagcag

SEQ ID NO: 149931 - DNA, 15 bp, Homo sapiens
ccgggctgcagagca

SEQ ID NO: 149932 - DNA, 15 bp, Homo sapiens
gccgggctgcagagc

SEQ ID NO: 149933 - DNA, 15 bp, Homo sapiens
cgccgggctgcagag

SEQ ID NO: 149934 - DNA, 15 bp, Homo sapiens
gcgccgggctgcaga

SEQ ID NO: 149935 - DNA, 15 bp, Homo sapiens
ggcgccgggctgcag

SEQ ID NO: 149936 - DNA, 15 bp, Homo sapiens
aggcgccgggctgca

SEQ ID NO: 149937 - DNA, 15 bp, Homo sapiens
gaggcgccgggctgc

SEQ ID NO: 149938 - DNA, 15 bp, Homo sapiens
ggaggcgccgggctg

SEQ ID NO: 149939 - DNA, 15 bp, Homo sapiens
tggaggcgccgggct

SEQ ID NO: 149940 - DNA, 15 bp, Homo sapiens
ctggaggcgccgggc

SEQ ID NO: 149941 - DNA, 15 bp, Homo sapiens
cctggaggcgccggg

SEQ ID NO: 149942 - DNA, 15 bp, Homo sapiens
gcctggaggcgccgg

SEQ ID NO: 149943 - DNA, 15 bp, Homo sapiens
agcctggaggcgccg

SEQ ID NO: 149944 - DNA, 15 bp, Homo sapiens
aagcctggaggcgcc

SEQ ID NO: 149945 - DNA, 15 bp, Homo sapiens
gaagcctggaggcgc

SEQ ID NO: 149946 - DNA, 15 bp, Homo sapiens
agaagcctggaggcg

SEQ ID NO: 149947 - DNA, 15 bp, Homo sapiens
gagaagcctggaggc

SEQ ID NO: 149948 - DNA, 15 bp, Homo sapiens
tgagaagcctggagg

SEQ ID NO: 149949 - DNA, 15 bp, Homo sapiens
gtgagaagcctggag

SEQ ID NO: 149950 - DNA, 15 bp, Homo sapiens
ggtgagaagcctgga

SEQ ID NO: 149951 - DNA, 15 bp, Homo sapiens
aggtgagaagcctgg

SEQ ID NO: 149952 - DNA, 15 bp, Homo sapiens
gaggtgagaagcctg

SEQ ID NO: 149953 - DNA, 15 bp, Homo sapiens
ggaggtgagaagcct

SEQ ID NO: 149954 - DNA, 15 bp, Homo sapiens
aggaggtgagaagcc

SEQ ID NO: 149955 - DNA, 15 bp, Homo sapiens
caggaggtgagaagc

SEQ ID NO: 149956 - DNA, 15 bp, Homo sapiens
gcaggaggtgagaag

SEQ ID NO: 149957 - DNA, 15 bp, Homo sapiens
agcaggaggtgagaa

SEQ ID NO: 149958 - DNA, 15 bp, Homo sapiens
cagcaggaggtgaga

SEQ ID NO: 149959 - DNA, 15 bp, Homo sapiens
gcagcaggaggtgag

SEQ ID NO: 149960 - DNA, 15 bp, Homo sapiens
agcagcaggaggtga

SEQ ID NO: 149961 - DNA, 15 bp, Homo sapiens
gagcagcaggaggtg

SEQ ID NO: 149962 - DNA, 15 bp, Homo sapiens
tgagcagcaggaggt

SEQ ID NO: 149963 - DNA, 15 bp, Homo sapiens
gtgagcagcaggagg

SEQ ID NO: 149964 - DNA, 15 bp, Homo sapiens
tgtgagcagcaggag

SEQ ID NO: 149965 - DNA, 15 bp, Homo sapiens
ctgtgagcagcagga

SEQ ID NO: 149966 - DNA, 15 bp, Homo sapiens
gctgtgagcagcagg

SEQ ID NO: 149967 - DNA, 15 bp, Homo sapiens
agctgtgagcagcag

SEQ ID NO: 149968 - DNA, 15 bp, Homo sapiens
gagctgtgagcagca

SEQ ID NO: 149969 - DNA, 15 bp, Homo sapiens
tgagctgtgagcagc

SEQ ID NO: 149970 - DNA, 15 bp, Homo sapiens
ctgagctgtgagcag

SEQ ID NO: 149971 - DNA, 15 bp, Homo sapiens
gctgagctgtgagca

SEQ ID NO: 149972 - DNA, 15 bp, Homo sapiens
ggctgagctgtgagc

SEQ ID NO: 149973 - DNA, 15 bp, Homo sapiens
aggctgagctgtgag

SEQ ID NO: 149974 - DNA, 15 bp, Homo sapiens
gaggctgagctgtga

SEQ ID NO: 149975 - DNA, 15 bp, Homo sapiens
tgaggctgagctgtg

SEQ ID NO: 149976 - DNA, 15 bp, Homo sapiens
gtgaggctgagctgt

SEQ ID NO: 149977 - DNA, 15 bp, Homo sapiens
agtgaggctgagctg

SEQ ID NO: 149978 - DNA, 15 bp, Homo sapiens
gagtgaggctgagct

SEQ ID NO: 149979 - DNA, 15 bp, Homo sapiens
ggagtgaggctgagc

SEQ ID NO: 149980 - DNA, 15 bp, Homo sapiens
gggagtgaggctgag

SEQ ID NO: 149981 - DNA, 15 bp, Homo sapiens
agggagtgaggctga

SEQ ID NO: 149982 - DNA, 15 bp, Homo sapiens
gagggagtgaggctg

SEQ ID NO: 149983 - DNA, 15 bp, Homo sapiens
ggagggagtgaggct

SEQ ID NO: 149984 - DNA, 15 bp, Homo sapiens
gggagggagtgaggc

SEQ ID NO: 149985 - DNA, 15 bp, Homo sapiens
agggagggagtgagg

SEQ ID NO: 149986 - DNA, 15 bp, Homo sapiens
gagggagggagtgag

SEQ ID NO: 149987 - DNA, 15 bp, Homo sapiens
ggagggagggagtga

SEQ ID NO: 149988 - DNA, 15 bp, Homo sapiens
gggagggagggagtg

SEQ ID NO: 149989 - DNA, 15 bp, Homo sapiens
ggggagggagggagt

SEQ ID NO: 149990 - DNA, 15 bp, Homo sapiens
cggggagggagggag

SEQ ID NO: 149991 - DNA, 15 bp, Homo sapiens
gcggggagggaggga

SEQ ID NO: 149992 - DNA, 15 bp, Homo sapiens
ggcggggagggaggg

SEQ ID NO: 149993 - DNA, 15 bp, Homo sapiens
aggcggggagggagg

SEQ ID NO: 149994 - DNA, 15 bp, Homo sapiens
gaggcggggagggag

SEQ ID NO: 149995 - DNA, 15 bp, Homo sapiens
agaggcggggaggga

SEQ ID NO: 149996 - DNA, 15 bp, Homo sapiens
cagaggcggggaggg

SEQ ID NO: 149997 - DNA, 15 bp, Homo sapiens
gcagaggcggggagg

SEQ ID NO: 149998 - DNA, 15 bp, Homo sapiens
agcagaggcggggag

SEQ ID NO: 149999 - DNA, 15 bp, Homo sapiens
gagcagaggcgggga

SEQ ID NO: 150000 - DNA, 15 bp, Homo sapiens
ggagcagaggcgggg

SEQ ID NO: 150001 - DNA, 15 bp, Homo sapiens
tggagcagaggcggg

SEQ ID NO: 150002 - DNA, 15 bp, Homo sapiens
ctggagcagaggcgg

SEQ ID NO: 150003 - DNA, 15 bp, Homo sapiens
gctggagcagaggcg

SEQ ID NO: 150004 - DNA, 15 bp, Homo sapiens
ggctggagcagaggc

SEQ ID NO: 150005 - DNA, 15 bp, Homo sapiens
aggctggagcagagg

SEQ ID NO: 150006 - DNA, 15 bp, Homo sapiens
gaggctggagcagag

SEQ ID NO: 150007 - DNA, 15 bp, Homo sapiens
tgaggctggagcaga

SEQ ID NO: 150008 - DNA, 15 bp, Homo sapiens
ctgaggctggagcag

SEQ ID NO: 150009 - DNA, 15 bp, Homo sapiens
actgaggctggagca

SEQ ID NO: 150010 - DNA, 15 bp, Homo sapiens
cactgaggctggagc

SEQ ID NO: 150011 - DNA, 15 bp, Homo sapiens
gcactgaggctggag

SEQ ID NO: 150012 - DNA, 15 bp, Homo sapiens
tgcactgaggctgga

SEQ ID NO: 150013 - DNA, 15 bp, Homo sapiens
ctgcactgaggctgg

SEQ ID NO: 150014 - DNA, 15 bp, Homo sapiens
cctgcactgaggctg

SEQ ID NO: 150015 - DNA, 15 bp, Homo sapiens
acctgcactgaggct

SEQ ID NO: 150016 - DNA, 15 bp, Homo sapiens
gacctgcactgaggc

SEQ ID NO: 150017 - DNA, 15 bp, Homo sapiens
ggacctgcactgagg

SEQ ID NO: 150018 - DNA, 15 bp, Homo sapiens
gggacctgcactgag

SEQ ID NO: 150019 - DNA, 15 bp, Homo sapiens
ggggacctgcactga

SEQ ID NO: 150020 - DNA, 15 bp, Homo sapiens
aggggacctgcactg

SEQ ID NO: 150021 - DNA, 15 bp, Homo sapiens
caggggacctgcact

SEQ ID NO: 150022 - DNA, 15 bp, Homo sapiens
gcaggggacctgcac

SEQ ID NO: 150023 - DNA, 15 bp, Homo sapiens
agcaggggacctgca

SEQ ID NO: 150024 - DNA, 15 bp, Homo sapiens
gagcaggggacctgc

SEQ ID NO: 150025 - DNA, 15 bp, Homo sapiens
ggagcaggggacctg

SEQ ID NO: 150026 - DNA, 15 bp, Homo sapiens
gggagcaggggacct

SEQ ID NO: 150027 - DNA, 15 bp, Homo sapiens
tgggagcaggggacc

SEQ ID NO: 150028 - DNA, 15 bp, Homo sapiens
atgggagcaggggac

SEQ ID NO: 150029 - DNA, 15 bp, Homo sapiens
gatgggagcagggga

SEQ ID NO: 150030 - DNA, 15 bp, Homo sapiens
agatgggagcagggg

SEQ ID NO: 150031 - DNA, 15 bp, Homo sapiens
aagatgggagcaggg

SEQ ID NO: 150032 - DNA, 15 bp, Homo sapiens
gaagatgggagcagg

SEQ ID NO: 150033 - DNA, 15 bp, Homo sapiens
agaagatgggagcag

SEQ ID NO: 150034 - DNA, 15 bp, Homo sapiens
cagaagatgggagca

SEQ ID NO: 150035 - DNA, 15 bp, Homo sapiens
ccagaagatgggagc

SEQ ID NO: 150036 - DNA, 15 bp, Homo sapiens
gccagaagatgggag

SEQ ID NO: 150037 - DNA, 15 bp, Homo sapiens
tgccagaagatggga

SEQ ID NO: 150038 - DNA, 15 bp, Homo sapiens
ctgccagaagatggg

SEQ ID NO: 150039 - DNA, 15 bp, Homo sapiens
gctgccagaagatgg

SEQ ID NO: 150040 - DNA, 15 bp, Homo sapiens
tgctgccagaagatg

SEQ ID NO: 150041 - DNA, 15 bp, Homo sapiens
ctgctgccagaagat

SEQ ID NO: 150042 - DNA, 15 bp, Homo sapiens
gctgctgccagaaga

SEQ ID NO: 150043 - DNA, 15 bp, Homo sapiens
agctgctgccagaag

SEQ ID NO: 150044 - DNA, 15 bp, Homo sapiens
cagctgctgccagaa

SEQ ID NO: 150045 - DNA, 15 bp, Homo sapiens
gcagctgctgccaga

SEQ ID NO: 150046 - DNA, 15 bp, Homo sapiens
ggcagctgctgccag

SEQ ID NO: 150047 - DNA, 15 bp, Homo sapiens
gggcagctgctgcca

SEQ ID NO: 150048 - DNA, 15 bp, Homo sapiens
cgggcagctgctgcc

SEQ ID NO: 150049 - DNA, 15 bp, Homo sapiens
tcgggcagctgctgc

SEQ ID NO: 150050 - DNA, 15 bp, Homo sapiens
gtcgggcagctgctg

SEQ ID NO: 150051 - DNA, 15 bp, Homo sapiens
ggtcgggcagctgct

SEQ ID NO: 150052 - DNA, 15 bp, Homo sapiens
aggtcgggcagctgc

SEQ ID NO: 150053 - DNA, 15 bp, Homo sapiens
caggtcgggcagctg

SEQ ID NO: 150054 - DNA, 15 bp, Homo sapiens
ccaggtcgggcagct

SEQ ID NO: 150055 - DNA, 15 bp, Homo sapiens
accaggtcgggcagc

SEQ ID NO: 150056 - DNA, 15 bp, Homo sapiens
gaccaggtcgggcag

SEQ ID NO: 150057 - DNA, 15 bp, Homo sapiens
ggaccaggtcgggca

SEQ ID NO: 150058 - DNA, 15 bp, Homo sapiens
gggaccaggtcgggc

SEQ ID NO: 150059 - DNA, 15 bp, Homo sapiens
agggaccaggtcggg

SEQ ID NO: 150060 - DNA, 15 bp, Homo sapiens
gagggaccaggtcgg

SEQ ID NO: 150061 - DNA, 15 bp, Homo sapiens
agagggaccaggtcg

SEQ ID NO: 150062 - DNA, 15 bp, Homo sapiens
aagagggaccaggtc

SEQ ID NO: 150063 - DNA, 15 bp, Homo sapiens
gaagagggaccaggt

SEQ ID NO: 150064 - DNA, 15 bp, Homo sapiens
tgaagagggaccagg

SEQ ID NO: 150065 - DNA, 15 bp, Homo sapiens
atgaagagggaccag

SEQ ID NO: 150066 - DNA, 15 bp, Homo sapiens
gatgaagagggacca

SEQ ID NO: 150067 - DNA, 15 bp, Homo sapiens
agatgaagagggacc

SEQ ID NO: 150068 - DNA, 15 bp, Homo sapiens
cagatgaagagggac

SEQ ID NO: 150069 - DNA, 15 bp, Homo sapiens
acagatgaagaggga

SEQ ID NO: 150070 - DNA, 15 bp, Homo sapiens
gacagatgaagaggg

SEQ ID NO: 150071 - DNA, 15 bp, Homo sapiens
ggacagatgaagagg

SEQ ID NO: 150072 - DNA, 15 bp, Homo sapiens
gggacagatgaagag

SEQ ID NO: 150073 - DNA, 15 bp, Homo sapiens
ggggacagatgaaga

SEQ ID NO: 150074 - DNA, 15 bp, Homo sapiens
tggggacagatgaag

SEQ ID NO: 150075 - DNA, 15 bp, Homo sapiens
atggggacagatgaa

SEQ ID NO: 150076 - DNA, 15 bp, Homo sapiens
aatggggacagatga

SEQ ID NO: 150077 - DNA, 15 bp, Homo sapiens
gaatggggacagatg

SEQ ID NO: 150078 - DNA, 15 bp, Homo sapiens
ggaatggggacagat

SEQ ID NO: 150079 - DNA, 15 bp, Homo sapiens
aggaatggggacaga

SEQ ID NO: 150080 - DNA, 15 bp, Homo sapiens
aaggaatggggacag

SEQ ID NO: 150081 - DNA, 15 bp, Homo sapiens
gaaggaatggggaca

SEQ ID NO: 150082 - DNA, 15 bp, Homo sapiens
tgaaggaatggggac

SEQ ID NO: 150083 - DNA, 15 bp, Homo sapiens
gtgaaggaatgggga

SEQ ID NO: 150084 - DNA, 15 bp, Homo sapiens
ggtgaaggaatgggg

SEQ ID NO: 150085 - DNA, 15 bp, Homo sapiens
gggtgaaggaatggg

SEQ ID NO: 150086 - DNA, 15 bp, Homo sapiens
ggggtgaaggaatgg

SEQ ID NO: 150087 - DNA, 15 bp, Homo sapiens
gggggtgaaggaatg

SEQ ID NO: 150088 - DNA, 15 bp, Homo sapiens
ggggggtgaaggaat

SEQ ID NO: 150089 - DNA, 15 bp, Homo sapiens
tggggggtgaaggaa

SEQ ID NO: 150090 - DNA, 15 bp, Homo sapiens
ctggggggtgaagga

SEQ ID NO: 150091 - DNA, 15 bp, Homo sapiens
gctggggggtgaagg

SEQ ID NO: 150092 - DNA, 15 bp, Homo sapiens
ggctggggggtgaag

SEQ ID NO: 150093 - DNA, 15 bp, Homo sapiens
aggctggggggtgaa

SEQ ID NO: 150094 - DNA, 15 bp, Homo sapiens
caggctggggggtga

SEQ ID NO: 150095 - DNA, 15 bp, Homo sapiens
acaggctggggggtg

SEQ ID NO: 150096 - DNA, 15 bp, Homo sapiens
gacaggctggggggt

SEQ ID NO: 150097 - DNA, 15 bp, Homo sapiens
ggacaggctgggggg

SEQ ID NO: 150098 - DNA, 15 bp, Homo sapiens
gggacaggctggggg

SEQ ID NO: 150099 - DNA, 15 bp, Homo sapiens
ggggacaggctgggg

SEQ ID NO: 150100 - DNA, 15 bp, Homo sapiens
tggggacaggctggg

SEQ ID NO: 150101 - DNA, 15 bp, Homo sapiens
ttggggacaggctgg

SEQ ID NO: 150102 - DNA, 15 bp, Homo sapiens
gttggggacaggctg

SEQ ID NO: 150103 - DNA, 15 bp, Homo sapiens
agttggggacaggct

SEQ ID NO: 150104 - DNA, 15 bp, Homo sapiens
aagttggggacaggc

SEQ ID NO: 150105 - DNA, 15 bp, Homo sapiens
caagttggggacagg

SEQ ID NO: 150106 - DNA, 15 bp, Homo sapiens
tcaagttggggacag

SEQ ID NO: 150107 - DNA, 15 bp, Homo sapiens
gtcaagttggggaca

SEQ ID NO: 150108 - DNA, 15 bp, Homo sapiens
agtcaagttggggac

SEQ ID NO: 150109 - DNA, 15 bp, Homo sapiens
cagtcaagttgggga

SEQ ID NO: 150110 - DNA, 15 bp, Homo sapiens
tcagtcaagttgggg

SEQ ID NO: 150111 - DNA, 15 bp, Homo sapiens
ctcagtcaagttggg

SEQ ID NO: 150112 - DNA, 15 bp, Homo sapiens
cctcagtcaagttgg

SEQ ID NO: 150113 - DNA, 15 bp, Homo sapiens
acctcagtcaagttg

SEQ ID NO: 150114 - DNA, 15 bp, Homo sapiens
aacctcagtcaagtt

SEQ ID NO: 150115 - DNA, 15 bp, Homo sapiens
gaacctcagtcaagt

SEQ ID NO: 150116 - DNA, 15 bp, Homo sapiens
agaacctcagtcaag

SEQ ID NO: 150117 - DNA, 15 bp, Homo sapiens
aagaacctcagtcaa

SEQ ID NO: 150118 - DNA, 15 bp, Homo sapiens
aaagaacctcagtca

SEQ ID NO: 150119 - DNA, 15 bp, Homo sapiens
gaaagaacctcagtc

SEQ ID NO: 150120 - DNA, 15 bp, Homo sapiens
ggaaagaacctcagt

SEQ ID NO: 150121 - DNA, 15 bp, Homo sapiens
aggaaagaacctcag

SEQ ID NO: 150122 - DNA, 15 bp, Homo sapiens
caggaaagaacctca

SEQ ID NO: 150123 - DNA, 15 bp, Homo sapiens
gcaggaaagaacctc

SEQ ID NO: 150124 - DNA, 15 bp, Homo sapiens
tgcaggaaagaacct

SEQ ID NO: 150125 - DNA, 15 bp, Homo sapiens
ctgcaggaaagaacc

SEQ ID NO: 150126 - DNA, 15 bp, Homo sapiens
tctgcaggaaagaac

SEQ ID NO: 150127 - DNA, 15 bp, Homo sapiens
atctgcaggaaagaa

SEQ ID NO: 150128 - DNA, 15 bp, Homo sapiens
gatctgcaggaaaga

SEQ ID NO: 150129 - DNA, 15 bp, Homo sapiens
ggatctgcaggaaag

SEQ ID NO: 150130 - DNA, 15 bp, Homo sapiens
gggatctgcaggaaa

SEQ ID NO: 150131 - DNA, 15 bp, Homo sapiens
ggggatctgcaggaa

SEQ ID NO: 150132 - DNA, 15 bp, Homo sapiens
cggggatctgcagga

SEQ ID NO: 150133 - DNA, 15 bp, Homo sapiens
gcggggatctgcagg

SEQ ID NO: 150134 - DNA, 15 bp, Homo sapiens
ggcggggatctgcag

SEQ ID NO: 150135 - DNA, 15 bp, Homo sapiens
gggcggggatctgca

SEQ ID NO: 150136 - DNA, 15 bp, Homo sapiens
agggcggggatctgc

SEQ ID NO: 150137 - DNA, 15 bp, Homo sapiens
aagggcggggatctg

SEQ ID NO: 150138 - DNA, 15 bp, Homo sapiens
caagggcggggatct

SEQ ID NO: 150139 - DNA, 15 bp, Homo sapiens
tcaagggcggggatc

SEQ ID NO: 150140 - DNA, 15 bp, Homo sapiens
ctcaagggcggggat

SEQ ID NO: 150141 - DNA, 15 bp, Homo sapiens
tctcaagggcgggga

SEQ ID NO: 150142 - DNA, 15 bp, Homo sapiens
ctctcaagggcgggg

SEQ ID NO: 150143 - DNA, 15 bp, Homo sapiens
cctctcaagggcggg

SEQ ID NO: 150144 - DNA, 15 bp, Homo sapiens
ccctctcaagggcgg

SEQ ID NO: 150145 - DNA, 15 bp, Homo sapiens
cccctctcaagggcg

SEQ ID NO: 150146 - DNA, 15 bp, Homo sapiens
acccctctcaagggc

SEQ ID NO: 150147 - DNA, 15 bp, Homo sapiens
aacccctctcaaggg

SEQ ID NO: 150148 - DNA, 15 bp, Homo sapiens
caacccctctcaagg

SEQ ID NO: 150149 - DNA, 15 bp, Homo sapiens
ccaacccctctcaag

SEQ ID NO: 150150 - DNA, 15 bp, Homo sapiens
accaacccctctcaa

SEQ ID NO: 150151 - DNA, 15 bp, Homo sapiens
gaccaacccctctca

SEQ ID NO: 150152 - DNA, 15 bp, Homo sapiens
ggaccaacccctctc

SEQ ID NO: 150153 - DNA, 15 bp, Homo sapiens
gggaccaacccctct

SEQ ID NO: 150154 - DNA, 15 bp, Homo sapiens
tgggaccaacccctc

SEQ ID NO: 150155 - DNA, 15 bp, Homo sapiens
gtgggaccaacccct

SEQ ID NO: 150156 - DNA, 15 bp, Homo sapiens
agtgggaccaacccc

SEQ ID NO: 150157 - DNA, 15 bp, Homo sapiens
cagtgggaccaaccc

SEQ ID NO: 150158 - DNA, 15 bp, Homo sapiens
acagtgggaccaacc

SEQ ID NO: 150159 - DNA, 15 bp, Homo sapiens
gacagtgggaccaac

SEQ ID NO: 150160 - DNA, 15 bp, Homo sapiens
tgacagtgggaccaa

SEQ ID NO: 150161 - DNA, 15 bp, Homo sapiens
ttgacagtgggacca

SEQ ID NO: 150162 - DNA, 15 bp, Homo sapiens
gttgacagtgggacc

SEQ ID NO: 150163 - DNA, 15 bp, Homo sapiens
agttgacagtgggac

SEQ ID NO: 150164 - DNA, 15 bp, Homo sapiens
gagttgacagtggga

SEQ ID NO: 150165 - DNA, 15 bp, Homo sapiens
agagttgacagtggg

SEQ ID NO: 150166 - DNA, 15 bp, Homo sapiens
cagagttgacagtgg

SEQ ID NO: 150167 - DNA, 15 bp, Homo sapiens
gcagagttgacagtg

SEQ ID NO: 150168 - DNA, 15 bp, Homo sapiens
agcagagttgacagt

SEQ ID NO: 150169 - DNA, 15 bp, Homo sapiens
aagcagagttgacag

SEQ ID NO: 150170 - DNA, 15 bp, Homo sapiens
gaagcagagttgaca

SEQ ID NO: 150171 - DNA, 15 bp, Homo sapiens
agaagcagagttgac

SEQ ID NO: 150172 - DNA, 15 bp, Homo sapiens
cagaagcagagttga

SEQ ID NO: 150173 - DNA, 15 bp, Homo sapiens
acagaagcagagttg

SEQ ID NO: 150174 - DNA, 15 bp, Homo sapiens
cacagaagcagagtt

SEQ ID NO: 150175 - DNA, 15 bp, Homo sapiens
gcacagaagcagagt

SEQ ID NO: 150176 - DNA, 15 bp, Homo sapiens
ggcacagaagcagag

SEQ ID NO: 150177 - DNA, 15 bp, Homo sapiens
gggcacagaagcaga

SEQ ID NO: 150178 - DNA, 15 bp, Homo sapiens
agggcacagaagcag

SEQ ID NO: 150179 - DNA, 15 bp, Homo sapiens
cagggcacagaagca

SEQ ID NO: 150180 - DNA, 15 bp, Homo sapiens
acagggcacagaagc

SEQ ID NO: 150181 - DNA, 15 bp, Homo sapiens
cacagggcacagaag

SEQ ID NO: 150182 - DNA, 15 bp, Homo sapiens
gcacagggcacagaa

SEQ ID NO: 150183 - DNA, 15 bp, Homo sapiens
ggcacagggcacaga

SEQ ID NO: 150184 - DNA, 15 bp, Homo sapiens
cggcacagggcacag

SEQ ID NO: 150185 - DNA, 15 bp, Homo sapiens
gcggcacagggcaca

SEQ ID NO: 150186 - DNA, 15 bp, Homo sapiens
tgcggcacagggcac

SEQ ID NO: 150187 - DNA, 15 bp, Homo sapiens
gtgcggcacagggca

SEQ ID NO: 150188 - DNA, 15 bp, Homo sapiens
ggtgcggcacagggc

SEQ ID NO: 150189 - DNA, 15 bp, Homo sapiens
aggtgcggcacaggg

SEQ ID NO: 150190 - DNA, 15 bp, Homo sapiens
caggtgcggcacagg

SEQ ID NO: 150191 - DNA, 15 bp, Homo sapiens
ccaggtgcggcacag

SEQ ID NO: 150192 - DNA, 15 bp, Homo sapiens
gccaggtgcggcaca

SEQ ID NO: 150193 - DNA, 15 bp, Homo sapiens
tgccaggtgcggcac

SEQ ID NO: 150194 - DNA, 15 bp, Homo sapiens
atgccaggtgcggca

SEQ ID NO: 150195 - DNA, 15 bp, Homo sapiens
aatgccaggtgcggc

SEQ ID NO: 150196 - DNA, 15 bp, Homo sapiens
gaatgccaggtgcgg

SEQ ID NO: 150197 - DNA, 15 bp, Homo sapiens
tgaatgccaggtgcg

SEQ ID NO: 150198 - DNA, 15 bp, Homo sapiens
ctgaatgccaggtgc

SEQ ID NO: 150199 - DNA, 15 bp, Homo sapiens
actgaatgccaggtg

SEQ ID NO: 150200 - DNA, 15 bp, Homo sapiens
cactgaatgccaggt

SEQ ID NO: 150201 - DNA, 15 bp, Homo sapiens
tcactgaatgccagg

SEQ ID NO: 150202 - DNA, 15 bp, Homo sapiens
ctcactgaatgccag

SEQ ID NO: 150203 - DNA, 15 bp, Homo sapiens
gctcactgaatgcca

SEQ ID NO: 150204 - DNA, 15 bp, Homo sapiens
tgctcactgaatgcc

SEQ ID NO: 150205 - DNA, 15 bp, Homo sapiens
atgctcactgaatgc

SEQ ID NO: 150206 - DNA, 15 bp, Homo sapiens
gatgctcactgaatg

SEQ ID NO: 150207 - DNA, 15 bp, Homo sapiens
agatgctcactgaat

SEQ ID NO: 150208 - DNA, 15 bp, Homo sapiens
cagatgctcactgaa

SEQ ID NO: 150209 - DNA, 15 bp, Homo sapiens
gcagatgctcactga

SEQ ID NO: 150210 - DNA, 15 bp, Homo sapiens
agcagatgctcactg

SEQ ID NO: 150211 - DNA, 15 bp, Homo sapiens
cagcagatgctcact

SEQ ID NO: 150212 - DNA, 15 bp, Homo sapiens
tcagcagatgctcac

SEQ ID NO: 150213 - DNA, 15 bp, Homo sapiens
ttcagcagatgctca

SEQ ID NO: 150214 - DNA, 15 bp, Homo sapiens
cttcagcagatgctc

SEQ ID NO: 150215 - DNA, 15 bp, Homo sapiens
tcttcagcagatgct

SEQ ID NO: 150216 - DNA, 15 bp, Homo sapiens
ctcttcagcagatgc

SEQ ID NO: 150217 - DNA, 15 bp, Homo sapiens
tctcttcagcagatg

SEQ ID NO: 150218 - DNA, 15 bp, Homo sapiens
atctcttcagcagat

SEQ ID NO: 150219 - DNA, 15 bp, Homo sapiens
catctcttcagcaga

SEQ ID NO: 150220 - DNA, 15 bp, Homo sapiens
tcatctcttcagcag

SEQ ID NO: 150221 - DNA, 15 bp, Homo sapiens
ctcatctcttcagca

SEQ ID NO: 150222 - DNA, 15 bp, Homo sapiens
cctcatctcttcagc

SEQ ID NO: 150223 - DNA, 15 bp, Homo sapiens
ccctcatctcttcag

SEQ ID NO: 150224 - DNA, 15 bp, Homo sapiens
accctcatctcttca

SEQ ID NO: 150225 - DNA, 15 bp, Homo sapiens
gaccctcatctcttc

SEQ ID NO: 150226 - DNA, 15 bp, Homo sapiens
tgaccctcatctctt

SEQ ID NO: 150227 - DNA, 15 bp, Homo sapiens
ctgaccctcatctct

SEQ ID NO: 150228 - DNA, 15 bp, Homo sapiens
tctgaccctcatctc

SEQ ID NO: 150229 - DNA, 15 bp, Homo sapiens
atctgaccctcatct

SEQ ID NO: 150230 - DNA, 15 bp, Homo sapiens
catctgaccctcatc

SEQ ID NO: 150231 - DNA, 15 bp, Homo sapiens
gcatctgaccctcat

SEQ ID NO: 150232 - DNA, 15 bp, Homo sapiens
ggcatctgaccctca

SEQ ID NO: 150233 - DNA, 15 bp, Homo sapiens
gggcatctgaccctc

SEQ ID NO: 150234 - DNA, 15 bp, Homo sapiens
agggcatctgaccct

SEQ ID NO: 150235 - DNA, 15 bp, Homo sapiens
cagggcatctgaccc

SEQ ID NO: 150236 - DNA, 15 bp, Homo sapiens
gcagggcatctgacc

SEQ ID NO: 150237 - DNA, 15 bp, Homo sapiens
tgcagggcatctgac

SEQ ID NO: 150238 - DNA, 15 bp, Homo sapiens
ctgcagggcatctga

SEQ ID NO: 150239 - DNA, 15 bp, Homo sapiens
cctgcagggcatctg

SEQ ID NO: 150240 - DNA, 15 bp, Homo sapiens
ccctgcagggcatct

SEQ ID NO: 150241 - DNA, 15 bp, Homo sapiens
tccctgcagggcatc

SEQ ID NO: 150242 - DNA, 15 bp, Homo sapiens
ctccctgcagggcat

SEQ ID NO: 150243 - DNA, 15 bp, Homo sapiens
actccctgcagggca

SEQ ID NO: 150244 - DNA, 15 bp, Homo sapiens
cactccctgcagggc

SEQ ID NO: 150245 - DNA, 15 bp, Homo sapiens
acactccctgcaggg

SEQ ID NO: 150246 - DNA, 15 bp, Homo sapiens
cacactccctgcagg

SEQ ID NO: 150247 - DNA, 15 bp, Homo sapiens
ccacactccctgcag

SEQ ID NO: 150248 - DNA, 15 bp, Homo sapiens
cccacactccctgca

SEQ ID NO: 150249 - DNA, 15 bp, Homo sapiens
ccccacactccctgc

SEQ ID NO: 150250 - DNA, 15 bp, Homo sapiens
cccccacactccctg

SEQ ID NO: 150251 - DNA, 15 bp, Homo sapiens
gcccccacactccct

SEQ ID NO: 150252 - DNA, 15 bp, Homo sapiens
cgcccccacactccc

SEQ ID NO: 150253 - DNA, 15 bp, Homo sapiens
acgcccccacactcc

SEQ ID NO: 150254 - DNA, 15 bp, Homo sapiens
gacgcccccacactc

SEQ ID NO: 150255 - DNA, 15 bp, Homo sapiens
ggacgcccccacact

SEQ ID NO: 150256 - DNA, 15 bp, Homo sapiens
aggacgcccccacac

SEQ ID NO: 150257 - DNA, 15 bp, Homo sapiens
gaggacgcccccaca

SEQ ID NO: 150258 - DNA, 15 bp, Homo sapiens
tgaggacgcccccac

SEQ ID NO: 150259 - DNA, 15 bp, Homo sapiens
ctgaggacgccccca

SEQ ID NO: 150260 - DNA, 15 bp, Homo sapiens
cctgaggacgccccc

SEQ ID NO: 150261 - DNA, 15 bp, Homo sapiens
gcctgaggacgcccc

SEQ ID NO: 150262 - DNA, 15 bp, Homo sapiens
tgcctgaggacgccc

SEQ ID NO: 150263 - DNA, 15 bp, Homo sapiens
ttgcctgaggacgcc

SEQ ID NO: 150264 - DNA, 15 bp, Homo sapiens
cttgcctgaggacgc

SEQ ID NO: 150265 - DNA, 15 bp, Homo sapiens
tcttgcctgaggacg

SEQ ID NO: 150266 - DNA, 15 bp, Homo sapiens
ttcttgcctgaggac

SEQ ID NO: 150267 - DNA, 15 bp, Homo sapiens
tttcttgcctgagga

SEQ ID NO: 150268 - DNA, 15 bp, Homo sapiens
ttttcttgcctgagg

SEQ ID NO: 150269 - DNA, 15 bp, Homo sapiens
cttttcttgcctgag

SEQ ID NO: 150270 - DNA, 15 bp, Homo sapiens
acttttcttgcctga

SEQ ID NO: 150271 - DNA, 15 bp, Homo sapiens
aacttttcttgcctg

SEQ ID NO: 150272 - DNA, 15 bp, Homo sapiens
caacttttcttgcct

SEQ ID NO: 150273 - DNA, 15 bp, Homo sapiens
acaacttttcttgcc

SEQ ID NO: 150274 - DNA, 15 bp, Homo sapiens
tacaacttttcttgc

SEQ ID NO: 150275 - DNA, 15 bp, Homo sapiens
gtacaacttttcttg

SEQ ID NO: 150276 - DNA, 15 bp, Homo sapiens
cgtacaacttttctt

SEQ ID NO: 150277 - DNA, 15 bp, Homo sapiens
acgtacaacttttct

SEQ ID NO: 150278 - DNA, 15 bp, Homo sapiens
aacgtacaacttttc

SEQ ID NO: 150279 - DNA, 15 bp, Homo sapiens
aaacgtacaactttt

SEQ ID NO: 150280 - DNA, 15 bp, Homo sapiens
caaacgtacaacttt

SEQ ID NO: 150281 - DNA, 15 bp, Homo sapiens
ccaaacgtacaactt

SEQ ID NO: 150282 - DNA, 15 bp, Homo sapiens
gccaaacgtacaact

SEQ ID NO: 150283 - DNA, 15 bp, Homo sapiens
agccaaacgtacaac

SEQ ID NO: 150284 - DNA, 15 bp, Homo sapiens
cagccaaacgtacaa

SEQ ID NO: 150285 - DNA, 15 bp, Homo sapiens
acagccaaacgtaca

SEQ ID NO: 150286 - DNA, 15 bp, Homo sapiens
cacagccaaacgtac

SEQ ID NO: 150287 - DNA, 15 bp, Homo sapiens
ccacagccaaacgta

SEQ ID NO: 150288 - DNA, 15 bp, Homo sapiens
cccacagccaaacgt

SEQ ID NO: 150289 - DNA, 15 bp, Homo sapiens
gcccacagccaaacg

SEQ ID NO: 150290 - DNA, 15 bp, Homo sapiens
ggcccacagccaaac

SEQ ID NO: 150291 - DNA, 15 bp, Homo sapiens
gggcccacagccaaa

SEQ ID NO: 150292 - DNA, 15 bp, Homo sapiens
agggcccacagccaa

SEQ ID NO: 150293 - DNA, 15 bp, Homo sapiens
cagggcccacagcca

SEQ ID NO: 150294 - DNA, 15 bp, Homo sapiens
tcagggcccacagcc

SEQ ID NO: 150295 - DNA, 15 bp, Homo sapiens
atcagggcccacagc

SEQ ID NO: 150296 - DNA, 15 bp, Homo sapiens
aatcagggcccacag

SEQ ID NO: 150297 - DNA, 15 bp, Homo sapiens
taatcagggcccaca

SEQ ID NO: 150298 - DNA, 15 bp, Homo sapiens
ataatcagggcccac

SEQ ID NO: 150299 - DNA, 15 bp, Homo sapiens
cataatcagggccca

SEQ ID NO: 150300 - DNA, 15 bp, Homo sapiens
acataatcagggccc

SEQ ID NO: 150301 - DNA, 15 bp, Homo sapiens
cacataatcagggcc

SEQ ID NO: 150302 - DNA, 15 bp, Homo sapiens
acacataatcagggc

SEQ ID NO: 150303 - DNA, 15 bp, Homo sapiens
gacacataatcaggg

SEQ ID NO: 150304 - DNA, 15 bp, Homo sapiens
ggacacataatcagg

SEQ ID NO: 150305 - DNA, 15 bp, Homo sapiens
aggacacataatcag

SEQ ID NO: 150306 - DNA, 15 bp, Homo sapiens
caggacacataatca

SEQ ID NO: 150307 - DNA, 15 bp, Homo sapiens
acaggacacataatc

SEQ ID NO: 150308 - DNA, 15 bp, Homo sapiens
cacaggacacataat

SEQ ID NO: 150309 - DNA, 15 bp, Homo sapiens
tcacaggacacataa

SEQ ID NO: 150310 - DNA, 15 bp, Homo sapiens
gtcacaggacacata

SEQ ID NO: 150311 - DNA, 15 bp, Homo sapiens
ggtcacaggacacat

SEQ ID NO: 150312 - DNA, 15 bp, Homo sapiens
aggtcacaggacaca

SEQ ID NO: 150313 - DNA, 15 bp, Homo sapiens
gaggtcacaggacac

SEQ ID NO: 150314 - DNA, 15 bp, Homo sapiens
agaggtcacaggaca

SEQ ID NO: 150315 - DNA, 15 bp, Homo sapiens
aagaggtcacaggac

SEQ ID NO: 150316 - DNA, 15 bp, Homo sapiens
caagaggtcacagga

SEQ ID NO: 150317 - DNA, 15 bp, Homo sapiens
ccaagaggtcacagg

SEQ ID NO: 150318 - DNA, 15 bp, Homo sapiens
cccaagaggtcacag

SEQ ID NO: 150319 - DNA, 15 bp, Homo sapiens
acccaagaggtcaca

SEQ ID NO: 150320 - DNA, 15 bp, Homo sapiens
cacccaagaggtcac

SEQ ID NO: 150321 - DNA, 15 bp, Homo sapiens
tcacccaagaggtca

SEQ ID NO: 150322 - DNA, 15 bp, Homo sapiens
ctcacccaagaggtc

SEQ ID NO: 150323 - DNA, 15 bp, Homo sapiens
cctcacccaagaggt

SEQ ID NO: 150324 - DNA, 15 bp, Homo sapiens
acctcacccaagagg

SEQ ID NO: 150325 - DNA, 15 bp, Homo sapiens
gacctcacccaagag

SEQ ID NO: 150326 - DNA, 15 bp, Homo sapiens
tgacctcacccaaga

SEQ ID NO: 150327 - DNA, 15 bp, Homo sapiens
ctgacctcacccaag

SEQ ID NO: 150328 - DNA, 15 bp, Homo sapiens
gctgacctcacccaa

SEQ ID NO: 150329 - DNA, 15 bp, Homo sapiens
tgctgacctcaccca

SEQ ID NO: 150330 - DNA, 15 bp, Homo sapiens
ttgctgacctcaccc

SEQ ID NO: 150331 - DNA, 15 bp, Homo sapiens
cttgctgacctcacc

SEQ ID NO: 150332 - DNA, 15 bp, Homo sapiens
tcttgctgacctcac

SEQ ID NO: 150333 - DNA, 15 bp, Homo sapiens
ctcttgctgacctca

SEQ ID NO: 150334 - DNA, 15 bp, Homo sapiens
tctcttgctgacctc

SEQ ID NO: 150335 - DNA, 15 bp, Homo sapiens
ttctcttgctgacct

SEQ ID NO: 150336 - DNA, 15 bp, Homo sapiens
tttctcttgctgacc

SEQ ID NO: 150337 - DNA, 15 bp, Homo sapiens
gtttctcttgctgac

SEQ ID NO: 150338 - DNA, 15 bp, Homo sapiens
ggtttctcttgctga

SEQ ID NO: 150339 - DNA, 15 bp, Homo sapiens
aggtttctcttgctg

SEQ ID NO: 150340 - DNA, 15 bp, Homo sapiens
gaggtttctcttgct

SEQ ID NO: 150341 - DNA, 15 bp, Homo sapiens
agaggtttctcttgc

SEQ ID NO: 150342 - DNA, 15 bp, Homo sapiens
cagaggtttctcttg

SEQ ID NO: 150343 - DNA, 15 bp, Homo sapiens
gcagaggtttctctt

SEQ ID NO: 150344 - DNA, 15 bp, Homo sapiens
tgcagaggtttctct

SEQ ID NO: 150345 - DNA, 15 bp, Homo sapiens
ttgcagaggtttctc

SEQ ID NO: 150346 - DNA, 15 bp, Homo sapiens
cttgcagaggtttct

SEQ ID NO: 150347 - DNA, 15 bp, Homo sapiens
gcttgcagaggtttc

SEQ ID NO: 150348 - DNA, 15 bp, Homo sapiens
agcttgcagaggttt

SEQ ID NO: 150349 - DNA, 15 bp, Homo sapiens
cagcttgcagaggtt

SEQ ID NO: 150350 - DNA, 15 bp, Homo sapiens
ccagcttgcagaggt

SEQ ID NO: 150351 - DNA, 15 bp, Homo sapiens
gccagcttgcagagg

SEQ ID NO: 150352 - DNA, 15 bp, Homo sapiens
agccagcttgcagag

SEQ ID NO: 150353 - DNA, 15 bp, Homo sapiens
cagccagcttgcaga

SEQ ID NO: 150354 - DNA, 15 bp, Homo sapiens
ccagccagcttgcag

SEQ ID NO: 150355 - DNA, 15 bp, Homo sapiens
cccagccagcttgca

SEQ ID NO: 150356 - DNA, 15 bp, Homo sapiens
ccccagccagcttgc

SEQ ID NO: 150357 - DNA, 15 bp, Homo sapiens
gccccagccagcttg

SEQ ID NO: 150358 - DNA, 15 bp, Homo sapiens
agccccagccagctt

SEQ ID NO: 150359 - DNA, 15 bp, Homo sapiens
cagccccagccagct

SEQ ID NO: 150360 - DNA, 15 bp, Homo sapiens
gcagccccagccagc

SEQ ID NO: 150361 - DNA, 15 bp, Homo sapiens
ggcagccccagccag

SEQ ID NO: 150362 - DNA, 15 bp, Homo sapiens
aggcagccccagcca

SEQ ID NO: 150363 - DNA, 15 bp, Homo sapiens
gaggcagccccagcc

SEQ ID NO: 150364 - DNA, 15 bp, Homo sapiens
ggaggcagccccagc

SEQ ID NO: 150365 - DNA, 15 bp, Homo sapiens
gggaggcagccccag

SEQ ID NO: 150366 - DNA, 15 bp, Homo sapiens
tgggaggcagcccca

SEQ ID NO: 150367 - DNA, 15 bp, Homo sapiens
ctgggaggcagcccc

SEQ ID NO: 150368 - DNA, 15 bp, Homo sapiens
tctgggaggcagccc

SEQ ID NO: 150369 - DNA, 15 bp, Homo sapiens
ctctgggaggcagcc

SEQ ID NO: 150370 - DNA, 15 bp, Homo sapiens
cctctgggaggcagc

SEQ ID NO: 150371 - DNA, 15 bp, Homo sapiens
gcctctgggaggcag

SEQ ID NO: 150372 - DNA, 15 bp, Homo sapiens
agcctctgggaggca

SEQ ID NO: 150373 - DNA, 15 bp, Homo sapiens
cagcctctgggaggc

SEQ ID NO: 150374 - DNA, 15 bp, Homo sapiens
gcagcctctgggagg

SEQ ID NO: 150375 - DNA, 15 bp, Homo sapiens
ggcagcctctgggag

SEQ ID NO: 150376 - DNA, 15 bp, Homo sapiens
tggcagcctctggga

SEQ ID NO: 150377 - DNA, 15 bp, Homo sapiens
ctggcagcctctggg

SEQ ID NO: 150378 - DNA, 15 bp, Homo sapiens
cctggcagcctctgg

SEQ ID NO: 150379 - DNA, 15 bp, Homo sapiens
ccctggcagcctctg

SEQ ID NO: 150380 - DNA, 15 bp, Homo sapiens
cccctggcagcctct

SEQ ID NO: 150381 - DNA, 15 bp, Homo sapiens
ccccctggcagcctc

SEQ ID NO: 150382 - DNA, 15 bp, Homo sapiens
tccccctggcagcct

SEQ ID NO: 150383 - DNA, 15 bp, Homo sapiens
ctccccctggcagcc

SEQ ID NO: 150384 - DNA, 15 bp, Homo sapiens
cctccccctggcagc

SEQ ID NO: 150385 - DNA, 15 bp, Homo sapiens
ccctccccctggcag

SEQ ID NO: 150386 - DNA, 15 bp, Homo sapiens
tccctccccctggca

SEQ ID NO: 150387 - DNA, 15 bp, Homo sapiens
gtccctccccctggc

SEQ ID NO: 150388 - DNA, 15 bp, Homo sapiens
tgtccctccccctgg

SEQ ID NO: 150389 - DNA, 15 bp, Homo sapiens
ctgtccctccccctg

SEQ ID NO: 150390 - DNA, 15 bp, Homo sapiens
cctgtccctccccct

SEQ ID NO: 150391 - DNA, 15 bp, Homo sapiens
gcctgtccctccccc

SEQ ID NO: 150392 - DNA, 15 bp, Homo sapiens
agcctgtccctcccc

SEQ ID NO: 150393 - DNA, 15 bp, Homo sapiens
gagcctgtccctccc

SEQ ID NO: 150394 - DNA, 15 bp, Homo sapiens
agagcctgtccctcc

SEQ ID NO: 150395 - DNA, 15 bp, Homo sapiens
cagagcctgtccctc

SEQ ID NO: 150396 - DNA, 15 bp, Homo sapiens
acagagcctgtccct

SEQ ID NO: 150397 - DNA, 15 bp, Homo sapiens
gacagagcctgtccc

SEQ ID NO: 150398 - DNA, 15 bp, Homo sapiens
agacagagcctgtcc

SEQ ID NO: 150399 - DNA, 15 bp, Homo sapiens
cagacagagcctgtc

SEQ ID NO: 150400 - DNA, 15 bp, Homo sapiens
acagacagagcctgt

SEQ ID NO: 150401 - DNA, 15 bp, Homo sapiens
cacagacagagcctg

SEQ ID NO: 150402 - DNA, 15 bp, Homo sapiens
gcacagacagagcct

SEQ ID NO: 150403 - DNA, 15 bp, Homo sapiens
agcacagacagagcc

SEQ ID NO: 150404 - DNA, 15 bp, Homo sapiens
gagcacagacagagc

SEQ ID NO: 150405 - DNA, 15 bp, Homo sapiens
agagcacagacagag

SEQ ID NO: 150406 - DNA, 15 bp, Homo sapiens
aagagcacagacaga

SEQ ID NO: 150407 - DNA, 15 bp, Homo sapiens
gaagagcacagacag

SEQ ID NO: 150408 - DNA, 15 bp, Homo sapiens
agaagagcacagaca

SEQ ID NO: 150409 - DNA, 15 bp, Homo sapiens
aagaagagcacagac

SEQ ID NO: 150410 - DNA, 15 bp, Homo sapiens
gaagaagagcacaga

SEQ ID NO: 150411 - DNA, 15 bp, Homo sapiens
ggaagaagagcacag

SEQ ID NO: 150412 - DNA, 15 bp, Homo sapiens
cggaagaagagcaca

SEQ ID NO: 150413 - DNA, 15 bp, Homo sapiens
tcggaagaagagcac

SEQ ID NO: 150414 - DNA, 15 bp, Homo sapiens
ctcggaagaagagca

SEQ ID NO: 150415 - DNA, 15 bp, Homo sapiens
cctcggaagaagagc

SEQ ID NO: 150416 - DNA, 15 bp, Homo sapiens
gcctcggaagaagag

SEQ ID NO: 150417 - DNA, 15 bp, Homo sapiens
agcctcggaagaaga

SEQ ID NO: 150418 - DNA, 15 bp, Homo sapiens
tagcctcggaagaag

SEQ ID NO: 150419 - DNA, 15 bp, Homo sapiens
gtagcctcggaagaa

SEQ ID NO: 150420 - DNA, 15 bp, Homo sapiens
tgtagcctcggaaga

SEQ ID NO: 150421 - DNA, 15 bp, Homo sapiens
gtgtagcctcggaag

SEQ ID NO: 150422 - DNA, 15 bp, Homo sapiens
ggtgtagcctcggaa

SEQ ID NO: 150423 - DNA, 15 bp, Homo sapiens
aggtgtagcctcgga

SEQ ID NO: 150424 - DNA, 15 bp, Homo sapiens
caggtgtagcctcgg

SEQ ID NO: 150425 - DNA, 15 bp, Homo sapiens
ccaggtgtagcctcg

SEQ ID NO: 150426 - DNA, 15 bp, Homo sapiens
cccaggtgtagcctc

SEQ ID NO: 150427 - DNA, 15 bp, Homo sapiens
ccccaggtgtagcct

SEQ ID NO: 150428 - DNA, 15 bp, Homo sapiens
gccccaggtgtagcc

SEQ ID NO: 150429 - DNA, 15 bp, Homo sapiens
cgccccaggtgtagc

SEQ ID NO: 150430 - DNA, 15 bp, Homo sapiens
gcgccccaggtgtag

SEQ ID NO: 150431 - DNA, 15 bp, Homo sapiens
ggcgccccaggtgta

SEQ ID NO: 150432 - DNA, 15 bp, Homo sapiens
tggcgccccaggtgt

SEQ ID NO: 150433 - DNA, 15 bp, Homo sapiens
ctggcgccccaggtg

SEQ ID NO: 150434 - DNA, 15 bp, Homo sapiens
cctggcgccccaggt

SEQ ID NO: 150435 - DNA, 15 bp, Homo sapiens
gcctggcgccccagg

SEQ ID NO: 150436 - DNA, 15 bp, Homo sapiens
agcctggcgccccag

SEQ ID NO: 150437 - DNA, 15 bp, Homo sapiens
gagcctggcgcccca

SEQ ID NO: 150438 - DNA, 15 bp, Homo sapiens
agagcctggcgcccc

SEQ ID NO: 150439 - DNA, 15 bp, Homo sapiens
gagagcctggcgccc

SEQ ID NO: 150440 - DNA, 15 bp, Homo sapiens
tgagagcctggcgcc

SEQ ID NO: 150441 - DNA, 15 bp, Homo sapiens
ctgagagcctggcgc

SEQ ID NO: 150442 - DNA, 15 bp, Homo sapiens
cctgagagcctggcg

SEQ ID NO: 150443 - DNA, 15 bp, Homo sapiens
ccctgagagcctggc

SEQ ID NO: 150444 - DNA, 15 bp, Homo sapiens
gccctgagagcctgg

SEQ ID NO: 150445 - DNA, 15 bp, Homo sapiens
agccctgagagcctg

SEQ ID NO: 150446 - DNA, 15 bp, Homo sapiens
gagccctgagagcct

SEQ ID NO: 150447 - DNA, 15 bp, Homo sapiens
ggagccctgagagcc

SEQ ID NO: 150448 - DNA, 15 bp, Homo sapiens
gggagccctgagagc

SEQ ID NO: 150449 - DNA, 15 bp, Homo sapiens
ggggagccctgagag

SEQ ID NO: 150450 - DNA, 15 bp, Homo sapiens
tggggagccctgaga

SEQ ID NO: 150451 - DNA, 15 bp, Homo sapiens
ctggggagccctgag

SEQ ID NO: 150452 - DNA, 15 bp, Homo sapiens
cctggggagccctga

SEQ ID NO: 150453 - DNA, 15 bp, Homo sapiens
acctggggagccctg

SEQ ID NO: 150454 - DNA, 15 bp, Homo sapiens
tacctggggagccct

SEQ ID NO: 150455 - DNA, 15 bp, Homo sapiens
gtacctggggagccc

SEQ ID NO: 150456 - DNA, 15 bp, Homo sapiens
ggtacctggggagcc

SEQ ID NO: 150457 - DNA, 15 bp, Homo sapiens
tggtacctggggagc

SEQ ID NO: 150458 - DNA, 15 bp, Homo sapiens
gtggtacctggggag

SEQ ID NO: 150459 - DNA, 15 bp, Homo sapiens
ggtggtacctgggga

SEQ ID NO: 150460 - DNA, 15 bp, Homo sapiens
tggtggtacctgggg

SEQ ID NO: 150461 - DNA, 15 bp, Homo sapiens
gtggtggtacctggg

SEQ ID NO: 150462 - DNA, 15 bp, Homo sapiens
tgtggtggtacctgg

SEQ ID NO: 150463 - DNA, 15 bp, Homo sapiens
atgtggtggtacctg

SEQ ID NO: 150464 - DNA, 15 bp, Homo sapiens
aatgtggtggtacct

SEQ ID NO: 150465 - DNA, 15 bp, Homo sapiens
aaatgtggtggtacc

SEQ ID NO: 150466 - DNA, 15 bp, Homo sapiens
gaaatgtggtggtac

SEQ ID NO: 150467 - DNA, 15 bp, Homo sapiens
ggaaatgtggtggta

SEQ ID NO: 150468 - DNA, 15 bp, Homo sapiens
aggaaatgtggtggt

SEQ ID NO: 150469 - DNA, 15 bp, Homo sapiens
taggaaatgtggtgg

SEQ ID NO: 150470 - DNA, 15 bp, Homo sapiens
gtaggaaatgtggtg

SEQ ID NO: 150471 - DNA, 15 bp, Homo sapiens
tgtaggaaatgtggt

SEQ ID NO: 150472 - DNA, 15 bp, Homo sapiens
gtgtaggaaatgtgg

SEQ ID NO: 150473 - DNA, 15 bp, Homo sapiens
agtgtaggaaatgtg

SEQ ID NO: 150474 - DNA, 15 bp, Homo sapiens
cagtgtaggaaatgt

SEQ ID NO: 150475 - DNA, 15 bp, Homo sapiens
gcagtgtaggaaatg

SEQ ID NO: 150476 - DNA, 15 bp, Homo sapiens
agcagtgtaggaaat

SEQ ID NO: 150477 - DNA, 15 bp, Homo sapiens
aagcagtgtaggaaa

SEQ ID NO: 150478 - DNA, 15 bp, Homo sapiens
caagcagtgtaggaa

SEQ ID NO: 150479 - DNA, 15 bp, Homo sapiens
ccaagcagtgtagga

SEQ ID NO: 150480 - DNA, 15 bp, Homo sapiens
cccaagcagtgtagg

SEQ ID NO: 150481 - DNA, 15 bp, Homo sapiens
tcccaagcagtgtag

SEQ ID NO: 150482 - DNA, 15 bp, Homo sapiens
ttcccaagcagtgta

SEQ ID NO: 150483 - DNA, 15 bp, Homo sapiens
tttcccaagcagtgt

SEQ ID NO: 150484 - DNA, 15 bp, Homo sapiens
ctttcccaagcagtg

SEQ ID NO: 150485 - DNA, 15 bp, Homo sapiens
gctttcccaagcagt

SEQ ID NO: 150486 - DNA, 15 bp, Homo sapiens
ggctttcccaagcag

SEQ ID NO: 150487 - DNA, 15 bp, Homo sapiens
gggctttcccaagca

SEQ ID NO: 150488 - DNA, 15 bp, Homo sapiens
agggctttcccaagc

SEQ ID NO: 150489 - DNA, 15 bp, Homo sapiens
cagggctttcccaag

SEQ ID NO: 150490 - DNA, 15 bp, Homo sapiens
acagggctttcccaa

SEQ ID NO: 150491 - DNA, 15 bp, Homo sapiens
tacagggctttccca

SEQ ID NO: 150492 - DNA, 15 bp, Homo sapiens
ttacagggctttccc

SEQ ID NO: 150493 - DNA, 15 bp, Homo sapiens
cttacagggctttcc

SEQ ID NO: 150494 - DNA, 15 bp, Homo sapiens
acttacagggctttc

SEQ ID NO: 150495 - DNA, 15 bp, Homo sapiens
aacttacagggcttt

SEQ ID NO: 150496 - DNA, 15 bp, Homo sapiens
aaacttacagggctt

SEQ ID NO: 150497 - DNA, 15 bp, Homo sapiens
caaacttacagggct

SEQ ID NO: 150498 - DNA, 15 bp, Homo sapiens
gcaaacttacagggc

SEQ ID NO: 150499 - DNA, 15 bp, Homo sapiens
tgcaaacttacaggg

SEQ ID NO: 150500 - DNA, 15 bp, Homo sapiens
gtgcaaacttacagg

SEQ ID NO: 150501 - DNA, 15 bp, Homo sapiens
tgtgcaaacttacag

SEQ ID NO: 150502 - DNA, 15 bp, Homo sapiens
ctgtgcaaacttaca

SEQ ID NO: 150503 - DNA, 15 bp, Homo sapiens
tctgtgcaaacttac

SEQ ID NO: 150504 - DNA, 15 bp, Homo sapiens
gtctgtgcaaactta

SEQ ID NO: 150505 - DNA, 15 bp, Homo sapiens
tgtctgtgcaaactt

SEQ ID NO: 150506 - DNA, 15 bp, Homo sapiens
gtgtctgtgcaaact

SEQ ID NO: 150507 - DNA, 15 bp, Homo sapiens
ggtgtctgtgcaaac

SEQ ID NO: 150508 - DNA, 15 bp, Homo sapiens
gggtgtctgtgcaaa

SEQ ID NO: 150509 - DNA, 15 bp, Homo sapiens
tgggtgtctgtgcaa

SEQ ID NO: 150510 - DNA, 15 bp, Homo sapiens
ctgggtgtctgtgca

SEQ ID NO: 150511 - DNA, 15 bp, Homo sapiens
gctgggtgtctgtgc

SEQ ID NO: 150512 - DNA, 15 bp, Homo sapiens
tgctgggtgtctgtg

SEQ ID NO: 150513 - DNA, 15 bp, Homo sapiens
atgctgggtgtctgt

SEQ ID NO: 150514 - DNA, 15 bp, Homo sapiens
catgctgggtgtctg

SEQ ID NO: 150515 - DNA, 15 bp, Homo sapiens
tcatgctgggtgtct

SEQ ID NO: 150516 - DNA, 15 bp, Homo sapiens
ctcatgctgggtgtc

SEQ ID NO: 150517 - DNA, 15 bp, Homo sapiens
cctcatgctgggtgt

SEQ ID NO: 150518 - DNA, 15 bp, Homo sapiens
gcctcatgctgggtg

SEQ ID NO: 150519 - DNA, 15 bp, Homo sapiens
agcctcatgctgggt

SEQ ID NO: 150520 - DNA, 15 bp, Homo sapiens
gagcctcatgctggg

SEQ ID NO: 150521 - DNA, 15 bp, Homo sapiens
cgagcctcatgctgg

SEQ ID NO: 150522 - DNA, 15 bp, Homo sapiens
gcgagcctcatgctg

SEQ ID NO: 150523 - DNA, 15 bp, Homo sapiens
ggcgagcctcatgct

SEQ ID NO: 150524 - DNA, 15 bp, Homo sapiens
tggcgagcctcatgc

SEQ ID NO: 150525 - DNA, 15 bp, Homo sapiens
ctggcgagcctcatg

SEQ ID NO: 150526 - DNA, 15 bp, Homo sapiens
tctggcgagcctcat

SEQ ID NO: 150527 - DNA, 15 bp, Homo sapiens
ctctggcgagcctca

SEQ ID NO: 150528 - DNA, 15 bp, Homo sapiens
tctctggcgagcctc

SEQ ID NO: 150529 - DNA, 15 bp, Homo sapiens
ctctctggcgagcct

SEQ ID NO: 150530 - DNA, 15 bp, Homo sapiens
tctctctggcgagcc

SEQ ID NO: 150531 - DNA, 15 bp, Homo sapiens
atctctctggcgagc

SEQ ID NO: 150532 - DNA, 15 bp, Homo sapiens
tatctctctggcgag

SEQ ID NO: 150533 - DNA, 15 bp, Homo sapiens
gtatctctctggcga

SEQ ID NO: 150534 - DNA, 15 bp, Homo sapiens
agtatctctctggcg

SEQ ID NO: 150535 - DNA, 15 bp, Homo sapiens
aagtatctctctggc

SEQ ID NO: 150536 - DNA, 15 bp, Homo sapiens
caagtatctctctgg

SEQ ID NO: 150537 - DNA, 15 bp, Homo sapiens
acaagtatctctctg

SEQ ID NO: 150538 - DNA, 15 bp, Homo sapiens
tacaagtatctctct

SEQ ID NO: 150539 - DNA, 15 bp, Homo sapiens
ctacaagtatctctc

SEQ ID NO: 150540 - DNA, 15 bp, Homo sapiens
gctacaagtatctct

SEQ ID NO: 150541 - DNA, 15 bp, Homo sapiens
agctacaagtatctc

SEQ ID NO: 150542 - DNA, 15 bp, Homo sapiens
cagctacaagtatct

SEQ ID NO: 150543 - DNA, 15 bp, Homo sapiens
ccagctacaagtatc

SEQ ID NO: 150544 - DNA, 15 bp, Homo sapiens
cccagctacaagtat

SEQ ID NO: 150545 - DNA, 15 bp, Homo sapiens
ccccagctacaagta

SEQ ID NO: 150546 - DNA, 15 bp, Homo sapiens
accccagctacaagt

SEQ ID NO: 150547 - DNA, 15 bp, Homo sapiens
gaccccagctacaag

SEQ ID NO: 150548 - DNA, 15 bp, Homo sapiens
agaccccagctacaa

SEQ ID NO: 150549 - DNA, 15 bp, Homo sapiens
cagaccccagctaca

SEQ ID NO: 150550 - DNA, 15 bp, Homo sapiens
ccagaccccagctac

SEQ ID NO: 150551 - DNA, 15 bp, Homo sapiens
cccagaccccagcta

SEQ ID NO: 150552 - DNA, 15 bp, Homo sapiens
gcccagaccccagct

SEQ ID NO: 150553 - DNA, 15 bp, Homo sapiens
tgcccagaccccagc

SEQ ID NO: 150554 - DNA, 15 bp, Homo sapiens
gtgcccagaccccag

SEQ ID NO: 150555 - DNA, 15 bp, Homo sapiens
ggtgcccagacccca

SEQ ID NO: 150556 - DNA, 15 bp, Homo sapiens
tggtgcccagacccc

SEQ ID NO: 150557 - DNA, 15 bp, Homo sapiens
ctggtgcccagaccc

SEQ ID NO: 150558 - DNA, 15 bp, Homo sapiens
cctggtgcccagacc

SEQ ID NO: 150559 - DNA, 15 bp, Homo sapiens
tcctggtgcccagac

SEQ ID NO: 150560 - DNA, 15 bp, Homo sapiens
ttcctggtgcccaga

SEQ ID NO: 150561 - DNA, 15 bp, Homo sapiens
gttcctggtgcccag

SEQ ID NO: 150562 - DNA, 15 bp, Homo sapiens
tgttcctggtgccca

SEQ ID NO: 150563 - DNA, 15 bp, Homo sapiens
ctgttcctggtgccc

SEQ ID NO: 150564 - DNA, 15 bp, Homo sapiens
gctgttcctggtgcc

SEQ ID NO: 150565 - DNA, 15 bp, Homo sapiens
agctgttcctggtgc

SEQ ID NO: 150566 - DNA, 15 bp, Homo sapiens
aagctgttcctggtg

SEQ ID NO: 150567 - DNA, 15 bp, Homo sapiens
caagctgttcctggt

SEQ ID NO: 150568 - DNA, 15 bp, Homo sapiens
ccaagctgttcctgg

SEQ ID NO: 150569 - DNA, 15 bp, Homo sapiens
accaagctgttcctg

SEQ ID NO: 150570 - DNA, 15 bp, Homo sapiens
caccaagctgttcct

SEQ ID NO: 150571 - DNA, 15 bp, Homo sapiens
gcaccaagctgttcc

SEQ ID NO: 150572 - DNA, 15 bp, Homo sapiens
agcaccaagctgttc

SEQ ID NO: 150573 - DNA, 15 bp, Homo sapiens
cagcaccaagctgtt

SEQ ID NO: 150574 - DNA, 15 bp, Homo sapiens
ccagcaccaagctgt

SEQ ID NO: 150575 - DNA, 15 bp, Homo sapiens
cccagcaccaagctg

SEQ ID NO: 150576 - DNA, 15 bp, Homo sapiens
gcccagcaccaagct

SEQ ID NO: 150577 - DNA, 15 bp, Homo sapiens
ggcccagcaccaagc

SEQ ID NO: 150578 - DNA, 15 bp, Homo sapiens
aggcccagcaccaag

SEQ ID NO: 150579 - DNA, 15 bp, Homo sapiens
caggcccagcaccaa

SEQ ID NO: 150580 - DNA, 15 bp, Homo sapiens
tcaggcccagcacca

SEQ ID NO: 150581 - DNA, 15 bp, Homo sapiens
ttcaggcccagcacc

SEQ ID NO: 150582 - DNA, 15 bp, Homo sapiens
cttcaggcccagcac

SEQ ID NO: 150583 - DNA, 15 bp, Homo sapiens
acttcaggcccagca

SEQ ID NO: 150584 - DNA, 15 bp, Homo sapiens
gacttcaggcccagc

SEQ ID NO: 150585 - DNA, 15 bp, Homo sapiens
cgacttcaggcccag

SEQ ID NO: 150586 - DNA, 15 bp, Homo sapiens
ccgacttcaggccca

SEQ ID NO: 150587 - DNA, 15 bp, Homo sapiens
cccgacttcaggccc

SEQ ID NO: 150588 - DNA, 15 bp, Homo sapiens
gcccgacttcaggcc

SEQ ID NO: 150589 - DNA, 15 bp, Homo sapiens
tgcccgacttcaggc

SEQ ID NO: 150590 - DNA, 15 bp, Homo sapiens
ctgcccgacttcagg

SEQ ID NO: 150591 - DNA, 15 bp, Homo sapiens
cctgcccgacttcag

SEQ ID NO: 150592 - DNA, 15 bp, Homo sapiens
tcctgcccgacttca

SEQ ID NO: 150593 - DNA, 15 bp, Homo sapiens
atcctgcccgacttc

SEQ ID NO: 150594 - DNA, 15 bp, Homo sapiens
catcctgcccgactt

SEQ ID NO: 150595 - DNA, 15 bp, Homo sapiens
gcatcctgcccgact

SEQ ID NO: 150596 - DNA, 15 bp, Homo sapiens
tgcatcctgcccgac

SEQ ID NO: 150597 - DNA, 15 bp, Homo sapiens
ctgcatcctgcccga

SEQ ID NO: 150598 - DNA, 15 bp, Homo sapiens
gctgcatcctgcccg

SEQ ID NO: 150599 - DNA, 15 bp, Homo sapiens
ggctgcatcctgccc

SEQ ID NO: 150600 - DNA, 15 bp, Homo sapiens
aggctgcatcctgcc

SEQ ID NO: 150601 - DNA, 15 bp, Homo sapiens
caggctgcatcctgc

SEQ ID NO: 150602 - DNA, 15 bp, Homo sapiens
ccaggctgcatcctg

SEQ ID NO: 150603 - DNA, 15 bp, Homo sapiens
gccaggctgcatcct

SEQ ID NO: 150604 - DNA, 15 bp, Homo sapiens
ggccaggctgcatcc

SEQ ID NO: 150605 - DNA, 15 bp, Homo sapiens
tggccaggctgcatc

SEQ ID NO: 150606 - DNA, 15 bp, Homo sapiens
ctggccaggctgcat

SEQ ID NO: 150607 - DNA, 15 bp, Homo sapiens
cctggccaggctgca

SEQ ID NO: 150608 - DNA, 15 bp, Homo sapiens
acctggccaggctgc

SEQ ID NO: 150609 - DNA, 15 bp, Homo sapiens
cacctggccaggctg

SEQ ID NO: 150610 - DNA, 15 bp, Homo sapiens
tcacctggccaggct

SEQ ID NO: 150611 - DNA, 15 bp, Homo sapiens
ctcacctggccaggc

SEQ ID NO: 150612 - DNA, 15 bp, Homo sapiens
tctcacctggccagg

SEQ ID NO: 150613 - DNA, 15 bp, Homo sapiens
ctctcacctggccag

SEQ ID NO: 150614 - DNA, 15 bp, Homo sapiens
cctctcacctggcca

SEQ ID NO: 150615 - DNA, 15 bp, Homo sapiens
tcctctcacctggcc

SEQ ID NO: 150616 - DNA, 15 bp, Homo sapiens
ttcctctcacctggc

SEQ ID NO: 150617 - DNA, 15 bp, Homo sapiens
tttcctctcacctgg

SEQ ID NO: 150618 - DNA, 15 bp, Homo sapiens
ctttcctctcacctg

SEQ ID NO: 150619 - DNA, 15 bp, Homo sapiens
gctttcctctcacct

SEQ ID NO: 150620 - DNA, 15 bp, Homo sapiens
agctttcctctcacc

SEQ ID NO: 150621 - DNA, 15 bp, Homo sapiens
aagctttcctctcac

SEQ ID NO: 150622 - DNA, 15 bp, Homo sapiens
caagctttcctctca

SEQ ID NO: 150623 - DNA, 15 bp, Homo sapiens
ccaagctttcctctc

SEQ ID NO: 150624 - DNA, 15 bp, Homo sapiens
tccaagctttcctct

SEQ ID NO: 150625 - DNA, 15 bp, Homo sapiens
ctccaagctttcctc

SEQ ID NO: 150626 - DNA, 15 bp, Homo sapiens
gctccaagctttcct

SEQ ID NO: 150627 - DNA, 15 bp, Homo sapiens
ggctccaagctttcc

SEQ ID NO: 150628 - DNA, 15 bp, Homo sapiens
tggctccaagctttc

SEQ ID NO: 150629 - DNA, 15 bp, Homo sapiens
ctggctccaagcttt

SEQ ID NO: 150630 - DNA, 15 bp, Homo sapiens
actggctccaagctt

SEQ ID NO: 150631 - DNA, 15 bp, Homo sapiens
cactggctccaagct

SEQ ID NO: 150632 - DNA, 15 bp, Homo sapiens
gcactggctccaagc

SEQ ID NO: 150633 - DNA, 15 bp, Homo sapiens
ggcactggctccaag

SEQ ID NO: 150634 - DNA, 15 bp, Homo sapiens
aggcactggctccaa

SEQ ID NO: 150635 - DNA, 15 bp, Homo sapiens
caggcactggctcca

SEQ ID NO: 150636 - DNA, 15 bp, Homo sapiens
ccaggcactggctcc

SEQ ID NO: 150637 - DNA, 15 bp, Homo sapiens
cccaggcactggctc

SEQ ID NO: 150638 - DNA, 15 bp, Homo sapiens
acccaggcactggct

SEQ ID NO: 150639 - DNA, 15 bp, Homo sapiens
aacccaggcactggc

SEQ ID NO: 150640 - DNA, 15 bp, Homo sapiens
gaacccaggcactgg

SEQ ID NO: 150641 - DNA, 15 bp, Homo sapiens
tgaacccaggcactg

SEQ ID NO: 150642 - DNA, 15 bp, Homo sapiens
ttgaacccaggcact

SEQ ID NO: 150643 - DNA, 15 bp, Homo sapiens
tttgaacccaggcac

SEQ ID NO: 150644 - DNA, 15 bp, Homo sapiens
gtttgaacccaggca

SEQ ID NO: 150645 - DNA, 15 bp, Homo sapiens
agtttgaacccaggc

SEQ ID NO: 150646 - DNA, 15 bp, Homo sapiens
gagtttgaacccagg

SEQ ID NO: 150647 - DNA, 15 bp, Homo sapiens
ggagtttgaacccag

SEQ ID NO: 150648 - DNA, 15 bp, Homo sapiens
aggagtttgaaccca

SEQ ID NO: 150649 - DNA, 15 bp, Homo sapiens
gaggagtttgaaccc

SEQ ID NO: 150650 - DNA, 15 bp, Homo sapiens
agaggagtttgaacc

SEQ ID NO: 150651 - DNA, 15 bp, Homo sapiens
cagaggagtttgaac

SEQ ID NO: 150652 - DNA, 15 bp, Homo sapiens
acagaggagtttgaa

SEQ ID NO: 150653 - DNA, 15 bp, Homo sapiens
cacagaggagtttga

SEQ ID NO: 150654 - DNA, 15 bp, Homo sapiens
ccacagaggagtttg

SEQ ID NO: 150655 - DNA, 15 bp, Homo sapiens
gccacagaggagttt

SEQ ID NO: 150656 - DNA, 15 bp, Homo sapiens
ggccacagaggagtt

SEQ ID NO: 150657 - DNA, 15 bp, Homo sapiens
aggccacagaggagt

SEQ ID NO: 150658 - DNA, 15 bp, Homo sapiens
taggccacagaggag

SEQ ID NO: 150659 - DNA, 15 bp, Homo sapiens
ataggccacagagga

SEQ ID NO: 150660 - DNA, 15 bp, Homo sapiens
cataggccacagagg

SEQ ID NO: 150661 - DNA, 15 bp, Homo sapiens
ccataggccacagag

SEQ ID NO: 150662 - DNA, 15 bp, Homo sapiens
accataggccacaga

SEQ ID NO: 150663 - DNA, 15 bp, Homo sapiens
aaccataggccacag

SEQ ID NO: 150664 - DNA, 15 bp, Homo sapiens
gaaccataggccaca

SEQ ID NO: 150665 - DNA, 15 bp, Homo sapiens
agaaccataggccac

SEQ ID NO: 150666 - DNA, 15 bp, Homo sapiens
cagaaccataggcca

SEQ ID NO: 150667 - DNA, 15 bp, Homo sapiens
acagaaccataggcc

SEQ ID NO: 150668 - DNA, 15 bp, Homo sapiens
cacagaaccataggc

SEQ ID NO: 150669 - DNA, 15 bp, Homo sapiens
ccacagaaccatagg

SEQ ID NO: 150670 - DNA, 15 bp, Homo sapiens
cccacagaaccatag

SEQ ID NO: 150671 - DNA, 15 bp, Homo sapiens
gcccacagaaccata

SEQ ID NO: 150672 - DNA, 15 bp, Homo sapiens
agcccacagaaccat

SEQ ID NO: 150673 - DNA, 15 bp, Homo sapiens
aagcccacagaacca

SEQ ID NO: 150674 - DNA, 15 bp, Homo sapiens
caagcccacagaacc

SEQ ID NO: 150675 - DNA, 15 bp, Homo sapiens
ccaagcccacagaac

SEQ ID NO: 150676 - DNA, 15 bp, Homo sapiens
cccaagcccacagaa

SEQ ID NO: 150677 - DNA, 15 bp, Homo sapiens
ccccaagcccacaga

SEQ ID NO: 150678 - DNA, 15 bp, Homo sapiens
tccccaagcccacag

SEQ ID NO: 150679 - DNA, 15 bp, Homo sapiens
ttccccaagcccaca

SEQ ID NO: 150680 - DNA, 15 bp, Homo sapiens
cttccccaagcccac

SEQ ID NO: 150681 - DNA, 15 bp, Homo sapiens
ccttccccaagccca

SEQ ID NO: 150682 - DNA, 15 bp, Homo sapiens
cccttccccaagccc

SEQ ID NO: 150683 - DNA, 15 bp, Homo sapiens
acccttccccaagcc

SEQ ID NO: 150684 - DNA, 15 bp, Homo sapiens
aacccttccccaagc

SEQ ID NO: 150685 - DNA, 15 bp, Homo sapiens
aaacccttccccaag

SEQ ID NO: 150686 - DNA, 15 bp, Homo sapiens
caaacccttccccaa

SEQ ID NO: 150687 - DNA, 15 bp, Homo sapiens
acaaacccttcccca

SEQ ID NO: 150688 - DNA, 15 bp, Homo sapiens
tacaaacccttcccc

SEQ ID NO: 150689 - DNA, 15 bp, Homo sapiens
gtacaaacccttccc

SEQ ID NO: 150690 - DNA, 15 bp, Homo sapiens
ggtacaaacccttcc

SEQ ID NO: 150691 - DNA, 15 bp, Homo sapiens
aggtacaaacccttc

SEQ ID NO: 150692 - DNA, 15 bp, Homo sapiens
gaggtacaaaccctt

SEQ ID NO: 150693 - DNA, 15 bp, Homo sapiens
agaggtacaaaccct

SEQ ID NO: 150694 - DNA, 15 bp, Homo sapiens
cagaggtacaaaccc

SEQ ID NO: 150695 - DNA, 15 bp, Homo sapiens
acagaggtacaaacc

SEQ ID NO: 150696 - DNA, 15 bp, Homo sapiens
cacagaggtacaaac

SEQ ID NO: 150697 - DNA, 15 bp, Homo sapiens
acacagaggtacaaa

SEQ ID NO: 150698 - DNA, 15 bp, Homo sapiens
gacacagaggtacaa

SEQ ID NO: 150699 - DNA, 15 bp, Homo sapiens
ggacacagaggtaca

SEQ ID NO: 150700 - DNA, 15 bp, Homo sapiens
tggacacagaggtac

SEQ ID NO: 150701 - DNA, 15 bp, Homo sapiens
ctggacacagaggta

SEQ ID NO: 150702 - DNA, 15 bp, Homo sapiens
actggacacagaggt

SEQ ID NO: 150703 - DNA, 15 bp, Homo sapiens
aactggacacagagg

SEQ ID NO: 150704 - DNA, 15 bp, Homo sapiens
aaactggacacagag

SEQ ID NO: 150705 - DNA, 15 bp, Homo sapiens
gaaactggacacaga

SEQ ID NO: 150706 - DNA, 15 bp, Homo sapiens
ggaaactggacacag

SEQ ID NO: 150707 - DNA, 15 bp, Homo sapiens
aggaaactggacaca

SEQ ID NO: 150708 - DNA, 15 bp, Homo sapiens
gaggaaactggacac

SEQ ID NO: 150709 - DNA, 15 bp, Homo sapiens
tgaggaaactggaca

SEQ ID NO: 150710 - DNA, 15 bp, Homo sapiens
gtgaggaaactggac

SEQ ID NO: 150711 - DNA, 15 bp, Homo sapiens
agtgaggaaactgga

SEQ ID NO: 150712 - DNA, 15 bp, Homo sapiens
aagtgaggaaactgg

SEQ ID NO: 150713 - DNA, 15 bp, Homo sapiens
taagtgaggaaactg

SEQ ID NO: 150714 - DNA, 15 bp, Homo sapiens
ataagtgaggaaact

SEQ ID NO: 150715 - DNA, 15 bp, Homo sapiens
tataagtgaggaaac

SEQ ID NO: 150716 - DNA, 15 bp, Homo sapiens
ttataagtgaggaaa

SEQ ID NO: 150717 - DNA, 15 bp, Homo sapiens
tttataagtgaggaa

SEQ ID NO: 150718 - DNA, 15 bp, Homo sapiens
ttttataagtgagga

SEQ ID NO: 150719 - DNA, 15 bp, Homo sapiens
tttttataagtgagg

SEQ ID NO: 150720 - DNA, 15 bp, Homo sapiens
ttttttataagtgag

SEQ ID NO: 150721 - DNA, 15 bp, Homo sapiens
tttttttataagtga

SEQ ID NO: 150722 - DNA, 15 bp, Homo sapiens
ctttttttataagtg

SEQ ID NO: 150723 - DNA, 15 bp, Homo sapiens
cctttttttataagt

SEQ ID NO: 150724 - DNA, 15 bp, Homo sapiens
tcctttttttataag

SEQ ID NO: 150725 - DNA, 15 bp, Homo sapiens
ctcctttttttataa

SEQ ID NO: 150726 - DNA, 15 bp, Homo sapiens
tctcctttttttata

SEQ ID NO: 150727 - DNA, 15 bp, Homo sapiens
atctcctttttttat

SEQ ID NO: 150728 - DNA, 15 bp, Homo sapiens
tatctccttttttta

SEQ ID NO: 150729 - DNA, 15 bp, Homo sapiens
ttatctccttttttt

SEQ ID NO: 150730 - DNA, 15 bp, Homo sapiens
attatctcctttttt

SEQ ID NO: 150731 - DNA, 15 bp, Homo sapiens
tattatctccttttt

SEQ ID NO: 150732 - DNA, 15 bp, Homo sapiens
ttattatctcctttt

SEQ ID NO: 150733 - DNA, 15 bp, Homo sapiens
tttattatctccttt

SEQ ID NO: 150734 - DNA, 15 bp, Homo sapiens
ttttattatctcctt

SEQ ID NO: 150735 - DNA, 15 bp, Homo sapiens
cttttattatctcct

SEQ ID NO: 150736 - DNA, 15 bp, Homo sapiens
acttttattatctcc

SEQ ID NO: 150737 - DNA, 15 bp, Homo sapiens
tacttttattatctc

SEQ ID NO: 150738 - DNA, 15 bp, Homo sapiens
gtacttttattatct

SEQ ID NO: 150739 - DNA, 15 bp, Homo sapiens
ggtacttttattatc

SEQ ID NO: 150740 - DNA, 15 bp, Homo sapiens
gggtacttttattat

SEQ ID NO: 150741 - DNA, 15 bp, Homo sapiens
tgggtacttttatta

SEQ ID NO: 150742 - DNA, 15 bp, Homo sapiens
atgggtacttttatt

SEQ ID NO: 150743 - DNA, 15 bp, Homo sapiens
catgggtacttttat

SEQ ID NO: 150744 - DNA, 15 bp, Homo sapiens
acatgggtactttta

SEQ ID NO: 150745 - DNA, 15 bp, Homo sapiens
gacatgggtactttt

SEQ ID NO: 150746 - DNA, 15 bp, Homo sapiens
ggacatgggtacttt

SEQ ID NO: 150747 - DNA, 15 bp, Homo sapiens
gggacatgggtactt

SEQ ID NO: 150748 - DNA, 15 bp, Homo sapiens
tgggacatgggtact

SEQ ID NO: 150749 - DNA, 15 bp, Homo sapiens
ctgggacatgggtac

SEQ ID NO: 150750 - DNA, 15 bp, Homo sapiens
cctgggacatgggta

SEQ ID NO: 150751 - DNA, 15 bp, Homo sapiens
ccctgggacatgggt

SEQ ID NO: 150752 - DNA, 15 bp, Homo sapiens
accctgggacatggg

SEQ ID NO: 150753 - DNA, 15 bp, Homo sapiens
caccctgggacatgg

SEQ ID NO: 150754 - DNA, 15 bp, Homo sapiens
ccaccctgggacatg

SEQ ID NO: 150755 - DNA, 15 bp, Homo sapiens
gccaccctgggacat

SEQ ID NO: 150756 - DNA, 15 bp, Homo sapiens
agccaccctgggaca

SEQ ID NO: 150757 - DNA, 15 bp, Homo sapiens
cagccaccctgggac

SEQ ID NO: 150758 - DNA, 15 bp, Homo sapiens
acagccaccctggga

SEQ ID NO: 150759 - DNA, 15 bp, Homo sapiens
tacagccaccctggg

SEQ ID NO: 150760 - DNA, 15 bp, Homo sapiens
ctacagccaccctgg

SEQ ID NO: 150761 - DNA, 15 bp, Homo sapiens
gctacagccaccctg

SEQ ID NO: 150762 - DNA, 15 bp, Homo sapiens
tgctacagccaccct

SEQ ID NO: 150763 - DNA, 15 bp, Homo sapiens
ttgctacagccaccc

SEQ ID NO: 150764 - DNA, 15 bp, Homo sapiens
attgctacagccacc

SEQ ID NO: 150765 - DNA, 15 bp, Homo sapiens
tattgctacagccac

SEQ ID NO: 150766 - DNA, 15 bp, Homo sapiens
ttattgctacagcca

SEQ ID NO: 150767 - DNA, 15 bp, Homo sapiens
attattgctacagcc

SEQ ID NO: 150768 - DNA, 15 bp, Homo sapiens
tattattgctacagc

SEQ ID NO: 150769 - DNA, 15 bp, Homo sapiens
ctattattgctacag

SEQ ID NO: 150770 - DNA, 15 bp, Homo sapiens
cctattattgctaca

SEQ ID NO: 150771 - DNA, 15 bp, Homo sapiens
ccctattattgctac

SEQ ID NO: 150772 - DNA, 15 bp, Homo sapiens
tccctattattgcta

SEQ ID NO: 150773 - DNA, 15 bp, Homo sapiens
ctccctattattgct

SEQ ID NO: 150774 - DNA, 15 bp, Homo sapiens
cctccctattattgc

SEQ ID NO: 150775 - DNA, 15 bp, Homo sapiens
ccctccctattattg

SEQ ID NO: 150776 - DNA, 15 bp, Homo sapiens
cccctccctattatt

SEQ ID NO: 150777 - DNA, 15 bp, Homo sapiens
acccctccctattat

SEQ ID NO: 150778 - DNA, 15 bp, Homo sapiens
cacccctccctatta

SEQ ID NO: 150779 - DNA, 15 bp, Homo sapiens
gcacccctccctatt

SEQ ID NO: 150780 - DNA, 15 bp, Homo sapiens
ggcacccctccctat

SEQ ID NO: 150781 - DNA, 15 bp, Homo sapiens
gggcacccctcccta

SEQ ID NO: 150782 - DNA, 15 bp, Homo sapiens
tgggcacccctccct

SEQ ID NO: 150783 - DNA, 15 bp, Homo sapiens
ctgggcacccctccc

SEQ ID NO: 150784 - DNA, 15 bp, Homo sapiens
tctgggcacccctcc

SEQ ID NO: 150785 - DNA, 15 bp, Homo sapiens
ctctgggcacccctc

SEQ ID NO: 150786 - DNA, 15 bp, Homo sapiens
gctctgggcacccct

SEQ ID NO: 150787 - DNA, 15 bp, Homo sapiens
tgctctgggcacccc

SEQ ID NO: 150788 - DNA, 15 bp, Homo sapiens
ctgctctgggcaccc

SEQ ID NO: 150789 - DNA, 15 bp, Homo sapiens
cctgctctgggcacc

SEQ ID NO: 150790 - DNA, 15 bp, Homo sapiens
acctgctctgggcac

SEQ ID NO: 150791 - DNA, 15 bp, Homo sapiens
gacctgctctgggca

SEQ ID NO: 150792 - DNA, 15 bp, Homo sapiens
agacctgctctgggc

SEQ ID NO: 150793 - DNA, 15 bp, Homo sapiens
cagacctgctctggg

SEQ ID NO: 150794 - DNA, 15 bp, Homo sapiens
ccagacctgctctgg

SEQ ID NO: 150795 - DNA, 15 bp, Homo sapiens
gccagacctgctctg

SEQ ID NO: 150796 - DNA, 15 bp, Homo sapiens
tgccagacctgctct

SEQ ID NO: 150797 - DNA, 15 bp, Homo sapiens
gtgccagacctgctc

SEQ ID NO: 150798 - DNA, 15 bp, Homo sapiens
tgtgccagacctgct

SEQ ID NO: 150799 - DNA, 15 bp, Homo sapiens
gtgtgccagacctgc

SEQ ID NO: 150800 - DNA, 15 bp, Homo sapiens
tgtgtgccagacctg

SEQ ID NO: 150801 - DNA, 15 bp, Homo sapiens
ctgtgtgccagacct

SEQ ID NO: 150802 - DNA, 15 bp, Homo sapiens
cctgtgtgccagacc

SEQ ID NO: 150803 - DNA, 15 bp, Homo sapiens
tcctgtgtgccagac

SEQ ID NO: 150804 - DNA, 15 bp, Homo sapiens
ttcctgtgtgccaga

SEQ ID NO: 150805 - DNA, 15 bp, Homo sapiens
cttcctgtgtgccag

SEQ ID NO: 150806 - DNA, 15 bp, Homo sapiens
acttcctgtgtgcca

SEQ ID NO: 150807 - DNA, 15 bp, Homo sapiens
cacttcctgtgtgcc

SEQ ID NO: 150808 - DNA, 15 bp, Homo sapiens
acacttcctgtgtgc

SEQ ID NO: 150809 - DNA, 15 bp, Homo sapiens
cacacttcctgtgtg

SEQ ID NO: 150810 - DNA, 15 bp, Homo sapiens
gcacacttcctgtgt

SEQ ID NO: 150811 - DNA, 15 bp, Homo sapiens
tgcacacttcctgtg

SEQ ID NO: 150812 - DNA, 15 bp, Homo sapiens
atgcacacttcctgt

SEQ ID NO: 150813 - DNA, 15 bp, Homo sapiens
gatgcacacttcctg

SEQ ID NO: 150814 - DNA, 15 bp, Homo sapiens
tgatgcacacttcct

SEQ ID NO: 150815 - DNA, 15 bp, Homo sapiens
ctgatgcacacttcc

SEQ ID NO: 150816 - DNA, 15 bp, Homo sapiens
gctgatgcacacttc

SEQ ID NO: 150817 - DNA, 15 bp, Homo sapiens
ggctgatgcacactt

SEQ ID NO: 150818 - DNA, 15 bp, Homo sapiens
aggctgatgcacact

SEQ ID NO: 150819 - DNA, 15 bp, Homo sapiens
gaggctgatgcacac

SEQ ID NO: 150820 - DNA, 15 bp, Homo sapiens
tgaggctgatgcaca

SEQ ID NO: 150821 - DNA, 15 bp, Homo sapiens
ctgaggctgatgcac

SEQ ID NO: 150822 - DNA, 15 bp, Homo sapiens
actgaggctgatgca

SEQ ID NO: 150823 - DNA, 15 bp, Homo sapiens
gactgaggctgatgc

SEQ ID NO: 150824 - DNA, 15 bp, Homo sapiens
ggactgaggctgatg

SEQ ID NO: 150825 - DNA, 15 bp, Homo sapiens
gggactgaggctgat

SEQ ID NO: 150826 - DNA, 15 bp, Homo sapiens
agggactgaggctga

SEQ ID NO: 150827 - DNA, 15 bp, Homo sapiens
cagggactgaggctg

SEQ ID NO: 150828 - DNA, 15 bp, Homo sapiens
gcagggactgaggct

SEQ ID NO: 150829 - DNA, 15 bp, Homo sapiens
ggcagggactgaggc

SEQ ID NO: 150830 - DNA, 15 bp, Homo sapiens
tggcagggactgagg

SEQ ID NO: 150831 - DNA, 15 bp, Homo sapiens
atggcagggactgag

SEQ ID NO: 150832 - DNA, 15 bp, Homo sapiens
aatggcagggactga

SEQ ID NO: 150833 - DNA, 15 bp, Homo sapiens
caatggcagggactg

SEQ ID NO: 150834 - DNA, 15 bp, Homo sapiens
ccaatggcagggact

SEQ ID NO: 150835 - DNA, 15 bp, Homo sapiens
cccaatggcagggac

SEQ ID NO: 150836 - DNA, 15 bp, Homo sapiens
gcccaatggcaggga

SEQ ID NO: 150837 - DNA, 15 bp, Homo sapiens
agcccaatggcaggg

SEQ ID NO: 150838 - DNA, 15 bp, Homo sapiens
aagcccaatggcagg

SEQ ID NO: 150839 - DNA, 15 bp, Homo sapiens
caagcccaatggcag

SEQ ID NO: 150840 - DNA, 15 bp, Homo sapiens
acaagcccaatggca

SEQ ID NO: 150841 - DNA, 15 bp, Homo sapiens
gacaagcccaatggc

SEQ ID NO: 150842 - DNA, 15 bp, Homo sapiens
ggacaagcccaatgg

SEQ ID NO: 150843 - DNA, 15 bp, Homo sapiens
aggacaagcccaatg

SEQ ID NO: 150844 - DNA, 15 bp, Homo sapiens
caggacaagcccaat

SEQ ID NO: 150845 - DNA, 15 bp, Homo sapiens
ccaggacaagcccaa

SEQ ID NO: 150846 - DNA, 15 bp, Homo sapiens
cccaggacaagccca

SEQ ID NO: 150847 - DNA, 15 bp, Homo sapiens
tcccaggacaagccc

SEQ ID NO: 150848 - DNA, 15 bp, Homo sapiens
ctcccaggacaagcc

SEQ ID NO: 150849 - DNA, 15 bp, Homo sapiens
actcccaggacaagc

SEQ ID NO: 150850 - DNA, 15 bp, Homo sapiens
gactcccaggacaag

SEQ ID NO: 150851 - DNA, 15 bp, Homo sapiens
agactcccaggacaa

SEQ ID NO: 150852 - DNA, 15 bp, Homo sapiens
cagactcccaggaca

SEQ ID NO: 150853 - DNA, 15 bp, Homo sapiens
acagactcccaggac

SEQ ID NO: 150854 - DNA, 15 bp, Homo sapiens
cacagactcccagga

SEQ ID NO: 150855 - DNA, 15 bp, Homo sapiens
tcacagactcccagg

SEQ ID NO: 150856 - DNA, 15 bp, Homo sapiens
ttcacagactcccag

SEQ ID NO: 150857 - DNA, 15 bp, Homo sapiens
cttcacagactccca

SEQ ID NO: 150858 - DNA, 15 bp, Homo sapiens
gcttcacagactccc

SEQ ID NO: 150859 - DNA, 15 bp, Homo sapiens
ggcttcacagactcc

SEQ ID NO: 150860 - DNA, 15 bp, Homo sapiens
tggcttcacagactc

SEQ ID NO: 150861 - DNA, 15 bp, Homo sapiens
ttggcttcacagact

SEQ ID NO: 150862 - DNA, 15 bp, Homo sapiens
gttggcttcacagac

SEQ ID NO: 150863 - DNA, 15 bp, Homo sapiens
ggttggcttcacaga

SEQ ID NO: 150864 - DNA, 15 bp, Homo sapiens
aggttggcttcacag

SEQ ID NO: 150865 - DNA, 15 bp, Homo sapiens
gaggttggcttcaca

SEQ ID NO: 150866 - DNA, 15 bp, Homo sapiens
agaggttggcttcac

SEQ ID NO: 150867 - DNA, 15 bp, Homo sapiens
cagaggttggcttca

SEQ ID NO: 150868 - DNA, 15 bp, Homo sapiens
gcagaggttggcttc

SEQ ID NO: 150869 - DNA, 15 bp, Homo sapiens
agcagaggttggctt

SEQ ID NO: 150870 - DNA, 15 bp, Homo sapiens
gagcagaggttggct

SEQ ID NO: 150871 - DNA, 15 bp, Homo sapiens
ggagcagaggttggc

SEQ ID NO: 150872 - DNA, 15 bp, Homo sapiens
tggagcagaggttgg

SEQ ID NO: 150873 - DNA, 15 bp, Homo sapiens
gtggagcagaggttg

SEQ ID NO: 150874 - DNA, 15 bp, Homo sapiens
tgtggagcagaggtt

SEQ ID NO: 150875 - DNA, 15 bp, Homo sapiens
ttgtggagcagaggt

SEQ ID NO: 150876 - DNA, 15 bp, Homo sapiens
attgtggagcagagg

SEQ ID NO: 150877 - DNA, 15 bp, Homo sapiens
cattgtggagcagag

SEQ ID NO: 150878 - DNA, 15 bp, Homo sapiens
acattgtggagcaga

SEQ ID NO: 150879 - DNA, 15 bp, Homo sapiens
cacattgtggagcag

SEQ ID NO: 150880 - DNA, 15 bp, Homo sapiens
tcacattgtggagca

SEQ ID NO: 150881 - DNA, 15 bp, Homo sapiens
gtcacattgtggagc

SEQ ID NO: 150882 - DNA, 15 bp, Homo sapiens
ggtcacattgtggag

SEQ ID NO: 150883 - DNA, 15 bp, Homo sapiens
gggtcacattgtgga

SEQ ID NO: 150884 - DNA, 15 bp, Homo sapiens
ggggtcacattgtgg

SEQ ID NO: 150885 - DNA, 15 bp, Homo sapiens
gggggtcacattgtg

SEQ ID NO: 150886 - DNA, 15 bp, Homo sapiens
tgggggtcacattgt

SEQ ID NO: 150887 - DNA, 15 bp, Homo sapiens
ctgggggtcacattg

SEQ ID NO: 150888 - DNA, 15 bp, Homo sapiens
cctgggggtcacatt

SEQ ID NO: 150889 - DNA, 15 bp, Homo sapiens
gcctgggggtcacat

SEQ ID NO: 150890 - DNA, 15 bp, Homo sapiens
agcctgggggtcaca

SEQ ID NO: 150891 - DNA, 15 bp, Homo sapiens
aagcctgggggtcac

SEQ ID NO: 150892 - DNA, 15 bp, Homo sapiens
caagcctgggggtca

SEQ ID NO: 150893 - DNA, 15 bp, Homo sapiens
acaagcctgggggtc

SEQ ID NO: 150894 - DNA, 15 bp, Homo sapiens
cacaagcctgggggt

SEQ ID NO: 150895 - DNA, 15 bp, Homo sapiens
tcacaagcctggggg

SEQ ID NO: 150896 - DNA, 15 bp, Homo sapiens
ctcacaagcctgggg

SEQ ID NO: 150897 - DNA, 15 bp, Homo sapiens
tctcacaagcctggg

SEQ ID NO: 150898 - DNA, 15 bp, Homo sapiens
gtctcacaagcctgg

SEQ ID NO: 150899 - DNA, 15 bp, Homo sapiens
ggtctcacaagcctg

SEQ ID NO: 150900 - DNA, 15 bp, Homo sapiens
tggtctcacaagcct

SEQ ID NO: 150901 - DNA, 15 bp, Homo sapiens
ttggtctcacaagcc

SEQ ID NO: 150902 - DNA, 15 bp, Homo sapiens
cttggtctcacaagc

SEQ ID NO: 150903 - DNA, 15 bp, Homo sapiens
gcttggtctcacaag

SEQ ID NO: 150904 - DNA, 15 bp, Homo sapiens
agcttggtctcacaa

SEQ ID NO: 150905 - DNA, 15 bp, Homo sapiens
cagcttggtctcaca

SEQ ID NO: 150906 - DNA, 15 bp, Homo sapiens
ccagcttggtctcac

SEQ ID NO: 150907 - DNA, 15 bp, Homo sapiens
cccagcttggtctca

SEQ ID NO: 150908 - DNA, 15 bp, Homo sapiens
acccagcttggtctc

SEQ ID NO: 150909 - DNA, 15 bp, Homo sapiens
gacccagcttggtct

SEQ ID NO: 150910 - DNA, 15 bp, Homo sapiens
tgacccagcttggtc

SEQ ID NO: 150911 - DNA, 15 bp, Homo sapiens
ctgacccagcttggt

SEQ ID NO: 150912 - DNA, 15 bp, Homo sapiens
tctgacccagcttgg

SEQ ID NO: 150913 - DNA, 15 bp, Homo sapiens
ctctgacccagcttg

SEQ ID NO: 150914 - DNA, 15 bp, Homo sapiens
gctctgacccagctt

SEQ ID NO: 150915 - DNA, 15 bp, Homo sapiens
agctctgacccagct

SEQ ID NO: 150916 - DNA, 15 bp, Homo sapiens
aagctctgacccagc

SEQ ID NO: 150917 - DNA, 15 bp, Homo sapiens
gaagctctgacccag

SEQ ID NO: 150918 - DNA, 15 bp, Homo sapiens
ggaagctctgaccca

SEQ ID NO: 150919 - DNA, 15 bp, Homo sapiens
aggaagctctgaccc

SEQ ID NO: 150920 - DNA, 15 bp, Homo sapiens
gaggaagctctgacc

SEQ ID NO: 150921 - DNA, 15 bp, Homo sapiens
ggaggaagctctgac

SEQ ID NO: 150922 - DNA, 15 bp, Homo sapiens
aggaggaagctctga

SEQ ID NO: 150923 - DNA, 15 bp, Homo sapiens
gaggaggaagctctg

SEQ ID NO: 150924 - DNA, 15 bp, Homo sapiens
agaggaggaagctct

SEQ ID NO: 150925 - DNA, 15 bp, Homo sapiens
cagaggaggaagctc

SEQ ID NO: 150926 - DNA, 15 bp, Homo sapiens
ccagaggaggaagct

SEQ ID NO: 150927 - DNA, 15 bp, Homo sapiens
cccagaggaggaagc

SEQ ID NO: 150928 - DNA, 15 bp, Homo sapiens
ccccagaggaggaag

SEQ ID NO: 150929 - DNA, 15 bp, Homo sapiens
accccagaggaggaa

SEQ ID NO: 150930 - DNA, 15 bp, Homo sapiens
aaccccagaggagga

SEQ ID NO: 150931 - DNA, 15 bp, Homo sapiens
caaccccagaggagg

SEQ ID NO: 150932 - DNA, 15 bp, Homo sapiens
gcaaccccagaggag

SEQ ID NO: 150933 - DNA, 15 bp, Homo sapiens
tgcaaccccagagga

SEQ ID NO: 150934 - DNA, 15 bp, Homo sapiens
gtgcaaccccagagg

SEQ ID NO: 150935 - DNA, 15 bp, Homo sapiens
ggtgcaaccccagag

SEQ ID NO: 150936 - DNA, 15 bp, Homo sapiens
tggtgcaaccccaga

SEQ ID NO: 150937 - DNA, 15 bp, Homo sapiens
ctggtgcaaccccag

SEQ ID NO: 150938 - DNA, 15 bp, Homo sapiens
cctggtgcaacccca

SEQ ID NO: 150939 - DNA, 15 bp, Homo sapiens
tcctggtgcaacccc

SEQ ID NO: 150940 - DNA, 15 bp, Homo sapiens
ctcctggtgcaaccc

SEQ ID NO: 150941 - DNA, 15 bp, Homo sapiens
cctcctggtgcaacc

SEQ ID NO: 150942 - DNA, 15 bp, Homo sapiens
ccctcctggtgcaac

SEQ ID NO: 150943 - DNA, 15 bp, Homo sapiens
cccctcctggtgcaa

SEQ ID NO: 150944 - DNA, 15 bp, Homo sapiens
tcccctcctggtgca

SEQ ID NO: 150945 - DNA, 15 bp, Homo sapiens
ttcccctcctggtgc

SEQ ID NO: 150946 - DNA, 15 bp, Homo sapiens
gttcccctcctggtg

SEQ ID NO: 150947 - DNA, 15 bp, Homo sapiens
agttcccctcctggt

SEQ ID NO: 150948 - DNA, 15 bp, Homo sapiens
aagttcccctcctgg

SEQ ID NO: 150949 - DNA, 15 bp, Homo sapiens
gaagttcccctcctg

SEQ ID NO: 150950 - DNA, 15 bp, Homo sapiens
agaagttcccctcct

SEQ ID NO: 150951 - DNA, 15 bp, Homo sapiens
cagaagttcccctcc

SEQ ID NO: 150952 - DNA, 15 bp, Homo sapiens
gcagaagttcccctc

SEQ ID NO: 150953 - DNA, 15 bp, Homo sapiens
tgcagaagttcccct

SEQ ID NO: 150954 - DNA, 15 bp, Homo sapiens
ctgcagaagttcccc

SEQ ID NO: 150955 - DNA, 15 bp, Homo sapiens
cctgcagaagttccc

SEQ ID NO: 150956 - DNA, 15 bp, Homo sapiens
gcctgcagaagttcc

SEQ ID NO: 150957 - DNA, 15 bp, Homo sapiens
ggcctgcagaagttc

SEQ ID NO: 150958 - DNA, 15 bp, Homo sapiens
gggcctgcagaagtt

SEQ ID NO: 150959 - DNA, 15 bp, Homo sapiens
tgggcctgcagaagt

SEQ ID NO: 150960 - DNA, 15 bp, Homo sapiens
ctgggcctgcagaag

SEQ ID NO: 150961 - DNA, 15 bp, Homo sapiens
tctgggcctgcagaa

SEQ ID NO: 150962 - DNA, 15 bp, Homo sapiens
atctgggcctgcaga

SEQ ID NO: 150963 - DNA, 15 bp, Homo sapiens
catctgggcctgcag

SEQ ID NO: 150964 - DNA, 15 bp, Homo sapiens
gcatctgggcctgca

SEQ ID NO: 150965 - DNA, 15 bp, Homo sapiens
tgcatctgggcctgc

SEQ ID NO: 150966 - DNA, 15 bp, Homo sapiens
gtgcatctgggcctg

SEQ ID NO: 150967 - DNA, 15 bp, Homo sapiens
ggtgcatctgggcct

SEQ ID NO: 150968 - DNA, 15 bp, Homo sapiens
gggtgcatctgggcc

SEQ ID NO: 150969 - DNA, 15 bp, Homo sapiens
agggtgcatctgggc

SEQ ID NO: 150970 - DNA, 15 bp, Homo sapiens
cagggtgcatctggg

SEQ ID NO: 150971 - DNA, 15 bp, Homo sapiens
tcagggtgcatctgg

SEQ ID NO: 150972 - DNA, 15 bp, Homo sapiens
ctcagggtgcatctg

SEQ ID NO: 150973 - DNA, 15 bp, Homo sapiens
cctcagggtgcatct

SEQ ID NO: 150974 - DNA, 15 bp, Homo sapiens
tcctcagggtgcatc

SEQ ID NO: 150975 - DNA, 15 bp, Homo sapiens
ttcctcagggtgcat

SEQ ID NO: 150976 - DNA, 15 bp, Homo sapiens
tttcctcagggtgca

SEQ ID NO: 150977 - DNA, 15 bp, Homo sapiens
ctttcctcagggtgc

SEQ ID NO: 150978 - DNA, 15 bp, Homo sapiens
cctttcctcagggtg

SEQ ID NO: 150979 - DNA, 15 bp, Homo sapiens
ccctttcctcagggt

SEQ ID NO: 150980 - DNA, 15 bp, Homo sapiens
gccctttcctcaggg

SEQ ID NO: 150981 - DNA, 15 bp, Homo sapiens
agccctttcctcagg

SEQ ID NO: 150982 - DNA, 15 bp, Homo sapiens
aagccctttcctcag

SEQ ID NO: 150983 - DNA, 15 bp, Homo sapiens
caagccctttcctca

SEQ ID NO: 150984 - DNA, 15 bp, Homo sapiens
acaagccctttcctc

SEQ ID NO: 150985 - DNA, 15 bp, Homo sapiens
aacaagccctttcct

SEQ ID NO: 150986 - DNA, 15 bp, Homo sapiens
gaacaagccctttcc

SEQ ID NO: 150987 - DNA, 15 bp, Homo sapiens
ggaacaagccctttc

SEQ ID NO: 150988 - DNA, 15 bp, Homo sapiens
gggaacaagcccttt

SEQ ID NO: 150989 - DNA, 15 bp, Homo sapiens
tgggaacaagccctt

SEQ ID NO: 150990 - DNA, 15 bp, Homo sapiens
gtgggaacaagccct

SEQ ID NO: 150991 - DNA, 15 bp, Homo sapiens
ggtgggaacaagccc

SEQ ID NO: 150992 - DNA, 15 bp, Homo sapiens
tggtgggaacaagcc

SEQ ID NO: 150993 - DNA, 15 bp, Homo sapiens
ttggtgggaacaagc

SEQ ID NO: 150994 - DNA, 15 bp, Homo sapiens
cttggtgggaacaag

SEQ ID NO: 150995 - DNA, 15 bp, Homo sapiens
tcttggtgggaacaa

SEQ ID NO: 150996 - DNA, 15 bp, Homo sapiens
ttcttggtgggaaca

SEQ ID NO: 150997 - DNA, 15 bp, Homo sapiens
gttcttggtgggaac

SEQ ID NO: 150998 - DNA, 15 bp, Homo sapiens
tgttcttggtgggaa

SEQ ID NO: 150999 - DNA, 15 bp, Homo sapiens
ttgttcttggtggga

SEQ ID NO: 151000 - DNA, 15 bp, Homo sapiens
cttgttcttggtggg

SEQ ID NO: 151001 - DNA, 15 bp, Homo sapiens
ccttgttcttggtgg

SEQ ID NO: 151002 - DNA, 15 bp, Homo sapiens
gccttgttcttggtg

SEQ ID NO: 151003 - DNA, 15 bp, Homo sapiens
agccttgttcttggt

SEQ ID NO: 151004 - DNA, 15 bp, Homo sapiens
gagccttgttcttgg

SEQ ID NO: 151005 - DNA, 15 bp, Homo sapiens
tgagccttgttcttg

SEQ ID NO: 151006 - DNA, 15 bp, Homo sapiens
gtgagccttgttctt

SEQ ID NO: 151007 - DNA, 15 bp, Homo sapiens
ggtgagccttgttct

SEQ ID NO: 151008 - DNA, 15 bp, Homo sapiens
aggtgagccttgttc

SEQ ID NO: 151009 - DNA, 15 bp, Homo sapiens
aaggtgagccttgtt

SEQ ID NO: 151010 - DNA, 15 bp, Homo sapiens
aaaggtgagccttgt

SEQ ID NO: 151011 - DNA, 15 bp, Homo sapiens
caaaggtgagccttg

SEQ ID NO: 151012 - DNA, 15 bp, Homo sapiens
ccaaaggtgagcctt

SEQ ID NO: 151013 - DNA, 15 bp, Homo sapiens
tccaaaggtgagcct

SEQ ID NO: 151014 - DNA, 15 bp, Homo sapiens
ctccaaaggtgagcc

SEQ ID NO: 151015 - DNA, 15 bp, Homo sapiens
cctccaaaggtgagc

SEQ ID NO: 151016 - DNA, 15 bp, Homo sapiens
tcctccaaaggtgag

SEQ ID NO: 151017 - DNA, 15 bp, Homo sapiens
atcctccaaaggtga

SEQ ID NO: 151018 - DNA, 15 bp, Homo sapiens
catcctccaaaggtg

SEQ ID NO: 151019 - DNA, 15 bp, Homo sapiens
gcatcctccaaaggt

SEQ ID NO: 151020 - DNA, 15 bp, Homo sapiens
agcatcctccaaagg

SEQ ID NO: 151021 - DNA, 15 bp, Homo sapiens
gagcatcctccaaag

SEQ ID NO: 151022 - DNA, 15 bp, Homo sapiens
ggagcatcctccaaa

SEQ ID NO: 151023 - DNA, 15 bp, Homo sapiens
gggagcatcctccaa

SEQ ID NO: 151024 - DNA, 15 bp, Homo sapiens
ggggagcatcctcca

SEQ ID NO: 151025 - DNA, 15 bp, Homo sapiens
tggggagcatcctcc

SEQ ID NO: 151026 - DNA, 15 bp, Homo sapiens
gtggggagcatcctc

SEQ ID NO: 151027 - DNA, 15 bp, Homo sapiens
tgtggggagcatcct

SEQ ID NO: 151028 - DNA, 15 bp, Homo sapiens
atgtggggagcatcc

SEQ ID NO: 151029 - DNA, 15 bp, Homo sapiens
catgtggggagcatc

SEQ ID NO: 151030 - DNA, 15 bp, Homo sapiens
tcatgtggggagcat

SEQ ID NO: 151031 - DNA, 15 bp, Homo sapiens
ctcatgtggggagca

SEQ ID NO: 151032 - DNA, 15 bp, Homo sapiens
tctcatgtggggagc

SEQ ID NO: 151033 - DNA, 15 bp, Homo sapiens
ctctcatgtggggag

SEQ ID NO: 151034 - DNA, 15 bp, Homo sapiens
cctctcatgtgggga

SEQ ID NO: 151035 - DNA, 15 bp, Homo sapiens
acctctcatgtgggg

SEQ ID NO: 151036 - DNA, 15 bp, Homo sapiens
cacctctcatgtggg

SEQ ID NO: 151037 - DNA, 15 bp, Homo sapiens
tcacctctcatgtgg

SEQ ID NO: 151038 - DNA, 15 bp, Homo sapiens
ttcacctctcatgtg

SEQ ID NO: 151039 - DNA, 15 bp, Homo sapiens
gttcacctctcatgt

SEQ ID NO: 151040 - DNA, 15 bp, Homo sapiens
ggttcacctctcatg

SEQ ID NO: 151041 - DNA, 15 bp, Homo sapiens
gggttcacctctcat

SEQ ID NO: 151042 - DNA, 15 bp, Homo sapiens
ggggttcacctctca

SEQ ID NO: 151043 - DNA, 15 bp, Homo sapiens
gggggttcacctctc

SEQ ID NO: 151044 - DNA, 15 bp, Homo sapiens
tgggggttcacctct

SEQ ID NO: 151045 - DNA, 15 bp, Homo sapiens
ctgggggttcacctc

SEQ ID NO: 151046 - DNA, 15 bp, Homo sapiens
cctgggggttcacct

SEQ ID NO: 151047 - DNA, 15 bp, Homo sapiens
acctgggggttcacc

SEQ ID NO: 151048 - DNA, 15 bp, Homo sapiens
gacctgggggttcac

SEQ ID NO: 151049 - DNA, 15 bp, Homo sapiens
agacctgggggttca

SEQ ID NO: 151050 - DNA, 15 bp, Homo sapiens
tagacctgggggttc

SEQ ID NO: 151051 - DNA, 15 bp, Homo sapiens
gtagacctgggggtt

SEQ ID NO: 151052 - DNA, 15 bp, Homo sapiens
agtagacctgggggt

SEQ ID NO: 151053 - DNA, 15 bp, Homo sapiens
cagtagacctggggg

SEQ ID NO: 151054 - DNA, 15 bp, Homo sapiens
ccagtagacctgggg

SEQ ID NO: 151055 - DNA, 15 bp, Homo sapiens
accagtagacctggg

SEQ ID NO: 151056 - DNA, 15 bp, Homo sapiens
caccagtagacctgg

SEQ ID NO: 151057 - DNA, 15 bp, Homo sapiens
tcaccagtagacctg

SEQ ID NO: 151058 - DNA, 15 bp, Homo sapiens
gtcaccagtagacct

SEQ ID NO: 151059 - DNA, 15 bp, Homo sapiens
agtcaccagtagacc

SEQ ID NO: 151060 - DNA, 15 bp, Homo sapiens
cagtcaccagtagac

SEQ ID NO: 151061 - DNA, 15 bp, Homo sapiens
gcagtcaccagtaga

SEQ ID NO: 151062 - DNA, 15 bp, Homo sapiens
tgcagtcaccagtag

SEQ ID NO: 151063 - DNA, 15 bp, Homo sapiens
ctgcagtcaccagta

SEQ ID NO: 151064 - DNA, 15 bp, Homo sapiens
gctgcagtcaccagt

SEQ ID NO: 151065 - DNA, 15 bp, Homo sapiens
ggctgcagtcaccag

SEQ ID NO: 151066 - DNA, 15 bp, Homo sapiens
aggctgcagtcacca

SEQ ID NO: 151067 - DNA, 15 bp, Homo sapiens
gaggctgcagtcacc

SEQ ID NO: 151068 - DNA, 15 bp, Homo sapiens
cgaggctgcagtcac

SEQ ID NO: 151069 - DNA, 15 bp, Homo sapiens
ccgaggctgcagtca

SEQ ID NO: 151070 - DNA, 15 bp, Homo sapiens
tccgaggctgcagtc

SEQ ID NO: 151071 - DNA, 15 bp, Homo sapiens
ttccgaggctgcagt

SEQ ID NO: 151072 - DNA, 15 bp, Homo sapiens
cttccgaggctgcag

SEQ ID NO: 151073 - DNA, 15 bp, Homo sapiens
gcttccgaggctgca

SEQ ID NO: 151074 - DNA, 15 bp, Homo sapiens
agcttccgaggctgc

SEQ ID NO: 151075 - DNA, 15 bp, Homo sapiens
cagcttccgaggctg

SEQ ID NO: 151076 - DNA, 15 bp, Homo sapiens
tcagcttccgaggct

SEQ ID NO: 151077 - DNA, 15 bp, Homo sapiens
gtcagcttccgaggc

SEQ ID NO: 151078 - DNA, 15 bp, Homo sapiens
tgtcagcttccgagg

SEQ ID NO: 151079 - DNA, 15 bp, Homo sapiens
ctgtcagcttccgag

SEQ ID NO: 151080 - DNA, 15 bp, Homo sapiens
gctgtcagcttccga

SEQ ID NO: 151081 - DNA, 15 bp, Homo sapiens
tgctgtcagcttccg

SEQ ID NO: 151082 - DNA, 15 bp, Homo sapiens
atgctgtcagcttcc

SEQ ID NO: 151083 - DNA, 15 bp, Homo sapiens
gatgctgtcagcttc

SEQ ID NO: 151084 - DNA, 15 bp, Homo sapiens
agatgctgtcagctt

SEQ ID NO: 151085 - DNA, 15 bp, Homo sapiens
tagatgctgtcagct

SEQ ID NO: 151086 - DNA, 15 bp, Homo sapiens
atagatgctgtcagc

SEQ ID NO: 151087 - DNA, 15 bp, Homo sapiens
gatagatgctgtcag

SEQ ID NO: 151088 - DNA, 15 bp, Homo sapiens
ggatagatgctgtca

SEQ ID NO: 151089 - DNA, 15 bp, Homo sapiens
aggatagatgctgtc

SEQ ID NO: 151090 - DNA, 15 bp, Homo sapiens
gaggatagatgctgt

SEQ ID NO: 151091 - DNA, 15 bp, Homo sapiens
ggaggatagatgctg

SEQ ID NO: 151092 - DNA, 15 bp, Homo sapiens
tggaggatagatgct

SEQ ID NO: 151093 - DNA, 15 bp, Homo sapiens
ttggaggatagatgc

SEQ ID NO: 151094 - DNA, 15 bp, Homo sapiens
gttggaggatagatg

SEQ ID NO: 151095 - DNA, 15 bp, Homo sapiens
ggttggaggatagat

SEQ ID NO: 151096 - DNA, 15 bp, Homo sapiens
gggttggaggataga

SEQ ID NO: 151097 - DNA, 15 bp, Homo sapiens
tgggttggaggatag

SEQ ID NO: 151098 - DNA, 15 bp, Homo sapiens
atgggttggaggata

SEQ ID NO: 151099 - DNA, 15 bp, Homo sapiens
catgggttggaggat

SEQ ID NO: 151100 - DNA, 15 bp, Homo sapiens
gcatgggttggagga

SEQ ID NO: 151101 - DNA, 15 bp, Homo sapiens
ggcatgggttggagg

SEQ ID NO: 151102 - DNA, 15 bp, Homo sapiens
gggcatgggttggag

SEQ ID NO: 151103 - DNA, 15 bp, Homo sapiens
tgggcatgggttgga

SEQ ID NO: 151104 - DNA, 15 bp, Homo sapiens
gtgggcatgggttgg

SEQ ID NO: 151105 - DNA, 15 bp, Homo sapiens
agtgggcatgggttg

SEQ ID NO: 151106 - DNA, 15 bp, Homo sapiens
cagtgggcatgggtt

SEQ ID NO: 151107 - DNA, 15 bp, Homo sapiens
ccagtgggcatgggt

SEQ ID NO: 151108 - DNA, 15 bp, Homo sapiens
cccagtgggcatggg

SEQ ID NO: 151109 - DNA, 15 bp, Homo sapiens
tcccagtgggcatgg

SEQ ID NO: 151110 - DNA, 15 bp, Homo sapiens
ttcccagtgggcatg

SEQ ID NO: 151111 - DNA, 15 bp, Homo sapiens
cttcccagtgggcat

SEQ ID NO: 151112 - DNA, 15 bp, Homo sapiens
acttcccagtgggca

SEQ ID NO: 151113 - DNA, 15 bp, Homo sapiens
cacttcccagtgggc

SEQ ID NO: 151114 - DNA, 15 bp, Homo sapiens
acacttcccagtggg

SEQ ID NO: 151115 - DNA, 15 bp, Homo sapiens
cacacttcccagtgg

SEQ ID NO: 151116 - DNA, 15 bp, Homo sapiens
acacacttcccagtg

SEQ ID NO: 151117 - DNA, 15 bp, Homo sapiens
cacacacttcccagt

SEQ ID NO: 151118 - DNA, 15 bp, Homo sapiens
tcacacacttcccag

SEQ ID NO: 151119 - DNA, 15 bp, Homo sapiens
ctcacacacttccca

SEQ ID NO: 151120 - DNA, 15 bp, Homo sapiens
cctcacacacttccc

SEQ ID NO: 151121 - DNA, 15 bp, Homo sapiens
ccctcacacacttcc

SEQ ID NO: 151122 - DNA, 15 bp, Homo sapiens
cccctcacacacttc

SEQ ID NO: 151123 - DNA, 15 bp, Homo sapiens
acccctcacacactt

SEQ ID NO: 151124 - DNA, 15 bp, Homo sapiens
gacccctcacacact

SEQ ID NO: 151125 - DNA, 15 bp, Homo sapiens
ggacccctcacacac

SEQ ID NO: 151126 - DNA, 15 bp, Homo sapiens
aggacccctcacaca

SEQ ID NO: 151127 - DNA, 15 bp, Homo sapiens
gaggacccctcacac

SEQ ID NO: 151128 - DNA, 15 bp, Homo sapiens
tgaggacccctcaca

SEQ ID NO: 151129 - DNA, 15 bp, Homo sapiens
atgaggacccctcac

SEQ ID NO: 151130 - DNA, 15 bp, Homo sapiens
tatgaggacccctca

SEQ ID NO: 151131 - DNA, 15 bp, Homo sapiens
ctatgaggacccctc

SEQ ID NO: 151132 - DNA, 15 bp, Homo sapiens
cctatgaggacccct

SEQ ID NO: 151133 - DNA, 15 bp, Homo sapiens
gcctatgaggacccc

SEQ ID NO: 151134 - DNA, 15 bp, Homo sapiens
ggcctatgaggaccc

SEQ ID NO: 151135 - DNA, 15 bp, Homo sapiens
gggcctatgaggacc

SEQ ID NO: 151136 - DNA, 15 bp, Homo sapiens
agggcctatgaggac

SEQ ID NO: 151137 - DNA, 15 bp, Homo sapiens
cagggcctatgagga

SEQ ID NO: 151138 - DNA, 15 bp, Homo sapiens
gcagggcctatgagg

SEQ ID NO: 151139 - DNA, 15 bp, Homo sapiens
cgcagggcctatgag

SEQ ID NO: 151140 - DNA, 15 bp, Homo sapiens
ccgcagggcctatga

SEQ ID NO: 151141 - DNA, 15 bp, Homo sapiens
accgcagggcctatg

SEQ ID NO: 151142 - DNA, 15 bp, Homo sapiens
caccgcagggcctat

SEQ ID NO: 151143 - DNA, 15 bp, Homo sapiens
acaccgcagggccta

SEQ ID NO: 151144 - DNA, 15 bp, Homo sapiens
cacaccgcagggcct

SEQ ID NO: 151145 - DNA, 15 bp, Homo sapiens
ccacaccgcagggcc

SEQ ID NO: 151146 - DNA, 15 bp, Homo sapiens
tccacaccgcagggc

SEQ ID NO: 151147 - DNA, 15 bp, Homo sapiens
gtccacaccgcaggg

SEQ ID NO: 151148 - DNA, 15 bp, Homo sapiens
tgtccacaccgcagg

SEQ ID NO: 151149 - DNA, 15 bp, Homo sapiens
ttgtccacaccgcag

SEQ ID NO: 151150 - DNA, 15 bp, Homo sapiens
attgtccacaccgca

SEQ ID NO: 151151 - DNA, 15 bp, Homo sapiens
cattgtccacaccgc

SEQ ID NO: 151152 - DNA, 15 bp, Homo sapiens
gcattgtccacaccg

SEQ ID NO: 151153 - DNA, 15 bp, Homo sapiens
tgcattgtccacacc

SEQ ID NO: 151154 - DNA, 15 bp, Homo sapiens
ctgcattgtccacac

SEQ ID NO: 151155 - DNA, 15 bp, Homo sapiens
tctgcattgtccaca

SEQ ID NO: 151156 - DNA, 15 bp, Homo sapiens
ctctgcattgtccac

SEQ ID NO: 151157 - DNA, 15 bp, Homo sapiens
tctctgcattgtcca

SEQ ID NO: 151158 - DNA, 15 bp, Homo sapiens
gtctctgcattgtcc

SEQ ID NO: 151159 - DNA, 15 bp, Homo sapiens
ggtctctgcattgtc

SEQ ID NO: 151160 - DNA, 15 bp, Homo sapiens
gggtctctgcattgt

SEQ ID NO: 151161 - DNA, 15 bp, Homo sapiens
agggtctctgcattg

SEQ ID NO: 151162 - DNA, 15 bp, Homo sapiens
cagggtctctgcatt

SEQ ID NO: 151163 - DNA, 15 bp, Homo sapiens
acagggtctctgcat

SEQ ID NO: 151164 - DNA, 15 bp, Homo sapiens
tacagggtctctgca

SEQ ID NO: 151165 - DNA, 15 bp, Homo sapiens
ctacagggtctctgc

SEQ ID NO: 151166 - DNA, 15 bp, Homo sapiens
gctacagggtctctg

SEQ ID NO: 151167 - DNA, 15 bp, Homo sapiens
tgctacagggtctct

SEQ ID NO: 151168 - DNA, 15 bp, Homo sapiens
atgctacagggtctc

SEQ ID NO: 151169 - DNA, 15 bp, Homo sapiens
gatgctacagggtct

SEQ ID NO: 151170 - DNA, 15 bp, Homo sapiens
agatgctacagggtc

SEQ ID NO: 151171 - DNA, 15 bp, Homo sapiens
cagatgctacagggt

SEQ ID NO: 151172 - DNA, 15 bp, Homo sapiens
ccagatgctacaggg

SEQ ID NO: 151173 - DNA, 15 bp, Homo sapiens
gccagatgctacagg

SEQ ID NO: 151174 - DNA, 15 bp, Homo sapiens
agccagatgctacag

SEQ ID NO: 151175 - DNA, 15 bp, Homo sapiens
tagccagatgctaca

SEQ ID NO: 151176 - DNA, 15 bp, Homo sapiens
ctagccagatgctac

SEQ ID NO: 151177 - DNA, 15 bp, Homo sapiens
cctagccagatgcta

SEQ ID NO: 151178 - DNA, 15 bp, Homo sapiens
ccctagccagatgct

SEQ ID NO: 151179 - DNA, 15 bp, Homo sapiens
gccctagccagatgc

SEQ ID NO: 151180 - DNA, 15 bp, Homo sapiens
cgccctagccagatg

SEQ ID NO: 151181 - DNA, 15 bp, Homo sapiens
ccgccctagccagat

SEQ ID NO: 151182 - DNA, 15 bp, Homo sapiens
cccgccctagccaga

SEQ ID NO: 151183 - DNA, 15 bp, Homo sapiens
ccccgccctagccag

SEQ ID NO: 151184 - DNA, 15 bp, Homo sapiens
gccccgccctagcca

SEQ ID NO: 151185 - DNA, 15 bp, Homo sapiens
ggccccgccctagcc

SEQ ID NO: 151186 - DNA, 15 bp, Homo sapiens
gggccccgccctagc

SEQ ID NO: 151187 - DNA, 15 bp, Homo sapiens
tgggccccgccctag

SEQ ID NO: 151188 - DNA, 15 bp, Homo sapiens
ctgggccccgcccta

SEQ ID NO: 151189 - DNA, 15 bp, Homo sapiens
tctgggccccgccct

SEQ ID NO: 151190 - DNA, 15 bp, Homo sapiens
atctgggccccgccc

SEQ ID NO: 151191 - DNA, 15 bp, Homo sapiens
tatctgggccccgcc

SEQ ID NO: 151192 - DNA, 15 bp, Homo sapiens
ttatctgggccccgc

SEQ ID NO: 151193 - DNA, 15 bp, Homo sapiens
cttatctgggccccg

SEQ ID NO: 151194 - DNA, 15 bp, Homo sapiens
tcttatctgggcccc

SEQ ID NO: 151195 - DNA, 15 bp, Homo sapiens
ctcttatctgggccc

SEQ ID NO: 151196 - DNA, 15 bp, Homo sapiens
gctcttatctgggcc

SEQ ID NO: 151197 - DNA, 15 bp, Homo sapiens
ggctcttatctgggc

SEQ ID NO: 151198 - DNA, 15 bp, Homo sapiens
gggctcttatctggg

SEQ ID NO: 151199 - DNA, 15 bp, Homo sapiens
agggctcttatctgg

SEQ ID NO: 151200 - DNA, 15 bp, Homo sapiens
cagggctcttatctg

SEQ ID NO: 151201 - DNA, 15 bp, Homo sapiens
acagggctcttatct

SEQ ID NO: 151202 - DNA, 15 bp, Homo sapiens
cacagggctcttatc

SEQ ID NO: 151203 - DNA, 15 bp, Homo sapiens
gcacagggctcttat

SEQ ID NO: 151204 - DNA, 15 bp, Homo sapiens
ggcacagggctctta

SEQ ID NO: 151205 - DNA, 15 bp, Homo sapiens
tggcacagggctctt

SEQ ID NO: 151206 - DNA, 15 bp, Homo sapiens
ctggcacagggctct

SEQ ID NO: 151207 - DNA, 15 bp, Homo sapiens
cctggcacagggctc

SEQ ID NO: 151208 - DNA, 15 bp, Homo sapiens
tcctggcacagggct

SEQ ID NO: 151209 - DNA, 15 bp, Homo sapiens
ctcctggcacagggc

SEQ ID NO: 151210 - DNA, 15 bp, Homo sapiens
tctcctggcacaggg

SEQ ID NO: 151211 - DNA, 15 bp, Homo sapiens
ctctcctggcacagg

SEQ ID NO: 151212 - DNA, 15 bp, Homo sapiens
gctctcctggcacag

SEQ ID NO: 151213 - DNA, 15 bp, Homo sapiens
ggctctcctggcaca

SEQ ID NO: 151214 - DNA, 15 bp, Homo sapiens
aggctctcctggcac

SEQ ID NO: 151215 - DNA, 15 bp, Homo sapiens
caggctctcctggca

SEQ ID NO: 151216 - DNA, 15 bp, Homo sapiens
ccaggctctcctggc

SEQ ID NO: 151217 - DNA, 15 bp, Homo sapiens
gccaggctctcctgg

SEQ ID NO: 151218 - DNA, 15 bp, Homo sapiens
ggccaggctctcctg

SEQ ID NO: 151219 - DNA, 15 bp, Homo sapiens
cggccaggctctcct

SEQ ID NO: 151220 - DNA, 15 bp, Homo sapiens
ccggccaggctctcc

SEQ ID NO: 151221 - DNA, 15 bp, Homo sapiens
accggccaggctctc

SEQ ID NO: 151222 - DNA, 15 bp, Homo sapiens
aaccggccaggctct

SEQ ID NO: 151223 - DNA, 15 bp, Homo sapiens
gaaccggccaggctc

SEQ ID NO: 151224 - DNA, 15 bp, Homo sapiens
agaaccggccaggct

SEQ ID NO: 151225 - DNA, 15 bp, Homo sapiens
cagaaccggccaggc

SEQ ID NO: 151226 - DNA, 15 bp, Homo sapiens
gcagaaccggccagg

SEQ ID NO: 151227 - DNA, 15 bp, Homo sapiens
ggcagaaccggccag

SEQ ID NO: 151228 - DNA, 15 bp, Homo sapiens
tggcagaaccggcca

SEQ ID NO: 151229 - DNA, 15 bp, Homo sapiens
gtggcagaaccggcc

SEQ ID NO: 151230 - DNA, 15 bp, Homo sapiens
agtggcagaaccggc

SEQ ID NO: 151231 - DNA, 15 bp, Homo sapiens
cagtggcagaaccgg

SEQ ID NO: 151232 - DNA, 15 bp, Homo sapiens
acagtggcagaaccg

SEQ ID NO: 151233 - DNA, 15 bp, Homo sapiens
cacagtggcagaacc

SEQ ID NO: 151234 - DNA, 15 bp, Homo sapiens
ccacagtggcagaac

SEQ ID NO: 151235 - DNA, 15 bp, Homo sapiens
cccacagtggcagaa

SEQ ID NO: 151236 - DNA, 15 bp, Homo sapiens
ccccacagtggcaga

SEQ ID NO: 151237 - DNA, 15 bp, Homo sapiens
tccccacagtggcag

SEQ ID NO: 151238 - DNA, 15 bp, Homo sapiens
ctccccacagtggca

SEQ ID NO: 151239 - DNA, 15 bp, Homo sapiens
tctccccacagtggc

SEQ ID NO: 151240 - DNA, 15 bp, Homo sapiens
gtctccccacagtgg

SEQ ID NO: 151241 - DNA, 15 bp, Homo sapiens
tgtctccccacagtg

SEQ ID NO: 151242 - DNA, 15 bp, Homo sapiens
ctgtctccccacagt

SEQ ID NO: 151243 - DNA, 15 bp, Homo sapiens
cctgtctccccacag

SEQ ID NO: 151244 - DNA, 15 bp, Homo sapiens
gcctgtctccccaca

SEQ ID NO: 151245 - DNA, 15 bp, Homo sapiens
agcctgtctccccac

SEQ ID NO: 151246 - DNA, 15 bp, Homo sapiens
gagcctgtctcccca

SEQ ID NO: 151247 - DNA, 15 bp, Homo sapiens
ggagcctgtctcccc

SEQ ID NO: 151248 - DNA, 15 bp, Homo sapiens
gggagcctgtctccc

SEQ ID NO: 151249 - DNA, 15 bp, Homo sapiens
ggggagcctgtctcc

SEQ ID NO: 151250 - DNA, 15 bp, Homo sapiens
gggggagcctgtctc

SEQ ID NO: 151251 - DNA, 15 bp, Homo sapiens
tgggggagcctgtct

SEQ ID NO: 151252 - DNA, 15 bp, Homo sapiens
gtgggggagcctgtc

SEQ ID NO: 151253 - DNA, 15 bp, Homo sapiens
ggtgggggagcctgt

SEQ ID NO: 151254 - DNA, 15 bp, Homo sapiens
gggtgggggagcctg

SEQ ID NO: 151255 - DNA, 15 bp, Homo sapiens
ggggtgggggagcct

SEQ ID NO: 151256 - DNA, 15 bp, Homo sapiens
tggggtgggggagcc

SEQ ID NO: 151257 - DNA, 15 bp, Homo sapiens
atggggtgggggagc

SEQ ID NO: 151258 - DNA, 15 bp, Homo sapiens
catggggtgggggag

SEQ ID NO: 151259 - DNA, 15 bp, Homo sapiens
acatggggtggggga

SEQ ID NO: 151260 - DNA, 15 bp, Homo sapiens
gacatggggtggggg

SEQ ID NO: 151261 - DNA, 15 bp, Homo sapiens
ggacatggggtgggg

SEQ ID NO: 151262 - DNA, 15 bp, Homo sapiens
gggacatggggtggg

SEQ ID NO: 151263 - DNA, 15 bp, Homo sapiens
ggggacatggggtgg

SEQ ID NO: 151264 - DNA, 15 bp, Homo sapiens
aggggacatggggtg

SEQ ID NO: 151265 - DNA, 15 bp, Homo sapiens
caggggacatggggt

SEQ ID NO: 151266 - DNA, 15 bp, Homo sapiens
gcaggggacatgggg

SEQ ID NO: 151267 - DNA, 15 bp, Homo sapiens
agcaggggacatggg

SEQ ID NO: 151268 - DNA, 15 bp, Homo sapiens
aagcaggggacatgg

SEQ ID NO: 151269 - DNA, 15 bp, Homo sapiens
gaagcaggggacatg

SEQ ID NO: 151270 - DNA, 15 bp, Homo sapiens
ggaagcaggggacat

SEQ ID NO: 151271 - DNA, 15 bp, Homo sapiens
gggaagcaggggaca

SEQ ID NO: 151272 - DNA, 15 bp, Homo sapiens
agggaagcaggggac

SEQ ID NO: 151273 - DNA, 15 bp, Homo sapiens
cagggaagcagggga

SEQ ID NO: 151274 - DNA, 15 bp, Homo sapiens
gcagggaagcagggg

SEQ ID NO: 151275 - DNA, 15 bp, Homo sapiens
tgcagggaagcaggg

SEQ ID NO: 151276 - DNA, 15 bp, Homo sapiens
ctgcagggaagcagg

SEQ ID NO: 151277 - DNA, 15 bp, Homo sapiens
gctgcagggaagcag

SEQ ID NO: 151278 - DNA, 15 bp, Homo sapiens
ggctgcagggaagca

SEQ ID NO: 151279 - DNA, 15 bp, Homo sapiens
gggctgcagggaagc

SEQ ID NO: 151280 - DNA, 15 bp, Homo sapiens
tgggctgcagggaag

SEQ ID NO: 151281 - DNA, 15 bp, Homo sapiens
gtgggctgcagggaa

SEQ ID NO: 151282 - DNA, 15 bp, Homo sapiens
tgtgggctgcaggga

SEQ ID NO: 151283 - DNA, 15 bp, Homo sapiens
ctgtgggctgcaggg

SEQ ID NO: 151284 - DNA, 15 bp, Homo sapiens
tctgtgggctgcagg

SEQ ID NO: 151285 - DNA, 15 bp, Homo sapiens
ctctgtgggctgcag

SEQ ID NO: 151286 - DNA, 15 bp, Homo sapiens
tctctgtgggctgca

SEQ ID NO: 151287 - DNA, 15 bp, Homo sapiens
ttctctgtgggctgc

SEQ ID NO: 151288 - DNA, 15 bp, Homo sapiens
attctctgtgggctg

SEQ ID NO: 151289 - DNA, 15 bp, Homo sapiens
tattctctgtgggct

SEQ ID NO: 151290 - DNA, 15 bp, Homo sapiens
gtattctctgtgggc

SEQ ID NO: 151291 - DNA, 15 bp, Homo sapiens
tgtattctctgtggg

SEQ ID NO: 151292 - DNA, 15 bp, Homo sapiens
ctgtattctctgtgg

SEQ ID NO: 151293 - DNA, 15 bp, Homo sapiens
tctgtattctctgtg

SEQ ID NO: 151294 - DNA, 15 bp, Homo sapiens
gtctgtattctctgt

SEQ ID NO: 151295 - DNA, 15 bp, Homo sapiens
ggtctgtattctctg

SEQ ID NO: 151296 - DNA, 15 bp, Homo sapiens
aggtctgtattctct

SEQ ID NO: 151297 - DNA, 15 bp, Homo sapiens
taggtctgtattctc

SEQ ID NO: 151298 - DNA, 15 bp, Homo sapiens
gtaggtctgtattct

SEQ ID NO: 151299 - DNA, 15 bp, Homo sapiens
agtaggtctgtattc

SEQ ID NO: 151300 - DNA, 15 bp, Homo sapiens
aagtaggtctgtatt

SEQ ID NO: 151301 - DNA, 15 bp, Homo sapiens
aaagtaggtctgtat

SEQ ID NO: 151302 - DNA, 15 bp, Homo sapiens
aaaagtaggtctgta

SEQ ID NO: 151303 - DNA, 15 bp, Homo sapiens
taaaagtaggtctgt

SEQ ID NO: 151304 - DNA, 15 bp, Homo sapiens
gtaaaagtaggtctg

SEQ ID NO: 151305 - DNA, 15 bp, Homo sapiens
tgtaaaagtaggtct

SEQ ID NO: 151306 - DNA, 15 bp, Homo sapiens
ctgtaaaagtaggtc

SEQ ID NO: 151307 - DNA, 15 bp, Homo sapiens
tctgtaaaagtaggt

SEQ ID NO: 151308 - DNA, 15 bp, Homo sapiens
ttctgtaaaagtagg

SEQ ID NO: 151309 - DNA, 15 bp, Homo sapiens
tttctgtaaaagtag

SEQ ID NO: 151310 - DNA, 15 bp, Homo sapiens
atttctgtaaaagta

SEQ ID NO: 151311 - DNA, 15 bp, Homo sapiens
gatttctgtaaaagt

SEQ ID NO: 151312 - DNA, 15 bp, Homo sapiens
ggatttctgtaaaag

SEQ ID NO: 151313 - DNA, 15 bp, Homo sapiens
tggatttctgtaaaa

SEQ ID NO: 151314 - DNA, 15 bp, Homo sapiens
ctggatttctgtaaa

SEQ ID NO: 151315 - DNA, 15 bp, Homo sapiens
tctggatttctgtaa

SEQ ID NO: 151316 - DNA, 15 bp, Homo sapiens
atctggatttctgta

SEQ ID NO: 151317 - DNA, 15 bp, Homo sapiens
aatctggatttctgt

SEQ ID NO: 151318 - DNA, 15 bp, Homo sapiens
aaatctggatttctg

SEQ ID NO: 151319 - DNA, 15 bp, Homo sapiens
aaaatctggatttct

SEQ ID NO: 151320 - DNA, 15 bp, Homo sapiens
aaaaatctggatttc

SEQ ID NO: 151321 - DNA, 15 bp, Homo sapiens
caaaaatctggattt

SEQ ID NO: 151322 - DNA, 15 bp, Homo sapiens
acaaaaatctggatt

SEQ ID NO: 151323 - DNA, 15 bp, Homo sapiens
cacaaaaatctggat

SEQ ID NO: 151324 - DNA, 15 bp, Homo sapiens
acacaaaaatctgga

SEQ ID NO: 151325 - DNA, 15 bp, Homo sapiens
tacacaaaaatctgg

SEQ ID NO: 151326 - DNA, 15 bp, Homo sapiens
ttacacaaaaatctg

SEQ ID NO: 151327 - DNA, 15 bp, Homo sapiens
tttacacaaaaatct

SEQ ID NO: 151328 - DNA, 15 bp, Homo sapiens
ttttacacaaaaatc

SEQ ID NO: 151329 - DNA, 15 bp, Homo sapiens
cttttacacaaaaat

SEQ ID NO: 151330 - DNA, 15 bp, Homo sapiens
acttttacacaaaaa

SEQ ID NO: 151331 - DNA, 15 bp, Homo sapiens
cacttttacacaaaa

SEQ ID NO: 151332 - DNA, 15 bp, Homo sapiens
acacttttacacaaa

SEQ ID NO: 151333 - DNA, 15 bp, Homo sapiens
gacacttttacacaa

SEQ ID NO: 151334 - DNA, 15 bp, Homo sapiens
agacacttttacaca

SEQ ID NO: 151335 - DNA, 15 bp, Homo sapiens
gagacacttttacac

SEQ ID NO: 151336 - DNA, 15 bp, Homo sapiens
agagacacttttaca

SEQ ID NO: 151337 - DNA, 15 bp, Homo sapiens
tagagacacttttac

SEQ ID NO: 151338 - DNA, 15 bp, Homo sapiens
atagagacactttta

SEQ ID NO: 151339 - DNA, 15 bp, Homo sapiens
aatagagacactttt

SEQ ID NO: 151340 - DNA, 15 bp, Homo sapiens
aaatagagacacttt

SEQ ID NO: 151341 - DNA, 15 bp, Homo sapiens
aaaatagagacactt

SEQ ID NO: 151342 - DNA, 15 bp, Homo sapiens
taaaatagagacact

SEQ ID NO: 151343 - DNA, 15 bp, Homo sapiens
ttaaaatagagacac

SEQ ID NO: 151344 - DNA, 15 bp, Homo sapiens
cttaaaatagagaca

SEQ ID NO: 151345 - DNA, 15 bp, Homo sapiens
acttaaaatagagac

SEQ ID NO: 151346 - DNA, 15 bp, Homo sapiens
tacttaaaatagaga

SEQ ID NO: 151347 - DNA, 15 bp, Homo sapiens
ctacttaaaatagag

SEQ ID NO: 151348 - DNA, 15 bp, Homo sapiens
tctacttaaaataga

SEQ ID NO: 151349 - DNA, 15 bp, Homo sapiens
atctacttaaaatag

SEQ ID NO: 151350 - DNA, 15 bp, Homo sapiens
aatctacttaaaata

SEQ ID NO: 151351 - DNA, 15 bp, Homo sapiens
aaatctacttaaaat

SEQ ID NO: 151352 - DNA, 15 bp, Homo sapiens
aaaatctacttaaaa

SEQ ID NO: 151353 - DNA, 15 bp, Homo sapiens
taaaatctacttaaa

SEQ ID NO: 151354 - DNA, 15 bp, Homo sapiens
ttaaaatctacttaa

SEQ ID NO: 151355 - DNA, 15 bp, Homo sapiens
cttaaaatctactta

SEQ ID NO: 151356 - DNA, 15 bp, Homo sapiens
acttaaaatctactt

SEQ ID NO: 151357 - DNA, 15 bp, Homo sapiens
cacttaaaatctact

SEQ ID NO: 151358 - DNA, 15 bp, Homo sapiens
ccacttaaaatctac

SEQ ID NO: 151359 - DNA, 15 bp, Homo sapiens
accacttaaaatcta

SEQ ID NO: 151360 - DNA, 15 bp, Homo sapiens
caccacttaaaatct

SEQ ID NO: 151361 - DNA, 15 bp, Homo sapiens
ccaccacttaaaatc

SEQ ID NO: 151362 - DNA, 15 bp, Homo sapiens
gccaccacttaaaat

SEQ ID NO: 151363 - DNA, 15 bp, Homo sapiens
tgccaccacttaaaa

SEQ ID NO: 151364 - DNA, 15 bp, Homo sapiens
ctgccaccacttaaa

SEQ ID NO: 151365 - DNA, 15 bp, Homo sapiens
gctgccaccacttaa

SEQ ID NO: 151366 - DNA, 15 bp, Homo sapiens
tgctgccaccactta

SEQ ID NO: 151367 - DNA, 15 bp, Homo sapiens
ttgctgccaccactt

SEQ ID NO: 151368 - DNA, 15 bp, Homo sapiens
tttgctgccaccact

SEQ ID NO: 151369 - DNA, 15 bp, Homo sapiens
atttgctgccaccac

SEQ ID NO: 151370 - DNA, 15 bp, Homo sapiens
aatttgctgccacca

SEQ ID NO: 151371 - DNA, 15 bp, Homo sapiens
aaatttgctgccacc

SEQ ID NO: 151372 - DNA, 15 bp, Homo sapiens
taaatttgctgccac

SEQ ID NO: 151373 - DNA, 15 bp, Homo sapiens
ttaaatttgctgcca

SEQ ID NO: 151374 - DNA, 15 bp, Homo sapiens
cttaaatttgctgcc

SEQ ID NO: 151375 - DNA, 15 bp, Homo sapiens
gcttaaatttgctgc

SEQ ID NO: 151376 - DNA, 15 bp, Homo sapiens
agcttaaatttgctg

SEQ ID NO: 151377 - DNA, 15 bp, Homo sapiens
aagcttaaatttgct

SEQ ID NO: 151378 - DNA, 15 bp, Homo sapiens
aaagcttaaatttgc

SEQ ID NO: 151379 - DNA, 15 bp, Homo sapiens
aaaagcttaaatttg

SEQ ID NO: 151380 - DNA, 15 bp, Homo sapiens
caaaagcttaaattt

SEQ ID NO: 151381 - DNA, 15 bp, Homo sapiens
tcaaaagcttaaatt

SEQ ID NO: 151382 - DNA, 15 bp, Homo sapiens
ctcaaaagcttaaat

SEQ ID NO: 151383 - DNA, 15 bp, Homo sapiens
tctcaaaagcttaaa

SEQ ID NO: 151384 - DNA, 15 bp, Homo sapiens
ttctcaaaagcttaa

SEQ ID NO: 151385 - DNA, 15 bp, Homo sapiens
attctcaaaagctta

SEQ ID NO: 151386 - DNA, 15 bp, Homo sapiens
tattctcaaaagctt

SEQ ID NO: 151387 - DNA, 15 bp, Homo sapiens
atattctcaaaagct

SEQ ID NO: 151388 - DNA, 15 bp, Homo sapiens
aatattctcaaaagc

SEQ ID NO: 151389 - DNA, 15 bp, Homo sapiens
taatattctcaaaag

SEQ ID NO: 151390 - DNA, 15 bp, Homo sapiens
ataatattctcaaaa

SEQ ID NO: 151391 - DNA, 15 bp, Homo sapiens
tataatattctcaaa

SEQ ID NO: 151392 - DNA, 15 bp, Homo sapiens
gtataatattctcaa

SEQ ID NO: 151393 - DNA, 15 bp, Homo sapiens
tgtataatattctca

SEQ ID NO: 151394 - DNA, 15 bp, Homo sapiens
ctgtataatattctc

SEQ ID NO: 151395 - DNA, 15 bp, Homo sapiens
tctgtataatattct

SEQ ID NO: 151396 - DNA, 15 bp, Homo sapiens
ttctgtataatattc

SEQ ID NO: 151397 - DNA, 15 bp, Homo sapiens
gttctgtataatatt

SEQ ID NO: 151398 - DNA, 15 bp, Homo sapiens
tgttctgtataatat

SEQ ID NO: 151399 - DNA, 15 bp, Homo sapiens
ttgttctgtataata

SEQ ID NO: 151400 - DNA, 15 bp, Homo sapiens
tttgttctgtataat

SEQ ID NO: 151401 - DNA, 15 bp, Homo sapiens
atttgttctgtataa

SEQ ID NO: 151402 - DNA, 15 bp, Homo sapiens
gatttgttctgtata

SEQ ID NO: 151403 - DNA, 15 bp, Homo sapiens
tgatttgttctgtat

SEQ ID NO: 151404 - DNA, 15 bp, Homo sapiens
ctgatttgttctgta

SEQ ID NO: 151405 - DNA, 15 bp, Homo sapiens
tctgatttgttctgt

SEQ ID NO: 151406 - DNA, 15 bp, Homo sapiens
atctgatttgttctg

SEQ ID NO: 151407 - DNA, 15 bp, Homo sapiens
aatctgatttgttct

SEQ ID NO: 151408 - DNA, 15 bp, Homo sapiens
gaatctgatttgttc

SEQ ID NO: 151409 - DNA, 15 bp, Homo sapiens
tgaatctgatttgtt

SEQ ID NO: 151410 - DNA, 15 bp, Homo sapiens
gtgaatctgatttgt

SEQ ID NO: 151411 - DNA, 15 bp, Homo sapiens
tgtgaatctgatttg

SEQ ID NO: 151412 - DNA, 15 bp, Homo sapiens
ctgtgaatctgattt

SEQ ID NO: 151413 - DNA, 15 bp, Homo sapiens
cctgtgaatctgatt

SEQ ID NO: 151414 - DNA, 15 bp, Homo sapiens
gcctgtgaatctgat

SEQ ID NO: 151415 - DNA, 15 bp, Homo sapiens
ggcctgtgaatctga

SEQ ID NO: 151416 - DNA, 15 bp, Homo sapiens
tggcctgtgaatctg

SEQ ID NO: 151417 - DNA, 15 bp, Homo sapiens
ctggcctgtgaatct

SEQ ID NO: 151418 - DNA, 15 bp, Homo sapiens
tctggcctgtgaatc

SEQ ID NO: 151419 - DNA, 15 bp, Homo sapiens
atctggcctgtgaat

SEQ ID NO: 151420 - DNA, 15 bp, Homo sapiens
catctggcctgtgaa

SEQ ID NO: 151421 - DNA, 15 bp, Homo sapiens
gcatctggcctgtga

SEQ ID NO: 151422 - DNA, 15 bp, Homo sapiens
tgcatctggcctgtg

SEQ ID NO: 151423 - DNA, 15 bp, Homo sapiens
ttgcatctggcctgt

SEQ ID NO: 151424 - DNA, 15 bp, Homo sapiens
gttgcatctggcctg

SEQ ID NO: 151425 - DNA, 15 bp, Homo sapiens
agttgcatctggcct

SEQ ID NO: 151426 - DNA, 15 bp, Homo sapiens
aagttgcatctggcc

SEQ ID NO: 151427 - DNA, 15 bp, Homo sapiens
aaagttgcatctggc

SEQ ID NO: 151428 - DNA, 15 bp, Homo sapiens
taaagttgcatctgg

SEQ ID NO: 151429 - DNA, 15 bp, Homo sapiens
ataaagttgcatctg

SEQ ID NO: 151430 - DNA, 15 bp, Homo sapiens
aataaagttgcatct

SEQ ID NO: 151431 - DNA, 15 bp, Homo sapiens
aaataaagttgcatc

SEQ ID NO: 151432 - DNA, 15 bp, Homo sapiens
taaataaagttgcat

SEQ ID NO: 151433 - DNA, 15 bp, Homo sapiens
gtaaataaagttgca

SEQ ID NO: 151434 - DNA, 15 bp, Homo sapiens
tgtaaataaagttgc

SEQ ID NO: 151435 - DNA, 15 bp, Homo sapiens
ctgtaaataaagttg

SEQ ID NO: 151436 - DNA, 15 bp, Homo sapiens
tctgtaaataaagtt

SEQ ID NO: 151437 - DNA, 15 bp, Homo sapiens
ttctgtaaataaagt

SEQ ID NO: 151438 - DNA, 15 bp, Homo sapiens
tttctgtaaataaag

SEQ ID NO: 151439 - DNA, 15 bp, Homo sapiens
atttctgtaaataaa

SEQ ID NO: 151440 - DNA, 15 bp, Homo sapiens
catttctgtaaataa

SEQ ID NO: 151441 - DNA, 15 bp, Homo sapiens
ccatttctgtaaata

SEQ ID NO: 151442 - DNA, 15 bp, Homo sapiens
cccatttctgtaaat

SEQ ID NO: 151443 - DNA, 15 bp, Homo sapiens
tcccatttctgtaaa

SEQ ID NO: 151444 - DNA, 15 bp, Homo sapiens
atcccatttctgtaa

SEQ ID NO: 151445 - DNA, 15 bp, Homo sapiens
gatcccatttctgta

SEQ ID NO: 151446 - DNA, 15 bp, Homo sapiens
tgatcccatttctgt

SEQ ID NO: 151447 - DNA, 15 bp, Homo sapiens
ctgatcccatttctg

SEQ ID NO: 151448 - DNA, 15 bp, Homo sapiens
cctgatcccatttct

SEQ ID NO: 151449 - DNA, 15 bp, Homo sapiens
acctgatcccatttc

SEQ ID NO: 151450 - DNA, 15 bp, Homo sapiens
gacctgatcccattt

SEQ ID NO: 151451 - DNA, 15 bp, Homo sapiens
ggacctgatcccatt

SEQ ID NO: 151452 - DNA, 15 bp, Homo sapiens
aggacctgatcccat

SEQ ID NO: 151453 - DNA, 15 bp, Homo sapiens
taggacctgatccca

SEQ ID NO: 151454 - DNA, 15 bp, Homo sapiens
gtaggacctgatccc

SEQ ID NO: 151455 - DNA, 15 bp, Homo sapiens
ggtaggacctgatcc

SEQ ID NO: 151456 - DNA, 15 bp, Homo sapiens
aggtaggacctgatc

SEQ ID NO: 151457 - DNA, 15 bp, Homo sapiens
gaggtaggacctgat

SEQ ID NO: 151458 - DNA, 15 bp, Homo sapiens
tgaggtaggacctga

SEQ ID NO: 151459 - DNA, 15 bp, Homo sapiens
ctgaggtaggacctg

SEQ ID NO: 151460 - DNA, 15 bp, Homo sapiens
cctgaggtaggacct

SEQ ID NO: 151461 - DNA, 15 bp, Homo sapiens
acctgaggtaggacc

SEQ ID NO: 151462 - DNA, 15 bp, Homo sapiens
gacctgaggtaggac

SEQ ID NO: 151463 - DNA, 15 bp, Homo sapiens
ggacctgaggtagga

SEQ ID NO: 151464 - DNA, 15 bp, Homo sapiens
gggacctgaggtagg

SEQ ID NO: 151465 - DNA, 15 bp, Homo sapiens
tgggacctgaggtag

SEQ ID NO: 151466 - DNA, 15 bp, Homo sapiens
atgggacctgaggta

SEQ ID NO: 151467 - DNA, 15 bp, Homo sapiens
gatgggacctgaggt

SEQ ID NO: 151468 - DNA, 15 bp, Homo sapiens
agatgggacctgagg

SEQ ID NO: 151469 - DNA, 15 bp, Homo sapiens
gagatgggacctgag

SEQ ID NO: 151470 - DNA, 15 bp, Homo sapiens
tgagatgggacctga

SEQ ID NO: 151471 - DNA, 15 bp, Homo sapiens
gtgagatgggacctg

SEQ ID NO: 151472 - DNA, 15 bp, Homo sapiens
cgtgagatgggacct

SEQ ID NO: 151473 - DNA, 15 bp, Homo sapiens
acgtgagatgggacc

SEQ ID NO: 151474 - DNA, 15 bp, Homo sapiens
aacgtgagatgggac

SEQ ID NO: 151475 - DNA, 15 bp, Homo sapiens
aaacgtgagatggga

SEQ ID NO: 151476 - DNA, 15 bp, Homo sapiens
aaaacgtgagatggg

SEQ ID NO: 151477 - DNA, 15 bp, Homo sapiens
gaaaacgtgagatgg

SEQ ID NO: 151478 - DNA, 15 bp, Homo sapiens
tgaaaacgtgagatg

SEQ ID NO: 151479 - DNA, 15 bp, Homo sapiens
gtgaaaacgtgagat

SEQ ID NO: 151480 - DNA, 15 bp, Homo sapiens
agtgaaaacgtgaga

SEQ ID NO: 151481 - DNA, 15 bp, Homo sapiens
aagtgaaaacgtgag

SEQ ID NO: 151482 - DNA, 15 bp, Homo sapiens
taagtgaaaacgtga

SEQ ID NO: 151483 - DNA, 15 bp, Homo sapiens
ataagtgaaaacgtg

SEQ ID NO: 151484 - DNA, 15 bp, Homo sapiens
cataagtgaaaacgt

SEQ ID NO: 151485 - DNA, 15 bp, Homo sapiens
gcataagtgaaaacg

SEQ ID NO: 151486 - DNA, 15 bp, Homo sapiens
ggcataagtgaaaac

SEQ ID NO: 151487 - DNA, 15 bp, Homo sapiens
aggcataagtgaaaa

SEQ ID NO: 151488 - DNA, 15 bp, Homo sapiens
taggcataagtgaaa

SEQ ID NO: 151489 - DNA, 15 bp, Homo sapiens
ataggcataagtgaa

SEQ ID NO: 151490 - DNA, 15 bp, Homo sapiens
tataggcataagtga

SEQ ID NO: 151491 - DNA, 15 bp, Homo sapiens
gtataggcataagtg

SEQ ID NO: 151492 - DNA, 15 bp, Homo sapiens
cgtataggcataagt

SEQ ID NO: 151493 - DNA, 15 bp, Homo sapiens
acgtataggcataag

SEQ ID NO: 151494 - DNA, 15 bp, Homo sapiens
gacgtataggcataa

SEQ ID NO: 151495 - DNA, 15 bp, Homo sapiens
agacgtataggcata

SEQ ID NO: 151496 - DNA, 15 bp, Homo sapiens
gagacgtataggcat

SEQ ID NO: 151497 - DNA, 15 bp, Homo sapiens
ggagacgtataggca

SEQ ID NO: 151498 - DNA, 15 bp, Homo sapiens
aggagacgtataggc

SEQ ID NO: 151499 - DNA, 15 bp, Homo sapiens
aaggagacgtatagg

SEQ ID NO: 151500 - DNA, 15 bp, Homo sapiens
gaaggagacgtatag

SEQ ID NO: 151501 - DNA, 15 bp, Homo sapiens
tgaaggagacgtata

SEQ ID NO: 151502 - DNA, 15 bp, Homo sapiens
gtgaaggagacgtat

SEQ ID NO: 151503 - DNA, 15 bp, Homo sapiens
cgtgaaggagacgta

SEQ ID NO: 151504 - DNA, 15 bp, Homo sapiens
ccgtgaaggagacgt

SEQ ID NO: 151505 - DNA, 15 bp, Homo sapiens
cccgtgaaggagacg

SEQ ID NO: 151506 - DNA, 15 bp, Homo sapiens
tcccgtgaaggagac

SEQ ID NO: 151507 - DNA, 15 bp, Homo sapiens
ttcccgtgaaggaga

SEQ ID NO: 151508 - DNA, 15 bp, Homo sapiens
tttcccgtgaaggag

SEQ ID NO: 151509 - DNA, 15 bp, Homo sapiens
ctttcccgtgaagga

SEQ ID NO: 151510 - DNA, 15 bp, Homo sapiens
cctttcccgtgaagg

SEQ ID NO: 151511 - DNA, 15 bp, Homo sapiens
gcctttcccgtgaag

SEQ ID NO: 151512 - DNA, 15 bp, Homo sapiens
ggcctttcccgtgaa

SEQ ID NO: 151513 - DNA, 15 bp, Homo sapiens
tggcctttcccgtga

SEQ ID NO: 151514 - DNA, 15 bp, Homo sapiens
gtggcctttcccgtg

SEQ ID NO: 151515 - DNA, 15 bp, Homo sapiens
tgtggcctttcccgt

SEQ ID NO: 151516 - DNA, 15 bp, Homo sapiens
ttgtggcctttcccg

SEQ ID NO: 151517 - DNA, 15 bp, Homo sapiens
cttgtggcctttccc

SEQ ID NO: 151518 - DNA, 15 bp, Homo sapiens
tcttgtggcctttcc

SEQ ID NO: 151519 - DNA, 15 bp, Homo sapiens
ctcttgtggcctttc

SEQ ID NO: 151520 - DNA, 15 bp, Homo sapiens
cctcttgtggccttt

SEQ ID NO: 151521 - DNA, 15 bp, Homo sapiens
gcctcttgtggcctt

SEQ ID NO: 151522 - DNA, 15 bp, Homo sapiens
ggcctcttgtggcct

SEQ ID NO: 151523 - DNA, 15 bp, Homo sapiens
gggcctcttgtggcc

SEQ ID NO: 151524 - DNA, 15 bp, Homo sapiens
agggcctcttgtggc

SEQ ID NO: 151525 - DNA, 15 bp, Homo sapiens
cagggcctcttgtgg

SEQ ID NO: 151526 - DNA, 15 bp, Homo sapiens
gcagggcctcttgtg

SEQ ID NO: 151527 - DNA, 15 bp, Homo sapiens
cgcagggcctcttgt

SEQ ID NO: 151528 - DNA, 15 bp, Homo sapiens
ccgcagggcctcttg

SEQ ID NO: 151529 - DNA, 15 bp, Homo sapiens
accgcagggcctctt

SEQ ID NO: 151530 - DNA, 15 bp, Homo sapiens
taccgcagggcctct

SEQ ID NO: 151531 - DNA, 15 bp, Homo sapiens
ttaccgcagggcctc

SEQ ID NO: 151532 - DNA, 15 bp, Homo sapiens
cttaccgcagggcct

SEQ ID NO: 151533 - DNA, 15 bp, Homo sapiens
acttaccgcagggcc

SEQ ID NO: 151534 - DNA, 15 bp, Homo sapiens
cacttaccgcagggc

SEQ ID NO: 151535 - DNA, 15 bp, Homo sapiens
acacttaccgcaggg

SEQ ID NO: 151536 - DNA, 15 bp, Homo sapiens
gacacttaccgcagg

SEQ ID NO: 151537 - DNA, 15 bp, Homo sapiens
ggacacttaccgcag

SEQ ID NO: 151538 - DNA, 15 bp, Homo sapiens
gggacacttaccgca

SEQ ID NO: 151539 - DNA, 15 bp, Homo sapiens
cgggacacttaccgc

SEQ ID NO: 151540 - DNA, 15 bp, Homo sapiens
ccgggacacttaccg

SEQ ID NO: 151541 - DNA, 15 bp, Homo sapiens
accgggacacttacc

SEQ ID NO: 151542 - DNA, 15 bp, Homo sapiens
caccgggacacttac

SEQ ID NO: 151543 - DNA, 15 bp, Homo sapiens
acaccgggacactta

SEQ ID NO: 151544 - DNA, 15 bp, Homo sapiens
aacaccgggacactt

SEQ ID NO: 151545 - DNA, 15 bp, Homo sapiens
caacaccgggacact

SEQ ID NO: 151546 - DNA, 15 bp, Homo sapiens
tcaacaccgggacac

SEQ ID NO: 151547 - DNA, 15 bp, Homo sapiens
atcaacaccgggaca

SEQ ID NO: 151548 - DNA, 15 bp, Homo sapiens
aatcaacaccgggac

SEQ ID NO: 151549 - DNA, 15 bp, Homo sapiens
aaatcaacaccggga

SEQ ID NO: 151550 - DNA, 15 bp, Homo sapiens
taaatcaacaccggg

SEQ ID NO: 151551 - DNA, 15 bp, Homo sapiens
ttaaatcaacaccgg

SEQ ID NO: 151552 - DNA, 15 bp, Homo sapiens
tttaaatcaacaccg

SEQ ID NO: 151553 - DNA, 15 bp, Homo sapiens
ctttaaatcaacacc

SEQ ID NO: 151554 - DNA, 15 bp, Homo sapiens
actttaaatcaacac

SEQ ID NO: 151555 - DNA, 15 bp, Homo sapiens
gactttaaatcaaca

SEQ ID NO: 151556 - DNA, 15 bp, Homo sapiens
ggactttaaatcaac

SEQ ID NO: 151557 - DNA, 15 bp, Homo sapiens
gggactttaaatcaa

SEQ ID NO: 151558 - DNA, 15 bp, Homo sapiens
ggggactttaaatca

SEQ ID NO: 151559 - DNA, 15 bp, Homo sapiens
tggggactttaaatc

SEQ ID NO: 151560 - DNA, 15 bp, Homo sapiens
ttggggactttaaat

SEQ ID NO: 151561 - DNA, 15 bp, Homo sapiens
gttggggactttaaa

SEQ ID NO: 151562 - DNA, 15 bp, Homo sapiens
tgttggggactttaa

SEQ ID NO: 151563 - DNA, 15 bp, Homo sapiens
ctgttggggacttta

SEQ ID NO: 151564 - DNA, 15 bp, Homo sapiens
actgttggggacttt

SEQ ID NO: 151565 - DNA, 15 bp, Homo sapiens
cactgttggggactt

SEQ ID NO: 151566 - DNA, 15 bp, Homo sapiens
tcactgttggggact

SEQ ID NO: 151567 - DNA, 15 bp, Homo sapiens
ttcactgttggggac

SEQ ID NO: 151568 - DNA, 15 bp, Homo sapiens
attcactgttgggga

SEQ ID NO: 151569 - DNA, 15 bp, Homo sapiens
tattcactgttgggg

SEQ ID NO: 151570 - DNA, 15 bp, Homo sapiens
atattcactgttggg

SEQ ID NO: 151571 - DNA, 15 bp, Homo sapiens
catattcactgttgg

SEQ ID NO: 151572 - DNA, 15 bp, Homo sapiens
tcatattcactgttg

SEQ ID NO: 151573 - DNA, 15 bp, Homo sapiens
ctcatattcactgtt

SEQ ID NO: 151574 - DNA, 15 bp, Homo sapiens
cctcatattcactgt

SEQ ID NO: 151575 - DNA, 15 bp, Homo sapiens
ccctcatattcactg

SEQ ID NO: 151576 - DNA, 15 bp, Homo sapiens
accctcatattcact

SEQ ID NO: 151577 - DNA, 15 bp, Homo sapiens
gaccctcatattcac

SEQ ID NO: 151578 - DNA, 15 bp, Homo sapiens
ggaccctcatattca

SEQ ID NO: 151579 - DNA, 15 bp, Homo sapiens
aggaccctcatattc

SEQ ID NO: 151580 - DNA, 15 bp, Homo sapiens
gaggaccctcatatt

SEQ ID NO: 151581 - DNA, 15 bp, Homo sapiens
tgaggaccctcatat

SEQ ID NO: 151582 - DNA, 15 bp, Homo sapiens
gtgaggaccctcata

SEQ ID NO: 151583 - DNA, 15 bp, Homo sapiens
agtgaggaccctcat

SEQ ID NO: 151584 - DNA, 15 bp, Homo sapiens
cagtgaggaccctca

SEQ ID NO: 151585 - DNA, 15 bp, Homo sapiens
acagtgaggaccctc

SEQ ID NO: 151586 - DNA, 15 bp, Homo sapiens
aacagtgaggaccct

SEQ ID NO: 151587 - DNA, 15 bp, Homo sapiens
caacagtgaggaccc

SEQ ID NO: 151588 - DNA, 15 bp, Homo sapiens
gcaacagtgaggacc

SEQ ID NO: 151589 - DNA, 15 bp, Homo sapiens
tgcaacagtgaggac

SEQ ID NO: 151590 - DNA, 15 bp, Homo sapiens
ctgcaacagtgagga

SEQ ID NO: 151591 - DNA, 15 bp, Homo sapiens
gctgcaacagtgagg

SEQ ID NO: 151592 - DNA, 15 bp, Homo sapiens
tgctgcaacagtgag

SEQ ID NO: 151593 - DNA, 15 bp, Homo sapiens
ttgctgcaacagtga

SEQ ID NO: 151594 - DNA, 15 bp, Homo sapiens
cttgctgcaacagtg

SEQ ID NO: 151595 - DNA, 15 bp, Homo sapiens
tcttgctgcaacagt

SEQ ID NO: 151596 - DNA, 15 bp, Homo sapiens
ctcttgctgcaacag

SEQ ID NO: 151597 - DNA, 15 bp, Homo sapiens
cctcttgctgcaaca

SEQ ID NO: 151598 - DNA, 15 bp, Homo sapiens
tcctcttgctgcaac

SEQ ID NO: 151599 - DNA, 15 bp, Homo sapiens
atcctcttgctgcaa

SEQ ID NO: 151600 - DNA, 15 bp, Homo sapiens
tatcctcttgctgca

SEQ ID NO: 151601 - DNA, 15 bp, Homo sapiens
gtatcctcttgctgc

SEQ ID NO: 151602 - DNA, 15 bp, Homo sapiens
ggtatcctcttgctg

SEQ ID NO: 151603 - DNA, 15 bp, Homo sapiens
gggtatcctcttgct

SEQ ID NO: 151604 - DNA, 15 bp, Homo sapiens
ggggtatcctcttgc

SEQ ID NO: 151605 - DNA, 15 bp, Homo sapiens
gggggtatcctcttg

SEQ ID NO: 151606 - DNA, 15 bp, Homo sapiens
ggggggtatcctctt

SEQ ID NO: 151607 - DNA, 15 bp, Homo sapiens
aggggggtatcctct

SEQ ID NO: 151608 - DNA, 15 bp, Homo sapiens
caggggggtatcctc

SEQ ID NO: 151609 - DNA, 15 bp, Homo sapiens
acaggggggtatcct

SEQ ID NO: 151610 - DNA, 15 bp, Homo sapiens
cacaggggggtatcc

SEQ ID NO: 151611 - DNA, 15 bp, Homo sapiens
acacaggggggtatc

SEQ ID NO: 151612 - DNA, 15 bp, Homo sapiens
tacacaggggggtat

SEQ ID NO: 151613 - DNA, 15 bp, Homo sapiens
atacacaggggggta

SEQ ID NO: 151614 - DNA, 15 bp, Homo sapiens
gatacacaggggggt

SEQ ID NO: 151615 - DNA, 15 bp, Homo sapiens
agatacacagggggg

SEQ ID NO: 151616 - DNA, 15 bp, Homo sapiens
aagatacacaggggg

SEQ ID NO: 151617 - DNA, 15 bp, Homo sapiens
caagatacacagggg

SEQ ID NO: 151618 - DNA, 15 bp, Homo sapiens
ccaagatacacaggg

SEQ ID NO: 151619 - DNA, 15 bp, Homo sapiens
tccaagatacacagg

SEQ ID NO: 151620 - DNA, 15 bp, Homo sapiens
ttccaagatacacag

SEQ ID NO: 151621 - DNA, 15 bp, Homo sapiens
tttccaagatacaca

SEQ ID NO: 151622 - DNA, 15 bp, Homo sapiens
atttccaagatacac

SEQ ID NO: 151623 - DNA, 15 bp, Homo sapiens
catttccaagataca

SEQ ID NO: 151624 - DNA, 15 bp, Homo sapiens
gcatttccaagatac

SEQ ID NO: 151625 - DNA, 15 bp, Homo sapiens
ggcatttccaagata

SEQ ID NO: 151626 - DNA, 15 bp, Homo sapiens
aggcatttccaagat

SEQ ID NO: 151627 - DNA, 15 bp, Homo sapiens
caggcatttccaaga

SEQ ID NO: 151628 - DNA, 15 bp, Homo sapiens
gcaggcatttccaag

SEQ ID NO: 151629 - DNA, 15 bp, Homo sapiens
tgcaggcatttccaa

SEQ ID NO: 151630 - DNA, 15 bp, Homo sapiens
ctgcaggcatttcca

SEQ ID NO: 151631 - DNA, 15 bp, Homo sapiens
gctgcaggcatttcc

SEQ ID NO: 151632 - DNA, 15 bp, Homo sapiens
ggctgcaggcatttc

SEQ ID NO: 151633 - DNA, 15 bp, Homo sapiens
gggctgcaggcattt

SEQ ID NO: 151634 - DNA, 15 bp, Homo sapiens
agggctgcaggcatt

SEQ ID NO: 151635 - DNA, 15 bp, Homo sapiens
gagggctgcaggcat

SEQ ID NO: 151636 - DNA, 15 bp, Homo sapiens
agagggctgcaggca

SEQ ID NO: 151637 - DNA, 15 bp, Homo sapiens
aagagggctgcaggc

SEQ ID NO: 151638 - DNA, 15 bp, Homo sapiens
caagagggctgcagg

SEQ ID NO: 151639 - DNA, 15 bp, Homo sapiens
gcaagagggctgcag

SEQ ID NO: 151640 - DNA, 15 bp, Homo sapiens
agcaagagggctgca

SEQ ID NO: 151641 - DNA, 15 bp, Homo sapiens
cagcaagagggctgc

SEQ ID NO: 151642 - DNA, 15 bp, Homo sapiens
gcagcaagagggctg

SEQ ID NO: 151643 - DNA, 15 bp, Homo sapiens
tgcagcaagagggct

SEQ ID NO: 151644 - DNA, 15 bp, Homo sapiens
ctgcagcaagagggc

SEQ ID NO: 151645 - DNA, 15 bp, Homo sapiens
tctgcagcaagaggg

SEQ ID NO: 151646 - DNA, 15 bp, Homo sapiens
ttctgcagcaagagg

SEQ ID NO: 151647 - DNA, 15 bp, Homo sapiens
gttctgcagcaagag

SEQ ID NO: 151648 - DNA, 15 bp, Homo sapiens
tgttctgcagcaaga

SEQ ID NO: 151649 - DNA, 15 bp, Homo sapiens
ctgttctgcagcaag

SEQ ID NO: 151650 - DNA, 15 bp, Homo sapiens
tctgttctgcagcaa

SEQ ID NO: 151651 - DNA, 15 bp, Homo sapiens
atctgttctgcagca

SEQ ID NO: 151652 - DNA, 15 bp, Homo sapiens
aatctgttctgcagc

SEQ ID NO: 151653 - DNA, 15 bp, Homo sapiens
gaatctgttctgcag

SEQ ID NO: 151654 - DNA, 15 bp, Homo sapiens
agaatctgttctgca

SEQ ID NO: 151655 - DNA, 15 bp, Homo sapiens
aagaatctgttctgc

SEQ ID NO: 151656 - DNA, 15 bp, Homo sapiens
taagaatctgttctg

SEQ ID NO: 151657 - DNA, 15 bp, Homo sapiens
ctaagaatctgttct

SEQ ID NO: 151658 - DNA, 15 bp, Homo sapiens
cctaagaatctgttc

SEQ ID NO: 151659 - DNA, 15 bp, Homo sapiens
tcctaagaatctgtt

SEQ ID NO: 151660 - DNA, 15 bp, Homo sapiens
ctcctaagaatctgt

SEQ ID NO: 151661 - DNA, 15 bp, Homo sapiens
tctcctaagaatctg

SEQ ID NO: 151662 - DNA, 15 bp, Homo sapiens
ctctcctaagaatct

SEQ ID NO: 151663 - DNA, 15 bp, Homo sapiens
tctctcctaagaatc

SEQ ID NO: 151664 - DNA, 15 bp, Homo sapiens
ttctctcctaagaat

SEQ ID NO: 151665 - DNA, 15 bp, Homo sapiens
tttctctcctaagaa

SEQ ID NO: 151666 - DNA, 15 bp, Homo sapiens
gtttctctcctaaga

SEQ ID NO: 151667 - DNA, 15 bp, Homo sapiens
agtttctctcctaag

SEQ ID NO: 151668 - DNA, 15 bp, Homo sapiens
cagtttctctcctaa

SEQ ID NO: 151669 - DNA, 15 bp, Homo sapiens
acagtttctctccta

SEQ ID NO: 151670 - DNA, 15 bp, Homo sapiens
gacagtttctctcct

SEQ ID NO: 151671 - DNA, 15 bp, Homo sapiens
tgacagtttctctcc

SEQ ID NO: 151672 - DNA, 15 bp, Homo sapiens
ctgacagtttctctc

SEQ ID NO: 151673 - DNA, 15 bp, Homo sapiens
tctgacagtttctct

SEQ ID NO: 151674 - DNA, 15 bp, Homo sapiens
atctgacagtttctc

SEQ ID NO: 151675 - DNA, 15 bp, Homo sapiens
gatctgacagtttct

SEQ ID NO: 151676 - DNA, 15 bp, Homo sapiens
tgatctgacagtttc

SEQ ID NO: 151677 - DNA, 15 bp, Homo sapiens
ttgatctgacagttt

SEQ ID NO: 151678 - DNA, 15 bp, Homo sapiens
tttgatctgacagtt

SEQ ID NO: 151679 - DNA, 15 bp, Homo sapiens
ctttgatctgacagt

SEQ ID NO: 151680 - DNA, 15 bp, Homo sapiens
actttgatctgacag

SEQ ID NO: 151681 - DNA, 15 bp, Homo sapiens
aactttgatctgaca

SEQ ID NO: 151682 - DNA, 15 bp, Homo sapiens
taactttgatctgac

SEQ ID NO: 151683 - DNA, 15 bp, Homo sapiens
ttaactttgatctga

SEQ ID NO: 151684 - DNA, 15 bp, Homo sapiens
tttaactttgatctg

SEQ ID NO: 151685 - DNA, 15 bp, Homo sapiens
gtttaactttgatct

SEQ ID NO: 151686 - DNA, 15 bp, Homo sapiens
agtttaactttgatc

SEQ ID NO: 151687 - DNA, 15 bp, Homo sapiens
aagtttaactttgat

SEQ ID NO: 151688 - DNA, 15 bp, Homo sapiens
taagtttaactttga

SEQ ID NO: 151689 - DNA, 15 bp, Homo sapiens
ctaagtttaactttg

SEQ ID NO: 151690 - DNA, 15 bp, Homo sapiens
tctaagtttaacttt

SEQ ID NO: 151691 - DNA, 15 bp, Homo sapiens
ctctaagtttaactt

SEQ ID NO: 151692 - DNA, 15 bp, Homo sapiens
tctctaagtttaact

SEQ ID NO: 151693 - DNA, 15 bp, Homo sapiens
ttctctaagtttaac

SEQ ID NO: 151694 - DNA, 15 bp, Homo sapiens
tttctctaagtttaa

SEQ ID NO: 151695 - DNA, 15 bp, Homo sapiens
gtttctctaagttta

SEQ ID NO: 151696 - DNA, 15 bp, Homo sapiens
agtttctctaagttt

SEQ ID NO: 151697 - DNA, 15 bp, Homo sapiens
gagtttctctaagtt

SEQ ID NO: 151698 - DNA, 15 bp, Homo sapiens
ggagtttctctaagt

SEQ ID NO: 151699 - DNA, 15 bp, Homo sapiens
tggagtttctctaag

SEQ ID NO: 151700 - DNA, 15 bp, Homo sapiens
ttggagtttctctaa

SEQ ID NO: 151701 - DNA, 15 bp, Homo sapiens
tttggagtttctcta

SEQ ID NO: 151702 - DNA, 15 bp, Homo sapiens
atttggagtttctct

SEQ ID NO: 151703 - DNA, 15 bp, Homo sapiens
aatttggagtttctc

SEQ ID NO: 151704 - DNA, 15 bp, Homo sapiens
caatttggagtttct

SEQ ID NO: 151705 - DNA, 15 bp, Homo sapiens
gcaatttggagtttc

SEQ ID NO: 151706 - DNA, 15 bp, Homo sapiens
ggcaatttggagttt

SEQ ID NO: 151707 - DNA, 15 bp, Homo sapiens
gggcaatttggagtt

SEQ ID NO: 151708 - DNA, 15 bp, Homo sapiens
agggcaatttggagt

SEQ ID NO: 151709 - DNA, 15 bp, Homo sapiens
gagggcaatttggag

SEQ ID NO: 151710 - DNA, 15 bp, Homo sapiens
agagggcaatttgga

SEQ ID NO: 151711 - DNA, 15 bp, Homo sapiens
cagagggcaatttgg

SEQ ID NO: 151712 - DNA, 15 bp, Homo sapiens
tcagagggcaatttg

SEQ ID NO: 151713 - DNA, 15 bp, Homo sapiens
ttcagagggcaattt

SEQ ID NO: 151714 - DNA, 15 bp, Homo sapiens
gttcagagggcaatt

SEQ ID NO: 151715 - DNA, 15 bp, Homo sapiens
tgttcagagggcaat

SEQ ID NO: 151716 - DNA, 15 bp, Homo sapiens
ctgttcagagggcaa

SEQ ID NO: 151717 - DNA, 15 bp, Homo sapiens
tctgttcagagggca

SEQ ID NO: 151718 - DNA, 15 bp, Homo sapiens
gtctgttcagagggc

SEQ ID NO: 151719 - DNA, 15 bp, Homo sapiens
cgtctgttcagaggg

SEQ ID NO: 151720 - DNA, 15 bp, Homo sapiens
ccgtctgttcagagg

SEQ ID NO: 151721 - DNA, 15 bp, Homo sapiens
accgtctgttcagag

SEQ ID NO: 151722 - DNA, 15 bp, Homo sapiens
taccgtctgttcaga

SEQ ID NO: 151723 - DNA, 15 bp, Homo sapiens
ataccgtctgttcag

SEQ ID NO: 151724 - DNA, 15 bp, Homo sapiens
gataccgtctgttca

SEQ ID NO: 151725 - DNA, 15 bp, Homo sapiens
tgataccgtctgttc

SEQ ID NO: 151726 - DNA, 15 bp, Homo sapiens
ctgataccgtctgtt

SEQ ID NO: 151727 - DNA, 15 bp, Homo sapiens
actgataccgtctgt

SEQ ID NO: 151728 - DNA, 15 bp, Homo sapiens
aactgataccgtctg

SEQ ID NO: 151729 - DNA, 15 bp, Homo sapiens
aaactgataccgtct

SEQ ID NO: 151730 - DNA, 15 bp, Homo sapiens
caaactgataccgtc

SEQ ID NO: 151731 - DNA, 15 bp, Homo sapiens
tcaaactgataccgt

SEQ ID NO: 151732 - DNA, 15 bp, Homo sapiens
gtcaaactgataccg

SEQ ID NO: 151733 - DNA, 15 bp, Homo sapiens
tgtcaaactgatacc

SEQ ID NO: 151734 - DNA, 15 bp, Homo sapiens
atgtcaaactgatac

SEQ ID NO: 151735 - DNA, 15 bp, Homo sapiens
gatgtcaaactgata

SEQ ID NO: 151736 - DNA, 15 bp, Homo sapiens
tgatgtcaaactgat

SEQ ID NO: 151737 - DNA, 15 bp, Homo sapiens
atgatgtcaaactga

SEQ ID NO: 151738 - DNA, 15 bp, Homo sapiens
gatgatgtcaaactg

SEQ ID NO: 151739 - DNA, 15 bp, Homo sapiens
ggatgatgtcaaact

SEQ ID NO: 151740 - DNA, 15 bp, Homo sapiens
tggatgatgtcaaac

SEQ ID NO: 151741 - DNA, 15 bp, Homo sapiens
ttggatgatgtcaaa

SEQ ID NO: 151742 - DNA, 15 bp, Homo sapiens
attggatgatgtcaa

SEQ ID NO: 151743 - DNA, 15 bp, Homo sapiens
tattggatgatgtca

SEQ ID NO: 151744 - DNA, 15 bp, Homo sapiens
gtattggatgatgtc

SEQ ID NO: 151745 - DNA, 15 bp, Homo sapiens
ggtattggatgatgt

SEQ ID NO: 151746 - DNA, 15 bp, Homo sapiens
cggtattggatgatg

SEQ ID NO: 151747 - DNA, 15 bp, Homo sapiens
ccggtattggatgat

SEQ ID NO: 151748 - DNA, 15 bp, Homo sapiens
cccggtattggatga

SEQ ID NO: 151749 - DNA, 15 bp, Homo sapiens
tcccggtattggatg

SEQ ID NO: 151750 - DNA, 15 bp, Homo sapiens
atcccggtattggat

SEQ ID NO: 151751 - DNA, 15 bp, Homo sapiens
aatcccggtattgga

SEQ ID NO: 151752 - DNA, 15 bp, Homo sapiens
gaatcccggtattgg

SEQ ID NO: 151753 - DNA, 15 bp, Homo sapiens
ggaatcccggtattg

SEQ ID NO: 151754 - DNA, 15 bp, Homo sapiens
aggaatcccggtatt

SEQ ID NO: 151755 - DNA, 15 bp, Homo sapiens
gaggaatcccggtat

SEQ ID NO: 151756 - DNA, 15 bp, Homo sapiens
cgaggaatcccggta

SEQ ID NO: 151757 - DNA, 15 bp, Homo sapiens
ccgaggaatcccggt

SEQ ID NO: 151758 - DNA, 15 bp, Homo sapiens
cccgaggaatcccgg

SEQ ID NO: 151759 - DNA, 15 bp, Homo sapiens
ccccgaggaatcccg

SEQ ID NO: 151760 - DNA, 15 bp, Homo sapiens
tccccgaggaatccc

SEQ ID NO: 151761 - DNA, 15 bp, Homo sapiens
ctccccgaggaatcc

SEQ ID NO: 151762 - DNA, 15 bp, Homo sapiens
tctccccgaggaatc

SEQ ID NO: 151763 - DNA, 15 bp, Homo sapiens
ttctccccgaggaat

SEQ ID NO: 151764 - DNA, 15 bp, Homo sapiens
gttctccccgaggaa

SEQ ID NO: 151765 - DNA, 15 bp, Homo sapiens
agttctccccgagga

SEQ ID NO: 151766 - DNA, 15 bp, Homo sapiens
aagttctccccgagg

SEQ ID NO: 151767 - DNA, 15 bp, Homo sapiens
aaagttctccccgag

SEQ ID NO: 151768 - DNA, 15 bp, Homo sapiens
gaaagttctccccga

SEQ ID NO: 151769 - DNA, 15 bp, Homo sapiens
agaaagttctccccg

SEQ ID NO: 151770 - DNA, 15 bp, Homo sapiens
cagaaagttctcccc

SEQ ID NO: 151771 - DNA, 15 bp, Homo sapiens
ccagaaagttctccc

SEQ ID NO: 151772 - DNA, 15 bp, Homo sapiens
gccagaaagttctcc

SEQ ID NO: 151773 - DNA, 15 bp, Homo sapiens
ggccagaaagttctc

SEQ ID NO: 151774 - DNA, 15 bp, Homo sapiens
aggccagaaagttct

SEQ ID NO: 151775 - DNA, 15 bp, Homo sapiens
taggccagaaagttc

SEQ ID NO: 151776 - DNA, 15 bp, Homo sapiens
ctaggccagaaagtt

SEQ ID NO: 151777 - DNA, 15 bp, Homo sapiens
tctaggccagaaagt

SEQ ID NO: 151778 - DNA, 15 bp, Homo sapiens
ttctaggccagaaag

SEQ ID NO: 151779 - DNA, 15 bp, Homo sapiens
cttctaggccagaaa

SEQ ID NO: 151780 - DNA, 15 bp, Homo sapiens
ccttctaggccagaa

SEQ ID NO: 151781 - DNA, 15 bp, Homo sapiens
gccttctaggccaga

SEQ ID NO: 151782 - DNA, 15 bp, Homo sapiens
tgccttctaggccag

SEQ ID NO: 151783 - DNA, 15 bp, Homo sapiens
ctgccttctaggcca

SEQ ID NO: 151784 - DNA, 15 bp, Homo sapiens
actgccttctaggcc

SEQ ID NO: 151785 - DNA, 15 bp, Homo sapiens
tactgccttctaggc

SEQ ID NO: 151786 - DNA, 15 bp, Homo sapiens
ctactgccttctagg

SEQ ID NO: 151787 - DNA, 15 bp, Homo sapiens
tctactgccttctag

SEQ ID NO: 151788 - DNA, 15 bp, Homo sapiens
ctctactgccttcta

SEQ ID NO: 151789 - DNA, 15 bp, Homo sapiens
gctctactgccttct

SEQ ID NO: 151790 - DNA, 15 bp, Homo sapiens
ggctctactgccttc

SEQ ID NO: 151791 - DNA, 15 bp, Homo sapiens
tggctctactgcctt

SEQ ID NO: 151792 - DNA, 15 bp, Homo sapiens
ctggctctactgcct

SEQ ID NO: 151793 - DNA, 15 bp, Homo sapiens
cctggctctactgcc

SEQ ID NO: 151794 - DNA, 15 bp, Homo sapiens
tcctggctctactgc

SEQ ID NO: 151795 - DNA, 15 bp, Homo sapiens
gtcctggctctactg

SEQ ID NO: 151796 - DNA, 15 bp, Homo sapiens
agtcctggctctact

SEQ ID NO: 151797 - DNA, 15 bp, Homo sapiens
aagtcctggctctac

SEQ ID NO: 151798 - DNA, 15 bp, Homo sapiens
gaagtcctggctcta

SEQ ID NO: 151799 - DNA, 15 bp, Homo sapiens
tgaagtcctggctct

SEQ ID NO: 151800 - DNA, 15 bp, Homo sapiens
gtgaagtcctggctc

SEQ ID NO: 151801 - DNA, 15 bp, Homo sapiens
ggtgaagtcctggct

SEQ ID NO: 151802 - DNA, 15 bp, Homo sapiens
gggtgaagtcctggc

SEQ ID NO: 151803 - DNA, 15 bp, Homo sapiens
tgggtgaagtcctgg

SEQ ID NO: 151804 - DNA, 15 bp, Homo sapiens
ctgggtgaagtcctg

SEQ ID NO: 151805 - DNA, 15 bp, Homo sapiens
actgggtgaagtcct

SEQ ID NO: 151806 - DNA, 15 bp, Homo sapiens
gactgggtgaagtcc

SEQ ID NO: 151807 - DNA, 15 bp, Homo sapiens
tgactgggtgaagtc

SEQ ID NO: 151808 - DNA, 15 bp, Homo sapiens
ctgactgggtgaagt

SEQ ID NO: 151809 - DNA, 15 bp, Homo sapiens
actgactgggtgaag

SEQ ID NO: 151810 - DNA, 15 bp, Homo sapiens
cactgactgggtgaa

SEQ ID NO: 151811 - DNA, 15 bp, Homo sapiens
ccactgactgggtga

SEQ ID NO: 151812 - DNA, 15 bp, Homo sapiens
gccactgactgggtg

SEQ ID NO: 151813 - DNA, 15 bp, Homo sapiens
tgccactgactgggt

SEQ ID NO: 151814 - DNA, 15 bp, Homo sapiens
ctgccactgactggg

SEQ ID NO: 151815 - DNA, 15 bp, Homo sapiens
cctgccactgactgg

SEQ ID NO: 151816 - DNA, 15 bp, Homo sapiens
ccctgccactgactg

SEQ ID NO: 151817 - DNA, 15 bp, Homo sapiens
gccctgccactgact

SEQ ID NO: 151818 - DNA, 15 bp, Homo sapiens
ggccctgccactgac

SEQ ID NO: 151819 - DNA, 15 bp, Homo sapiens
tggccctgccactga

SEQ ID NO: 151820 - DNA, 15 bp, Homo sapiens
gtggccctgccactg

SEQ ID NO: 151821 - DNA, 15 bp, Homo sapiens
tgtggccctgccact

SEQ ID NO: 151822 - DNA, 15 bp, Homo sapiens
gtgtggccctgccac

SEQ ID NO: 151823 - DNA, 15 bp, Homo sapiens
cgtgtggccctgcca

SEQ ID NO: 151824 - DNA, 15 bp, Homo sapiens
acgtgtggccctgcc

SEQ ID NO: 151825 - DNA, 15 bp, Homo sapiens
cacgtgtggccctgc

SEQ ID NO: 151826 - DNA, 15 bp, Homo sapiens
ccacgtgtggccctg

SEQ ID NO: 151827 - DNA, 15 bp, Homo sapiens
cccacgtgtggccct

SEQ ID NO: 151828 - DNA, 15 bp, Homo sapiens
gcccacgtgtggccc

SEQ ID NO: 151829 - DNA, 15 bp, Homo sapiens
ggcccacgtgtggcc

SEQ ID NO: 151830 - DNA, 15 bp, Homo sapiens
aggcccacgtgtggc

SEQ ID NO: 151831 - DNA, 15 bp, Homo sapiens
aaggcccacgtgtgg

SEQ ID NO: 151832 - DNA, 15 bp, Homo sapiens
caaggcccacgtgtg

SEQ ID NO: 151833 - DNA, 15 bp, Homo sapiens
tcaaggcccacgtgt

SEQ ID NO: 151834 - DNA, 15 bp, Homo sapiens
atcaaggcccacgtg

SEQ ID NO: 151835 - DNA, 15 bp, Homo sapiens
tatcaaggcccacgt

SEQ ID NO: 151836 - DNA, 15 bp, Homo sapiens
gtatcaaggcccacg

SEQ ID NO: 151837 - DNA, 15 bp, Homo sapiens
tgtatcaaggcccac

SEQ ID NO: 151838 - DNA, 15 bp, Homo sapiens
ctgtatcaaggccca

SEQ ID NO: 151839 - DNA, 15 bp, Homo sapiens
tctgtatcaaggccc

SEQ ID NO: 151840 - DNA, 15 bp, Homo sapiens
ctctgtatcaaggcc

SEQ ID NO: 151841 - DNA, 15 bp, Homo sapiens
cctctgtatcaaggc

SEQ ID NO: 151842 - DNA, 15 bp, Homo sapiens
ccctctgtatcaagg

SEQ ID NO: 151843 - DNA, 15 bp, Homo sapiens
cccctctgtatcaag

SEQ ID NO: 151844 - DNA, 15 bp, Homo sapiens
ccccctctgtatcaa

SEQ ID NO: 151845 - DNA, 15 bp, Homo sapiens
tccccctctgtatca

SEQ ID NO: 151846 - DNA, 15 bp, Homo sapiens
ttccccctctgtatc

SEQ ID NO: 151847 - DNA, 15 bp, Homo sapiens
cttccccctctgtat

SEQ ID NO: 151848 - DNA, 15 bp, Homo sapiens
tcttccccctctgta

SEQ ID NO: 151849 - DNA, 15 bp, Homo sapiens
gtcttccccctctgt

SEQ ID NO: 151850 - DNA, 15 bp, Homo sapiens
agtcttccccctctg

SEQ ID NO: 151851 - DNA, 15 bp, Homo sapiens
aagtcttccccctct

SEQ ID NO: 151852 - DNA, 15 bp, Homo sapiens
caagtcttccccctc

SEQ ID NO: 151853 - DNA, 15 bp, Homo sapiens
tcaagtcttccccct

SEQ ID NO: 151854 - DNA, 15 bp, Homo sapiens
ctcaagtcttccccc

SEQ ID NO: 151855 - DNA, 15 bp, Homo sapiens
gctcaagtcttcccc

SEQ ID NO: 151856 - DNA, 15 bp, Homo sapiens
ggctcaagtcttccc

SEQ ID NO: 151857 - DNA, 15 bp, Homo sapiens
aggctcaagtcttcc

SEQ ID NO: 151858 - DNA, 15 bp, Homo sapiens
gaggctcaagtcttc

SEQ ID NO: 151859 - DNA, 15 bp, Homo sapiens
ggaggctcaagtctt

SEQ ID NO: 151860 - DNA, 15 bp, Homo sapiens
aggaggctcaagtct

SEQ ID NO: 151861 - DNA, 15 bp, Homo sapiens
gaggaggctcaagtc

SEQ ID NO: 151862 - DNA, 15 bp, Homo sapiens
cgaggaggctcaagt

SEQ ID NO: 151863 - DNA, 15 bp, Homo sapiens
tcgaggaggctcaag

SEQ ID NO: 151864 - DNA, 15 bp, Homo sapiens
gtcgaggaggctcaa

SEQ ID NO: 151865 - DNA, 15 bp, Homo sapiens
tgtcgaggaggctca

SEQ ID NO: 151866 - DNA, 15 bp, Homo sapiens
gtgtcgaggaggctc

SEQ ID NO: 151867 - DNA, 15 bp, Homo sapiens
ggtgtcgaggaggct

SEQ ID NO: 151868 - DNA, 15 bp, Homo sapiens
gggtgtcgaggaggc

SEQ ID NO: 151869 - DNA, 15 bp, Homo sapiens
agggtgtcgaggagg

SEQ ID NO: 151870 - DNA, 15 bp, Homo sapiens
tagggtgtcgaggag

SEQ ID NO: 151871 - DNA, 15 bp, Homo sapiens
gtagggtgtcgagga

SEQ ID NO: 151872 - DNA, 15 bp, Homo sapiens
tgtagggtgtcgagg

SEQ ID NO: 151873 - DNA, 15 bp, Homo sapiens
ctgtagggtgtcgag

SEQ ID NO: 151874 - DNA, 15 bp, Homo sapiens
cctgtagggtgtcga

SEQ ID NO: 151875 - DNA, 15 bp, Homo sapiens
ccctgtagggtgtcg

SEQ ID NO: 151876 - DNA, 15 bp, Homo sapiens
gccctgtagggtgtc

SEQ ID NO: 151877 - DNA, 15 bp, Homo sapiens
ggccctgtagggtgt

SEQ ID NO: 151878 - DNA, 15 bp, Homo sapiens
gggccctgtagggtg

SEQ ID NO: 151879 - DNA, 15 bp, Homo sapiens
tgggccctgtagggt

SEQ ID NO: 151880 - DNA, 15 bp, Homo sapiens
ctgggccctgtaggg

SEQ ID NO: 151881 - DNA, 15 bp, Homo sapiens
gctgggccctgtagg

SEQ ID NO: 151882 - DNA, 15 bp, Homo sapiens
ggctgggccctgtag

SEQ ID NO: 151883 - DNA, 15 bp, Homo sapiens
aggctgggccctgta

SEQ ID NO: 151884 - DNA, 15 bp, Homo sapiens
gaggctgggccctgt

SEQ ID NO: 151885 - DNA, 15 bp, Homo sapiens
ggaggctgggccctg

SEQ ID NO: 151886 - DNA, 15 bp, Homo sapiens
gggaggctgggccct

SEQ ID NO: 151887 - DNA, 15 bp, Homo sapiens
tgggaggctgggccc

SEQ ID NO: 151888 - DNA, 15 bp, Homo sapiens
ttgggaggctgggcc

SEQ ID NO: 151889 - DNA, 15 bp, Homo sapiens
gttgggaggctgggc

SEQ ID NO: 151890 - DNA, 15 bp, Homo sapiens
tgttgggaggctggg

SEQ ID NO: 151891 - DNA, 15 bp, Homo sapiens
atgttgggaggctgg

SEQ ID NO: 151892 - DNA, 15 bp, Homo sapiens
catgttgggaggctg

SEQ ID NO: 151893 - DNA, 15 bp, Homo sapiens
acatgttgggaggct

SEQ ID NO: 151894 - DNA, 15 bp, Homo sapiens
cacatgttgggaggc

SEQ ID NO: 151895 - DNA, 15 bp, Homo sapiens
tcacatgttgggagg

SEQ ID NO: 151896 - DNA, 15 bp, Homo sapiens
atcacatgttgggag

SEQ ID NO: 151897 - DNA, 15 bp, Homo sapiens
tatcacatgttggga

SEQ ID NO: 151898 - DNA, 15 bp, Homo sapiens
ttatcacatgttggg

SEQ ID NO: 151899 - DNA, 15 bp, Homo sapiens
cttatcacatgttgg

SEQ ID NO: 151900 - DNA, 15 bp, Homo sapiens
tcttatcacatgttg

SEQ ID NO: 151901 - DNA, 15 bp, Homo sapiens
ctcttatcacatgtt

SEQ ID NO: 151902 - DNA, 15 bp, Homo sapiens
tctcttatcacatgt

SEQ ID NO: 151903 - DNA, 15 bp, Homo sapiens
ttctcttatcacatg

SEQ ID NO: 151904 - DNA, 15 bp, Homo sapiens
tttctcttatcacat

SEQ ID NO: 151905 - DNA, 15 bp, Homo sapiens
gtttctcttatcaca

SEQ ID NO: 151906 - DNA, 15 bp, Homo sapiens
tgtttctcttatcac

SEQ ID NO: 151907 - DNA, 15 bp, Homo sapiens
ttgtttctcttatca

SEQ ID NO: 151908 - DNA, 15 bp, Homo sapiens
gttgtttctcttatc

SEQ ID NO: 151909 - DNA, 15 bp, Homo sapiens
tgttgtttctcttat

SEQ ID NO: 151910 - DNA, 15 bp, Homo sapiens
ctgttgtttctctta

SEQ ID NO: 151911 - DNA, 15 bp, Homo sapiens
gctgttgtttctctt

SEQ ID NO: 151912 - DNA, 15 bp, Homo sapiens
ggctgttgtttctct

SEQ ID NO: 151913 - DNA, 15 bp, Homo sapiens
tggctgttgtttctc

SEQ ID NO: 151914 - DNA, 15 bp, Homo sapiens
ttggctgttgtttct

SEQ ID NO: 151915 - DNA, 15 bp, Homo sapiens
gttggctgttgtttc

SEQ ID NO: 151916 - DNA, 15 bp, Homo sapiens
agttggctgttgttt

SEQ ID NO: 151917 - DNA, 15 bp, Homo sapiens
aagttggctgttgtt

SEQ ID NO: 151918 - DNA, 15 bp, Homo sapiens
caagttggctgttgt

SEQ ID NO: 151919 - DNA, 15 bp, Homo sapiens
acaagttggctgttg

SEQ ID NO: 151920 - DNA, 15 bp, Homo sapiens
tacaagttggctgtt

SEQ ID NO: 151921 - DNA, 15 bp, Homo sapiens
gtacaagttggctgt

SEQ ID NO: 151922 - DNA, 15 bp, Homo sapiens
ggtacaagttggctg

SEQ ID NO: 151923 - DNA, 15 bp, Homo sapiens
aggtacaagttggct

SEQ ID NO: 151924 - DNA, 15 bp, Homo sapiens
taggtacaagttggc

SEQ ID NO: 151925 - DNA, 15 bp, Homo sapiens
ctaggtacaagttgg

SEQ ID NO: 151926 - DNA, 15 bp, Homo sapiens
gctaggtacaagttg

SEQ ID NO: 151927 - DNA, 15 bp, Homo sapiens
agctaggtacaagtt

SEQ ID NO: 151928 - DNA, 15 bp, Homo sapiens
gagctaggtacaagt

SEQ ID NO: 151929 - DNA, 15 bp, Homo sapiens
agagctaggtacaag

SEQ ID NO: 151930 - DNA, 15 bp, Homo sapiens
gagagctaggtacaa

SEQ ID NO: 151931 - DNA, 15 bp, Homo sapiens
ggagagctaggtaca

SEQ ID NO: 151932 - DNA, 15 bp, Homo sapiens
aggagagctaggtac

SEQ ID NO: 151933 - DNA, 15 bp, Homo sapiens
aaggagagctaggta

SEQ ID NO: 151934 - DNA, 15 bp, Homo sapiens
taaggagagctaggt

SEQ ID NO: 151935 - DNA, 15 bp, Homo sapiens
ataaggagagctagg

SEQ ID NO: 151936 - DNA, 15 bp, Homo sapiens
aataaggagagctag

SEQ ID NO: 151937 - DNA, 15 bp, Homo sapiens
gaataaggagagcta

SEQ ID NO: 151938 - DNA, 15 bp, Homo sapiens
agaataaggagagct

SEQ ID NO: 151939 - DNA, 15 bp, Homo sapiens
gagaataaggagagc

SEQ ID NO: 151940 - DNA, 15 bp, Homo sapiens
ggagaataaggagag

SEQ ID NO: 151941 - DNA, 15 bp, Homo sapiens
tggagaataaggaga

SEQ ID NO: 151942 - DNA, 15 bp, Homo sapiens
ttggagaataaggag

SEQ ID NO: 151943 - DNA, 15 bp, Homo sapiens
cttggagaataagga

SEQ ID NO: 151944 - DNA, 15 bp, Homo sapiens
ccttggagaataagg

SEQ ID NO: 151945 - DNA, 15 bp, Homo sapiens
cccttggagaataag

SEQ ID NO: 151946 - DNA, 15 bp, Homo sapiens
gcccttggagaataa

SEQ ID NO: 151947 - DNA, 15 bp, Homo sapiens
agcccttggagaata

SEQ ID NO: 151948 - DNA, 15 bp, Homo sapiens
cagcccttggagaat

SEQ ID NO: 151949 - DNA, 15 bp, Homo sapiens
ccagcccttggagaa

SEQ ID NO: 151950 - DNA, 15 bp, Homo sapiens
cccagcccttggaga

SEQ ID NO: 151951 - DNA, 15 bp, Homo sapiens
gcccagcccttggag

SEQ ID NO: 151952 - DNA, 15 bp, Homo sapiens
ggcccagcccttgga

SEQ ID NO: 151953 - DNA, 15 bp, Homo sapiens
tggcccagcccttgg

SEQ ID NO: 151954 - DNA, 15 bp, Homo sapiens
ctggcccagcccttg

SEQ ID NO: 151955 - DNA, 15 bp, Homo sapiens
actggcccagccctt

SEQ ID NO: 151956 - DNA, 15 bp, Homo sapiens
aactggcccagccct

SEQ ID NO: 151957 - DNA, 15 bp, Homo sapiens
gaactggcccagccc

SEQ ID NO: 151958 - DNA, 15 bp, Homo sapiens
agaactggcccagcc

SEQ ID NO: 151959 - DNA, 15 bp, Homo sapiens
gagaactggcccagc

SEQ ID NO: 151960 - DNA, 15 bp, Homo sapiens
ggagaactggcccag

SEQ ID NO: 151961 - DNA, 15 bp, Homo sapiens
gggagaactggccca

SEQ ID NO: 151962 - DNA, 15 bp, Homo sapiens
ggggagaactggccc

SEQ ID NO: 151963 - DNA, 15 bp, Homo sapiens
tggggagaactggcc

SEQ ID NO: 151964 - DNA, 15 bp, Homo sapiens
gtggggagaactggc

SEQ ID NO: 151965 - DNA, 15 bp, Homo sapiens
tgtggggagaactgg

SEQ ID NO: 151966 - DNA, 15 bp, Homo sapiens
ctgtggggagaactg

SEQ ID NO: 151967 - DNA, 15 bp, Homo sapiens
gctgtggggagaact

SEQ ID NO: 151968 - DNA, 15 bp, Homo sapiens
ggctgtggggagaac

SEQ ID NO: 151969 - DNA, 15 bp, Homo sapiens
gggctgtggggagaa

SEQ ID NO: 151970 - DNA, 15 bp, Homo sapiens
agggctgtggggaga

SEQ ID NO: 151971 - DNA, 15 bp, Homo sapiens
cagggctgtggggag

SEQ ID NO: 151972 - DNA, 15 bp, Homo sapiens
gcagggctgtgggga

SEQ ID NO: 151973 - DNA, 15 bp, Homo sapiens
tgcagggctgtgggg

SEQ ID NO: 151974 - DNA, 15 bp, Homo sapiens
ttgcagggctgtggg

SEQ ID NO: 151975 - DNA, 15 bp, Homo sapiens
cttgcagggctgtgg

SEQ ID NO: 151976 - DNA, 15 bp, Homo sapiens
ccttgcagggctgtg

SEQ ID NO: 151977 - DNA, 15 bp, Homo sapiens
cccttgcagggctgt

SEQ ID NO: 151978 - DNA, 15 bp, Homo sapiens
tcccttgcagggctg

SEQ ID NO: 151979 - DNA, 15 bp, Homo sapiens
ctcccttgcagggct

SEQ ID NO: 151980 - DNA, 15 bp, Homo sapiens
cctcccttgcagggc

SEQ ID NO: 151981 - DNA, 15 bp, Homo sapiens
tcctcccttgcaggg

SEQ ID NO: 151982 - DNA, 15 bp, Homo sapiens
atcctcccttgcagg

SEQ ID NO: 151983 - DNA, 15 bp, Homo sapiens
gatcctcccttgcag

SEQ ID NO: 151984 - DNA, 15 bp, Homo sapiens
tgatcctcccttgca

SEQ ID NO: 151985 - DNA, 15 bp, Homo sapiens
gtgatcctcccttgc

SEQ ID NO: 151986 - DNA, 15 bp, Homo sapiens
agtgatcctcccttg

SEQ ID NO: 151987 - DNA, 15 bp, Homo sapiens
gagtgatcctccctt

SEQ ID NO: 151988 - DNA, 15 bp, Homo sapiens
tgagtgatcctccct

SEQ ID NO: 151989 - DNA, 15 bp, Homo sapiens
ttgagtgatcctccc

SEQ ID NO: 151990 - DNA, 15 bp, Homo sapiens
cttgagtgatcctcc

SEQ ID NO: 151991 - DNA, 15 bp, Homo sapiens
ccttgagtgatcctc

SEQ ID NO: 151992 - DNA, 15 bp, Homo sapiens
cccttgagtgatcct

SEQ ID NO: 151993 - DNA, 15 bp, Homo sapiens
gcccttgagtgatcc

SEQ ID NO: 151994 - DNA, 15 bp, Homo sapiens
ggcccttgagtgatc

SEQ ID NO: 151995 - DNA, 15 bp, Homo sapiens
gggcccttgagtgat

SEQ ID NO: 151996 - DNA, 15 bp, Homo sapiens
ggggcccttgagtga

SEQ ID NO: 151997 - DNA, 15 bp, Homo sapiens
tggggcccttgagtg

SEQ ID NO: 151998 - DNA, 15 bp, Homo sapiens
ttggggcccttgagt

SEQ ID NO: 151999 - DNA, 15 bp, Homo sapiens
gttggggcccttgag

SEQ ID NO: 152000 - DNA, 15 bp, Homo sapiens
agttggggcccttga

SEQ ID NO: 152001 - DNA, 15 bp, Homo sapiens
cagttggggcccttg

SEQ ID NO: 152002 - DNA, 15 bp, Homo sapiens
acagttggggccctt

SEQ ID NO: 152003 - DNA, 15 bp, Homo sapiens
gacagttggggccct

SEQ ID NO: 152004 - DNA, 15 bp, Homo sapiens
agacagttggggccc

SEQ ID NO: 152005 - DNA, 15 bp, Homo sapiens
cagacagttggggcc

SEQ ID NO: 152006 - DNA, 15 bp, Homo sapiens
tcagacagttggggc

SEQ ID NO: 152007 - DNA, 15 bp, Homo sapiens
gtcagacagttgggg

SEQ ID NO: 152008 - DNA, 15 bp, Homo sapiens
tgtcagacagttggg

SEQ ID NO: 152009 - DNA, 15 bp, Homo sapiens
ttgtcagacagttgg

SEQ ID NO: 152010 - DNA, 15 bp, Homo sapiens
attgtcagacagttg

SEQ ID NO: 152011 - DNA, 15 bp, Homo sapiens
tattgtcagacagtt

SEQ ID NO: 152012 - DNA, 15 bp, Homo sapiens
gtattgtcagacagt

SEQ ID NO: 152013 - DNA, 15 bp, Homo sapiens
tgtattgtcagacag

SEQ ID NO: 152014 - DNA, 15 bp, Homo sapiens
ctgtattgtcagaca

SEQ ID NO: 152015 - DNA, 15 bp, Homo sapiens
gctgtattgtcagac

SEQ ID NO: 152016 - DNA, 15 bp, Homo sapiens
ggctgtattgtcaga

SEQ ID NO: 152017 - DNA, 15 bp, Homo sapiens
tggctgtattgtcag

SEQ ID NO: 152018 - DNA, 15 bp, Homo sapiens
gtggctgtattgtca

SEQ ID NO: 152019 - DNA, 15 bp, Homo sapiens
tgtggctgtattgtc

SEQ ID NO: 152020 - DNA, 15 bp, Homo sapiens
gtgtggctgtattgt

SEQ ID NO: 152021 - DNA, 15 bp, Homo sapiens
agtgtggctgtattg

SEQ ID NO: 152022 - DNA, 15 bp, Homo sapiens
gagtgtggctgtatt

SEQ ID NO: 152023 - DNA, 15 bp, Homo sapiens
agagtgtggctgtat

SEQ ID NO: 152024 - DNA, 15 bp, Homo sapiens
cagagtgtggctgta

SEQ ID NO: 152025 - DNA, 15 bp, Homo sapiens
tcagagtgtggctgt

SEQ ID NO: 152026 - DNA, 15 bp, Homo sapiens
atcagagtgtggctg

SEQ ID NO: 152027 - DNA, 15 bp, Homo sapiens
gatcagagtgtggct

SEQ ID NO: 152028 - DNA, 15 bp, Homo sapiens
tgatcagagtgtggc

SEQ ID NO: 152029 - DNA, 15 bp, Homo sapiens
ctgatcagagtgtgg

SEQ ID NO: 152030 - DNA, 15 bp, Homo sapiens
gctgatcagagtgtg

SEQ ID NO: 152031 - DNA, 15 bp, Homo sapiens
ggctgatcagagtgt

SEQ ID NO: 152032 - DNA, 15 bp, Homo sapiens
tggctgatcagagtg

SEQ ID NO: 152033 - DNA, 15 bp, Homo sapiens
gtggctgatcagagt

SEQ ID NO: 152034 - DNA, 15 bp, Homo sapiens
ggtggctgatcagag

SEQ ID NO: 152035 - DNA, 15 bp, Homo sapiens
aggtggctgatcaga

SEQ ID NO: 152036 - DNA, 15 bp, Homo sapiens
caggtggctgatcag

SEQ ID NO: 152037 - DNA, 15 bp, Homo sapiens
ccaggtggctgatca

SEQ ID NO: 152038 - DNA, 15 bp, Homo sapiens
cccaggtggctgatc

SEQ ID NO: 152039 - DNA, 15 bp, Homo sapiens
gcccaggtggctgat

SEQ ID NO: 152040 - DNA, 15 bp, Homo sapiens
tgcccaggtggctga

SEQ ID NO: 152041 - DNA, 15 bp, Homo sapiens
atgcccaggtggctg

SEQ ID NO: 152042 - DNA, 15 bp, Homo sapiens
tatgcccaggtggct

SEQ ID NO: 152043 - DNA, 15 bp, Homo sapiens
ctatgcccaggtggc

SEQ ID NO: 152044 - DNA, 15 bp, Homo sapiens
cctatgcccaggtgg

SEQ ID NO: 152045 - DNA, 15 bp, Homo sapiens
gcctatgcccaggtg

SEQ ID NO: 152046 - DNA, 15 bp, Homo sapiens
agcctatgcccaggt

SEQ ID NO: 152047 - DNA, 15 bp, Homo sapiens
gagcctatgcccagg

SEQ ID NO: 152048 - DNA, 15 bp, Homo sapiens
ggagcctatgcccag

SEQ ID NO: 152049 - DNA, 15 bp, Homo sapiens
tggagcctatgccca

SEQ ID NO: 152050 - DNA, 15 bp, Homo sapiens
atggagcctatgccc

SEQ ID NO: 152051 - DNA, 15 bp, Homo sapiens
catggagcctatgcc

SEQ ID NO: 152052 - DNA, 15 bp, Homo sapiens
gcatggagcctatgc

SEQ ID NO: 152053 - DNA, 15 bp, Homo sapiens
ggcatggagcctatg

SEQ ID NO: 152054 - DNA, 15 bp, Homo sapiens
tggcatggagcctat

SEQ ID NO: 152055 - DNA, 15 bp, Homo sapiens
atggcatggagccta

SEQ ID NO: 152056 - DNA, 15 bp, Homo sapiens
aatggcatggagcct

SEQ ID NO: 152057 - DNA, 15 bp, Homo sapiens
caatggcatggagcc

SEQ ID NO: 152058 - DNA, 15 bp, Homo sapiens
acaatggcatggagc

SEQ ID NO: 152059 - DNA, 15 bp, Homo sapiens
gacaatggcatggag

SEQ ID NO: 152060 - DNA, 15 bp, Homo sapiens
ggacaatggcatgga

SEQ ID NO: 152061 - DNA, 15 bp, Homo sapiens
aggacaatggcatgg

SEQ ID NO: 152062 - DNA, 15 bp, Homo sapiens
gaggacaatggcatg

SEQ ID NO: 152063 - DNA, 15 bp, Homo sapiens
ggaggacaatggcat

SEQ ID NO: 152064 - DNA, 15 bp, Homo sapiens
cggaggacaatggca

SEQ ID NO: 152065 - DNA, 15 bp, Homo sapiens
gcggaggacaatggc

SEQ ID NO: 152066 - DNA, 15 bp, Homo sapiens
ggcggaggacaatgg

SEQ ID NO: 152067 - DNA, 15 bp, Homo sapiens
tggcggaggacaatg

SEQ ID NO: 152068 - DNA, 15 bp, Homo sapiens
ttggcggaggacaat

SEQ ID NO: 152069 - DNA, 15 bp, Homo sapiens
cttggcggaggacaa

SEQ ID NO: 152070 - DNA, 15 bp, Homo sapiens
tcttggcggaggaca

SEQ ID NO: 152071 - DNA, 15 bp, Homo sapiens
gtcttggcggaggac

SEQ ID NO: 152072 - DNA, 15 bp, Homo sapiens
ggtcttggcggagga

SEQ ID NO: 152073 - DNA, 15 bp, Homo sapiens
aggtcttggcggagg

SEQ ID NO: 152074 - DNA, 15 bp, Homo sapiens
gaggtcttggcggag

SEQ ID NO: 152075 - DNA, 15 bp, Homo sapiens
tgaggtcttggcgga

SEQ ID NO: 152076 - DNA, 15 bp, Homo sapiens
ctgaggtcttggcgg

SEQ ID NO: 152077 - DNA, 15 bp, Homo sapiens
tctgaggtcttggcg

SEQ ID NO: 152078 - DNA, 15 bp, Homo sapiens
gtctgaggtcttggc

SEQ ID NO: 152079 - DNA, 15 bp, Homo sapiens
agtctgaggtcttgg

SEQ ID NO: 152080 - DNA, 15 bp, Homo sapiens
cagtctgaggtcttg

SEQ ID NO: 152081 - DNA, 15 bp, Homo sapiens
tcagtctgaggtctt

SEQ ID NO: 152082 - DNA, 15 bp, Homo sapiens
ttcagtctgaggtct

SEQ ID NO: 152083 - DNA, 15 bp, Homo sapiens
tttcagtctgaggtc

SEQ ID NO: 152084 - DNA, 15 bp, Homo sapiens
atttcagtctgaggt

SEQ ID NO: 152085 - DNA, 15 bp, Homo sapiens
catttcagtctgagg

SEQ ID NO: 152086 - DNA, 15 bp, Homo sapiens
acatttcagtctgag

SEQ ID NO: 152087 - DNA, 15 bp, Homo sapiens
aacatttcagtctga

SEQ ID NO: 152088 - DNA, 15 bp, Homo sapiens
caacatttcagtctg

SEQ ID NO: 152089 - DNA, 15 bp, Homo sapiens
ccaacatttcagtct

SEQ ID NO: 152090 - DNA, 15 bp, Homo sapiens
gccaacatttcagtc

SEQ ID NO: 152091 - DNA, 15 bp, Homo sapiens
agccaacatttcagt

SEQ ID NO: 152092 - DNA, 15 bp, Homo sapiens
gagccaacatttcag

SEQ ID NO: 152093 - DNA, 15 bp, Homo sapiens
ggagccaacatttca

SEQ ID NO: 152094 - DNA, 15 bp, Homo sapiens
aggagccaacatttc

SEQ ID NO: 152095 - DNA, 15 bp, Homo sapiens
gaggagccaacattt

SEQ ID NO: 152096 - DNA, 15 bp, Homo sapiens
ggaggagccaacatt

SEQ ID NO: 152097 - DNA, 15 bp, Homo sapiens
gggaggagccaacat

SEQ ID NO: 152098 - DNA, 15 bp, Homo sapiens
tgggaggagccaaca

SEQ ID NO: 152099 - DNA, 15 bp, Homo sapiens
atgggaggagccaac

SEQ ID NO: 152100 - DNA, 15 bp, Homo sapiens
catgggaggagccaa

SEQ ID NO: 152101 - DNA, 15 bp, Homo sapiens
tcatgggaggagcca

SEQ ID NO: 152102 - DNA, 15 bp, Homo sapiens
ttcatgggaggagcc

SEQ ID NO: 152103 - DNA, 15 bp, Homo sapiens
cttcatgggaggagc

SEQ ID NO: 152104 - DNA, 15 bp, Homo sapiens
tcttcatgggaggag

SEQ ID NO: 152105 - DNA, 15 bp, Homo sapiens
ttcttcatgggagga

SEQ ID NO: 152106 - DNA, 15 bp, Homo sapiens
gttcttcatgggagg

SEQ ID NO: 152107 - DNA, 15 bp, Homo sapiens
ggttcttcatgggag

SEQ ID NO: 152108 - DNA, 15 bp, Homo sapiens
aggttcttcatggga

SEQ ID NO: 152109 - DNA, 15 bp, Homo sapiens
caggttcttcatggg

SEQ ID NO: 152110 - DNA, 15 bp, Homo sapiens
ccaggttcttcatgg

SEQ ID NO: 152111 - DNA, 15 bp, Homo sapiens
cccaggttcttcatg

SEQ ID NO: 152112 - DNA, 15 bp, Homo sapiens
ccccaggttcttcat

SEQ ID NO: 152113 - DNA, 15 bp, Homo sapiens
gccccaggttcttca

SEQ ID NO: 152114 - DNA, 15 bp, Homo sapiens
ggccccaggttcttc

SEQ ID NO: 152115 - DNA, 15 bp, Homo sapiens
tggccccaggttctt

SEQ ID NO: 152116 - DNA, 15 bp, Homo sapiens
ttggccccaggttct

SEQ ID NO: 152117 - DNA, 15 bp, Homo sapiens
tttggccccaggttc

SEQ ID NO: 152118 - DNA, 15 bp, Homo sapiens
ctttggccccaggtt

SEQ ID NO: 152119 - DNA, 15 bp, Homo sapiens
cctttggccccaggt

SEQ ID NO: 152120 - DNA, 15 bp, Homo sapiens
tcctttggccccagg

SEQ ID NO: 152121 - DNA, 15 bp, Homo sapiens
gtcctttggccccag

SEQ ID NO: 152122 - DNA, 15 bp, Homo sapiens
ggtcctttggcccca

SEQ ID NO: 152123 - DNA, 15 bp, Homo sapiens
tggtcctttggcccc

SEQ ID NO: 152124 - DNA, 15 bp, Homo sapiens
ctggtcctttggccc

SEQ ID NO: 152125 - DNA, 15 bp, Homo sapiens
tctggtcctttggcc

SEQ ID NO: 152126 - DNA, 15 bp, Homo sapiens
ctctggtcctttggc

SEQ ID NO: 152127 - DNA, 15 bp, Homo sapiens
actctggtcctttgg

SEQ ID NO: 152128 - DNA, 15 bp, Homo sapiens
gactctggtcctttg

SEQ ID NO: 152129 - DNA, 15 bp, Homo sapiens
ggactctggtccttt

SEQ ID NO: 152130 - DNA, 15 bp, Homo sapiens
tggactctggtcctt

SEQ ID NO: 152131 - DNA, 15 bp, Homo sapiens
ctggactctggtcct

SEQ ID NO: 152132 - DNA, 15 bp, Homo sapiens
cctggactctggtcc

SEQ ID NO: 152133 - DNA, 15 bp, Homo sapiens
acctggactctggtc

SEQ ID NO: 152134 - DNA, 15 bp, Homo sapiens
gacctggactctggt

SEQ ID NO: 152135 - DNA, 15 bp, Homo sapiens
ggacctggactctgg

SEQ ID NO: 152136 - DNA, 15 bp, Homo sapiens
cggacctggactctg

SEQ ID NO: 152137 - DNA, 15 bp, Homo sapiens
acggacctggactct

SEQ ID NO: 152138 - DNA, 15 bp, Homo sapiens
cacggacctggactc

SEQ ID NO: 152139 - DNA, 15 bp, Homo sapiens
ccacggacctggact

SEQ ID NO: 152140 - DNA, 15 bp, Homo sapiens
gccacggacctggac

SEQ ID NO: 152141 - DNA, 15 bp, Homo sapiens
agccacggacctgga

SEQ ID NO: 152142 - DNA, 15 bp, Homo sapiens
cagccacggacctgg

SEQ ID NO: 152143 - DNA, 15 bp, Homo sapiens
gcagccacggacctg

SEQ ID NO: 152144 - DNA, 15 bp, Homo sapiens
ggcagccacggacct

SEQ ID NO: 152145 - DNA, 15 bp, Homo sapiens
tggcagccacggacc

SEQ ID NO: 152146 - DNA, 15 bp, Homo sapiens
ctggcagccacggac

SEQ ID NO: 152147 - DNA, 15 bp, Homo sapiens
cctggcagccacgga

SEQ ID NO: 152148 - DNA, 15 bp, Homo sapiens
tcctggcagccacgg

SEQ ID NO: 152149 - DNA, 15 bp, Homo sapiens
atcctggcagccacg

SEQ ID NO: 152150 - DNA, 15 bp, Homo sapiens
catcctggcagccac

SEQ ID NO: 152151 - DNA, 15 bp, Homo sapiens
ccatcctggcagcca

SEQ ID NO: 152152 - DNA, 15 bp, Homo sapiens
cccatcctggcagcc

SEQ ID NO: 152153 - DNA, 15 bp, Homo sapiens
gcccatcctggcagc

SEQ ID NO: 152154 - DNA, 15 bp, Homo sapiens
ggcccatcctggcag

SEQ ID NO: 152155 - DNA, 15 bp, Homo sapiens
tggcccatcctggca

SEQ ID NO: 152156 - DNA, 15 bp, Homo sapiens
gtggcccatcctggc

SEQ ID NO: 152157 - DNA, 15 bp, Homo sapiens
agtggcccatcctgg

SEQ ID NO: 152158 - DNA, 15 bp, Homo sapiens
aagtggcccatcctg

SEQ ID NO: 152159 - DNA, 15 bp, Homo sapiens
caagtggcccatcct

SEQ ID NO: 152160 - DNA, 15 bp, Homo sapiens
ccaagtggcccatcc

SEQ ID NO: 152161 - DNA, 15 bp, Homo sapiens
tccaagtggcccatc

SEQ ID NO: 152162 - DNA, 15 bp, Homo sapiens
ctccaagtggcccat

SEQ ID NO: 152163 - DNA, 15 bp, Homo sapiens
tctccaagtggccca

SEQ ID NO: 152164 - DNA, 15 bp, Homo sapiens
ctctccaagtggccc

SEQ ID NO: 152165 - DNA, 15 bp, Homo sapiens
tctctccaagtggcc

SEQ ID NO: 152166 - DNA, 15 bp, Homo sapiens
ctctctccaagtggc

SEQ ID NO: 152167 - DNA, 15 bp, Homo sapiens
cctctctccaagtgg

SEQ ID NO: 152168 - DNA, 15 bp, Homo sapiens
gcctctctccaagtg

SEQ ID NO: 152169 - DNA, 15 bp, Homo sapiens
tgcctctctccaagt

SEQ ID NO: 152170 - DNA, 15 bp, Homo sapiens
gtgcctctctccaag

SEQ ID NO: 152171 - DNA, 15 bp, Homo sapiens
tgtgcctctctccaa

SEQ ID NO: 152172 - DNA, 15 bp, Homo sapiens
ttgtgcctctctcca

SEQ ID NO: 152173 - DNA, 15 bp, Homo sapiens
cttgtgcctctctcc

SEQ ID NO: 152174 - DNA, 15 bp, Homo sapiens
ccttgtgcctctctc

SEQ ID NO: 152175 - DNA, 15 bp, Homo sapiens
cccttgtgcctctct

SEQ ID NO: 152176 - DNA, 15 bp, Homo sapiens
acccttgtgcctctc

SEQ ID NO: 152177 - DNA, 15 bp, Homo sapiens
cacccttgtgcctct

SEQ ID NO: 152178 - DNA, 15 bp, Homo sapiens
ccacccttgtgcctc

SEQ ID NO: 152179 - DNA, 15 bp, Homo sapiens
accacccttgtgcct

SEQ ID NO: 152180 - DNA, 15 bp, Homo sapiens
caccacccttgtgcc

SEQ ID NO: 152181 - DNA, 15 bp, Homo sapiens
gcaccacccttgtgc

SEQ ID NO: 152182 - DNA, 15 bp, Homo sapiens
ggcaccacccttgtg

SEQ ID NO: 152183 - DNA, 15 bp, Homo sapiens
tggcaccacccttgt

SEQ ID NO: 152184 - DNA, 15 bp, Homo sapiens
ctggcaccacccttg

SEQ ID NO: 152185 - DNA, 15 bp, Homo sapiens
cctggcaccaccctt

SEQ ID NO: 152186 - DNA, 15 bp, Homo sapiens
gcctggcaccaccct

SEQ ID NO: 152187 - DNA, 15 bp, Homo sapiens
tgcctggcaccaccc

SEQ ID NO: 152188 - DNA, 15 bp, Homo sapiens
ctgcctggcaccacc

SEQ ID NO: 152189 - DNA, 15 bp, Homo sapiens
cctgcctggcaccac

SEQ ID NO: 152190 - DNA, 15 bp, Homo sapiens
acctgcctggcacca

SEQ ID NO: 152191 - DNA, 15 bp, Homo sapiens
cacctgcctggcacc

SEQ ID NO: 152192 - DNA, 15 bp, Homo sapiens
acacctgcctggcac

SEQ ID NO: 152193 - DNA, 15 bp, Homo sapiens
cacacctgcctggca

SEQ ID NO: 152194 - DNA, 15 bp, Homo sapiens
tcacacctgcctggc

SEQ ID NO: 152195 - DNA, 15 bp, Homo sapiens
ctcacacctgcctgg

SEQ ID NO: 152196 - DNA, 15 bp, Homo sapiens
cctcacacctgcctg

SEQ ID NO: 152197 - DNA, 15 bp, Homo sapiens
ccctcacacctgcct

SEQ ID NO: 152198 - DNA, 15 bp, Homo sapiens
gccctcacacctgcc

SEQ ID NO: 152199 - DNA, 15 bp, Homo sapiens
agccctcacacctgc

SEQ ID NO: 152200 - DNA, 15 bp, Homo sapiens
cagccctcacacctg

SEQ ID NO: 152201 - DNA, 15 bp, Homo sapiens
ccagccctcacacct

SEQ ID NO: 152202 - DNA, 15 bp, Homo sapiens
tccagccctcacacc

SEQ ID NO: 152203 - DNA, 15 bp, Homo sapiens
gtccagccctcacac

SEQ ID NO: 152204 - DNA, 15 bp, Homo sapiens
ggtccagccctcaca

SEQ ID NO: 152205 - DNA, 15 bp, Homo sapiens
aggtccagccctcac

SEQ ID NO: 152206 - DNA, 15 bp, Homo sapiens
aaggtccagccctca

SEQ ID NO: 152207 - DNA, 15 bp, Homo sapiens
aaaggtccagccctc

SEQ ID NO: 152208 - DNA, 15 bp, Homo sapiens
caaaggtccagccct

SEQ ID NO: 152209 - DNA, 15 bp, Homo sapiens
gcaaaggtccagccc

SEQ ID NO: 152210 - DNA, 15 bp, Homo sapiens
tgcaaaggtccagcc

SEQ ID NO: 152211 - DNA, 15 bp, Homo sapiens
ttgcaaaggtccagc

SEQ ID NO: 152212 - DNA, 15 bp, Homo sapiens
cttgcaaaggtccag

SEQ ID NO: 152213 - DNA, 15 bp, Homo sapiens
tcttgcaaaggtcca

SEQ ID NO: 152214 - DNA, 15 bp, Homo sapiens
ctcttgcaaaggtcc

SEQ ID NO: 152215 - DNA, 15 bp, Homo sapiens
gctcttgcaaaggtc

SEQ ID NO: 152216 - DNA, 15 bp, Homo sapiens
tgctcttgcaaaggt

SEQ ID NO: 152217 - DNA, 15 bp, Homo sapiens
ctgctcttgcaaagg

SEQ ID NO: 152218 - DNA, 15 bp, Homo sapiens
gctgctcttgcaaag

SEQ ID NO: 152219 - DNA, 15 bp, Homo sapiens
tgctgctcttgcaaa

SEQ ID NO: 152220 - DNA, 15 bp, Homo sapiens
atgctgctcttgcaa

SEQ ID NO: 152221 - DNA, 15 bp, Homo sapiens
gatgctgctcttgca

SEQ ID NO: 152222 - DNA, 15 bp, Homo sapiens
tgatgctgctcttgc

SEQ ID NO: 152223 - DNA, 15 bp, Homo sapiens
gtgatgctgctcttg

SEQ ID NO: 152224 - DNA, 15 bp, Homo sapiens
agtgatgctgctctt

SEQ ID NO: 152225 - DNA, 15 bp, Homo sapiens
aagtgatgctgctct

SEQ ID NO: 152226 - DNA, 15 bp, Homo sapiens
aaagtgatgctgctc

SEQ ID NO: 152227 - DNA, 15 bp, Homo sapiens
aaaagtgatgctgct

SEQ ID NO: 152228 - DNA, 15 bp, Homo sapiens
caaaagtgatgctgc

SEQ ID NO: 152229 - DNA, 15 bp, Homo sapiens
acaaaagtgatgctg

SEQ ID NO: 152230 - DNA, 15 bp, Homo sapiens
aacaaaagtgatgct

SEQ ID NO: 152231 - DNA, 15 bp, Homo sapiens
caacaaaagtgatgc

SEQ ID NO: 152232 - DNA, 15 bp, Homo sapiens
tcaacaaaagtgatg

SEQ ID NO: 152233 - DNA, 15 bp, Homo sapiens
ctcaacaaaagtgat

SEQ ID NO: 152234 - DNA, 15 bp, Homo sapiens
tctcaacaaaagtga

SEQ ID NO: 152235 - DNA, 15 bp, Homo sapiens
ctctcaacaaaagtg

SEQ ID NO: 152236 - DNA, 15 bp, Homo sapiens
gctctcaacaaaagt

SEQ ID NO: 152237 - DNA, 15 bp, Homo sapiens
ggctctcaacaaaag

SEQ ID NO: 152238 - DNA, 15 bp, Homo sapiens
gggctctcaacaaaa

SEQ ID NO: 152239 - DNA, 15 bp, Homo sapiens
tgggctctcaacaaa

SEQ ID NO: 152240 - DNA, 15 bp, Homo sapiens
gtgggctctcaacaa

SEQ ID NO: 152241 - DNA, 15 bp, Homo sapiens
tgtgggctctcaaca

SEQ ID NO: 152242 - DNA, 15 bp, Homo sapiens
ctgtgggctctcaac

SEQ ID NO: 152243 - DNA, 15 bp, Homo sapiens
cctgtgggctctcaa

SEQ ID NO: 152244 - DNA, 15 bp, Homo sapiens
acctgtgggctctca

SEQ ID NO: 152245 - DNA, 15 bp, Homo sapiens
tacctgtgggctctc

SEQ ID NO: 152246 - DNA, 15 bp, Homo sapiens
atacctgtgggctct

SEQ ID NO: 152247 - DNA, 15 bp, Homo sapiens
gatacctgtgggctc

SEQ ID NO: 152248 - DNA, 15 bp, Homo sapiens
agatacctgtgggct

SEQ ID NO: 152249 - DNA, 15 bp, Homo sapiens
aagatacctgtgggc

SEQ ID NO: 152250 - DNA, 15 bp, Homo sapiens
taagatacctgtggg

SEQ ID NO: 152251 - DNA, 15 bp, Homo sapiens
ataagatacctgtgg

SEQ ID NO: 152252 - DNA, 15 bp, Homo sapiens
tataagatacctgtg

SEQ ID NO: 152253 - DNA, 15 bp, Homo sapiens
ttataagatacctgt

SEQ ID NO: 152254 - DNA, 15 bp, Homo sapiens
attataagatacctg

SEQ ID NO: 152255 - DNA, 15 bp, Homo sapiens
aattataagatacct

SEQ ID NO: 152256 - DNA, 15 bp, Homo sapiens
caattataagatacc

SEQ ID NO: 152257 - DNA, 15 bp, Homo sapiens
ccaattataagatac

SEQ ID NO: 152258 - DNA, 15 bp, Homo sapiens
cccaattataagata

SEQ ID NO: 152259 - DNA, 15 bp, Homo sapiens
acccaattataagat

SEQ ID NO: 152260 - DNA, 15 bp, Homo sapiens
gacccaattataaga

SEQ ID NO: 152261 - DNA, 15 bp, Homo sapiens
ggacccaattataag

SEQ ID NO: 152262 - DNA, 15 bp, Homo sapiens
aggacccaattataa

SEQ ID NO: 152263 - DNA, 15 bp, Homo sapiens
taggacccaattata

SEQ ID NO: 152264 - DNA, 15 bp, Homo sapiens
ctaggacccaattat

SEQ ID NO: 152265 - DNA, 15 bp, Homo sapiens
cctaggacccaatta

SEQ ID NO: 152266 - DNA, 15 bp, Homo sapiens
tcctaggacccaatt

SEQ ID NO: 152267 - DNA, 15 bp, Homo sapiens
gtcctaggacccaat

SEQ ID NO: 152268 - DNA, 15 bp, Homo sapiens
agtcctaggacccaa

SEQ ID NO: 152269 - DNA, 15 bp, Homo sapiens
aagtcctaggaccca

SEQ ID NO: 152270 - DNA, 15 bp, Homo sapiens
gaagtcctaggaccc

SEQ ID NO: 152271 - DNA, 15 bp, Homo sapiens
ggaagtcctaggacc

SEQ ID NO: 152272 - DNA, 15 bp, Homo sapiens
aggaagtcctaggac

SEQ ID NO: 152273 - DNA, 15 bp, Homo sapiens
caggaagtcctagga

SEQ ID NO: 152274 - DNA, 15 bp, Homo sapiens
gcaggaagtcctagg

SEQ ID NO: 152275 - DNA, 15 bp, Homo sapiens
ggcaggaagtcctag

SEQ ID NO: 152276 - DNA, 15 bp, Homo sapiens
tggcaggaagtccta

SEQ ID NO: 152277 - DNA, 15 bp, Homo sapiens
ctggcaggaagtcct

SEQ ID NO: 152278 - DNA, 15 bp, Homo sapiens
actggcaggaagtcc

SEQ ID NO: 152279 - DNA, 15 bp, Homo sapiens
tactggcaggaagtc

SEQ ID NO: 152280 - DNA, 15 bp, Homo sapiens
ctactggcaggaagt

SEQ ID NO: 152281 - DNA, 15 bp, Homo sapiens
gctactggcaggaag

SEQ ID NO: 152282 - DNA, 15 bp, Homo sapiens
ggctactggcaggaa

SEQ ID NO: 152283 - DNA, 15 bp, Homo sapiens
tggctactggcagga

SEQ ID NO: 152284 - DNA, 15 bp, Homo sapiens
atggctactggcagg

SEQ ID NO: 152285 - DNA, 15 bp, Homo sapiens
aatggctactggcag

SEQ ID NO: 152286 - DNA, 15 bp, Homo sapiens
caatggctactggca

SEQ ID NO: 152287 - DNA, 15 bp, Homo sapiens
acaatggctactggc

SEQ ID NO: 152288 - DNA, 15 bp, Homo sapiens
cacaatggctactgg

SEQ ID NO: 152289 - DNA, 15 bp, Homo sapiens
acacaatggctactg

SEQ ID NO: 152290 - DNA, 15 bp, Homo sapiens
cacacaatggctact

SEQ ID NO: 152291 - DNA, 15 bp, Homo sapiens
gcacacaatggctac

SEQ ID NO: 152292 - DNA, 15 bp, Homo sapiens
tgcacacaatggcta

SEQ ID NO: 152293 - DNA, 15 bp, Homo sapiens
atgcacacaatggct

SEQ ID NO: 152294 - DNA, 15 bp, Homo sapiens
catgcacacaatggc

SEQ ID NO: 152295 - DNA, 15 bp, Homo sapiens
ccatgcacacaatgg

SEQ ID NO: 152296 - DNA, 15 bp, Homo sapiens
tccatgcacacaatg

SEQ ID NO: 152297 - DNA, 15 bp, Homo sapiens
atccatgcacacaat

SEQ ID NO: 152298 - DNA, 15 bp, Homo sapiens
aatccatgcacacaa

SEQ ID NO: 152299 - DNA, 15 bp, Homo sapiens
aaatccatgcacaca

SEQ ID NO: 152300 - DNA, 15 bp, Homo sapiens
caaatccatgcacac

SEQ ID NO: 152301 - DNA, 15 bp, Homo sapiens
ccaaatccatgcaca

SEQ ID NO: 152302 - DNA, 15 bp, Homo sapiens
cccaaatccatgcac

SEQ ID NO: 152303 - DNA, 15 bp, Homo sapiens
acccaaatccatgca

SEQ ID NO: 152304 - DNA, 15 bp, Homo sapiens
cacccaaatccatgc

SEQ ID NO: 152305 - DNA, 15 bp, Homo sapiens
gcacccaaatccatg

SEQ ID NO: 152306 - DNA, 15 bp, Homo sapiens
agcacccaaatccat

SEQ ID NO: 152307 - DNA, 15 bp, Homo sapiens
cagcacccaaatcca

SEQ ID NO: 152308 - DNA, 15 bp, Homo sapiens
ccagcacccaaatcc

SEQ ID NO: 152309 - DNA, 15 bp, Homo sapiens
gccagcacccaaatc

SEQ ID NO: 152310 - DNA, 15 bp, Homo sapiens
ggccagcacccaaat

SEQ ID NO: 152311 - DNA, 15 bp, Homo sapiens
aggccagcacccaaa

SEQ ID NO: 152312 - DNA, 15 bp, Homo sapiens
gaggccagcacccaa

SEQ ID NO: 152313 - DNA, 15 bp, Homo sapiens
tgaggccagcaccca

SEQ ID NO: 152314 - DNA, 15 bp, Homo sapiens
gtgaggccagcaccc

SEQ ID NO: 152315 - DNA, 15 bp, Homo sapiens
ggtgaggccagcacc

SEQ ID NO: 152316 - DNA, 15 bp, Homo sapiens
tggtgaggccagcac

SEQ ID NO: 152317 - DNA, 15 bp, Homo sapiens
atggtgaggccagca

SEQ ID NO: 152318 - DNA, 15 bp, Homo sapiens
catggtgaggccagc

SEQ ID NO: 152319 - DNA, 15 bp, Homo sapiens
ccatggtgaggccag

SEQ ID NO: 152320 - DNA, 15 bp, Homo sapiens
accatggtgaggcca

SEQ ID NO: 152321 - DNA, 15 bp, Homo sapiens
caccatggtgaggcc

SEQ ID NO: 152322 - DNA, 15 bp, Homo sapiens
acaccatggtgaggc

SEQ ID NO: 152323 - DNA, 15 bp, Homo sapiens
cacaccatggtgagg

SEQ ID NO: 152324 - DNA, 15 bp, Homo sapiens
gcacaccatggtgag

SEQ ID NO: 152325 - DNA, 15 bp, Homo sapiens
agcacaccatggtga

SEQ ID NO: 152326 - DNA, 15 bp, Homo sapiens
cagcacaccatggtg

SEQ ID NO: 152327 - DNA, 15 bp, Homo sapiens
ccagcacaccatggt

SEQ ID NO: 152328 - DNA, 15 bp, Homo sapiens
gccagcacaccatgg

SEQ ID NO: 152329 - DNA, 15 bp, Homo sapiens
agccagcacaccatg

SEQ ID NO: 152330 - DNA, 15 bp, Homo sapiens
cagccagcacaccat

SEQ ID NO: 152331 - DNA, 15 bp, Homo sapiens
gcagccagcacacca

SEQ ID NO: 152332 - DNA, 15 bp, Homo sapiens
ggcagccagcacacc

SEQ ID NO: 152333 - DNA, 15 bp, Homo sapiens
gggcagccagcacac

SEQ ID NO: 152334 - DNA, 15 bp, Homo sapiens
tgggcagccagcaca

SEQ ID NO: 152335 - DNA, 15 bp, Homo sapiens
atgggcagccagcac

SEQ ID NO: 152336 - DNA, 15 bp, Homo sapiens
catgggcagccagca

SEQ ID NO: 152337 - DNA, 15 bp, Homo sapiens
gcatgggcagccagc

SEQ ID NO: 152338 - DNA, 15 bp, Homo sapiens
ggcatgggcagccag

SEQ ID NO: 152339 - DNA, 15 bp, Homo sapiens
aggcatgggcagcca

SEQ ID NO: 152340 - DNA, 15 bp, Homo sapiens
caggcatgggcagcc

SEQ ID NO: 152341 - DNA, 15 bp, Homo sapiens
gcaggcatgggcagc

SEQ ID NO: 152342 - DNA, 15 bp, Homo sapiens
tgcaggcatgggcag

SEQ ID NO: 152343 - DNA, 15 bp, Homo sapiens
ttgcaggcatgggca

SEQ ID NO: 152344 - DNA, 15 bp, Homo sapiens
attgcaggcatgggc

SEQ ID NO: 152345 - DNA, 15 bp, Homo sapiens
tattgcaggcatggg

SEQ ID NO: 152346 - DNA, 15 bp, Homo sapiens
ttattgcaggcatgg

SEQ ID NO: 152347 - DNA, 15 bp, Homo sapiens
attattgcaggcatg

SEQ ID NO: 152348 - DNA, 15 bp, Homo sapiens
cattattgcaggcat

SEQ ID NO: 152349 - DNA, 15 bp, Homo sapiens
tcattattgcaggca

SEQ ID NO: 152350 - DNA, 15 bp, Homo sapiens
gtcattattgcaggc

SEQ ID NO: 152351 - DNA, 15 bp, Homo sapiens
agtcattattgcagg

SEQ ID NO: 152352 - DNA, 15 bp, Homo sapiens
aagtcattattgcag

SEQ ID NO: 152353 - DNA, 15 bp, Homo sapiens
gaagtcattattgca

SEQ ID NO: 152354 - DNA, 15 bp, Homo sapiens
agaagtcattattgc

SEQ ID NO: 152355 - DNA, 15 bp, Homo sapiens
cagaagtcattattg

SEQ ID NO: 152356 - DNA, 15 bp, Homo sapiens
acagaagtcattatt

SEQ ID NO: 152357 - DNA, 15 bp, Homo sapiens
tacagaagtcattat

SEQ ID NO: 152358 - DNA, 15 bp, Homo sapiens
ttacagaagtcatta

SEQ ID NO: 152359 - DNA, 15 bp, Homo sapiens
cttacagaagtcatt

SEQ ID NO: 152360 - DNA, 15 bp, Homo sapiens
gcttacagaagtcat

SEQ ID NO: 152361 - DNA, 15 bp, Homo sapiens
ggcttacagaagtca

SEQ ID NO: 152362 - DNA, 15 bp, Homo sapiens
aggcttacagaagtc

SEQ ID NO: 152363 - DNA, 15 bp, Homo sapiens
aaggcttacagaagt

SEQ ID NO: 152364 - DNA, 15 bp, Homo sapiens
aaaggcttacagaag

SEQ ID NO: 152365 - DNA, 15 bp, Homo sapiens
gaaaggcttacagaa

SEQ ID NO: 152366 - DNA, 15 bp, Homo sapiens
agaaaggcttacaga

SEQ ID NO: 152367 - DNA, 15 bp, Homo sapiens
aagaaaggcttacag

SEQ ID NO: 152368 - DNA, 15 bp, Homo sapiens
gaagaaaggcttaca

SEQ ID NO: 152369 - DNA, 15 bp, Homo sapiens
tgaagaaaggcttac

SEQ ID NO: 152370 - DNA, 15 bp, Homo sapiens
atgaagaaaggctta

SEQ ID NO: 152371 - DNA, 15 bp, Homo sapiens
gatgaagaaaggctt

SEQ ID NO: 152372 - DNA, 15 bp, Homo sapiens
agatgaagaaaggct

SEQ ID NO: 152373 - DNA, 15 bp, Homo sapiens
cagatgaagaaaggc

SEQ ID NO: 152374 - DNA, 15 bp, Homo sapiens
gcagatgaagaaagg

SEQ ID NO: 152375 - DNA, 15 bp, Homo sapiens
tgcagatgaagaaag

SEQ ID NO: 152376 - DNA, 15 bp, Homo sapiens
ttgcagatgaagaaa

SEQ ID NO: 152377 - DNA, 15 bp, Homo sapiens
cttgcagatgaagaa

SEQ ID NO: 152378 - DNA, 15 bp, Homo sapiens
tcttgcagatgaaga

SEQ ID NO: 152379 - DNA, 15 bp, Homo sapiens
atcttgcagatgaag

SEQ ID NO: 152380 - DNA, 15 bp, Homo sapiens
catcttgcagatgaa

SEQ ID NO: 152381 - DNA, 15 bp, Homo sapiens
ccatcttgcagatga

SEQ ID NO: 152382 - DNA, 15 bp, Homo sapiens
cccatcttgcagatg

SEQ ID NO: 152383 - DNA, 15 bp, Homo sapiens
acccatcttgcagat

SEQ ID NO: 152384 - DNA, 15 bp, Homo sapiens
cacccatcttgcaga

SEQ ID NO: 152385 - DNA, 15 bp, Homo sapiens
gcacccatcttgcag

SEQ ID NO: 152386 - DNA, 15 bp, Homo sapiens
agcacccatcttgca

SEQ ID NO: 152387 - DNA, 15 bp, Homo sapiens
cagcacccatcttgc

SEQ ID NO: 152388 - DNA, 15 bp, Homo sapiens
gcagcacccatcttg

SEQ ID NO: 152389 - DNA, 15 bp, Homo sapiens
agcagcacccatctt

SEQ ID NO: 152390 - DNA, 15 bp, Homo sapiens
cagcagcacccatct

SEQ ID NO: 152391 - DNA, 15 bp, Homo sapiens
ccagcagcacccatc

SEQ ID NO: 152392 - DNA, 15 bp, Homo sapiens
gccagcagcacccat

SEQ ID NO: 152393 - DNA, 15 bp, Homo sapiens
tgccagcagcaccca

SEQ ID NO: 152394 - DNA, 15 bp, Homo sapiens
gtgccagcagcaccc

SEQ ID NO: 152395 - DNA, 15 bp, Homo sapiens
ggtgccagcagcacc

SEQ ID NO: 152396 - DNA, 15 bp, Homo sapiens
aggtgccagcagcac

SEQ ID NO: 152397 - DNA, 15 bp, Homo sapiens
gaggtgccagcagca

SEQ ID NO: 152398 - DNA, 15 bp, Homo sapiens
ggaggtgccagcagc

SEQ ID NO: 152399 - DNA, 15 bp, Homo sapiens
aggaggtgccagcag

SEQ ID NO: 152400 - DNA, 15 bp, Homo sapiens
gaggaggtgccagca

SEQ ID NO: 152401 - DNA, 15 bp, Homo sapiens
ggaggaggtgccagc

SEQ ID NO: 152402 - DNA, 15 bp, Homo sapiens
gggaggaggtgccag

SEQ ID NO: 152403 - DNA, 15 bp, Homo sapiens
ggggaggaggtgcca

SEQ ID NO: 152404 - DNA, 15 bp, Homo sapiens
cggggaggaggtgcc

SEQ ID NO: 152405 - DNA, 15 bp, Homo sapiens
ccggggaggaggtgc

SEQ ID NO: 152406 - DNA, 15 bp, Homo sapiens
accggggaggaggtg

SEQ ID NO: 152407 - DNA, 15 bp, Homo sapiens
caccggggaggaggt

SEQ ID NO: 152408 - DNA, 15 bp, Homo sapiens
gcaccggggaggagg

SEQ ID NO: 152409 - DNA, 15 bp, Homo sapiens
agcaccggggaggag

SEQ ID NO: 152410 - DNA, 15 bp, Homo sapiens
cagcaccggggagga

SEQ ID NO: 152411 - DNA, 15 bp, Homo sapiens
acagcaccggggagg

SEQ ID NO: 152412 - DNA, 15 bp, Homo sapiens
cacagcaccggggag

SEQ ID NO: 152413 - DNA, 15 bp, Homo sapiens
ccacagcaccgggga

SEQ ID NO: 152414 - DNA, 15 bp, Homo sapiens
accacagcaccgggg

SEQ ID NO: 152415 - DNA, 15 bp, Homo sapiens
caccacagcaccggg

SEQ ID NO: 152416 - DNA, 15 bp, Homo sapiens
tcaccacagcaccgg

SEQ ID NO: 152417 - DNA, 15 bp, Homo sapiens
gtcaccacagcaccg

SEQ ID NO: 152418 - DNA, 15 bp, Homo sapiens
tgtcaccacagcacc

SEQ ID NO: 152419 - DNA, 15 bp, Homo sapiens
ctgtcaccacagcac

SEQ ID NO: 152420 - DNA, 15 bp, Homo sapiens
cctgtcaccacagca

SEQ ID NO: 152421 - DNA, 15 bp, Homo sapiens
ccctgtcaccacagc

SEQ ID NO: 152422 - DNA, 15 bp, Homo sapiens
gccctgtcaccacag

SEQ ID NO: 152423 - DNA, 15 bp, Homo sapiens
tgccctgtcaccaca

SEQ ID NO: 152424 - DNA, 15 bp, Homo sapiens
atgccctgtcaccac

SEQ ID NO: 152425 - DNA, 15 bp, Homo sapiens
tatgccctgtcacca

SEQ ID NO: 152426 - DNA, 15 bp, Homo sapiens
ctatgccctgtcacc

SEQ ID NO: 152427 - DNA, 15 bp, Homo sapiens
actatgccctgtcac

SEQ ID NO: 152428 - DNA, 15 bp, Homo sapiens
cactatgccctgtca

SEQ ID NO: 152429 - DNA, 15 bp, Homo sapiens
acactatgccctgtc

SEQ ID NO: 152430 - DNA, 15 bp, Homo sapiens
cacactatgccctgt

SEQ ID NO: 152431 - DNA, 15 bp, Homo sapiens
acacactatgccctg

SEQ ID NO: 152432 - DNA, 15 bp, Homo sapiens
cacacactatgccct

SEQ ID NO: 152433 - DNA, 15 bp, Homo sapiens
tcacacactatgccc

SEQ ID NO: 152434 - DNA, 15 bp, Homo sapiens
ctcacacactatgcc

SEQ ID NO: 152435 - DNA, 15 bp, Homo sapiens
cctcacacactatgc

SEQ ID NO: 152436 - DNA, 15 bp, Homo sapiens
gcctcacacactatg

SEQ ID NO: 152437 - DNA, 15 bp, Homo sapiens
agcctcacacactat

SEQ ID NO: 152438 - DNA, 15 bp, Homo sapiens
cagcctcacacacta

SEQ ID NO: 152439 - DNA, 15 bp, Homo sapiens
gcagcctcacacact

SEQ ID NO: 152440 - DNA, 15 bp, Homo sapiens
agcagcctcacacac

SEQ ID NO: 152441 - DNA, 15 bp, Homo sapiens
tagcagcctcacaca

SEQ ID NO: 152442 - DNA, 15 bp, Homo sapiens
atagcagcctcacac

SEQ ID NO: 152443 - DNA, 15 bp, Homo sapiens
catagcagcctcaca

SEQ ID NO: 152444 - DNA, 15 bp, Homo sapiens
acatagcagcctcac

SEQ ID NO: 152445 - DNA, 15 bp, Homo sapiens
cacatagcagcctca

SEQ ID NO: 152446 - DNA, 15 bp, Homo sapiens
tcacatagcagcctc

SEQ ID NO: 152447 - DNA, 15 bp, Homo sapiens
ttcacatagcagcct

SEQ ID NO: 152448 - DNA, 15 bp, Homo sapiens
cttcacatagcagcc

SEQ ID NO: 152449 - DNA, 15 bp, Homo sapiens
gcttcacatagcagc

SEQ ID NO: 152450 - DNA, 15 bp, Homo sapiens
tgcttcacatagcag

SEQ ID NO: 152451 - DNA, 15 bp, Homo sapiens
gtgcttcacatagca

SEQ ID NO: 152452 - DNA, 15 bp, Homo sapiens
ggtgcttcacatagc

SEQ ID NO: 152453 - DNA, 15 bp, Homo sapiens
aggtgcttcacatag

SEQ ID NO: 152454 - DNA, 15 bp, Homo sapiens
taggtgcttcacata

SEQ ID NO: 152455 - DNA, 15 bp, Homo sapiens
ttaggtgcttcacat

SEQ ID NO: 152456 - DNA, 15 bp, Homo sapiens
attaggtgcttcaca

SEQ ID NO: 152457 - DNA, 15 bp, Homo sapiens
cattaggtgcttcac

SEQ ID NO: 152458 - DNA, 15 bp, Homo sapiens
gcattaggtgcttca

SEQ ID NO: 152459 - DNA, 15 bp, Homo sapiens
tgcattaggtgcttc

SEQ ID NO: 152460 - DNA, 15 bp, Homo sapiens
ctgcattaggtgctt

SEQ ID NO: 152461 - DNA, 15 bp, Homo sapiens
cctgcattaggtgct

SEQ ID NO: 152462 - DNA, 15 bp, Homo sapiens
ccctgcattaggtgc

SEQ ID NO: 152463 - DNA, 15 bp, Homo sapiens
gccctgcattaggtg

SEQ ID NO: 152464 - DNA, 15 bp, Homo sapiens
ggccctgcattaggt

SEQ ID NO: 152465 - DNA, 15 bp, Homo sapiens
aggccctgcattagg

SEQ ID NO: 152466 - DNA, 15 bp, Homo sapiens
caggccctgcattag

SEQ ID NO: 152467 - DNA, 15 bp, Homo sapiens
ccaggccctgcatta

SEQ ID NO: 152468 - DNA, 15 bp, Homo sapiens
gccaggccctgcatt

SEQ ID NO: 152469 - DNA, 15 bp, Homo sapiens
tgccaggccctgcat

SEQ ID NO: 152470 - DNA, 15 bp, Homo sapiens
atgccaggccctgca

SEQ ID NO: 152471 - DNA, 15 bp, Homo sapiens
tatgccaggccctgc

SEQ ID NO: 152472 - DNA, 15 bp, Homo sapiens
atatgccaggccctg

SEQ ID NO: 152473 - DNA, 15 bp, Homo sapiens
catatgccaggccct

SEQ ID NO: 152474 - DNA, 15 bp, Homo sapiens
ccatatgccaggccc

SEQ ID NO: 152475 - DNA, 15 bp, Homo sapiens
tccatatgccaggcc

SEQ ID NO: 152476 - DNA, 15 bp, Homo sapiens
ctccatatgccaggc

SEQ ID NO: 152477 - DNA, 15 bp, Homo sapiens
cctccatatgccagg

SEQ ID NO: 152478 - DNA, 15 bp, Homo sapiens
tcctccatatgccag

SEQ ID NO: 152479 - DNA, 15 bp, Homo sapiens
ttcctccatatgcca

SEQ ID NO: 152480 - DNA, 15 bp, Homo sapiens
attcctccatatgcc

SEQ ID NO: 152481 - DNA, 15 bp, Homo sapiens
aattcctccatatgc

SEQ ID NO: 152482 - DNA, 15 bp, Homo sapiens
gaattcctccatatg

SEQ ID NO: 152483 - DNA, 15 bp, Homo sapiens
tgaattcctccatat

SEQ ID NO: 152484 - DNA, 15 bp, Homo sapiens
ctgaattcctccata

SEQ ID NO: 152485 - DNA, 15 bp, Homo sapiens
gctgaattcctccat

SEQ ID NO: 152486 - DNA, 15 bp, Homo sapiens
tgctgaattcctcca

SEQ ID NO: 152487 - DNA, 15 bp, Homo sapiens
ttgctgaattcctcc

SEQ ID NO: 152488 - DNA, 15 bp, Homo sapiens
tttgctgaattcctc

SEQ ID NO: 152489 - DNA, 15 bp, Homo sapiens
atttgctgaattcct

SEQ ID NO: 152490 - DNA, 15 bp, Homo sapiens
catttgctgaattcc

SEQ ID NO: 152491 - DNA, 15 bp, Homo sapiens
tcatttgctgaattc

SEQ ID NO: 152492 - DNA, 15 bp, Homo sapiens
gtcatttgctgaatt

SEQ ID NO: 152493 - DNA, 15 bp, Homo sapiens
tgtcatttgctgaat

SEQ ID NO: 152494 - DNA, 15 bp, Homo sapiens
ctgtcatttgctgaa

SEQ ID NO: 152495 - DNA, 15 bp, Homo sapiens
tctgtcatttgctga

SEQ ID NO: 152496 - DNA, 15 bp, Homo sapiens
atctgtcatttgctg

SEQ ID NO: 152497 - DNA, 15 bp, Homo sapiens
catctgtcatttgct

SEQ ID NO: 152498 - DNA, 15 bp, Homo sapiens
gcatctgtcatttgc

SEQ ID NO: 152499 - DNA, 15 bp, Homo sapiens
ggcatctgtcatttg

SEQ ID NO: 152500 - DNA, 15 bp, Homo sapiens
aggcatctgtcattt

SEQ ID NO: 152501 - DNA, 15 bp, Homo sapiens
aaggcatctgtcatt

SEQ ID NO: 152502 - DNA, 15 bp, Homo sapiens
gaaggcatctgtcat

SEQ ID NO: 152503 - DNA, 15 bp, Homo sapiens
tgaaggcatctgtca

SEQ ID NO: 152504 - DNA, 15 bp, Homo sapiens
gtgaaggcatctgtc

SEQ ID NO: 152505 - DNA, 15 bp, Homo sapiens
tgtgaaggcatctgt

SEQ ID NO: 152506 - DNA, 15 bp, Homo sapiens
ctgtgaaggcatctg

SEQ ID NO: 152507 - DNA, 15 bp, Homo sapiens
actgtgaaggcatct

SEQ ID NO: 152508 - DNA, 15 bp, Homo sapiens
aactgtgaaggcatc

SEQ ID NO: 152509 - DNA, 15 bp, Homo sapiens
taactgtgaaggcat

SEQ ID NO: 152510 - DNA, 15 bp, Homo sapiens
ctaactgtgaaggca

SEQ ID NO: 152511 - DNA, 15 bp, Homo sapiens
actaactgtgaaggc

SEQ ID NO: 152512 - DNA, 15 bp, Homo sapiens
aactaactgtgaagg

SEQ ID NO: 152513 - DNA, 15 bp, Homo sapiens
gaactaactgtgaag

SEQ ID NO: 152514 - DNA, 15 bp, Homo sapiens
ggaactaactgtgaa

SEQ ID NO: 152515 - DNA, 15 bp, Homo sapiens
aggaactaactgtga

SEQ ID NO: 152516 - DNA, 15 bp, Homo sapiens
caggaactaactgtg

SEQ ID NO: 152517 - DNA, 15 bp, Homo sapiens
ccaggaactaactgt

SEQ ID NO: 152518 - DNA, 15 bp, Homo sapiens
gccaggaactaactg

SEQ ID NO: 152519 - DNA, 15 bp, Homo sapiens
tgccaggaactaact

SEQ ID NO: 152520 - DNA, 15 bp, Homo sapiens
atgccaggaactaac

SEQ ID NO: 152521 - DNA, 15 bp, Homo sapiens
gatgccaggaactaa

SEQ ID NO: 152522 - DNA, 15 bp, Homo sapiens
ggatgccaggaacta

SEQ ID NO: 152523 - DNA, 15 bp, Homo sapiens
aggatgccaggaact

SEQ ID NO: 152524 - DNA, 15 bp, Homo sapiens
gaggatgccaggaac

SEQ ID NO: 152525 - DNA, 15 bp, Homo sapiens
agaggatgccaggaa

SEQ ID NO: 152526 - DNA, 15 bp, Homo sapiens
tagaggatgccagga

SEQ ID NO: 152527 - DNA, 15 bp, Homo sapiens
gtagaggatgccagg

SEQ ID NO: 152528 - DNA, 15 bp, Homo sapiens
tgtagaggatgccag

SEQ ID NO: 152529 - DNA, 15 bp, Homo sapiens
atgtagaggatgcca

SEQ ID NO: 152530 - DNA, 15 bp, Homo sapiens
aatgtagaggatgcc

SEQ ID NO: 152531 - DNA, 15 bp, Homo sapiens
caatgtagaggatgc

SEQ ID NO: 152532 - DNA, 15 bp, Homo sapiens
ccaatgtagaggatg

SEQ ID NO: 152533 - DNA, 15 bp, Homo sapiens
accaatgtagaggat

SEQ ID NO: 152534 - DNA, 15 bp, Homo sapiens
caccaatgtagagga

SEQ ID NO: 152535 - DNA, 15 bp, Homo sapiens
ccaccaatgtagagg

SEQ ID NO: 152536 - DNA, 15 bp, Homo sapiens
cccaccaatgtagag

SEQ ID NO: 152537 - DNA, 15 bp, Homo sapiens
acccaccaatgtaga

SEQ ID NO: 152538 - DNA, 15 bp, Homo sapiens
cacccaccaatgtag

SEQ ID NO: 152539 - DNA, 15 bp, Homo sapiens
acacccaccaatgta

SEQ ID NO: 152540 - DNA, 15 bp, Homo sapiens
tacacccaccaatgt

SEQ ID NO: 152541 - DNA, 15 bp, Homo sapiens
ctacacccaccaatg

SEQ ID NO: 152542 - DNA, 15 bp, Homo sapiens
cctacacccaccaat

SEQ ID NO: 152543 - DNA, 15 bp, Homo sapiens
tcctacacccaccaa

SEQ ID NO: 152544 - DNA, 15 bp, Homo sapiens
ttcctacacccacca

SEQ ID NO: 152545 - DNA, 15 bp, Homo sapiens
tttcctacacccacc

SEQ ID NO: 152546 - DNA, 15 bp, Homo sapiens
ctttcctacacccac

SEQ ID NO: 152547 - DNA, 15 bp, Homo sapiens
tctttcctacaccca

SEQ ID NO: 152548 - DNA, 15 bp, Homo sapiens
ttctttcctacaccc

SEQ ID NO: 152549 - DNA, 15 bp, Homo sapiens
tttctttcctacacc

SEQ ID NO: 152550 - DNA, 15 bp, Homo sapiens
ctttctttcctacac

SEQ ID NO: 152551 - DNA, 15 bp, Homo sapiens
tctttctttcctaca

SEQ ID NO: 152552 - DNA, 15 bp, Homo sapiens
gtctttctttcctac

SEQ ID NO: 152553 - DNA, 15 bp, Homo sapiens
tgtctttctttccta

SEQ ID NO: 152554 - DNA, 15 bp, Homo sapiens
ctgtctttctttcct

SEQ ID NO: 152555 - DNA, 15 bp, Homo sapiens
tctgtctttctttcc

SEQ ID NO: 152556 - DNA, 15 bp, Homo sapiens
ctctgtctttctttc

SEQ ID NO: 152557 - DNA, 15 bp, Homo sapiens
cctctgtctttcttt

SEQ ID NO: 152558 - DNA, 15 bp, Homo sapiens
tcctctgtctttctt

SEQ ID NO: 152559 - DNA, 15 bp, Homo sapiens
ctcctctgtctttct

SEQ ID NO: 152560 - DNA, 15 bp, Homo sapiens
cctcctctgtctttc

SEQ ID NO: 152561 - DNA, 15 bp, Homo sapiens
gcctcctctgtcttt

SEQ ID NO: 152562 - DNA, 15 bp, Homo sapiens
tgcctcctctgtctt

SEQ ID NO: 152563 - DNA, 15 bp, Homo sapiens
ttgcctcctctgtct

SEQ ID NO: 152564 - DNA, 15 bp, Homo sapiens
tttgcctcctctgtc

SEQ ID NO: 152565 - DNA, 15 bp, Homo sapiens
ttttgcctcctctgt

SEQ ID NO: 152566 - DNA, 15 bp, Homo sapiens
cttttgcctcctctg

SEQ ID NO: 152567 - DNA, 15 bp, Homo sapiens
acttttgcctcctct

SEQ ID NO: 152568 - DNA, 15 bp, Homo sapiens
aacttttgcctcctc

SEQ ID NO: 152569 - DNA, 15 bp, Homo sapiens
caacttttgcctcct

SEQ ID NO: 152570 - DNA, 15 bp, Homo sapiens
acaacttttgcctcc

SEQ ID NO: 152571 - DNA, 15 bp, Homo sapiens
tacaacttttgcctc

SEQ ID NO: 152572 - DNA, 15 bp, Homo sapiens
ctacaacttttgcct

SEQ ID NO: 152573 - DNA, 15 bp, Homo sapiens
gctacaacttttgcc

SEQ ID NO: 152574 - DNA, 15 bp, Homo sapiens
agctacaacttttgc

SEQ ID NO: 152575 - DNA, 15 bp, Homo sapiens
cagctacaacttttg

SEQ ID NO: 152576 - DNA, 15 bp, Homo sapiens
acagctacaactttt

SEQ ID NO: 152577 - DNA, 15 bp, Homo sapiens
cacagctacaacttt

SEQ ID NO: 152578 - DNA, 15 bp, Homo sapiens
ccacagctacaactt

SEQ ID NO: 152579 - DNA, 15 bp, Homo sapiens
cccacagctacaact

SEQ ID NO: 152580 - DNA, 15 bp, Homo sapiens
ccccacagctacaac

SEQ ID NO: 152581 - DNA, 15 bp, Homo sapiens
gccccacagctacaa

SEQ ID NO: 152582 - DNA, 15 bp, Homo sapiens
tgccccacagctaca

SEQ ID NO: 152583 - DNA, 15 bp, Homo sapiens
atgccccacagctac

SEQ ID NO: 152584 - DNA, 15 bp, Homo sapiens
aatgccccacagcta

SEQ ID NO: 152585 - DNA, 15 bp, Homo sapiens
caatgccccacagct

SEQ ID NO: 152586 - DNA, 15 bp, Homo sapiens
tcaatgccccacagc

SEQ ID NO: 152587 - DNA, 15 bp, Homo sapiens
ctcaatgccccacag

SEQ ID NO: 152588 - DNA, 15 bp, Homo sapiens
cctcaatgccccaca

SEQ ID NO: 152589 - DNA, 15 bp, Homo sapiens
tcctcaatgccccac

SEQ ID NO: 152590 - DNA, 15 bp, Homo sapiens
gtcctcaatgcccca

SEQ ID NO: 152591 - DNA, 15 bp, Homo sapiens
tgtcctcaatgcccc

SEQ ID NO: 152592 - DNA, 15 bp, Homo sapiens
ctgtcctcaatgccc

SEQ ID NO: 152593 - DNA, 15 bp, Homo sapiens
gctgtcctcaatgcc

SEQ ID NO: 152594 - DNA, 15 bp, Homo sapiens
ggctgtcctcaatgc

SEQ ID NO: 152595 - DNA, 15 bp, Homo sapiens
aggctgtcctcaatg

SEQ ID NO: 152596 - DNA, 15 bp, Homo sapiens
caggctgtcctcaat

SEQ ID NO: 152597 - DNA, 15 bp, Homo sapiens
ccaggctgtcctcaa

SEQ ID NO: 152598 - DNA, 15 bp, Homo sapiens
tccaggctgtcctca

SEQ ID NO: 152599 - DNA, 15 bp, Homo sapiens
atccaggctgtcctc

SEQ ID NO: 152600 - DNA, 15 bp, Homo sapiens
aatccaggctgtcct

SEQ ID NO: 152601 - DNA, 15 bp, Homo sapiens
caatccaggctgtcc

SEQ ID NO: 152602 - DNA, 15 bp, Homo sapiens
acaatccaggctgtc

SEQ ID NO: 152603 - DNA, 15 bp, Homo sapiens
aacaatccaggctgt

SEQ ID NO: 152604 - DNA, 15 bp, Homo sapiens
gaacaatccaggctg

SEQ ID NO: 152605 - DNA, 15 bp, Homo sapiens
ggaacaatccaggct

SEQ ID NO: 152606 - DNA, 15 bp, Homo sapiens
tggaacaatccaggc

SEQ ID NO: 152607 - DNA, 15 bp, Homo sapiens
gtggaacaatccagg

SEQ ID NO: 152608 - DNA, 15 bp, Homo sapiens
tgtggaacaatccag

SEQ ID NO: 152609 - DNA, 15 bp, Homo sapiens
ctgtggaacaatcca

SEQ ID NO: 152610 - DNA, 15 bp, Homo sapiens
tctgtggaacaatcc

SEQ ID NO: 152611 - DNA, 15 bp, Homo sapiens
ctctgtggaacaatc

SEQ ID NO: 152612 - DNA, 15 bp, Homo sapiens
gctctgtggaacaat

SEQ ID NO: 152613 - DNA, 15 bp, Homo sapiens
ggctctgtggaacaa

SEQ ID NO: 152614 - DNA, 15 bp, Homo sapiens
gggctctgtggaaca

SEQ ID NO: 152615 - DNA, 15 bp, Homo sapiens
agggctctgtggaac

SEQ ID NO: 152616 - DNA, 15 bp, Homo sapiens
cagggctctgtggaa

SEQ ID NO: 152617 - DNA, 15 bp, Homo sapiens
tcagggctctgtgga

SEQ ID NO: 152618 - DNA, 15 bp, Homo sapiens
ctcagggctctgtgg

SEQ ID NO: 152619 - DNA, 15 bp, Homo sapiens
cctcagggctctgtg

SEQ ID NO: 152620 - DNA, 15 bp, Homo sapiens
tcctcagggctctgt

SEQ ID NO: 152621 - DNA, 15 bp, Homo sapiens
gtcctcagggctctg

SEQ ID NO: 152622 - DNA, 15 bp, Homo sapiens
tgtcctcagggctct

SEQ ID NO: 152623 - DNA, 15 bp, Homo sapiens
atgtcctcagggctc

SEQ ID NO: 152624 - DNA, 15 bp, Homo sapiens
gatgtcctcagggct

SEQ ID NO: 152625 - DNA, 15 bp, Homo sapiens
agatgtcctcagggc

SEQ ID NO: 152626 - DNA, 15 bp, Homo sapiens
gagatgtcctcaggg

SEQ ID NO: 152627 - DNA, 15 bp, Homo sapiens
ggagatgtcctcagg

SEQ ID NO: 152628 - DNA, 15 bp, Homo sapiens
tggagatgtcctcag

SEQ ID NO: 152629 - DNA, 15 bp, Homo sapiens
ctggagatgtcctca

SEQ ID NO: 152630 - DNA, 15 bp, Homo sapiens
cctggagatgtcctc

SEQ ID NO: 152631 - DNA, 15 bp, Homo sapiens
ccctggagatgtcct

SEQ ID NO: 152632 - DNA, 15 bp, Homo sapiens
cccctggagatgtcc

SEQ ID NO: 152633 - DNA, 15 bp, Homo sapiens
acccctggagatgtc

SEQ ID NO: 152634 - DNA, 15 bp, Homo sapiens
cacccctggagatgt

SEQ ID NO: 152635 - DNA, 15 bp, Homo sapiens
acacccctggagatg

SEQ ID NO: 152636 - DNA, 15 bp, Homo sapiens
cacacccctggagat

SEQ ID NO: 152637 - DNA, 15 bp, Homo sapiens
gcacacccctggaga

SEQ ID NO: 152638 - DNA, 15 bp, Homo sapiens
agcacacccctggag

SEQ ID NO: 152639 - DNA, 15 bp, Homo sapiens
gagcacacccctgga

SEQ ID NO: 152640 - DNA, 15 bp, Homo sapiens
agagcacacccctgg

SEQ ID NO: 152641 - DNA, 15 bp, Homo sapiens
cagagcacacccctg

SEQ ID NO: 152642 - DNA, 15 bp, Homo sapiens
gcagagcacacccct

SEQ ID NO: 152643 - DNA, 15 bp, Homo sapiens
tgcagagcacacccc

SEQ ID NO: 152644 - DNA, 15 bp, Homo sapiens
ctgcagagcacaccc

SEQ ID NO: 152645 - DNA, 15 bp, Homo sapiens
cctgcagagcacacc

SEQ ID NO: 152646 - DNA, 15 bp, Homo sapiens
ccctgcagagcacac

SEQ ID NO: 152647 - DNA, 15 bp, Homo sapiens
cccctgcagagcaca

SEQ ID NO: 152648 - DNA, 15 bp, Homo sapiens
gcccctgcagagcac

SEQ ID NO: 152649 - DNA, 15 bp, Homo sapiens
tgcccctgcagagca

SEQ ID NO: 152650 - DNA, 15 bp, Homo sapiens
ctgcccctgcagagc

SEQ ID NO: 152651 - DNA, 15 bp, Homo sapiens
gctgcccctgcagag

SEQ ID NO: 152652 - DNA, 15 bp, Homo sapiens
agctgcccctgcaga

SEQ ID NO: 152653 - DNA, 15 bp, Homo sapiens
cagctgcccctgcag

SEQ ID NO: 152654 - DNA, 15 bp, Homo sapiens
ccagctgcccctgca

SEQ ID NO: 152655 - DNA, 15 bp, Homo sapiens
tccagctgcccctgc

SEQ ID NO: 152656 - DNA, 15 bp, Homo sapiens
atccagctgcccctg

SEQ ID NO: 152657 - DNA, 15 bp, Homo sapiens
aatccagctgcccct

SEQ ID NO: 152658 - DNA, 15 bp, Homo sapiens
caatccagctgcccc

SEQ ID NO: 152659 - DNA, 15 bp, Homo sapiens
ccaatccagctgccc

SEQ ID NO: 152660 - DNA, 15 bp, Homo sapiens
tccaatccagctgcc

SEQ ID NO: 152661 - DNA, 15 bp, Homo sapiens
ctccaatccagctgc

SEQ ID NO: 152662 - DNA, 15 bp, Homo sapiens
cctccaatccagctg

SEQ ID NO: 152663 - DNA, 15 bp, Homo sapiens
ccctccaatccagct

SEQ ID NO: 152664 - DNA, 15 bp, Homo sapiens
accctccaatccagc

SEQ ID NO: 152665 - DNA, 15 bp, Homo sapiens
aaccctccaatccag

SEQ ID NO: 152666 - DNA, 15 bp, Homo sapiens
taaccctccaatcca

SEQ ID NO: 152667 - DNA, 15 bp, Homo sapiens
ctaaccctccaatcc

SEQ ID NO: 152668 - DNA, 15 bp, Homo sapiens
cctaaccctccaatc

SEQ ID NO: 152669 - DNA, 15 bp, Homo sapiens
ccctaaccctccaat

SEQ ID NO: 152670 - DNA, 15 bp, Homo sapiens
cccctaaccctccaa

SEQ ID NO: 152671 - DNA, 15 bp, Homo sapiens
acccctaaccctcca

SEQ ID NO: 152672 - DNA, 15 bp, Homo sapiens
gacccctaaccctcc

SEQ ID NO: 152673 - DNA, 15 bp, Homo sapiens
cgacccctaaccctc

SEQ ID NO: 152674 - DNA, 15 bp, Homo sapiens
ccgacccctaaccct

SEQ ID NO: 152675 - DNA, 15 bp, Homo sapiens
cccgacccctaaccc

SEQ ID NO: 152676 - DNA, 15 bp, Homo sapiens
ccccgacccctaacc

SEQ ID NO: 152677 - DNA, 15 bp, Homo sapiens
tccccgacccctaac

SEQ ID NO: 152678 - DNA, 15 bp, Homo sapiens
ctccccgacccctaa

SEQ ID NO: 152679 - DNA, 15 bp, Homo sapiens
cctccccgaccccta

SEQ ID NO: 152680 - DNA, 15 bp, Homo sapiens
ccctccccgacccct

SEQ ID NO: 152681 - DNA, 15 bp, Homo sapiens
gccctccccgacccc

SEQ ID NO: 152682 - DNA, 15 bp, Homo sapiens
cgccctccccgaccc

SEQ ID NO: 152683 - DNA, 15 bp, Homo sapiens
acgccctccccgacc

SEQ ID NO: 152684 - DNA, 15 bp, Homo sapiens
cacgccctccccgac

SEQ ID NO: 152685 - DNA, 15 bp, Homo sapiens
gcacgccctccccga

SEQ ID NO: 152686 - DNA, 15 bp, Homo sapiens
tgcacgccctccccg

SEQ ID NO: 152687 - DNA, 15 bp, Homo sapiens
gtgcacgccctcccc

SEQ ID NO: 152688 - DNA, 15 bp, Homo sapiens
agtgcacgccctccc

SEQ ID NO: 152689 - DNA, 15 bp, Homo sapiens
gagtgcacgccctcc

SEQ ID NO: 152690 - DNA, 15 bp, Homo sapiens
ggagtgcacgccctc

SEQ ID NO: 152691 - DNA, 15 bp, Homo sapiens
gggagtgcacgccct

SEQ ID NO: 152692 - DNA, 15 bp, Homo sapiens
tgggagtgcacgccc

SEQ ID NO: 152693 - DNA, 15 bp, Homo sapiens
gtgggagtgcacgcc

SEQ ID NO: 152694 - DNA, 15 bp, Homo sapiens
ggtgggagtgcacgc

SEQ ID NO: 152695 - DNA, 15 bp, Homo sapiens
gggtgggagtgcacg

SEQ ID NO: 152696 - DNA, 15 bp, Homo sapiens
tgggtgggagtgcac

SEQ ID NO: 152697 - DNA, 15 bp, Homo sapiens
atgggtgggagtgca

SEQ ID NO: 152698 - DNA, 15 bp, Homo sapiens
catgggtgggagtgc

SEQ ID NO: 152699 - DNA, 15 bp, Homo sapiens
gcatgggtgggagtg

SEQ ID NO: 152700 - DNA, 15 bp, Homo sapiens
agcatgggtgggagt

SEQ ID NO: 152701 - DNA, 15 bp, Homo sapiens
gagcatgggtgggag

SEQ ID NO: 152702 - DNA, 15 bp, Homo sapiens
tgagcatgggtggga

SEQ ID NO: 152703 - DNA, 15 bp, Homo sapiens
gtgagcatgggtggg

SEQ ID NO: 152704 - DNA, 15 bp, Homo sapiens
tgtgagcatgggtgg

SEQ ID NO: 152705 - DNA, 15 bp, Homo sapiens
ctgtgagcatgggtg

SEQ ID NO: 152706 - DNA, 15 bp, Homo sapiens
gctgtgagcatgggt

SEQ ID NO: 152707 - DNA, 15 bp, Homo sapiens
ggctgtgagcatggg

SEQ ID NO: 152708 - DNA, 15 bp, Homo sapiens
aggctgtgagcatgg

SEQ ID NO: 152709 - DNA, 15 bp, Homo sapiens
gaggctgtgagcatg

SEQ ID NO: 152710 - DNA, 15 bp, Homo sapiens
cgaggctgtgagcat

SEQ ID NO: 152711 - DNA, 15 bp, Homo sapiens
ccgaggctgtgagca

SEQ ID NO: 152712 - DNA, 15 bp, Homo sapiens
tccgaggctgtgagc

SEQ ID NO: 152713 - DNA, 15 bp, Homo sapiens
ttccgaggctgtgag

SEQ ID NO: 152714 - DNA, 15 bp, Homo sapiens
gttccgaggctgtga

SEQ ID NO: 152715 - DNA, 15 bp, Homo sapiens
tgttccgaggctgtg

SEQ ID NO: 152716 - DNA, 15 bp, Homo sapiens
ctgttccgaggctgt

SEQ ID NO: 152717 - DNA, 15 bp, Homo sapiens
actgttccgaggctg

SEQ ID NO: 152718 - DNA, 15 bp, Homo sapiens
cactgttccgaggct

SEQ ID NO: 152719 - DNA, 15 bp, Homo sapiens
gcactgttccgaggc

SEQ ID NO: 152720 - DNA, 15 bp, Homo sapiens
ggcactgttccgagg

SEQ ID NO: 152721 - DNA, 15 bp, Homo sapiens
aggcactgttccgag

SEQ ID NO: 152722 - DNA, 15 bp, Homo sapiens
caggcactgttccga

SEQ ID NO: 152723 - DNA, 15 bp, Homo sapiens
gcaggcactgttccg

SEQ ID NO: 152724 - DNA, 15 bp, Homo sapiens
agcaggcactgttcc

SEQ ID NO: 152725 - DNA, 15 bp, Homo sapiens
gagcaggcactgttc

SEQ ID NO: 152726 - DNA, 15 bp, Homo sapiens
tgagcaggcactgtt

SEQ ID NO: 152727 - DNA, 15 bp, Homo sapiens
ctgagcaggcactgt

SEQ ID NO: 152728 - DNA, 15 bp, Homo sapiens
gctgagcaggcactg

SEQ ID NO: 152729 - DNA, 15 bp, Homo sapiens
ggctgagcaggcact

SEQ ID NO: 152730 - DNA, 15 bp, Homo sapiens
tggctgagcaggcac

SEQ ID NO: 152731 - DNA, 15 bp, Homo sapiens
ttggctgagcaggca

SEQ ID NO: 152732 - DNA, 15 bp, Homo sapiens
gttggctgagcaggc

SEQ ID NO: 152733 - DNA, 15 bp, Homo sapiens
tgttggctgagcagg

SEQ ID NO: 152734 - DNA, 15 bp, Homo sapiens
atgttggctgagcag

SEQ ID NO: 152735 - DNA, 15 bp, Homo sapiens
catgttggctgagca

SEQ ID NO: 152736 - DNA, 15 bp, Homo sapiens
ccatgttggctgagc

SEQ ID NO: 152737 - DNA, 15 bp, Homo sapiens
cccatgttggctgag

SEQ ID NO: 152738 - DNA, 15 bp, Homo sapiens
acccatgttggctga

SEQ ID NO: 152739 - DNA, 15 bp, Homo sapiens
cacccatgttggctg

SEQ ID NO: 152740 - DNA, 15 bp, Homo sapiens
acacccatgttggct

SEQ ID NO: 152741 - DNA, 15 bp, Homo sapiens
aacacccatgttggc

SEQ ID NO: 152742 - DNA, 15 bp, Homo sapiens
aaacacccatgttgg

SEQ ID NO: 152743 - DNA, 15 bp, Homo sapiens
caaacacccatgttg

SEQ ID NO: 152744 - DNA, 15 bp, Homo sapiens
tcaaacacccatgtt

SEQ ID NO: 152745 - DNA, 15 bp, Homo sapiens
atcaaacacccatgt

SEQ ID NO: 152746 - DNA, 15 bp, Homo sapiens
aatcaaacacccatg

SEQ ID NO: 152747 - DNA, 15 bp, Homo sapiens
gaatcaaacacccat

SEQ ID NO: 152748 - DNA, 15 bp, Homo sapiens
agaatcaaacaccca

SEQ ID NO: 152749 - DNA, 15 bp, Homo sapiens
cagaatcaaacaccc

SEQ ID NO: 152750 - DNA, 15 bp, Homo sapiens
acagaatcaaacacc

SEQ ID NO: 152751 - DNA, 15 bp, Homo sapiens
cacagaatcaaacac

SEQ ID NO: 152752 - DNA, 15 bp, Homo sapiens
acacagaatcaaaca

SEQ ID NO: 152753 - DNA, 15 bp, Homo sapiens
gacacagaatcaaac

SEQ ID NO: 152754 - DNA, 15 bp, Homo sapiens
agacacagaatcaaa

SEQ ID NO: 152755 - DNA, 15 bp, Homo sapiens
aagacacagaatcaa

SEQ ID NO: 152756 - DNA, 15 bp, Homo sapiens
aaagacacagaatca

SEQ ID NO: 152757 - DNA, 15 bp, Homo sapiens
aaaagacacagaatc

SEQ ID NO: 152758 - DNA, 15 bp, Homo sapiens
caaaagacacagaat

SEQ ID NO: 152759 - DNA, 15 bp, Homo sapiens
acaaaagacacagaa

SEQ ID NO: 152760 - DNA, 15 bp, Homo sapiens
gacaaaagacacaga

SEQ ID NO: 152761 - DNA, 15 bp, Homo sapiens
tgacaaaagacacag

SEQ ID NO: 152762 - DNA, 15 bp, Homo sapiens
gtgacaaaagacaca

SEQ ID NO: 152763 - DNA, 15 bp, Homo sapiens
tgtgacaaaagacac

SEQ ID NO: 152764 - DNA, 15 bp, Homo sapiens
ctgtgacaaaagaca

SEQ ID NO: 152765 - DNA, 15 bp, Homo sapiens
tctgtgacaaaagac

SEQ ID NO: 152766 - DNA, 15 bp, Homo sapiens
gtctgtgacaaaaga

SEQ ID NO: 152767 - DNA, 15 bp, Homo sapiens
agtctgtgacaaaag

SEQ ID NO: 152768 - DNA, 15 bp, Homo sapiens
aagtctgtgacaaaa

SEQ ID NO: 152769 - DNA, 15 bp, Homo sapiens
aaagtctgtgacaaa

SEQ ID NO: 152770 - DNA, 15 bp, Homo sapiens
taaagtctgtgacaa

SEQ ID NO: 152771 - DNA, 15 bp, Homo sapiens
ataaagtctgtgaca

SEQ ID NO: 152772 - DNA, 15 bp, Homo sapiens
gataaagtctgtgac

SEQ ID NO: 152773 - DNA, 15 bp, Homo sapiens
tgataaagtctgtga

SEQ ID NO: 152774 - DNA, 15 bp, Homo sapiens
ctgataaagtctgtg

SEQ ID NO: 152775 - DNA, 15 bp, Homo sapiens
gctgataaagtctgt

SEQ ID NO: 152776 - DNA, 15 bp, Homo sapiens
ggctgataaagtctg

SEQ ID NO: 152777 - DNA, 15 bp, Homo sapiens
gggctgataaagtct

SEQ ID NO: 152778 - DNA, 15 bp, Homo sapiens
ggggctgataaagtc

SEQ ID NO: 152779 - DNA, 15 bp, Homo sapiens
tggggctgataaagt

SEQ ID NO: 152780 - DNA, 15 bp, Homo sapiens
atggggctgataaag

SEQ ID NO: 152781 - DNA, 15 bp, Homo sapiens
gatggggctgataaa

SEQ ID NO: 152782 - DNA, 15 bp, Homo sapiens
ggatggggctgataa

SEQ ID NO: 152783 - DNA, 15 bp, Homo sapiens
gggatggggctgata

SEQ ID NO: 152784 - DNA, 15 bp, Homo sapiens
agggatggggctgat

SEQ ID NO: 152785 - DNA, 15 bp, Homo sapiens
aagggatggggctga

SEQ ID NO: 152786 - DNA, 15 bp, Homo sapiens
aaagggatggggctg

SEQ ID NO: 152787 - DNA, 15 bp, Homo sapiens
gaaagggatggggct

SEQ ID NO: 152788 - DNA, 15 bp, Homo sapiens
agaaagggatggggc

SEQ ID NO: 152789 - DNA, 15 bp, Homo sapiens
cagaaagggatgggg

SEQ ID NO: 152790 - DNA, 15 bp, Homo sapiens
tcagaaagggatggg

SEQ ID NO: 152791 - DNA, 15 bp, Homo sapiens
gtcagaaagggatgg

SEQ ID NO: 152792 - DNA, 15 bp, Homo sapiens
ggtcagaaagggatg

SEQ ID NO: 152793 - DNA, 15 bp, Homo sapiens
aggtcagaaagggat

SEQ ID NO: 152794 - DNA, 15 bp, Homo sapiens
aaggtcagaaaggga

SEQ ID NO: 152795 - DNA, 15 bp, Homo sapiens
caaggtcagaaaggg

SEQ ID NO: 152796 - DNA, 15 bp, Homo sapiens
gcaaggtcagaaagg

SEQ ID NO: 152797 - DNA, 15 bp, Homo sapiens
ggcaaggtcagaaag

SEQ ID NO: 152798 - DNA, 15 bp, Homo sapiens
aggcaaggtcagaaa

SEQ ID NO: 152799 - DNA, 15 bp, Homo sapiens
gaggcaaggtcagaa

SEQ ID NO: 152800 - DNA, 15 bp, Homo sapiens
tgaggcaaggtcaga

SEQ ID NO: 152801 - DNA, 15 bp, Homo sapiens
ctgaggcaaggtcag

SEQ ID NO: 152802 - DNA, 15 bp, Homo sapiens
actgaggcaaggtca

SEQ ID NO: 152803 - DNA, 15 bp, Homo sapiens
aactgaggcaaggtc

SEQ ID NO: 152804 - DNA, 15 bp, Homo sapiens
aaactgaggcaaggt

SEQ ID NO: 152805 - DNA, 15 bp, Homo sapiens
taaactgaggcaagg

SEQ ID NO: 152806 - DNA, 15 bp, Homo sapiens
ttaaactgaggcaag

SEQ ID NO: 152807 - DNA, 15 bp, Homo sapiens
tttaaactgaggcaa

SEQ ID NO: 152808 - DNA, 15 bp, Homo sapiens
atttaaactgaggca

SEQ ID NO: 152809 - DNA, 15 bp, Homo sapiens
aatttaaactgaggc

SEQ ID NO: 152810 - DNA, 15 bp, Homo sapiens
aaatttaaactgagg

SEQ ID NO: 152811 - DNA, 15 bp, Homo sapiens
aaaatttaaactgag

SEQ ID NO: 152812 - DNA, 15 bp, Homo sapiens
taaaatttaaactga

SEQ ID NO: 152813 - DNA, 15 bp, Homo sapiens
gtaaaatttaaactg

SEQ ID NO: 152814 - DNA, 15 bp, Homo sapiens
tgtaaaatttaaact

SEQ ID NO: 152815 - DNA, 15 bp, Homo sapiens
atgtaaaatttaaac

SEQ ID NO: 152816 - DNA, 15 bp, Homo sapiens
catgtaaaatttaaa

SEQ ID NO: 152817 - DNA, 15 bp, Homo sapiens
acatgtaaaatttaa

SEQ ID NO: 152818 - DNA, 15 bp, Homo sapiens
cacatgtaaaattta

SEQ ID NO: 152819 - DNA, 15 bp, Homo sapiens
ccacatgtaaaattt

SEQ ID NO: 152820 - DNA, 15 bp, Homo sapiens
cccacatgtaaaatt

SEQ ID NO: 152821 - DNA, 15 bp, Homo sapiens
ccccacatgtaaaat

SEQ ID NO: 152822 - DNA, 15 bp, Homo sapiens
gccccacatgtaaaa

SEQ ID NO: 152823 - DNA, 15 bp, Homo sapiens
ggccccacatgtaaa

SEQ ID NO: 152824 - DNA, 15 bp, Homo sapiens
aggccccacatgtaa

SEQ ID NO: 152825 - DNA, 15 bp, Homo sapiens
gaggccccacatgta

SEQ ID NO: 152826 - DNA, 15 bp, Homo sapiens
tgaggccccacatgt

SEQ ID NO: 152827 - DNA, 15 bp, Homo sapiens
atgaggccccacatg

SEQ ID NO: 152828 - DNA, 15 bp, Homo sapiens
aatgaggccccacat

SEQ ID NO: 152829 - DNA, 15 bp, Homo sapiens
taatgaggccccaca

SEQ ID NO: 152830 - DNA, 15 bp, Homo sapiens
ttaatgaggccccac

SEQ ID NO: 152831 - DNA, 15 bp, Homo sapiens
cttaatgaggcccca

SEQ ID NO: 152832 - DNA, 15 bp, Homo sapiens
tcttaatgaggcccc

SEQ ID NO: 152833 - DNA, 15 bp, Homo sapiens
ctcttaatgaggccc

SEQ ID NO: 152834 - DNA, 15 bp, Homo sapiens
tctcttaatgaggcc

SEQ ID NO: 152835 - DNA, 15 bp, Homo sapiens
gtctcttaatgaggc

SEQ ID NO: 152836 - DNA, 15 bp, Homo sapiens
tgtctcttaatgagg

SEQ ID NO: 152837 - DNA, 15 bp, Homo sapiens
atgtctcttaatgag

SEQ ID NO: 152838 - DNA, 15 bp, Homo sapiens
catgtctcttaatga

SEQ ID NO: 152839 - DNA, 15 bp, Homo sapiens
ccatgtctcttaatg

SEQ ID NO: 152840 - DNA, 15 bp, Homo sapiens
accatgtctcttaat

SEQ ID NO: 152841 - DNA, 15 bp, Homo sapiens
aaccatgtctcttaa

SEQ ID NO: 152842 - DNA, 15 bp, Homo sapiens
gaaccatgtctctta

SEQ ID NO: 152843 - DNA, 15 bp, Homo sapiens
agaaccatgtctctt

SEQ ID NO: 152844 - DNA, 15 bp, Homo sapiens
aagaaccatgtctct

SEQ ID NO: 152845 - DNA, 15 bp, Homo sapiens
taagaaccatgtctc

SEQ ID NO: 152846 - DNA, 15 bp, Homo sapiens
ttaagaaccatgtct

SEQ ID NO: 152847 - DNA, 15 bp, Homo sapiens
gttaagaaccatgtc

SEQ ID NO: 152848 - DNA, 15 bp, Homo sapiens
agttaagaaccatgt

SEQ ID NO: 152849 - DNA, 15 bp, Homo sapiens
tagttaagaaccatg

SEQ ID NO: 152850 - DNA, 15 bp, Homo sapiens
ttagttaagaaccat

SEQ ID NO: 152851 - DNA, 15 bp, Homo sapiens
tttagttaagaacca

SEQ ID NO: 152852 - DNA, 15 bp, Homo sapiens
ctttagttaagaacc

SEQ ID NO: 152853 - DNA, 15 bp, Homo sapiens
tctttagttaagaac

SEQ ID NO: 152854 - DNA, 15 bp, Homo sapiens
atctttagttaagaa

SEQ ID NO: 152855 - DNA, 15 bp, Homo sapiens
gatctttagttaaga

SEQ ID NO: 152856 - DNA, 15 bp, Homo sapiens
agatctttagttaag

SEQ ID NO: 152857 - DNA, 15 bp, Homo sapiens
cagatctttagttaa

SEQ ID NO: 152858 - DNA, 15 bp, Homo sapiens
acagatctttagtta

SEQ ID NO: 152859 - DNA, 15 bp, Homo sapiens
tacagatctttagtt

SEQ ID NO: 152860 - DNA, 15 bp, Homo sapiens
atacagatctttagt

SEQ ID NO: 152861 - DNA, 15 bp, Homo sapiens
gatacagatctttag

SEQ ID NO: 152862 - DNA, 15 bp, Homo sapiens
ggatacagatcttta

SEQ ID NO: 152863 - DNA, 15 bp, Homo sapiens
tggatacagatcttt

SEQ ID NO: 152864 - DNA, 15 bp, Homo sapiens
atggatacagatctt

SEQ ID NO: 152865 - DNA, 15 bp, Homo sapiens
aatggatacagatct

SEQ ID NO: 152866 - DNA, 15 bp, Homo sapiens
taatggatacagatc

SEQ ID NO: 152867 - DNA, 15 bp, Homo sapiens
ctaatggatacagat

SEQ ID NO: 152868 - DNA, 15 bp, Homo sapiens
cctaatggatacaga

SEQ ID NO: 152869 - DNA, 15 bp, Homo sapiens
tcctaatggatacag

SEQ ID NO: 152870 - DNA, 15 bp, Homo sapiens
ttcctaatggataca

SEQ ID NO: 152871 - DNA, 15 bp, Homo sapiens
attcctaatggatac

SEQ ID NO: 152872 - DNA, 15 bp, Homo sapiens
cattcctaatggata

SEQ ID NO: 152873 - DNA, 15 bp, Homo sapiens
gcattcctaatggat

SEQ ID NO: 152874 - DNA, 15 bp, Homo sapiens
agcattcctaatgga

SEQ ID NO: 152875 - DNA, 15 bp, Homo sapiens
aagcattcctaatgg

SEQ ID NO: 152876 - DNA, 15 bp, Homo sapiens
aaagcattcctaatg

SEQ ID NO: 152877 - DNA, 15 bp, Homo sapiens
caaagcattcctaat

SEQ ID NO: 152878 - DNA, 15 bp, Homo sapiens
ccaaagcattcctaa

SEQ ID NO: 152879 - DNA, 15 bp, Homo sapiens
cccaaagcattccta

SEQ ID NO: 152880 - DNA, 15 bp, Homo sapiens
gcccaaagcattcct

SEQ ID NO: 152881 - DNA, 15 bp, Homo sapiens
agcccaaagcattcc

SEQ ID NO: 152882 - DNA, 15 bp, Homo sapiens
cagcccaaagcattc

SEQ ID NO: 152883 - DNA, 15 bp, Homo sapiens
gcagcccaaagcatt

SEQ ID NO: 152884 - DNA, 15 bp, Homo sapiens
tgcagcccaaagcat

SEQ ID NO: 152885 - DNA, 15 bp, Homo sapiens
ctgcagcccaaagca

SEQ ID NO: 152886 - DNA, 15 bp, Homo sapiens
cctgcagcccaaagc

SEQ ID NO: 152887 - DNA, 15 bp, Homo sapiens
tcctgcagcccaaag

SEQ ID NO: 152888 - DNA, 15 bp, Homo sapiens
ttcctgcagcccaaa

SEQ ID NO: 152889 - DNA, 15 bp, Homo sapiens
cttcctgcagcccaa

SEQ ID NO: 152890 - DNA, 15 bp, Homo sapiens
tcttcctgcagccca

SEQ ID NO: 152891 - DNA, 15 bp, Homo sapiens
gtcttcctgcagccc

SEQ ID NO: 152892 - DNA, 15 bp, Homo sapiens
tgtcttcctgcagcc

SEQ ID NO: 152893 - DNA, 15 bp, Homo sapiens
ttgtcttcctgcagc

SEQ ID NO: 152894 - DNA, 15 bp, Homo sapiens
tttgtcttcctgcag

SEQ ID NO: 152895 - DNA, 15 bp, Homo sapiens
gtttgtcttcctgca

SEQ ID NO: 152896 - DNA, 15 bp, Homo sapiens
tgtttgtcttcctgc

SEQ ID NO: 152897 - DNA, 15 bp, Homo sapiens
gtgtttgtcttcctg

SEQ ID NO: 152898 - DNA, 15 bp, Homo sapiens
ggtgtttgtcttcct

SEQ ID NO: 152899 - DNA, 15 bp, Homo sapiens
aggtgtttgtcttcc

SEQ ID NO: 152900 - DNA, 15 bp, Homo sapiens
caggtgtttgtcttc

SEQ ID NO: 152901 - DNA, 15 bp, Homo sapiens
tcaggtgtttgtctt

SEQ ID NO: 152902 - DNA, 15 bp, Homo sapiens
gtcaggtgtttgtct

SEQ ID NO: 152903 - DNA, 15 bp, Homo sapiens
agtcaggtgtttgtc

SEQ ID NO: 152904 - DNA, 15 bp, Homo sapiens
gagtcaggtgtttgt

SEQ ID NO: 152905 - DNA, 15 bp, Homo sapiens
tgagtcaggtgtttg

SEQ ID NO: 152906 - DNA, 15 bp, Homo sapiens
gtgagtcaggtgttt

SEQ ID NO: 152907 - DNA, 15 bp, Homo sapiens
agtgagtcaggtgtt

SEQ ID NO: 152908 - DNA, 15 bp, Homo sapiens
cagtgagtcaggtgt

SEQ ID NO: 152909 - DNA, 15 bp, Homo sapiens
acagtgagtcaggtg

SEQ ID NO: 152910 - DNA, 15 bp, Homo sapiens
cacagtgagtcaggt

SEQ ID NO: 152911 - DNA, 15 bp, Homo sapiens
ccacagtgagtcagg

SEQ ID NO: 152912 - DNA, 15 bp, Homo sapiens
gccacagtgagtcag

SEQ ID NO: 152913 - DNA, 15 bp, Homo sapiens
tgccacagtgagtca

SEQ ID NO: 152914 - DNA, 15 bp, Homo sapiens
atgccacagtgagtc

SEQ ID NO: 152915 - DNA, 15 bp, Homo sapiens
tatgccacagtgagt

SEQ ID NO: 152916 - DNA, 15 bp, Homo sapiens
ttatgccacagtgag

SEQ ID NO: 152917 - DNA, 15 bp, Homo sapiens
cttatgccacagtga

SEQ ID NO: 152918 - DNA, 15 bp, Homo sapiens
acttatgccacagtg

SEQ ID NO: 152919 - DNA, 15 bp, Homo sapiens
cacttatgccacagt

SEQ ID NO: 152920 - DNA, 15 bp, Homo sapiens
ccacttatgccacag

SEQ ID NO: 152921 - DNA, 15 bp, Homo sapiens
accacttatgccaca

SEQ ID NO: 152922 - DNA, 15 bp, Homo sapiens
aaccacttatgccac

SEQ ID NO: 152923 - DNA, 15 bp, Homo sapiens
aaaccacttatgcca

SEQ ID NO: 152924 - DNA, 15 bp, Homo sapiens
caaaccacttatgcc

SEQ ID NO: 152925 - DNA, 15 bp, Homo sapiens
gcaaaccacttatgc

SEQ ID NO: 152926 - DNA, 15 bp, Homo sapiens
cgcaaaccacttatg

SEQ ID NO: 152927 - DNA, 15 bp, Homo sapiens
acgcaaaccacttat

SEQ ID NO: 152928 - DNA, 15 bp, Homo sapiens
gacgcaaaccactta

SEQ ID NO: 152929 - DNA, 15 bp, Homo sapiens
agacgcaaaccactt

SEQ ID NO: 152930 - DNA, 15 bp, Homo sapiens
cagacgcaaaccact

SEQ ID NO: 152931 - DNA, 15 bp, Homo sapiens
gcagacgcaaaccac

SEQ ID NO: 152932 - DNA, 15 bp, Homo sapiens
agcagacgcaaacca

SEQ ID NO: 152933 - DNA, 15 bp, Homo sapiens
gagcagacgcaaacc

SEQ ID NO: 152934 - DNA, 15 bp, Homo sapiens
ggagcagacgcaaac

SEQ ID NO: 152935 - DNA, 15 bp, Homo sapiens
gggagcagacgcaaa

SEQ ID NO: 152936 - DNA, 15 bp, Homo sapiens
tgggagcagacgcaa

SEQ ID NO: 152937 - DNA, 15 bp, Homo sapiens
atgggagcagacgca

SEQ ID NO: 152938 - DNA, 15 bp, Homo sapiens
tatgggagcagacgc

SEQ ID NO: 152939 - DNA, 15 bp, Homo sapiens
ttatgggagcagacg

SEQ ID NO: 152940 - DNA, 15 bp, Homo sapiens
cttatgggagcagac

SEQ ID NO: 152941 - DNA, 15 bp, Homo sapiens
gcttatgggagcaga

SEQ ID NO: 152942 - DNA, 15 bp, Homo sapiens
agcttatgggagcag

SEQ ID NO: 152943 - DNA, 15 bp, Homo sapiens
cagcttatgggagca

SEQ ID NO: 152944 - DNA, 15 bp, Homo sapiens
gcagcttatgggagc

SEQ ID NO: 152945 - DNA, 15 bp, Homo sapiens
tgcagcttatgggag

SEQ ID NO: 152946 - DNA, 15 bp, Homo sapiens
gtgcagcttatggga

SEQ ID NO: 152947 - DNA, 15 bp, Homo sapiens
cgtgcagcttatggg

SEQ ID NO: 152948 - DNA, 15 bp, Homo sapiens
acgtgcagcttatgg

SEQ ID NO: 152949 - DNA, 15 bp, Homo sapiens
cacgtgcagcttatg

SEQ ID NO: 152950 - DNA, 15 bp, Homo sapiens
ccacgtgcagcttat

SEQ ID NO: 152951 - DNA, 15 bp, Homo sapiens
tccacgtgcagctta

SEQ ID NO: 152952 - DNA, 15 bp, Homo sapiens
ctccacgtgcagctt

SEQ ID NO: 152953 - DNA, 15 bp, Homo sapiens
cctccacgtgcagct

SEQ ID NO: 152954 - DNA, 15 bp, Homo sapiens
ccctccacgtgcagc

SEQ ID NO: 152955 - DNA, 15 bp, Homo sapiens
accctccacgtgcag

SEQ ID NO: 152956 - DNA, 15 bp, Homo sapiens
caccctccacgtgca

SEQ ID NO: 152957 - DNA, 15 bp, Homo sapiens
ccaccctccacgtgc

SEQ ID NO: 152958 - DNA, 15 bp, Homo sapiens
tccaccctccacgtg

SEQ ID NO: 152959 - DNA, 15 bp, Homo sapiens
atccaccctccacgt

SEQ ID NO: 152960 - DNA, 15 bp, Homo sapiens
gatccaccctccacg

SEQ ID NO: 152961 - DNA, 15 bp, Homo sapiens
agatccaccctccac

SEQ ID NO: 152962 - DNA, 15 bp, Homo sapiens
cagatccaccctcca

SEQ ID NO: 152963 - DNA, 15 bp, Homo sapiens
ccagatccaccctcc

SEQ ID NO: 152964 - DNA, 15 bp, Homo sapiens
gccagatccaccctc

SEQ ID NO: 152965 - DNA, 15 bp, Homo sapiens
tgccagatccaccct

SEQ ID NO: 152966 - DNA, 15 bp, Homo sapiens
atgccagatccaccc

SEQ ID NO: 152967 - DNA, 15 bp, Homo sapiens
aatgccagatccacc

SEQ ID NO: 152968 - DNA, 15 bp, Homo sapiens
taatgccagatccac

SEQ ID NO: 152969 - DNA, 15 bp, Homo sapiens
gtaatgccagatcca

SEQ ID NO: 152970 - DNA, 15 bp, Homo sapiens
agtaatgccagatcc

SEQ ID NO: 152971 - DNA, 15 bp, Homo sapiens
gagtaatgccagatc

SEQ ID NO: 152972 - DNA, 15 bp, Homo sapiens
agagtaatgccagat

SEQ ID NO: 152973 - DNA, 15 bp, Homo sapiens
gagagtaatgccaga

SEQ ID NO: 152974 - DNA, 15 bp, Homo sapiens
agagagtaatgccag

SEQ ID NO: 152975 - DNA, 15 bp, Homo sapiens
gagagagtaatgcca

SEQ ID NO: 152976 - DNA, 15 bp, Homo sapiens
agagagagtaatgcc

SEQ ID NO: 152977 - DNA, 15 bp, Homo sapiens
aagagagagtaatgc

SEQ ID NO: 152978 - DNA, 15 bp, Homo sapiens
gaagagagagtaatg

SEQ ID NO: 152979 - DNA, 15 bp, Homo sapiens
ggaagagagagtaat

SEQ ID NO: 152980 - DNA, 15 bp, Homo sapiens
gggaagagagagtaa

SEQ ID NO: 152981 - DNA, 15 bp, Homo sapiens
agggaagagagagta

SEQ ID NO: 152982 - DNA, 15 bp, Homo sapiens
tagggaagagagagt

SEQ ID NO: 152983 - DNA, 15 bp, Homo sapiens
gtagggaagagagag

SEQ ID NO: 152984 - DNA, 15 bp, Homo sapiens
tgtagggaagagaga

SEQ ID NO: 152985 - DNA, 15 bp, Homo sapiens
atgtagggaagagag

SEQ ID NO: 152986 - DNA, 15 bp, Homo sapiens
aatgtagggaagaga

SEQ ID NO: 152987 - DNA, 15 bp, Homo sapiens
aaatgtagggaagag

SEQ ID NO: 152988 - DNA, 15 bp, Homo sapiens
caaatgtagggaaga

SEQ ID NO: 152989 - DNA, 15 bp, Homo sapiens
gcaaatgtagggaag

SEQ ID NO: 152990 - DNA, 15 bp, Homo sapiens
tgcaaatgtagggaa

SEQ ID NO: 152991 - DNA, 15 bp, Homo sapiens
ctgcaaatgtaggga

SEQ ID NO: 152992 - DNA, 15 bp, Homo sapiens
actgcaaatgtaggg

SEQ ID NO: 152993 - DNA, 15 bp, Homo sapiens
tactgcaaatgtagg

SEQ ID NO: 152994 - DNA, 15 bp, Homo sapiens
atactgcaaatgtag

SEQ ID NO: 152995 - DNA, 15 bp, Homo sapiens
catactgcaaatgta

SEQ ID NO: 152996 - DNA, 15 bp, Homo sapiens
gcatactgcaaatgt

SEQ ID NO: 152997 - DNA, 15 bp, Homo sapiens
agcatactgcaaatg

SEQ ID NO: 152998 - DNA, 15 bp, Homo sapiens
tagcatactgcaaat

SEQ ID NO: 152999 - DNA, 15 bp, Homo sapiens
ttagcatactgcaaa

SEQ ID NO: 153000 - DNA, 15 bp, Homo sapiens
gttagcatactgcaa

SEQ ID NO: 153001 - DNA, 15 bp, Homo sapiens
tgttagcatactgca

SEQ ID NO: 153002 - DNA, 15 bp, Homo sapiens
ctgttagcatactgc

SEQ ID NO: 153003 - DNA, 15 bp, Homo sapiens
gctgttagcatactg

SEQ ID NO: 153004 - DNA, 15 bp, Homo sapiens
agctgttagcatact

SEQ ID NO: 153005 - DNA, 15 bp, Homo sapiens
aagctgttagcatac

SEQ ID NO: 153006 - DNA, 15 bp, Homo sapiens
aaagctgttagcata

SEQ ID NO: 153007 - DNA, 15 bp, Homo sapiens
taaagctgttagcat

SEQ ID NO: 153008 - DNA, 15 bp, Homo sapiens
ttaaagctgttagca

SEQ ID NO: 153009 - DNA, 15 bp, Homo sapiens
gttaaagctgttagc

SEQ ID NO: 153010 - DNA, 15 bp, Homo sapiens
ggttaaagctgttag

SEQ ID NO: 153011 - DNA, 15 bp, Homo sapiens
aggttaaagctgtta

SEQ ID NO: 153012 - DNA, 15 bp, Homo sapiens
gaggttaaagctgtt

SEQ ID NO: 153013 - DNA, 15 bp, Homo sapiens
ggaggttaaagctgt

SEQ ID NO: 153014 - DNA, 15 bp, Homo sapiens
tggaggttaaagctg

SEQ ID NO: 153015 - DNA, 15 bp, Homo sapiens
ctggaggttaaagct

SEQ ID NO: 153016 - DNA, 15 bp, Homo sapiens
gctggaggttaaagc

SEQ ID NO: 153017 - DNA, 15 bp, Homo sapiens
ggctggaggttaaag

SEQ ID NO: 153018 - DNA, 15 bp, Homo sapiens
aggctggaggttaaa

SEQ ID NO: 153019 - DNA, 15 bp, Homo sapiens
aaggctggaggttaa

SEQ ID NO: 153020 - DNA, 15 bp, Homo sapiens
caaggctggaggtta

SEQ ID NO: 153021 - DNA, 15 bp, Homo sapiens
acaaggctggaggtt

SEQ ID NO: 153022 - DNA, 15 bp, Homo sapiens
aacaaggctggaggt

SEQ ID NO: 153023 - DNA, 15 bp, Homo sapiens
aaacaaggctggagg

SEQ ID NO: 153024 - DNA, 15 bp, Homo sapiens
gaaacaaggctggag

SEQ ID NO: 153025 - DNA, 15 bp, Homo sapiens
agaaacaaggctgga

SEQ ID NO: 153026 - DNA, 15 bp, Homo sapiens
aagaaacaaggctgg

SEQ ID NO: 153027 - DNA, 15 bp, Homo sapiens
gaagaaacaaggctg

SEQ ID NO: 153028 - DNA, 15 bp, Homo sapiens
tgaagaaacaaggct

SEQ ID NO: 153029 - DNA, 15 bp, Homo sapiens
atgaagaaacaaggc

SEQ ID NO: 153030 - DNA, 15 bp, Homo sapiens
catgaagaaacaagg

SEQ ID NO: 153031 - DNA, 15 bp, Homo sapiens
ccatgaagaaacaag

SEQ ID NO: 153032 - DNA, 15 bp, Homo sapiens
accatgaagaaacaa

SEQ ID NO: 153033 - DNA, 15 bp, Homo sapiens
aaccatgaagaaaca

SEQ ID NO: 153034 - DNA, 15 bp, Homo sapiens
caaccatgaagaaac

SEQ ID NO: 153035 - DNA, 15 bp, Homo sapiens
gcaaccatgaagaaa

SEQ ID NO: 153036 - DNA, 15 bp, Homo sapiens
tgcaaccatgaagaa

SEQ ID NO: 153037 - DNA, 15 bp, Homo sapiens
ctgcaaccatgaaga

SEQ ID NO: 153038 - DNA, 15 bp, Homo sapiens
cctgcaaccatgaag

SEQ ID NO: 153039 - DNA, 15 bp, Homo sapiens
ccctgcaaccatgaa

SEQ ID NO: 153040 - DNA, 15 bp, Homo sapiens
accctgcaaccatga

SEQ ID NO: 153041 - DNA, 15 bp, Homo sapiens
caccctgcaaccatg

SEQ ID NO: 153042 - DNA, 15 bp, Homo sapiens
ccaccctgcaaccat

SEQ ID NO: 153043 - DNA, 15 bp, Homo sapiens
gccaccctgcaacca

SEQ ID NO: 153044 - DNA, 15 bp, Homo sapiens
agccaccctgcaacc

SEQ ID NO: 153045 - DNA, 15 bp, Homo sapiens
tagccaccctgcaac

SEQ ID NO: 153046 - DNA, 15 bp, Homo sapiens
atagccaccctgcaa

SEQ ID NO: 153047 - DNA, 15 bp, Homo sapiens
gatagccaccctgca

SEQ ID NO: 153048 - DNA, 15 bp, Homo sapiens
tgatagccaccctgc

SEQ ID NO: 153049 - DNA, 15 bp, Homo sapiens
gtgatagccaccctg

SEQ ID NO: 153050 - DNA, 15 bp, Homo sapiens
tgtgatagccaccct

SEQ ID NO: 153051 - DNA, 15 bp, Homo sapiens
ctgtgatagccaccc

SEQ ID NO: 153052 - DNA, 15 bp, Homo sapiens
gctgtgatagccacc

SEQ ID NO: 153053 - DNA, 15 bp, Homo sapiens
cgctgtgatagccac

SEQ ID NO: 153054 - DNA, 15 bp, Homo sapiens
gcgctgtgatagcca

SEQ ID NO: 153055 - DNA, 15 bp, Homo sapiens
agcgctgtgatagcc

SEQ ID NO: 153056 - DNA, 15 bp, Homo sapiens
cagcgctgtgatagc

SEQ ID NO: 153057 - DNA, 15 bp, Homo sapiens
ccagcgctgtgatag

SEQ ID NO: 153058 - DNA, 15 bp, Homo sapiens
gccagcgctgtgata

SEQ ID NO: 153059 - DNA, 15 bp, Homo sapiens
ggccagcgctgtgat

SEQ ID NO: 153060 - DNA, 15 bp, Homo sapiens
tggccagcgctgtga

SEQ ID NO: 153061 - DNA, 15 bp, Homo sapiens
atggccagcgctgtg

SEQ ID NO: 153062 - DNA, 15 bp, Homo sapiens
gatggccagcgctgt

SEQ ID NO: 153063 - DNA, 15 bp, Homo sapiens
tgatggccagcgctg

SEQ ID NO: 153064 - DNA, 15 bp, Homo sapiens
gtgatggccagcgct

SEQ ID NO: 153065 - DNA, 15 bp, Homo sapiens
tgtgatggccagcgc

SEQ ID NO: 153066 - DNA, 15 bp, Homo sapiens
atgtgatggccagcg

SEQ ID NO: 153067 - DNA, 15 bp, Homo sapiens
gatgtgatggccagc

SEQ ID NO: 153068 - DNA, 15 bp, Homo sapiens
ggatgtgatggccag

SEQ ID NO: 153069 - DNA, 15 bp, Homo sapiens
aggatgtgatggcca

SEQ ID NO: 153070 - DNA, 15 bp, Homo sapiens
aaggatgtgatggcc

SEQ ID NO: 153071 - DNA, 15 bp, Homo sapiens
taaggatgtgatggc

SEQ ID NO: 153072 - DNA, 15 bp, Homo sapiens
gtaaggatgtgatgg

SEQ ID NO: 153073 - DNA, 15 bp, Homo sapiens
tgtaaggatgtgatg

SEQ ID NO: 153074 - DNA, 15 bp, Homo sapiens
gtgtaaggatgtgat

SEQ ID NO: 153075 - DNA, 15 bp, Homo sapiens
tgtgtaaggatgtga

SEQ ID NO: 153076 - DNA, 15 bp, Homo sapiens
ctgtgtaaggatgtg

SEQ ID NO: 153077 - DNA, 15 bp, Homo sapiens
gctgtgtaaggatgt

SEQ ID NO: 153078 - DNA, 15 bp, Homo sapiens
agctgtgtaaggatg

SEQ ID NO: 153079 - DNA, 15 bp, Homo sapiens
cagctgtgtaaggat

SEQ ID NO: 153080 - DNA, 15 bp, Homo sapiens
acagctgtgtaagga

SEQ ID NO: 153081 - DNA, 15 bp, Homo sapiens
cacagctgtgtaagg

SEQ ID NO: 153082 - DNA, 15 bp, Homo sapiens
acacagctgtgtaag

SEQ ID NO: 153083 - DNA, 15 bp, Homo sapiens
aacacagctgtgtaa

SEQ ID NO: 153084 - DNA, 15 bp, Homo sapiens
aaacacagctgtgta

SEQ ID NO: 153085 - DNA, 15 bp, Homo sapiens
taaacacagctgtgt

SEQ ID NO: 153086 - DNA, 15 bp, Homo sapiens
gtaaacacagctgtg

SEQ ID NO: 153087 - DNA, 15 bp, Homo sapiens
tgtaaacacagctgt

SEQ ID NO: 153088 - DNA, 15 bp, Homo sapiens
ttgtaaacacagctg

SEQ ID NO: 153089 - DNA, 15 bp, Homo sapiens
tttgtaaacacagct

SEQ ID NO: 153090 - DNA, 15 bp, Homo sapiens
atttgtaaacacagc

SEQ ID NO: 153091 - DNA, 15 bp, Homo sapiens
aatttgtaaacacag

SEQ ID NO: 153092 - DNA, 15 bp, Homo sapiens
aaatttgtaaacaca

SEQ ID NO: 153093 - DNA, 15 bp, Homo sapiens
taaatttgtaaacac

SEQ ID NO: 153094 - DNA, 15 bp, Homo sapiens
ctaaatttgtaaaca

SEQ ID NO: 153095 - DNA, 15 bp, Homo sapiens
cctaaatttgtaaac

SEQ ID NO: 153096 - DNA, 15 bp, Homo sapiens
ccctaaatttgtaaa

SEQ ID NO: 153097 - DNA, 15 bp, Homo sapiens
cccctaaatttgtaa

SEQ ID NO: 153098 - DNA, 15 bp, Homo sapiens
ccccctaaatttgta

SEQ ID NO: 153099 - DNA, 15 bp, Homo sapiens
tccccctaaatttgt

SEQ ID NO: 153100 - DNA, 15 bp, Homo sapiens
gtccccctaaatttg

SEQ ID NO: 153101 - DNA, 15 bp, Homo sapiens
tgtccccctaaattt

SEQ ID NO: 153102 - DNA, 15 bp, Homo sapiens
atgtccccctaaatt

SEQ ID NO: 153103 - DNA, 15 bp, Homo sapiens
aatgtccccctaaat

SEQ ID NO: 153104 - DNA, 15 bp, Homo sapiens
caatgtccccctaaa

SEQ ID NO: 153105 - DNA, 15 bp, Homo sapiens
tcaatgtccccctaa

SEQ ID NO: 153106 - DNA, 15 bp, Homo sapiens
ttcaatgtcccccta

SEQ ID NO: 153107 - DNA, 15 bp, Homo sapiens
cttcaatgtccccct

SEQ ID NO: 153108 - DNA, 15 bp, Homo sapiens
gcttcaatgtccccc

SEQ ID NO: 153109 - DNA, 15 bp, Homo sapiens
agcttcaatgtcccc

SEQ ID NO: 153110 - DNA, 15 bp, Homo sapiens
gagcttcaatgtccc

SEQ ID NO: 153111 - DNA, 15 bp, Homo sapiens
ggagcttcaatgtcc

SEQ ID NO: 153112 - DNA, 15 bp, Homo sapiens
aggagcttcaatgtc

SEQ ID NO: 153113 - DNA, 15 bp, Homo sapiens
gaggagcttcaatgt

SEQ ID NO: 153114 - DNA, 15 bp, Homo sapiens
ggaggagcttcaatg

SEQ ID NO: 153115 - DNA, 15 bp, Homo sapiens
gggaggagcttcaat

SEQ ID NO: 153116 - DNA, 15 bp, Homo sapiens
ggggaggagcttcaa

SEQ ID NO: 153117 - DNA, 15 bp, Homo sapiens
aggggaggagcttca

SEQ ID NO: 153118 - DNA, 15 bp, Homo sapiens
caggggaggagcttc

SEQ ID NO: 153119 - DNA, 15 bp, Homo sapiens
gcaggggaggagctt

SEQ ID NO: 153120 - DNA, 15 bp, Homo sapiens
agcaggggaggagct

SEQ ID NO: 153121 - DNA, 15 bp, Homo sapiens
tagcaggggaggagc

SEQ ID NO: 153122 - DNA, 15 bp, Homo sapiens
ttagcaggggaggag

SEQ ID NO: 153123 - DNA, 15 bp, Homo sapiens
tttagcaggggagga

SEQ ID NO: 153124 - DNA, 15 bp, Homo sapiens
ttttagcaggggagg

SEQ ID NO: 153125 - DNA, 15 bp, Homo sapiens
attttagcaggggag

SEQ ID NO: 153126 - DNA, 15 bp, Homo sapiens
gattttagcagggga

SEQ ID NO: 153127 - DNA, 15 bp, Homo sapiens
tgattttagcagggg

SEQ ID NO: 153128 - DNA, 15 bp, Homo sapiens
ctgattttagcaggg

SEQ ID NO: 153129 - DNA, 15 bp, Homo sapiens
cctgattttagcagg

SEQ ID NO: 153130 - DNA, 15 bp, Homo sapiens
gcctgattttagcag

SEQ ID NO: 153131 - DNA, 15 bp, Homo sapiens
agcctgattttagca

SEQ ID NO: 153132 - DNA, 15 bp, Homo sapiens
aagcctgattttagc

SEQ ID NO: 153133 - DNA, 15 bp, Homo sapiens
gaagcctgattttag

SEQ ID NO: 153134 - DNA, 15 bp, Homo sapiens
ggaagcctgatttta

SEQ ID NO: 153135 - DNA, 15 bp, Homo sapiens
gggaagcctgatttt

SEQ ID NO: 153136 - DNA, 15 bp, Homo sapiens
agggaagcctgattt

SEQ ID NO: 153137 - DNA, 15 bp, Homo sapiens
aagggaagcctgatt

SEQ ID NO: 153138 - DNA, 15 bp, Homo sapiens
gaagggaagcctgat

SEQ ID NO: 153139 - DNA, 15 bp, Homo sapiens
tgaagggaagcctga

SEQ ID NO: 153140 - DNA, 15 bp, Homo sapiens
gtgaagggaagcctg

SEQ ID NO: 153141 - DNA, 15 bp, Homo sapiens
ggtgaagggaagcct

SEQ ID NO: 153142 - DNA, 15 bp, Homo sapiens
aggtgaagggaagcc

SEQ ID NO: 153143 - DNA, 15 bp, Homo sapiens
caggtgaagggaagc

SEQ ID NO: 153144 - DNA, 15 bp, Homo sapiens
acaggtgaagggaag

SEQ ID NO: 153145 - DNA, 15 bp, Homo sapiens
gacaggtgaagggaa

SEQ ID NO: 153146 - DNA, 15 bp, Homo sapiens
tgacaggtgaaggga

SEQ ID NO: 153147 - DNA, 15 bp, Homo sapiens
atgacaggtgaaggg

SEQ ID NO: 153148 - DNA, 15 bp, Homo sapiens
aatgacaggtgaagg

SEQ ID NO: 153149 - DNA, 15 bp, Homo sapiens
caatgacaggtgaag

SEQ ID NO: 153150 - DNA, 15 bp, Homo sapiens
ccaatgacaggtgaa

SEQ ID NO: 153151 - DNA, 15 bp, Homo sapiens
gccaatgacaggtga

SEQ ID NO: 153152 - DNA, 15 bp, Homo sapiens
ggccaatgacaggtg

SEQ ID NO: 153153 - DNA, 15 bp, Homo sapiens
tggccaatgacaggt

SEQ ID NO: 153154 - DNA, 15 bp, Homo sapiens
ctggccaatgacagg

SEQ ID NO: 153155 - DNA, 15 bp, Homo sapiens
tctggccaatgacag

SEQ ID NO: 153156 - DNA, 15 bp, Homo sapiens
ttctggccaatgaca

SEQ ID NO: 153157 - DNA, 15 bp, Homo sapiens
gttctggccaatgac

SEQ ID NO: 153158 - DNA, 15 bp, Homo sapiens
agttctggccaatga

SEQ ID NO: 153159 - DNA, 15 bp, Homo sapiens
cagttctggccaatg

SEQ ID NO: 153160 - DNA, 15 bp, Homo sapiens
ccagttctggccaat

SEQ ID NO: 153161 - DNA, 15 bp, Homo sapiens
cccagttctggccaa

SEQ ID NO: 153162 - DNA, 15 bp, Homo sapiens
acccagttctggcca

SEQ ID NO: 153163 - DNA, 15 bp, Homo sapiens
cacccagttctggcc

SEQ ID NO: 153164 - DNA, 15 bp, Homo sapiens
tcacccagttctggc

SEQ ID NO: 153165 - DNA, 15 bp, Homo sapiens
ttcacccagttctgg

SEQ ID NO: 153166 - DNA, 15 bp, Homo sapiens
tttcacccagttctg

SEQ ID NO: 153167 - DNA, 15 bp, Homo sapiens
aaaaagaaaaaggaa

SEQ ID NO: 153168 - DNA, 15 bp, Homo sapiens
caaaaagaaaaagga

SEQ ID NO: 153169 - DNA, 15 bp, Homo sapiens
tcaaaaagaaaaagg

SEQ ID NO: 153170 - DNA, 15 bp, Homo sapiens
atcaaaaagaaaaag

SEQ ID NO: 153171 - DNA, 15 bp, Homo sapiens
aatcaaaaagaaaaa

SEQ ID NO: 153172 - DNA, 15 bp, Homo sapiens
gaatcaaaaagaaaa

SEQ ID NO: 153173 - DNA, 15 bp, Homo sapiens
tgaatcaaaaagaaa

SEQ ID NO: 153174 - DNA, 15 bp, Homo sapiens
ttgaatcaaaaagaa

SEQ ID NO: 153175 - DNA, 15 bp, Homo sapiens
cttgaatcaaaaaga

SEQ ID NO: 153176 - DNA, 15 bp, Homo sapiens
tcttgaatcaaaaag

SEQ ID NO: 153177 - DNA, 15 bp, Homo sapiens
atcttgaatcaaaaa

SEQ ID NO: 153178 - DNA, 15 bp, Homo sapiens
catcttgaatcaaaa

SEQ ID NO: 153179 - DNA, 15 bp, Homo sapiens
tcatcttgaatcaaa

SEQ ID NO: 153180 - DNA, 15 bp, Homo sapiens
ttcatcttgaatcaa

SEQ ID NO: 153181 - DNA, 15 bp, Homo sapiens
tttcatcttgaatca

SEQ ID NO: 153182 - DNA, 15 bp, Homo sapiens
ttttcatcttgaatc

SEQ ID NO: 153183 - DNA, 15 bp, Homo sapiens
attttcatcttgaat

SEQ ID NO: 153184 - DNA, 15 bp, Homo sapiens
tattttcatcttgaa

SEQ ID NO: 153185 - DNA, 15 bp, Homo sapiens
atattttcatcttga

SEQ ID NO: 153186 - DNA, 15 bp, Homo sapiens
aatattttcatcttg

SEQ ID NO: 153187 - DNA, 15 bp, Homo sapiens
gaatattttcatctt

SEQ ID NO: 153188 - DNA, 15 bp, Homo sapiens
agaatattttcatct

SEQ ID NO: 153189 - DNA, 15 bp, Homo sapiens
aagaatattttcatc

SEQ ID NO: 153190 - DNA, 15 bp, Homo sapiens
taagaatattttcat

SEQ ID NO: 153191 - DNA, 15 bp, Homo sapiens
ataagaatattttca

SEQ ID NO: 153192 - DNA, 15 bp, Homo sapiens
cataagaatattttc

SEQ ID NO: 153193 - DNA, 15 bp, Homo sapiens
tcataagaatatttt

SEQ ID NO: 153194 - DNA, 15 bp, Homo sapiens
atcataagaatattt

SEQ ID NO: 153195 - DNA, 15 bp, Homo sapiens
aatcataagaatatt

SEQ ID NO: 153196 - DNA, 15 bp, Homo sapiens
taatcataagaatat

SEQ ID NO: 153197 - DNA, 15 bp, Homo sapiens
ataatcataagaata

SEQ ID NO: 153198 - DNA, 15 bp, Homo sapiens
aataatcataagaat

SEQ ID NO: 153199 - DNA, 15 bp, Homo sapiens
aaataatcataagaa

SEQ ID NO: 153200 - DNA, 15 bp, Homo sapiens
aaaataatcataaga

SEQ ID NO: 153201 - DNA, 15 bp, Homo sapiens
aaaaataatcataag

SEQ ID NO: 153202 - DNA, 15 bp, Homo sapiens
gaaaaataatcataa

SEQ ID NO: 153203 - DNA, 15 bp, Homo sapiens
agaaaaataatcata

SEQ ID NO: 153204 - DNA, 15 bp, Homo sapiens
gagaaaaataatcat

SEQ ID NO: 153205 - DNA, 15 bp, Homo sapiens
tgagaaaaataatca

SEQ ID NO: 153206 - DNA, 15 bp, Homo sapiens
gtgagaaaaataatc

SEQ ID NO: 153207 - DNA, 15 bp, Homo sapiens
ggtgagaaaaataat

SEQ ID NO: 153208 - DNA, 15 bp, Homo sapiens
tggtgagaaaaataa

SEQ ID NO: 153209 - DNA, 15 bp, Homo sapiens
gtggtgagaaaaata

SEQ ID NO: 153210 - DNA, 15 bp, Homo sapiens
agtggtgagaaaaat

SEQ ID NO: 153211 - DNA, 15 bp, Homo sapiens
cagtggtgagaaaaa

SEQ ID NO: 153212 - DNA, 15 bp, Homo sapiens
gcagtggtgagaaaa

SEQ ID NO: 153213 - DNA, 15 bp, Homo sapiens
ggcagtggtgagaaa

SEQ ID NO: 153214 - DNA, 15 bp, Homo sapiens
gggcagtggtgagaa

SEQ ID NO: 153215 - DNA, 15 bp, Homo sapiens
tgggcagtggtgaga

SEQ ID NO: 153216 - DNA, 15 bp, Homo sapiens
ctgggcagtggtgag

SEQ ID NO: 153217 - DNA, 15 bp, Homo sapiens
tctgggcagtggtga

SEQ ID NO: 153218 - DNA, 15 bp, Homo sapiens
ctctgggcagtggtg

SEQ ID NO: 153219 - DNA, 15 bp, Homo sapiens
tctctgggcagtggt

SEQ ID NO: 153220 - DNA, 15 bp, Homo sapiens
atctctgggcagtgg

SEQ ID NO: 153221 - DNA, 15 bp, Homo sapiens
tatctctgggcagtg

SEQ ID NO: 153222 - DNA, 15 bp, Homo sapiens
ttatctctgggcagt

SEQ ID NO: 153223 - DNA, 15 bp, Homo sapiens
gttatctctgggcag

SEQ ID NO: 153224 - DNA, 15 bp, Homo sapiens
ggttatctctgggca

SEQ ID NO: 153225 - DNA, 15 bp, Homo sapiens
tggttatctctgggc

SEQ ID NO: 153226 - DNA, 15 bp, Homo sapiens
ctggttatctctggg

SEQ ID NO: 153227 - DNA, 15 bp, Homo sapiens
gctggttatctctgg

SEQ ID NO: 153228 - DNA, 15 bp, Homo sapiens
tgctggttatctctg

SEQ ID NO: 153229 - DNA, 15 bp, Homo sapiens
gtgctggttatctct

SEQ ID NO: 153230 - DNA, 15 bp, Homo sapiens
tgtgctggttatctc

SEQ ID NO: 153231 - DNA, 15 bp, Homo sapiens
atgtgctggttatct

SEQ ID NO: 153232 - DNA, 15 bp, Homo sapiens
aatgtgctggttatc

SEQ ID NO: 153233 - DNA, 15 bp, Homo sapiens
taatgtgctggttat

SEQ ID NO: 153234 - DNA, 15 bp, Homo sapiens
ttaatgtgctggtta

SEQ ID NO: 153235 - DNA, 15 bp, Homo sapiens
gttaatgtgctggtt

SEQ ID NO: 153236 - DNA, 15 bp, Homo sapiens
tgttaatgtgctggt

SEQ ID NO: 153237 - DNA, 15 bp, Homo sapiens
atgttaatgtgctgg

SEQ ID NO: 153238 - DNA, 15 bp, Homo sapiens
catgttaatgtgctg

SEQ ID NO: 153239 - DNA, 15 bp, Homo sapiens
ccatgttaatgtgct

SEQ ID NO: 153240 - DNA, 15 bp, Homo sapiens
gccatgttaatgtgc

SEQ ID NO: 153241 - DNA, 15 bp, Homo sapiens
ggccatgttaatgtg

SEQ ID NO: 153242 - DNA, 15 bp, Homo sapiens
aggccatgttaatgt

SEQ ID NO: 153243 - DNA, 15 bp, Homo sapiens
aaggccatgttaatg

SEQ ID NO: 153244 - DNA, 15 bp, Homo sapiens
aaaggccatgttaat

SEQ ID NO: 153245 - DNA, 15 bp, Homo sapiens
aaaaggccatgttaa

SEQ ID NO: 153246 - DNA, 15 bp, Homo sapiens
gaaaaggccatgtta

SEQ ID NO: 153247 - DNA, 15 bp, Homo sapiens
agaaaaggccatgtt

SEQ ID NO: 153248 - DNA, 15 bp, Homo sapiens
gagaaaaggccatgt

SEQ ID NO: 153249 - DNA, 15 bp, Homo sapiens
ggagaaaaggccatg

SEQ ID NO: 153250 - DNA, 15 bp, Homo sapiens
tggagaaaaggccat

SEQ ID NO: 153251 - DNA, 15 bp, Homo sapiens
atggagaaaaggcca

SEQ ID NO: 153252 - DNA, 15 bp, Homo sapiens
catggagaaaaggcc

SEQ ID NO: 153253 - DNA, 15 bp, Homo sapiens
tcatggagaaaaggc

SEQ ID NO: 153254 - DNA, 15 bp, Homo sapiens
ttcatggagaaaagg

SEQ ID NO: 153255 - DNA, 15 bp, Homo sapiens
attcatggagaaaag

SEQ ID NO: 153256 - DNA, 15 bp, Homo sapiens
tattcatggagaaaa

SEQ ID NO: 153257 - DNA, 15 bp, Homo sapiens
ctattcatggagaaa

SEQ ID NO: 153258 - DNA, 15 bp, Homo sapiens
gctattcatggagaa

SEQ ID NO: 153259 - DNA, 15 bp, Homo sapiens
tgctattcatggaga

SEQ ID NO: 153260 - DNA, 15 bp, Homo sapiens
gtgctattcatggag

SEQ ID NO: 153261 - DNA, 15 bp, Homo sapiens
agtgctattcatgga

SEQ ID NO: 153262 - DNA, 15 bp, Homo sapiens
tagtgctattcatgg

SEQ ID NO: 153263 - DNA, 15 bp, Homo sapiens
ctagtgctattcatg

SEQ ID NO: 153264 - DNA, 15 bp, Homo sapiens
cctagtgctattcat

SEQ ID NO: 153265 - DNA, 15 bp, Homo sapiens
ccctagtgctattca

SEQ ID NO: 153266 - DNA, 15 bp, Homo sapiens
accctagtgctattc

SEQ ID NO: 153267 - DNA, 15 bp, Homo sapiens
caccctagtgctatt

SEQ ID NO: 153268 - DNA, 15 bp, Homo sapiens
gcaccctagtgctat

SEQ ID NO: 153269 - DNA, 15 bp, Homo sapiens
ggcaccctagtgcta

SEQ ID NO: 153270 - DNA, 15 bp, Homo sapiens
gggcaccctagtgct

SEQ ID NO: 153271 - DNA, 15 bp, Homo sapiens
tgggcaccctagtgc

SEQ ID NO: 153272 - DNA, 15 bp, Homo sapiens
ctgggcaccctagtg

SEQ ID NO: 153273 - DNA, 15 bp, Homo sapiens
actgggcaccctagt

SEQ ID NO: 153274 - DNA, 15 bp, Homo sapiens
cactgggcaccctag

SEQ ID NO: 153275 - DNA, 15 bp, Homo sapiens
ccactgggcacccta

SEQ ID NO: 153276 - DNA, 15 bp, Homo sapiens
tccactgggcaccct

SEQ ID NO: 153277 - DNA, 15 bp, Homo sapiens
gtccactgggcaccc

SEQ ID NO: 153278 - DNA, 15 bp, Homo sapiens
tgtccactgggcacc

SEQ ID NO: 153279 - DNA, 15 bp, Homo sapiens
ctgtccactgggcac

SEQ ID NO: 153280 - DNA, 15 bp, Homo sapiens
tctgtccactgggca

SEQ ID NO: 153281 - DNA, 15 bp, Homo sapiens
gtctgtccactgggc

SEQ ID NO: 153282 - DNA, 15 bp, Homo sapiens
tgtctgtccactggg

SEQ ID NO: 153283 - DNA, 15 bp, Homo sapiens
gtgtctgtccactgg

SEQ ID NO: 153284 - DNA, 15 bp, Homo sapiens
tgtgtctgtccactg

SEQ ID NO: 153285 - DNA, 15 bp, Homo sapiens
atgtgtctgtccact

SEQ ID NO: 153286 - DNA, 15 bp, Homo sapiens
tatgtgtctgtccac

SEQ ID NO: 153287 - DNA, 15 bp, Homo sapiens
ctatgtgtctgtcca

SEQ ID NO: 153288 - DNA, 15 bp, Homo sapiens
gctatgtgtctgtcc

SEQ ID NO: 153289 - DNA, 15 bp, Homo sapiens
agctatgtgtctgtc

SEQ ID NO: 153290 - DNA, 15 bp, Homo sapiens
cagctatgtgtctgt

SEQ ID NO: 153291 - DNA, 15 bp, Homo sapiens
acagctatgtgtctg

SEQ ID NO: 153292 - DNA, 15 bp, Homo sapiens
gacagctatgtgtct

SEQ ID NO: 153293 - DNA, 15 bp, Homo sapiens
ggacagctatgtgtc

SEQ ID NO: 153294 - DNA, 15 bp, Homo sapiens
tggacagctatgtgt

SEQ ID NO: 153295 - DNA, 15 bp, Homo sapiens
gtggacagctatgtg

SEQ ID NO: 153296 - DNA, 15 bp, Homo sapiens
tgtggacagctatgt

SEQ ID NO: 153297 - DNA, 15 bp, Homo sapiens
gtgtggacagctatg

SEQ ID NO: 153298 - DNA, 15 bp, Homo sapiens
tgtgtggacagctat

SEQ ID NO: 153299 - DNA, 15 bp, Homo sapiens
gtgtgtggacagcta

SEQ ID NO: 153300 - DNA, 15 bp, Homo sapiens
ggtgtgtggacagct

SEQ ID NO: 153301 - DNA, 15 bp, Homo sapiens
tggtgtgtggacagc

SEQ ID NO: 153302 - DNA, 15 bp, Homo sapiens
ctggtgtgtggacag

SEQ ID NO: 153303 - DNA, 15 bp, Homo sapiens
gctggtgtgtggaca

SEQ ID NO: 153304 - DNA, 15 bp, Homo sapiens
agctggtgtgtggac

SEQ ID NO: 153305 - DNA, 15 bp, Homo sapiens
aagctggtgtgtgga

SEQ ID NO: 153306 - DNA, 15 bp, Homo sapiens
caagctggtgtgtgg

SEQ ID NO: 153307 - DNA, 15 bp, Homo sapiens
gcaagctggtgtgtg

SEQ ID NO: 153308 - DNA, 15 bp, Homo sapiens
agcaagctggtgtgt

SEQ ID NO: 153309 - DNA, 15 bp, Homo sapiens
cagcaagctggtgtg

SEQ ID NO: 153310 - DNA, 15 bp, Homo sapiens
ccagcaagctggtgt

SEQ ID NO: 153311 - DNA, 15 bp, Homo sapiens
cccagcaagctggtg

SEQ ID NO: 153312 - DNA, 15 bp, Homo sapiens
ccccagcaagctggt

SEQ ID NO: 153313 - DNA, 15 bp, Homo sapiens
tccccagcaagctgg

SEQ ID NO: 153314 - DNA, 15 bp, Homo sapiens
atccccagcaagctg

SEQ ID NO: 153315 - DNA, 15 bp, Homo sapiens
catccccagcaagct

SEQ ID NO: 153316 - DNA, 15 bp, Homo sapiens
gcatccccagcaagc

SEQ ID NO: 153317 - DNA, 15 bp, Homo sapiens
tgcatccccagcaag

SEQ ID NO: 153318 - DNA, 15 bp, Homo sapiens
atgcatccccagcaa

SEQ ID NO: 153319 - DNA, 15 bp, Homo sapiens
tatgcatccccagca

SEQ ID NO: 153320 - DNA, 15 bp, Homo sapiens
ctatgcatccccagc

SEQ ID NO: 153321 - DNA, 15 bp, Homo sapiens
cctatgcatccccag

SEQ ID NO: 153322 - DNA, 15 bp, Homo sapiens
gcctatgcatcccca

SEQ ID NO: 153323 - DNA, 15 bp, Homo sapiens
tgcctatgcatcccc

SEQ ID NO: 153324 - DNA, 15 bp, Homo sapiens
ctgcctatgcatccc

SEQ ID NO: 153325 - DNA, 15 bp, Homo sapiens
tctgcctatgcatcc

SEQ ID NO: 153326 - DNA, 15 bp, Homo sapiens
ctctgcctatgcatc

SEQ ID NO: 153327 - DNA, 15 bp, Homo sapiens
actctgcctatgcat

SEQ ID NO: 153328 - DNA, 15 bp, Homo sapiens
gactctgcctatgca

SEQ ID NO: 153329 - DNA, 15 bp, Homo sapiens
tgactctgcctatgc

SEQ ID NO: 153330 - DNA, 15 bp, Homo sapiens
gtgactctgcctatg

SEQ ID NO: 153331 - DNA, 15 bp, Homo sapiens
tgtgactctgcctat

SEQ ID NO: 153332 - DNA, 15 bp, Homo sapiens
atgtgactctgccta

SEQ ID NO: 153333 - DNA, 15 bp, Homo sapiens
gatgtgactctgcct

SEQ ID NO: 153334 - DNA, 15 bp, Homo sapiens
agatgtgactctgcc

SEQ ID NO: 153335 - DNA, 15 bp, Homo sapiens
cagatgtgactctgc

SEQ ID NO: 153336 - DNA, 15 bp, Homo sapiens
gcagatgtgactctg

SEQ ID NO: 153337 - DNA, 15 bp, Homo sapiens
tgcagatgtgactct

SEQ ID NO: 153338 - DNA, 15 bp, Homo sapiens
gtgcagatgtgactc

SEQ ID NO: 153339 - DNA, 15 bp, Homo sapiens
agtgcagatgtgact

SEQ ID NO: 153340 - DNA, 15 bp, Homo sapiens
gagtgcagatgtgac

SEQ ID NO: 153341 - DNA, 15 bp, Homo sapiens
tgagtgcagatgtga

SEQ ID NO: 153342 - DNA, 15 bp, Homo sapiens
gtgagtgcagatgtg

SEQ ID NO: 153343 - DNA, 15 bp, Homo sapiens
cgtgagtgcagatgt

SEQ ID NO: 153344 - DNA, 15 bp, Homo sapiens
ccgtgagtgcagatg

SEQ ID NO: 153345 - DNA, 15 bp, Homo sapiens
gccgtgagtgcagat

SEQ ID NO: 153346 - DNA, 15 bp, Homo sapiens
ggccgtgagtgcaga

SEQ ID NO: 153347 - DNA, 15 bp, Homo sapiens
aggccgtgagtgcag

SEQ ID NO: 153348 - DNA, 15 bp, Homo sapiens
caggccgtgagtgca

SEQ ID NO: 153349 - DNA, 15 bp, Homo sapiens
acaggccgtgagtgc

SEQ ID NO: 153350 - DNA, 15 bp, Homo sapiens
gacaggccgtgagtg

SEQ ID NO: 153351 - DNA, 15 bp, Homo sapiens
ggacaggccgtgagt

SEQ ID NO: 153352 - DNA, 15 bp, Homo sapiens
aggacaggccgtgag

SEQ ID NO: 153353 - DNA, 15 bp, Homo sapiens
gaggacaggccgtga

SEQ ID NO: 153354 - DNA, 15 bp, Homo sapiens
tgaggacaggccgtg

SEQ ID NO: 153355 - DNA, 15 bp, Homo sapiens
gtgaggacaggccgt

SEQ ID NO: 153356 - DNA, 15 bp, Homo sapiens
tgtgaggacaggccg

SEQ ID NO: 153357 - DNA, 15 bp, Homo sapiens
gtgtgaggacaggcc

SEQ ID NO: 153358 - DNA, 15 bp, Homo sapiens
agtgtgaggacaggc

SEQ ID NO: 153359 - DNA, 15 bp, Homo sapiens
cagtgtgaggacagg

SEQ ID NO: 153360 - DNA, 15 bp, Homo sapiens
gcagtgtgaggacag

SEQ ID NO: 153361 - DNA, 15 bp, Homo sapiens
ggcagtgtgaggaca

SEQ ID NO: 153362 - DNA, 15 bp, Homo sapiens
tggcagtgtgaggac

SEQ ID NO: 153363 - DNA, 15 bp, Homo sapiens
atggcagtgtgagga

SEQ ID NO: 153364 - DNA, 15 bp, Homo sapiens
catggcagtgtgagg

SEQ ID NO: 153365 - DNA, 15 bp, Homo sapiens
acatggcagtgtgag

SEQ ID NO: 153366 - DNA, 15 bp, Homo sapiens
cacatggcagtgtga

SEQ ID NO: 153367 - DNA, 15 bp, Homo sapiens
ccacatggcagtgtg

SEQ ID NO: 153368 - DNA, 15 bp, Homo sapiens
tccacatggcagtgt

SEQ ID NO: 153369 - DNA, 15 bp, Homo sapiens
ctccacatggcagtg

SEQ ID NO: 153370 - DNA, 15 bp, Homo sapiens
tctccacatggcagt

SEQ ID NO: 153371 - DNA, 15 bp, Homo sapiens
ctctccacatggcag

SEQ ID NO: 153372 - DNA, 15 bp, Homo sapiens
gctctccacatggca

SEQ ID NO: 153373 - DNA, 15 bp, Homo sapiens
ggctctccacatggc

SEQ ID NO: 153374 - DNA, 15 bp, Homo sapiens
tggctctccacatgg

SEQ ID NO: 153375 - DNA, 15 bp, Homo sapiens
ctggctctccacatg

SEQ ID NO: 153376 - DNA, 15 bp, Homo sapiens
gctggctctccacat

SEQ ID NO: 153377 - DNA, 15 bp, Homo sapiens
tgctggctctccaca

SEQ ID NO: 153378 - DNA, 15 bp, Homo sapiens
ctgctggctctccac

SEQ ID NO: 153379 - DNA, 15 bp, Homo sapiens
gctgctggctctcca

SEQ ID NO: 153380 - DNA, 15 bp, Homo sapiens
ggctgctggctctcc

SEQ ID NO: 153381 - DNA, 15 bp, Homo sapiens
tggctgctggctctc

SEQ ID NO: 153382 - DNA, 15 bp, Homo sapiens
gtggctgctggctct

SEQ ID NO: 153383 - DNA, 15 bp, Homo sapiens
tgtggctgctggctc

SEQ ID NO: 153384 - DNA, 15 bp, Homo sapiens
gtgtggctgctggct

SEQ ID NO: 153385 - DNA, 15 bp, Homo sapiens
ggtgtggctgctggc

SEQ ID NO: 153386 - DNA, 15 bp, Homo sapiens
tggtgtggctgctgg

SEQ ID NO: 153387 - DNA, 15 bp, Homo sapiens
atggtgtggctgctg

SEQ ID NO: 153388 - DNA, 15 bp, Homo sapiens
catggtgtggctgct

SEQ ID NO: 153389 - DNA, 15 bp, Homo sapiens
ccatggtgtggctgc

SEQ ID NO: 153390 - DNA, 15 bp, Homo sapiens
cccatggtgtggctg

SEQ ID NO: 153391 - DNA, 15 bp, Homo sapiens
gcccatggtgtggct

SEQ ID NO: 153392 - DNA, 15 bp, Homo sapiens
ggcccatggtgtggc

SEQ ID NO: 153393 - DNA, 15 bp, Homo sapiens
cggcccatggtgtgg

SEQ ID NO: 153394 - DNA, 15 bp, Homo sapiens
acggcccatggtgtg

SEQ ID NO: 153395 - DNA, 15 bp, Homo sapiens
gacggcccatggtgt

SEQ ID NO: 153396 - DNA, 15 bp, Homo sapiens
ggacggcccatggtg

SEQ ID NO: 153397 - DNA, 15 bp, Homo sapiens
tggacggcccatggt

SEQ ID NO: 153398 - DNA, 15 bp, Homo sapiens
atggacggcccatgg

SEQ ID NO: 153399 - DNA, 15 bp, Homo sapiens
catggacggcccatg

SEQ ID NO: 153400 - DNA, 15 bp, Homo sapiens
gcatggacggcccat

SEQ ID NO: 153401 - DNA, 15 bp, Homo sapiens
agcatggacggccca

SEQ ID NO: 153402 - DNA, 15 bp, Homo sapiens
gagcatggacggccc

SEQ ID NO: 153403 - DNA, 15 bp, Homo sapiens
tgagcatggacggcc

SEQ ID NO: 153404 - DNA, 15 bp, Homo sapiens
gtgagcatggacggc

SEQ ID NO: 153405 - DNA, 15 bp, Homo sapiens
cgtgagcatggacgg

SEQ ID NO: 153406 - DNA, 15 bp, Homo sapiens
ccgtgagcatggacg

SEQ ID NO: 153407 - DNA, 15 bp, Homo sapiens
cccgtgagcatggac

SEQ ID NO: 153408 - DNA, 15 bp, Homo sapiens
tcccgtgagcatgga

SEQ ID NO: 153409 - DNA, 15 bp, Homo sapiens
ctcccgtgagcatgg

SEQ ID NO: 153410 - DNA, 15 bp, Homo sapiens
actcccgtgagcatg

SEQ ID NO: 153411 - DNA, 15 bp, Homo sapiens
cactcccgtgagcat

SEQ ID NO: 153412 - DNA, 15 bp, Homo sapiens
ccactcccgtgagca

SEQ ID NO: 153413 - DNA, 15 bp, Homo sapiens
gccactcccgtgagc

SEQ ID NO: 153414 - DNA, 15 bp, Homo sapiens
tgccactcccgtgag

SEQ ID NO: 153415 - DNA, 15 bp, Homo sapiens
ctgccactcccgtga

SEQ ID NO: 153416 - DNA, 15 bp, Homo sapiens
actgccactcccgtg

SEQ ID NO: 153417 - DNA, 15 bp, Homo sapiens
tactgccactcccgt

SEQ ID NO: 153418 - DNA, 15 bp, Homo sapiens
atactgccactcccg

SEQ ID NO: 153419 - DNA, 15 bp, Homo sapiens
gatactgccactccc

SEQ ID NO: 153420 - DNA, 15 bp, Homo sapiens
tgatactgccactcc

SEQ ID NO: 153421 - DNA, 15 bp, Homo sapiens
ctgatactgccactc

SEQ ID NO: 153422 - DNA, 15 bp, Homo sapiens
tctgatactgccact

SEQ ID NO: 153423 - DNA, 15 bp, Homo sapiens
atctgatactgccac

SEQ ID NO: 153424 - DNA, 15 bp, Homo sapiens
gatctgatactgcca

SEQ ID NO: 153425 - DNA, 15 bp, Homo sapiens
agatctgatactgcc

SEQ ID NO: 153426 - DNA, 15 bp, Homo sapiens
cagatctgatactgc

SEQ ID NO: 153427 - DNA, 15 bp, Homo sapiens
tcagatctgatactg

SEQ ID NO: 153428 - DNA, 15 bp, Homo sapiens
ctcagatctgatact

SEQ ID NO: 153429 - DNA, 15 bp, Homo sapiens
gctcagatctgatac

SEQ ID NO: 153430 - DNA, 15 bp, Homo sapiens
agctcagatctgata

SEQ ID NO: 153431 - DNA, 15 bp, Homo sapiens
aagctcagatctgat

SEQ ID NO: 153432 - DNA, 15 bp, Homo sapiens
gaagctcagatctga

SEQ ID NO: 153433 - DNA, 15 bp, Homo sapiens
cgaagctcagatctg

SEQ ID NO: 153434 - DNA, 15 bp, Homo sapiens
acgaagctcagatct

SEQ ID NO: 153435 - DNA, 15 bp, Homo sapiens
cacgaagctcagatc

SEQ ID NO: 153436 - DNA, 15 bp, Homo sapiens
acacgaagctcagat

SEQ ID NO: 153437 - DNA, 15 bp, Homo sapiens
cacacgaagctcaga

SEQ ID NO: 153438 - DNA, 15 bp, Homo sapiens
gcacacgaagctcag

SEQ ID NO: 153439 - DNA, 15 bp, Homo sapiens
ggcacacgaagctca

SEQ ID NO: 153440 - DNA, 15 bp, Homo sapiens
gggcacacgaagctc

SEQ ID NO: 153441 - DNA, 15 bp, Homo sapiens
tgggcacacgaagct

SEQ ID NO: 153442 - DNA, 15 bp, Homo sapiens
ctgggcacacgaagc

SEQ ID NO: 153443 - DNA, 15 bp, Homo sapiens
cctgggcacacgaag

SEQ ID NO: 153444 - DNA, 15 bp, Homo sapiens
gcctgggcacacgaa

SEQ ID NO: 153445 - DNA, 15 bp, Homo sapiens
cgcctgggcacacga

SEQ ID NO: 153446 - DNA, 15 bp, Homo sapiens
acgcctgggcacacg

SEQ ID NO: 153447 - DNA, 15 bp, Homo sapiens
gacgcctgggcacac

SEQ ID NO: 153448 - DNA, 15 bp, Homo sapiens
agacgcctgggcaca

SEQ ID NO: 153449 - DNA, 15 bp, Homo sapiens
gagacgcctgggcac

SEQ ID NO: 153450 - DNA, 15 bp, Homo sapiens
agagacgcctgggca

SEQ ID NO: 153451 - DNA, 15 bp, Homo sapiens
gagagacgcctgggc

SEQ ID NO: 153452 - DNA, 15 bp, Homo sapiens
tgagagacgcctggg

SEQ ID NO: 153453 - DNA, 15 bp, Homo sapiens
gtgagagacgcctgg

SEQ ID NO: 153454 - DNA, 15 bp, Homo sapiens
tgtgagagacgcctg

SEQ ID NO: 153455 - DNA, 15 bp, Homo sapiens
atgtgagagacgcct

SEQ ID NO: 153456 - DNA, 15 bp, Homo sapiens
gatgtgagagacgcc

SEQ ID NO: 153457 - DNA, 15 bp, Homo sapiens
tgatgtgagagacgc

SEQ ID NO: 153458 - DNA, 15 bp, Homo sapiens
ctgatgtgagagacg

SEQ ID NO: 153459 - DNA, 15 bp, Homo sapiens
actgatgtgagagac

SEQ ID NO: 153460 - DNA, 15 bp, Homo sapiens
cactgatgtgagaga

SEQ ID NO: 153461 - DNA, 15 bp, Homo sapiens
gcactgatgtgagag

SEQ ID NO: 153462 - DNA, 15 bp, Homo sapiens
tgcactgatgtgaga

SEQ ID NO: 153463 - DNA, 15 bp, Homo sapiens
atgcactgatgtgag

SEQ ID NO: 153464 - DNA, 15 bp, Homo sapiens
tatgcactgatgtga

SEQ ID NO: 153465 - DNA, 15 bp, Homo sapiens
ctatgcactgatgtg

SEQ ID NO: 153466 - DNA, 15 bp, Homo sapiens
cctatgcactgatgt

SEQ ID NO: 153467 - DNA, 15 bp, Homo sapiens
ccctatgcactgatg

SEQ ID NO: 153468 - DNA, 15 bp, Homo sapiens
tccctatgcactgat

SEQ ID NO: 153469 - DNA, 15 bp, Homo sapiens
gtccctatgcactga

SEQ ID NO: 153470 - DNA, 15 bp, Homo sapiens
ggtccctatgcactg

SEQ ID NO: 153471 - DNA, 15 bp, Homo sapiens
gggtccctatgcact

SEQ ID NO: 153472 - DNA, 15 bp, Homo sapiens
agggtccctatgcac

SEQ ID NO: 153473 - DNA, 15 bp, Homo sapiens
gagggtccctatgca

SEQ ID NO: 153474 - DNA, 15 bp, Homo sapiens
agagggtccctatgc

SEQ ID NO: 153475 - DNA, 15 bp, Homo sapiens
aagagggtccctatg

SEQ ID NO: 153476 - DNA, 15 bp, Homo sapiens
aaagagggtccctat

SEQ ID NO: 153477 - DNA, 15 bp, Homo sapiens
caaagagggtcccta

SEQ ID NO: 153478 - DNA, 15 bp, Homo sapiens
acaaagagggtccct

SEQ ID NO: 153479 - DNA, 15 bp, Homo sapiens
aacaaagagggtccc

SEQ ID NO: 153480 - DNA, 15 bp, Homo sapiens
gaacaaagagggtcc

SEQ ID NO: 153481 - DNA, 15 bp, Homo sapiens
agaacaaagagggtc

SEQ ID NO: 153482 - DNA, 15 bp, Homo sapiens
cagaacaaagagggt

SEQ ID NO: 153483 - DNA, 15 bp, Homo sapiens
acagaacaaagaggg

SEQ ID NO: 153484 - DNA, 15 bp, Homo sapiens
cacagaacaaagagg

SEQ ID NO: 153485 - DNA, 15 bp, Homo sapiens
ccacagaacaaagag

SEQ ID NO: 153486 - DNA, 15 bp, Homo sapiens
gccacagaacaaaga

SEQ ID NO: 153487 - DNA, 15 bp, Homo sapiens
ggccacagaacaaag

SEQ ID NO: 153488 - DNA, 15 bp, Homo sapiens
gggccacagaacaaa

SEQ ID NO: 153489 - DNA, 15 bp, Homo sapiens
tgggccacagaacaa

SEQ ID NO: 153490 - DNA, 15 bp, Homo sapiens
ctgggccacagaaca

SEQ ID NO: 153491 - DNA, 15 bp, Homo sapiens
actgggccacagaac

SEQ ID NO: 153492 - DNA, 15 bp, Homo sapiens
cactgggccacagaa

SEQ ID NO: 153493 - DNA, 15 bp, Homo sapiens
acactgggccacaga

SEQ ID NO: 153494 - DNA, 15 bp, Homo sapiens
cacactgggccacag

SEQ ID NO: 153495 - DNA, 15 bp, Homo sapiens
gcacactgggccaca

SEQ ID NO: 153496 - DNA, 15 bp, Homo sapiens
ggcacactgggccac

SEQ ID NO: 153497 - DNA, 15 bp, Homo sapiens
gggcacactgggcca

SEQ ID NO: 153498 - DNA, 15 bp, Homo sapiens
tgggcacactgggcc

SEQ ID NO: 153499 - DNA, 15 bp, Homo sapiens
atgggcacactgggc

SEQ ID NO: 153500 - DNA, 15 bp, Homo sapiens
catgggcacactggg

SEQ ID NO: 153501 - DNA, 15 bp, Homo sapiens
gcatgggcacactgg

SEQ ID NO: 153502 - DNA, 15 bp, Homo sapiens
ggcatgggcacactg

SEQ ID NO: 153503 - DNA, 15 bp, Homo sapiens
tggcatgggcacact

SEQ ID NO: 153504 - DNA, 15 bp, Homo sapiens
gtggcatgggcacac

SEQ ID NO: 153505 - DNA, 15 bp, Homo sapiens
tgtggcatgggcaca

SEQ ID NO: 153506 - DNA, 15 bp, Homo sapiens
ctgtggcatgggcac

SEQ ID NO: 153507 - DNA, 15 bp, Homo sapiens
tctgtggcatgggca

SEQ ID NO: 153508 - DNA, 15 bp, Homo sapiens
atctgtggcatgggc

SEQ ID NO: 153509 - DNA, 15 bp, Homo sapiens
catctgtggcatggg

SEQ ID NO: 153510 - DNA, 15 bp, Homo sapiens
ccatctgtggcatgg

SEQ ID NO: 153511 - DNA, 15 bp, Homo sapiens
gccatctgtggcatg

SEQ ID NO: 153512 - DNA, 15 bp, Homo sapiens
agccatctgtggcat

SEQ ID NO: 153513 - DNA, 15 bp, Homo sapiens
aagccatctgtggca

SEQ ID NO: 153514 - DNA, 15 bp, Homo sapiens
gaagccatctgtggc

SEQ ID NO: 153515 - DNA, 15 bp, Homo sapiens
tgaagccatctgtgg

SEQ ID NO: 153516 - DNA, 15 bp, Homo sapiens
ctgaagccatctgtg

SEQ ID NO: 153517 - DNA, 15 bp, Homo sapiens
actgaagccatctgt

SEQ ID NO: 153518 - DNA, 15 bp, Homo sapiens
gactgaagccatctg

SEQ ID NO: 153519 - DNA, 15 bp, Homo sapiens
tgactgaagccatct

SEQ ID NO: 153520 - DNA, 15 bp, Homo sapiens
ctgactgaagccatc

SEQ ID NO: 153521 - DNA, 15 bp, Homo sapiens
gctgactgaagccat

SEQ ID NO: 153522 - DNA, 15 bp, Homo sapiens
tgctgactgaagcca

SEQ ID NO: 153523 - DNA, 15 bp, Homo sapiens
ctgctgactgaagcc

SEQ ID NO: 153524 - DNA, 15 bp, Homo sapiens
tctgctgactgaagc

SEQ ID NO: 153525 - DNA, 15 bp, Homo sapiens
gtctgctgactgaag

SEQ ID NO: 153526 - DNA, 15 bp, Homo sapiens
tgtctgctgactgaa

SEQ ID NO: 153527 - DNA, 15 bp, Homo sapiens
gtgtctgctgactga

SEQ ID NO: 153528 - DNA, 15 bp, Homo sapiens
ggtgtctgctgactg

SEQ ID NO: 153529 - DNA, 15 bp, Homo sapiens
aggtgtctgctgact

SEQ ID NO: 153530 - DNA, 15 bp, Homo sapiens
gaggtgtctgctgac

SEQ ID NO: 153531 - DNA, 15 bp, Homo sapiens
ggaggtgtctgctga

SEQ ID NO: 153532 - DNA, 15 bp, Homo sapiens
aggaggtgtctgctg

SEQ ID NO: 153533 - DNA, 15 bp, Homo sapiens
aaggaggtgtctgct

SEQ ID NO: 153534 - DNA, 15 bp, Homo sapiens
gaaggaggtgtctgc

SEQ ID NO: 153535 - DNA, 15 bp, Homo sapiens
agaaggaggtgtctg

SEQ ID NO: 153536 - DNA, 15 bp, Homo sapiens
tagaaggaggtgtct

SEQ ID NO: 153537 - DNA, 15 bp, Homo sapiens
ctagaaggaggtgtc

SEQ ID NO: 153538 - DNA, 15 bp, Homo sapiens
tctagaaggaggtgt

SEQ ID NO: 153539 - DNA, 15 bp, Homo sapiens
gtctagaaggaggtg

SEQ ID NO: 153540 - DNA, 15 bp, Homo sapiens
tgtctagaaggaggt

SEQ ID NO: 153541 - DNA, 15 bp, Homo sapiens
gtgtctagaaggagg

SEQ ID NO: 153542 - DNA, 15 bp, Homo sapiens
agtgtctagaaggag

SEQ ID NO: 153543 - DNA, 15 bp, Homo sapiens
gagtgtctagaagga

SEQ ID NO: 153544 - DNA, 15 bp, Homo sapiens
tgagtgtctagaagg

SEQ ID NO: 153545 - DNA, 15 bp, Homo sapiens
gtgagtgtctagaag

SEQ ID NO: 153546 - DNA, 15 bp, Homo sapiens
tgtgagtgtctagaa

SEQ ID NO: 153547 - DNA, 15 bp, Homo sapiens
gtgtgagtgtctaga

SEQ ID NO: 153548 - DNA, 15 bp, Homo sapiens
agtgtgagtgtctag

SEQ ID NO: 153549 - DNA, 15 bp, Homo sapiens
gagtgtgagtgtcta

SEQ ID NO: 153550 - DNA, 15 bp, Homo sapiens
tgagtgtgagtgtct

SEQ ID NO: 153551 - DNA, 15 bp, Homo sapiens
gtgagtgtgagtgtc

SEQ ID NO: 153552 - DNA, 15 bp, Homo sapiens
agtgagtgtgagtgt

SEQ ID NO: 153553 - DNA, 15 bp, Homo sapiens
gagtgagtgtgagtg

SEQ ID NO: 153554 - DNA, 15 bp, Homo sapiens
ggagtgagtgtgagt

SEQ ID NO: 153555 - DNA, 15 bp, Homo sapiens
aggagtgagtgtgag

SEQ ID NO: 153556 - DNA, 15 bp, Homo sapiens
caggagtgagtgtga

SEQ ID NO: 153557 - DNA, 15 bp, Homo sapiens
ccaggagtgagtgtg

SEQ ID NO: 153558 - DNA, 15 bp, Homo sapiens
gccaggagtgagtgt

SEQ ID NO: 153559 - DNA, 15 bp, Homo sapiens
agccaggagtgagtg

SEQ ID NO: 153560 - DNA, 15 bp, Homo sapiens
cagccaggagtgagt

SEQ ID NO: 153561 - DNA, 15 bp, Homo sapiens
ccagccaggagtgag

SEQ ID NO: 153562 - DNA, 15 bp, Homo sapiens
gccagccaggagtga

SEQ ID NO: 153563 - DNA, 15 bp, Homo sapiens
ggccagccaggagtg

SEQ ID NO: 153564 - DNA, 15 bp, Homo sapiens
gggccagccaggagt

SEQ ID NO: 153565 - DNA, 15 bp, Homo sapiens
agggccagccaggag

SEQ ID NO: 153566 - DNA, 15 bp, Homo sapiens
aagggccagccagga

SEQ ID NO: 153567 - DNA, 15 bp, Homo sapiens
taagggccagccagg

SEQ ID NO: 153568 - DNA, 15 bp, Homo sapiens
ctaagggccagccag

SEQ ID NO: 153569 - DNA, 15 bp, Homo sapiens
gctaagggccagcca

SEQ ID NO: 153570 - DNA, 15 bp, Homo sapiens
tgctaagggccagcc

SEQ ID NO: 153571 - DNA, 15 bp, Homo sapiens
gtgctaagggccagc

SEQ ID NO: 153572 - DNA, 15 bp, Homo sapiens
tgtgctaagggccag

SEQ ID NO: 153573 - DNA, 15 bp, Homo sapiens
gtgtgctaagggcca

SEQ ID NO: 153574 - DNA, 15 bp, Homo sapiens
ggtgtgctaagggcc

SEQ ID NO: 153575 - DNA, 15 bp, Homo sapiens
aggtgtgctaagggc

SEQ ID NO: 153576 - DNA, 15 bp, Homo sapiens
caggtgtgctaaggg

SEQ ID NO: 153577 - DNA, 15 bp, Homo sapiens
acaggtgtgctaagg

SEQ ID NO: 153578 - DNA, 15 bp, Homo sapiens
cacaggtgtgctaag

SEQ ID NO: 153579 - DNA, 15 bp, Homo sapiens
gcacaggtgtgctaa

SEQ ID NO: 153580 - DNA, 15 bp, Homo sapiens
tgcacaggtgtgcta

SEQ ID NO: 153581 - DNA, 15 bp, Homo sapiens
ctgcacaggtgtgct

SEQ ID NO: 153582 - DNA, 15 bp, Homo sapiens
tctgcacaggtgtgc

SEQ ID NO: 153583 - DNA, 15 bp, Homo sapiens
gtctgcacaggtgtg

SEQ ID NO: 153584 - DNA, 15 bp, Homo sapiens
tgtctgcacaggtgt

SEQ ID NO: 153585 - DNA, 15 bp, Homo sapiens
ctgtctgcacaggtg

SEQ ID NO: 153586 - DNA, 15 bp, Homo sapiens
cctgtctgcacaggt

SEQ ID NO: 153587 - DNA, 15 bp, Homo sapiens
gcctgtctgcacagg

SEQ ID NO: 153588 - DNA, 15 bp, Homo sapiens
ggcctgtctgcacag

SEQ ID NO: 153589 - DNA, 15 bp, Homo sapiens
gggcctgtctgcaca

SEQ ID NO: 153590 - DNA, 15 bp, Homo sapiens
tgggcctgtctgcac

SEQ ID NO: 153591 - DNA, 15 bp, Homo sapiens
atgggcctgtctgca

SEQ ID NO: 153592 - DNA, 15 bp, Homo sapiens
aatgggcctgtctgc

SEQ ID NO: 153593 - DNA, 15 bp, Homo sapiens
aaatgggcctgtctg

SEQ ID NO: 153594 - DNA, 15 bp, Homo sapiens
taaatgggcctgtct

SEQ ID NO: 153595 - DNA, 15 bp, Homo sapiens
ataaatgggcctgtc

SEQ ID NO: 153596 - DNA, 15 bp, Homo sapiens
aataaatgggcctgt

SEQ ID NO: 153597 - DNA, 15 bp, Homo sapiens
aaataaatgggcctg

SEQ ID NO: 153598 - DNA, 15 bp, Homo sapiens
aaaataaatgggcct

SEQ ID NO: 153599 - DNA, 15 bp, Homo sapiens
gaaaataaatgggcc

SEQ ID NO: 153600 - DNA, 15 bp, Homo sapiens
agaaaataaatgggc

SEQ ID NO: 153601 - DNA, 15 bp, Homo sapiens
aagaaaataaatggg

SEQ ID NO: 153602 - DNA, 15 bp, Homo sapiens
caagaaaataaatgg

SEQ ID NO: 153603 - DNA, 15 bp, Homo sapiens
acaagaaaataaatg

SEQ ID NO: 153604 - DNA, 15 bp, Homo sapiens
cacaagaaaataaat

SEQ ID NO: 153605 - DNA, 15 bp, Homo sapiens
acacaagaaaataaa

SEQ ID NO: 153606 - DNA, 15 bp, Homo sapiens
tacacaagaaaataa

SEQ ID NO: 153607 - DNA, 15 bp, Homo sapiens
ttacacaagaaaata

SEQ ID NO: 153608 - DNA, 15 bp, Homo sapiens
tttacacaagaaaat

SEQ ID NO: 153609 - DNA, 15 bp, Homo sapiens
atttacacaagaaaa

SEQ ID NO: 153610 - DNA, 15 bp, Homo sapiens
gatttacacaagaaa

SEQ ID NO: 153611 - DNA, 15 bp, Homo sapiens
ggatttacacaagaa

SEQ ID NO: 153612 - DNA, 15 bp, Homo sapiens
gggatttacacaaga

SEQ ID NO: 153613 - DNA, 15 bp, Homo sapiens
tgggatttacacaag

SEQ ID NO: 153614 - DNA, 15 bp, Homo sapiens
ttgggatttacacaa

SEQ ID NO: 153615 - DNA, 15 bp, Homo sapiens
cttgggatttacaca

SEQ ID NO: 153616 - DNA, 15 bp, Homo sapiens
acttgggatttacac

SEQ ID NO: 153617 - DNA, 15 bp, Homo sapiens
tacttgggatttaca

SEQ ID NO: 153618 - DNA, 15 bp, Homo sapiens
ctacttgggatttac

SEQ ID NO: 153619 - DNA, 15 bp, Homo sapiens
cctacttgggattta

SEQ ID NO: 153620 - DNA, 15 bp, Homo sapiens
tcctacttgggattt

SEQ ID NO: 153621 - DNA, 15 bp, Homo sapiens
ctcctacttgggatt

SEQ ID NO: 153622 - DNA, 15 bp, Homo sapiens
cctcctacttgggat

SEQ ID NO: 153623 - DNA, 15 bp, Homo sapiens
tcctcctacttggga

SEQ ID NO: 153624 - DNA, 15 bp, Homo sapiens
gtcctcctacttggg

SEQ ID NO: 153625 - DNA, 15 bp, Homo sapiens
agtcctcctacttgg

SEQ ID NO: 153626 - DNA, 15 bp, Homo sapiens
cagtcctcctacttg

SEQ ID NO: 153627 - DNA, 15 bp, Homo sapiens
ccagtcctcctactt

SEQ ID NO: 153628 - DNA, 15 bp, Homo sapiens
cccagtcctcctact

SEQ ID NO: 153629 - DNA, 15 bp, Homo sapiens
acccagtcctcctac

SEQ ID NO: 153630 - DNA, 15 bp, Homo sapiens
gacccagtcctccta

SEQ ID NO: 153631 - DNA, 15 bp, Homo sapiens
agacccagtcctcct

SEQ ID NO: 153632 - DNA, 15 bp, Homo sapiens
gagacccagtcctcc

SEQ ID NO: 153633 - DNA, 15 bp, Homo sapiens
agagacccagtcctc

SEQ ID NO: 153634 - DNA, 15 bp, Homo sapiens
gagagacccagtcct

SEQ ID NO: 153635 - DNA, 15 bp, Homo sapiens
agagagacccagtcc

SEQ ID NO: 153636 - DNA, 15 bp, Homo sapiens
cagagagacccagtc

SEQ ID NO: 153637 - DNA, 15 bp, Homo sapiens
tcagagagacccagt

SEQ ID NO: 153638 - DNA, 15 bp, Homo sapiens
gtcagagagacccag

SEQ ID NO: 153639 - DNA, 15 bp, Homo sapiens
tgtcagagagaccca

SEQ ID NO: 153640 - DNA, 15 bp, Homo sapiens
ctgtcagagagaccc

SEQ ID NO: 153641 - DNA, 15 bp, Homo sapiens
gctgtcagagagacc

SEQ ID NO: 153642 - DNA, 15 bp, Homo sapiens
tgctgtcagagagac

SEQ ID NO: 153643 - DNA, 15 bp, Homo sapiens
ttgctgtcagagaga

SEQ ID NO: 153644 - DNA, 15 bp, Homo sapiens
attgctgtcagagag

SEQ ID NO: 153645 - DNA, 15 bp, Homo sapiens
cattgctgtcagaga

SEQ ID NO: 153646 - DNA, 15 bp, Homo sapiens
gcattgctgtcagag

SEQ ID NO: 153647 - DNA, 15 bp, Homo sapiens
ggcattgctgtcaga

SEQ ID NO: 153648 - DNA, 15 bp, Homo sapiens
tggcattgctgtcag

SEQ ID NO: 153649 - DNA, 15 bp, Homo sapiens
ctggcattgctgtca

SEQ ID NO: 153650 - DNA, 15 bp, Homo sapiens
gctggcattgctgtc

SEQ ID NO: 153651 - DNA, 15 bp, Homo sapiens
agctggcattgctgt

SEQ ID NO: 153652 - DNA, 15 bp, Homo sapiens
cagctggcattgctg

SEQ ID NO: 153653 - DNA, 15 bp, Homo sapiens
gcagctggcattgct

SEQ ID NO: 153654 - DNA, 15 bp, Homo sapiens
ggcagctggcattgc

SEQ ID NO: 153655 - DNA, 15 bp, Homo sapiens
aggcagctggcattg

SEQ ID NO: 153656 - DNA, 15 bp, Homo sapiens
caggcagctggcatt

SEQ ID NO: 153657 - DNA, 15 bp, Homo sapiens
ccaggcagctggcat

SEQ ID NO: 153658 - DNA, 15 bp, Homo sapiens
gccaggcagctggca

SEQ ID NO: 153659 - DNA, 15 bp, Homo sapiens
tgccaggcagctggc

SEQ ID NO: 153660 - DNA, 15 bp, Homo sapiens
gtgccaggcagctgg

SEQ ID NO: 153661 - DNA, 15 bp, Homo sapiens
ggtgccaggcagctg

SEQ ID NO: 153662 - DNA, 15 bp, Homo sapiens
gggtgccaggcagct

SEQ ID NO: 153663 - DNA, 15 bp, Homo sapiens
agggtgccaggcagc

SEQ ID NO: 153664 - DNA, 15 bp, Homo sapiens
gagggtgccaggcag

SEQ ID NO: 153665 - DNA, 15 bp, Homo sapiens
ggagggtgccaggca

SEQ ID NO: 153666 - DNA, 15 bp, Homo sapiens
tggagggtgccaggc

SEQ ID NO: 153667 - DNA, 15 bp, Homo sapiens
ctggagggtgccagg

SEQ ID NO: 153668 - DNA, 15 bp, Homo sapiens
tctggagggtgccag

SEQ ID NO: 153669 - DNA, 15 bp, Homo sapiens
gtctggagggtgcca

SEQ ID NO: 153670 - DNA, 15 bp, Homo sapiens
tgtctggagggtgcc

SEQ ID NO: 153671 - DNA, 15 bp, Homo sapiens
ctgtctggagggtgc

SEQ ID NO: 153672 - DNA, 15 bp, Homo sapiens
cctgtctggagggtg

SEQ ID NO: 153673 - DNA, 15 bp, Homo sapiens
acctgtctggagggt

SEQ ID NO: 153674 - DNA, 15 bp, Homo sapiens
cacctgtctggaggg

SEQ ID NO: 153675 - DNA, 15 bp, Homo sapiens
ccacctgtctggagg

SEQ ID NO: 153676 - DNA, 15 bp, Homo sapiens
gccacctgtctggag

SEQ ID NO: 153677 - DNA, 15 bp, Homo sapiens
agccacctgtctgga

SEQ ID NO: 153678 - DNA, 15 bp, Homo sapiens
gagccacctgtctgg

SEQ ID NO: 153679 - DNA, 15 bp, Homo sapiens
tgagccacctgtctg

SEQ ID NO: 153680 - DNA, 15 bp, Homo sapiens
ttgagccacctgtct

SEQ ID NO: 153681 - DNA, 15 bp, Homo sapiens
cttgagccacctgtc

SEQ ID NO: 153682 - DNA, 15 bp, Homo sapiens
gcttgagccacctgt

SEQ ID NO: 153683 - DNA, 15 bp, Homo sapiens
ggcttgagccacctg

SEQ ID NO: 153684 - DNA, 15 bp, Homo sapiens
gggcttgagccacct

SEQ ID NO: 153685 - DNA, 15 bp, Homo sapiens
ggggcttgagccacc

SEQ ID NO: 153686 - DNA, 15 bp, Homo sapiens
tggggcttgagccac

SEQ ID NO: 153687 - DNA, 15 bp, Homo sapiens
gtggggcttgagcca

SEQ ID NO: 153688 - DNA, 15 bp, Homo sapiens
ggtggggcttgagcc

SEQ ID NO: 153689 - DNA, 15 bp, Homo sapiens
aggtggggcttgagc

SEQ ID NO: 153690 - DNA, 15 bp, Homo sapiens
gaggtggggcttgag

SEQ ID NO: 153691 - DNA, 15 bp, Homo sapiens
cgaggtggggcttga

SEQ ID NO: 153692 - DNA, 15 bp, Homo sapiens
gcgaggtggggcttg

SEQ ID NO: 153693 - DNA, 15 bp, Homo sapiens
ggcgaggtggggctt

SEQ ID NO: 153694 - DNA, 15 bp, Homo sapiens
tggcgaggtggggct

SEQ ID NO: 153695 - DNA, 15 bp, Homo sapiens
ctggcgaggtggggc

SEQ ID NO: 153696 - DNA, 15 bp, Homo sapiens
gctggcgaggtgggg

SEQ ID NO: 153697 - DNA, 15 bp, Homo sapiens
agctggcgaggtggg

SEQ ID NO: 153698 - DNA, 15 bp, Homo sapiens
gagctggcgaggtgg

SEQ ID NO: 153699 - DNA, 15 bp, Homo sapiens
agagctggcgaggtg

SEQ ID NO: 153700 - DNA, 15 bp, Homo sapiens
gagagctggcgaggt

SEQ ID NO: 153701 - DNA, 15 bp, Homo sapiens
ggagagctggcgagg

SEQ ID NO: 153702 - DNA, 15 bp, Homo sapiens
gggagagctggcgag

SEQ ID NO: 153703 - DNA, 15 bp, Homo sapiens
tgggagagctggcga

SEQ ID NO: 153704 - DNA, 15 bp, Homo sapiens
ctgggagagctggcg

SEQ ID NO: 153705 - DNA, 15 bp, Homo sapiens
actgggagagctggc

SEQ ID NO: 153706 - DNA, 15 bp, Homo sapiens
aactgggagagctgg

SEQ ID NO: 153707 - DNA, 15 bp, Homo sapiens
taactgggagagctg

SEQ ID NO: 153708 - DNA, 15 bp, Homo sapiens
ctaactgggagagct

SEQ ID NO: 153709 - DNA, 15 bp, Homo sapiens
gctaactgggagagc

SEQ ID NO: 153710 - DNA, 15 bp, Homo sapiens
ggctaactgggagag

SEQ ID NO: 153711 - DNA, 15 bp, Homo sapiens
gggctaactgggaga

SEQ ID NO: 153712 - DNA, 15 bp, Homo sapiens
ggggctaactgggag

SEQ ID NO: 153713 - DNA, 15 bp, Homo sapiens
aggggctaactggga

SEQ ID NO: 153714 - DNA, 15 bp, Homo sapiens
gaggggctaactggg

SEQ ID NO: 153715 - DNA, 15 bp, Homo sapiens
ggaggggctaactgg

SEQ ID NO: 153716 - DNA, 15 bp, Homo sapiens
aggaggggctaactg

SEQ ID NO: 153717 - DNA, 15 bp, Homo sapiens
aaggaggggctaact

SEQ ID NO: 153718 - DNA, 15 bp, Homo sapiens
aaaggaggggctaac

SEQ ID NO: 153719 - DNA, 15 bp, Homo sapiens
gaaaggaggggctaa

SEQ ID NO: 153720 - DNA, 15 bp, Homo sapiens
ggaaaggaggggcta

SEQ ID NO: 153721 - DNA, 15 bp, Homo sapiens
gggaaaggaggggct

SEQ ID NO: 153722 - DNA, 15 bp, Homo sapiens
agggaaaggaggggc

SEQ ID NO: 153723 - DNA, 15 bp, Homo sapiens
cagggaaaggagggg

SEQ ID NO: 153724 - DNA, 15 bp, Homo sapiens
ccagggaaaggaggg

SEQ ID NO: 153725 - DNA, 15 bp, Homo sapiens
gccagggaaaggagg

SEQ ID NO: 153726 - DNA, 15 bp, Homo sapiens
agccagggaaaggag

SEQ ID NO: 153727 - DNA, 15 bp, Homo sapiens
gagccagggaaagga

SEQ ID NO: 153728 - DNA, 15 bp, Homo sapiens
agagccagggaaagg

SEQ ID NO: 153729 - DNA, 15 bp, Homo sapiens
cagagccagggaaag

SEQ ID NO: 153730 - DNA, 15 bp, Homo sapiens
tcagagccagggaaa

SEQ ID NO: 153731 - DNA, 15 bp, Homo sapiens
gtcagagccagggaa

SEQ ID NO: 153732 - DNA, 15 bp, Homo sapiens
ggtcagagccaggga

SEQ ID NO: 153733 - DNA, 15 bp, Homo sapiens
aggtcagagccaggg

SEQ ID NO: 153734 - DNA, 15 bp, Homo sapiens
caggtcagagccagg

SEQ ID NO: 153735 - DNA, 15 bp, Homo sapiens
tcaggtcagagccag

SEQ ID NO: 153736 - DNA, 15 bp, Homo sapiens
ctcaggtcagagcca

SEQ ID NO: 153737 - DNA, 15 bp, Homo sapiens
cctcaggtcagagcc

SEQ ID NO: 153738 - DNA, 15 bp, Homo sapiens
ccctcaggtcagagc

SEQ ID NO: 153739 - DNA, 15 bp, Homo sapiens
tccctcaggtcagag

SEQ ID NO: 153740 - DNA, 15 bp, Homo sapiens
gtccctcaggtcaga

SEQ ID NO: 153741 - DNA, 15 bp, Homo sapiens
cgtccctcaggtcag

SEQ ID NO: 153742 - DNA, 15 bp, Homo sapiens
tcgtccctcaggtca

SEQ ID NO: 153743 - DNA, 15 bp, Homo sapiens
ttcgtccctcaggtc

SEQ ID NO: 153744 - DNA, 15 bp, Homo sapiens
cttcgtccctcaggt

SEQ ID NO: 153745 - DNA, 15 bp, Homo sapiens
gcttcgtccctcagg

SEQ ID NO: 153746 - DNA, 15 bp, Homo sapiens
tgcttcgtccctcag

SEQ ID NO: 153747 - DNA, 15 bp, Homo sapiens
ctgcttcgtccctca

SEQ ID NO: 153748 - DNA, 15 bp, Homo sapiens
cctgcttcgtccctc

SEQ ID NO: 153749 - DNA, 15 bp, Homo sapiens
ccctgcttcgtccct

SEQ ID NO: 153750 - DNA, 15 bp, Homo sapiens
accctgcttcgtccc

SEQ ID NO: 153751 - DNA, 15 bp, Homo sapiens
caccctgcttcgtcc

SEQ ID NO: 153752 - DNA, 15 bp, Homo sapiens
gcaccctgcttcgtc

SEQ ID NO: 153753 - DNA, 15 bp, Homo sapiens
agcaccctgcttcgt

SEQ ID NO: 153754 - DNA, 15 bp, Homo sapiens
tagcaccctgcttcg

SEQ ID NO: 153755 - DNA, 15 bp, Homo sapiens
gtagcaccctgcttc

SEQ ID NO: 153756 - DNA, 15 bp, Homo sapiens
tgtagcaccctgctt

SEQ ID NO: 153757 - DNA, 15 bp, Homo sapiens
ctgtagcaccctgct

SEQ ID NO: 153758 - DNA, 15 bp, Homo sapiens
cctgtagcaccctgc

SEQ ID NO: 153759 - DNA, 15 bp, Homo sapiens
tcctgtagcaccctg

SEQ ID NO: 153760 - DNA, 15 bp, Homo sapiens
gtcctgtagcaccct

SEQ ID NO: 153761 - DNA, 15 bp, Homo sapiens
cgtcctgtagcaccc

SEQ ID NO: 153762 - DNA, 15 bp, Homo sapiens
gcgtcctgtagcacc

SEQ ID NO: 153763 - DNA, 15 bp, Homo sapiens
agcgtcctgtagcac

SEQ ID NO: 153764 - DNA, 15 bp, Homo sapiens
cagcgtcctgtagca

SEQ ID NO: 153765 - DNA, 15 bp, Homo sapiens
acagcgtcctgtagc

SEQ ID NO: 153766 - DNA, 15 bp, Homo sapiens
cacagcgtcctgtag

SEQ ID NO: 153767 - DNA, 15 bp, Homo sapiens
gcacagcgtcctgta

SEQ ID NO: 153768 - DNA, 15 bp, Homo sapiens
ggcacagcgtcctgt

SEQ ID NO: 153769 - DNA, 15 bp, Homo sapiens
tggcacagcgtcctg

SEQ ID NO: 153770 - DNA, 15 bp, Homo sapiens
gtggcacagcgtcct

SEQ ID NO: 153771 - DNA, 15 bp, Homo sapiens
tgtggcacagcgtcc

SEQ ID NO: 153772 - DNA, 15 bp, Homo sapiens
ctgtggcacagcgtc

SEQ ID NO: 153773 - DNA, 15 bp, Homo sapiens
cctgtggcacagcgt

SEQ ID NO: 153774 - DNA, 15 bp, Homo sapiens
ccctgtggcacagcg

SEQ ID NO: 153775 - DNA, 15 bp, Homo sapiens
tccctgtggcacagc

SEQ ID NO: 153776 - DNA, 15 bp, Homo sapiens
atccctgtggcacag

SEQ ID NO: 153777 - DNA, 15 bp, Homo sapiens
tatccctgtggcaca

SEQ ID NO: 153778 - DNA, 15 bp, Homo sapiens
atatccctgtggcac

SEQ ID NO: 153779 - DNA, 15 bp, Homo sapiens
gatatccctgtggca

SEQ ID NO: 153780 - DNA, 15 bp, Homo sapiens
cgatatccctgtggc

SEQ ID NO: 153781 - DNA, 15 bp, Homo sapiens
acgatatccctgtgg

SEQ ID NO: 153782 - DNA, 15 bp, Homo sapiens
gacgatatccctgtg

SEQ ID NO: 153783 - DNA, 15 bp, Homo sapiens
tgacgatatccctgt

SEQ ID NO: 153784 - DNA, 15 bp, Homo sapiens
ctgacgatatccctg

SEQ ID NO: 153785 - DNA, 15 bp, Homo sapiens
cctgacgatatccct

SEQ ID NO: 153786 - DNA, 15 bp, Homo sapiens
ccctgacgatatccc

SEQ ID NO: 153787 - DNA, 15 bp, Homo sapiens
tccctgacgatatcc

SEQ ID NO: 153788 - DNA, 15 bp, Homo sapiens
gtccctgacgatatc

SEQ ID NO: 153789 - DNA, 15 bp, Homo sapiens
tgtccctgacgatat

SEQ ID NO: 153790 - DNA, 15 bp, Homo sapiens
ctgtccctgacgata

SEQ ID NO: 153791 - DNA, 15 bp, Homo sapiens
tctgtccctgacgat

SEQ ID NO: 153792 - DNA, 15 bp, Homo sapiens
ttctgtccctgacga

SEQ ID NO: 153793 - DNA, 15 bp, Homo sapiens
cttctgtccctgacg

SEQ ID NO: 153794 - DNA, 15 bp, Homo sapiens
gcttctgtccctgac

SEQ ID NO: 153795 - DNA, 15 bp, Homo sapiens
agcttctgtccctga

SEQ ID NO: 153796 - DNA, 15 bp, Homo sapiens
tagcttctgtccctg

SEQ ID NO: 153797 - DNA, 15 bp, Homo sapiens
gtagcttctgtccct

SEQ ID NO: 153798 - DNA, 15 bp, Homo sapiens
agtagcttctgtccc

SEQ ID NO: 153799 - DNA, 15 bp, Homo sapiens
gagtagcttctgtcc

SEQ ID NO: 153800 - DNA, 15 bp, Homo sapiens
agagtagcttctgtc

SEQ ID NO: 153801 - DNA, 15 bp, Homo sapiens
cagagtagcttctgt

SEQ ID NO: 153802 - DNA, 15 bp, Homo sapiens
gcagagtagcttctg

SEQ ID NO: 153803 - DNA, 15 bp, Homo sapiens
ggcagagtagcttct

SEQ ID NO: 153804 - DNA, 15 bp, Homo sapiens
gggcagagtagcttc

SEQ ID NO: 153805 - DNA, 15 bp, Homo sapiens
agggcagagtagctt

SEQ ID NO: 153806 - DNA, 15 bp, Homo sapiens
gagggcagagtagct

SEQ ID NO: 153807 - DNA, 15 bp, Homo sapiens
agagggcagagtagc

SEQ ID NO: 153808 - DNA, 15 bp, Homo sapiens
cagagggcagagtag

SEQ ID NO: 153809 - DNA, 15 bp, Homo sapiens
gcagagggcagagta

SEQ ID NO: 153810 - DNA, 15 bp, Homo sapiens
agcagagggcagagt

SEQ ID NO: 153811 - DNA, 15 bp, Homo sapiens
cagcagagggcagag

SEQ ID NO: 153812 - DNA, 15 bp, Homo sapiens
gcagcagagggcaga

SEQ ID NO: 153813 - DNA, 15 bp, Homo sapiens
agcagcagagggcag

SEQ ID NO: 153814 - DNA, 15 bp, Homo sapiens
gagcagcagagggca

SEQ ID NO: 153815 - DNA, 15 bp, Homo sapiens
tgagcagcagagggc

SEQ ID NO: 153816 - DNA, 15 bp, Homo sapiens
gtgagcagcagaggg

SEQ ID NO: 153817 - DNA, 15 bp, Homo sapiens
ggtgagcagcagagg

SEQ ID NO: 153818 - DNA, 15 bp, Homo sapiens
gggtgagcagcagag

SEQ ID NO: 153819 - DNA, 15 bp, Homo sapiens
ggggtgagcagcaga

SEQ ID NO: 153820 - DNA, 15 bp, Homo sapiens
aggggtgagcagcag

SEQ ID NO: 153821 - DNA, 15 bp, Homo sapiens
gaggggtgagcagca

SEQ ID NO: 153822 - DNA, 15 bp, Homo sapiens
ggaggggtgagcagc

SEQ ID NO: 153823 - DNA, 15 bp, Homo sapiens
tggaggggtgagcag

SEQ ID NO: 153824 - DNA, 15 bp, Homo sapiens
ttggaggggtgagca

SEQ ID NO: 153825 - DNA, 15 bp, Homo sapiens
gttggaggggtgagc

SEQ ID NO: 153826 - DNA, 15 bp, Homo sapiens
tgttggaggggtgag

SEQ ID NO: 153827 - DNA, 15 bp, Homo sapiens
gtgttggaggggtga

SEQ ID NO: 153828 - DNA, 15 bp, Homo sapiens
cgtgttggaggggtg

SEQ ID NO: 153829 - DNA, 15 bp, Homo sapiens
gcgtgttggaggggt

SEQ ID NO: 153830 - DNA, 15 bp, Homo sapiens
agcgtgttggagggg

SEQ ID NO: 153831 - DNA, 15 bp, Homo sapiens
cagcgtgttggaggg

SEQ ID NO: 153832 - DNA, 15 bp, Homo sapiens
acagcgtgttggagg

SEQ ID NO: 153833 - DNA, 15 bp, Homo sapiens
cacagcgtgttggag

SEQ ID NO: 153834 - DNA, 15 bp, Homo sapiens
ccacagcgtgttgga

SEQ ID NO: 153835 - DNA, 15 bp, Homo sapiens
cccacagcgtgttgg

SEQ ID NO: 153836 - DNA, 15 bp, Homo sapiens
gcccacagcgtgttg

SEQ ID NO: 153837 - DNA, 15 bp, Homo sapiens
agcccacagcgtgtt

SEQ ID NO: 153838 - DNA, 15 bp, Homo sapiens
cagcccacagcgtgt

SEQ ID NO: 153839 - DNA, 15 bp, Homo sapiens
gcagcccacagcgtg

SEQ ID NO: 153840 - DNA, 15 bp, Homo sapiens
tgcagcccacagcgt

SEQ ID NO: 153841 - DNA, 15 bp, Homo sapiens
atgcagcccacagcg

SEQ ID NO: 153842 - DNA, 15 bp, Homo sapiens
aatgcagcccacagc

SEQ ID NO: 153843 - DNA, 15 bp, Homo sapiens
aaatgcagcccacag

SEQ ID NO: 153844 - DNA, 15 bp, Homo sapiens
caaatgcagcccaca

SEQ ID NO: 153845 - DNA, 15 bp, Homo sapiens
acaaatgcagcccac

SEQ ID NO: 153846 - DNA, 15 bp, Homo sapiens
aacaaatgcagccca

SEQ ID NO: 153847 - DNA, 15 bp, Homo sapiens
caacaaatgcagccc

SEQ ID NO: 153848 - DNA, 15 bp, Homo sapiens
tcaacaaatgcagcc

SEQ ID NO: 153849 - DNA, 15 bp, Homo sapiens
ctcaacaaatgcagc

SEQ ID NO: 153850 - DNA, 15 bp, Homo sapiens
actcaacaaatgcag

SEQ ID NO: 153851 - DNA, 15 bp, Homo sapiens
cactcaacaaatgca

SEQ ID NO: 153852 - DNA, 15 bp, Homo sapiens
ccactcaacaaatgc

SEQ ID NO: 153853 - DNA, 15 bp, Homo sapiens
gccactcaacaaatg

SEQ ID NO: 153854 - DNA, 15 bp, Homo sapiens
agccactcaacaaat

SEQ ID NO: 153855 - DNA, 15 bp, Homo sapiens
cagccactcaacaaa

SEQ ID NO: 153856 - DNA, 15 bp, Homo sapiens
ccagccactcaacaa

SEQ ID NO: 153857 - DNA, 15 bp, Homo sapiens
accagccactcaaca

SEQ ID NO: 153858 - DNA, 15 bp, Homo sapiens
taccagccactcaac

SEQ ID NO: 153859 - DNA, 15 bp, Homo sapiens
gtaccagccactcaa

SEQ ID NO: 153860 - DNA, 15 bp, Homo sapiens
ggtaccagccactca

SEQ ID NO: 153861 - DNA, 15 bp, Homo sapiens
tggtaccagccactc

SEQ ID NO: 153862 - DNA, 15 bp, Homo sapiens
ctggtaccagccact

SEQ ID NO: 153863 - DNA, 15 bp, Homo sapiens
tctggtaccagccac

SEQ ID NO: 153864 - DNA, 15 bp, Homo sapiens
gtctggtaccagcca

SEQ ID NO: 153865 - DNA, 15 bp, Homo sapiens
agtctggtaccagcc

SEQ ID NO: 153866 - DNA, 15 bp, Homo sapiens
gagtctggtaccagc

SEQ ID NO: 153867 - DNA, 15 bp, Homo sapiens
agagtctggtaccag

SEQ ID NO: 153868 - DNA, 15 bp, Homo sapiens
cagagtctggtacca

SEQ ID NO: 153869 - DNA, 15 bp, Homo sapiens
gcagagtctggtacc

SEQ ID NO: 153870 - DNA, 15 bp, Homo sapiens
agcagagtctggtac

SEQ ID NO: 153871 - DNA, 15 bp, Homo sapiens
gagcagagtctggta

SEQ ID NO: 153872 - DNA, 15 bp, Homo sapiens
agagcagagtctggt

SEQ ID NO: 153873 - DNA, 15 bp, Homo sapiens
aagagcagagtctgg

SEQ ID NO: 153874 - DNA, 15 bp, Homo sapiens
gaagagcagagtctg

SEQ ID NO: 153875 - DNA, 15 bp, Homo sapiens
agaagagcagagtct

SEQ ID NO: 153876 - DNA, 15 bp, Homo sapiens
cagaagagcagagtc

SEQ ID NO: 153877 - DNA, 15 bp, Homo sapiens
tcagaagagcagagt

SEQ ID NO: 153878 - DNA, 15 bp, Homo sapiens
gtcagaagagcagag

SEQ ID NO: 153879 - DNA, 15 bp, Homo sapiens
agtcagaagagcaga

SEQ ID NO: 153880 - DNA, 15 bp, Homo sapiens
aagtcagaagagcag

SEQ ID NO: 153881 - DNA, 15 bp, Homo sapiens
aaagtcagaagagca

SEQ ID NO: 153882 - DNA, 15 bp, Homo sapiens
gaaagtcagaagagc

SEQ ID NO: 153883 - DNA, 15 bp, Homo sapiens
ggaaagtcagaagag

SEQ ID NO: 153884 - DNA, 15 bp, Homo sapiens
tggaaagtcagaaga

SEQ ID NO: 153885 - DNA, 15 bp, Homo sapiens
ctggaaagtcagaag

SEQ ID NO: 153886 - DNA, 15 bp, Homo sapiens
gctggaaagtcagaa

SEQ ID NO: 153887 - DNA, 15 bp, Homo sapiens
agctggaaagtcaga

SEQ ID NO: 153888 - DNA, 15 bp, Homo sapiens
cagctggaaagtcag

SEQ ID NO: 153889 - DNA, 15 bp, Homo sapiens
ccagctggaaagtca

SEQ ID NO: 153890 - DNA, 15 bp, Homo sapiens
accagctggaaagtc

SEQ ID NO: 153891 - DNA, 15 bp, Homo sapiens
aaccagctggaaagt

SEQ ID NO: 153892 - DNA, 15 bp, Homo sapiens
aaaccagctggaaag

SEQ ID NO: 153893 - DNA, 15 bp, Homo sapiens
aaaaccagctggaaa

SEQ ID NO: 153894 - DNA, 15 bp, Homo sapiens
taaaaccagctggaa

SEQ ID NO: 153895 - DNA, 15 bp, Homo sapiens
gtaaaaccagctgga

SEQ ID NO: 153896 - DNA, 15 bp, Homo sapiens
ggtaaaaccagctgg

SEQ ID NO: 153897 - DNA, 15 bp, Homo sapiens
aggtaaaaccagctg

SEQ ID NO: 153898 - DNA, 15 bp, Homo sapiens
caggtaaaaccagct

SEQ ID NO: 153899 - DNA, 15 bp, Homo sapiens
acaggtaaaaccagc

SEQ ID NO: 153900 - DNA, 15 bp, Homo sapiens
tacaggtaaaaccag

SEQ ID NO: 153901 - DNA, 15 bp, Homo sapiens
ctacaggtaaaacca

SEQ ID NO: 153902 - DNA, 15 bp, Homo sapiens
actacaggtaaaacc

SEQ ID NO: 153903 - DNA, 15 bp, Homo sapiens
tactacaggtaaaac

SEQ ID NO: 153904 - DNA, 15 bp, Homo sapiens
ttactacaggtaaaa

SEQ ID NO: 153905 - DNA, 15 bp, Homo sapiens
tttactacaggtaaa

SEQ ID NO: 153906 - DNA, 15 bp, Homo sapiens
ctttactacaggtaa

SEQ ID NO: 153907 - DNA, 15 bp, Homo sapiens
actttactacaggta

SEQ ID NO: 153908 - DNA, 15 bp, Homo sapiens
aactttactacaggt

SEQ ID NO: 153909 - DNA, 15 bp, Homo sapiens
aaactttactacagg

SEQ ID NO: 153910 - DNA, 15 bp, Homo sapiens
caaactttactacag

SEQ ID NO: 153911 - DNA, 15 bp, Homo sapiens
tcaaactttactaca

SEQ ID NO: 153912 - DNA, 15 bp, Homo sapiens
ctcaaactttactac

SEQ ID NO: 153913 - DNA, 15 bp, Homo sapiens
tctcaaactttacta

SEQ ID NO: 153914 - DNA, 15 bp, Homo sapiens
ttctcaaactttact

SEQ ID NO: 153915 - DNA, 15 bp, Homo sapiens
cttctcaaactttac

SEQ ID NO: 153916 - DNA, 15 bp, Homo sapiens
tcttctcaaacttta

SEQ ID NO: 153917 - DNA, 15 bp, Homo sapiens
atcttctcaaacttt

SEQ ID NO: 153918 - DNA, 15 bp, Homo sapiens
catcttctcaaactt

SEQ ID NO: 153919 - DNA, 15 bp, Homo sapiens
ccatcttctcaaact

SEQ ID NO: 153920 - DNA, 15 bp, Homo sapiens
cccatcttctcaaac

SEQ ID NO: 153921 - DNA, 15 bp, Homo sapiens
acccatcttctcaaa

SEQ ID NO: 153922 - DNA, 15 bp, Homo sapiens
gacccatcttctcaa

SEQ ID NO: 153923 - DNA, 15 bp, Homo sapiens
tgacccatcttctca

SEQ ID NO: 153924 - DNA, 15 bp, Homo sapiens
atgacccatcttctc

SEQ ID NO: 153925 - DNA, 15 bp, Homo sapiens
gatgacccatcttct

SEQ ID NO: 153926 - DNA, 15 bp, Homo sapiens
ggatgacccatcttc

SEQ ID NO: 153927 - DNA, 15 bp, Homo sapiens
aggatgacccatctt

SEQ ID NO: 153928 - DNA, 15 bp, Homo sapiens
caggatgacccatct

SEQ ID NO: 153929 - DNA, 15 bp, Homo sapiens
tcaggatgacccatc

SEQ ID NO: 153930 - DNA, 15 bp, Homo sapiens
gtcaggatgacccat

SEQ ID NO: 153931 - DNA, 15 bp, Homo sapiens
ggtcaggatgaccca

SEQ ID NO: 153932 - DNA, 15 bp, Homo sapiens
gggtcaggatgaccc

SEQ ID NO: 153933 - DNA, 15 bp, Homo sapiens
ggggtcaggatgacc

SEQ ID NO: 153934 - DNA, 15 bp, Homo sapiens
cggggtcaggatgac

SEQ ID NO: 153935 - DNA, 15 bp, Homo sapiens
ccggggtcaggatga

SEQ ID NO: 153936 - DNA, 15 bp, Homo sapiens
cccggggtcaggatg

SEQ ID NO: 153937 - DNA, 15 bp, Homo sapiens
ccccggggtcaggat

SEQ ID NO: 153938 - DNA, 15 bp, Homo sapiens
accccggggtcagga

SEQ ID NO: 153939 - DNA, 15 bp, Homo sapiens
gaccccggggtcagg

SEQ ID NO: 153940 - DNA, 15 bp, Homo sapiens
tgaccccggggtcag

SEQ ID NO: 153941 - DNA, 15 bp, Homo sapiens
ctgaccccggggtca

SEQ ID NO: 153942 - DNA, 15 bp, Homo sapiens
tctgaccccggggtc

SEQ ID NO: 153943 - DNA, 15 bp, Homo sapiens
ttctgaccccggggt

SEQ ID NO: 153944 - DNA, 15 bp, Homo sapiens
cttctgaccccgggg

SEQ ID NO: 153945 - DNA, 15 bp, Homo sapiens
tcttctgaccccggg

SEQ ID NO: 153946 - DNA, 15 bp, Homo sapiens
gtcttctgaccccgg

SEQ ID NO: 153947 - DNA, 15 bp, Homo sapiens
tgtcttctgaccccg

SEQ ID NO: 153948 - DNA, 15 bp, Homo sapiens
ctgtcttctgacccc

SEQ ID NO: 153949 - DNA, 15 bp, Homo sapiens
tctgtcttctgaccc

SEQ ID NO: 153950 - DNA, 15 bp, Homo sapiens
ttctgtcttctgacc

SEQ ID NO: 153951 - DNA, 15 bp, Homo sapiens
cttctgtcttctgac

SEQ ID NO: 153952 - DNA, 15 bp, Homo sapiens
ccttctgtcttctga

SEQ ID NO: 153953 - DNA, 15 bp, Homo sapiens
tccttctgtcttctg

SEQ ID NO: 153954 - DNA, 15 bp, Homo sapiens
ctccttctgtcttct

SEQ ID NO: 153955 - DNA, 15 bp, Homo sapiens
cctccttctgtcttc

SEQ ID NO: 153956 - DNA, 15 bp, Homo sapiens
gcctccttctgtctt

SEQ ID NO: 153957 - DNA, 15 bp, Homo sapiens
ggcctccttctgtct

SEQ ID NO: 153958 - DNA, 15 bp, Homo sapiens
gggcctccttctgtc

SEQ ID NO: 153959 - DNA, 15 bp, Homo sapiens
tgggcctccttctgt

SEQ ID NO: 153960 - DNA, 15 bp, Homo sapiens
atgggcctccttctg

SEQ ID NO: 153961 - DNA, 15 bp, Homo sapiens
catgggcctccttct

SEQ ID NO: 153962 - DNA, 15 bp, Homo sapiens
ccatgggcctccttc

SEQ ID NO: 153963 - DNA, 15 bp, Homo sapiens
gccatgggcctcctt

SEQ ID NO: 153964 - DNA, 15 bp, Homo sapiens
cgccatgggcctcct

SEQ ID NO: 153965 - DNA, 15 bp, Homo sapiens
acgccatgggcctcc

SEQ ID NO: 153966 - DNA, 15 bp, Homo sapiens
cacgccatgggcctc

SEQ ID NO: 153967 - DNA, 15 bp, Homo sapiens
acacgccatgggcct

SEQ ID NO: 153968 - DNA, 15 bp, Homo sapiens
cacacgccatgggcc

SEQ ID NO: 153969 - DNA, 15 bp, Homo sapiens
ccacacgccatgggc

SEQ ID NO: 153970 - DNA, 15 bp, Homo sapiens
cccacacgccatggg

SEQ ID NO: 153971 - DNA, 15 bp, Homo sapiens
ccccacacgccatgg

SEQ ID NO: 153972 - DNA, 15 bp, Homo sapiens
cccccacacgccatg

SEQ ID NO: 153973 - DNA, 15 bp, Homo sapiens
tcccccacacgccat

SEQ ID NO: 153974 - DNA, 15 bp, Homo sapiens
ctcccccacacgcca

SEQ ID NO: 153975 - DNA, 15 bp, Homo sapiens
tctcccccacacgcc

SEQ ID NO: 153976 - DNA, 15 bp, Homo sapiens
atctcccccacacgc

SEQ ID NO: 153977 - DNA, 15 bp, Homo sapiens
catctcccccacacg

SEQ ID NO: 153978 - DNA, 15 bp, Homo sapiens
gcatctcccccacac

SEQ ID NO: 153979 - DNA, 15 bp, Homo sapiens
ggcatctcccccaca

SEQ ID NO: 153980 - DNA, 15 bp, Homo sapiens
gggcatctcccccac

SEQ ID NO: 153981 - DNA, 15 bp, Homo sapiens
ggggcatctccccca

SEQ ID NO: 153982 - DNA, 15 bp, Homo sapiens
cggggcatctccccc

SEQ ID NO: 153983 - DNA, 15 bp, Homo sapiens
acggggcatctcccc

SEQ ID NO: 153984 - DNA, 15 bp, Homo sapiens
cacggggcatctccc

SEQ ID NO: 153985 - DNA, 15 bp, Homo sapiens
tcacggggcatctcc

SEQ ID NO: 153986 - DNA, 15 bp, Homo sapiens
ctcacggggcatctc

SEQ ID NO: 153987 - DNA, 15 bp, Homo sapiens
cctcacggggcatct

SEQ ID NO: 153988 - DNA, 15 bp, Homo sapiens
gcctcacggggcatc

SEQ ID NO: 153989 - DNA, 15 bp, Homo sapiens
ggcctcacggggcat

SEQ ID NO: 153990 - DNA, 15 bp, Homo sapiens
gggcctcacggggca

SEQ ID NO: 153991 - DNA, 15 bp, Homo sapiens
agggcctcacggggc

SEQ ID NO: 153992 - DNA, 15 bp, Homo sapiens
gagggcctcacgggg

SEQ ID NO: 153993 - DNA, 15 bp, Homo sapiens
cgagggcctcacggg

SEQ ID NO: 153994 - DNA, 15 bp, Homo sapiens
ccgagggcctcacgg

SEQ ID NO: 153995 - DNA, 15 bp, Homo sapiens
accgagggcctcacg

SEQ ID NO: 153996 - DNA, 15 bp, Homo sapiens
caccgagggcctcac

SEQ ID NO: 153997 - DNA, 15 bp, Homo sapiens
acaccgagggcctca

SEQ ID NO: 153998 - DNA, 15 bp, Homo sapiens
cacaccgagggcctc

SEQ ID NO: 153999 - DNA, 15 bp, Homo sapiens
gcacaccgagggcct

SEQ ID NO: 154000 - DNA, 15 bp, Homo sapiens
tgcacaccgagggcc

SEQ ID NO: 154001 - DNA, 15 bp, Homo sapiens
ctgcacaccgagggc

SEQ ID NO: 154002 - DNA, 15 bp, Homo sapiens
tctgcacaccgaggg

SEQ ID NO: 154003 - DNA, 15 bp, Homo sapiens
atctgcacaccgagg

SEQ ID NO: 154004 - DNA, 15 bp, Homo sapiens
catctgcacaccgag

SEQ ID NO: 154005 - DNA, 15 bp, Homo sapiens
gcatctgcacaccga

SEQ ID NO: 154006 - DNA, 15 bp, Homo sapiens
ggcatctgcacaccg

SEQ ID NO: 154007 - DNA, 15 bp, Homo sapiens
aggcatctgcacacc

SEQ ID NO: 154008 - DNA, 15 bp, Homo sapiens
caggcatctgcacac

SEQ ID NO: 154009 - DNA, 15 bp, Homo sapiens
ccaggcatctgcaca

SEQ ID NO: 154010 - DNA, 15 bp, Homo sapiens
accaggcatctgcac

SEQ ID NO: 154011 - DNA, 15 bp, Homo sapiens
caccaggcatctgca

SEQ ID NO: 154012 - DNA, 15 bp, Homo sapiens
tcaccaggcatctgc

SEQ ID NO: 154013 - DNA, 15 bp, Homo sapiens
gtcaccaggcatctg

SEQ ID NO: 154014 - DNA, 15 bp, Homo sapiens
tgtcaccaggcatct

SEQ ID NO: 154015 - DNA, 15 bp, Homo sapiens
ctgtcaccaggcatc

SEQ ID NO: 154016 - DNA, 15 bp, Homo sapiens
gctgtcaccaggcat

SEQ ID NO: 154017 - DNA, 15 bp, Homo sapiens
ggctgtcaccaggca

SEQ ID NO: 154018 - DNA, 15 bp, Homo sapiens
gggctgtcaccaggc

SEQ ID NO: 154019 - DNA, 15 bp, Homo sapiens
ggggctgtcaccagg

SEQ ID NO: 154020 - DNA, 15 bp, Homo sapiens
tggggctgtcaccag

SEQ ID NO: 154021 - DNA, 15 bp, Homo sapiens
gtggggctgtcacca

SEQ ID NO: 154022 - DNA, 15 bp, Homo sapiens
ggtggggctgtcacc

SEQ ID NO: 154023 - DNA, 15 bp, Homo sapiens
gggtggggctgtcac

SEQ ID NO: 154024 - DNA, 15 bp, Homo sapiens
agggtggggctgtca

SEQ ID NO: 154025 - DNA, 15 bp, Homo sapiens
cagggtggggctgtc

SEQ ID NO: 154026 - DNA, 15 bp, Homo sapiens
tcagggtggggctgt

SEQ ID NO: 154027 - DNA, 15 bp, Homo sapiens
ctcagggtggggctg

SEQ ID NO: 154028 - DNA, 15 bp, Homo sapiens
cctcagggtggggct

SEQ ID NO: 154029 - DNA, 15 bp, Homo sapiens
acctcagggtggggc

SEQ ID NO: 154030 - DNA, 15 bp, Homo sapiens
gacctcagggtgggg

SEQ ID NO: 154031 - DNA, 15 bp, Homo sapiens
ggacctcagggtggg

SEQ ID NO: 154032 - DNA, 15 bp, Homo sapiens
gggacctcagggtgg

SEQ ID NO: 154033 - DNA, 15 bp, Homo sapiens
ggggacctcagggtg

SEQ ID NO: 154034 - DNA, 15 bp, Homo sapiens
tggggacctcagggt

SEQ ID NO: 154035 - DNA, 15 bp, Homo sapiens
ctggggacctcaggg

SEQ ID NO: 154036 - DNA, 15 bp, Homo sapiens
gctggggacctcagg

SEQ ID NO: 154037 - DNA, 15 bp, Homo sapiens
ggctggggacctcag

SEQ ID NO: 154038 - DNA, 15 bp, Homo sapiens
aggctggggacctca

SEQ ID NO: 154039 - DNA, 15 bp, Homo sapiens
taggctggggacctc

SEQ ID NO: 154040 - DNA, 15 bp, Homo sapiens
gtaggctggggacct

SEQ ID NO: 154041 - DNA, 15 bp, Homo sapiens
ggtaggctggggacc

SEQ ID NO: 154042 - DNA, 15 bp, Homo sapiens
gggtaggctggggac

SEQ ID NO: 154043 - DNA, 15 bp, Homo sapiens
ggggtaggctgggga

SEQ ID NO: 154044 - DNA, 15 bp, Homo sapiens
gggggtaggctgggg

SEQ ID NO: 154045 - DNA, 15 bp, Homo sapiens
agggggtaggctggg

SEQ ID NO: 154046 - DNA, 15 bp, Homo sapiens
gagggggtaggctgg

SEQ ID NO: 154047 - DNA, 15 bp, Homo sapiens
ggagggggtaggctg

SEQ ID NO: 154048 - DNA, 15 bp, Homo sapiens
gggagggggtaggct

SEQ ID NO: 154049 - DNA, 15 bp, Homo sapiens
ggggagggggtaggc

SEQ ID NO: 154050 - DNA, 15 bp, Homo sapiens
tggggagggggtagg

SEQ ID NO: 154051 - DNA, 15 bp, Homo sapiens
ctggggagggggtag

SEQ ID NO: 154052 - DNA, 15 bp, Homo sapiens
gctggggagggggta

SEQ ID NO: 154053 - DNA, 15 bp, Homo sapiens
ggctggggagggggt

SEQ ID NO: 154054 - DNA, 15 bp, Homo sapiens
gggctggggaggggg

SEQ ID NO: 154055 - DNA, 15 bp, Homo sapiens
cgggctggggagggg

SEQ ID NO: 154056 - DNA, 15 bp, Homo sapiens
tcgggctggggaggg

SEQ ID NO: 154057 - DNA, 15 bp, Homo sapiens
gtcgggctggggagg

SEQ ID NO: 154058 - DNA, 15 bp, Homo sapiens
agtcgggctggggag

SEQ ID NO: 154059 - DNA, 15 bp, Homo sapiens
cagtcgggctgggga

SEQ ID NO: 154060 - DNA, 15 bp, Homo sapiens
gcagtcgggctgggg

SEQ ID NO: 154061 - DNA, 15 bp, Homo sapiens
agcagtcgggctggg

SEQ ID NO: 154062 - DNA, 15 bp, Homo sapiens
gagcagtcgggctgg

SEQ ID NO: 154063 - DNA, 15 bp, Homo sapiens
ggagcagtcgggctg

SEQ ID NO: 154064 - DNA, 15 bp, Homo sapiens
gggagcagtcgggct

SEQ ID NO: 154065 - DNA, 15 bp, Homo sapiens
tgggagcagtcgggc

SEQ ID NO: 154066 - DNA, 15 bp, Homo sapiens
atgggagcagtcggg

SEQ ID NO: 154067 - DNA, 15 bp, Homo sapiens
gatgggagcagtcgg

SEQ ID NO: 154068 - DNA, 15 bp, Homo sapiens
ggatgggagcagtcg

SEQ ID NO: 154069 - DNA, 15 bp, Homo sapiens
gggatgggagcagtc

SEQ ID NO: 154070 - DNA, 15 bp, Homo sapiens
ggggatgggagcagt

SEQ ID NO: 154071 - DNA, 15 bp, Homo sapiens
gggggatgggagcag

SEQ ID NO: 154072 - DNA, 15 bp, Homo sapiens
agggggatgggagca

SEQ ID NO: 154073 - DNA, 15 bp, Homo sapiens
gagggggatgggagc

SEQ ID NO: 154074 - DNA, 15 bp, Homo sapiens
ggagggggatgggag

SEQ ID NO: 154075 - DNA, 15 bp, Homo sapiens
gggagggggatggga

SEQ ID NO: 154076 - DNA, 15 bp, Homo sapiens
agggagggggatggg

SEQ ID NO: 154077 - DNA, 15 bp, Homo sapiens
cagggagggggatgg

SEQ ID NO: 154078 - DNA, 15 bp, Homo sapiens
acagggagggggatg

SEQ ID NO: 154079 - DNA, 15 bp, Homo sapiens
cacagggagggggat

SEQ ID NO: 154080 - DNA, 15 bp, Homo sapiens
gcacagggaggggga

SEQ ID NO: 154081 - DNA, 15 bp, Homo sapiens
tgcacagggaggggg

SEQ ID NO: 154082 - DNA, 15 bp, Homo sapiens
ctgcacagggagggg

SEQ ID NO: 154083 - DNA, 15 bp, Homo sapiens
cctgcacagggaggg

SEQ ID NO: 154084 - DNA, 15 bp, Homo sapiens
acctgcacagggagg

SEQ ID NO: 154085 - DNA, 15 bp, Homo sapiens
tacctgcacagggag

SEQ ID NO: 154086 - DNA, 15 bp, Homo sapiens
ctacctgcacaggga

SEQ ID NO: 154087 - DNA, 15 bp, Homo sapiens
tctacctgcacaggg

SEQ ID NO: 154088 - DNA, 15 bp, Homo sapiens
ctctacctgcacagg

SEQ ID NO: 154089 - DNA, 15 bp, Homo sapiens
gctctacctgcacag

SEQ ID NO: 154090 - DNA, 15 bp, Homo sapiens
tgctctacctgcaca

SEQ ID NO: 154091 - DNA, 15 bp, Homo sapiens
ctgctctacctgcac

SEQ ID NO: 154092 - DNA, 15 bp, Homo sapiens
tctgctctacctgca

SEQ ID NO: 154093 - DNA, 15 bp, Homo sapiens
atctgctctacctgc

SEQ ID NO: 154094 - DNA, 15 bp, Homo sapiens
gatctgctctacctg

SEQ ID NO: 154095 - DNA, 15 bp, Homo sapiens
ggatctgctctacct

SEQ ID NO: 154096 - DNA, 15 bp, Homo sapiens
aggatctgctctacc

SEQ ID NO: 154097 - DNA, 15 bp, Homo sapiens
caggatctgctctac

SEQ ID NO: 154098 - DNA, 15 bp, Homo sapiens
ccaggatctgctcta

SEQ ID NO: 154099 - DNA, 15 bp, Homo sapiens
gccaggatctgctct

SEQ ID NO: 154100 - DNA, 15 bp, Homo sapiens
tgccaggatctgctc

SEQ ID NO: 154101 - DNA, 15 bp, Homo sapiens
ctgccaggatctgct

SEQ ID NO: 154102 - DNA, 15 bp, Homo sapiens
tctgccaggatctgc

SEQ ID NO: 154103 - DNA, 15 bp, Homo sapiens
ctctgccaggatctg

SEQ ID NO: 154104 - DNA, 15 bp, Homo sapiens
actctgccaggatct

SEQ ID NO: 154105 - DNA, 15 bp, Homo sapiens
aactctgccaggatc

SEQ ID NO: 154106 - DNA, 15 bp, Homo sapiens
gaactctgccaggat

SEQ ID NO: 154107 - DNA, 15 bp, Homo sapiens
ggaactctgccagga

SEQ ID NO: 154108 - DNA, 15 bp, Homo sapiens
tggaactctgccagg

SEQ ID NO: 154109 - DNA, 15 bp, Homo sapiens
ctggaactctgccag

SEQ ID NO: 154110 - DNA, 15 bp, Homo sapiens
gctggaactctgcca

SEQ ID NO: 154111 - DNA, 15 bp, Homo sapiens
agctggaactctgcc

SEQ ID NO: 154112 - DNA, 15 bp, Homo sapiens
cagctggaactctgc

SEQ ID NO: 154113 - DNA, 15 bp, Homo sapiens
gcagctggaactctg

SEQ ID NO: 154114 - DNA, 15 bp, Homo sapiens
tgcagctggaactct

SEQ ID NO: 154115 - DNA, 15 bp, Homo sapiens
ctgcagctggaactc

SEQ ID NO: 154116 - DNA, 15 bp, Homo sapiens
cctgcagctggaact

SEQ ID NO: 154117 - DNA, 15 bp, Homo sapiens
tcctgcagctggaac

SEQ ID NO: 154118 - DNA, 15 bp, Homo sapiens
ctcctgcagctggaa

SEQ ID NO: 154119 - DNA, 15 bp, Homo sapiens
cctcctgcagctgga

SEQ ID NO: 154120 - DNA, 15 bp, Homo sapiens
tcctcctgcagctgg

SEQ ID NO: 154121 - DNA, 15 bp, Homo sapiens
ctcctcctgcagctg

SEQ ID NO: 154122 - DNA, 15 bp, Homo sapiens
cctcctcctgcagct

SEQ ID NO: 154123 - DNA, 15 bp, Homo sapiens
tcctcctcctgcagc

SEQ ID NO: 154124 - DNA, 15 bp, Homo sapiens
gtcctcctcctgcag

SEQ ID NO: 154125 - DNA, 15 bp, Homo sapiens
ggtcctcctcctgca

SEQ ID NO: 154126 - DNA, 15 bp, Homo sapiens
aggtcctcctcctgc

SEQ ID NO: 154127 - DNA, 15 bp, Homo sapiens
caggtcctcctcctg

SEQ ID NO: 154128 - DNA, 15 bp, Homo sapiens
tcaggtcctcctcct

SEQ ID NO: 154129 - DNA, 15 bp, Homo sapiens
ttcaggtcctcctcc

SEQ ID NO: 154130 - DNA, 15 bp, Homo sapiens
cttcaggtcctcctc

SEQ ID NO: 154131 - DNA, 15 bp, Homo sapiens
tcttcaggtcctcct

SEQ ID NO: 154132 - DNA, 15 bp, Homo sapiens
ttcttcaggtcctcc

SEQ ID NO: 154133 - DNA, 15 bp, Homo sapiens
cttcttcaggtcctc

SEQ ID NO: 154134 - DNA, 15 bp, Homo sapiens
ccttcttcaggtcct

SEQ ID NO: 154135 - DNA, 15 bp, Homo sapiens
accttcttcaggtcc

SEQ ID NO: 154136 - DNA, 15 bp, Homo sapiens
caccttcttcaggtc

SEQ ID NO: 154137 - DNA, 15 bp, Homo sapiens
tcaccttcttcaggt

SEQ ID NO: 154138 - DNA, 15 bp, Homo sapiens
atcaccttcttcagg

SEQ ID NO: 154139 - DNA, 15 bp, Homo sapiens
catcaccttcttcag

SEQ ID NO: 154140 - DNA, 15 bp, Homo sapiens
tcatcaccttcttca

SEQ ID NO: 154141 - DNA, 15 bp, Homo sapiens
ctcatcaccttcttc

SEQ ID NO: 154142 - DNA, 15 bp, Homo sapiens
tctcatcaccttctt

SEQ ID NO: 154143 - DNA, 15 bp, Homo sapiens
gtctcatcaccttct

SEQ ID NO: 154144 - DNA, 15 bp, Homo sapiens
cgtctcatcaccttc

SEQ ID NO: 154145 - DNA, 15 bp, Homo sapiens
ccgtctcatcacctt

SEQ ID NO: 154146 - DNA, 15 bp, Homo sapiens
tccgtctcatcacct

SEQ ID NO: 154147 - DNA, 15 bp, Homo sapiens
atccgtctcatcacc

SEQ ID NO: 154148 - DNA, 15 bp, Homo sapiens
catccgtctcatcac

SEQ ID NO: 154149 - DNA, 15 bp, Homo sapiens
gcatccgtctcatca

SEQ ID NO: 154150 - DNA, 15 bp, Homo sapiens
tgcatccgtctcatc

SEQ ID NO: 154151 - DNA, 15 bp, Homo sapiens
ctgcatccgtctcat

SEQ ID NO: 154152 - DNA, 15 bp, Homo sapiens
tctgcatccgtctca

SEQ ID NO: 154153 - DNA, 15 bp, Homo sapiens
ttctgcatccgtctc

SEQ ID NO: 154154 - DNA, 15 bp, Homo sapiens
cttctgcatccgtct

SEQ ID NO: 154155 - DNA, 15 bp, Homo sapiens
ccttctgcatccgtc

SEQ ID NO: 154156 - DNA, 15 bp, Homo sapiens
tccttctgcatccgt

SEQ ID NO: 154157 - DNA, 15 bp, Homo sapiens
ctccttctgcatccg

SEQ ID NO: 154158 - DNA, 15 bp, Homo sapiens
tctccttctgcatcc

SEQ ID NO: 154159 - DNA, 15 bp, Homo sapiens
atctccttctgcatc

SEQ ID NO: 154160 - DNA, 15 bp, Homo sapiens
catctccttctgcat

SEQ ID NO: 154161 - DNA, 15 bp, Homo sapiens
ccatctccttctgca

SEQ ID NO: 154162 - DNA, 15 bp, Homo sapiens
tccatctccttctgc

SEQ ID NO: 154163 - DNA, 15 bp, Homo sapiens
gtccatctccttctg

SEQ ID NO: 154164 - DNA, 15 bp, Homo sapiens
ggtccatctccttct

SEQ ID NO: 154165 - DNA, 15 bp, Homo sapiens
cggtccatctccttc

SEQ ID NO: 154166 - DNA, 15 bp, Homo sapiens
gcggtccatctcctt

SEQ ID NO: 154167 - DNA, 15 bp, Homo sapiens
cgcggtccatctcct

SEQ ID NO: 154168 - DNA, 15 bp, Homo sapiens
ccgcggtccatctcc

SEQ ID NO: 154169 - DNA, 15 bp, Homo sapiens
gccgcggtccatctc

SEQ ID NO: 154170 - DNA, 15 bp, Homo sapiens
ggccgcggtccatct

SEQ ID NO: 154171 - DNA, 15 bp, Homo sapiens
aggccgcggtccatc

SEQ ID NO: 154172 - DNA, 15 bp, Homo sapiens
caggccgcggtccat

SEQ ID NO: 154173 - DNA, 15 bp, Homo sapiens
tcaggccgcggtcca

SEQ ID NO: 154174 - DNA, 15 bp, Homo sapiens
ctcaggccgcggtcc

SEQ ID NO: 154175 - DNA, 15 bp, Homo sapiens
cctcaggccgcggtc

SEQ ID NO: 154176 - DNA, 15 bp, Homo sapiens
gcctcaggccgcggt

SEQ ID NO: 154177 - DNA, 15 bp, Homo sapiens
agcctcaggccgcgg

SEQ ID NO: 154178 - DNA, 15 bp, Homo sapiens
cagcctcaggccgcg

SEQ ID NO: 154179 - DNA, 15 bp, Homo sapiens
ccagcctcaggccgc

SEQ ID NO: 154180 - DNA, 15 bp, Homo sapiens
tccagcctcaggccg

SEQ ID NO: 154181 - DNA, 15 bp, Homo sapiens
ctccagcctcaggcc

SEQ ID NO: 154182 - DNA, 15 bp, Homo sapiens
tctccagcctcaggc

SEQ ID NO: 154183 - DNA, 15 bp, Homo sapiens
gtctccagcctcagg

SEQ ID NO: 154184 - DNA, 15 bp, Homo sapiens
ggtctccagcctcag

SEQ ID NO: 154185 - DNA, 15 bp, Homo sapiens
gggtctccagcctca

SEQ ID NO: 154186 - DNA, 15 bp, Homo sapiens
tgggtctccagcctc

SEQ ID NO: 154187 - DNA, 15 bp, Homo sapiens
atgggtctccagcct

SEQ ID NO: 154188 - DNA, 15 bp, Homo sapiens
catgggtctccagcc

SEQ ID NO: 154189 - DNA, 15 bp, Homo sapiens
tcatgggtctccagc

SEQ ID NO: 154190 - DNA, 15 bp, Homo sapiens
ttcatgggtctccag

SEQ ID NO: 154191 - DNA, 15 bp, Homo sapiens
cttcatgggtctcca

SEQ ID NO: 154192 - DNA, 15 bp, Homo sapiens
tcttcatgggtctcc

SEQ ID NO: 154193 - DNA, 15 bp, Homo sapiens
ctcttcatgggtctc

SEQ ID NO: 154194 - DNA, 15 bp, Homo sapiens
cctcttcatgggtct

SEQ ID NO: 154195 - DNA, 15 bp, Homo sapiens
gcctcttcatgggtc

SEQ ID NO: 154196 - DNA, 15 bp, Homo sapiens
ggcctcttcatgggt

SEQ ID NO: 154197 - DNA, 15 bp, Homo sapiens
tggcctcttcatggg

SEQ ID NO: 154198 - DNA, 15 bp, Homo sapiens
ctggcctcttcatgg

SEQ ID NO: 154199 - DNA, 15 bp, Homo sapiens
actggcctcttcatg

SEQ ID NO: 154200 - DNA, 15 bp, Homo sapiens
cactggcctcttcat

SEQ ID NO: 154201 - DNA, 15 bp, Homo sapiens
acactggcctcttca

SEQ ID NO: 154202 - DNA, 15 bp, Homo sapiens
cacactggcctcttc

SEQ ID NO: 154203 - DNA, 15 bp, Homo sapiens
tcacactggcctctt

SEQ ID NO: 154204 - DNA, 15 bp, Homo sapiens
ttcacactggcctct

SEQ ID NO: 154205 - DNA, 15 bp, Homo sapiens
cttcacactggcctc

SEQ ID NO: 154206 - DNA, 15 bp, Homo sapiens
tcttcacactggcct

SEQ ID NO: 154207 - DNA, 15 bp, Homo sapiens
atcttcacactggcc

SEQ ID NO: 154208 - DNA, 15 bp, Homo sapiens
catcttcacactggc

SEQ ID NO: 154209 - DNA, 15 bp, Homo sapiens
gcatcttcacactgg

SEQ ID NO: 154210 - DNA, 15 bp, Homo sapiens
agcatcttcacactg

SEQ ID NO: 154211 - DNA, 15 bp, Homo sapiens
cagcatcttcacact

SEQ ID NO: 154212 - DNA, 15 bp, Homo sapiens
gcagcatcttcacac

SEQ ID NO: 154213 - DNA, 15 bp, Homo sapiens
ggcagcatcttcaca

SEQ ID NO: 154214 - DNA, 15 bp, Homo sapiens
gggcagcatcttcac

SEQ ID NO: 154215 - DNA, 15 bp, Homo sapiens
tgggcagcatcttca

SEQ ID NO: 154216 - DNA, 15 bp, Homo sapiens
gtgggcagcatcttc

SEQ ID NO: 154217 - DNA, 15 bp, Homo sapiens
ggtgggcagcatctt

SEQ ID NO: 154218 - DNA, 15 bp, Homo sapiens
aggtgggcagcatct

SEQ ID NO: 154219 - DNA, 15 bp, Homo sapiens
taggtgggcagcatc

SEQ ID NO: 154220 - DNA, 15 bp, Homo sapiens
gtaggtgggcagcat

SEQ ID NO: 154221 - DNA, 15 bp, Homo sapiens
cgtaggtgggcagca

SEQ ID NO: 154222 - DNA, 15 bp, Homo sapiens
acgtaggtgggcagc

SEQ ID NO: 154223 - DNA, 15 bp, Homo sapiens
cacgtaggtgggcag

SEQ ID NO: 154224 - DNA, 15 bp, Homo sapiens
gcacgtaggtgggca

SEQ ID NO: 154225 - DNA, 15 bp, Homo sapiens
cgcacgtaggtgggc

SEQ ID NO: 154226 - DNA, 15 bp, Homo sapiens
gcgcacgtaggtggg

SEQ ID NO: 154227 - DNA, 15 bp, Homo sapiens
agcgcacgtaggtgg

SEQ ID NO: 154228 - DNA, 15 bp, Homo sapiens
gagcgcacgtaggtg

SEQ ID NO: 154229 - DNA, 15 bp, Homo sapiens
ggagcgcacgtaggt

SEQ ID NO: 154230 - DNA, 15 bp, Homo sapiens
tggagcgcacgtagg

SEQ ID NO: 154231 - DNA, 15 bp, Homo sapiens
gtggagcgcacgtag

SEQ ID NO: 154232 - DNA, 15 bp, Homo sapiens
ggtggagcgcacgta

SEQ ID NO: 154233 - DNA, 15 bp, Homo sapiens
gggtggagcgcacgt

SEQ ID NO: 154234 - DNA, 15 bp, Homo sapiens
ggggtggagcgcacg

SEQ ID NO: 154235 - DNA, 15 bp, Homo sapiens
tggggtggagcgcac

SEQ ID NO: 154236 - DNA, 15 bp, Homo sapiens
ctggggtggagcgca

SEQ ID NO: 154237 - DNA, 15 bp, Homo sapiens
tctggggtggagcgc

SEQ ID NO: 154238 - DNA, 15 bp, Homo sapiens
ttctggggtggagcg

SEQ ID NO: 154239 - DNA, 15 bp, Homo sapiens
cttctggggtggagc

SEQ ID NO: 154240 - DNA, 15 bp, Homo sapiens
ccttctggggtggag

SEQ ID NO: 154241 - DNA, 15 bp, Homo sapiens
gccttctggggtgga

SEQ ID NO: 154242 - DNA, 15 bp, Homo sapiens
agccttctggggtgg

SEQ ID NO: 154243 - DNA, 15 bp, Homo sapiens
gagccttctggggtg

SEQ ID NO: 154244 - DNA, 15 bp, Homo sapiens
tgagccttctggggt

SEQ ID NO: 154245 - DNA, 15 bp, Homo sapiens
ctgagccttctgggg

SEQ ID NO: 154246 - DNA, 15 bp, Homo sapiens
cctgagccttctggg

SEQ ID NO: 154247 - DNA, 15 bp, Homo sapiens
acctgagccttctgg

SEQ ID NO: 154248 - DNA, 15 bp, Homo sapiens
tacctgagccttctg

SEQ ID NO: 154249 - DNA, 15 bp, Homo sapiens
gtacctgagccttct

SEQ ID NO: 154250 - DNA, 15 bp, Homo sapiens
ggtacctgagccttc

SEQ ID NO: 154251 - DNA, 15 bp, Homo sapiens
tggtacctgagcctt

SEQ ID NO: 154252 - DNA, 15 bp, Homo sapiens
gtggtacctgagcct

SEQ ID NO: 154253 - DNA, 15 bp, Homo sapiens
tgtggtacctgagcc

SEQ ID NO: 154254 - DNA, 15 bp, Homo sapiens
atgtggtacctgagc

SEQ ID NO: 154255 - DNA, 15 bp, Homo sapiens
catgtggtacctgag

SEQ ID NO: 154256 - DNA, 15 bp, Homo sapiens
ccatgtggtacctga

SEQ ID NO: 154257 - DNA, 15 bp, Homo sapiens
accatgtggtacctg

SEQ ID NO: 154258 - DNA, 15 bp, Homo sapiens
taccatgtggtacct

SEQ ID NO: 154259 - DNA, 15 bp, Homo sapiens
ttaccatgtggtacc

SEQ ID NO: 154260 - DNA, 15 bp, Homo sapiens
gttaccatgtggtac

SEQ ID NO: 154261 - DNA, 15 bp, Homo sapiens
ggttaccatgtggta

SEQ ID NO: 154262 - DNA, 15 bp, Homo sapiens
cggttaccatgtggt

SEQ ID NO: 154263 - DNA, 15 bp, Homo sapiens
ccggttaccatgtgg

SEQ ID NO: 154264 - DNA, 15 bp, Homo sapiens
gccggttaccatgtg

SEQ ID NO: 154265 - DNA, 15 bp, Homo sapiens
agccggttaccatgt

SEQ ID NO: 154266 - DNA, 15 bp, Homo sapiens
gagccggttaccatg

SEQ ID NO: 154267 - DNA, 15 bp, Homo sapiens
ggagccggttaccat

SEQ ID NO: 154268 - DNA, 15 bp, Homo sapiens
aggagccggttacca

SEQ ID NO: 154269 - DNA, 15 bp, Homo sapiens
gaggagccggttacc

SEQ ID NO: 154270 - DNA, 15 bp, Homo sapiens
tgaggagccggttac

SEQ ID NO: 154271 - DNA, 15 bp, Homo sapiens
atgaggagccggtta

SEQ ID NO: 154272 - DNA, 15 bp, Homo sapiens
gatgaggagccggtt

SEQ ID NO: 154273 - DNA, 15 bp, Homo sapiens
ggatgaggagccggt

SEQ ID NO: 154274 - DNA, 15 bp, Homo sapiens
tggatgaggagccgg

SEQ ID NO: 154275 - DNA, 15 bp, Homo sapiens
ctggatgaggagccg

SEQ ID NO: 154276 - DNA, 15 bp, Homo sapiens
tctggatgaggagcc

SEQ ID NO: 154277 - DNA, 15 bp, Homo sapiens
ttctggatgaggagc

SEQ ID NO: 154278 - DNA, 15 bp, Homo sapiens
cttctggatgaggag

SEQ ID NO: 154279 - DNA, 15 bp, Homo sapiens
gcttctggatgagga

SEQ ID NO: 154280 - DNA, 15 bp, Homo sapiens
tgcttctggatgagg

SEQ ID NO: 154281 - DNA, 15 bp, Homo sapiens
ctgcttctggatgag

SEQ ID NO: 154282 - DNA, 15 bp, Homo sapiens
gctgcttctggatga

SEQ ID NO: 154283 - DNA, 15 bp, Homo sapiens
agctgcttctggatg

SEQ ID NO: 154284 - DNA, 15 bp, Homo sapiens
cagctgcttctggat

SEQ ID NO: 154285 - DNA, 15 bp, Homo sapiens
acagctgcttctgga

SEQ ID NO: 154286 - DNA, 15 bp, Homo sapiens
cacagctgcttctgg

SEQ ID NO: 154287 - DNA, 15 bp, Homo sapiens
ccacagctgcttctg

SEQ ID NO: 154288 - DNA, 15 bp, Homo sapiens
cccacagctgcttct

SEQ ID NO: 154289 - DNA, 15 bp, Homo sapiens
gcccacagctgcttc

SEQ ID NO: 154290 - DNA, 15 bp, Homo sapiens
agcccacagctgctt

SEQ ID NO: 154291 - DNA, 15 bp, Homo sapiens
gagcccacagctgct

SEQ ID NO: 154292 - DNA, 15 bp, Homo sapiens
tgagcccacagctgc

SEQ ID NO: 154293 - DNA, 15 bp, Homo sapiens
ctgagcccacagctg

SEQ ID NO: 154294 - DNA, 15 bp, Homo sapiens
gctgagcccacagct

SEQ ID NO: 154295 - DNA, 15 bp, Homo sapiens
ggctgagcccacagc

SEQ ID NO: 154296 - DNA, 15 bp, Homo sapiens
gggctgagcccacag

SEQ ID NO: 154297 - DNA, 15 bp, Homo sapiens
agggctgagcccaca

SEQ ID NO: 154298 - DNA, 15 bp, Homo sapiens
tagggctgagcccac

SEQ ID NO: 154299 - DNA, 15 bp, Homo sapiens
ctagggctgagccca

SEQ ID NO: 154300 - DNA, 15 bp, Homo sapiens
gctagggctgagccc

SEQ ID NO: 154301 - DNA, 15 bp, Homo sapiens
agctagggctgagcc

SEQ ID NO: 154302 - DNA, 15 bp, Homo sapiens
cagctagggctgagc

SEQ ID NO: 154303 - DNA, 15 bp, Homo sapiens
ccagctagggctgag

SEQ ID NO: 154304 - DNA, 15 bp, Homo sapiens
cccagctagggctga

SEQ ID NO: 154305 - DNA, 15 bp, Homo sapiens
tcccagctagggctg

SEQ ID NO: 154306 - DNA, 15 bp, Homo sapiens
ctcccagctagggct

SEQ ID NO: 154307 - DNA, 15 bp, Homo sapiens
tctcccagctagggc

SEQ ID NO: 154308 - DNA, 15 bp, Homo sapiens
ttctcccagctaggg

SEQ ID NO: 154309 - DNA, 15 bp, Homo sapiens
cttctcccagctagg

SEQ ID NO: 154310 - DNA, 15 bp, Homo sapiens
gcttctcccagctag

SEQ ID NO: 154311 - DNA, 15 bp, Homo sapiens
tgcttctcccagcta

SEQ ID NO: 154312 - DNA, 15 bp, Homo sapiens
gtgcttctcccagct

SEQ ID NO: 154313 - DNA, 15 bp, Homo sapiens
ggtgcttctcccagc

SEQ ID NO: 154314 - DNA, 15 bp, Homo sapiens
gggtgcttctcccag

SEQ ID NO: 154315 - DNA, 15 bp, Homo sapiens
ggggtgcttctccca

SEQ ID NO: 154316 - DNA, 15 bp, Homo sapiens
tggggtgcttctccc

SEQ ID NO: 154317 - DNA, 15 bp, Homo sapiens
ctggggtgcttctcc

SEQ ID NO: 154318 - DNA, 15 bp, Homo sapiens
cctggggtgcttctc

SEQ ID NO: 154319 - DNA, 15 bp, Homo sapiens
gcctggggtgcttct

SEQ ID NO: 154320 - DNA, 15 bp, Homo sapiens
tgcctggggtgcttc

SEQ ID NO: 154321 - DNA, 15 bp, Homo sapiens
gtgcctggggtgctt

SEQ ID NO: 154322 - DNA, 15 bp, Homo sapiens
agtgcctggggtgct

SEQ ID NO: 154323 - DNA, 15 bp, Homo sapiens
gagtgcctggggtgc

SEQ ID NO: 154324 - DNA, 15 bp, Homo sapiens
ggagtgcctggggtg

SEQ ID NO: 154325 - DNA, 15 bp, Homo sapiens
gggagtgcctggggt

SEQ ID NO: 154326 - DNA, 15 bp, Homo sapiens
tgggagtgcctgggg

SEQ ID NO: 154327 - DNA, 15 bp, Homo sapiens
ctgggagtgcctggg

SEQ ID NO: 154328 - DNA, 15 bp, Homo sapiens
tctgggagtgcctgg

SEQ ID NO: 154329 - DNA, 15 bp, Homo sapiens
gtctgggagtgcctg

SEQ ID NO: 154330 - DNA, 15 bp, Homo sapiens
agtctgggagtgcct

SEQ ID NO: 154331 - DNA, 15 bp, Homo sapiens
gagtctgggagtgcc

SEQ ID NO: 154332 - DNA, 15 bp, Homo sapiens
tgagtctgggagtgc

SEQ ID NO: 154333 - DNA, 15 bp, Homo sapiens
gtgagtctgggagtg

SEQ ID NO: 154334 - DNA, 15 bp, Homo sapiens
tgtgagtctgggagt

SEQ ID NO: 154335 - DNA, 15 bp, Homo sapiens
ctgtgagtctgggag

SEQ ID NO: 154336 - DNA, 15 bp, Homo sapiens
gctgtgagtctggga

SEQ ID NO: 154337 - DNA, 15 bp, Homo sapiens
ggctgtgagtctggg

SEQ ID NO: 154338 - DNA, 15 bp, Homo sapiens
tggctgtgagtctgg

SEQ ID NO: 154339 - DNA, 15 bp, Homo sapiens
ctggctgtgagtctg

SEQ ID NO: 154340 - DNA, 15 bp, Homo sapiens
gctggctgtgagtct

SEQ ID NO: 154341 - DNA, 15 bp, Homo sapiens
ggctggctgtgagtc

SEQ ID NO: 154342 - DNA, 15 bp, Homo sapiens
gggctggctgtgagt

SEQ ID NO: 154343 - DNA, 15 bp, Homo sapiens
cgggctggctgtgag

SEQ ID NO: 154344 - DNA, 15 bp, Homo sapiens
tcgggctggctgtga

SEQ ID NO: 154345 - DNA, 15 bp, Homo sapiens
ctcgggctggctgtg

SEQ ID NO: 154346 - DNA, 15 bp, Homo sapiens
tctcgggctggctgt

SEQ ID NO: 154347 - DNA, 15 bp, Homo sapiens
gtctcgggctggctg

SEQ ID NO: 154348 - DNA, 15 bp, Homo sapiens
tgtctcgggctggct

SEQ ID NO: 154349 - DNA, 15 bp, Homo sapiens
ctgtctcgggctggc

SEQ ID NO: 154350 - DNA, 15 bp, Homo sapiens
tctgtctcgggctgg

SEQ ID NO: 154351 - DNA, 15 bp, Homo sapiens
ttctgtctcgggctg

SEQ ID NO: 154352 - DNA, 15 bp, Homo sapiens
attctgtctcgggct

SEQ ID NO: 154353 - DNA, 15 bp, Homo sapiens
gattctgtctcgggc

SEQ ID NO: 154354 - DNA, 15 bp, Homo sapiens
agattctgtctcggg

SEQ ID NO: 154355 - DNA, 15 bp, Homo sapiens
gagattctgtctcgg

SEQ ID NO: 154356 - DNA, 15 bp, Homo sapiens
ggagattctgtctcg

SEQ ID NO: 154357 - DNA, 15 bp, Homo sapiens
aggagattctgtctc

SEQ ID NO: 154358 - DNA, 15 bp, Homo sapiens
caggagattctgtct

SEQ ID NO: 154359 - DNA, 15 bp, Homo sapiens
ccaggagattctgtc

SEQ ID NO: 154360 - DNA, 15 bp, Homo sapiens
cccaggagattctgt

SEQ ID NO: 154361 - DNA, 15 bp, Homo sapiens
ccccaggagattctg

SEQ ID NO: 154362 - DNA, 15 bp, Homo sapiens
tccccaggagattct

SEQ ID NO: 154363 - DNA, 15 bp, Homo sapiens
ctccccaggagattc

SEQ ID NO: 154364 - DNA, 15 bp, Homo sapiens
gctccccaggagatt

SEQ ID NO: 154365 - DNA, 15 bp, Homo sapiens
tgctccccaggagat

SEQ ID NO: 154366 - DNA, 15 bp, Homo sapiens
ttgctccccaggaga

SEQ ID NO: 154367 - DNA, 15 bp, Homo sapiens
attgctccccaggag

SEQ ID NO: 154368 - DNA, 15 bp, Homo sapiens
cattgctccccagga

SEQ ID NO: 154369 - DNA, 15 bp, Homo sapiens
tcattgctccccagg

SEQ ID NO: 154370 - DNA, 15 bp, Homo sapiens
ttcattgctccccag

SEQ ID NO: 154371 - DNA, 15 bp, Homo sapiens
cttcattgctcccca

SEQ ID NO: 154372 - DNA, 15 bp, Homo sapiens
acttcattgctcccc

SEQ ID NO: 154373 - DNA, 15 bp, Homo sapiens
gacttcattgctccc

SEQ ID NO: 154374 - DNA, 15 bp, Homo sapiens
ggacttcattgctcc

SEQ ID NO: 154375 - DNA, 15 bp, Homo sapiens
aggacttcattgctc

SEQ ID NO: 154376 - DNA, 15 bp, Homo sapiens
gaggacttcattgct

SEQ ID NO: 154377 - DNA, 15 bp, Homo sapiens
cgaggacttcattgc

SEQ ID NO: 154378 - DNA, 15 bp, Homo sapiens
tcgaggacttcattg

SEQ ID NO: 154379 - DNA, 15 bp, Homo sapiens
gtcgaggacttcatt

SEQ ID NO: 154380 - DNA, 15 bp, Homo sapiens
agtcgaggacttcat

SEQ ID NO: 154381 - DNA, 15 bp, Homo sapiens
aagtcgaggacttca

SEQ ID NO: 154382 - DNA, 15 bp, Homo sapiens
caagtcgaggacttc

SEQ ID NO: 154383 - DNA, 15 bp, Homo sapiens
ccaagtcgaggactt

SEQ ID NO: 154384 - DNA, 15 bp, Homo sapiens
cccaagtcgaggact

SEQ ID NO: 154385 - DNA, 15 bp, Homo sapiens
gcccaagtcgaggac

SEQ ID NO: 154386 - DNA, 15 bp, Homo sapiens
ggcccaagtcgagga

SEQ ID NO: 154387 - DNA, 15 bp, Homo sapiens
tggcccaagtcgagg

SEQ ID NO: 154388 - DNA, 15 bp, Homo sapiens
ctggcccaagtcgag

SEQ ID NO: 154389 - DNA, 15 bp, Homo sapiens
actggcccaagtcga

SEQ ID NO: 154390 - DNA, 15 bp, Homo sapiens
aactggcccaagtcg

SEQ ID NO: 154391 - DNA, 15 bp, Homo sapiens
gaactggcccaagtc

SEQ ID NO: 154392 - DNA, 15 bp, Homo sapiens
agaactggcccaagt

SEQ ID NO: 154393 - DNA, 15 bp, Homo sapiens
gagaactggcccaag

SEQ ID NO: 154394 - DNA, 15 bp, Homo sapiens
tgagaactggcccaa

SEQ ID NO: 154395 - DNA, 15 bp, Homo sapiens
gtgagaactggccca

SEQ ID NO: 154396 - DNA, 15 bp, Homo sapiens
ggtgagaactggccc

SEQ ID NO: 154397 - DNA, 15 bp, Homo sapiens
gggtgagaactggcc

SEQ ID NO: 154398 - DNA, 15 bp, Homo sapiens
agggtgagaactggc

SEQ ID NO: 154399 - DNA, 15 bp, Homo sapiens
aagggtgagaactgg

SEQ ID NO: 154400 - DNA, 15 bp, Homo sapiens
caagggtgagaactg

SEQ ID NO: 154401 - DNA, 15 bp, Homo sapiens
ccaagggtgagaact

SEQ ID NO: 154402 - DNA, 15 bp, Homo sapiens
gccaagggtgagaac

SEQ ID NO: 154403 - DNA, 15 bp, Homo sapiens
agccaagggtgagaa

SEQ ID NO: 154404 - DNA, 15 bp, Homo sapiens
gagccaagggtgaga

SEQ ID NO: 154405 - DNA, 15 bp, Homo sapiens
ggagccaagggtgag

SEQ ID NO: 154406 - DNA, 15 bp, Homo sapiens
aggagccaagggtga

SEQ ID NO: 154407 - DNA, 15 bp, Homo sapiens
gaggagccaagggtg

SEQ ID NO: 154408 - DNA, 15 bp, Homo sapiens
agaggagccaagggt

SEQ ID NO: 154409 - DNA, 15 bp, Homo sapiens
cagaggagccaaggg

SEQ ID NO: 154410 - DNA, 15 bp, Homo sapiens
ccagaggagccaagg

SEQ ID NO: 154411 - DNA, 15 bp, Homo sapiens
accagaggagccaag

SEQ ID NO: 154412 - DNA, 15 bp, Homo sapiens
gaccagaggagccaa

SEQ ID NO: 154413 - DNA, 15 bp, Homo sapiens
ggaccagaggagcca

SEQ ID NO: 154414 - DNA, 15 bp, Homo sapiens
cggaccagaggagcc

SEQ ID NO: 154415 - DNA, 15 bp, Homo sapiens
ccggaccagaggagc

SEQ ID NO: 154416 - DNA, 15 bp, Homo sapiens
gccggaccagaggag

SEQ ID NO: 154417 - DNA, 15 bp, Homo sapiens
ggccggaccagagga

SEQ ID NO: 154418 - DNA, 15 bp, Homo sapiens
gggccggaccagagg

SEQ ID NO: 154419 - DNA, 15 bp, Homo sapiens
agggccggaccagag

SEQ ID NO: 154420 - DNA, 15 bp, Homo sapiens
cagggccggaccaga

SEQ ID NO: 154421 - DNA, 15 bp, Homo sapiens
ccagggccggaccag

SEQ ID NO: 154422 - DNA, 15 bp, Homo sapiens
cccagggccggacca

SEQ ID NO: 154423 - DNA, 15 bp, Homo sapiens
ccccagggccggacc

SEQ ID NO: 154424 - DNA, 15 bp, Homo sapiens
gccccagggccggac

SEQ ID NO: 154425 - DNA, 15 bp, Homo sapiens
tgccccagggccgga

SEQ ID NO: 154426 - DNA, 15 bp, Homo sapiens
gtgccccagggccgg

SEQ ID NO: 154427 - DNA, 15 bp, Homo sapiens
agtgccccagggccg

SEQ ID NO: 154428 - DNA, 15 bp, Homo sapiens
gagtgccccagggcc

SEQ ID NO: 154429 - DNA, 15 bp, Homo sapiens
cgagtgccccagggc

SEQ ID NO: 154430 - DNA, 15 bp, Homo sapiens
ccgagtgccccaggg

SEQ ID NO: 154431 - DNA, 15 bp, Homo sapiens
cccgagtgccccagg

SEQ ID NO: 154432 - DNA, 15 bp, Homo sapiens
gcccgagtgccccag

SEQ ID NO: 154433 - DNA, 15 bp, Homo sapiens
agcccgagtgcccca

SEQ ID NO: 154434 - DNA, 15 bp, Homo sapiens
gagcccgagtgcccc

SEQ ID NO: 154435 - DNA, 15 bp, Homo sapiens
tgagcccgagtgccc

SEQ ID NO: 154436 - DNA, 15 bp, Homo sapiens
gtgagcccgagtgcc

SEQ ID NO: 154437 - DNA, 15 bp, Homo sapiens
ggtgagcccgagtgc

SEQ ID NO: 154438 - DNA, 15 bp, Homo sapiens
gggtgagcccgagtg

SEQ ID NO: 154439 - DNA, 15 bp, Homo sapiens
agggtgagcccgagt

SEQ ID NO: 154440 - DNA, 15 bp, Homo sapiens
cagggtgagcccgag

SEQ ID NO: 154441 - DNA, 15 bp, Homo sapiens
ccagggtgagcccga

SEQ ID NO: 154442 - DNA, 15 bp, Homo sapiens
tccagggtgagcccg

SEQ ID NO: 154443 - DNA, 15 bp, Homo sapiens
ctccagggtgagccc

SEQ ID NO: 154444 - DNA, 15 bp, Homo sapiens
gctccagggtgagcc

SEQ ID NO: 154445 - DNA, 15 bp, Homo sapiens
agctccagggtgagc

SEQ ID NO: 154446 - DNA, 15 bp, Homo sapiens
cagctccagggtgag

SEQ ID NO: 154447 - DNA, 15 bp, Homo sapiens
ccagctccagggtga

SEQ ID NO: 154448 - DNA, 15 bp, Homo sapiens
gccagctccagggtg

SEQ ID NO: 154449 - DNA, 15 bp, Homo sapiens
tgccagctccagggt

SEQ ID NO: 154450 - DNA, 15 bp, Homo sapiens
ttgccagctccaggg

SEQ ID NO: 154451 - DNA, 15 bp, Homo sapiens
tttgccagctccagg

SEQ ID NO: 154452 - DNA, 15 bp, Homo sapiens
gtttgccagctccag

SEQ ID NO: 154453 - DNA, 15 bp, Homo sapiens
ggtttgccagctcca

SEQ ID NO: 154454 - DNA, 15 bp, Homo sapiens
aggtttgccagctcc

SEQ ID NO: 154455 - DNA, 15 bp, Homo sapiens
gaggtttgccagctc

SEQ ID NO: 154456 - DNA, 15 bp, Homo sapiens
tgaggtttgccagct

SEQ ID NO: 154457 - DNA, 15 bp, Homo sapiens
ctgaggtttgccagc

SEQ ID NO: 154458 - DNA, 15 bp, Homo sapiens
cctgaggtttgccag

SEQ ID NO: 154459 - DNA, 15 bp, Homo sapiens
tcctgaggtttgcca

SEQ ID NO: 154460 - DNA, 15 bp, Homo sapiens
ttcctgaggtttgcc

SEQ ID NO: 154461 - DNA, 15 bp, Homo sapiens
tttcctgaggtttgc

SEQ ID NO: 154462 - DNA, 15 bp, Homo sapiens
ttttcctgaggtttg

SEQ ID NO: 154463 - DNA, 15 bp, Homo sapiens
gttttcctgaggttt

SEQ ID NO: 154464 - DNA, 15 bp, Homo sapiens
agttttcctgaggtt

SEQ ID NO: 154465 - DNA, 15 bp, Homo sapiens
cagttttcctgaggt

SEQ ID NO: 154466 - DNA, 15 bp, Homo sapiens
ccagttttcctgagg

SEQ ID NO: 154467 - DNA, 15 bp, Homo sapiens
gccagttttcctgag

SEQ ID NO: 154468 - DNA, 15 bp, Homo sapiens
cgccagttttcctga

SEQ ID NO: 154469 - DNA, 15 bp, Homo sapiens
acgccagttttcctg

SEQ ID NO: 154470 - DNA, 15 bp, Homo sapiens
aacgccagttttcct

SEQ ID NO: 154471 - DNA, 15 bp, Homo sapiens
aaacgccagttttcc

SEQ ID NO: 154472 - DNA, 15 bp, Homo sapiens
aaaacgccagttttc

SEQ ID NO: 154473 - DNA, 15 bp, Homo sapiens
taaaacgccagtttt

SEQ ID NO: 154474 - DNA, 15 bp, Homo sapiens
ttaaaacgccagttt

SEQ ID NO: 154475 - DNA, 15 bp, Homo sapiens
tttaaaacgccagtt

SEQ ID NO: 154476 - DNA, 15 bp, Homo sapiens
atttaaaacgccagt

SEQ ID NO: 154477 - DNA, 15 bp, Homo sapiens
gatttaaaacgccag

SEQ ID NO: 154478 - DNA, 15 bp, Homo sapiens
agatttaaaacgcca

SEQ ID NO: 154479 - DNA, 15 bp, Homo sapiens
gagatttaaaacgcc

SEQ ID NO: 154480 - DNA, 15 bp, Homo sapiens
tgagatttaaaacgc

SEQ ID NO: 154481 - DNA, 15 bp, Homo sapiens
gtgagatttaaaacg

SEQ ID NO: 154482 - DNA, 15 bp, Homo sapiens
agtgagatttaaaac

SEQ ID NO: 154483 - DNA, 15 bp, Homo sapiens
gagtgagatttaaaa

SEQ ID NO: 154484 - DNA, 15 bp, Homo sapiens
ggagtgagatttaaa

SEQ ID NO: 154485 - DNA, 15 bp, Homo sapiens
aggagtgagatttaa

SEQ ID NO: 154486 - DNA, 15 bp, Homo sapiens
caggagtgagattta

SEQ ID NO: 154487 - DNA, 15 bp, Homo sapiens
ccaggagtgagattt

SEQ ID NO: 154488 - DNA, 15 bp, Homo sapiens
gccaggagtgagatt

SEQ ID NO: 154489 - DNA, 15 bp, Homo sapiens
ggccaggagtgagat

SEQ ID NO: 154490 - DNA, 15 bp, Homo sapiens
tggccaggagtgaga

SEQ ID NO: 154491 - DNA, 15 bp, Homo sapiens
ctggccaggagtgag

SEQ ID NO: 154492 - DNA, 15 bp, Homo sapiens
cctggccaggagtga

SEQ ID NO: 154493 - DNA, 15 bp, Homo sapiens
acctggccaggagtg

SEQ ID NO: 154494 - DNA, 15 bp, Homo sapiens
cacctggccaggagt

SEQ ID NO: 154495 - DNA, 15 bp, Homo sapiens
gcacctggccaggag

SEQ ID NO: 154496 - DNA, 15 bp, Homo sapiens
tgcacctggccagga

SEQ ID NO: 154497 - DNA, 15 bp, Homo sapiens
ctgcacctggccagg

SEQ ID NO: 154498 - DNA, 15 bp, Homo sapiens
actgcacctggccag

SEQ ID NO: 154499 - DNA, 15 bp, Homo sapiens
cactgcacctggcca

SEQ ID NO: 154500 - DNA, 15 bp, Homo sapiens
ccactgcacctggcc

SEQ ID NO: 154501 - DNA, 15 bp, Homo sapiens
gccactgcacctggc

SEQ ID NO: 154502 - DNA, 15 bp, Homo sapiens
agccactgcacctgg

SEQ ID NO: 154503 - DNA, 15 bp, Homo sapiens
gagccactgcacctg

SEQ ID NO: 154504 - DNA, 15 bp, Homo sapiens
tgagccactgcacct

SEQ ID NO: 154505 - DNA, 15 bp, Homo sapiens
gtgagccactgcacc

SEQ ID NO: 154506 - DNA, 15 bp, Homo sapiens
ggtgagccactgcac

SEQ ID NO: 154507 - DNA, 15 bp, Homo sapiens
gggtgagccactgca

SEQ ID NO: 154508 - DNA, 15 bp, Homo sapiens
ggggtgagccactgc

SEQ ID NO: 154509 - DNA, 15 bp, Homo sapiens
aggggtgagccactg

SEQ ID NO: 154510 - DNA, 15 bp, Homo sapiens
caggggtgagccact

SEQ ID NO: 154511 - DNA, 15 bp, Homo sapiens
acaggggtgagccac

SEQ ID NO: 154512 - DNA, 15 bp, Homo sapiens
tacaggggtgagcca

SEQ ID NO: 154513 - DNA, 15 bp, Homo sapiens
ttacaggggtgagcc

SEQ ID NO: 154514 - DNA, 15 bp, Homo sapiens
gttacaggggtgagc

SEQ ID NO: 154515 - DNA, 15 bp, Homo sapiens
agttacaggggtgag

SEQ ID NO: 154516 - DNA, 15 bp, Homo sapiens
aagttacaggggtga

SEQ ID NO: 154517 - DNA, 15 bp, Homo sapiens
gaagttacaggggtg

SEQ ID NO: 154518 - DNA, 15 bp, Homo sapiens
tgaagttacaggggt

SEQ ID NO: 154519 - DNA, 15 bp, Homo sapiens
ttgaagttacagggg

SEQ ID NO: 154520 - DNA, 15 bp, Homo sapiens
gttgaagttacaggg

SEQ ID NO: 154521 - DNA, 15 bp, Homo sapiens
tgttgaagttacagg

SEQ ID NO: 154522 - DNA, 15 bp, Homo sapiens
gtgttgaagttacag

SEQ ID NO: 154523 - DNA, 15 bp, Homo sapiens
agtgttgaagttaca

SEQ ID NO: 154524 - DNA, 15 bp, Homo sapiens
aagtgttgaagttac

SEQ ID NO: 154525 - DNA, 15 bp, Homo sapiens
aaagtgttgaagtta

SEQ ID NO: 154526 - DNA, 15 bp, Homo sapiens
caaagtgttgaagtt

SEQ ID NO: 154527 - DNA, 15 bp, Homo sapiens
ccaaagtgttgaagt

SEQ ID NO: 154528 - DNA, 15 bp, Homo sapiens
cccaaagtgttgaag

SEQ ID NO: 154529 - DNA, 15 bp, Homo sapiens
tcccaaagtgttgaa

SEQ ID NO: 154530 - DNA, 15 bp, Homo sapiens
ctcccaaagtgttga

SEQ ID NO: 154531 - DNA, 15 bp, Homo sapiens
ggcctcccaaagtgt

SEQ ID NO: 154532 - DNA, 15 bp, Homo sapiens
tggcctcccaaagtg

SEQ ID NO: 154533 - DNA, 15 bp, Homo sapiens
ttggcctcccaaagt

SEQ ID NO: 154534 - DNA, 15 bp, Homo sapiens
tttggcctcccaaag

SEQ ID NO: 154535 - DNA, 15 bp, Homo sapiens
ctttggcctcccaaa

SEQ ID NO: 154536 - DNA, 15 bp, Homo sapiens
gctttggcctcccaa

SEQ ID NO: 154537 - DNA, 15 bp, Homo sapiens
tgctttggcctccca

SEQ ID NO: 154538 - DNA, 15 bp, Homo sapiens
ctgctttggcctccc

SEQ ID NO: 154539 - DNA, 15 bp, Homo sapiens
cctgctttggcctcc

SEQ ID NO: 154540 - DNA, 15 bp, Homo sapiens
gcctgctttggcctc

SEQ ID NO: 154541 - DNA, 15 bp, Homo sapiens
cgcctgctttggcct

SEQ ID NO: 154542 - DNA, 15 bp, Homo sapiens
ccgcctgctttggcc

SEQ ID NO: 154543 - DNA, 15 bp, Homo sapiens
tccgcctgctttggc

SEQ ID NO: 154544 - DNA, 15 bp, Homo sapiens
atccgcctgctttgg

SEQ ID NO: 154545 - DNA, 15 bp, Homo sapiens
gatccgcctgctttg

SEQ ID NO: 154546 - DNA, 15 bp, Homo sapiens
agatccgcctgcttt

SEQ ID NO: 154547 - DNA, 15 bp, Homo sapiens
gagatccgcctgctt

SEQ ID NO: 154548 - DNA, 15 bp, Homo sapiens
agagatccgcctgct

SEQ ID NO: 154549 - DNA, 15 bp, Homo sapiens
aagagatccgcctgc

SEQ ID NO: 154550 - DNA, 15 bp, Homo sapiens
caagagatccgcctg

SEQ ID NO: 154551 - DNA, 15 bp, Homo sapiens
tcaagagatccgcct

SEQ ID NO: 154552 - DNA, 15 bp, Homo sapiens
ctcaagagatccgcc

SEQ ID NO: 154553 - DNA, 15 bp, Homo sapiens
cctcaagagatccgc

SEQ ID NO: 154554 - DNA, 15 bp, Homo sapiens
gcctcaagagatccg

SEQ ID NO: 154555 - DNA, 15 bp, Homo sapiens
ggcctcaagagatcc

SEQ ID NO: 154556 - DNA, 15 bp, Homo sapiens
tggcctcaagagatc

SEQ ID NO: 154557 - DNA, 15 bp, Homo sapiens
ctggcctcaagagat

SEQ ID NO: 154558 - DNA, 15 bp, Homo sapiens
cctggcctcaagaga

SEQ ID NO: 154559 - DNA, 15 bp, Homo sapiens
tcctggcctcaagag

SEQ ID NO: 154560 - DNA, 15 bp, Homo sapiens
ctcctggcctcaaga

SEQ ID NO: 154561 - DNA, 15 bp, Homo sapiens
actcctggcctcaag

SEQ ID NO: 154562 - DNA, 15 bp, Homo sapiens
aactcctggcctcaa

SEQ ID NO: 154563 - DNA, 15 bp, Homo sapiens
aaactcctggcctca

SEQ ID NO: 154564 - DNA, 15 bp, Homo sapiens
caaactcctggcctc

SEQ ID NO: 154565 - DNA, 15 bp, Homo sapiens
tcaaactcctggcct

SEQ ID NO: 154566 - DNA, 15 bp, Homo sapiens
ctcaaactcctggcc

SEQ ID NO: 154567 - DNA, 15 bp, Homo sapiens
tctcaaactcctggc

SEQ ID NO: 154568 - DNA, 15 bp, Homo sapiens
gtctcaaactcctgg

SEQ ID NO: 154569 - DNA, 15 bp, Homo sapiens
ggtctcaaactcctg

SEQ ID NO: 154570 - DNA, 15 bp, Homo sapiens
tggtctcaaactcct

SEQ ID NO: 154571 - DNA, 15 bp, Homo sapiens
ctggtctcaaactcc

SEQ ID NO: 154572 - DNA, 15 bp, Homo sapiens
gctggtctcaaactc

SEQ ID NO: 154573 - DNA, 15 bp, Homo sapiens
ggctggtctcaaact

SEQ ID NO: 154574 - DNA, 15 bp, Homo sapiens
aggctggtctcaaac

SEQ ID NO: 154575 - DNA, 15 bp, Homo sapiens
caggctggtctcaaa

SEQ ID NO: 154576 - DNA, 15 bp, Homo sapiens
gcaggctggtctcaa

SEQ ID NO: 154577 - DNA, 15 bp, Homo sapiens
ggcaggctggtctca

SEQ ID NO: 154578 - DNA, 15 bp, Homo sapiens
gggcaggctggtctc

SEQ ID NO: 154579 - DNA, 15 bp, Homo sapiens
tgggcaggctggtct

SEQ ID NO: 154580 - DNA, 15 bp, Homo sapiens
ttgggcaggctggtc

SEQ ID NO: 154581 - DNA, 15 bp, Homo sapiens
gttgggcaggctggt

SEQ ID NO: 154582 - DNA, 15 bp, Homo sapiens
tgttgggcaggctgg

SEQ ID NO: 154583 - DNA, 15 bp, Homo sapiens
atgttgggcaggctg

SEQ ID NO: 154584 - DNA, 15 bp, Homo sapiens
catgttgggcaggct

SEQ ID NO: 154585 - DNA, 15 bp, Homo sapiens
ccatgttgggcaggc

SEQ ID NO: 154586 - DNA, 15 bp, Homo sapiens
accatgttgggcagg

SEQ ID NO: 154587 - DNA, 15 bp, Homo sapiens
caccatgttgggcag

SEQ ID NO: 154588 - DNA, 15 bp, Homo sapiens
tcaccatgttgggca

SEQ ID NO: 154589 - DNA, 15 bp, Homo sapiens
ttcaccatgttgggc

SEQ ID NO: 154590 - DNA, 15 bp, Homo sapiens
tttcaccatgttggg

SEQ ID NO: 154591 - DNA, 15 bp, Homo sapiens
ggtttcaccatgttg

SEQ ID NO: 154592 - DNA, 15 bp, Homo sapiens
gggtttcaccatgtt

SEQ ID NO: 154593 - DNA, 15 bp, Homo sapiens
ggggtttcaccatgt

SEQ ID NO: 154594 - DNA, 15 bp, Homo sapiens
cggggtttcaccatg

SEQ ID NO: 154595 - DNA, 15 bp, Homo sapiens
acggggtttcaccat

SEQ ID NO: 154596 - DNA, 15 bp, Homo sapiens
gacggggtttcacca

SEQ ID NO: 154597 - DNA, 15 bp, Homo sapiens
agacggggtttcacc

SEQ ID NO: 154598 - DNA, 15 bp, Homo sapiens
gagacggggtttcac

SEQ ID NO: 154599 - DNA, 15 bp, Homo sapiens
agagacggggtttca

SEQ ID NO: 154600 - DNA, 15 bp, Homo sapiens
tagagacggggtttc

SEQ ID NO: 154601 - DNA, 15 bp, Homo sapiens
tagtagagacggggt

SEQ ID NO: 154602 - DNA, 15 bp, Homo sapiens
ttagtagagacgggg

SEQ ID NO: 154603 - DNA, 15 bp, Homo sapiens
tttagtagagacggg

SEQ ID NO: 154604 - DNA, 15 bp, Homo sapiens
ttttagtagagacgg

SEQ ID NO: 154605 - DNA, 15 bp, Homo sapiens
tttttagtagagacg

SEQ ID NO: 154606 - DNA, 15 bp, Homo sapiens
atttttagtagagac

SEQ ID NO: 154607 - DNA, 15 bp, Homo sapiens
tatttttagtagaga

SEQ ID NO: 154608 - DNA, 15 bp, Homo sapiens
gtatttttagtagag

SEQ ID NO: 154609 - DNA, 15 bp, Homo sapiens
tgtatttttagtaga

SEQ ID NO: 154610 - DNA, 15 bp, Homo sapiens
ttgtatttttagtag

SEQ ID NO: 154611 - DNA, 15 bp, Homo sapiens
tttgtatttttagta

SEQ ID NO: 154612 - DNA, 15 bp, Homo sapiens
ttttgtatttttagt

SEQ ID NO: 154613 - DNA, 15 bp, Homo sapiens
tttttgtatttttag

SEQ ID NO: 154614 - DNA, 15 bp, Homo sapiens
atttttgtattttta

SEQ ID NO: 154615 - DNA, 15 bp, Homo sapiens
aatttttgtattttt

SEQ ID NO: 154616 - DNA, 15 bp, Homo sapiens
taatttttgtatttt

SEQ ID NO: 154617 - DNA, 15 bp, Homo sapiens
ataatttttgtattt

SEQ ID NO: 154618 - DNA, 15 bp, Homo sapiens
gataatttttgtatt

SEQ ID NO: 154619 - DNA, 15 bp, Homo sapiens
ggataatttttgtat

SEQ ID NO: 154620 - DNA, 15 bp, Homo sapiens
tggataatttttgta

SEQ ID NO: 154621 - DNA, 15 bp, Homo sapiens
ctggataatttttgt

SEQ ID NO: 154622 - DNA, 15 bp, Homo sapiens
cctggataatttttg

SEQ ID NO: 154623 - DNA, 15 bp, Homo sapiens
gcctggataattttt

SEQ ID NO: 154624 - DNA, 15 bp, Homo sapiens
tgcctggataatttt

SEQ ID NO: 154625 - DNA, 15 bp, Homo sapiens
atgcctggataattt

SEQ ID NO: 154626 - DNA, 15 bp, Homo sapiens
catgcctggataatt

SEQ ID NO: 154627 - DNA, 15 bp, Homo sapiens
ccatgcctggataat

SEQ ID NO: 154628 - DNA, 15 bp, Homo sapiens
accatgcctggataa

SEQ ID NO: 154629 - DNA, 15 bp, Homo sapiens
caccatgcctggata

SEQ ID NO: 154630 - DNA, 15 bp, Homo sapiens
ccaccatgcctggat

SEQ ID NO: 154631 - DNA, 15 bp, Homo sapiens
gccaccatgcctgga

SEQ ID NO: 154632 - DNA, 15 bp, Homo sapiens
tgccaccatgcctgg

SEQ ID NO: 154633 - DNA, 15 bp, Homo sapiens
gtgccaccatgcctg

SEQ ID NO: 154634 - DNA, 15 bp, Homo sapiens
tgtgccaccatgcct

SEQ ID NO: 154635 - DNA, 15 bp, Homo sapiens
atgtgccaccatgcc

SEQ ID NO: 154636 - DNA, 15 bp, Homo sapiens
aatgtgccaccatgc

SEQ ID NO: 154637 - DNA, 15 bp, Homo sapiens
gaatgtgccaccatg

SEQ ID NO: 154638 - DNA, 15 bp, Homo sapiens
ggaatgtgccaccat

SEQ ID NO: 154639 - DNA, 15 bp, Homo sapiens
aggaatgtgccacca

SEQ ID NO: 154640 - DNA, 15 bp, Homo sapiens
caggaatgtgccacc

SEQ ID NO: 154641 - DNA, 15 bp, Homo sapiens
acaggaatgtgccac

SEQ ID NO: 154642 - DNA, 15 bp, Homo sapiens
tacaggaatgtgcca

SEQ ID NO: 154643 - DNA, 15 bp, Homo sapiens
ctacaggaatgtgcc

SEQ ID NO: 154644 - DNA, 15 bp, Homo sapiens
actacaggaatgtgc

SEQ ID NO: 154645 - DNA, 15 bp, Homo sapiens
aactacaggaatgtg

SEQ ID NO: 154646 - DNA, 15 bp, Homo sapiens
gaactacaggaatgt

SEQ ID NO: 154647 - DNA, 15 bp, Homo sapiens
ggaactacaggaatg

SEQ ID NO: 154648 - DNA, 15 bp, Homo sapiens
tggaactacaggaat

SEQ ID NO: 154649 - DNA, 15 bp, Homo sapiens
ctggaactacaggaa

SEQ ID NO: 154650 - DNA, 15 bp, Homo sapiens
gctggaactacagga

SEQ ID NO: 154651 - DNA, 15 bp, Homo sapiens
agctggaactacagg

SEQ ID NO: 154652 - DNA, 15 bp, Homo sapiens
tagctggaactacag

SEQ ID NO: 154653 - DNA, 15 bp, Homo sapiens
gtagctggaactaca

SEQ ID NO: 154654 - DNA, 15 bp, Homo sapiens
agtagctggaactac

SEQ ID NO: 154655 - DNA, 15 bp, Homo sapiens
gagtagctggaacta

SEQ ID NO: 154656 - DNA, 15 bp, Homo sapiens
cgagtagctggaact

SEQ ID NO: 154657 - DNA, 15 bp, Homo sapiens
ccgagtagctggaac

SEQ ID NO: 154658 - DNA, 15 bp, Homo sapiens
cccgagtagctggaa

SEQ ID NO: 154659 - DNA, 15 bp, Homo sapiens
tcccgagtagctgga

SEQ ID NO: 154660 - DNA, 15 bp, Homo sapiens
ctcccgagtagctgg

SEQ ID NO: 154661 - DNA, 15 bp, Homo sapiens
cctcccgagtagctg

SEQ ID NO: 154662 - DNA, 15 bp, Homo sapiens
gcctcccgagtagct

SEQ ID NO: 154663 - DNA, 15 bp, Homo sapiens
agcctcccgagtagc

SEQ ID NO: 154664 - DNA, 15 bp, Homo sapiens
cagcctcccgagtag

SEQ ID NO: 154665 - DNA, 15 bp, Homo sapiens
tcagcctcccgagta

SEQ ID NO: 154666 - DNA, 15 bp, Homo sapiens
ctcagcctcccgagt

SEQ ID NO: 154667 - DNA, 15 bp, Homo sapiens
cctcagcctcccgag

SEQ ID NO: 154668 - DNA, 15 bp, Homo sapiens
gcctcagcctcccga

SEQ ID NO: 154669 - DNA, 15 bp, Homo sapiens
tgcctcagcctcccg

SEQ ID NO: 154670 - DNA, 15 bp, Homo sapiens
atgcctcagcctccc

SEQ ID NO: 154671 - DNA, 15 bp, Homo sapiens
tatgcctcagcctcc

SEQ ID NO: 154672 - DNA, 15 bp, Homo sapiens
ttatgcctcagcctc

SEQ ID NO: 154673 - DNA, 15 bp, Homo sapiens
cttatgcctcagcct

SEQ ID NO: 154674 - DNA, 15 bp, Homo sapiens
tcttatgcctcagcc

SEQ ID NO: 154675 - DNA, 15 bp, Homo sapiens
ttcttatgcctcagc

SEQ ID NO: 154676 - DNA, 15 bp, Homo sapiens
attcttatgcctcag

SEQ ID NO: 154677 - DNA, 15 bp, Homo sapiens
aattcttatgcctca

SEQ ID NO: 154678 - DNA, 15 bp, Homo sapiens
caattcttatgcctc

SEQ ID NO: 154679 - DNA, 15 bp, Homo sapiens
gcaattcttatgcct

SEQ ID NO: 154680 - DNA, 15 bp, Homo sapiens
agcaattcttatgcc

SEQ ID NO: 154681 - DNA, 15 bp, Homo sapiens
aagcaattcttatgc

SEQ ID NO: 154682 - DNA, 15 bp, Homo sapiens
caagcaattcttatg

SEQ ID NO: 154683 - DNA, 15 bp, Homo sapiens
tcaagcaattcttat

SEQ ID NO: 154684 - DNA, 15 bp, Homo sapiens
ttcaagcaattctta

SEQ ID NO: 154685 - DNA, 15 bp, Homo sapiens
gttcaagcaattctt

SEQ ID NO: 154686 - DNA, 15 bp, Homo sapiens
ggttcaagcaattct

SEQ ID NO: 154687 - DNA, 15 bp, Homo sapiens
gggttcaagcaattc

SEQ ID NO: 154688 - DNA, 15 bp, Homo sapiens
cgggttcaagcaatt

SEQ ID NO: 154689 - DNA, 15 bp, Homo sapiens
ccgggttcaagcaat

SEQ ID NO: 154690 - DNA, 15 bp, Homo sapiens
cccgggttcaagcaa

SEQ ID NO: 154691 - DNA, 15 bp, Homo sapiens
tcccgggttcaagca

SEQ ID NO: 154692 - DNA, 15 bp, Homo sapiens
ctcccgggttcaagc

SEQ ID NO: 154693 - DNA, 15 bp, Homo sapiens
cctcccgggttcaag

SEQ ID NO: 154694 - DNA, 15 bp, Homo sapiens
gcctcccgggttcaa

SEQ ID NO: 154695 - DNA, 15 bp, Homo sapiens
ggcctcccgggttca

SEQ ID NO: 154696 - DNA, 15 bp, Homo sapiens
cggcctcccgggttc

SEQ ID NO: 154697 - DNA, 15 bp, Homo sapiens
tcggcctcccgggtt

SEQ ID NO: 154698 - DNA, 15 bp, Homo sapiens
ctcggcctcccgggt

SEQ ID NO: 154699 - DNA, 15 bp, Homo sapiens
cctcggcctcccggg

SEQ ID NO: 154700 - DNA, 15 bp, Homo sapiens
acctcggcctcccgg

SEQ ID NO: 154701 - DNA, 15 bp, Homo sapiens
aacctcggcctcccg

SEQ ID NO: 154702 - DNA, 15 bp, Homo sapiens
caacctcggcctccc

SEQ ID NO: 154703 - DNA, 15 bp, Homo sapiens
gcaacctcggcctcc

SEQ ID NO: 154704 - DNA, 15 bp, Homo sapiens
tgcaacctcggcctc

SEQ ID NO: 154705 - DNA, 15 bp, Homo sapiens
ctgcaacctcggcct

SEQ ID NO: 154706 - DNA, 15 bp, Homo sapiens
actgcaacctcggcc

SEQ ID NO: 154707 - DNA, 15 bp, Homo sapiens
cactgcaacctcggc

SEQ ID NO: 154708 - DNA, 15 bp, Homo sapiens
tcactgcaacctcgg

SEQ ID NO: 154709 - DNA, 15 bp, Homo sapiens
ctcactgcaacctcg

SEQ ID NO: 154710 - DNA, 15 bp, Homo sapiens
gctcactgcaacctc

SEQ ID NO: 154711 - DNA, 15 bp, Homo sapiens
ggctcactgcaacct

SEQ ID NO: 154712 - DNA, 15 bp, Homo sapiens
tggctcactgcaacc

SEQ ID NO: 154713 - DNA, 15 bp, Homo sapiens
ttggctcactgcaac

SEQ ID NO: 154714 - DNA, 15 bp, Homo sapiens
tttggctcactgcaa

SEQ ID NO: 154715 - DNA, 15 bp, Homo sapiens
ttttggctcactgca

SEQ ID NO: 154716 - DNA, 15 bp, Homo sapiens
attttggctcactgc

SEQ ID NO: 154717 - DNA, 15 bp, Homo sapiens
gattttggctcactg

SEQ ID NO: 154718 - DNA, 15 bp, Homo sapiens
cgattttggctcact

SEQ ID NO: 154719 - DNA, 15 bp, Homo sapiens
gcgattttggctcac

SEQ ID NO: 154720 - DNA, 15 bp, Homo sapiens
cgcgattttggctca

SEQ ID NO: 154721 - DNA, 15 bp, Homo sapiens
gcgcgattttggctc

SEQ ID NO: 154722 - DNA, 15 bp, Homo sapiens
ggcgcgattttggct

SEQ ID NO: 154723 - DNA, 15 bp, Homo sapiens
tggcgcgattttggc

SEQ ID NO: 154724 - DNA, 15 bp, Homo sapiens
gtggcgcgattttgg

SEQ ID NO: 154725 - DNA, 15 bp, Homo sapiens
agtggcgcgattttg

SEQ ID NO: 154726 - DNA, 15 bp, Homo sapiens
cagtggcgcgatttt

SEQ ID NO: 154727 - DNA, 15 bp, Homo sapiens
gcagtggcgcgattt

SEQ ID NO: 154728 - DNA, 15 bp, Homo sapiens
tgcagtggcgcgatt

SEQ ID NO: 154729 - DNA, 15 bp, Homo sapiens
gtgcagtggcgcgat

SEQ ID NO: 154730 - DNA, 15 bp, Homo sapiens
agtgcagtggcgcga

SEQ ID NO: 154731 - DNA, 15 bp, Homo sapiens
gagtgcagtggcgcg

SEQ ID NO: 154732 - DNA, 15 bp, Homo sapiens
ggagtgcagtggcgc

SEQ ID NO: 154733 - DNA, 15 bp, Homo sapiens
tggagtgcagtggcg

SEQ ID NO: 154734 - DNA, 15 bp, Homo sapiens
ctggagtgcagtggc

SEQ ID NO: 154735 - DNA, 15 bp, Homo sapiens
ccccaggctggagtg

SEQ ID NO: 154736 - DNA, 15 bp, Homo sapiens
accccaggctggagt

SEQ ID NO: 154737 - DNA, 15 bp, Homo sapiens
caccccaggctggag

SEQ ID NO: 154738 - DNA, 15 bp, Homo sapiens
tcaccccaggctgga

SEQ ID NO: 154739 - DNA, 15 bp, Homo sapiens
gtcaccccaggctgg

SEQ ID NO: 154740 - DNA, 15 bp, Homo sapiens
tgtcaccccaggctg

SEQ ID NO: 154741 - DNA, 15 bp, Homo sapiens
ctgtcaccccaggct

SEQ ID NO: 154742 - DNA, 15 bp, Homo sapiens
cctgtcaccccaggc

SEQ ID NO: 154743 - DNA, 15 bp, Homo sapiens
ccctgtcaccccagg

SEQ ID NO: 154744 - DNA, 15 bp, Homo sapiens
accctgtcaccccag

SEQ ID NO: 154745 - DNA, 15 bp, Homo sapiens
caccctgtcacccca

SEQ ID NO: 154746 - DNA, 15 bp, Homo sapiens
tcaccctgtcacccc

SEQ ID NO: 154747 - DNA, 15 bp, Homo sapiens
ctcaccctgtcaccc

SEQ ID NO: 154748 - DNA, 15 bp, Homo sapiens
tctcaccctgtcacc

SEQ ID NO: 154749 - DNA, 15 bp, Homo sapiens
gtctcaccctgtcac

SEQ ID NO: 154750 - DNA, 15 bp, Homo sapiens
tgtctcaccctgtca

SEQ ID NO: 154751 - DNA, 15 bp, Homo sapiens
gtgtctcaccctgtc

SEQ ID NO: 154752 - DNA, 15 bp, Homo sapiens
ggtgtctcaccctgt

SEQ ID NO: 154753 - DNA, 15 bp, Homo sapiens
tggtgtctcaccctg

SEQ ID NO: 154754 - DNA, 15 bp, Homo sapiens
atggtgtctcaccct

SEQ ID NO: 154755 - DNA, 15 bp, Homo sapiens
gatggtgtctcaccc

SEQ ID NO: 154756 - DNA, 15 bp, Homo sapiens
agatggtgtctcacc

SEQ ID NO: 154757 - DNA, 15 bp, Homo sapiens
gagatggtgtctcac

SEQ ID NO: 154758 - DNA, 15 bp, Homo sapiens
tgagatggtgtctca

SEQ ID NO: 154759 - DNA, 15 bp, Homo sapiens
ttgagatggtgtctc

SEQ ID NO: 154760 - DNA, 15 bp, Homo sapiens
tttgagatggtgtct

SEQ ID NO: 154761 - DNA, 15 bp, Homo sapiens
ttttgagatggtgtc

SEQ ID NO: 154762 - DNA, 15 bp, Homo sapiens
tttttgagatggtgt

SEQ ID NO: 154763 - DNA, 15 bp, Homo sapiens
ttttttgagatggtg

SEQ ID NO: 154764 - DNA, 15 bp, Homo sapiens
tttttttgagatggt

SEQ ID NO: 154765 - DNA, 15 bp, Homo sapiens
ttttttttgagatgg

SEQ ID NO: 154766 - DNA, 15 bp, Homo sapiens
tttttttttgagatg

SEQ ID NO: 154767 - DNA, 15 bp, Homo sapiens
ttttttttttgagat

SEQ ID NO: 154768 - DNA, 15 bp, Homo sapiens
ttttttttttttttt

SEQ ID NO: 154769 - DNA, 15 bp, Homo sapiens
gtctttttttttttt

SEQ ID NO: 154770 - DNA, 15 bp, Homo sapiens
ggtcttttttttttt

SEQ ID NO: 154771 - DNA, 15 bp, Homo sapiens
aggtctttttttttt

SEQ ID NO: 154772 - DNA, 15 bp, Homo sapiens
gaggtcttttttttt

SEQ ID NO: 154773 - DNA, 15 bp, Homo sapiens
tgaggtctttttttt

SEQ ID NO: 154774 - DNA, 15 bp, Homo sapiens
gtgaggtcttttttt

SEQ ID NO: 154775 - DNA, 15 bp, Homo sapiens
agtgaggtctttttt

SEQ ID NO: 154776 - DNA, 15 bp, Homo sapiens
cagtgaggtcttttt

SEQ ID NO: 154777 - DNA, 15 bp, Homo sapiens
gcagtgaggtctttt

SEQ ID NO: 154778 - DNA, 15 bp, Homo sapiens
agcagtgaggtcttt

SEQ ID NO: 154779 - DNA, 15 bp, Homo sapiens
gagcagtgaggtctt

SEQ ID NO: 154780 - DNA, 15 bp, Homo sapiens
ggagcagtgaggtct

SEQ ID NO: 154781 - DNA, 15 bp, Homo sapiens
gggagcagtgaggtc

SEQ ID NO: 154782 - DNA, 15 bp, Homo sapiens
ggggagcagtgaggt

SEQ ID NO: 154783 - DNA, 15 bp, Homo sapiens
tggggagcagtgagg

SEQ ID NO: 154784 - DNA, 15 bp, Homo sapiens
atggggagcagtgag

SEQ ID NO: 154785 - DNA, 15 bp, Homo sapiens
catggggagcagtga

SEQ ID NO: 154786 - DNA, 15 bp, Homo sapiens
ccatggggagcagtg

SEQ ID NO: 154787 - DNA, 15 bp, Homo sapiens
cccatggggagcagt

SEQ ID NO: 154788 - DNA, 15 bp, Homo sapiens
gcccatggggagcag

SEQ ID NO: 154789 - DNA, 15 bp, Homo sapiens
tgcccatggggagca

SEQ ID NO: 154790 - DNA, 15 bp, Homo sapiens
gtgcccatggggagc

SEQ ID NO: 154791 - DNA, 15 bp, Homo sapiens
agtgcccatggggag

SEQ ID NO: 154792 - DNA, 15 bp, Homo sapiens
aagtgcccatgggga

SEQ ID NO: 154793 - DNA, 15 bp, Homo sapiens
taagtgcccatgggg

SEQ ID NO: 154794 - DNA, 15 bp, Homo sapiens
ctaagtgcccatggg

SEQ ID NO: 154795 - DNA, 15 bp, Homo sapiens
cctaagtgcccatgg

SEQ ID NO: 154796 - DNA, 15 bp, Homo sapiens
ccctaagtgcccatg

SEQ ID NO: 154797 - DNA, 15 bp, Homo sapiens
tccctaagtgcccat

SEQ ID NO: 154798 - DNA, 15 bp, Homo sapiens
ttccctaagtgccca

SEQ ID NO: 154799 - DNA, 15 bp, Homo sapiens
gttccctaagtgccc

SEQ ID NO: 154800 - DNA, 15 bp, Homo sapiens
agttccctaagtgcc

SEQ ID NO: 154801 - DNA, 15 bp, Homo sapiens
gagttccctaagtgc

SEQ ID NO: 154802 - DNA, 15 bp, Homo sapiens
agagttccctaagtg

SEQ ID NO: 154803 - DNA, 15 bp, Homo sapiens
gagagttccctaagt

SEQ ID NO: 154804 - DNA, 15 bp, Homo sapiens
ggagagttccctaag

SEQ ID NO: 154805 - DNA, 15 bp, Homo sapiens
gggagagttccctaa

SEQ ID NO: 154806 - DNA, 15 bp, Homo sapiens
tgggagagttcccta

SEQ ID NO: 154807 - DNA, 15 bp, Homo sapiens
ctgggagagttccct

SEQ ID NO: 154808 - DNA, 15 bp, Homo sapiens
gctgggagagttccc

SEQ ID NO: 154809 - DNA, 15 bp, Homo sapiens
ggctgggagagttcc

SEQ ID NO: 154810 - DNA, 15 bp, Homo sapiens
gggctgggagagttc

SEQ ID NO: 154811 - DNA, 15 bp, Homo sapiens
tgggctgggagagtt

SEQ ID NO: 154812 - DNA, 15 bp, Homo sapiens
ctgggctgggagagt

SEQ ID NO: 154813 - DNA, 15 bp, Homo sapiens
actgggctgggagag

SEQ ID NO: 154814 - DNA, 15 bp, Homo sapiens
aactgggctgggaga

SEQ ID NO: 154815 - DNA, 15 bp, Homo sapiens
gaactgggctgggag

SEQ ID NO: 154816 - DNA, 15 bp, Homo sapiens
agaactgggctggga

SEQ ID NO: 154817 - DNA, 15 bp, Homo sapiens
cagaactgggctggg

SEQ ID NO: 154818 - DNA, 15 bp, Homo sapiens
gcagaactgggctgg

SEQ ID NO: 154819 - DNA, 15 bp, Homo sapiens
tgcagaactgggctg

SEQ ID NO: 154820 - DNA, 15 bp, Homo sapiens
ctgcagaactgggct

SEQ ID NO: 154821 - DNA, 15 bp, Homo sapiens
gctgcagaactgggc

SEQ ID NO: 154822 - DNA, 15 bp, Homo sapiens
agctgcagaactggg

SEQ ID NO: 154823 - DNA, 15 bp, Homo sapiens
cagctgcagaactgg

SEQ ID NO: 154824 - DNA, 15 bp, Homo sapiens
ccagctgcagaactg

SEQ ID NO: 154825 - DNA, 15 bp, Homo sapiens
cccagctgcagaact

SEQ ID NO: 154826 - DNA, 15 bp, Homo sapiens
gcccagctgcagaac

SEQ ID NO: 154827 - DNA, 15 bp, Homo sapiens
ggcccagctgcagaa

SEQ ID NO: 154828 - DNA, 15 bp, Homo sapiens
tggcccagctgcaga

SEQ ID NO: 154829 - DNA, 15 bp, Homo sapiens
atggcccagctgcag

SEQ ID NO: 154830 - DNA, 15 bp, Homo sapiens
aatggcccagctgca

SEQ ID NO: 154831 - DNA, 15 bp, Homo sapiens
caatggcccagctgc

SEQ ID NO: 154832 - DNA, 15 bp, Homo sapiens
gcaatggcccagctg

SEQ ID NO: 154833 - DNA, 15 bp, Homo sapiens
tgcaatggcccagct

SEQ ID NO: 154834 - DNA, 15 bp, Homo sapiens
gtgcaatggcccagc

SEQ ID NO: 154835 - DNA, 15 bp, Homo sapiens
agtgcaatggcccag

SEQ ID NO: 154836 - DNA, 15 bp, Homo sapiens
tagtgcaatggccca

SEQ ID NO: 154837 - DNA, 15 bp, Homo sapiens
ctagtgcaatggccc

SEQ ID NO: 154838 - DNA, 15 bp, Homo sapiens
tctagtgcaatggcc

SEQ ID NO: 154839 - DNA, 15 bp, Homo sapiens
atctagtgcaatggc

SEQ ID NO: 154840 - DNA, 15 bp, Homo sapiens
gatctagtgcaatgg

SEQ ID NO: 154841 - DNA, 15 bp, Homo sapiens
ggatctagtgcaatg

SEQ ID NO: 154842 - DNA, 15 bp, Homo sapiens
aggatctagtgcaat

SEQ ID NO: 154843 - DNA, 15 bp, Homo sapiens
gaggatctagtgcaa

SEQ ID NO: 154844 - DNA, 15 bp, Homo sapiens
tgaggatctagtgca

SEQ ID NO: 154845 - DNA, 15 bp, Homo sapiens
ctgaggatctagtgc

SEQ ID NO: 154846 - DNA, 15 bp, Homo sapiens
actgaggatctagtg

SEQ ID NO: 154847 - DNA, 15 bp, Homo sapiens
aactgaggatctagt

SEQ ID NO: 154848 - DNA, 15 bp, Homo sapiens
caactgaggatctag

SEQ ID NO: 154849 - DNA, 15 bp, Homo sapiens
ccaactgaggatcta

SEQ ID NO: 154850 - DNA, 15 bp, Homo sapiens
accaactgaggatct

SEQ ID NO: 154851 - DNA, 15 bp, Homo sapiens
gaccaactgaggatc

SEQ ID NO: 154852 - DNA, 15 bp, Homo sapiens
ggaccaactgaggat

SEQ ID NO: 154853 - DNA, 15 bp, Homo sapiens
gggaccaactgagga

SEQ ID NO: 154854 - DNA, 15 bp, Homo sapiens
agggaccaactgagg

SEQ ID NO: 154855 - DNA, 15 bp, Homo sapiens
cagggaccaactgag

SEQ ID NO: 154856 - DNA, 15 bp, Homo sapiens
ccagggaccaactga

SEQ ID NO: 154857 - DNA, 15 bp, Homo sapiens
cccagggaccaactg

SEQ ID NO: 154858 - DNA, 15 bp, Homo sapiens
gcccagggaccaact

SEQ ID NO: 154859 - DNA, 15 bp, Homo sapiens
agcccagggaccaac

SEQ ID NO: 154860 - DNA, 15 bp, Homo sapiens
gagcccagggaccaa

SEQ ID NO: 154861 - DNA, 15 bp, Homo sapiens
agagcccagggacca

SEQ ID NO: 154862 - DNA, 15 bp, Homo sapiens
gagagcccagggacc

SEQ ID NO: 154863 - DNA, 15 bp, Homo sapiens
cgagagcccagggac

SEQ ID NO: 154864 - DNA, 15 bp, Homo sapiens
ccgagagcccaggga

SEQ ID NO: 154865 - DNA, 15 bp, Homo sapiens
accgagagcccaggg

SEQ ID NO: 154866 - DNA, 15 bp, Homo sapiens
caccgagagcccagg

SEQ ID NO: 154867 - DNA, 15 bp, Homo sapiens
tcaccgagagcccag

SEQ ID NO: 154868 - DNA, 15 bp, Homo sapiens
gtcaccgagagccca

SEQ ID NO: 154869 - DNA, 15 bp, Homo sapiens
agtcaccgagagccc

SEQ ID NO: 154870 - DNA, 15 bp, Homo sapiens
cagtcaccgagagcc

SEQ ID NO: 154871 - DNA, 15 bp, Homo sapiens
acagtcaccgagagc

SEQ ID NO: 154872 - DNA, 15 bp, Homo sapiens
gacagtcaccgagag

SEQ ID NO: 154873 - DNA, 15 bp, Homo sapiens
ggacagtcaccgaga

SEQ ID NO: 154874 - DNA, 15 bp, Homo sapiens
tggacagtcaccgag

SEQ ID NO: 154875 - DNA, 15 bp, Homo sapiens
ctggacagtcaccga

SEQ ID NO: 154876 - DNA, 15 bp, Homo sapiens
cctggacagtcaccg

SEQ ID NO: 154877 - DNA, 15 bp, Homo sapiens
ccctggacagtcacc

SEQ ID NO: 154878 - DNA, 15 bp, Homo sapiens
gccctggacagtcac

SEQ ID NO: 154879 - DNA, 15 bp, Homo sapiens
tgccctggacagtca

SEQ ID NO: 154880 - DNA, 15 bp, Homo sapiens
ctgccctggacagtc

SEQ ID NO: 154881 - DNA, 15 bp, Homo sapiens
cctgccctggacagt

SEQ ID NO: 154882 - DNA, 15 bp, Homo sapiens
tcctgccctggacag

SEQ ID NO: 154883 - DNA, 15 bp, Homo sapiens
ctcctgccctggaca

SEQ ID NO: 154884 - DNA, 15 bp, Homo sapiens
actcctgccctggac

SEQ ID NO: 154885 - DNA, 15 bp, Homo sapiens
aactcctgccctgga

SEQ ID NO: 154886 - DNA, 15 bp, Homo sapiens
aaactcctgccctgg

SEQ ID NO: 154887 - DNA, 15 bp, Homo sapiens
gaaactcctgccctg

SEQ ID NO: 154888 - DNA, 15 bp, Homo sapiens
ggaaactcctgccct

SEQ ID NO: 154889 - DNA, 15 bp, Homo sapiens
gggaaactcctgccc

SEQ ID NO: 154890 - DNA, 15 bp, Homo sapiens
tgggaaactcctgcc

SEQ ID NO: 154891 - DNA, 15 bp, Homo sapiens
atgggaaactcctgc

SEQ ID NO: 154892 - DNA, 15 bp, Homo sapiens
aatgggaaactcctg

SEQ ID NO: 154893 - DNA, 15 bp, Homo sapiens
caatgggaaactcct

SEQ ID NO: 154894 - DNA, 15 bp, Homo sapiens
tcaatgggaaactcc

SEQ ID NO: 154895 - DNA, 15 bp, Homo sapiens
gtcaatgggaaactc

SEQ ID NO: 154896 - DNA, 15 bp, Homo sapiens
agtcaatgggaaact

SEQ ID NO: 154897 - DNA, 15 bp, Homo sapiens
aagtcaatgggaaac

SEQ ID NO: 154898 - DNA, 15 bp, Homo sapiens
aaagtcaatgggaaa

SEQ ID NO: 154899 - DNA, 15 bp, Homo sapiens
aaaagtcaatgggaa

SEQ ID NO: 154900 - DNA, 15 bp, Homo sapiens
gaaaagtcaatggga

SEQ ID NO: 154901 - DNA, 15 bp, Homo sapiens
ggaaaagtcaatggg

SEQ ID NO: 154902 - DNA, 15 bp, Homo sapiens
gggaaaagtcaatgg

SEQ ID NO: 154903 - DNA, 15 bp, Homo sapiens
agggaaaagtcaatg

SEQ ID NO: 154904 - DNA, 15 bp, Homo sapiens
cagggaaaagtcaat

SEQ ID NO: 154905 - DNA, 15 bp, Homo sapiens
ccagggaaaagtcaa

SEQ ID NO: 154906 - DNA, 15 bp, Homo sapiens
accagggaaaagtca

SEQ ID NO: 154907 - DNA, 15 bp, Homo sapiens
aaccagggaaaagtc

SEQ ID NO: 154908 - DNA, 15 bp, Homo sapiens
caaccagggaaaagt

SEQ ID NO: 154909 - DNA, 15 bp, Homo sapiens
tcaaccagggaaaag

SEQ ID NO: 154910 - DNA, 15 bp, Homo sapiens
gtcaaccagggaaaa

SEQ ID NO: 154911 - DNA, 15 bp, Homo sapiens
ggtcaaccagggaaa

SEQ ID NO: 154912 - DNA, 15 bp, Homo sapiens
aggtcaaccagggaa

SEQ ID NO: 154913 - DNA, 15 bp, Homo sapiens
aaggtcaaccaggga

SEQ ID NO: 154914 - DNA, 15 bp, Homo sapiens
aaaggtcaaccaggg

SEQ ID NO: 154915 - DNA, 15 bp, Homo sapiens
caaaggtcaaccagg

SEQ ID NO: 154916 - DNA, 15 bp, Homo sapiens
tcaaaggtcaaccag

SEQ ID NO: 154917 - DNA, 15 bp, Homo sapiens
gtcaaaggtcaacca

SEQ ID NO: 154918 - DNA, 15 bp, Homo sapiens
ggtcaaaggtcaacc

SEQ ID NO: 154919 - DNA, 15 bp, Homo sapiens
gggtcaaaggtcaac

SEQ ID NO: 154920 - DNA, 15 bp, Homo sapiens
ggggtcaaaggtcaa

SEQ ID NO: 154921 - DNA, 15 bp, Homo sapiens
aggggtcaaaggtca

SEQ ID NO: 154922 - DNA, 15 bp, Homo sapiens
aaggggtcaaaggtc

SEQ ID NO: 154923 - DNA, 15 bp, Homo sapiens
gaaggggtcaaaggt

SEQ ID NO: 154924 - DNA, 15 bp, Homo sapiens
ggaaggggtcaaagg

SEQ ID NO: 154925 - DNA, 15 bp, Homo sapiens
tggaaggggtcaaag

SEQ ID NO: 154926 - DNA, 15 bp, Homo sapiens
gtggaaggggtcaaa

SEQ ID NO: 154927 - DNA, 15 bp, Homo sapiens
tgtggaaggggtcaa

SEQ ID NO: 154928 - DNA, 15 bp, Homo sapiens
ctgtggaaggggtca

SEQ ID NO: 154929 - DNA, 15 bp, Homo sapiens
actgtggaaggggtc

SEQ ID NO: 154930 - DNA, 15 bp, Homo sapiens
aactgtggaaggggt

SEQ ID NO: 154931 - DNA, 15 bp, Homo sapiens
caactgtggaagggg

SEQ ID NO: 154932 - DNA, 15 bp, Homo sapiens
tcaactgtggaaggg

SEQ ID NO: 154933 - DNA, 15 bp, Homo sapiens
gtcaactgtggaagg

SEQ ID NO: 154934 - DNA, 15 bp, Homo sapiens
tgtcaactgtggaag

SEQ ID NO: 154935 - DNA, 15 bp, Homo sapiens
gtgtcaactgtggaa

SEQ ID NO: 154936 - DNA, 15 bp, Homo sapiens
agtgtcaactgtgga

SEQ ID NO: 154937 - DNA, 15 bp, Homo sapiens
cagtgtcaactgtgg

SEQ ID NO: 154938 - DNA, 15 bp, Homo sapiens
ccagtgtcaactgtg

SEQ ID NO: 154939 - DNA, 15 bp, Homo sapiens
accagtgtcaactgt

SEQ ID NO: 154940 - DNA, 15 bp, Homo sapiens
caccagtgtcaactg

SEQ ID NO: 154941 - DNA, 15 bp, Homo sapiens
acaccagtgtcaact

SEQ ID NO: 154942 - DNA, 15 bp, Homo sapiens
gacaccagtgtcaac

SEQ ID NO: 154943 - DNA, 15 bp, Homo sapiens
ggacaccagtgtcaa

SEQ ID NO: 154944 - DNA, 15 bp, Homo sapiens
gggacaccagtgtca

SEQ ID NO: 154945 - DNA, 15 bp, Homo sapiens
ggggacaccagtgtc

SEQ ID NO: 154946 - DNA, 15 bp, Homo sapiens
tggggacaccagtgt

SEQ ID NO: 154947 - DNA, 15 bp, Homo sapiens
ctggggacaccagtg

SEQ ID NO: 154948 - DNA, 15 bp, Homo sapiens
cctggggacaccagt

SEQ ID NO: 154949 - DNA, 15 bp, Homo sapiens
acctggggacaccag

SEQ ID NO: 154950 - DNA, 15 bp, Homo sapiens
cacctggggacacca

SEQ ID NO: 154951 - DNA, 15 bp, Homo sapiens
acacctggggacacc

SEQ ID NO: 154952 - DNA, 15 bp, Homo sapiens
gacacctggggacac

SEQ ID NO: 154953 - DNA, 15 bp, Homo sapiens
agacacctggggaca

SEQ ID NO: 154954 - DNA, 15 bp, Homo sapiens
cagacacctggggac

SEQ ID NO: 154955 - DNA, 15 bp, Homo sapiens
ccagacacctgggga

SEQ ID NO: 154956 - DNA, 15 bp, Homo sapiens
accagacacctgggg

SEQ ID NO: 154957 - DNA, 15 bp, Homo sapiens
caccagacacctggg

SEQ ID NO: 154958 - DNA, 15 bp, Homo sapiens
ccaccagacacctgg

SEQ ID NO: 154959 - DNA, 15 bp, Homo sapiens
gccaccagacacctg

SEQ ID NO: 154960 - DNA, 15 bp, Homo sapiens
ggccaccagacacct

SEQ ID NO: 154961 - DNA, 15 bp, Homo sapiens
gggccaccagacacc

SEQ ID NO: 154962 - DNA, 15 bp, Homo sapiens
ggggccaccagacac

SEQ ID NO: 154963 - DNA, 15 bp, Homo sapiens
aggggccaccagaca

SEQ ID NO: 154964 - DNA, 15 bp, Homo sapiens
aaggggccaccagac

SEQ ID NO: 154965 - DNA, 15 bp, Homo sapiens
caaggggccaccaga

SEQ ID NO: 154966 - DNA, 15 bp, Homo sapiens
acaaggggccaccag

SEQ ID NO: 154967 - DNA, 15 bp, Homo sapiens
gacaaggggccacca

SEQ ID NO: 154968 - DNA, 15 bp, Homo sapiens
ggacaaggggccacc

SEQ ID NO: 154969 - DNA, 15 bp, Homo sapiens
tggacaaggggccac

SEQ ID NO: 154970 - DNA, 15 bp, Homo sapiens
ctggacaaggggcca

SEQ ID NO: 154971 - DNA, 15 bp, Homo sapiens
gctggacaaggggcc

SEQ ID NO: 154972 - DNA, 15 bp, Homo sapiens
agctggacaaggggc

SEQ ID NO: 154973 - DNA, 15 bp, Homo sapiens
gagctggacaagggg

SEQ ID NO: 154974 - DNA, 15 bp, Homo sapiens
ggagctggacaaggg

SEQ ID NO: 154975 - DNA, 15 bp, Homo sapiens
gggagctggacaagg

SEQ ID NO: 154976 - DNA, 15 bp, Homo sapiens
agggagctggacaag

SEQ ID NO: 154977 - DNA, 15 bp, Homo sapiens
aagggagctggacaa

SEQ ID NO: 154978 - DNA, 15 bp, Homo sapiens
taagggagctggaca

SEQ ID NO: 154979 - DNA, 15 bp, Homo sapiens
ctaagggagctggac

SEQ ID NO: 154980 - DNA, 15 bp, Homo sapiens
actaagggagctgga

SEQ ID NO: 154981 - DNA, 15 bp, Homo sapiens
gactaagggagctgg

SEQ ID NO: 154982 - DNA, 15 bp, Homo sapiens
ggactaagggagctg

SEQ ID NO: 154983 - DNA, 15 bp, Homo sapiens
gggactaagggagct

SEQ ID NO: 154984 - DNA, 15 bp, Homo sapiens
agggactaagggagc

SEQ ID NO: 154985 - DNA, 15 bp, Homo sapiens
aagggactaagggag

SEQ ID NO: 154986 - DNA, 15 bp, Homo sapiens
caagggactaaggga

SEQ ID NO: 154987 - DNA, 15 bp, Homo sapiens
acaagggactaaggg

SEQ ID NO: 154988 - DNA, 15 bp, Homo sapiens
cacaagggactaagg

SEQ ID NO: 154989 - DNA, 15 bp, Homo sapiens
gcacaagggactaag

SEQ ID NO: 154990 - DNA, 15 bp, Homo sapiens
ggcacaagggactaa

SEQ ID NO: 154991 - DNA, 15 bp, Homo sapiens
aggcacaagggacta

SEQ ID NO: 154992 - DNA, 15 bp, Homo sapiens
aaggcacaagggact

SEQ ID NO: 154993 - DNA, 15 bp, Homo sapiens
gaaggcacaagggac

SEQ ID NO: 154994 - DNA, 15 bp, Homo sapiens
ggaaggcacaaggga

SEQ ID NO: 154995 - DNA, 15 bp, Homo sapiens
gggaaggcacaaggg

SEQ ID NO: 154996 - DNA, 15 bp, Homo sapiens
agggaaggcacaagg

SEQ ID NO: 154997 - DNA, 15 bp, Homo sapiens
gagggaaggcacaag

SEQ ID NO: 154998 - DNA, 15 bp, Homo sapiens
ggagggaaggcacaa

SEQ ID NO: 154999 - DNA, 15 bp, Homo sapiens
aggagggaaggcaca

SEQ ID NO: 155000 - DNA, 15 bp, Homo sapiens
gaggagggaaggcac

SEQ ID NO: 155001 - DNA, 15 bp, Homo sapiens
ggaggagggaaggca

SEQ ID NO: 155002 - DNA, 15 bp, Homo sapiens
aggaggagggaaggc

SEQ ID NO: 155003 - DNA, 15 bp, Homo sapiens
gaggaggagggaagg

SEQ ID NO: 155004 - DNA, 15 bp, Homo sapiens
agaggaggagggaag

SEQ ID NO: 155005 - DNA, 15 bp, Homo sapiens
aagaggaggagggaa

SEQ ID NO: 155006 - DNA, 15 bp, Homo sapiens
aaagaggaggaggga

SEQ ID NO: 155007 - DNA, 15 bp, Homo sapiens
caaagaggaggaggg

SEQ ID NO: 155008 - DNA, 15 bp, Homo sapiens
acaaagaggaggagg

SEQ ID NO: 155009 - DNA, 15 bp, Homo sapiens
tacaaagaggaggag

SEQ ID NO: 155010 - DNA, 15 bp, Homo sapiens
ttacaaagaggagga

SEQ ID NO: 155011 - DNA, 15 bp, Homo sapiens
attacaaagaggagg

SEQ ID NO: 155012 - DNA, 15 bp, Homo sapiens
tattacaaagaggag

SEQ ID NO: 155013 - DNA, 15 bp, Homo sapiens
atattacaaagagga

SEQ ID NO: 155014 - DNA, 15 bp, Homo sapiens
gatattacaaagagg

SEQ ID NO: 155015 - DNA, 15 bp, Homo sapiens
ggatattacaaagag

SEQ ID NO: 155016 - DNA, 15 bp, Homo sapiens
cggatattacaaaga

SEQ ID NO: 155017 - DNA, 15 bp, Homo sapiens
ccggatattacaaag

SEQ ID NO: 155018 - DNA, 15 bp, Homo sapiens
cccggatattacaaa

SEQ ID NO: 155019 - DNA, 15 bp, Homo sapiens
gcccggatattacaa

SEQ ID NO: 155020 - DNA, 15 bp, Homo sapiens
agcccggatattaca

SEQ ID NO: 155021 - DNA, 15 bp, Homo sapiens
gagcccggatattac

SEQ ID NO: 155022 - DNA, 15 bp, Homo sapiens
tgagcccggatatta

SEQ ID NO: 155023 - DNA, 15 bp, Homo sapiens
ctgagcccggatatt

SEQ ID NO: 155024 - DNA, 15 bp, Homo sapiens
actgagcccggatat

SEQ ID NO: 155025 - DNA, 15 bp, Homo sapiens
gactgagcccggata

SEQ ID NO: 155026 - DNA, 15 bp, Homo sapiens
tgactgagcccggat

SEQ ID NO: 155027 - DNA, 15 bp, Homo sapiens
gtgactgagcccgga

SEQ ID NO: 155028 - DNA, 15 bp, Homo sapiens
ggtgactgagcccgg

SEQ ID NO: 155029 - DNA, 15 bp, Homo sapiens
aggtgactgagcccg

SEQ ID NO: 155030 - DNA, 15 bp, Homo sapiens
caggtgactgagccc

SEQ ID NO: 155031 - DNA, 15 bp, Homo sapiens
ccaggtgactgagcc

SEQ ID NO: 155032 - DNA, 15 bp, Homo sapiens
cccaggtgactgagc

SEQ ID NO: 155033 - DNA, 15 bp, Homo sapiens
ccccaggtgactgag

SEQ ID NO: 155034 - DNA, 15 bp, Homo sapiens
gccccaggtgactga

SEQ ID NO: 155035 - DNA, 15 bp, Homo sapiens
ggccccaggtgactg

SEQ ID NO: 155036 - DNA, 15 bp, Homo sapiens
gggccccaggtgact

SEQ ID NO: 155037 - DNA, 15 bp, Homo sapiens
tgggccccaggtgac

SEQ ID NO: 155038 - DNA, 15 bp, Homo sapiens
gtgggccccaggtga

SEQ ID NO: 155039 - DNA, 15 bp, Homo sapiens
ggtgggccccaggtg

SEQ ID NO: 155040 - DNA, 15 bp, Homo sapiens
gggtgggccccaggt

SEQ ID NO: 155041 - DNA, 15 bp, Homo sapiens
tgggtgggccccagg

SEQ ID NO: 155042 - DNA, 15 bp, Homo sapiens
ctgggtgggccccag

SEQ ID NO: 155043 - DNA, 15 bp, Homo sapiens
gctgggtgggcccca

SEQ ID NO: 155044 - DNA, 15 bp, Homo sapiens
ggctgggtgggcccc

SEQ ID NO: 155045 - DNA, 15 bp, Homo sapiens
gggctgggtgggccc

SEQ ID NO: 155046 - DNA, 15 bp, Homo sapiens
tgggctgggtgggcc

SEQ ID NO: 155047 - DNA, 15 bp, Homo sapiens
ttgggctgggtgggc

SEQ ID NO: 155048 - DNA, 15 bp, Homo sapiens
cttgggctgggtggg

SEQ ID NO: 155049 - DNA, 15 bp, Homo sapiens
ccttgggctgggtgg

SEQ ID NO: 155050 - DNA, 15 bp, Homo sapiens
gccttgggctgggtg

SEQ ID NO: 155051 - DNA, 15 bp, Homo sapiens
ggccttgggctgggt

SEQ ID NO: 155052 - DNA, 15 bp, Homo sapiens
tggccttgggctggg

SEQ ID NO: 155053 - DNA, 15 bp, Homo sapiens
ctggccttgggctgg

SEQ ID NO: 155054 - DNA, 15 bp, Homo sapiens
gctggccttgggctg

SEQ ID NO: 155055 - DNA, 15 bp, Homo sapiens
ggctggccttgggct

SEQ ID NO: 155056 - DNA, 15 bp, Homo sapiens
aggctggccttgggc

SEQ ID NO: 155057 - DNA, 15 bp, Homo sapiens
caggctggccttggg

SEQ ID NO: 155058 - DNA, 15 bp, Homo sapiens
acaggctggccttgg

SEQ ID NO: 155059 - DNA, 15 bp, Homo sapiens
cacaggctggccttg

SEQ ID NO: 155060 - DNA, 15 bp, Homo sapiens
ccacaggctggcctt

SEQ ID NO: 155061 - DNA, 15 bp, Homo sapiens
cccacaggctggcct

SEQ ID NO: 155062 - DNA, 15 bp, Homo sapiens
acccacaggctggcc

SEQ ID NO: 155063 - DNA, 15 bp, Homo sapiens
cacccacaggctggc

SEQ ID NO: 155064 - DNA, 15 bp, Homo sapiens
acacccacaggctgg

SEQ ID NO: 155065 - DNA, 15 bp, Homo sapiens
gacacccacaggctg

SEQ ID NO: 155066 - DNA, 15 bp, Homo sapiens
ggacacccacaggct

SEQ ID NO: 155067 - DNA, 15 bp, Homo sapiens
gggacacccacaggc

SEQ ID NO: 155068 - DNA, 15 bp, Homo sapiens
agggacacccacagg

SEQ ID NO: 155069 - DNA, 15 bp, Homo sapiens
cagggacacccacag

SEQ ID NO: 155070 - DNA, 15 bp, Homo sapiens
tcagggacacccaca

SEQ ID NO: 155071 - DNA, 15 bp, Homo sapiens
ctcagggacacccac

SEQ ID NO: 155072 - DNA, 15 bp, Homo sapiens
cctcagggacaccca

SEQ ID NO: 155073 - DNA, 15 bp, Homo sapiens
gcctcagggacaccc

SEQ ID NO: 155074 - DNA, 15 bp, Homo sapiens
agcctcagggacacc

SEQ ID NO: 155075 - DNA, 15 bp, Homo sapiens
cagcctcagggacac

SEQ ID NO: 155076 - DNA, 15 bp, Homo sapiens
tcagcctcagggaca

SEQ ID NO: 155077 - DNA, 15 bp, Homo sapiens
gtcagcctcagggac

SEQ ID NO: 155078 - DNA, 15 bp, Homo sapiens
tgtcagcctcaggga

SEQ ID NO: 155079 - DNA, 15 bp, Homo sapiens
gtgtcagcctcaggg

SEQ ID NO: 155080 - DNA, 15 bp, Homo sapiens
tgtgtcagcctcagg

SEQ ID NO: 155081 - DNA, 15 bp, Homo sapiens
gtgtgtcagcctcag

SEQ ID NO: 155082 - DNA, 15 bp, Homo sapiens
agtgtgtcagcctca

SEQ ID NO: 155083 - DNA, 15 bp, Homo sapiens
aagtgtgtcagcctc

SEQ ID NO: 155084 - DNA, 15 bp, Homo sapiens
gaagtgtgtcagcct

SEQ ID NO: 155085 - DNA, 15 bp, Homo sapiens
agaagtgtgtcagcc

SEQ ID NO: 155086 - DNA, 15 bp, Homo sapiens
gagaagtgtgtcagc

SEQ ID NO: 155087 - DNA, 15 bp, Homo sapiens
agagaagtgtgtcag

SEQ ID NO: 155088 - DNA, 15 bp, Homo sapiens
gagagaagtgtgtca

SEQ ID NO: 155089 - DNA, 15 bp, Homo sapiens
agagagaagtgtgtc

SEQ ID NO: 155090 - DNA, 15 bp, Homo sapiens
cagagagaagtgtgt

SEQ ID NO: 155091 - DNA, 15 bp, Homo sapiens
acagagagaagtgtg

SEQ ID NO: 155092 - DNA, 15 bp, Homo sapiens
cacagagagaagtgt

SEQ ID NO: 155093 - DNA, 15 bp, Homo sapiens
gcacagagagaagtg

SEQ ID NO: 155094 - DNA, 15 bp, Homo sapiens
ggcacagagagaagt

SEQ ID NO: 155095 - DNA, 15 bp, Homo sapiens
aggcacagagagaag

SEQ ID NO: 155096 - DNA, 15 bp, Homo sapiens
aaggcacagagagaa

SEQ ID NO: 155097 - DNA, 15 bp, Homo sapiens
aaaggcacagagaga

SEQ ID NO: 155098 - DNA, 15 bp, Homo sapiens
taaaggcacagagag

SEQ ID NO: 155099 - DNA, 15 bp, Homo sapiens
ctaaaggcacagaga

SEQ ID NO: 155100 - DNA, 15 bp, Homo sapiens
tctaaaggcacagag

SEQ ID NO: 155101 - DNA, 15 bp, Homo sapiens
ttctaaaggcacaga

SEQ ID NO: 155102 - DNA, 15 bp, Homo sapiens
cttctaaaggcacag

SEQ ID NO: 155103 - DNA, 15 bp, Homo sapiens
acttctaaaggcaca

SEQ ID NO: 155104 - DNA, 15 bp, Homo sapiens
gacttctaaaggcac

SEQ ID NO: 155105 - DNA, 15 bp, Homo sapiens
cgacttctaaaggca

SEQ ID NO: 155106 - DNA, 15 bp, Homo sapiens
ccgacttctaaaggc

SEQ ID NO: 155107 - DNA, 15 bp, Homo sapiens
cccgacttctaaagg

SEQ ID NO: 155108 - DNA, 15 bp, Homo sapiens
ccccgacttctaaag

SEQ ID NO: 155109 - DNA, 15 bp, Homo sapiens
tccccgacttctaaa

SEQ ID NO: 155110 - DNA, 15 bp, Homo sapiens
gtccccgacttctaa

SEQ ID NO: 155111 - DNA, 15 bp, Homo sapiens
agtccccgacttcta

SEQ ID NO: 155112 - DNA, 15 bp, Homo sapiens
aagtccccgacttct

SEQ ID NO: 155113 - DNA, 15 bp, Homo sapiens
gaagtccccgacttc

SEQ ID NO: 155114 - DNA, 15 bp, Homo sapiens
ggaagtccccgactt

SEQ ID NO: 155115 - DNA, 15 bp, Homo sapiens
aggaagtccccgact

SEQ ID NO: 155116 - DNA, 15 bp, Homo sapiens
gaggaagtccccgac

SEQ ID NO: 155117 - DNA, 15 bp, Homo sapiens
agaggaagtccccga

SEQ ID NO: 155118 - DNA, 15 bp, Homo sapiens
gagaggaagtccccg

SEQ ID NO: 155119 - DNA, 15 bp, Homo sapiens
ggagaggaagtcccc

SEQ ID NO: 155120 - DNA, 15 bp, Homo sapiens
gggagaggaagtccc

SEQ ID NO: 155121 - DNA, 15 bp, Homo sapiens
agggagaggaagtcc

SEQ ID NO: 155122 - DNA, 15 bp, Homo sapiens
cagggagaggaagtc

SEQ ID NO: 155123 - DNA, 15 bp, Homo sapiens
ccagggagaggaagt

SEQ ID NO: 155124 - DNA, 15 bp, Homo sapiens
tccagggagaggaag

SEQ ID NO: 155125 - DNA, 15 bp, Homo sapiens
gtccagggagaggaa

SEQ ID NO: 155126 - DNA, 15 bp, Homo sapiens
ggtccagggagagga

SEQ ID NO: 155127 - DNA, 15 bp, Homo sapiens
aggtccagggagagg

SEQ ID NO: 155128 - DNA, 15 bp, Homo sapiens
caggtccagggagag

SEQ ID NO: 155129 - DNA, 15 bp, Homo sapiens
ccaggtccagggaga

SEQ ID NO: 155130 - DNA, 15 bp, Homo sapiens
cccaggtccagggag

SEQ ID NO: 155131 - DNA, 15 bp, Homo sapiens
acccaggtccaggga

SEQ ID NO: 155132 - DNA, 15 bp, Homo sapiens
cacccaggtccaggg

SEQ ID NO: 155133 - DNA, 15 bp, Homo sapiens
ccacccaggtccagg

SEQ ID NO: 155134 - DNA, 15 bp, Homo sapiens
gccacccaggtccag

SEQ ID NO: 155135 - DNA, 15 bp, Homo sapiens
tgccacccaggtcca

SEQ ID NO: 155136 - DNA, 15 bp, Homo sapiens
gtgccacccaggtcc

SEQ ID NO: 155137 - DNA, 15 bp, Homo sapiens
agtgccacccaggtc

SEQ ID NO: 155138 - DNA, 15 bp, Homo sapiens
tagtgccacccaggt

SEQ ID NO: 155139 - DNA, 15 bp, Homo sapiens
ttagtgccacccagg

SEQ ID NO: 155140 - DNA, 15 bp, Homo sapiens
gttagtgccacccag

SEQ ID NO: 155141 - DNA, 15 bp, Homo sapiens
agttagtgccaccca

SEQ ID NO: 155142 - DNA, 15 bp, Homo sapiens
aagttagtgccaccc

SEQ ID NO: 155143 - DNA, 15 bp, Homo sapiens
gaagttagtgccacc

SEQ ID NO: 155144 - DNA, 15 bp, Homo sapiens
tgaagttagtgccac

SEQ ID NO: 155145 - DNA, 15 bp, Homo sapiens
ctgaagttagtgcca

SEQ ID NO: 155146 - DNA, 15 bp, Homo sapiens
cctgaagttagtgcc

SEQ ID NO: 155147 - DNA, 15 bp, Homo sapiens
ccctgaagttagtgc

SEQ ID NO: 155148 - DNA, 15 bp, Homo sapiens
accctgaagttagtg

SEQ ID NO: 155149 - DNA, 15 bp, Homo sapiens
caccctgaagttagt

SEQ ID NO: 155150 - DNA, 15 bp, Homo sapiens
tcaccctgaagttag

SEQ ID NO: 155151 - DNA, 15 bp, Homo sapiens
atcaccctgaagtta

SEQ ID NO: 155152 - DNA, 15 bp, Homo sapiens
catcaccctgaagtt

SEQ ID NO: 155153 - DNA, 15 bp, Homo sapiens
gcatcaccctgaagt

SEQ ID NO: 155154 - DNA, 15 bp, Homo sapiens
agcatcaccctgaag

SEQ ID NO: 155155 - DNA, 15 bp, Homo sapiens
cagcatcaccctgaa

SEQ ID NO: 155156 - DNA, 15 bp, Homo sapiens
ccagcatcaccctga

SEQ ID NO: 155157 - DNA, 15 bp, Homo sapiens
accagcatcaccctg

SEQ ID NO: 155158 - DNA, 15 bp, Homo sapiens
caccagcatcaccct

SEQ ID NO: 155159 - DNA, 15 bp, Homo sapiens
tcaccagcatcaccc

SEQ ID NO: 155160 - DNA, 15 bp, Homo sapiens
ttcaccagcatcacc

SEQ ID NO: 155161 - DNA, 15 bp, Homo sapiens
cttcaccagcatcac

SEQ ID NO: 155162 - DNA, 15 bp, Homo sapiens
ccttcaccagcatca

SEQ ID NO: 155163 - DNA, 15 bp, Homo sapiens
accttcaccagcatc

SEQ ID NO: 155164 - DNA, 15 bp, Homo sapiens
caccttcaccagcat

SEQ ID NO: 155165 - DNA, 15 bp, Homo sapiens
ccaccttcaccagca

SEQ ID NO: 155166 - DNA, 15 bp, Homo sapiens
cccaccttcaccagc

SEQ ID NO: 155167 - DNA, 15 bp, Homo sapiens
tcccaccttcaccag

SEQ ID NO: 155168 - DNA, 15 bp, Homo sapiens
ctcccaccttcacca

SEQ ID NO: 155169 - DNA, 15 bp, Homo sapiens
tctcccaccttcacc

SEQ ID NO: 155170 - DNA, 15 bp, Homo sapiens
ttctcccaccttcac

SEQ ID NO: 155171 - DNA, 15 bp, Homo sapiens
cttctcccaccttca

SEQ ID NO: 155172 - DNA, 15 bp, Homo sapiens
ccttctcccaccttc

SEQ ID NO: 155173 - DNA, 15 bp, Homo sapiens
accttctcccacctt

SEQ ID NO: 155174 - DNA, 15 bp, Homo sapiens
caccttctcccacct

SEQ ID NO: 155175 - DNA, 15 bp, Homo sapiens
tcaccttctcccacc

SEQ ID NO: 155176 - DNA, 15 bp, Homo sapiens
ctcaccttctcccac

SEQ ID NO: 155177 - DNA, 15 bp, Homo sapiens
cctcaccttctccca

SEQ ID NO: 155178 - DNA, 15 bp, Homo sapiens
tcctcaccttctccc

SEQ ID NO: 155179 - DNA, 15 bp, Homo sapiens
ctcctcaccttctcc

SEQ ID NO: 155180 - DNA, 15 bp, Homo sapiens
cctcctcaccttctc

SEQ ID NO: 155181 - DNA, 15 bp, Homo sapiens
ccctcctcaccttct

SEQ ID NO: 155182 - DNA, 15 bp, Homo sapiens
cccctcctcaccttc

SEQ ID NO: 155183 - DNA, 15 bp, Homo sapiens
gcccctcctcacctt

SEQ ID NO: 155184 - DNA, 15 bp, Homo sapiens
tgcccctcctcacct

SEQ ID NO: 155185 - DNA, 15 bp, Homo sapiens
ctgcccctcctcacc

SEQ ID NO: 155186 - DNA, 15 bp, Homo sapiens
actgcccctcctcac

SEQ ID NO: 155187 - DNA, 15 bp, Homo sapiens
cactgcccctcctca

SEQ ID NO: 155188 - DNA, 15 bp, Homo sapiens
ccactgcccctcctc

SEQ ID NO: 155189 - DNA, 15 bp, Homo sapiens
tccactgcccctcct

SEQ ID NO: 155190 - DNA, 15 bp, Homo sapiens
ctccactgcccctcc

SEQ ID NO: 155191 - DNA, 15 bp, Homo sapiens
gctccactgcccctc

SEQ ID NO: 155192 - DNA, 15 bp, Homo sapiens
cgctccactgcccct

SEQ ID NO: 155193 - DNA, 15 bp, Homo sapiens
acgctccactgcccc

SEQ ID NO: 155194 - DNA, 15 bp, Homo sapiens
cacgctccactgccc

SEQ ID NO: 155195 - DNA, 15 bp, Homo sapiens
tcacgctccactgcc

SEQ ID NO: 155196 - DNA, 15 bp, Homo sapiens
ttcacgctccactgc

SEQ ID NO: 155197 - DNA, 15 bp, Homo sapiens
cttcacgctccactg

SEQ ID NO: 155198 - DNA, 15 bp, Homo sapiens
tcttcacgctccact

SEQ ID NO: 155199 - DNA, 15 bp, Homo sapiens
gtcttcacgctccac

SEQ ID NO: 155200 - DNA, 15 bp, Homo sapiens
ggtcttcacgctcca

SEQ ID NO: 155201 - DNA, 15 bp, Homo sapiens
tggtcttcacgctcc

SEQ ID NO: 155202 - DNA, 15 bp, Homo sapiens
ttggtcttcacgctc

SEQ ID NO: 155203 - DNA, 15 bp, Homo sapiens
tttggtcttcacgct

SEQ ID NO: 155204 - DNA, 15 bp, Homo sapiens
gtttggtcttcacgc

SEQ ID NO: 155205 - DNA, 15 bp, Homo sapiens
tgtttggtcttcacg

SEQ ID NO: 155206 - DNA, 15 bp, Homo sapiens
gtgtttggtcttcac

SEQ ID NO: 155207 - DNA, 15 bp, Homo sapiens
ggtgtttggtcttca

SEQ ID NO: 155208 - DNA, 15 bp, Homo sapiens
tggtgtttggtcttc

SEQ ID NO: 155209 - DNA, 15 bp, Homo sapiens
ctggtgtttggtctt

SEQ ID NO: 155210 - DNA, 15 bp, Homo sapiens
tctggtgtttggtct

SEQ ID NO: 155211 - DNA, 15 bp, Homo sapiens
atctggtgtttggtc

SEQ ID NO: 155212 - DNA, 15 bp, Homo sapiens
catctggtgtttggt

SEQ ID NO: 155213 - DNA, 15 bp, Homo sapiens
acatctggtgtttgg

SEQ ID NO: 155214 - DNA, 15 bp, Homo sapiens
tacatctggtgtttg

SEQ ID NO: 155215 - DNA, 15 bp, Homo sapiens
gtacatctggtgttt

SEQ ID NO: 155216 - DNA, 15 bp, Homo sapiens
agtacatctggtgtt

SEQ ID NO: 155217 - DNA, 15 bp, Homo sapiens
gagtacatctggtgt

SEQ ID NO: 155218 - DNA, 15 bp, Homo sapiens
ggagtacatctggtg

SEQ ID NO: 155219 - DNA, 15 bp, Homo sapiens
tggagtacatctggt

SEQ ID NO: 155220 - DNA, 15 bp, Homo sapiens
atggagtacatctgg

SEQ ID NO: 155221 - DNA, 15 bp, Homo sapiens
gatggagtacatctg

SEQ ID NO: 155222 - DNA, 15 bp, Homo sapiens
ggatggagtacatct

SEQ ID NO: 155223 - DNA, 15 bp, Homo sapiens
gggatggagtacatc

SEQ ID NO: 155224 - DNA, 15 bp, Homo sapiens
ggggatggagtacat

SEQ ID NO: 155225 - DNA, 15 bp, Homo sapiens
cggggatggagtaca

SEQ ID NO: 155226 - DNA, 15 bp, Homo sapiens
tcggggatggagtac

SEQ ID NO: 155227 - DNA, 15 bp, Homo sapiens
ctcggggatggagta

SEQ ID NO: 155228 - DNA, 15 bp, Homo sapiens
cctcggggatggagt

SEQ ID NO: 155229 - DNA, 15 bp, Homo sapiens
tcctcggggatggag

SEQ ID NO: 155230 - DNA, 15 bp, Homo sapiens
gtcctcggggatgga

SEQ ID NO: 155231 - DNA, 15 bp, Homo sapiens
cgtcctcggggatgg

SEQ ID NO: 155232 - DNA, 15 bp, Homo sapiens
gcgtcctcggggatg

SEQ ID NO: 155233 - DNA, 15 bp, Homo sapiens
ggcgtcctcggggat

SEQ ID NO: 155234 - DNA, 15 bp, Homo sapiens
tggcgtcctcgggga

SEQ ID NO: 155235 - DNA, 15 bp, Homo sapiens
atggcgtcctcgggg

SEQ ID NO: 155236 - DNA, 15 bp, Homo sapiens
catggcgtcctcggg

SEQ ID NO: 155237 - DNA, 15 bp, Homo sapiens
tcatggcgtcctcgg

SEQ ID NO: 155238 - DNA, 15 bp, Homo sapiens
gtcatggcgtcctcg

SEQ ID NO: 155239 - DNA, 15 bp, Homo sapiens
ggtcatggcgtcctc

SEQ ID NO: 155240 - DNA, 15 bp, Homo sapiens
cggtcatggcgtcct

SEQ ID NO: 155241 - DNA, 15 bp, Homo sapiens
ccggtcatggcgtcc

SEQ ID NO: 155242 - DNA, 15 bp, Homo sapiens
gccggtcatggcgtc

SEQ ID NO: 155243 - DNA, 15 bp, Homo sapiens
tgccggtcatggcgt

SEQ ID NO: 155244 - DNA, 15 bp, Homo sapiens
gtgccggtcatggcg

SEQ ID NO: 155245 - DNA, 15 bp, Homo sapiens
agtgccggtcatggc

SEQ ID NO: 155246 - DNA, 15 bp, Homo sapiens
cagtgccggtcatgg

SEQ ID NO: 155247 - DNA, 15 bp, Homo sapiens
gcagtgccggtcatg

SEQ ID NO: 155248 - DNA, 15 bp, Homo sapiens
agcagtgccggtcat

SEQ ID NO: 155249 - DNA, 15 bp, Homo sapiens
cagcagtgccggtca

SEQ ID NO: 155250 - DNA, 15 bp, Homo sapiens
tcagcagtgccggtc

SEQ ID NO: 155251 - DNA, 15 bp, Homo sapiens
ctcagcagtgccggt

SEQ ID NO: 155252 - DNA, 15 bp, Homo sapiens
tctcagcagtgccgg

SEQ ID NO: 155253 - DNA, 15 bp, Homo sapiens
atctcagcagtgccg

SEQ ID NO: 155254 - DNA, 15 bp, Homo sapiens
catctcagcagtgcc

SEQ ID NO: 155255 - DNA, 15 bp, Homo sapiens
ccatctcagcagtgc

SEQ ID NO: 155256 - DNA, 15 bp, Homo sapiens
accatctcagcagtg

SEQ ID NO: 155257 - DNA, 15 bp, Homo sapiens
caccatctcagcagt

SEQ ID NO: 155258 - DNA, 15 bp, Homo sapiens
tcaccatctcagcag

SEQ ID NO: 155259 - DNA, 15 bp, Homo sapiens
ctcaccatctcagca

SEQ ID NO: 155260 - DNA, 15 bp, Homo sapiens
gctcaccatctcagc

SEQ ID NO: 155261 - DNA, 15 bp, Homo sapiens
tgctcaccatctcag

SEQ ID NO: 155262 - DNA, 15 bp, Homo sapiens
ctgctcaccatctca

SEQ ID NO: 155263 - DNA, 15 bp, Homo sapiens
gctgctcaccatctc

SEQ ID NO: 155264 - DNA, 15 bp, Homo sapiens
cgctgctcaccatct

SEQ ID NO: 155265 - DNA, 15 bp, Homo sapiens
gcgctgctcaccatc

SEQ ID NO: 155266 - DNA, 15 bp, Homo sapiens
tgcgctgctcaccat

SEQ ID NO: 155267 - DNA, 15 bp, Homo sapiens
ctgcgctgctcacca

SEQ ID NO: 155268 - DNA, 15 bp, Homo sapiens
cctgcgctgctcacc

SEQ ID NO: 155269 - DNA, 15 bp, Homo sapiens
ccctgcgctgctcac

SEQ ID NO: 155270 - DNA, 15 bp, Homo sapiens
cccctgcgctgctca

SEQ ID NO: 155271 - DNA, 15 bp, Homo sapiens
gcccctgcgctgctc

SEQ ID NO: 155272 - DNA, 15 bp, Homo sapiens
ggcccctgcgctgct

SEQ ID NO: 155273 - DNA, 15 bp, Homo sapiens
cggcccctgcgctgc

SEQ ID NO: 155274 - DNA, 15 bp, Homo sapiens
ccggcccctgcgctg

SEQ ID NO: 155275 - DNA, 15 bp, Homo sapiens
cccggcccctgcgct

SEQ ID NO: 155276 - DNA, 15 bp, Homo sapiens
ccccggcccctgcgc

SEQ ID NO: 155277 - DNA, 15 bp, Homo sapiens
gccccggcccctgcg

SEQ ID NO: 155278 - DNA, 15 bp, Homo sapiens
tgccccggcccctgc

SEQ ID NO: 155279 - DNA, 15 bp, Homo sapiens
ctgccccggcccctg

SEQ ID NO: 155280 - DNA, 15 bp, Homo sapiens
cctgccccggcccct

SEQ ID NO: 155281 - DNA, 15 bp, Homo sapiens
ccctgccccggcccc

SEQ ID NO: 155282 - DNA, 15 bp, Homo sapiens
cccctgccccggccc

SEQ ID NO: 155283 - DNA, 15 bp, Homo sapiens
ccccctgccccggcc

SEQ ID NO: 155284 - DNA, 15 bp, Homo sapiens
gccccctgccccggc

SEQ ID NO: 155285 - DNA, 15 bp, Homo sapiens
ggccccctgccccgg

SEQ ID NO: 155286 - DNA, 15 bp, Homo sapiens
tggccccctgccccg

SEQ ID NO: 155287 - DNA, 15 bp, Homo sapiens
ttggccccctgcccc

SEQ ID NO: 155288 - DNA, 15 bp, Homo sapiens
cttggccccctgccc

SEQ ID NO: 155289 - DNA, 15 bp, Homo sapiens
ccttggccccctgcc

SEQ ID NO: 155290 - DNA, 15 bp, Homo sapiens
gccttggccccctgc

SEQ ID NO: 155291 - DNA, 15 bp, Homo sapiens
ggccttggccccctg

SEQ ID NO: 155292 - DNA, 15 bp, Homo sapiens
tggccttggccccct

SEQ ID NO: 155293 - DNA, 15 bp, Homo sapiens
atggccttggccccc

SEQ ID NO: 155294 - DNA, 15 bp, Homo sapiens
catggccttggcccc

SEQ ID NO: 155295 - DNA, 15 bp, Homo sapiens
gcatggccttggccc

SEQ ID NO: 155296 - DNA, 15 bp, Homo sapiens
tgcatggccttggcc

SEQ ID NO: 155297 - DNA, 15 bp, Homo sapiens
ctgcatggccttggc

SEQ ID NO: 155298 - DNA, 15 bp, Homo sapiens
cctgcatggccttgg

SEQ ID NO: 155299 - DNA, 15 bp, Homo sapiens
tcctgcatggccttg

SEQ ID NO: 155300 - DNA, 15 bp, Homo sapiens
atcctgcatggcctt

SEQ ID NO: 155301 - DNA, 15 bp, Homo sapiens
gatcctgcatggcct

SEQ ID NO: 155302 - DNA, 15 bp, Homo sapiens
agatcctgcatggcc

SEQ ID NO: 155303 - DNA, 15 bp, Homo sapiens
gagatcctgcatggc

SEQ ID NO: 155304 - DNA, 15 bp, Homo sapiens
tgagatcctgcatgg

SEQ ID NO: 155305 - DNA, 15 bp, Homo sapiens
ctgagatcctgcatg

SEQ ID NO: 155306 - DNA, 15 bp, Homo sapiens
cctgagatcctgcat

SEQ ID NO: 155307 - DNA, 15 bp, Homo sapiens
ccctgagatcctgca

SEQ ID NO: 155308 - DNA, 15 bp, Homo sapiens
gccctgagatcctgc

SEQ ID NO: 155309 - DNA, 15 bp, Homo sapiens
ggccctgagatcctg

SEQ ID NO: 155310 - DNA, 15 bp, Homo sapiens
gggccctgagatcct

SEQ ID NO: 155311 - DNA, 15 bp, Homo sapiens
tgggccctgagatcc

SEQ ID NO: 155312 - DNA, 15 bp, Homo sapiens
ctgggccctgagatc

SEQ ID NO: 155313 - DNA, 15 bp, Homo sapiens
gctgggccctgagat

SEQ ID NO: 155314 - DNA, 15 bp, Homo sapiens
agctgggccctgaga

SEQ ID NO: 155315 - DNA, 15 bp, Homo sapiens
tagctgggccctgag

SEQ ID NO: 155316 - DNA, 15 bp, Homo sapiens
ctagctgggccctga

SEQ ID NO: 155317 - DNA, 15 bp, Homo sapiens
actagctgggccctg

SEQ ID NO: 155318 - DNA, 15 bp, Homo sapiens
gactagctgggccct

SEQ ID NO: 155319 - DNA, 15 bp, Homo sapiens
ggactagctgggccc

SEQ ID NO: 155320 - DNA, 15 bp, Homo sapiens
aggactagctgggcc

SEQ ID NO: 155321 - DNA, 15 bp, Homo sapiens
caggactagctgggc

SEQ ID NO: 155322 - DNA, 15 bp, Homo sapiens
tcaggactagctggg

SEQ ID NO: 155323 - DNA, 15 bp, Homo sapiens
gtcaggactagctgg

SEQ ID NO: 155324 - DNA, 15 bp, Homo sapiens
cgtcaggactagctg

SEQ ID NO: 155325 - DNA, 15 bp, Homo sapiens
ccgtcaggactagct

SEQ ID NO: 155326 - DNA, 15 bp, Homo sapiens
cccgtcaggactagc

SEQ ID NO: 155327 - DNA, 15 bp, Homo sapiens
tcccgtcaggactag

SEQ ID NO: 155328 - DNA, 15 bp, Homo sapiens
ctcccgtcaggacta

SEQ ID NO: 155329 - DNA, 15 bp, Homo sapiens
cctcccgtcaggact

SEQ ID NO: 155330 - DNA, 15 bp, Homo sapiens
acctcccgtcaggac

SEQ ID NO: 155331 - DNA, 15 bp, Homo sapiens
cacctcccgtcagga

SEQ ID NO: 155332 - DNA, 15 bp, Homo sapiens
gcacctcccgtcagg

SEQ ID NO: 155333 - DNA, 15 bp, Homo sapiens
ggcacctcccgtcag

SEQ ID NO: 155334 - DNA, 15 bp, Homo sapiens
tggcacctcccgtca

SEQ ID NO: 155335 - DNA, 15 bp, Homo sapiens
gtggcacctcccgtc

SEQ ID NO: 155336 - DNA, 15 bp, Homo sapiens
ggtggcacctcccgt

SEQ ID NO: 155337 - DNA, 15 bp, Homo sapiens
aggtggcacctcccg

SEQ ID NO: 155338 - DNA, 15 bp, Homo sapiens
caggtggcacctccc

SEQ ID NO: 155339 - DNA, 15 bp, Homo sapiens
acaggtggcacctcc

SEQ ID NO: 155340 - DNA, 15 bp, Homo sapiens
gacaggtggcacctc

SEQ ID NO: 155341 - DNA, 15 bp, Homo sapiens
agacaggtggcacct

SEQ ID NO: 155342 - DNA, 15 bp, Homo sapiens
tagacaggtggcacc

SEQ ID NO: 155343 - DNA, 15 bp, Homo sapiens
gtagacaggtggcac

SEQ ID NO: 155344 - DNA, 15 bp, Homo sapiens
ggtagacaggtggca

SEQ ID NO: 155345 - DNA, 15 bp, Homo sapiens
tggtagacaggtggc

SEQ ID NO: 155346 - DNA, 15 bp, Homo sapiens
ctggtagacaggtgg

SEQ ID NO: 155347 - DNA, 15 bp, Homo sapiens
cctggtagacaggtg

SEQ ID NO: 155348 - DNA, 15 bp, Homo sapiens
ccctggtagacaggt

SEQ ID NO: 155349 - DNA, 15 bp, Homo sapiens
cccctggtagacagg

SEQ ID NO: 155350 - DNA, 15 bp, Homo sapiens
acccctggtagacag

SEQ ID NO: 155351 - DNA, 15 bp, Homo sapiens
cacccctggtagaca

SEQ ID NO: 155352 - DNA, 15 bp, Homo sapiens
ccacccctggtagac

SEQ ID NO: 155353 - DNA, 15 bp, Homo sapiens
cccacccctggtaga

SEQ ID NO: 155354 - DNA, 15 bp, Homo sapiens
ccccacccctggtag

SEQ ID NO: 155355 - DNA, 15 bp, Homo sapiens
tccccacccctggta

SEQ ID NO: 155356 - DNA, 15 bp, Homo sapiens
ctccccacccctggt

SEQ ID NO: 155357 - DNA, 15 bp, Homo sapiens
tctccccacccctgg

SEQ ID NO: 155358 - DNA, 15 bp, Homo sapiens
ctctccccacccctg

SEQ ID NO: 155359 - DNA, 15 bp, Homo sapiens
gctctccccacccct

SEQ ID NO: 155360 - DNA, 15 bp, Homo sapiens
cgctctccccacccc

SEQ ID NO: 155361 - DNA, 15 bp, Homo sapiens
ccgctctccccaccc

SEQ ID NO: 155362 - DNA, 15 bp, Homo sapiens
cccgctctccccacc

SEQ ID NO: 155363 - DNA, 15 bp, Homo sapiens
ccccgctctccccac

SEQ ID NO: 155364 - DNA, 15 bp, Homo sapiens
cccccgctctcccca

SEQ ID NO: 155365 - DNA, 15 bp, Homo sapiens
gcccccgctctcccc

SEQ ID NO: 155366 - DNA, 15 bp, Homo sapiens
agcccccgctctccc

SEQ ID NO: 155367 - DNA, 15 bp, Homo sapiens
cagcccccgctctcc

SEQ ID NO: 155368 - DNA, 15 bp, Homo sapiens
ccagcccccgctctc

SEQ ID NO: 155369 - DNA, 15 bp, Homo sapiens
tccagcccccgctct

SEQ ID NO: 155370 - DNA, 15 bp, Homo sapiens
ctccagcccccgctc

SEQ ID NO: 155371 - DNA, 15 bp, Homo sapiens
cctccagcccccgct

SEQ ID NO: 155372 - DNA, 15 bp, Homo sapiens
tcctccagcccccgc

SEQ ID NO: 155373 - DNA, 15 bp, Homo sapiens
gtcctccagcccccg

SEQ ID NO: 155374 - DNA, 15 bp, Homo sapiens
ggtcctccagccccc

SEQ ID NO: 155375 - DNA, 15 bp, Homo sapiens
tggtcctccagcccc

SEQ ID NO: 155376 - DNA, 15 bp, Homo sapiens
gtggtcctccagccc

SEQ ID NO: 155377 - DNA, 15 bp, Homo sapiens
ggtggtcctccagcc

SEQ ID NO: 155378 - DNA, 15 bp, Homo sapiens
gggtggtcctccagc

SEQ ID NO: 155379 - DNA, 15 bp, Homo sapiens
tgggtggtcctccag

SEQ ID NO: 155380 - DNA, 15 bp, Homo sapiens
ctgggtggtcctcca

SEQ ID NO: 155381 - DNA, 15 bp, Homo sapiens
gctgggtggtcctcc

SEQ ID NO: 155382 - DNA, 15 bp, Homo sapiens
ggctgggtggtcctc

SEQ ID NO: 155383 - DNA, 15 bp, Homo sapiens
aggctgggtggtcct

SEQ ID NO: 155384 - DNA, 15 bp, Homo sapiens
gaggctgggtggtcc

SEQ ID NO: 155385 - DNA, 15 bp, Homo sapiens
tgaggctgggtggtc

SEQ ID NO: 155386 - DNA, 15 bp, Homo sapiens
ctgaggctgggtggt

SEQ ID NO: 155387 - DNA, 15 bp, Homo sapiens
tctgaggctgggtgg

SEQ ID NO: 155388 - DNA, 15 bp, Homo sapiens
ctctgaggctgggtg

SEQ ID NO: 155389 - DNA, 15 bp, Homo sapiens
cctctgaggctgggt

SEQ ID NO: 155390 - DNA, 15 bp, Homo sapiens
gcctctgaggctggg

SEQ ID NO: 155391 - DNA, 15 bp, Homo sapiens
tgcctctgaggctgg

SEQ ID NO: 155392 - DNA, 15 bp, Homo sapiens
ctgcctctgaggctg

SEQ ID NO: 155393 - DNA, 15 bp, Homo sapiens
gctgcctctgaggct

SEQ ID NO: 155394 - DNA, 15 bp, Homo sapiens
agctgcctctgaggc

SEQ ID NO: 155395 - DNA, 15 bp, Homo sapiens
cagctgcctctgagg

SEQ ID NO: 155396 - DNA, 15 bp, Homo sapiens
ccagctgcctctgag

SEQ ID NO: 155397 - DNA, 15 bp, Homo sapiens
tccagctgcctctga

SEQ ID NO: 155398 - DNA, 15 bp, Homo sapiens
ctccagctgcctctg

SEQ ID NO: 155399 - DNA, 15 bp, Homo sapiens
cctccagctgcctct

SEQ ID NO: 155400 - DNA, 15 bp, Homo sapiens
gcctccagctgcctc

SEQ ID NO: 155401 - DNA, 15 bp, Homo sapiens
ggcctccagctgcct

SEQ ID NO: 155402 - DNA, 15 bp, Homo sapiens
aggcctccagctgcc

SEQ ID NO: 155403 - DNA, 15 bp, Homo sapiens
caggcctccagctgc

SEQ ID NO: 155404 - DNA, 15 bp, Homo sapiens
ccaggcctccagctg

SEQ ID NO: 155405 - DNA, 15 bp, Homo sapiens
cccaggcctccagct

SEQ ID NO: 155406 - DNA, 15 bp, Homo sapiens
acccaggcctccagc

SEQ ID NO: 155407 - DNA, 15 bp, Homo sapiens
cacccaggcctccag

SEQ ID NO: 155408 - DNA, 15 bp, Homo sapiens
tcacccaggcctcca

SEQ ID NO: 155409 - DNA, 15 bp, Homo sapiens
ttcacccaggcctcc

SEQ ID NO: 155410 - DNA, 15 bp, Homo sapiens
gttcacccaggcctc

SEQ ID NO: 155411 - DNA, 15 bp, Homo sapiens
tgttcacccaggcct

SEQ ID NO: 155412 - DNA, 15 bp, Homo sapiens
ctgttcacccaggcc

SEQ ID NO: 155413 - DNA, 15 bp, Homo sapiens
cctgttcacccaggc

SEQ ID NO: 155414 - DNA, 15 bp, Homo sapiens
tcctgttcacccagg

SEQ ID NO: 155415 - DNA, 15 bp, Homo sapiens
gtcctgttcacccag

SEQ ID NO: 155416 - DNA, 15 bp, Homo sapiens
agtcctgttcaccca

SEQ ID NO: 155417 - DNA, 15 bp, Homo sapiens
cagtcctgttcaccc

SEQ ID NO: 155418 - DNA, 15 bp, Homo sapiens
ccagtcctgttcacc

SEQ ID NO: 155419 - DNA, 15 bp, Homo sapiens
gccagtcctgttcac

SEQ ID NO: 155420 - DNA, 15 bp, Homo sapiens
ggccagtcctgttca

SEQ ID NO: 155421 - DNA, 15 bp, Homo sapiens
tggccagtcctgttc

SEQ ID NO: 155422 - DNA, 15 bp, Homo sapiens
ttggccagtcctgtt

SEQ ID NO: 155423 - DNA, 15 bp, Homo sapiens
gttggccagtcctgt

SEQ ID NO: 155424 - DNA, 15 bp, Homo sapiens
tgttggccagtcctg

SEQ ID NO: 155425 - DNA, 15 bp, Homo sapiens
atgttggccagtcct

SEQ ID NO: 155426 - DNA, 15 bp, Homo sapiens
catgttggccagtcc

SEQ ID NO: 155427 - DNA, 15 bp, Homo sapiens
acatgttggccagtc

SEQ ID NO: 155428 - DNA, 15 bp, Homo sapiens
gacatgttggccagt

SEQ ID NO: 155429 - DNA, 15 bp, Homo sapiens
ggacatgttggccag

SEQ ID NO: 155430 - DNA, 15 bp, Homo sapiens
gggacatgttggcca

SEQ ID NO: 155431 - DNA, 15 bp, Homo sapiens
ggggacatgttggcc

SEQ ID NO: 155432 - DNA, 15 bp, Homo sapiens
tggggacatgttggc

SEQ ID NO: 155433 - DNA, 15 bp, Homo sapiens
ttggggacatgttgg

SEQ ID NO: 155434 - DNA, 15 bp, Homo sapiens
cttggggacatgttg

SEQ ID NO: 155435 - DNA, 15 bp, Homo sapiens
acttggggacatgtt

SEQ ID NO: 155436 - DNA, 15 bp, Homo sapiens
gacttggggacatgt

SEQ ID NO: 155437 - DNA, 15 bp, Homo sapiens
ggacttggggacatg

SEQ ID NO: 155438 - DNA, 15 bp, Homo sapiens
gggacttggggacat

SEQ ID NO: 155439 - DNA, 15 bp, Homo sapiens
tgggacttggggaca

SEQ ID NO: 155440 - DNA, 15 bp, Homo sapiens
gtgggacttggggac

SEQ ID NO: 155441 - DNA, 15 bp, Homo sapiens
tgtgggacttgggga

SEQ ID NO: 155442 - DNA, 15 bp, Homo sapiens
ctgtgggacttgggg

SEQ ID NO: 155443 - DNA, 15 bp, Homo sapiens
actgtgggacttggg

SEQ ID NO: 155444 - DNA, 15 bp, Homo sapiens
gactgtgggacttgg

SEQ ID NO: 155445 - DNA, 15 bp, Homo sapiens
tgactgtgggacttg

SEQ ID NO: 155446 - DNA, 15 bp, Homo sapiens
gtgactgtgggactt

SEQ ID NO: 155447 - DNA, 15 bp, Homo sapiens
ggtgactgtgggact

SEQ ID NO: 155448 - DNA, 15 bp, Homo sapiens
tggtgactgtgggac

SEQ ID NO: 155449 - DNA, 15 bp, Homo sapiens
atggtgactgtggga

SEQ ID NO: 155450 - DNA, 15 bp, Homo sapiens
gatggtgactgtggg

SEQ ID NO: 155451 - DNA, 15 bp, Homo sapiens
agatggtgactgtgg

SEQ ID NO: 155452 - DNA, 15 bp, Homo sapiens
cagatggtgactgtg

SEQ ID NO: 155453 - DNA, 15 bp, Homo sapiens
ccagatggtgactgt

SEQ ID NO: 155454 - DNA, 15 bp, Homo sapiens
gccagatggtgactg

SEQ ID NO: 155455 - DNA, 15 bp, Homo sapiens
ggccagatggtgact

SEQ ID NO: 155456 - DNA, 15 bp, Homo sapiens
tggccagatggtgac

SEQ ID NO: 155457 - DNA, 15 bp, Homo sapiens
ctggccagatggtga

SEQ ID NO: 155458 - DNA, 15 bp, Homo sapiens
gctggccagatggtg

SEQ ID NO: 155459 - DNA, 15 bp, Homo sapiens
tgctggccagatggt

SEQ ID NO: 155460 - DNA, 15 bp, Homo sapiens
atgctggccagatgg

SEQ ID NO: 155461 - DNA, 15 bp, Homo sapiens
aatgctggccagatg

SEQ ID NO: 155462 - DNA, 15 bp, Homo sapiens
caatgctggccagat

SEQ ID NO: 155463 - DNA, 15 bp, Homo sapiens
tcaatgctggccaga

SEQ ID NO: 155464 - DNA, 15 bp, Homo sapiens
ctcaatgctggccag

SEQ ID NO: 155465 - DNA, 15 bp, Homo sapiens
tctcaatgctggcca

SEQ ID NO: 155466 - DNA, 15 bp, Homo sapiens
ctctcaatgctggcc

SEQ ID NO: 155467 - DNA, 15 bp, Homo sapiens
cctctcaatgctggc

SEQ ID NO: 155468 - DNA, 15 bp, Homo sapiens
ccctctcaatgctgg

SEQ ID NO: 155469 - DNA, 15 bp, Homo sapiens
cccctctcaatgctg

SEQ ID NO: 155470 - DNA, 15 bp, Homo sapiens
tcccctctcaatgct

SEQ ID NO: 155471 - DNA, 15 bp, Homo sapiens
ttcccctctcaatgc

SEQ ID NO: 155472 - DNA, 15 bp, Homo sapiens
gttcccctctcaatg

SEQ ID NO: 155473 - DNA, 15 bp, Homo sapiens
cgttcccctctcaat

SEQ ID NO: 155474 - DNA, 15 bp, Homo sapiens
ccgttcccctctcaa

SEQ ID NO: 155475 - DNA, 15 bp, Homo sapiens
cccgttcccctctca

SEQ ID NO: 155476 - DNA, 15 bp, Homo sapiens
gcccgttcccctctc

SEQ ID NO: 155477 - DNA, 15 bp, Homo sapiens
agcccgttcccctct

SEQ ID NO: 155478 - DNA, 15 bp, Homo sapiens
cagcccgttcccctc

SEQ ID NO: 155479 - DNA, 15 bp, Homo sapiens
tcagcccgttcccct

SEQ ID NO: 155480 - DNA, 15 bp, Homo sapiens
ctcagcccgttcccc

SEQ ID NO: 155481 - DNA, 15 bp, Homo sapiens
cctcagcccgttccc

SEQ ID NO: 155482 - DNA, 15 bp, Homo sapiens
tcctcagcccgttcc

SEQ ID NO: 155483 - DNA, 15 bp, Homo sapiens
ttcctcagcccgttc

SEQ ID NO: 155484 - DNA, 15 bp, Homo sapiens
cttcctcagcccgtt

SEQ ID NO: 155485 - DNA, 15 bp, Homo sapiens
tcttcctcagcccgt

SEQ ID NO: 155486 - DNA, 15 bp, Homo sapiens
ctcttcctcagcccg

SEQ ID NO: 155487 - DNA, 15 bp, Homo sapiens
actcttcctcagccc

SEQ ID NO: 155488 - DNA, 15 bp, Homo sapiens
aactcttcctcagcc

SEQ ID NO: 155489 - DNA, 15 bp, Homo sapiens
taactcttcctcagc

SEQ ID NO: 155490 - DNA, 15 bp, Homo sapiens
ctaactcttcctcag

SEQ ID NO: 155491 - DNA, 15 bp, Homo sapiens
actaactcttcctca

SEQ ID NO: 155492 - DNA, 15 bp, Homo sapiens
cactaactcttcctc

SEQ ID NO: 155493 - DNA, 15 bp, Homo sapiens
ccactaactcttcct

SEQ ID NO: 155494 - DNA, 15 bp, Homo sapiens
gccactaactcttcc

SEQ ID NO: 155495 - DNA, 15 bp, Homo sapiens
tgccactaactcttc

SEQ ID NO: 155496 - DNA, 15 bp, Homo sapiens
ttgccactaactctt

SEQ ID NO: 155497 - DNA, 15 bp, Homo sapiens
cttgccactaactct

SEQ ID NO: 155498 - DNA, 15 bp, Homo sapiens
tcttgccactaactc

SEQ ID NO: 155499 - DNA, 15 bp, Homo sapiens
ctcttgccactaact

SEQ ID NO: 155500 - DNA, 15 bp, Homo sapiens
cctcttgccactaac

SEQ ID NO: 155501 - DNA, 15 bp, Homo sapiens
tcctcttgccactaa

SEQ ID NO: 155502 - DNA, 15 bp, Homo sapiens
ttcctcttgccacta

SEQ ID NO: 155503 - DNA, 15 bp, Homo sapiens
gttcctcttgccact

SEQ ID NO: 155504 - DNA, 15 bp, Homo sapiens
ggttcctcttgccac

SEQ ID NO: 155505 - DNA, 15 bp, Homo sapiens
gggttcctcttgcca

SEQ ID NO: 155506 - DNA, 15 bp, Homo sapiens
ggggttcctcttgcc

SEQ ID NO: 155507 - DNA, 15 bp, Homo sapiens
tggggttcctcttgc

SEQ ID NO: 155508 - DNA, 15 bp, Homo sapiens
ctggggttcctcttg

SEQ ID NO: 155509 - DNA, 15 bp, Homo sapiens
gctggggttcctctt

SEQ ID NO: 155510 - DNA, 15 bp, Homo sapiens
ggctggggttcctct

SEQ ID NO: 155511 - DNA, 15 bp, Homo sapiens
tggctggggttcctc

SEQ ID NO: 155512 - DNA, 15 bp, Homo sapiens
ctggctggggttcct

SEQ ID NO: 155513 - DNA, 15 bp, Homo sapiens
actggctggggttcc

SEQ ID NO: 155514 - DNA, 15 bp, Homo sapiens
gactggctggggttc

SEQ ID NO: 155515 - DNA, 15 bp, Homo sapiens
tgactggctggggtt

SEQ ID NO: 155516 - DNA, 15 bp, Homo sapiens
gtgactggctggggt

SEQ ID NO: 155517 - DNA, 15 bp, Homo sapiens
tgtgactggctgggg

SEQ ID NO: 155518 - DNA, 15 bp, Homo sapiens
gtgtgactggctggg

SEQ ID NO: 155519 - DNA, 15 bp, Homo sapiens
ggtgtgactggctgg

SEQ ID NO: 155520 - DNA, 15 bp, Homo sapiens
aggtgtgactggctg

SEQ ID NO: 155521 - DNA, 15 bp, Homo sapiens
aaggtgtgactggct

SEQ ID NO: 155522 - DNA, 15 bp, Homo sapiens
caaggtgtgactggc

SEQ ID NO: 155523 - DNA, 15 bp, Homo sapiens
acaaggtgtgactgg

SEQ ID NO: 155524 - DNA, 15 bp, Homo sapiens
gacaaggtgtgactg

SEQ ID NO: 155525 - DNA, 15 bp, Homo sapiens
ggacaaggtgtgact

SEQ ID NO: 155526 - DNA, 15 bp, Homo sapiens
tggacaaggtgtgac

SEQ ID NO: 155527 - DNA, 15 bp, Homo sapiens
ctggacaaggtgtga

SEQ ID NO: 155528 - DNA, 15 bp, Homo sapiens
actggacaaggtgtg

SEQ ID NO: 155529 - DNA, 15 bp, Homo sapiens
aactggacaaggtgt

SEQ ID NO: 155530 - DNA, 15 bp, Homo sapiens
aaactggacaaggtg

SEQ ID NO: 155531 - DNA, 15 bp, Homo sapiens
taaactggacaaggt

SEQ ID NO: 155532 - DNA, 15 bp, Homo sapiens
gtaaactggacaagg

SEQ ID NO: 155533 - DNA, 15 bp, Homo sapiens
ggtaaactggacaag

SEQ ID NO: 155534 - DNA, 15 bp, Homo sapiens
tggtaaactggacaa

SEQ ID NO: 155535 - DNA, 15 bp, Homo sapiens
ctggtaaactggaca

SEQ ID NO: 155536 - DNA, 15 bp, Homo sapiens
tctggtaaactggac

SEQ ID NO: 155537 - DNA, 15 bp, Homo sapiens
ctctggtaaactgga

SEQ ID NO: 155538 - DNA, 15 bp, Homo sapiens
cctctggtaaactgg

SEQ ID NO: 155539 - DNA, 15 bp, Homo sapiens
tcctctggtaaactg

SEQ ID NO: 155540 - DNA, 15 bp, Homo sapiens
ttcctctggtaaact

SEQ ID NO: 155541 - DNA, 15 bp, Homo sapiens
tttcctctggtaaac

SEQ ID NO: 155542 - DNA, 15 bp, Homo sapiens
ttttcctctggtaaa

SEQ ID NO: 155543 - DNA, 15 bp, Homo sapiens
tttttcctctggtaa

SEQ ID NO: 155544 - DNA, 15 bp, Homo sapiens
gtttttcctctggta

SEQ ID NO: 155545 - DNA, 15 bp, Homo sapiens
ggtttttcctctggt

SEQ ID NO: 155546 - DNA, 15 bp, Homo sapiens
tggtttttcctctgg

SEQ ID NO: 155547 - DNA, 15 bp, Homo sapiens
ttggtttttcctctg

SEQ ID NO: 155548 - DNA, 15 bp, Homo sapiens
attggtttttcctct

SEQ ID NO: 155549 - DNA, 15 bp, Homo sapiens
cattggtttttcctc

SEQ ID NO: 155550 - DNA, 15 bp, Homo sapiens
acattggtttttcct

SEQ ID NO: 155551 - DNA, 15 bp, Homo sapiens
cacattggtttttcc

SEQ ID NO: 155552 - DNA, 15 bp, Homo sapiens
acacattggtttttc

SEQ ID NO: 155553 - DNA, 15 bp, Homo sapiens
tacacattggttttt

SEQ ID NO: 155554 - DNA, 15 bp, Homo sapiens
ttacacattggtttt

SEQ ID NO: 155555 - DNA, 15 bp, Homo sapiens
cttacacattggttt

SEQ ID NO: 155556 - DNA, 15 bp, Homo sapiens
tcttacacattggtt

SEQ ID NO: 155557 - DNA, 15 bp, Homo sapiens
ttcttacacattggt

SEQ ID NO: 155558 - DNA, 15 bp, Homo sapiens
gttcttacacattgg

SEQ ID NO: 155559 - DNA, 15 bp, Homo sapiens
tgttcttacacattg

SEQ ID NO: 155560 - DNA, 15 bp, Homo sapiens
ctgttcttacacatt

SEQ ID NO: 155561 - DNA, 15 bp, Homo sapiens
tctgttcttacacat

SEQ ID NO: 155562 - DNA, 15 bp, Homo sapiens
ttctgttcttacaca

SEQ ID NO: 155563 - DNA, 15 bp, Homo sapiens
tttctgttcttacac

SEQ ID NO: 155564 - DNA, 15 bp, Homo sapiens
atttctgttcttaca

SEQ ID NO: 155565 - DNA, 15 bp, Homo sapiens
catttctgttcttac

SEQ ID NO: 155566 - DNA, 15 bp, Homo sapiens
acatttctgttctta

SEQ ID NO: 155567 - DNA, 15 bp, Homo sapiens
cacatttctgttctt

SEQ ID NO: 155568 - DNA, 15 bp, Homo sapiens
tcacatttctgttct

SEQ ID NO: 155569 - DNA, 15 bp, Homo sapiens
gtcacatttctgttc

SEQ ID NO: 155570 - DNA, 15 bp, Homo sapiens
ggtcacatttctgtt

SEQ ID NO: 155571 - DNA, 15 bp, Homo sapiens
gggtcacatttctgt

SEQ ID NO: 155572 - DNA, 15 bp, Homo sapiens
cgggtcacatttctg

SEQ ID NO: 155573 - DNA, 15 bp, Homo sapiens
ccgggtcacatttct

SEQ ID NO: 155574 - DNA, 15 bp, Homo sapiens
gccgggtcacatttc

SEQ ID NO: 155575 - DNA, 15 bp, Homo sapiens
tgccgggtcacattt

SEQ ID NO: 155576 - DNA, 15 bp, Homo sapiens
ctgccgggtcacatt

SEQ ID NO: 155577 - DNA, 15 bp, Homo sapiens
gctgccgggtcacat

SEQ ID NO: 155578 - DNA, 15 bp, Homo sapiens
ggctgccgggtcaca

SEQ ID NO: 155579 - DNA, 15 bp, Homo sapiens
tggctgccgggtcac

SEQ ID NO: 155580 - DNA, 15 bp, Homo sapiens
ctggctgccgggtca

SEQ ID NO: 155581 - DNA, 15 bp, Homo sapiens
actggctgccgggtc

SEQ ID NO: 155582 - DNA, 15 bp, Homo sapiens
cactggctgccgggt

SEQ ID NO: 155583 - DNA, 15 bp, Homo sapiens
gcactggctgccggg

SEQ ID NO: 155584 - DNA, 15 bp, Homo sapiens
tgcactggctgccgg

SEQ ID NO: 155585 - DNA, 15 bp, Homo sapiens
gtgcactggctgccg

SEQ ID NO: 155586 - DNA, 15 bp, Homo sapiens
agtgcactggctgcc

SEQ ID NO: 155587 - DNA, 15 bp, Homo sapiens
cagtgcactggctgc

SEQ ID NO: 155588 - DNA, 15 bp, Homo sapiens
gcagtgcactggctg

SEQ ID NO: 155589 - DNA, 15 bp, Homo sapiens
ggcagtgcactggct

SEQ ID NO: 155590 - DNA, 15 bp, Homo sapiens
gggcagtgcactggc

SEQ ID NO: 155591 - DNA, 15 bp, Homo sapiens
ggggcagtgcactgg

SEQ ID NO: 155592 - DNA, 15 bp, Homo sapiens
gggggcagtgcactg

SEQ ID NO: 155593 - DNA, 15 bp, Homo sapiens
ggggggcagtgcact

SEQ ID NO: 155594 - DNA, 15 bp, Homo sapiens
aggggggcagtgcac

SEQ ID NO: 155595 - DNA, 15 bp, Homo sapiens
gaggggggcagtgca

SEQ ID NO: 155596 - DNA, 15 bp, Homo sapiens
agaggggggcagtgc

SEQ ID NO: 155597 - DNA, 15 bp, Homo sapiens
gagaggggggcagtg

SEQ ID NO: 155598 - DNA, 15 bp, Homo sapiens
ggagaggggggcagt

SEQ ID NO: 155599 - DNA, 15 bp, Homo sapiens
tggagaggggggcag

SEQ ID NO: 155600 - DNA, 15 bp, Homo sapiens
ttggagaggggggca

SEQ ID NO: 155601 - DNA, 15 bp, Homo sapiens
tttggagaggggggc

SEQ ID NO: 155602 - DNA, 15 bp, Homo sapiens
ctttggagagggggg

SEQ ID NO: 155603 - DNA, 15 bp, Homo sapiens
cctttggagaggggg

SEQ ID NO: 155604 - DNA, 15 bp, Homo sapiens
gcctttggagagggg

SEQ ID NO: 155605 - DNA, 15 bp, Homo sapiens
ggcctttggagaggg

SEQ ID NO: 155606 - DNA, 15 bp, Homo sapiens
tggcctttggagagg

SEQ ID NO: 155607 - DNA, 15 bp, Homo sapiens
gtggcctttggagag

SEQ ID NO: 155608 - DNA, 15 bp, Homo sapiens
ggtggcctttggaga

SEQ ID NO: 155609 - DNA, 15 bp, Homo sapiens
gggtggcctttggag

SEQ ID NO: 155610 - DNA, 15 bp, Homo sapiens
ggggtggcctttgga

SEQ ID NO: 155611 - DNA, 15 bp, Homo sapiens
aggggtggcctttgg

SEQ ID NO: 155612 - DNA, 15 bp, Homo sapiens
gaggggtggcctttg

SEQ ID NO: 155613 - DNA, 15 bp, Homo sapiens
tgaggggtggccttt

SEQ ID NO: 155614 - DNA, 15 bp, Homo sapiens
gtgaggggtggcctt

SEQ ID NO: 155615 - DNA, 15 bp, Homo sapiens
ggtgaggggtggcct

SEQ ID NO: 155616 - DNA, 15 bp, Homo sapiens
gggtgaggggtggcc

SEQ ID NO: 155617 - DNA, 15 bp, Homo sapiens
agggtgaggggtggc

SEQ ID NO: 155618 - DNA, 15 bp, Homo sapiens
gagggtgaggggtgg

SEQ ID NO: 155619 - DNA, 15 bp, Homo sapiens
ggagggtgaggggtg

SEQ ID NO: 155620 - DNA, 15 bp, Homo sapiens
tggagggtgaggggt

SEQ ID NO: 155621 - DNA, 15 bp, Homo sapiens
gtggagggtgagggg

SEQ ID NO: 155622 - DNA, 15 bp, Homo sapiens
ggtggagggtgaggg

SEQ ID NO: 155623 - DNA, 15 bp, Homo sapiens
tggtggagggtgagg

SEQ ID NO: 155624 - DNA, 15 bp, Homo sapiens
ctggtggagggtgag

SEQ ID NO: 155625 - DNA, 15 bp, Homo sapiens
gctggtggagggtga

SEQ ID NO: 155626 - DNA, 15 bp, Homo sapiens
tgctggtggagggtg

SEQ ID NO: 155627 - DNA, 15 bp, Homo sapiens
atgctggtggagggt

SEQ ID NO: 155628 - DNA, 15 bp, Homo sapiens
catgctggtggaggg

SEQ ID NO: 155629 - DNA, 15 bp, Homo sapiens
gcatgctggtggagg

SEQ ID NO: 155630 - DNA, 15 bp, Homo sapiens
tgcatgctggtggag

SEQ ID NO: 155631 - DNA, 15 bp, Homo sapiens
gtgcatgctggtgga

SEQ ID NO: 155632 - DNA, 15 bp, Homo sapiens
tgtgcatgctggtgg

SEQ ID NO: 155633 - DNA, 15 bp, Homo sapiens
ctgtgcatgctggtg

SEQ ID NO: 155634 - DNA, 15 bp, Homo sapiens
tctgtgcatgctggt

SEQ ID NO: 155635 - DNA, 15 bp, Homo sapiens
ttctgtgcatgctgg

SEQ ID NO: 155636 - DNA, 15 bp, Homo sapiens
tttctgtgcatgctg

SEQ ID NO: 155637 - DNA, 15 bp, Homo sapiens
ctttctgtgcatgct

SEQ ID NO: 155638 - DNA, 15 bp, Homo sapiens
actttctgtgcatgc

SEQ ID NO: 155639 - DNA, 15 bp, Homo sapiens
cactttctgtgcatg

SEQ ID NO: 155640 - DNA, 15 bp, Homo sapiens
ccactttctgtgcat

SEQ ID NO: 155641 - DNA, 15 bp, Homo sapiens
cccactttctgtgca

SEQ ID NO: 155642 - DNA, 15 bp, Homo sapiens
ccccactttctgtgc

SEQ ID NO: 155643 - DNA, 15 bp, Homo sapiens
accccactttctgtg

SEQ ID NO: 155644 - DNA, 15 bp, Homo sapiens
caccccactttctgt

SEQ ID NO: 155645 - DNA, 15 bp, Homo sapiens
tcaccccactttctg

SEQ ID NO: 155646 - DNA, 15 bp, Homo sapiens
gtcaccccactttct

SEQ ID NO: 155647 - DNA, 15 bp, Homo sapiens
tgtcaccccactttc

SEQ ID NO: 155648 - DNA, 15 bp, Homo sapiens
ctgtcaccccacttt

SEQ ID NO: 155649 - DNA, 15 bp, Homo sapiens
gctgtcaccccactt

SEQ ID NO: 155650 - DNA, 15 bp, Homo sapiens
tgctgtcaccccact

SEQ ID NO: 155651 - DNA, 15 bp, Homo sapiens
ttgctgtcaccccac

SEQ ID NO: 155652 - DNA, 15 bp, Homo sapiens
attgctgtcacccca

SEQ ID NO: 155653 - DNA, 15 bp, Homo sapiens
gattgctgtcacccc

SEQ ID NO: 155654 - DNA, 15 bp, Homo sapiens
tgattgctgtcaccc

SEQ ID NO: 155655 - DNA, 15 bp, Homo sapiens
gtgattgctgtcacc

SEQ ID NO: 155656 - DNA, 15 bp, Homo sapiens
tgtgattgctgtcac

SEQ ID NO: 155657 - DNA, 15 bp, Homo sapiens
ttgtgattgctgtca

SEQ ID NO: 155658 - DNA, 15 bp, Homo sapiens
attgtgattgctgtc

SEQ ID NO: 155659 - DNA, 15 bp, Homo sapiens
cattgtgattgctgt

SEQ ID NO: 155660 - DNA, 15 bp, Homo sapiens
acattgtgattgctg

SEQ ID NO: 155661 - DNA, 15 bp, Homo sapiens
gacattgtgattgct

SEQ ID NO: 155662 - DNA, 15 bp, Homo sapiens
agacattgtgattgc

SEQ ID NO: 155663 - DNA, 15 bp, Homo sapiens
tagacattgtgattg

SEQ ID NO: 155664 - DNA, 15 bp, Homo sapiens
gtagacattgtgatt

SEQ ID NO: 155665 - DNA, 15 bp, Homo sapiens
ggtagacattgtgat

SEQ ID NO: 155666 - DNA, 15 bp, Homo sapiens
gggtagacattgtga

SEQ ID NO: 155667 - DNA, 15 bp, Homo sapiens
tgggtagacattgtg

SEQ ID NO: 155668 - DNA, 15 bp, Homo sapiens
ctgggtagacattgt

SEQ ID NO: 155669 - DNA, 15 bp, Homo sapiens
cctgggtagacattg

SEQ ID NO: 155670 - DNA, 15 bp, Homo sapiens
gcctgggtagacatt

SEQ ID NO: 155671 - DNA, 15 bp, Homo sapiens
tgcctgggtagacat

SEQ ID NO: 155672 - DNA, 15 bp, Homo sapiens
ctgcctgggtagaca

SEQ ID NO: 155673 - DNA, 15 bp, Homo sapiens
gctgcctgggtagac

SEQ ID NO: 155674 - DNA, 15 bp, Homo sapiens
tgctgcctgggtaga

SEQ ID NO: 155675 - DNA, 15 bp, Homo sapiens
ttgctgcctgggtag

SEQ ID NO: 155676 - DNA, 15 bp, Homo sapiens
cttgctgcctgggta

SEQ ID NO: 155677 - DNA, 15 bp, Homo sapiens
ccttgctgcctgggt

SEQ ID NO: 155678 - DNA, 15 bp, Homo sapiens
tccttgctgcctggg

SEQ ID NO: 155679 - DNA, 15 bp, Homo sapiens
gtccttgctgcctgg

SEQ ID NO: 155680 - DNA, 15 bp, Homo sapiens
ggtccttgctgcctg

SEQ ID NO: 155681 - DNA, 15 bp, Homo sapiens
gggtccttgctgcct

SEQ ID NO: 155682 - DNA, 15 bp, Homo sapiens
ggggtccttgctgcc

SEQ ID NO: 155683 - DNA, 15 bp, Homo sapiens
aggggtccttgctgc

SEQ ID NO: 155684 - DNA, 15 bp, Homo sapiens
caggggtccttgctg

SEQ ID NO: 155685 - DNA, 15 bp, Homo sapiens
tcaggggtccttgct

SEQ ID NO: 155686 - DNA, 15 bp, Homo sapiens
gtcaggggtccttgc

SEQ ID NO: 155687 - DNA, 15 bp, Homo sapiens
ggtcaggggtccttg

SEQ ID NO: 155688 - DNA, 15 bp, Homo sapiens
tggtcaggggtcctt

SEQ ID NO: 155689 - DNA, 15 bp, Homo sapiens
atggtcaggggtcct

SEQ ID NO: 155690 - DNA, 15 bp, Homo sapiens
catggtcaggggtcc

SEQ ID NO: 155691 - DNA, 15 bp, Homo sapiens
ccatggtcaggggtc

SEQ ID NO: 155692 - DNA, 15 bp, Homo sapiens
cccatggtcaggggt

SEQ ID NO: 155693 - DNA, 15 bp, Homo sapiens
ccccatggtcagggg

SEQ ID NO: 155694 - DNA, 15 bp, Homo sapiens
tccccatggtcaggg

SEQ ID NO: 155695 - DNA, 15 bp, Homo sapiens
ctccccatggtcagg

SEQ ID NO: 155696 - DNA, 15 bp, Homo sapiens
cctccccatggtcag

SEQ ID NO: 155697 - DNA, 15 bp, Homo sapiens
tcctccccatggtca

SEQ ID NO: 155698 - DNA, 15 bp, Homo sapiens
gtcctccccatggtc

SEQ ID NO: 155699 - DNA, 15 bp, Homo sapiens
agtcctccccatggt

SEQ ID NO: 155700 - DNA, 15 bp, Homo sapiens
cagtcctccccatgg

SEQ ID NO: 155701 - DNA, 15 bp, Homo sapiens
ccagtcctccccatg

SEQ ID NO: 155702 - DNA, 15 bp, Homo sapiens
cccagtcctccccat

SEQ ID NO: 155703 - DNA, 15 bp, Homo sapiens
ccccagtcctcccca

SEQ ID NO: 155704 - DNA, 15 bp, Homo sapiens
accccagtcctcccc

SEQ ID NO: 155705 - DNA, 15 bp, Homo sapiens
caccccagtcctccc

SEQ ID NO: 155706 - DNA, 15 bp, Homo sapiens
gcaccccagtcctcc

SEQ ID NO: 155707 - DNA, 15 bp, Homo sapiens
tgcaccccagtcctc

SEQ ID NO: 155708 - DNA, 15 bp, Homo sapiens
ctgcaccccagtcct

SEQ ID NO: 155709 - DNA, 15 bp, Homo sapiens
cctgcaccccagtcc

SEQ ID NO: 155710 - DNA, 15 bp, Homo sapiens
ccctgcaccccagtc

SEQ ID NO: 155711 - DNA, 15 bp, Homo sapiens
tccctgcaccccagt

SEQ ID NO: 155712 - DNA, 15 bp, Homo sapiens
ttccctgcaccccag

SEQ ID NO: 155713 - DNA, 15 bp, Homo sapiens
gttccctgcacccca

SEQ ID NO: 155714 - DNA, 15 bp, Homo sapiens
tgttccctgcacccc

SEQ ID NO: 155715 - DNA, 15 bp, Homo sapiens
atgttccctgcaccc

SEQ ID NO: 155716 - DNA, 15 bp, Homo sapiens
tatgttccctgcacc

SEQ ID NO: 155717 - DNA, 15 bp, Homo sapiens
ctatgttccctgcac

SEQ ID NO: 155718 - DNA, 15 bp, Homo sapiens
tctatgttccctgca

SEQ ID NO: 155719 - DNA, 15 bp, Homo sapiens
ttctatgttccctgc

SEQ ID NO: 155720 - DNA, 15 bp, Homo sapiens
cttctatgttccctg

SEQ ID NO: 155721 - DNA, 15 bp, Homo sapiens
gcttctatgttccct

SEQ ID NO: 155722 - DNA, 15 bp, Homo sapiens
tgcttctatgttccc

SEQ ID NO: 155723 - DNA, 15 bp, Homo sapiens
ctgcttctatgttcc

SEQ ID NO: 155724 - DNA, 15 bp, Homo sapiens
tctgcttctatgttc

SEQ ID NO: 155725 - DNA, 15 bp, Homo sapiens
ttctgcttctatgtt

SEQ ID NO: 155726 - DNA, 15 bp, Homo sapiens
attctgcttctatgt

SEQ ID NO: 155727 - DNA, 15 bp, Homo sapiens
cattctgcttctatg

SEQ ID NO: 155728 - DNA, 15 bp, Homo sapiens
tcattctgcttctat

SEQ ID NO: 155729 - DNA, 15 bp, Homo sapiens
ctcattctgcttcta

SEQ ID NO: 155730 - DNA, 15 bp, Homo sapiens
cctcattctgcttct

SEQ ID NO: 155731 - DNA, 15 bp, Homo sapiens
gcctcattctgcttc

SEQ ID NO: 155732 - DNA, 15 bp, Homo sapiens
ggcctcattctgctt

SEQ ID NO: 155733 - DNA, 15 bp, Homo sapiens
aggcctcattctgct

SEQ ID NO: 155734 - DNA, 15 bp, Homo sapiens
taggcctcattctgc

SEQ ID NO: 155735 - DNA, 15 bp, Homo sapiens
ctaggcctcattctg

SEQ ID NO: 155736 - DNA, 15 bp, Homo sapiens
cctaggcctcattct

SEQ ID NO: 155737 - DNA, 15 bp, Homo sapiens
ccctaggcctcattc

SEQ ID NO: 155738 - DNA, 15 bp, Homo sapiens
cccctaggcctcatt

SEQ ID NO: 155739 - DNA, 15 bp, Homo sapiens
ccccctaggcctcat

SEQ ID NO: 155740 - DNA, 15 bp, Homo sapiens
tccccctaggcctca

SEQ ID NO: 155741 - DNA, 15 bp, Homo sapiens
ctccccctaggcctc

SEQ ID NO: 155742 - DNA, 15 bp, Homo sapiens
actccccctaggcct

SEQ ID NO: 155743 - DNA, 15 bp, Homo sapiens
aactccccctaggcc

SEQ ID NO: 155744 - DNA, 15 bp, Homo sapiens
caactccccctaggc

SEQ ID NO: 155745 - DNA, 15 bp, Homo sapiens
ccaactccccctagg

SEQ ID NO: 155746 - DNA, 15 bp, Homo sapiens
cccaactccccctag

SEQ ID NO: 155747 - DNA, 15 bp, Homo sapiens
gcccaactcccccta

SEQ ID NO: 155748 - DNA, 15 bp, Homo sapiens
tgcccaactccccct

SEQ ID NO: 155749 - DNA, 15 bp, Homo sapiens
ttgcccaactccccc

SEQ ID NO: 155750 - DNA, 15 bp, Homo sapiens
cttgcccaactcccc

SEQ ID NO: 155751 - DNA, 15 bp, Homo sapiens
ccttgcccaactccc

SEQ ID NO: 155752 - DNA, 15 bp, Homo sapiens
gccttgcccaactcc

SEQ ID NO: 155753 - DNA, 15 bp, Homo sapiens
ggccttgcccaactc

SEQ ID NO: 155754 - DNA, 15 bp, Homo sapiens
tggccttgcccaact

SEQ ID NO: 155755 - DNA, 15 bp, Homo sapiens
ctggccttgcccaac

SEQ ID NO: 155756 - DNA, 15 bp, Homo sapiens
tctggccttgcccaa

SEQ ID NO: 155757 - DNA, 15 bp, Homo sapiens
ctctggccttgccca

SEQ ID NO: 155758 - DNA, 15 bp, Homo sapiens
gctctggccttgccc

SEQ ID NO: 155759 - DNA, 15 bp, Homo sapiens
ggctctggccttgcc

SEQ ID NO: 155760 - DNA, 15 bp, Homo sapiens
gggctctggccttgc

SEQ ID NO: 155761 - DNA, 15 bp, Homo sapiens
agggctctggccttg

SEQ ID NO: 155762 - DNA, 15 bp, Homo sapiens
tagggctctggcctt

SEQ ID NO: 155763 - DNA, 15 bp, Homo sapiens
ctagggctctggcct

SEQ ID NO: 155764 - DNA, 15 bp, Homo sapiens
gctagggctctggcc

SEQ ID NO: 155765 - DNA, 15 bp, Homo sapiens
agctagggctctggc

SEQ ID NO: 155766 - DNA, 15 bp, Homo sapiens
cagctagggctctgg

SEQ ID NO: 155767 - DNA, 15 bp, Homo sapiens
gcagctagggctctg

SEQ ID NO: 155768 - DNA, 15 bp, Homo sapiens
tgcagctagggctct

SEQ ID NO: 155769 - DNA, 15 bp, Homo sapiens
ctgcagctagggctc

SEQ ID NO: 155770 - DNA, 15 bp, Homo sapiens
gctgcagctagggct

SEQ ID NO: 155771 - DNA, 15 bp, Homo sapiens
ggctgcagctagggc

SEQ ID NO: 155772 - DNA, 15 bp, Homo sapiens
tggctgcagctaggg

SEQ ID NO: 155773 - DNA, 15 bp, Homo sapiens
ttggctgcagctagg

SEQ ID NO: 155774 - DNA, 15 bp, Homo sapiens
cttggctgcagctag

SEQ ID NO: 155775 - DNA, 15 bp, Homo sapiens
gcttggctgcagcta

SEQ ID NO: 155776 - DNA, 15 bp, Homo sapiens
tgcttggctgcagct

SEQ ID NO: 155777 - DNA, 15 bp, Homo sapiens
gtgcttggctgcagc

SEQ ID NO: 155778 - DNA, 15 bp, Homo sapiens
tgtgcttggctgcag

SEQ ID NO: 155779 - DNA, 15 bp, Homo sapiens
atgtgcttggctgca

SEQ ID NO: 155780 - DNA, 15 bp, Homo sapiens
catgtgcttggctgc

SEQ ID NO: 155781 - DNA, 15 bp, Homo sapiens
ccatgtgcttggctg

SEQ ID NO: 155782 - DNA, 15 bp, Homo sapiens
gccatgtgcttggct

SEQ ID NO: 155783 - DNA, 15 bp, Homo sapiens
ggccatgtgcttggc

SEQ ID NO: 155784 - DNA, 15 bp, Homo sapiens
tggccatgtgcttgg

SEQ ID NO: 155785 - DNA, 15 bp, Homo sapiens
ttggccatgtgcttg

SEQ ID NO: 155786 - DNA, 15 bp, Homo sapiens
cttggccatgtgctt

SEQ ID NO: 155787 - DNA, 15 bp, Homo sapiens
ccttggccatgtgct

SEQ ID NO: 155788 - DNA, 15 bp, Homo sapiens
gccttggccatgtgc

SEQ ID NO: 155789 - DNA, 15 bp, Homo sapiens
ggccttggccatgtg

SEQ ID NO: 155790 - DNA, 15 bp, Homo sapiens
tggccttggccatgt

SEQ ID NO: 155791 - DNA, 15 bp, Homo sapiens
ctggccttggccatg

SEQ ID NO: 155792 - DNA, 15 bp, Homo sapiens
gctggccttggccat

SEQ ID NO: 155793 - DNA, 15 bp, Homo sapiens
agctggccttggcca

SEQ ID NO: 155794 - DNA, 15 bp, Homo sapiens
gagctggccttggcc

SEQ ID NO: 155795 - DNA, 15 bp, Homo sapiens
ggagctggccttggc

SEQ ID NO: 155796 - DNA, 15 bp, Homo sapiens
aggagctggccttgg

SEQ ID NO: 155797 - DNA, 15 bp, Homo sapiens
caggagctggccttg

SEQ ID NO: 155798 - DNA, 15 bp, Homo sapiens
ccaggagctggcctt

SEQ ID NO: 155799 - DNA, 15 bp, Homo sapiens
tccaggagctggcct

SEQ ID NO: 155800 - DNA, 15 bp, Homo sapiens
ttccaggagctggcc

SEQ ID NO: 155801 - DNA, 15 bp, Homo sapiens
cttccaggagctggc

SEQ ID NO: 155802 - DNA, 15 bp, Homo sapiens
ccttccaggagctgg

SEQ ID NO: 155803 - DNA, 15 bp, Homo sapiens
cccttccaggagctg

SEQ ID NO: 155804 - DNA, 15 bp, Homo sapiens
gcccttccaggagct

SEQ ID NO: 155805 - DNA, 15 bp, Homo sapiens
tgcccttccaggagc

SEQ ID NO: 155806 - DNA, 15 bp, Homo sapiens
ctgcccttccaggag

SEQ ID NO: 155807 - DNA, 15 bp, Homo sapiens
cctgcccttccagga

SEQ ID NO: 155808 - DNA, 15 bp, Homo sapiens
ccctgcccttccagg

SEQ ID NO: 155809 - DNA, 15 bp, Homo sapiens
gccctgcccttccag

SEQ ID NO: 155810 - DNA, 15 bp, Homo sapiens
agccctgcccttcca

SEQ ID NO: 155811 - DNA, 15 bp, Homo sapiens
gagccctgcccttcc

SEQ ID NO: 155812 - DNA, 15 bp, Homo sapiens
ggagccctgcccttc

SEQ ID NO: 155813 - DNA, 15 bp, Homo sapiens
cggagccctgccctt

SEQ ID NO: 155814 - DNA, 15 bp, Homo sapiens
tcggagccctgccct

SEQ ID NO: 155815 - DNA, 15 bp, Homo sapiens
ctcggagccctgccc

SEQ ID NO: 155816 - DNA, 15 bp, Homo sapiens
cctcggagccctgcc

SEQ ID NO: 155817 - DNA, 15 bp, Homo sapiens
gcctcggagccctgc

SEQ ID NO: 155818 - DNA, 15 bp, Homo sapiens
tgcctcggagccctg

SEQ ID NO: 155819 - DNA, 15 bp, Homo sapiens
ctgcctcggagccct

SEQ ID NO: 155820 - DNA, 15 bp, Homo sapiens
cctgcctcggagccc

SEQ ID NO: 155821 - DNA, 15 bp, Homo sapiens
tcctgcctcggagcc

SEQ ID NO: 155822 - DNA, 15 bp, Homo sapiens
ctcctgcctcggagc

SEQ ID NO: 155823 - DNA, 15 bp, Homo sapiens
cctcctgcctcggag

SEQ ID NO: 155824 - DNA, 15 bp, Homo sapiens
gcctcctgcctcgga

SEQ ID NO: 155825 - DNA, 15 bp, Homo sapiens
tgcctcctgcctcgg

SEQ ID NO: 155826 - DNA, 15 bp, Homo sapiens
ctgcctcctgcctcg

SEQ ID NO: 155827 - DNA, 15 bp, Homo sapiens
cctgcctcctgcctc

SEQ ID NO: 155828 - DNA, 15 bp, Homo sapiens
tcctgcctcctgcct

SEQ ID NO: 155829 - DNA, 15 bp, Homo sapiens
ctcctgcctcctgcc

SEQ ID NO: 155830 - DNA, 15 bp, Homo sapiens
cctcctgcctcctgc

SEQ ID NO: 155831 - DNA, 15 bp, Homo sapiens
gcctcctgcctcctg

SEQ ID NO: 155832 - DNA, 15 bp, Homo sapiens
agcctcctgcctcct

SEQ ID NO: 155833 - DNA, 15 bp, Homo sapiens
cagcctcctgcctcc

SEQ ID NO: 155834 - DNA, 15 bp, Homo sapiens
gcagcctcctgcctc

SEQ ID NO: 155835 - DNA, 15 bp, Homo sapiens
ggcagcctcctgcct

SEQ ID NO: 155836 - DNA, 15 bp, Homo sapiens
gggcagcctcctgcc

SEQ ID NO: 155837 - DNA, 15 bp, Homo sapiens
cgggcagcctcctgc

SEQ ID NO: 155838 - DNA, 15 bp, Homo sapiens
acgggcagcctcctg

SEQ ID NO: 155839 - DNA, 15 bp, Homo sapiens
cacgggcagcctcct

SEQ ID NO: 155840 - DNA, 15 bp, Homo sapiens
ccacgggcagcctcc

SEQ ID NO: 155841 - DNA, 15 bp, Homo sapiens
gccacgggcagcctc

SEQ ID NO: 155842 - DNA, 15 bp, Homo sapiens
agccacgggcagcct

SEQ ID NO: 155843 - DNA, 15 bp, Homo sapiens
tagccacgggcagcc

SEQ ID NO: 155844 - DNA, 15 bp, Homo sapiens
gtagccacgggcagc

SEQ ID NO: 155845 - DNA, 15 bp, Homo sapiens
ggtagccacgggcag

SEQ ID NO: 155846 - DNA, 15 bp, Homo sapiens
gggtagccacgggca

SEQ ID NO: 155847 - DNA, 15 bp, Homo sapiens
cgggtagccacgggc

SEQ ID NO: 155848 - DNA, 15 bp, Homo sapiens
acgggtagccacggg

SEQ ID NO: 155849 - DNA, 15 bp, Homo sapiens
gacgggtagccacgg

SEQ ID NO: 155850 - DNA, 15 bp, Homo sapiens
ggacgggtagccacg

SEQ ID NO: 155851 - DNA, 15 bp, Homo sapiens
aggacgggtagccac

SEQ ID NO: 155852 - DNA, 15 bp, Homo sapiens
gaggacgggtagcca

SEQ ID NO: 155853 - DNA, 15 bp, Homo sapiens
tgaggacgggtagcc

SEQ ID NO: 155854 - DNA, 15 bp, Homo sapiens
gtgaggacgggtagc

SEQ ID NO: 155855 - DNA, 15 bp, Homo sapiens
tgtgaggacgggtag

SEQ ID NO: 155856 - DNA, 15 bp, Homo sapiens
gtgtgaggacgggta

SEQ ID NO: 155857 - DNA, 15 bp, Homo sapiens
ggtgtgaggacgggt

SEQ ID NO: 155858 - DNA, 15 bp, Homo sapiens
gggtgtgaggacggg

SEQ ID NO: 155859 - DNA, 15 bp, Homo sapiens
ggggtgtgaggacgg

SEQ ID NO: 155860 - DNA, 15 bp, Homo sapiens
aggggtgtgaggacg

SEQ ID NO: 155861 - DNA, 15 bp, Homo sapiens
caggggtgtgaggac

SEQ ID NO: 155862 - DNA, 15 bp, Homo sapiens
gcaggggtgtgagga

SEQ ID NO: 155863 - DNA, 15 bp, Homo sapiens
tgcaggggtgtgagg

SEQ ID NO: 155864 - DNA, 15 bp, Homo sapiens
ctgcaggggtgtgag

SEQ ID NO: 155865 - DNA, 15 bp, Homo sapiens
gctgcaggggtgtga

SEQ ID NO: 155866 - DNA, 15 bp, Homo sapiens
agctgcaggggtgtg

SEQ ID NO: 155867 - DNA, 15 bp, Homo sapiens
aagctgcaggggtgt

SEQ ID NO: 155868 - DNA, 15 bp, Homo sapiens
caagctgcaggggtg

SEQ ID NO: 155869 - DNA, 15 bp, Homo sapiens
gcaagctgcaggggt

SEQ ID NO: 155870 - DNA, 15 bp, Homo sapiens
agcaagctgcagggg

SEQ ID NO: 155871 - DNA, 15 bp, Homo sapiens
tagcaagctgcaggg

SEQ ID NO: 155872 - DNA, 15 bp, Homo sapiens
ctagcaagctgcagg

SEQ ID NO: 155873 - DNA, 15 bp, Homo sapiens
actagcaagctgcag

SEQ ID NO: 155874 - DNA, 15 bp, Homo sapiens
gactagcaagctgca

SEQ ID NO: 155875 - DNA, 15 bp, Homo sapiens
agactagcaagctgc

SEQ ID NO: 155876 - DNA, 15 bp, Homo sapiens
cagactagcaagctg

SEQ ID NO: 155877 - DNA, 15 bp, Homo sapiens
acagactagcaagct

SEQ ID NO: 155878 - DNA, 15 bp, Homo sapiens
gacagactagcaagc

SEQ ID NO: 155879 - DNA, 15 bp, Homo sapiens
agacagactagcaag

SEQ ID NO: 155880 - DNA, 15 bp, Homo sapiens
cagacagactagcaa

SEQ ID NO: 155881 - DNA, 15 bp, Homo sapiens
acagacagactagca

SEQ ID NO: 155882 - DNA, 15 bp, Homo sapiens
cacagacagactagc

SEQ ID NO: 155883 - DNA, 15 bp, Homo sapiens
ccacagacagactag

SEQ ID NO: 155884 - DNA, 15 bp, Homo sapiens
cccacagacagacta

SEQ ID NO: 155885 - DNA, 15 bp, Homo sapiens
gcccacagacagact

SEQ ID NO: 155886 - DNA, 15 bp, Homo sapiens
agcccacagacagac

SEQ ID NO: 155887 - DNA, 15 bp, Homo sapiens
cagcccacagacaga

SEQ ID NO: 155888 - DNA, 15 bp, Homo sapiens
ccagcccacagacag

SEQ ID NO: 155889 - DNA, 15 bp, Homo sapiens
cccagcccacagaca

SEQ ID NO: 155890 - DNA, 15 bp, Homo sapiens
acccagcccacagac

SEQ ID NO: 155891 - DNA, 15 bp, Homo sapiens
cacccagcccacaga

SEQ ID NO: 155892 - DNA, 15 bp, Homo sapiens
acacccagcccacag

SEQ ID NO: 155893 - DNA, 15 bp, Homo sapiens
cacacccagcccaca

SEQ ID NO: 155894 - DNA, 15 bp, Homo sapiens
tcacacccagcccac

SEQ ID NO: 155895 - DNA, 15 bp, Homo sapiens
ttcacacccagccca

SEQ ID NO: 155896 - DNA, 15 bp, Homo sapiens
attcacacccagccc

SEQ ID NO: 155897 - DNA, 15 bp, Homo sapiens
gattcacacccagcc

SEQ ID NO: 155898 - DNA, 15 bp, Homo sapiens
tgattcacacccagc

SEQ ID NO: 155899 - DNA, 15 bp, Homo sapiens
ttgattcacacccag

SEQ ID NO: 155900 - DNA, 15 bp, Homo sapiens
cttgattcacaccca

SEQ ID NO: 155901 - DNA, 15 bp, Homo sapiens
ccttgattcacaccc

SEQ ID NO: 155902 - DNA, 15 bp, Homo sapiens
gccttgattcacacc

SEQ ID NO: 155903 - DNA, 15 bp, Homo sapiens
tgccttgattcacac

SEQ ID NO: 155904 - DNA, 15 bp, Homo sapiens
ctgccttgattcaca

SEQ ID NO: 155905 - DNA, 15 bp, Homo sapiens
actgccttgattcac

SEQ ID NO: 155906 - DNA, 15 bp, Homo sapiens
cactgccttgattca

SEQ ID NO: 155907 - DNA, 15 bp, Homo sapiens
ccactgccttgattc

SEQ ID NO: 155908 - DNA, 15 bp, Homo sapiens
cccactgccttgatt

SEQ ID NO: 155909 - DNA, 15 bp, Homo sapiens
tcccactgccttgat

SEQ ID NO: 155910 - DNA, 15 bp, Homo sapiens
atcccactgccttga

SEQ ID NO: 155911 - DNA, 15 bp, Homo sapiens
catcccactgccttg

SEQ ID NO: 155912 - DNA, 15 bp, Homo sapiens
ccatcccactgcctt

SEQ ID NO: 155913 - DNA, 15 bp, Homo sapiens
accatcccactgcct

SEQ ID NO: 155914 - DNA, 15 bp, Homo sapiens
caccatcccactgcc

SEQ ID NO: 155915 - DNA, 15 bp, Homo sapiens
acaccatcccactgc

SEQ ID NO: 155916 - DNA, 15 bp, Homo sapiens
cacaccatcccactg

SEQ ID NO: 155917 - DNA, 15 bp, Homo sapiens
ccacaccatcccact

SEQ ID NO: 155918 - DNA, 15 bp, Homo sapiens
cccacaccatcccac

SEQ ID NO: 155919 - DNA, 15 bp, Homo sapiens
ccccacaccatccca

SEQ ID NO: 155920 - DNA, 15 bp, Homo sapiens
tccccacaccatccc

SEQ ID NO: 155921 - DNA, 15 bp, Homo sapiens
gtccccacaccatcc

SEQ ID NO: 155922 - DNA, 15 bp, Homo sapiens
ggtccccacaccatc

SEQ ID NO: 155923 - DNA, 15 bp, Homo sapiens
aggtccccacaccat

SEQ ID NO: 155924 - DNA, 15 bp, Homo sapiens
gaggtccccacacca

SEQ ID NO: 155925 - DNA, 15 bp, Homo sapiens
ggaggtccccacacc

SEQ ID NO: 155926 - DNA, 15 bp, Homo sapiens
gggaggtccccacac

SEQ ID NO: 155927 - DNA, 15 bp, Homo sapiens
agggaggtccccaca

SEQ ID NO: 155928 - DNA, 15 bp, Homo sapiens
cagggaggtccccac

SEQ ID NO: 155929 - DNA, 15 bp, Homo sapiens
ccagggaggtcccca

SEQ ID NO: 155930 - DNA, 15 bp, Homo sapiens
gccagggaggtcccc

SEQ ID NO: 155931 - DNA, 15 bp, Homo sapiens
ggccagggaggtccc

SEQ ID NO: 155932 - DNA, 15 bp, Homo sapiens
gggccagggaggtcc

SEQ ID NO: 155933 - DNA, 15 bp, Homo sapiens
ggggccagggaggtc

SEQ ID NO: 155934 - DNA, 15 bp, Homo sapiens
tggggccagggaggt

SEQ ID NO: 155935 - DNA, 15 bp, Homo sapiens
ctggggccagggagg

SEQ ID NO: 155936 - DNA, 15 bp, Homo sapiens
gctggggccagggag

SEQ ID NO: 155937 - DNA, 15 bp, Homo sapiens
tgctggggccaggga

SEQ ID NO: 155938 - DNA, 15 bp, Homo sapiens
ctgctggggccaggg

SEQ ID NO: 155939 - DNA, 15 bp, Homo sapiens
gctgctggggccagg

SEQ ID NO: 155940 - DNA, 15 bp, Homo sapiens
ggctgctggggccag

SEQ ID NO: 155941 - DNA, 15 bp, Homo sapiens
tggctgctggggcca

SEQ ID NO: 155942 - DNA, 15 bp, Homo sapiens
ctggctgctggggcc

SEQ ID NO: 155943 - DNA, 15 bp, Homo sapiens
actggctgctggggc

SEQ ID NO: 155944 - DNA, 15 bp, Homo sapiens
cactggctgctgggg

SEQ ID NO: 155945 - DNA, 15 bp, Homo sapiens
tcactggctgctggg

SEQ ID NO: 155946 - DNA, 15 bp, Homo sapiens
ctcactggctgctgg

SEQ ID NO: 155947 - DNA, 15 bp, Homo sapiens
cctcactggctgctg

SEQ ID NO: 155948 - DNA, 15 bp, Homo sapiens
tcctcactggctgct

SEQ ID NO: 155949 - DNA, 15 bp, Homo sapiens
ctcctcactggctgc

SEQ ID NO: 155950 - DNA, 15 bp, Homo sapiens
gctcctcactggctg

SEQ ID NO: 155951 - DNA, 15 bp, Homo sapiens
ggctcctcactggct

SEQ ID NO: 155952 - DNA, 15 bp, Homo sapiens
aggctcctcactggc

SEQ ID NO: 155953 - DNA, 15 bp, Homo sapiens
caggctcctcactgg

SEQ ID NO: 155954 - DNA, 15 bp, Homo sapiens
ccaggctcctcactg

SEQ ID NO: 155955 - DNA, 15 bp, Homo sapiens
accaggctcctcact

SEQ ID NO: 155956 - DNA, 15 bp, Homo sapiens
gaccaggctcctcac

SEQ ID NO: 155957 - DNA, 15 bp, Homo sapiens
tgaccaggctcctca

SEQ ID NO: 155958 - DNA, 15 bp, Homo sapiens
ctgaccaggctcctc

SEQ ID NO: 155959 - DNA, 15 bp, Homo sapiens
actgaccaggctcct

SEQ ID NO: 155960 - DNA, 15 bp, Homo sapiens
gactgaccaggctcc

SEQ ID NO: 155961 - DNA, 15 bp, Homo sapiens
tgactgaccaggctc

SEQ ID NO: 155962 - DNA, 15 bp, Homo sapiens
ctgactgaccaggct

SEQ ID NO: 155963 - DNA, 15 bp, Homo sapiens
gctgactgaccaggc

SEQ ID NO: 155964 - DNA, 15 bp, Homo sapiens
tgctgactgaccagg

SEQ ID NO: 155965 - DNA, 15 bp, Homo sapiens
ctgctgactgaccag

SEQ ID NO: 155966 - DNA, 15 bp, Homo sapiens
tctgctgactgacca

SEQ ID NO: 155967 - DNA, 15 bp, Homo sapiens
ctctgctgactgacc

SEQ ID NO: 155968 - DNA, 15 bp, Homo sapiens
gctctgctgactgac

SEQ ID NO: 155969 - DNA, 15 bp, Homo sapiens
tgctctgctgactga

SEQ ID NO: 155970 - DNA, 15 bp, Homo sapiens
atgctctgctgactg

SEQ ID NO: 155971 - DNA, 15 bp, Homo sapiens
aatgctctgctgact

SEQ ID NO: 155972 - DNA, 15 bp, Homo sapiens
gaatgctctgctgac

SEQ ID NO: 155973 - DNA, 15 bp, Homo sapiens
tgaatgctctgctga

SEQ ID NO: 155974 - DNA, 15 bp, Homo sapiens
ctgaatgctctgctg

SEQ ID NO: 155975 - DNA, 15 bp, Homo sapiens
gctgaatgctctgct

SEQ ID NO: 155976 - DNA, 15 bp, Homo sapiens
tgctgaatgctctgc

SEQ ID NO: 155977 - DNA, 15 bp, Homo sapiens
ctgctgaatgctctg

SEQ ID NO: 155978 - DNA, 15 bp, Homo sapiens
actgctgaatgctct

SEQ ID NO: 155979 - DNA, 15 bp, Homo sapiens
tactgctgaatgctc

SEQ ID NO: 155980 - DNA, 15 bp, Homo sapiens
atactgctgaatgct

SEQ ID NO: 155981 - DNA, 15 bp, Homo sapiens
gatactgctgaatgc

SEQ ID NO: 155982 - DNA, 15 bp, Homo sapiens
ggatactgctgaatg

SEQ ID NO: 155983 - DNA, 15 bp, Homo sapiens
tggatactgctgaat

SEQ ID NO: 155984 - DNA, 15 bp, Homo sapiens
ctggatactgctgaa

SEQ ID NO: 155985 - DNA, 15 bp, Homo sapiens
actggatactgctga

SEQ ID NO: 155986 - DNA, 15 bp, Homo sapiens
aactggatactgctg

SEQ ID NO: 155987 - DNA, 15 bp, Homo sapiens
gaactggatactgct

SEQ ID NO: 155988 - DNA, 15 bp, Homo sapiens
ggaactggatactgc

SEQ ID NO: 155989 - DNA, 15 bp, Homo sapiens
tggaactggatactg

SEQ ID NO: 155990 - DNA, 15 bp, Homo sapiens
atggaactggatact

SEQ ID NO: 155991 - DNA, 15 bp, Homo sapiens
catggaactggatac

SEQ ID NO: 155992 - DNA, 15 bp, Homo sapiens
ccatggaactggata

SEQ ID NO: 155993 - DNA, 15 bp, Homo sapiens
tccatggaactggat

SEQ ID NO: 155994 - DNA, 15 bp, Homo sapiens
ctccatggaactgga

SEQ ID NO: 155995 - DNA, 15 bp, Homo sapiens
tctccatggaactgg

SEQ ID NO: 155996 - DNA, 15 bp, Homo sapiens
ctctccatggaactg

SEQ ID NO: 155997 - DNA, 15 bp, Homo sapiens
cctctccatggaact

SEQ ID NO: 155998 - DNA, 15 bp, Homo sapiens
gcctctccatggaac

SEQ ID NO: 155999 - DNA, 15 bp, Homo sapiens
ggcctctccatggaa

SEQ ID NO: 156000 - DNA, 15 bp, Homo sapiens
gggcctctccatgga

SEQ ID NO: 156001 - DNA, 15 bp, Homo sapiens
cgggcctctccatgg

SEQ ID NO: 156002 - DNA, 15 bp, Homo sapiens
acgggcctctccatg

SEQ ID NO: 156003 - DNA, 15 bp, Homo sapiens
cacgggcctctccat

SEQ ID NO: 156004 - DNA, 15 bp, Homo sapiens
acacgggcctctcca

SEQ ID NO: 156005 - DNA, 15 bp, Homo sapiens
cacacgggcctctcc

SEQ ID NO: 156006 - DNA, 15 bp, Homo sapiens
tcacacgggcctctc

SEQ ID NO: 156007 - DNA, 15 bp, Homo sapiens
ctcacacgggcctct

SEQ ID NO: 156008 - DNA, 15 bp, Homo sapiens
cctcacacgggcctc

SEQ ID NO: 156009 - DNA, 15 bp, Homo sapiens
ccctcacacgggcct

SEQ ID NO: 156010 - DNA, 15 bp, Homo sapiens
cccctcacacgggcc

SEQ ID NO: 156011 - DNA, 15 bp, Homo sapiens
tcccctcacacgggc

SEQ ID NO: 156012 - DNA, 15 bp, Homo sapiens
ctcccctcacacggg

SEQ ID NO: 156013 - DNA, 15 bp, Homo sapiens
actcccctcacacgg

SEQ ID NO: 156014 - DNA, 15 bp, Homo sapiens
gactcccctcacacg

SEQ ID NO: 156015 - DNA, 15 bp, Homo sapiens
cgactcccctcacac

SEQ ID NO: 156016 - DNA, 15 bp, Homo sapiens
ccgactcccctcaca

SEQ ID NO: 156017 - DNA, 15 bp, Homo sapiens
cccgactcccctcac

SEQ ID NO: 156018 - DNA, 15 bp, Homo sapiens
ccccgactcccctca

SEQ ID NO: 156019 - DNA, 15 bp, Homo sapiens
gccccgactcccctc

SEQ ID NO: 156020 - DNA, 15 bp, Homo sapiens
agccccgactcccct

SEQ ID NO: 156021 - DNA, 15 bp, Homo sapiens
cagccccgactcccc

SEQ ID NO: 156022 - DNA, 15 bp, Homo sapiens
ccagccccgactccc

SEQ ID NO: 156023 - DNA, 15 bp, Homo sapiens
accagccccgactcc

SEQ ID NO: 156024 - DNA, 15 bp, Homo sapiens
gaccagccccgactc

SEQ ID NO: 156025 - DNA, 15 bp, Homo sapiens
agaccagccccgact

SEQ ID NO: 156026 - DNA, 15 bp, Homo sapiens
aagaccagccccgac

SEQ ID NO: 156027 - DNA, 15 bp, Homo sapiens
gaagaccagccccga

SEQ ID NO: 156028 - DNA, 15 bp, Homo sapiens
tgaagaccagccccg

SEQ ID NO: 156029 - DNA, 15 bp, Homo sapiens
ctgaagaccagcccc

SEQ ID NO: 156030 - DNA, 15 bp, Homo sapiens
actgaagaccagccc

SEQ ID NO: 156031 - DNA, 15 bp, Homo sapiens
tactgaagaccagcc

SEQ ID NO: 156032 - DNA, 15 bp, Homo sapiens
ttactgaagaccagc

SEQ ID NO: 156033 - DNA, 15 bp, Homo sapiens
cttactgaagaccag

SEQ ID NO: 156034 - DNA, 15 bp, Homo sapiens
ccttactgaagacca

SEQ ID NO: 156035 - DNA, 15 bp, Homo sapiens
tccttactgaagacc

SEQ ID NO: 156036 - DNA, 15 bp, Homo sapiens
atccttactgaagac

SEQ ID NO: 156037 - DNA, 15 bp, Homo sapiens
catccttactgaaga

SEQ ID NO: 156038 - DNA, 15 bp, Homo sapiens
ccatccttactgaag

SEQ ID NO: 156039 - DNA, 15 bp, Homo sapiens
cccatccttactgaa

SEQ ID NO: 156040 - DNA, 15 bp, Homo sapiens
acccatccttactga

SEQ ID NO: 156041 - DNA, 15 bp, Homo sapiens
cacccatccttactg

SEQ ID NO: 156042 - DNA, 15 bp, Homo sapiens
ccacccatccttact

SEQ ID NO: 156043 - DNA, 15 bp, Homo sapiens
gccacccatccttac

SEQ ID NO: 156044 - DNA, 15 bp, Homo sapiens
ggccacccatcctta

SEQ ID NO: 156045 - DNA, 15 bp, Homo sapiens
tggccacccatcctt

SEQ ID NO: 156046 - DNA, 15 bp, Homo sapiens
ctggccacccatcct

SEQ ID NO: 156047 - DNA, 15 bp, Homo sapiens
cctggccacccatcc

SEQ ID NO: 156048 - DNA, 15 bp, Homo sapiens
ccctggccacccatc

SEQ ID NO: 156049 - DNA, 15 bp, Homo sapiens
gccctggccacccat

SEQ ID NO: 156050 - DNA, 15 bp, Homo sapiens
ggccctggccaccca

SEQ ID NO: 156051 - DNA, 15 bp, Homo sapiens
gggccctggccaccc

SEQ ID NO: 156052 - DNA, 15 bp, Homo sapiens
ggggccctggccacc

SEQ ID NO: 156053 - DNA, 15 bp, Homo sapiens
aggggccctggccac

SEQ ID NO: 156054 - DNA, 15 bp, Homo sapiens
taggggccctggcca

SEQ ID NO: 156055 - DNA, 15 bp, Homo sapiens
ctaggggccctggcc

SEQ ID NO: 156056 - DNA, 15 bp, Homo sapiens
tctaggggccctggc

SEQ ID NO: 156057 - DNA, 15 bp, Homo sapiens
ttctaggggccctgg

SEQ ID NO: 156058 - DNA, 15 bp, Homo sapiens
cttctaggggccctg

SEQ ID NO: 156059 - DNA, 15 bp, Homo sapiens
acttctaggggccct

SEQ ID NO: 156060 - DNA, 15 bp, Homo sapiens
tacttctaggggccc

SEQ ID NO: 156061 - DNA, 15 bp, Homo sapiens
ctacttctaggggcc

SEQ ID NO: 156062 - DNA, 15 bp, Homo sapiens
tctacttctaggggc

SEQ ID NO: 156063 - DNA, 15 bp, Homo sapiens
ttctacttctagggg

SEQ ID NO: 156064 - DNA, 15 bp, Homo sapiens
tttctacttctaggg

SEQ ID NO: 156065 - DNA, 15 bp, Homo sapiens
ttttctacttctagg

SEQ ID NO: 156066 - DNA, 15 bp, Homo sapiens
cttttctacttctag

SEQ ID NO: 156067 - DNA, 15 bp, Homo sapiens
ccttttctacttcta

SEQ ID NO: 156068 - DNA, 15 bp, Homo sapiens
tccttttctacttct

SEQ ID NO: 156069 - DNA, 15 bp, Homo sapiens
ctccttttctacttc

SEQ ID NO: 156070 - DNA, 15 bp, Homo sapiens
tctccttttctactt

SEQ ID NO: 156071 - DNA, 15 bp, Homo sapiens
gtctccttttctact

SEQ ID NO: 156072 - DNA, 15 bp, Homo sapiens
agtctccttttctac

SEQ ID NO: 156073 - DNA, 15 bp, Homo sapiens
gagtctccttttcta

SEQ ID NO: 156074 - DNA, 15 bp, Homo sapiens
ggagtctccttttct

SEQ ID NO: 156075 - DNA, 15 bp, Homo sapiens
cggagtctccttttc

SEQ ID NO: 156076 - DNA, 15 bp, Homo sapiens
ccggagtctcctttt

SEQ ID NO: 156077 - DNA, 15 bp, Homo sapiens
cccggagtctccttt

SEQ ID NO: 156078 - DNA, 15 bp, Homo sapiens
acccggagtctcctt

SEQ ID NO: 156079 - DNA, 15 bp, Homo sapiens
cacccggagtctcct

SEQ ID NO: 156080 - DNA, 15 bp, Homo sapiens
gcacccggagtctcc

SEQ ID NO: 156081 - DNA, 15 bp, Homo sapiens
agcacccggagtctc

SEQ ID NO: 156082 - DNA, 15 bp, Homo sapiens
cagcacccggagtct

SEQ ID NO: 156083 - DNA, 15 bp, Homo sapiens
ccagcacccggagtc

SEQ ID NO: 156084 - DNA, 15 bp, Homo sapiens
tccagcacccggagt

SEQ ID NO: 156085 - DNA, 15 bp, Homo sapiens
ctccagcacccggag

SEQ ID NO: 156086 - DNA, 15 bp, Homo sapiens
tctccagcacccgga

SEQ ID NO: 156087 - DNA, 15 bp, Homo sapiens
gtctccagcacccgg

SEQ ID NO: 156088 - DNA, 15 bp, Homo sapiens
tgtctccagcacccg

SEQ ID NO: 156089 - DNA, 15 bp, Homo sapiens
ctgtctccagcaccc

SEQ ID NO: 156090 - DNA, 15 bp, Homo sapiens
tctgtctccagcacc

SEQ ID NO: 156091 - DNA, 15 bp, Homo sapiens
ttctgtctccagcac

SEQ ID NO: 156092 - DNA, 15 bp, Homo sapiens
tttctgtctccagca

SEQ ID NO: 156093 - DNA, 15 bp, Homo sapiens
atttctgtctccagc

SEQ ID NO: 156094 - DNA, 15 bp, Homo sapiens
gatttctgtctccag

SEQ ID NO: 156095 - DNA, 15 bp, Homo sapiens
tgatttctgtctcca

SEQ ID NO: 156096 - DNA, 15 bp, Homo sapiens
ttgatttctgtctcc

SEQ ID NO: 156097 - DNA, 15 bp, Homo sapiens
cttgatttctgtctc

SEQ ID NO: 156098 - DNA, 15 bp, Homo sapiens
ccttgatttctgtct

SEQ ID NO: 156099 - DNA, 15 bp, Homo sapiens
tccttgatttctgtc

SEQ ID NO: 156100 - DNA, 15 bp, Homo sapiens
atccttgatttctgt

SEQ ID NO: 156101 - DNA, 15 bp, Homo sapiens
catccttgatttctg

SEQ ID NO: 156102 - DNA, 15 bp, Homo sapiens
acatccttgatttct

SEQ ID NO: 156103 - DNA, 15 bp, Homo sapiens
cacatccttgatttc

SEQ ID NO: 156104 - DNA, 15 bp, Homo sapiens
gcacatccttgattt

SEQ ID NO: 156105 - DNA, 15 bp, Homo sapiens
ggcacatccttgatt

SEQ ID NO: 156106 - DNA, 15 bp, Homo sapiens
aggcacatccttgat

SEQ ID NO: 156107 - DNA, 15 bp, Homo sapiens
gaggcacatccttga

SEQ ID NO: 156108 - DNA, 15 bp, Homo sapiens
ggaggcacatccttg

SEQ ID NO: 156109 - DNA, 15 bp, Homo sapiens
tggaggcacatcctt

SEQ ID NO: 156110 - DNA, 15 bp, Homo sapiens
atggaggcacatcct

SEQ ID NO: 156111 - DNA, 15 bp, Homo sapiens
catggaggcacatcc

SEQ ID NO: 156112 - DNA, 15 bp, Homo sapiens
acatggaggcacatc

SEQ ID NO: 156113 - DNA, 15 bp, Homo sapiens
cacatggaggcacat

SEQ ID NO: 156114 - DNA, 15 bp, Homo sapiens
ccacatggaggcaca

SEQ ID NO: 156115 - DNA, 15 bp, Homo sapiens
tccacatggaggcac

SEQ ID NO: 156116 - DNA, 15 bp, Homo sapiens
ctccacatggaggca

SEQ ID NO: 156117 - DNA, 15 bp, Homo sapiens
gctccacatggaggc

SEQ ID NO: 156118 - DNA, 15 bp, Homo sapiens
ggctccacatggagg

SEQ ID NO: 156119 - DNA, 15 bp, Homo sapiens
aggctccacatggag

SEQ ID NO: 156120 - DNA, 15 bp, Homo sapiens
gaggctccacatgga

SEQ ID NO: 156121 - DNA, 15 bp, Homo sapiens
tgaggctccacatgg

SEQ ID NO: 156122 - DNA, 15 bp, Homo sapiens
ctgaggctccacatg

SEQ ID NO: 156123 - DNA, 15 bp, Homo sapiens
cctgaggctccacat

SEQ ID NO: 156124 - DNA, 15 bp, Homo sapiens
tcctgaggctccaca

SEQ ID NO: 156125 - DNA, 15 bp, Homo sapiens
ttcctgaggctccac

SEQ ID NO: 156126 - DNA, 15 bp, Homo sapiens
attcctgaggctcca

SEQ ID NO: 156127 - DNA, 15 bp, Homo sapiens
tattcctgaggctcc

SEQ ID NO: 156128 - DNA, 15 bp, Homo sapiens
ctattcctgaggctc

SEQ ID NO: 156129 - DNA, 15 bp, Homo sapiens
gctattcctgaggct

SEQ ID NO: 156130 - DNA, 15 bp, Homo sapiens
agctattcctgaggc

SEQ ID NO: 156131 - DNA, 15 bp, Homo sapiens
cagctattcctgagg

SEQ ID NO: 156132 - DNA, 15 bp, Homo sapiens
ccagctattcctgag

SEQ ID NO: 156133 - DNA, 15 bp, Homo sapiens
gccagctattcctga

SEQ ID NO: 156134 - DNA, 15 bp, Homo sapiens
ggccagctattcctg

SEQ ID NO: 156135 - DNA, 15 bp, Homo sapiens
tggccagctattcct

SEQ ID NO: 156136 - DNA, 15 bp, Homo sapiens
ctggccagctattcc

SEQ ID NO: 156137 - DNA, 15 bp, Homo sapiens
cctggccagctattc

SEQ ID NO: 156138 - DNA, 15 bp, Homo sapiens
gcctggccagctatt

SEQ ID NO: 156139 - DNA, 15 bp, Homo sapiens
ggcctggccagctat

SEQ ID NO: 156140 - DNA, 15 bp, Homo sapiens
aggcctggccagcta

SEQ ID NO: 156141 - DNA, 15 bp, Homo sapiens
caggcctggccagct

SEQ ID NO: 156142 - DNA, 15 bp, Homo sapiens
tcaggcctggccagc

SEQ ID NO: 156143 - DNA, 15 bp, Homo sapiens
ctcaggcctggccag

SEQ ID NO: 156144 - DNA, 15 bp, Homo sapiens
cctcaggcctggcca

SEQ ID NO: 156145 - DNA, 15 bp, Homo sapiens
gcctcaggcctggcc

SEQ ID NO: 156146 - DNA, 15 bp, Homo sapiens
agcctcaggcctggc

SEQ ID NO: 156147 - DNA, 15 bp, Homo sapiens
cagcctcaggcctgg

SEQ ID NO: 156148 - DNA, 15 bp, Homo sapiens
tcagcctcaggcctg

SEQ ID NO: 156149 - DNA, 15 bp, Homo sapiens
ttcagcctcaggcct

SEQ ID NO: 156150 - DNA, 15 bp, Homo sapiens
gttcagcctcaggcc

SEQ ID NO: 156151 - DNA, 15 bp, Homo sapiens
ggttcagcctcaggc

SEQ ID NO: 156152 - DNA, 15 bp, Homo sapiens
aggttcagcctcagg

SEQ ID NO: 156153 - DNA, 15 bp, Homo sapiens
gaggttcagcctcag

SEQ ID NO: 156154 - DNA, 15 bp, Homo sapiens
tgaggttcagcctca

SEQ ID NO: 156155 - DNA, 15 bp, Homo sapiens
gtgaggttcagcctc

SEQ ID NO: 156156 - DNA, 15 bp, Homo sapiens
tgtgaggttcagcct

SEQ ID NO: 156157 - DNA, 15 bp, Homo sapiens
ttgtgaggttcagcc

SEQ ID NO: 156158 - DNA, 15 bp, Homo sapiens
cttgtgaggttcagc

SEQ ID NO: 156159 - DNA, 15 bp, Homo sapiens
ccttgtgaggttcag

SEQ ID NO: 156160 - DNA, 15 bp, Homo sapiens
accttgtgaggttca

SEQ ID NO: 156161 - DNA, 15 bp, Homo sapiens
aaccttgtgaggttc

SEQ ID NO: 156162 - DNA, 15 bp, Homo sapiens
gaaccttgtgaggtt

SEQ ID NO: 156163 - DNA, 15 bp, Homo sapiens
tgaaccttgtgaggt

SEQ ID NO: 156164 - DNA, 15 bp, Homo sapiens
ctgaaccttgtgagg

SEQ ID NO: 156165 - DNA, 15 bp, Homo sapiens
gctgaaccttgtgag

SEQ ID NO: 156166 - DNA, 15 bp, Homo sapiens
agctgaaccttgtga

SEQ ID NO: 156167 - DNA, 15 bp, Homo sapiens
cagctgaaccttgtg

SEQ ID NO: 156168 - DNA, 15 bp, Homo sapiens
ccagctgaaccttgt

SEQ ID NO: 156169 - DNA, 15 bp, Homo sapiens
cccagctgaaccttg

SEQ ID NO: 156170 - DNA, 15 bp, Homo sapiens
tcccagctgaacctt

SEQ ID NO: 156171 - DNA, 15 bp, Homo sapiens
ctcccagctgaacct

SEQ ID NO: 156172 - DNA, 15 bp, Homo sapiens
cctcccagctgaacc

SEQ ID NO: 156173 - DNA, 15 bp, Homo sapiens
ccctcccagctgaac

SEQ ID NO: 156174 - DNA, 15 bp, Homo sapiens
gccctcccagctgaa

SEQ ID NO: 156175 - DNA, 15 bp, Homo sapiens
agccctcccagctga

SEQ ID NO: 156176 - DNA, 15 bp, Homo sapiens
tagccctcccagctg

SEQ ID NO: 156177 - DNA, 15 bp, Homo sapiens
ctagccctcccagct

SEQ ID NO: 156178 - DNA, 15 bp, Homo sapiens
cctagccctcccagc

SEQ ID NO: 156179 - DNA, 15 bp, Homo sapiens
gcctagccctcccag

SEQ ID NO: 156180 - DNA, 15 bp, Homo sapiens
agcctagccctccca

SEQ ID NO: 156181 - DNA, 15 bp, Homo sapiens
cagcctagccctccc

SEQ ID NO: 156182 - DNA, 15 bp, Homo sapiens
tcagcctagccctcc

SEQ ID NO: 156183 - DNA, 15 bp, Homo sapiens
gtcagcctagccctc

SEQ ID NO: 156184 - DNA, 15 bp, Homo sapiens
tgtcagcctagccct

SEQ ID NO: 156185 - DNA, 15 bp, Homo sapiens
ctgtcagcctagccc

SEQ ID NO: 156186 - DNA, 15 bp, Homo sapiens
tctgtcagcctagcc

SEQ ID NO: 156187 - DNA, 15 bp, Homo sapiens
ctctgtcagcctagc

SEQ ID NO: 156188 - DNA, 15 bp, Homo sapiens
gctctgtcagcctag

SEQ ID NO: 156189 - DNA, 15 bp, Homo sapiens
tgctctgtcagccta

SEQ ID NO: 156190 - DNA, 15 bp, Homo sapiens
gtgctctgtcagcct

SEQ ID NO: 156191 - DNA, 15 bp, Homo sapiens
tgtgctctgtcagcc

SEQ ID NO: 156192 - DNA, 15 bp, Homo sapiens
ctgtgctctgtcagc

SEQ ID NO: 156193 - DNA, 15 bp, Homo sapiens
gctgtgctctgtcag

SEQ ID NO: 156194 - DNA, 15 bp, Homo sapiens
ggctgtgctctgtca

SEQ ID NO: 156195 - DNA, 15 bp, Homo sapiens
cggctgtgctctgtc

SEQ ID NO: 156196 - DNA, 15 bp, Homo sapiens
ccggctgtgctctgt

SEQ ID NO: 156197 - DNA, 15 bp, Homo sapiens
cccggctgtgctctg

SEQ ID NO: 156198 - DNA, 15 bp, Homo sapiens
gcccggctgtgctct

SEQ ID NO: 156199 - DNA, 15 bp, Homo sapiens
ggcccggctgtgctc

SEQ ID NO: 156200 - DNA, 15 bp, Homo sapiens
tggcccggctgtgct

SEQ ID NO: 156201 - DNA, 15 bp, Homo sapiens
ctggcccggctgtgc

SEQ ID NO: 156202 - DNA, 15 bp, Homo sapiens
cctggcccggctgtg

SEQ ID NO: 156203 - DNA, 15 bp, Homo sapiens
ccctggcccggctgt

SEQ ID NO: 156204 - DNA, 15 bp, Homo sapiens
tccctggcccggctg

SEQ ID NO: 156205 - DNA, 15 bp, Homo sapiens
gtccctggcccggct

SEQ ID NO: 156206 - DNA, 15 bp, Homo sapiens
ggtccctggcccggc

SEQ ID NO: 156207 - DNA, 15 bp, Homo sapiens
tggtccctggcccgg

SEQ ID NO: 156208 - DNA, 15 bp, Homo sapiens
ctggtccctggcccg

SEQ ID NO: 156209 - DNA, 15 bp, Homo sapiens
gctggtccctggccc

SEQ ID NO: 156210 - DNA, 15 bp, Homo sapiens
ggctggtccctggcc

SEQ ID NO: 156211 - DNA, 15 bp, Homo sapiens
aggctggtccctggc

SEQ ID NO: 156212 - DNA, 15 bp, Homo sapiens
caggctggtccctgg

SEQ ID NO: 156213 - DNA, 15 bp, Homo sapiens
gcaggctggtccctg

SEQ ID NO: 156214 - DNA, 15 bp, Homo sapiens
ggcaggctggtccct

SEQ ID NO: 156215 - DNA, 15 bp, Homo sapiens
gggcaggctggtccc

SEQ ID NO: 156216 - DNA, 15 bp, Homo sapiens
agggcaggctggtcc

SEQ ID NO: 156217 - DNA, 15 bp, Homo sapiens
cagggcaggctggtc

SEQ ID NO: 156218 - DNA, 15 bp, Homo sapiens
acagggcaggctggt

SEQ ID NO: 156219 - DNA, 15 bp, Homo sapiens
cacagggcaggctgg

SEQ ID NO: 156220 - DNA, 15 bp, Homo sapiens
acacagggcaggctg

SEQ ID NO: 156221 - DNA, 15 bp, Homo sapiens
aacacagggcaggct

SEQ ID NO: 156222 - DNA, 15 bp, Homo sapiens
caacacagggcaggc

SEQ ID NO: 156223 - DNA, 15 bp, Homo sapiens
gcaacacagggcagg

SEQ ID NO: 156224 - DNA, 15 bp, Homo sapiens
ggcaacacagggcag

SEQ ID NO: 156225 - DNA, 15 bp, Homo sapiens
aggcaacacagggca

SEQ ID NO: 156226 - DNA, 15 bp, Homo sapiens
aaggcaacacagggc

SEQ ID NO: 156227 - DNA, 15 bp, Homo sapiens
caaggcaacacaggg

SEQ ID NO: 156228 - DNA, 15 bp, Homo sapiens
acaaggcaacacagg

SEQ ID NO: 156229 - DNA, 15 bp, Homo sapiens
gacaaggcaacacag

SEQ ID NO: 156230 - DNA, 15 bp, Homo sapiens
ggacaaggcaacaca

SEQ ID NO: 156231 - DNA, 15 bp, Homo sapiens
gggacaaggcaacac

SEQ ID NO: 156232 - DNA, 15 bp, Homo sapiens
cgggacaaggcaaca

SEQ ID NO: 156233 - DNA, 15 bp, Homo sapiens
tcgggacaaggcaac

SEQ ID NO: 156234 - DNA, 15 bp, Homo sapiens
ctcgggacaaggcaa

SEQ ID NO: 156235 - DNA, 15 bp, Homo sapiens
cctcgggacaaggca

SEQ ID NO: 156236 - DNA, 15 bp, Homo sapiens
ccctcgggacaaggc

SEQ ID NO: 156237 - DNA, 15 bp, Homo sapiens
gccctcgggacaagg

SEQ ID NO: 156238 - DNA, 15 bp, Homo sapiens
ggccctcgggacaag

SEQ ID NO: 156239 - DNA, 15 bp, Homo sapiens
tggccctcgggacaa

SEQ ID NO: 156240 - DNA, 15 bp, Homo sapiens
gtggccctcgggaca

SEQ ID NO: 156241 - DNA, 15 bp, Homo sapiens
agtggccctcgggac

SEQ ID NO: 156242 - DNA, 15 bp, Homo sapiens
cagtggccctcggga

SEQ ID NO: 156243 - DNA, 15 bp, Homo sapiens
acagtggccctcggg

SEQ ID NO: 156244 - DNA, 15 bp, Homo sapiens
gacagtggccctcgg

SEQ ID NO: 156245 - DNA, 15 bp, Homo sapiens
tgacagtggccctcg

SEQ ID NO: 156246 - DNA, 15 bp, Homo sapiens
ctgacagtggccctc

SEQ ID NO: 156247 - DNA, 15 bp, Homo sapiens
gctgacagtggccct

SEQ ID NO: 156248 - DNA, 15 bp, Homo sapiens
tgctgacagtggccc

SEQ ID NO: 156249 - DNA, 15 bp, Homo sapiens
ctgctgacagtggcc

SEQ ID NO: 156250 - DNA, 15 bp, Homo sapiens
cctgctgacagtggc

SEQ ID NO: 156251 - DNA, 15 bp, Homo sapiens
acctgctgacagtgg

SEQ ID NO: 156252 - DNA, 15 bp, Homo sapiens
gacctgctgacagtg

SEQ ID NO: 156253 - DNA, 15 bp, Homo sapiens
agacctgctgacagt

SEQ ID NO: 156254 - DNA, 15 bp, Homo sapiens
gagacctgctgacag

SEQ ID NO: 156255 - DNA, 15 bp, Homo sapiens
agagacctgctgaca

SEQ ID NO: 156256 - DNA, 15 bp, Homo sapiens
cagagacctgctgac

SEQ ID NO: 156257 - DNA, 15 bp, Homo sapiens
ccagagacctgctga

SEQ ID NO: 156258 - DNA, 15 bp, Homo sapiens
gccagagacctgctg

SEQ ID NO: 156259 - DNA, 15 bp, Homo sapiens
tgccagagacctgct

SEQ ID NO: 156260 - DNA, 15 bp, Homo sapiens
atgccagagacctgc

SEQ ID NO: 156261 - DNA, 15 bp, Homo sapiens
catgccagagacctg

SEQ ID NO: 156262 - DNA, 15 bp, Homo sapiens
ccatgccagagacct

SEQ ID NO: 156263 - DNA, 15 bp, Homo sapiens
cccatgccagagacc

SEQ ID NO: 156264 - DNA, 15 bp, Homo sapiens
ccccatgccagagac

SEQ ID NO: 156265 - DNA, 15 bp, Homo sapiens
cccccatgccagaga

SEQ ID NO: 156266 - DNA, 15 bp, Homo sapiens
tcccccatgccagag

SEQ ID NO: 156267 - DNA, 15 bp, Homo sapiens
ctcccccatgccaga

SEQ ID NO: 156268 - DNA, 15 bp, Homo sapiens
cctcccccatgccag

SEQ ID NO: 156269 - DNA, 15 bp, Homo sapiens
gcctcccccatgcca

SEQ ID NO: 156270 - DNA, 15 bp, Homo sapiens
agcctcccccatgcc

SEQ ID NO: 156271 - DNA, 15 bp, Homo sapiens
aagcctcccccatgc

SEQ ID NO: 156272 - DNA, 15 bp, Homo sapiens
taagcctcccccatg

SEQ ID NO: 156273 - DNA, 15 bp, Homo sapiens
ctaagcctcccccat

SEQ ID NO: 156274 - DNA, 15 bp, Homo sapiens
cctaagcctccccca

SEQ ID NO: 156275 - DNA, 15 bp, Homo sapiens
ccctaagcctccccc

SEQ ID NO: 156276 - DNA, 15 bp, Homo sapiens
gccctaagcctcccc

SEQ ID NO: 156277 - DNA, 15 bp, Homo sapiens
ggccctaagcctccc

SEQ ID NO: 156278 - DNA, 15 bp, Homo sapiens
aggccctaagcctcc

SEQ ID NO: 156279 - DNA, 15 bp, Homo sapiens
caggccctaagcctc

SEQ ID NO: 156280 - DNA, 15 bp, Homo sapiens
tcaggccctaagcct

SEQ ID NO: 156281 - DNA, 15 bp, Homo sapiens
ctcaggccctaagcc

SEQ ID NO: 156282 - DNA, 15 bp, Homo sapiens
gctcaggccctaagc

SEQ ID NO: 156283 - DNA, 15 bp, Homo sapiens
ggctcaggccctaag

SEQ ID NO: 156284 - DNA, 15 bp, Homo sapiens
gggctcaggccctaa

SEQ ID NO: 156285 - DNA, 15 bp, Homo sapiens
tgggctcaggcccta

SEQ ID NO: 156286 - DNA, 15 bp, Homo sapiens
ttgggctcaggccct

SEQ ID NO: 156287 - DNA, 15 bp, Homo sapiens
gttgggctcaggccc

SEQ ID NO: 156288 - DNA, 15 bp, Homo sapiens
tgttgggctcaggcc

SEQ ID NO: 156289 - DNA, 15 bp, Homo sapiens
ttgttgggctcaggc

SEQ ID NO: 156290 - DNA, 15 bp, Homo sapiens
cttgttgggctcagg

SEQ ID NO: 156291 - DNA, 15 bp, Homo sapiens
gcttgttgggctcag

SEQ ID NO: 156292 - DNA, 15 bp, Homo sapiens
tgcttgttgggctca

SEQ ID NO: 156293 - DNA, 15 bp, Homo sapiens
ctgcttgttgggctc

SEQ ID NO: 156294 - DNA, 15 bp, Homo sapiens
gctgcttgttgggct

SEQ ID NO: 156295 - DNA, 15 bp, Homo sapiens
tgctgcttgttgggc

SEQ ID NO: 156296 - DNA, 15 bp, Homo sapiens
ctgctgcttgttggg

SEQ ID NO: 156297 - DNA, 15 bp, Homo sapiens
gctgctgcttgttgg

SEQ ID NO: 156298 - DNA, 15 bp, Homo sapiens
cgctgctgcttgttg

SEQ ID NO: 156299 - DNA, 15 bp, Homo sapiens
ccgctgctgcttgtt

SEQ ID NO: 156300 - DNA, 15 bp, Homo sapiens
tccgctgctgcttgt

SEQ ID NO: 156301 - DNA, 15 bp, Homo sapiens
ttccgctgctgcttg

SEQ ID NO: 156302 - DNA, 15 bp, Homo sapiens
cttccgctgctgctt

SEQ ID NO: 156303 - DNA, 15 bp, Homo sapiens
tcttccgctgctgct

SEQ ID NO: 156304 - DNA, 15 bp, Homo sapiens
ctcttccgctgctgc

SEQ ID NO: 156305 - DNA, 15 bp, Homo sapiens
cctcttccgctgctg

SEQ ID NO: 156306 - DNA, 15 bp, Homo sapiens
tcctcttccgctgct

SEQ ID NO: 156307 - DNA, 15 bp, Homo sapiens
ctcctcttccgctgc

SEQ ID NO: 156308 - DNA, 15 bp, Homo sapiens
tctcctcttccgctg

SEQ ID NO: 156309 - DNA, 15 bp, Homo sapiens
ctctcctcttccgct

SEQ ID NO: 156310 - DNA, 15 bp, Homo sapiens
cctctcctcttccgc

SEQ ID NO: 156311 - DNA, 15 bp, Homo sapiens
ccctctcctcttccg

SEQ ID NO: 156312 - DNA, 15 bp, Homo sapiens
tccctctcctcttcc

SEQ ID NO: 156313 - DNA, 15 bp, Homo sapiens
ttccctctcctcttc

SEQ ID NO: 156314 - DNA, 15 bp, Homo sapiens
tttccctctcctctt

SEQ ID NO: 156315 - DNA, 15 bp, Homo sapiens
gtttccctctcctct

SEQ ID NO: 156316 - DNA, 15 bp, Homo sapiens
agtttccctctcctc

SEQ ID NO: 156317 - DNA, 15 bp, Homo sapiens
cagtttccctctcct

SEQ ID NO: 156318 - DNA, 15 bp, Homo sapiens
acagtttccctctcc

SEQ ID NO: 156319 - DNA, 15 bp, Homo sapiens
cacagtttccctctc

SEQ ID NO: 156320 - DNA, 15 bp, Homo sapiens
ccacagtttccctct

SEQ ID NO: 156321 - DNA, 15 bp, Homo sapiens
tccacagtttccctc

SEQ ID NO: 156322 - DNA, 15 bp, Homo sapiens
gtccacagtttccct

SEQ ID NO: 156323 - DNA, 15 bp, Homo sapiens
tgtccacagtttccc

SEQ ID NO: 156324 - DNA, 15 bp, Homo sapiens
ctgtccacagtttcc

SEQ ID NO: 156325 - DNA, 15 bp, Homo sapiens
cctgtccacagtttc

SEQ ID NO: 156326 - DNA, 15 bp, Homo sapiens
gcctgtccacagttt

SEQ ID NO: 156327 - DNA, 15 bp, Homo sapiens
ggcctgtccacagtt

SEQ ID NO: 156328 - DNA, 15 bp, Homo sapiens
aggcctgtccacagt

SEQ ID NO: 156329 - DNA, 15 bp, Homo sapiens
caggcctgtccacag

SEQ ID NO: 156330 - DNA, 15 bp, Homo sapiens
ccaggcctgtccaca

SEQ ID NO: 156331 - DNA, 15 bp, Homo sapiens
gccaggcctgtccac

SEQ ID NO: 156332 - DNA, 15 bp, Homo sapiens
tgccaggcctgtcca

SEQ ID NO: 156333 - DNA, 15 bp, Homo sapiens
atgccaggcctgtcc

SEQ ID NO: 156334 - DNA, 15 bp, Homo sapiens
aatgccaggcctgtc

SEQ ID NO: 156335 - DNA, 15 bp, Homo sapiens
gaatgccaggcctgt

SEQ ID NO: 156336 - DNA, 15 bp, Homo sapiens
tgaatgccaggcctg

SEQ ID NO: 156337 - DNA, 15 bp, Homo sapiens
ctgaatgccaggcct

SEQ ID NO: 156338 - DNA, 15 bp, Homo sapiens
actgaatgccaggcc

SEQ ID NO: 156339 - DNA, 15 bp, Homo sapiens
cactgaatgccaggc

SEQ ID NO: 156340 - DNA, 15 bp, Homo sapiens
ccactgaatgccagg

SEQ ID NO: 156341 - DNA, 15 bp, Homo sapiens
gccactgaatgccag

SEQ ID NO: 156342 - DNA, 15 bp, Homo sapiens
ggccactgaatgcca

SEQ ID NO: 156343 - DNA, 15 bp, Homo sapiens
tggccactgaatgcc

SEQ ID NO: 156344 - DNA, 15 bp, Homo sapiens
ctggccactgaatgc

SEQ ID NO: 156345 - DNA, 15 bp, Homo sapiens
cctggccactgaatg

SEQ ID NO: 156346 - DNA, 15 bp, Homo sapiens
acctggccactgaat

SEQ ID NO: 156347 - DNA, 15 bp, Homo sapiens
cacctggccactgaa

SEQ ID NO: 156348 - DNA, 15 bp, Homo sapiens
acacctggccactga

SEQ ID NO: 156349 - DNA, 15 bp, Homo sapiens
aacacctggccactg

SEQ ID NO: 156350 - DNA, 15 bp, Homo sapiens
caacacctggccact

SEQ ID NO: 156351 - DNA, 15 bp, Homo sapiens
gcaacacctggccac

SEQ ID NO: 156352 - DNA, 15 bp, Homo sapiens
tgcaacacctggcca

SEQ ID NO: 156353 - DNA, 15 bp, Homo sapiens
ctgcaacacctggcc

SEQ ID NO: 156354 - DNA, 15 bp, Homo sapiens
actgcaacacctggc

SEQ ID NO: 156355 - DNA, 15 bp, Homo sapiens
cactgcaacacctgg

SEQ ID NO: 156356 - DNA, 15 bp, Homo sapiens
acactgcaacacctg

SEQ ID NO: 156357 - DNA, 15 bp, Homo sapiens
gacactgcaacacct

SEQ ID NO: 156358 - DNA, 15 bp, Homo sapiens
ggacactgcaacacc

SEQ ID NO: 156359 - DNA, 15 bp, Homo sapiens
gggacactgcaacac

SEQ ID NO: 156360 - DNA, 15 bp, Homo sapiens
agggacactgcaaca

SEQ ID NO: 156361 - DNA, 15 bp, Homo sapiens
cagggacactgcaac

SEQ ID NO: 156362 - DNA, 15 bp, Homo sapiens
tcagggacactgcaa

SEQ ID NO: 156363 - DNA, 15 bp, Homo sapiens
ctcagggacactgca

SEQ ID NO: 156364 - DNA, 15 bp, Homo sapiens
cctcagggacactgc

SEQ ID NO: 156365 - DNA, 15 bp, Homo sapiens
tcctcagggacactg

SEQ ID NO: 156366 - DNA, 15 bp, Homo sapiens
ttcctcagggacact

SEQ ID NO: 156367 - DNA, 15 bp, Homo sapiens
attcctcagggacac

SEQ ID NO: 156368 - DNA, 15 bp, Homo sapiens
tattcctcagggaca

SEQ ID NO: 156369 - DNA, 15 bp, Homo sapiens
ctattcctcagggac

SEQ ID NO: 156370 - DNA, 15 bp, Homo sapiens
gctattcctcaggga

SEQ ID NO: 156371 - DNA, 15 bp, Homo sapiens
agctattcctcaggg

SEQ ID NO: 156372 - DNA, 15 bp, Homo sapiens
aagctattcctcagg

SEQ ID NO: 156373 - DNA, 15 bp, Homo sapiens
caagctattcctcag

SEQ ID NO: 156374 - DNA, 15 bp, Homo sapiens
ccaagctattcctca

SEQ ID NO: 156375 - DNA, 15 bp, Homo sapiens
gccaagctattcctc

SEQ ID NO: 156376 - DNA, 15 bp, Homo sapiens
agccaagctattcct

SEQ ID NO: 156377 - DNA, 15 bp, Homo sapiens
aagccaagctattcc

SEQ ID NO: 156378 - DNA, 15 bp, Homo sapiens
caagccaagctattc

SEQ ID NO: 156379 - DNA, 15 bp, Homo sapiens
tcaagccaagctatt

SEQ ID NO: 156380 - DNA, 15 bp, Homo sapiens
ctcaagccaagctat

SEQ ID NO: 156381 - DNA, 15 bp, Homo sapiens
cctcaagccaagcta

SEQ ID NO: 156382 - DNA, 15 bp, Homo sapiens
gcctcaagccaagct

SEQ ID NO: 156383 - DNA, 15 bp, Homo sapiens
ggcctcaagccaagc

SEQ ID NO: 156384 - DNA, 15 bp, Homo sapiens
cggcctcaagccaag

SEQ ID NO: 156385 - DNA, 15 bp, Homo sapiens
acggcctcaagccaa

SEQ ID NO: 156386 - DNA, 15 bp, Homo sapiens
cacggcctcaagcca

SEQ ID NO: 156387 - DNA, 15 bp, Homo sapiens
ccacggcctcaagcc

SEQ ID NO: 156388 - DNA, 15 bp, Homo sapiens
cccacggcctcaagc

SEQ ID NO: 156389 - DNA, 15 bp, Homo sapiens
ccccacggcctcaag

SEQ ID NO: 156390 - DNA, 15 bp, Homo sapiens
tccccacggcctcaa

SEQ ID NO: 156391 - DNA, 15 bp, Homo sapiens
ctccccacggcctca

SEQ ID NO: 156392 - DNA, 15 bp, Homo sapiens
cctccccacggcctc

SEQ ID NO: 156393 - DNA, 15 bp, Homo sapiens
ccctccccacggcct

SEQ ID NO: 156394 - DNA, 15 bp, Homo sapiens
gccctccccacggcc

SEQ ID NO: 156395 - DNA, 15 bp, Homo sapiens
agccctccccacggc

SEQ ID NO: 156396 - DNA, 15 bp, Homo sapiens
cagccctccccacgg

SEQ ID NO: 156397 - DNA, 15 bp, Homo sapiens
gcagccctccccacg

SEQ ID NO: 156398 - DNA, 15 bp, Homo sapiens
ggcagccctccccac

SEQ ID NO: 156399 - DNA, 15 bp, Homo sapiens
cggcagccctcccca

SEQ ID NO: 156400 - DNA, 15 bp, Homo sapiens
ccggcagccctcccc

SEQ ID NO: 156401 - DNA, 15 bp, Homo sapiens
gccggcagccctccc

SEQ ID NO: 156402 - DNA, 15 bp, Homo sapiens
ggccggcagccctcc

SEQ ID NO: 156403 - DNA, 15 bp, Homo sapiens
tggccggcagccctc

SEQ ID NO: 156404 - DNA, 15 bp, Homo sapiens
ctggccggcagccct

SEQ ID NO: 156405 - DNA, 15 bp, Homo sapiens
gctggccggcagccc

SEQ ID NO: 156406 - DNA, 15 bp, Homo sapiens
cgctggccggcagcc

SEQ ID NO: 156407 - DNA, 15 bp, Homo sapiens
gcgctggccggcagc

SEQ ID NO: 156408 - DNA, 15 bp, Homo sapiens
tgcgctggccggcag

SEQ ID NO: 156409 - DNA, 15 bp, Homo sapiens
gtgcgctggccggca

SEQ ID NO: 156410 - DNA, 15 bp, Homo sapiens
ggtgcgctggccggc

SEQ ID NO: 156411 - DNA, 15 bp, Homo sapiens
gggtgcgctggccgg

SEQ ID NO: 156412 - DNA, 15 bp, Homo sapiens
ggggtgcgctggccg

SEQ ID NO: 156413 - DNA, 15 bp, Homo sapiens
gggggtgcgctggcc

SEQ ID NO: 156414 - DNA, 15 bp, Homo sapiens
ggggggtgcgctggc

SEQ ID NO: 156415 - DNA, 15 bp, Homo sapiens
gggggggtgcgctgg

SEQ ID NO: 156416 - DNA, 15 bp, Homo sapiens
tgggggggtgcgctg

SEQ ID NO: 156417 - DNA, 15 bp, Homo sapiens
atgggggggtgcgct

SEQ ID NO: 156418 - DNA, 15 bp, Homo sapiens
catgggggggtgcgc

SEQ ID NO: 156419 - DNA, 15 bp, Homo sapiens
gcatgggggggtgcg

SEQ ID NO: 156420 - DNA, 15 bp, Homo sapiens
ggcatgggggggtgc

SEQ ID NO: 156421 - DNA, 15 bp, Homo sapiens
tggcatgggggggtg

SEQ ID NO: 156422 - DNA, 15 bp, Homo sapiens
ctggcatgggggggt

SEQ ID NO: 156423 - DNA, 15 bp, Homo sapiens
tctggcatggggggg

SEQ ID NO: 156424 - DNA, 15 bp, Homo sapiens
atctggcatgggggg

SEQ ID NO: 156425 - DNA, 15 bp, Homo sapiens
catctggcatggggg

SEQ ID NO: 156426 - DNA, 15 bp, Homo sapiens
ccatctggcatgggg

SEQ ID NO: 156427 - DNA, 15 bp, Homo sapiens
accatctggcatggg

SEQ ID NO: 156428 - DNA, 15 bp, Homo sapiens
gaccatctggcatgg

SEQ ID NO: 156429 - DNA, 15 bp, Homo sapiens
tgaccatctggcatg

SEQ ID NO: 156430 - DNA, 15 bp, Homo sapiens
gtgaccatctggcat

SEQ ID NO: 156431 - DNA, 15 bp, Homo sapiens
ggtgaccatctggca

SEQ ID NO: 156432 - DNA, 15 bp, Homo sapiens
tggtgaccatctggc

SEQ ID NO: 156433 - DNA, 15 bp, Homo sapiens
atggtgaccatctgg

SEQ ID NO: 156434 - DNA, 15 bp, Homo sapiens
catggtgaccatctg

SEQ ID NO: 156435 - DNA, 15 bp, Homo sapiens
ccatggtgaccatct

SEQ ID NO: 156436 - DNA, 15 bp, Homo sapiens
gccatggtgaccatc

SEQ ID NO: 156437 - DNA, 15 bp, Homo sapiens
cgccatggtgaccat

SEQ ID NO: 156438 - DNA, 15 bp, Homo sapiens
acgccatggtgacca

SEQ ID NO: 156439 - DNA, 15 bp, Homo sapiens
cacgccatggtgacc

SEQ ID NO: 156440 - DNA, 15 bp, Homo sapiens
gcacgccatggtgac

SEQ ID NO: 156441 - DNA, 15 bp, Homo sapiens
tgcacgccatggtga

SEQ ID NO: 156442 - DNA, 15 bp, Homo sapiens
atgcacgccatggtg

SEQ ID NO: 156443 - DNA, 15 bp, Homo sapiens
gatgcacgccatggt

SEQ ID NO: 156444 - DNA, 15 bp, Homo sapiens
agatgcacgccatgg

SEQ ID NO: 156445 - DNA, 15 bp, Homo sapiens
aagatgcacgccatg

SEQ ID NO: 156446 - DNA, 15 bp, Homo sapiens
gaagatgcacgccat

SEQ ID NO: 156447 - DNA, 15 bp, Homo sapiens
ggaagatgcacgcca

SEQ ID NO: 156448 - DNA, 15 bp, Homo sapiens
tggaagatgcacgcc

SEQ ID NO: 156449 - DNA, 15 bp, Homo sapiens
ctggaagatgcacgc

SEQ ID NO: 156450 - DNA, 15 bp, Homo sapiens
gctggaagatgcacg

SEQ ID NO: 156451 - DNA, 15 bp, Homo sapiens
agctggaagatgcac

SEQ ID NO: 156452 - DNA, 15 bp, Homo sapiens
gagctggaagatgca

SEQ ID NO: 156453 - DNA, 15 bp, Homo sapiens
agagctggaagatgc

SEQ ID NO: 156454 - DNA, 15 bp, Homo sapiens
aagagctggaagatg

SEQ ID NO: 156455 - DNA, 15 bp, Homo sapiens
gaagagctggaagat

SEQ ID NO: 156456 - DNA, 15 bp, Homo sapiens
cgaagagctggaaga

SEQ ID NO: 156457 - DNA, 15 bp, Homo sapiens
tcgaagagctggaag

SEQ ID NO: 156458 - DNA, 15 bp, Homo sapiens
gtcgaagagctggaa

SEQ ID NO: 156459 - DNA, 15 bp, Homo sapiens
agtcgaagagctgga

SEQ ID NO: 156460 - DNA, 15 bp, Homo sapiens
tagtcgaagagctgg

SEQ ID NO: 156461 - DNA, 15 bp, Homo sapiens
gtagtcgaagagctg

SEQ ID NO: 156462 - DNA, 15 bp, Homo sapiens
tgtagtcgaagagct

SEQ ID NO: 156463 - DNA, 15 bp, Homo sapiens
atgtagtcgaagagc

SEQ ID NO: 156464 - DNA, 15 bp, Homo sapiens
gatgtagtcgaagag

SEQ ID NO: 156465 - DNA, 15 bp, Homo sapiens
agatgtagtcgaaga

SEQ ID NO: 156466 - DNA, 15 bp, Homo sapiens
gagatgtagtcgaag

SEQ ID NO: 156467 - DNA, 15 bp, Homo sapiens
agagatgtagtcgaa

SEQ ID NO: 156468 - DNA, 15 bp, Homo sapiens
cagagatgtagtcga

SEQ ID NO: 156469 - DNA, 15 bp, Homo sapiens
tcagagatgtagtcg

SEQ ID NO: 156470 - DNA, 15 bp, Homo sapiens
ctcagagatgtagtc

SEQ ID NO: 156471 - DNA, 15 bp, Homo sapiens
actcagagatgtagt

SEQ ID NO: 156472 - DNA, 15 bp, Homo sapiens
cactcagagatgtag

SEQ ID NO: 156473 - DNA, 15 bp, Homo sapiens
gcactcagagatgta

SEQ ID NO: 156474 - DNA, 15 bp, Homo sapiens
tgcactcagagatgt

SEQ ID NO: 156475 - DNA, 15 bp, Homo sapiens
atgcactcagagatg

SEQ ID NO: 156476 - DNA, 15 bp, Homo sapiens
gatgcactcagagat

SEQ ID NO: 156477 - DNA, 15 bp, Homo sapiens
agatgcactcagaga

SEQ ID NO: 156478 - DNA, 15 bp, Homo sapiens
gagatgcactcagag

SEQ ID NO: 156479 - DNA, 15 bp, Homo sapiens
ggagatgcactcaga

SEQ ID NO: 156480 - DNA, 15 bp, Homo sapiens
cggagatgcactcag

SEQ ID NO: 156481 - DNA, 15 bp, Homo sapiens
tcggagatgcactca

SEQ ID NO: 156482 - DNA, 15 bp, Homo sapiens
gtcggagatgcactc

SEQ ID NO: 156483 - DNA, 15 bp, Homo sapiens
agtcggagatgcact

SEQ ID NO: 156484 - DNA, 15 bp, Homo sapiens
aagtcggagatgcac

SEQ ID NO: 156485 - DNA, 15 bp, Homo sapiens
gaagtcggagatgca

SEQ ID NO: 156486 - DNA, 15 bp, Homo sapiens
ggaagtcggagatgc

SEQ ID NO: 156487 - DNA, 15 bp, Homo sapiens
aggaagtcggagatg

SEQ ID NO: 156488 - DNA, 15 bp, Homo sapiens
caggaagtcggagat

SEQ ID NO: 156489 - DNA, 15 bp, Homo sapiens
ccaggaagtcggaga

SEQ ID NO: 156490 - DNA, 15 bp, Homo sapiens
tccaggaagtcggag

SEQ ID NO: 156491 - DNA, 15 bp, Homo sapiens
gtccaggaagtcgga

SEQ ID NO: 156492 - DNA, 15 bp, Homo sapiens
tgtccaggaagtcgg

SEQ ID NO: 156493 - DNA, 15 bp, Homo sapiens
ttgtccaggaagtcg

SEQ ID NO: 156494 - DNA, 15 bp, Homo sapiens
cttgtccaggaagtc

SEQ ID NO: 156495 - DNA, 15 bp, Homo sapiens
gcttgtccaggaagt

SEQ ID NO: 156496 - DNA, 15 bp, Homo sapiens
tgcttgtccaggaag

SEQ ID NO: 156497 - DNA, 15 bp, Homo sapiens
atgcttgtccaggaa

SEQ ID NO: 156498 - DNA, 15 bp, Homo sapiens
gatgcttgtccagga

SEQ ID NO: 156499 - DNA, 15 bp, Homo sapiens
tgatgcttgtccagg

SEQ ID NO: 156500 - DNA, 15 bp, Homo sapiens
ctgatgcttgtccag

SEQ ID NO: 156501 - DNA, 15 bp, Homo sapiens
tctgatgcttgtcca

SEQ ID NO: 156502 - DNA, 15 bp, Homo sapiens
atctgatgcttgtcc

SEQ ID NO: 156503 - DNA, 15 bp, Homo sapiens
catctgatgcttgtc

SEQ ID NO: 156504 - DNA, 15 bp, Homo sapiens
tcatctgatgcttgt

SEQ ID NO: 156505 - DNA, 15 bp, Homo sapiens
ttcatctgatgcttg

SEQ ID NO: 156506 - DNA, 15 bp, Homo sapiens
tttcatctgatgctt

SEQ ID NO: 156507 - DNA, 15 bp, Homo sapiens
gtttcatctgatgct

SEQ ID NO: 156508 - DNA, 15 bp, Homo sapiens
tgtttcatctgatgc

SEQ ID NO: 156509 - DNA, 15 bp, Homo sapiens
gtgtttcatctgatg

SEQ ID NO: 156510 - DNA, 15 bp, Homo sapiens
tgtgtttcatctgat

SEQ ID NO: 156511 - DNA, 15 bp, Homo sapiens
ttgtgtttcatctga

SEQ ID NO: 156512 - DNA, 15 bp, Homo sapiens
cttgtgtttcatctg

SEQ ID NO: 156513 - DNA, 15 bp, Homo sapiens
tcttgtgtttcatct

SEQ ID NO: 156514 - DNA, 15 bp, Homo sapiens
ttcttgtgtttcatc

SEQ ID NO: 156515 - DNA, 15 bp, Homo sapiens
cttcttgtgtttcat

SEQ ID NO: 156516 - DNA, 15 bp, Homo sapiens
gcttcttgtgtttca

SEQ ID NO: 156517 - DNA, 15 bp, Homo sapiens
agcttcttgtgtttc

SEQ ID NO: 156518 - DNA, 15 bp, Homo sapiens
cagcttcttgtgttt

SEQ ID NO: 156519 - DNA, 15 bp, Homo sapiens
gcagcttcttgtgtt

SEQ ID NO: 156520 - DNA, 15 bp, Homo sapiens
ggcagcttcttgtgt

SEQ ID NO: 156521 - DNA, 15 bp, Homo sapiens
gggcagcttcttgtg

SEQ ID NO: 156522 - DNA, 15 bp, Homo sapiens
ggggcagcttcttgt

SEQ ID NO: 156523 - DNA, 15 bp, Homo sapiens
aggggcagcttcttg

SEQ ID NO: 156524 - DNA, 15 bp, Homo sapiens
caggggcagcttctt

SEQ ID NO: 156525 - DNA, 15 bp, Homo sapiens
ccaggggcagcttct

SEQ ID NO: 156526 - DNA, 15 bp, Homo sapiens
cccaggggcagcttc

SEQ ID NO: 156527 - DNA, 15 bp, Homo sapiens
gcccaggggcagctt

SEQ ID NO: 156528 - DNA, 15 bp, Homo sapiens
agcccaggggcagct

SEQ ID NO: 156529 - DNA, 15 bp, Homo sapiens
aagcccaggggcagc

SEQ ID NO: 156530 - DNA, 15 bp, Homo sapiens
gaagcccaggggcag

SEQ ID NO: 156531 - DNA, 15 bp, Homo sapiens
tgaagcccaggggca

SEQ ID NO: 156532 - DNA, 15 bp, Homo sapiens
gtgaagcccaggggc

SEQ ID NO: 156533 - DNA, 15 bp, Homo sapiens
ggtgaagcccagggg

SEQ ID NO: 156534 - DNA, 15 bp, Homo sapiens
aggtgaagcccaggg

SEQ ID NO: 156535 - DNA, 15 bp, Homo sapiens
aaggtgaagcccagg

SEQ ID NO: 156536 - DNA, 15 bp, Homo sapiens
gaaggtgaagcccag

SEQ ID NO: 156537 - DNA, 15 bp, Homo sapiens
agaaggtgaagccca

SEQ ID NO: 156538 - DNA, 15 bp, Homo sapiens
gagaaggtgaagccc

SEQ ID NO: 156539 - DNA, 15 bp, Homo sapiens
ggagaaggtgaagcc

SEQ ID NO: 156540 - DNA, 15 bp, Homo sapiens
aggagaaggtgaagc

SEQ ID NO: 156541 - DNA, 15 bp, Homo sapiens
aaggagaaggtgaag

SEQ ID NO: 156542 - DNA, 15 bp, Homo sapiens
aaaggagaaggtgaa

SEQ ID NO: 156543 - DNA, 15 bp, Homo sapiens
gaaaggagaaggtga

SEQ ID NO: 156544 - DNA, 15 bp, Homo sapiens
ggaaaggagaaggtg

SEQ ID NO: 156545 - DNA, 15 bp, Homo sapiens
aggaaaggagaaggt

SEQ ID NO: 156546 - DNA, 15 bp, Homo sapiens
caggaaaggagaagg

SEQ ID NO: 156547 - DNA, 15 bp, Homo sapiens
acaggaaaggagaag

SEQ ID NO: 156548 - DNA, 15 bp, Homo sapiens
cacaggaaaggagaa

SEQ ID NO: 156549 - DNA, 15 bp, Homo sapiens
tcacaggaaaggaga

SEQ ID NO: 156550 - DNA, 15 bp, Homo sapiens
ctcacaggaaaggag

SEQ ID NO: 156551 - DNA, 15 bp, Homo sapiens
cctcacaggaaagga

SEQ ID NO: 156552 - DNA, 15 bp, Homo sapiens
gcctcacaggaaagg

SEQ ID NO: 156553 - DNA, 15 bp, Homo sapiens
tgcctcacaggaaag

SEQ ID NO: 156554 - DNA, 15 bp, Homo sapiens
gtgcctcacaggaaa

SEQ ID NO: 156555 - DNA, 15 bp, Homo sapiens
cgtgcctcacaggaa

SEQ ID NO: 156556 - DNA, 15 bp, Homo sapiens
tcgtgcctcacagga

SEQ ID NO: 156557 - DNA, 15 bp, Homo sapiens
ttcgtgcctcacagg

SEQ ID NO: 156558 - DNA, 15 bp, Homo sapiens
cttcgtgcctcacag

SEQ ID NO: 156559 - DNA, 15 bp, Homo sapiens
tcttcgtgcctcaca

SEQ ID NO: 156560 - DNA, 15 bp, Homo sapiens
gtcttcgtgcctcac

SEQ ID NO: 156561 - DNA, 15 bp, Homo sapiens
tgtcttcgtgcctca

SEQ ID NO: 156562 - DNA, 15 bp, Homo sapiens
atgtcttcgtgcctc

SEQ ID NO: 156563 - DNA, 15 bp, Homo sapiens
gatgtcttcgtgcct

SEQ ID NO: 156564 - DNA, 15 bp, Homo sapiens
cgatgtcttcgtgcc

SEQ ID NO: 156565 - DNA, 15 bp, Homo sapiens
tcgatgtcttcgtgc

SEQ ID NO: 156566 - DNA, 15 bp, Homo sapiens
atcgatgtcttcgtg

SEQ ID NO: 156567 - DNA, 15 bp, Homo sapiens
tatcgatgtcttcgt

SEQ ID NO: 156568 - DNA, 15 bp, Homo sapiens
ttatcgatgtcttcg

SEQ ID NO: 156569 - DNA, 15 bp, Homo sapiens
cttatcgatgtcttc

SEQ ID NO: 156570 - DNA, 15 bp, Homo sapiens
ccttatcgatgtctt

SEQ ID NO: 156571 - DNA, 15 bp, Homo sapiens
accttatcgatgtct

SEQ ID NO: 156572 - DNA, 15 bp, Homo sapiens
caccttatcgatgtc

SEQ ID NO: 156573 - DNA, 15 bp, Homo sapiens
ccaccttatcgatgt

SEQ ID NO: 156574 - DNA, 15 bp, Homo sapiens
cccaccttatcgatg

SEQ ID NO: 156575 - DNA, 15 bp, Homo sapiens
gcccaccttatcgat

SEQ ID NO: 156576 - DNA, 15 bp, Homo sapiens
ggcccaccttatcga

SEQ ID NO: 156577 - DNA, 15 bp, Homo sapiens
cggcccaccttatcg

SEQ ID NO: 156578 - DNA, 15 bp, Homo sapiens
ccggcccaccttatc

SEQ ID NO: 156579 - DNA, 15 bp, Homo sapiens
cccggcccaccttat

SEQ ID NO: 156580 - DNA, 15 bp, Homo sapiens
acccggcccacctta

SEQ ID NO: 156581 - DNA, 15 bp, Homo sapiens
cacccggcccacctt

SEQ ID NO: 156582 - DNA, 15 bp, Homo sapiens
ccacccggcccacct

SEQ ID NO: 156583 - DNA, 15 bp, Homo sapiens
tccacccggcccacc

SEQ ID NO: 156584 - DNA, 15 bp, Homo sapiens
ctccacccggcccac

SEQ ID NO: 156585 - DNA, 15 bp, Homo sapiens
cctccacccggccca

SEQ ID NO: 156586 - DNA, 15 bp, Homo sapiens
ccctccacccggccc

SEQ ID NO: 156587 - DNA, 15 bp, Homo sapiens
cccctccacccggcc

SEQ ID NO: 156588 - DNA, 15 bp, Homo sapiens
gcccctccacccggc

SEQ ID NO: 156589 - DNA, 15 bp, Homo sapiens
tgcccctccacccgg

SEQ ID NO: 156590 - DNA, 15 bp, Homo sapiens
ctgcccctccacccg

SEQ ID NO: 156591 - DNA, 15 bp, Homo sapiens
tctgcccctccaccc

SEQ ID NO: 156592 - DNA, 15 bp, Homo sapiens
ttctgcccctccacc

SEQ ID NO: 156593 - DNA, 15 bp, Homo sapiens
cttctgcccctccac

SEQ ID NO: 156594 - DNA, 15 bp, Homo sapiens
ccttctgcccctcca

SEQ ID NO: 156595 - DNA, 15 bp, Homo sapiens
gccttctgcccctcc

SEQ ID NO: 156596 - DNA, 15 bp, Homo sapiens
tgccttctgcccctc

SEQ ID NO: 156597 - DNA, 15 bp, Homo sapiens
ctgccttctgcccct

SEQ ID NO: 156598 - DNA, 15 bp, Homo sapiens
tctgccttctgcccc

SEQ ID NO: 156599 - DNA, 15 bp, Homo sapiens
atctgccttctgccc

SEQ ID NO: 156600 - DNA, 15 bp, Homo sapiens
catctgccttctgcc

SEQ ID NO: 156601 - DNA, 15 bp, Homo sapiens
tcatctgccttctgc

SEQ ID NO: 156602 - DNA, 15 bp, Homo sapiens
ctcatctgccttctg

SEQ ID NO: 156603 - DNA, 15 bp, Homo sapiens
cctcatctgccttct

SEQ ID NO: 156604 - DNA, 15 bp, Homo sapiens
ccctcatctgccttc

SEQ ID NO: 156605 - DNA, 15 bp, Homo sapiens
cccctcatctgcctt

SEQ ID NO: 156606 - DNA, 15 bp, Homo sapiens
tcccctcatctgcct

SEQ ID NO: 156607 - DNA, 15 bp, Homo sapiens
ctcccctcatctgcc

SEQ ID NO: 156608 - DNA, 15 bp, Homo sapiens
cctcccctcatctgc

SEQ ID NO: 156609 - DNA, 15 bp, Homo sapiens
gcctcccctcatctg

SEQ ID NO: 156610 - DNA, 15 bp, Homo sapiens
tgcctcccctcatct

SEQ ID NO: 156611 - DNA, 15 bp, Homo sapiens
gtgcctcccctcatc

SEQ ID NO: 156612 - DNA, 15 bp, Homo sapiens
tgtgcctcccctcat

SEQ ID NO: 156613 - DNA, 15 bp, Homo sapiens
ctgtgcctcccctca

SEQ ID NO: 156614 - DNA, 15 bp, Homo sapiens
cctgtgcctcccctc

SEQ ID NO: 156615 - DNA, 15 bp, Homo sapiens
gcctgtgcctcccct

SEQ ID NO: 156616 - DNA, 15 bp, Homo sapiens
tgcctgtgcctcccc

SEQ ID NO: 156617 - DNA, 15 bp, Homo sapiens
gtgcctgtgcctccc

SEQ ID NO: 156618 - DNA, 15 bp, Homo sapiens
ggtgcctgtgcctcc

SEQ ID NO: 156619 - DNA, 15 bp, Homo sapiens
gggtgcctgtgcctc

SEQ ID NO: 156620 - DNA, 15 bp, Homo sapiens
ggggtgcctgtgcct

SEQ ID NO: 156621 - DNA, 15 bp, Homo sapiens
tggggtgcctgtgcc

SEQ ID NO: 156622 - DNA, 15 bp, Homo sapiens
ctggggtgcctgtgc

SEQ ID NO: 156623 - DNA, 15 bp, Homo sapiens
tctggggtgcctgtg

SEQ ID NO: 156624 - DNA, 15 bp, Homo sapiens
ctctggggtgcctgt

SEQ ID NO: 156625 - DNA, 15 bp, Homo sapiens
cctctggggtgcctg

SEQ ID NO: 156626 - DNA, 15 bp, Homo sapiens
tcctctggggtgcct

SEQ ID NO: 156627 - DNA, 15 bp, Homo sapiens
ttcctctggggtgcc

SEQ ID NO: 156628 - DNA, 15 bp, Homo sapiens
gttcctctggggtgc

SEQ ID NO: 156629 - DNA, 15 bp, Homo sapiens
agttcctctggggtg

SEQ ID NO: 156630 - DNA, 15 bp, Homo sapiens
gagttcctctggggt

SEQ ID NO: 156631 - DNA, 15 bp, Homo sapiens
agagttcctctgggg

SEQ ID NO: 156632 - DNA, 15 bp, Homo sapiens
cagagttcctctggg

SEQ ID NO: 156633 - DNA, 15 bp, Homo sapiens
gcagagttcctctgg

SEQ ID NO: 156634 - DNA, 15 bp, Homo sapiens
ggcagagttcctctg

SEQ ID NO: 156635 - DNA, 15 bp, Homo sapiens
aggcagagttcctct

SEQ ID NO: 156636 - DNA, 15 bp, Homo sapiens
aaggcagagttcctc

SEQ ID NO: 156637 - DNA, 15 bp, Homo sapiens
gaaggcagagttcct

SEQ ID NO: 156638 - DNA, 15 bp, Homo sapiens
tgaaggcagagttcc

SEQ ID NO: 156639 - DNA, 15 bp, Homo sapiens
ttgaaggcagagttc

SEQ ID NO: 156640 - DNA, 15 bp, Homo sapiens
tttgaaggcagagtt

SEQ ID NO: 156641 - DNA, 15 bp, Homo sapiens
atttgaaggcagagt

SEQ ID NO: 156642 - DNA, 15 bp, Homo sapiens
catttgaaggcagag

SEQ ID NO: 156643 - DNA, 15 bp, Homo sapiens
acatttgaaggcaga

SEQ ID NO: 156644 - DNA, 15 bp, Homo sapiens
tacatttgaaggcag

SEQ ID NO: 156645 - DNA, 15 bp, Homo sapiens
ctacatttgaaggca

SEQ ID NO: 156646 - DNA, 15 bp, Homo sapiens
gctacatttgaaggc

SEQ ID NO: 156647 - DNA, 15 bp, Homo sapiens
ggctacatttgaagg

SEQ ID NO: 156648 - DNA, 15 bp, Homo sapiens
gggctacatttgaag

SEQ ID NO: 156649 - DNA, 15 bp, Homo sapiens
ggggctacatttgaa

SEQ ID NO: 156650 - DNA, 15 bp, Homo sapiens
gggggctacatttga

SEQ ID NO: 156651 - DNA, 15 bp, Homo sapiens
tgggggctacatttg

SEQ ID NO: 156652 - DNA, 15 bp, Homo sapiens
atgggggctacattt

SEQ ID NO: 156653 - DNA, 15 bp, Homo sapiens
tatgggggctacatt

SEQ ID NO: 156654 - DNA, 15 bp, Homo sapiens
gtatgggggctacat

SEQ ID NO: 156655 - DNA, 15 bp, Homo sapiens
ggtatgggggctaca

SEQ ID NO: 156656 - DNA, 15 bp, Homo sapiens
tggtatgggggctac

SEQ ID NO: 156657 - DNA, 15 bp, Homo sapiens
atggtatgggggcta

SEQ ID NO: 156658 - DNA, 15 bp, Homo sapiens
catggtatgggggct

SEQ ID NO: 156659 - DNA, 15 bp, Homo sapiens
acatggtatgggggc

SEQ ID NO: 156660 - DNA, 15 bp, Homo sapiens
cacatggtatggggg

SEQ ID NO: 156661 - DNA, 15 bp, Homo sapiens
gcacatggtatgggg

SEQ ID NO: 156662 - DNA, 15 bp, Homo sapiens
agcacatggtatggg

SEQ ID NO: 156663 - DNA, 15 bp, Homo sapiens
gagcacatggtatgg

SEQ ID NO: 156664 - DNA, 15 bp, Homo sapiens
tgagcacatggtatg

SEQ ID NO: 156665 - DNA, 15 bp, Homo sapiens
ctgagcacatggtat

SEQ ID NO: 156666 - DNA, 15 bp, Homo sapiens
tctgagcacatggta

SEQ ID NO: 156667 - DNA, 15 bp, Homo sapiens
ttctgagcacatggt

SEQ ID NO: 156668 - DNA, 15 bp, Homo sapiens
cttctgagcacatgg

SEQ ID NO: 156669 - DNA, 15 bp, Homo sapiens
ccttctgagcacatg

SEQ ID NO: 156670 - DNA, 15 bp, Homo sapiens
cccttctgagcacat

SEQ ID NO: 156671 - DNA, 15 bp, Homo sapiens
tcccttctgagcaca

SEQ ID NO: 156672 - DNA, 15 bp, Homo sapiens
ctcccttctgagcac

SEQ ID NO: 156673 - DNA, 15 bp, Homo sapiens
tctcccttctgagca

SEQ ID NO: 156674 - DNA, 15 bp, Homo sapiens
atctcccttctgagc

SEQ ID NO: 156675 - DNA, 15 bp, Homo sapiens
gatctcccttctgag

SEQ ID NO: 156676 - DNA, 15 bp, Homo sapiens
agatctcccttctga

SEQ ID NO: 156677 - DNA, 15 bp, Homo sapiens
cagatctcccttctg

SEQ ID NO: 156678 - DNA, 15 bp, Homo sapiens
ccagatctcccttct

SEQ ID NO: 156679 - DNA, 15 bp, Homo sapiens
tccagatctcccttc

SEQ ID NO: 156680 - DNA, 15 bp, Homo sapiens
atccagatctccctt

SEQ ID NO: 156681 - DNA, 15 bp, Homo sapiens
aatccagatctccct

SEQ ID NO: 156682 - DNA, 15 bp, Homo sapiens
gaatccagatctccc

SEQ ID NO: 156683 - DNA, 15 bp, Homo sapiens
tgaatccagatctcc

SEQ ID NO: 156684 - DNA, 15 bp, Homo sapiens
ttgaatccagatctc

SEQ ID NO: 156685 - DNA, 15 bp, Homo sapiens
tttgaatccagatct

SEQ ID NO: 156686 - DNA, 15 bp, Homo sapiens
atttgaatccagatc

SEQ ID NO: 156687 - DNA, 15 bp, Homo sapiens
aatttgaatccagat

SEQ ID NO: 156688 - DNA, 15 bp, Homo sapiens
caatttgaatccaga

SEQ ID NO: 156689 - DNA, 15 bp, Homo sapiens
acaatttgaatccag

SEQ ID NO: 156690 - DNA, 15 bp, Homo sapiens
cacaatttgaatcca

SEQ ID NO: 156691 - DNA, 15 bp, Homo sapiens
ccacaatttgaatcc

SEQ ID NO: 156692 - DNA, 15 bp, Homo sapiens
gccacaatttgaatc

SEQ ID NO: 156693 - DNA, 15 bp, Homo sapiens
ggccacaatttgaat

SEQ ID NO: 156694 - DNA, 15 bp, Homo sapiens
tggccacaatttgaa

SEQ ID NO: 156695 - DNA, 15 bp, Homo sapiens
atggccacaatttga

SEQ ID NO: 156696 - DNA, 15 bp, Homo sapiens
catggccacaatttg

SEQ ID NO: 156697 - DNA, 15 bp, Homo sapiens
acatggccacaattt

SEQ ID NO: 156698 - DNA, 15 bp, Homo sapiens
gacatggccacaatt

SEQ ID NO: 156699 - DNA, 15 bp, Homo sapiens
tgacatggccacaat

SEQ ID NO: 156700 - DNA, 15 bp, Homo sapiens
gtgacatggccacaa

SEQ ID NO: 156701 - DNA, 15 bp, Homo sapiens
ggtgacatggccaca

SEQ ID NO: 156702 - DNA, 15 bp, Homo sapiens
aggtgacatggccac

SEQ ID NO: 156703 - DNA, 15 bp, Homo sapiens
caggtgacatggcca

SEQ ID NO: 156704 - DNA, 15 bp, Homo sapiens
gcaggtgacatggcc

SEQ ID NO: 156705 - DNA, 15 bp, Homo sapiens
ggcaggtgacatggc

SEQ ID NO: 156706 - DNA, 15 bp, Homo sapiens
tggcaggtgacatgg

SEQ ID NO: 156707 - DNA, 15 bp, Homo sapiens
gtggcaggtgacatg

SEQ ID NO: 156708 - DNA, 15 bp, Homo sapiens
ggtggcaggtgacat

SEQ ID NO: 156709 - DNA, 15 bp, Homo sapiens
aggtggcaggtgaca

SEQ ID NO: 156710 - DNA, 15 bp, Homo sapiens
gaggtggcaggtgac

SEQ ID NO: 156711 - DNA, 15 bp, Homo sapiens
agaggtggcaggtga

SEQ ID NO: 156712 - DNA, 15 bp, Homo sapiens
tagaggtggcaggtg

SEQ ID NO: 156713 - DNA, 15 bp, Homo sapiens
ttagaggtggcaggt

SEQ ID NO: 156714 - DNA, 15 bp, Homo sapiens
attagaggtggcagg

SEQ ID NO: 156715 - DNA, 15 bp, Homo sapiens
cattagaggtggcag

SEQ ID NO: 156716 - DNA, 15 bp, Homo sapiens
gcattagaggtggca

SEQ ID NO: 156717 - DNA, 15 bp, Homo sapiens
agcattagaggtggc

SEQ ID NO: 156718 - DNA, 15 bp, Homo sapiens
cagcattagaggtgg

SEQ ID NO: 156719 - DNA, 15 bp, Homo sapiens
acagcattagaggtg

SEQ ID NO: 156720 - DNA, 15 bp, Homo sapiens
cacagcattagaggt

SEQ ID NO: 156721 - DNA, 15 bp, Homo sapiens
ccacagcattagagg

SEQ ID NO: 156722 - DNA, 15 bp, Homo sapiens
tccacagcattagag

SEQ ID NO: 156723 - DNA, 15 bp, Homo sapiens
ttccacagcattaga

SEQ ID NO: 156724 - DNA, 15 bp, Homo sapiens
tttccacagcattag

SEQ ID NO: 156725 - DNA, 15 bp, Homo sapiens
ttttccacagcatta

SEQ ID NO: 156726 - DNA, 15 bp, Homo sapiens
cttttccacagcatt

SEQ ID NO: 156727 - DNA, 15 bp, Homo sapiens
tcttttccacagcat

SEQ ID NO: 156728 - DNA, 15 bp, Homo sapiens
ttcttttccacagca

SEQ ID NO: 156729 - DNA, 15 bp, Homo sapiens
cttcttttccacagc

SEQ ID NO: 156730 - DNA, 15 bp, Homo sapiens
gcttcttttccacag

SEQ ID NO: 156731 - DNA, 15 bp, Homo sapiens
tgcttcttttccaca

SEQ ID NO: 156732 - DNA, 15 bp, Homo sapiens
atgcttcttttccac

SEQ ID NO: 156733 - DNA, 15 bp, Homo sapiens
gatgcttcttttcca

SEQ ID NO: 156734 - DNA, 15 bp, Homo sapiens
tgatgcttcttttcc

SEQ ID NO: 156735 - DNA, 15 bp, Homo sapiens
gtgatgcttcttttc

SEQ ID NO: 156736 - DNA, 15 bp, Homo sapiens
tgtgatgcttctttt

SEQ ID NO: 156737 - DNA, 15 bp, Homo sapiens
atgtgatgcttcttt

SEQ ID NO: 156738 - DNA, 15 bp, Homo sapiens
aatgtgatgcttctt

SEQ ID NO: 156739 - DNA, 15 bp, Homo sapiens
taatgtgatgcttct

SEQ ID NO: 156740 - DNA, 15 bp, Homo sapiens
ctaatgtgatgcttc

SEQ ID NO: 156741 - DNA, 15 bp, Homo sapiens
gctaatgtgatgctt

SEQ ID NO: 156742 - DNA, 15 bp, Homo sapiens
agctaatgtgatgct

SEQ ID NO: 156743 - DNA, 15 bp, Homo sapiens
tagctaatgtgatgc

SEQ ID NO: 156744 - DNA, 15 bp, Homo sapiens
ttagctaatgtgatg

SEQ ID NO: 156745 - DNA, 15 bp, Homo sapiens
attagctaatgtgat

SEQ ID NO: 156746 - DNA, 15 bp, Homo sapiens
aattagctaatgtga

SEQ ID NO: 156747 - DNA, 15 bp, Homo sapiens
gaattagctaatgtg

SEQ ID NO: 156748 - DNA, 15 bp, Homo sapiens
agaattagctaatgt

SEQ ID NO: 156749 - DNA, 15 bp, Homo sapiens
cagaattagctaatg

SEQ ID NO: 156750 - DNA, 15 bp, Homo sapiens
ccagaattagctaat

SEQ ID NO: 156751 - DNA, 15 bp, Homo sapiens
gccagaattagctaa

SEQ ID NO: 156752 - DNA, 15 bp, Homo sapiens
agccagaattagcta

SEQ ID NO: 156753 - DNA, 15 bp, Homo sapiens
cagccagaattagct

SEQ ID NO: 156754 - DNA, 15 bp, Homo sapiens
acagccagaattagc

SEQ ID NO: 156755 - DNA, 15 bp, Homo sapiens
cacagccagaattag

SEQ ID NO: 156756 - DNA, 15 bp, Homo sapiens
gcacagccagaatta

SEQ ID NO: 156757 - DNA, 15 bp, Homo sapiens
cgcacagccagaatt

SEQ ID NO: 156758 - DNA, 15 bp, Homo sapiens
gcgcacagccagaat

SEQ ID NO: 156759 - DNA, 15 bp, Homo sapiens
ggcgcacagccagaa

SEQ ID NO: 156760 - DNA, 15 bp, Homo sapiens
aggcgcacagccaga

SEQ ID NO: 156761 - DNA, 15 bp, Homo sapiens
aaggcgcacagccag

SEQ ID NO: 156762 - DNA, 15 bp, Homo sapiens
caaggcgcacagcca

SEQ ID NO: 156763 - DNA, 15 bp, Homo sapiens
acaaggcgcacagcc

SEQ ID NO: 156764 - DNA, 15 bp, Homo sapiens
cacaaggcgcacagc

SEQ ID NO: 156765 - DNA, 15 bp, Homo sapiens
tcacaaggcgcacag

SEQ ID NO: 156766 - DNA, 15 bp, Homo sapiens
ctcacaaggcgcaca

SEQ ID NO: 156767 - DNA, 15 bp, Homo sapiens
cctcacaaggcgcac

SEQ ID NO: 156768 - DNA, 15 bp, Homo sapiens
gcctcacaaggcgca

SEQ ID NO: 156769 - DNA, 15 bp, Homo sapiens
tgcctcacaaggcgc

SEQ ID NO: 156770 - DNA, 15 bp, Homo sapiens
gtgcctcacaaggcg

SEQ ID NO: 156771 - DNA, 15 bp, Homo sapiens
ggtgcctcacaaggc

SEQ ID NO: 156772 - DNA, 15 bp, Homo sapiens
tggtgcctcacaagg

SEQ ID NO: 156773 - DNA, 15 bp, Homo sapiens
ctggtgcctcacaag

SEQ ID NO: 156774 - DNA, 15 bp, Homo sapiens
gctggtgcctcacaa

SEQ ID NO: 156775 - DNA, 15 bp, Homo sapiens
agctggtgcctcaca

SEQ ID NO: 156776 - DNA, 15 bp, Homo sapiens
tagctggtgcctcac

SEQ ID NO: 156777 - DNA, 15 bp, Homo sapiens
atagctggtgcctca

SEQ ID NO: 156778 - DNA, 15 bp, Homo sapiens
catagctggtgcctc

SEQ ID NO: 156779 - DNA, 15 bp, Homo sapiens
tcatagctggtgcct

SEQ ID NO: 156780 - DNA, 15 bp, Homo sapiens
atcatagctggtgcc

SEQ ID NO: 156781 - DNA, 15 bp, Homo sapiens
gatcatagctggtgc

SEQ ID NO: 156782 - DNA, 15 bp, Homo sapiens
tgatcatagctggtg

SEQ ID NO: 156783 - DNA, 15 bp, Homo sapiens
gtgatcatagctggt

SEQ ID NO: 156784 - DNA, 15 bp, Homo sapiens
ggtgatcatagctgg

SEQ ID NO: 156785 - DNA, 15 bp, Homo sapiens
gggtgatcatagctg

SEQ ID NO: 156786 - DNA, 15 bp, Homo sapiens
ggggtgatcatagct

SEQ ID NO: 156787 - DNA, 15 bp, Homo sapiens
tggggtgatcatagc

SEQ ID NO: 156788 - DNA, 15 bp, Homo sapiens
gtggggtgatcatag

SEQ ID NO: 156789 - DNA, 15 bp, Homo sapiens
agtggggtgatcata

SEQ ID NO: 156790 - DNA, 15 bp, Homo sapiens
gagtggggtgatcat

SEQ ID NO: 156791 - DNA, 15 bp, Homo sapiens
ggagtggggtgatca

SEQ ID NO: 156792 - DNA, 15 bp, Homo sapiens
tggagtggggtgatc

SEQ ID NO: 156793 - DNA, 15 bp, Homo sapiens
ctggagtggggtgat

SEQ ID NO: 156794 - DNA, 15 bp, Homo sapiens
actggagtggggtga

SEQ ID NO: 156795 - DNA, 15 bp, Homo sapiens
cactggagtggggtg

SEQ ID NO: 156796 - DNA, 15 bp, Homo sapiens
ccactggagtggggt

SEQ ID NO: 156797 - DNA, 15 bp, Homo sapiens
tccactggagtgggg

SEQ ID NO: 156798 - DNA, 15 bp, Homo sapiens
ttccactggagtggg

SEQ ID NO: 156799 - DNA, 15 bp, Homo sapiens
tttccactggagtgg

SEQ ID NO: 156800 - DNA, 15 bp, Homo sapiens
ctttccactggagtg

SEQ ID NO: 156801 - DNA, 15 bp, Homo sapiens
tctttccactggagt

SEQ ID NO: 156802 - DNA, 15 bp, Homo sapiens
ctctttccactggag

SEQ ID NO: 156803 - DNA, 15 bp, Homo sapiens
gctctttccactgga

SEQ ID NO: 156804 - DNA, 15 bp, Homo sapiens
tgctctttccactgg

SEQ ID NO: 156805 - DNA, 15 bp, Homo sapiens
ctgctctttccactg

SEQ ID NO: 156806 - DNA, 15 bp, Homo sapiens
gctgctctttccact

SEQ ID NO: 156807 - DNA, 15 bp, Homo sapiens
agctgctctttccac

SEQ ID NO: 156808 - DNA, 15 bp, Homo sapiens
cagctgctctttcca

SEQ ID NO: 156809 - DNA, 15 bp, Homo sapiens
ccagctgctctttcc

SEQ ID NO: 156810 - DNA, 15 bp, Homo sapiens
gccagctgctctttc

SEQ ID NO: 156811 - DNA, 15 bp, Homo sapiens
tgccagctgctcttt

SEQ ID NO: 156812 - DNA, 15 bp, Homo sapiens
ctgccagctgctctt

SEQ ID NO: 156813 - DNA, 15 bp, Homo sapiens
actgccagctgctct

SEQ ID NO: 156814 - DNA, 15 bp, Homo sapiens
tactgccagctgctc

SEQ ID NO: 156815 - DNA, 15 bp, Homo sapiens
ctactgccagctgct

SEQ ID NO: 156816 - DNA, 15 bp, Homo sapiens
cctactgccagctgc

SEQ ID NO: 156817 - DNA, 15 bp, Homo sapiens
ccctactgccagctg

SEQ ID NO: 156818 - DNA, 15 bp, Homo sapiens
accctactgccagct

SEQ ID NO: 156819 - DNA, 15 bp, Homo sapiens
caccctactgccagc

SEQ ID NO: 156820 - DNA, 15 bp, Homo sapiens
ccaccctactgccag

SEQ ID NO: 156821 - DNA, 15 bp, Homo sapiens
cccaccctactgcca

SEQ ID NO: 156822 - DNA, 15 bp, Homo sapiens
ccccaccctactgcc

SEQ ID NO: 156823 - DNA, 15 bp, Homo sapiens
gccccaccctactgc

SEQ ID NO: 156824 - DNA, 15 bp, Homo sapiens
agccccaccctactg

SEQ ID NO: 156825 - DNA, 15 bp, Homo sapiens
gagccccaccctact

SEQ ID NO: 156826 - DNA, 15 bp, Homo sapiens
tgagccccaccctac

SEQ ID NO: 156827 - DNA, 15 bp, Homo sapiens
ttgagccccacccta

SEQ ID NO: 156828 - DNA, 15 bp, Homo sapiens
tttgagccccaccct

SEQ ID NO: 156829 - DNA, 15 bp, Homo sapiens
gtttgagccccaccc

SEQ ID NO: 156830 - DNA, 15 bp, Homo sapiens
agtttgagccccacc

SEQ ID NO: 156831 - DNA, 15 bp, Homo sapiens
gagtttgagccccac

SEQ ID NO: 156832 - DNA, 15 bp, Homo sapiens
tgagtttgagcccca

SEQ ID NO: 156833 - DNA, 15 bp, Homo sapiens
ctgagtttgagcccc

SEQ ID NO: 156834 - DNA, 15 bp, Homo sapiens
cctgagtttgagccc

SEQ ID NO: 156835 - DNA, 15 bp, Homo sapiens
gcctgagtttgagcc

SEQ ID NO: 156836 - DNA, 15 bp, Homo sapiens
tgcctgagtttgagc

SEQ ID NO: 156837 - DNA, 15 bp, Homo sapiens
ctgcctgagtttgag

SEQ ID NO: 156838 - DNA, 15 bp, Homo sapiens
gctgcctgagtttga

SEQ ID NO: 156839 - DNA, 15 bp, Homo sapiens
ggctgcctgagtttg

SEQ ID NO: 156840 - DNA, 15 bp, Homo sapiens
cggctgcctgagttt

SEQ ID NO: 156841 - DNA, 15 bp, Homo sapiens
ccggctgcctgagtt

SEQ ID NO: 156842 - DNA, 15 bp, Homo sapiens
cccggctgcctgagt

SEQ ID NO: 156843 - DNA, 15 bp, Homo sapiens
gcccggctgcctgag

SEQ ID NO: 156844 - DNA, 15 bp, Homo sapiens
agcccggctgcctga

SEQ ID NO: 156845 - DNA, 15 bp, Homo sapiens
gagcccggctgcctg

SEQ ID NO: 156846 - DNA, 15 bp, Homo sapiens
agagcccggctgcct

SEQ ID NO: 156847 - DNA, 15 bp, Homo sapiens
cagagcccggctgcc

SEQ ID NO: 156848 - DNA, 15 bp, Homo sapiens
ccagagcccggctgc

SEQ ID NO: 156849 - DNA, 15 bp, Homo sapiens
cccagagcccggctg

SEQ ID NO: 156850 - DNA, 15 bp, Homo sapiens
acccagagcccggct

SEQ ID NO: 156851 - DNA, 15 bp, Homo sapiens
gacccagagcccggc

SEQ ID NO: 156852 - DNA, 15 bp, Homo sapiens
tgacccagagcccgg

SEQ ID NO: 156853 - DNA, 15 bp, Homo sapiens
gtgacccagagcccg

SEQ ID NO: 156854 - DNA, 15 bp, Homo sapiens
ggtgacccagagccc

SEQ ID NO: 156855 - DNA, 15 bp, Homo sapiens
aggtgacccagagcc

SEQ ID NO: 156856 - DNA, 15 bp, Homo sapiens
caggtgacccagagc

SEQ ID NO: 156857 - DNA, 15 bp, Homo sapiens
gcaggtgacccagag

SEQ ID NO: 156858 - DNA, 15 bp, Homo sapiens
tgcaggtgacccaga

SEQ ID NO: 156859 - DNA, 15 bp, Homo sapiens
ctgcaggtgacccag

SEQ ID NO: 156860 - DNA, 15 bp, Homo sapiens
cctgcaggtgaccca

SEQ ID NO: 156861 - DNA, 15 bp, Homo sapiens
gcctgcaggtgaccc

SEQ ID NO: 156862 - DNA, 15 bp, Homo sapiens
ggcctgcaggtgacc

SEQ ID NO: 156863 - DNA, 15 bp, Homo sapiens
tggcctgcaggtgac

SEQ ID NO: 156864 - DNA, 15 bp, Homo sapiens
gtggcctgcaggtga

SEQ ID NO: 156865 - DNA, 15 bp, Homo sapiens
cgtggcctgcaggtg

SEQ ID NO: 156866 - DNA, 15 bp, Homo sapiens
ccgtggcctgcaggt

SEQ ID NO: 156867 - DNA, 15 bp, Homo sapiens
accgtggcctgcagg

SEQ ID NO: 156868 - DNA, 15 bp, Homo sapiens
gaccgtggcctgcag

SEQ ID NO: 156869 - DNA, 15 bp, Homo sapiens
tgaccgtggcctgca

SEQ ID NO: 156870 - DNA, 15 bp, Homo sapiens
atgaccgtggcctgc

SEQ ID NO: 156871 - DNA, 15 bp, Homo sapiens
catgaccgtggcctg

SEQ ID NO: 156872 - DNA, 15 bp, Homo sapiens
acatgaccgtggcct

SEQ ID NO: 156873 - DNA, 15 bp, Homo sapiens
gacatgaccgtggcc

SEQ ID NO: 156874 - DNA, 15 bp, Homo sapiens
tgacatgaccgtggc

SEQ ID NO: 156875 - DNA, 15 bp, Homo sapiens
gtgacatgaccgtgg

SEQ ID NO: 156876 - DNA, 15 bp, Homo sapiens
tgtgacatgaccgtg

SEQ ID NO: 156877 - DNA, 15 bp, Homo sapiens
gtgtgacatgaccgt

SEQ ID NO: 156878 - DNA, 15 bp, Homo sapiens
agtgtgacatgaccg

SEQ ID NO: 156879 - DNA, 15 bp, Homo sapiens
cagtgtgacatgacc

SEQ ID NO: 156880 - DNA, 15 bp, Homo sapiens
gcagtgtgacatgac

SEQ ID NO: 156881 - DNA, 15 bp, Homo sapiens
ggcagtgtgacatga

SEQ ID NO: 156882 - DNA, 15 bp, Homo sapiens
aggcagtgtgacatg

SEQ ID NO: 156883 - DNA, 15 bp, Homo sapiens
gaggcagtgtgacat

SEQ ID NO: 156884 - DNA, 15 bp, Homo sapiens
agaggcagtgtgaca

SEQ ID NO: 156885 - DNA, 15 bp, Homo sapiens
tagaggcagtgtgac

SEQ ID NO: 156886 - DNA, 15 bp, Homo sapiens
ctagaggcagtgtga

SEQ ID NO: 156887 - DNA, 15 bp, Homo sapiens
gctagaggcagtgtg

SEQ ID NO: 156888 - DNA, 15 bp, Homo sapiens
agctagaggcagtgt

SEQ ID NO: 156889 - DNA, 15 bp, Homo sapiens
cagctagaggcagtg

SEQ ID NO: 156890 - DNA, 15 bp, Homo sapiens
tcagctagaggcagt

SEQ ID NO: 156891 - DNA, 15 bp, Homo sapiens
ctcagctagaggcag

SEQ ID NO: 156892 - DNA, 15 bp, Homo sapiens
actcagctagaggca

SEQ ID NO: 156893 - DNA, 15 bp, Homo sapiens
gactcagctagaggc

SEQ ID NO: 156894 - DNA, 15 bp, Homo sapiens
tgactcagctagagg

SEQ ID NO: 156895 - DNA, 15 bp, Homo sapiens
ctgactcagctagag

SEQ ID NO: 156896 - DNA, 15 bp, Homo sapiens
tctgactcagctaga

SEQ ID NO: 156897 - DNA, 15 bp, Homo sapiens
ttctgactcagctag

SEQ ID NO: 156898 - DNA, 15 bp, Homo sapiens
tttctgactcagcta

SEQ ID NO: 156899 - DNA, 15 bp, Homo sapiens
atttctgactcagct

SEQ ID NO: 156900 - DNA, 15 bp, Homo sapiens
catttctgactcagc

SEQ ID NO: 156901 - DNA, 15 bp, Homo sapiens
acatttctgactcag

SEQ ID NO: 156902 - DNA, 15 bp, Homo sapiens
cacatttctgactca

SEQ ID NO: 156903 - DNA, 15 bp, Homo sapiens
tcacatttctgactc

SEQ ID NO: 156904 - DNA, 15 bp, Homo sapiens
ttcacatttctgact

SEQ ID NO: 156905 - DNA, 15 bp, Homo sapiens
cttcacatttctgac

SEQ ID NO: 156906 - DNA, 15 bp, Homo sapiens
ccttcacatttctga

SEQ ID NO: 156907 - DNA, 15 bp, Homo sapiens
tccttcacatttctg

SEQ ID NO: 156908 - DNA, 15 bp, Homo sapiens
ttccttcacatttct

SEQ ID NO: 156909 - DNA, 15 bp, Homo sapiens
gttccttcacatttc

SEQ ID NO: 156910 - DNA, 15 bp, Homo sapiens
agttccttcacattt

SEQ ID NO: 156911 - DNA, 15 bp, Homo sapiens
cagttccttcacatt

SEQ ID NO: 156912 - DNA, 15 bp, Homo sapiens
tcagttccttcacat

SEQ ID NO: 156913 - DNA, 15 bp, Homo sapiens
ctcagttccttcaca

SEQ ID NO: 156914 - DNA, 15 bp, Homo sapiens
tctcagttccttcac

SEQ ID NO: 156915 - DNA, 15 bp, Homo sapiens
atctcagttccttca

SEQ ID NO: 156916 - DNA, 15 bp, Homo sapiens
aatctcagttccttc

SEQ ID NO: 156917 - DNA, 15 bp, Homo sapiens
gaatctcagttcctt

SEQ ID NO: 156918 - DNA, 15 bp, Homo sapiens
agaatctcagttcct

SEQ ID NO: 156919 - DNA, 15 bp, Homo sapiens
tagaatctcagttcc

SEQ ID NO: 156920 - DNA, 15 bp, Homo sapiens
gtagaatctcagttc

SEQ ID NO: 156921 - DNA, 15 bp, Homo sapiens
ggtagaatctcagtt

SEQ ID NO: 156922 - DNA, 15 bp, Homo sapiens
gggtagaatctcagt

SEQ ID NO: 156923 - DNA, 15 bp, Homo sapiens
agggtagaatctcag

SEQ ID NO: 156924 - DNA, 15 bp, Homo sapiens
aagggtagaatctca

SEQ ID NO: 156925 - DNA, 15 bp, Homo sapiens
gaagggtagaatctc

SEQ ID NO: 156926 - DNA, 15 bp, Homo sapiens
ggaagggtagaatct

SEQ ID NO: 156927 - DNA, 15 bp, Homo sapiens
aggaagggtagaatc

SEQ ID NO: 156928 - DNA, 15 bp, Homo sapiens
caggaagggtagaat

SEQ ID NO: 156929 - DNA, 15 bp, Homo sapiens
gcaggaagggtagaa

SEQ ID NO: 156930 - DNA, 15 bp, Homo sapiens
tgcaggaagggtaga

SEQ ID NO: 156931 - DNA, 15 bp, Homo sapiens
ttgcaggaagggtag

SEQ ID NO: 156932 - DNA, 15 bp, Homo sapiens
cttgcaggaagggta

SEQ ID NO: 156933 - DNA, 15 bp, Homo sapiens
gcttgcaggaagggt

SEQ ID NO: 156934 - DNA, 15 bp, Homo sapiens
agcttgcaggaaggg

SEQ ID NO: 156935 - DNA, 15 bp, Homo sapiens
tagcttgcaggaagg

SEQ ID NO: 156936 - DNA, 15 bp, Homo sapiens
ctagcttgcaggaag

SEQ ID NO: 156937 - DNA, 15 bp, Homo sapiens
gctagcttgcaggaa

SEQ ID NO: 156938 - DNA, 15 bp, Homo sapiens
tgctagcttgcagga

SEQ ID NO: 156939 - DNA, 15 bp, Homo sapiens
ttgctagcttgcagg

SEQ ID NO: 156940 - DNA, 15 bp, Homo sapiens
tttgctagcttgcag

SEQ ID NO: 156941 - DNA, 15 bp, Homo sapiens
ctttgctagcttgca

SEQ ID NO: 156942 - DNA, 15 bp, Homo sapiens
actttgctagcttgc

SEQ ID NO: 156943 - DNA, 15 bp, Homo sapiens
cactttgctagcttg

SEQ ID NO: 156944 - DNA, 15 bp, Homo sapiens
ccactttgctagctt

SEQ ID NO: 156945 - DNA, 15 bp, Homo sapiens
gccactttgctagct

SEQ ID NO: 156946 - DNA, 15 bp, Homo sapiens
ggccactttgctagc

SEQ ID NO: 156947 - DNA, 15 bp, Homo sapiens
aggccactttgctag

SEQ ID NO: 156948 - DNA, 15 bp, Homo sapiens
caggccactttgcta

SEQ ID NO: 156949 - DNA, 15 bp, Homo sapiens
gcaggccactttgct

SEQ ID NO: 156950 - DNA, 15 bp, Homo sapiens
ggcaggccactttgc

SEQ ID NO: 156951 - DNA, 15 bp, Homo sapiens
tggcaggccactttg

SEQ ID NO: 156952 - DNA, 15 bp, Homo sapiens
ctggcaggccacttt

SEQ ID NO: 156953 - DNA, 15 bp, Homo sapiens
actggcaggccactt

SEQ ID NO: 156954 - DNA, 15 bp, Homo sapiens
aactggcaggccact

SEQ ID NO: 156955 - DNA, 15 bp, Homo sapiens
taactggcaggccac

SEQ ID NO: 156956 - DNA, 15 bp, Homo sapiens
gtaactggcaggcca

SEQ ID NO: 156957 - DNA, 15 bp, Homo sapiens
tgtaactggcaggcc

SEQ ID NO: 156958 - DNA, 15 bp, Homo sapiens
atgtaactggcaggc

SEQ ID NO: 156959 - DNA, 15 bp, Homo sapiens
gatgtaactggcagg

SEQ ID NO: 156960 - DNA, 15 bp, Homo sapiens
agatgtaactggcag

SEQ ID NO: 156961 - DNA, 15 bp, Homo sapiens
cagatgtaactggca

SEQ ID NO: 156962 - DNA, 15 bp, Homo sapiens
acagatgtaactggc

SEQ ID NO: 156963 - DNA, 15 bp, Homo sapiens
cacagatgtaactgg

SEQ ID NO: 156964 - DNA, 15 bp, Homo sapiens
gcacagatgtaactg

SEQ ID NO: 156965 - DNA, 15 bp, Homo sapiens
tgcacagatgtaact

SEQ ID NO: 156966 - DNA, 15 bp, Homo sapiens
atgcacagatgtaac

SEQ ID NO: 156967 - DNA, 15 bp, Homo sapiens
catgcacagatgtaa

SEQ ID NO: 156968 - DNA, 15 bp, Homo sapiens
gcatgcacagatgta

SEQ ID NO: 156969 - DNA, 15 bp, Homo sapiens
tgcatgcacagatgt

SEQ ID NO: 156970 - DNA, 15 bp, Homo sapiens
gtgcatgcacagatg

SEQ ID NO: 156971 - DNA, 15 bp, Homo sapiens
tgtgcatgcacagat

SEQ ID NO: 156972 - DNA, 15 bp, Homo sapiens
gtgtgcatgcacaga

SEQ ID NO: 156973 - DNA, 15 bp, Homo sapiens
tgtgtgcatgcacag

SEQ ID NO: 156974 - DNA, 15 bp, Homo sapiens
gtgtgtgcatgcaca

SEQ ID NO: 156975 - DNA, 15 bp, Homo sapiens
tgtgtgtgcatgcac

SEQ ID NO: 156976 - DNA, 15 bp, Homo sapiens
gtgtgtgtgcatgca

SEQ ID NO: 156977 - DNA, 15 bp, Homo sapiens
tgtgtgtgtgcatgc

SEQ ID NO: 156978 - DNA, 15 bp, Homo sapiens
gtgtgtgtgtgcatg

SEQ ID NO: 156979 - DNA, 15 bp, Homo sapiens
tgtgtgtgtgtgcat

SEQ ID NO: 156980 - DNA, 15 bp, Homo sapiens
gtgtgtgtgtgtgca

SEQ ID NO: 156981 - DNA, 15 bp, Homo sapiens
tgtgtgtgtgtgtgc

SEQ ID NO: 156982 - DNA, 15 bp, Homo sapiens
ctgtgtgtgtgtgtg

SEQ ID NO: 156983 - DNA, 15 bp, Homo sapiens
actgtgtgtgtgtgt

SEQ ID NO: 156984 - DNA, 15 bp, Homo sapiens
aactgtgtgtgtgtg

SEQ ID NO: 156985 - DNA, 15 bp, Homo sapiens
taactgtgtgtgtgt

SEQ ID NO: 156986 - DNA, 15 bp, Homo sapiens
ataactgtgtgtgtg

SEQ ID NO: 156987 - DNA, 15 bp, Homo sapiens
tataactgtgtgtgt

SEQ ID NO: 156988 - DNA, 15 bp, Homo sapiens
atataactgtgtgtg

SEQ ID NO: 156989 - DNA, 15 bp, Homo sapiens
tatataactgtgtgt

SEQ ID NO: 156990 - DNA, 15 bp, Homo sapiens
atatataactgtgtg

SEQ ID NO: 156991 - DNA, 15 bp, Homo sapiens
catatataactgtgt

SEQ ID NO: 156992 - DNA, 15 bp, Homo sapiens
gcatatataactgtg

SEQ ID NO: 156993 - DNA, 15 bp, Homo sapiens
tgcatatataactgt

SEQ ID NO: 156994 - DNA, 15 bp, Homo sapiens
gtgcatatataactg

SEQ ID NO: 156995 - DNA, 15 bp, Homo sapiens
tgtgcatatataact

SEQ ID NO: 156996 - DNA, 15 bp, Homo sapiens
gtgtgcatatataac

SEQ ID NO: 156997 - DNA, 15 bp, Homo sapiens
tgtgtgcatatataa

SEQ ID NO: 156998 - DNA, 15 bp, Homo sapiens
gtgtgtgcatatata

SEQ ID NO: 156999 - DNA, 15 bp, Homo sapiens
tgtgtgtgcatatat

SEQ ID NO: 157000 - DNA, 15 bp, Homo sapiens
atgtgtgtgcatata

SEQ ID NO: 157001 - DNA, 15 bp, Homo sapiens
tatgtgtgtgcatat

SEQ ID NO: 157002 - DNA, 15 bp, Homo sapiens
ttatgtgtgtgcata

SEQ ID NO: 157003 - DNA, 15 bp, Homo sapiens
tttatgtgtgtgcat

SEQ ID NO: 157004 - DNA, 15 bp, Homo sapiens
ttttatgtgtgtgca

SEQ ID NO: 157005 - DNA, 15 bp, Homo sapiens
gttttatgtgtgtgc

SEQ ID NO: 157006 - DNA, 15 bp, Homo sapiens
tgttttatgtgtgtg

SEQ ID NO: 157007 - DNA, 15 bp, Homo sapiens
gtgttttatgtgtgt

SEQ ID NO: 157008 - DNA, 15 bp, Homo sapiens
cgtgttttatgtgtg

SEQ ID NO: 157009 - DNA, 15 bp, Homo sapiens
tcgtgttttatgtgt

SEQ ID NO: 157010 - DNA, 15 bp, Homo sapiens
ctcgtgttttatgtg

SEQ ID NO: 157011 - DNA, 15 bp, Homo sapiens
tctcgtgttttatgt

SEQ ID NO: 157012 - DNA, 15 bp, Homo sapiens
gtctcgtgttttatg

SEQ ID NO: 157013 - DNA, 15 bp, Homo sapiens
ggtctcgtgttttat

SEQ ID NO: 157014 - DNA, 15 bp, Homo sapiens
aggtctcgtgtttta

SEQ ID NO: 157015 - DNA, 15 bp, Homo sapiens
aaggtctcgtgtttt

SEQ ID NO: 157016 - DNA, 15 bp, Homo sapiens
aaaggtctcgtgttt

SEQ ID NO: 157017 - DNA, 15 bp, Homo sapiens
caaaggtctcgtgtt

SEQ ID NO: 157018 - DNA, 15 bp, Homo sapiens
ccaaaggtctcgtgt

SEQ ID NO: 157019 - DNA, 15 bp, Homo sapiens
cccaaaggtctcgtg

SEQ ID NO: 157020 - DNA, 15 bp, Homo sapiens
acccaaaggtctcgt

SEQ ID NO: 157021 - DNA, 15 bp, Homo sapiens
gacccaaaggtctcg

SEQ ID NO: 157022 - DNA, 15 bp, Homo sapiens
tgacccaaaggtctc

SEQ ID NO: 157023 - DNA, 15 bp, Homo sapiens
ctgacccaaaggtct

SEQ ID NO: 157024 - DNA, 15 bp, Homo sapiens
cctgacccaaaggtc

SEQ ID NO: 157025 - DNA, 15 bp, Homo sapiens
ccctgacccaaaggt

SEQ ID NO: 157026 - DNA, 15 bp, Homo sapiens
tccctgacccaaagg

SEQ ID NO: 157027 - DNA, 15 bp, Homo sapiens
ctccctgacccaaag

SEQ ID NO: 157028 - DNA, 15 bp, Homo sapiens
tctccctgacccaaa

SEQ ID NO: 157029 - DNA, 15 bp, Homo sapiens
ttctccctgacccaa

SEQ ID NO: 157030 - DNA, 15 bp, Homo sapiens
tttctccctgaccca

SEQ ID NO: 157031 - DNA, 15 bp, Homo sapiens
ctttctccctgaccc

SEQ ID NO: 157032 - DNA, 15 bp, Homo sapiens
gctttctccctgacc

SEQ ID NO: 157033 - DNA, 15 bp, Homo sapiens
ggctttctccctgac

SEQ ID NO: 157034 - DNA, 15 bp, Homo sapiens
tggctttctccctga

SEQ ID NO: 157035 - DNA, 15 bp, Homo sapiens
ctggctttctccctg

SEQ ID NO: 157036 - DNA, 15 bp, Homo sapiens
tctggctttctccct

SEQ ID NO: 157037 - DNA, 15 bp, Homo sapiens
atctggctttctccc

SEQ ID NO: 157038 - DNA, 15 bp, Homo sapiens
gatctggctttctcc

SEQ ID NO: 157039 - DNA, 15 bp, Homo sapiens
ggatctggctttctc

SEQ ID NO: 157040 - DNA, 15 bp, Homo sapiens
aggatctggctttct

SEQ ID NO: 157041 - DNA, 15 bp, Homo sapiens
gaggatctggctttc

SEQ ID NO: 157042 - DNA, 15 bp, Homo sapiens
tgaggatctggcttt

SEQ ID NO: 157043 - DNA, 15 bp, Homo sapiens
gtgaggatctggctt

SEQ ID NO: 157044 - DNA, 15 bp, Homo sapiens
agtgaggatctggct

SEQ ID NO: 157045 - DNA, 15 bp, Homo sapiens
gagtgaggatctggc

SEQ ID NO: 157046 - DNA, 15 bp, Homo sapiens
tgagtgaggatctgg

SEQ ID NO: 157047 - DNA, 15 bp, Homo sapiens
gtgagtgaggatctg

SEQ ID NO: 157048 - DNA, 15 bp, Homo sapiens
cgtgagtgaggatct

SEQ ID NO: 157049 - DNA, 15 bp, Homo sapiens
ccgtgagtgaggatc

SEQ ID NO: 157050 - DNA, 15 bp, Homo sapiens
gccgtgagtgaggat

SEQ ID NO: 157051 - DNA, 15 bp, Homo sapiens
tgccgtgagtgagga

SEQ ID NO: 157052 - DNA, 15 bp, Homo sapiens
ctgccgtgagtgagg

SEQ ID NO: 157053 - DNA, 15 bp, Homo sapiens
tctgccgtgagtgag

SEQ ID NO: 157054 - DNA, 15 bp, Homo sapiens
ttctgccgtgagtga

SEQ ID NO: 157055 - DNA, 15 bp, Homo sapiens
cttctgccgtgagtg

SEQ ID NO: 157056 - DNA, 15 bp, Homo sapiens
gcttctgccgtgagt

SEQ ID NO: 157057 - DNA, 15 bp, Homo sapiens
tgcttctgccgtgag

SEQ ID NO: 157058 - DNA, 15 bp, Homo sapiens
ctgcttctgccgtga

SEQ ID NO: 157059 - DNA, 15 bp, Homo sapiens
gctgcttctgccgtg

SEQ ID NO: 157060 - DNA, 15 bp, Homo sapiens
tgctgcttctgccgt

SEQ ID NO: 157061 - DNA, 15 bp, Homo sapiens
ctgctgcttctgccg

SEQ ID NO: 157062 - DNA, 15 bp, Homo sapiens
gctgctgcttctgcc

SEQ ID NO: 157063 - DNA, 15 bp, Homo sapiens
ggctgctgcttctgc

SEQ ID NO: 157064 - DNA, 15 bp, Homo sapiens
tggctgctgcttctg

SEQ ID NO: 157065 - DNA, 15 bp, Homo sapiens
ttggctgctgcttct

SEQ ID NO: 157066 - DNA, 15 bp, Homo sapiens
tttggctgctgcttc

SEQ ID NO: 157067 - DNA, 15 bp, Homo sapiens
ctttggctgctgctt

SEQ ID NO: 157068 - DNA, 15 bp, Homo sapiens
gctttggctgctgct

SEQ ID NO: 157069 - DNA, 15 bp, Homo sapiens
tgctttggctgctgc

SEQ ID NO: 157070 - DNA, 15 bp, Homo sapiens
ttgctttggctgctg

SEQ ID NO: 157071 - DNA, 15 bp, Homo sapiens
gttgctttggctgct

SEQ ID NO: 157072 - DNA, 15 bp, Homo sapiens
tgttgctttggctgc

SEQ ID NO: 157073 - DNA, 15 bp, Homo sapiens
atgttgctttggctg

SEQ ID NO: 157074 - DNA, 15 bp, Homo sapiens
gatgttgctttggct

SEQ ID NO: 157075 - DNA, 15 bp, Homo sapiens
agatgttgctttggc

SEQ ID NO: 157076 - DNA, 15 bp, Homo sapiens
gagatgttgctttgg

SEQ ID NO: 157077 - DNA, 15 bp, Homo sapiens
tgagatgttgctttg

SEQ ID NO: 157078 - DNA, 15 bp, Homo sapiens
atgagatgttgcttt

SEQ ID NO: 157079 - DNA, 15 bp, Homo sapiens
catgagatgttgctt

SEQ ID NO: 157080 - DNA, 15 bp, Homo sapiens
acatgagatgttgct

SEQ ID NO: 157081 - DNA, 15 bp, Homo sapiens
cacatgagatgttgc

SEQ ID NO: 157082 - DNA, 15 bp, Homo sapiens
ccacatgagatgttg

SEQ ID NO: 157083 - DNA, 15 bp, Homo sapiens
accacatgagatgtt

SEQ ID NO: 157084 - DNA, 15 bp, Homo sapiens
aaccacatgagatgt

SEQ ID NO: 157085 - DNA, 15 bp, Homo sapiens
aaaccacatgagatg

SEQ ID NO: 157086 - DNA, 15 bp, Homo sapiens
aaaaccacatgagat

SEQ ID NO: 157087 - DNA, 15 bp, Homo sapiens
gaaaaccacatgaga

SEQ ID NO: 157088 - DNA, 15 bp, Homo sapiens
ggaaaaccacatgag

SEQ ID NO: 157089 - DNA, 15 bp, Homo sapiens
tggaaaaccacatga

SEQ ID NO: 157090 - DNA, 15 bp, Homo sapiens
ttggaaaaccacatg

SEQ ID NO: 157091 - DNA, 15 bp, Homo sapiens
cttggaaaaccacat

SEQ ID NO: 157092 - DNA, 15 bp, Homo sapiens
gcttggaaaaccaca

SEQ ID NO: 157093 - DNA, 15 bp, Homo sapiens
ggcttggaaaaccac

SEQ ID NO: 157094 - DNA, 15 bp, Homo sapiens
gggcttggaaaacca

SEQ ID NO: 157095 - DNA, 15 bp, Homo sapiens
ggggcttggaaaacc

SEQ ID NO: 157096 - DNA, 15 bp, Homo sapiens
tggggcttggaaaac

SEQ ID NO: 157097 - DNA, 15 bp, Homo sapiens
ctggggcttggaaaa

SEQ ID NO: 157098 - DNA, 15 bp, Homo sapiens
actggggcttggaaa

SEQ ID NO: 157099 - DNA, 15 bp, Homo sapiens
gactggggcttggaa

SEQ ID NO: 157100 - DNA, 15 bp, Homo sapiens
ggactggggcttgga

SEQ ID NO: 157101 - DNA, 15 bp, Homo sapiens
gggactggggcttgg

SEQ ID NO: 157102 - DNA, 15 bp, Homo sapiens
agggactggggcttg

SEQ ID NO: 157103 - DNA, 15 bp, Homo sapiens
tagggactggggctt

SEQ ID NO: 157104 - DNA, 15 bp, Homo sapiens
gtagggactggggct

SEQ ID NO: 157105 - DNA, 15 bp, Homo sapiens
tgtagggactggggc

SEQ ID NO: 157106 - DNA, 15 bp, Homo sapiens
ctgtagggactgggg

SEQ ID NO: 157107 - DNA, 15 bp, Homo sapiens
tctgtagggactggg

SEQ ID NO: 157108 - DNA, 15 bp, Homo sapiens
ctctgtagggactgg

SEQ ID NO: 157109 - DNA, 15 bp, Homo sapiens
tctctgtagggactg

SEQ ID NO: 157110 - DNA, 15 bp, Homo sapiens
gtctctgtagggact

SEQ ID NO: 157111 - DNA, 15 bp, Homo sapiens
tgtctctgtagggac

SEQ ID NO: 157112 - DNA, 15 bp, Homo sapiens
ctgtctctgtaggga

SEQ ID NO: 157113 - DNA, 15 bp, Homo sapiens
tctgtctctgtaggg

SEQ ID NO: 157114 - DNA, 15 bp, Homo sapiens
ctctgtctctgtagg

SEQ ID NO: 157115 - DNA, 15 bp, Homo sapiens
tctctgtctctgtag

SEQ ID NO: 157116 - DNA, 15 bp, Homo sapiens
ctctctgtctctgta

SEQ ID NO: 157117 - DNA, 15 bp, Homo sapiens
cctctctgtctctgt

SEQ ID NO: 157118 - DNA, 15 bp, Homo sapiens
ccctctctgtctctg

SEQ ID NO: 157119 - DNA, 15 bp, Homo sapiens
gccctctctgtctct

SEQ ID NO: 157120 - DNA, 15 bp, Homo sapiens
ggccctctctgtctc

SEQ ID NO: 157121 - DNA, 15 bp, Homo sapiens
tggccctctctgtct

SEQ ID NO: 157122 - DNA, 15 bp, Homo sapiens
ctggccctctctgtc

SEQ ID NO: 157123 - DNA, 15 bp, Homo sapiens
cctggccctctctgt

SEQ ID NO: 157124 - DNA, 15 bp, Homo sapiens
acctggccctctctg

SEQ ID NO: 157125 - DNA, 15 bp, Homo sapiens
cacctggccctctct

SEQ ID NO: 157126 - DNA, 15 bp, Homo sapiens
ccacctggccctctc

SEQ ID NO: 157127 - DNA, 15 bp, Homo sapiens
gccacctggccctct

SEQ ID NO: 157128 - DNA, 15 bp, Homo sapiens
tgccacctggccctc

SEQ ID NO: 157129 - DNA, 15 bp, Homo sapiens
gtgccacctggccct

SEQ ID NO: 157130 - DNA, 15 bp, Homo sapiens
ggtgccacctggccc

SEQ ID NO: 157131 - DNA, 15 bp, Homo sapiens
aggtgccacctggcc

SEQ ID NO: 157132 - DNA, 15 bp, Homo sapiens
caggtgccacctggc

SEQ ID NO: 157133 - DNA, 15 bp, Homo sapiens
acaggtgccacctgg

SEQ ID NO: 157134 - DNA, 15 bp, Homo sapiens
cacaggtgccacctg

SEQ ID NO: 157135 - DNA, 15 bp, Homo sapiens
gcacaggtgccacct

SEQ ID NO: 157136 - DNA, 15 bp, Homo sapiens
tgcacaggtgccacc

SEQ ID NO: 157137 - DNA, 15 bp, Homo sapiens
atgcacaggtgccac

SEQ ID NO: 157138 - DNA, 15 bp, Homo sapiens
catgcacaggtgcca

SEQ ID NO: 157139 - DNA, 15 bp, Homo sapiens
gcatgcacaggtgcc

SEQ ID NO: 157140 - DNA, 15 bp, Homo sapiens
tgcatgcacaggtgc

SEQ ID NO: 157141 - DNA, 15 bp, Homo sapiens
ctgcatgcacaggtg

SEQ ID NO: 157142 - DNA, 15 bp, Homo sapiens
gctgcatgcacaggt

SEQ ID NO: 157143 - DNA, 15 bp, Homo sapiens
cgctgcatgcacagg

SEQ ID NO: 157144 - DNA, 15 bp, Homo sapiens
ccgctgcatgcacag

SEQ ID NO: 157145 - DNA, 15 bp, Homo sapiens
cccgctgcatgcaca

SEQ ID NO: 157146 - DNA, 15 bp, Homo sapiens
ccccgctgcatgcac

SEQ ID NO: 157147 - DNA, 15 bp, Homo sapiens
accccgctgcatgca

SEQ ID NO: 157148 - DNA, 15 bp, Homo sapiens
taccccgctgcatgc

SEQ ID NO: 157149 - DNA, 15 bp, Homo sapiens
gtaccccgctgcatg

SEQ ID NO: 157150 - DNA, 15 bp, Homo sapiens
ggtaccccgctgcat

SEQ ID NO: 157151 - DNA, 15 bp, Homo sapiens
aggtaccccgctgca

SEQ ID NO: 157152 - DNA, 15 bp, Homo sapiens
aaggtaccccgctgc

SEQ ID NO: 157153 - DNA, 15 bp, Homo sapiens
caaggtaccccgctg

SEQ ID NO: 157154 - DNA, 15 bp, Homo sapiens
gcaaggtaccccgct

SEQ ID NO: 157155 - DNA, 15 bp, Homo sapiens
tgcaaggtaccccgc

SEQ ID NO: 157156 - DNA, 15 bp, Homo sapiens
ctgcaaggtaccccg

SEQ ID NO: 157157 - DNA, 15 bp, Homo sapiens
cctgcaaggtacccc

SEQ ID NO: 157158 - DNA, 15 bp, Homo sapiens
tcctgcaaggtaccc

SEQ ID NO: 157159 - DNA, 15 bp, Homo sapiens
ctcctgcaaggtacc

SEQ ID NO: 157160 - DNA, 15 bp, Homo sapiens
cctcctgcaaggtac

SEQ ID NO: 157161 - DNA, 15 bp, Homo sapiens
ccctcctgcaaggta

SEQ ID NO: 157162 - DNA, 15 bp, Homo sapiens
tccctcctgcaaggt

SEQ ID NO: 157163 - DNA, 15 bp, Homo sapiens
ttccctcctgcaagg

SEQ ID NO: 157164 - DNA, 15 bp, Homo sapiens
tttccctcctgcaag

SEQ ID NO: 157165 - DNA, 15 bp, Homo sapiens
atttccctcctgcaa

SEQ ID NO: 157166 - DNA, 15 bp, Homo sapiens
gatttccctcctgca

SEQ ID NO: 157167 - DNA, 15 bp, Homo sapiens
ggatttccctcctgc

SEQ ID NO: 157168 - DNA, 15 bp, Homo sapiens
aggatttccctcctg

SEQ ID NO: 157169 - DNA, 15 bp, Homo sapiens
caggatttccctcct

SEQ ID NO: 157170 - DNA, 15 bp, Homo sapiens
tcaggatttccctcc

SEQ ID NO: 157171 - DNA, 15 bp, Homo sapiens
atcaggatttccctc

SEQ ID NO: 157172 - DNA, 15 bp, Homo sapiens
aatcaggatttccct

SEQ ID NO: 157173 - DNA, 15 bp, Homo sapiens
aaatcaggatttccc

SEQ ID NO: 157174 - DNA, 15 bp, Homo sapiens
aaaatcaggatttcc

SEQ ID NO: 157175 - DNA, 15 bp, Homo sapiens
taaaatcaggatttc

SEQ ID NO: 157176 - DNA, 15 bp, Homo sapiens
gtaaaatcaggattt

SEQ ID NO: 157177 - DNA, 15 bp, Homo sapiens
tgtaaaatcaggatt

SEQ ID NO: 157178 - DNA, 15 bp, Homo sapiens
gtgtaaaatcaggat

SEQ ID NO: 157179 - DNA, 15 bp, Homo sapiens
tgtgtaaaatcagga

SEQ ID NO: 157180 - DNA, 15 bp, Homo sapiens
ttgtgtaaaatcagg

SEQ ID NO: 157181 - DNA, 15 bp, Homo sapiens
tttgtgtaaaatcag

SEQ ID NO: 157182 - DNA, 15 bp, Homo sapiens
ctttgtgtaaaatca

SEQ ID NO: 157183 - DNA, 15 bp, Homo sapiens
gctttgtgtaaaatc

SEQ ID NO: 157184 - DNA, 15 bp, Homo sapiens
agctttgtgtaaaat

SEQ ID NO: 157185 - DNA, 15 bp, Homo sapiens
cagctttgtgtaaaa

SEQ ID NO: 157186 - DNA, 15 bp, Homo sapiens
gcagctttgtgtaaa

SEQ ID NO: 157187 - DNA, 15 bp, Homo sapiens
agcagctttgtgtaa

SEQ ID NO: 157188 - DNA, 15 bp, Homo sapiens
gagcagctttgtgta

SEQ ID NO: 157189 - DNA, 15 bp, Homo sapiens
ggagcagctttgtgt

SEQ ID NO: 157190 - DNA, 15 bp, Homo sapiens
gggagcagctttgtg

SEQ ID NO: 157191 - DNA, 15 bp, Homo sapiens
ggggagcagctttgt

SEQ ID NO: 157192 - DNA, 15 bp, Homo sapiens
gggggagcagctttg

SEQ ID NO: 157193 - DNA, 15 bp, Homo sapiens
ggggggagcagcttt

SEQ ID NO: 157194 - DNA, 15 bp, Homo sapiens
tggggggagcagctt

SEQ ID NO: 157195 - DNA, 15 bp, Homo sapiens
gtggggggagcagct

SEQ ID NO: 157196 - DNA, 15 bp, Homo sapiens
cgtggggggagcagc

SEQ ID NO: 157197 - DNA, 15 bp, Homo sapiens
gcgtggggggagcag

SEQ ID NO: 157198 - DNA, 15 bp, Homo sapiens
ggcgtggggggagca

SEQ ID NO: 157199 - DNA, 15 bp, Homo sapiens
gggcgtggggggagc

SEQ ID NO: 157200 - DNA, 15 bp, Homo sapiens
agggcgtggggggag

SEQ ID NO: 157201 - DNA, 15 bp, Homo sapiens
cagggcgtgggggga

SEQ ID NO: 157202 - DNA, 15 bp, Homo sapiens
gcagggcgtgggggg

SEQ ID NO: 157203 - DNA, 15 bp, Homo sapiens
ggcagggcgtggggg

SEQ ID NO: 157204 - DNA, 15 bp, Homo sapiens
aggcagggcgtgggg

SEQ ID NO: 157205 - DNA, 15 bp, Homo sapiens
aaggcagggcgtggg

SEQ ID NO: 157206 - DNA, 15 bp, Homo sapiens
caaggcagggcgtgg

SEQ ID NO: 157207 - DNA, 15 bp, Homo sapiens
tcaaggcagggcgtg

SEQ ID NO: 157208 - DNA, 15 bp, Homo sapiens
gtcaaggcagggcgt

SEQ ID NO: 157209 - DNA, 15 bp, Homo sapiens
agtcaaggcagggcg

SEQ ID NO: 157210 - DNA, 15 bp, Homo sapiens
gagtcaaggcagggc

SEQ ID NO: 157211 - DNA, 15 bp, Homo sapiens
agagtcaaggcaggg

SEQ ID NO: 157212 - DNA, 15 bp, Homo sapiens
cagagtcaaggcagg

SEQ ID NO: 157213 - DNA, 15 bp, Homo sapiens
ccagagtcaaggcag

SEQ ID NO: 157214 - DNA, 15 bp, Homo sapiens
cccagagtcaaggca

SEQ ID NO: 157215 - DNA, 15 bp, Homo sapiens
tcccagagtcaaggc

SEQ ID NO: 157216 - DNA, 15 bp, Homo sapiens
atcccagagtcaagg

SEQ ID NO: 157217 - DNA, 15 bp, Homo sapiens
catcccagagtcaag

SEQ ID NO: 157218 - DNA, 15 bp, Homo sapiens
tcatcccagagtcaa

SEQ ID NO: 157219 - DNA, 15 bp, Homo sapiens
gtcatcccagagtca

SEQ ID NO: 157220 - DNA, 15 bp, Homo sapiens
cgtcatcccagagtc

SEQ ID NO: 157221 - DNA, 15 bp, Homo sapiens
acgtcatcccagagt

SEQ ID NO: 157222 - DNA, 15 bp, Homo sapiens
gacgtcatcccagag

SEQ ID NO: 157223 - DNA, 15 bp, Homo sapiens
agacgtcatcccaga

SEQ ID NO: 157224 - DNA, 15 bp, Homo sapiens
gagacgtcatcccag

SEQ ID NO: 157225 - DNA, 15 bp, Homo sapiens
tgagacgtcatccca

SEQ ID NO: 157226 - DNA, 15 bp, Homo sapiens
ctgagacgtcatccc

SEQ ID NO: 157227 - DNA, 15 bp, Homo sapiens
tctgagacgtcatcc

SEQ ID NO: 157228 - DNA, 15 bp, Homo sapiens
ctctgagacgtcatc

SEQ ID NO: 157229 - DNA, 15 bp, Homo sapiens
gctctgagacgtcat

SEQ ID NO: 157230 - DNA, 15 bp, Homo sapiens
agctctgagacgtca

SEQ ID NO: 157231 - DNA, 15 bp, Homo sapiens
cagctctgagacgtc

SEQ ID NO: 157232 - DNA, 15 bp, Homo sapiens
acagctctgagacgt

SEQ ID NO: 157233 - DNA, 15 bp, Homo sapiens
cacagctctgagacg

SEQ ID NO: 157234 - DNA, 15 bp, Homo sapiens
gcacagctctgagac

SEQ ID NO: 157235 - DNA, 15 bp, Homo sapiens
tgcacagctctgaga

SEQ ID NO: 157236 - DNA, 15 bp, Homo sapiens
ctgcacagctctgag

SEQ ID NO: 157237 - DNA, 15 bp, Homo sapiens
actgcacagctctga

SEQ ID NO: 157238 - DNA, 15 bp, Homo sapiens
tactgcacagctctg

SEQ ID NO: 157239 - DNA, 15 bp, Homo sapiens
gtactgcacagctct

SEQ ID NO: 157240 - DNA, 15 bp, Homo sapiens
tgtactgcacagctc

SEQ ID NO: 157241 - DNA, 15 bp, Homo sapiens
ttgtactgcacagct

SEQ ID NO: 157242 - DNA, 15 bp, Homo sapiens
gttgtactgcacagc

SEQ ID NO: 157243 - DNA, 15 bp, Homo sapiens
tgttgtactgcacag

SEQ ID NO: 157244 - DNA, 15 bp, Homo sapiens
atgttgtactgcaca

SEQ ID NO: 157245 - DNA, 15 bp, Homo sapiens
aatgttgtactgcac

SEQ ID NO: 157246 - DNA, 15 bp, Homo sapiens
gaatgttgtactgca

SEQ ID NO: 157247 - DNA, 15 bp, Homo sapiens
agaatgttgtactgc

SEQ ID NO: 157248 - DNA, 15 bp, Homo sapiens
aagaatgttgtactg

SEQ ID NO: 157249 - DNA, 15 bp, Homo sapiens
taagaatgttgtact

SEQ ID NO: 157250 - DNA, 15 bp, Homo sapiens
ttaagaatgttgtac

SEQ ID NO: 157251 - DNA, 15 bp, Homo sapiens
tttaagaatgttgta

SEQ ID NO: 157252 - DNA, 15 bp, Homo sapiens
atttaagaatgttgt

SEQ ID NO: 157253 - DNA, 15 bp, Homo sapiens
aatttaagaatgttg

SEQ ID NO: 157254 - DNA, 15 bp, Homo sapiens
caatttaagaatgtt

SEQ ID NO: 157255 - DNA, 15 bp, Homo sapiens
ccaatttaagaatgt

SEQ ID NO: 157256 - DNA, 15 bp, Homo sapiens
gccaatttaagaatg

SEQ ID NO: 157257 - DNA, 15 bp, Homo sapiens
agccaatttaagaat

SEQ ID NO: 157258 - DNA, 15 bp, Homo sapiens
cagccaatttaagaa

SEQ ID NO: 157259 - DNA, 15 bp, Homo sapiens
ccagccaatttaaga

SEQ ID NO: 157260 - DNA, 15 bp, Homo sapiens
cccagccaatttaag

SEQ ID NO: 157261 - DNA, 15 bp, Homo sapiens
tcccagccaatttaa

SEQ ID NO: 157262 - DNA, 15 bp, Homo sapiens
gtcccagccaattta

SEQ ID NO: 157263 - DNA, 15 bp, Homo sapiens
agtcccagccaattt

SEQ ID NO: 157264 - DNA, 15 bp, Homo sapiens
gagtcccagccaatt

SEQ ID NO: 157265 - DNA, 15 bp, Homo sapiens
tgagtcccagccaat

SEQ ID NO: 157266 - DNA, 15 bp, Homo sapiens
ctgagtcccagccaa

SEQ ID NO: 157267 - DNA, 15 bp, Homo sapiens
gctgagtcccagcca

SEQ ID NO: 157268 - DNA, 15 bp, Homo sapiens
ggctgagtcccagcc

SEQ ID NO: 157269 - DNA, 15 bp, Homo sapiens
gggctgagtcccagc

SEQ ID NO: 157270 - DNA, 15 bp, Homo sapiens
agggctgagtcccag

SEQ ID NO: 157271 - DNA, 15 bp, Homo sapiens
cagggctgagtccca

SEQ ID NO: 157272 - DNA, 15 bp, Homo sapiens
gcagggctgagtccc

SEQ ID NO: 157273 - DNA, 15 bp, Homo sapiens
tgcagggctgagtcc

SEQ ID NO: 157274 - DNA, 15 bp, Homo sapiens
ctgcagggctgagtc

SEQ ID NO: 157275 - DNA, 15 bp, Homo sapiens
tctgcagggctgagt

SEQ ID NO: 157276 - DNA, 15 bp, Homo sapiens
ttctgcagggctgag

SEQ ID NO: 157277 - DNA, 15 bp, Homo sapiens
tttctgcagggctga

SEQ ID NO: 157278 - DNA, 15 bp, Homo sapiens
atttctgcagggctg

SEQ ID NO: 157279 - DNA, 15 bp, Homo sapiens
tatttctgcagggct

SEQ ID NO: 157280 - DNA, 15 bp, Homo sapiens
atatttctgcagggc

SEQ ID NO: 157281 - DNA, 15 bp, Homo sapiens
catatttctgcaggg

SEQ ID NO: 157282 - DNA, 15 bp, Homo sapiens
tcatatttctgcagg

SEQ ID NO: 157283 - DNA, 15 bp, Homo sapiens
atcatatttctgcag

SEQ ID NO: 157284 - DNA, 15 bp, Homo sapiens
tatcatatttctgca

SEQ ID NO: 157285 - DNA, 15 bp, Homo sapiens
atatcatatttctgc

SEQ ID NO: 157286 - DNA, 15 bp, Homo sapiens
gatatcatatttctg

SEQ ID NO: 157287 - DNA, 15 bp, Homo sapiens
agatatcatatttct

SEQ ID NO: 157288 - DNA, 15 bp, Homo sapiens
aagatatcatatttc

SEQ ID NO: 157289 - DNA, 15 bp, Homo sapiens
gaagatatcatattt

SEQ ID NO: 157290 - DNA, 15 bp, Homo sapiens
tgaagatatcatatt

SEQ ID NO: 157291 - DNA, 15 bp, Homo sapiens
ttgaagatatcatat

SEQ ID NO: 157292 - DNA, 15 bp, Homo sapiens
cttgaagatatcata

SEQ ID NO: 157293 - DNA, 15 bp, Homo sapiens
ccttgaagatatcat

SEQ ID NO: 157294 - DNA, 15 bp, Homo sapiens
tccttgaagatatca

SEQ ID NO: 157295 - DNA, 15 bp, Homo sapiens
ctccttgaagatatc

SEQ ID NO: 157296 - DNA, 15 bp, Homo sapiens
tctccttgaagatat

SEQ ID NO: 157297 - DNA, 15 bp, Homo sapiens
ttctccttgaagata

SEQ ID NO: 157298 - DNA, 15 bp, Homo sapiens
attctccttgaagat

SEQ ID NO: 157299 - DNA, 15 bp, Homo sapiens
gattctccttgaaga

SEQ ID NO: 157300 - DNA, 15 bp, Homo sapiens
cgattctccttgaag

SEQ ID NO: 157301 - DNA, 15 bp, Homo sapiens
acgattctccttgaa

SEQ ID NO: 157302 - DNA, 15 bp, Homo sapiens
aacgattctccttga

SEQ ID NO: 157303 - DNA, 15 bp, Homo sapiens
gaacgattctccttg

SEQ ID NO: 157304 - DNA, 15 bp, Homo sapiens
ggaacgattctcctt

SEQ ID NO: 157305 - DNA, 15 bp, Homo sapiens
gggaacgattctcct

SEQ ID NO: 157306 - DNA, 15 bp, Homo sapiens
tgggaacgattctcc

SEQ ID NO: 157307 - DNA, 15 bp, Homo sapiens
ttgggaacgattctc

SEQ ID NO: 157308 - DNA, 15 bp, Homo sapiens
tttgggaacgattct

SEQ ID NO: 157309 - DNA, 15 bp, Homo sapiens
ttttgggaacgattc

SEQ ID NO: 157310 - DNA, 15 bp, Homo sapiens
gttttgggaacgatt

SEQ ID NO: 157311 - DNA, 15 bp, Homo sapiens
ggttttgggaacgat

SEQ ID NO: 157312 - DNA, 15 bp, Homo sapiens
aggttttgggaacga

SEQ ID NO: 157313 - DNA, 15 bp, Homo sapiens
gaggttttgggaacg

SEQ ID NO: 157314 - DNA, 15 bp, Homo sapiens
agaggttttgggaac

SEQ ID NO: 157315 - DNA, 15 bp, Homo sapiens
gagaggttttgggaa

SEQ ID NO: 157316 - DNA, 15 bp, Homo sapiens
tgagaggttttggga

SEQ ID NO: 157317 - DNA, 15 bp, Homo sapiens
ttgagaggttttggg

SEQ ID NO: 157318 - DNA, 15 bp, Homo sapiens
tttgagaggttttgg

SEQ ID NO: 157319 - DNA, 15 bp, Homo sapiens
ctttgagaggttttg

SEQ ID NO: 157320 - DNA, 15 bp, Homo sapiens
gctttgagaggtttt

SEQ ID NO: 157321 - DNA, 15 bp, Homo sapiens
agctttgagaggttt

SEQ ID NO: 157322 - DNA, 15 bp, Homo sapiens
tagctttgagaggtt

SEQ ID NO: 157323 - DNA, 15 bp, Homo sapiens
atagctttgagaggt

SEQ ID NO: 157324 - DNA, 15 bp, Homo sapiens
catagctttgagagg

SEQ ID NO: 157325 - DNA, 15 bp, Homo sapiens
ccatagctttgagag

SEQ ID NO: 157326 - DNA, 15 bp, Homo sapiens
cccatagctttgaga

SEQ ID NO: 157327 - DNA, 15 bp, Homo sapiens
ccccatagctttgag

SEQ ID NO: 157328 - DNA, 15 bp, Homo sapiens
gccccatagctttga

SEQ ID NO: 157329 - DNA, 15 bp, Homo sapiens
agccccatagctttg

SEQ ID NO: 157330 - DNA, 15 bp, Homo sapiens
cagccccatagcttt

SEQ ID NO: 157331 - DNA, 15 bp, Homo sapiens
gcagccccatagctt

SEQ ID NO: 157332 - DNA, 15 bp, Homo sapiens
agcagccccatagct

SEQ ID NO: 157333 - DNA, 15 bp, Homo sapiens
gagcagccccatagc

SEQ ID NO: 157334 - DNA, 15 bp, Homo sapiens
agagcagccccatag

SEQ ID NO: 157335 - DNA, 15 bp, Homo sapiens
cagagcagccccata

SEQ ID NO: 157336 - DNA, 15 bp, Homo sapiens
tcagagcagccccat

SEQ ID NO: 157337 - DNA, 15 bp, Homo sapiens
ctcagagcagcccca

SEQ ID NO: 157338 - DNA, 15 bp, Homo sapiens
gctcagagcagcccc

SEQ ID NO: 157339 - DNA, 15 bp, Homo sapiens
ggctcagagcagccc

SEQ ID NO: 157340 - DNA, 15 bp, Homo sapiens
aggctcagagcagcc

SEQ ID NO: 157341 - DNA, 15 bp, Homo sapiens
caggctcagagcagc

SEQ ID NO: 157342 - DNA, 15 bp, Homo sapiens
acaggctcagagcag

SEQ ID NO: 157343 - DNA, 15 bp, Homo sapiens
aacaggctcagagca

SEQ ID NO: 157344 - DNA, 15 bp, Homo sapiens
aaacaggctcagagc

SEQ ID NO: 157345 - DNA, 15 bp, Homo sapiens
gaaacaggctcagag

SEQ ID NO: 157346 - DNA, 15 bp, Homo sapiens
ggaaacaggctcaga

SEQ ID NO: 157347 - DNA, 15 bp, Homo sapiens
aggaaacaggctcag

SEQ ID NO: 157348 - DNA, 15 bp, Homo sapiens
gaggaaacaggctca

SEQ ID NO: 157349 - DNA, 15 bp, Homo sapiens
tgaggaaacaggctc

SEQ ID NO: 157350 - DNA, 15 bp, Homo sapiens
ctgaggaaacaggct

SEQ ID NO: 157351 - DNA, 15 bp, Homo sapiens
gctgaggaaacaggc

SEQ ID NO: 157352 - DNA, 15 bp, Homo sapiens
agctgaggaaacagg

SEQ ID NO: 157353 - DNA, 15 bp, Homo sapiens
cagctgaggaaacag

SEQ ID NO: 157354 - DNA, 15 bp, Homo sapiens
acagctgaggaaaca

SEQ ID NO: 157355 - DNA, 15 bp, Homo sapiens
tacagctgaggaaac

SEQ ID NO: 157356 - DNA, 15 bp, Homo sapiens
ttacagctgaggaaa

SEQ ID NO: 157357 - DNA, 15 bp, Homo sapiens
tttacagctgaggaa

SEQ ID NO: 157358 - DNA, 15 bp, Homo sapiens
ctttacagctgagga

SEQ ID NO: 157359 - DNA, 15 bp, Homo sapiens
actttacagctgagg

SEQ ID NO: 157360 - DNA, 15 bp, Homo sapiens
tactttacagctgag

SEQ ID NO: 157361 - DNA, 15 bp, Homo sapiens
ctactttacagctga

SEQ ID NO: 157362 - DNA, 15 bp, Homo sapiens
cctactttacagctg

SEQ ID NO: 157363 - DNA, 15 bp, Homo sapiens
ccctactttacagct

SEQ ID NO: 157364 - DNA, 15 bp, Homo sapiens
accctactttacagc

SEQ ID NO: 157365 - DNA, 15 bp, Homo sapiens
caccctactttacag

SEQ ID NO: 157366 - DNA, 15 bp, Homo sapiens
gcaccctactttaca

SEQ ID NO: 157367 - DNA, 15 bp, Homo sapiens
tgcaccctactttac

SEQ ID NO: 157368 - DNA, 15 bp, Homo sapiens
atgcaccctacttta

SEQ ID NO: 157369 - DNA, 15 bp, Homo sapiens
tatgcaccctacttt

SEQ ID NO: 157370 - DNA, 15 bp, Homo sapiens
gtatgcaccctactt

SEQ ID NO: 157371 - DNA, 15 bp, Homo sapiens
agtatgcaccctact

SEQ ID NO: 157372 - DNA, 15 bp, Homo sapiens
aagtatgcaccctac

SEQ ID NO: 157373 - DNA, 15 bp, Homo sapiens
aaagtatgcacccta

SEQ ID NO: 157374 - DNA, 15 bp, Homo sapiens
aaaagtatgcaccct

SEQ ID NO: 157375 - DNA, 15 bp, Homo sapiens
taaaagtatgcaccc

SEQ ID NO: 157376 - DNA, 15 bp, Homo sapiens
ataaaagtatgcacc

SEQ ID NO: 157377 - DNA, 15 bp, Homo sapiens
cataaaagtatgcac

SEQ ID NO: 157378 - DNA, 15 bp, Homo sapiens
ccataaaagtatgca

SEQ ID NO: 157379 - DNA, 15 bp, Homo sapiens
gccataaaagtatgc

SEQ ID NO: 157380 - DNA, 15 bp, Homo sapiens
ggccataaaagtatg

SEQ ID NO: 157381 - DNA, 15 bp, Homo sapiens
gggccataaaagtat

SEQ ID NO: 157382 - DNA, 15 bp, Homo sapiens
agggccataaaagta

SEQ ID NO: 157383 - DNA, 15 bp, Homo sapiens
cagggccataaaagt

SEQ ID NO: 157384 - DNA, 15 bp, Homo sapiens
acagggccataaaag

SEQ ID NO: 157385 - DNA, 15 bp, Homo sapiens
cacagggccataaaa

SEQ ID NO: 157386 - DNA, 15 bp, Homo sapiens
gcacagggccataaa

SEQ ID NO: 157387 - DNA, 15 bp, Homo sapiens
tgcacagggccataa

SEQ ID NO: 157388 - DNA, 15 bp, Homo sapiens
ctgcacagggccata

SEQ ID NO: 157389 - DNA, 15 bp, Homo sapiens
cctgcacagggccat

SEQ ID NO: 157390 - DNA, 15 bp, Homo sapiens
tcctgcacagggcca

SEQ ID NO: 157391 - DNA, 15 bp, Homo sapiens
ctcctgcacagggcc

SEQ ID NO: 157392 - DNA, 15 bp, Homo sapiens
cctcctgcacagggc

SEQ ID NO: 157393 - DNA, 15 bp, Homo sapiens
acctcctgcacaggg

SEQ ID NO: 157394 - DNA, 15 bp, Homo sapiens
tacctcctgcacagg

SEQ ID NO: 157395 - DNA, 15 bp, Homo sapiens
ctacctcctgcacag

SEQ ID NO: 157396 - DNA, 15 bp, Homo sapiens
actacctcctgcaca

SEQ ID NO: 157397 - DNA, 15 bp, Homo sapiens
cactacctcctgcac

SEQ ID NO: 157398 - DNA, 15 bp, Homo sapiens
tcactacctcctgca

SEQ ID NO: 157399 - DNA, 15 bp, Homo sapiens
gtcactacctcctgc

SEQ ID NO: 157400 - DNA, 15 bp, Homo sapiens
tgtcactacctcctg

SEQ ID NO: 157401 - DNA, 15 bp, Homo sapiens
ctgtcactacctcct

SEQ ID NO: 157402 - DNA, 15 bp, Homo sapiens
cctgtcactacctcc

SEQ ID NO: 157403 - DNA, 15 bp, Homo sapiens
gcctgtcactacctc

SEQ ID NO: 157404 - DNA, 15 bp, Homo sapiens
ggcctgtcactacct

SEQ ID NO: 157405 - DNA, 15 bp, Homo sapiens
gggcctgtcactacc

SEQ ID NO: 157406 - DNA, 15 bp, Homo sapiens
agggcctgtcactac

SEQ ID NO: 157407 - DNA, 15 bp, Homo sapiens
tagggcctgtcacta

SEQ ID NO: 157408 - DNA, 15 bp, Homo sapiens
ctagggcctgtcact

SEQ ID NO: 157409 - DNA, 15 bp, Homo sapiens
gctagggcctgtcac

SEQ ID NO: 157410 - DNA, 15 bp, Homo sapiens
tgctagggcctgtca

SEQ ID NO: 157411 - DNA, 15 bp, Homo sapiens
gtgctagggcctgtc

SEQ ID NO: 157412 - DNA, 15 bp, Homo sapiens
ggtgctagggcctgt

SEQ ID NO: 157413 - DNA, 15 bp, Homo sapiens
gggtgctagggcctg

SEQ ID NO: 157414 - DNA, 15 bp, Homo sapiens
agggtgctagggcct

SEQ ID NO: 157415 - DNA, 15 bp, Homo sapiens
cagggtgctagggcc

SEQ ID NO: 157416 - DNA, 15 bp, Homo sapiens
gcagggtgctagggc

SEQ ID NO: 157417 - DNA, 15 bp, Homo sapiens
ggcagggtgctaggg

SEQ ID NO: 157418 - DNA, 15 bp, Homo sapiens
aggcagggtgctagg

SEQ ID NO: 157419 - DNA, 15 bp, Homo sapiens
gaggcagggtgctag

SEQ ID NO: 157420 - DNA, 15 bp, Homo sapiens
ggaggcagggtgcta

SEQ ID NO: 157421 - DNA, 15 bp, Homo sapiens
tggaggcagggtgct

SEQ ID NO: 157422 - DNA, 15 bp, Homo sapiens
ctggaggcagggtgc

SEQ ID NO: 157423 - DNA, 15 bp, Homo sapiens
actggaggcagggtg

SEQ ID NO: 157424 - DNA, 15 bp, Homo sapiens
tactggaggcagggt

SEQ ID NO: 157425 - DNA, 15 bp, Homo sapiens
atactggaggcaggg

SEQ ID NO: 157426 - DNA, 15 bp, Homo sapiens
tatactggaggcagg

SEQ ID NO: 157427 - DNA, 15 bp, Homo sapiens
atatactggaggcag

SEQ ID NO: 157428 - DNA, 15 bp, Homo sapiens
catatactggaggca

SEQ ID NO: 157429 - DNA, 15 bp, Homo sapiens
acatatactggaggc

SEQ ID NO: 157430 - DNA, 15 bp, Homo sapiens
aacatatactggagg

SEQ ID NO: 157431 - DNA, 15 bp, Homo sapiens
taacatatactggag

SEQ ID NO: 157432 - DNA, 15 bp, Homo sapiens
ctaacatatactgga

SEQ ID NO: 157433 - DNA, 15 bp, Homo sapiens
gctaacatatactgg

SEQ ID NO: 157434 - DNA, 15 bp, Homo sapiens
tgctaacatatactg

SEQ ID NO: 157435 - DNA, 15 bp, Homo sapiens
ctgctaacatatact

SEQ ID NO: 157436 - DNA, 15 bp, Homo sapiens
gctgctaacatatac

SEQ ID NO: 157437 - DNA, 15 bp, Homo sapiens
ggctgctaacatata

SEQ ID NO: 157438 - DNA, 15 bp, Homo sapiens
tggctgctaacatat

SEQ ID NO: 157439 - DNA, 15 bp, Homo sapiens
gtggctgctaacata

SEQ ID NO: 157440 - DNA, 15 bp, Homo sapiens
cgtggctgctaacat

SEQ ID NO: 157441 - DNA, 15 bp, Homo sapiens
tcgtggctgctaaca

SEQ ID NO: 157442 - DNA, 15 bp, Homo sapiens
ctcgtggctgctaac

SEQ ID NO: 157443 - DNA, 15 bp, Homo sapiens
cctcgtggctgctaa

SEQ ID NO: 157444 - DNA, 15 bp, Homo sapiens
gcctcgtggctgcta

SEQ ID NO: 157445 - DNA, 15 bp, Homo sapiens
ggcctcgtggctgct

SEQ ID NO: 157446 - DNA, 15 bp, Homo sapiens
aggcctcgtggctgc

SEQ ID NO: 157447 - DNA, 15 bp, Homo sapiens
taggcctcgtggctg

SEQ ID NO: 157448 - DNA, 15 bp, Homo sapiens
ataggcctcgtggct

SEQ ID NO: 157449 - DNA, 15 bp, Homo sapiens
gataggcctcgtggc

SEQ ID NO: 157450 - DNA, 15 bp, Homo sapiens
agataggcctcgtgg

SEQ ID NO: 157451 - DNA, 15 bp, Homo sapiens
gagataggcctcgtg

SEQ ID NO: 157452 - DNA, 15 bp, Homo sapiens
agagataggcctcgt

SEQ ID NO: 157453 - DNA, 15 bp, Homo sapiens
gagagataggcctcg

SEQ ID NO: 157454 - DNA, 15 bp, Homo sapiens
ggagagataggcctc

SEQ ID NO: 157455 - DNA, 15 bp, Homo sapiens
gggagagataggcct

SEQ ID NO: 157456 - DNA, 15 bp, Homo sapiens
ggggagagataggcc

SEQ ID NO: 157457 - DNA, 15 bp, Homo sapiens
tggggagagataggc

SEQ ID NO: 157458 - DNA, 15 bp, Homo sapiens
gtggggagagatagg

SEQ ID NO: 157459 - DNA, 15 bp, Homo sapiens
tgtggggagagatag

SEQ ID NO: 157460 - DNA, 15 bp, Homo sapiens
ctgtggggagagata

SEQ ID NO: 157461 - DNA, 15 bp, Homo sapiens
cctgtggggagagat

SEQ ID NO: 157462 - DNA, 15 bp, Homo sapiens
ccctgtggggagaga

SEQ ID NO: 157463 - DNA, 15 bp, Homo sapiens
gccctgtggggagag

SEQ ID NO: 157464 - DNA, 15 bp, Homo sapiens
tgccctgtggggaga

SEQ ID NO: 157465 - DNA, 15 bp, Homo sapiens
atgccctgtggggag

SEQ ID NO: 157466 - DNA, 15 bp, Homo sapiens
gatgccctgtgggga

SEQ ID NO: 157467 - DNA, 15 bp, Homo sapiens
ggatgccctgtgggg

SEQ ID NO: 157468 - DNA, 15 bp, Homo sapiens
aggatgccctgtggg

SEQ ID NO: 157469 - DNA, 15 bp, Homo sapiens
aaggatgccctgtgg

SEQ ID NO: 157470 - DNA, 15 bp, Homo sapiens
gaaggatgccctgtg

SEQ ID NO: 157471 - DNA, 15 bp, Homo sapiens
agaaggatgccctgt

SEQ ID NO: 157472 - DNA, 15 bp, Homo sapiens
gagaaggatgccctg

SEQ ID NO: 157473 - DNA, 15 bp, Homo sapiens
tgagaaggatgccct

SEQ ID NO: 157474 - DNA, 15 bp, Homo sapiens
ttgagaaggatgccc

SEQ ID NO: 157475 - DNA, 15 bp, Homo sapiens
gttgagaaggatgcc

SEQ ID NO: 157476 - DNA, 15 bp, Homo sapiens
agttgagaaggatgc

SEQ ID NO: 157477 - DNA, 15 bp, Homo sapiens
cagttgagaaggatg

SEQ ID NO: 157478 - DNA, 15 bp, Homo sapiens
ccagttgagaaggat

SEQ ID NO: 157479 - DNA, 15 bp, Homo sapiens
tccagttgagaagga

SEQ ID NO: 157480 - DNA, 15 bp, Homo sapiens
gtccagttgagaagg

SEQ ID NO: 157481 - DNA, 15 bp, Homo sapiens
ggtccagttgagaag

SEQ ID NO: 157482 - DNA, 15 bp, Homo sapiens
tggtccagttgagaa

SEQ ID NO: 157483 - DNA, 15 bp, Homo sapiens
ttggtccagttgaga

SEQ ID NO: 157484 - DNA, 15 bp, Homo sapiens
cttggtccagttgag

SEQ ID NO: 157485 - DNA, 15 bp, Homo sapiens
ccttggtccagttga

SEQ ID NO: 157486 - DNA, 15 bp, Homo sapiens
cccttggtccagttg

SEQ ID NO: 157487 - DNA, 15 bp, Homo sapiens
gcccttggtccagtt

SEQ ID NO: 157488 - DNA, 15 bp, Homo sapiens
agcccttggtccagt

SEQ ID NO: 157489 - DNA, 15 bp, Homo sapiens
aagcccttggtccag

SEQ ID NO: 157490 - DNA, 15 bp, Homo sapiens
gaagcccttggtcca

SEQ ID NO: 157491 - DNA, 15 bp, Homo sapiens
tgaagcccttggtcc

SEQ ID NO: 157492 - DNA, 15 bp, Homo sapiens
ttgaagcccttggtc

SEQ ID NO: 157493 - DNA, 15 bp, Homo sapiens
cttgaagcccttggt

SEQ ID NO: 157494 - DNA, 15 bp, Homo sapiens
ccttgaagcccttgg

SEQ ID NO: 157495 - DNA, 15 bp, Homo sapiens
gccttgaagcccttg

SEQ ID NO: 157496 - DNA, 15 bp, Homo sapiens
ggccttgaagccctt

SEQ ID NO: 157497 - DNA, 15 bp, Homo sapiens
aggccttgaagccct

SEQ ID NO: 157498 - DNA, 15 bp, Homo sapiens
gaggccttgaagccc

SEQ ID NO: 157499 - DNA, 15 bp, Homo sapiens
tgaggccttgaagcc

SEQ ID NO: 157500 - DNA, 15 bp, Homo sapiens
ctgaggccttgaagc

SEQ ID NO: 157501 - DNA, 15 bp, Homo sapiens
cctgaggccttgaag

SEQ ID NO: 157502 - DNA, 15 bp, Homo sapiens
tcctgaggccttgaa

SEQ ID NO: 157503 - DNA, 15 bp, Homo sapiens
ctcctgaggccttga

SEQ ID NO: 157504 - DNA, 15 bp, Homo sapiens
gctcctgaggccttg

SEQ ID NO: 157505 - DNA, 15 bp, Homo sapiens
tgctcctgaggcctt

SEQ ID NO: 157506 - DNA, 15 bp, Homo sapiens
ctgctcctgaggcct

SEQ ID NO: 157507 - DNA, 15 bp, Homo sapiens
tctgctcctgaggcc

SEQ ID NO: 157508 - DNA, 15 bp, Homo sapiens
ttctgctcctgaggc

SEQ ID NO: 157509 - DNA, 15 bp, Homo sapiens
cttctgctcctgagg

SEQ ID NO: 157510 - DNA, 15 bp, Homo sapiens
ccttctgctcctgag

SEQ ID NO: 157511 - DNA, 15 bp, Homo sapiens
cccttctgctcctga

SEQ ID NO: 157512 - DNA, 15 bp, Homo sapiens
tcccttctgctcctg

SEQ ID NO: 157513 - DNA, 15 bp, Homo sapiens
ttcccttctgctcct

SEQ ID NO: 157514 - DNA, 15 bp, Homo sapiens
gttcccttctgctcc

SEQ ID NO: 157515 - DNA, 15 bp, Homo sapiens
tgttcccttctgctc

SEQ ID NO: 157516 - DNA, 15 bp, Homo sapiens
ttgttcccttctgct

SEQ ID NO: 157517 - DNA, 15 bp, Homo sapiens
attgttcccttctgc

SEQ ID NO: 157518 - DNA, 15 bp, Homo sapiens
cattgttcccttctg

SEQ ID NO: 157519 - DNA, 15 bp, Homo sapiens
acattgttcccttct

SEQ ID NO: 157520 - DNA, 15 bp, Homo sapiens
gacattgttcccttc

SEQ ID NO: 157521 - DNA, 15 bp, Homo sapiens
cgacattgttccctt

SEQ ID NO: 157522 - DNA, 15 bp, Homo sapiens
acgacattgttccct

SEQ ID NO: 157523 - DNA, 15 bp, Homo sapiens
cacgacattgttccc

SEQ ID NO: 157524 - DNA, 15 bp, Homo sapiens
ccacgacattgttcc

SEQ ID NO: 157525 - DNA, 15 bp, Homo sapiens
cccacgacattgttc

SEQ ID NO: 157526 - DNA, 15 bp, Homo sapiens
ccccacgacattgtt

SEQ ID NO: 157527 - DNA, 15 bp, Homo sapiens
gccccacgacattgt

SEQ ID NO: 157528 - DNA, 15 bp, Homo sapiens
agccccacgacattg

SEQ ID NO: 157529 - DNA, 15 bp, Homo sapiens
aagccccacgacatt

SEQ ID NO: 157530 - DNA, 15 bp, Homo sapiens
gaagccccacgacat

SEQ ID NO: 157531 - DNA, 15 bp, Homo sapiens
agaagccccacgaca

SEQ ID NO: 157532 - DNA, 15 bp, Homo sapiens
cagaagccccacgac

SEQ ID NO: 157533 - DNA, 15 bp, Homo sapiens
gcagaagccccacga

SEQ ID NO: 157534 - DNA, 15 bp, Homo sapiens
cgcagaagccccacg

SEQ ID NO: 157535 - DNA, 15 bp, Homo sapiens
tcgcagaagccccac

SEQ ID NO: 157536 - DNA, 15 bp, Homo sapiens
ctcgcagaagcccca

SEQ ID NO: 157537 - DNA, 15 bp, Homo sapiens
tctcgcagaagcccc

SEQ ID NO: 157538 - DNA, 15 bp, Homo sapiens
gtctcgcagaagccc

SEQ ID NO: 157539 - DNA, 15 bp, Homo sapiens
cgtctcgcagaagcc

SEQ ID NO: 157540 - DNA, 15 bp, Homo sapiens
gcgtctcgcagaagc

SEQ ID NO: 157541 - DNA, 15 bp, Homo sapiens
agcgtctcgcagaag

SEQ ID NO: 157542 - DNA, 15 bp, Homo sapiens
tagcgtctcgcagaa

SEQ ID NO: 157543 - DNA, 15 bp, Homo sapiens
atagcgtctcgcaga

SEQ ID NO: 157544 - DNA, 15 bp, Homo sapiens
gatagcgtctcgcag

SEQ ID NO: 157545 - DNA, 15 bp, Homo sapiens
tgatagcgtctcgca

SEQ ID NO: 157546 - DNA, 15 bp, Homo sapiens
ttgatagcgtctcgc

SEQ ID NO: 157547 - DNA, 15 bp, Homo sapiens
tttgatagcgtctcg

SEQ ID NO: 157548 - DNA, 15 bp, Homo sapiens
gtttgatagcgtctc

SEQ ID NO: 157549 - DNA, 15 bp, Homo sapiens
cgtttgatagcgtct

SEQ ID NO: 157550 - DNA, 15 bp, Homo sapiens
ccgtttgatagcgtc

SEQ ID NO: 157551 - DNA, 15 bp, Homo sapiens
tccgtttgatagcgt

SEQ ID NO: 157552 - DNA, 15 bp, Homo sapiens
ctccgtttgatagcg

SEQ ID NO: 157553 - DNA, 15 bp, Homo sapiens
tctccgtttgatagc

SEQ ID NO: 157554 - DNA, 15 bp, Homo sapiens
ctctccgtttgatag

SEQ ID NO: 157555 - DNA, 15 bp, Homo sapiens
cctctccgtttgata

SEQ ID NO: 157556 - DNA, 15 bp, Homo sapiens
ccctctccgtttgat

SEQ ID NO: 157557 - DNA, 15 bp, Homo sapiens
cccctctccgtttga

SEQ ID NO: 157558 - DNA, 15 bp, Homo sapiens
acccctctccgtttg

SEQ ID NO: 157559 - DNA, 15 bp, Homo sapiens
cacccctctccgttt

SEQ ID NO: 157560 - DNA, 15 bp, Homo sapiens
tcacccctctccgtt

SEQ ID NO: 157561 - DNA, 15 bp, Homo sapiens
ctcacccctctccgt

SEQ ID NO: 157562 - DNA, 15 bp, Homo sapiens
cctcacccctctccg

SEQ ID NO: 157563 - DNA, 15 bp, Homo sapiens
ccctcacccctctcc

SEQ ID NO: 157564 - DNA, 15 bp, Homo sapiens
cccctcacccctctc

SEQ ID NO: 157565 - DNA, 15 bp, Homo sapiens
ccccctcacccctct

SEQ ID NO: 157566 - DNA, 15 bp, Homo sapiens
gccccctcacccctc

SEQ ID NO: 157567 - DNA, 15 bp, Homo sapiens
tgccccctcacccct

SEQ ID NO: 157568 - DNA, 15 bp, Homo sapiens
gtgccccctcacccc

SEQ ID NO: 157569 - DNA, 15 bp, Homo sapiens
ggtgccccctcaccc

SEQ ID NO: 157570 - DNA, 15 bp, Homo sapiens
aggtgccccctcacc

SEQ ID NO: 157571 - DNA, 15 bp, Homo sapiens
caggtgccccctcac

SEQ ID NO: 157572 - DNA, 15 bp, Homo sapiens
acaggtgccccctca

SEQ ID NO: 157573 - DNA, 15 bp, Homo sapiens
tacaggtgccccctc

SEQ ID NO: 157574 - DNA, 15 bp, Homo sapiens
gtacaggtgccccct

SEQ ID NO: 157575 - DNA, 15 bp, Homo sapiens
ggtacaggtgccccc

SEQ ID NO: 157576 - DNA, 15 bp, Homo sapiens
aggtacaggtgcccc

SEQ ID NO: 157577 - DNA, 15 bp, Homo sapiens
caggtacaggtgccc

SEQ ID NO: 157578 - DNA, 15 bp, Homo sapiens
gcaggtacaggtgcc

SEQ ID NO: 157579 - DNA, 15 bp, Homo sapiens
ggcaggtacaggtgc

SEQ ID NO: 157580 - DNA, 15 bp, Homo sapiens
cggcaggtacaggtg

SEQ ID NO: 157581 - DNA, 15 bp, Homo sapiens
ccggcaggtacaggt

SEQ ID NO: 157582 - DNA, 15 bp, Homo sapiens
cccggcaggtacagg

SEQ ID NO: 157583 - DNA, 15 bp, Homo sapiens
ccccggcaggtacag

SEQ ID NO: 157584 - DNA, 15 bp, Homo sapiens
cccccggcaggtaca

SEQ ID NO: 157585 - DNA, 15 bp, Homo sapiens
ccccccggcaggtac

SEQ ID NO: 157586 - DNA, 15 bp, Homo sapiens
cccccccggcaggta

SEQ ID NO: 157587 - DNA, 15 bp, Homo sapiens
gcccccccggcaggt

SEQ ID NO: 157588 - DNA, 15 bp, Homo sapiens
agcccccccggcagg

SEQ ID NO: 157589 - DNA, 15 bp, Homo sapiens
cagcccccccggcag

SEQ ID NO: 157590 - DNA, 15 bp, Homo sapiens
gcagcccccccggca

SEQ ID NO: 157591 - DNA, 15 bp, Homo sapiens
ggcagcccccccggc

SEQ ID NO: 157592 - DNA, 15 bp, Homo sapiens
gggcagcccccccgg

SEQ ID NO: 157593 - DNA, 15 bp, Homo sapiens
agggcagcccccccg

SEQ ID NO: 157594 - DNA, 15 bp, Homo sapiens
cagggcagccccccc

SEQ ID NO: 157595 - DNA, 15 bp, Homo sapiens
ccagggcagcccccc

SEQ ID NO: 157596 - DNA, 15 bp, Homo sapiens
cccagggcagccccc

SEQ ID NO: 157597 - DNA, 15 bp, Homo sapiens
gcccagggcagcccc

SEQ ID NO: 157598 - DNA, 15 bp, Homo sapiens
ggcccagggcagccc

SEQ ID NO: 157599 - DNA, 15 bp, Homo sapiens
tggcccagggcagcc

SEQ ID NO: 157600 - DNA, 15 bp, Homo sapiens
gtggcccagggcagc

SEQ ID NO: 157601 - DNA, 15 bp, Homo sapiens
ggtggcccagggcag

SEQ ID NO: 157602 - DNA, 15 bp, Homo sapiens
gggtggcccagggca

SEQ ID NO: 157603 - DNA, 15 bp, Homo sapiens
tgggtggcccagggc

SEQ ID NO: 157604 - DNA, 15 bp, Homo sapiens
gtgggtggcccaggg

SEQ ID NO: 157605 - DNA, 15 bp, Homo sapiens
ggtgggtggcccagg

SEQ ID NO: 157606 - DNA, 15 bp, Homo sapiens
gggtgggtggcccag

SEQ ID NO: 157607 - DNA, 15 bp, Homo sapiens
ggggtgggtggccca

SEQ ID NO: 157608 - DNA, 15 bp, Homo sapiens
tggggtgggtggccc

SEQ ID NO: 157609 - DNA, 15 bp, Homo sapiens
ctggggtgggtggcc

SEQ ID NO: 157610 - DNA, 15 bp, Homo sapiens
gctggggtgggtggc

SEQ ID NO: 157611 - DNA, 15 bp, Homo sapiens
tgctggggtgggtgg

SEQ ID NO: 157612 - DNA, 15 bp, Homo sapiens
gtgctggggtgggtg

SEQ ID NO: 157613 - DNA, 15 bp, Homo sapiens
agtgctggggtgggt

SEQ ID NO: 157614 - DNA, 15 bp, Homo sapiens
cagtgctggggtggg

SEQ ID NO: 157615 - DNA, 15 bp, Homo sapiens
gcagtgctggggtgg

SEQ ID NO: 157616 - DNA, 15 bp, Homo sapiens
ggcagtgctggggtg

SEQ ID NO: 157617 - DNA, 15 bp, Homo sapiens
aggcagtgctggggt

SEQ ID NO: 157618 - DNA, 15 bp, Homo sapiens
caggcagtgctgggg

SEQ ID NO: 157619 - DNA, 15 bp, Homo sapiens
gcaggcagtgctggg

SEQ ID NO: 157620 - DNA, 15 bp, Homo sapiens
ggcaggcagtgctgg

SEQ ID NO: 157621 - DNA, 15 bp, Homo sapiens
aggcaggcagtgctg

SEQ ID NO: 157622 - DNA, 15 bp, Homo sapiens
aaggcaggcagtgct

SEQ ID NO: 157623 - DNA, 15 bp, Homo sapiens
aaaggcaggcagtgc

SEQ ID NO: 157624 - DNA, 15 bp, Homo sapiens
gaaaggcaggcagtg

SEQ ID NO: 157625 - DNA, 15 bp, Homo sapiens
agaaaggcaggcagt

SEQ ID NO: 157626 - DNA, 15 bp, Homo sapiens
gagaaaggcaggcag

SEQ ID NO: 157627 - DNA, 15 bp, Homo sapiens
ggagaaaggcaggca

SEQ ID NO: 157628 - DNA, 15 bp, Homo sapiens
aggagaaaggcaggc

SEQ ID NO: 157629 - DNA, 15 bp, Homo sapiens
aaggagaaaggcagg

SEQ ID NO: 157630 - DNA, 15 bp, Homo sapiens
caaggagaaaggcag

SEQ ID NO: 157631 - DNA, 15 bp, Homo sapiens
ccaaggagaaaggca

SEQ ID NO: 157632 - DNA, 15 bp, Homo sapiens
gccaaggagaaaggc

SEQ ID NO: 157633 - DNA, 15 bp, Homo sapiens
agccaaggagaaagg

SEQ ID NO: 157634 - DNA, 15 bp, Homo sapiens
aagccaaggagaaag

SEQ ID NO: 157635 - DNA, 15 bp, Homo sapiens
gaagccaaggagaaa

SEQ ID NO: 157636 - DNA, 15 bp, Homo sapiens
ggaagccaaggagaa

SEQ ID NO: 157637 - DNA, 15 bp, Homo sapiens
tggaagccaaggaga

SEQ ID NO: 157638 - DNA, 15 bp, Homo sapiens
ctggaagccaaggag

SEQ ID NO: 157639 - DNA, 15 bp, Homo sapiens
gctggaagccaagga

SEQ ID NO: 157640 - DNA, 15 bp, Homo sapiens
tgctggaagccaagg

SEQ ID NO: 157641 - DNA, 15 bp, Homo sapiens
gtgctggaagccaag

SEQ ID NO: 157642 - DNA, 15 bp, Homo sapiens
agtgctggaagccaa

SEQ ID NO: 157643 - DNA, 15 bp, Homo sapiens
cagtgctggaagcca

SEQ ID NO: 157644 - DNA, 15 bp, Homo sapiens
gcagtgctggaagcc

SEQ ID NO: 157645 - DNA, 15 bp, Homo sapiens
tgcagtgctggaagc

SEQ ID NO: 157646 - DNA, 15 bp, Homo sapiens
ctgcagtgctggaag

SEQ ID NO: 157647 - DNA, 15 bp, Homo sapiens
gctgcagtgctggaa

SEQ ID NO: 157648 - DNA, 15 bp, Homo sapiens
agctgcagtgctgga

SEQ ID NO: 157649 - DNA, 15 bp, Homo sapiens
aagctgcagtgctgg

SEQ ID NO: 157650 - DNA, 15 bp, Homo sapiens
gaagctgcagtgctg

SEQ ID NO: 157651 - DNA, 15 bp, Homo sapiens
agaagctgcagtgct

SEQ ID NO: 157652 - DNA, 15 bp, Homo sapiens
cagaagctgcagtgc

SEQ ID NO: 157653 - DNA, 15 bp, Homo sapiens
acagaagctgcagtg

SEQ ID NO: 157654 - DNA, 15 bp, Homo sapiens
cacagaagctgcagt

SEQ ID NO: 157655 - DNA, 15 bp, Homo sapiens
gcacagaagctgcag

SEQ ID NO: 157656 - DNA, 15 bp, Homo sapiens
agcacagaagctgca

SEQ ID NO: 157657 - DNA, 15 bp, Homo sapiens
aagcacagaagctgc

SEQ ID NO: 157658 - DNA, 15 bp, Homo sapiens
gaagcacagaagctg

SEQ ID NO: 157659 - DNA, 15 bp, Homo sapiens
agaagcacagaagct

SEQ ID NO: 157660 - DNA, 15 bp, Homo sapiens
aagaagcacagaagc

SEQ ID NO: 157661 - DNA, 15 bp, Homo sapiens
caagaagcacagaag

SEQ ID NO: 157662 - DNA, 15 bp, Homo sapiens
ccaagaagcacagaa

SEQ ID NO: 157663 - DNA, 15 bp, Homo sapiens
gccaagaagcacaga

SEQ ID NO: 157664 - DNA, 15 bp, Homo sapiens
tgccaagaagcacag

SEQ ID NO: 157665 - DNA, 15 bp, Homo sapiens
ctgccaagaagcaca

SEQ ID NO: 157666 - DNA, 15 bp, Homo sapiens
cctgccaagaagcac

SEQ ID NO: 157667 - DNA, 15 bp, Homo sapiens
tcctgccaagaagca

SEQ ID NO: 157668 - DNA, 15 bp, Homo sapiens
gtcctgccaagaagc

SEQ ID NO: 157669 - DNA, 15 bp, Homo sapiens
agtcctgccaagaag

SEQ ID NO: 157670 - DNA, 15 bp, Homo sapiens
aagtcctgccaagaa

SEQ ID NO: 157671 - DNA, 15 bp, Homo sapiens
aaagtcctgccaaga

SEQ ID NO: 157672 - DNA, 15 bp, Homo sapiens
caaagtcctgccaag

SEQ ID NO: 157673 - DNA, 15 bp, Homo sapiens
tcaaagtcctgccaa

SEQ ID NO: 157674 - DNA, 15 bp, Homo sapiens
ttcaaagtcctgcca

SEQ ID NO: 157675 - DNA, 15 bp, Homo sapiens
tttcaaagtcctgcc

SEQ ID NO: 157676 - DNA, 15 bp, Homo sapiens
atttcaaagtcctgc

SEQ ID NO: 157677 - DNA, 15 bp, Homo sapiens
catttcaaagtcctg

SEQ ID NO: 157678 - DNA, 15 bp, Homo sapiens
ccatttcaaagtcct

SEQ ID NO: 157679 - DNA, 15 bp, Homo sapiens
tccatttcaaagtcc

SEQ ID NO: 157680 - DNA, 15 bp, Homo sapiens
atccatttcaaagtc

SEQ ID NO: 157681 - DNA, 15 bp, Homo sapiens
catccatttcaaagt

SEQ ID NO: 157682 - DNA, 15 bp, Homo sapiens
acatccatttcaaag

SEQ ID NO: 157683 - DNA, 15 bp, Homo sapiens
cacatccatttcaaa

SEQ ID NO: 157684 - DNA, 15 bp, Homo sapiens
ccacatccatttcaa

SEQ ID NO: 157685 - DNA, 15 bp, Homo sapiens
accacatccatttca

SEQ ID NO: 157686 - DNA, 15 bp, Homo sapiens
caccacatccatttc

SEQ ID NO: 157687 - DNA, 15 bp, Homo sapiens
ccaccacatccattt

SEQ ID NO: 157688 - DNA, 15 bp, Homo sapiens
gccaccacatccatt

SEQ ID NO: 157689 - DNA, 15 bp, Homo sapiens
tgccaccacatccat

SEQ ID NO: 157690 - DNA, 15 bp, Homo sapiens
ttgccaccacatcca

SEQ ID NO: 157691 - DNA, 15 bp, Homo sapiens
attgccaccacatcc

SEQ ID NO: 157692 - DNA, 15 bp, Homo sapiens
cattgccaccacatc

SEQ ID NO: 157693 - DNA, 15 bp, Homo sapiens
ccattgccaccacat

SEQ ID NO: 157694 - DNA, 15 bp, Homo sapiens
accattgccaccaca

SEQ ID NO: 157695 - DNA, 15 bp, Homo sapiens
caccattgccaccac

SEQ ID NO: 157696 - DNA, 15 bp, Homo sapiens
tcaccattgccacca

SEQ ID NO: 157697 - DNA, 15 bp, Homo sapiens
ttcaccattgccacc

SEQ ID NO: 157698 - DNA, 15 bp, Homo sapiens
attcaccattgccac

SEQ ID NO: 157699 - DNA, 15 bp, Homo sapiens
cattcaccattgcca

SEQ ID NO: 157700 - DNA, 15 bp, Homo sapiens
tcattcaccattgcc

SEQ ID NO: 157701 - DNA, 15 bp, Homo sapiens
gtcattcaccattgc

SEQ ID NO: 157702 - DNA, 15 bp, Homo sapiens
tgtcattcaccattg

SEQ ID NO: 157703 - DNA, 15 bp, Homo sapiens
gtgtcattcaccatt

SEQ ID NO: 157704 - DNA, 15 bp, Homo sapiens
cgtgtcattcaccat

SEQ ID NO: 157705 - DNA, 15 bp, Homo sapiens
ccgtgtcattcacca

SEQ ID NO: 157706 - DNA, 15 bp, Homo sapiens
accgtgtcattcacc

SEQ ID NO: 157707 - DNA, 15 bp, Homo sapiens
caccgtgtcattcac

SEQ ID NO: 157708 - DNA, 15 bp, Homo sapiens
ccaccgtgtcattca

SEQ ID NO: 157709 - DNA, 15 bp, Homo sapiens
gccaccgtgtcattc

SEQ ID NO: 157710 - DNA, 15 bp, Homo sapiens
ggccaccgtgtcatt

SEQ ID NO: 157711 - DNA, 15 bp, Homo sapiens
tggccaccgtgtcat

SEQ ID NO: 157712 - DNA, 15 bp, Homo sapiens
gtggccaccgtgtca

SEQ ID NO: 157713 - DNA, 15 bp, Homo sapiens
cgtggccaccgtgtc

SEQ ID NO: 157714 - DNA, 15 bp, Homo sapiens
tcgtggccaccgtgt

SEQ ID NO: 157715 - DNA, 15 bp, Homo sapiens
atcgtggccaccgtg

SEQ ID NO: 157716 - DNA, 15 bp, Homo sapiens
catcgtggccaccgt

SEQ ID NO: 157717 - DNA, 15 bp, Homo sapiens
tcatcgtggccaccg

SEQ ID NO: 157718 - DNA, 15 bp, Homo sapiens
atcatcgtggccacc

SEQ ID NO: 157719 - DNA, 15 bp, Homo sapiens
gatcatcgtggccac

SEQ ID NO: 157720 - DNA, 15 bp, Homo sapiens
agatcatcgtggcca

SEQ ID NO: 157721 - DNA, 15 bp, Homo sapiens
gagatcatcgtggcc

SEQ ID NO: 157722 - DNA, 15 bp, Homo sapiens
ggagatcatcgtggc

SEQ ID NO: 157723 - DNA, 15 bp, Homo sapiens
aggagatcatcgtgg

SEQ ID NO: 157724 - DNA, 15 bp, Homo sapiens
caggagatcatcgtg

SEQ ID NO: 157725 - DNA, 15 bp, Homo sapiens
gcaggagatcatcgt

SEQ ID NO: 157726 - DNA, 15 bp, Homo sapiens
agcaggagatcatcg

SEQ ID NO: 157727 - DNA, 15 bp, Homo sapiens
tagcaggagatcatc

SEQ ID NO: 157728 - DNA, 15 bp, Homo sapiens
gtagcaggagatcat

SEQ ID NO: 157729 - DNA, 15 bp, Homo sapiens
agtagcaggagatca

SEQ ID NO: 157730 - DNA, 15 bp, Homo sapiens
tagtagcaggagatc

SEQ ID NO: 157731 - DNA, 15 bp, Homo sapiens
gtagtagcaggagat

SEQ ID NO: 157732 - DNA, 15 bp, Homo sapiens
cgtagtagcaggaga

SEQ ID NO: 157733 - DNA, 15 bp, Homo sapiens
tcgtagtagcaggag

SEQ ID NO: 157734 - DNA, 15 bp, Homo sapiens
ttcgtagtagcagga

SEQ ID NO: 157735 - DNA, 15 bp, Homo sapiens
cttcgtagtagcagg

SEQ ID NO: 157736 - DNA, 15 bp, Homo sapiens
tcttcgtagtagcag

SEQ ID NO: 157737 - DNA, 15 bp, Homo sapiens
gtcttcgtagtagca

SEQ ID NO: 157738 - DNA, 15 bp, Homo sapiens
ggtcttcgtagtagc

SEQ ID NO: 157739 - DNA, 15 bp, Homo sapiens
tggtcttcgtagtag

SEQ ID NO: 157740 - DNA, 15 bp, Homo sapiens
atggtcttcgtagta

SEQ ID NO: 157741 - DNA, 15 bp, Homo sapiens
gatggtcttcgtagt

SEQ ID NO: 157742 - DNA, 15 bp, Homo sapiens
tgatggtcttcgtag

SEQ ID NO: 157743 - DNA, 15 bp, Homo sapiens
ctgatggtcttcgta

SEQ ID NO: 157744 - DNA, 15 bp, Homo sapiens
actgatggtcttcgt

SEQ ID NO: 157745 - DNA, 15 bp, Homo sapiens
cactgatggtcttcg

SEQ ID NO: 157746 - DNA, 15 bp, Homo sapiens
gcactgatggtcttc

SEQ ID NO: 157747 - DNA, 15 bp, Homo sapiens
cgcactgatggtctt

SEQ ID NO: 157748 - DNA, 15 bp, Homo sapiens
tcgcactgatggtct

SEQ ID NO: 157749 - DNA, 15 bp, Homo sapiens
ctcgcactgatggtc

SEQ ID NO: 157750 - DNA, 15 bp, Homo sapiens
cctcgcactgatggt

SEQ ID NO: 157751 - DNA, 15 bp, Homo sapiens
acctcgcactgatgg

SEQ ID NO: 157752 - DNA, 15 bp, Homo sapiens
gacctcgcactgatg

SEQ ID NO: 157753 - DNA, 15 bp, Homo sapiens
cgacctcgcactgat

SEQ ID NO: 157754 - DNA, 15 bp, Homo sapiens
ccgacctcgcactga

SEQ ID NO: 157755 - DNA, 15 bp, Homo sapiens
gccgacctcgcactg

SEQ ID NO: 157756 - DNA, 15 bp, Homo sapiens
tgccgacctcgcact

SEQ ID NO: 157757 - DNA, 15 bp, Homo sapiens
atgccgacctcgcac

SEQ ID NO: 157758 - DNA, 15 bp, Homo sapiens
catgccgacctcgca

SEQ ID NO: 157759 - DNA, 15 bp, Homo sapiens
tcatgccgacctcgc

SEQ ID NO: 157760 - DNA, 15 bp, Homo sapiens
atcatgccgacctcg

SEQ ID NO: 157761 - DNA, 15 bp, Homo sapiens
gatcatgccgacctc

SEQ ID NO: 157762 - DNA, 15 bp, Homo sapiens
cgatcatgccgacct

SEQ ID NO: 157763 - DNA, 15 bp, Homo sapiens
acgatcatgccgacc

SEQ ID NO: 157764 - DNA, 15 bp, Homo sapiens
cacgatcatgccgac

SEQ ID NO: 157765 - DNA, 15 bp, Homo sapiens
ccacgatcatgccga

SEQ ID NO: 157766 - DNA, 15 bp, Homo sapiens
cccacgatcatgccg

SEQ ID NO: 157767 - DNA, 15 bp, Homo sapiens
acccacgatcatgcc

SEQ ID NO: 157768 - DNA, 15 bp, Homo sapiens
tacccacgatcatgc

SEQ ID NO: 157769 - DNA, 15 bp, Homo sapiens
ttacccacgatcatg

SEQ ID NO: 157770 - DNA, 15 bp, Homo sapiens
cttacccacgatcat

SEQ ID NO: 157771 - DNA, 15 bp, Homo sapiens
ccttacccacgatca

SEQ ID NO: 157772 - DNA, 15 bp, Homo sapiens
cccttacccacgatc

SEQ ID NO: 157773 - DNA, 15 bp, Homo sapiens
gcccttacccacgat

SEQ ID NO: 157774 - DNA, 15 bp, Homo sapiens
agcccttacccacga

SEQ ID NO: 157775 - DNA, 15 bp, Homo sapiens
gagcccttacccacg

SEQ ID NO: 157776 - DNA, 15 bp, Homo sapiens
ggagcccttacccac

SEQ ID NO: 157777 - DNA, 15 bp, Homo sapiens
aggagcccttaccca

SEQ ID NO: 157778 - DNA, 15 bp, Homo sapiens
aaggagcccttaccc

SEQ ID NO: 157779 - DNA, 15 bp, Homo sapiens
caaggagcccttacc

SEQ ID NO: 157780 - DNA, 15 bp, Homo sapiens
gcaaggagcccttac

SEQ ID NO: 157781 - DNA, 15 bp, Homo sapiens
tgcaaggagccctta

SEQ ID NO: 157782 - DNA, 15 bp, Homo sapiens
gtgcaaggagccctt

SEQ ID NO: 157783 - DNA, 15 bp, Homo sapiens
ggtgcaaggagccct

SEQ ID NO: 157784 - DNA, 15 bp, Homo sapiens
gggtgcaaggagccc

SEQ ID NO: 157785 - DNA, 15 bp, Homo sapiens
ggggtgcaaggagcc

SEQ ID NO: 157786 - DNA, 15 bp, Homo sapiens
aggggtgcaaggagc

SEQ ID NO: 157787 - DNA, 15 bp, Homo sapiens
caggggtgcaaggag

SEQ ID NO: 157788 - DNA, 15 bp, Homo sapiens
gcaggggtgcaagga

SEQ ID NO: 157789 - DNA, 15 bp, Homo sapiens
ggcaggggtgcaagg

SEQ ID NO: 157790 - DNA, 15 bp, Homo sapiens
gggcaggggtgcaag

SEQ ID NO: 157791 - DNA, 15 bp, Homo sapiens
ggggcaggggtgcaa

SEQ ID NO: 157792 - DNA, 15 bp, Homo sapiens
aggggcaggggtgca

SEQ ID NO: 157793 - DNA, 15 bp, Homo sapiens
aaggggcaggggtgc

SEQ ID NO: 157794 - DNA, 15 bp, Homo sapiens
gaaggggcaggggtg

SEQ ID NO: 157795 - DNA, 15 bp, Homo sapiens
ggaaggggcaggggt

SEQ ID NO: 157796 - DNA, 15 bp, Homo sapiens
tggaaggggcagggg

SEQ ID NO: 157797 - DNA, 15 bp, Homo sapiens
ctggaaggggcaggg

SEQ ID NO: 157798 - DNA, 15 bp, Homo sapiens
tctggaaggggcagg

SEQ ID NO: 157799 - DNA, 15 bp, Homo sapiens
gtctggaaggggcag

SEQ ID NO: 157800 - DNA, 15 bp, Homo sapiens
agtctggaaggggca

SEQ ID NO: 157801 - DNA, 15 bp, Homo sapiens
cagtctggaaggggc

SEQ ID NO: 157802 - DNA, 15 bp, Homo sapiens
gcagtctggaagggg

SEQ ID NO: 157803 - DNA, 15 bp, Homo sapiens
agcagtctggaaggg

SEQ ID NO: 157804 - DNA, 15 bp, Homo sapiens
cagcagtctggaagg

SEQ ID NO: 157805 - DNA, 15 bp, Homo sapiens
tcagcagtctggaag

SEQ ID NO: 157806 - DNA, 15 bp, Homo sapiens
ctcagcagtctggaa

SEQ ID NO: 157807 - DNA, 15 bp, Homo sapiens
cctcagcagtctgga

SEQ ID NO: 157808 - DNA, 15 bp, Homo sapiens
gcctcagcagtctgg

SEQ ID NO: 157809 - DNA, 15 bp, Homo sapiens
agcctcagcagtctg

SEQ ID NO: 157810 - DNA, 15 bp, Homo sapiens
gagcctcagcagtct

SEQ ID NO: 157811 - DNA, 15 bp, Homo sapiens
ggagcctcagcagtc

SEQ ID NO: 157812 - DNA, 15 bp, Homo sapiens
gggagcctcagcagt

SEQ ID NO: 157813 - DNA, 15 bp, Homo sapiens
agggagcctcagcag

SEQ ID NO: 157814 - DNA, 15 bp, Homo sapiens
cagggagcctcagca

SEQ ID NO: 157815 - DNA, 15 bp, Homo sapiens
acagggagcctcagc

SEQ ID NO: 157816 - DNA, 15 bp, Homo sapiens
cacagggagcctcag

SEQ ID NO: 157817 - DNA, 15 bp, Homo sapiens
acacagggagcctca

SEQ ID NO: 157818 - DNA, 15 bp, Homo sapiens
tacacagggagcctc

SEQ ID NO: 157819 - DNA, 15 bp, Homo sapiens
gtacacagggagcct

SEQ ID NO: 157820 - DNA, 15 bp, Homo sapiens
tgtacacagggagcc

SEQ ID NO: 157821 - DNA, 15 bp, Homo sapiens
ttgtacacagggagc

SEQ ID NO: 157822 - DNA, 15 bp, Homo sapiens
gttgtacacagggag

SEQ ID NO: 157823 - DNA, 15 bp, Homo sapiens
tgttgtacacaggga

SEQ ID NO: 157824 - DNA, 15 bp, Homo sapiens
ctgttgtacacaggg

SEQ ID NO: 157825 - DNA, 15 bp, Homo sapiens
cctgttgtacacagg

SEQ ID NO: 157826 - DNA, 15 bp, Homo sapiens
gcctgttgtacacag

SEQ ID NO: 157827 - DNA, 15 bp, Homo sapiens
agcctgttgtacaca

SEQ ID NO: 157828 - DNA, 15 bp, Homo sapiens
aagcctgttgtacac

SEQ ID NO: 157829 - DNA, 15 bp, Homo sapiens
gaagcctgttgtaca

SEQ ID NO: 157830 - DNA, 15 bp, Homo sapiens
tgaagcctgttgtac

SEQ ID NO: 157831 - DNA, 15 bp, Homo sapiens
ttgaagcctgttgta

SEQ ID NO: 157832 - DNA, 15 bp, Homo sapiens
cttgaagcctgttgt

SEQ ID NO: 157833 - DNA, 15 bp, Homo sapiens
ccttgaagcctgttg

SEQ ID NO: 157834 - DNA, 15 bp, Homo sapiens
cccttgaagcctgtt

SEQ ID NO: 157835 - DNA, 15 bp, Homo sapiens
gcccttgaagcctgt

SEQ ID NO: 157836 - DNA, 15 bp, Homo sapiens
ggcccttgaagcctg

SEQ ID NO: 157837 - DNA, 15 bp, Homo sapiens
gggcccttgaagcct

SEQ ID NO: 157838 - DNA, 15 bp, Homo sapiens
agggcccttgaagcc

SEQ ID NO: 157839 - DNA, 15 bp, Homo sapiens
cagggcccttgaagc

SEQ ID NO: 157840 - DNA, 15 bp, Homo sapiens
acagggcccttgaag

SEQ ID NO: 157841 - DNA, 15 bp, Homo sapiens
cacagggcccttgaa

SEQ ID NO: 157842 - DNA, 15 bp, Homo sapiens
ccacagggcccttga

SEQ ID NO: 157843 - DNA, 15 bp, Homo sapiens
cccacagggcccttg

SEQ ID NO: 157844 - DNA, 15 bp, Homo sapiens
ccccacagggccctt

SEQ ID NO: 157845 - DNA, 15 bp, Homo sapiens
accccacagggccct

SEQ ID NO: 157846 - DNA, 15 bp, Homo sapiens
caccccacagggccc

SEQ ID NO: 157847 - DNA, 15 bp, Homo sapiens
tcaccccacagggcc

SEQ ID NO: 157848 - DNA, 15 bp, Homo sapiens
ctcaccccacagggc

SEQ ID NO: 157849 - DNA, 15 bp, Homo sapiens
cctcaccccacaggg

SEQ ID NO: 157850 - DNA, 15 bp, Homo sapiens
tcctcaccccacagg

SEQ ID NO: 157851 - DNA, 15 bp, Homo sapiens
gtcctcaccccacag

SEQ ID NO: 157852 - DNA, 15 bp, Homo sapiens
ggtcctcaccccaca

SEQ ID NO: 157853 - DNA, 15 bp, Homo sapiens
tggtcctcaccccac

SEQ ID NO: 157854 - DNA, 15 bp, Homo sapiens
ttggtcctcacccca

SEQ ID NO: 157855 - DNA, 15 bp, Homo sapiens
tttggtcctcacccc

SEQ ID NO: 157856 - DNA, 15 bp, Homo sapiens
gtttggtcctcaccc

SEQ ID NO: 157857 - DNA, 15 bp, Homo sapiens
agtttggtcctcacc

SEQ ID NO: 157858 - DNA, 15 bp, Homo sapiens
tagtttggtcctcac

SEQ ID NO: 157859 - DNA, 15 bp, Homo sapiens
gtagtttggtcctca

SEQ ID NO: 157860 - DNA, 15 bp, Homo sapiens
agtagtttggtcctc

SEQ ID NO: 157861 - DNA, 15 bp, Homo sapiens
aagtagtttggtcct

SEQ ID NO: 157862 - DNA, 15 bp, Homo sapiens
taagtagtttggtcc

SEQ ID NO: 157863 - DNA, 15 bp, Homo sapiens
ttaagtagtttggtc

SEQ ID NO: 157864 - DNA, 15 bp, Homo sapiens
gttaagtagtttggt

SEQ ID NO: 157865 - DNA, 15 bp, Homo sapiens
tgttaagtagtttgg

SEQ ID NO: 157866 - DNA, 15 bp, Homo sapiens
ttgttaagtagtttg

SEQ ID NO: 157867 - DNA, 15 bp, Homo sapiens
gttgttaagtagttt

SEQ ID NO: 157868 - DNA, 15 bp, Homo sapiens
ggttgttaagtagtt

SEQ ID NO: 157869 - DNA, 15 bp, Homo sapiens
cggttgttaagtagt

SEQ ID NO: 157870 - DNA, 15 bp, Homo sapiens
ccggttgttaagtag

SEQ ID NO: 157871 - DNA, 15 bp, Homo sapiens
accggttgttaagta

SEQ ID NO: 157872 - DNA, 15 bp, Homo sapiens
caccggttgttaagt

SEQ ID NO: 157873 - DNA, 15 bp, Homo sapiens
tcaccggttgttaag

SEQ ID NO: 157874 - DNA, 15 bp, Homo sapiens
atcaccggttgttaa

SEQ ID NO: 157875 - DNA, 15 bp, Homo sapiens
catcaccggttgtta

SEQ ID NO: 157876 - DNA, 15 bp, Homo sapiens
acatcaccggttgtt

SEQ ID NO: 157877 - DNA, 15 bp, Homo sapiens
gacatcaccggttgt

SEQ ID NO: 157878 - DNA, 15 bp, Homo sapiens
tgacatcaccggttg

SEQ ID NO: 157879 - DNA, 15 bp, Homo sapiens
ctgacatcaccggtt

SEQ ID NO: 157880 - DNA, 15 bp, Homo sapiens
tctgacatcaccggt

SEQ ID NO: 157881 - DNA, 15 bp, Homo sapiens
ctctgacatcaccgg

SEQ ID NO: 157882 - DNA, 15 bp, Homo sapiens
gctctgacatcaccg

SEQ ID NO: 157883 - DNA, 15 bp, Homo sapiens
tgctctgacatcacc

SEQ ID NO: 157884 - DNA, 15 bp, Homo sapiens
ctgctctgacatcac

SEQ ID NO: 157885 - DNA, 15 bp, Homo sapiens
tctgctctgacatca

SEQ ID NO: 157886 - DNA, 15 bp, Homo sapiens
ctctgctctgacatc

SEQ ID NO: 157887 - DNA, 15 bp, Homo sapiens
gctctgctctgacat

SEQ ID NO: 157888 - DNA, 15 bp, Homo sapiens
ggctctgctctgaca

SEQ ID NO: 157889 - DNA, 15 bp, Homo sapiens
aggctctgctctgac

SEQ ID NO: 157890 - DNA, 15 bp, Homo sapiens
caggctctgctctga

SEQ ID NO: 157891 - DNA, 15 bp, Homo sapiens
ccaggctctgctctg

SEQ ID NO: 157892 - DNA, 15 bp, Homo sapiens
accaggctctgctct

SEQ ID NO: 157893 - DNA, 15 bp, Homo sapiens
caccaggctctgctc

SEQ ID NO: 157894 - DNA, 15 bp, Homo sapiens
gcaccaggctctgct

SEQ ID NO: 157895 - DNA, 15 bp, Homo sapiens
agcaccaggctctgc

SEQ ID NO: 157896 - DNA, 15 bp, Homo sapiens
tagcaccaggctctg

SEQ ID NO: 157897 - DNA, 15 bp, Homo sapiens
gtagcaccaggctct

SEQ ID NO: 157898 - DNA, 15 bp, Homo sapiens
tgtagcaccaggctc

SEQ ID NO: 157899 - DNA, 15 bp, Homo sapiens
ctgtagcaccaggct

SEQ ID NO: 157900 - DNA, 15 bp, Homo sapiens
gctgtagcaccaggc

SEQ ID NO: 157901 - DNA, 15 bp, Homo sapiens
ggctgtagcaccagg

SEQ ID NO: 157902 - DNA, 15 bp, Homo sapiens
aggctgtagcaccag

SEQ ID NO: 157903 - DNA, 15 bp, Homo sapiens
caggctgtagcacca

SEQ ID NO: 157904 - DNA, 15 bp, Homo sapiens
ccaggctgtagcacc

SEQ ID NO: 157905 - DNA, 15 bp, Homo sapiens
cccaggctgtagcac

SEQ ID NO: 157906 - DNA, 15 bp, Homo sapiens
acccaggctgtagca

SEQ ID NO: 157907 - DNA, 15 bp, Homo sapiens
cacccaggctgtagc

SEQ ID NO: 157908 - DNA, 15 bp, Homo sapiens
ccacccaggctgtag

SEQ ID NO: 157909 - DNA, 15 bp, Homo sapiens
accacccaggctgta

SEQ ID NO: 157910 - DNA, 15 bp, Homo sapiens
gaccacccaggctgt

SEQ ID NO: 157911 - DNA, 15 bp, Homo sapiens
agaccacccaggctg

SEQ ID NO: 157912 - DNA, 15 bp, Homo sapiens
aagaccacccaggct

SEQ ID NO: 157913 - DNA, 15 bp, Homo sapiens
caagaccacccaggc

SEQ ID NO: 157914 - DNA, 15 bp, Homo sapiens
ccaagaccacccagg

SEQ ID NO: 157915 - DNA, 15 bp, Homo sapiens
cccaagaccacccag

SEQ ID NO: 157916 - DNA, 15 bp, Homo sapiens
ccccaagaccaccca

SEQ ID NO: 157917 - DNA, 15 bp, Homo sapiens
accccaagaccaccc

SEQ ID NO: 157918 - DNA, 15 bp, Homo sapiens
taccccaagaccacc

SEQ ID NO: 157919 - DNA, 15 bp, Homo sapiens
ataccccaagaccac

SEQ ID NO: 157920 - DNA, 15 bp, Homo sapiens
gataccccaagacca

SEQ ID NO: 157921 - DNA, 15 bp, Homo sapiens
tgataccccaagacc

SEQ ID NO: 157922 - DNA, 15 bp, Homo sapiens
ttgataccccaagac

SEQ ID NO: 157923 - DNA, 15 bp, Homo sapiens
cttgataccccaaga

SEQ ID NO: 157924 - DNA, 15 bp, Homo sapiens
tcttgataccccaag

SEQ ID NO: 157925 - DNA, 15 bp, Homo sapiens
atcttgataccccaa

SEQ ID NO: 157926 - DNA, 15 bp, Homo sapiens
catcttgatacccca

SEQ ID NO: 157927 - DNA, 15 bp, Homo sapiens
ccatcttgatacccc

SEQ ID NO: 157928 - DNA, 15 bp, Homo sapiens
tccatcttgataccc

SEQ ID NO: 157929 - DNA, 15 bp, Homo sapiens
ttccatcttgatacc

SEQ ID NO: 157930 - DNA, 15 bp, Homo sapiens
cttccatcttgatac

SEQ ID NO: 157931 - DNA, 15 bp, Homo sapiens
gcttccatcttgata

SEQ ID NO: 157932 - DNA, 15 bp, Homo sapiens
tgcttccatcttgat

SEQ ID NO: 157933 - DNA, 15 bp, Homo sapiens
gtgcttccatcttga

SEQ ID NO: 157934 - DNA, 15 bp, Homo sapiens
ggtgcttccatcttg

SEQ ID NO: 157935 - DNA, 15 bp, Homo sapiens
cggtgcttccatctt

SEQ ID NO: 157936 - DNA, 15 bp, Homo sapiens
acggtgcttccatct

SEQ ID NO: 157937 - DNA, 15 bp, Homo sapiens
cacggtgcttccatc

SEQ ID NO: 157938 - DNA, 15 bp, Homo sapiens
acacggtgcttccat

SEQ ID NO: 157939 - DNA, 15 bp, Homo sapiens
tacacggtgcttcca

SEQ ID NO: 157940 - DNA, 15 bp, Homo sapiens
gtacacggtgcttcc

SEQ ID NO: 157941 - DNA, 15 bp, Homo sapiens
tgtacacggtgcttc

SEQ ID NO: 157942 - DNA, 15 bp, Homo sapiens
ctgtacacggtgctt

SEQ ID NO: 157943 - DNA, 15 bp, Homo sapiens
actgtacacggtgct

SEQ ID NO: 157944 - DNA, 15 bp, Homo sapiens
tactgtacacggtgc

SEQ ID NO: 157945 - DNA, 15 bp, Homo sapiens
ctactgtacacggtg

SEQ ID NO: 157946 - DNA, 15 bp, Homo sapiens
cctactgtacacggt

SEQ ID NO: 157947 - DNA, 15 bp, Homo sapiens
tcctactgtacacgg

SEQ ID NO: 157948 - DNA, 15 bp, Homo sapiens
ttcctactgtacacg

SEQ ID NO: 157949 - DNA, 15 bp, Homo sapiens
cttcctactgtacac

SEQ ID NO: 157950 - DNA, 15 bp, Homo sapiens
gcttcctactgtaca

SEQ ID NO: 157951 - DNA, 15 bp, Homo sapiens
tgcttcctactgtac

SEQ ID NO: 157952 - DNA, 15 bp, Homo sapiens
atgcttcctactgta

SEQ ID NO: 157953 - DNA, 15 bp, Homo sapiens
aatgcttcctactgt

SEQ ID NO: 157954 - DNA, 15 bp, Homo sapiens
aaatgcttcctactg

SEQ ID NO: 157955 - DNA, 15 bp, Homo sapiens
gaaatgcttcctact

SEQ ID NO: 157956 - DNA, 15 bp, Homo sapiens
tgaaatgcttcctac

SEQ ID NO: 157957 - DNA, 15 bp, Homo sapiens
ttgaaatgcttccta

SEQ ID NO: 157958 - DNA, 15 bp, Homo sapiens
gttgaaatgcttcct

SEQ ID NO: 157959 - DNA, 15 bp, Homo sapiens
cgttgaaatgcttcc

SEQ ID NO: 157960 - DNA, 15 bp, Homo sapiens
gcgttgaaatgcttc

SEQ ID NO: 157961 - DNA, 15 bp, Homo sapiens
ggcgttgaaatgctt

SEQ ID NO: 157962 - DNA, 15 bp, Homo sapiens
tggcgttgaaatgct

SEQ ID NO: 157963 - DNA, 15 bp, Homo sapiens
atggcgttgaaatgc

SEQ ID NO: 157964 - DNA, 15 bp, Homo sapiens
catggcgttgaaatg

SEQ ID NO: 157965 - DNA, 15 bp, Homo sapiens
tcatggcgttgaaat

SEQ ID NO: 157966 - DNA, 15 bp, Homo sapiens
atcatggcgttgaaa

SEQ ID NO: 157967 - DNA, 15 bp, Homo sapiens
catcatggcgttgaa

SEQ ID NO: 157968 - DNA, 15 bp, Homo sapiens
gcatcatggcgttga

SEQ ID NO: 157969 - DNA, 15 bp, Homo sapiens
ggcatcatggcgttg

SEQ ID NO: 157970 - DNA, 15 bp, Homo sapiens
tggcatcatggcgtt

SEQ ID NO: 157971 - DNA, 15 bp, Homo sapiens
gtggcatcatggcgt

SEQ ID NO: 157972 - DNA, 15 bp, Homo sapiens
tgtggcatcatggcg

SEQ ID NO: 157973 - DNA, 15 bp, Homo sapiens
atgtggcatcatggc

SEQ ID NO: 157974 - DNA, 15 bp, Homo sapiens
aatgtggcatcatgg

SEQ ID NO: 157975 - DNA, 15 bp, Homo sapiens
gaatgtggcatcatg

SEQ ID NO: 157976 - DNA, 15 bp, Homo sapiens
ggaatgtggcatcat

SEQ ID NO: 157977 - DNA, 15 bp, Homo sapiens
aggaatgtggcatca

SEQ ID NO: 157978 - DNA, 15 bp, Homo sapiens
caggaatgtggcatc

SEQ ID NO: 157979 - DNA, 15 bp, Homo sapiens
gcaggaatgtggcat

SEQ ID NO: 157980 - DNA, 15 bp, Homo sapiens
tgcaggaatgtggca

SEQ ID NO: 157981 - DNA, 15 bp, Homo sapiens
atgcaggaatgtggc

SEQ ID NO: 157982 - DNA, 15 bp, Homo sapiens
gatgcaggaatgtgg

SEQ ID NO: 157983 - DNA, 15 bp, Homo sapiens
tgatgcaggaatgtg

SEQ ID NO: 157984 - DNA, 15 bp, Homo sapiens
ctgatgcaggaatgt

SEQ ID NO: 157985 - DNA, 15 bp, Homo sapiens
tctgatgcaggaatg

SEQ ID NO: 157986 - DNA, 15 bp, Homo sapiens
atctgatgcaggaat

SEQ ID NO: 157987 - DNA, 15 bp, Homo sapiens
catctgatgcaggaa

SEQ ID NO: 157988 - DNA, 15 bp, Homo sapiens
ccatctgatgcagga

SEQ ID NO: 157989 - DNA, 15 bp, Homo sapiens
accatctgatgcagg

SEQ ID NO: 157990 - DNA, 15 bp, Homo sapiens
taccatctgatgcag

SEQ ID NO: 157991 - DNA, 15 bp, Homo sapiens
ataccatctgatgca

SEQ ID NO: 157992 - DNA, 15 bp, Homo sapiens
cataccatctgatgc

SEQ ID NO: 157993 - DNA, 15 bp, Homo sapiens
gcataccatctgatg

SEQ ID NO: 157994 - DNA, 15 bp, Homo sapiens
ggcataccatctgat

SEQ ID NO: 157995 - DNA, 15 bp, Homo sapiens
tggcataccatctga

SEQ ID NO: 157996 - DNA, 15 bp, Homo sapiens
ctggcataccatctg

SEQ ID NO: 157997 - DNA, 15 bp, Homo sapiens
gctggcataccatct

SEQ ID NO: 157998 - DNA, 15 bp, Homo sapiens
agctggcataccatc

SEQ ID NO: 157999 - DNA, 15 bp, Homo sapiens
cagctggcataccat

SEQ ID NO: 158000 - DNA, 15 bp, Homo sapiens
gcagctggcatacca

SEQ ID NO: 158001 - DNA, 15 bp, Homo sapiens
tgcagctggcatacc

SEQ ID NO: 158002 - DNA, 15 bp, Homo sapiens
atgcagctggcatac

SEQ ID NO: 158003 - DNA, 15 bp, Homo sapiens
tatgcagctggcata

SEQ ID NO: 158004 - DNA, 15 bp, Homo sapiens
atatgcagctggcat

SEQ ID NO: 158005 - DNA, 15 bp, Homo sapiens
gatatgcagctggca

SEQ ID NO: 158006 - DNA, 15 bp, Homo sapiens
ggatatgcagctggc

SEQ ID NO: 158007 - DNA, 15 bp, Homo sapiens
tggatatgcagctgg

SEQ ID NO: 158008 - DNA, 15 bp, Homo sapiens
gtggatatgcagctg

SEQ ID NO: 158009 - DNA, 15 bp, Homo sapiens
ggtggatatgcagct

SEQ ID NO: 158010 - DNA, 15 bp, Homo sapiens
aggtggatatgcagc

SEQ ID NO: 158011 - DNA, 15 bp, Homo sapiens
gaggtggatatgcag

SEQ ID NO: 158012 - DNA, 15 bp, Homo sapiens
tgaggtggatatgca

SEQ ID NO: 158013 - DNA, 15 bp, Homo sapiens
gtgaggtggatatgc

SEQ ID NO: 158014 - DNA, 15 bp, Homo sapiens
ggtgaggtggatatg

SEQ ID NO: 158015 - DNA, 15 bp, Homo sapiens
gggtgaggtggatat

SEQ ID NO: 158016 - DNA, 15 bp, Homo sapiens
tgggtgaggtggata

SEQ ID NO: 158017 - DNA, 15 bp, Homo sapiens
atgggtgaggtggat

SEQ ID NO: 158018 - DNA, 15 bp, Homo sapiens
gatgggtgaggtgga

SEQ ID NO: 158019 - DNA, 15 bp, Homo sapiens
tgatgggtgaggtgg

SEQ ID NO: 158020 - DNA, 15 bp, Homo sapiens
ctgatgggtgaggtg

SEQ ID NO: 158021 - DNA, 15 bp, Homo sapiens
cctgatgggtgaggt

SEQ ID NO: 158022 - DNA, 15 bp, Homo sapiens
tcctgatgggtgagg

SEQ ID NO: 158023 - DNA, 15 bp, Homo sapiens
atcctgatgggtgag

SEQ ID NO: 158024 - DNA, 15 bp, Homo sapiens
aatcctgatgggtga

SEQ ID NO: 158025 - DNA, 15 bp, Homo sapiens
taatcctgatgggtg

SEQ ID NO: 158026 - DNA, 15 bp, Homo sapiens
ataatcctgatgggt

SEQ ID NO: 158027 - DNA, 15 bp, Homo sapiens
tataatcctgatggg

SEQ ID NO: 158028 - DNA, 15 bp, Homo sapiens
ttataatcctgatgg

SEQ ID NO: 158029 - DNA, 15 bp, Homo sapiens
attataatcctgatg

SEQ ID NO: 158030 - DNA, 15 bp, Homo sapiens
aattataatcctgat

SEQ ID NO: 158031 - DNA, 15 bp, Homo sapiens
taattataatcctga

SEQ ID NO: 158032 - DNA, 15 bp, Homo sapiens
ttaattataatcctg

SEQ ID NO: 158033 - DNA, 15 bp, Homo sapiens
tttaattataatcct

SEQ ID NO: 158034 - DNA, 15 bp, Homo sapiens
ttttaattataatcc

SEQ ID NO: 158035 - DNA, 15 bp, Homo sapiens
gttttaattataatc

SEQ ID NO: 158036 - DNA, 15 bp, Homo sapiens
tgttttaattataat

SEQ ID NO: 158037 - DNA, 15 bp, Homo sapiens
gtgttttaattataa

SEQ ID NO: 158038 - DNA, 15 bp, Homo sapiens
agtgttttaattata

SEQ ID NO: 158039 - DNA, 15 bp, Homo sapiens
aagtgttttaattat

SEQ ID NO: 158040 - DNA, 15 bp, Homo sapiens
taagtgttttaatta

SEQ ID NO: 158041 - DNA, 15 bp, Homo sapiens
ataagtgttttaatt

SEQ ID NO: 158042 - DNA, 15 bp, Homo sapiens
gataagtgttttaat

SEQ ID NO: 158043 - DNA, 15 bp, Homo sapiens
agataagtgttttaa

SEQ ID NO: 158044 - DNA, 15 bp, Homo sapiens
cagataagtgtttta

SEQ ID NO: 158045 - DNA, 15 bp, Homo sapiens
ccagataagtgtttt

SEQ ID NO: 158046 - DNA, 15 bp, Homo sapiens
accagataagtgttt

SEQ ID NO: 158047 - DNA, 15 bp, Homo sapiens
taccagataagtgtt

SEQ ID NO: 158048 - DNA, 15 bp, Homo sapiens
ttaccagataagtgt

SEQ ID NO: 158049 - DNA, 15 bp, Homo sapiens
tttaccagataagtg

SEQ ID NO: 158050 - DNA, 15 bp, Homo sapiens
atttaccagataagt

SEQ ID NO: 158051 - DNA, 15 bp, Homo sapiens
aatttaccagataag

SEQ ID NO: 158052 - DNA, 15 bp, Homo sapiens
caatttaccagataa

SEQ ID NO: 158053 - DNA, 15 bp, Homo sapiens
tcaatttaccagata

SEQ ID NO: 158054 - DNA, 15 bp, Homo sapiens
gtcaatttaccagat

SEQ ID NO: 158055 - DNA, 15 bp, Homo sapiens
ggtcaatttaccaga

SEQ ID NO: 158056 - DNA, 15 bp, Homo sapiens
tggtcaatttaccag

SEQ ID NO: 158057 - DNA, 15 bp, Homo sapiens
ttggtcaatttacca

SEQ ID NO: 158058 - DNA, 15 bp, Homo sapiens
gttggtcaatttacc

SEQ ID NO: 158059 - DNA, 15 bp, Homo sapiens
agttggtcaatttac

SEQ ID NO: 158060 - DNA, 15 bp, Homo sapiens
cagttggtcaattta

SEQ ID NO: 158061 - DNA, 15 bp, Homo sapiens
ccagttggtcaattt

SEQ ID NO: 158062 - DNA, 15 bp, Homo sapiens
tccagttggtcaatt

SEQ ID NO: 158063 - DNA, 15 bp, Homo sapiens
gtccagttggtcaat

SEQ ID NO: 158064 - DNA, 15 bp, Homo sapiens
tgtccagttggtcaa

SEQ ID NO: 158065 - DNA, 15 bp, Homo sapiens
ctgtccagttggtca

SEQ ID NO: 158066 - DNA, 15 bp, Homo sapiens
tctgtccagttggtc

SEQ ID NO: 158067 - DNA, 15 bp, Homo sapiens
atctgtccagttggt

SEQ ID NO: 158068 - DNA, 15 bp, Homo sapiens
aatctgtccagttgg

SEQ ID NO: 158069 - DNA, 15 bp, Homo sapiens
caatctgtccagttg

SEQ ID NO: 158070 - DNA, 15 bp, Homo sapiens
ccaatctgtccagtt

SEQ ID NO: 158071 - DNA, 15 bp, Homo sapiens
accaatctgtccagt

SEQ ID NO: 158072 - DNA, 15 bp, Homo sapiens
gaccaatctgtccag

SEQ ID NO: 158073 - DNA, 15 bp, Homo sapiens
ggaccaatctgtcca

SEQ ID NO: 158074 - DNA, 15 bp, Homo sapiens
tggaccaatctgtcc

SEQ ID NO: 158075 - DNA, 15 bp, Homo sapiens
ttggaccaatctgtc

SEQ ID NO: 158076 - DNA, 15 bp, Homo sapiens
cttggaccaatctgt

SEQ ID NO: 158077 - DNA, 15 bp, Homo sapiens
acttggaccaatctg

SEQ ID NO: 158078 - DNA, 15 bp, Homo sapiens
cacttggaccaatct

SEQ ID NO: 158079 - DNA, 15 bp, Homo sapiens
ccacttggaccaatc

SEQ ID NO: 158080 - DNA, 15 bp, Homo sapiens
tccacttggaccaat

SEQ ID NO: 158081 - DNA, 15 bp, Homo sapiens
ttccacttggaccaa

SEQ ID NO: 158082 - DNA, 15 bp, Homo sapiens
cttccacttggacca

SEQ ID NO: 158083 - DNA, 15 bp, Homo sapiens
tcttccacttggacc

SEQ ID NO: 158084 - DNA, 15 bp, Homo sapiens
ctcttccacttggac

SEQ ID NO: 158085 - DNA, 15 bp, Homo sapiens
cctcttccacttgga

SEQ ID NO: 158086 - DNA, 15 bp, Homo sapiens
tcctcttccacttgg

SEQ ID NO: 158087 - DNA, 15 bp, Homo sapiens
atcctcttccacttg

SEQ ID NO: 158088 - DNA, 15 bp, Homo sapiens
tatcctcttccactt

SEQ ID NO: 158089 - DNA, 15 bp, Homo sapiens
ttatcctcttccact

SEQ ID NO: 158090 - DNA, 15 bp, Homo sapiens
cttatcctcttccac

SEQ ID NO: 158091 - DNA, 15 bp, Homo sapiens
gcttatcctcttcca

SEQ ID NO: 158092 - DNA, 15 bp, Homo sapiens
tgcttatcctcttcc

SEQ ID NO: 158093 - DNA, 15 bp, Homo sapiens
ttgcttatcctcttc

SEQ ID NO: 158094 - DNA, 15 bp, Homo sapiens
tttgcttatcctctt

SEQ ID NO: 158095 - DNA, 15 bp, Homo sapiens
ttttgcttatcctct

SEQ ID NO: 158096 - DNA, 15 bp, Homo sapiens
cttttgcttatcctc

SEQ ID NO: 158097 - DNA, 15 bp, Homo sapiens
acttttgcttatcct

SEQ ID NO: 158098 - DNA, 15 bp, Homo sapiens
cacttttgcttatcc

SEQ ID NO: 158099 - DNA, 15 bp, Homo sapiens
ccacttttgcttatc

SEQ ID NO: 158100 - DNA, 15 bp, Homo sapiens
accacttttgcttat

SEQ ID NO: 158101 - DNA, 15 bp, Homo sapiens
taccacttttgctta

SEQ ID NO: 158102 - DNA, 15 bp, Homo sapiens
gtaccacttttgctt

SEQ ID NO: 158103 - DNA, 15 bp, Homo sapiens
ggtaccacttttgct

SEQ ID NO: 158104 - DNA, 15 bp, Homo sapiens
tggtaccacttttgc

SEQ ID NO: 158105 - DNA, 15 bp, Homo sapiens
atggtaccacttttg

SEQ ID NO: 158106 - DNA, 15 bp, Homo sapiens
gatggtaccactttt

SEQ ID NO: 158107 - DNA, 15 bp, Homo sapiens
agatggtaccacttt

SEQ ID NO: 158108 - DNA, 15 bp, Homo sapiens
gagatggtaccactt

SEQ ID NO: 158109 - DNA, 15 bp, Homo sapiens
ggagatggtaccact

SEQ ID NO: 158110 - DNA, 15 bp, Homo sapiens
tggagatggtaccac

SEQ ID NO: 158111 - DNA, 15 bp, Homo sapiens
gtggagatggtacca

SEQ ID NO: 158112 - DNA, 15 bp, Homo sapiens
ggtggagatggtacc

SEQ ID NO: 158113 - DNA, 15 bp, Homo sapiens
gggtggagatggtac

SEQ ID NO: 158114 - DNA, 15 bp, Homo sapiens
cgggtggagatggta

SEQ ID NO: 158115 - DNA, 15 bp, Homo sapiens
tcgggtggagatggt

SEQ ID NO: 158116 - DNA, 15 bp, Homo sapiens
ttcgggtggagatgg

SEQ ID NO: 158117 - DNA, 15 bp, Homo sapiens
attcgggtggagatg

SEQ ID NO: 158118 - DNA, 15 bp, Homo sapiens
cattcgggtggagat

SEQ ID NO: 158119 - DNA, 15 bp, Homo sapiens
ccattcgggtggaga

SEQ ID NO: 158120 - DNA, 15 bp, Homo sapiens
accattcgggtggag

SEQ ID NO: 158121 - DNA, 15 bp, Homo sapiens
gaccattcgggtgga

SEQ ID NO: 158122 - DNA, 15 bp, Homo sapiens
agaccattcgggtgg

SEQ ID NO: 158123 - DNA, 15 bp, Homo sapiens
aagaccattcgggtg

SEQ ID NO: 158124 - DNA, 15 bp, Homo sapiens
aaagaccattcgggt

SEQ ID NO: 158125 - DNA, 15 bp, Homo sapiens
gaaagaccattcggg

SEQ ID NO: 158126 - DNA, 15 bp, Homo sapiens
ggaaagaccattcgg

SEQ ID NO: 158127 - DNA, 15 bp, Homo sapiens
tggaaagaccattcg

SEQ ID NO: 158128 - DNA, 15 bp, Homo sapiens
gtggaaagaccattc

SEQ ID NO: 158129 - DNA, 15 bp, Homo sapiens
cgtggaaagaccatt

SEQ ID NO: 158130 - DNA, 15 bp, Homo sapiens
ccgtggaaagaccat

SEQ ID NO: 158131 - DNA, 15 bp, Homo sapiens
cccgtggaaagacca

SEQ ID NO: 158132 - DNA, 15 bp, Homo sapiens
gcccgtggaaagacc

SEQ ID NO: 158133 - DNA, 15 bp, Homo sapiens
ggcccgtggaaagac

SEQ ID NO: 158134 - DNA, 15 bp, Homo sapiens
aggcccgtggaaaga

SEQ ID NO: 158135 - DNA, 15 bp, Homo sapiens
caggcccgtggaaag

SEQ ID NO: 158136 - DNA, 15 bp, Homo sapiens
gcaggcccgtggaaa

SEQ ID NO: 158137 - DNA, 15 bp, Homo sapiens
ggcaggcccgtggaa

SEQ ID NO: 158138 - DNA, 15 bp, Homo sapiens
gggcaggcccgtgga

SEQ ID NO: 158139 - DNA, 15 bp, Homo sapiens
ggggcaggcccgtgg

SEQ ID NO: 158140 - DNA, 15 bp, Homo sapiens
aggggcaggcccgtg

SEQ ID NO: 158141 - DNA, 15 bp, Homo sapiens
caggggcaggcccgt

SEQ ID NO: 158142 - DNA, 15 bp, Homo sapiens
gcaggggcaggcccg

SEQ ID NO: 158143 - DNA, 15 bp, Homo sapiens
ggcaggggcaggccc

SEQ ID NO: 158144 - DNA, 15 bp, Homo sapiens
gggcaggggcaggcc

SEQ ID NO: 158145 - DNA, 15 bp, Homo sapiens
ggggcaggggcaggc

SEQ ID NO: 158146 - DNA, 15 bp, Homo sapiens
aggggcaggggcagg

SEQ ID NO: 158147 - DNA, 15 bp, Homo sapiens
caggggcaggggcag

SEQ ID NO: 158148 - DNA, 15 bp, Homo sapiens
gcaggggcaggggca

SEQ ID NO: 158149 - DNA, 15 bp, Homo sapiens
ggcaggggcaggggc

SEQ ID NO: 158150 - DNA, 15 bp, Homo sapiens
gggcaggggcagggg

SEQ ID NO: 158151 - DNA, 15 bp, Homo sapiens
ggggcaggggcaggg

SEQ ID NO: 158152 - DNA, 15 bp, Homo sapiens
gggggcaggggcagg

SEQ ID NO: 158153 - DNA, 15 bp, Homo sapiens
tgggggcaggggcag

SEQ ID NO: 158154 - DNA, 15 bp, Homo sapiens
gtgggggcaggggca

SEQ ID NO: 158155 - DNA, 15 bp, Homo sapiens
ggtgggggcaggggc

SEQ ID NO: 158156 - DNA, 15 bp, Homo sapiens
gggtgggggcagggg

SEQ ID NO: 158157 - DNA, 15 bp, Homo sapiens
tgggtgggggcaggg

SEQ ID NO: 158158 - DNA, 15 bp, Homo sapiens
ttgggtgggggcagg

SEQ ID NO: 158159 - DNA, 15 bp, Homo sapiens
tttgggtgggggcag

SEQ ID NO: 158160 - DNA, 15 bp, Homo sapiens
ctttgggtgggggca

SEQ ID NO: 158161 - DNA, 15 bp, Homo sapiens
actttgggtgggggc

SEQ ID NO: 158162 - DNA, 15 bp, Homo sapiens
cactttgggtggggg

SEQ ID NO: 158163 - DNA, 15 bp, Homo sapiens
tcactttgggtgggg

SEQ ID NO: 158164 - DNA, 15 bp, Homo sapiens
ttcactttgggtggg

SEQ ID NO: 158165 - DNA, 15 bp, Homo sapiens
cttcactttgggtgg

SEQ ID NO: 158166 - DNA, 15 bp, Homo sapiens
ccttcactttgggtg

SEQ ID NO: 158167 - DNA, 15 bp, Homo sapiens
gccttcactttgggt

SEQ ID NO: 158168 - DNA, 15 bp, Homo sapiens
tgccttcactttggg

SEQ ID NO: 158169 - DNA, 15 bp, Homo sapiens
ctgccttcactttgg

SEQ ID NO: 158170 - DNA, 15 bp, Homo sapiens
cctgccttcactttg

SEQ ID NO: 158171 - DNA, 15 bp, Homo sapiens
acctgccttcacttt

SEQ ID NO: 158172 - DNA, 15 bp, Homo sapiens
tacctgccttcactt

SEQ ID NO: 158173 - DNA, 15 bp, Homo sapiens
gtacctgccttcact

SEQ ID NO: 158174 - DNA, 15 bp, Homo sapiens
ggtacctgccttcac

SEQ ID NO: 158175 - DNA, 15 bp, Homo sapiens
tggtacctgccttca

SEQ ID NO: 158176 - DNA, 15 bp, Homo sapiens
ctggtacctgccttc

SEQ ID NO: 158177 - DNA, 15 bp, Homo sapiens
cctggtacctgcctt

SEQ ID NO: 158178 - DNA, 15 bp, Homo sapiens
tcctggtacctgcct

SEQ ID NO: 158179 - DNA, 15 bp, Homo sapiens
ttcctggtacctgcc

SEQ ID NO: 158180 - DNA, 15 bp, Homo sapiens
tttcctggtacctgc

SEQ ID NO: 158181 - DNA, 15 bp, Homo sapiens
ctttcctggtacctg

SEQ ID NO: 158182 - DNA, 15 bp, Homo sapiens
cctttcctggtacct

SEQ ID NO: 158183 - DNA, 15 bp, Homo sapiens
ccctttcctggtacc

SEQ ID NO: 158184 - DNA, 15 bp, Homo sapiens
tccctttcctggtac

SEQ ID NO: 158185 - DNA, 15 bp, Homo sapiens
ctccctttcctggta

SEQ ID NO: 158186 - DNA, 15 bp, Homo sapiens
gctccctttcctggt

SEQ ID NO: 158187 - DNA, 15 bp, Homo sapiens
tgctccctttcctgg

SEQ ID NO: 158188 - DNA, 15 bp, Homo sapiens
ctgctccctttcctg

SEQ ID NO: 158189 - DNA, 15 bp, Homo sapiens
gctgctccctttcct

SEQ ID NO: 158190 - DNA, 15 bp, Homo sapiens
tgctgctccctttcc

SEQ ID NO: 158191 - DNA, 15 bp, Homo sapiens
ctgctgctccctttc

SEQ ID NO: 158192 - DNA, 15 bp, Homo sapiens
actgctgctcccttt

SEQ ID NO: 158193 - DNA, 15 bp, Homo sapiens
gactgctgctccctt

SEQ ID NO: 158194 - DNA, 15 bp, Homo sapiens
ggactgctgctccct

SEQ ID NO: 158195 - DNA, 15 bp, Homo sapiens
cggactgctgctccc

SEQ ID NO: 158196 - DNA, 15 bp, Homo sapiens
gcggactgctgctcc

SEQ ID NO: 158197 - DNA, 15 bp, Homo sapiens
ggcggactgctgctc

SEQ ID NO: 158198 - DNA, 15 bp, Homo sapiens
gggcggactgctgct

SEQ ID NO: 158199 - DNA, 15 bp, Homo sapiens
ggggcggactgctgc

SEQ ID NO: 158200 - DNA, 15 bp, Homo sapiens
aggggcggactgctg

SEQ ID NO: 158201 - DNA, 15 bp, Homo sapiens
gaggggcggactgct

SEQ ID NO: 158202 - DNA, 15 bp, Homo sapiens
ggaggggcggactgc

SEQ ID NO: 158203 - DNA, 15 bp, Homo sapiens
gggaggggcggactg

SEQ ID NO: 158204 - DNA, 15 bp, Homo sapiens
tgggaggggcggact

SEQ ID NO: 158205 - DNA, 15 bp, Homo sapiens
ctgggaggggcggac

SEQ ID NO: 158206 - DNA, 15 bp, Homo sapiens
gctgggaggggcgga

SEQ ID NO: 158207 - DNA, 15 bp, Homo sapiens
tgctgggaggggcgg

SEQ ID NO: 158208 - DNA, 15 bp, Homo sapiens
ctgctgggaggggcg

SEQ ID NO: 158209 - DNA, 15 bp, Homo sapiens
tctgctgggaggggc

SEQ ID NO: 158210 - DNA, 15 bp, Homo sapiens
ctctgctgggagggg

SEQ ID NO: 158211 - DNA, 15 bp, Homo sapiens
cctctgctgggaggg

SEQ ID NO: 158212 - DNA, 15 bp, Homo sapiens
ccctctgctgggagg

SEQ ID NO: 158213 - DNA, 15 bp, Homo sapiens
cccctctgctgggag

SEQ ID NO: 158214 - DNA, 15 bp, Homo sapiens
acccctctgctggga

SEQ ID NO: 158215 - DNA, 15 bp, Homo sapiens
gacccctctgctggg

SEQ ID NO: 158216 - DNA, 15 bp, Homo sapiens
agacccctctgctgg

SEQ ID NO: 158217 - DNA, 15 bp, Homo sapiens
aagacccctctgctg

SEQ ID NO: 158218 - DNA, 15 bp, Homo sapiens
gaagacccctctgct

SEQ ID NO: 158219 - DNA, 15 bp, Homo sapiens
ggaagacccctctgc

SEQ ID NO: 158220 - DNA, 15 bp, Homo sapiens
tggaagacccctctg

SEQ ID NO: 158221 - DNA, 15 bp, Homo sapiens
gtggaagacccctct

SEQ ID NO: 158222 - DNA, 15 bp, Homo sapiens
tgtggaagacccctc

SEQ ID NO: 158223 - DNA, 15 bp, Homo sapiens
gtgtggaagacccct

SEQ ID NO: 158224 - DNA, 15 bp, Homo sapiens
ggtgtggaagacccc

SEQ ID NO: 158225 - DNA, 15 bp, Homo sapiens
tggtgtggaagaccc

SEQ ID NO: 158226 - DNA, 15 bp, Homo sapiens
ttggtgtggaagacc

SEQ ID NO: 158227 - DNA, 15 bp, Homo sapiens
gttggtgtggaagac

SEQ ID NO: 158228 - DNA, 15 bp, Homo sapiens
agttggtgtggaaga

SEQ ID NO: 158229 - DNA, 15 bp, Homo sapiens
gagttggtgtggaag

SEQ ID NO: 158230 - DNA, 15 bp, Homo sapiens
cgagttggtgtggaa

SEQ ID NO: 158231 - DNA, 15 bp, Homo sapiens
ccgagttggtgtgga

SEQ ID NO: 158232 - DNA, 15 bp, Homo sapiens
tccgagttggtgtgg

SEQ ID NO: 158233 - DNA, 15 bp, Homo sapiens
gtccgagttggtgtg

SEQ ID NO: 158234 - DNA, 15 bp, Homo sapiens
ggtccgagttggtgt

SEQ ID NO: 158235 - DNA, 15 bp, Homo sapiens
aggtccgagttggtg

SEQ ID NO: 158236 - DNA, 15 bp, Homo sapiens
aaggtccgagttggt

SEQ ID NO: 158237 - DNA, 15 bp, Homo sapiens
aaaggtccgagttgg

SEQ ID NO: 158238 - DNA, 15 bp, Homo sapiens
gaaaggtccgagttg

SEQ ID NO: 158239 - DNA, 15 bp, Homo sapiens
agaaaggtccgagtt

SEQ ID NO: 158240 - DNA, 15 bp, Homo sapiens
gagaaaggtccgagt

SEQ ID NO: 158241 - DNA, 15 bp, Homo sapiens
tgagaaaggtccgag

SEQ ID NO: 158242 - DNA, 15 bp, Homo sapiens
ctgagaaaggtccga

SEQ ID NO: 158243 - DNA, 15 bp, Homo sapiens
tctgagaaaggtccg

SEQ ID NO: 158244 - DNA, 15 bp, Homo sapiens
ttctgagaaaggtcc

SEQ ID NO: 158245 - DNA, 15 bp, Homo sapiens
cttctgagaaaggtc

SEQ ID NO: 158246 - DNA, 15 bp, Homo sapiens
acttctgagaaaggt

SEQ ID NO: 158247 - DNA, 15 bp, Homo sapiens
aacttctgagaaagg

SEQ ID NO: 158248 - DNA, 15 bp, Homo sapiens
gaacttctgagaaag

SEQ ID NO: 158249 - DNA, 15 bp, Homo sapiens
ggaacttctgagaaa

SEQ ID NO: 158250 - DNA, 15 bp, Homo sapiens
cggaacttctgagaa

SEQ ID NO: 158251 - DNA, 15 bp, Homo sapiens
ccggaacttctgaga

SEQ ID NO: 158252 - DNA, 15 bp, Homo sapiens
tccggaacttctgag

SEQ ID NO: 158253 - DNA, 15 bp, Homo sapiens
ctccggaacttctga

SEQ ID NO: 158254 - DNA, 15 bp, Homo sapiens
cctccggaacttctg

SEQ ID NO: 158255 - DNA, 15 bp, Homo sapiens
acctccggaacttct

SEQ ID NO: 158256 - DNA, 15 bp, Homo sapiens
gacctccggaacttc

SEQ ID NO: 158257 - DNA, 15 bp, Homo sapiens
tgacctccggaactt

SEQ ID NO: 158258 - DNA, 15 bp, Homo sapiens
atgacctccggaact

SEQ ID NO: 158259 - DNA, 15 bp, Homo sapiens
aatgacctccggaac

SEQ ID NO: 158260 - DNA, 15 bp, Homo sapiens
taatgacctccggaa

SEQ ID NO: 158261 - DNA, 15 bp, Homo sapiens
ataatgacctccgga

SEQ ID NO: 158262 - DNA, 15 bp, Homo sapiens
tataatgacctccgg

SEQ ID NO: 158263 - DNA, 15 bp, Homo sapiens
ttataatgacctccg

SEQ ID NO: 158264 - DNA, 15 bp, Homo sapiens
gttataatgacctcc

SEQ ID NO: 158265 - DNA, 15 bp, Homo sapiens
ggttataatgacctc

SEQ ID NO: 158266 - DNA, 15 bp, Homo sapiens
tggttataatgacct

SEQ ID NO: 158267 - DNA, 15 bp, Homo sapiens
ctggttataatgacc

SEQ ID NO: 158268 - DNA, 15 bp, Homo sapiens
gctggttataatgac

SEQ ID NO: 158269 - DNA, 15 bp, Homo sapiens
ggctggttataatga

SEQ ID NO: 158270 - DNA, 15 bp, Homo sapiens
aggctggttataatg

SEQ ID NO: 158271 - DNA, 15 bp, Homo sapiens
aaggctggttataat

SEQ ID NO: 158272 - DNA, 15 bp, Homo sapiens
gaaggctggttataa

SEQ ID NO: 158273 - DNA, 15 bp, Homo sapiens
tgaaggctggttata

SEQ ID NO: 158274 - DNA, 15 bp, Homo sapiens
gtgaaggctggttat

SEQ ID NO: 158275 - DNA, 15 bp, Homo sapiens
agtgaaggctggtta

SEQ ID NO: 158276 - DNA, 15 bp, Homo sapiens
cagtgaaggctggtt

SEQ ID NO: 158277 - DNA, 15 bp, Homo sapiens
ccatgtttaaaactt

SEQ ID NO: 158278 - DNA, 15 bp, Homo sapiens
gccatgtttaaaact

SEQ ID NO: 158279 - DNA, 15 bp, Homo sapiens
ggccatgtttaaaac

SEQ ID NO: 158280 - DNA, 15 bp, Homo sapiens
aggccatgtttaaaa

SEQ ID NO: 158281 - DNA, 15 bp, Homo sapiens
caggccatgtttaaa

SEQ ID NO: 158282 - DNA, 15 bp, Homo sapiens
acaggccatgtttaa

SEQ ID NO: 158283 - DNA, 15 bp, Homo sapiens
gacaggccatgttta

SEQ ID NO: 158284 - DNA, 15 bp, Homo sapiens
ggacaggccatgttt

SEQ ID NO: 158285 - DNA, 15 bp, Homo sapiens
tggacaggccatgtt

SEQ ID NO: 158286 - DNA, 15 bp, Homo sapiens
gtggacaggccatgt

SEQ ID NO: 158287 - DNA, 15 bp, Homo sapiens
agtggacaggccatg

SEQ ID NO: 158288 - DNA, 15 bp, Homo sapiens
cagtggacaggccat

SEQ ID NO: 158289 - DNA, 15 bp, Homo sapiens
acagtggacaggcca

SEQ ID NO: 158290 - DNA, 15 bp, Homo sapiens
aacagtggacaggcc

SEQ ID NO: 158291 - DNA, 15 bp, Homo sapiens
gaacagtggacaggc

SEQ ID NO: 158292 - DNA, 15 bp, Homo sapiens
agaacagtggacagg

SEQ ID NO: 158293 - DNA, 15 bp, Homo sapiens
aagaacagtggacag

SEQ ID NO: 158294 - DNA, 15 bp, Homo sapiens
aaagaacagtggaca

SEQ ID NO: 158295 - DNA, 15 bp, Homo sapiens
caaagaacagtggac

SEQ ID NO: 158296 - DNA, 15 bp, Homo sapiens
tcaaagaacagtgga

SEQ ID NO: 158297 - DNA, 15 bp, Homo sapiens
gtcaaagaacagtgg

SEQ ID NO: 158298 - DNA, 15 bp, Homo sapiens
agtcaaagaacagtg

SEQ ID NO: 158299 - DNA, 15 bp, Homo sapiens
aagtcaaagaacagt

SEQ ID NO: 158300 - DNA, 15 bp, Homo sapiens
gaagtcaaagaacag

SEQ ID NO: 158301 - DNA, 15 bp, Homo sapiens
agaagtcaaagaaca

SEQ ID NO: 158302 - DNA, 15 bp, Homo sapiens
cagaagtcaaagaac

SEQ ID NO: 158303 - DNA, 15 bp, Homo sapiens
acagaagtcaaagaa

SEQ ID NO: 158304 - DNA, 15 bp, Homo sapiens
cacagaagtcaaaga

SEQ ID NO: 158305 - DNA, 15 bp, Homo sapiens
gcacagaagtcaaag

SEQ ID NO: 158306 - DNA, 15 bp, Homo sapiens
tgcacagaagtcaaa

SEQ ID NO: 158307 - DNA, 15 bp, Homo sapiens
atgcacagaagtcaa

SEQ ID NO: 158308 - DNA, 15 bp, Homo sapiens
aatgcacagaagtca

SEQ ID NO: 158309 - DNA, 15 bp, Homo sapiens
taatgcacagaagtc

SEQ ID NO: 158310 - DNA, 15 bp, Homo sapiens
ctaatgcacagaagt

SEQ ID NO: 158311 - DNA, 15 bp, Homo sapiens
cctaatgcacagaag

SEQ ID NO: 158312 - DNA, 15 bp, Homo sapiens
tcctaatgcacagaa

SEQ ID NO: 158313 - DNA, 15 bp, Homo sapiens
gtcctaatgcacaga

SEQ ID NO: 158314 - DNA, 15 bp, Homo sapiens
agtcctaatgcacag

SEQ ID NO: 158315 - DNA, 15 bp, Homo sapiens
cagtcctaatgcaca

SEQ ID NO: 158316 - DNA, 15 bp, Homo sapiens
acagtcctaatgcac

SEQ ID NO: 158317 - DNA, 15 bp, Homo sapiens
cacagtcctaatgca

SEQ ID NO: 158318 - DNA, 15 bp, Homo sapiens
ccacagtcctaatgc

SEQ ID NO: 158319 - DNA, 15 bp, Homo sapiens
cccacagtcctaatg

SEQ ID NO: 158320 - DNA, 15 bp, Homo sapiens
ccccacagtcctaat

SEQ ID NO: 158321 - DNA, 15 bp, Homo sapiens
tccccacagtcctaa

SEQ ID NO: 158322 - DNA, 15 bp, Homo sapiens
gtccccacagtccta

SEQ ID NO: 158323 - DNA, 15 bp, Homo sapiens
tgtccccacagtcct

SEQ ID NO: 158324 - DNA, 15 bp, Homo sapiens
ttgtccccacagtcc

SEQ ID NO: 158325 - DNA, 15 bp, Homo sapiens
attgtccccacagtc

SEQ ID NO: 158326 - DNA, 15 bp, Homo sapiens
gattgtccccacagt

SEQ ID NO: 158327 - DNA, 15 bp, Homo sapiens
agattgtccccacag

SEQ ID NO: 158328 - DNA, 15 bp, Homo sapiens
tagattgtccccaca

SEQ ID NO: 158329 - DNA, 15 bp, Homo sapiens
atagattgtccccac

SEQ ID NO: 158330 - DNA, 15 bp, Homo sapiens
tatagattgtcccca

SEQ ID NO: 158331 - DNA, 15 bp, Homo sapiens
ttatagattgtcccc

SEQ ID NO: 158332 - DNA, 15 bp, Homo sapiens
tttatagattgtccc

SEQ ID NO: 158333 - DNA, 15 bp, Homo sapiens
ctttatagattgtcc

SEQ ID NO: 158334 - DNA, 15 bp, Homo sapiens
tctttatagattgtc

SEQ ID NO: 158335 - DNA, 15 bp, Homo sapiens
ctctttatagattgt

SEQ ID NO: 158336 - DNA, 15 bp, Homo sapiens
actctttatagattg

SEQ ID NO: 158337 - DNA, 15 bp, Homo sapiens
gactctttatagatt

SEQ ID NO: 158338 - DNA, 15 bp, Homo sapiens
agactctttatagat

SEQ ID NO: 158339 - DNA, 15 bp, Homo sapiens
cagactctttataga

SEQ ID NO: 158340 - DNA, 15 bp, Homo sapiens
gcagactctttatag

SEQ ID NO: 158341 - DNA, 15 bp, Homo sapiens
cgcagactctttata

SEQ ID NO: 158342 - DNA, 15 bp, Homo sapiens
acgcagactctttat

SEQ ID NO: 158343 - DNA, 15 bp, Homo sapiens
gacgcagactcttta

SEQ ID NO: 158344 - DNA, 15 bp, Homo sapiens
tgacgcagactcttt

SEQ ID NO: 158345 - DNA, 15 bp, Homo sapiens
gtgacgcagactctt

SEQ ID NO: 158346 - DNA, 15 bp, Homo sapiens
tgtgacgcagactct

SEQ ID NO: 158347 - DNA, 15 bp, Homo sapiens
atgtgacgcagactc

SEQ ID NO: 158348 - DNA, 15 bp, Homo sapiens
catgtgacgcagact

SEQ ID NO: 158349 - DNA, 15 bp, Homo sapiens
gcatgtgacgcagac

SEQ ID NO: 158350 - DNA, 15 bp, Homo sapiens
tgcatgtgacgcaga

SEQ ID NO: 158351 - DNA, 15 bp, Homo sapiens
atgcatgtgacgcag

SEQ ID NO: 158352 - DNA, 15 bp, Homo sapiens
catgcatgtgacgca

SEQ ID NO: 158353 - DNA, 15 bp, Homo sapiens
tcatgcatgtgacgc

SEQ ID NO: 158354 - DNA, 15 bp, Homo sapiens
ttcatgcatgtgacg

SEQ ID NO: 158355 - DNA, 15 bp, Homo sapiens
cttcatgcatgtgac

SEQ ID NO: 158356 - DNA, 15 bp, Homo sapiens
tcttcatgcatgtga

SEQ ID NO: 158357 - DNA, 15 bp, Homo sapiens
gtcttcatgcatgtg

SEQ ID NO: 158358 - DNA, 15 bp, Homo sapiens
tgtcttcatgcatgt

SEQ ID NO: 158359 - DNA, 15 bp, Homo sapiens
gtgtcttcatgcatg

SEQ ID NO: 158360 - DNA, 15 bp, Homo sapiens
agtgtcttcatgcat

SEQ ID NO: 158361 - DNA, 15 bp, Homo sapiens
aagtgtcttcatgca

SEQ ID NO: 158362 - DNA, 15 bp, Homo sapiens
gaagtgtcttcatgc

SEQ ID NO: 158363 - DNA, 15 bp, Homo sapiens
tgaagtgtcttcatg

SEQ ID NO: 158364 - DNA, 15 bp, Homo sapiens
ctgaagtgtcttcat

SEQ ID NO: 158365 - DNA, 15 bp, Homo sapiens
actgaagtgtcttca

SEQ ID NO: 158366 - DNA, 15 bp, Homo sapiens
tactgaagtgtcttc

SEQ ID NO: 158367 - DNA, 15 bp, Homo sapiens
atactgaagtgtctt

SEQ ID NO: 158368 - DNA, 15 bp, Homo sapiens
gatactgaagtgtct

SEQ ID NO: 158369 - DNA, 15 bp, Homo sapiens
agatactgaagtgtc

SEQ ID NO: 158370 - DNA, 15 bp, Homo sapiens
gagatactgaagtgt

SEQ ID NO: 158371 - DNA, 15 bp, Homo sapiens
cgagatactgaagtg

SEQ ID NO: 158372 - DNA, 15 bp, Homo sapiens
ccgagatactgaagt

SEQ ID NO: 158373 - DNA, 15 bp, Homo sapiens
gccgagatactgaag

SEQ ID NO: 158374 - DNA, 15 bp, Homo sapiens
tgccgagatactgaa

SEQ ID NO: 158375 - DNA, 15 bp, Homo sapiens
ttgccgagatactga

SEQ ID NO: 158376 - DNA, 15 bp, Homo sapiens
attgccgagatactg

SEQ ID NO: 158377 - DNA, 15 bp, Homo sapiens
cattgccgagatact

SEQ ID NO: 158378 - DNA, 15 bp, Homo sapiens
gcattgccgagatac

SEQ ID NO: 158379 - DNA, 15 bp, Homo sapiens
ggcattgccgagata

SEQ ID NO: 158380 - DNA, 15 bp, Homo sapiens
gggcattgccgagat

SEQ ID NO: 158381 - DNA, 15 bp, Homo sapiens
agggcattgccgaga

SEQ ID NO: 158382 - DNA, 15 bp, Homo sapiens
gagggcattgccgag

SEQ ID NO: 158383 - DNA, 15 bp, Homo sapiens
ggagggcattgccga

SEQ ID NO: 158384 - DNA, 15 bp, Homo sapiens
tggagggcattgccg

SEQ ID NO: 158385 - DNA, 15 bp, Homo sapiens
ctggagggcattgcc

SEQ ID NO: 158386 - DNA, 15 bp, Homo sapiens
tctggagggcattgc

SEQ ID NO: 158387 - DNA, 15 bp, Homo sapiens
gtctggagggcattg

SEQ ID NO: 158388 - DNA, 15 bp, Homo sapiens
tgtctggagggcatt

SEQ ID NO: 158389 - DNA, 15 bp, Homo sapiens
ctgtctggagggcat

SEQ ID NO: 158390 - DNA, 15 bp, Homo sapiens
gctgtctggagggca

SEQ ID NO: 158391 - DNA, 15 bp, Homo sapiens
agctgtctggagggc

SEQ ID NO: 158392 - DNA, 15 bp, Homo sapiens
gagctgtctggaggg

SEQ ID NO: 158393 - DNA, 15 bp, Homo sapiens
ggagctgtctggagg

SEQ ID NO: 158394 - DNA, 15 bp, Homo sapiens
aggagctgtctggag

SEQ ID NO: 158395 - DNA, 15 bp, Homo sapiens
gaggagctgtctgga

SEQ ID NO: 158396 - DNA, 15 bp, Homo sapiens
ggaggagctgtctgg

SEQ ID NO: 158397 - DNA, 15 bp, Homo sapiens
tggaggagctgtctg

SEQ ID NO: 158398 - DNA, 15 bp, Homo sapiens
ctggaggagctgtct

SEQ ID NO: 158399 - DNA, 15 bp, Homo sapiens
gctggaggagctgtc

SEQ ID NO: 158400 - DNA, 15 bp, Homo sapiens
ggctggaggagctgt

SEQ ID NO: 158401 - DNA, 15 bp, Homo sapiens
tggctggaggagctg

SEQ ID NO: 158402 - DNA, 15 bp, Homo sapiens
atggctggaggagct

SEQ ID NO: 158403 - DNA, 15 bp, Homo sapiens
gatggctggaggagc

SEQ ID NO: 158404 - DNA, 15 bp, Homo sapiens
agatggctggaggag

SEQ ID NO: 158405 - DNA, 15 bp, Homo sapiens
cagatggctggagga

SEQ ID NO: 158406 - DNA, 15 bp, Homo sapiens
acagatggctggagg

SEQ ID NO: 158407 - DNA, 15 bp, Homo sapiens
cacagatggctggag

SEQ ID NO: 158408 - DNA, 15 bp, Homo sapiens
gcacagatggctgga

SEQ ID NO: 158409 - DNA, 15 bp, Homo sapiens
ggcacagatggctgg

SEQ ID NO: 158410 - DNA, 15 bp, Homo sapiens
tggcacagatggctg

SEQ ID NO: 158411 - DNA, 15 bp, Homo sapiens
ttggcacagatggct

SEQ ID NO: 158412 - DNA, 15 bp, Homo sapiens
cttggcacagatggc

SEQ ID NO: 158413 - DNA, 15 bp, Homo sapiens
ccttggcacagatgg

SEQ ID NO: 158414 - DNA, 15 bp, Homo sapiens
cccttggcacagatg

SEQ ID NO: 158415 - DNA, 15 bp, Homo sapiens
ccccttggcacagat

SEQ ID NO: 158416 - DNA, 15 bp, Homo sapiens
tccccttggcacaga

SEQ ID NO: 158417 - DNA, 15 bp, Homo sapiens
ctccccttggcacag

SEQ ID NO: 158418 - DNA, 15 bp, Homo sapiens
actccccttggcaca

SEQ ID NO: 158419 - DNA, 15 bp, Homo sapiens
cactccccttggcac

SEQ ID NO: 158420 - DNA, 15 bp, Homo sapiens
acactccccttggca

SEQ ID NO: 158421 - DNA, 15 bp, Homo sapiens
cacactccccttggc

SEQ ID NO: 158422 - DNA, 15 bp, Homo sapiens
tcacactccccttgg

SEQ ID NO: 158423 - DNA, 15 bp, Homo sapiens
ctcacactccccttg

SEQ ID NO: 158424 - DNA, 15 bp, Homo sapiens
cctcacactcccctt

SEQ ID NO: 158425 - DNA, 15 bp, Homo sapiens
tcctcacactcccct

SEQ ID NO: 158426 - DNA, 15 bp, Homo sapiens
ctcctcacactcccc

SEQ ID NO: 158427 - DNA, 15 bp, Homo sapiens
actcctcacactccc

SEQ ID NO: 158428 - DNA, 15 bp, Homo sapiens
cactcctcacactcc

SEQ ID NO: 158429 - DNA, 15 bp, Homo sapiens
tcactcctcacactc

SEQ ID NO: 158430 - DNA, 15 bp, Homo sapiens
gtcactcctcacact

SEQ ID NO: 158431 - DNA, 15 bp, Homo sapiens
tgtcactcctcacac

SEQ ID NO: 158432 - DNA, 15 bp, Homo sapiens
ctgtcactcctcaca

SEQ ID NO: 158433 - DNA, 15 bp, Homo sapiens
tctgtcactcctcac

SEQ ID NO: 158434 - DNA, 15 bp, Homo sapiens
gtctgtcactcctca

SEQ ID NO: 158435 - DNA, 15 bp, Homo sapiens
ggtctgtcactcctc

SEQ ID NO: 158436 - DNA, 15 bp, Homo sapiens
tggtctgtcactcct

SEQ ID NO: 158437 - DNA, 15 bp, Homo sapiens
ctggtctgtcactcc

SEQ ID NO: 158438 - DNA, 15 bp, Homo sapiens
cctggtctgtcactc

SEQ ID NO: 158439 - DNA, 15 bp, Homo sapiens
gcctggtctgtcact

SEQ ID NO: 158440 - DNA, 15 bp, Homo sapiens
agcctggtctgtcac

SEQ ID NO: 158441 - DNA, 15 bp, Homo sapiens
cagcctggtctgtca

SEQ ID NO: 158442 - DNA, 15 bp, Homo sapiens
acagcctggtctgtc

SEQ ID NO: 158443 - DNA, 15 bp, Homo sapiens
tacagcctggtctgt

SEQ ID NO: 158444 - DNA, 15 bp, Homo sapiens
ctacagcctggtctg

SEQ ID NO: 158445 - DNA, 15 bp, Homo sapiens
cctacagcctggtct

SEQ ID NO: 158446 - DNA, 15 bp, Homo sapiens
tcctacagcctggtc

SEQ ID NO: 158447 - DNA, 15 bp, Homo sapiens
ttcctacagcctggt

SEQ ID NO: 158448 - DNA, 15 bp, Homo sapiens
gttcctacagcctgg

SEQ ID NO: 158449 - DNA, 15 bp, Homo sapiens
tgttcctacagcctg

SEQ ID NO: 158450 - DNA, 15 bp, Homo sapiens
ctgttcctacagcct

SEQ ID NO: 158451 - DNA, 15 bp, Homo sapiens
cctgttcctacagcc

SEQ ID NO: 158452 - DNA, 15 bp, Homo sapiens
tcctgttcctacagc

SEQ ID NO: 158453 - DNA, 15 bp, Homo sapiens
ttcctgttcctacag

SEQ ID NO: 158454 - DNA, 15 bp, Homo sapiens
attcctgttcctaca

SEQ ID NO: 158455 - DNA, 15 bp, Homo sapiens
cattcctgttcctac

SEQ ID NO: 158456 - DNA, 15 bp, Homo sapiens
ccattcctgttccta

SEQ ID NO: 158457 - DNA, 15 bp, Homo sapiens
cccattcctgttcct

SEQ ID NO: 158458 - DNA, 15 bp, Homo sapiens
ccccattcctgttcc

SEQ ID NO: 158459 - DNA, 15 bp, Homo sapiens
accccattcctgttc

SEQ ID NO: 158460 - DNA, 15 bp, Homo sapiens
caccccattcctgtt

SEQ ID NO: 158461 - DNA, 15 bp, Homo sapiens
acaccccattcctgt

SEQ ID NO: 158462 - DNA, 15 bp, Homo sapiens
gacaccccattcctg

SEQ ID NO: 158463 - DNA, 15 bp, Homo sapiens
tgacaccccattcct

SEQ ID NO: 158464 - DNA, 15 bp, Homo sapiens
atgacaccccattcc

SEQ ID NO: 158465 - DNA, 15 bp, Homo sapiens
catgacaccccattc

SEQ ID NO: 158466 - DNA, 15 bp, Homo sapiens
ccatgacaccccatt

SEQ ID NO: 158467 - DNA, 15 bp, Homo sapiens
cccatgacaccccat

SEQ ID NO: 158468 - DNA, 15 bp, Homo sapiens
ccccatgacacccca

SEQ ID NO: 158469 - DNA, 15 bp, Homo sapiens
cccccatgacacccc

SEQ ID NO: 158470 - DNA, 15 bp, Homo sapiens
tcccccatgacaccc

SEQ ID NO: 158471 - DNA, 15 bp, Homo sapiens
atcccccatgacacc

SEQ ID NO: 158472 - DNA, 15 bp, Homo sapiens
catcccccatgacac

SEQ ID NO: 158473 - DNA, 15 bp, Homo sapiens
ccatcccccatgaca

SEQ ID NO: 158474 - DNA, 15 bp, Homo sapiens
gccatcccccatgac

SEQ ID NO: 158475 - DNA, 15 bp, Homo sapiens
tgccatcccccatga

SEQ ID NO: 158476 - DNA, 15 bp, Homo sapiens
ctgccatcccccatg

SEQ ID NO: 158477 - DNA, 15 bp, Homo sapiens
tctgccatcccccat

SEQ ID NO: 158478 - DNA, 15 bp, Homo sapiens
ctctgccatccccca

SEQ ID NO: 158479 - DNA, 15 bp, Homo sapiens
gctctgccatccccc

SEQ ID NO: 158480 - DNA, 15 bp, Homo sapiens
tgctctgccatcccc

SEQ ID NO: 158481 - DNA, 15 bp, Homo sapiens
ctgctctgccatccc

SEQ ID NO: 158482 - DNA, 15 bp, Homo sapiens
actgctctgccatcc

SEQ ID NO: 158483 - DNA, 15 bp, Homo sapiens
cactgctctgccatc

SEQ ID NO: 158484 - DNA, 15 bp, Homo sapiens
ccactgctctgccat

SEQ ID NO: 158485 - DNA, 15 bp, Homo sapiens
tccactgctctgcca

SEQ ID NO: 158486 - DNA, 15 bp, Homo sapiens
gtccactgctctgcc

SEQ ID NO: 158487 - DNA, 15 bp, Homo sapiens
tgtccactgctctgc

SEQ ID NO: 158488 - DNA, 15 bp, Homo sapiens
ctgtccactgctctg

SEQ ID NO: 158489 - DNA, 15 bp, Homo sapiens
actgtccactgctct

SEQ ID NO: 158490 - DNA, 15 bp, Homo sapiens
tactgtccactgctc

SEQ ID NO: 158491 - DNA, 15 bp, Homo sapiens
gtactgtccactgct

SEQ ID NO: 158492 - DNA, 15 bp, Homo sapiens
tgtactgtccactgc

SEQ ID NO: 158493 - DNA, 15 bp, Homo sapiens
gtgtactgtccactg

SEQ ID NO: 158494 - DNA, 15 bp, Homo sapiens
agtgtactgtccact

SEQ ID NO: 158495 - DNA, 15 bp, Homo sapiens
cagtgtactgtccac

SEQ ID NO: 158496 - DNA, 15 bp, Homo sapiens
gcagtgtactgtcca

SEQ ID NO: 158497 - DNA, 15 bp, Homo sapiens
ggcagtgtactgtcc

SEQ ID NO: 158498 - DNA, 15 bp, Homo sapiens
aggcagtgtactgtc

SEQ ID NO: 158499 - DNA, 15 bp, Homo sapiens
caggcagtgtactgt

SEQ ID NO: 158500 - DNA, 15 bp, Homo sapiens
ccaggcagtgtactg

SEQ ID NO: 158501 - DNA, 15 bp, Homo sapiens
gccaggcagtgtact

SEQ ID NO: 158502 - DNA, 15 bp, Homo sapiens
ggccaggcagtgtac

SEQ ID NO: 158503 - DNA, 15 bp, Homo sapiens
gggccaggcagtgta

SEQ ID NO: 158504 - DNA, 15 bp, Homo sapiens
cgggccaggcagtgt

SEQ ID NO: 158505 - DNA, 15 bp, Homo sapiens
ccgggccaggcagtg

SEQ ID NO: 158506 - DNA, 15 bp, Homo sapiens
cccgggccaggcagt

SEQ ID NO: 158507 - DNA, 15 bp, Homo sapiens
gcccgggccaggcag

SEQ ID NO: 158508 - DNA, 15 bp, Homo sapiens
ggcccgggccaggca

SEQ ID NO: 158509 - DNA, 15 bp, Homo sapiens
gggcccgggccaggc

SEQ ID NO: 158510 - DNA, 15 bp, Homo sapiens
ggggcccgggccagg

SEQ ID NO: 158511 - DNA, 15 bp, Homo sapiens
aggggcccgggccag

SEQ ID NO: 158512 - DNA, 15 bp, Homo sapiens
caggggcccgggcca

SEQ ID NO: 158513 - DNA, 15 bp, Homo sapiens
gcaggggcccgggcc

SEQ ID NO: 158514 - DNA, 15 bp, Homo sapiens
agcaggggcccgggc

SEQ ID NO: 158515 - DNA, 15 bp, Homo sapiens
aagcaggggcccggg

SEQ ID NO: 158516 - DNA, 15 bp, Homo sapiens
caagcaggggcccgg

SEQ ID NO: 158517 - DNA, 15 bp, Homo sapiens
gcaagcaggggcccg

SEQ ID NO: 158518 - DNA, 15 bp, Homo sapiens
ggcaagcaggggccc

SEQ ID NO: 158519 - DNA, 15 bp, Homo sapiens
aggcaagcaggggcc

SEQ ID NO: 158520 - DNA, 15 bp, Homo sapiens
caggcaagcaggggc

SEQ ID NO: 158521 - DNA, 15 bp, Homo sapiens
gcaggcaagcagggg

SEQ ID NO: 158522 - DNA, 15 bp, Homo sapiens
ggcaggcaagcaggg

SEQ ID NO: 158523 - DNA, 15 bp, Homo sapiens
gggcaggcaagcagg

SEQ ID NO: 158524 - DNA, 15 bp, Homo sapiens
tgggcaggcaagcag

SEQ ID NO: 158525 - DNA, 15 bp, Homo sapiens
atgggcaggcaagca

SEQ ID NO: 158526 - DNA, 15 bp, Homo sapiens
catgggcaggcaagc

SEQ ID NO: 158527 - DNA, 15 bp, Homo sapiens
ccatgggcaggcaag

SEQ ID NO: 158528 - DNA, 15 bp, Homo sapiens
tccatgggcaggcaa

SEQ ID NO: 158529 - DNA, 15 bp, Homo sapiens
ttccatgggcaggca

SEQ ID NO: 158530 - DNA, 15 bp, Homo sapiens
attccatgggcaggc

SEQ ID NO: 158531 - DNA, 15 bp, Homo sapiens
cattccatgggcagg

SEQ ID NO: 158532 - DNA, 15 bp, Homo sapiens
acattccatgggcag

SEQ ID NO: 158533 - DNA, 15 bp, Homo sapiens
cacattccatgggca

SEQ ID NO: 158534 - DNA, 15 bp, Homo sapiens
acacattccatgggc

SEQ ID NO: 158535 - DNA, 15 bp, Homo sapiens
cacacattccatggg

SEQ ID NO: 158536 - DNA, 15 bp, Homo sapiens
gcacacattccatgg

SEQ ID NO: 158537 - DNA, 15 bp, Homo sapiens
tgcacacattccatg

SEQ ID NO: 158538 - DNA, 15 bp, Homo sapiens
ctgcacacattccat

SEQ ID NO: 158539 - DNA, 15 bp, Homo sapiens
tctgcacacattcca

SEQ ID NO: 158540 - DNA, 15 bp, Homo sapiens
ctctgcacacattcc

SEQ ID NO: 158541 - DNA, 15 bp, Homo sapiens
cctctgcacacattc

SEQ ID NO: 158542 - DNA, 15 bp, Homo sapiens
ccctctgcacacatt

SEQ ID NO: 158543 - DNA, 15 bp, Homo sapiens
tccctctgcacacat

SEQ ID NO: 158544 - DNA, 15 bp, Homo sapiens
ctccctctgcacaca

SEQ ID NO: 158545 - DNA, 15 bp, Homo sapiens
actccctctgcacac

SEQ ID NO: 158546 - DNA, 15 bp, Homo sapiens
cactccctctgcaca

SEQ ID NO: 158547 - DNA, 15 bp, Homo sapiens
gcactccctctgcac

SEQ ID NO: 158548 - DNA, 15 bp, Homo sapiens
ggcactccctctgca

SEQ ID NO: 158549 - DNA, 15 bp, Homo sapiens
tggcactccctctgc

SEQ ID NO: 158550 - DNA, 15 bp, Homo sapiens
ctggcactccctctg

SEQ ID NO: 158551 - DNA, 15 bp, Homo sapiens
cctggcactccctct

SEQ ID NO: 158552 - DNA, 15 bp, Homo sapiens
gcctggcactccctc

SEQ ID NO: 158553 - DNA, 15 bp, Homo sapiens
ggcctggcactccct

SEQ ID NO: 158554 - DNA, 15 bp, Homo sapiens
tggcctggcactccc

SEQ ID NO: 158555 - DNA, 15 bp, Homo sapiens
ctggcctggcactcc

SEQ ID NO: 158556 - DNA, 15 bp, Homo sapiens
cctggcctggcactc

SEQ ID NO: 158557 - DNA, 15 bp, Homo sapiens
acctggcctggcact

SEQ ID NO: 158558 - DNA, 15 bp, Homo sapiens
cacctggcctggcac

SEQ ID NO: 158559 - DNA, 15 bp, Homo sapiens
gcacctggcctggca

SEQ ID NO: 158560 - DNA, 15 bp, Homo sapiens
agcacctggcctggc

SEQ ID NO: 158561 - DNA, 15 bp, Homo sapiens
cagcacctggcctgg

SEQ ID NO: 158562 - DNA, 15 bp, Homo sapiens
gcagcacctggcctg

SEQ ID NO: 158563 - DNA, 15 bp, Homo sapiens
agcagcacctggcct

SEQ ID NO: 158564 - DNA, 15 bp, Homo sapiens
gagcagcacctggcc

SEQ ID NO: 158565 - DNA, 15 bp, Homo sapiens
agagcagcacctggc

SEQ ID NO: 158566 - DNA, 15 bp, Homo sapiens
cagagcagcacctgg

SEQ ID NO: 158567 - DNA, 15 bp, Homo sapiens
ccagagcagcacctg

SEQ ID NO: 158568 - DNA, 15 bp, Homo sapiens
tccagagcagcacct

SEQ ID NO: 158569 - DNA, 15 bp, Homo sapiens
ctccagagcagcacc

SEQ ID NO: 158570 - DNA, 15 bp, Homo sapiens
tctccagagcagcac

SEQ ID NO: 158571 - DNA, 15 bp, Homo sapiens
ttctccagagcagca

SEQ ID NO: 158572 - DNA, 15 bp, Homo sapiens
cttctccagagcagc

SEQ ID NO: 158573 - DNA, 15 bp, Homo sapiens
acttctccagagcag

SEQ ID NO: 158574 - DNA, 15 bp, Homo sapiens
cacttctccagagca

SEQ ID NO: 158575 - DNA, 15 bp, Homo sapiens
ccacttctccagagc

SEQ ID NO: 158576 - DNA, 15 bp, Homo sapiens
cccacttctccagag

SEQ ID NO: 158577 - DNA, 15 bp, Homo sapiens
ccccacttctccaga

SEQ ID NO: 158578 - DNA, 15 bp, Homo sapiens
cccccacttctccag

SEQ ID NO: 158579 - DNA, 15 bp, Homo sapiens
tcccccacttctcca

SEQ ID NO: 158580 - DNA, 15 bp, Homo sapiens
ttcccccacttctcc

SEQ ID NO: 158581 - DNA, 15 bp, Homo sapiens
attcccccacttctc

SEQ ID NO: 158582 - DNA, 15 bp, Homo sapiens
cattcccccacttct

SEQ ID NO: 158583 - DNA, 15 bp, Homo sapiens
tcattcccccacttc

SEQ ID NO: 158584 - DNA, 15 bp, Homo sapiens
ctcattcccccactt

SEQ ID NO: 158585 - DNA, 15 bp, Homo sapiens
cctcattcccccact

SEQ ID NO: 158586 - DNA, 15 bp, Homo sapiens
gcctcattcccccac

SEQ ID NO: 158587 - DNA, 15 bp, Homo sapiens
agcctcattccccca

SEQ ID NO: 158588 - DNA, 15 bp, Homo sapiens
cagcctcattccccc

SEQ ID NO: 158589 - DNA, 15 bp, Homo sapiens
ccagcctcattcccc

SEQ ID NO: 158590 - DNA, 15 bp, Homo sapiens
accagcctcattccc

SEQ ID NO: 158591 - DNA, 15 bp, Homo sapiens
gaccagcctcattcc

SEQ ID NO: 158592 - DNA, 15 bp, Homo sapiens
ggaccagcctcattc

SEQ ID NO: 158593 - DNA, 15 bp, Homo sapiens
aggaccagcctcatt

SEQ ID NO: 158594 - DNA, 15 bp, Homo sapiens
caggaccagcctcat

SEQ ID NO: 158595 - DNA, 15 bp, Homo sapiens
gcaggaccagcctca

SEQ ID NO: 158596 - DNA, 15 bp, Homo sapiens
agcaggaccagcctc

SEQ ID NO: 158597 - DNA, 15 bp, Homo sapiens
cagcaggaccagcct

SEQ ID NO: 158598 - DNA, 15 bp, Homo sapiens
gcagcaggaccagcc

SEQ ID NO: 158599 - DNA, 15 bp, Homo sapiens
tgcagcaggaccagc

SEQ ID NO: 158600 - DNA, 15 bp, Homo sapiens
ctgcagcaggaccag

SEQ ID NO: 158601 - DNA, 15 bp, Homo sapiens
cctgcagcaggacca

SEQ ID NO: 158602 - DNA, 15 bp, Homo sapiens
acctgcagcaggacc

SEQ ID NO: 158603 - DNA, 15 bp, Homo sapiens
gacctgcagcaggac

SEQ ID NO: 158604 - DNA, 15 bp, Homo sapiens
tgacctgcagcagga

SEQ ID NO: 158605 - DNA, 15 bp, Homo sapiens
ctgacctgcagcagg

SEQ ID NO: 158606 - DNA, 15 bp, Homo sapiens
actgacctgcagcag

SEQ ID NO: 158607 - DNA, 15 bp, Homo sapiens
gactgacctgcagca

SEQ ID NO: 158608 - DNA, 15 bp, Homo sapiens
agactgacctgcagc

SEQ ID NO: 158609 - DNA, 15 bp, Homo sapiens
gagactgacctgcag

SEQ ID NO: 158610 - DNA, 15 bp, Homo sapiens
tgagactgacctgca

SEQ ID NO: 158611 - DNA, 15 bp, Homo sapiens
ctgagactgacctgc

SEQ ID NO: 158612 - DNA, 15 bp, Homo sapiens
gctgagactgacctg

SEQ ID NO: 158613 - DNA, 15 bp, Homo sapiens
tgctgagactgacct

SEQ ID NO: 158614 - DNA, 15 bp, Homo sapiens
gtgctgagactgacc

SEQ ID NO: 158615 - DNA, 15 bp, Homo sapiens
ggtgctgagactgac

SEQ ID NO: 158616 - DNA, 15 bp, Homo sapiens
cggtgctgagactga

SEQ ID NO: 158617 - DNA, 15 bp, Homo sapiens
acggtgctgagactg

SEQ ID NO: 158618 - DNA, 15 bp, Homo sapiens
gacggtgctgagact

SEQ ID NO: 158619 - DNA, 15 bp, Homo sapiens
ggacggtgctgagac

SEQ ID NO: 158620 - DNA, 15 bp, Homo sapiens
aggacggtgctgaga

SEQ ID NO: 158621 - DNA, 15 bp, Homo sapiens
caggacggtgctgag

SEQ ID NO: 158622 - DNA, 15 bp, Homo sapiens
acaggacggtgctga

SEQ ID NO: 158623 - DNA, 15 bp, Homo sapiens
gacaggacggtgctg

SEQ ID NO: 158624 - DNA, 15 bp, Homo sapiens
ggacaggacggtgct

SEQ ID NO: 158625 - DNA, 15 bp, Homo sapiens
tggacaggacggtgc

SEQ ID NO: 158626 - DNA, 15 bp, Homo sapiens
ctggacaggacggtg

SEQ ID NO: 158627 - DNA, 15 bp, Homo sapiens
actggacaggacggt

SEQ ID NO: 158628 - DNA, 15 bp, Homo sapiens
gactggacaggacgg

SEQ ID NO: 158629 - DNA, 15 bp, Homo sapiens
tgactggacaggacg

SEQ ID NO: 158630 - DNA, 15 bp, Homo sapiens
ctgactggacaggac

SEQ ID NO: 158631 - DNA, 15 bp, Homo sapiens
tctgactggacagga

SEQ ID NO: 158632 - DNA, 15 bp, Homo sapiens
ctctgactggacagg

SEQ ID NO: 158633 - DNA, 15 bp, Homo sapiens
actctgactggacag

SEQ ID NO: 158634 - DNA, 15 bp, Homo sapiens
gactctgactggaca

SEQ ID NO: 158635 - DNA, 15 bp, Homo sapiens
tgactctgactggac

SEQ ID NO: 158636 - DNA, 15 bp, Homo sapiens
gtgactctgactgga

SEQ ID NO: 158637 - DNA, 15 bp, Homo sapiens
agtgactctgactgg

SEQ ID NO: 158638 - DNA, 15 bp, Homo sapiens
aagtgactctgactg

SEQ ID NO: 158639 - DNA, 15 bp, Homo sapiens
taagtgactctgact

SEQ ID NO: 158640 - DNA, 15 bp, Homo sapiens
ctaagtgactctgac

SEQ ID NO: 158641 - DNA, 15 bp, Homo sapiens
cctaagtgactctga

SEQ ID NO: 158642 - DNA, 15 bp, Homo sapiens
acctaagtgactctg

SEQ ID NO: 158643 - DNA, 15 bp, Homo sapiens
aacctaagtgactct

SEQ ID NO: 158644 - DNA, 15 bp, Homo sapiens
aaacctaagtgactc

SEQ ID NO: 158645 - DNA, 15 bp, Homo sapiens
caaacctaagtgact

SEQ ID NO: 158646 - DNA, 15 bp, Homo sapiens
gcaaacctaagtgac

SEQ ID NO: 158647 - DNA, 15 bp, Homo sapiens
ggcaaacctaagtga

SEQ ID NO: 158648 - DNA, 15 bp, Homo sapiens
tggcaaacctaagtg

SEQ ID NO: 158649 - DNA, 15 bp, Homo sapiens
ctggcaaacctaagt

SEQ ID NO: 158650 - DNA, 15 bp, Homo sapiens
actggcaaacctaag

SEQ ID NO: 158651 - DNA, 15 bp, Homo sapiens
cactggcaaacctaa

SEQ ID NO: 158652 - DNA, 15 bp, Homo sapiens
tcactggcaaaccta

SEQ ID NO: 158653 - DNA, 15 bp, Homo sapiens
ctcactggcaaacct

SEQ ID NO: 158654 - DNA, 15 bp, Homo sapiens
actcactggcaaacc

SEQ ID NO: 158655 - DNA, 15 bp, Homo sapiens
tactcactggcaaac

SEQ ID NO: 158656 - DNA, 15 bp, Homo sapiens
ctactcactggcaaa

SEQ ID NO: 158657 - DNA, 15 bp, Homo sapiens
cctactcactggcaa

SEQ ID NO: 158658 - DNA, 15 bp, Homo sapiens
ccctactcactggca

SEQ ID NO: 158659 - DNA, 15 bp, Homo sapiens
cccctactcactggc

SEQ ID NO: 158660 - DNA, 15 bp, Homo sapiens
gcccctactcactgg

SEQ ID NO: 158661 - DNA, 15 bp, Homo sapiens
ggcccctactcactg

SEQ ID NO: 158662 - DNA, 15 bp, Homo sapiens
gggcccctactcact

SEQ ID NO: 158663 - DNA, 15 bp, Homo sapiens
tgggcccctactcac

SEQ ID NO: 158664 - DNA, 15 bp, Homo sapiens
ctgggcccctactca

SEQ ID NO: 158665 - DNA, 15 bp, Homo sapiens
tctgggcccctactc

SEQ ID NO: 158666 - DNA, 15 bp, Homo sapiens
atctgggcccctact

SEQ ID NO: 158667 - DNA, 15 bp, Homo sapiens
tatctgggcccctac

SEQ ID NO: 158668 - DNA, 15 bp, Homo sapiens
gtatctgggccccta

SEQ ID NO: 158669 - DNA, 15 bp, Homo sapiens
tgtatctgggcccct

SEQ ID NO: 158670 - DNA, 15 bp, Homo sapiens
atgtatctgggcccc

SEQ ID NO: 158671 - DNA, 15 bp, Homo sapiens
catgtatctgggccc

SEQ ID NO: 158672 - DNA, 15 bp, Homo sapiens
acatgtatctgggcc

SEQ ID NO: 158673 - DNA, 15 bp, Homo sapiens
aacatgtatctgggc

SEQ ID NO: 158674 - DNA, 15 bp, Homo sapiens
caacatgtatctggg

SEQ ID NO: 158675 - DNA, 15 bp, Homo sapiens
ccaacatgtatctgg

SEQ ID NO: 158676 - DNA, 15 bp, Homo sapiens
tccaacatgtatctg

SEQ ID NO: 158677 - DNA, 15 bp, Homo sapiens
atccaacatgtatct

SEQ ID NO: 158678 - DNA, 15 bp, Homo sapiens
aatccaacatgtatc

SEQ ID NO: 158679 - DNA, 15 bp, Homo sapiens
aaatccaacatgtat

SEQ ID NO: 158680 - DNA, 15 bp, Homo sapiens
gaaatccaacatgta

SEQ ID NO: 158681 - DNA, 15 bp, Homo sapiens
agaaatccaacatgt

SEQ ID NO: 158682 - DNA, 15 bp, Homo sapiens
tagaaatccaacatg

SEQ ID NO: 158683 - DNA, 15 bp, Homo sapiens
ttagaaatccaacat

SEQ ID NO: 158684 - DNA, 15 bp, Homo sapiens
cttagaaatccaaca

SEQ ID NO: 158685 - DNA, 15 bp, Homo sapiens
ccttagaaatccaac

SEQ ID NO: 158686 - DNA, 15 bp, Homo sapiens
accttagaaatccaa

SEQ ID NO: 158687 - DNA, 15 bp, Homo sapiens
gaccttagaaatcca

SEQ ID NO: 158688 - DNA, 15 bp, Homo sapiens
ggaccttagaaatcc

SEQ ID NO: 158689 - DNA, 15 bp, Homo sapiens
gggaccttagaaatc

SEQ ID NO: 158690 - DNA, 15 bp, Homo sapiens
agggaccttagaaat

SEQ ID NO: 158691 - DNA, 15 bp, Homo sapiens
gagggaccttagaaa

SEQ ID NO: 158692 - DNA, 15 bp, Homo sapiens
ggagggaccttagaa

SEQ ID NO: 158693 - DNA, 15 bp, Homo sapiens
tggagggaccttaga

SEQ ID NO: 158694 - DNA, 15 bp, Homo sapiens
ctggagggaccttag

SEQ ID NO: 158695 - DNA, 15 bp, Homo sapiens
tctggagggacctta

SEQ ID NO: 158696 - DNA, 15 bp, Homo sapiens
atctggagggacctt

SEQ ID NO: 158697 - DNA, 15 bp, Homo sapiens
catctggagggacct

SEQ ID NO: 158698 - DNA, 15 bp, Homo sapiens
gcatctggagggacc

SEQ ID NO: 158699 - DNA, 15 bp, Homo sapiens
agcatctggagggac

SEQ ID NO: 158700 - DNA, 15 bp, Homo sapiens
gagcatctggaggga

SEQ ID NO: 158701 - DNA, 15 bp, Homo sapiens
ggagcatctggaggg

SEQ ID NO: 158702 - DNA, 15 bp, Homo sapiens
aggagcatctggagg

SEQ ID NO: 158703 - DNA, 15 bp, Homo sapiens
caggagcatctggag

SEQ ID NO: 158704 - DNA, 15 bp, Homo sapiens
acaggagcatctgga

SEQ ID NO: 158705 - DNA, 15 bp, Homo sapiens
gacaggagcatctgg

SEQ ID NO: 158706 - DNA, 15 bp, Homo sapiens
tgacaggagcatctg

SEQ ID NO: 158707 - DNA, 15 bp, Homo sapiens
ctgacaggagcatct

SEQ ID NO: 158708 - DNA, 15 bp, Homo sapiens
actgacaggagcatc

SEQ ID NO: 158709 - DNA, 15 bp, Homo sapiens
cactgacaggagcat

SEQ ID NO: 158710 - DNA, 15 bp, Homo sapiens
ccactgacaggagca

SEQ ID NO: 158711 - DNA, 15 bp, Homo sapiens
tccactgacaggagc

SEQ ID NO: 158712 - DNA, 15 bp, Homo sapiens
ttccactgacaggag

SEQ ID NO: 158713 - DNA, 15 bp, Homo sapiens
gttccactgacagga

SEQ ID NO: 158714 - DNA, 15 bp, Homo sapiens
cgttccactgacagg

SEQ ID NO: 158715 - DNA, 15 bp, Homo sapiens
gcgttccactgacag

SEQ ID NO: 158716 - DNA, 15 bp, Homo sapiens
ggcgttccactgaca

SEQ ID NO: 158717 - DNA, 15 bp, Homo sapiens
aggcgttccactgac

SEQ ID NO: 158718 - DNA, 15 bp, Homo sapiens
taggcgttccactga

SEQ ID NO: 158719 - DNA, 15 bp, Homo sapiens
ataggcgttccactg

SEQ ID NO: 158720 - DNA, 15 bp, Homo sapiens
aataggcgttccact

SEQ ID NO: 158721 - DNA, 15 bp, Homo sapiens
aaataggcgttccac

SEQ ID NO: 158722 - DNA, 15 bp, Homo sapiens
taaataggcgttcca

SEQ ID NO: 158723 - DNA, 15 bp, Homo sapiens
ctaaataggcgttcc

SEQ ID NO: 158724 - DNA, 15 bp, Homo sapiens
tctaaataggcgttc

SEQ ID NO: 158725 - DNA, 15 bp, Homo sapiens
ctctaaataggcgtt

SEQ ID NO: 158726 - DNA, 15 bp, Homo sapiens
actctaaataggcgt

SEQ ID NO: 158727 - DNA, 15 bp, Homo sapiens
aactctaaataggcg

SEQ ID NO: 158728 - DNA, 15 bp, Homo sapiens
taactctaaataggc

SEQ ID NO: 158729 - DNA, 15 bp, Homo sapiens
ctaactctaaatagg

SEQ ID NO: 158730 - DNA, 15 bp, Homo sapiens
gctaactctaaatag

SEQ ID NO: 158731 - DNA, 15 bp, Homo sapiens
ggctaactctaaata

SEQ ID NO: 158732 - DNA, 15 bp, Homo sapiens
tggctaactctaaat

SEQ ID NO: 158733 - DNA, 15 bp, Homo sapiens
ttggctaactctaaa

SEQ ID NO: 158734 - DNA, 15 bp, Homo sapiens
cttggctaactctaa

SEQ ID NO: 158735 - DNA, 15 bp, Homo sapiens
gcttggctaactcta

SEQ ID NO: 158736 - DNA, 15 bp, Homo sapiens
cgcttggctaactct

SEQ ID NO: 158737 - DNA, 15 bp, Homo sapiens
acgcttggctaactc

SEQ ID NO: 158738 - DNA, 15 bp, Homo sapiens
tacgcttggctaact

SEQ ID NO: 158739 - DNA, 15 bp, Homo sapiens
ctacgcttggctaac

SEQ ID NO: 158740 - DNA, 15 bp, Homo sapiens
cctacgcttggctaa

SEQ ID NO: 158741 - DNA, 15 bp, Homo sapiens
gcctacgcttggcta

SEQ ID NO: 158742 - DNA, 15 bp, Homo sapiens
tgcctacgcttggct

SEQ ID NO: 158743 - DNA, 15 bp, Homo sapiens
atgcctacgcttggc

SEQ ID NO: 158744 - DNA, 15 bp, Homo sapiens
tatgcctacgcttgg

SEQ ID NO: 158745 - DNA, 15 bp, Homo sapiens
ttatgcctacgcttg

SEQ ID NO: 158746 - DNA, 15 bp, Homo sapiens
attatgcctacgctt

SEQ ID NO: 158747 - DNA, 15 bp, Homo sapiens
cattatgcctacgct

SEQ ID NO: 158748 - DNA, 15 bp, Homo sapiens
gcattatgcctacgc

SEQ ID NO: 158749 - DNA, 15 bp, Homo sapiens
ggcattatgcctacg

SEQ ID NO: 158750 - DNA, 15 bp, Homo sapiens
tggcattatgcctac

SEQ ID NO: 158751 - DNA, 15 bp, Homo sapiens
atggcattatgccta

SEQ ID NO: 158752 - DNA, 15 bp, Homo sapiens
gatggcattatgcct

SEQ ID NO: 158753 - DNA, 15 bp, Homo sapiens
agatggcattatgcc

SEQ ID NO: 158754 - DNA, 15 bp, Homo sapiens
aagatggcattatgc

SEQ ID NO: 158755 - DNA, 15 bp, Homo sapiens
aaagatggcattatg

SEQ ID NO: 158756 - DNA, 15 bp, Homo sapiens
gaaagatggcattat

SEQ ID NO: 158757 - DNA, 15 bp, Homo sapiens
agaaagatggcatta

SEQ ID NO: 158758 - DNA, 15 bp, Homo sapiens
cagaaagatggcatt

SEQ ID NO: 158759 - DNA, 15 bp, Homo sapiens
gcagaaagatggcat

SEQ ID NO: 158760 - DNA, 15 bp, Homo sapiens
tgcagaaagatggca

SEQ ID NO: 158761 - DNA, 15 bp, Homo sapiens
ctgcagaaagatggc

SEQ ID NO: 158762 - DNA, 15 bp, Homo sapiens
gctgcagaaagatgg

SEQ ID NO: 158763 - DNA, 15 bp, Homo sapiens
tgctgcagaaagatg

SEQ ID NO: 158764 - DNA, 15 bp, Homo sapiens
atgctgcagaaagat

SEQ ID NO: 158765 - DNA, 15 bp, Homo sapiens
tatgctgcagaaaga

SEQ ID NO: 158766 - DNA, 15 bp, Homo sapiens
ttatgctgcagaaag

SEQ ID NO: 158767 - DNA, 15 bp, Homo sapiens
tttatgctgcagaaa

SEQ ID NO: 158768 - DNA, 15 bp, Homo sapiens
ttttatgctgcagaa

SEQ ID NO: 158769 - DNA, 15 bp, Homo sapiens
attttatgctgcaga

SEQ ID NO: 158770 - DNA, 15 bp, Homo sapiens
tattttatgctgcag

SEQ ID NO: 158771 - DNA, 15 bp, Homo sapiens
gtattttatgctgca

SEQ ID NO: 158772 - DNA, 15 bp, Homo sapiens
tgtattttatgctgc

SEQ ID NO: 158773 - DNA, 15 bp, Homo sapiens
ctgtattttatgctg

SEQ ID NO: 158774 - DNA, 15 bp, Homo sapiens
actgtattttatgct

SEQ ID NO: 158775 - DNA, 15 bp, Homo sapiens
cactgtattttatgc

SEQ ID NO: 158776 - DNA, 15 bp, Homo sapiens
tcactgtattttatg

SEQ ID NO: 158777 - DNA, 15 bp, Homo sapiens
gtcactgtattttat

SEQ ID NO: 158778 - DNA, 15 bp, Homo sapiens
tgtcactgtatttta

SEQ ID NO: 158779 - DNA, 15 bp, Homo sapiens
atgtcactgtatttt

SEQ ID NO: 158780 - DNA, 15 bp, Homo sapiens
tatgtcactgtattt

SEQ ID NO: 158781 - DNA, 15 bp, Homo sapiens
ctatgtcactgtatt

SEQ ID NO: 158782 - DNA, 15 bp, Homo sapiens
tctatgtcactgtat

SEQ ID NO: 158783 - DNA, 15 bp, Homo sapiens
ttctatgtcactgta

SEQ ID NO: 158784 - DNA, 15 bp, Homo sapiens
tttctatgtcactgt

SEQ ID NO: 158785 - DNA, 15 bp, Homo sapiens
gtttctatgtcactg

SEQ ID NO: 158786 - DNA, 15 bp, Homo sapiens
tgtttctatgtcact

SEQ ID NO: 158787 - DNA, 15 bp, Homo sapiens
atgtttctatgtcac

SEQ ID NO: 158788 - DNA, 15 bp, Homo sapiens
tatgtttctatgtca

SEQ ID NO: 158789 - DNA, 15 bp, Homo sapiens
atatgtttctatgtc

SEQ ID NO: 158790 - DNA, 15 bp, Homo sapiens
aatatgtttctatgt

SEQ ID NO: 158791 - DNA, 15 bp, Homo sapiens
aaatatgtttctatg

SEQ ID NO: 158792 - DNA, 15 bp, Homo sapiens
caaatatgtttctat

SEQ ID NO: 158793 - DNA, 15 bp, Homo sapiens
acaaatatgtttcta

SEQ ID NO: 158794 - DNA, 15 bp, Homo sapiens
cacaaatatgtttct

SEQ ID NO: 158795 - DNA, 15 bp, Homo sapiens
acacaaatatgtttc

SEQ ID NO: 158796 - DNA, 15 bp, Homo sapiens
cacacaaatatgttt

SEQ ID NO: 158797 - DNA, 15 bp, Homo sapiens
tcacacaaatatgtt

SEQ ID NO: 158798 - DNA, 15 bp, Homo sapiens
atcacacaaatatgt

SEQ ID NO: 158799 - DNA, 15 bp, Homo sapiens
aatcacacaaatatg

SEQ ID NO: 158800 - DNA, 15 bp, Homo sapiens
aaatcacacaaatat

SEQ ID NO: 158801 - DNA, 15 bp, Homo sapiens
aaaatcacacaaata

SEQ ID NO: 158802 - DNA, 15 bp, Homo sapiens
gaaaatcacacaaat

SEQ ID NO: 158803 - DNA, 15 bp, Homo sapiens
tgaaaatcacacaaa

SEQ ID NO: 158804 - DNA, 15 bp, Homo sapiens
atgaaaatcacacaa

SEQ ID NO: 158805 - DNA, 15 bp, Homo sapiens
catgaaaatcacaca

SEQ ID NO: 158806 - DNA, 15 bp, Homo sapiens
gcatgaaaatcacac

SEQ ID NO: 158807 - DNA, 15 bp, Homo sapiens
tgcatgaaaatcaca

SEQ ID NO: 158808 - DNA, 15 bp, Homo sapiens
atgcatgaaaatcac

SEQ ID NO: 158809 - DNA, 15 bp, Homo sapiens
aatgcatgaaaatca

SEQ ID NO: 158810 - DNA, 15 bp, Homo sapiens
gaatgcatgaaaatc

SEQ ID NO: 158811 - DNA, 15 bp, Homo sapiens
ggaatgcatgaaaat

SEQ ID NO: 158812 - DNA, 15 bp, Homo sapiens
aggaatgcatgaaaa

SEQ ID NO: 158813 - DNA, 15 bp, Homo sapiens
aaggaatgcatgaaa

SEQ ID NO: 158814 - DNA, 15 bp, Homo sapiens
aaaggaatgcatgaa

SEQ ID NO: 158815 - DNA, 15 bp, Homo sapiens
aaaaggaatgcatga

SEQ ID NO: 158816 - DNA, 15 bp, Homo sapiens
aaaaaggaatgcatg

SEQ ID NO: 158817 - DNA, 15 bp, Homo sapiens
aaaaaaggaatgcat

SEQ ID NO: 158818 - DNA, 15 bp, Homo sapiens
caaaaaaggaatgca

SEQ ID NO: 158819 - DNA, 15 bp, Homo sapiens
tcaaaaaaggaatgc

SEQ ID NO: 158820 - DNA, 15 bp, Homo sapiens
atcaaaaaaggaatg

SEQ ID NO: 158821 - DNA, 15 bp, Homo sapiens
catcaaaaaaggaat

SEQ ID NO: 158822 - DNA, 15 bp, Homo sapiens
tcatcaaaaaaggaa

SEQ ID NO: 158823 - DNA, 15 bp, Homo sapiens
ctcatcaaaaaagga

SEQ ID NO: 158824 - DNA, 15 bp, Homo sapiens
tctcatcaaaaaagg

SEQ ID NO: 158825 - DNA, 15 bp, Homo sapiens
ctctcatcaaaaaag

SEQ ID NO: 158826 - DNA, 15 bp, Homo sapiens
tctctcatcaaaaaa

SEQ ID NO: 158827 - DNA, 15 bp, Homo sapiens
atctctcatcaaaaa

SEQ ID NO: 158828 - DNA, 15 bp, Homo sapiens
tatctctcatcaaaa

SEQ ID NO: 158829 - DNA, 15 bp, Homo sapiens
atatctctcatcaaa

SEQ ID NO: 158830 - DNA, 15 bp, Homo sapiens
aatatctctcatcaa

SEQ ID NO: 158831 - DNA, 15 bp, Homo sapiens
taatatctctcatca

SEQ ID NO: 158832 - DNA, 15 bp, Homo sapiens
gtaatatctctcatc

SEQ ID NO: 158833 - DNA, 15 bp, Homo sapiens
ggtaatatctctcat

SEQ ID NO: 158834 - DNA, 15 bp, Homo sapiens
gggtaatatctctca

SEQ ID NO: 158835 - DNA, 15 bp, Homo sapiens
tgggtaatatctctc

SEQ ID NO: 158836 - DNA, 15 bp, Homo sapiens
ctgggtaatatctct

SEQ ID NO: 158837 - DNA, 15 bp, Homo sapiens
gctgggtaatatctc

SEQ ID NO: 158838 - DNA, 15 bp, Homo sapiens
agctgggtaatatct

SEQ ID NO: 158839 - DNA, 15 bp, Homo sapiens
tagctgggtaatatc

SEQ ID NO: 158840 - DNA, 15 bp, Homo sapiens
ttagctgggtaatat

SEQ ID NO: 158841 - DNA, 15 bp, Homo sapiens
attagctgggtaata

SEQ ID NO: 158842 - DNA, 15 bp, Homo sapiens
aattagctgggtaat

SEQ ID NO: 158843 - DNA, 15 bp, Homo sapiens
taattagctgggtaa

SEQ ID NO: 158844 - DNA, 15 bp, Homo sapiens
ctaattagctgggta

SEQ ID NO: 158845 - DNA, 15 bp, Homo sapiens
cctaattagctgggt

SEQ ID NO: 158846 - DNA, 15 bp, Homo sapiens
tcctaattagctggg

SEQ ID NO: 158847 - DNA, 15 bp, Homo sapiens
ttcctaattagctgg

SEQ ID NO: 158848 - DNA, 15 bp, Homo sapiens
gttcctaattagctg

SEQ ID NO: 158849 - DNA, 15 bp, Homo sapiens
tgttcctaattagct

SEQ ID NO: 158850 - DNA, 15 bp, Homo sapiens
ttgttcctaattagc

SEQ ID NO: 158851 - DNA, 15 bp, Homo sapiens
gttgttcctaattag

SEQ ID NO: 158852 - DNA, 15 bp, Homo sapiens
agttgttcctaatta

SEQ ID NO: 158853 - DNA, 15 bp, Homo sapiens
cagttgttcctaatt

SEQ ID NO: 158854 - DNA, 15 bp, Homo sapiens
acagttgttcctaat

SEQ ID NO: 158855 - DNA, 15 bp, Homo sapiens
aacagttgttcctaa

SEQ ID NO: 158856 - DNA, 15 bp, Homo sapiens
aaacagttgttccta

SEQ ID NO: 158857 - DNA, 15 bp, Homo sapiens
aaaacagttgttcct

SEQ ID NO: 158858 - DNA, 15 bp, Homo sapiens
caaaacagttgttcc

SEQ ID NO: 158859 - DNA, 15 bp, Homo sapiens
acaaaacagttgttc

SEQ ID NO: 158860 - DNA, 15 bp, Homo sapiens
aacaaaacagttgtt

SEQ ID NO: 158861 - DNA, 15 bp, Homo sapiens
aaacaaaacagttgt

SEQ ID NO: 158862 - DNA, 15 bp, Homo sapiens
gaaacaaaacagttg

SEQ ID NO: 158863 - DNA, 15 bp, Homo sapiens
ggaaacaaaacagtt

SEQ ID NO: 158864 - DNA, 15 bp, Homo sapiens
aggaaacaaaacagt

SEQ ID NO: 158865 - DNA, 15 bp, Homo sapiens
aaggaaacaaaacag

SEQ ID NO: 158866 - DNA, 15 bp, Homo sapiens
gaaggaaacaaaaca

SEQ ID NO: 158867 - DNA, 15 bp, Homo sapiens
tgaaggaaacaaaac

SEQ ID NO: 158868 - DNA, 15 bp, Homo sapiens
ctgaaggaaacaaaa

SEQ ID NO: 158869 - DNA, 15 bp, Homo sapiens
tctgaaggaaacaaa

SEQ ID NO: 158870 - DNA, 15 bp, Homo sapiens
atctgaaggaaacaa

SEQ ID NO: 158871 - DNA, 15 bp, Homo sapiens
gatctgaaggaaaca

SEQ ID NO: 158872 - DNA, 15 bp, Homo sapiens
tgatctgaaggaaac

SEQ ID NO: 158873 - DNA, 15 bp, Homo sapiens
atgatctgaaggaaa

SEQ ID NO: 158874 - DNA, 15 bp, Homo sapiens
tatgatctgaaggaa

SEQ ID NO: 158875 - DNA, 15 bp, Homo sapiens
ttatgatctgaagga

SEQ ID NO: 158876 - DNA, 15 bp, Homo sapiens
gttatgatctgaagg

SEQ ID NO: 158877 - DNA, 15 bp, Homo sapiens
ggttatgatctgaag

SEQ ID NO: 158878 - DNA, 15 bp, Homo sapiens
gggttatgatctgaa

SEQ ID NO: 158879 - DNA, 15 bp, Homo sapiens
tgggttatgatctga

SEQ ID NO: 158880 - DNA, 15 bp, Homo sapiens
ttgggttatgatctg

SEQ ID NO: 158881 - DNA, 15 bp, Homo sapiens
tttgggttatgatct

SEQ ID NO: 158882 - DNA, 15 bp, Homo sapiens
ctttgggttatgatc

SEQ ID NO: 158883 - DNA, 15 bp, Homo sapiens
actttgggttatgat

SEQ ID NO: 158884 - DNA, 15 bp, Homo sapiens
aactttgggttatga

SEQ ID NO: 158885 - DNA, 15 bp, Homo sapiens
caactttgggttatg

SEQ ID NO: 158886 - DNA, 15 bp, Homo sapiens
acaactttgggttat

SEQ ID NO: 158887 - DNA, 15 bp, Homo sapiens
cacaactttgggtta

SEQ ID NO: 158888 - DNA, 15 bp, Homo sapiens
tcacaactttgggtt

SEQ ID NO: 158889 - DNA, 15 bp, Homo sapiens
atcacaactttgggt

SEQ ID NO: 158890 - DNA, 15 bp, Homo sapiens
aatcacaactttggg

SEQ ID NO: 158891 - DNA, 15 bp, Homo sapiens
aaatcacaactttgg

SEQ ID NO: 158892 - DNA, 15 bp, Homo sapiens
aaaatcacaactttg

SEQ ID NO: 158893 - DNA, 15 bp, Homo sapiens
caaaatcacaacttt

SEQ ID NO: 158894 - DNA, 15 bp, Homo sapiens
tcaaaatcacaactt

SEQ ID NO: 158895 - DNA, 15 bp, Homo sapiens
ttcaaaatcacaact

SEQ ID NO: 158896 - DNA, 15 bp, Homo sapiens
tttcaaaatcacaac

SEQ ID NO: 158897 - DNA, 15 bp, Homo sapiens
ttttcaaaatcacaa

SEQ ID NO: 158898 - DNA, 15 bp, Homo sapiens
cttttcaaaatcaca

SEQ ID NO: 158899 - DNA, 15 bp, Homo sapiens
acttttcaaaatcac

SEQ ID NO: 158900 - DNA, 15 bp, Homo sapiens
gacttttcaaaatca

SEQ ID NO: 158901 - DNA, 15 bp, Homo sapiens
tgacttttcaaaatc

SEQ ID NO: 158902 - DNA, 15 bp, Homo sapiens
atgacttttcaaaat

SEQ ID NO: 158903 - DNA, 15 bp, Homo sapiens
catgacttttcaaaa

SEQ ID NO: 158904 - DNA, 15 bp, Homo sapiens
acatgacttttcaaa

SEQ ID NO: 158905 - DNA, 15 bp, Homo sapiens
gacatgacttttcaa

SEQ ID NO: 158906 - DNA, 15 bp, Homo sapiens
ggacatgacttttca

SEQ ID NO: 158907 - DNA, 15 bp, Homo sapiens
gggacatgacttttc

SEQ ID NO: 158908 - DNA, 15 bp, Homo sapiens
ggggacatgactttt

SEQ ID NO: 158909 - DNA, 15 bp, Homo sapiens
gggggacatgacttt

SEQ ID NO: 158910 - DNA, 15 bp, Homo sapiens
agggggacatgactt

SEQ ID NO: 158911 - DNA, 15 bp, Homo sapiens
aagggggacatgact

SEQ ID NO: 158912 - DNA, 15 bp, Homo sapiens
gaagggggacatgac

SEQ ID NO: 158913 - DNA, 15 bp, Homo sapiens
tgaagggggacatga

SEQ ID NO: 158914 - DNA, 15 bp, Homo sapiens
ctgaagggggacatg

SEQ ID NO: 158915 - DNA, 15 bp, Homo sapiens
tctgaagggggacat

SEQ ID NO: 158916 - DNA, 15 bp, Homo sapiens
atctgaagggggaca

SEQ ID NO: 158917 - DNA, 15 bp, Homo sapiens
aatctgaagggggac

SEQ ID NO: 158918 - DNA, 15 bp, Homo sapiens
aaatctgaaggggga

SEQ ID NO: 158919 - DNA, 15 bp, Homo sapiens
gaaatctgaaggggg

SEQ ID NO: 158920 - DNA, 15 bp, Homo sapiens
agaaatctgaagggg

SEQ ID NO: 158921 - DNA, 15 bp, Homo sapiens
aagaaatctgaaggg

SEQ ID NO: 158922 - DNA, 15 bp, Homo sapiens
caagaaatctgaagg

SEQ ID NO: 158923 - DNA, 15 bp, Homo sapiens
acaagaaatctgaag

SEQ ID NO: 158924 - DNA, 15 bp, Homo sapiens
aacaagaaatctgaa

SEQ ID NO: 158925 - DNA, 15 bp, Homo sapiens
aaacaagaaatctga

SEQ ID NO: 158926 - DNA, 15 bp, Homo sapiens
aaaacaagaaatctg

SEQ ID NO: 158927 - DNA, 15 bp, Homo sapiens
gaaaacaagaaatct

SEQ ID NO: 158928 - DNA, 15 bp, Homo sapiens
agaaaacaagaaatc

SEQ ID NO: 158929 - DNA, 15 bp, Homo sapiens
cagaaaacaagaaat

SEQ ID NO: 158930 - DNA, 15 bp, Homo sapiens
gcagaaaacaagaaa

SEQ ID NO: 158931 - DNA, 15 bp, Homo sapiens
agcagaaaacaagaa

SEQ ID NO: 158932 - DNA, 15 bp, Homo sapiens
tagcagaaaacaaga

SEQ ID NO: 158933 - DNA, 15 bp, Homo sapiens
gtagcagaaaacaag

SEQ ID NO: 158934 - DNA, 15 bp, Homo sapiens
agtagcagaaaacaa

SEQ ID NO: 158935 - DNA, 15 bp, Homo sapiens
aagtagcagaaaaca

SEQ ID NO: 158936 - DNA, 15 bp, Homo sapiens
gaagtagcagaaaac

SEQ ID NO: 158937 - DNA, 15 bp, Homo sapiens
agaagtagcagaaaa

SEQ ID NO: 158938 - DNA, 15 bp, Homo sapiens
gagaagtagcagaaa

SEQ ID NO: 158939 - DNA, 15 bp, Homo sapiens
tgagaagtagcagaa

SEQ ID NO: 158940 - DNA, 15 bp, Homo sapiens
atgagaagtagcaga

SEQ ID NO: 158941 - DNA, 15 bp, Homo sapiens
catgagaagtagcag

SEQ ID NO: 158942 - DNA, 15 bp, Homo sapiens
acatgagaagtagca

SEQ ID NO: 158943 - DNA, 15 bp, Homo sapiens
cacatgagaagtagc

SEQ ID NO: 158944 - DNA, 15 bp, Homo sapiens
ccacatgagaagtag

SEQ ID NO: 158945 - DNA, 15 bp, Homo sapiens
tccacatgagaagta

SEQ ID NO: 158946 - DNA, 15 bp, Homo sapiens
ttccacatgagaagt

SEQ ID NO: 158947 - DNA, 15 bp, Homo sapiens
attccacatgagaag

SEQ ID NO: 158948 - DNA, 15 bp, Homo sapiens
aattccacatgagaa

SEQ ID NO: 158949 - DNA, 15 bp, Homo sapiens
caattccacatgaga

SEQ ID NO: 158950 - DNA, 15 bp, Homo sapiens
gcaattccacatgag

SEQ ID NO: 158951 - DNA, 15 bp, Homo sapiens
agcaattccacatga

SEQ ID NO: 158952 - DNA, 15 bp, Homo sapiens
aagcaattccacatg

SEQ ID NO: 158953 - DNA, 15 bp, Homo sapiens
aaagcaattccacat

SEQ ID NO: 158954 - DNA, 15 bp, Homo sapiens
caaagcaattccaca

SEQ ID NO: 158955 - DNA, 15 bp, Homo sapiens
ccaaagcaattccac

SEQ ID NO: 158956 - DNA, 15 bp, Homo sapiens
gccaaagcaattcca

SEQ ID NO: 158957 - DNA, 15 bp, Homo sapiens
agccaaagcaattcc

SEQ ID NO: 158958 - DNA, 15 bp, Homo sapiens
gagccaaagcaattc

SEQ ID NO: 158959 - DNA, 15 bp, Homo sapiens
agagccaaagcaatt

SEQ ID NO: 158960 - DNA, 15 bp, Homo sapiens
aagagccaaagcaat

SEQ ID NO: 158961 - DNA, 15 bp, Homo sapiens
gaagagccaaagcaa

SEQ ID NO: 158962 - DNA, 15 bp, Homo sapiens
agaagagccaaagca

SEQ ID NO: 158963 - DNA, 15 bp, Homo sapiens
aagaagagccaaagc

SEQ ID NO: 158964 - DNA, 15 bp, Homo sapiens
taagaagagccaaag

SEQ ID NO: 158965 - DNA, 15 bp, Homo sapiens
ctaagaagagccaaa

SEQ ID NO: 158966 - DNA, 15 bp, Homo sapiens
actaagaagagccaa

SEQ ID NO: 158967 - DNA, 15 bp, Homo sapiens
aactaagaagagcca

SEQ ID NO: 158968 - DNA, 15 bp, Homo sapiens
gaactaagaagagcc

SEQ ID NO: 158969 - DNA, 15 bp, Homo sapiens
agaactaagaagagc

SEQ ID NO: 158970 - DNA, 15 bp, Homo sapiens
gagaactaagaagag

SEQ ID NO: 158971 - DNA, 15 bp, Homo sapiens
agagaactaagaaga

SEQ ID NO: 158972 - DNA, 15 bp, Homo sapiens
aagagaactaagaag

SEQ ID NO: 158973 - DNA, 15 bp, Homo sapiens
caagagaactaagaa

SEQ ID NO: 158974 - DNA, 15 bp, Homo sapiens
tcaagagaactaaga

SEQ ID NO: 158975 - DNA, 15 bp, Homo sapiens
ctcaagagaactaag

SEQ ID NO: 158976 - DNA, 15 bp, Homo sapiens
actcaagagaactaa

SEQ ID NO: 158977 - DNA, 15 bp, Homo sapiens
gactcaagagaacta

SEQ ID NO: 158978 - DNA, 15 bp, Homo sapiens
agactcaagagaact

SEQ ID NO: 158979 - DNA, 15 bp, Homo sapiens
tagactcaagagaac

SEQ ID NO: 158980 - DNA, 15 bp, Homo sapiens
ttagactcaagagaa

SEQ ID NO: 158981 - DNA, 15 bp, Homo sapiens
tttagactcaagaga

SEQ ID NO: 158982 - DNA, 15 bp, Homo sapiens
atttagactcaagag

SEQ ID NO: 158983 - DNA, 15 bp, Homo sapiens
aatttagactcaaga

SEQ ID NO: 158984 - DNA, 15 bp, Homo sapiens
taatttagactcaag

SEQ ID NO: 158985 - DNA, 15 bp, Homo sapiens
ataatttagactcaa

SEQ ID NO: 158986 - DNA, 15 bp, Homo sapiens
aataatttagactca

SEQ ID NO: 158987 - DNA, 15 bp, Homo sapiens
gaataatttagactc

SEQ ID NO: 158988 - DNA, 15 bp, Homo sapiens
ggaataatttagact

SEQ ID NO: 158989 - DNA, 15 bp, Homo sapiens
aggaataatttagac

SEQ ID NO: 158990 - DNA, 15 bp, Homo sapiens
aaggaataatttaga

SEQ ID NO: 158991 - DNA, 15 bp, Homo sapiens
taaggaataatttag

SEQ ID NO: 158992 - DNA, 15 bp, Homo sapiens
ataaggaataattta

SEQ ID NO: 158993 - DNA, 15 bp, Homo sapiens
tataaggaataattt

SEQ ID NO: 158994 - DNA, 15 bp, Homo sapiens
ttataaggaataatt

SEQ ID NO: 158995 - DNA, 15 bp, Homo sapiens
cttataaggaataat

SEQ ID NO: 158996 - DNA, 15 bp, Homo sapiens
acttataaggaataa

SEQ ID NO: 158997 - DNA, 15 bp, Homo sapiens
aacttataaggaata

SEQ ID NO: 158998 - DNA, 15 bp, Homo sapiens
caacttataaggaat

SEQ ID NO: 158999 - DNA, 15 bp, Homo sapiens
ccaacttataaggaa

SEQ ID NO: 159000 - DNA, 15 bp, Homo sapiens
accaacttataagga

SEQ ID NO: 159001 - DNA, 15 bp, Homo sapiens
caccaacttataagg

SEQ ID NO: 159002 - DNA, 15 bp, Homo sapiens
gcaccaacttataag

SEQ ID NO: 159003 - DNA, 15 bp, Homo sapiens
tgcaccaacttataa

SEQ ID NO: 159004 - DNA, 15 bp, Homo sapiens
ttgcaccaacttata

SEQ ID NO: 159005 - DNA, 15 bp, Homo sapiens
cttgcaccaacttat

SEQ ID NO: 159006 - DNA, 15 bp, Homo sapiens
gcttgcaccaactta

SEQ ID NO: 159007 - DNA, 15 bp, Homo sapiens
tgcttgcaccaactt

SEQ ID NO: 159008 - DNA, 15 bp, Homo sapiens
atgcttgcaccaact

SEQ ID NO: 159009 - DNA, 15 bp, Homo sapiens
gatgcttgcaccaac

SEQ ID NO: 159010 - DNA, 15 bp, Homo sapiens
agatgcttgcaccaa

SEQ ID NO: 159011 - DNA, 15 bp, Homo sapiens
cagatgcttgcacca

SEQ ID NO: 159012 - DNA, 15 bp, Homo sapiens
tcagatgcttgcacc

SEQ ID NO: 159013 - DNA, 15 bp, Homo sapiens
atcagatgcttgcac

SEQ ID NO: 159014 - DNA, 15 bp, Homo sapiens
aatcagatgcttgca

SEQ ID NO: 159015 - DNA, 15 bp, Homo sapiens
taatcagatgcttgc

SEQ ID NO: 159016 - DNA, 15 bp, Homo sapiens
ataatcagatgcttg

SEQ ID NO: 159017 - DNA, 15 bp, Homo sapiens
aataatcagatgctt

SEQ ID NO: 159018 - DNA, 15 bp, Homo sapiens
aaataatcagatgct

SEQ ID NO: 159019 - DNA, 15 bp, Homo sapiens
aaaataatcagatgc

SEQ ID NO: 159020 - DNA, 15 bp, Homo sapiens
caaaataatcagatg

SEQ ID NO: 159021 - DNA, 15 bp, Homo sapiens
acaaaataatcagat

SEQ ID NO: 159022 - DNA, 15 bp, Homo sapiens
aacaaaataatcaga

SEQ ID NO: 159023 - DNA, 15 bp, Homo sapiens
taacaaaataatcag

SEQ ID NO: 159024 - DNA, 15 bp, Homo sapiens
ataacaaaataatca

SEQ ID NO: 159025 - DNA, 15 bp, Homo sapiens
gataacaaaataatc

SEQ ID NO: 159026 - DNA, 15 bp, Homo sapiens
tgataacaaaataat

SEQ ID NO: 159027 - DNA, 15 bp, Homo sapiens
atgataacaaaataa

SEQ ID NO: 159028 - DNA, 15 bp, Homo sapiens
aatgataacaaaata

SEQ ID NO: 159029 - DNA, 15 bp, Homo sapiens
taatgataacaaaat

SEQ ID NO: 159030 - DNA, 15 bp, Homo sapiens
gtaatgataacaaaa

SEQ ID NO: 159031 - DNA, 15 bp, Homo sapiens
agtaatgataacaaa

SEQ ID NO: 159032 - DNA, 15 bp, Homo sapiens
cagtaatgataacaa

SEQ ID NO: 159033 - DNA, 15 bp, Homo sapiens
acagtaatgataaca

SEQ ID NO: 159034 - DNA, 15 bp, Homo sapiens
aacagtaatgataac

SEQ ID NO: 159035 - DNA, 15 bp, Homo sapiens
taacagtaatgataa

SEQ ID NO: 159036 - DNA, 15 bp, Homo sapiens
ataacagtaatgata

SEQ ID NO: 159037 - DNA, 15 bp, Homo sapiens
cataacagtaatgat

SEQ ID NO: 159038 - DNA, 15 bp, Homo sapiens
gcataacagtaatga

SEQ ID NO: 159039 - DNA, 15 bp, Homo sapiens
agcataacagtaatg

SEQ ID NO: 159040 - DNA, 15 bp, Homo sapiens
gagcataacagtaat

SEQ ID NO: 159041 - DNA, 15 bp, Homo sapiens
tgagcataacagtaa

SEQ ID NO: 159042 - DNA, 15 bp, Homo sapiens
ttgagcataacagta

SEQ ID NO: 159043 - DNA, 15 bp, Homo sapiens
cttgagcataacagt

SEQ ID NO: 159044 - DNA, 15 bp, Homo sapiens
gcttgagcataacag

SEQ ID NO: 159045 - DNA, 15 bp, Homo sapiens
tgcttgagcataaca

SEQ ID NO: 159046 - DNA, 15 bp, Homo sapiens
atgcttgagcataac

SEQ ID NO: 159047 - DNA, 15 bp, Homo sapiens
aatgcttgagcataa

SEQ ID NO: 159048 - DNA, 15 bp, Homo sapiens
gaatgcttgagcata

SEQ ID NO: 159049 - DNA, 15 bp, Homo sapiens
tgaatgcttgagcat

SEQ ID NO: 159050 - DNA, 15 bp, Homo sapiens
gtgaatgcttgagca

SEQ ID NO: 159051 - DNA, 15 bp, Homo sapiens
tgtgaatgcttgagc

SEQ ID NO: 159052 - DNA, 15 bp, Homo sapiens
ctgtgaatgcttgag

SEQ ID NO: 159053 - DNA, 15 bp, Homo sapiens
tctgtgaatgcttga

SEQ ID NO: 159054 - DNA, 15 bp, Homo sapiens
ctctgtgaatgcttg

SEQ ID NO: 159055 - DNA, 15 bp, Homo sapiens
actctgtgaatgctt

SEQ ID NO: 159056 - DNA, 15 bp, Homo sapiens
cactctgtgaatgct

SEQ ID NO: 159057 - DNA, 15 bp, Homo sapiens
ccactctgtgaatgc

SEQ ID NO: 159058 - DNA, 15 bp, Homo sapiens
tccactctgtgaatg

SEQ ID NO: 159059 - DNA, 15 bp, Homo sapiens
ttccactctgtgaat

SEQ ID NO: 159060 - DNA, 15 bp, Homo sapiens
gttccactctgtgaa

SEQ ID NO: 159061 - DNA, 15 bp, Homo sapiens
tgttccactctgtga

SEQ ID NO: 159062 - DNA, 15 bp, Homo sapiens
gtgttccactctgtg

SEQ ID NO: 159063 - DNA, 15 bp, Homo sapiens
tgtgttccactctgt

SEQ ID NO: 159064 - DNA, 15 bp, Homo sapiens
atgtgttccactctg

SEQ ID NO: 159065 - DNA, 15 bp, Homo sapiens
aatgtgttccactct

SEQ ID NO: 159066 - DNA, 15 bp, Homo sapiens
aaatgtgttccactc

SEQ ID NO: 159067 - DNA, 15 bp, Homo sapiens
aaaatgtgttccact

SEQ ID NO: 159068 - DNA, 15 bp, Homo sapiens
taaaatgtgttccac

SEQ ID NO: 159069 - DNA, 15 bp, Homo sapiens
ttaaaatgtgttcca

SEQ ID NO: 159070 - DNA, 15 bp, Homo sapiens
attaaaatgtgttcc

SEQ ID NO: 159071 - DNA, 15 bp, Homo sapiens
tattaaaatgtgttc

SEQ ID NO: 159072 - DNA, 15 bp, Homo sapiens
atattaaaatgtgtt

SEQ ID NO: 159073 - DNA, 15 bp, Homo sapiens
gatattaaaatgtgt

SEQ ID NO: 159074 - DNA, 15 bp, Homo sapiens
tgatattaaaatgtg

SEQ ID NO: 159075 - DNA, 15 bp, Homo sapiens
ttgatattaaaatgt

SEQ ID NO: 159076 - DNA, 15 bp, Homo sapiens
attgatattaaaatg

SEQ ID NO: 159077 - DNA, 15 bp, Homo sapiens
aattgatattaaaat

SEQ ID NO: 159078 - DNA, 15 bp, Homo sapiens
caattgatattaaaa

SEQ ID NO: 159079 - DNA, 15 bp, Homo sapiens
gcaattgatattaaa

SEQ ID NO: 159080 - DNA, 15 bp, Homo sapiens
agcaattgatattaa

SEQ ID NO: 159081 - DNA, 15 bp, Homo sapiens
aagcaattgatatta

SEQ ID NO: 159082 - DNA, 15 bp, Homo sapiens
aaagcaattgatatt

SEQ ID NO: 159083 - DNA, 15 bp, Homo sapiens
gaaagcaattgatat

SEQ ID NO: 159084 - DNA, 15 bp, Homo sapiens
agaaagcaattgata

SEQ ID NO: 159085 - DNA, 15 bp, Homo sapiens
tagaaagcaattgat

SEQ ID NO: 159086 - DNA, 15 bp, Homo sapiens
atagaaagcaattga

SEQ ID NO: 159087 - DNA, 15 bp, Homo sapiens
aatagaaagcaattg

SEQ ID NO: 159088 - DNA, 15 bp, Homo sapiens
aaatagaaagcaatt

SEQ ID NO: 159089 - DNA, 15 bp, Homo sapiens
gaaatagaaagcaat

SEQ ID NO: 159090 - DNA, 15 bp, Homo sapiens
agaaatagaaagcaa

SEQ ID NO: 159091 - DNA, 15 bp, Homo sapiens
gagaaatagaaagca

SEQ ID NO: 159092 - DNA, 15 bp, Homo sapiens
ggagaaatagaaagc

SEQ ID NO: 159093 - DNA, 15 bp, Homo sapiens
aggagaaatagaaag

SEQ ID NO: 159094 - DNA, 15 bp, Homo sapiens
aaggagaaatagaaa

SEQ ID NO: 159095 - DNA, 15 bp, Homo sapiens
aaaggagaaatagaa

SEQ ID NO: 159096 - DNA, 15 bp, Homo sapiens
taaaggagaaataga

SEQ ID NO: 159097 - DNA, 15 bp, Homo sapiens
ataaaggagaaatag

SEQ ID NO: 159098 - DNA, 15 bp, Homo sapiens
tataaaggagaaata

SEQ ID NO: 159099 - DNA, 15 bp, Homo sapiens
atataaaggagaaat

SEQ ID NO: 159100 - DNA, 15 bp, Homo sapiens
aatataaaggagaaa

SEQ ID NO: 159101 - DNA, 15 bp, Homo sapiens
taatataaaggagaa

SEQ ID NO: 159102 - DNA, 15 bp, Homo sapiens
gtaatataaaggaga

SEQ ID NO: 159103 - DNA, 15 bp, Homo sapiens
tgtaatataaaggag

SEQ ID NO: 159104 - DNA, 15 bp, Homo sapiens
ctgtaatataaagga

SEQ ID NO: 159105 - DNA, 15 bp, Homo sapiens
actgtaatataaagg

SEQ ID NO: 159106 - DNA, 15 bp, Homo sapiens
aactgtaatataaag

SEQ ID NO: 159107 - DNA, 15 bp, Homo sapiens
gaactgtaatataaa

SEQ ID NO: 159108 - DNA, 15 bp, Homo sapiens
tgaactgtaatataa

SEQ ID NO: 159109 - DNA, 15 bp, Homo sapiens
ctgaactgtaatata

SEQ ID NO: 159110 - DNA, 15 bp, Homo sapiens
cctgaactgtaatat

SEQ ID NO: 159111 - DNA, 15 bp, Homo sapiens
tcctgaactgtaata

SEQ ID NO: 159112 - DNA, 15 bp, Homo sapiens
gtcctgaactgtaat

SEQ ID NO: 159113 - DNA, 15 bp, Homo sapiens
tgtcctgaactgtaa

SEQ ID NO: 159114 - DNA, 15 bp, Homo sapiens
atgtcctgaactgta

SEQ ID NO: 159115 - DNA, 15 bp, Homo sapiens
aatgtcctgaactgt

SEQ ID NO: 159116 - DNA, 15 bp, Homo sapiens
caatgtcctgaactg

SEQ ID NO: 159117 - DNA, 15 bp, Homo sapiens
acaatgtcctgaact

SEQ ID NO: 159118 - DNA, 15 bp, Homo sapiens
tacaatgtcctgaac

SEQ ID NO: 159119 - DNA, 15 bp, Homo sapiens
atacaatgtcctgaa

SEQ ID NO: 159120 - DNA, 15 bp, Homo sapiens
aatacaatgtcctga

SEQ ID NO: 159121 - DNA, 15 bp, Homo sapiens
taatacaatgtcctg

SEQ ID NO: 159122 - DNA, 15 bp, Homo sapiens
ttaatacaatgtcct

SEQ ID NO: 159123 - DNA, 15 bp, Homo sapiens
attaatacaatgtcc

SEQ ID NO: 159124 - DNA, 15 bp, Homo sapiens
aattaatacaatgtc

SEQ ID NO: 159125 - DNA, 15 bp, Homo sapiens
taattaatacaatgt

SEQ ID NO: 159126 - DNA, 15 bp, Homo sapiens
ataattaatacaatg

SEQ ID NO: 159127 - DNA, 15 bp, Homo sapiens
aataattaatacaat

SEQ ID NO: 159128 - DNA, 15 bp, Homo sapiens
taataattaatacaa

SEQ ID NO: 159129 - DNA, 15 bp, Homo sapiens
ttaataattaataca

SEQ ID NO: 159130 - DNA, 15 bp, Homo sapiens
tttaataattaatac

SEQ ID NO: 159131 - DNA, 15 bp, Homo sapiens
ttttaataattaata

SEQ ID NO: 159132 - DNA, 15 bp, Homo sapiens
attttaataattaat

SEQ ID NO: 159133 - DNA, 15 bp, Homo sapiens
aattttaataattaa

SEQ ID NO: 159134 - DNA, 15 bp, Homo sapiens
gaattttaataatta

SEQ ID NO: 159135 - DNA, 15 bp, Homo sapiens
agaattttaataatt

SEQ ID NO: 159136 - DNA, 15 bp, Homo sapiens
tagaattttaataat

SEQ ID NO: 159137 - DNA, 15 bp, Homo sapiens
atagaattttaataa

SEQ ID NO: 159138 - DNA, 15 bp, Homo sapiens
aatagaattttaata

SEQ ID NO: 159139 - DNA, 15 bp, Homo sapiens
gaatagaattttaat

SEQ ID NO: 159140 - DNA, 15 bp, Homo sapiens
cgaatagaattttaa

SEQ ID NO: 159141 - DNA, 15 bp, Homo sapiens
acgaatagaatttta

SEQ ID NO: 159142 - DNA, 15 bp, Homo sapiens
tacgaatagaatttt

SEQ ID NO: 159143 - DNA, 15 bp, Homo sapiens
ctacgaatagaattt

SEQ ID NO: 159144 - DNA, 15 bp, Homo sapiens
cctacgaatagaatt

SEQ ID NO: 159145 - DNA, 15 bp, Homo sapiens
acctacgaatagaat

SEQ ID NO: 159146 - DNA, 15 bp, Homo sapiens
tacctacgaatagaa

SEQ ID NO: 159147 - DNA, 15 bp, Homo sapiens
ctacctacgaataga

SEQ ID NO: 159148 - DNA, 15 bp, Homo sapiens
cctacctacgaatag

SEQ ID NO: 159149 - DNA, 15 bp, Homo sapiens
acctacctacgaata

SEQ ID NO: 159150 - DNA, 15 bp, Homo sapiens
aacctacctacgaat

SEQ ID NO: 159151 - DNA, 15 bp, Homo sapiens
taacctacctacgaa

SEQ ID NO: 159152 - DNA, 15 bp, Homo sapiens
ataacctacctacga

SEQ ID NO: 159153 - DNA, 15 bp, Homo sapiens
tataacctacctacg

SEQ ID NO: 159154 - DNA, 15 bp, Homo sapiens
atataacctacctac

SEQ ID NO: 159155 - DNA, 15 bp, Homo sapiens
catataacctaccta

SEQ ID NO: 159156 - DNA, 15 bp, Homo sapiens
tcatataacctacct

SEQ ID NO: 159157 - DNA, 15 bp, Homo sapiens
gtcatataacctacc

SEQ ID NO: 159158 - DNA, 15 bp, Homo sapiens
agtcatataacctac

SEQ ID NO: 159159 - DNA, 15 bp, Homo sapiens
cagtcatataaccta

SEQ ID NO: 159160 - DNA, 15 bp, Homo sapiens
tcagtcatataacct

SEQ ID NO: 159161 - DNA, 15 bp, Homo sapiens
ttcagtcatataacc

SEQ ID NO: 159162 - DNA, 15 bp, Homo sapiens
attcagtcatataac

SEQ ID NO: 159163 - DNA, 15 bp, Homo sapiens
aattcagtcatataa

SEQ ID NO: 159164 - DNA, 15 bp, Homo sapiens
caattcagtcatata

SEQ ID NO: 159165 - DNA, 15 bp, Homo sapiens
tcaattcagtcatat

SEQ ID NO: 159166 - DNA, 15 bp, Homo sapiens
ttcaattcagtcata

SEQ ID NO: 159167 - DNA, 15 bp, Homo sapiens
tttcaattcagtcat

SEQ ID NO: 159168 - DNA, 15 bp, Homo sapiens
atttcaattcagtca

SEQ ID NO: 159169 - DNA, 15 bp, Homo sapiens
tatttcaattcagtc

SEQ ID NO: 159170 - DNA, 15 bp, Homo sapiens
ctatttcaattcagt

SEQ ID NO: 159171 - DNA, 15 bp, Homo sapiens
tctatttcaattcag

SEQ ID NO: 159172 - DNA, 15 bp, Homo sapiens
atctatttcaattca

SEQ ID NO: 159173 - DNA, 15 bp, Homo sapiens
tatctatttcaattc

SEQ ID NO: 159174 - DNA, 15 bp, Homo sapiens
ttatctatttcaatt

SEQ ID NO: 159175 - DNA, 15 bp, Homo sapiens
tttatctatttcaat

SEQ ID NO: 159176 - DNA, 15 bp, Homo sapiens
ttttatctatttcaa

SEQ ID NO: 159177 - DNA, 15 bp, Homo sapiens
attttatctatttca

SEQ ID NO: 159178 - DNA, 15 bp, Homo sapiens
cattttatctatttc

SEQ ID NO: 159179 - DNA, 15 bp, Homo sapiens
tcattttatctattt

SEQ ID NO: 159180 - DNA, 15 bp, Homo sapiens
ttcattttatctatt

SEQ ID NO: 159181 - DNA, 15 bp, Homo sapiens
attcattttatctat

SEQ ID NO: 159182 - DNA, 15 bp, Homo sapiens
aattcattttatcta

SEQ ID NO: 159183 - DNA, 15 bp, Homo sapiens
aaattcattttatct

SEQ ID NO: 159184 - DNA, 15 bp, Homo sapiens
gaaattcattttatc

SEQ ID NO: 159185 - DNA, 15 bp, Homo sapiens
agaaattcattttat

SEQ ID NO: 159186 - DNA, 15 bp, Homo sapiens
aagaaattcatttta

SEQ ID NO: 159187 - DNA, 15 bp, Homo sapiens
aaagaaattcatttt

SEQ ID NO: 159188 - DNA, 15 bp, Homo sapiens
aaaagaaattcattt

SEQ ID NO: 159189 - DNA, 15 bp, Homo sapiens
gaaaagaaattcatt

SEQ ID NO: 159190 - DNA, 15 bp, Homo sapiens
agaaaagaaattcat

SEQ ID NO: 159191 - DNA, 15 bp, Homo sapiens
tagaaaagaaattca

SEQ ID NO: 159192 - DNA, 15 bp, Homo sapiens
ctagaaaagaaattc

SEQ ID NO: 159193 - DNA, 15 bp, Homo sapiens
tctagaaaagaaatt

SEQ ID NO: 159194 - DNA, 15 bp, Homo sapiens
atctagaaaagaaat

SEQ ID NO: 159195 - DNA, 15 bp, Homo sapiens
tatctagaaaagaaa

SEQ ID NO: 159196 - DNA, 15 bp, Homo sapiens
ttatctagaaaagaa

SEQ ID NO: 159197 - DNA, 15 bp, Homo sapiens
gttatctagaaaaga

SEQ ID NO: 159198 - DNA, 15 bp, Homo sapiens
tgttatctagaaaag

SEQ ID NO: 159199 - DNA, 15 bp, Homo sapiens
ttgttatctagaaaa

SEQ ID NO: 159200 - DNA, 15 bp, Homo sapiens
tttgttatctagaaa

SEQ ID NO: 159201 - DNA, 15 bp, Homo sapiens
ctttgttatctagaa

SEQ ID NO: 159202 - DNA, 15 bp, Homo sapiens
cctttgttatctaga

SEQ ID NO: 159203 - DNA, 15 bp, Homo sapiens
tcctttgttatctag

SEQ ID NO: 159204 - DNA, 15 bp, Homo sapiens
ctcctttgttatcta

SEQ ID NO: 159205 - DNA, 15 bp, Homo sapiens
cctcctttgttatct

SEQ ID NO: 159206 - DNA, 15 bp, Homo sapiens
acctcctttgttatc

SEQ ID NO: 159207 - DNA, 15 bp, Homo sapiens
cacctcctttgttat

SEQ ID NO: 159208 - DNA, 15 bp, Homo sapiens
acacctcctttgtta

SEQ ID NO: 159209 - DNA, 15 bp, Homo sapiens
gacacctcctttgtt

SEQ ID NO: 159210 - DNA, 15 bp, Homo sapiens
tgacacctcctttgt

SEQ ID NO: 159211 - DNA, 15 bp, Homo sapiens
atgacacctcctttg

SEQ ID NO: 159212 - DNA, 15 bp, Homo sapiens
tatgacacctccttt

SEQ ID NO: 159213 - DNA, 15 bp, Homo sapiens
ttatgacacctcctt

SEQ ID NO: 159214 - DNA, 15 bp, Homo sapiens
tttatgacacctcct

SEQ ID NO: 159215 - DNA, 15 bp, Homo sapiens
ttttatgacacctcc

SEQ ID NO: 159216 - DNA, 15 bp, Homo sapiens
gttttatgacacctc

SEQ ID NO: 159217 - DNA, 15 bp, Homo sapiens
tgttttatgacacct

SEQ ID NO: 159218 - DNA, 15 bp, Homo sapiens
gtgttttatgacacc

SEQ ID NO: 159219 - DNA, 15 bp, Homo sapiens
agtgttttatgacac

SEQ ID NO: 159220 - DNA, 15 bp, Homo sapiens
aagtgttttatgaca

SEQ ID NO: 159221 - DNA, 15 bp, Homo sapiens
caagtgttttatgac

SEQ ID NO: 159222 - DNA, 15 bp, Homo sapiens
acaagtgttttatga

SEQ ID NO: 159223 - DNA, 15 bp, Homo sapiens
aacaagtgttttatg

SEQ ID NO: 159224 - DNA, 15 bp, Homo sapiens
taacaagtgttttat

SEQ ID NO: 159225 - DNA, 15 bp, Homo sapiens
ataacaagtgtttta

SEQ ID NO: 159226 - DNA, 15 bp, Homo sapiens
cataacaagtgtttt

SEQ ID NO: 159227 - DNA, 15 bp, Homo sapiens
ccataacaagtgttt

SEQ ID NO: 159228 - DNA, 15 bp, Homo sapiens
cccataacaagtgtt

SEQ ID NO: 159229 - DNA, 15 bp, Homo sapiens
gcccataacaagtgt

SEQ ID NO: 159230 - DNA, 15 bp, Homo sapiens
ggcccataacaagtg

SEQ ID NO: 159231 - DNA, 15 bp, Homo sapiens
tggcccataacaagt

SEQ ID NO: 159232 - DNA, 15 bp, Homo sapiens
ctggcccataacaag

SEQ ID NO: 159233 - DNA, 15 bp, Homo sapiens
actggcccataacaa

SEQ ID NO: 159234 - DNA, 15 bp, Homo sapiens
cactggcccataaca

SEQ ID NO: 159235 - DNA, 15 bp, Homo sapiens
acactggcccataac

SEQ ID NO: 159236 - DNA, 15 bp, Homo sapiens
cacactggcccataa

SEQ ID NO: 159237 - DNA, 15 bp, Homo sapiens
tcacactggcccata

SEQ ID NO: 159238 - DNA, 15 bp, Homo sapiens
atcacactggcccat

SEQ ID NO: 159239 - DNA, 15 bp, Homo sapiens
catcacactggccca

SEQ ID NO: 159240 - DNA, 15 bp, Homo sapiens
ccatcacactggccc

SEQ ID NO: 159241 - DNA, 15 bp, Homo sapiens
gccatcacactggcc

SEQ ID NO: 159242 - DNA, 15 bp, Homo sapiens
agccatcacactggc

SEQ ID NO: 159243 - DNA, 15 bp, Homo sapiens
gagccatcacactgg

SEQ ID NO: 159244 - DNA, 15 bp, Homo sapiens
tgagccatcacactg

SEQ ID NO: 159245 - DNA, 15 bp, Homo sapiens
atgagccatcacact

SEQ ID NO: 159246 - DNA, 15 bp, Homo sapiens
catgagccatcacac

SEQ ID NO: 159247 - DNA, 15 bp, Homo sapiens
gcatgagccatcaca

SEQ ID NO: 159248 - DNA, 15 bp, Homo sapiens
ggcatgagccatcac

SEQ ID NO: 159249 - DNA, 15 bp, Homo sapiens
aggcatgagccatca

SEQ ID NO: 159250 - DNA, 15 bp, Homo sapiens
taggcatgagccatc

SEQ ID NO: 159251 - DNA, 15 bp, Homo sapiens
ataggcatgagccat

SEQ ID NO: 159252 - DNA, 15 bp, Homo sapiens
tataggcatgagcca

SEQ ID NO: 159253 - DNA, 15 bp, Homo sapiens
ttataggcatgagcc

SEQ ID NO: 159254 - DNA, 15 bp, Homo sapiens
attataggcatgagc

SEQ ID NO: 159255 - DNA, 15 bp, Homo sapiens
gattataggcatgag

SEQ ID NO: 159256 - DNA, 15 bp, Homo sapiens
agattataggcatga

SEQ ID NO: 159257 - DNA, 15 bp, Homo sapiens
gagattataggcatg

SEQ ID NO: 159258 - DNA, 15 bp, Homo sapiens
tgagattataggcat

SEQ ID NO: 159259 - DNA, 15 bp, Homo sapiens
ctgagattataggca

SEQ ID NO: 159260 - DNA, 15 bp, Homo sapiens
actgagattataggc

SEQ ID NO: 159261 - DNA, 15 bp, Homo sapiens
cactgagattatagg

SEQ ID NO: 159262 - DNA, 15 bp, Homo sapiens
gcactgagattatag

SEQ ID NO: 159263 - DNA, 15 bp, Homo sapiens
agcactgagattata

SEQ ID NO: 159264 - DNA, 15 bp, Homo sapiens
aagcactgagattat

SEQ ID NO: 159265 - DNA, 15 bp, Homo sapiens
aaagcactgagatta

SEQ ID NO: 159266 - DNA, 15 bp, Homo sapiens
caaagcactgagatt

SEQ ID NO: 159267 - DNA, 15 bp, Homo sapiens
tcaaagcactgagat

SEQ ID NO: 159268 - DNA, 15 bp, Homo sapiens
ctcaaagcactgaga

SEQ ID NO: 159269 - DNA, 15 bp, Homo sapiens
tctcaaagcactgag

SEQ ID NO: 159270 - DNA, 15 bp, Homo sapiens
ctctcaaagcactga

SEQ ID NO: 159271 - DNA, 15 bp, Homo sapiens
cctctcaaagcactg

SEQ ID NO: 159272 - DNA, 15 bp, Homo sapiens
gcctctcaaagcact

SEQ ID NO: 159273 - DNA, 15 bp, Homo sapiens
agcctctcaaagcac

SEQ ID NO: 159274 - DNA, 15 bp, Homo sapiens
cagcctctcaaagca

SEQ ID NO: 159275 - DNA, 15 bp, Homo sapiens
tcagcctctcaaagc

SEQ ID NO: 159276 - DNA, 15 bp, Homo sapiens
ctcagcctctcaaag

SEQ ID NO: 159277 - DNA, 15 bp, Homo sapiens
cctcagcctctcaaa

SEQ ID NO: 159278 - DNA, 15 bp, Homo sapiens
acctcagcctctcaa

SEQ ID NO: 159279 - DNA, 15 bp, Homo sapiens
cacctcagcctctca

SEQ ID NO: 159280 - DNA, 15 bp, Homo sapiens
ccacctcagcctctc

SEQ ID NO: 159281 - DNA, 15 bp, Homo sapiens
tccacctcagcctct

SEQ ID NO: 159282 - DNA, 15 bp, Homo sapiens
ctccacctcagcctc

SEQ ID NO: 159283 - DNA, 15 bp, Homo sapiens
cctccacctcagcct

SEQ ID NO: 159284 - DNA, 15 bp, Homo sapiens
tcctccacctcagcc

SEQ ID NO: 159285 - DNA, 15 bp, Homo sapiens
atcctccacctcagc

SEQ ID NO: 159286 - DNA, 15 bp, Homo sapiens
aatcctccacctcag

SEQ ID NO: 159287 - DNA, 15 bp, Homo sapiens
caatcctccacctca

SEQ ID NO: 159288 - DNA, 15 bp, Homo sapiens
gcaatcctccacctc

SEQ ID NO: 159289 - DNA, 15 bp, Homo sapiens
agcaatcctccacct

SEQ ID NO: 159290 - DNA, 15 bp, Homo sapiens
aagcaatcctccacc

SEQ ID NO: 159291 - DNA, 15 bp, Homo sapiens
caagcaatcctccac

SEQ ID NO: 159292 - DNA, 15 bp, Homo sapiens
tcaagcaatcctcca

SEQ ID NO: 159293 - DNA, 15 bp, Homo sapiens
ctcaagcaatcctcc

SEQ ID NO: 159294 - DNA, 15 bp, Homo sapiens
cctcaagcaatcctc

SEQ ID NO: 159295 - DNA, 15 bp, Homo sapiens
gcctcaagcaatcct

SEQ ID NO: 159296 - DNA, 15 bp, Homo sapiens
ggcctcaagcaatcc

SEQ ID NO: 159297 - DNA, 15 bp, Homo sapiens
tggcctcaagcaatc

SEQ ID NO: 159298 - DNA, 15 bp, Homo sapiens
ctggcctcaagcaat

SEQ ID NO: 159299 - DNA, 15 bp, Homo sapiens
cctggcctcaagcaa

SEQ ID NO: 159300 - DNA, 15 bp, Homo sapiens
tcctggcctcaagca

SEQ ID NO: 159301 - DNA, 15 bp, Homo sapiens
ttcctggcctcaagc

SEQ ID NO: 159302 - DNA, 15 bp, Homo sapiens
attcctggcctcaag

SEQ ID NO: 159303 - DNA, 15 bp, Homo sapiens
aattcctggcctcaa

SEQ ID NO: 159304 - DNA, 15 bp, Homo sapiens
aaattcctggcctca

SEQ ID NO: 159305 - DNA, 15 bp, Homo sapiens
caaattcctggcctc

SEQ ID NO: 159306 - DNA, 15 bp, Homo sapiens
tcaaattcctggcct

SEQ ID NO: 159307 - DNA, 15 bp, Homo sapiens
ctcaaattcctggcc

SEQ ID NO: 159308 - DNA, 15 bp, Homo sapiens
tctcaaattcctggc

SEQ ID NO: 159309 - DNA, 15 bp, Homo sapiens
gtctcaaattcctgg

SEQ ID NO: 159310 - DNA, 15 bp, Homo sapiens
ggtctcaaattcctg

SEQ ID NO: 159311 - DNA, 15 bp, Homo sapiens
tggtctcaaattcct

SEQ ID NO: 159312 - DNA, 15 bp, Homo sapiens
ctggtctcaaattcc

SEQ ID NO: 159313 - DNA, 15 bp, Homo sapiens
gctggtctcaaattc

SEQ ID NO: 159314 - DNA, 15 bp, Homo sapiens
ggctggtctcaaatt

SEQ ID NO: 159315 - DNA, 15 bp, Homo sapiens
aggctggtctcaaat

SEQ ID NO: 159316 - DNA, 15 bp, Homo sapiens
cccaggctggtctca

SEQ ID NO: 159317 - DNA, 15 bp, Homo sapiens
ccccaggctggtctc

SEQ ID NO: 159318 - DNA, 15 bp, Homo sapiens
gccccaggctggtct

SEQ ID NO: 159319 - DNA, 15 bp, Homo sapiens
tgccccaggctggtc

SEQ ID NO: 159320 - DNA, 15 bp, Homo sapiens
ttgccccaggctggt

SEQ ID NO: 159321 - DNA, 15 bp, Homo sapiens
gttgccccaggctgg

SEQ ID NO: 159322 - DNA, 15 bp, Homo sapiens
tgttgccccaggctg

SEQ ID NO: 159323 - DNA, 15 bp, Homo sapiens
atgttgccccaggct

SEQ ID NO: 159324 - DNA, 15 bp, Homo sapiens
tatgttgccccaggc

SEQ ID NO: 159325 - DNA, 15 bp, Homo sapiens
ctatgttgccccagg

SEQ ID NO: 159326 - DNA, 15 bp, Homo sapiens
gctatgttgccccag

SEQ ID NO: 159327 - DNA, 15 bp, Homo sapiens
tgctatgttgcccca

SEQ ID NO: 159328 - DNA, 15 bp, Homo sapiens
ttgctatgttgcccc

SEQ ID NO: 159329 - DNA, 15 bp, Homo sapiens
cttgctatgttgccc

SEQ ID NO: 159330 - DNA, 15 bp, Homo sapiens
tcttgctatgttgcc

SEQ ID NO: 159331 - DNA, 15 bp, Homo sapiens
gtcttgctatgttgc

SEQ ID NO: 159332 - DNA, 15 bp, Homo sapiens
ggtcttgctatgttg

SEQ ID NO: 159333 - DNA, 15 bp, Homo sapiens
gggtcttgctatgtt

SEQ ID NO: 159334 - DNA, 15 bp, Homo sapiens
ggggtcttgctatgt

SEQ ID NO: 159335 - DNA, 15 bp, Homo sapiens
tggggtcttgctatg

SEQ ID NO: 159336 - DNA, 15 bp, Homo sapiens
atggggtcttgctat

SEQ ID NO: 159337 - DNA, 15 bp, Homo sapiens
gatggggtcttgcta

SEQ ID NO: 159338 - DNA, 15 bp, Homo sapiens
agatggggtcttgct

SEQ ID NO: 159339 - DNA, 15 bp, Homo sapiens
gagatggggtcttgc

SEQ ID NO: 159340 - DNA, 15 bp, Homo sapiens
agagatggggtcttg

SEQ ID NO: 159341 - DNA, 15 bp, Homo sapiens
aagagatggggtctt

SEQ ID NO: 159342 - DNA, 15 bp, Homo sapiens
taagagatggggtct

SEQ ID NO: 159343 - DNA, 15 bp, Homo sapiens
ttaagagatggggtc

SEQ ID NO: 159344 - DNA, 15 bp, Homo sapiens
tttaagagatggggt

SEQ ID NO: 159345 - DNA, 15 bp, Homo sapiens
ttttaagagatgggg

SEQ ID NO: 159346 - DNA, 15 bp, Homo sapiens
tttttaagagatggg

SEQ ID NO: 159347 - DNA, 15 bp, Homo sapiens
ttttttaagagatgg

SEQ ID NO: 159348 - DNA, 15 bp, Homo sapiens
tttttttaagagatg

SEQ ID NO: 159349 - DNA, 15 bp, Homo sapiens
ttttttttaagagat

SEQ ID NO: 159350 - DNA, 15 bp, Homo sapiens
tttttttttaagaga

SEQ ID NO: 159351 - DNA, 15 bp, Homo sapiens
ttttttttttaagag

SEQ ID NO: 159352 - DNA, 15 bp, Homo sapiens
cttttttttttaaga

SEQ ID NO: 159353 - DNA, 15 bp, Homo sapiens
ccttttttttttaag

SEQ ID NO: 159354 - DNA, 15 bp, Homo sapiens
cccttttttttttaa

SEQ ID NO: 159355 - DNA, 15 bp, Homo sapiens
accctttttttttta

SEQ ID NO: 159356 - DNA, 15 bp, Homo sapiens
caccctttttttttt

SEQ ID NO: 159357 - DNA, 15 bp, Homo sapiens
ccacccttttttttt

SEQ ID NO: 159358 - DNA, 15 bp, Homo sapiens
cccaccctttttttt

SEQ ID NO: 159359 - DNA, 15 bp, Homo sapiens
ccccacccttttttt

SEQ ID NO: 159360 - DNA, 15 bp, Homo sapiens
gccccaccctttttt

SEQ ID NO: 159361 - DNA, 15 bp, Homo sapiens
cgccccacccttttt

SEQ ID NO: 159362 - DNA, 15 bp, Homo sapiens
ccgccccaccctttt

SEQ ID NO: 159363 - DNA, 15 bp, Homo sapiens
cccgccccacccttt

SEQ ID NO: 159364 - DNA, 15 bp, Homo sapiens
ccccgccccaccctt

SEQ ID NO: 159365 - DNA, 15 bp, Homo sapiens
cccccgccccaccct

SEQ ID NO: 159366 - DNA, 15 bp, Homo sapiens
ccccccgccccaccc

SEQ ID NO: 159367 - DNA, 15 bp, Homo sapiens
cccccccgccccacc

SEQ ID NO: 159368 - DNA, 15 bp, Homo sapiens
gcccccccgccccac

SEQ ID NO: 159369 - DNA, 15 bp, Homo sapiens
tgcccccccgcccca

SEQ ID NO: 159370 - DNA, 15 bp, Homo sapiens
gtgcccccccgcccc

SEQ ID NO: 159371 - DNA, 15 bp, Homo sapiens
agtgcccccccgccc

SEQ ID NO: 159372 - DNA, 15 bp, Homo sapiens
cagtgcccccccgcc

SEQ ID NO: 159373 - DNA, 15 bp, Homo sapiens
gcagtgcccccccgc

SEQ ID NO: 159374 - DNA, 15 bp, Homo sapiens
agcagtgcccccccg

SEQ ID NO: 159375 - DNA, 15 bp, Homo sapiens
cagcagtgccccccc

SEQ ID NO: 159376 - DNA, 15 bp, Homo sapiens
ccagcagtgcccccc

SEQ ID NO: 159377 - DNA, 15 bp, Homo sapiens
cccagcagtgccccc

SEQ ID NO: 159378 - DNA, 15 bp, Homo sapiens
gcccagcagtgcccc

SEQ ID NO: 159379 - DNA, 15 bp, Homo sapiens
cgcccagcagtgccc

SEQ ID NO: 159380 - DNA, 15 bp, Homo sapiens
gcgcccagcagtgcc

SEQ ID NO: 159381 - DNA, 15 bp, Homo sapiens
cgcgcccagcagtgc

SEQ ID NO: 159382 - DNA, 15 bp, Homo sapiens
ccgcgcccagcagtg

SEQ ID NO: 159383 - DNA, 15 bp, Homo sapiens
accgcgcccagcagt

SEQ ID NO: 159384 - DNA, 15 bp, Homo sapiens
caccgcgcccagcag

SEQ ID NO: 159385 - DNA, 15 bp, Homo sapiens
ccaccgcgcccagca

SEQ ID NO: 159386 - DNA, 15 bp, Homo sapiens
gccaccgcgcccagc

SEQ ID NO: 159387 - DNA, 15 bp, Homo sapiens
agccaccgcgcccag

SEQ ID NO: 159388 - DNA, 15 bp, Homo sapiens
gagccaccgcgccca

SEQ ID NO: 159389 - DNA, 15 bp, Homo sapiens
tgagccaccgcgccc

SEQ ID NO: 159390 - DNA, 15 bp, Homo sapiens
atgagccaccgcgcc

SEQ ID NO: 159391 - DNA, 15 bp, Homo sapiens
catgagccaccgcgc

SEQ ID NO: 159392 - DNA, 15 bp, Homo sapiens
gcatgagccaccgcg

SEQ ID NO: 159393 - DNA, 15 bp, Homo sapiens
ggcatgagccaccgc

SEQ ID NO: 159394 - DNA, 15 bp, Homo sapiens
aggcatgagccaccg

SEQ ID NO: 159395 - DNA, 15 bp, Homo sapiens
caggcatgagccacc

SEQ ID NO: 159396 - DNA, 15 bp, Homo sapiens
acaggcatgagccac

SEQ ID NO: 159397 - DNA, 15 bp, Homo sapiens
gattacaggcatgag

SEQ ID NO: 159398 - DNA, 15 bp, Homo sapiens
ggattacaggcatga

SEQ ID NO: 159399 - DNA, 15 bp, Homo sapiens
ttcccaaagtgctgg

SEQ ID NO: 159400 - DNA, 15 bp, Homo sapiens
cttcccaaagtgctg

SEQ ID NO: 159401 - DNA, 15 bp, Homo sapiens
gcttcccaaagtgct

SEQ ID NO: 159402 - DNA, 15 bp, Homo sapiens
ggcttcccaaagtgc

SEQ ID NO: 159403 - DNA, 15 bp, Homo sapiens
tggcttcccaaagtg

SEQ ID NO: 159404 - DNA, 15 bp, Homo sapiens
ttggcttcccaaagt

SEQ ID NO: 159405 - DNA, 15 bp, Homo sapiens
tttggcttcccaaag

SEQ ID NO: 159406 - DNA, 15 bp, Homo sapiens
ctttggcttcccaaa

SEQ ID NO: 159407 - DNA, 15 bp, Homo sapiens
gctttggcttcccaa

SEQ ID NO: 159408 - DNA, 15 bp, Homo sapiens
tgctttggcttccca

SEQ ID NO: 159409 - DNA, 15 bp, Homo sapiens
ctgctttggcttccc

SEQ ID NO: 159410 - DNA, 15 bp, Homo sapiens
cctgctttggcttcc

SEQ ID NO: 159411 - DNA, 15 bp, Homo sapiens
acctgctttggcttc

SEQ ID NO: 159412 - DNA, 15 bp, Homo sapiens
cacctgctttggctt

SEQ ID NO: 159413 - DNA, 15 bp, Homo sapiens
ccacctgctttggct

SEQ ID NO: 159414 - DNA, 15 bp, Homo sapiens
tccacctgctttggc

SEQ ID NO: 159415 - DNA, 15 bp, Homo sapiens
atccacctgctttgg

SEQ ID NO: 159416 - DNA, 15 bp, Homo sapiens
gatccacctgctttg

SEQ ID NO: 159417 - DNA, 15 bp, Homo sapiens
tgatccacctgcttt

SEQ ID NO: 159418 - DNA, 15 bp, Homo sapiens
ttgatccacctgctt

SEQ ID NO: 159419 - DNA, 15 bp, Homo sapiens
tttgatccacctgct

SEQ ID NO: 159420 - DNA, 15 bp, Homo sapiens
ttttgatccacctgc

SEQ ID NO: 159421 - DNA, 15 bp, Homo sapiens
cttttgatccacctg

SEQ ID NO: 159422 - DNA, 15 bp, Homo sapiens
ccttttgatccacct

SEQ ID NO: 159423 - DNA, 15 bp, Homo sapiens
accttttgatccacc

SEQ ID NO: 159424 - DNA, 15 bp, Homo sapiens
gaccttttgatccac

SEQ ID NO: 159425 - DNA, 15 bp, Homo sapiens
tgaccttttgatcca

SEQ ID NO: 159426 - DNA, 15 bp, Homo sapiens
ctgaccttttgatcc

SEQ ID NO: 159427 - DNA, 15 bp, Homo sapiens
cctgaccttttgatc

SEQ ID NO: 159428 - DNA, 15 bp, Homo sapiens
tcctgaccttttgat

SEQ ID NO: 159429 - DNA, 15 bp, Homo sapiens
ctcctgaccttttga

SEQ ID NO: 159430 - DNA, 15 bp, Homo sapiens
actcctgaccttttg

SEQ ID NO: 159431 - DNA, 15 bp, Homo sapiens
aactcctgacctttt

SEQ ID NO: 159432 - DNA, 15 bp, Homo sapiens
gaactcctgaccttt

SEQ ID NO: 159433 - DNA, 15 bp, Homo sapiens
cgaactcctgacctt

SEQ ID NO: 159434 - DNA, 15 bp, Homo sapiens
tcgaactcctgacct

SEQ ID NO: 159435 - DNA, 15 bp, Homo sapiens
ctcgaactcctgacc

SEQ ID NO: 159436 - DNA, 15 bp, Homo sapiens
tctcgaactcctgac

SEQ ID NO: 159437 - DNA, 15 bp, Homo sapiens
atctcgaactcctga

SEQ ID NO: 159438 - DNA, 15 bp, Homo sapiens
gatctcgaactcctg

SEQ ID NO: 159439 - DNA, 15 bp, Homo sapiens
tgatctcgaactcct

SEQ ID NO: 159440 - DNA, 15 bp, Homo sapiens
ctgatctcgaactcc

SEQ ID NO: 159441 - DNA, 15 bp, Homo sapiens
gctgatctcgaactc

SEQ ID NO: 159442 - DNA, 15 bp, Homo sapiens
ggctgatctcgaact

SEQ ID NO: 159443 - DNA, 15 bp, Homo sapiens
aggctgatctcgaac

SEQ ID NO: 159444 - DNA, 15 bp, Homo sapiens
caggctgatctcgaa

SEQ ID NO: 159445 - DNA, 15 bp, Homo sapiens
ccaggctgatctcga

SEQ ID NO: 159446 - DNA, 15 bp, Homo sapiens
gccaggctgatctcg

SEQ ID NO: 159447 - DNA, 15 bp, Homo sapiens
ggccaggctgatctc

SEQ ID NO: 159448 - DNA, 15 bp, Homo sapiens
tggccaggctgatct

SEQ ID NO: 159449 - DNA, 15 bp, Homo sapiens
ttggccaggctgatc

SEQ ID NO: 159450 - DNA, 15 bp, Homo sapiens
gttggccaggctgat

SEQ ID NO: 159451 - DNA, 15 bp, Homo sapiens
tgttggccaggctga

SEQ ID NO: 159452 - DNA, 15 bp, Homo sapiens
tggggtttcaccatg

SEQ ID NO: 159453 - DNA, 15 bp, Homo sapiens
ttggggtttcaccat

SEQ ID NO: 159454 - DNA, 15 bp, Homo sapiens
gttggggtttcacca

SEQ ID NO: 159455 - DNA, 15 bp, Homo sapiens
agttggggtttcacc

SEQ ID NO: 159456 - DNA, 15 bp, Homo sapiens
gagttggggtttcac

SEQ ID NO: 159457 - DNA, 15 bp, Homo sapiens
agagttggggtttca

SEQ ID NO: 159458 - DNA, 15 bp, Homo sapiens
tagagttggggtttc

SEQ ID NO: 159459 - DNA, 15 bp, Homo sapiens
gtagagttggggttt

SEQ ID NO: 159460 - DNA, 15 bp, Homo sapiens
agtagagttggggtt

SEQ ID NO: 159461 - DNA, 15 bp, Homo sapiens
tagtagagttggggt

SEQ ID NO: 159462 - DNA, 15 bp, Homo sapiens
ttagtagagttgggg

SEQ ID NO: 159463 - DNA, 15 bp, Homo sapiens
tttagtagagttggg

SEQ ID NO: 159464 - DNA, 15 bp, Homo sapiens
ttttagtagagttgg

SEQ ID NO: 159465 - DNA, 15 bp, Homo sapiens
tttttagtagagttg

SEQ ID NO: 159466 - DNA, 15 bp, Homo sapiens
atttttagtagagtt

SEQ ID NO: 159467 - DNA, 15 bp, Homo sapiens
tatttttagtagagt

SEQ ID NO: 159468 - DNA, 15 bp, Homo sapiens
ggctaatttttgtat

SEQ ID NO: 159469 - DNA, 15 bp, Homo sapiens
cggctaatttttgta

SEQ ID NO: 159470 - DNA, 15 bp, Homo sapiens
ccggctaatttttgt

SEQ ID NO: 159471 - DNA, 15 bp, Homo sapiens
cccggctaatttttg

SEQ ID NO: 159472 - DNA, 15 bp, Homo sapiens
gcccggctaattttt

SEQ ID NO: 159473 - DNA, 15 bp, Homo sapiens
tgcccggctaatttt

SEQ ID NO: 159474 - DNA, 15 bp, Homo sapiens
atgcccggctaattt

SEQ ID NO: 159475 - DNA, 15 bp, Homo sapiens
catgcccggctaatt

SEQ ID NO: 159476 - DNA, 15 bp, Homo sapiens
tcatgcccggctaat

SEQ ID NO: 159477 - DNA, 15 bp, Homo sapiens
atcatgcccggctaa

SEQ ID NO: 159478 - DNA, 15 bp, Homo sapiens
catcatgcccggcta

SEQ ID NO: 159479 - DNA, 15 bp, Homo sapiens
ccatcatgcccggct

SEQ ID NO: 159480 - DNA, 15 bp, Homo sapiens
gccatcatgcccggc

SEQ ID NO: 159481 - DNA, 15 bp, Homo sapiens
cgccatcatgcccgg

SEQ ID NO: 159482 - DNA, 15 bp, Homo sapiens
ccgccatcatgcccg

SEQ ID NO: 159483 - DNA, 15 bp, Homo sapiens
cccgccatcatgccc

SEQ ID NO: 159484 - DNA, 15 bp, Homo sapiens
acccgccatcatgcc

SEQ ID NO: 159485 - DNA, 15 bp, Homo sapiens
cacccgccatcatgc

SEQ ID NO: 159486 - DNA, 15 bp, Homo sapiens
gcacccgccatcatg

SEQ ID NO: 159487 - DNA, 15 bp, Homo sapiens
agcacccgccatcat

SEQ ID NO: 159488 - DNA, 15 bp, Homo sapiens
aagcacccgccatca

SEQ ID NO: 159489 - DNA, 15 bp, Homo sapiens
taagcacccgccatc

SEQ ID NO: 159490 - DNA, 15 bp, Homo sapiens
ataagcacccgccat

SEQ ID NO: 159491 - DNA, 15 bp, Homo sapiens
tataagcacccgcca

SEQ ID NO: 159492 - DNA, 15 bp, Homo sapiens
ttataagcacccgcc

SEQ ID NO: 159493 - DNA, 15 bp, Homo sapiens
attataagcacccgc

SEQ ID NO: 159494 - DNA, 15 bp, Homo sapiens
gattataagcacccg

SEQ ID NO: 159495 - DNA, 15 bp, Homo sapiens
ggattataagcaccc

SEQ ID NO: 159496 - DNA, 15 bp, Homo sapiens
gggattataagcacc

SEQ ID NO: 159497 - DNA, 15 bp, Homo sapiens
tgggattataagcac

SEQ ID NO: 159498 - DNA, 15 bp, Homo sapiens
ctgggattataagca

SEQ ID NO: 159499 - DNA, 15 bp, Homo sapiens
gctgggattataagc

SEQ ID NO: 159500 - DNA, 15 bp, Homo sapiens
agctgggattataag

SEQ ID NO: 159501 - DNA, 15 bp, Homo sapiens
tagctgggattataa

SEQ ID NO: 159502 - DNA, 15 bp, Homo sapiens
gtagctgggattata

SEQ ID NO: 159503 - DNA, 15 bp, Homo sapiens
agtagctgggattat

SEQ ID NO: 159504 - DNA, 15 bp, Homo sapiens
tctgcctcagcctcc

SEQ ID NO: 159505 - DNA, 15 bp, Homo sapiens
ttctgcctcagcctc

SEQ ID NO: 159506 - DNA, 15 bp, Homo sapiens
cttctgcctcagcct

SEQ ID NO: 159507 - DNA, 15 bp, Homo sapiens
tcttctgcctcagcc

SEQ ID NO: 159508 - DNA, 15 bp, Homo sapiens
ttcttctgcctcagc

SEQ ID NO: 159509 - DNA, 15 bp, Homo sapiens
attcttctgcctcag

SEQ ID NO: 159510 - DNA, 15 bp, Homo sapiens
aattcttctgcctca

SEQ ID NO: 159511 - DNA, 15 bp, Homo sapiens
caattcttctgcctc

SEQ ID NO: 159512 - DNA, 15 bp, Homo sapiens
gcaattcttctgcct

SEQ ID NO: 159513 - DNA, 15 bp, Homo sapiens
agcaattcttctgcc

SEQ ID NO: 159514 - DNA, 15 bp, Homo sapiens
aagcaattcttctgc

SEQ ID NO: 159515 - DNA, 15 bp, Homo sapiens
caagcaattcttctg

SEQ ID NO: 159516 - DNA, 15 bp, Homo sapiens
tcaagcaattcttct

SEQ ID NO: 159517 - DNA, 15 bp, Homo sapiens
ttcaagcaattcttc

SEQ ID NO: 159518 - DNA, 15 bp, Homo sapiens
tgggttcaagcaatt

SEQ ID NO: 159519 - DNA, 15 bp, Homo sapiens
ctgggttcaagcaat

SEQ ID NO: 159520 - DNA, 15 bp, Homo sapiens
cctgggttcaagcaa

SEQ ID NO: 159521 - DNA, 15 bp, Homo sapiens
tcctgggttcaagca

SEQ ID NO: 159522 - DNA, 15 bp, Homo sapiens
ctcctgggttcaagc

SEQ ID NO: 159523 - DNA, 15 bp, Homo sapiens
cgcctcctgggttca

SEQ ID NO: 159524 - DNA, 15 bp, Homo sapiens
ccgcctcctgggttc

SEQ ID NO: 159525 - DNA, 15 bp, Homo sapiens
tccgcctcctgggtt

SEQ ID NO: 159526 - DNA, 15 bp, Homo sapiens
ctccgcctcctgggt

SEQ ID NO: 159527 - DNA, 15 bp, Homo sapiens
cctccgcctcctggg

SEQ ID NO: 159528 - DNA, 15 bp, Homo sapiens
acctccgcctcctgg

SEQ ID NO: 159529 - DNA, 15 bp, Homo sapiens
aacctccgcctcctg

SEQ ID NO: 159530 - DNA, 15 bp, Homo sapiens
caacctccgcctcct

SEQ ID NO: 159531 - DNA, 15 bp, Homo sapiens
gcaacctccgcctcc

SEQ ID NO: 159532 - DNA, 15 bp, Homo sapiens
tgcaacctccgcctc

SEQ ID NO: 159533 - DNA, 15 bp, Homo sapiens
ctgcaacctccgcct

SEQ ID NO: 159534 - DNA, 15 bp, Homo sapiens
actgcaacctccgcc

SEQ ID NO: 159535 - DNA, 15 bp, Homo sapiens
cactgcaacctccgc

SEQ ID NO: 159536 - DNA, 15 bp, Homo sapiens
tcactgcaacctccg

SEQ ID NO: 159537 - DNA, 15 bp, Homo sapiens
ctcactgcaacctcc

SEQ ID NO: 159538 - DNA, 15 bp, Homo sapiens
tgctcactgcaacct

SEQ ID NO: 159539 - DNA, 15 bp, Homo sapiens
ctgctcactgcaacc

SEQ ID NO: 159540 - DNA, 15 bp, Homo sapiens
tctgctcactgcaac

SEQ ID NO: 159541 - DNA, 15 bp, Homo sapiens
ctctgctcactgcaa

SEQ ID NO: 159542 - DNA, 15 bp, Homo sapiens
tctctgctcactgca

SEQ ID NO: 159543 - DNA, 15 bp, Homo sapiens
atctctgctcactgc

SEQ ID NO: 159544 - DNA, 15 bp, Homo sapiens
aatctctgctcactg

SEQ ID NO: 159545 - DNA, 15 bp, Homo sapiens
caatctctgctcact

SEQ ID NO: 159546 - DNA, 15 bp, Homo sapiens
gcaatctctgctcac

SEQ ID NO: 159547 - DNA, 15 bp, Homo sapiens
tgcaatctctgctca

SEQ ID NO: 159548 - DNA, 15 bp, Homo sapiens
gtgcaatctctgctc

SEQ ID NO: 159549 - DNA, 15 bp, Homo sapiens
ggtgcaatctctgct

SEQ ID NO: 159550 - DNA, 15 bp, Homo sapiens
tggtgcaatctctgc

SEQ ID NO: 159551 - DNA, 15 bp, Homo sapiens
gtggtgcaatctctg

SEQ ID NO: 159552 - DNA, 15 bp, Homo sapiens
agtggtgcaatctct

SEQ ID NO: 159553 - DNA, 15 bp, Homo sapiens
cagtggtgcaatctc

SEQ ID NO: 159554 - DNA, 15 bp, Homo sapiens
gcagtggtgcaatct

SEQ ID NO: 159555 - DNA, 15 bp, Homo sapiens
cgctctgttgcccag

SEQ ID NO: 159556 - DNA, 15 bp, Homo sapiens
tcgctctgttgccca

SEQ ID NO: 159557 - DNA, 15 bp, Homo sapiens
ttcgctctgttgccc

SEQ ID NO: 159558 - DNA, 15 bp, Homo sapiens
tttcgctctgttgcc

SEQ ID NO: 159559 - DNA, 15 bp, Homo sapiens
gtttcgctctgttgc

SEQ ID NO: 159560 - DNA, 15 bp, Homo sapiens
agtttcgctctgttg

SEQ ID NO: 159561 - DNA, 15 bp, Homo sapiens
gagtttcgctctgtt

SEQ ID NO: 159562 - DNA, 15 bp, Homo sapiens
agagtttcgctctgt

SEQ ID NO: 159563 - DNA, 15 bp, Homo sapiens
cagagtttcgctctg

SEQ ID NO: 159564 - DNA, 15 bp, Homo sapiens
acagagtttcgctct

SEQ ID NO: 159565 - DNA, 15 bp, Homo sapiens
gacagagtttcgctc

SEQ ID NO: 159566 - DNA, 15 bp, Homo sapiens
agacagagtttcgct

SEQ ID NO: 159567 - DNA, 15 bp, Homo sapiens
gagacagagtttcgc

SEQ ID NO: 159568 - DNA, 15 bp, Homo sapiens
tgagacagagtttcg

SEQ ID NO: 159569 - DNA, 15 bp, Homo sapiens
ttgagacagagtttc

SEQ ID NO: 159570 - DNA, 15 bp, Homo sapiens
tttgagacagagttt

SEQ ID NO: 159571 - DNA, 15 bp, Homo sapiens
ttttgagacagagtt

SEQ ID NO: 159572 - DNA, 15 bp, Homo sapiens
tttttgagacagagt

SEQ ID NO: 159573 - DNA, 15 bp, Homo sapiens
atttttgagacagag

SEQ ID NO: 159574 - DNA, 15 bp, Homo sapiens
catttttgagacaga

SEQ ID NO: 159575 - DNA, 15 bp, Homo sapiens
tcatttttgagacag

SEQ ID NO: 159576 - DNA, 15 bp, Homo sapiens
ttcatttttgagaca

SEQ ID NO: 159577 - DNA, 15 bp, Homo sapiens
attcatttttgagac

SEQ ID NO: 159578 - DNA, 15 bp, Homo sapiens
aattcatttttgaga

SEQ ID NO: 159579 - DNA, 15 bp, Homo sapiens
taattcatttttgag

SEQ ID NO: 159580 - DNA, 15 bp, Homo sapiens
ttaattcatttttga

SEQ ID NO: 159581 - DNA, 15 bp, Homo sapiens
attaattcatttttg

SEQ ID NO: 159582 - DNA, 15 bp, Homo sapiens
aattaattcattttt

SEQ ID NO: 159583 - DNA, 15 bp, Homo sapiens
taattaattcatttt

SEQ ID NO: 159584 - DNA, 15 bp, Homo sapiens
ttaattaattcattt

SEQ ID NO: 159585 - DNA, 15 bp, Homo sapiens
attaattaattcatt

SEQ ID NO: 159586 - DNA, 15 bp, Homo sapiens
aattaattaattcat

SEQ ID NO: 159587 - DNA, 15 bp, Homo sapiens
taattaattaattca

SEQ ID NO: 159588 - DNA, 15 bp, Homo sapiens
ttaattaattaattc

SEQ ID NO: 159589 - DNA, 15 bp, Homo sapiens
tttaattaattaatt

SEQ ID NO: 159590 - DNA, 15 bp, Homo sapiens
ttttaattaattaat

SEQ ID NO: 159591 - DNA, 15 bp, Homo sapiens
tttttaattaattaa

SEQ ID NO: 159592 - DNA, 15 bp, Homo sapiens
ttttttaattaatta

SEQ ID NO: 159593 - DNA, 15 bp, Homo sapiens
tttttttaattaatt

SEQ ID NO: 159594 - DNA, 15 bp, Homo sapiens
ctttttttaattaat

SEQ ID NO: 159595 - DNA, 15 bp, Homo sapiens
tctttttttaattaa

SEQ ID NO: 159596 - DNA, 15 bp, Homo sapiens
ttctttttttaatta

SEQ ID NO: 159597 - DNA, 15 bp, Homo sapiens
tttctttttttaatt

SEQ ID NO: 159598 - DNA, 15 bp, Homo sapiens
ttttctttttttaat

SEQ ID NO: 159599 - DNA, 15 bp, Homo sapiens
tttttctttttttaa

SEQ ID NO: 159600 - DNA, 15 bp, Homo sapiens
ttttttcttttttta

SEQ ID NO: 159601 - DNA, 15 bp, Homo sapiens
tttttttcttttttt

SEQ ID NO: 159602 - DNA, 15 bp, Homo sapiens
ttttttttctttttt

SEQ ID NO: 159603 - DNA, 15 bp, Homo sapiens
tttttttttcttttt

SEQ ID NO: 159604 - DNA, 15 bp, Homo sapiens
ttttttttttctttt

SEQ ID NO: 159605 - DNA, 15 bp, Homo sapiens
gttttttttttcttt

SEQ ID NO: 159606 - DNA, 15 bp, Homo sapiens
tgttttttttttctt

SEQ ID NO: 159607 - DNA, 15 bp, Homo sapiens
gtgttttttttttct

SEQ ID NO: 159608 - DNA, 15 bp, Homo sapiens
agtgttttttttttc

SEQ ID NO: 159609 - DNA, 15 bp, Homo sapiens
cagtgtttttttttt

SEQ ID NO: 159610 - DNA, 15 bp, Homo sapiens
ccagtgttttttttt

SEQ ID NO: 159611 - DNA, 15 bp, Homo sapiens
cccagtgtttttttt

SEQ ID NO: 159612 - DNA, 15 bp, Homo sapiens
gcccagtgttttttt

SEQ ID NO: 159613 - DNA, 15 bp, Homo sapiens
tgcccagtgtttttt

SEQ ID NO: 159614 - DNA, 15 bp, Homo sapiens
ctgcccagtgttttt

SEQ ID NO: 159615 - DNA, 15 bp, Homo sapiens
cctgcccagtgtttt

SEQ ID NO: 159616 - DNA, 15 bp, Homo sapiens
ccctgcccagtgttt

SEQ ID NO: 159617 - DNA, 15 bp, Homo sapiens
accctgcccagtgtt

SEQ ID NO: 159618 - DNA, 15 bp, Homo sapiens
caccctgcccagtgt

SEQ ID NO: 159619 - DNA, 15 bp, Homo sapiens
ccaccctgcccagtg

SEQ ID NO: 159620 - DNA, 15 bp, Homo sapiens
accaccctgcccagt

SEQ ID NO: 159621 - DNA, 15 bp, Homo sapiens
caccaccctgcccag

SEQ ID NO: 159622 - DNA, 15 bp, Homo sapiens
acaccaccctgccca

SEQ ID NO: 159623 - DNA, 15 bp, Homo sapiens
cacaccaccctgccc

SEQ ID NO: 159624 - DNA, 15 bp, Homo sapiens
gcacaccaccctgcc

SEQ ID NO: 159625 - DNA, 15 bp, Homo sapiens
tgcacaccaccctgc

SEQ ID NO: 159626 - DNA, 15 bp, Homo sapiens
gtgcacaccaccctg

SEQ ID NO: 159627 - DNA, 15 bp, Homo sapiens
ggtgcacaccaccct

SEQ ID NO: 159628 - DNA, 15 bp, Homo sapiens
aggtgcacaccaccc

SEQ ID NO: 159629 - DNA, 15 bp, Homo sapiens
caggtgcacaccacc

SEQ ID NO: 159630 - DNA, 15 bp, Homo sapiens
acaggtgcacaccac

SEQ ID NO: 159631 - DNA, 15 bp, Homo sapiens
tacaggtgcacacca

SEQ ID NO: 159632 - DNA, 15 bp, Homo sapiens
ctacaggtgcacacc

SEQ ID NO: 159633 - DNA, 15 bp, Homo sapiens
actacaggtgcacac

SEQ ID NO: 159634 - DNA, 15 bp, Homo sapiens
gactacaggtgcaca

SEQ ID NO: 159635 - DNA, 15 bp, Homo sapiens
ggactacaggtgcac

SEQ ID NO: 159636 - DNA, 15 bp, Homo sapiens
gggactacaggtgca

SEQ ID NO: 159637 - DNA, 15 bp, Homo sapiens
tgggactacaggtgc

SEQ ID NO: 159638 - DNA, 15 bp, Homo sapiens
ttgggactacaggtg

SEQ ID NO: 159639 - DNA, 15 bp, Homo sapiens
gttgggactacaggt

SEQ ID NO: 159640 - DNA, 15 bp, Homo sapiens
agttgggactacagg

SEQ ID NO: 159641 - DNA, 15 bp, Homo sapiens
tagttgggactacag

SEQ ID NO: 159642 - DNA, 15 bp, Homo sapiens
gtagttgggactaca

SEQ ID NO: 159643 - DNA, 15 bp, Homo sapiens
agtagttgggactac

SEQ ID NO: 159644 - DNA, 15 bp, Homo sapiens
gagtagttgggacta

SEQ ID NO: 159645 - DNA, 15 bp, Homo sapiens
ggagtagttgggact

SEQ ID NO: 159646 - DNA, 15 bp, Homo sapiens
tggagtagttgggac

SEQ ID NO: 159647 - DNA, 15 bp, Homo sapiens
ctggagtagttggga

SEQ ID NO: 159648 - DNA, 15 bp, Homo sapiens
tctggagtagttggg

SEQ ID NO: 159649 - DNA, 15 bp, Homo sapiens
ctctggagtagttgg

SEQ ID NO: 159650 - DNA, 15 bp, Homo sapiens
cctctggagtagttg

SEQ ID NO: 159651 - DNA, 15 bp, Homo sapiens
gcctctggagtagtt

SEQ ID NO: 159652 - DNA, 15 bp, Homo sapiens
agcctctggagtagt

SEQ ID NO: 159653 - DNA, 15 bp, Homo sapiens
cagcctctggagtag

SEQ ID NO: 159654 - DNA, 15 bp, Homo sapiens
tcagcctctggagta

SEQ ID NO: 159655 - DNA, 15 bp, Homo sapiens
ctcagcctctggagt

SEQ ID NO: 159656 - DNA, 15 bp, Homo sapiens
cctcagcctctggag

SEQ ID NO: 159657 - DNA, 15 bp, Homo sapiens
gcctcagcctctgga

SEQ ID NO: 159658 - DNA, 15 bp, Homo sapiens
tgcctcagcctctgg

SEQ ID NO: 159659 - DNA, 15 bp, Homo sapiens
ctgcctcagcctctg

SEQ ID NO: 159660 - DNA, 15 bp, Homo sapiens
cctgcctcagcctct

SEQ ID NO: 159661 - DNA, 15 bp, Homo sapiens
cttcctgcctcagcc

SEQ ID NO: 159662 - DNA, 15 bp, Homo sapiens
ccttcctgcctcagc

SEQ ID NO: 159663 - DNA, 15 bp, Homo sapiens
tccttcctgcctcag

SEQ ID NO: 159664 - DNA, 15 bp, Homo sapiens
ctccttcctgcctca

SEQ ID NO: 159665 - DNA, 15 bp, Homo sapiens
gctccttcctgcctc

SEQ ID NO: 159666 - DNA, 15 bp, Homo sapiens
tgctccttcctgcct

SEQ ID NO: 159667 - DNA, 15 bp, Homo sapiens
gtgctccttcctgcc

SEQ ID NO: 159668 - DNA, 15 bp, Homo sapiens
agtgctccttcctgc

SEQ ID NO: 159669 - DNA, 15 bp, Homo sapiens
aagtgctccttcctg

SEQ ID NO: 159670 - DNA, 15 bp, Homo sapiens
caagtgctccttcct

SEQ ID NO: 159671 - DNA, 15 bp, Homo sapiens
tcaagtgctccttcc

SEQ ID NO: 159672 - DNA, 15 bp, Homo sapiens
ctcaagtgctccttc

SEQ ID NO: 159673 - DNA, 15 bp, Homo sapiens
gctcaagtgctcctt

SEQ ID NO: 159674 - DNA, 15 bp, Homo sapiens
ggctcaagtgctcct

SEQ ID NO: 159675 - DNA, 15 bp, Homo sapiens
gggctcaagtgctcc

SEQ ID NO: 159676 - DNA, 15 bp, Homo sapiens
tgggctcaagtgctc

SEQ ID NO: 159677 - DNA, 15 bp, Homo sapiens
ctgggctcaagtgct

SEQ ID NO: 159678 - DNA, 15 bp, Homo sapiens
cctgggctcaagtgc

SEQ ID NO: 159679 - DNA, 15 bp, Homo sapiens
tcctgggctcaagtg

SEQ ID NO: 159680 - DNA, 15 bp, Homo sapiens
ctcctgggctcaagt

SEQ ID NO: 159681 - DNA, 15 bp, Homo sapiens
cctcctgggctcaag

SEQ ID NO: 159682 - DNA, 15 bp, Homo sapiens
acaacctcctgggct

SEQ ID NO: 159683 - DNA, 15 bp, Homo sapiens
gacaacctcctgggc

SEQ ID NO: 159684 - DNA, 15 bp, Homo sapiens
agacaacctcctggg

SEQ ID NO: 159685 - DNA, 15 bp, Homo sapiens
cagacaacctcctgg

SEQ ID NO: 159686 - DNA, 15 bp, Homo sapiens
gcagacaacctcctg

SEQ ID NO: 159687 - DNA, 15 bp, Homo sapiens
tgcagacaacctcct

SEQ ID NO: 159688 - DNA, 15 bp, Homo sapiens
ctgcagacaacctcc

SEQ ID NO: 159689 - DNA, 15 bp, Homo sapiens
actgcagacaacctc

SEQ ID NO: 159690 - DNA, 15 bp, Homo sapiens
cactgcagacaacct

SEQ ID NO: 159691 - DNA, 15 bp, Homo sapiens
tcactgcagacaacc

SEQ ID NO: 159692 - DNA, 15 bp, Homo sapiens
ctcactgcagacaac

SEQ ID NO: 159693 - DNA, 15 bp, Homo sapiens
gctcactgcagacaa

SEQ ID NO: 159694 - DNA, 15 bp, Homo sapiens
agctcactgcagaca

SEQ ID NO: 159695 - DNA, 15 bp, Homo sapiens
gagctcactgcagac

SEQ ID NO: 159696 - DNA, 15 bp, Homo sapiens
agagctcactgcaga

SEQ ID NO: 159697 - DNA, 15 bp, Homo sapiens
tagagctcactgcag

SEQ ID NO: 159698 - DNA, 15 bp, Homo sapiens
gtagagctcactgca

SEQ ID NO: 159699 - DNA, 15 bp, Homo sapiens
agtagagctcactgc

SEQ ID NO: 159700 - DNA, 15 bp, Homo sapiens
gagtagagctcactg

SEQ ID NO: 159701 - DNA, 15 bp, Homo sapiens
tgagtagagctcact

SEQ ID NO: 159702 - DNA, 15 bp, Homo sapiens
atgagtagagctcac

SEQ ID NO: 159703 - DNA, 15 bp, Homo sapiens
catgagtagagctca

SEQ ID NO: 159704 - DNA, 15 bp, Homo sapiens
gcatgagtagagctc

SEQ ID NO: 159705 - DNA, 15 bp, Homo sapiens
ggcatgagtagagct

SEQ ID NO: 159706 - DNA, 15 bp, Homo sapiens
tggcatgagtagagc

SEQ ID NO: 159707 - DNA, 15 bp, Homo sapiens
gtggcatgagtagag

SEQ ID NO: 159708 - DNA, 15 bp, Homo sapiens
agtggcatgagtaga

SEQ ID NO: 159709 - DNA, 15 bp, Homo sapiens
cagtggcatgagtag

SEQ ID NO: 159710 - DNA, 15 bp, Homo sapiens
gcagtggcatgagta

SEQ ID NO: 159711 - DNA, 15 bp, Homo sapiens
tgcagtggcatgagt

SEQ ID NO: 159712 - DNA, 15 bp, Homo sapiens
gtgcagtggcatgag

SEQ ID NO: 159713 - DNA, 15 bp, Homo sapiens
agtgcagtggcatga

SEQ ID NO: 159714 - DNA, 15 bp, Homo sapiens
gagtgcagtggcatg

SEQ ID NO: 159715 - DNA, 15 bp, Homo sapiens
ggagtgcagtggcat

SEQ ID NO: 159716 - DNA, 15 bp, Homo sapiens
tggagtgcagtggca

SEQ ID NO: 159717 - DNA, 15 bp, Homo sapiens
gtcacccaggctgga

SEQ ID NO: 159718 - DNA, 15 bp, Homo sapiens
tgtcacccaggctgg

SEQ ID NO: 159719 - DNA, 15 bp, Homo sapiens
ctgtcacccaggctg

SEQ ID NO: 159720 - DNA, 15 bp, Homo sapiens
tctgtcacccaggct

SEQ ID NO: 159721 - DNA, 15 bp, Homo sapiens
ctctgtcacccaggc

SEQ ID NO: 159722 - DNA, 15 bp, Homo sapiens
gctctgtcacccagg

SEQ ID NO: 159723 - DNA, 15 bp, Homo sapiens
agctctgtcacccag

SEQ ID NO: 159724 - DNA, 15 bp, Homo sapiens
gagctctgtcaccca

SEQ ID NO: 159725 - DNA, 15 bp, Homo sapiens
tgagctctgtcaccc

SEQ ID NO: 159726 - DNA, 15 bp, Homo sapiens
ctgagctctgtcacc

SEQ ID NO: 159727 - DNA, 15 bp, Homo sapiens
actgagctctgtcac

SEQ ID NO: 159728 - DNA, 15 bp, Homo sapiens
cactgagctctgtca

SEQ ID NO: 159729 - DNA, 15 bp, Homo sapiens
ccactgagctctgtc

SEQ ID NO: 159730 - DNA, 15 bp, Homo sapiens
gccactgagctctgt

SEQ ID NO: 159731 - DNA, 15 bp, Homo sapiens
agccactgagctctg

SEQ ID NO: 159732 - DNA, 15 bp, Homo sapiens
aagccactgagctct

SEQ ID NO: 159733 - DNA, 15 bp, Homo sapiens
taagccactgagctc

SEQ ID NO: 159734 - DNA, 15 bp, Homo sapiens
gtaagccactgagct

SEQ ID NO: 159735 - DNA, 15 bp, Homo sapiens
tgtaagccactgagc

SEQ ID NO: 159736 - DNA, 15 bp, Homo sapiens
gtgtaagccactgag

SEQ ID NO: 159737 - DNA, 15 bp, Homo sapiens
ggtgtaagccactga

SEQ ID NO: 159738 - DNA, 15 bp, Homo sapiens
aggtgtaagccactg

SEQ ID NO: 159739 - DNA, 15 bp, Homo sapiens
caggtgtaagccact

SEQ ID NO: 159740 - DNA, 15 bp, Homo sapiens
acaggtgtaagccac

SEQ ID NO: 159741 - DNA, 15 bp, Homo sapiens
tacaggtgtaagcca

SEQ ID NO: 159742 - DNA, 15 bp, Homo sapiens
ttacaggtgtaagcc

SEQ ID NO: 159743 - DNA, 15 bp, Homo sapiens
attacaggtgtaagc

SEQ ID NO: 159744 - DNA, 15 bp, Homo sapiens
gattacaggtgtaag

SEQ ID NO: 159745 - DNA, 15 bp, Homo sapiens
ggattacaggtgtaa

SEQ ID NO: 159746 - DNA, 15 bp, Homo sapiens
aggattacaggtgta

SEQ ID NO: 159747 - DNA, 15 bp, Homo sapiens
taggattacaggtgt

SEQ ID NO: 159748 - DNA, 15 bp, Homo sapiens
ctaggattacaggtg

SEQ ID NO: 159749 - DNA, 15 bp, Homo sapiens
gctaggattacaggt

SEQ ID NO: 159750 - DNA, 15 bp, Homo sapiens
tgctaggattacagg

SEQ ID NO: 159751 - DNA, 15 bp, Homo sapiens
gtgctaggattacag

SEQ ID NO: 159752 - DNA, 15 bp, Homo sapiens
agtgctaggattaca

SEQ ID NO: 159753 - DNA, 15 bp, Homo sapiens
aagtgctaggattac

SEQ ID NO: 159754 - DNA, 15 bp, Homo sapiens
aaagtgctaggatta

SEQ ID NO: 159755 - DNA, 15 bp, Homo sapiens
caaagtgctaggatt

SEQ ID NO: 159756 - DNA, 15 bp, Homo sapiens
ccaaagtgctaggat

SEQ ID NO: 159757 - DNA, 15 bp, Homo sapiens
cccaaagtgctagga

SEQ ID NO: 159758 - DNA, 15 bp, Homo sapiens
tcccaaagtgctagg

SEQ ID NO: 159759 - DNA, 15 bp, Homo sapiens
ctcccaaagtgctag

SEQ ID NO: 159760 - DNA, 15 bp, Homo sapiens
cctcccaaagtgcta

SEQ ID NO: 159761 - DNA, 15 bp, Homo sapiens
agcctcccaaagtgc

SEQ ID NO: 159762 - DNA, 15 bp, Homo sapiens
tcagcctcccaaagt

SEQ ID NO: 159763 - DNA, 15 bp, Homo sapiens
ttcagcctcccaaag

SEQ ID NO: 159764 - DNA, 15 bp, Homo sapiens
cttcagcctcccaaa

SEQ ID NO: 159765 - DNA, 15 bp, Homo sapiens
gcttcagcctcccaa

SEQ ID NO: 159766 - DNA, 15 bp, Homo sapiens
tgcttcagcctccca

SEQ ID NO: 159767 - DNA, 15 bp, Homo sapiens
ctgcttcagcctccc

SEQ ID NO: 159768 - DNA, 15 bp, Homo sapiens
cctgcttcagcctcc

SEQ ID NO: 159769 - DNA, 15 bp, Homo sapiens
gcctgcttcagcctc

SEQ ID NO: 159770 - DNA, 15 bp, Homo sapiens
tgcctgcttcagcct

SEQ ID NO: 159771 - DNA, 15 bp, Homo sapiens
ctgcctgcttcagcc

SEQ ID NO: 159772 - DNA, 15 bp, Homo sapiens
tctgcctgcttcagc

SEQ ID NO: 159773 - DNA, 15 bp, Homo sapiens
atctgcctgcttcag

SEQ ID NO: 159774 - DNA, 15 bp, Homo sapiens
gatctgcctgcttca

SEQ ID NO: 159775 - DNA, 15 bp, Homo sapiens
tgatctgcctgcttc

SEQ ID NO: 159776 - DNA, 15 bp, Homo sapiens
gtgatctgcctgctt

SEQ ID NO: 159777 - DNA, 15 bp, Homo sapiens
ggtgatctgcctgct

SEQ ID NO: 159778 - DNA, 15 bp, Homo sapiens
taggtgatctgcctg

SEQ ID NO: 159779 - DNA, 15 bp, Homo sapiens
ttaggtgatctgcct

SEQ ID NO: 159780 - DNA, 15 bp, Homo sapiens
cttaggtgatctgcc

SEQ ID NO: 159781 - DNA, 15 bp, Homo sapiens
tcttaggtgatctgc

SEQ ID NO: 159782 - DNA, 15 bp, Homo sapiens
atcttaggtgatctg

SEQ ID NO: 159783 - DNA, 15 bp, Homo sapiens
gatcttaggtgatct

SEQ ID NO: 159784 - DNA, 15 bp, Homo sapiens
tgatcttaggtgatc

SEQ ID NO: 159785 - DNA, 15 bp, Homo sapiens
ctgatcttaggtgat

SEQ ID NO: 159786 - DNA, 15 bp, Homo sapiens
cctgatcttaggtga

SEQ ID NO: 159787 - DNA, 15 bp, Homo sapiens
tcctgatcttaggtg

SEQ ID NO: 159788 - DNA, 15 bp, Homo sapiens
ctcctgatcttaggt

SEQ ID NO: 159789 - DNA, 15 bp, Homo sapiens
actcctgatcttagg

SEQ ID NO: 159790 - DNA, 15 bp, Homo sapiens
aactcctgatcttag

SEQ ID NO: 159791 - DNA, 15 bp, Homo sapiens
gaactcctgatctta

SEQ ID NO: 159792 - DNA, 15 bp, Homo sapiens
cgaactcctgatctt

SEQ ID NO: 159793 - DNA, 15 bp, Homo sapiens
tcgaactcctgatct

SEQ ID NO: 159794 - DNA, 15 bp, Homo sapiens
ctcgaactcctgatc

SEQ ID NO: 159795 - DNA, 15 bp, Homo sapiens
tctcgaactcctgat

SEQ ID NO: 159796 - DNA, 15 bp, Homo sapiens
gtctcgaactcctga

SEQ ID NO: 159797 - DNA, 15 bp, Homo sapiens
ggtctcgaactcctg

SEQ ID NO: 159798 - DNA, 15 bp, Homo sapiens
cggtctcgaactcct

SEQ ID NO: 159799 - DNA, 15 bp, Homo sapiens
ccggtctcgaactcc

SEQ ID NO: 159800 - DNA, 15 bp, Homo sapiens
gccggtctcgaactc

SEQ ID NO: 159801 - DNA, 15 bp, Homo sapiens
agccggtctcgaact

SEQ ID NO: 159802 - DNA, 15 bp, Homo sapiens
cagccggtctcgaac

SEQ ID NO: 159803 - DNA, 15 bp, Homo sapiens
ccagccggtctcgaa

SEQ ID NO: 159804 - DNA, 15 bp, Homo sapiens
gccagccggtctcga

SEQ ID NO: 159805 - DNA, 15 bp, Homo sapiens
ggccagccggtctcg

SEQ ID NO: 159806 - DNA, 15 bp, Homo sapiens
tggccagccggtctc

SEQ ID NO: 159807 - DNA, 15 bp, Homo sapiens
ttggccagccggtct

SEQ ID NO: 159808 - DNA, 15 bp, Homo sapiens
gttggccagccggtc

SEQ ID NO: 159809 - DNA, 15 bp, Homo sapiens
tgttggccagccggt

SEQ ID NO: 159810 - DNA, 15 bp, Homo sapiens
atgttggccagccgg

SEQ ID NO: 159811 - DNA, 15 bp, Homo sapiens
catgttggccagccg

SEQ ID NO: 159812 - DNA, 15 bp, Homo sapiens
tcatgttggccagcc

SEQ ID NO: 159813 - DNA, 15 bp, Homo sapiens
atcatgttggccagc

SEQ ID NO: 159814 - DNA, 15 bp, Homo sapiens
tatcatgttggccag

SEQ ID NO: 159815 - DNA, 15 bp, Homo sapiens
ttatcatgttggcca

SEQ ID NO: 159816 - DNA, 15 bp, Homo sapiens
tttatcatgttggcc

SEQ ID NO: 159817 - DNA, 15 bp, Homo sapiens
ttttatcatgttggc

SEQ ID NO: 159818 - DNA, 15 bp, Homo sapiens
gttttatcatgttgg

SEQ ID NO: 159819 - DNA, 15 bp, Homo sapiens
ggttttatcatgttg

SEQ ID NO: 159820 - DNA, 15 bp, Homo sapiens
gggttttatcatgtt

SEQ ID NO: 159821 - DNA, 15 bp, Homo sapiens
ggggttttatcatgt

SEQ ID NO: 159822 - DNA, 15 bp, Homo sapiens
cggggttttatcatg

SEQ ID NO: 159823 - DNA, 15 bp, Homo sapiens
acggggttttatcat

SEQ ID NO: 159824 - DNA, 15 bp, Homo sapiens
gacggggttttatca

SEQ ID NO: 159825 - DNA, 15 bp, Homo sapiens
agacggggttttatc

SEQ ID NO: 159826 - DNA, 15 bp, Homo sapiens
aagacggggttttat

SEQ ID NO: 159827 - DNA, 15 bp, Homo sapiens
aaagacggggtttta

SEQ ID NO: 159828 - DNA, 15 bp, Homo sapiens
taaagacggggtttt

SEQ ID NO: 159829 - DNA, 15 bp, Homo sapiens
gtaaagacggggttt

SEQ ID NO: 159830 - DNA, 15 bp, Homo sapiens
agtaaagacggggtt

SEQ ID NO: 159831 - DNA, 15 bp, Homo sapiens
tagtaaagacggggt

SEQ ID NO: 159832 - DNA, 15 bp, Homo sapiens
ttagtaaagacgggg

SEQ ID NO: 159833 - DNA, 15 bp, Homo sapiens
tttagtaaagacggg

SEQ ID NO: 159834 - DNA, 15 bp, Homo sapiens
ttttagtaaagacgg

SEQ ID NO: 159835 - DNA, 15 bp, Homo sapiens
tttttagtaaagacg

SEQ ID NO: 159836 - DNA, 15 bp, Homo sapiens
atttttagtaaagac

SEQ ID NO: 159837 - DNA, 15 bp, Homo sapiens
tatttttagtaaaga

SEQ ID NO: 159838 - DNA, 15 bp, Homo sapiens
ttatttttagtaaag

SEQ ID NO: 159839 - DNA, 15 bp, Homo sapiens
tttatttttagtaaa

SEQ ID NO: 159840 - DNA, 15 bp, Homo sapiens
ttttatttttagtaa

SEQ ID NO: 159841 - DNA, 15 bp, Homo sapiens
attttatttttagta

SEQ ID NO: 159842 - DNA, 15 bp, Homo sapiens
tattttatttttagt

SEQ ID NO: 159843 - DNA, 15 bp, Homo sapiens
ttattttatttttag

SEQ ID NO: 159844 - DNA, 15 bp, Homo sapiens
tttattttattttta

SEQ ID NO: 159845 - DNA, 15 bp, Homo sapiens
ttttattttattttt

SEQ ID NO: 159846 - DNA, 15 bp, Homo sapiens
attttattttatttt

SEQ ID NO: 159847 - DNA, 15 bp, Homo sapiens
tattttattttattt

SEQ ID NO: 159848 - DNA, 15 bp, Homo sapiens
ttattttattttatt

SEQ ID NO: 159849 - DNA, 15 bp, Homo sapiens
tttattttattttat

SEQ ID NO: 159850 - DNA, 15 bp, Homo sapiens
ttttattttatttta

SEQ ID NO: 159851 - DNA, 15 bp, Homo sapiens
tttttattttatttt

SEQ ID NO: 159852 - DNA, 15 bp, Homo sapiens
ttttttattttattt

SEQ ID NO: 159853 - DNA, 15 bp, Homo sapiens
attttttattttatt

SEQ ID NO: 159854 - DNA, 15 bp, Homo sapiens
tattttttattttat

SEQ ID NO: 159855 - DNA, 15 bp, Homo sapiens
atattttttatttta

SEQ ID NO: 159856 - DNA, 15 bp, Homo sapiens
tatattttttatttt

SEQ ID NO: 159857 - DNA, 15 bp, Homo sapiens
atatattttttattt

SEQ ID NO: 159858 - DNA, 15 bp, Homo sapiens
tatatattttttatt

SEQ ID NO: 159859 - DNA, 15 bp, Homo sapiens
atatatattttttat

SEQ ID NO: 159860 - DNA, 15 bp, Homo sapiens
tatatatatttttta

SEQ ID NO: 159861 - DNA, 15 bp, Homo sapiens
ttatatatatttttt

SEQ ID NO: 159862 - DNA, 15 bp, Homo sapiens
tttatatatattttt

SEQ ID NO: 159863 - DNA, 15 bp, Homo sapiens
ttttatatatatttt

SEQ ID NO: 159864 - DNA, 15 bp, Homo sapiens
tttttatatatattt

SEQ ID NO: 159865 - DNA, 15 bp, Homo sapiens
atttttatatatatt

SEQ ID NO: 159866 - DNA, 15 bp, Homo sapiens
aatttttatatatat

SEQ ID NO: 159867 - DNA, 15 bp, Homo sapiens
taatttttatatata

SEQ ID NO: 159868 - DNA, 15 bp, Homo sapiens
ctaatttttatatat

SEQ ID NO: 159869 - DNA, 15 bp, Homo sapiens
gctaatttttatata

SEQ ID NO: 159870 - DNA, 15 bp, Homo sapiens
agctaatttttatat

SEQ ID NO: 159871 - DNA, 15 bp, Homo sapiens
cagctaatttttata

SEQ ID NO: 159872 - DNA, 15 bp, Homo sapiens
ccagctaatttttat

SEQ ID NO: 159873 - DNA, 15 bp, Homo sapiens
cccagctaattttta

SEQ ID NO: 159874 - DNA, 15 bp, Homo sapiens
ccacacccagctaat

SEQ ID NO: 159875 - DNA, 15 bp, Homo sapiens
accacacccagctaa

SEQ ID NO: 159876 - DNA, 15 bp, Homo sapiens
caccacacccagcta

SEQ ID NO: 159877 - DNA, 15 bp, Homo sapiens
ccaccacacccagct

SEQ ID NO: 159878 - DNA, 15 bp, Homo sapiens
gccaccacacccagc

SEQ ID NO: 159879 - DNA, 15 bp, Homo sapiens
tgccaccacacccag

SEQ ID NO: 159880 - DNA, 15 bp, Homo sapiens
gtgccaccacaccca

SEQ ID NO: 159881 - DNA, 15 bp, Homo sapiens
tgtgccaccacaccc

SEQ ID NO: 159882 - DNA, 15 bp, Homo sapiens
atgtgccaccacacc

SEQ ID NO: 159883 - DNA, 15 bp, Homo sapiens
catgtgccaccacac

SEQ ID NO: 159884 - DNA, 15 bp, Homo sapiens
gcatgtgccaccaca

SEQ ID NO: 159885 - DNA, 15 bp, Homo sapiens
taggcatgtgccacc

SEQ ID NO: 159886 - DNA, 15 bp, Homo sapiens
ataggcatgtgccac

SEQ ID NO: 159887 - DNA, 15 bp, Homo sapiens
tataggcatgtgcca

SEQ ID NO: 159888 - DNA, 15 bp, Homo sapiens
ttataggcatgtgcc

SEQ ID NO: 159889 - DNA, 15 bp, Homo sapiens
attataggcatgtgc

SEQ ID NO: 159890 - DNA, 15 bp, Homo sapiens
gattataggcatgtg

SEQ ID NO: 159891 - DNA, 15 bp, Homo sapiens
ggattataggcatgt

SEQ ID NO: 159892 - DNA, 15 bp, Homo sapiens
gggattataggcatg

SEQ ID NO: 159893 - DNA, 15 bp, Homo sapiens
tgggattataggcat

SEQ ID NO: 159894 - DNA, 15 bp, Homo sapiens
ctgggattataggca

SEQ ID NO: 159895 - DNA, 15 bp, Homo sapiens
gctgggattataggc

SEQ ID NO: 159896 - DNA, 15 bp, Homo sapiens
agctgggattatagg

SEQ ID NO: 159897 - DNA, 15 bp, Homo sapiens
cagctgggattatag

SEQ ID NO: 159898 - DNA, 15 bp, Homo sapiens
gcagctgggattata

SEQ ID NO: 159899 - DNA, 15 bp, Homo sapiens
agcagctgggattat

SEQ ID NO: 159900 - DNA, 15 bp, Homo sapiens
aagcagctgggatta

SEQ ID NO: 159901 - DNA, 15 bp, Homo sapiens
caagcagctgggatt

SEQ ID NO: 159902 - DNA, 15 bp, Homo sapiens
ccaagcagctgggat

SEQ ID NO: 159903 - DNA, 15 bp, Homo sapiens
cccaagcagctggga

SEQ ID NO: 159904 - DNA, 15 bp, Homo sapiens
tcccaagcagctggg

SEQ ID NO: 159905 - DNA, 15 bp, Homo sapiens
ctcccaagcagctgg

SEQ ID NO: 159906 - DNA, 15 bp, Homo sapiens
cctcccaagcagctg

SEQ ID NO: 159907 - DNA, 15 bp, Homo sapiens
gcctcccaagcagct

SEQ ID NO: 159908 - DNA, 15 bp, Homo sapiens
agcctcccaagcagc

SEQ ID NO: 159909 - DNA, 15 bp, Homo sapiens
cagcctcccaagcag

SEQ ID NO: 159910 - DNA, 15 bp, Homo sapiens
tcagcctcccaagca

SEQ ID NO: 159911 - DNA, 15 bp, Homo sapiens
ctcagcctcccaagc

SEQ ID NO: 159912 - DNA, 15 bp, Homo sapiens
cctcagcctcccaag

SEQ ID NO: 159913 - DNA, 15 bp, Homo sapiens
tcctcagcctcccaa

SEQ ID NO: 159914 - DNA, 15 bp, Homo sapiens
ttcctcagcctccca

SEQ ID NO: 159915 - DNA, 15 bp, Homo sapiens
gttcctcagcctccc

SEQ ID NO: 159916 - DNA, 15 bp, Homo sapiens
tgttcctcagcctcc

SEQ ID NO: 159917 - DNA, 15 bp, Homo sapiens
ttgttcctcagcctc

SEQ ID NO: 159918 - DNA, 15 bp, Homo sapiens
cttgttcctcagcct

SEQ ID NO: 159919 - DNA, 15 bp, Homo sapiens
tcttgttcctcagcc

SEQ ID NO: 159920 - DNA, 15 bp, Homo sapiens
ttcttgttcctcagc

SEQ ID NO: 159921 - DNA, 15 bp, Homo sapiens
attcttgttcctcag

SEQ ID NO: 159922 - DNA, 15 bp, Homo sapiens
cattcttgttcctca

SEQ ID NO: 159923 - DNA, 15 bp, Homo sapiens
ccattcttgttcctc

SEQ ID NO: 159924 - DNA, 15 bp, Homo sapiens
gccattcttgttcct

SEQ ID NO: 159925 - DNA, 15 bp, Homo sapiens
agccattcttgttcc

SEQ ID NO: 159926 - DNA, 15 bp, Homo sapiens
aagccattcttgttc

SEQ ID NO: 159927 - DNA, 15 bp, Homo sapiens
caagccattcttgtt

SEQ ID NO: 159928 - DNA, 15 bp, Homo sapiens
tcaagccattcttgt

SEQ ID NO: 159929 - DNA, 15 bp, Homo sapiens
ttcaagccattcttg

SEQ ID NO: 159930 - DNA, 15 bp, Homo sapiens
gttcaagccattctt

SEQ ID NO: 159931 - DNA, 15 bp, Homo sapiens
ggttcaagccattct

SEQ ID NO: 159932 - DNA, 15 bp, Homo sapiens
gggttcaagccattc

SEQ ID NO: 159933 - DNA, 15 bp, Homo sapiens
cgggttcaagccatt

SEQ ID NO: 159934 - DNA, 15 bp, Homo sapiens
ccgggttcaagccat

SEQ ID NO: 159935 - DNA, 15 bp, Homo sapiens
cccgggttcaagcca

SEQ ID NO: 159936 - DNA, 15 bp, Homo sapiens
tcccgggttcaagcc

SEQ ID NO: 159937 - DNA, 15 bp, Homo sapiens
tgcctcccgggttca

SEQ ID NO: 159938 - DNA, 15 bp, Homo sapiens
ctgcctcccgggttc

SEQ ID NO: 159939 - DNA, 15 bp, Homo sapiens
tctgcctcccgggtt

SEQ ID NO: 159940 - DNA, 15 bp, Homo sapiens
ctctgcctcccgggt

SEQ ID NO: 159941 - DNA, 15 bp, Homo sapiens
cctctgcctcccggg

SEQ ID NO: 159942 - DNA, 15 bp, Homo sapiens
acctctgcctcccgg

SEQ ID NO: 159943 - DNA, 15 bp, Homo sapiens
cacctctgcctcccg

SEQ ID NO: 159944 - DNA, 15 bp, Homo sapiens
ccacctctgcctccc

SEQ ID NO: 159945 - DNA, 15 bp, Homo sapiens
gccacctctgcctcc

SEQ ID NO: 159946 - DNA, 15 bp, Homo sapiens
tgccacctctgcctc

SEQ ID NO: 159947 - DNA, 15 bp, Homo sapiens
ctgccacctctgcct

SEQ ID NO: 159948 - DNA, 15 bp, Homo sapiens
actgccacctctgcc

SEQ ID NO: 159949 - DNA, 15 bp, Homo sapiens
cactgccacctctgc

SEQ ID NO: 159950 - DNA, 15 bp, Homo sapiens
tcactgccacctctg

SEQ ID NO: 159951 - DNA, 15 bp, Homo sapiens
ctcactgccacctct

SEQ ID NO: 159952 - DNA, 15 bp, Homo sapiens
gctcactgccacctc

SEQ ID NO: 159953 - DNA, 15 bp, Homo sapiens
agctcactgccacct

SEQ ID NO: 159954 - DNA, 15 bp, Homo sapiens
ggagcagcccccagc

SEQ ID NO: 159955 - DNA, 15 bp, Homo sapiens
gggagcagcccccag

SEQ ID NO: 159956 - DNA, 15 bp, Homo sapiens
tgggagcagccccca

SEQ ID NO: 159957 - DNA, 15 bp, Homo sapiens
gtgggagcagccccc

SEQ ID NO: 159958 - DNA, 15 bp, Homo sapiens
ggtgggagcagcccc

SEQ ID NO: 159959 - DNA, 15 bp, Homo sapiens
aggtgggagcagccc

SEQ ID NO: 159960 - DNA, 15 bp, Homo sapiens
caggtgggagcagcc

SEQ ID NO: 159961 - DNA, 15 bp, Homo sapiens
tcaggtgggagcagc

SEQ ID NO: 159962 - DNA, 15 bp, Homo sapiens
ttcaggtgggagcag

SEQ ID NO: 159963 - DNA, 15 bp, Homo sapiens
cttcaggtgggagca

SEQ ID NO: 159964 - DNA, 15 bp, Homo sapiens
ccttcaggtgggagc

SEQ ID NO: 159965 - DNA, 15 bp, Homo sapiens
gccttcaggtgggag

SEQ ID NO: 159966 - DNA, 15 bp, Homo sapiens
ggccttcaggtggga

SEQ ID NO: 159967 - DNA, 15 bp, Homo sapiens
gggccttcaggtggg

SEQ ID NO: 159968 - DNA, 15 bp, Homo sapiens
ggggccttcaggtgg

SEQ ID NO: 159969 - DNA, 15 bp, Homo sapiens
gggggccttcaggtg

SEQ ID NO: 159970 - DNA, 15 bp, Homo sapiens
tgggggccttcaggt

SEQ ID NO: 159971 - DNA, 15 bp, Homo sapiens
atgggggccttcagg

SEQ ID NO: 159972 - DNA, 15 bp, Homo sapiens
gatgggggccttcag

SEQ ID NO: 159973 - DNA, 15 bp, Homo sapiens
ggatgggggccttca

SEQ ID NO: 159974 - DNA, 15 bp, Homo sapiens
gggatgggggccttc

SEQ ID NO: 159975 - DNA, 15 bp, Homo sapiens
tgggatgggggcctt

SEQ ID NO: 159976 - DNA, 15 bp, Homo sapiens
gtgggatgggggcct

SEQ ID NO: 159977 - DNA, 15 bp, Homo sapiens
tgtgggatgggggcc

SEQ ID NO: 159978 - DNA, 15 bp, Homo sapiens
ctgtgggatgggggc

SEQ ID NO: 159979 - DNA, 15 bp, Homo sapiens
cctgtgggatggggg

SEQ ID NO: 159980 - DNA, 15 bp, Homo sapiens
gcctgtgggatgggg

SEQ ID NO: 159981 - DNA, 15 bp, Homo sapiens
ggcctgtgggatggg

SEQ ID NO: 159982 - DNA, 15 bp, Homo sapiens
aggcctgtgggatgg

SEQ ID NO: 159983 - DNA, 15 bp, Homo sapiens
aaggcctgtgggatg

SEQ ID NO: 159984 - DNA, 15 bp, Homo sapiens
gaaggcctgtgggat

SEQ ID NO: 159985 - DNA, 15 bp, Homo sapiens
tgaaggcctgtggga

SEQ ID NO: 159986 - DNA, 15 bp, Homo sapiens
ctgaaggcctgtggg

SEQ ID NO: 159987 - DNA, 15 bp, Homo sapiens
gctgaaggcctgtgg

SEQ ID NO: 159988 - DNA, 15 bp, Homo sapiens
agctgaaggcctgtg

SEQ ID NO: 159989 - DNA, 15 bp, Homo sapiens
cagctgaaggcctgt

SEQ ID NO: 159990 - DNA, 15 bp, Homo sapiens
acagctgaaggcctg

SEQ ID NO: 159991 - DNA, 15 bp, Homo sapiens
tacagctgaaggcct

SEQ ID NO: 159992 - DNA, 15 bp, Homo sapiens
atacagctgaaggcc

SEQ ID NO: 159993 - DNA, 15 bp, Homo sapiens
gatacagctgaaggc

SEQ ID NO: 159994 - DNA, 15 bp, Homo sapiens
cgatacagctgaagg

SEQ ID NO: 159995 - DNA, 15 bp, Homo sapiens
tcgatacagctgaag

SEQ ID NO: 159996 - DNA, 15 bp, Homo sapiens
gtcgatacagctgaa

SEQ ID NO: 159997 - DNA, 15 bp, Homo sapiens
ggtcgatacagctga

SEQ ID NO: 159998 - DNA, 15 bp, Homo sapiens
tggtcgatacagctg

SEQ ID NO: 159999 - DNA, 15 bp, Homo sapiens
ctggtcgatacagct

SEQ ID NO: 160000 - DNA, 15 bp, Homo sapiens
tctggtcgatacagc

SEQ ID NO: 160001 - DNA, 15 bp, Homo sapiens
ttctggtcgatacag

SEQ ID NO: 160002 - DNA, 15 bp, Homo sapiens
attctggtcgataca

SEQ ID NO: 160003 - DNA, 15 bp, Homo sapiens
gattctggtcgatac

SEQ ID NO: 160004 - DNA, 15 bp, Homo sapiens
cgattctggtcgata

SEQ ID NO: 160005 - DNA, 15 bp, Homo sapiens
acgattctggtcgat

SEQ ID NO: 160006 - DNA, 15 bp, Homo sapiens
cacgattctggtcga

SEQ ID NO: 160007 - DNA, 15 bp, Homo sapiens
tcacgattctggtcg

SEQ ID NO: 160008 - DNA, 15 bp, Homo sapiens
atcacgattctggtc

SEQ ID NO: 160009 - DNA, 15 bp, Homo sapiens
catcacgattctggt

SEQ ID NO: 160010 - DNA, 15 bp, Homo sapiens
ccatcacgattctgg

SEQ ID NO: 160011 - DNA, 15 bp, Homo sapiens
gccatcacgattctg

SEQ ID NO: 160012 - DNA, 15 bp, Homo sapiens
tgccatcacgattct

SEQ ID NO: 160013 - DNA, 15 bp, Homo sapiens
atgccatcacgattc

SEQ ID NO: 160014 - DNA, 15 bp, Homo sapiens
gatgccatcacgatt

SEQ ID NO: 160015 - DNA, 15 bp, Homo sapiens
tgatgccatcacgat

SEQ ID NO: 160016 - DNA, 15 bp, Homo sapiens
atgatgccatcacga

SEQ ID NO: 160017 - DNA, 15 bp, Homo sapiens
gatgatgccatcacg

SEQ ID NO: 160018 - DNA, 15 bp, Homo sapiens
agatgatgccatcac

SEQ ID NO: 160019 - DNA, 15 bp, Homo sapiens
cagatgatgccatca

SEQ ID NO: 160020 - DNA, 15 bp, Homo sapiens
gcagatgatgccatc

SEQ ID NO: 160021 - DNA, 15 bp, Homo sapiens
tgcagatgatgccat

SEQ ID NO: 160022 - DNA, 15 bp, Homo sapiens
ttgcagatgatgcca

SEQ ID NO: 160023 - DNA, 15 bp, Homo sapiens
cttgcagatgatgcc

SEQ ID NO: 160024 - DNA, 15 bp, Homo sapiens
ccttgcagatgatgc

SEQ ID NO: 160025 - DNA, 15 bp, Homo sapiens
gccttgcagatgatg

SEQ ID NO: 160026 - DNA, 15 bp, Homo sapiens
tgccttgcagatgat

SEQ ID NO: 160027 - DNA, 15 bp, Homo sapiens
ctgccttgcagatga

SEQ ID NO: 160028 - DNA, 15 bp, Homo sapiens
tctgccttgcagatg

SEQ ID NO: 160029 - DNA, 15 bp, Homo sapiens
gtctgccttgcagat

SEQ ID NO: 160030 - DNA, 15 bp, Homo sapiens
ggtctgccttgcaga

SEQ ID NO: 160031 - DNA, 15 bp, Homo sapiens
aggtctgccttgcag

SEQ ID NO: 160032 - DNA, 15 bp, Homo sapiens
caggtctgccttgca

SEQ ID NO: 160033 - DNA, 15 bp, Homo sapiens
tcaggtctgccttgc

SEQ ID NO: 160034 - DNA, 15 bp, Homo sapiens
ctcaggtctgccttg

SEQ ID NO: 160035 - DNA, 15 bp, Homo sapiens
cctcaggtctgcctt

SEQ ID NO: 160036 - DNA, 15 bp, Homo sapiens
ccctcaggtctgcct

SEQ ID NO: 160037 - DNA, 15 bp, Homo sapiens
tccctcaggtctgcc

SEQ ID NO: 160038 - DNA, 15 bp, Homo sapiens
ctccctcaggtctgc

SEQ ID NO: 160039 - DNA, 15 bp, Homo sapiens
tctccctcaggtctg

SEQ ID NO: 160040 - DNA, 15 bp, Homo sapiens
gtctccctcaggtct

SEQ ID NO: 160041 - DNA, 15 bp, Homo sapiens
ggtctccctcaggtc

SEQ ID NO: 160042 - DNA, 15 bp, Homo sapiens
aggtctccctcaggt

SEQ ID NO: 160043 - DNA, 15 bp, Homo sapiens
taggtctccctcagg

SEQ ID NO: 160044 - DNA, 15 bp, Homo sapiens
gtaggtctccctcag

SEQ ID NO: 160045 - DNA, 15 bp, Homo sapiens
agtaggtctccctca

SEQ ID NO: 160046 - DNA, 15 bp, Homo sapiens
gagtaggtctccctc

SEQ ID NO: 160047 - DNA, 15 bp, Homo sapiens
ggagtaggtctccct

SEQ ID NO: 160048 - DNA, 15 bp, Homo sapiens
gggagtaggtctccc

SEQ ID NO: 160049 - DNA, 15 bp, Homo sapiens
tgggagtaggtctcc

SEQ ID NO: 160050 - DNA, 15 bp, Homo sapiens
ctgggagtaggtctc

SEQ ID NO: 160051 - DNA, 15 bp, Homo sapiens
gctgggagtaggtct

SEQ ID NO: 160052 - DNA, 15 bp, Homo sapiens
agctgggagtaggtc

SEQ ID NO: 160053 - DNA, 15 bp, Homo sapiens
cagctgggagtaggt

SEQ ID NO: 160054 - DNA, 15 bp, Homo sapiens
ccagctgggagtagg

SEQ ID NO: 160055 - DNA, 15 bp, Homo sapiens
cccagctgggagtag

SEQ ID NO: 160056 - DNA, 15 bp, Homo sapiens
acccagctgggagta

SEQ ID NO: 160057 - DNA, 15 bp, Homo sapiens
cacccagctgggagt

SEQ ID NO: 160058 - DNA, 15 bp, Homo sapiens
gcacccagctgggag

SEQ ID NO: 160059 - DNA, 15 bp, Homo sapiens
cgcacccagctggga

SEQ ID NO: 160060 - DNA, 15 bp, Homo sapiens
acgcacccagctggg

SEQ ID NO: 160061 - DNA, 15 bp, Homo sapiens
cacgcacccagctgg

SEQ ID NO: 160062 - DNA, 15 bp, Homo sapiens
gcacgcacccagctg

SEQ ID NO: 160063 - DNA, 15 bp, Homo sapiens
tgcacgcacccagct

SEQ ID NO: 160064 - DNA, 15 bp, Homo sapiens
gtgcacgcacccagc

SEQ ID NO: 160065 - DNA, 15 bp, Homo sapiens
ggtgcacgcacccag

SEQ ID NO: 160066 - DNA, 15 bp, Homo sapiens
gggtgcacgcaccca

SEQ ID NO: 160067 - DNA, 15 bp, Homo sapiens
tgggtgcacgcaccc

SEQ ID NO: 160068 - DNA, 15 bp, Homo sapiens
gtgggtgcacgcacc

SEQ ID NO: 160069 - DNA, 15 bp, Homo sapiens
ggtgggtgcacgcac

SEQ ID NO: 160070 - DNA, 15 bp, Homo sapiens
aggtgggtgcacgca

SEQ ID NO: 160071 - DNA, 15 bp, Homo sapiens
gaggtgggtgcacgc

SEQ ID NO: 160072 - DNA, 15 bp, Homo sapiens
ggaggtgggtgcacg

SEQ ID NO: 160073 - DNA, 15 bp, Homo sapiens
gggaggtgggtgcac

SEQ ID NO: 160074 - DNA, 15 bp, Homo sapiens
tgggaggtgggtgca

SEQ ID NO: 160075 - DNA, 15 bp, Homo sapiens
gtgggaggtgggtgc

SEQ ID NO: 160076 - DNA, 15 bp, Homo sapiens
ggtgggaggtgggtg

SEQ ID NO: 160077 - DNA, 15 bp, Homo sapiens
gggtgggaggtgggt

SEQ ID NO: 160078 - DNA, 15 bp, Homo sapiens
agggtgggaggtggg

SEQ ID NO: 160079 - DNA, 15 bp, Homo sapiens
cagggtgggaggtgg

SEQ ID NO: 160080 - DNA, 15 bp, Homo sapiens
gcagggtgggaggtg

SEQ ID NO: 160081 - DNA, 15 bp, Homo sapiens
cgcagggtgggaggt

SEQ ID NO: 160082 - DNA, 15 bp, Homo sapiens
gcgcagggtgggagg

SEQ ID NO: 160083 - DNA, 15 bp, Homo sapiens
tgcgcagggtgggag

SEQ ID NO: 160084 - DNA, 15 bp, Homo sapiens
gtgcgcagggtggga

SEQ ID NO: 160085 - DNA, 15 bp, Homo sapiens
agtgcgcagggtggg

SEQ ID NO: 160086 - DNA, 15 bp, Homo sapiens
cagtgcgcagggtgg

SEQ ID NO: 160087 - DNA, 15 bp, Homo sapiens
ccagtgcgcagggtg

SEQ ID NO: 160088 - DNA, 15 bp, Homo sapiens
cccagtgcgcagggt

SEQ ID NO: 160089 - DNA, 15 bp, Homo sapiens
ccccagtgcgcaggg

SEQ ID NO: 160090 - DNA, 15 bp, Homo sapiens
accccagtgcgcagg

SEQ ID NO: 160091 - DNA, 15 bp, Homo sapiens
gaccccagtgcgcag

SEQ ID NO: 160092 - DNA, 15 bp, Homo sapiens
ggaccccagtgcgca

SEQ ID NO: 160093 - DNA, 15 bp, Homo sapiens
gggaccccagtgcgc

SEQ ID NO: 160094 - DNA, 15 bp, Homo sapiens
agggaccccagtgcg

SEQ ID NO: 160095 - DNA, 15 bp, Homo sapiens
tagggaccccagtgc

SEQ ID NO: 160096 - DNA, 15 bp, Homo sapiens
gtagggaccccagtg

SEQ ID NO: 160097 - DNA, 15 bp, Homo sapiens
agtagggaccccagt

SEQ ID NO: 160098 - DNA, 15 bp, Homo sapiens
gagtagggaccccag

SEQ ID NO: 160099 - DNA, 15 bp, Homo sapiens
agagtagggacccca

SEQ ID NO: 160100 - DNA, 15 bp, Homo sapiens
cagagtagggacccc

SEQ ID NO: 160101 - DNA, 15 bp, Homo sapiens
tcagagtagggaccc

SEQ ID NO: 160102 - DNA, 15 bp, Homo sapiens
ctcagagtagggacc

SEQ ID NO: 160103 - DNA, 15 bp, Homo sapiens
gctcagagtagggac

SEQ ID NO: 160104 - DNA, 15 bp, Homo sapiens
agctcagagtaggga

SEQ ID NO: 160105 - DNA, 15 bp, Homo sapiens
cagctcagagtaggg

SEQ ID NO: 160106 - DNA, 15 bp, Homo sapiens
gcagctcagagtagg

SEQ ID NO: 160107 - DNA, 15 bp, Homo sapiens
agcagctcagagtag

SEQ ID NO: 160108 - DNA, 15 bp, Homo sapiens
cagcagctcagagta

SEQ ID NO: 160109 - DNA, 15 bp, Homo sapiens
ccagcagctcagagt

SEQ ID NO: 160110 - DNA, 15 bp, Homo sapiens
cccagcagctcagag

SEQ ID NO: 160111 - DNA, 15 bp, Homo sapiens
gcccagcagctcaga

SEQ ID NO: 160112 - DNA, 15 bp, Homo sapiens
cgcccagcagctcag

SEQ ID NO: 160113 - DNA, 15 bp, Homo sapiens
ccgcccagcagctca

SEQ ID NO: 160114 - DNA, 15 bp, Homo sapiens
cccgcccagcagctc

SEQ ID NO: 160115 - DNA, 15 bp, Homo sapiens
acccgcccagcagct

SEQ ID NO: 160116 - DNA, 15 bp, Homo sapiens
cacccgcccagcagc

SEQ ID NO: 160117 - DNA, 15 bp, Homo sapiens
ccacccgcccagcag

SEQ ID NO: 160118 - DNA, 15 bp, Homo sapiens
cccacccgcccagca

SEQ ID NO: 160119 - DNA, 15 bp, Homo sapiens
tcccacccgcccagc

SEQ ID NO: 160120 - DNA, 15 bp, Homo sapiens
ctcccacccgcccag

SEQ ID NO: 160121 - DNA, 15 bp, Homo sapiens
actcccacccgccca

SEQ ID NO: 160122 - DNA, 15 bp, Homo sapiens
cactcccacccgccc

SEQ ID NO: 160123 - DNA, 15 bp, Homo sapiens
ccactcccacccgcc

SEQ ID NO: 160124 - DNA, 15 bp, Homo sapiens
gccactcccacccgc

SEQ ID NO: 160125 - DNA, 15 bp, Homo sapiens
agccactcccacccg

SEQ ID NO: 160126 - DNA, 15 bp, Homo sapiens
cagccactcccaccc

SEQ ID NO: 160127 - DNA, 15 bp, Homo sapiens
ccagccactcccacc

SEQ ID NO: 160128 - DNA, 15 bp, Homo sapiens
cccagccactcccac

SEQ ID NO: 160129 - DNA, 15 bp, Homo sapiens
ccccagccactccca

SEQ ID NO: 160130 - DNA, 15 bp, Homo sapiens
cccccagccactccc

SEQ ID NO: 160131 - DNA, 15 bp, Homo sapiens
ccccccagccactcc

SEQ ID NO: 160132 - DNA, 15 bp, Homo sapiens
tccccccagccactc

SEQ ID NO: 160133 - DNA, 15 bp, Homo sapiens
gtccccccagccact

SEQ ID NO: 160134 - DNA, 15 bp, Homo sapiens
tgtccccccagccac

SEQ ID NO: 160135 - DNA, 15 bp, Homo sapiens
ctgtccccccagcca

SEQ ID NO: 160136 - DNA, 15 bp, Homo sapiens
cctgtccccccagcc

SEQ ID NO: 160137 - DNA, 15 bp, Homo sapiens
tcctgtccccccagc

SEQ ID NO: 160138 - DNA, 15 bp, Homo sapiens
gtcctgtccccccag

SEQ ID NO: 160139 - DNA, 15 bp, Homo sapiens
agtcctgtcccccca

SEQ ID NO: 160140 - DNA, 15 bp, Homo sapiens
gagtcctgtcccccc

SEQ ID NO: 160141 - DNA, 15 bp, Homo sapiens
agagtcctgtccccc

SEQ ID NO: 160142 - DNA, 15 bp, Homo sapiens
cagagtcctgtcccc

SEQ ID NO: 160143 - DNA, 15 bp, Homo sapiens
gcagagtcctgtccc

SEQ ID NO: 160144 - DNA, 15 bp, Homo sapiens
agcagagtcctgtcc

SEQ ID NO: 160145 - DNA, 15 bp, Homo sapiens
gagcagagtcctgtc

SEQ ID NO: 160146 - DNA, 15 bp, Homo sapiens
ggagcagagtcctgt

SEQ ID NO: 160147 - DNA, 15 bp, Homo sapiens
gggagcagagtcctg

SEQ ID NO: 160148 - DNA, 15 bp, Homo sapiens
ggggagcagagtcct

SEQ ID NO: 160149 - DNA, 15 bp, Homo sapiens
aggggagcagagtcc

SEQ ID NO: 160150 - DNA, 15 bp, Homo sapiens
caggggagcagagtc

SEQ ID NO: 160151 - DNA, 15 bp, Homo sapiens
gcaggggagcagagt

SEQ ID NO: 160152 - DNA, 15 bp, Homo sapiens
agcaggggagcagag

SEQ ID NO: 160153 - DNA, 15 bp, Homo sapiens
aagcaggggagcaga

SEQ ID NO: 160154 - DNA, 15 bp, Homo sapiens
gaagcaggggagcag

SEQ ID NO: 160155 - DNA, 15 bp, Homo sapiens
ggaagcaggggagca

SEQ ID NO: 160156 - DNA, 15 bp, Homo sapiens
gggaagcaggggagc

SEQ ID NO: 160157 - DNA, 15 bp, Homo sapiens
ggggaagcaggggag

SEQ ID NO: 160158 - DNA, 15 bp, Homo sapiens
aggggaagcagggga

SEQ ID NO: 160159 - DNA, 15 bp, Homo sapiens
gaggggaagcagggg

SEQ ID NO: 160160 - DNA, 15 bp, Homo sapiens
ggaggggaagcaggg

SEQ ID NO: 160161 - DNA, 15 bp, Homo sapiens
aggaggggaagcagg

SEQ ID NO: 160162 - DNA, 15 bp, Homo sapiens
gaggaggggaagcag

SEQ ID NO: 160163 - DNA, 15 bp, Homo sapiens
ggaggaggggaagca

SEQ ID NO: 160164 - DNA, 15 bp, Homo sapiens
gggaggaggggaagc

SEQ ID NO: 160165 - DNA, 15 bp, Homo sapiens
ggggaggaggggaag

SEQ ID NO: 160166 - DNA, 15 bp, Homo sapiens
cggggaggaggggaa

SEQ ID NO: 160167 - DNA, 15 bp, Homo sapiens
acggggaggagggga

SEQ ID NO: 160168 - DNA, 15 bp, Homo sapiens
gacggggaggagggg

SEQ ID NO: 160169 - DNA, 15 bp, Homo sapiens
agacggggaggaggg

SEQ ID NO: 160170 - DNA, 15 bp, Homo sapiens
gagacggggaggagg

SEQ ID NO: 160171 - DNA, 15 bp, Homo sapiens
ggagacggggaggag

SEQ ID NO: 160172 - DNA, 15 bp, Homo sapiens
aggagacggggagga

SEQ ID NO: 160173 - DNA, 15 bp, Homo sapiens
gaggagacggggagg

SEQ ID NO: 160174 - DNA, 15 bp, Homo sapiens
tgaggagacggggag

SEQ ID NO: 160175 - DNA, 15 bp, Homo sapiens
gtgaggagacgggga

SEQ ID NO: 160176 - DNA, 15 bp, Homo sapiens
tgtgaggagacgggg

SEQ ID NO: 160177 - DNA, 15 bp, Homo sapiens
gtgtgaggagacggg

SEQ ID NO: 160178 - DNA, 15 bp, Homo sapiens
agtgtgaggagacgg

SEQ ID NO: 160179 - DNA, 15 bp, Homo sapiens
cagtgtgaggagacg

SEQ ID NO: 160180 - DNA, 15 bp, Homo sapiens
gcagtgtgaggagac

SEQ ID NO: 160181 - DNA, 15 bp, Homo sapiens
ggcagtgtgaggaga

SEQ ID NO: 160182 - DNA, 15 bp, Homo sapiens
gggcagtgtgaggag

SEQ ID NO: 160183 - DNA, 15 bp, Homo sapiens
agggcagtgtgagga

SEQ ID NO: 160184 - DNA, 15 bp, Homo sapiens
aagggcagtgtgagg

SEQ ID NO: 160185 - DNA, 15 bp, Homo sapiens
gaagggcagtgtgag

SEQ ID NO: 160186 - DNA, 15 bp, Homo sapiens
ggaagggcagtgtga

SEQ ID NO: 160187 - DNA, 15 bp, Homo sapiens
gggaagggcagtgtg

SEQ ID NO: 160188 - DNA, 15 bp, Homo sapiens
ggggaagggcagtgt

SEQ ID NO: 160189 - DNA, 15 bp, Homo sapiens
gggggaagggcagtg

SEQ ID NO: 160190 - DNA, 15 bp, Homo sapiens
ggggggaagggcagt

SEQ ID NO: 160191 - DNA, 15 bp, Homo sapiens
aggggggaagggcag

SEQ ID NO: 160192 - DNA, 15 bp, Homo sapiens
aaggggggaagggca

SEQ ID NO: 160193 - DNA, 15 bp, Homo sapiens
caaggggggaagggc

SEQ ID NO: 160194 - DNA, 15 bp, Homo sapiens
acaaggggggaaggg

SEQ ID NO: 160195 - DNA, 15 bp, Homo sapiens
gacaaggggggaagg

SEQ ID NO: 160196 - DNA, 15 bp, Homo sapiens
tgacaaggggggaag

SEQ ID NO: 160197 - DNA, 15 bp, Homo sapiens
gtgacaaggggggaa

SEQ ID NO: 160198 - DNA, 15 bp, Homo sapiens
cgtgacaagggggga

SEQ ID NO: 160199 - DNA, 15 bp, Homo sapiens
gcgtgacaagggggg

SEQ ID NO: 160200 - DNA, 15 bp, Homo sapiens
ggcgtgacaaggggg

SEQ ID NO: 160201 - DNA, 15 bp, Homo sapiens
aggcgtgacaagggg

SEQ ID NO: 160202 - DNA, 15 bp, Homo sapiens
aaggcgtgacaaggg

SEQ ID NO: 160203 - DNA, 15 bp, Homo sapiens
caaggcgtgacaagg

SEQ ID NO: 160204 - DNA, 15 bp, Homo sapiens
gcaaggcgtgacaag

SEQ ID NO: 160205 - DNA, 15 bp, Homo sapiens
agcaaggcgtgacaa

SEQ ID NO: 160206 - DNA, 15 bp, Homo sapiens
aagcaaggcgtgaca

SEQ ID NO: 160207 - DNA, 15 bp, Homo sapiens
gaagcaaggcgtgac

SEQ ID NO: 160208 - DNA, 15 bp, Homo sapiens
ggaagcaaggcgtga

SEQ ID NO: 160209 - DNA, 15 bp, Homo sapiens
tggaagcaaggcgtg

SEQ ID NO: 160210 - DNA, 15 bp, Homo sapiens
gtggaagcaaggcgt

SEQ ID NO: 160211 - DNA, 15 bp, Homo sapiens
agtggaagcaaggcg

SEQ ID NO: 160212 - DNA, 15 bp, Homo sapiens
aagtggaagcaaggc

SEQ ID NO: 160213 - DNA, 15 bp, Homo sapiens
gaagtggaagcaagg

SEQ ID NO: 160214 - DNA, 15 bp, Homo sapiens
tgaagtggaagcaag

SEQ ID NO: 160215 - DNA, 15 bp, Homo sapiens
gtgaagtggaagcaa

SEQ ID NO: 160216 - DNA, 15 bp, Homo sapiens
ggtgaagtggaagca

SEQ ID NO: 160217 - DNA, 15 bp, Homo sapiens
aggtgaagtggaagc

SEQ ID NO: 160218 - DNA, 15 bp, Homo sapiens
aaggtgaagtggaag

SEQ ID NO: 160219 - DNA, 15 bp, Homo sapiens
gaaggtgaagtggaa

SEQ ID NO: 160220 - DNA, 15 bp, Homo sapiens
ggaaggtgaagtgga

SEQ ID NO: 160221 - DNA, 15 bp, Homo sapiens
gggaaggtgaagtgg

SEQ ID NO: 160222 - DNA, 15 bp, Homo sapiens
cgggaaggtgaagtg

SEQ ID NO: 160223 - DNA, 15 bp, Homo sapiens
tcgggaaggtgaagt

SEQ ID NO: 160224 - DNA, 15 bp, Homo sapiens
gtcgggaaggtgaag

SEQ ID NO: 160225 - DNA, 15 bp, Homo sapiens
ggtcgggaaggtgaa

SEQ ID NO: 160226 - DNA, 15 bp, Homo sapiens
gggtcgggaaggtga

SEQ ID NO: 160227 - DNA, 15 bp, Homo sapiens
tgggtcgggaaggtg

SEQ ID NO: 160228 - DNA, 15 bp, Homo sapiens
gtgggtcgggaaggt

SEQ ID NO: 160229 - DNA, 15 bp, Homo sapiens
tgtgggtcgggaagg

SEQ ID NO: 160230 - DNA, 15 bp, Homo sapiens
ctgtgggtcgggaag

SEQ ID NO: 160231 - DNA, 15 bp, Homo sapiens
gctgtgggtcgggaa

SEQ ID NO: 160232 - DNA, 15 bp, Homo sapiens
agctgtgggtcggga

SEQ ID NO: 160233 - DNA, 15 bp, Homo sapiens
cagctgtgggtcggg

SEQ ID NO: 160234 - DNA, 15 bp, Homo sapiens
gcagctgtgggtcgg

SEQ ID NO: 160235 - DNA, 15 bp, Homo sapiens
ggcagctgtgggtcg

SEQ ID NO: 160236 - DNA, 15 bp, Homo sapiens
aggcagctgtgggtc

SEQ ID NO: 160237 - DNA, 15 bp, Homo sapiens
gaggcagctgtgggt

SEQ ID NO: 160238 - DNA, 15 bp, Homo sapiens
agaggcagctgtggg

SEQ ID NO: 160239 - DNA, 15 bp, Homo sapiens
cagaggcagctgtgg

SEQ ID NO: 160240 - DNA, 15 bp, Homo sapiens
gcagaggcagctgtg

SEQ ID NO: 160241 - DNA, 15 bp, Homo sapiens
ggcagaggcagctgt

SEQ ID NO: 160242 - DNA, 15 bp, Homo sapiens
gggcagaggcagctg

SEQ ID NO: 160243 - DNA, 15 bp, Homo sapiens
ggggcagaggcagct

SEQ ID NO: 160244 - DNA, 15 bp, Homo sapiens
aggggcagaggcagc

SEQ ID NO: 160245 - DNA, 15 bp, Homo sapiens
gaggggcagaggcag

SEQ ID NO: 160246 - DNA, 15 bp, Homo sapiens
ggaggggcagaggca

SEQ ID NO: 160247 - DNA, 15 bp, Homo sapiens
tggaggggcagaggc

SEQ ID NO: 160248 - DNA, 15 bp, Homo sapiens
ctggaggggcagagg

SEQ ID NO: 160249 - DNA, 15 bp, Homo sapiens
gctggaggggcagag

SEQ ID NO: 160250 - DNA, 15 bp, Homo sapiens
ggctggaggggcaga

SEQ ID NO: 160251 - DNA, 15 bp, Homo sapiens
gggctggaggggcag

SEQ ID NO: 160252 - DNA, 15 bp, Homo sapiens
ggggctggaggggca

SEQ ID NO: 160253 - DNA, 15 bp, Homo sapiens
aggggctggaggggc

SEQ ID NO: 160254 - DNA, 15 bp, Homo sapiens
caggggctggagggg

SEQ ID NO: 160255 - DNA, 15 bp, Homo sapiens
acaggggctggaggg

SEQ ID NO: 160256 - DNA, 15 bp, Homo sapiens
cacaggggctggagg

SEQ ID NO: 160257 - DNA, 15 bp, Homo sapiens
ccacaggggctggag

SEQ ID NO: 160258 - DNA, 15 bp, Homo sapiens
gccacaggggctgga

SEQ ID NO: 160259 - DNA, 15 bp, Homo sapiens
ggccacaggggctgg

SEQ ID NO: 160260 - DNA, 15 bp, Homo sapiens
tggccacaggggctg

SEQ ID NO: 160261 - DNA, 15 bp, Homo sapiens
ctggccacaggggct

SEQ ID NO: 160262 - DNA, 15 bp, Homo sapiens
cctggccacaggggc

SEQ ID NO: 160263 - DNA, 15 bp, Homo sapiens
tcctggccacagggg

SEQ ID NO: 160264 - DNA, 15 bp, Homo sapiens
atcctggccacaggg

SEQ ID NO: 160265 - DNA, 15 bp, Homo sapiens
catcctggccacagg

SEQ ID NO: 160266 - DNA, 15 bp, Homo sapiens
ccatcctggccacag

SEQ ID NO: 160267 - DNA, 15 bp, Homo sapiens
tccatcctggccaca

SEQ ID NO: 160268 - DNA, 15 bp, Homo sapiens
ctccatcctggccac

SEQ ID NO: 160269 - DNA, 15 bp, Homo sapiens
cctccatcctggcca

SEQ ID NO: 160270 - DNA, 15 bp, Homo sapiens
ccctccatcctggcc

SEQ ID NO: 160271 - DNA, 15 bp, Homo sapiens
tccctccatcctggc

SEQ ID NO: 160272 - DNA, 15 bp, Homo sapiens
ctccctccatcctgg

SEQ ID NO: 160273 - DNA, 15 bp, Homo sapiens
cctccctccatcctg

SEQ ID NO: 160274 - DNA, 15 bp, Homo sapiens
ccctccctccatcct

SEQ ID NO: 160275 - DNA, 15 bp, Homo sapiens
gccctccctccatcc

SEQ ID NO: 160276 - DNA, 15 bp, Homo sapiens
cgccctccctccatc

SEQ ID NO: 160277 - DNA, 15 bp, Homo sapiens
ccgccctccctccat

SEQ ID NO: 160278 - DNA, 15 bp, Homo sapiens
gccgccctccctcca

SEQ ID NO: 160279 - DNA, 15 bp, Homo sapiens
ggccgccctccctcc

SEQ ID NO: 160280 - DNA, 15 bp, Homo sapiens
aggccgccctccctc

SEQ ID NO: 160281 - DNA, 15 bp, Homo sapiens
caggccgccctccct

SEQ ID NO: 160282 - DNA, 15 bp, Homo sapiens
ccaggccgccctccc

SEQ ID NO: 160283 - DNA, 15 bp, Homo sapiens
cccaggccgccctcc

SEQ ID NO: 160284 - DNA, 15 bp, Homo sapiens
gcccaggccgccctc

SEQ ID NO: 160285 - DNA, 15 bp, Homo sapiens
ggcccaggccgccct

SEQ ID NO: 160286 - DNA, 15 bp, Homo sapiens
aggcccaggccgccc

SEQ ID NO: 160287 - DNA, 15 bp, Homo sapiens
aaggcccaggccgcc

SEQ ID NO: 160288 - DNA, 15 bp, Homo sapiens
gaaggcccaggccgc

SEQ ID NO: 160289 - DNA, 15 bp, Homo sapiens
agaaggcccaggccg

SEQ ID NO: 160290 - DNA, 15 bp, Homo sapiens
cagaaggcccaggcc

SEQ ID NO: 160291 - DNA, 15 bp, Homo sapiens
ccagaaggcccaggc

SEQ ID NO: 160292 - DNA, 15 bp, Homo sapiens
cccagaaggcccagg

SEQ ID NO: 160293 - DNA, 15 bp, Homo sapiens
ccccagaaggcccag

SEQ ID NO: 160294 - DNA, 15 bp, Homo sapiens
cccccagaaggccca

SEQ ID NO: 160295 - DNA, 15 bp, Homo sapiens
tcccccagaaggccc

SEQ ID NO: 160296 - DNA, 15 bp, Homo sapiens
gtcccccagaaggcc

SEQ ID NO: 160297 - DNA, 15 bp, Homo sapiens
tgtcccccagaaggc

SEQ ID NO: 160298 - DNA, 15 bp, Homo sapiens
gtgtcccccagaagg

SEQ ID NO: 160299 - DNA, 15 bp, Homo sapiens
ggtgtcccccagaag

SEQ ID NO: 160300 - DNA, 15 bp, Homo sapiens
gggtgtcccccagaa

SEQ ID NO: 160301 - DNA, 15 bp, Homo sapiens
tgggtgtcccccaga

SEQ ID NO: 160302 - DNA, 15 bp, Homo sapiens
ctgggtgtcccccag

SEQ ID NO: 160303 - DNA, 15 bp, Homo sapiens
cctgggtgtccccca

SEQ ID NO: 160304 - DNA, 15 bp, Homo sapiens
ccctgggtgtccccc

SEQ ID NO: 160305 - DNA, 15 bp, Homo sapiens
accctgggtgtcccc

SEQ ID NO: 160306 - DNA, 15 bp, Homo sapiens
gaccctgggtgtccc

SEQ ID NO: 160307 - DNA, 15 bp, Homo sapiens
ggaccctgggtgtcc

SEQ ID NO: 160308 - DNA, 15 bp, Homo sapiens
gggaccctgggtgtc

SEQ ID NO: 160309 - DNA, 15 bp, Homo sapiens
agggaccctgggtgt

SEQ ID NO: 160310 - DNA, 15 bp, Homo sapiens
cagggaccctgggtg

SEQ ID NO: 160311 - DNA, 15 bp, Homo sapiens
acagggaccctgggt

SEQ ID NO: 160312 - DNA, 15 bp, Homo sapiens
cacagggaccctggg

SEQ ID NO: 160313 - DNA, 15 bp, Homo sapiens
acacagggaccctgg

SEQ ID NO: 160314 - DNA, 15 bp, Homo sapiens
cacacagggaccctg

SEQ ID NO: 160315 - DNA, 15 bp, Homo sapiens
gcacacagggaccct

SEQ ID NO: 160316 - DNA, 15 bp, Homo sapiens
tgcacacagggaccc

SEQ ID NO: 160317 - DNA, 15 bp, Homo sapiens
gtgcacacagggacc

SEQ ID NO: 160318 - DNA, 15 bp, Homo sapiens
ggtgcacacagggac

SEQ ID NO: 160319 - DNA, 15 bp, Homo sapiens
aggtgcacacaggga

SEQ ID NO: 160320 - DNA, 15 bp, Homo sapiens
gaggtgcacacaggg

SEQ ID NO: 160321 - DNA, 15 bp, Homo sapiens
tgaggtgcacacagg

SEQ ID NO: 160322 - DNA, 15 bp, Homo sapiens
atgaggtgcacacag

SEQ ID NO: 160323 - DNA, 15 bp, Homo sapiens
catgaggtgcacaca

SEQ ID NO: 160324 - DNA, 15 bp, Homo sapiens
gcatgaggtgcacac

SEQ ID NO: 160325 - DNA, 15 bp, Homo sapiens
ggcatgaggtgcaca

SEQ ID NO: 160326 - DNA, 15 bp, Homo sapiens
gggcatgaggtgcac

SEQ ID NO: 160327 - DNA, 15 bp, Homo sapiens
ggggcatgaggtgca

SEQ ID NO: 160328 - DNA, 15 bp, Homo sapiens
tggggcatgaggtgc

SEQ ID NO: 160329 - DNA, 15 bp, Homo sapiens
gtggggcatgaggtg

SEQ ID NO: 160330 - DNA, 15 bp, Homo sapiens
ggtggggcatgaggt

SEQ ID NO: 160331 - DNA, 15 bp, Homo sapiens
gggtggggcatgagg

SEQ ID NO: 160332 - DNA, 15 bp, Homo sapiens
ggggtggggcatgag

SEQ ID NO: 160333 - DNA, 15 bp, Homo sapiens
gggggtggggcatga

SEQ ID NO: 160334 - DNA, 15 bp, Homo sapiens
tgggggtggggcatg

SEQ ID NO: 160335 - DNA, 15 bp, Homo sapiens
gtgggggtggggcat

SEQ ID NO: 160336 - DNA, 15 bp, Homo sapiens
ggtgggggtggggca

SEQ ID NO: 160337 - DNA, 15 bp, Homo sapiens
tggtgggggtggggc

SEQ ID NO: 160338 - DNA, 15 bp, Homo sapiens
ctggtgggggtgggg

SEQ ID NO: 160339 - DNA, 15 bp, Homo sapiens
cctggtgggggtggg

SEQ ID NO: 160340 - DNA, 15 bp, Homo sapiens
ccctggtgggggtgg

SEQ ID NO: 160341 - DNA, 15 bp, Homo sapiens
tccctggtgggggtg

SEQ ID NO: 160342 - DNA, 15 bp, Homo sapiens
ttccctggtgggggt

SEQ ID NO: 160343 - DNA, 15 bp, Homo sapiens
cttccctggtggggg

SEQ ID NO: 160344 - DNA, 15 bp, Homo sapiens
ccttccctggtgggg

SEQ ID NO: 160345 - DNA, 15 bp, Homo sapiens
accttccctggtggg

SEQ ID NO: 160346 - DNA, 15 bp, Homo sapiens
caccttccctggtgg

SEQ ID NO: 160347 - DNA, 15 bp, Homo sapiens
tcaccttccctggtg

SEQ ID NO: 160348 - DNA, 15 bp, Homo sapiens
ctcaccttccctggt

SEQ ID NO: 160349 - DNA, 15 bp, Homo sapiens
actcaccttccctgg

SEQ ID NO: 160350 - DNA, 15 bp, Homo sapiens
cactcaccttccctg

SEQ ID NO: 160351 - DNA, 15 bp, Homo sapiens
acactcaccttccct

SEQ ID NO: 160352 - DNA, 15 bp, Homo sapiens
gacactcaccttccc

SEQ ID NO: 160353 - DNA, 15 bp, Homo sapiens
ggacactcaccttcc

SEQ ID NO: 160354 - DNA, 15 bp, Homo sapiens
gggacactcaccttc

SEQ ID NO: 160355 - DNA, 15 bp, Homo sapiens
tgggacactcacctt

SEQ ID NO: 160356 - DNA, 15 bp, Homo sapiens
ctgggacactcacct

SEQ ID NO: 160357 - DNA, 15 bp, Homo sapiens
tctgggacactcacc

SEQ ID NO: 160358 - DNA, 15 bp, Homo sapiens
ctctgggacactcac

SEQ ID NO: 160359 - DNA, 15 bp, Homo sapiens
cctctgggacactca

SEQ ID NO: 160360 - DNA, 15 bp, Homo sapiens
tcctctgggacactc

SEQ ID NO: 160361 - DNA, 15 bp, Homo sapiens
ctcctctgggacact

SEQ ID NO: 160362 - DNA, 15 bp, Homo sapiens
cctcctctgggacac

SEQ ID NO: 160363 - DNA, 15 bp, Homo sapiens
tcctcctctgggaca

SEQ ID NO: 160364 - DNA, 15 bp, Homo sapiens
ctcctcctctgggac

SEQ ID NO: 160365 - DNA, 15 bp, Homo sapiens
gctcctcctctggga

SEQ ID NO: 160366 - DNA, 15 bp, Homo sapiens
agctcctcctctggg

SEQ ID NO: 160367 - DNA, 15 bp, Homo sapiens
cagctcctcctctgg

SEQ ID NO: 160368 - DNA, 15 bp, Homo sapiens
ccagctcctcctctg

SEQ ID NO: 160369 - DNA, 15 bp, Homo sapiens
tccagctcctcctct

SEQ ID NO: 160370 - DNA, 15 bp, Homo sapiens
gtccagctcctcctc

SEQ ID NO: 160371 - DNA, 15 bp, Homo sapiens
cgtccagctcctcct

SEQ ID NO: 160372 - DNA, 15 bp, Homo sapiens
gcgtccagctcctcc

SEQ ID NO: 160373 - DNA, 15 bp, Homo sapiens
ggcgtccagctcctc

SEQ ID NO: 160374 - DNA, 15 bp, Homo sapiens
tggcgtccagctcct

SEQ ID NO: 160375 - DNA, 15 bp, Homo sapiens
atggcgtccagctcc

SEQ ID NO: 160376 - DNA, 15 bp, Homo sapiens
catggcgtccagctc

SEQ ID NO: 160377 - DNA, 15 bp, Homo sapiens
gcatggcgtccagct

SEQ ID NO: 160378 - DNA, 15 bp, Homo sapiens
agcatggcgtccagc

SEQ ID NO: 160379 - DNA, 15 bp, Homo sapiens
cagcatggcgtccag

SEQ ID NO: 160380 - DNA, 15 bp, Homo sapiens
gcagcatggcgtcca

SEQ ID NO: 160381 - DNA, 15 bp, Homo sapiens
tgcagcatggcgtcc

SEQ ID NO: 160382 - DNA, 15 bp, Homo sapiens
ttgcagcatggcgtc

SEQ ID NO: 160383 - DNA, 15 bp, Homo sapiens
cttgcagcatggcgt

SEQ ID NO: 160384 - DNA, 15 bp, Homo sapiens
tcttgcagcatggcg

SEQ ID NO: 160385 - DNA, 15 bp, Homo sapiens
ctcttgcagcatggc

SEQ ID NO: 160386 - DNA, 15 bp, Homo sapiens
cctcttgcagcatgg

SEQ ID NO: 160387 - DNA, 15 bp, Homo sapiens
ccctcttgcagcatg

SEQ ID NO: 160388 - DNA, 15 bp, Homo sapiens
gccctcttgcagcat

SEQ ID NO: 160389 - DNA, 15 bp, Homo sapiens
tgccctcttgcagca

SEQ ID NO: 160390 - DNA, 15 bp, Homo sapiens
ttgccctcttgcagc

SEQ ID NO: 160391 - DNA, 15 bp, Homo sapiens
cttgccctcttgcag

SEQ ID NO: 160392 - DNA, 15 bp, Homo sapiens
ccttgccctcttgca

SEQ ID NO: 160393 - DNA, 15 bp, Homo sapiens
cccttgccctcttgc

SEQ ID NO: 160394 - DNA, 15 bp, Homo sapiens
gcccttgccctcttg

SEQ ID NO: 160395 - DNA, 15 bp, Homo sapiens
ggcccttgccctctt

SEQ ID NO: 160396 - DNA, 15 bp, Homo sapiens
gggcccttgccctct

SEQ ID NO: 160397 - DNA, 15 bp, Homo sapiens
ggggcccttgccctc

SEQ ID NO: 160398 - DNA, 15 bp, Homo sapiens
tggggcccttgccct

SEQ ID NO: 160399 - DNA, 15 bp, Homo sapiens
atggggcccttgccc

SEQ ID NO: 160400 - DNA, 15 bp, Homo sapiens
gatggggcccttgcc

SEQ ID NO: 160401 - DNA, 15 bp, Homo sapiens
tgatggggcccttgc

SEQ ID NO: 160402 - DNA, 15 bp, Homo sapiens
ttgatggggcccttg

SEQ ID NO: 160403 - DNA, 15 bp, Homo sapiens
gttgatggggccctt

SEQ ID NO: 160404 - DNA, 15 bp, Homo sapiens
agttgatggggccct

SEQ ID NO: 160405 - DNA, 15 bp, Homo sapiens
aagttgatggggccc

SEQ ID NO: 160406 - DNA, 15 bp, Homo sapiens
gaagttgatggggcc

SEQ ID NO: 160407 - DNA, 15 bp, Homo sapiens
tgaagttgatggggc

SEQ ID NO: 160408 - DNA, 15 bp, Homo sapiens
gtgaagttgatgggg

SEQ ID NO: 160409 - DNA, 15 bp, Homo sapiens
ggtgaagttgatggg

SEQ ID NO: 160410 - DNA, 15 bp, Homo sapiens
cggtgaagttgatgg

SEQ ID NO: 160411 - DNA, 15 bp, Homo sapiens
acggtgaagttgatg

SEQ ID NO: 160412 - DNA, 15 bp, Homo sapiens
gacggtgaagttgat

SEQ ID NO: 160413 - DNA, 15 bp, Homo sapiens
agacggtgaagttga

SEQ ID NO: 160414 - DNA, 15 bp, Homo sapiens
aagacggtgaagttg

SEQ ID NO: 160415 - DNA, 15 bp, Homo sapiens
gaagacggtgaagtt

SEQ ID NO: 160416 - DNA, 15 bp, Homo sapiens
ggaagacggtgaagt

SEQ ID NO: 160417 - DNA, 15 bp, Homo sapiens
aggaagacggtgaag

SEQ ID NO: 160418 - DNA, 15 bp, Homo sapiens
gaggaagacggtgaa

SEQ ID NO: 160419 - DNA, 15 bp, Homo sapiens
tgaggaagacggtga

SEQ ID NO: 160420 - DNA, 15 bp, Homo sapiens
gtgaggaagacggtg

SEQ ID NO: 160421 - DNA, 15 bp, Homo sapiens
cgtgaggaagacggt

SEQ ID NO: 160422 - DNA, 15 bp, Homo sapiens
gcgtgaggaagacgg

SEQ ID NO: 160423 - DNA, 15 bp, Homo sapiens
agcgtgaggaagacg

SEQ ID NO: 160424 - DNA, 15 bp, Homo sapiens
gagcgtgaggaagac

SEQ ID NO: 160425 - DNA, 15 bp, Homo sapiens
agagcgtgaggaaga

SEQ ID NO: 160426 - DNA, 15 bp, Homo sapiens
aagagcgtgaggaag

SEQ ID NO: 160427 - DNA, 15 bp, Homo sapiens
aaagagcgtgaggaa

SEQ ID NO: 160428 - DNA, 15 bp, Homo sapiens
caaagagcgtgagga

SEQ ID NO: 160429 - DNA, 15 bp, Homo sapiens
ccaaagagcgtgagg

SEQ ID NO: 160430 - DNA, 15 bp, Homo sapiens
cccaaagagcgtgag

SEQ ID NO: 160431 - DNA, 15 bp, Homo sapiens
ccccaaagagcgtga

SEQ ID NO: 160432 - DNA, 15 bp, Homo sapiens
tccccaaagagcgtg

SEQ ID NO: 160433 - DNA, 15 bp, Homo sapiens
ctccccaaagagcgt

SEQ ID NO: 160434 - DNA, 15 bp, Homo sapiens
tctccccaaagagcg

SEQ ID NO: 160435 - DNA, 15 bp, Homo sapiens
ttctccccaaagagc

SEQ ID NO: 160436 - DNA, 15 bp, Homo sapiens
cttctccccaaagag

SEQ ID NO: 160437 - DNA, 15 bp, Homo sapiens
gcttctccccaaaga

SEQ ID NO: 160438 - DNA, 15 bp, Homo sapiens
agcttctccccaaag

SEQ ID NO: 160439 - DNA, 15 bp, Homo sapiens
gagcttctccccaaa

SEQ ID NO: 160440 - DNA, 15 bp, Homo sapiens
tgagcttctccccaa

SEQ ID NO: 160441 - DNA, 15 bp, Homo sapiens
ttgagcttctcccca

SEQ ID NO: 160442 - DNA, 15 bp, Homo sapiens
attgagcttctcccc

SEQ ID NO: 160443 - DNA, 15 bp, Homo sapiens
cattgagcttctccc

SEQ ID NO: 160444 - DNA, 15 bp, Homo sapiens
ccattgagcttctcc

SEQ ID NO: 160445 - DNA, 15 bp, Homo sapiens
accattgagcttctc

SEQ ID NO: 160446 - DNA, 15 bp, Homo sapiens
caccattgagcttct

SEQ ID NO: 160447 - DNA, 15 bp, Homo sapiens
tcaccattgagcttc

SEQ ID NO: 160448 - DNA, 15 bp, Homo sapiens
ctcaccattgagctt

SEQ ID NO: 160449 - DNA, 15 bp, Homo sapiens
gctcaccattgagct

SEQ ID NO: 160450 - DNA, 15 bp, Homo sapiens
ggctcaccattgagc

SEQ ID NO: 160451 - DNA, 15 bp, Homo sapiens
aggctcaccattgag

SEQ ID NO: 160452 - DNA, 15 bp, Homo sapiens
caggctcaccattga

SEQ ID NO: 160453 - DNA, 15 bp, Homo sapiens
ccaggctcaccattg

SEQ ID NO: 160454 - DNA, 15 bp, Homo sapiens
cccaggctcaccatt

SEQ ID NO: 160455 - DNA, 15 bp, Homo sapiens
tcccaggctcaccat

SEQ ID NO: 160456 - DNA, 15 bp, Homo sapiens
gtcccaggctcacca

SEQ ID NO: 160457 - DNA, 15 bp, Homo sapiens
tgtcccaggctcacc

SEQ ID NO: 160458 - DNA, 15 bp, Homo sapiens
ctgtcccaggctcac

SEQ ID NO: 160459 - DNA, 15 bp, Homo sapiens
tctgtcccaggctca

SEQ ID NO: 160460 - DNA, 15 bp, Homo sapiens
ctctgtcccaggctc

SEQ ID NO: 160461 - DNA, 15 bp, Homo sapiens
gctctgtcccaggct

SEQ ID NO: 160462 - DNA, 15 bp, Homo sapiens
agctctgtcccaggc

SEQ ID NO: 160463 - DNA, 15 bp, Homo sapiens
cagctctgtcccagg

SEQ ID NO: 160464 - DNA, 15 bp, Homo sapiens
ccagctctgtcccag

SEQ ID NO: 160465 - DNA, 15 bp, Homo sapiens
cccagctctgtccca

SEQ ID NO: 160466 - DNA, 15 bp, Homo sapiens
gcccagctctgtccc

SEQ ID NO: 160467 - DNA, 15 bp, Homo sapiens
tgcccagctctgtcc

SEQ ID NO: 160468 - DNA, 15 bp, Homo sapiens
gtgcccagctctgtc

SEQ ID NO: 160469 - DNA, 15 bp, Homo sapiens
ggtgcccagctctgt

SEQ ID NO: 160470 - DNA, 15 bp, Homo sapiens
gggtgcccagctctg

SEQ ID NO: 160471 - DNA, 15 bp, Homo sapiens
agggtgcccagctct

SEQ ID NO: 160472 - DNA, 15 bp, Homo sapiens
aagggtgcccagctc

SEQ ID NO: 160473 - DNA, 15 bp, Homo sapiens
caagggtgcccagct

SEQ ID NO: 160474 - DNA, 15 bp, Homo sapiens
ccaagggtgcccagc

SEQ ID NO: 160475 - DNA, 15 bp, Homo sapiens
gccaagggtgcccag

SEQ ID NO: 160476 - DNA, 15 bp, Homo sapiens
ggccaagggtgccca

SEQ ID NO: 160477 - DNA, 15 bp, Homo sapiens
tggccaagggtgccc

SEQ ID NO: 160478 - DNA, 15 bp, Homo sapiens
ctggccaagggtgcc

SEQ ID NO: 160479 - DNA, 15 bp, Homo sapiens
cctggccaagggtgc

SEQ ID NO: 160480 - DNA, 15 bp, Homo sapiens
gcctggccaagggtg

SEQ ID NO: 160481 - DNA, 15 bp, Homo sapiens
tgcctggccaagggt

SEQ ID NO: 160482 - DNA, 15 bp, Homo sapiens
ctgcctggccaaggg

SEQ ID NO: 160483 - DNA, 15 bp, Homo sapiens
cctgcctggccaagg

SEQ ID NO: 160484 - DNA, 15 bp, Homo sapiens
ccctgcctggccaag

SEQ ID NO: 160485 - DNA, 15 bp, Homo sapiens
tccctgcctggccaa

SEQ ID NO: 160486 - DNA, 15 bp, Homo sapiens
ctccctgcctggcca

SEQ ID NO: 160487 - DNA, 15 bp, Homo sapiens
gctccctgcctggcc

SEQ ID NO: 160488 - DNA, 15 bp, Homo sapiens
ggctccctgcctggc

SEQ ID NO: 160489 - DNA, 15 bp, Homo sapiens
aggctccctgcctgg

SEQ ID NO: 160490 - DNA, 15 bp, Homo sapiens
caggctccctgcctg

SEQ ID NO: 160491 - DNA, 15 bp, Homo sapiens
gcaggctccctgcct

SEQ ID NO: 160492 - DNA, 15 bp, Homo sapiens
tgcaggctccctgcc

SEQ ID NO: 160493 - DNA, 15 bp, Homo sapiens
gtgcaggctccctgc

SEQ ID NO: 160494 - DNA, 15 bp, Homo sapiens
ggtgcaggctccctg

SEQ ID NO: 160495 - DNA, 15 bp, Homo sapiens
gggtgcaggctccct

SEQ ID NO: 160496 - DNA, 15 bp, Homo sapiens
agggtgcaggctccc

SEQ ID NO: 160497 - DNA, 15 bp, Homo sapiens
cagggtgcaggctcc

SEQ ID NO: 160498 - DNA, 15 bp, Homo sapiens
gcagggtgcaggctc

SEQ ID NO: 160499 - DNA, 15 bp, Homo sapiens
ggcagggtgcaggct

SEQ ID NO: 160500 - DNA, 15 bp, Homo sapiens
aggcagggtgcaggc

SEQ ID NO: 160501 - DNA, 15 bp, Homo sapiens
caggcagggtgcagg

SEQ ID NO: 160502 - DNA, 15 bp, Homo sapiens
tcaggcagggtgcag

SEQ ID NO: 160503 - DNA, 15 bp, Homo sapiens
ttcaggcagggtgca

SEQ ID NO: 160504 - DNA, 15 bp, Homo sapiens
gttcaggcagggtgc

SEQ ID NO: 160505 - DNA, 15 bp, Homo sapiens
ggttcaggcagggtg

SEQ ID NO: 160506 - DNA, 15 bp, Homo sapiens
gggttcaggcagggt

SEQ ID NO: 160507 - DNA, 15 bp, Homo sapiens
ggggttcaggcaggg

SEQ ID NO: 160508 - DNA, 15 bp, Homo sapiens
tggggttcaggcagg

SEQ ID NO: 160509 - DNA, 15 bp, Homo sapiens
gtggggttcaggcag

SEQ ID NO: 160510 - DNA, 15 bp, Homo sapiens
ggtggggttcaggca

SEQ ID NO: 160511 - DNA, 15 bp, Homo sapiens
aggtggggttcaggc

SEQ ID NO: 160512 - DNA, 15 bp, Homo sapiens
caggtggggttcagg

SEQ ID NO: 160513 - DNA, 15 bp, Homo sapiens
tcaggtggggttcag

SEQ ID NO: 160514 - DNA, 15 bp, Homo sapiens
ttcaggtggggttca

SEQ ID NO: 160515 - DNA, 15 bp, Homo sapiens
gttcaggtggggttc

SEQ ID NO: 160516 - DNA, 15 bp, Homo sapiens
ggttcaggtggggtt

SEQ ID NO: 160517 - DNA, 15 bp, Homo sapiens
gggttcaggtggggt

SEQ ID NO: 160518 - DNA, 15 bp, Homo sapiens
agggttcaggtgggg

SEQ ID NO: 160519 - DNA, 15 bp, Homo sapiens
cagggttcaggtggg

SEQ ID NO: 160520 - DNA, 15 bp, Homo sapiens
gcagggttcaggtgg

SEQ ID NO: 160521 - DNA, 15 bp, Homo sapiens
ggcagggttcaggtg

SEQ ID NO: 160522 - DNA, 15 bp, Homo sapiens
aggcagggttcaggt

SEQ ID NO: 160523 - DNA, 15 bp, Homo sapiens
caggcagggttcagg

SEQ ID NO: 160524 - DNA, 15 bp, Homo sapiens
tcaggcagggttcag

SEQ ID NO: 160525 - DNA, 15 bp, Homo sapiens
ttcaggcagggttca

SEQ ID NO: 160526 - DNA, 15 bp, Homo sapiens
gttcaggcagggttc

SEQ ID NO: 160527 - DNA, 15 bp, Homo sapiens
ggttcaggcagggtt

SEQ ID NO: 160528 - DNA, 15 bp, Homo sapiens
aggttcaggtggggt

SEQ ID NO: 160529 - DNA, 15 bp, Homo sapiens
aaggttcaggtgggg

SEQ ID NO: 160530 - DNA, 15 bp, Homo sapiens
taaggttcaggtggg

SEQ ID NO: 160531 - DNA, 15 bp, Homo sapiens
gtaaggttcaggtgg

SEQ ID NO: 160532 - DNA, 15 bp, Homo sapiens
tgtaaggttcaggtg

SEQ ID NO: 160533 - DNA, 15 bp, Homo sapiens
atgtaaggttcaggt

SEQ ID NO: 160534 - DNA, 15 bp, Homo sapiens
catgtaaggttcagg

SEQ ID NO: 160535 - DNA, 15 bp, Homo sapiens
tcatgtaaggttcag

SEQ ID NO: 160536 - DNA, 15 bp, Homo sapiens
ttcatgtaaggttca

SEQ ID NO: 160537 - DNA, 15 bp, Homo sapiens
gttcatgtaaggttc

SEQ ID NO: 160538 - DNA, 15 bp, Homo sapiens
ggttcatgtaaggtt

SEQ ID NO: 160539 - DNA, 15 bp, Homo sapiens
gggttcatgtaaggt

SEQ ID NO: 160540 - DNA, 15 bp, Homo sapiens
ggggttcatgtaagg

SEQ ID NO: 160541 - DNA, 15 bp, Homo sapiens
tggggttcatgtaag

SEQ ID NO: 160542 - DNA, 15 bp, Homo sapiens
gtggggttcatgtaa

SEQ ID NO: 160543 - DNA, 15 bp, Homo sapiens
ggtggggttcatgta

SEQ ID NO: 160544 - DNA, 15 bp, Homo sapiens
aggtggggttcatgt

SEQ ID NO: 160545 - DNA, 15 bp, Homo sapiens
caggtggggttcatg

SEQ ID NO: 160546 - DNA, 15 bp, Homo sapiens
tcaggtggggttcat

SEQ ID NO: 160547 - DNA, 15 bp, Homo sapiens
tagggttcaggtggg

SEQ ID NO: 160548 - DNA, 15 bp, Homo sapiens
ttagggttcaggtgg

SEQ ID NO: 160549 - DNA, 15 bp, Homo sapiens
gttagggttcaggtg

SEQ ID NO: 160550 - DNA, 15 bp, Homo sapiens
agttagggttcaggt

SEQ ID NO: 160551 - DNA, 15 bp, Homo sapiens
cagttagggttcagg

SEQ ID NO: 160552 - DNA, 15 bp, Homo sapiens
tcagttagggttcag

SEQ ID NO: 160553 - DNA, 15 bp, Homo sapiens
ttcagttagggttca

SEQ ID NO: 160554 - DNA, 15 bp, Homo sapiens
gttcagttagggttc

SEQ ID NO: 160555 - DNA, 15 bp, Homo sapiens
ggttcagttagggtt

SEQ ID NO: 160556 - DNA, 15 bp, Homo sapiens
gggttcagttagggt

SEQ ID NO: 160557 - DNA, 15 bp, Homo sapiens
ggggttcagttaggg

SEQ ID NO: 160558 - DNA, 15 bp, Homo sapiens
tggggttcagttagg

SEQ ID NO: 160559 - DNA, 15 bp, Homo sapiens
gtggggttcagttag

SEQ ID NO: 160560 - DNA, 15 bp, Homo sapiens
ggtggggttcagtta

SEQ ID NO: 160561 - DNA, 15 bp, Homo sapiens
aggtggggttcagtt

SEQ ID NO: 160562 - DNA, 15 bp, Homo sapiens
caggtggggttcagt

SEQ ID NO: 160563 - DNA, 15 bp, Homo sapiens
ccaggtggggttcag

SEQ ID NO: 160564 - DNA, 15 bp, Homo sapiens
tccaggtggggttca

SEQ ID NO: 160565 - DNA, 15 bp, Homo sapiens
gtccaggtggggttc

SEQ ID NO: 160566 - DNA, 15 bp, Homo sapiens
ggtccaggtggggtt

SEQ ID NO: 160567 - DNA, 15 bp, Homo sapiens
gggtccaggtggggt

SEQ ID NO: 160568 - DNA, 15 bp, Homo sapiens
tgggtccaggtgggg

SEQ ID NO: 160569 - DNA, 15 bp, Homo sapiens
gtgggtccaggtggg

SEQ ID NO: 160570 - DNA, 15 bp, Homo sapiens
ggtgggtccaggtgg

SEQ ID NO: 160571 - DNA, 15 bp, Homo sapiens
aggtgggtccaggtg

SEQ ID NO: 160572 - DNA, 15 bp, Homo sapiens
caggtgggtccaggt

SEQ ID NO: 160573 - DNA, 15 bp, Homo sapiens
ccaggtgggtccagg

SEQ ID NO: 160574 - DNA, 15 bp, Homo sapiens
tccaggtgggtccag

SEQ ID NO: 160575 - DNA, 15 bp, Homo sapiens
gtccaggtgggtcca

SEQ ID NO: 160576 - DNA, 15 bp, Homo sapiens
agtccaggtgggtcc

SEQ ID NO: 160577 - DNA, 15 bp, Homo sapiens
gagtccaggtgggtc

SEQ ID NO: 160578 - DNA, 15 bp, Homo sapiens
agagtccaggtgggt

SEQ ID NO: 160579 - DNA, 15 bp, Homo sapiens
aagagtccaggtggg

SEQ ID NO: 160580 - DNA, 15 bp, Homo sapiens
gaagagtccaggtgg

SEQ ID NO: 160581 - DNA, 15 bp, Homo sapiens
ggaagagtccaggtg

SEQ ID NO: 160582 - DNA, 15 bp, Homo sapiens
aggaagagtccaggt

SEQ ID NO: 160583 - DNA, 15 bp, Homo sapiens
caggaagagtccagg

SEQ ID NO: 160584 - DNA, 15 bp, Homo sapiens
ccaggaagagtccag

SEQ ID NO: 160585 - DNA, 15 bp, Homo sapiens
gccaggaagagtcca

SEQ ID NO: 160586 - DNA, 15 bp, Homo sapiens
ggccaggaagagtcc

SEQ ID NO: 160587 - DNA, 15 bp, Homo sapiens
tggccaggaagagtc

SEQ ID NO: 160588 - DNA, 15 bp, Homo sapiens
atggccaggaagagt

SEQ ID NO: 160589 - DNA, 15 bp, Homo sapiens
catggccaggaagag

SEQ ID NO: 160590 - DNA, 15 bp, Homo sapiens
tcatggccaggaaga

SEQ ID NO: 160591 - DNA, 15 bp, Homo sapiens
gtgggccaagaggca

SEQ ID NO: 160592 - DNA, 15 bp, Homo sapiens
tgtgggccaagaggc

SEQ ID NO: 160593 - DNA, 15 bp, Homo sapiens
atgtgggccaagagg

SEQ ID NO: 160594 - DNA, 15 bp, Homo sapiens
aatgtgggccaagag

SEQ ID NO: 160595 - DNA, 15 bp, Homo sapiens
aaatgtgggccaaga

SEQ ID NO: 160596 - DNA, 15 bp, Homo sapiens
caaatgtgggccaag

SEQ ID NO: 160597 - DNA, 15 bp, Homo sapiens
gcaaatgtgggccaa

SEQ ID NO: 160598 - DNA, 15 bp, Homo sapiens
tgcaaatgtgggcca

SEQ ID NO: 160599 - DNA, 15 bp, Homo sapiens
gtgcaaatgtgggcc

SEQ ID NO: 160600 - DNA, 15 bp, Homo sapiens
agtgcaaatgtgggc

SEQ ID NO: 160601 - DNA, 15 bp, Homo sapiens
cagtgcaaatgtggg

SEQ ID NO: 160602 - DNA, 15 bp, Homo sapiens
tcagtgcaaatgtgg

SEQ ID NO: 160603 - DNA, 15 bp, Homo sapiens
gtcagtgcaaatgtg

SEQ ID NO: 160604 - DNA, 15 bp, Homo sapiens
agtcagtgcaaatgt

SEQ ID NO: 160605 - DNA, 15 bp, Homo sapiens
gagtcagtgcaaatg

SEQ ID NO: 160606 - DNA, 15 bp, Homo sapiens
ggagtcagtgcaaat

SEQ ID NO: 160607 - DNA, 15 bp, Homo sapiens
aggagtcagtgcaaa

SEQ ID NO: 160608 - DNA, 15 bp, Homo sapiens
gaggagtcagtgcaa

SEQ ID NO: 160609 - DNA, 15 bp, Homo sapiens
tgaggagtcagtgca

SEQ ID NO: 160610 - DNA, 15 bp, Homo sapiens
gtgaggagtcagtgc

SEQ ID NO: 160611 - DNA, 15 bp, Homo sapiens
agtgaggagtcagtg

SEQ ID NO: 160612 - DNA, 15 bp, Homo sapiens
gagtgaggagtcagt

SEQ ID NO: 160613 - DNA, 15 bp, Homo sapiens
agagtgaggagtcag

SEQ ID NO: 160614 - DNA, 15 bp, Homo sapiens
cagagtgaggagtca

SEQ ID NO: 160615 - DNA, 15 bp, Homo sapiens
gcagagtgaggagtc

SEQ ID NO: 160616 - DNA, 15 bp, Homo sapiens
ggcagagtgaggagt

SEQ ID NO: 160617 - DNA, 15 bp, Homo sapiens
gggcagagtgaggag

SEQ ID NO: 160618 - DNA, 15 bp, Homo sapiens
tgggcagagtgagga

SEQ ID NO: 160619 - DNA, 15 bp, Homo sapiens
ctgggcagagtgagg

SEQ ID NO: 160620 - DNA, 15 bp, Homo sapiens
tctgggcagagtgag

SEQ ID NO: 160621 - DNA, 15 bp, Homo sapiens
ctctgggcagagtga

SEQ ID NO: 160622 - DNA, 15 bp, Homo sapiens
actctgggcagagtg

SEQ ID NO: 160623 - DNA, 15 bp, Homo sapiens
gactctgggcagagt

SEQ ID NO: 160624 - DNA, 15 bp, Homo sapiens
tgactctgggcagag

SEQ ID NO: 160625 - DNA, 15 bp, Homo sapiens
ctgactctgggcaga

SEQ ID NO: 160626 - DNA, 15 bp, Homo sapiens
gctgactctgggcag

SEQ ID NO: 160627 - DNA, 15 bp, Homo sapiens
ggctgactctgggca

SEQ ID NO: 160628 - DNA, 15 bp, Homo sapiens
tggctgactctgggc

SEQ ID NO: 160629 - DNA, 15 bp, Homo sapiens
ttggctgactctggg

SEQ ID NO: 160630 - DNA, 15 bp, Homo sapiens
cttggctgactctgg

SEQ ID NO: 160631 - DNA, 15 bp, Homo sapiens
tcttggctgactctg

SEQ ID NO: 160632 - DNA, 15 bp, Homo sapiens
ctcttggctgactct

SEQ ID NO: 160633 - DNA, 15 bp, Homo sapiens
tctcttggctgactc

SEQ ID NO: 160634 - DNA, 15 bp, Homo sapiens
ttctcttggctgact

SEQ ID NO: 160635 - DNA, 15 bp, Homo sapiens
tttctcttggctgac

SEQ ID NO: 160636 - DNA, 15 bp, Homo sapiens
ttttctcttggctga

SEQ ID NO: 160637 - DNA, 15 bp, Homo sapiens
tttttctcttggctg

SEQ ID NO: 160638 - DNA, 15 bp, Homo sapiens
gtttttctcttggct

SEQ ID NO: 160639 - DNA, 15 bp, Homo sapiens
tgtttttctcttggc

SEQ ID NO: 160640 - DNA, 15 bp, Homo sapiens
atgtttttctcttgg

SEQ ID NO: 160641 - DNA, 15 bp, Homo sapiens
aatgtttttctcttg

SEQ ID NO: 160642 - DNA, 15 bp, Homo sapiens
taatgtttttctctt

SEQ ID NO: 160643 - DNA, 15 bp, Homo sapiens
ttaatgtttttctct

SEQ ID NO: 160644 - DNA, 15 bp, Homo sapiens
gttaatgtttttctc

SEQ ID NO: 160645 - DNA, 15 bp, Homo sapiens
ggttaatgtttttct

SEQ ID NO: 160646 - DNA, 15 bp, Homo sapiens
gggttaatgtttttc

SEQ ID NO: 160647 - DNA, 15 bp, Homo sapiens
tgggttaatgttttt

SEQ ID NO: 160648 - DNA, 15 bp, Homo sapiens
ctgggttaatgtttt

SEQ ID NO: 160649 - DNA, 15 bp, Homo sapiens
tctgggttaatgttt

SEQ ID NO: 160650 - DNA, 15 bp, Homo sapiens
ctctgggttaatgtt

SEQ ID NO: 160651 - DNA, 15 bp, Homo sapiens
actctgggttaatgt

SEQ ID NO: 160652 - DNA, 15 bp, Homo sapiens
gactctgggttaatg

SEQ ID NO: 160653 - DNA, 15 bp, Homo sapiens
agactctgggttaat

SEQ ID NO: 160654 - DNA, 15 bp, Homo sapiens
cagactctgggttaa

SEQ ID NO: 160655 - DNA, 15 bp, Homo sapiens
ccagactctgggtta

SEQ ID NO: 160656 - DNA, 15 bp, Homo sapiens
cccagactctgggtt

SEQ ID NO: 160657 - DNA, 15 bp, Homo sapiens
ccccagactctgggt

SEQ ID NO: 160658 - DNA, 15 bp, Homo sapiens
accccagactctggg

SEQ ID NO: 160659 - DNA, 15 bp, Homo sapiens
gaccccagactctgg

SEQ ID NO: 160660 - DNA, 15 bp, Homo sapiens
agaccccagactctg

SEQ ID NO: 160661 - DNA, 15 bp, Homo sapiens
tagaccccagactct

SEQ ID NO: 160662 - DNA, 15 bp, Homo sapiens
ctagaccccagactc

SEQ ID NO: 160663 - DNA, 15 bp, Homo sapiens
cctagaccccagact

SEQ ID NO: 160664 - DNA, 15 bp, Homo sapiens
ccctagaccccagac

SEQ ID NO: 160665 - DNA, 15 bp, Homo sapiens
accctagaccccaga

SEQ ID NO: 160666 - DNA, 15 bp, Homo sapiens
aaccctagaccccag

SEQ ID NO: 160667 - DNA, 15 bp, Homo sapiens
caaccctagacccca

SEQ ID NO: 160668 - DNA, 15 bp, Homo sapiens
tcaaccctagacccc

SEQ ID NO: 160669 - DNA, 15 bp, Homo sapiens
ttcaaccctagaccc

SEQ ID NO: 160670 - DNA, 15 bp, Homo sapiens
tttcaaccctagacc

SEQ ID NO: 160671 - DNA, 15 bp, Homo sapiens
ttttcaaccctagac

SEQ ID NO: 160672 - DNA, 15 bp, Homo sapiens
cttttcaaccctaga

SEQ ID NO: 160673 - DNA, 15 bp, Homo sapiens
gcttttcaaccctag

SEQ ID NO: 160674 - DNA, 15 bp, Homo sapiens
agcttttcaacccta

SEQ ID NO: 160675 - DNA, 15 bp, Homo sapiens
tagcttttcaaccct

SEQ ID NO: 160676 - DNA, 15 bp, Homo sapiens
ttagcttttcaaccc

SEQ ID NO: 160677 - DNA, 15 bp, Homo sapiens
cttagcttttcaacc

SEQ ID NO: 160678 - DNA, 15 bp, Homo sapiens
ccttagcttttcaac

SEQ ID NO: 160679 - DNA, 15 bp, Homo sapiens
gccttagcttttcaa

SEQ ID NO: 160680 - DNA, 15 bp, Homo sapiens
tgccttagcttttca

SEQ ID NO: 160681 - DNA, 15 bp, Homo sapiens
ttgccttagcttttc

SEQ ID NO: 160682 - DNA, 15 bp, Homo sapiens
tttgccttagctttt

SEQ ID NO: 160683 - DNA, 15 bp, Homo sapiens
ttttgccttagcttt

SEQ ID NO: 160684 - DNA, 15 bp, Homo sapiens
tttttgccttagctt

SEQ ID NO: 160685 - DNA, 15 bp, Homo sapiens
ctttttgccttagct

SEQ ID NO: 160686 - DNA, 15 bp, Homo sapiens
gctttttgccttagc

SEQ ID NO: 160687 - DNA, 15 bp, Homo sapiens
tgctttttgccttag

SEQ ID NO: 160688 - DNA, 15 bp, Homo sapiens
gtgctttttgcctta

SEQ ID NO: 160689 - DNA, 15 bp, Homo sapiens
tgtgctttttgcctt

SEQ ID NO: 160690 - DNA, 15 bp, Homo sapiens
ctgtgctttttgcct

SEQ ID NO: 160691 - DNA, 15 bp, Homo sapiens
tctgtgctttttgcc

SEQ ID NO: 160692 - DNA, 15 bp, Homo sapiens
atctgtgctttttgc

SEQ ID NO: 160693 - DNA, 15 bp, Homo sapiens
catctgtgctttttg

SEQ ID NO: 160694 - DNA, 15 bp, Homo sapiens
gcatctgtgcttttt

SEQ ID NO: 160695 - DNA, 15 bp, Homo sapiens
tgcatctgtgctttt

SEQ ID NO: 160696 - DNA, 15 bp, Homo sapiens
ctgcatctgtgcttt

SEQ ID NO: 160697 - DNA, 15 bp, Homo sapiens
cctgcatctgtgctt

SEQ ID NO: 160698 - DNA, 15 bp, Homo sapiens
ccctgcatctgtgct

SEQ ID NO: 160699 - DNA, 15 bp, Homo sapiens
cccctgcatctgtgc

SEQ ID NO: 160700 - DNA, 15 bp, Homo sapiens
ccccctgcatctgtg

SEQ ID NO: 160701 - DNA, 15 bp, Homo sapiens
gccccctgcatctgt

SEQ ID NO: 160702 - DNA, 15 bp, Homo sapiens
tgccccctgcatctg

SEQ ID NO: 160703 - DNA, 15 bp, Homo sapiens
ctgccccctgcatct

SEQ ID NO: 160704 - DNA, 15 bp, Homo sapiens
tctgccccctgcatc

SEQ ID NO: 160705 - DNA, 15 bp, Homo sapiens
gtctgccccctgcat

SEQ ID NO: 160706 - DNA, 15 bp, Homo sapiens
tgtctgccccctgca

SEQ ID NO: 160707 - DNA, 15 bp, Homo sapiens
ctgtctgccccctgc

SEQ ID NO: 160708 - DNA, 15 bp, Homo sapiens
tctgtctgccccctg

SEQ ID NO: 160709 - DNA, 15 bp, Homo sapiens
ttctgtctgccccct

SEQ ID NO: 160710 - DNA, 15 bp, Homo sapiens
tttctgtctgccccc

SEQ ID NO: 160711 - DNA, 15 bp, Homo sapiens
ctttctgtctgcccc

SEQ ID NO: 160712 - DNA, 15 bp, Homo sapiens
cctttctgtctgccc

SEQ ID NO: 160713 - DNA, 15 bp, Homo sapiens
gcctttctgtctgcc

SEQ ID NO: 160714 - DNA, 15 bp, Homo sapiens
ggcctttctgtctgc

SEQ ID NO: 160715 - DNA, 15 bp, Homo sapiens
tggcctttctgtctg

SEQ ID NO: 160716 - DNA, 15 bp, Homo sapiens
gtggcctttctgtct

SEQ ID NO: 160717 - DNA, 15 bp, Homo sapiens
tgtggcctttctgtc

SEQ ID NO: 160718 - DNA, 15 bp, Homo sapiens
ctgtggcctttctgt

SEQ ID NO: 160719 - DNA, 15 bp, Homo sapiens
cctgtggcctttctg

SEQ ID NO: 160720 - DNA, 15 bp, Homo sapiens
tcctgtggcctttct

SEQ ID NO: 160721 - DNA, 15 bp, Homo sapiens
gtcctgtggcctttc

SEQ ID NO: 160722 - DNA, 15 bp, Homo sapiens
agtcctgtggccttt

SEQ ID NO: 160723 - DNA, 15 bp, Homo sapiens
gagtcctgtggcctt

SEQ ID NO: 160724 - DNA, 15 bp, Homo sapiens
tgagtcctgtggcct

SEQ ID NO: 160725 - DNA, 15 bp, Homo sapiens
ctgagtcctgtggcc

SEQ ID NO: 160726 - DNA, 15 bp, Homo sapiens
cctgagtcctgtggc

SEQ ID NO: 160727 - DNA, 15 bp, Homo sapiens
acctgagtcctgtgg

SEQ ID NO: 160728 - DNA, 15 bp, Homo sapiens
cacctgagtcctgtg

SEQ ID NO: 160729 - DNA, 15 bp, Homo sapiens
tcacctgagtcctgt

SEQ ID NO: 160730 - DNA, 15 bp, Homo sapiens
ctcacctgagtcctg

SEQ ID NO: 160731 - DNA, 15 bp, Homo sapiens
cctcacctgagtcct

SEQ ID NO: 160732 - DNA, 15 bp, Homo sapiens
acctcacctgagtcc

SEQ ID NO: 160733 - DNA, 15 bp, Homo sapiens
gacctcacctgagtc

SEQ ID NO: 160734 - DNA, 15 bp, Homo sapiens
agacctcacctgagt

SEQ ID NO: 160735 - DNA, 15 bp, Homo sapiens
gagacctcacctgag

SEQ ID NO: 160736 - DNA, 15 bp, Homo sapiens
agagacctcacctga

SEQ ID NO: 160737 - DNA, 15 bp, Homo sapiens
cagagacctcacctg

SEQ ID NO: 160738 - DNA, 15 bp, Homo sapiens
gcagagacctcacct

SEQ ID NO: 160739 - DNA, 15 bp, Homo sapiens
ggcagagacctcacc

SEQ ID NO: 160740 - DNA, 15 bp, Homo sapiens
cggcagagacctcac

SEQ ID NO: 160741 - DNA, 15 bp, Homo sapiens
ccggcagagacctca

SEQ ID NO: 160742 - DNA, 15 bp, Homo sapiens
cccggcagagacctc

SEQ ID NO: 160743 - DNA, 15 bp, Homo sapiens
gcccggcagagacct

SEQ ID NO: 160744 - DNA, 15 bp, Homo sapiens
agcccggcagagacc

SEQ ID NO: 160745 - DNA, 15 bp, Homo sapiens
cagcccggcagagac

SEQ ID NO: 160746 - DNA, 15 bp, Homo sapiens
ccagcccggcagaga

SEQ ID NO: 160747 - DNA, 15 bp, Homo sapiens
cccagcccggcagag

SEQ ID NO: 160748 - DNA, 15 bp, Homo sapiens
gcccagcccggcaga

SEQ ID NO: 160749 - DNA, 15 bp, Homo sapiens
ggcccagcccggcag

SEQ ID NO: 160750 - DNA, 15 bp, Homo sapiens
tggcccagcccggca

SEQ ID NO: 160751 - DNA, 15 bp, Homo sapiens
ctggcccagcccggc

SEQ ID NO: 160752 - DNA, 15 bp, Homo sapiens
cctggcccagcccgg

SEQ ID NO: 160753 - DNA, 15 bp, Homo sapiens
tcctggcccagcccg

SEQ ID NO: 160754 - DNA, 15 bp, Homo sapiens
ctcctggcccagccc

SEQ ID NO: 160755 - DNA, 15 bp, Homo sapiens
gctcctggcccagcc

SEQ ID NO: 160756 - DNA, 15 bp, Homo sapiens
ggctcctggcccagc

SEQ ID NO: 160757 - DNA, 15 bp, Homo sapiens
tggctcctggcccag

SEQ ID NO: 160758 - DNA, 15 bp, Homo sapiens
ctggctcctggccca

SEQ ID NO: 160759 - DNA, 15 bp, Homo sapiens
cctggctcctggccc

SEQ ID NO: 160760 - DNA, 15 bp, Homo sapiens
ccctggctcctggcc

SEQ ID NO: 160761 - DNA, 15 bp, Homo sapiens
cccctggctcctggc

SEQ ID NO: 160762 - DNA, 15 bp, Homo sapiens
tcccctggctcctgg

SEQ ID NO: 160763 - DNA, 15 bp, Homo sapiens
gtcccctggctcctg

SEQ ID NO: 160764 - DNA, 15 bp, Homo sapiens
agtcccctggctcct

SEQ ID NO: 160765 - DNA, 15 bp, Homo sapiens
cagtcccctggctcc

SEQ ID NO: 160766 - DNA, 15 bp, Homo sapiens
gcagtcccctggctc

SEQ ID NO: 160767 - DNA, 15 bp, Homo sapiens
ggcagtcccctggct

SEQ ID NO: 160768 - DNA, 15 bp, Homo sapiens
tggcagtcccctggc

SEQ ID NO: 160769 - DNA, 15 bp, Homo sapiens
gtggcagtcccctgg

SEQ ID NO: 160770 - DNA, 15 bp, Homo sapiens
agtggcagtcccctg

SEQ ID NO: 160771 - DNA, 15 bp, Homo sapiens
gagtggcagtcccct

SEQ ID NO: 160772 - DNA, 15 bp, Homo sapiens
tgagtggcagtcccc

SEQ ID NO: 160773 - DNA, 15 bp, Homo sapiens
gtgagtggcagtccc

SEQ ID NO: 160774 - DNA, 15 bp, Homo sapiens
ggtgagtggcagtcc

SEQ ID NO: 160775 - DNA, 15 bp, Homo sapiens
tggtgagtggcagtc

SEQ ID NO: 160776 - DNA, 15 bp, Homo sapiens
ctggtgagtggcagt

SEQ ID NO: 160777 - DNA, 15 bp, Homo sapiens
actggtgagtggcag

SEQ ID NO: 160778 - DNA, 15 bp, Homo sapiens
cactggtgagtggca

SEQ ID NO: 160779 - DNA, 15 bp, Homo sapiens
acactggtgagtggc

SEQ ID NO: 160780 - DNA, 15 bp, Homo sapiens
gacactggtgagtgg

SEQ ID NO: 160781 - DNA, 15 bp, Homo sapiens
ggacactggtgagtg

SEQ ID NO: 160782 - DNA, 15 bp, Homo sapiens
gggacactggtgagt

SEQ ID NO: 160783 - DNA, 15 bp, Homo sapiens
ggggacactggtgag

SEQ ID NO: 160784 - DNA, 15 bp, Homo sapiens
aggggacactggtga

SEQ ID NO: 160785 - DNA, 15 bp, Homo sapiens
caggggacactggtg

SEQ ID NO: 160786 - DNA, 15 bp, Homo sapiens
gcaggggacactggt

SEQ ID NO: 160787 - DNA, 15 bp, Homo sapiens
tgcaggggacactgg

SEQ ID NO: 160788 - DNA, 15 bp, Homo sapiens
ctgcaggggacactg

SEQ ID NO: 160789 - DNA, 15 bp, Homo sapiens
cctgcaggggacact

SEQ ID NO: 160790 - DNA, 15 bp, Homo sapiens
acctgcaggggacac

SEQ ID NO: 160791 - DNA, 15 bp, Homo sapiens
cacctgcaggggaca

SEQ ID NO: 160792 - DNA, 15 bp, Homo sapiens
ccacctgcaggggac

SEQ ID NO: 160793 - DNA, 15 bp, Homo sapiens
tccacctgcagggga

SEQ ID NO: 160794 - DNA, 15 bp, Homo sapiens
ctccacctgcagggg

SEQ ID NO: 160795 - DNA, 15 bp, Homo sapiens
gctccacctgcaggg

SEQ ID NO: 160796 - DNA, 15 bp, Homo sapiens
tgctccacctgcagg

SEQ ID NO: 160797 - DNA, 15 bp, Homo sapiens
ctgctccacctgcag

SEQ ID NO: 160798 - DNA, 15 bp, Homo sapiens
tctgctccacctgca

SEQ ID NO: 160799 - DNA, 15 bp, Homo sapiens
atctgctccacctgc

SEQ ID NO: 160800 - DNA, 15 bp, Homo sapiens
catctgctccacctg

SEQ ID NO: 160801 - DNA, 15 bp, Homo sapiens
acatctgctccacct

SEQ ID NO: 160802 - DNA, 15 bp, Homo sapiens
aacatctgctccacc

SEQ ID NO: 160803 - DNA, 15 bp, Homo sapiens
gaacatctgctccac

SEQ ID NO: 160804 - DNA, 15 bp, Homo sapiens
cgaacatctgctcca

SEQ ID NO: 160805 - DNA, 15 bp, Homo sapiens
gcgaacatctgctcc

SEQ ID NO: 160806 - DNA, 15 bp, Homo sapiens
ggcgaacatctgctc

SEQ ID NO: 160807 - DNA, 15 bp, Homo sapiens
gggcgaacatctgct

SEQ ID NO: 160808 - DNA, 15 bp, Homo sapiens
agggcgaacatctgc

SEQ ID NO: 160809 - DNA, 15 bp, Homo sapiens
cagggcgaacatctg

SEQ ID NO: 160810 - DNA, 15 bp, Homo sapiens
tcagggcgaacatct

SEQ ID NO: 160811 - DNA, 15 bp, Homo sapiens
gtcagggcgaacatc

SEQ ID NO: 160812 - DNA, 15 bp, Homo sapiens
tgtcagggcgaacat

SEQ ID NO: 160813 - DNA, 15 bp, Homo sapiens
gtgtcagggcgaaca

SEQ ID NO: 160814 - DNA, 15 bp, Homo sapiens
ggtgtcagggcgaac

SEQ ID NO: 160815 - DNA, 15 bp, Homo sapiens
gggtgtcagggcgaa

SEQ ID NO: 160816 - DNA, 15 bp, Homo sapiens
tgggtgtcagggcga

SEQ ID NO: 160817 - DNA, 15 bp, Homo sapiens
atgggtgtcagggcg

SEQ ID NO: 160818 - DNA, 15 bp, Homo sapiens
catgggtgtcagggc

SEQ ID NO: 160819 - DNA, 15 bp, Homo sapiens
ccatgggtgtcaggg

SEQ ID NO: 160820 - DNA, 15 bp, Homo sapiens
tccatgggtgtcagg

SEQ ID NO: 160821 - DNA, 15 bp, Homo sapiens
gtccatgggtgtcag

SEQ ID NO: 160822 - DNA, 15 bp, Homo sapiens
ggtccatgggtgtca

SEQ ID NO: 160823 - DNA, 15 bp, Homo sapiens
aggtccatgggtgtc

SEQ ID NO: 160824 - DNA, 15 bp, Homo sapiens
caggtccatgggtgt

SEQ ID NO: 160825 - DNA, 15 bp, Homo sapiens
ccaggtccatgggtg

SEQ ID NO: 160826 - DNA, 15 bp, Homo sapiens
gccaggtccatgggt

SEQ ID NO: 160827 - DNA, 15 bp, Homo sapiens
cgccaggtccatggg

SEQ ID NO: 160828 - DNA, 15 bp, Homo sapiens
ccgccaggtccatgg

SEQ ID NO: 160829 - DNA, 15 bp, Homo sapiens
cccgccaggtccatg

SEQ ID NO: 160830 - DNA, 15 bp, Homo sapiens
ccccgccaggtccat

SEQ ID NO: 160831 - DNA, 15 bp, Homo sapiens
tccccgccaggtcca

SEQ ID NO: 160832 - DNA, 15 bp, Homo sapiens
ttccccgccaggtcc

SEQ ID NO: 160833 - DNA, 15 bp, Homo sapiens
gttccccgccaggtc

SEQ ID NO: 160834 - DNA, 15 bp, Homo sapiens
tgttccccgccaggt

SEQ ID NO: 160835 - DNA, 15 bp, Homo sapiens
atgttccccgccagg

SEQ ID NO: 160836 - DNA, 15 bp, Homo sapiens
gatgttccccgccag

SEQ ID NO: 160837 - DNA, 15 bp, Homo sapiens
cgatgttccccgcca

SEQ ID NO: 160838 - DNA, 15 bp, Homo sapiens
tcgatgttccccgcc

SEQ ID NO: 160839 - DNA, 15 bp, Homo sapiens
gtcgatgttccccgc

SEQ ID NO: 160840 - DNA, 15 bp, Homo sapiens
agtcgatgttccccg

SEQ ID NO: 160841 - DNA, 15 bp, Homo sapiens
tagtcgatgttcccc

SEQ ID NO: 160842 - DNA, 15 bp, Homo sapiens
gtagtcgatgttccc

SEQ ID NO: 160843 - DNA, 15 bp, Homo sapiens
tgtagtcgatgttcc

SEQ ID NO: 160844 - DNA, 15 bp, Homo sapiens
ttgtagtcgatgttc

SEQ ID NO: 160845 - DNA, 15 bp, Homo sapiens
cttgtagtcgatgtt

SEQ ID NO: 160846 - DNA, 15 bp, Homo sapiens
acttgtagtcgatgt

SEQ ID NO: 160847 - DNA, 15 bp, Homo sapiens
gacttgtagtcgatg

SEQ ID NO: 160848 - DNA, 15 bp, Homo sapiens
tgacttgtagtcgat

SEQ ID NO: 160849 - DNA, 15 bp, Homo sapiens
gtgacttgtagtcga

SEQ ID NO: 160850 - DNA, 15 bp, Homo sapiens
agtgacttgtagtcg

SEQ ID NO: 160851 - DNA, 15 bp, Homo sapiens
cagtgacttgtagtc

SEQ ID NO: 160852 - DNA, 15 bp, Homo sapiens
acagtgacttgtagt

SEQ ID NO: 160853 - DNA, 15 bp, Homo sapiens
cacagtgacttgtag

SEQ ID NO: 160854 - DNA, 15 bp, Homo sapiens
gcacagtgacttgta

SEQ ID NO: 160855 - DNA, 15 bp, Homo sapiens
agcacagtgacttgt

SEQ ID NO: 160856 - DNA, 15 bp, Homo sapiens
tagcacagtgacttg

SEQ ID NO: 160857 - DNA, 15 bp, Homo sapiens
gtagcacagtgactt

SEQ ID NO: 160858 - DNA, 15 bp, Homo sapiens
tgtagcacagtgact

SEQ ID NO: 160859 - DNA, 15 bp, Homo sapiens
atgtagcacagtgac

SEQ ID NO: 160860 - DNA, 15 bp, Homo sapiens
gatgtagcacagtga

SEQ ID NO: 160861 - DNA, 15 bp, Homo sapiens
tgatgtagcacagtg

SEQ ID NO: 160862 - DNA, 15 bp, Homo sapiens
atgatgtagcacagt

SEQ ID NO: 160863 - DNA, 15 bp, Homo sapiens
gatgatgtagcacag

SEQ ID NO: 160864 - DNA, 15 bp, Homo sapiens
tgatgatgtagcaca

SEQ ID NO: 160865 - DNA, 15 bp, Homo sapiens
gtgatgatgtagcac

SEQ ID NO: 160866 - DNA, 15 bp, Homo sapiens
ggtgatgatgtagca

SEQ ID NO: 160867 - DNA, 15 bp, Homo sapiens
gggtgatgatgtagc

SEQ ID NO: 160868 - DNA, 15 bp, Homo sapiens
tgggtgatgatgtag

SEQ ID NO: 160869 - DNA, 15 bp, Homo sapiens
atgggtgatgatgta

SEQ ID NO: 160870 - DNA, 15 bp, Homo sapiens
catgggtgatgatgt

SEQ ID NO: 160871 - DNA, 15 bp, Homo sapiens
ccatgggtgatgatg

SEQ ID NO: 160872 - DNA, 15 bp, Homo sapiens
tccatgggtgatgat

SEQ ID NO: 160873 - DNA, 15 bp, Homo sapiens
ctccatgggtgatga

SEQ ID NO: 160874 - DNA, 15 bp, Homo sapiens
tctccatgggtgatg

SEQ ID NO: 160875 - DNA, 15 bp, Homo sapiens
gtctccatgggtgat

SEQ ID NO: 160876 - DNA, 15 bp, Homo sapiens
cgtctccatgggtga

SEQ ID NO: 160877 - DNA, 15 bp, Homo sapiens
tcgtctccatgggtg

SEQ ID NO: 160878 - DNA, 15 bp, Homo sapiens
ctcgtctccatgggt

SEQ ID NO: 160879 - DNA, 15 bp, Homo sapiens
tctcgtctccatggg

SEQ ID NO: 160880 - DNA, 15 bp, Homo sapiens
ttctcgtctccatgg

SEQ ID NO: 160881 - DNA, 15 bp, Homo sapiens
tttctcgtctccatg

SEQ ID NO: 160882 - DNA, 15 bp, Homo sapiens
ctttctcgtctccat

SEQ ID NO: 160883 - DNA, 15 bp, Homo sapiens
tctttctcgtctcca

SEQ ID NO: 160884 - DNA, 15 bp, Homo sapiens
ctctttctcgtctcc

SEQ ID NO: 160885 - DNA, 15 bp, Homo sapiens
cctctttctcgtctc

SEQ ID NO: 160886 - DNA, 15 bp, Homo sapiens
tcctctttctcgtct

SEQ ID NO: 160887 - DNA, 15 bp, Homo sapiens
ttcctctttctcgtc

SEQ ID NO: 160888 - DNA, 15 bp, Homo sapiens
attcctctttctcgt

SEQ ID NO: 160889 - DNA, 15 bp, Homo sapiens
cattcctctttctcg

SEQ ID NO: 160890 - DNA, 15 bp, Homo sapiens
tcattcctctttctc

SEQ ID NO: 160891 - DNA, 15 bp, Homo sapiens
ctcattcctctttct

SEQ ID NO: 160892 - DNA, 15 bp, Homo sapiens
cctcattcctctttc

SEQ ID NO: 160893 - DNA, 15 bp, Homo sapiens
ccctcattcctcttt

SEQ ID NO: 160894 - DNA, 15 bp, Homo sapiens
cccctcattcctctt

SEQ ID NO: 160895 - DNA, 15 bp, Homo sapiens
gcccctcattcctct

SEQ ID NO: 160896 - DNA, 15 bp, Homo sapiens
tgcccctcattcctc

SEQ ID NO: 160897 - DNA, 15 bp, Homo sapiens
ctgcccctcattcct

SEQ ID NO: 160898 - DNA, 15 bp, Homo sapiens
cctgcccctcattcc

SEQ ID NO: 160899 - DNA, 15 bp, Homo sapiens
ccctgcccctcattc

SEQ ID NO: 160900 - DNA, 15 bp, Homo sapiens
gccctgcccctcatt

SEQ ID NO: 160901 - DNA, 15 bp, Homo sapiens
ggccctgcccctcat

SEQ ID NO: 160902 - DNA, 15 bp, Homo sapiens
tggccctgcccctca

SEQ ID NO: 160903 - DNA, 15 bp, Homo sapiens
ctggccctgcccctc

SEQ ID NO: 160904 - DNA, 15 bp, Homo sapiens
cctggccctgcccct

SEQ ID NO: 160905 - DNA, 15 bp, Homo sapiens
gcctggccctgcccc

SEQ ID NO: 160906 - DNA, 15 bp, Homo sapiens
ggcctggccctgccc

SEQ ID NO: 160907 - DNA, 15 bp, Homo sapiens
gggcctggccctgcc

SEQ ID NO: 160908 - DNA, 15 bp, Homo sapiens
tgggcctggccctgc

SEQ ID NO: 160909 - DNA, 15 bp, Homo sapiens
gtgggcctggccctg

SEQ ID NO: 160910 - DNA, 15 bp, Homo sapiens
cgtgggcctggccct

SEQ ID NO: 160911 - DNA, 15 bp, Homo sapiens
ccgtgggcctggccc

SEQ ID NO: 160912 - DNA, 15 bp, Homo sapiens
cccgtgggcctggcc

SEQ ID NO: 160913 - DNA, 15 bp, Homo sapiens
ccccgtgggcctggc

SEQ ID NO: 160914 - DNA, 15 bp, Homo sapiens
cccccgtgggcctgg

SEQ ID NO: 160915 - DNA, 15 bp, Homo sapiens
ccccccgtgggcctg

SEQ ID NO: 160916 - DNA, 15 bp, Homo sapiens
cccccccgtgggcct

SEQ ID NO: 160917 - DNA, 15 bp, Homo sapiens
gcccccccgtgggcc

SEQ ID NO: 160918 - DNA, 15 bp, Homo sapiens
tgcccccccgtgggc

SEQ ID NO: 160919 - DNA, 15 bp, Homo sapiens
gtgcccccccgtggg

SEQ ID NO: 160920 - DNA, 15 bp, Homo sapiens
ggtgcccccccgtgg

SEQ ID NO: 160921 - DNA, 15 bp, Homo sapiens
aggtgcccccccgtg

SEQ ID NO: 160922 - DNA, 15 bp, Homo sapiens
gaggtgcccccccgt

SEQ ID NO: 160923 - DNA, 15 bp, Homo sapiens
tgaggtgcccccccg

SEQ ID NO: 160924 - DNA, 15 bp, Homo sapiens
ttgaggtgccccccc

SEQ ID NO: 160925 - DNA, 15 bp, Homo sapiens
attgaggtgcccccc

SEQ ID NO: 160926 - DNA, 15 bp, Homo sapiens
tattgaggtgccccc

SEQ ID NO: 160927 - DNA, 15 bp, Homo sapiens
ttattgaggtgcccc

SEQ ID NO: 160928 - DNA, 15 bp, Homo sapiens
tttattgaggtgccc

SEQ ID NO: 160929 - DNA, 15 bp, Homo sapiens
gtttattgaggtgcc

SEQ ID NO: 160930 - DNA, 15 bp, Homo sapiens
agtttattgaggtgc

SEQ ID NO: 160931 - DNA, 15 bp, Homo sapiens
gagtttattgaggtg

SEQ ID NO: 160932 - DNA, 15 bp, Homo sapiens
agagtttattgaggt

SEQ ID NO: 160933 - DNA, 15 bp, Homo sapiens
cagagtttattgagg

SEQ ID NO: 160934 - DNA, 15 bp, Homo sapiens
acagagtttattgag

SEQ ID NO: 160935 - DNA, 15 bp, Homo sapiens
aacagagtttattga

SEQ ID NO: 160936 - DNA, 15 bp, Homo sapiens
caacagagtttattg

SEQ ID NO: 160937 - DNA, 15 bp, Homo sapiens
gcaacagagtttatt

SEQ ID NO: 160938 - DNA, 15 bp, Homo sapiens
tgcaacagagtttat

SEQ ID NO: 160939 - DNA, 15 bp, Homo sapiens
ttgcaacagagttta

SEQ ID NO: 160940 - DNA, 15 bp, Homo sapiens
tttgcaacagagttt

SEQ ID NO: 160941 - DNA, 15 bp, Homo sapiens
ttttgcaacagagtt

SEQ ID NO: 160942 - DNA, 15 bp, Homo sapiens
attttgcaacagagt

SEQ ID NO: 160943 - DNA, 15 bp, Homo sapiens
aattttgcaacagag

SEQ ID NO: 160944 - DNA, 15 bp, Homo sapiens
caattttgcaacaga

SEQ ID NO: 160945 - DNA, 15 bp, Homo sapiens
ccaattttgcaacag

SEQ ID NO: 160946 - DNA, 15 bp, Homo sapiens
tccaattttgcaaca

SEQ ID NO: 160947 - DNA, 15 bp, Homo sapiens
ttccaattttgcaac

SEQ ID NO: 160948 - DNA, 15 bp, Homo sapiens
attccaattttgcaa

SEQ ID NO: 160949 - DNA, 15 bp, Homo sapiens
aattccaattttgca

SEQ ID NO: 160950 - DNA, 15 bp, Homo sapiens
caattccaattttgc

SEQ ID NO: 160951 - DNA, 15 bp, Homo sapiens
gcaattccaattttg

SEQ ID NO: 160952 - DNA, 15 bp, Homo sapiens
agcaattccaatttt

SEQ ID NO: 160953 - DNA, 15 bp, Homo sapiens
cagcaattccaattt

SEQ ID NO: 160954 - DNA, 15 bp, Homo sapiens
acagcaattccaatt

SEQ ID NO: 160955 - DNA, 15 bp, Homo sapiens
cacagcaattccaat

SEQ ID NO: 160956 - DNA, 15 bp, Homo sapiens
ccacagcaattccaa

SEQ ID NO: 160957 - DNA, 15 bp, Homo sapiens
accacagcaattcca

SEQ ID NO: 160958 - DNA, 15 bp, Homo sapiens
caccacagcaattcc

SEQ ID NO: 160959 - DNA, 15 bp, Homo sapiens
acaccacagcaattc

SEQ ID NO: 160960 - DNA, 15 bp, Homo sapiens
gacaccacagcaatt

SEQ ID NO: 160961 - DNA, 15 bp, Homo sapiens
agacaccacagcaat

SEQ ID NO: 160962 - DNA, 15 bp, Homo sapiens
aagacaccacagcaa

SEQ ID NO: 160963 - DNA, 15 bp, Homo sapiens
caagacaccacagca

SEQ ID NO: 160964 - DNA, 15 bp, Homo sapiens
acaagacaccacagc

SEQ ID NO: 160965 - DNA, 15 bp, Homo sapiens
gacaagacaccacag

SEQ ID NO: 160966 - DNA, 15 bp, Homo sapiens
agacaagacaccaca

SEQ ID NO: 160967 - DNA, 15 bp, Homo sapiens
cagacaagacaccac

SEQ ID NO: 160968 - DNA, 15 bp, Homo sapiens
acagacaagacacca

SEQ ID NO: 160969 - DNA, 15 bp, Homo sapiens
cacagacaagacacc

SEQ ID NO: 160970 - DNA, 15 bp, Homo sapiens
tcacagacaagacac

SEQ ID NO: 160971 - DNA, 15 bp, Homo sapiens
gtcacagacaagaca

SEQ ID NO: 160972 - DNA, 15 bp, Homo sapiens
tgtcacagacaagac

SEQ ID NO: 160973 - DNA, 15 bp, Homo sapiens
ctgtcacagacaaga

SEQ ID NO: 160974 - DNA, 15 bp, Homo sapiens
tctgtcacagacaag

SEQ ID NO: 160975 - DNA, 15 bp, Homo sapiens
atctgtcacagacaa

SEQ ID NO: 160976 - DNA, 15 bp, Homo sapiens
catctgtcacagaca

SEQ ID NO: 160977 - DNA, 15 bp, Homo sapiens
ccatctgtcacagac

SEQ ID NO: 160978 - DNA, 15 bp, Homo sapiens
cccatctgtcacaga

SEQ ID NO: 160979 - DNA, 15 bp, Homo sapiens
acccatctgtcacag

SEQ ID NO: 160980 - DNA, 15 bp, Homo sapiens
aacccatctgtcaca

SEQ ID NO: 160981 - DNA, 15 bp, Homo sapiens
caacccatctgtcac

SEQ ID NO: 160982 - DNA, 15 bp, Homo sapiens
ccaacccatctgtca

SEQ ID NO: 160983 - DNA, 15 bp, Homo sapiens
cccaacccatctgtc

SEQ ID NO: 160984 - DNA, 15 bp, Homo sapiens
ccccaacccatctgt

SEQ ID NO: 160985 - DNA, 15 bp, Homo sapiens
tccccaacccatctg

SEQ ID NO: 160986 - DNA, 15 bp, Homo sapiens
gtccccaacccatct

SEQ ID NO: 160987 - DNA, 15 bp, Homo sapiens
ggtccccaacccatc

SEQ ID NO: 160988 - DNA, 15 bp, Homo sapiens
tggtccccaacccat

SEQ ID NO: 160989 - DNA, 15 bp, Homo sapiens
ctggtccccaaccca

SEQ ID NO: 160990 - DNA, 15 bp, Homo sapiens
gctggtccccaaccc

SEQ ID NO: 160991 - DNA, 15 bp, Homo sapiens
ggctggtccccaacc

SEQ ID NO: 160992 - DNA, 15 bp, Homo sapiens
tggctggtccccaac

SEQ ID NO: 160993 - DNA, 15 bp, Homo sapiens
ttggctggtccccaa

SEQ ID NO: 160994 - DNA, 15 bp, Homo sapiens
cttggctggtcccca

SEQ ID NO: 160995 - DNA, 15 bp, Homo sapiens
ccttggctggtcccc

SEQ ID NO: 160996 - DNA, 15 bp, Homo sapiens
cccttggctggtccc

SEQ ID NO: 160997 - DNA, 15 bp, Homo sapiens
ccccttggctggtcc

SEQ ID NO: 160998 - DNA, 15 bp, Homo sapiens
cccccttggctggtc

SEQ ID NO: 160999 - DNA, 15 bp, Homo sapiens
tcccccttggctggt

SEQ ID NO: 161000 - DNA, 15 bp, Homo sapiens
atcccccttggctgg

SEQ ID NO: 161001 - DNA, 15 bp, Homo sapiens
gatcccccttggctg

SEQ ID NO: 161002 - DNA, 15 bp, Homo sapiens
ggatcccccttggct

SEQ ID NO: 161003 - DNA, 15 bp, Homo sapiens
gggatcccccttggc

SEQ ID NO: 161004 - DNA, 15 bp, Homo sapiens
tgggatcccccttgg

SEQ ID NO: 161005 - DNA, 15 bp, Homo sapiens
ctgggatcccccttg

SEQ ID NO: 161006 - DNA, 15 bp, Homo sapiens
cctgggatccccctt

SEQ ID NO: 161007 - DNA, 15 bp, Homo sapiens
ccctgggatccccct

SEQ ID NO: 161008 - DNA, 15 bp, Homo sapiens
accctgggatccccc

SEQ ID NO: 161009 - DNA, 15 bp, Homo sapiens
gaccctgggatcccc

SEQ ID NO: 161010 - DNA, 15 bp, Homo sapiens
agaccctgggatccc

SEQ ID NO: 161011 - DNA, 15 bp, Homo sapiens
gagaccctgggatcc

SEQ ID NO: 161012 - DNA, 15 bp, Homo sapiens
tgagaccctgggatc

SEQ ID NO: 161013 - DNA, 15 bp, Homo sapiens
ctgagaccctgggat

SEQ ID NO: 161014 - DNA, 15 bp, Homo sapiens
actgagaccctggga

SEQ ID NO: 161015 - DNA, 15 bp, Homo sapiens
cactgagaccctggg

SEQ ID NO: 161016 - DNA, 15 bp, Homo sapiens
gcactgagaccctgg

SEQ ID NO: 161017 - DNA, 15 bp, Homo sapiens
cgcactgagaccctg

SEQ ID NO: 161018 - DNA, 15 bp, Homo sapiens
gcgcactgagaccct

SEQ ID NO: 161019 - DNA, 15 bp, Homo sapiens
tgcgcactgagaccc

SEQ ID NO: 161020 - DNA, 15 bp, Homo sapiens
gtgcgcactgagacc

SEQ ID NO: 161021 - DNA, 15 bp, Homo sapiens
tgtgcgcactgagac

SEQ ID NO: 161022 - DNA, 15 bp, Homo sapiens
atgtgcgcactgaga

SEQ ID NO: 161023 - DNA, 15 bp, Homo sapiens
gatgtgcgcactgag

SEQ ID NO: 161024 - DNA, 15 bp, Homo sapiens
tgatgtgcgcactga

SEQ ID NO: 161025 - DNA, 15 bp, Homo sapiens
gtgatgtgcgcactg

SEQ ID NO: 161026 - DNA, 15 bp, Homo sapiens
ggtgatgtgcgcact

SEQ ID NO: 161027 - DNA, 15 bp, Homo sapiens
tggtgatgtgcgcac

SEQ ID NO: 161028 - DNA, 15 bp, Homo sapiens
atggtgatgtgcgca

SEQ ID NO: 161029 - DNA, 15 bp, Homo sapiens
catggtgatgtgcgc

SEQ ID NO: 161030 - DNA, 15 bp, Homo sapiens
tcatggtgatgtgcg

SEQ ID NO: 161031 - DNA, 15 bp, Homo sapiens
atcatggtgatgtgc

SEQ ID NO: 161032 - DNA, 15 bp, Homo sapiens
gatcatggtgatgtg

SEQ ID NO: 161033 - DNA, 15 bp, Homo sapiens
tgatcatggtgatgt

SEQ ID NO: 161034 - DNA, 15 bp, Homo sapiens
atgatcatggtgatg

SEQ ID NO: 161035 - DNA, 15 bp, Homo sapiens
catgatcatggtgat

SEQ ID NO: 161036 - DNA, 15 bp, Homo sapiens
ccatgatcatggtga

SEQ ID NO: 161037 - DNA, 15 bp, Homo sapiens
gccatgatcatggtg

SEQ ID NO: 161038 - DNA, 15 bp, Homo sapiens
ggccatgatcatggt

SEQ ID NO: 161039 - DNA, 15 bp, Homo sapiens
tggccatgatcatgg

SEQ ID NO: 161040 - DNA, 15 bp, Homo sapiens
gtggccatgatcatg

SEQ ID NO: 161041 - DNA, 15 bp, Homo sapiens
ggtggccatgatcat

SEQ ID NO: 161042 - DNA, 15 bp, Homo sapiens
tggtggccatgatca

SEQ ID NO: 161043 - DNA, 15 bp, Homo sapiens
atggtggccatgatc

SEQ ID NO: 161044 - DNA, 15 bp, Homo sapiens
gatggtggccatgat

SEQ ID NO: 161045 - DNA, 15 bp, Homo sapiens
agatggtggccatga

SEQ ID NO: 161046 - DNA, 15 bp, Homo sapiens
tagatggtggccatg

SEQ ID NO: 161047 - DNA, 15 bp, Homo sapiens
gtagatggtggccat

SEQ ID NO: 161048 - DNA, 15 bp, Homo sapiens
ggtagatggtggcca

SEQ ID NO: 161049 - DNA, 15 bp, Homo sapiens
aggtagatggtggcc

SEQ ID NO: 161050 - DNA, 15 bp, Homo sapiens
gaggtagatggtggc

SEQ ID NO: 161051 - DNA, 15 bp, Homo sapiens
ggaggtagatggtgg

SEQ ID NO: 161052 - DNA, 15 bp, Homo sapiens
aggaggtagatggtg

SEQ ID NO: 161053 - DNA, 15 bp, Homo sapiens
caggaggtagatggt

SEQ ID NO: 161054 - DNA, 15 bp, Homo sapiens
ccaggaggtagatgg

SEQ ID NO: 161055 - DNA, 15 bp, Homo sapiens
cccaggaggtagatg

SEQ ID NO: 161056 - DNA, 15 bp, Homo sapiens
tcccaggaggtagat

SEQ ID NO: 161057 - DNA, 15 bp, Homo sapiens
ctcccaggaggtaga

SEQ ID NO: 161058 - DNA, 15 bp, Homo sapiens
gctcccaggaggtag

SEQ ID NO: 161059 - DNA, 15 bp, Homo sapiens
agctcccaggaggta

SEQ ID NO: 161060 - DNA, 15 bp, Homo sapiens
cagctcccaggaggt

SEQ ID NO: 161061 - DNA, 15 bp, Homo sapiens
ccagctcccaggagg

SEQ ID NO: 161062 - DNA, 15 bp, Homo sapiens
gccagctcccaggag

SEQ ID NO: 161063 - DNA, 15 bp, Homo sapiens
ggccagctcccagga

SEQ ID NO: 161064 - DNA, 15 bp, Homo sapiens
gggccagctcccagg

SEQ ID NO: 161065 - DNA, 15 bp, Homo sapiens
ggggccagctcccag

SEQ ID NO: 161066 - DNA, 15 bp, Homo sapiens
aggggccagctccca

SEQ ID NO: 161067 - DNA, 15 bp, Homo sapiens
gaggggccagctccc

SEQ ID NO: 161068 - DNA, 15 bp, Homo sapiens
cgaggggccagctcc

SEQ ID NO: 161069 - DNA, 15 bp, Homo sapiens
gcgaggggccagctc

SEQ ID NO: 161070 - DNA, 15 bp, Homo sapiens
ggcgaggggccagct

SEQ ID NO: 161071 - DNA, 15 bp, Homo sapiens
tggcgaggggccagc

SEQ ID NO: 161072 - DNA, 15 bp, Homo sapiens
ctggcgaggggccag

SEQ ID NO: 161073 - DNA, 15 bp, Homo sapiens
gctggcgaggggcca

SEQ ID NO: 161074 - DNA, 15 bp, Homo sapiens
agctggcgaggggcc

SEQ ID NO: 161075 - DNA, 15 bp, Homo sapiens
gagctggcgaggggc

SEQ ID NO: 161076 - DNA, 15 bp, Homo sapiens
tgagctggcgagggg

SEQ ID NO: 161077 - DNA, 15 bp, Homo sapiens
gtgagctggcgaggg

SEQ ID NO: 161078 - DNA, 15 bp, Homo sapiens
ggtgagctggcgagg

SEQ ID NO: 161079 - DNA, 15 bp, Homo sapiens
aggtgagctggcgag

SEQ ID NO: 161080 - DNA, 15 bp, Homo sapiens
aaggtgagctggcga

SEQ ID NO: 161081 - DNA, 15 bp, Homo sapiens
caaggtgagctggcg

SEQ ID NO: 161082 - DNA, 15 bp, Homo sapiens
tcaaggtgagctggc

SEQ ID NO: 161083 - DNA, 15 bp, Homo sapiens
atcaaggtgagctgg

SEQ ID NO: 161084 - DNA, 15 bp, Homo sapiens
aatcaaggtgagctg

SEQ ID NO: 161085 - DNA, 15 bp, Homo sapiens
gaatcaaggtgagct

SEQ ID NO: 161086 - DNA, 15 bp, Homo sapiens
tgaatcaaggtgagc

SEQ ID NO: 161087 - DNA, 15 bp, Homo sapiens
gtgaatcaaggtgag

SEQ ID NO: 161088 - DNA, 15 bp, Homo sapiens
agtgaatcaaggtga

SEQ ID NO: 161089 - DNA, 15 bp, Homo sapiens
gagtgaatcaaggtg

SEQ ID NO: 161090 - DNA, 15 bp, Homo sapiens
ggagtgaatcaaggt

SEQ ID NO: 161091 - DNA, 15 bp, Homo sapiens
gggagtgaatcaagg

SEQ ID NO: 161092 - DNA, 15 bp, Homo sapiens
tgggagtgaatcaag

SEQ ID NO: 161093 - DNA, 15 bp, Homo sapiens
atgggagtgaatcaa

SEQ ID NO: 161094 - DNA, 15 bp, Homo sapiens
catgggagtgaatca

SEQ ID NO: 161095 - DNA, 15 bp, Homo sapiens
tcatgggagtgaatc

SEQ ID NO: 161096 - DNA, 15 bp, Homo sapiens
atcatgggagtgaat

SEQ ID NO: 161097 - DNA, 15 bp, Homo sapiens
catcatgggagtgaa

SEQ ID NO: 161098 - DNA, 15 bp, Homo sapiens
gcatcatgggagtga

SEQ ID NO: 161099 - DNA, 15 bp, Homo sapiens
ggcatcatgggagtg

SEQ ID NO: 161100 - DNA, 15 bp, Homo sapiens
tggcatcatgggagt

SEQ ID NO: 161101 - DNA, 15 bp, Homo sapiens
ttggcatcatgggag

SEQ ID NO: 161102 - DNA, 15 bp, Homo sapiens
cttggcatcatggga

SEQ ID NO: 161103 - DNA, 15 bp, Homo sapiens
acttggcatcatggg

SEQ ID NO: 161104 - DNA, 15 bp, Homo sapiens
cacttggcatcatgg

SEQ ID NO: 161105 - DNA, 15 bp, Homo sapiens
tcacttggcatcatg

SEQ ID NO: 161106 - DNA, 15 bp, Homo sapiens
ttcacttggcatcat

SEQ ID NO: 161107 - DNA, 15 bp, Homo sapiens
cttcacttggcatca

SEQ ID NO: 161108 - DNA, 15 bp, Homo sapiens
acttcacttggcatc

SEQ ID NO: 161109 - DNA, 15 bp, Homo sapiens
cacttcacttggcat

SEQ ID NO: 161110 - DNA, 15 bp, Homo sapiens
acacttcacttggca

SEQ ID NO: 161111 - DNA, 15 bp, Homo sapiens
cacacttcacttggc

SEQ ID NO: 161112 - DNA, 15 bp, Homo sapiens
tcacacttcacttgg

SEQ ID NO: 161113 - DNA, 15 bp, Homo sapiens
ttcacacttcacttg

SEQ ID NO: 161114 - DNA, 15 bp, Homo sapiens
gttcacacttcactt

SEQ ID NO: 161115 - DNA, 15 bp, Homo sapiens
agttcacacttcact

SEQ ID NO: 161116 - DNA, 15 bp, Homo sapiens
tagttcacacttcac

SEQ ID NO: 161117 - DNA, 15 bp, Homo sapiens
atagttcacacttca

SEQ ID NO: 161118 - DNA, 15 bp, Homo sapiens
catagttcacacttc

SEQ ID NO: 161119 - DNA, 15 bp, Homo sapiens
tcatagttcacactt

SEQ ID NO: 161120 - DNA, 15 bp, Homo sapiens
atcatagttcacact

SEQ ID NO: 161121 - DNA, 15 bp, Homo sapiens
gatcatagttcacac

SEQ ID NO: 161122 - DNA, 15 bp, Homo sapiens
tgatcatagttcaca

SEQ ID NO: 161123 - DNA, 15 bp, Homo sapiens
atgatcatagttcac

SEQ ID NO: 161124 - DNA, 15 bp, Homo sapiens
catgatcatagttca

SEQ ID NO: 161125 - DNA, 15 bp, Homo sapiens
gcatgatcatagttc

SEQ ID NO: 161126 - DNA, 15 bp, Homo sapiens
ggcatgatcatagtt

SEQ ID NO: 161127 - DNA, 15 bp, Homo sapiens
aggcatgatcatagt

SEQ ID NO: 161128 - DNA, 15 bp, Homo sapiens
taggcatgatcatag

SEQ ID NO: 161129 - DNA, 15 bp, Homo sapiens
ctaggcatgatcata

SEQ ID NO: 161130 - DNA, 15 bp, Homo sapiens
actaggcatgatcat

SEQ ID NO: 161131 - DNA, 15 bp, Homo sapiens
aactaggcatgatca

SEQ ID NO: 161132 - DNA, 15 bp, Homo sapiens
aaactaggcatgatc

SEQ ID NO: 161133 - DNA, 15 bp, Homo sapiens
taaactaggcatgat

SEQ ID NO: 161134 - DNA, 15 bp, Homo sapiens
gtaaactaggcatga

SEQ ID NO: 161135 - DNA, 15 bp, Homo sapiens
tgtaaactaggcatg

SEQ ID NO: 161136 - DNA, 15 bp, Homo sapiens
ctgtaaactaggcat

SEQ ID NO: 161137 - DNA, 15 bp, Homo sapiens
tctgtaaactaggca

SEQ ID NO: 161138 - DNA, 15 bp, Homo sapiens
atctgtaaactaggc

SEQ ID NO: 161139 - DNA, 15 bp, Homo sapiens
catctgtaaactagg

SEQ ID NO: 161140 - DNA, 15 bp, Homo sapiens
tcatctgtaaactag

SEQ ID NO: 161141 - DNA, 15 bp, Homo sapiens
ctcatctgtaaacta

SEQ ID NO: 161142 - DNA, 15 bp, Homo sapiens
cctcatctgtaaact

SEQ ID NO: 161143 - DNA, 15 bp, Homo sapiens
tcctcatctgtaaac

SEQ ID NO: 161144 - DNA, 15 bp, Homo sapiens
gtcctcatctgtaaa

SEQ ID NO: 161145 - DNA, 15 bp, Homo sapiens
tgtcctcatctgtaa

SEQ ID NO: 161146 - DNA, 15 bp, Homo sapiens
gtgtcctcatctgta

SEQ ID NO: 161147 - DNA, 15 bp, Homo sapiens
agtgtcctcatctgt

SEQ ID NO: 161148 - DNA, 15 bp, Homo sapiens
cagtgtcctcatctg

SEQ ID NO: 161149 - DNA, 15 bp, Homo sapiens
tcagtgtcctcatct

SEQ ID NO: 161150 - DNA, 15 bp, Homo sapiens
ctcagtgtcctcatc

SEQ ID NO: 161151 - DNA, 15 bp, Homo sapiens
cctcagtgtcctcat

SEQ ID NO: 161152 - DNA, 15 bp, Homo sapiens
gcctcagtgtcctca

SEQ ID NO: 161153 - DNA, 15 bp, Homo sapiens
ggcctcagtgtcctc

SEQ ID NO: 161154 - DNA, 15 bp, Homo sapiens
gggcctcagtgtcct

SEQ ID NO: 161155 - DNA, 15 bp, Homo sapiens
tgggcctcagtgtcc

SEQ ID NO: 161156 - DNA, 15 bp, Homo sapiens
ctgggcctcagtgtc

SEQ ID NO: 161157 - DNA, 15 bp, Homo sapiens
tctgggcctcagtgt

SEQ ID NO: 161158 - DNA, 15 bp, Homo sapiens
ttctgggcctcagtg

SEQ ID NO: 161159 - DNA, 15 bp, Homo sapiens
tttctgggcctcagt

SEQ ID NO: 161160 - DNA, 15 bp, Homo sapiens
ctttctgggcctcag

SEQ ID NO: 161161 - DNA, 15 bp, Homo sapiens
actttctgggcctca

SEQ ID NO: 161162 - DNA, 15 bp, Homo sapiens
cactttctgggcctc

SEQ ID NO: 161163 - DNA, 15 bp, Homo sapiens
acactttctgggcct

SEQ ID NO: 161164 - DNA, 15 bp, Homo sapiens
cacactttctgggcc

SEQ ID NO: 161165 - DNA, 15 bp, Homo sapiens
tcacactttctgggc

SEQ ID NO: 161166 - DNA, 15 bp, Homo sapiens
ctcacactttctggg

SEQ ID NO: 161167 - DNA, 15 bp, Homo sapiens
gctcacactttctgg

SEQ ID NO: 161168 - DNA, 15 bp, Homo sapiens
tgctcacactttctg

SEQ ID NO: 161169 - DNA, 15 bp, Homo sapiens
atgctcacactttct

SEQ ID NO: 161170 - DNA, 15 bp, Homo sapiens
gatgctcacactttc

SEQ ID NO: 161171 - DNA, 15 bp, Homo sapiens
agatgctcacacttt

SEQ ID NO: 161172 - DNA, 15 bp, Homo sapiens
aagatgctcacactt

SEQ ID NO: 161173 - DNA, 15 bp, Homo sapiens
taagatgctcacact

SEQ ID NO: 161174 - DNA, 15 bp, Homo sapiens
gtaagatgctcacac

SEQ ID NO: 161175 - DNA, 15 bp, Homo sapiens
ggtaagatgctcaca

SEQ ID NO: 161176 - DNA, 15 bp, Homo sapiens
tggtaagatgctcac

SEQ ID NO: 161177 - DNA, 15 bp, Homo sapiens
ttggtaagatgctca

SEQ ID NO: 161178 - DNA, 15 bp, Homo sapiens
cttggtaagatgctc

SEQ ID NO: 161179 - DNA, 15 bp, Homo sapiens
ccttggtaagatgct

SEQ ID NO: 161180 - DNA, 15 bp, Homo sapiens
gccttggtaagatgc

SEQ ID NO: 161181 - DNA, 15 bp, Homo sapiens
ggccttggtaagatg

SEQ ID NO: 161182 - DNA, 15 bp, Homo sapiens
tggccttggtaagat

SEQ ID NO: 161183 - DNA, 15 bp, Homo sapiens
ctggccttggtaaga

SEQ ID NO: 161184 - DNA, 15 bp, Homo sapiens
gctggccttggtaag

SEQ ID NO: 161185 - DNA, 15 bp, Homo sapiens
ggctggccttggtaa

SEQ ID NO: 161186 - DNA, 15 bp, Homo sapiens
gggctggccttggta

SEQ ID NO: 161187 - DNA, 15 bp, Homo sapiens
agggctggccttggt

SEQ ID NO: 161188 - DNA, 15 bp, Homo sapiens
gagggctggccttgg

SEQ ID NO: 161189 - DNA, 15 bp, Homo sapiens
agagggctggccttg

SEQ ID NO: 161190 - DNA, 15 bp, Homo sapiens
tagagggctggcctt

SEQ ID NO: 161191 - DNA, 15 bp, Homo sapiens
ctagagggctggcct

SEQ ID NO: 161192 - DNA, 15 bp, Homo sapiens
tctagagggctggcc

SEQ ID NO: 161193 - DNA, 15 bp, Homo sapiens
ttctagagggctggc

SEQ ID NO: 161194 - DNA, 15 bp, Homo sapiens
cttctagagggctgg

SEQ ID NO: 161195 - DNA, 15 bp, Homo sapiens
tcttctagagggctg

SEQ ID NO: 161196 - DNA, 15 bp, Homo sapiens
ctcttctagagggct

SEQ ID NO: 161197 - DNA, 15 bp, Homo sapiens
cctcttctagagggc

SEQ ID NO: 161198 - DNA, 15 bp, Homo sapiens
tcctcttctagaggg

SEQ ID NO: 161199 - DNA, 15 bp, Homo sapiens
ctcctcttctagagg

SEQ ID NO: 161200 - DNA, 15 bp, Homo sapiens
tctcctcttctagag

SEQ ID NO: 161201 - DNA, 15 bp, Homo sapiens
atctcctcttctaga

SEQ ID NO: 161202 - DNA, 15 bp, Homo sapiens
catctcctcttctag

SEQ ID NO: 161203 - DNA, 15 bp, Homo sapiens
ccatctcctcttcta

SEQ ID NO: 161204 - DNA, 15 bp, Homo sapiens
accatctcctcttct

SEQ ID NO: 161205 - DNA, 15 bp, Homo sapiens
caccatctcctcttc

SEQ ID NO: 161206 - DNA, 15 bp, Homo sapiens
ccaccatctcctctt

SEQ ID NO: 161207 - DNA, 15 bp, Homo sapiens
cccaccatctcctct

SEQ ID NO: 161208 - DNA, 15 bp, Homo sapiens
tcccaccatctcctc

SEQ ID NO: 161209 - DNA, 15 bp, Homo sapiens
atcccaccatctcct

SEQ ID NO: 161210 - DNA, 15 bp, Homo sapiens
aatcccaccatctcc

SEQ ID NO: 161211 - DNA, 15 bp, Homo sapiens
aaatcccaccatctc

SEQ ID NO: 161212 - DNA, 15 bp, Homo sapiens
taaatcccaccatct

SEQ ID NO: 161213 - DNA, 15 bp, Homo sapiens
gtaaatcccaccatc

SEQ ID NO: 161214 - DNA, 15 bp, Homo sapiens
tgtaaatcccaccat

SEQ ID NO: 161215 - DNA, 15 bp, Homo sapiens
gtgtaaatcccacca

SEQ ID NO: 161216 - DNA, 15 bp, Homo sapiens
ggtgtaaatcccacc

SEQ ID NO: 161217 - DNA, 15 bp, Homo sapiens
tggtgtaaatcccac

SEQ ID NO: 161218 - DNA, 15 bp, Homo sapiens
gtggtgtaaatccca

SEQ ID NO: 161219 - DNA, 15 bp, Homo sapiens
ggtggtgtaaatccc

SEQ ID NO: 161220 - DNA, 15 bp, Homo sapiens
aggtggtgtaaatcc

SEQ ID NO: 161221 - DNA, 15 bp, Homo sapiens
gaggtggtgtaaatc

SEQ ID NO: 161222 - DNA, 15 bp, Homo sapiens
ggaggtggtgtaaat

SEQ ID NO: 161223 - DNA, 15 bp, Homo sapiens
tggaggtggtgtaaa

SEQ ID NO: 161224 - DNA, 15 bp, Homo sapiens
gtggaggtggtgtaa

SEQ ID NO: 161225 - DNA, 15 bp, Homo sapiens
ggtggaggtggtgta

SEQ ID NO: 161226 - DNA, 15 bp, Homo sapiens
tggtggaggtggtgt

SEQ ID NO: 161227 - DNA, 15 bp, Homo sapiens
ttggtggaggtggtg

SEQ ID NO: 161228 - DNA, 15 bp, Homo sapiens
cttggtggaggtggt

SEQ ID NO: 161229 - DNA, 15 bp, Homo sapiens
gcttggtggaggtgg

SEQ ID NO: 161230 - DNA, 15 bp, Homo sapiens
ggcttggtggaggtg

SEQ ID NO: 161231 - DNA, 15 bp, Homo sapiens
gggcttggtggaggt

SEQ ID NO: 161232 - DNA, 15 bp, Homo sapiens
tgggcttggtggagg

SEQ ID NO: 161233 - DNA, 15 bp, Homo sapiens
ctgggcttggtggag

SEQ ID NO: 161234 - DNA, 15 bp, Homo sapiens
cctgggcttggtgga

SEQ ID NO: 161235 - DNA, 15 bp, Homo sapiens
tcctgggcttggtgg

SEQ ID NO: 161236 - DNA, 15 bp, Homo sapiens
ttcctgggcttggtg

SEQ ID NO: 161237 - DNA, 15 bp, Homo sapiens
attcctgggcttggt

SEQ ID NO: 161238 - DNA, 15 bp, Homo sapiens
cattcctgggcttgg

SEQ ID NO: 161239 - DNA, 15 bp, Homo sapiens
tcattcctgggcttg

SEQ ID NO: 161240 - DNA, 15 bp, Homo sapiens
ctcattcctgggctt

SEQ ID NO: 161241 - DNA, 15 bp, Homo sapiens
gctcattcctgggct

SEQ ID NO: 161242 - DNA, 15 bp, Homo sapiens
ggctcattcctgggc

SEQ ID NO: 161243 - DNA, 15 bp, Homo sapiens
tggctcattcctggg

SEQ ID NO: 161244 - DNA, 15 bp, Homo sapiens
gtggctcattcctgg

SEQ ID NO: 161245 - DNA, 15 bp, Homo sapiens
tgtggctcattcctg

SEQ ID NO: 161246 - DNA, 15 bp, Homo sapiens
ttgtggctcattcct

SEQ ID NO: 161247 - DNA, 15 bp, Homo sapiens
tttgtggctcattcc

SEQ ID NO: 161248 - DNA, 15 bp, Homo sapiens
ctttgtggctcattc

SEQ ID NO: 161249 - DNA, 15 bp, Homo sapiens
actttgtggctcatt

SEQ ID NO: 161250 - DNA, 15 bp, Homo sapiens
cactttgtggctcat

SEQ ID NO: 161251 - DNA, 15 bp, Homo sapiens
ccactttgtggctca

SEQ ID NO: 161252 - DNA, 15 bp, Homo sapiens
cccactttgtggctc

SEQ ID NO: 161253 - DNA, 15 bp, Homo sapiens
gcccactttgtggct

SEQ ID NO: 161254 - DNA, 15 bp, Homo sapiens
tgcccactttgtggc

SEQ ID NO: 161255 - DNA, 15 bp, Homo sapiens
gtgcccactttgtgg

SEQ ID NO: 161256 - DNA, 15 bp, Homo sapiens
agtgcccactttgtg

SEQ ID NO: 161257 - DNA, 15 bp, Homo sapiens
cagtgcccactttgt

SEQ ID NO: 161258 - DNA, 15 bp, Homo sapiens
gcagtgcccactttg

SEQ ID NO: 161259 - DNA, 15 bp, Homo sapiens
ggcagtgcccacttt

SEQ ID NO: 161260 - DNA, 15 bp, Homo sapiens
gggcagtgcccactt

SEQ ID NO: 161261 - DNA, 15 bp, Homo sapiens
tgggcagtgcccact

SEQ ID NO: 161262 - DNA, 15 bp, Homo sapiens
ctgggcagtgcccac

SEQ ID NO: 161263 - DNA, 15 bp, Homo sapiens
gctgggcagtgccca

SEQ ID NO: 161264 - DNA, 15 bp, Homo sapiens
agctgggcagtgccc

SEQ ID NO: 161265 - DNA, 15 bp, Homo sapiens
tagctgggcagtgcc

SEQ ID NO: 161266 - DNA, 15 bp, Homo sapiens
gtagctgggcagtgc

SEQ ID NO: 161267 - DNA, 15 bp, Homo sapiens
agtagctgggcagtg

SEQ ID NO: 161268 - DNA, 15 bp, Homo sapiens
aagtagctgggcagt

SEQ ID NO: 161269 - DNA, 15 bp, Homo sapiens
caagtagctgggcag

SEQ ID NO: 161270 - DNA, 15 bp, Homo sapiens
ccaagtagctgggca

SEQ ID NO: 161271 - DNA, 15 bp, Homo sapiens
cccaagtagctgggc

SEQ ID NO: 161272 - DNA, 15 bp, Homo sapiens
ccccaagtagctggg

SEQ ID NO: 161273 - DNA, 15 bp, Homo sapiens
gccccaagtagctgg

SEQ ID NO: 161274 - DNA, 15 bp, Homo sapiens
agccccaagtagctg

SEQ ID NO: 161275 - DNA, 15 bp, Homo sapiens
cagccccaagtagct

SEQ ID NO: 161276 - DNA, 15 bp, Homo sapiens
acagccccaagtagc

SEQ ID NO: 161277 - DNA, 15 bp, Homo sapiens
cacagccccaagtag

SEQ ID NO: 161278 - DNA, 15 bp, Homo sapiens
gcacagccccaagta

SEQ ID NO: 161279 - DNA, 15 bp, Homo sapiens
tgcacagccccaagt

SEQ ID NO: 161280 - DNA, 15 bp, Homo sapiens
ctgcacagccccaag

SEQ ID NO: 161281 - DNA, 15 bp, Homo sapiens
tctgcacagccccaa

SEQ ID NO: 161282 - DNA, 15 bp, Homo sapiens
ctctgcacagcccca

SEQ ID NO: 161283 - DNA, 15 bp, Homo sapiens
tctctgcacagcccc

SEQ ID NO: 161284 - DNA, 15 bp, Homo sapiens
ttctctgcacagccc

SEQ ID NO: 161285 - DNA, 15 bp, Homo sapiens
cttctctgcacagcc

SEQ ID NO: 161286 - DNA, 15 bp, Homo sapiens
tcttctctgcacagc

SEQ ID NO: 161287 - DNA, 15 bp, Homo sapiens
ctcttctctgcacag

SEQ ID NO: 161288 - DNA, 15 bp, Homo sapiens
cctcttctctgcaca

SEQ ID NO: 161289 - DNA, 15 bp, Homo sapiens
gcctcttctctgcac

SEQ ID NO: 161290 - DNA, 15 bp, Homo sapiens
agcctcttctctgca

SEQ ID NO: 161291 - DNA, 15 bp, Homo sapiens
cagcctcttctctgc

SEQ ID NO: 161292 - DNA, 15 bp, Homo sapiens
gcagcctcttctctg

SEQ ID NO: 161293 - DNA, 15 bp, Homo sapiens
agcagcctcttctct

SEQ ID NO: 161294 - DNA, 15 bp, Homo sapiens
aagcagcctcttctc

SEQ ID NO: 161295 - DNA, 15 bp, Homo sapiens
caagcagcctcttct

SEQ ID NO: 161296 - DNA, 15 bp, Homo sapiens
gcaagcagcctcttc

SEQ ID NO: 161297 - DNA, 15 bp, Homo sapiens
agcaagcagcctctt

SEQ ID NO: 161298 - DNA, 15 bp, Homo sapiens
cagcaagcagcctct

SEQ ID NO: 161299 - DNA, 15 bp, Homo sapiens
ccagcaagcagcctc

SEQ ID NO: 161300 - DNA, 15 bp, Homo sapiens
cccagcaagcagcct

SEQ ID NO: 161301 - DNA, 15 bp, Homo sapiens
gcccagcaagcagcc

SEQ ID NO: 161302 - DNA, 15 bp, Homo sapiens
tgcccagcaagcagc

SEQ ID NO: 161303 - DNA, 15 bp, Homo sapiens
gtgcccagcaagcag

SEQ ID NO: 161304 - DNA, 15 bp, Homo sapiens
agtgcccagcaagca

SEQ ID NO: 161305 - DNA, 15 bp, Homo sapiens
gagtgcccagcaagc

SEQ ID NO: 161306 - DNA, 15 bp, Homo sapiens
tgagtgcccagcaag

SEQ ID NO: 161307 - DNA, 15 bp, Homo sapiens
ctgagtgcccagcaa

SEQ ID NO: 161308 - DNA, 15 bp, Homo sapiens
gctgagtgcccagca

SEQ ID NO: 161309 - DNA, 15 bp, Homo sapiens
tgctgagtgcccagc

SEQ ID NO: 161310 - DNA, 15 bp, Homo sapiens
ttgctgagtgcccag

SEQ ID NO: 161311 - DNA, 15 bp, Homo sapiens
tttgctgagtgccca

SEQ ID NO: 161312 - DNA, 15 bp, Homo sapiens
gtttgctgagtgccc

SEQ ID NO: 161313 - DNA, 15 bp, Homo sapiens
agtttgctgagtgcc

SEQ ID NO: 161314 - DNA, 15 bp, Homo sapiens
gagtttgctgagtgc

SEQ ID NO: 161315 - DNA, 15 bp, Homo sapiens
agagtttgctgagtg

SEQ ID NO: 161316 - DNA, 15 bp, Homo sapiens
cagagtttgctgagt

SEQ ID NO: 161317 - DNA, 15 bp, Homo sapiens
gcagagtttgctgag

SEQ ID NO: 161318 - DNA, 15 bp, Homo sapiens
ggcagagtttgctga

SEQ ID NO: 161319 - DNA, 15 bp, Homo sapiens
gggcagagtttgctg

SEQ ID NO: 161320 - DNA, 15 bp, Homo sapiens
tgggcagagtttgct

SEQ ID NO: 161321 - DNA, 15 bp, Homo sapiens
ttgggcagagtttgc

SEQ ID NO: 161322 - DNA, 15 bp, Homo sapiens
gttgggcagagtttg

SEQ ID NO: 161323 - DNA, 15 bp, Homo sapiens
tgttgggcagagttt

SEQ ID NO: 161324 - DNA, 15 bp, Homo sapiens
ctgttgggcagagtt

SEQ ID NO: 161325 - DNA, 15 bp, Homo sapiens
gctgttgggcagagt

SEQ ID NO: 161326 - DNA, 15 bp, Homo sapiens
ggctgttgggcagag

SEQ ID NO: 161327 - DNA, 15 bp, Homo sapiens
gggctgttgggcaga

SEQ ID NO: 161328 - DNA, 15 bp, Homo sapiens
tgggctgttgggcag

SEQ ID NO: 161329 - DNA, 15 bp, Homo sapiens
ctgggctgttgggca

SEQ ID NO: 161330 - DNA, 15 bp, Homo sapiens
gctgggctgttgggc

SEQ ID NO: 161331 - DNA, 15 bp, Homo sapiens
cgctgggctgttggg

SEQ ID NO: 161332 - DNA, 15 bp, Homo sapiens
ccgctgggctgttgg

SEQ ID NO: 161333 - DNA, 15 bp, Homo sapiens
cccgctgggctgttg

SEQ ID NO: 161334 - DNA, 15 bp, Homo sapiens
acccgctgggctgtt

SEQ ID NO: 161335 - DNA, 15 bp, Homo sapiens
cacccgctgggctgt

SEQ ID NO: 161336 - DNA, 15 bp, Homo sapiens
ccacccgctgggctg

SEQ ID NO: 161337 - DNA, 15 bp, Homo sapiens
cccacccgctgggct

SEQ ID NO: 161338 - DNA, 15 bp, Homo sapiens
gcccacccgctgggc

SEQ ID NO: 161339 - DNA, 15 bp, Homo sapiens
tgcccacccgctggg

SEQ ID NO: 161340 - DNA, 15 bp, Homo sapiens
ctgcccacccgctgg

SEQ ID NO: 161341 - DNA, 15 bp, Homo sapiens
gctgcccacccgctg

SEQ ID NO: 161342 - DNA, 15 bp, Homo sapiens
tgctgcccacccgct

SEQ ID NO: 161343 - DNA, 15 bp, Homo sapiens
ctgctgcccacccgc

SEQ ID NO: 161344 - DNA, 15 bp, Homo sapiens
gctgctgcccacccg

SEQ ID NO: 161345 - DNA, 15 bp, Homo sapiens
ggctgctgcccaccc

SEQ ID NO: 161346 - DNA, 15 bp, Homo sapiens
gggctgctgcccacc

SEQ ID NO: 161347 - DNA, 15 bp, Homo sapiens
agggctgctgcccac

SEQ ID NO: 161348 - DNA, 15 bp, Homo sapiens
cagggctgctgccca

SEQ ID NO: 161349 - DNA, 15 bp, Homo sapiens
ccagggctgctgccc

SEQ ID NO: 161350 - DNA, 15 bp, Homo sapiens
cccagggctgctgcc

SEQ ID NO: 161351 - DNA, 15 bp, Homo sapiens
tcccagggctgctgc

SEQ ID NO: 161352 - DNA, 15 bp, Homo sapiens
gtcccagggctgctg

SEQ ID NO: 161353 - DNA, 15 bp, Homo sapiens
ggtcccagggctgct

SEQ ID NO: 161354 - DNA, 15 bp, Homo sapiens
gggtcccagggctgc

SEQ ID NO: 161355 - DNA, 15 bp, Homo sapiens
ggggtcccagggctg

SEQ ID NO: 161356 - DNA, 15 bp, Homo sapiens
gggggtcccagggct

SEQ ID NO: 161357 - DNA, 15 bp, Homo sapiens
tgggggtcccagggc

SEQ ID NO: 161358 - DNA, 15 bp, Homo sapiens
gtgggggtcccaggg

SEQ ID NO: 161359 - DNA, 15 bp, Homo sapiens
tgtgggggtcccagg

SEQ ID NO: 161360 - DNA, 15 bp, Homo sapiens
gtgtgggggtcccag

SEQ ID NO: 161361 - DNA, 15 bp, Homo sapiens
ggtgtgggggtccca

SEQ ID NO: 161362 - DNA, 15 bp, Homo sapiens
gggtgtgggggtccc

SEQ ID NO: 161363 - DNA, 15 bp, Homo sapiens
tgggtgtgggggtcc

SEQ ID NO: 161364 - DNA, 15 bp, Homo sapiens
ttgggtgtgggggtc

SEQ ID NO: 161365 - DNA, 15 bp, Homo sapiens
gttgggtgtgggggt

SEQ ID NO: 161366 - DNA, 15 bp, Homo sapiens
ggttgggtgtggggg

SEQ ID NO: 161367 - DNA, 15 bp, Homo sapiens
tggttgggtgtgggg

SEQ ID NO: 161368 - DNA, 15 bp, Homo sapiens
gtggttgggtgtggg

SEQ ID NO: 161369 - DNA, 15 bp, Homo sapiens
tgtggttgggtgtgg

SEQ ID NO: 161370 - DNA, 15 bp, Homo sapiens
gtgtggttgggtgtg

SEQ ID NO: 161371 - DNA, 15 bp, Homo sapiens
tgtgtggttgggtgt

SEQ ID NO: 161372 - DNA, 15 bp, Homo sapiens
ctgtgtggttgggtg

SEQ ID NO: 161373 - DNA, 15 bp, Homo sapiens
gctgtgtggttgggt

SEQ ID NO: 161374 - DNA, 15 bp, Homo sapiens
ggctgtgtggttggg

SEQ ID NO: 161375 - DNA, 15 bp, Homo sapiens
aggctgtgtggttgg

SEQ ID NO: 161376 - DNA, 15 bp, Homo sapiens
gaggctgtgtggttg

SEQ ID NO: 161377 - DNA, 15 bp, Homo sapiens
ggaggctgtgtggtt

SEQ ID NO: 161378 - DNA, 15 bp, Homo sapiens
gggaggctgtgtggt

SEQ ID NO: 161379 - DNA, 15 bp, Homo sapiens
ggggaggctgtgtgg

SEQ ID NO: 161380 - DNA, 15 bp, Homo sapiens
aggggaggctgtgtg

SEQ ID NO: 161381 - DNA, 15 bp, Homo sapiens
caggggaggctgtgt

SEQ ID NO: 161382 - DNA, 15 bp, Homo sapiens
ccaggggaggctgtg

SEQ ID NO: 161383 - DNA, 15 bp, Homo sapiens
gccaggggaggctgt

SEQ ID NO: 161384 - DNA, 15 bp, Homo sapiens
ggccaggggaggctg

SEQ ID NO: 161385 - DNA, 15 bp, Homo sapiens
gggccaggggaggct

SEQ ID NO: 161386 - DNA, 15 bp, Homo sapiens
tgggccaggggaggc

SEQ ID NO: 161387 - DNA, 15 bp, Homo sapiens
gtgggccaggggagg

SEQ ID NO: 161388 - DNA, 15 bp, Homo sapiens
agtgggccaggggag

SEQ ID NO: 161389 - DNA, 15 bp, Homo sapiens
cagtgggccagggga

SEQ ID NO: 161390 - DNA, 15 bp, Homo sapiens
gcagtgggccagggg

SEQ ID NO: 161391 - DNA, 15 bp, Homo sapiens
agcagtgggccaggg

SEQ ID NO: 161392 - DNA, 15 bp, Homo sapiens
gagcagtgggccagg

SEQ ID NO: 161393 - DNA, 15 bp, Homo sapiens
cgagcagtgggccag

SEQ ID NO: 161394 - DNA, 15 bp, Homo sapiens
gcgagcagtgggcca

SEQ ID NO: 161395 - DNA, 15 bp, Homo sapiens
tgcgagcagtgggcc

SEQ ID NO: 161396 - DNA, 15 bp, Homo sapiens
gtgcgagcagtgggc

SEQ ID NO: 161397 - DNA, 15 bp, Homo sapiens
ggtgcgagcagtggg

SEQ ID NO: 161398 - DNA, 15 bp, Homo sapiens
gggtgcgagcagtgg

SEQ ID NO: 161399 - DNA, 15 bp, Homo sapiens
ggggtgcgagcagtg

SEQ ID NO: 161400 - DNA, 15 bp, Homo sapiens
tggggtgcgagcagt

SEQ ID NO: 161401 - DNA, 15 bp, Homo sapiens
atggggtgcgagcag

SEQ ID NO: 161402 - DNA, 15 bp, Homo sapiens
gatggggtgcgagca

SEQ ID NO: 161403 - DNA, 15 bp, Homo sapiens
agatggggtgcgagc

SEQ ID NO: 161404 - DNA, 15 bp, Homo sapiens
gagatggggtgcgag

SEQ ID NO: 161405 - DNA, 15 bp, Homo sapiens
tgagatggggtgcga

SEQ ID NO: 161406 - DNA, 15 bp, Homo sapiens
ttgagatggggtgcg

SEQ ID NO: 161407 - DNA, 15 bp, Homo sapiens
attgagatggggtgc

SEQ ID NO: 161408 - DNA, 15 bp, Homo sapiens
tattgagatggggtg

SEQ ID NO: 161409 - DNA, 15 bp, Homo sapiens
gtattgagatggggt

SEQ ID NO: 161410 - DNA, 15 bp, Homo sapiens
tgtattgagatgggg

SEQ ID NO: 161411 - DNA, 15 bp, Homo sapiens
gtgtattgagatggg

SEQ ID NO: 161412 - DNA, 15 bp, Homo sapiens
agtgtattgagatgg

SEQ ID NO: 161413 - DNA, 15 bp, Homo sapiens
cagtgtattgagatg

SEQ ID NO: 161414 - DNA, 15 bp, Homo sapiens
ccagtgtattgagat

SEQ ID NO: 161415 - DNA, 15 bp, Homo sapiens
gccagtgtattgaga

SEQ ID NO: 161416 - DNA, 15 bp, Homo sapiens
agccagtgtattgag

SEQ ID NO: 161417 - DNA, 15 bp, Homo sapiens
aagccagtgtattga

SEQ ID NO: 161418 - DNA, 15 bp, Homo sapiens
caagccagtgtattg

SEQ ID NO: 161419 - DNA, 15 bp, Homo sapiens
ccaagccagtgtatt

SEQ ID NO: 161420 - DNA, 15 bp, Homo sapiens
cccaagccagtgtat

SEQ ID NO: 161421 - DNA, 15 bp, Homo sapiens
acccaagccagtgta

SEQ ID NO: 161422 - DNA, 15 bp, Homo sapiens
cacccaagccagtgt

SEQ ID NO: 161423 - DNA, 15 bp, Homo sapiens
gcacccaagccagtg

SEQ ID NO: 161424 - DNA, 15 bp, Homo sapiens
ggcacccaagccagt

SEQ ID NO: 161425 - DNA, 15 bp, Homo sapiens
aggcacccaagccag

SEQ ID NO: 161426 - DNA, 15 bp, Homo sapiens
gaggcacccaagcca

SEQ ID NO: 161427 - DNA, 15 bp, Homo sapiens
ggaggcacccaagcc

SEQ ID NO: 161428 - DNA, 15 bp, Homo sapiens
gggaggcacccaagc

SEQ ID NO: 161429 - DNA, 15 bp, Homo sapiens
agggaggcacccaag

SEQ ID NO: 161430 - DNA, 15 bp, Homo sapiens
cagggaggcacccaa

SEQ ID NO: 161431 - DNA, 15 bp, Homo sapiens
gcagggaggcaccca

SEQ ID NO: 161432 - DNA, 15 bp, Homo sapiens
tgcagggaggcaccc

SEQ ID NO: 161433 - DNA, 15 bp, Homo sapiens
atgcagggaggcacc

SEQ ID NO: 161434 - DNA, 15 bp, Homo sapiens
catgcagggaggcac

SEQ ID NO: 161435 - DNA, 15 bp, Homo sapiens
ccatgcagggaggca

SEQ ID NO: 161436 - DNA, 15 bp, Homo sapiens
cccatgcagggaggc

SEQ ID NO: 161437 - DNA, 15 bp, Homo sapiens
gcccatgcagggagg

SEQ ID NO: 161438 - DNA, 15 bp, Homo sapiens
ggcccatgcagggag

SEQ ID NO: 161439 - DNA, 15 bp, Homo sapiens
gggcccatgcaggga

SEQ ID NO: 161440 - DNA, 15 bp, Homo sapiens
agggcccatgcaggg

SEQ ID NO: 161441 - DNA, 15 bp, Homo sapiens
aagggcccatgcagg

SEQ ID NO: 161442 - DNA, 15 bp, Homo sapiens
aaagggcccatgcag

SEQ ID NO: 161443 - DNA, 15 bp, Homo sapiens
caaagggcccatgca

SEQ ID NO: 161444 - DNA, 15 bp, Homo sapiens
acaaagggcccatgc

SEQ ID NO: 161445 - DNA, 15 bp, Homo sapiens
cacaaagggcccatg

SEQ ID NO: 161446 - DNA, 15 bp, Homo sapiens
tcacaaagggcccat

SEQ ID NO: 161447 - DNA, 15 bp, Homo sapiens
ttcacaaagggccca

SEQ ID NO: 161448 - DNA, 15 bp, Homo sapiens
tttcacaaagggccc

SEQ ID NO: 161449 - DNA, 15 bp, Homo sapiens
ctttcacaaagggcc

SEQ ID NO: 161450 - DNA, 15 bp, Homo sapiens
cctttcacaaagggc

SEQ ID NO: 161451 - DNA, 15 bp, Homo sapiens
gcctttcacaaaggg

SEQ ID NO: 161452 - DNA, 15 bp, Homo sapiens
tgcctttcacaaagg

SEQ ID NO: 161453 - DNA, 15 bp, Homo sapiens
ctgcctttcacaaag

SEQ ID NO: 161454 - DNA, 15 bp, Homo sapiens
tctgcctttcacaaa

SEQ ID NO: 161455 - DNA, 15 bp, Homo sapiens
ctctgcctttcacaa

SEQ ID NO: 161456 - DNA, 15 bp, Homo sapiens
tctctgcctttcaca

SEQ ID NO: 161457 - DNA, 15 bp, Homo sapiens
ctctctgcctttcac

SEQ ID NO: 161458 - DNA, 15 bp, Homo sapiens
cctctctgcctttca

SEQ ID NO: 161459 - DNA, 15 bp, Homo sapiens
acctctctgcctttc

SEQ ID NO: 161460 - DNA, 15 bp, Homo sapiens
tacctctctgccttt

SEQ ID NO: 161461 - DNA, 15 bp, Homo sapiens
gtacctctctgcctt

SEQ ID NO: 161462 - DNA, 15 bp, Homo sapiens
ggtacctctctgcct

SEQ ID NO: 161463 - DNA, 15 bp, Homo sapiens
gggtacctctctgcc

SEQ ID NO: 161464 - DNA, 15 bp, Homo sapiens
tgggtacctctctgc

SEQ ID NO: 161465 - DNA, 15 bp, Homo sapiens
atgggtacctctctg

SEQ ID NO: 161466 - DNA, 15 bp, Homo sapiens
aatgggtacctctct

SEQ ID NO: 161467 - DNA, 15 bp, Homo sapiens
aaatgggtacctctc

SEQ ID NO: 161468 - DNA, 15 bp, Homo sapiens
caaatgggtacctct

SEQ ID NO: 161469 - DNA, 15 bp, Homo sapiens
tcaaatgggtacctc

SEQ ID NO: 161470 - DNA, 15 bp, Homo sapiens
ttcaaatgggtacct

SEQ ID NO: 161471 - DNA, 15 bp, Homo sapiens
tttcaaatgggtacc

SEQ ID NO: 161472 - DNA, 15 bp, Homo sapiens
gtttcaaatgggtac

SEQ ID NO: 161473 - DNA, 15 bp, Homo sapiens
tgtttcaaatgggta

SEQ ID NO: 161474 - DNA, 15 bp, Homo sapiens
gtgtttcaaatgggt

SEQ ID NO: 161475 - DNA, 15 bp, Homo sapiens
tgtgtttcaaatggg

SEQ ID NO: 161476 - DNA, 15 bp, Homo sapiens
ttgtgtttcaaatgg

SEQ ID NO: 161477 - DNA, 15 bp, Homo sapiens
gttgtgtttcaaatg

SEQ ID NO: 161478 - DNA, 15 bp, Homo sapiens
ggttgtgtttcaaat

SEQ ID NO: 161479 - DNA, 15 bp, Homo sapiens
tggttgtgtttcaaa

SEQ ID NO: 161480 - DNA, 15 bp, Homo sapiens
ctggttgtgtttcaa

SEQ ID NO: 161481 - DNA, 15 bp, Homo sapiens
gctggttgtgtttca

SEQ ID NO: 161482 - DNA, 15 bp, Homo sapiens
agctggttgtgtttc

SEQ ID NO: 161483 - DNA, 15 bp, Homo sapiens
aagctggttgtgttt

SEQ ID NO: 161484 - DNA, 15 bp, Homo sapiens
gaagctggttgtgtt

SEQ ID NO: 161485 - DNA, 15 bp, Homo sapiens
agaagctggttgtgt

SEQ ID NO: 161486 - DNA, 15 bp, Homo sapiens
gagaagctggttgtg

SEQ ID NO: 161487 - DNA, 15 bp, Homo sapiens
tgagaagctggttgt

SEQ ID NO: 161488 - DNA, 15 bp, Homo sapiens
atgagaagctggttg

SEQ ID NO: 161489 - DNA, 15 bp, Homo sapiens
aatgagaagctggtt

SEQ ID NO: 161490 - DNA, 15 bp, Homo sapiens
caatgagaagctggt

SEQ ID NO: 161491 - DNA, 15 bp, Homo sapiens
gcaatgagaagctgg

SEQ ID NO: 161492 - DNA, 15 bp, Homo sapiens
tgcaatgagaagctg

SEQ ID NO: 161493 - DNA, 15 bp, Homo sapiens
ttgcaatgagaagct

SEQ ID NO: 161494 - DNA, 15 bp, Homo sapiens
tttgcaatgagaagc

SEQ ID NO: 161495 - DNA, 15 bp, Homo sapiens
atttgcaatgagaag

SEQ ID NO: 161496 - DNA, 15 bp, Homo sapiens
tatttgcaatgagaa

SEQ ID NO: 161497 - DNA, 15 bp, Homo sapiens
gtatttgcaatgaga

SEQ ID NO: 161498 - DNA, 15 bp, Homo sapiens
tgtatttgcaatgag

SEQ ID NO: 161499 - DNA, 15 bp, Homo sapiens
ctgtatttgcaatga

SEQ ID NO: 161500 - DNA, 15 bp, Homo sapiens
cctgtatttgcaatg

SEQ ID NO: 161501 - DNA, 15 bp, Homo sapiens
gcctgtatttgcaat

SEQ ID NO: 161502 - DNA, 15 bp, Homo sapiens
tgcctgtatttgcaa

SEQ ID NO: 161503 - DNA, 15 bp, Homo sapiens
ttgcctgtatttgca

SEQ ID NO: 161504 - DNA, 15 bp, Homo sapiens
cttgcctgtatttgc

SEQ ID NO: 161505 - DNA, 15 bp, Homo sapiens
ccttgcctgtatttg

SEQ ID NO: 161506 - DNA, 15 bp, Homo sapiens
gccttgcctgtattt

SEQ ID NO: 161507 - DNA, 15 bp, Homo sapiens
tgccttgcctgtatt

SEQ ID NO: 161508 - DNA, 15 bp, Homo sapiens
gtgccttgcctgtat

SEQ ID NO: 161509 - DNA, 15 bp, Homo sapiens
agtgccttgcctgta

SEQ ID NO: 161510 - DNA, 15 bp, Homo sapiens
tagtgccttgcctgt

SEQ ID NO: 161511 - DNA, 15 bp, Homo sapiens
ttagtgccttgcctg

SEQ ID NO: 161512 - DNA, 15 bp, Homo sapiens
cttagtgccttgcct

SEQ ID NO: 161513 - DNA, 15 bp, Homo sapiens
tcttagtgccttgcc

SEQ ID NO: 161514 - DNA, 15 bp, Homo sapiens
gtcttagtgccttgc

SEQ ID NO: 161515 - DNA, 15 bp, Homo sapiens
tgtcttagtgccttg

SEQ ID NO: 161516 - DNA, 15 bp, Homo sapiens
atgtcttagtgcctt

SEQ ID NO: 161517 - DNA, 15 bp, Homo sapiens
catgtcttagtgcct

SEQ ID NO: 161518 - DNA, 15 bp, Homo sapiens
tcatgtcttagtgcc

SEQ ID NO: 161519 - DNA, 15 bp, Homo sapiens
ctcatgtcttagtgc

SEQ ID NO: 161520 - DNA, 15 bp, Homo sapiens
cctcatgtcttagtg

SEQ ID NO: 161521 - DNA, 15 bp, Homo sapiens
tcctcatgtcttagt

SEQ ID NO: 161522 - DNA, 15 bp, Homo sapiens
ttcctcatgtcttag

SEQ ID NO: 161523 - DNA, 15 bp, Homo sapiens
gttcctcatgtctta

SEQ ID NO: 161524 - DNA, 15 bp, Homo sapiens
tgttcctcatgtctt

SEQ ID NO: 161525 - DNA, 15 bp, Homo sapiens
atgttcctcatgtct

SEQ ID NO: 161526 - DNA, 15 bp, Homo sapiens
catgttcctcatgtc

SEQ ID NO: 161527 - DNA, 15 bp, Homo sapiens
ccatgttcctcatgt

SEQ ID NO: 161528 - DNA, 15 bp, Homo sapiens
tccatgttcctcatg

SEQ ID NO: 161529 - DNA, 15 bp, Homo sapiens
gtccatgttcctcat

SEQ ID NO: 161530 - DNA, 15 bp, Homo sapiens
tgtccatgttcctca

SEQ ID NO: 161531 - DNA, 15 bp, Homo sapiens
gtgtccatgttcctc

SEQ ID NO: 161532 - DNA, 15 bp, Homo sapiens
ggtgtccatgttcct

SEQ ID NO: 161533 - DNA, 15 bp, Homo sapiens
tggtgtccatgttcc

SEQ ID NO: 161534 - DNA, 15 bp, Homo sapiens
ttggtgtccatgttc

SEQ ID NO: 161535 - DNA, 15 bp, Homo sapiens
tttggtgtccatgtt

SEQ ID NO: 161536 - DNA, 15 bp, Homo sapiens
ctttggtgtccatgt

SEQ ID NO: 161537 - DNA, 15 bp, Homo sapiens
gctttggtgtccatg

SEQ ID NO: 161538 - DNA, 15 bp, Homo sapiens
tgctttggtgtccat

SEQ ID NO: 161539 - DNA, 15 bp, Homo sapiens
ctgctttggtgtcca

SEQ ID NO: 161540 - DNA, 15 bp, Homo sapiens
cctgctttggtgtcc

SEQ ID NO: 161541 - DNA, 15 bp, Homo sapiens
ccctgctttggtgtc

SEQ ID NO: 161542 - DNA, 15 bp, Homo sapiens
cccctgctttggtgt

SEQ ID NO: 161543 - DNA, 15 bp, Homo sapiens
gcccctgctttggtg

SEQ ID NO: 161544 - DNA, 15 bp, Homo sapiens
ggcccctgctttggt

SEQ ID NO: 161545 - DNA, 15 bp, Homo sapiens
tggcccctgctttgg

SEQ ID NO: 161546 - DNA, 15 bp, Homo sapiens
ctggcccctgctttg

SEQ ID NO: 161547 - DNA, 15 bp, Homo sapiens
cctggcccctgcttt

SEQ ID NO: 161548 - DNA, 15 bp, Homo sapiens
acctggcccctgctt

SEQ ID NO: 161549 - DNA, 15 bp, Homo sapiens
tacctggcccctgct

SEQ ID NO: 161550 - DNA, 15 bp, Homo sapiens
ttacctggcccctgc

SEQ ID NO: 161551 - DNA, 15 bp, Homo sapiens
gttacctggcccctg

SEQ ID NO: 161552 - DNA, 15 bp, Homo sapiens
tgttacctggcccct

SEQ ID NO: 161553 - DNA, 15 bp, Homo sapiens
atgttacctggcccc

SEQ ID NO: 161554 - DNA, 15 bp, Homo sapiens
catgttacctggccc

SEQ ID NO: 161555 - DNA, 15 bp, Homo sapiens
gcatgttacctggcc

SEQ ID NO: 161556 - DNA, 15 bp, Homo sapiens
tgcatgttacctggc

SEQ ID NO: 161557 - DNA, 15 bp, Homo sapiens
ttgcatgttacctgg

SEQ ID NO: 161558 - DNA, 15 bp, Homo sapiens
tttgcatgttacctg

SEQ ID NO: 161559 - DNA, 15 bp, Homo sapiens
atttgcatgttacct

SEQ ID NO: 161560 - DNA, 15 bp, Homo sapiens
aatttgcatgttacc

SEQ ID NO: 161561 - DNA, 15 bp, Homo sapiens
aaatttgcatgttac

SEQ ID NO: 161562 - DNA, 15 bp, Homo sapiens
gaaatttgcatgtta

SEQ ID NO: 161563 - DNA, 15 bp, Homo sapiens
agaaatttgcatgtt

SEQ ID NO: 161564 - DNA, 15 bp, Homo sapiens
tagaaatttgcatgt

SEQ ID NO: 161565 - DNA, 15 bp, Homo sapiens
ctagaaatttgcatg

SEQ ID NO: 161566 - DNA, 15 bp, Homo sapiens
tctagaaatttgcat

SEQ ID NO: 161567 - DNA, 15 bp, Homo sapiens
ctctagaaatttgca

SEQ ID NO: 161568 - DNA, 15 bp, Homo sapiens
cctctagaaatttgc

SEQ ID NO: 161569 - DNA, 15 bp, Homo sapiens
tcctctagaaatttg

SEQ ID NO: 161570 - DNA, 15 bp, Homo sapiens
ttcctctagaaattt

SEQ ID NO: 161571 - DNA, 15 bp, Homo sapiens
tttcctctagaaatt

SEQ ID NO: 161572 - DNA, 15 bp, Homo sapiens
atttcctctagaaat

SEQ ID NO: 161573 - DNA, 15 bp, Homo sapiens
catttcctctagaaa

SEQ ID NO: 161574 - DNA, 15 bp, Homo sapiens
gcatttcctctagaa

SEQ ID NO: 161575 - DNA, 15 bp, Homo sapiens
ggcatttcctctaga

SEQ ID NO: 161576 - DNA, 15 bp, Homo sapiens
gggcatttcctctag

SEQ ID NO: 161577 - DNA, 15 bp, Homo sapiens
tgggcatttcctcta

SEQ ID NO: 161578 - DNA, 15 bp, Homo sapiens
ctgggcatttcctct

SEQ ID NO: 161579 - DNA, 15 bp, Homo sapiens
tctgggcatttcctc

SEQ ID NO: 161580 - DNA, 15 bp, Homo sapiens
ttctgggcatttcct

SEQ ID NO: 161581 - DNA, 15 bp, Homo sapiens
gttctgggcatttcc

SEQ ID NO: 161582 - DNA, 15 bp, Homo sapiens
ggttctgggcatttc

SEQ ID NO: 161583 - DNA, 15 bp, Homo sapiens
aggttctgggcattt

SEQ ID NO: 161584 - DNA, 15 bp, Homo sapiens
caggttctgggcatt

SEQ ID NO: 161585 - DNA, 15 bp, Homo sapiens
ccaggttctgggcat

SEQ ID NO: 161586 - DNA, 15 bp, Homo sapiens
gccaggttctgggca

SEQ ID NO: 161587 - DNA, 15 bp, Homo sapiens
tgccaggttctgggc

SEQ ID NO: 161588 - DNA, 15 bp, Homo sapiens
atgccaggttctggg

SEQ ID NO: 161589 - DNA, 15 bp, Homo sapiens
gatgccaggttctgg

SEQ ID NO: 161590 - DNA, 15 bp, Homo sapiens
tgatgccaggttctg

SEQ ID NO: 161591 - DNA, 15 bp, Homo sapiens
atgatgccaggttct

SEQ ID NO: 161592 - DNA, 15 bp, Homo sapiens
catgatgccaggttc

SEQ ID NO: 161593 - DNA, 15 bp, Homo sapiens
gcatgatgccaggtt

SEQ ID NO: 161594 - DNA, 15 bp, Homo sapiens
ggcatgatgccaggt

SEQ ID NO: 161595 - DNA, 15 bp, Homo sapiens
aggcatgatgccagg

SEQ ID NO: 161596 - DNA, 15 bp, Homo sapiens
gaggcatgatgccag

SEQ ID NO: 161597 - DNA, 15 bp, Homo sapiens
ggaggcatgatgcca

SEQ ID NO: 161598 - DNA, 15 bp, Homo sapiens
aggaggcatgatgcc

SEQ ID NO: 161599 - DNA, 15 bp, Homo sapiens
caggaggcatgatgc

SEQ ID NO: 161600 - DNA, 15 bp, Homo sapiens
tcaggaggcatgatg

SEQ ID NO: 161601 - DNA, 15 bp, Homo sapiens
ctcaggaggcatgat

SEQ ID NO: 161602 - DNA, 15 bp, Homo sapiens
gctcaggaggcatga

SEQ ID NO: 161603 - DNA, 15 bp, Homo sapiens
ggctcaggaggcatg

SEQ ID NO: 161604 - DNA, 15 bp, Homo sapiens
gggctcaggaggcat

SEQ ID NO: 161605 - DNA, 15 bp, Homo sapiens
ggggctcaggaggca

SEQ ID NO: 161606 - DNA, 15 bp, Homo sapiens
aggggctcaggaggc

SEQ ID NO: 161607 - DNA, 15 bp, Homo sapiens
gaggggctcaggagg

SEQ ID NO: 161608 - DNA, 15 bp, Homo sapiens
tgaggggctcaggag

SEQ ID NO: 161609 - DNA, 15 bp, Homo sapiens
atgaggggctcagga

SEQ ID NO: 161610 - DNA, 15 bp, Homo sapiens
catgaggggctcagg

SEQ ID NO: 161611 - DNA, 15 bp, Homo sapiens
gcatgaggggctcag

SEQ ID NO: 161612 - DNA, 15 bp, Homo sapiens
cgcatgaggggctca

SEQ ID NO: 161613 - DNA, 15 bp, Homo sapiens
gcgcatgaggggctc

SEQ ID NO: 161614 - DNA, 15 bp, Homo sapiens
ggcgcatgaggggct

SEQ ID NO: 161615 - DNA, 15 bp, Homo sapiens
cggcgcatgaggggc

SEQ ID NO: 161616 - DNA, 15 bp, Homo sapiens
acggcgcatgagggg

SEQ ID NO: 161617 - DNA, 15 bp, Homo sapiens
cacggcgcatgaggg

SEQ ID NO: 161618 - DNA, 15 bp, Homo sapiens
tcacggcgcatgagg

SEQ ID NO: 161619 - DNA, 15 bp, Homo sapiens
ctcacggcgcatgag

SEQ ID NO: 161620 - DNA, 15 bp, Homo sapiens
cctcacggcgcatga

SEQ ID NO: 161621 - DNA, 15 bp, Homo sapiens
ccctcacggcgcatg

SEQ ID NO: 161622 - DNA, 15 bp, Homo sapiens
cccctcacggcgcat

SEQ ID NO: 161623 - DNA, 15 bp, Homo sapiens
acccctcacggcgca

SEQ ID NO: 161624 - DNA, 15 bp, Homo sapiens
tacccctcacggcgc

SEQ ID NO: 161625 - DNA, 15 bp, Homo sapiens
ttacccctcacggcg

SEQ ID NO: 161626 - DNA, 15 bp, Homo sapiens
cttacccctcacggc

SEQ ID NO: 161627 - DNA, 15 bp, Homo sapiens
tcttacccctcacgg

SEQ ID NO: 161628 - DNA, 15 bp, Homo sapiens
ctcttacccctcacg

SEQ ID NO: 161629 - DNA, 15 bp, Homo sapiens
cctcttacccctcac

SEQ ID NO: 161630 - DNA, 15 bp, Homo sapiens
ccctcttacccctca

SEQ ID NO: 161631 - DNA, 15 bp, Homo sapiens
accctcttacccctc

SEQ ID NO: 161632 - DNA, 15 bp, Homo sapiens
gaccctcttacccct

SEQ ID NO: 161633 - DNA, 15 bp, Homo sapiens
tgaccctcttacccc

SEQ ID NO: 161634 - DNA, 15 bp, Homo sapiens
ctgaccctcttaccc

SEQ ID NO: 161635 - DNA, 15 bp, Homo sapiens
tctgaccctcttacc

SEQ ID NO: 161636 - DNA, 15 bp, Homo sapiens
gtctgaccctcttac

SEQ ID NO: 161637 - DNA, 15 bp, Homo sapiens
tgtctgaccctctta

SEQ ID NO: 161638 - DNA, 15 bp, Homo sapiens
ctgtctgaccctctt

SEQ ID NO: 161639 - DNA, 15 bp, Homo sapiens
gctgtctgaccctct

SEQ ID NO: 161640 - DNA, 15 bp, Homo sapiens
agctgtctgaccctc

SEQ ID NO: 161641 - DNA, 15 bp, Homo sapiens
cagctgtctgaccct

SEQ ID NO: 161642 - DNA, 15 bp, Homo sapiens
ccagctgtctgaccc

SEQ ID NO: 161643 - DNA, 15 bp, Homo sapiens
tccagctgtctgacc

SEQ ID NO: 161644 - DNA, 15 bp, Homo sapiens
ctccagctgtctgac

SEQ ID NO: 161645 - DNA, 15 bp, Homo sapiens
actccagctgtctga

SEQ ID NO: 161646 - DNA, 15 bp, Homo sapiens
cactccagctgtctg

SEQ ID NO: 161647 - DNA, 15 bp, Homo sapiens
acactccagctgtct

SEQ ID NO: 161648 - DNA, 15 bp, Homo sapiens
tacactccagctgtc

SEQ ID NO: 161649 - DNA, 15 bp, Homo sapiens
ctacactccagctgt

SEQ ID NO: 161650 - DNA, 15 bp, Homo sapiens
cctacactccagctg

SEQ ID NO: 161651 - DNA, 15 bp, Homo sapiens
ccctacactccagct

SEQ ID NO: 161652 - DNA, 15 bp, Homo sapiens
tccctacactccagc

SEQ ID NO: 161653 - DNA, 15 bp, Homo sapiens
ctccctacactccag

SEQ ID NO: 161654 - DNA, 15 bp, Homo sapiens
tctccctacactcca

SEQ ID NO: 161655 - DNA, 15 bp, Homo sapiens
gtctccctacactcc

SEQ ID NO: 161656 - DNA, 15 bp, Homo sapiens
cgtctccctacactc

SEQ ID NO: 161657 - DNA, 15 bp, Homo sapiens
tcgtctccctacact

SEQ ID NO: 161658 - DNA, 15 bp, Homo sapiens
gtcgtctccctacac

SEQ ID NO: 161659 - DNA, 15 bp, Homo sapiens
agtcgtctccctaca

SEQ ID NO: 161660 - DNA, 15 bp, Homo sapiens
aagtcgtctccctac

SEQ ID NO: 161661 - DNA, 15 bp, Homo sapiens
gaagtcgtctcccta

SEQ ID NO: 161662 - DNA, 15 bp, Homo sapiens
agaagtcgtctccct

SEQ ID NO: 161663 - DNA, 15 bp, Homo sapiens
gagaagtcgtctccc

SEQ ID NO: 161664 - DNA, 15 bp, Homo sapiens
tgagaagtcgtctcc

SEQ ID NO: 161665 - DNA, 15 bp, Homo sapiens
ctgagaagtcgtctc

SEQ ID NO: 161666 - DNA, 15 bp, Homo sapiens
cctgagaagtcgtct

SEQ ID NO: 161667 - DNA, 15 bp, Homo sapiens
tcctgagaagtcgtc

SEQ ID NO: 161668 - DNA, 15 bp, Homo sapiens
ctcctgagaagtcgt

SEQ ID NO: 161669 - DNA, 15 bp, Homo sapiens
tctcctgagaagtcg

SEQ ID NO: 161670 - DNA, 15 bp, Homo sapiens
ctctcctgagaagtc

SEQ ID NO: 161671 - DNA, 15 bp, Homo sapiens
tctctcctgagaagt

SEQ ID NO: 161672 - DNA, 15 bp, Homo sapiens
ttctctcctgagaag

SEQ ID NO: 161673 - DNA, 15 bp, Homo sapiens
attctctcctgagaa

SEQ ID NO: 161674 - DNA, 15 bp, Homo sapiens
tattctctcctgaga

SEQ ID NO: 161675 - DNA, 15 bp, Homo sapiens
ctattctctcctgag

SEQ ID NO: 161676 - DNA, 15 bp, Homo sapiens
actattctctcctga

SEQ ID NO: 161677 - DNA, 15 bp, Homo sapiens
aactattctctcctg

SEQ ID NO: 161678 - DNA, 15 bp, Homo sapiens
taactattctctcct

SEQ ID NO: 161679 - DNA, 15 bp, Homo sapiens
ctaactattctctcc

SEQ ID NO: 161680 - DNA, 15 bp, Homo sapiens
actaactattctctc

SEQ ID NO: 161681 - DNA, 15 bp, Homo sapiens
cactaactattctct

SEQ ID NO: 161682 - DNA, 15 bp, Homo sapiens
gcactaactattctc

SEQ ID NO: 161683 - DNA, 15 bp, Homo sapiens
agcactaactattct

SEQ ID NO: 161684 - DNA, 15 bp, Homo sapiens
gagcactaactattc

SEQ ID NO: 161685 - DNA, 15 bp, Homo sapiens
ggagcactaactatt

SEQ ID NO: 161686 - DNA, 15 bp, Homo sapiens
gggagcactaactat

SEQ ID NO: 161687 - DNA, 15 bp, Homo sapiens
cgggagcactaacta

SEQ ID NO: 161688 - DNA, 15 bp, Homo sapiens
acgggagcactaact

SEQ ID NO: 161689 - DNA, 15 bp, Homo sapiens
gacgggagcactaac

SEQ ID NO: 161690 - DNA, 15 bp, Homo sapiens
tgacgggagcactaa

SEQ ID NO: 161691 - DNA, 15 bp, Homo sapiens
gtgacgggagcacta

SEQ ID NO: 161692 - DNA, 15 bp, Homo sapiens
ggtgacgggagcact

SEQ ID NO: 161693 - DNA, 15 bp, Homo sapiens
gggtgacgggagcac

SEQ ID NO: 161694 - DNA, 15 bp, Homo sapiens
agggtgacgggagca

SEQ ID NO: 161695 - DNA, 15 bp, Homo sapiens
aagggtgacgggagc

SEQ ID NO: 161696 - DNA, 15 bp, Homo sapiens
gaagggtgacgggag

SEQ ID NO: 161697 - DNA, 15 bp, Homo sapiens
tgaagggtgacggga

SEQ ID NO: 161698 - DNA, 15 bp, Homo sapiens
atgaagggtgacggg

SEQ ID NO: 161699 - DNA, 15 bp, Homo sapiens
gatgaagggtgacgg

SEQ ID NO: 161700 - DNA, 15 bp, Homo sapiens
agatgaagggtgacg

SEQ ID NO: 161701 - DNA, 15 bp, Homo sapiens
cagatgaagggtgac

SEQ ID NO: 161702 - DNA, 15 bp, Homo sapiens
tcagatgaagggtga

SEQ ID NO: 161703 - DNA, 15 bp, Homo sapiens
ctcagatgaagggtg

SEQ ID NO: 161704 - DNA, 15 bp, Homo sapiens
tctcagatgaagggt

SEQ ID NO: 161705 - DNA, 15 bp, Homo sapiens
ttctcagatgaaggg

SEQ ID NO: 161706 - DNA, 15 bp, Homo sapiens
gttctcagatgaagg

SEQ ID NO: 161707 - DNA, 15 bp, Homo sapiens
ggttctcagatgaag

SEQ ID NO: 161708 - DNA, 15 bp, Homo sapiens
gggttctcagatgaa

SEQ ID NO: 161709 - DNA, 15 bp, Homo sapiens
tgggttctcagatga

SEQ ID NO: 161710 - DNA, 15 bp, Homo sapiens
ttgggttctcagatg

SEQ ID NO: 161711 - DNA, 15 bp, Homo sapiens
cttgggttctcagat

SEQ ID NO: 161712 - DNA, 15 bp, Homo sapiens
tcttgggttctcaga

SEQ ID NO: 161713 - DNA, 15 bp, Homo sapiens
ctcttgggttctcag

SEQ ID NO: 161714 - DNA, 15 bp, Homo sapiens
gctcttgggttctca

SEQ ID NO: 161715 - DNA, 15 bp, Homo sapiens
agctcttgggttctc

SEQ ID NO: 161716 - DNA, 15 bp, Homo sapiens
tagctcttgggttct

SEQ ID NO: 161717 - DNA, 15 bp, Homo sapiens
ctagctcttgggttc

SEQ ID NO: 161718 - DNA, 15 bp, Homo sapiens
tctagctcttgggtt

SEQ ID NO: 161719 - DNA, 15 bp, Homo sapiens
ctctagctcttgggt

SEQ ID NO: 161720 - DNA, 15 bp, Homo sapiens
cctctagctcttggg

SEQ ID NO: 161721 - DNA, 15 bp, Homo sapiens
tcctctagctcttgg

SEQ ID NO: 161722 - DNA, 15 bp, Homo sapiens
ctcctctagctcttg

SEQ ID NO: 161723 - DNA, 15 bp, Homo sapiens
tctcctctagctctt

SEQ ID NO: 161724 - DNA, 15 bp, Homo sapiens
ttctcctctagctct

SEQ ID NO: 161725 - DNA, 15 bp, Homo sapiens
tttctcctctagctc

SEQ ID NO: 161726 - DNA, 15 bp, Homo sapiens
ctttctcctctagct

SEQ ID NO: 161727 - DNA, 15 bp, Homo sapiens
actttctcctctagc

SEQ ID NO: 161728 - DNA, 15 bp, Homo sapiens
cactttctcctctag

SEQ ID NO: 161729 - DNA, 15 bp, Homo sapiens
tcactttctcctcta

SEQ ID NO: 161730 - DNA, 15 bp, Homo sapiens
atcactttctcctct

SEQ ID NO: 161731 - DNA, 15 bp, Homo sapiens
gatcactttctcctc

SEQ ID NO: 161732 - DNA, 15 bp, Homo sapiens
ggatcactttctcct

SEQ ID NO: 161733 - DNA, 15 bp, Homo sapiens
aggatcactttctcc

SEQ ID NO: 161734 - DNA, 15 bp, Homo sapiens
gaggatcactttctc

SEQ ID NO: 161735 - DNA, 15 bp, Homo sapiens
tgaggatcactttct

SEQ ID NO: 161736 - DNA, 15 bp, Homo sapiens
atgaggatcactttc

SEQ ID NO: 161737 - DNA, 15 bp, Homo sapiens
catgaggatcacttt

SEQ ID NO: 161738 - DNA, 15 bp, Homo sapiens
tcatgaggatcactt

SEQ ID NO: 161739 - DNA, 15 bp, Homo sapiens
ctcatgaggatcact

SEQ ID NO: 161740 - DNA, 15 bp, Homo sapiens
actcatgaggatcac

SEQ ID NO: 161741 - DNA, 15 bp, Homo sapiens
tactcatgaggatca

SEQ ID NO: 161742 - DNA, 15 bp, Homo sapiens
gtactcatgaggatc

SEQ ID NO: 161743 - DNA, 15 bp, Homo sapiens
ggtactcatgaggat

SEQ ID NO: 161744 - DNA, 15 bp, Homo sapiens
tggtactcatgagga

SEQ ID NO: 161745 - DNA, 15 bp, Homo sapiens
ctggtactcatgagg

SEQ ID NO: 161746 - DNA, 15 bp, Homo sapiens
tctggtactcatgag

SEQ ID NO: 161747 - DNA, 15 bp, Homo sapiens
ctctggtactcatga

SEQ ID NO: 161748 - DNA, 15 bp, Homo sapiens
cctctggtactcatg

SEQ ID NO: 161749 - DNA, 15 bp, Homo sapiens
tcctctggtactcat

SEQ ID NO: 161750 - DNA, 15 bp, Homo sapiens
ctcctctggtactca

SEQ ID NO: 161751 - DNA, 15 bp, Homo sapiens
gctcctctggtactc

SEQ ID NO: 161752 - DNA, 15 bp, Homo sapiens
tgctcctctggtact

SEQ ID NO: 161753 - DNA, 15 bp, Homo sapiens
ctgctcctctggtac

SEQ ID NO: 161754 - DNA, 15 bp, Homo sapiens
gctgctcctctggta

SEQ ID NO: 161755 - DNA, 15 bp, Homo sapiens
tgctgctcctctggt

SEQ ID NO: 161756 - DNA, 15 bp, Homo sapiens
ctgctgctcctctgg

SEQ ID NO: 161757 - DNA, 15 bp, Homo sapiens
cctgctgctcctctg

SEQ ID NO: 161758 - DNA, 15 bp, Homo sapiens
ccctgctgctcctct

SEQ ID NO: 161759 - DNA, 15 bp, Homo sapiens
cccctgctgctcctc

SEQ ID NO: 161760 - DNA, 15 bp, Homo sapiens
tcccctgctgctcct

SEQ ID NO: 161761 - DNA, 15 bp, Homo sapiens
gtcccctgctgctcc

SEQ ID NO: 161762 - DNA, 15 bp, Homo sapiens
tgtcccctgctgctc

SEQ ID NO: 161763 - DNA, 15 bp, Homo sapiens
atgtcccctgctgct

SEQ ID NO: 161764 - DNA, 15 bp, Homo sapiens
gatgtcccctgctgc

SEQ ID NO: 161765 - DNA, 15 bp, Homo sapiens
ggatgtcccctgctg

SEQ ID NO: 161766 - DNA, 15 bp, Homo sapiens
tggatgtcccctgct

SEQ ID NO: 161767 - DNA, 15 bp, Homo sapiens
ttggatgtcccctgc

SEQ ID NO: 161768 - DNA, 15 bp, Homo sapiens
tttggatgtcccctg

SEQ ID NO: 161769 - DNA, 15 bp, Homo sapiens
ctttggatgtcccct

SEQ ID NO: 161770 - DNA, 15 bp, Homo sapiens
gctttggatgtcccc

SEQ ID NO: 161771 - DNA, 15 bp, Homo sapiens
tgctttggatgtccc

SEQ ID NO: 161772 - DNA, 15 bp, Homo sapiens
gtgctttggatgtcc

SEQ ID NO: 161773 - DNA, 15 bp, Homo sapiens
ggtgctttggatgtc

SEQ ID NO: 161774 - DNA, 15 bp, Homo sapiens
tggtgctttggatgt

SEQ ID NO: 161775 - DNA, 15 bp, Homo sapiens
ctggtgctttggatg

SEQ ID NO: 161776 - DNA, 15 bp, Homo sapiens
tctggtgctttggat

SEQ ID NO: 161777 - DNA, 15 bp, Homo sapiens
ctctggtgctttgga

SEQ ID NO: 161778 - DNA, 15 bp, Homo sapiens
tctctggtgctttgg

SEQ ID NO: 161779 - DNA, 15 bp, Homo sapiens
ctctctggtgctttg

SEQ ID NO: 161780 - DNA, 15 bp, Homo sapiens
tctctctggtgcttt

SEQ ID NO: 161781 - DNA, 15 bp, Homo sapiens
ctctctctggtgctt

SEQ ID NO: 161782 - DNA, 15 bp, Homo sapiens
tctctctctggtgct

SEQ ID NO: 161783 - DNA, 15 bp, Homo sapiens
ttctctctctggtgc

SEQ ID NO: 161784 - DNA, 15 bp, Homo sapiens
tttctctctctggtg

SEQ ID NO: 161785 - DNA, 15 bp, Homo sapiens
gtttctctctctggt

SEQ ID NO: 161786 - DNA, 15 bp, Homo sapiens
tgtttctctctctgg

SEQ ID NO: 161787 - DNA, 15 bp, Homo sapiens
ctgtttctctctctg

SEQ ID NO: 161788 - DNA, 15 bp, Homo sapiens
tctgtttctctctct

SEQ ID NO: 161789 - DNA, 15 bp, Homo sapiens
ctctgtttctctctc

SEQ ID NO: 161790 - DNA, 15 bp, Homo sapiens
tctctgtttctctct

SEQ ID NO: 161791 - DNA, 15 bp, Homo sapiens
gtctctgtttctctc

SEQ ID NO: 161792 - DNA, 15 bp, Homo sapiens
tgtctctgtttctct

SEQ ID NO: 161793 - DNA, 15 bp, Homo sapiens
ctgtctctgtttctc

SEQ ID NO: 161794 - DNA, 15 bp, Homo sapiens
tctgtctctgtttct

SEQ ID NO: 161795 - DNA, 15 bp, Homo sapiens
ctctgtctctgtttc

SEQ ID NO: 161796 - DNA, 15 bp, Homo sapiens
tctctgtctctgttt

SEQ ID NO: 161797 - DNA, 15 bp, Homo sapiens
ctctctgtctctgtt

SEQ ID NO: 161798 - DNA, 15 bp, Homo sapiens
tctctctgtctctgt

SEQ ID NO: 161799 - DNA, 15 bp, Homo sapiens
gtctctctgtctctg

SEQ ID NO: 161800 - DNA, 15 bp, Homo sapiens
tgtctctctgtctct

SEQ ID NO: 161801 - DNA, 15 bp, Homo sapiens
ctgtctctctgtctc

SEQ ID NO: 161802 - DNA, 15 bp, Homo sapiens
cctgtctctctgtct

SEQ ID NO: 161803 - DNA, 15 bp, Homo sapiens
gcctgtctctctgtc

SEQ ID NO: 161804 - DNA, 15 bp, Homo sapiens
tgcctgtctctctgt

SEQ ID NO: 161805 - DNA, 15 bp, Homo sapiens
ctgcctgtctctctg

SEQ ID NO: 161806 - DNA, 15 bp, Homo sapiens
actgcctgtctctct

SEQ ID NO: 161807 - DNA, 15 bp, Homo sapiens
cactgcctgtctctc

SEQ ID NO: 161808 - DNA, 15 bp, Homo sapiens
tcactgcctgtctct

SEQ ID NO: 161809 - DNA, 15 bp, Homo sapiens
gtcactgcctgtctc

SEQ ID NO: 161810 - DNA, 15 bp, Homo sapiens
tgtcactgcctgtct

SEQ ID NO: 161811 - DNA, 15 bp, Homo sapiens
ctgtcactgcctgtc

SEQ ID NO: 161812 - DNA, 15 bp, Homo sapiens
gctgtcactgcctgt

SEQ ID NO: 161813 - DNA, 15 bp, Homo sapiens
agctgtcactgcctg

SEQ ID NO: 161814 - DNA, 15 bp, Homo sapiens
gagctgtcactgcct

SEQ ID NO: 161815 - DNA, 15 bp, Homo sapiens
tgagctgtcactgcc

SEQ ID NO: 161816 - DNA, 15 bp, Homo sapiens
ttgagctgtcactgc

SEQ ID NO: 161817 - DNA, 15 bp, Homo sapiens
tttgagctgtcactg

SEQ ID NO: 161818 - DNA, 15 bp, Homo sapiens
gtttgagctgtcact

SEQ ID NO: 161819 - DNA, 15 bp, Homo sapiens
ggtttgagctgtcac

SEQ ID NO: 161820 - DNA, 15 bp, Homo sapiens
aggtttgagctgtca

SEQ ID NO: 161821 - DNA, 15 bp, Homo sapiens
gaggtttgagctgtc

SEQ ID NO: 161822 - DNA, 15 bp, Homo sapiens
tgaggtttgagctgt

SEQ ID NO: 161823 - DNA, 15 bp, Homo sapiens
ctgaggtttgagctg

SEQ ID NO: 161824 - DNA, 15 bp, Homo sapiens
gctgaggtttgagct

SEQ ID NO: 161825 - DNA, 15 bp, Homo sapiens
ggctgaggtttgagc

SEQ ID NO: 161826 - DNA, 15 bp, Homo sapiens
tggctgaggtttgag

SEQ ID NO: 161827 - DNA, 15 bp, Homo sapiens
ctggctgaggtttga

SEQ ID NO: 161828 - DNA, 15 bp, Homo sapiens
tctggctgaggtttg

SEQ ID NO: 161829 - DNA, 15 bp, Homo sapiens
atctggctgaggttt

SEQ ID NO: 161830 - DNA, 15 bp, Homo sapiens
gatctggctgaggtt

SEQ ID NO: 161831 - DNA, 15 bp, Homo sapiens
ggatctggctgaggt

SEQ ID NO: 161832 - DNA, 15 bp, Homo sapiens
tggatctggctgagg

SEQ ID NO: 161833 - DNA, 15 bp, Homo sapiens
ctggatctggctgag

SEQ ID NO: 161834 - DNA, 15 bp, Homo sapiens
tctggatctggctga

SEQ ID NO: 161835 - DNA, 15 bp, Homo sapiens
ctctggatctggctg

SEQ ID NO: 161836 - DNA, 15 bp, Homo sapiens
gctctggatctggct

SEQ ID NO: 161837 - DNA, 15 bp, Homo sapiens
tgctctggatctggc

SEQ ID NO: 161838 - DNA, 15 bp, Homo sapiens
atgctctggatctgg

SEQ ID NO: 161839 - DNA, 15 bp, Homo sapiens
tatgctctggatctg

SEQ ID NO: 161840 - DNA, 15 bp, Homo sapiens
gtatgctctggatct

SEQ ID NO: 161841 - DNA, 15 bp, Homo sapiens
tgtatgctctggatc

SEQ ID NO: 161842 - DNA, 15 bp, Homo sapiens
ttgtatgctctggat

SEQ ID NO: 161843 - DNA, 15 bp, Homo sapiens
tttgtatgctctgga

SEQ ID NO: 161844 - DNA, 15 bp, Homo sapiens
ctttgtatgctctgg

SEQ ID NO: 161845 - DNA, 15 bp, Homo sapiens
actttgtatgctctg

SEQ ID NO: 161846 - DNA, 15 bp, Homo sapiens
gactttgtatgctct

SEQ ID NO: 161847 - DNA, 15 bp, Homo sapiens
agactttgtatgctc

SEQ ID NO: 161848 - DNA, 15 bp, Homo sapiens
gagactttgtatgct

SEQ ID NO: 161849 - DNA, 15 bp, Homo sapiens
ggagactttgtatgc

SEQ ID NO: 161850 - DNA, 15 bp, Homo sapiens
aggagactttgtatg

SEQ ID NO: 161851 - DNA, 15 bp, Homo sapiens
caggagactttgtat

SEQ ID NO: 161852 - DNA, 15 bp, Homo sapiens
gcaggagactttgta

SEQ ID NO: 161853 - DNA, 15 bp, Homo sapiens
ggcaggagactttgt

SEQ ID NO: 161854 - DNA, 15 bp, Homo sapiens
aggcaggagactttg

SEQ ID NO: 161855 - DNA, 15 bp, Homo sapiens
taggcaggagacttt

SEQ ID NO: 161856 - DNA, 15 bp, Homo sapiens
gtaggcaggagactt

SEQ ID NO: 161857 - DNA, 15 bp, Homo sapiens
tgtaggcaggagact

SEQ ID NO: 161858 - DNA, 15 bp, Homo sapiens
ctgtaggcaggagac

SEQ ID NO: 161859 - DNA, 15 bp, Homo sapiens
cctgtaggcaggaga

SEQ ID NO: 161860 - DNA, 15 bp, Homo sapiens
tcctgtaggcaggag

SEQ ID NO: 161861 - DNA, 15 bp, Homo sapiens
gtcctgtaggcagga

SEQ ID NO: 161862 - DNA, 15 bp, Homo sapiens
tgtcctgtaggcagg

SEQ ID NO: 161863 - DNA, 15 bp, Homo sapiens
ctgtcctgtaggcag

SEQ ID NO: 161864 - DNA, 15 bp, Homo sapiens
gctgtcctgtaggca

SEQ ID NO: 161865 - DNA, 15 bp, Homo sapiens
ggctgtcctgtaggc

SEQ ID NO: 161866 - DNA, 15 bp, Homo sapiens
gggctgtcctgtagg

SEQ ID NO: 161867 - DNA, 15 bp, Homo sapiens
tgggctgtcctgtag

SEQ ID NO: 161868 - DNA, 15 bp, Homo sapiens
ctgggctgtcctgta

SEQ ID NO: 161869 - DNA, 15 bp, Homo sapiens
actgggctgtcctgt

SEQ ID NO: 161870 - DNA, 15 bp, Homo sapiens
tactgggctgtcctg

SEQ ID NO: 161871 - DNA, 15 bp, Homo sapiens
ttactgggctgtcct

SEQ ID NO: 161872 - DNA, 15 bp, Homo sapiens
cttactgggctgtcc

SEQ ID NO: 161873 - DNA, 15 bp, Homo sapiens
tcttactgggctgtc

SEQ ID NO: 161874 - DNA, 15 bp, Homo sapiens
ctcttactgggctgt

SEQ ID NO: 161875 - DNA, 15 bp, Homo sapiens
gctcttactgggctg

SEQ ID NO: 161876 - DNA, 15 bp, Homo sapiens
agctcttactgggct

SEQ ID NO: 161877 - DNA, 15 bp, Homo sapiens
gagctcttactgggc

SEQ ID NO: 161878 - DNA, 15 bp, Homo sapiens
agagctcttactggg

SEQ ID NO: 161879 - DNA, 15 bp, Homo sapiens
gagagctcttactgg

SEQ ID NO: 161880 - DNA, 15 bp, Homo sapiens
tgagagctcttactg

SEQ ID NO: 161881 - DNA, 15 bp, Homo sapiens
ctgagagctcttact

SEQ ID NO: 161882 - DNA, 15 bp, Homo sapiens
gctgagagctcttac

SEQ ID NO: 161883 - DNA, 15 bp, Homo sapiens
agctgagagctctta

SEQ ID NO: 161884 - DNA, 15 bp, Homo sapiens
aagctgagagctctt

SEQ ID NO: 161885 - DNA, 15 bp, Homo sapiens
caagctgagagctct

SEQ ID NO: 161886 - DNA, 15 bp, Homo sapiens
gcaagctgagagctc

SEQ ID NO: 161887 - DNA, 15 bp, Homo sapiens
ggcaagctgagagct

SEQ ID NO: 161888 - DNA, 15 bp, Homo sapiens
aggcaagctgagagc

SEQ ID NO: 161889 - DNA, 15 bp, Homo sapiens
gaggcaagctgagag

SEQ ID NO: 161890 - DNA, 15 bp, Homo sapiens
ggaggcaagctgaga

SEQ ID NO: 161891 - DNA, 15 bp, Homo sapiens
aggaggcaagctgag

SEQ ID NO: 161892 - DNA, 15 bp, Homo sapiens
aaggaggcaagctga

SEQ ID NO: 161893 - DNA, 15 bp, Homo sapiens
gaaggaggcaagctg

SEQ ID NO: 161894 - DNA, 15 bp, Homo sapiens
ggaaggaggcaagct

SEQ ID NO: 161895 - DNA, 15 bp, Homo sapiens
gggaaggaggcaagc

SEQ ID NO: 161896 - DNA, 15 bp, Homo sapiens
agggaaggaggcaag

SEQ ID NO: 161897 - DNA, 15 bp, Homo sapiens
gagggaaggaggcaa

SEQ ID NO: 161898 - DNA, 15 bp, Homo sapiens
ggagggaaggaggca

SEQ ID NO: 161899 - DNA, 15 bp, Homo sapiens
gggagggaaggaggc

SEQ ID NO: 161900 - DNA, 15 bp, Homo sapiens
ggggagggaaggagg

SEQ ID NO: 161901 - DNA, 15 bp, Homo sapiens
tggggagggaaggag

SEQ ID NO: 161902 - DNA, 15 bp, Homo sapiens
gtggggagggaagga

SEQ ID NO: 161903 - DNA, 15 bp, Homo sapiens
tgtggggagggaagg

SEQ ID NO: 161904 - DNA, 15 bp, Homo sapiens
ttgtggggagggaag

SEQ ID NO: 161905 - DNA, 15 bp, Homo sapiens
cttgtggggagggaa

SEQ ID NO: 161906 - DNA, 15 bp, Homo sapiens
gcttgtggggaggga

SEQ ID NO: 161907 - DNA, 15 bp, Homo sapiens
ggcttgtggggaggg

SEQ ID NO: 161908 - DNA, 15 bp, Homo sapiens
gggcttgtggggagg

SEQ ID NO: 161909 - DNA, 15 bp, Homo sapiens
agggcttgtggggag

SEQ ID NO: 161910 - DNA, 15 bp, Homo sapiens
cagggcttgtgggga

SEQ ID NO: 161911 - DNA, 15 bp, Homo sapiens
gcagggcttgtgggg

SEQ ID NO: 161912 - DNA, 15 bp, Homo sapiens
agcagggcttgtggg

SEQ ID NO: 161913 - DNA, 15 bp, Homo sapiens
cagcagggcttgtgg

SEQ ID NO: 161914 - DNA, 15 bp, Homo sapiens
gcagcagggcttgtg

SEQ ID NO: 161915 - DNA, 15 bp, Homo sapiens
tgcagcagggcttgt

SEQ ID NO: 161916 - DNA, 15 bp, Homo sapiens
ttgcagcagggcttg

SEQ ID NO: 161917 - DNA, 15 bp, Homo sapiens
attgcagcagggctt

SEQ ID NO: 161918 - DNA, 15 bp, Homo sapiens
gattgcagcagggct

SEQ ID NO: 161919 - DNA, 15 bp, Homo sapiens
ggattgcagcagggc

SEQ ID NO: 161920 - DNA, 15 bp, Homo sapiens
gggattgcagcaggg

SEQ ID NO: 161921 - DNA, 15 bp, Homo sapiens
agggattgcagcagg

SEQ ID NO: 161922 - DNA, 15 bp, Homo sapiens
cagggattgcagcag

SEQ ID NO: 161923 - DNA, 15 bp, Homo sapiens
acagggattgcagca

SEQ ID NO: 161924 - DNA, 15 bp, Homo sapiens
tacagggattgcagc

SEQ ID NO: 161925 - DNA, 15 bp, Homo sapiens
gtacagggattgcag

SEQ ID NO: 161926 - DNA, 15 bp, Homo sapiens
ggtacagggattgca

SEQ ID NO: 161927 - DNA, 15 bp, Homo sapiens
aggtacagggattgc

SEQ ID NO: 161928 - DNA, 15 bp, Homo sapiens
caggtacagggattg

SEQ ID NO: 161929 - DNA, 15 bp, Homo sapiens
ccaggtacagggatt

SEQ ID NO: 161930 - DNA, 15 bp, Homo sapiens
cccaggtacagggat

SEQ ID NO: 161931 - DNA, 15 bp, Homo sapiens
ccccaggtacaggga

SEQ ID NO: 161932 - DNA, 15 bp, Homo sapiens
cccccaggtacaggg

SEQ ID NO: 161933 - DNA, 15 bp, Homo sapiens
acccccaggtacagg

SEQ ID NO: 161934 - DNA, 15 bp, Homo sapiens
gacccccaggtacag

SEQ ID NO: 161935 - DNA, 15 bp, Homo sapiens
tgacccccaggtaca

SEQ ID NO: 161936 - DNA, 15 bp, Homo sapiens
ctgacccccaggtac

SEQ ID NO: 161937 - DNA, 15 bp, Homo sapiens
actgacccccaggta

SEQ ID NO: 161938 - DNA, 15 bp, Homo sapiens
cactgacccccaggt

SEQ ID NO: 161939 - DNA, 15 bp, Homo sapiens
ccactgacccccagg

SEQ ID NO: 161940 - DNA, 15 bp, Homo sapiens
cccactgacccccag

SEQ ID NO: 161941 - DNA, 15 bp, Homo sapiens
tcccactgaccccca

SEQ ID NO: 161942 - DNA, 15 bp, Homo sapiens
ttcccactgaccccc

SEQ ID NO: 161943 - DNA, 15 bp, Homo sapiens
cttcccactgacccc

SEQ ID NO: 161944 - DNA, 15 bp, Homo sapiens
ccttcccactgaccc

SEQ ID NO: 161945 - DNA, 15 bp, Homo sapiens
tccttcccactgacc

SEQ ID NO: 161946 - DNA, 15 bp, Homo sapiens
ctccttcccactgac

SEQ ID NO: 161947 - DNA, 15 bp, Homo sapiens
cctccttcccactga

SEQ ID NO: 161948 - DNA, 15 bp, Homo sapiens
acctccttcccactg

SEQ ID NO: 161949 - DNA, 15 bp, Homo sapiens
cacctccttcccact

SEQ ID NO: 161950 - DNA, 15 bp, Homo sapiens
tcacctccttcccac

SEQ ID NO: 161951 - DNA, 15 bp, Homo sapiens
ctcacctccttccca

SEQ ID NO: 161952 - DNA, 15 bp, Homo sapiens
gctcacctccttccc

SEQ ID NO: 161953 - DNA, 15 bp, Homo sapiens
cgctcacctccttcc

SEQ ID NO: 161954 - DNA, 15 bp, Homo sapiens
tcgctcacctccttc

SEQ ID NO: 161955 - DNA, 15 bp, Homo sapiens
ctcgctcacctcctt

SEQ ID NO: 161956 - DNA, 15 bp, Homo sapiens
tctcgctcacctcct

SEQ ID NO: 161957 - DNA, 15 bp, Homo sapiens
ttctcgctcacctcc

SEQ ID NO: 161958 - DNA, 15 bp, Homo sapiens
tttctcgctcacctc

SEQ ID NO: 161959 - DNA, 15 bp, Homo sapiens
ctttctcgctcacct

SEQ ID NO: 161960 - DNA, 15 bp, Homo sapiens
cctttctcgctcacc

SEQ ID NO: 161961 - DNA, 15 bp, Homo sapiens
tcctttctcgctcac

SEQ ID NO: 161962 - DNA, 15 bp, Homo sapiens
ctcctttctcgctca

SEQ ID NO: 161963 - DNA, 15 bp, Homo sapiens
cctcctttctcgctc

SEQ ID NO: 161964 - DNA, 15 bp, Homo sapiens
ccctcctttctcgct

SEQ ID NO: 161965 - DNA, 15 bp, Homo sapiens
cccctcctttctcgc

SEQ ID NO: 161966 - DNA, 15 bp, Homo sapiens
gcccctcctttctcg

SEQ ID NO: 161967 - DNA, 15 bp, Homo sapiens
tgcccctcctttctc

SEQ ID NO: 161968 - DNA, 15 bp, Homo sapiens
gtgcccctcctttct

SEQ ID NO: 161969 - DNA, 15 bp, Homo sapiens
ggtgcccctcctttc

SEQ ID NO: 161970 - DNA, 15 bp, Homo sapiens
gggtgcccctccttt

SEQ ID NO: 161971 - DNA, 15 bp, Homo sapiens
ggggtgcccctcctt

SEQ ID NO: 161972 - DNA, 15 bp, Homo sapiens
aggggtgcccctcct

SEQ ID NO: 161973 - DNA, 15 bp, Homo sapiens
aaggggtgcccctcc

SEQ ID NO: 161974 - DNA, 15 bp, Homo sapiens
gaaggggtgcccctc

SEQ ID NO: 161975 - DNA, 15 bp, Homo sapiens
ggaaggggtgcccct

SEQ ID NO: 161976 - DNA, 15 bp, Homo sapiens
aggaaggggtgcccc

SEQ ID NO: 161977 - DNA, 15 bp, Homo sapiens
caggaaggggtgccc

SEQ ID NO: 161978 - DNA, 15 bp, Homo sapiens
tcaggaaggggtgcc

SEQ ID NO: 161979 - DNA, 15 bp, Homo sapiens
ttcaggaaggggtgc

SEQ ID NO: 161980 - DNA, 15 bp, Homo sapiens
cttcaggaaggggtg

SEQ ID NO: 161981 - DNA, 15 bp, Homo sapiens
ccttcaggaaggggt

SEQ ID NO: 161982 - DNA, 15 bp, Homo sapiens
gccttcaggaagggg

SEQ ID NO: 161983 - DNA, 15 bp, Homo sapiens
ggccttcaggaaggg

SEQ ID NO: 161984 - DNA, 15 bp, Homo sapiens
gggccttcaggaagg

SEQ ID NO: 161985 - DNA, 15 bp, Homo sapiens
ggggccttcaggaag

SEQ ID NO: 161986 - DNA, 15 bp, Homo sapiens
tggggccttcaggaa

SEQ ID NO: 161987 - DNA, 15 bp, Homo sapiens
ttggggccttcagga

SEQ ID NO: 161988 - DNA, 15 bp, Homo sapiens
cttggggccttcagg

SEQ ID NO: 161989 - DNA, 15 bp, Homo sapiens
tcttggggccttcag

SEQ ID NO: 161990 - DNA, 15 bp, Homo sapiens
ctcttggggccttca

SEQ ID NO: 161991 - DNA, 15 bp, Homo sapiens
cctcttggggccttc

SEQ ID NO: 161992 - DNA, 15 bp, Homo sapiens
tcctcttggggcctt

SEQ ID NO: 161993 - DNA, 15 bp, Homo sapiens
ttcctcttggggcct

SEQ ID NO: 161994 - DNA, 15 bp, Homo sapiens
tttcctcttggggcc

SEQ ID NO: 161995 - DNA, 15 bp, Homo sapiens
ctttcctcttggggc

SEQ ID NO: 161996 - DNA, 15 bp, Homo sapiens
cctttcctcttgggg

SEQ ID NO: 161997 - DNA, 15 bp, Homo sapiens
gcctttcctcttggg

SEQ ID NO: 161998 - DNA, 15 bp, Homo sapiens
cgcctttcctcttgg

SEQ ID NO: 161999 - DNA, 15 bp, Homo sapiens
acgcctttcctcttg

SEQ ID NO: 162000 - DNA, 15 bp, Homo sapiens
aacgcctttcctctt

SEQ ID NO: 162001 - DNA, 15 bp, Homo sapiens
aaacgcctttcctct

SEQ ID NO: 162002 - DNA, 15 bp, Homo sapiens
aaaacgcctttcctc

SEQ ID NO: 162003 - DNA, 15 bp, Homo sapiens
gaaaacgcctttcct

SEQ ID NO: 162004 - DNA, 15 bp, Homo sapiens
tgaaaacgcctttcc

SEQ ID NO: 162005 - DNA, 15 bp, Homo sapiens
gtgaaaacgcctttc

SEQ ID NO: 162006 - DNA, 15 bp, Homo sapiens
ggtgaaaacgccttt

SEQ ID NO: 162007 - DNA, 15 bp, Homo sapiens
gggtgaaaacgcctt

SEQ ID NO: 162008 - DNA, 15 bp, Homo sapiens
tgggtgaaaacgcct

SEQ ID NO: 162009 - DNA, 15 bp, Homo sapiens
ctgggtgaaaacgcc

SEQ ID NO: 162010 - DNA, 15 bp, Homo sapiens
tctgggtgaaaacgc

SEQ ID NO: 162011 - DNA, 15 bp, Homo sapiens
gtctgggtgaaaacg

SEQ ID NO: 162012 - DNA, 15 bp, Homo sapiens
tgtctgggtgaaaac

SEQ ID NO: 162013 - DNA, 15 bp, Homo sapiens
ctgtctgggtgaaaa

SEQ ID NO: 162014 - DNA, 15 bp, Homo sapiens
cctgtctgggtgaaa

SEQ ID NO: 162015 - DNA, 15 bp, Homo sapiens
acctgtctgggtgaa

SEQ ID NO: 162016 - DNA, 15 bp, Homo sapiens
cacctgtctgggtga

SEQ ID NO: 162017 - DNA, 15 bp, Homo sapiens
acacctgtctgggtg

SEQ ID NO: 162018 - DNA, 15 bp, Homo sapiens
aacacctgtctgggt

SEQ ID NO: 162019 - DNA, 15 bp, Homo sapiens
gaacacctgtctggg

SEQ ID NO: 162020 - DNA, 15 bp, Homo sapiens
tgaacacctgtctgg

SEQ ID NO: 162021 - DNA, 15 bp, Homo sapiens
ctgaacacctgtctg

SEQ ID NO: 162022 - DNA, 15 bp, Homo sapiens
actgaacacctgtct

SEQ ID NO: 162023 - DNA, 15 bp, Homo sapiens
aactgaacacctgtc

SEQ ID NO: 162024 - DNA, 15 bp, Homo sapiens
aaactgaacacctgt

SEQ ID NO: 162025 - DNA, 15 bp, Homo sapiens
aaaactgaacacctg

SEQ ID NO: 162026 - DNA, 15 bp, Homo sapiens
caaaactgaacacct

SEQ ID NO: 162027 - DNA, 15 bp, Homo sapiens
tcaaaactgaacacc

SEQ ID NO: 162028 - DNA, 15 bp, Homo sapiens
atcaaaactgaacac

SEQ ID NO: 162029 - DNA, 15 bp, Homo sapiens
aatcaaaactgaaca

SEQ ID NO: 162030 - DNA, 15 bp, Homo sapiens
aaatcaaaactgaac

SEQ ID NO: 162031 - DNA, 15 bp, Homo sapiens
aaaatcaaaactgaa

SEQ ID NO: 162032 - DNA, 15 bp, Homo sapiens
taaaatcaaaactga

SEQ ID NO: 162033 - DNA, 15 bp, Homo sapiens
ataaaatcaaaactg

SEQ ID NO: 162034 - DNA, 15 bp, Homo sapiens
gataaaatcaaaact

SEQ ID NO: 162035 - DNA, 15 bp, Homo sapiens
agataaaatcaaaac

SEQ ID NO: 162036 - DNA, 15 bp, Homo sapiens
cagataaaatcaaaa

SEQ ID NO: 162037 - DNA, 15 bp, Homo sapiens
ccagataaaatcaaa

SEQ ID NO: 162038 - DNA, 15 bp, Homo sapiens
gccagataaaatcaa

SEQ ID NO: 162039 - DNA, 15 bp, Homo sapiens
cgccagataaaatca

SEQ ID NO: 162040 - DNA, 15 bp, Homo sapiens
gcgccagataaaatc

SEQ ID NO: 162041 - DNA, 15 bp, Homo sapiens
ggcgccagataaaat

SEQ ID NO: 162042 - DNA, 15 bp, Homo sapiens
aggcgccagataaaa

SEQ ID NO: 162043 - DNA, 15 bp, Homo sapiens
caggcgccagataaa

SEQ ID NO: 162044 - DNA, 15 bp, Homo sapiens
ccaggcgccagataa

SEQ ID NO: 162045 - DNA, 15 bp, Homo sapiens
gccaggcgccagata

SEQ ID NO: 162046 - DNA, 15 bp, Homo sapiens
tgccaggcgccagat

SEQ ID NO: 162047 - DNA, 15 bp, Homo sapiens
ttgccaggcgccaga

SEQ ID NO: 162048 - DNA, 15 bp, Homo sapiens
attgccaggcgccag

SEQ ID NO: 162049 - DNA, 15 bp, Homo sapiens
aattgccaggcgcca

SEQ ID NO: 162050 - DNA, 15 bp, Homo sapiens
aaattgccaggcgcc

SEQ ID NO: 162051 - DNA, 15 bp, Homo sapiens
taaattgccaggcgc

SEQ ID NO: 162052 - DNA, 15 bp, Homo sapiens
ttaaattgccaggcg

SEQ ID NO: 162053 - DNA, 15 bp, Homo sapiens
attaaattgccaggc

SEQ ID NO: 162054 - DNA, 15 bp, Homo sapiens
aattaaattgccagg

SEQ ID NO: 162055 - DNA, 15 bp, Homo sapiens
taattaaattgccag

SEQ ID NO: 162056 - DNA, 15 bp, Homo sapiens
gtaattaaattgcca

SEQ ID NO: 162057 - DNA, 15 bp, Homo sapiens
agtaattaaattgcc

SEQ ID NO: 162058 - DNA, 15 bp, Homo sapiens
tagtaattaaattgc

SEQ ID NO: 162059 - DNA, 15 bp, Homo sapiens
ttagtaattaaattg

SEQ ID NO: 162060 - DNA, 15 bp, Homo sapiens
tttagtaattaaatt

SEQ ID NO: 162061 - DNA, 15 bp, Homo sapiens
atttagtaattaaat

SEQ ID NO: 162062 - DNA, 15 bp, Homo sapiens
aatttagtaattaaa

SEQ ID NO: 162063 - DNA, 15 bp, Homo sapiens
caatttagtaattaa

SEQ ID NO: 162064 - DNA, 15 bp, Homo sapiens
tcaatttagtaatta

SEQ ID NO: 162065 - DNA, 15 bp, Homo sapiens
ttcaatttagtaatt

SEQ ID NO: 162066 - DNA, 15 bp, Homo sapiens
tttcaatttagtaat

SEQ ID NO: 162067 - DNA, 15 bp, Homo sapiens
gtttcaatttagtaa

SEQ ID NO: 162068 - DNA, 15 bp, Homo sapiens
agtttcaatttagta

SEQ ID NO: 162069 - DNA, 15 bp, Homo sapiens
aagtttcaatttagt

SEQ ID NO: 162070 - DNA, 15 bp, Homo sapiens
caagtttcaatttag

SEQ ID NO: 162071 - DNA, 15 bp, Homo sapiens
tcaagtttcaattta

SEQ ID NO: 162072 - DNA, 15 bp, Homo sapiens
ctcaagtttcaattt

SEQ ID NO: 162073 - DNA, 15 bp, Homo sapiens
tctcaagtttcaatt

SEQ ID NO: 162074 - DNA, 15 bp, Homo sapiens
gtctcaagtttcaat

SEQ ID NO: 162075 - DNA, 15 bp, Homo sapiens
agtctcaagtttcaa

SEQ ID NO: 162076 - DNA, 15 bp, Homo sapiens
aagtctcaagtttca

SEQ ID NO: 162077 - DNA, 15 bp, Homo sapiens
aaagtctcaagtttc

SEQ ID NO: 162078 - DNA, 15 bp, Homo sapiens
gaaagtctcaagttt

SEQ ID NO: 162079 - DNA, 15 bp, Homo sapiens
agaaagtctcaagtt

SEQ ID NO: 162080 - DNA, 15 bp, Homo sapiens
cagaaagtctcaagt

SEQ ID NO: 162081 - DNA, 15 bp, Homo sapiens
ccagaaagtctcaag

SEQ ID NO: 162082 - DNA, 15 bp, Homo sapiens
tccagaaagtctcaa

SEQ ID NO: 162083 - DNA, 15 bp, Homo sapiens
ttccagaaagtctca

SEQ ID NO: 162084 - DNA, 15 bp, Homo sapiens
attccagaaagtctc

SEQ ID NO: 162085 - DNA, 15 bp, Homo sapiens
aattccagaaagtct

SEQ ID NO: 162086 - DNA, 15 bp, Homo sapiens
taattccagaaagtc

SEQ ID NO: 162087 - DNA, 15 bp, Homo sapiens
ataattccagaaagt

SEQ ID NO: 162088 - DNA, 15 bp, Homo sapiens
cataattccagaaag

SEQ ID NO: 162089 - DNA, 15 bp, Homo sapiens
ccataattccagaaa

SEQ ID NO: 162090 - DNA, 15 bp, Homo sapiens
gccataattccagaa

SEQ ID NO: 162091 - DNA, 15 bp, Homo sapiens
tgccataattccaga

SEQ ID NO: 162092 - DNA, 15 bp, Homo sapiens
atgccataattccag

SEQ ID NO: 162093 - DNA, 15 bp, Homo sapiens
aatgccataattcca

SEQ ID NO: 162094 - DNA, 15 bp, Homo sapiens
aaatgccataattcc

SEQ ID NO: 162095 - DNA, 15 bp, Homo sapiens
aaaatgccataattc

SEQ ID NO: 162096 - DNA, 15 bp, Homo sapiens
gaaaatgccataatt

SEQ ID NO: 162097 - DNA, 15 bp, Homo sapiens
agaaaatgccataat

SEQ ID NO: 162098 - DNA, 15 bp, Homo sapiens
cagaaaatgccataa

SEQ ID NO: 162099 - DNA, 15 bp, Homo sapiens
acagaaaatgccata

SEQ ID NO: 162100 - DNA, 15 bp, Homo sapiens
aacagaaaatgccat

SEQ ID NO: 162101 - DNA, 15 bp, Homo sapiens
caacagaaaatgcca

SEQ ID NO: 162102 - DNA, 15 bp, Homo sapiens
gcaacagaaaatgcc

SEQ ID NO: 162103 - DNA, 15 bp, Homo sapiens
agcaacagaaaatgc

SEQ ID NO: 162104 - DNA, 15 bp, Homo sapiens
aagcaacagaaaatg

SEQ ID NO: 162105 - DNA, 15 bp, Homo sapiens
taagcaacagaaaat

SEQ ID NO: 162106 - DNA, 15 bp, Homo sapiens
ctaagcaacagaaaa

SEQ ID NO: 162107 - DNA, 15 bp, Homo sapiens
tctaagcaacagaaa

SEQ ID NO: 162108 - DNA, 15 bp, Homo sapiens
ctctaagcaacagaa

SEQ ID NO: 162109 - DNA, 15 bp, Homo sapiens
tctctaagcaacaga

SEQ ID NO: 162110 - DNA, 15 bp, Homo sapiens
ctctctaagcaacag

SEQ ID NO: 162111 - DNA, 15 bp, Homo sapiens
tctctctaagcaaca

SEQ ID NO: 162112 - DNA, 15 bp, Homo sapiens
atctctctaagcaac

SEQ ID NO: 162113 - DNA, 15 bp, Homo sapiens
aatctctctaagcaa

SEQ ID NO: 162114 - DNA, 15 bp, Homo sapiens
taatctctctaagca

SEQ ID NO: 162115 - DNA, 15 bp, Homo sapiens
gtaatctctctaagc

SEQ ID NO: 162116 - DNA, 15 bp, Homo sapiens
tgtaatctctctaag

SEQ ID NO: 162117 - DNA, 15 bp, Homo sapiens
ttgtaatctctctaa

SEQ ID NO: 162118 - DNA, 15 bp, Homo sapiens
tttgtaatctctcta

SEQ ID NO: 162119 - DNA, 15 bp, Homo sapiens
ttttgtaatctctct

SEQ ID NO: 162120 - DNA, 15 bp, Homo sapiens
cttttgtaatctctc

SEQ ID NO: 162121 - DNA, 15 bp, Homo sapiens
acttttgtaatctct

SEQ ID NO: 162122 - DNA, 15 bp, Homo sapiens
gacttttgtaatctc

SEQ ID NO: 162123 - DNA, 15 bp, Homo sapiens
tgacttttgtaatct

SEQ ID NO: 162124 - DNA, 15 bp, Homo sapiens
gtgacttttgtaatc

SEQ ID NO: 162125 - DNA, 15 bp, Homo sapiens
cgtgacttttgtaat

SEQ ID NO: 162126 - DNA, 15 bp, Homo sapiens
tcgtgacttttgtaa

SEQ ID NO: 162127 - DNA, 15 bp, Homo sapiens
ttcgtgacttttgta

SEQ ID NO: 162128 - DNA, 15 bp, Homo sapiens
gttcgtgacttttgt

SEQ ID NO: 162129 - DNA, 15 bp, Homo sapiens
agttcgtgacttttg

SEQ ID NO: 162130 - DNA, 15 bp, Homo sapiens
cagttcgtgactttt

SEQ ID NO: 162131 - DNA, 15 bp, Homo sapiens
gcagttcgtgacttt

SEQ ID NO: 162132 - DNA, 15 bp, Homo sapiens
ggcagttcgtgactt

SEQ ID NO: 162133 - DNA, 15 bp, Homo sapiens
aggcagttcgtgact

SEQ ID NO: 162134 - DNA, 15 bp, Homo sapiens
caggcagttcgtgac

SEQ ID NO: 162135 - DNA, 15 bp, Homo sapiens
tcaggcagttcgtga

SEQ ID NO: 162136 - DNA, 15 bp, Homo sapiens
ctcaggcagttcgtg

SEQ ID NO: 162137 - DNA, 15 bp, Homo sapiens
actcaggcagttcgt

SEQ ID NO: 162138 - DNA, 15 bp, Homo sapiens
aactcaggcagttcg

SEQ ID NO: 162139 - DNA, 15 bp, Homo sapiens
aaactcaggcagttc

SEQ ID NO: 162140 - DNA, 15 bp, Homo sapiens
gaaactcaggcagtt

SEQ ID NO: 162141 - DNA, 15 bp, Homo sapiens
ggaaactcaggcagt

SEQ ID NO: 162142 - DNA, 15 bp, Homo sapiens
tggaaactcaggcag

SEQ ID NO: 162143 - DNA, 15 bp, Homo sapiens
atggaaactcaggca

SEQ ID NO: 162144 - DNA, 15 bp, Homo sapiens
gatggaaactcaggc

SEQ ID NO: 162145 - DNA, 15 bp, Homo sapiens
ggatggaaactcagg

SEQ ID NO: 162146 - DNA, 15 bp, Homo sapiens
aggatggaaactcag

SEQ ID NO: 162147 - DNA, 15 bp, Homo sapiens
caggatggaaactca

SEQ ID NO: 162148 - DNA, 15 bp, Homo sapiens
tcaggatggaaactc

SEQ ID NO: 162149 - DNA, 15 bp, Homo sapiens
ttcaggatggaaact

SEQ ID NO: 162150 - DNA, 15 bp, Homo sapiens
tttcaggatggaaac

SEQ ID NO: 162151 - DNA, 15 bp, Homo sapiens
ctttcaggatggaaa

SEQ ID NO: 162152 - DNA, 15 bp, Homo sapiens
gctttcaggatggaa

SEQ ID NO: 162153 - DNA, 15 bp, Homo sapiens
tgctttcaggatgga

SEQ ID NO: 162154 - DNA, 15 bp, Homo sapiens
ctgctttcaggatgg

SEQ ID NO: 162155 - DNA, 15 bp, Homo sapiens
cctgctttcaggatg

SEQ ID NO: 162156 - DNA, 15 bp, Homo sapiens
gcctgctttcaggat

SEQ ID NO: 162157 - DNA, 15 bp, Homo sapiens
ggcctgctttcagga

SEQ ID NO: 162158 - DNA, 15 bp, Homo sapiens
tggcctgctttcagg

SEQ ID NO: 162159 - DNA, 15 bp, Homo sapiens
gtggcctgctttcag

SEQ ID NO: 162160 - DNA, 15 bp, Homo sapiens
ggtggcctgctttca

SEQ ID NO: 162161 - DNA, 15 bp, Homo sapiens
tggtggcctgctttc

SEQ ID NO: 162162 - DNA, 15 bp, Homo sapiens
ctggtggcctgcttt

SEQ ID NO: 162163 - DNA, 15 bp, Homo sapiens
gctggtggcctgctt

SEQ ID NO: 162164 - DNA, 15 bp, Homo sapiens
ggctggtggcctgct

SEQ ID NO: 162165 - DNA, 15 bp, Homo sapiens
gggctggtggcctgc

SEQ ID NO: 162166 - DNA, 15 bp, Homo sapiens
tgggctggtggcctg

SEQ ID NO: 162167 - DNA, 15 bp, Homo sapiens
gtgggctggtggcct

SEQ ID NO: 162168 - DNA, 15 bp, Homo sapiens
agtgggctggtggcc

SEQ ID NO: 162169 - DNA, 15 bp, Homo sapiens
gagtgggctggtggc

SEQ ID NO: 162170 - DNA, 15 bp, Homo sapiens
ggagtgggctggtgg

SEQ ID NO: 162171 - DNA, 15 bp, Homo sapiens
tggagtgggctggtg

SEQ ID NO: 162172 - DNA, 15 bp, Homo sapiens
gtggagtgggctggt

SEQ ID NO: 162173 - DNA, 15 bp, Homo sapiens
agtggagtgggctgg

SEQ ID NO: 162174 - DNA, 15 bp, Homo sapiens
cagtggagtgggctg

SEQ ID NO: 162175 - DNA, 15 bp, Homo sapiens
tcagtggagtgggct

SEQ ID NO: 162176 - DNA, 15 bp, Homo sapiens
gtcagtggagtgggc

SEQ ID NO: 162177 - DNA, 15 bp, Homo sapiens
ggtcagtggagtggg

SEQ ID NO: 162178 - DNA, 15 bp, Homo sapiens
tggtcagtggagtgg

SEQ ID NO: 162179 - DNA, 15 bp, Homo sapiens
atggtcagtggagtg

SEQ ID NO: 162180 - DNA, 15 bp, Homo sapiens
catggtcagtggagt

SEQ ID NO: 162181 - DNA, 15 bp, Homo sapiens
gcatggtcagtggag

SEQ ID NO: 162182 - DNA, 15 bp, Homo sapiens
agcatggtcagtgga

SEQ ID NO: 162183 - DNA, 15 bp, Homo sapiens
cagcatggtcagtgg

SEQ ID NO: 162184 - DNA, 15 bp, Homo sapiens
ccagcatggtcagtg

SEQ ID NO: 162185 - DNA, 15 bp, Homo sapiens
tccagcatggtcagt

SEQ ID NO: 162186 - DNA, 15 bp, Homo sapiens
ttccagcatggtcag

SEQ ID NO: 162187 - DNA, 15 bp, Homo sapiens
gttccagcatggtca

SEQ ID NO: 162188 - DNA, 15 bp, Homo sapiens
tgttccagcatggtc

SEQ ID NO: 162189 - DNA, 15 bp, Homo sapiens
ctgttccagcatggt

SEQ ID NO: 162190 - DNA, 15 bp, Homo sapiens
actgttccagcatgg

SEQ ID NO: 162191 - DNA, 15 bp, Homo sapiens
cactgttccagcatg

SEQ ID NO: 162192 - DNA, 15 bp, Homo sapiens
ccactgttccagcat

SEQ ID NO: 162193 - DNA, 15 bp, Homo sapiens
tccactgttccagca

SEQ ID NO: 162194 - DNA, 15 bp, Homo sapiens
atccactgttccagc

SEQ ID NO: 162195 - DNA, 15 bp, Homo sapiens
catccactgttccag

SEQ ID NO: 162196 - DNA, 15 bp, Homo sapiens
tcatccactgttcca

SEQ ID NO: 162197 - DNA, 15 bp, Homo sapiens
ttcatccactgttcc

SEQ ID NO: 162198 - DNA, 15 bp, Homo sapiens
gttcatccactgttc

SEQ ID NO: 162199 - DNA, 15 bp, Homo sapiens
tgttcatccactgtt

SEQ ID NO: 162200 - DNA, 15 bp, Homo sapiens
ttgttcatccactgt

SEQ ID NO: 162201 - DNA, 15 bp, Homo sapiens
tttgttcatccactg

SEQ ID NO: 162202 - DNA, 15 bp, Homo sapiens
ttttgttcatccact

SEQ ID NO: 162203 - DNA, 15 bp, Homo sapiens
attttgttcatccac

SEQ ID NO: 162204 - DNA, 15 bp, Homo sapiens
gattttgttcatcca

SEQ ID NO: 162205 - DNA, 15 bp, Homo sapiens
tgattttgttcatcc

SEQ ID NO: 162206 - DNA, 15 bp, Homo sapiens
ttgattttgttcatc

SEQ ID NO: 162207 - DNA, 15 bp, Homo sapiens
cttgattttgttcat

SEQ ID NO: 162208 - DNA, 15 bp, Homo sapiens
acttgattttgttca

SEQ ID NO: 162209 - DNA, 15 bp, Homo sapiens
tacttgattttgttc

SEQ ID NO: 162210 - DNA, 15 bp, Homo sapiens
gtacttgattttgtt

SEQ ID NO: 162211 - DNA, 15 bp, Homo sapiens
ggtacttgattttgt

SEQ ID NO: 162212 - DNA, 15 bp, Homo sapiens
tggtacttgattttg

SEQ ID NO: 162213 - DNA, 15 bp, Homo sapiens
atggtacttgatttt

SEQ ID NO: 162214 - DNA, 15 bp, Homo sapiens
aatggtacttgattt

SEQ ID NO: 162215 - DNA, 15 bp, Homo sapiens
taatggtacttgatt

SEQ ID NO: 162216 - DNA, 15 bp, Homo sapiens
ctaatggtacttgat

SEQ ID NO: 162217 - DNA, 15 bp, Homo sapiens
cctaatggtacttga

SEQ ID NO: 162218 - DNA, 15 bp, Homo sapiens
tcctaatggtacttg

SEQ ID NO: 162219 - DNA, 15 bp, Homo sapiens
atcctaatggtactt

SEQ ID NO: 162220 - DNA, 15 bp, Homo sapiens
aatcctaatggtact

SEQ ID NO: 162221 - DNA, 15 bp, Homo sapiens
gaatcctaatggtac

SEQ ID NO: 162222 - DNA, 15 bp, Homo sapiens
agaatcctaatggta

SEQ ID NO: 162223 - DNA, 15 bp, Homo sapiens
tagaatcctaatggt

SEQ ID NO: 162224 - DNA, 15 bp, Homo sapiens
gtagaatcctaatgg

SEQ ID NO: 162225 - DNA, 15 bp, Homo sapiens
ggtagaatcctaatg

SEQ ID NO: 162226 - DNA, 15 bp, Homo sapiens
tggtagaatcctaat

SEQ ID NO: 162227 - DNA, 15 bp, Homo sapiens
gtggtagaatcctaa

SEQ ID NO: 162228 - DNA, 15 bp, Homo sapiens
tgtggtagaatccta

SEQ ID NO: 162229 - DNA, 15 bp, Homo sapiens
atgtggtagaatcct

SEQ ID NO: 162230 - DNA, 15 bp, Homo sapiens
catgtggtagaatcc

SEQ ID NO: 162231 - DNA, 15 bp, Homo sapiens
tcatgtggtagaatc

SEQ ID NO: 162232 - DNA, 15 bp, Homo sapiens
ctcatgtggtagaat

SEQ ID NO: 162233 - DNA, 15 bp, Homo sapiens
actcatgtggtagaa

SEQ ID NO: 162234 - DNA, 15 bp, Homo sapiens
gactcatgtggtaga

SEQ ID NO: 162235 - DNA, 15 bp, Homo sapiens
agactcatgtggtag

SEQ ID NO: 162236 - DNA, 15 bp, Homo sapiens
cagactcatgtggta

SEQ ID NO: 162237 - DNA, 15 bp, Homo sapiens
gcagactcatgtggt

SEQ ID NO: 162238 - DNA, 15 bp, Homo sapiens
agcagactcatgtgg

SEQ ID NO: 162239 - DNA, 15 bp, Homo sapiens
aagcagactcatgtg

SEQ ID NO: 162240 - DNA, 15 bp, Homo sapiens
caagcagactcatgt

SEQ ID NO: 162241 - DNA, 15 bp, Homo sapiens
acaagcagactcatg

SEQ ID NO: 162242 - DNA, 15 bp, Homo sapiens
aacaagcagactcat

SEQ ID NO: 162243 - DNA, 15 bp, Homo sapiens
gaacaagcagactca

SEQ ID NO: 162244 - DNA, 15 bp, Homo sapiens
tgaacaagcagactc

SEQ ID NO: 162245 - DNA, 15 bp, Homo sapiens
ttgaacaagcagact

SEQ ID NO: 162246 - DNA, 15 bp, Homo sapiens
gttgaacaagcagac

SEQ ID NO: 162247 - DNA, 15 bp, Homo sapiens
tgttgaacaagcaga

SEQ ID NO: 162248 - DNA, 15 bp, Homo sapiens
ttgttgaacaagcag

SEQ ID NO: 162249 - DNA, 15 bp, Homo sapiens
cttgttgaacaagca

SEQ ID NO: 162250 - DNA, 15 bp, Homo sapiens
gcttgttgaacaagc

SEQ ID NO: 162251 - DNA, 15 bp, Homo sapiens
agcttgttgaacaag

SEQ ID NO: 162252 - DNA, 15 bp, Homo sapiens
cagcttgttgaacaa

SEQ ID NO: 162253 - DNA, 15 bp, Homo sapiens
tcagcttgttgaaca

SEQ ID NO: 162254 - DNA, 15 bp, Homo sapiens
atcagcttgttgaac

SEQ ID NO: 162255 - DNA, 15 bp, Homo sapiens
aatcagcttgttgaa

SEQ ID NO: 162256 - DNA, 15 bp, Homo sapiens
aaatcagcttgttga

SEQ ID NO: 162257 - DNA, 15 bp, Homo sapiens
gaaatcagcttgttg

SEQ ID NO: 162258 - DNA, 15 bp, Homo sapiens
tgaaatcagcttgtt

SEQ ID NO: 162259 - DNA, 15 bp, Homo sapiens
atgaaatcagcttgt

SEQ ID NO: 162260 - DNA, 15 bp, Homo sapiens
tatgaaatcagcttg

SEQ ID NO: 162261 - DNA, 15 bp, Homo sapiens
ttatgaaatcagctt

SEQ ID NO: 162262 - DNA, 15 bp, Homo sapiens
tttatgaaatcagct

SEQ ID NO: 162263 - DNA, 15 bp, Homo sapiens
ctttatgaaatcagc

SEQ ID NO: 162264 - DNA, 15 bp, Homo sapiens
actttatgaaatcag

SEQ ID NO: 162265 - DNA, 15 bp, Homo sapiens
tactttatgaaatca

SEQ ID NO: 162266 - DNA, 15 bp, Homo sapiens
ttactttatgaaatc

SEQ ID NO: 162267 - DNA, 15 bp, Homo sapiens
cttactttatgaaat

SEQ ID NO: 162268 - DNA, 15 bp, Homo sapiens
ccttactttatgaaa

SEQ ID NO: 162269 - DNA, 15 bp, Homo sapiens
cccttactttatgaa

SEQ ID NO: 162270 - DNA, 15 bp, Homo sapiens
tcccttactttatga

SEQ ID NO: 162271 - DNA, 15 bp, Homo sapiens
atcccttactttatg

SEQ ID NO: 162272 - DNA, 15 bp, Homo sapiens
gatcccttactttat

SEQ ID NO: 162273 - DNA, 15 bp, Homo sapiens
tgatcccttacttta

SEQ ID NO: 162274 - DNA, 15 bp, Homo sapiens
atgatcccttacttt

SEQ ID NO: 162275 - DNA, 15 bp, Homo sapiens
catgatcccttactt

SEQ ID NO: 162276 - DNA, 15 bp, Homo sapiens
acatgatcccttact

SEQ ID NO: 162277 - DNA, 15 bp, Homo sapiens
aacatgatcccttac

SEQ ID NO: 162278 - DNA, 15 bp, Homo sapiens
taacatgatccctta

SEQ ID NO: 162279 - DNA, 15 bp, Homo sapiens
ataacatgatccctt

SEQ ID NO: 162280 - DNA, 15 bp, Homo sapiens
tataacatgatccct

SEQ ID NO: 162281 - DNA, 15 bp, Homo sapiens
ttataacatgatccc

SEQ ID NO: 162282 - DNA, 15 bp, Homo sapiens
attataacatgatcc

SEQ ID NO: 162283 - DNA, 15 bp, Homo sapiens
gattataacatgatc

SEQ ID NO: 162284 - DNA, 15 bp, Homo sapiens
ggattataacatgat

SEQ ID NO: 162285 - DNA, 15 bp, Homo sapiens
tggattataacatga

SEQ ID NO: 162286 - DNA, 15 bp, Homo sapiens
ttggattataacatg

SEQ ID NO: 162287 - DNA, 15 bp, Homo sapiens
cttggattataacat

SEQ ID NO: 162288 - DNA, 15 bp, Homo sapiens
gcttggattataaca

SEQ ID NO: 162289 - DNA, 15 bp, Homo sapiens
agcttggattataac

SEQ ID NO: 162290 - DNA, 15 bp, Homo sapiens
gagcttggattataa

SEQ ID NO: 162291 - DNA, 15 bp, Homo sapiens
agagcttggattata

SEQ ID NO: 162292 - DNA, 15 bp, Homo sapiens
tagagcttggattat

SEQ ID NO: 162293 - DNA, 15 bp, Homo sapiens
gtagagcttggatta

SEQ ID NO: 162294 - DNA, 15 bp, Homo sapiens
tgtagagcttggatt

SEQ ID NO: 162295 - DNA, 15 bp, Homo sapiens
ctgtagagcttggat

SEQ ID NO: 162296 - DNA, 15 bp, Homo sapiens
cctgtagagcttgga

SEQ ID NO: 162297 - DNA, 15 bp, Homo sapiens
ccctgtagagcttgg

SEQ ID NO: 162298 - DNA, 15 bp, Homo sapiens
cccctgtagagcttg

SEQ ID NO: 162299 - DNA, 15 bp, Homo sapiens
acccctgtagagctt

SEQ ID NO: 162300 - DNA, 15 bp, Homo sapiens
tacccctgtagagct

SEQ ID NO: 162301 - DNA, 15 bp, Homo sapiens
ttacccctgtagagc

SEQ ID NO: 162302 - DNA, 15 bp, Homo sapiens
tttacccctgtagag

SEQ ID NO: 162303 - DNA, 15 bp, Homo sapiens
atttacccctgtaga

SEQ ID NO: 162304 - DNA, 15 bp, Homo sapiens
aatttacccctgtag

SEQ ID NO: 162305 - DNA, 15 bp, Homo sapiens
caatttacccctgta

SEQ ID NO: 162306 - DNA, 15 bp, Homo sapiens
acaatttacccctgt

SEQ ID NO: 162307 - DNA, 15 bp, Homo sapiens
cacaatttacccctg

SEQ ID NO: 162308 - DNA, 15 bp, Homo sapiens
tcacaatttacccct

SEQ ID NO: 162309 - DNA, 15 bp, Homo sapiens
ttcacaatttacccc

SEQ ID NO: 162310 - DNA, 15 bp, Homo sapiens
tttcacaatttaccc

SEQ ID NO: 162311 - DNA, 15 bp, Homo sapiens
ctttcacaatttacc

SEQ ID NO: 162312 - DNA, 15 bp, Homo sapiens
tctttcacaatttac

SEQ ID NO: 162313 - DNA, 15 bp, Homo sapiens
gtctttcacaattta

SEQ ID NO: 162314 - DNA, 15 bp, Homo sapiens
agtctttcacaattt

SEQ ID NO: 162315 - DNA, 15 bp, Homo sapiens
tagtctttcacaatt

SEQ ID NO: 162316 - DNA, 15 bp, Homo sapiens
ttagtctttcacaat

SEQ ID NO: 162317 - DNA, 15 bp, Homo sapiens
tttagtctttcacaa

SEQ ID NO: 162318 - DNA, 15 bp, Homo sapiens
ttttagtctttcaca

SEQ ID NO: 162319 - DNA, 15 bp, Homo sapiens
attttagtctttcac

SEQ ID NO: 162320 - DNA, 15 bp, Homo sapiens
cattttagtctttca

SEQ ID NO: 162321 - DNA, 15 bp, Homo sapiens
tcattttagtctttc

SEQ ID NO: 162322 - DNA, 15 bp, Homo sapiens
ttcattttagtcttt

SEQ ID NO: 162323 - DNA, 15 bp, Homo sapiens
gttcattttagtctt

SEQ ID NO: 162324 - DNA, 15 bp, Homo sapiens
ggttcattttagtct

SEQ ID NO: 162325 - DNA, 15 bp, Homo sapiens
tggttcattttagtc

SEQ ID NO: 162326 - DNA, 15 bp, Homo sapiens
ttggttcattttagt

SEQ ID NO: 162327 - DNA, 15 bp, Homo sapiens
tttggttcattttag

SEQ ID NO: 162328 - DNA, 15 bp, Homo sapiens
ttttggttcatttta

SEQ ID NO: 162329 - DNA, 15 bp, Homo sapiens
tttttggttcatttt

SEQ ID NO: 162330 - DNA, 15 bp, Homo sapiens
ctttttggttcattt

SEQ ID NO: 162331 - DNA, 15 bp, Homo sapiens
tctttttggttcatt

SEQ ID NO: 162332 - DNA, 15 bp, Homo sapiens
atctttttggttcat

SEQ ID NO: 162333 - DNA, 15 bp, Homo sapiens
gatctttttggttca

SEQ ID NO: 162334 - DNA, 15 bp, Homo sapiens
tgatctttttggttc

SEQ ID NO: 162335 - DNA, 15 bp, Homo sapiens
atgatctttttggtt

SEQ ID NO: 162336 - DNA, 15 bp, Homo sapiens
tatgatctttttggt

SEQ ID NO: 162337 - DNA, 15 bp, Homo sapiens
ctatgatctttttgg

SEQ ID NO: 162338 - DNA, 15 bp, Homo sapiens
cctatgatctttttg

SEQ ID NO: 162339 - DNA, 15 bp, Homo sapiens
acctatgatcttttt

SEQ ID NO: 162340 - DNA, 15 bp, Homo sapiens
cacctatgatctttt

SEQ ID NO: 162341 - DNA, 15 bp, Homo sapiens
acacctatgatcttt

SEQ ID NO: 162342 - DNA, 15 bp, Homo sapiens
gacacctatgatctt

SEQ ID NO: 162343 - DNA, 15 bp, Homo sapiens
ggacacctatgatct

SEQ ID NO: 162344 - DNA, 15 bp, Homo sapiens
tggacacctatgatc

SEQ ID NO: 162345 - DNA, 15 bp, Homo sapiens
ctggacacctatgat

SEQ ID NO: 162346 - DNA, 15 bp, Homo sapiens
actggacacctatga

SEQ ID NO: 162347 - DNA, 15 bp, Homo sapiens
aactggacacctatg

SEQ ID NO: 162348 - DNA, 15 bp, Homo sapiens
taactggacacctat

SEQ ID NO: 162349 - DNA, 15 bp, Homo sapiens
ataactggacaccta

SEQ ID NO: 162350 - DNA, 15 bp, Homo sapiens
gataactggacacct

SEQ ID NO: 162351 - DNA, 15 bp, Homo sapiens
agataactggacacc

SEQ ID NO: 162352 - DNA, 15 bp, Homo sapiens
cagataactggacac

SEQ ID NO: 162353 - DNA, 15 bp, Homo sapiens
tcagataactggaca

SEQ ID NO: 162354 - DNA, 15 bp, Homo sapiens
atcagataactggac

SEQ ID NO: 162355 - DNA, 15 bp, Homo sapiens
aatcagataactgga

SEQ ID NO: 162356 - DNA, 15 bp, Homo sapiens
aaatcagataactgg

SEQ ID NO: 162357 - DNA, 15 bp, Homo sapiens
caaatcagataactg

SEQ ID NO: 162358 - DNA, 15 bp, Homo sapiens
tcaaatcagataact

SEQ ID NO: 162359 - DNA, 15 bp, Homo sapiens
atcaaatcagataac

SEQ ID NO: 162360 - DNA, 15 bp, Homo sapiens
catcaaatcagataa

SEQ ID NO: 162361 - DNA, 15 bp, Homo sapiens
ccatcaaatcagata

SEQ ID NO: 162362 - DNA, 15 bp, Homo sapiens
cccatcaaatcagat

SEQ ID NO: 162363 - DNA, 15 bp, Homo sapiens
ccccatcaaatcaga

SEQ ID NO: 162364 - DNA, 15 bp, Homo sapiens
accccatcaaatcag

SEQ ID NO: 162365 - DNA, 15 bp, Homo sapiens
caccccatcaaatca

SEQ ID NO: 162366 - DNA, 15 bp, Homo sapiens
acaccccatcaaatc

SEQ ID NO: 162367 - DNA, 15 bp, Homo sapiens
gacaccccatcaaat

SEQ ID NO: 162368 - DNA, 15 bp, Homo sapiens
agacaccccatcaaa

SEQ ID NO: 162369 - DNA, 15 bp, Homo sapiens
cagacaccccatcaa

SEQ ID NO: 162370 - DNA, 15 bp, Homo sapiens
tcagacaccccatca

SEQ ID NO: 162371 - DNA, 15 bp, Homo sapiens
ttcagacaccccatc

SEQ ID NO: 162372 - DNA, 15 bp, Homo sapiens
gttcagacaccccat

SEQ ID NO: 162373 - DNA, 15 bp, Homo sapiens
ggttcagacacccca

SEQ ID NO: 162374 - DNA, 15 bp, Homo sapiens
aggttcagacacccc

SEQ ID NO: 162375 - DNA, 15 bp, Homo sapiens
aaggttcagacaccc

SEQ ID NO: 162376 - DNA, 15 bp, Homo sapiens
aaaggttcagacacc

SEQ ID NO: 162377 - DNA, 15 bp, Homo sapiens
aaaaggttcagacac

SEQ ID NO: 162378 - DNA, 15 bp, Homo sapiens
caaaaggttcagaca

SEQ ID NO: 162379 - DNA, 15 bp, Homo sapiens
acaaaaggttcagac

SEQ ID NO: 162380 - DNA, 15 bp, Homo sapiens
aacaaaaggttcaga

SEQ ID NO: 162381 - DNA, 15 bp, Homo sapiens
taacaaaaggttcag

SEQ ID NO: 162382 - DNA, 15 bp, Homo sapiens
ataacaaaaggttca

SEQ ID NO: 162383 - DNA, 15 bp, Homo sapiens
gataacaaaaggttc

SEQ ID NO: 162384 - DNA, 15 bp, Homo sapiens
agataacaaaaggtt

SEQ ID NO: 162385 - DNA, 15 bp, Homo sapiens
aagataacaaaaggt

SEQ ID NO: 162386 - DNA, 15 bp, Homo sapiens
aaagataacaaaagg

SEQ ID NO: 162387 - DNA, 15 bp, Homo sapiens
caaagataacaaaag

SEQ ID NO: 162388 - DNA, 15 bp, Homo sapiens
tcaaagataacaaaa

SEQ ID NO: 162389 - DNA, 15 bp, Homo sapiens
ctcaaagataacaaa

SEQ ID NO: 162390 - DNA, 15 bp, Homo sapiens
gctcaaagataacaa

SEQ ID NO: 162391 - DNA, 15 bp, Homo sapiens
agctcaaagataaca

SEQ ID NO: 162392 - DNA, 15 bp, Homo sapiens
cagctcaaagataac

SEQ ID NO: 162393 - DNA, 15 bp, Homo sapiens
acagctcaaagataa

SEQ ID NO: 162394 - DNA, 15 bp, Homo sapiens
aacagctcaaagata

SEQ ID NO: 162395 - DNA, 15 bp, Homo sapiens
aaacagctcaaagat

SEQ ID NO: 162396 - DNA, 15 bp, Homo sapiens
gaaacagctcaaaga

SEQ ID NO: 162397 - DNA, 15 bp, Homo sapiens
tgaaacagctcaaag

SEQ ID NO: 162398 - DNA, 15 bp, Homo sapiens
ttgaaacagctcaaa

SEQ ID NO: 162399 - DNA, 15 bp, Homo sapiens
tttgaaacagctcaa

SEQ ID NO: 162400 - DNA, 15 bp, Homo sapiens
ttttgaaacagctca

SEQ ID NO: 162401 - DNA, 15 bp, Homo sapiens
gttttgaaacagctc

SEQ ID NO: 162402 - DNA, 15 bp, Homo sapiens
agttttgaaacagct

SEQ ID NO: 162403 - DNA, 15 bp, Homo sapiens
gagttttgaaacagc

SEQ ID NO: 162404 - DNA, 15 bp, Homo sapiens
agagttttgaaacag

SEQ ID NO: 162405 - DNA, 15 bp, Homo sapiens
gagagttttgaaaca

SEQ ID NO: 162406 - DNA, 15 bp, Homo sapiens
agagagttttgaaac

SEQ ID NO: 162407 - DNA, 15 bp, Homo sapiens
tagagagttttgaaa

SEQ ID NO: 162408 - DNA, 15 bp, Homo sapiens
ttagagagttttgaa

SEQ ID NO: 162409 - DNA, 15 bp, Homo sapiens
tttagagagttttga

SEQ ID NO: 162410 - DNA, 15 bp, Homo sapiens
atttagagagttttg

SEQ ID NO: 162411 - DNA, 15 bp, Homo sapiens
aatttagagagtttt

SEQ ID NO: 162412 - DNA, 15 bp, Homo sapiens
taatttagagagttt

SEQ ID NO: 162413 - DNA, 15 bp, Homo sapiens
ataatttagagagtt

SEQ ID NO: 162414 - DNA, 15 bp, Homo sapiens
aataatttagagagt

SEQ ID NO: 162415 - DNA, 15 bp, Homo sapiens
taataatttagagag

SEQ ID NO: 162416 - DNA, 15 bp, Homo sapiens
ataataatttagaga

SEQ ID NO: 162417 - DNA, 15 bp, Homo sapiens
aataataatttagag

SEQ ID NO: 162418 - DNA, 15 bp, Homo sapiens
taataataatttaga

SEQ ID NO: 162419 - DNA, 15 bp, Homo sapiens
ataataataatttag

SEQ ID NO: 162420 - DNA, 15 bp, Homo sapiens
aataataataattta

SEQ ID NO: 162421 - DNA, 15 bp, Homo sapiens
taataataataattt

SEQ ID NO: 162422 - DNA, 15 bp, Homo sapiens
ataataataataatt

SEQ ID NO: 162423 - DNA, 15 bp, Homo sapiens
aaaaataataataat

SEQ ID NO: 162424 - DNA, 15 bp, Homo sapiens
caaaaataataataa

SEQ ID NO: 162425 - DNA, 15 bp, Homo sapiens
tcaaaaataataata

SEQ ID NO: 162426 - DNA, 15 bp, Homo sapiens
ctcaaaaataataat

SEQ ID NO: 162427 - DNA, 15 bp, Homo sapiens
tctcaaaaataataa

SEQ ID NO: 162428 - DNA, 15 bp, Homo sapiens
gtctcaaaaataata

SEQ ID NO: 162429 - DNA, 15 bp, Homo sapiens
tgtctcaaaaataat

SEQ ID NO: 162430 - DNA, 15 bp, Homo sapiens
ctgtctcaaaaataa

SEQ ID NO: 162431 - DNA, 15 bp, Homo sapiens
tctgtctcaaaaata

SEQ ID NO: 162432 - DNA, 15 bp, Homo sapiens
ctctgtctcaaaaat

SEQ ID NO: 162433 - DNA, 15 bp, Homo sapiens
agagactctgtctca

SEQ ID NO: 162434 - DNA, 15 bp, Homo sapiens
gagagactctgtctc

SEQ ID NO: 162435 - DNA, 15 bp, Homo sapiens
agagagactctgtct

SEQ ID NO: 162436 - DNA, 15 bp, Homo sapiens
gagagagactctgtc

SEQ ID NO: 162437 - DNA, 15 bp, Homo sapiens
agagagagactctgt

SEQ ID NO: 162438 - DNA, 15 bp, Homo sapiens
cagagagagactctg

SEQ ID NO: 162439 - DNA, 15 bp, Homo sapiens
acagagagagactct

SEQ ID NO: 162440 - DNA, 15 bp, Homo sapiens
gacagagagagactc

SEQ ID NO: 162441 - DNA, 15 bp, Homo sapiens
tgacagagagagact

SEQ ID NO: 162442 - DNA, 15 bp, Homo sapiens
gtgacagagagagac

SEQ ID NO: 162443 - DNA, 15 bp, Homo sapiens
ggtgacagagagaga

SEQ ID NO: 162444 - DNA, 15 bp, Homo sapiens
gggtgacagagagag

SEQ ID NO: 162445 - DNA, 15 bp, Homo sapiens
tgggtgacagagaga

SEQ ID NO: 162446 - DNA, 15 bp, Homo sapiens
ctgggtgacagagag

SEQ ID NO: 162447 - DNA, 15 bp, Homo sapiens
cctgggtgacagaga

SEQ ID NO: 162448 - DNA, 15 bp, Homo sapiens
gcctgggtgacagag

SEQ ID NO: 162449 - DNA, 15 bp, Homo sapiens
agcctgggtgacaga

SEQ ID NO: 162450 - DNA, 15 bp, Homo sapiens
cagcctgggtgacag

SEQ ID NO: 162451 - DNA, 15 bp, Homo sapiens
ccagcctgggtgaca

SEQ ID NO: 162452 - DNA, 15 bp, Homo sapiens
tccagcctgggtgac

SEQ ID NO: 162453 - DNA, 15 bp, Homo sapiens
ctccagcctgggtga

SEQ ID NO: 162454 - DNA, 15 bp, Homo sapiens
actccagcctgggtg

SEQ ID NO: 162455 - DNA, 15 bp, Homo sapiens
cactccagcctgggt

SEQ ID NO: 162456 - DNA, 15 bp, Homo sapiens
gcactccagcctggg

SEQ ID NO: 162457 - DNA, 15 bp, Homo sapiens
atgccactgcactcc

SEQ ID NO: 162458 - DNA, 15 bp, Homo sapiens
catgccactgcactc

SEQ ID NO: 162459 - DNA, 15 bp, Homo sapiens
tcatgccactgcact

SEQ ID NO: 162460 - DNA, 15 bp, Homo sapiens
atcatgccactgcac

SEQ ID NO: 162461 - DNA, 15 bp, Homo sapiens
gatcatgccactgca

SEQ ID NO: 162462 - DNA, 15 bp, Homo sapiens
agatcatgccactgc

SEQ ID NO: 162463 - DNA, 15 bp, Homo sapiens
gagatcatgccactg

SEQ ID NO: 162464 - DNA, 15 bp, Homo sapiens
tgagatcatgccact

SEQ ID NO: 162465 - DNA, 15 bp, Homo sapiens
ctgagatcatgccac

SEQ ID NO: 162466 - DNA, 15 bp, Homo sapiens
gctgagatcatgcca

SEQ ID NO: 162467 - DNA, 15 bp, Homo sapiens
agctgagatcatgcc

SEQ ID NO: 162468 - DNA, 15 bp, Homo sapiens
gagctgagatcatgc

SEQ ID NO: 162469 - DNA, 15 bp, Homo sapiens
tgagctgagatcatg

SEQ ID NO: 162470 - DNA, 15 bp, Homo sapiens
gtgagctgagatcat

SEQ ID NO: 162471 - DNA, 15 bp, Homo sapiens
agtgagctgagatca

SEQ ID NO: 162472 - DNA, 15 bp, Homo sapiens
cagtgagctgagatc

SEQ ID NO: 162473 - DNA, 15 bp, Homo sapiens
gcagtgagctgagat

SEQ ID NO: 162474 - DNA, 15 bp, Homo sapiens
tgcagtgagctgaga

SEQ ID NO: 162475 - DNA, 15 bp, Homo sapiens
ttgcagtgagctgag

SEQ ID NO: 162476 - DNA, 15 bp, Homo sapiens
gttgcagtgagctga

SEQ ID NO: 162477 - DNA, 15 bp, Homo sapiens
ggttgcagtgagctg

SEQ ID NO: 162478 - DNA, 15 bp, Homo sapiens
aggttgcagtgagct

SEQ ID NO: 162479 - DNA, 15 bp, Homo sapiens
tggaggttgcagtga

SEQ ID NO: 162480 - DNA, 15 bp, Homo sapiens
gtggaggttgcagtg

SEQ ID NO: 162481 - DNA, 15 bp, Homo sapiens
ggtggaggttgcagt

SEQ ID NO: 162482 - DNA, 15 bp, Homo sapiens
aggtggaggttgcag

SEQ ID NO: 162483 - DNA, 15 bp, Homo sapiens
gaggtggaggttgca

SEQ ID NO: 162484 - DNA, 15 bp, Homo sapiens
ggaggtggaggttgc

SEQ ID NO: 162485 - DNA, 15 bp, Homo sapiens
gggaggtggaggttg

SEQ ID NO: 162486 - DNA, 15 bp, Homo sapiens
tgggaggtggaggtt

SEQ ID NO: 162487 - DNA, 15 bp, Homo sapiens
ctgggaggtggaggt

SEQ ID NO: 162488 - DNA, 15 bp, Homo sapiens
cctgggaggtggagg

SEQ ID NO: 162489 - DNA, 15 bp, Homo sapiens
acctgggaggtggag

SEQ ID NO: 162490 - DNA, 15 bp, Homo sapiens
aacctgggaggtgga

SEQ ID NO: 162491 - DNA, 15 bp, Homo sapiens
gaacctgggaggtgg

SEQ ID NO: 162492 - DNA, 15 bp, Homo sapiens
tgaacctgggaggtg

SEQ ID NO: 162493 - DNA, 15 bp, Homo sapiens
ttgaacctgggaggt

SEQ ID NO: 162494 - DNA, 15 bp, Homo sapiens
acttgaacctgggag

SEQ ID NO: 162495 - DNA, 15 bp, Homo sapiens
cacttgaacctggga

SEQ ID NO: 162496 - DNA, 15 bp, Homo sapiens
tcacttgaacctggg

SEQ ID NO: 162497 - DNA, 15 bp, Homo sapiens
atcacttgaacctgg

SEQ ID NO: 162498 - DNA, 15 bp, Homo sapiens
aatcacttgaacctg

SEQ ID NO: 162499 - DNA, 15 bp, Homo sapiens
gaatcacttgaacct

SEQ ID NO: 162500 - DNA, 15 bp, Homo sapiens
agaatcacttgaacc

SEQ ID NO: 162501 - DNA, 15 bp, Homo sapiens
gagaatcacttgaac

SEQ ID NO: 162502 - DNA, 15 bp, Homo sapiens
tgagaatcacttgaa

SEQ ID NO: 162503 - DNA, 15 bp, Homo sapiens
atgagaatcacttga

SEQ ID NO: 162504 - DNA, 15 bp, Homo sapiens
catgagaatcacttg

SEQ ID NO: 162505 - DNA, 15 bp, Homo sapiens
gcatgagaatcactt

SEQ ID NO: 162506 - DNA, 15 bp, Homo sapiens
ggcatgagaatcact

SEQ ID NO: 162507 - DNA, 15 bp, Homo sapiens
aggcatgagaatcac

SEQ ID NO: 162508 - DNA, 15 bp, Homo sapiens
gaggcatgagaatca

SEQ ID NO: 162509 - DNA, 15 bp, Homo sapiens
tgaggcatgagaatc

SEQ ID NO: 162510 - DNA, 15 bp, Homo sapiens
gtgaggcatgagaat

SEQ ID NO: 162511 - DNA, 15 bp, Homo sapiens
ggtgaggcatgagaa

SEQ ID NO: 162512 - DNA, 15 bp, Homo sapiens
gggtgaggcatgaga

SEQ ID NO: 162513 - DNA, 15 bp, Homo sapiens
agggtgaggcatgag

SEQ ID NO: 162514 - DNA, 15 bp, Homo sapiens
gagggtgaggcatga

SEQ ID NO: 162515 - DNA, 15 bp, Homo sapiens
ggagggtgaggcatg

SEQ ID NO: 162516 - DNA, 15 bp, Homo sapiens
gggagggtgaggcat

SEQ ID NO: 162517 - DNA, 15 bp, Homo sapiens
tgggagggtgaggca

SEQ ID NO: 162518 - DNA, 15 bp, Homo sapiens
ttgggagggtgaggc

SEQ ID NO: 162519 - DNA, 15 bp, Homo sapiens
cttgggagggtgagg

SEQ ID NO: 162520 - DNA, 15 bp, Homo sapiens
acttgggagggtgag

SEQ ID NO: 162521 - DNA, 15 bp, Homo sapiens
tacttgggagggtga

SEQ ID NO: 162522 - DNA, 15 bp, Homo sapiens
ctacttgggagggtg

SEQ ID NO: 162523 - DNA, 15 bp, Homo sapiens
gctacttgggagggt

SEQ ID NO: 162524 - DNA, 15 bp, Homo sapiens
agctacttgggaggg

SEQ ID NO: 162525 - DNA, 15 bp, Homo sapiens
tagctacttgggagg

SEQ ID NO: 162526 - DNA, 15 bp, Homo sapiens
ctagctacttgggag

SEQ ID NO: 162527 - DNA, 15 bp, Homo sapiens
actagctacttggga

SEQ ID NO: 162528 - DNA, 15 bp, Homo sapiens
tactagctacttggg

SEQ ID NO: 162529 - DNA, 15 bp, Homo sapiens
atactagctacttgg

SEQ ID NO: 162530 - DNA, 15 bp, Homo sapiens
aatactagctacttg

SEQ ID NO: 162531 - DNA, 15 bp, Homo sapiens
taatactagctactt

SEQ ID NO: 162532 - DNA, 15 bp, Homo sapiens
gtaatactagctact

SEQ ID NO: 162533 - DNA, 15 bp, Homo sapiens
tgtaatactagctac

SEQ ID NO: 162534 - DNA, 15 bp, Homo sapiens
ctgtaatactagcta

SEQ ID NO: 162535 - DNA, 15 bp, Homo sapiens
tctgtaatactagct

SEQ ID NO: 162536 - DNA, 15 bp, Homo sapiens
atctgtaatactagc

SEQ ID NO: 162537 - DNA, 15 bp, Homo sapiens
catctgtaatactag

SEQ ID NO: 162538 - DNA, 15 bp, Homo sapiens
ccatctgtaatacta

SEQ ID NO: 162539 - DNA, 15 bp, Homo sapiens
cccatctgtaatact

SEQ ID NO: 162540 - DNA, 15 bp, Homo sapiens
gcccatctgtaatac

SEQ ID NO: 162541 - DNA, 15 bp, Homo sapiens
tgcccatctgtaata

SEQ ID NO: 162542 - DNA, 15 bp, Homo sapiens
gtgcccatctgtaat

SEQ ID NO: 162543 - DNA, 15 bp, Homo sapiens
tgtgcccatctgtaa

SEQ ID NO: 162544 - DNA, 15 bp, Homo sapiens
gtgtgcccatctgta

SEQ ID NO: 162545 - DNA, 15 bp, Homo sapiens
ggtgtgcccatctgt

SEQ ID NO: 162546 - DNA, 15 bp, Homo sapiens
aggtgtgcccatctg

SEQ ID NO: 162547 - DNA, 15 bp, Homo sapiens
aaggtgtgcccatct

SEQ ID NO: 162548 - DNA, 15 bp, Homo sapiens
caaggtgtgcccatc

SEQ ID NO: 162549 - DNA, 15 bp, Homo sapiens
gcaaggtgtgcccat

SEQ ID NO: 162550 - DNA, 15 bp, Homo sapiens
ggcaaggtgtgccca

SEQ ID NO: 162551 - DNA, 15 bp, Homo sapiens
aggcaaggtgtgccc

SEQ ID NO: 162552 - DNA, 15 bp, Homo sapiens
caggcaaggtgtgcc

SEQ ID NO: 162553 - DNA, 15 bp, Homo sapiens
ccaggcaaggtgtgc

SEQ ID NO: 162554 - DNA, 15 bp, Homo sapiens
gccaggcaaggtgtg

SEQ ID NO: 162555 - DNA, 15 bp, Homo sapiens
agccaggcaaggtgt

SEQ ID NO: 162556 - DNA, 15 bp, Homo sapiens
tagccaggcaaggtg

SEQ ID NO: 162557 - DNA, 15 bp, Homo sapiens
ttagccaggcaaggt

SEQ ID NO: 162558 - DNA, 15 bp, Homo sapiens
attagccaggcaagg

SEQ ID NO: 162559 - DNA, 15 bp, Homo sapiens
aattagccaggcaag

SEQ ID NO: 162560 - DNA, 15 bp, Homo sapiens
aaattagccaggcaa

SEQ ID NO: 162561 - DNA, 15 bp, Homo sapiens
aaaattagccaggca

SEQ ID NO: 162562 - DNA, 15 bp, Homo sapiens
aaaaattagccaggc

SEQ ID NO: 162563 - DNA, 15 bp, Homo sapiens
caaaaattagccagg

SEQ ID NO: 162564 - DNA, 15 bp, Homo sapiens
acaaaaattagccag

SEQ ID NO: 162565 - DNA, 15 bp, Homo sapiens
tacaaaaattagcca

SEQ ID NO: 162566 - DNA, 15 bp, Homo sapiens
atacaaaaattagcc

SEQ ID NO: 162567 - DNA, 15 bp, Homo sapiens
ttaaaaatacaaaaa

SEQ ID NO: 162568 - DNA, 15 bp, Homo sapiens
attaaaaatacaaaa

SEQ ID NO: 162569 - DNA, 15 bp, Homo sapiens
tattaaaaatacaaa

SEQ ID NO: 162570 - DNA, 15 bp, Homo sapiens
ctattaaaaatacaa

SEQ ID NO: 162571 - DNA, 15 bp, Homo sapiens
tctattaaaaataca

SEQ ID NO: 162572 - DNA, 15 bp, Homo sapiens
ctctattaaaaatac

SEQ ID NO: 162573 - DNA, 15 bp, Homo sapiens
tctctattaaaaata

SEQ ID NO: 162574 - DNA, 15 bp, Homo sapiens
gtctctattaaaaat

SEQ ID NO: 162575 - DNA, 15 bp, Homo sapiens
cgtctctattaaaaa

SEQ ID NO: 162576 - DNA, 15 bp, Homo sapiens
acgtctctattaaaa

SEQ ID NO: 162577 - DNA, 15 bp, Homo sapiens
cacgtctctattaaa

SEQ ID NO: 162578 - DNA, 15 bp, Homo sapiens
ccacgtctctattaa

SEQ ID NO: 162579 - DNA, 15 bp, Homo sapiens
accacgtctctatta

SEQ ID NO: 162580 - DNA, 15 bp, Homo sapiens
aaccacgtctctatt

SEQ ID NO: 162581 - DNA, 15 bp, Homo sapiens
aaaccacgtctctat

SEQ ID NO: 162582 - DNA, 15 bp, Homo sapiens
gaaaccacgtctcta

SEQ ID NO: 162583 - DNA, 15 bp, Homo sapiens
tgaaaccacgtctct

SEQ ID NO: 162584 - DNA, 15 bp, Homo sapiens
gtgaaaccacgtctc

SEQ ID NO: 162585 - DNA, 15 bp, Homo sapiens
ggtgaaaccacgtct

SEQ ID NO: 162586 - DNA, 15 bp, Homo sapiens
tggtgaaaccacgtc

SEQ ID NO: 162587 - DNA, 15 bp, Homo sapiens
atggtgaaaccacgt

SEQ ID NO: 162588 - DNA, 15 bp, Homo sapiens
catggtgaaaccacg

SEQ ID NO: 162589 - DNA, 15 bp, Homo sapiens
acatggtgaaaccac

SEQ ID NO: 162590 - DNA, 15 bp, Homo sapiens
aacatggtgaaacca

SEQ ID NO: 162591 - DNA, 15 bp, Homo sapiens
taacatggtgaaacc

SEQ ID NO: 162592 - DNA, 15 bp, Homo sapiens
ctaacatggtgaaac

SEQ ID NO: 162593 - DNA, 15 bp, Homo sapiens
gctaacatggtgaaa

SEQ ID NO: 162594 - DNA, 15 bp, Homo sapiens
ggctaacatggtgaa

SEQ ID NO: 162595 - DNA, 15 bp, Homo sapiens
tggctaacatggtga

SEQ ID NO: 162596 - DNA, 15 bp, Homo sapiens
ctggctaacatggtg

SEQ ID NO: 162597 - DNA, 15 bp, Homo sapiens
cctggctaacatggt

SEQ ID NO: 162598 - DNA, 15 bp, Homo sapiens
gcctggctaacatgg

SEQ ID NO: 162599 - DNA, 15 bp, Homo sapiens
agcctggctaacatg

SEQ ID NO: 162600 - DNA, 15 bp, Homo sapiens
cagcctggctaacat

SEQ ID NO: 162601 - DNA, 15 bp, Homo sapiens
ccagcctggctaaca

SEQ ID NO: 162602 - DNA, 15 bp, Homo sapiens
accagcctggctaac

SEQ ID NO: 162603 - DNA, 15 bp, Homo sapiens
gaccagcctggctaa

SEQ ID NO: 162604 - DNA, 15 bp, Homo sapiens
agaccagcctggcta

SEQ ID NO: 162605 - DNA, 15 bp, Homo sapiens
gagaccagcctggct

SEQ ID NO: 162606 - DNA, 15 bp, Homo sapiens
cgagaccagcctggc

SEQ ID NO: 162607 - DNA, 15 bp, Homo sapiens
tcgagaccagcctgg

SEQ ID NO: 162608 - DNA, 15 bp, Homo sapiens
ttcgagaccagcctg

SEQ ID NO: 162609 - DNA, 15 bp, Homo sapiens
gttcgagaccagcct

SEQ ID NO: 162610 - DNA, 15 bp, Homo sapiens
agttcgagaccagcc

SEQ ID NO: 162611 - DNA, 15 bp, Homo sapiens
gagttcgagaccagc

SEQ ID NO: 162612 - DNA, 15 bp, Homo sapiens
ggagttcgagaccag

SEQ ID NO: 162613 - DNA, 15 bp, Homo sapiens
aggagttcgagacca

SEQ ID NO: 162614 - DNA, 15 bp, Homo sapiens
caggagttcgagacc

SEQ ID NO: 162615 - DNA, 15 bp, Homo sapiens
tcaggagttcgagac

SEQ ID NO: 162616 - DNA, 15 bp, Homo sapiens
gtcaggagttcgaga

SEQ ID NO: 162617 - DNA, 15 bp, Homo sapiens
ggtcaggagttcgag

SEQ ID NO: 162618 - DNA, 15 bp, Homo sapiens
aggtcaggagttcga

SEQ ID NO: 162619 - DNA, 15 bp, Homo sapiens
gaggtcaggagttcg

SEQ ID NO: 162620 - DNA, 15 bp, Homo sapiens
ggaggtcaggagttc

SEQ ID NO: 162621 - DNA, 15 bp, Homo sapiens
cggaggtcaggagtt

SEQ ID NO: 162622 - DNA, 15 bp, Homo sapiens
acggaggtcaggagt

SEQ ID NO: 162623 - DNA, 15 bp, Homo sapiens
aacggaggtcaggag

SEQ ID NO: 162624 - DNA, 15 bp, Homo sapiens
caacggaggtcagga

SEQ ID NO: 162625 - DNA, 15 bp, Homo sapiens
tcaacggaggtcagg

SEQ ID NO: 162626 - DNA, 15 bp, Homo sapiens
atcaacggaggtcag

SEQ ID NO: 162627 - DNA, 15 bp, Homo sapiens
gatcaacggaggtca

SEQ ID NO: 162628 - DNA, 15 bp, Homo sapiens
ggatcaacggaggtc

SEQ ID NO: 162629 - DNA, 15 bp, Homo sapiens
tggatcaacggaggt

SEQ ID NO: 162630 - DNA, 15 bp, Homo sapiens
gtggatcaacggagg

SEQ ID NO: 162631 - DNA, 15 bp, Homo sapiens
ggtggatcaacggag

SEQ ID NO: 162632 - DNA, 15 bp, Homo sapiens
aggtggatcaacgga

SEQ ID NO: 162633 - DNA, 15 bp, Homo sapiens
caggtggatcaacgg

SEQ ID NO: 162634 - DNA, 15 bp, Homo sapiens
gcaggtggatcaacg

SEQ ID NO: 162635 - DNA, 15 bp, Homo sapiens
ggcaggtggatcaac

SEQ ID NO: 162636 - DNA, 15 bp, Homo sapiens
aggcaggtggatcaa

SEQ ID NO: 162637 - DNA, 15 bp, Homo sapiens
gaggcaggtggatca

SEQ ID NO: 162638 - DNA, 15 bp, Homo sapiens
agaggcaggtggatc

SEQ ID NO: 162639 - DNA, 15 bp, Homo sapiens
cagaggcaggtggat

SEQ ID NO: 162640 - DNA, 15 bp, Homo sapiens
gcagaggcaggtgga

SEQ ID NO: 162641 - DNA, 15 bp, Homo sapiens
ggcagaggcaggtgg

SEQ ID NO: 162642 - DNA, 15 bp, Homo sapiens
aggcagaggcaggtg

SEQ ID NO: 162643 - DNA, 15 bp, Homo sapiens
gaggcagaggcaggt

SEQ ID NO: 162644 - DNA, 15 bp, Homo sapiens
ggaggcagaggcagg

SEQ ID NO: 162645 - DNA, 15 bp, Homo sapiens
gggaggcagaggcag

SEQ ID NO: 162646 - DNA, 15 bp, Homo sapiens
tgggaggcagaggca

SEQ ID NO: 162647 - DNA, 15 bp, Homo sapiens
ttgggaggcagaggc

SEQ ID NO: 162648 - DNA, 15 bp, Homo sapiens
tttgggaggcagagg

SEQ ID NO: 162649 - DNA, 15 bp, Homo sapiens
actttgggaggcaga

SEQ ID NO: 162650 - DNA, 15 bp, Homo sapiens
cactttgggaggcag

SEQ ID NO: 162651 - DNA, 15 bp, Homo sapiens
gcactttgggaggca

SEQ ID NO: 162652 - DNA, 15 bp, Homo sapiens
ccctgtaatcccagc

SEQ ID NO: 162653 - DNA, 15 bp, Homo sapiens
cccctgtaatcccag

SEQ ID NO: 162654 - DNA, 15 bp, Homo sapiens
acccctgtaatccca

SEQ ID NO: 162655 - DNA, 15 bp, Homo sapiens
cacccctgtaatccc

SEQ ID NO: 162656 - DNA, 15 bp, Homo sapiens
tcacccctgtaatcc

SEQ ID NO: 162657 - DNA, 15 bp, Homo sapiens
ctcacccctgtaatc

SEQ ID NO: 162658 - DNA, 15 bp, Homo sapiens
gctcacccctgtaat

SEQ ID NO: 162659 - DNA, 15 bp, Homo sapiens
ggctcacccctgtaa

SEQ ID NO: 162660 - DNA, 15 bp, Homo sapiens
tggctcacccctgta

SEQ ID NO: 162661 - DNA, 15 bp, Homo sapiens
gtggctcacccctgt

SEQ ID NO: 162662 - DNA, 15 bp, Homo sapiens
ggtggctcacccctg

SEQ ID NO: 162663 - DNA, 15 bp, Homo sapiens
cggtggctcacccct

SEQ ID NO: 162664 - DNA, 15 bp, Homo sapiens
acggtggctcacccc

SEQ ID NO: 162665 - DNA, 15 bp, Homo sapiens
cacggtggctcaccc

SEQ ID NO: 162666 - DNA, 15 bp, Homo sapiens
gcacggtggctcacc

SEQ ID NO: 162667 - DNA, 15 bp, Homo sapiens
ggcacggtggctcac

SEQ ID NO: 162668 - DNA, 15 bp, Homo sapiens
gggcacggtggctca

SEQ ID NO: 162669 - DNA, 15 bp, Homo sapiens
agggcacggtggctc

SEQ ID NO: 162670 - DNA, 15 bp, Homo sapiens
cagggcacggtggct

SEQ ID NO: 162671 - DNA, 15 bp, Homo sapiens
gcagggcacggtggc

SEQ ID NO: 162672 - DNA, 15 bp, Homo sapiens
ggcagggcacggtgg

SEQ ID NO: 162673 - DNA, 15 bp, Homo sapiens
tggcagggcacggtg

SEQ ID NO: 162674 - DNA, 15 bp, Homo sapiens
gtggcagggcacggt

SEQ ID NO: 162675 - DNA, 15 bp, Homo sapiens
tgtggcagggcacgg

SEQ ID NO: 162676 - DNA, 15 bp, Homo sapiens
ttgtggcagggcacg

SEQ ID NO: 162677 - DNA, 15 bp, Homo sapiens
gttgtggcagggcac

SEQ ID NO: 162678 - DNA, 15 bp, Homo sapiens
agttgtggcagggca

SEQ ID NO: 162679 - DNA, 15 bp, Homo sapiens
gagttgtggcagggc

SEQ ID NO: 162680 - DNA, 15 bp, Homo sapiens
agagttgtggcaggg

SEQ ID NO: 162681 - DNA, 15 bp, Homo sapiens
tagagttgtggcagg

SEQ ID NO: 162682 - DNA, 15 bp, Homo sapiens
ttagagttgtggcag

SEQ ID NO: 162683 - DNA, 15 bp, Homo sapiens
tttagagttgtggca

SEQ ID NO: 162684 - DNA, 15 bp, Homo sapiens
atttagagttgtggc

SEQ ID NO: 162685 - DNA, 15 bp, Homo sapiens
aatttagagttgtgg

SEQ ID NO: 162686 - DNA, 15 bp, Homo sapiens
taatttagagttgtg

SEQ ID NO: 162687 - DNA, 15 bp, Homo sapiens
ataatttagagttgt

SEQ ID NO: 162688 - DNA, 15 bp, Homo sapiens
tataatttagagttg

SEQ ID NO: 162689 - DNA, 15 bp, Homo sapiens
ttataatttagagtt

SEQ ID NO: 162690 - DNA, 15 bp, Homo sapiens
gttataatttagagt

SEQ ID NO: 162691 - DNA, 15 bp, Homo sapiens
agttataatttagag

SEQ ID NO: 162692 - DNA, 15 bp, Homo sapiens
tagttataatttaga

SEQ ID NO: 162693 - DNA, 15 bp, Homo sapiens
ttagttataatttag

SEQ ID NO: 162694 - DNA, 15 bp, Homo sapiens
attagttataattta

SEQ ID NO: 162695 - DNA, 15 bp, Homo sapiens
tattagttataattt

SEQ ID NO: 162696 - DNA, 15 bp, Homo sapiens
ctattagttataatt

SEQ ID NO: 162697 - DNA, 15 bp, Homo sapiens
gctattagttataat

SEQ ID NO: 162698 - DNA, 15 bp, Homo sapiens
tgctattagttataa

SEQ ID NO: 162699 - DNA, 15 bp, Homo sapiens
ttgctattagttata

SEQ ID NO: 162700 - DNA, 15 bp, Homo sapiens
cttgctattagttat

SEQ ID NO: 162701 - DNA, 15 bp, Homo sapiens
ccttgctattagtta

SEQ ID NO: 162702 - DNA, 15 bp, Homo sapiens
gccttgctattagtt

SEQ ID NO: 162703 - DNA, 15 bp, Homo sapiens
tgccttgctattagt

SEQ ID NO: 162704 - DNA, 15 bp, Homo sapiens
ttgccttgctattag

SEQ ID NO: 162705 - DNA, 15 bp, Homo sapiens
attgccttgctatta

SEQ ID NO: 162706 - DNA, 15 bp, Homo sapiens
cattgccttgctatt

SEQ ID NO: 162707 - DNA, 15 bp, Homo sapiens
ccattgccttgctat

SEQ ID NO: 162708 - DNA, 15 bp, Homo sapiens
accattgccttgcta

SEQ ID NO: 162709 - DNA, 15 bp, Homo sapiens
aaccattgccttgct

SEQ ID NO: 162710 - DNA, 15 bp, Homo sapiens
gaaccattgccttgc

SEQ ID NO: 162711 - DNA, 15 bp, Homo sapiens
agaaccattgccttg

SEQ ID NO: 162712 - DNA, 15 bp, Homo sapiens
aagaaccattgcctt

SEQ ID NO: 162713 - DNA, 15 bp, Homo sapiens
gaagaaccattgcct

SEQ ID NO: 162714 - DNA, 15 bp, Homo sapiens
agaagaaccattgcc

SEQ ID NO: 162715 - DNA, 15 bp, Homo sapiens
gagaagaaccattgc

SEQ ID NO: 162716 - DNA, 15 bp, Homo sapiens
agagaagaaccattg

SEQ ID NO: 162717 - DNA, 15 bp, Homo sapiens
tagagaagaaccatt

SEQ ID NO: 162718 - DNA, 15 bp, Homo sapiens
atagagaagaaccat

SEQ ID NO: 162719 - DNA, 15 bp, Homo sapiens
aatagagaagaacca

SEQ ID NO: 162720 - DNA, 15 bp, Homo sapiens
taatagagaagaacc

SEQ ID NO: 162721 - DNA, 15 bp, Homo sapiens
ttaatagagaagaac

SEQ ID NO: 162722 - DNA, 15 bp, Homo sapiens
gttaatagagaagaa

SEQ ID NO: 162723 - DNA, 15 bp, Homo sapiens
cgttaatagagaaga

SEQ ID NO: 162724 - DNA, 15 bp, Homo sapiens
acgttaatagagaag

SEQ ID NO: 162725 - DNA, 15 bp, Homo sapiens
cacgttaatagagaa

SEQ ID NO: 162726 - DNA, 15 bp, Homo sapiens
gcacgttaatagaga

SEQ ID NO: 162727 - DNA, 15 bp, Homo sapiens
tgcacgttaatagag

SEQ ID NO: 162728 - DNA, 15 bp, Homo sapiens
ttgcacgttaataga

SEQ ID NO: 162729 - DNA, 15 bp, Homo sapiens
tttgcacgttaatag

SEQ ID NO: 162730 - DNA, 15 bp, Homo sapiens
atttgcacgttaata

SEQ ID NO: 162731 - DNA, 15 bp, Homo sapiens
tatttgcacgttaat

SEQ ID NO: 162732 - DNA, 15 bp, Homo sapiens
ttatttgcacgttaa

SEQ ID NO: 162733 - DNA, 15 bp, Homo sapiens
tttatttgcacgtta

SEQ ID NO: 162734 - DNA, 15 bp, Homo sapiens
atttatttgcacgtt

SEQ ID NO: 162735 - DNA, 15 bp, Homo sapiens
catttatttgcacgt

SEQ ID NO: 162736 - DNA, 15 bp, Homo sapiens
acatttatttgcacg

SEQ ID NO: 162737 - DNA, 15 bp, Homo sapiens
aacatttatttgcac

SEQ ID NO: 162738 - DNA, 15 bp, Homo sapiens
caacatttatttgca

SEQ ID NO: 162739 - DNA, 15 bp, Homo sapiens
acaacatttatttgc

SEQ ID NO: 162740 - DNA, 15 bp, Homo sapiens
gacaacatttatttg

SEQ ID NO: 162741 - DNA, 15 bp, Homo sapiens
ggacaacatttattt

SEQ ID NO: 162742 - DNA, 15 bp, Homo sapiens
tggacaacatttatt

SEQ ID NO: 162743 - DNA, 15 bp, Homo sapiens
ctggacaacatttat

SEQ ID NO: 162744 - DNA, 15 bp, Homo sapiens
actggacaacattta

SEQ ID NO: 162745 - DNA, 15 bp, Homo sapiens
cactggacaacattt

SEQ ID NO: 162746 - DNA, 15 bp, Homo sapiens
ccactggacaacatt

SEQ ID NO: 162747 - DNA, 15 bp, Homo sapiens
tccactggacaacat

SEQ ID NO: 162748 - DNA, 15 bp, Homo sapiens
ttccactggacaaca

SEQ ID NO: 162749 - DNA, 15 bp, Homo sapiens
cttccactggacaac

SEQ ID NO: 162750 - DNA, 15 bp, Homo sapiens
gcttccactggacaa

SEQ ID NO: 162751 - DNA, 15 bp, Homo sapiens
tgcttccactggaca

SEQ ID NO: 162752 - DNA, 15 bp, Homo sapiens
gtgcttccactggac

SEQ ID NO: 162753 - DNA, 15 bp, Homo sapiens
tgtgcttccactgga

SEQ ID NO: 162754 - DNA, 15 bp, Homo sapiens
ttgtgcttccactgg

SEQ ID NO: 162755 - DNA, 15 bp, Homo sapiens
gttgtgcttccactg

SEQ ID NO: 162756 - DNA, 15 bp, Homo sapiens
agttgtgcttccact

SEQ ID NO: 162757 - DNA, 15 bp, Homo sapiens
cagttgtgcttccac

SEQ ID NO: 162758 - DNA, 15 bp, Homo sapiens
tcagttgtgcttcca

SEQ ID NO: 162759 - DNA, 15 bp, Homo sapiens
atcagttgtgcttcc

SEQ ID NO: 162760 - DNA, 15 bp, Homo sapiens
aatcagttgtgcttc

SEQ ID NO: 162761 - DNA, 15 bp, Homo sapiens
aaatcagttgtgctt

SEQ ID NO: 162762 - DNA, 15 bp, Homo sapiens
aaaatcagttgtgct

SEQ ID NO: 162763 - DNA, 15 bp, Homo sapiens
aaaaatcagttgtgc

SEQ ID NO: 162764 - DNA, 15 bp, Homo sapiens
gaaaaatcagttgtg

SEQ ID NO: 162765 - DNA, 15 bp, Homo sapiens
ggaaaaatcagttgt

SEQ ID NO: 162766 - DNA, 15 bp, Homo sapiens
gggaaaaatcagttg

SEQ ID NO: 162767 - DNA, 15 bp, Homo sapiens
agggaaaaatcagtt

SEQ ID NO: 162768 - DNA, 15 bp, Homo sapiens
aagggaaaaatcagt

SEQ ID NO: 162769 - DNA, 15 bp, Homo sapiens
gaagggaaaaatcag

SEQ ID NO: 162770 - DNA, 15 bp, Homo sapiens
agaagggaaaaatca

SEQ ID NO: 162771 - DNA, 15 bp, Homo sapiens
gagaagggaaaaatc

SEQ ID NO: 162772 - DNA, 15 bp, Homo sapiens
agagaagggaaaaat

SEQ ID NO: 162773 - DNA, 15 bp, Homo sapiens
cagagaagggaaaaa

SEQ ID NO: 162774 - DNA, 15 bp, Homo sapiens
acagagaagggaaaa

SEQ ID NO: 162775 - DNA, 15 bp, Homo sapiens
cacagagaagggaaa

SEQ ID NO: 162776 - DNA, 15 bp, Homo sapiens
ccacagagaagggaa

SEQ ID NO: 162777 - DNA, 15 bp, Homo sapiens
tccacagagaaggga

SEQ ID NO: 162778 - DNA, 15 bp, Homo sapiens
ttccacagagaaggg

SEQ ID NO: 162779 - DNA, 15 bp, Homo sapiens
cttccacagagaagg

SEQ ID NO: 162780 - DNA, 15 bp, Homo sapiens
tcttccacagagaag

SEQ ID NO: 162781 - DNA, 15 bp, Homo sapiens
ttcttccacagagaa

SEQ ID NO: 162782 - DNA, 15 bp, Homo sapiens
cttcttccacagaga

SEQ ID NO: 162783 - DNA, 15 bp, Homo sapiens
gcttcttccacagag

SEQ ID NO: 162784 - DNA, 15 bp, Homo sapiens
ggcttcttccacaga

SEQ ID NO: 162785 - DNA, 15 bp, Homo sapiens
tggcttcttccacag

SEQ ID NO: 162786 - DNA, 15 bp, Homo sapiens
ttggcttcttccaca

SEQ ID NO: 162787 - DNA, 15 bp, Homo sapiens
attggcttcttccac

SEQ ID NO: 162788 - DNA, 15 bp, Homo sapiens
aattggcttcttcca

SEQ ID NO: 162789 - DNA, 15 bp, Homo sapiens
aaattggcttcttcc

SEQ ID NO: 162790 - DNA, 15 bp, Homo sapiens
aaaattggcttcttc

SEQ ID NO: 162791 - DNA, 15 bp, Homo sapiens
caaaattggcttctt

SEQ ID NO: 162792 - DNA, 15 bp, Homo sapiens
gcaaaattggcttct

SEQ ID NO: 162793 - DNA, 15 bp, Homo sapiens
tgcaaaattggcttc

SEQ ID NO: 162794 - DNA, 15 bp, Homo sapiens
atgcaaaattggctt

SEQ ID NO: 162795 - DNA, 15 bp, Homo sapiens
gatgcaaaattggct

SEQ ID NO: 162796 - DNA, 15 bp, Homo sapiens
agatgcaaaattggc

SEQ ID NO: 162797 - DNA, 15 bp, Homo sapiens
tagatgcaaaattgg

SEQ ID NO: 162798 - DNA, 15 bp, Homo sapiens
atagatgcaaaattg

SEQ ID NO: 162799 - DNA, 15 bp, Homo sapiens
aatagatgcaaaatt

SEQ ID NO: 162800 - DNA, 15 bp, Homo sapiens
taatagatgcaaaat

SEQ ID NO: 162801 - DNA, 15 bp, Homo sapiens
ttaatagatgcaaaa

SEQ ID NO: 162802 - DNA, 15 bp, Homo sapiens
cttaatagatgcaaa

SEQ ID NO: 162803 - DNA, 15 bp, Homo sapiens
gcttaatagatgcaa

SEQ ID NO: 162804 - DNA, 15 bp, Homo sapiens
tgcttaatagatgca

SEQ ID NO: 162805 - DNA, 15 bp, Homo sapiens
ttgcttaatagatgc

SEQ ID NO: 162806 - DNA, 15 bp, Homo sapiens
tttgcttaatagatg

SEQ ID NO: 162807 - DNA, 15 bp, Homo sapiens
atttgcttaatagat

SEQ ID NO: 162808 - DNA, 15 bp, Homo sapiens
aatttgcttaataga

SEQ ID NO: 162809 - DNA, 15 bp, Homo sapiens
gaatttgcttaatag

SEQ ID NO: 162810 - DNA, 15 bp, Homo sapiens
tgaatttgcttaata

SEQ ID NO: 162811 - DNA, 15 bp, Homo sapiens
atgaatttgcttaat

SEQ ID NO: 162812 - DNA, 15 bp, Homo sapiens
gatgaatttgcttaa

SEQ ID NO: 162813 - DNA, 15 bp, Homo sapiens
agatgaatttgctta

SEQ ID NO: 162814 - DNA, 15 bp, Homo sapiens
cagatgaatttgctt

SEQ ID NO: 162815 - DNA, 15 bp, Homo sapiens
ccagatgaatttgct

SEQ ID NO: 162816 - DNA, 15 bp, Homo sapiens
cccagatgaatttgc

SEQ ID NO: 162817 - DNA, 15 bp, Homo sapiens
gcccagatgaatttg

SEQ ID NO: 162818 - DNA, 15 bp, Homo sapiens
tgcccagatgaattt

SEQ ID NO: 162819 - DNA, 15 bp, Homo sapiens
atgcccagatgaatt

SEQ ID NO: 162820 - DNA, 15 bp, Homo sapiens
aatgcccagatgaat

SEQ ID NO: 162821 - DNA, 15 bp, Homo sapiens
gaatgcccagatgaa

SEQ ID NO: 162822 - DNA, 15 bp, Homo sapiens
ggaatgcccagatga

SEQ ID NO: 162823 - DNA, 15 bp, Homo sapiens
aggaatgcccagatg

SEQ ID NO: 162824 - DNA, 15 bp, Homo sapiens
taggaatgcccagat

SEQ ID NO: 162825 - DNA, 15 bp, Homo sapiens
ttaggaatgcccaga

SEQ ID NO: 162826 - DNA, 15 bp, Homo sapiens
gttaggaatgcccag

SEQ ID NO: 162827 - DNA, 15 bp, Homo sapiens
ggttaggaatgccca

SEQ ID NO: 162828 - DNA, 15 bp, Homo sapiens
cggttaggaatgccc

SEQ ID NO: 162829 - DNA, 15 bp, Homo sapiens
acggttaggaatgcc

SEQ ID NO: 162830 - DNA, 15 bp, Homo sapiens
gacggttaggaatgc

SEQ ID NO: 162831 - DNA, 15 bp, Homo sapiens
agacggttaggaatg

SEQ ID NO: 162832 - DNA, 15 bp, Homo sapiens
tagacggttaggaat

SEQ ID NO: 162833 - DNA, 15 bp, Homo sapiens
gtagacggttaggaa

SEQ ID NO: 162834 - DNA, 15 bp, Homo sapiens
tgtagacggttagga

SEQ ID NO: 162835 - DNA, 15 bp, Homo sapiens
gtgtagacggttagg

SEQ ID NO: 162836 - DNA, 15 bp, Homo sapiens
tgtgtagacggttag

SEQ ID NO: 162837 - DNA, 15 bp, Homo sapiens
atgtgtagacggtta

SEQ ID NO: 162838 - DNA, 15 bp, Homo sapiens
catgtgtagacggtt

SEQ ID NO: 162839 - DNA, 15 bp, Homo sapiens
gcatgtgtagacggt

SEQ ID NO: 162840 - DNA, 15 bp, Homo sapiens
tgcatgtgtagacgg

SEQ ID NO: 162841 - DNA, 15 bp, Homo sapiens
gtgcatgtgtagacg

SEQ ID NO: 162842 - DNA, 15 bp, Homo sapiens
ggtgcatgtgtagac

SEQ ID NO: 162843 - DNA, 15 bp, Homo sapiens
cggtgcatgtgtaga

SEQ ID NO: 162844 - DNA, 15 bp, Homo sapiens
ccggtgcatgtgtag

SEQ ID NO: 162845 - DNA, 15 bp, Homo sapiens
gccggtgcatgtgta

SEQ ID NO: 162846 - DNA, 15 bp, Homo sapiens
agccggtgcatgtgt

SEQ ID NO: 162847 - DNA, 15 bp, Homo sapiens
gagccggtgcatgtg

SEQ ID NO: 162848 - DNA, 15 bp, Homo sapiens
agagccggtgcatgt

SEQ ID NO: 162849 - DNA, 15 bp, Homo sapiens
aagagccggtgcatg

SEQ ID NO: 162850 - DNA, 15 bp, Homo sapiens
aaagagccggtgcat

SEQ ID NO: 162851 - DNA, 15 bp, Homo sapiens
caaagagccggtgca

SEQ ID NO: 162852 - DNA, 15 bp, Homo sapiens
tcaaagagccggtgc

SEQ ID NO: 162853 - DNA, 15 bp, Homo sapiens
ttcaaagagccggtg

SEQ ID NO: 162854 - DNA, 15 bp, Homo sapiens
attcaaagagccggt

SEQ ID NO: 162855 - DNA, 15 bp, Homo sapiens
aattcaaagagccgg

SEQ ID NO: 162856 - DNA, 15 bp, Homo sapiens
gaattcaaagagccg

SEQ ID NO: 162857 - DNA, 15 bp, Homo sapiens
agaattcaaagagcc

SEQ ID NO: 162858 - DNA, 15 bp, Homo sapiens
aagaattcaaagagc

SEQ ID NO: 162859 - DNA, 15 bp, Homo sapiens
gaagaattcaaagag

SEQ ID NO: 162860 - DNA, 15 bp, Homo sapiens
agaagaattcaaaga

SEQ ID NO: 162861 - DNA, 15 bp, Homo sapiens
gagaagaattcaaag

SEQ ID NO: 162862 - DNA, 15 bp, Homo sapiens
agagaagaattcaaa

SEQ ID NO: 162863 - DNA, 15 bp, Homo sapiens
cagagaagaattcaa

SEQ ID NO: 162864 - DNA, 15 bp, Homo sapiens
tcagagaagaattca

SEQ ID NO: 162865 - DNA, 15 bp, Homo sapiens
ttcagagaagaattc

SEQ ID NO: 162866 - DNA, 15 bp, Homo sapiens
gttcagagaagaatt

SEQ ID NO: 162867 - DNA, 15 bp, Homo sapiens
ggttcagagaagaat

SEQ ID NO: 162868 - DNA, 15 bp, Homo sapiens
tggttcagagaagaa

SEQ ID NO: 162869 - DNA, 15 bp, Homo sapiens
ctggttcagagaaga

SEQ ID NO: 162870 - DNA, 15 bp, Homo sapiens
cctggttcagagaag

SEQ ID NO: 162871 - DNA, 15 bp, Homo sapiens
gcctggttcagagaa

SEQ ID NO: 162872 - DNA, 15 bp, Homo sapiens
ggcctggttcagaga

SEQ ID NO: 162873 - DNA, 15 bp, Homo sapiens
gggcctggttcagag

SEQ ID NO: 162874 - DNA, 15 bp, Homo sapiens
tgggcctggttcaga

SEQ ID NO: 162875 - DNA, 15 bp, Homo sapiens
ctgggcctggttcag

SEQ ID NO: 162876 - DNA, 15 bp, Homo sapiens
cctgggcctggttca

SEQ ID NO: 162877 - DNA, 15 bp, Homo sapiens
tcctgggcctggttc

SEQ ID NO: 162878 - DNA, 15 bp, Homo sapiens
ttcctgggcctggtt

SEQ ID NO: 162879 - DNA, 15 bp, Homo sapiens
attcctgggcctggt

SEQ ID NO: 162880 - DNA, 15 bp, Homo sapiens
tattcctgggcctgg

SEQ ID NO: 162881 - DNA, 15 bp, Homo sapiens
ttattcctgggcctg

SEQ ID NO: 162882 - DNA, 15 bp, Homo sapiens
cttattcctgggcct

SEQ ID NO: 162883 - DNA, 15 bp, Homo sapiens
gcttattcctgggcc

SEQ ID NO: 162884 - DNA, 15 bp, Homo sapiens
ggcttattcctgggc

SEQ ID NO: 162885 - DNA, 15 bp, Homo sapiens
tggcttattcctggg

SEQ ID NO: 162886 - DNA, 15 bp, Homo sapiens
gtggcttattcctgg

SEQ ID NO: 162887 - DNA, 15 bp, Homo sapiens
tgtggcttattcctg

SEQ ID NO: 162888 - DNA, 15 bp, Homo sapiens
ttgtggcttattcct

SEQ ID NO: 162889 - DNA, 15 bp, Homo sapiens
cttgtggcttattcc

SEQ ID NO: 162890 - DNA, 15 bp, Homo sapiens
tcttgtggcttattc

SEQ ID NO: 162891 - DNA, 15 bp, Homo sapiens
atcttgtggcttatt

SEQ ID NO: 162892 - DNA, 15 bp, Homo sapiens
catcttgtggcttat

SEQ ID NO: 162893 - DNA, 15 bp, Homo sapiens
tcatcttgtggctta

SEQ ID NO: 162894 - DNA, 15 bp, Homo sapiens
ctcatcttgtggctt

SEQ ID NO: 162895 - DNA, 15 bp, Homo sapiens
gctcatcttgtggct

SEQ ID NO: 162896 - DNA, 15 bp, Homo sapiens
tgctcatcttgtggc

SEQ ID NO: 162897 - DNA, 15 bp, Homo sapiens
gtgctcatcttgtgg

SEQ ID NO: 162898 - DNA, 15 bp, Homo sapiens
agtgctcatcttgtg

SEQ ID NO: 162899 - DNA, 15 bp, Homo sapiens
cagtgctcatcttgt

SEQ ID NO: 162900 - DNA, 15 bp, Homo sapiens
gcagtgctcatcttg

SEQ ID NO: 162901 - DNA, 15 bp, Homo sapiens
ggcagtgctcatctt

SEQ ID NO: 162902 - DNA, 15 bp, Homo sapiens
gggcagtgctcatct

SEQ ID NO: 162903 - DNA, 15 bp, Homo sapiens
tgggcagtgctcatc

SEQ ID NO: 162904 - DNA, 15 bp, Homo sapiens
ctgggcagtgctcat

SEQ ID NO: 162905 - DNA, 15 bp, Homo sapiens
gctgggcagtgctca

SEQ ID NO: 162906 - DNA, 15 bp, Homo sapiens
agctgggcagtgctc

SEQ ID NO: 162907 - DNA, 15 bp, Homo sapiens
gagctgggcagtgct

SEQ ID NO: 162908 - DNA, 15 bp, Homo sapiens
ggagctgggcagtgc

SEQ ID NO: 162909 - DNA, 15 bp, Homo sapiens
aggagctgggcagtg

SEQ ID NO: 162910 - DNA, 15 bp, Homo sapiens
aaggagctgggcagt

SEQ ID NO: 162911 - DNA, 15 bp, Homo sapiens
caaggagctgggcag

SEQ ID NO: 162912 - DNA, 15 bp, Homo sapiens
ccaaggagctgggca

SEQ ID NO: 162913 - DNA, 15 bp, Homo sapiens
cccaaggagctgggc

SEQ ID NO: 162914 - DNA, 15 bp, Homo sapiens
gcccaaggagctggg

SEQ ID NO: 162915 - DNA, 15 bp, Homo sapiens
agcccaaggagctgg

SEQ ID NO: 162916 - DNA, 15 bp, Homo sapiens
cagcccaaggagctg

SEQ ID NO: 162917 - DNA, 15 bp, Homo sapiens
acagcccaaggagct

SEQ ID NO: 162918 - DNA, 15 bp, Homo sapiens
gacagcccaaggagc

SEQ ID NO: 162919 - DNA, 15 bp, Homo sapiens
tgacagcccaaggag

SEQ ID NO: 162920 - DNA, 15 bp, Homo sapiens
gtgacagcccaagga

SEQ ID NO: 162921 - DNA, 15 bp, Homo sapiens
tgtgacagcccaagg

SEQ ID NO: 162922 - DNA, 15 bp, Homo sapiens
atgtgacagcccaag

SEQ ID NO: 162923 - DNA, 15 bp, Homo sapiens
gatgtgacagcccaa

SEQ ID NO: 162924 - DNA, 15 bp, Homo sapiens
agatgtgacagccca

SEQ ID NO: 162925 - DNA, 15 bp, Homo sapiens
aagatgtgacagccc

SEQ ID NO: 162926 - DNA, 15 bp, Homo sapiens
taagatgtgacagcc

SEQ ID NO: 162927 - DNA, 15 bp, Homo sapiens
ataagatgtgacagc

SEQ ID NO: 162928 - DNA, 15 bp, Homo sapiens
aataagatgtgacag

SEQ ID NO: 162929 - DNA, 15 bp, Homo sapiens
caataagatgtgaca

SEQ ID NO: 162930 - DNA, 15 bp, Homo sapiens
tcaataagatgtgac

SEQ ID NO: 162931 - DNA, 15 bp, Homo sapiens
atcaataagatgtga

SEQ ID NO: 162932 - DNA, 15 bp, Homo sapiens
aatcaataagatgtg

SEQ ID NO: 162933 - DNA, 15 bp, Homo sapiens
gaatcaataagatgt

SEQ ID NO: 162934 - DNA, 15 bp, Homo sapiens
ggaatcaataagatg

SEQ ID NO: 162935 - DNA, 15 bp, Homo sapiens
gggaatcaataagat

SEQ ID NO: 162936 - DNA, 15 bp, Homo sapiens
tgggaatcaataaga

SEQ ID NO: 162937 - DNA, 15 bp, Homo sapiens
gtgggaatcaataag

SEQ ID NO: 162938 - DNA, 15 bp, Homo sapiens
tgtgggaatcaataa

SEQ ID NO: 162939 - DNA, 15 bp, Homo sapiens
atgtgggaatcaata

SEQ ID NO: 162940 - DNA, 15 bp, Homo sapiens
catgtgggaatcaat

SEQ ID NO: 162941 - DNA, 15 bp, Homo sapiens
tcatgtgggaatcaa

SEQ ID NO: 162942 - DNA, 15 bp, Homo sapiens
ttcatgtgggaatca

SEQ ID NO: 162943 - DNA, 15 bp, Homo sapiens
attcatgtgggaatc

SEQ ID NO: 162944 - DNA, 15 bp, Homo sapiens
aattcatgtgggaat

SEQ ID NO: 162945 - DNA, 15 bp, Homo sapiens
gaattcatgtgggaa

SEQ ID NO: 162946 - DNA, 15 bp, Homo sapiens
tgaattcatgtggga

SEQ ID NO: 162947 - DNA, 15 bp, Homo sapiens
gtgaattcatgtggg

SEQ ID NO: 162948 - DNA, 15 bp, Homo sapiens
tgtgaattcatgtgg

SEQ ID NO: 162949 - DNA, 15 bp, Homo sapiens
ttgtgaattcatgtg

SEQ ID NO: 162950 - DNA, 15 bp, Homo sapiens
cttgtgaattcatgt

SEQ ID NO: 162951 - DNA, 15 bp, Homo sapiens
acttgtgaattcatg

SEQ ID NO: 162952 - DNA, 15 bp, Homo sapiens
tacttgtgaattcat

SEQ ID NO: 162953 - DNA, 15 bp, Homo sapiens
ttacttgtgaattca

SEQ ID NO: 162954 - DNA, 15 bp, Homo sapiens
tttacttgtgaattc

SEQ ID NO: 162955 - DNA, 15 bp, Homo sapiens
atttacttgtgaatt

SEQ ID NO: 162956 - DNA, 15 bp, Homo sapiens
tatttacttgtgaat

SEQ ID NO: 162957 - DNA, 15 bp, Homo sapiens
ttatttacttgtgaa

SEQ ID NO: 162958 - DNA, 15 bp, Homo sapiens
tttatttacttgtga

SEQ ID NO: 162959 - DNA, 15 bp, Homo sapiens
ttttatttacttgtg

SEQ ID NO: 162960 - DNA, 15 bp, Homo sapiens
attttatttacttgt

SEQ ID NO: 162961 - DNA, 15 bp, Homo sapiens
tattttatttacttg

SEQ ID NO: 162962 - DNA, 15 bp, Homo sapiens
atattttatttactt

SEQ ID NO: 162963 - DNA, 15 bp, Homo sapiens
aatattttatttact

SEQ ID NO: 162964 - DNA, 15 bp, Homo sapiens
aaatattttatttac

SEQ ID NO: 162965 - DNA, 15 bp, Homo sapiens
caaatattttattta

SEQ ID NO: 162966 - DNA, 15 bp, Homo sapiens
ccaaatattttattt

SEQ ID NO: 162967 - DNA, 15 bp, Homo sapiens
gccaaatattttatt

SEQ ID NO: 162968 - DNA, 15 bp, Homo sapiens
cgccaaatattttat

SEQ ID NO: 162969 - DNA, 15 bp, Homo sapiens
ccgccaaatatttta

SEQ ID NO: 162970 - DNA, 15 bp, Homo sapiens
accgccaaatatttt

SEQ ID NO: 162971 - DNA, 15 bp, Homo sapiens
aaccgccaaatattt

SEQ ID NO: 162972 - DNA, 15 bp, Homo sapiens
caaccgccaaatatt

SEQ ID NO: 162973 - DNA, 15 bp, Homo sapiens
acaaccgccaaatat

SEQ ID NO: 162974 - DNA, 15 bp, Homo sapiens
aacaaccgccaaata

SEQ ID NO: 162975 - DNA, 15 bp, Homo sapiens
gaacaaccgccaaat

SEQ ID NO: 162976 - DNA, 15 bp, Homo sapiens
tgaacaaccgccaaa

SEQ ID NO: 162977 - DNA, 15 bp, Homo sapiens
gtgaacaaccgccaa

SEQ ID NO: 162978 - DNA, 15 bp, Homo sapiens
agtgaacaaccgcca

SEQ ID NO: 162979 - DNA, 15 bp, Homo sapiens
aagtgaacaaccgcc

SEQ ID NO: 162980 - DNA, 15 bp, Homo sapiens
taagtgaacaaccgc

SEQ ID NO: 162981 - DNA, 15 bp, Homo sapiens
ctaagtgaacaaccg

SEQ ID NO: 162982 - DNA, 15 bp, Homo sapiens
actaagtgaacaacc

SEQ ID NO: 162983 - DNA, 15 bp, Homo sapiens
tactaagtgaacaac

SEQ ID NO: 162984 - DNA, 15 bp, Homo sapiens
atactaagtgaacaa

SEQ ID NO: 162985 - DNA, 15 bp, Homo sapiens
catactaagtgaaca

SEQ ID NO: 162986 - DNA, 15 bp, Homo sapiens
gcatactaagtgaac

SEQ ID NO: 162987 - DNA, 15 bp, Homo sapiens
tgcatactaagtgaa

SEQ ID NO: 162988 - DNA, 15 bp, Homo sapiens
ttgcatactaagtga

SEQ ID NO: 162989 - DNA, 15 bp, Homo sapiens
cttgcatactaagtg

SEQ ID NO: 162990 - DNA, 15 bp, Homo sapiens
acttgcatactaagt

SEQ ID NO: 162991 - DNA, 15 bp, Homo sapiens
gacttgcatactaag

SEQ ID NO: 162992 - DNA, 15 bp, Homo sapiens
tgacttgcatactaa

SEQ ID NO: 162993 - DNA, 15 bp, Homo sapiens
ttgacttgcatacta

SEQ ID NO: 162994 - DNA, 15 bp, Homo sapiens
attgacttgcatact

SEQ ID NO: 162995 - DNA, 15 bp, Homo sapiens
tattgacttgcatac

SEQ ID NO: 162996 - DNA, 15 bp, Homo sapiens
atattgacttgcata

SEQ ID NO: 162997 - DNA, 15 bp, Homo sapiens
aatattgacttgcat

SEQ ID NO: 162998 - DNA, 15 bp, Homo sapiens
aaatattgacttgca

SEQ ID NO: 162999 - DNA, 15 bp, Homo sapiens
aaaatattgacttgc

SEQ ID NO: 163000 - DNA, 15 bp, Homo sapiens
caaaatattgacttg

SEQ ID NO: 163001 - DNA, 15 bp, Homo sapiens
gcaaaatattgactt

SEQ ID NO: 163002 - DNA, 15 bp, Homo sapiens
agcaaaatattgact

SEQ ID NO: 163003 - DNA, 15 bp, Homo sapiens
aagcaaaatattgac

SEQ ID NO: 163004 - DNA, 15 bp, Homo sapiens
aaagcaaaatattga

SEQ ID NO: 163005 - DNA, 15 bp, Homo sapiens
taaagcaaaatattg

SEQ ID NO: 163006 - DNA, 15 bp, Homo sapiens
ttaaagcaaaatatt

SEQ ID NO: 163007 - DNA, 15 bp, Homo sapiens
tttaaagcaaaatat

SEQ ID NO: 163008 - DNA, 15 bp, Homo sapiens
ttttaaagcaaaata

SEQ ID NO: 163009 - DNA, 15 bp, Homo sapiens
tttttaaagcaaaat

SEQ ID NO: 163010 - DNA, 15 bp, Homo sapiens
atttttaaagcaaaa

SEQ ID NO: 163011 - DNA, 15 bp, Homo sapiens
tatttttaaagcaaa

SEQ ID NO: 163012 - DNA, 15 bp, Homo sapiens
atatttttaaagcaa

SEQ ID NO: 163013 - DNA, 15 bp, Homo sapiens
aatatttttaaagca

SEQ ID NO: 163014 - DNA, 15 bp, Homo sapiens
taatatttttaaagc

SEQ ID NO: 163015 - DNA, 15 bp, Homo sapiens
ataatatttttaaag

SEQ ID NO: 163016 - DNA, 15 bp, Homo sapiens
gataatatttttaaa

SEQ ID NO: 163017 - DNA, 15 bp, Homo sapiens
ggataatatttttaa

SEQ ID NO: 163018 - DNA, 15 bp, Homo sapiens
aggataatattttta

SEQ ID NO: 163019 - DNA, 15 bp, Homo sapiens
aaggataatattttt

SEQ ID NO: 163020 - DNA, 15 bp, Homo sapiens
aaaggataatatttt

SEQ ID NO: 163021 - DNA, 15 bp, Homo sapiens
gaaaggataatattt

SEQ ID NO: 163022 - DNA, 15 bp, Homo sapiens
tgaaaggataatatt

SEQ ID NO: 163023 - DNA, 15 bp, Homo sapiens
gtgaaaggataatat

SEQ ID NO: 163024 - DNA, 15 bp, Homo sapiens
tgtgaaaggataata

SEQ ID NO: 163025 - DNA, 15 bp, Homo sapiens
gtgtgaaaggataat

SEQ ID NO: 163026 - DNA, 15 bp, Homo sapiens
agtgtgaaaggataa

SEQ ID NO: 163027 - DNA, 15 bp, Homo sapiens
gagtgtgaaaggata

SEQ ID NO: 163028 - DNA, 15 bp, Homo sapiens
ggagtgtgaaaggat

SEQ ID NO: 163029 - DNA, 15 bp, Homo sapiens
aggagtgtgaaagga

SEQ ID NO: 163030 - DNA, 15 bp, Homo sapiens
caggagtgtgaaagg

SEQ ID NO: 163031 - DNA, 15 bp, Homo sapiens
tcaggagtgtgaaag

SEQ ID NO: 163032 - DNA, 15 bp, Homo sapiens
atcaggagtgtgaaa

SEQ ID NO: 163033 - DNA, 15 bp, Homo sapiens
tatcaggagtgtgaa

SEQ ID NO: 163034 - DNA, 15 bp, Homo sapiens
atatcaggagtgtga

SEQ ID NO: 163035 - DNA, 15 bp, Homo sapiens
tatatcaggagtgtg

SEQ ID NO: 163036 - DNA, 15 bp, Homo sapiens
ctatatcaggagtgt

SEQ ID NO: 163037 - DNA, 15 bp, Homo sapiens
actatatcaggagtg

SEQ ID NO: 163038 - DNA, 15 bp, Homo sapiens
aactatatcaggagt

SEQ ID NO: 163039 - DNA, 15 bp, Homo sapiens
caactatatcaggag

SEQ ID NO: 163040 - DNA, 15 bp, Homo sapiens
acaactatatcagga

SEQ ID NO: 163041 - DNA, 15 bp, Homo sapiens
gacaactatatcagg

SEQ ID NO: 163042 - DNA, 15 bp, Homo sapiens
agacaactatatcag

SEQ ID NO: 163043 - DNA, 15 bp, Homo sapiens
cagacaactatatca

SEQ ID NO: 163044 - DNA, 15 bp, Homo sapiens
tcagacaactatatc

SEQ ID NO: 163045 - DNA, 15 bp, Homo sapiens
atcagacaactatat

SEQ ID NO: 163046 - DNA, 15 bp, Homo sapiens
tatcagacaactata

SEQ ID NO: 163047 - DNA, 15 bp, Homo sapiens
ttatcagacaactat

SEQ ID NO: 163048 - DNA, 15 bp, Homo sapiens
cttatcagacaacta

SEQ ID NO: 163049 - DNA, 15 bp, Homo sapiens
ccttatcagacaact

SEQ ID NO: 163050 - DNA, 15 bp, Homo sapiens
accttatcagacaac

SEQ ID NO: 163051 - DNA, 15 bp, Homo sapiens
aaccttatcagacaa

SEQ ID NO: 163052 - DNA, 15 bp, Homo sapiens
taaccttatcagaca

SEQ ID NO: 163053 - DNA, 15 bp, Homo sapiens
ctaaccttatcagac

SEQ ID NO: 163054 - DNA, 15 bp, Homo sapiens
actaaccttatcaga

SEQ ID NO: 163055 - DNA, 15 bp, Homo sapiens
gactaaccttatcag

SEQ ID NO: 163056 - DNA, 15 bp, Homo sapiens
ggactaaccttatca

SEQ ID NO: 163057 - DNA, 15 bp, Homo sapiens
aggactaaccttatc

SEQ ID NO: 163058 - DNA, 15 bp, Homo sapiens
aaggactaaccttat

SEQ ID NO: 163059 - DNA, 15 bp, Homo sapiens
gaaggactaacctta

SEQ ID NO: 163060 - DNA, 15 bp, Homo sapiens
ggaaggactaacctt

SEQ ID NO: 163061 - DNA, 15 bp, Homo sapiens
gggaaggactaacct

SEQ ID NO: 163062 - DNA, 15 bp, Homo sapiens
tgggaaggactaacc

SEQ ID NO: 163063 - DNA, 15 bp, Homo sapiens
gtgggaaggactaac

SEQ ID NO: 163064 - DNA, 15 bp, Homo sapiens
tgtgggaaggactaa

SEQ ID NO: 163065 - DNA, 15 bp, Homo sapiens
gtgtgggaaggacta

SEQ ID NO: 163066 - DNA, 15 bp, Homo sapiens
ggtgtgggaaggact

SEQ ID NO: 163067 - DNA, 15 bp, Homo sapiens
tggtgtgggaaggac

SEQ ID NO: 163068 - DNA, 15 bp, Homo sapiens
ttggtgtgggaagga

SEQ ID NO: 163069 - DNA, 15 bp, Homo sapiens
tttggtgtgggaagg

SEQ ID NO: 163070 - DNA, 15 bp, Homo sapiens
ttttggtgtgggaag

SEQ ID NO: 163071 - DNA, 15 bp, Homo sapiens
gttttggtgtgggaa

SEQ ID NO: 163072 - DNA, 15 bp, Homo sapiens
agttttggtgtggga

SEQ ID NO: 163073 - DNA, 15 bp, Homo sapiens
cagttttggtgtggg

SEQ ID NO: 163074 - DNA, 15 bp, Homo sapiens
gcagttttggtgtgg

SEQ ID NO: 163075 - DNA, 15 bp, Homo sapiens
ggcagttttggtgtg

SEQ ID NO: 163076 - DNA, 15 bp, Homo sapiens
aggcagttttggtgt

SEQ ID NO: 163077 - DNA, 15 bp, Homo sapiens
caggcagttttggtg

SEQ ID NO: 163078 - DNA, 15 bp, Homo sapiens
acaggcagttttggt

SEQ ID NO: 163079 - DNA, 15 bp, Homo sapiens
tacaggcagttttgg

SEQ ID NO: 163080 - DNA, 15 bp, Homo sapiens
atacaggcagttttg

SEQ ID NO: 163081 - DNA, 15 bp, Homo sapiens
aatacaggcagtttt

SEQ ID NO: 163082 - DNA, 15 bp, Homo sapiens
taatacaggcagttt

SEQ ID NO: 163083 - DNA, 15 bp, Homo sapiens
ctaatacaggcagtt

SEQ ID NO: 163084 - DNA, 15 bp, Homo sapiens
actaatacaggcagt

SEQ ID NO: 163085 - DNA, 15 bp, Homo sapiens
cactaatacaggcag

SEQ ID NO: 163086 - DNA, 15 bp, Homo sapiens
acactaatacaggca

SEQ ID NO: 163087 - DNA, 15 bp, Homo sapiens
aacactaatacaggc

SEQ ID NO: 163088 - DNA, 15 bp, Homo sapiens
caacactaatacagg

SEQ ID NO: 163089 - DNA, 15 bp, Homo sapiens
acaacactaatacag

SEQ ID NO: 163090 - DNA, 15 bp, Homo sapiens
aacaacactaataca

SEQ ID NO: 163091 - DNA, 15 bp, Homo sapiens
aaacaacactaatac

SEQ ID NO: 163092 - DNA, 15 bp, Homo sapiens
caaacaacactaata

SEQ ID NO: 163093 - DNA, 15 bp, Homo sapiens
ccaaacaacactaat

SEQ ID NO: 163094 - DNA, 15 bp, Homo sapiens
tccaaacaacactaa

SEQ ID NO: 163095 - DNA, 15 bp, Homo sapiens
ttccaaacaacacta

SEQ ID NO: 163096 - DNA, 15 bp, Homo sapiens
attccaaacaacact

SEQ ID NO: 163097 - DNA, 15 bp, Homo sapiens
tattccaaacaacac

SEQ ID NO: 163098 - DNA, 15 bp, Homo sapiens
ttattccaaacaaca

SEQ ID NO: 163099 - DNA, 15 bp, Homo sapiens
tttattccaaacaac

SEQ ID NO: 163100 - DNA, 15 bp, Homo sapiens
gtttattccaaacaa

SEQ ID NO: 163101 - DNA, 15 bp, Homo sapiens
agtttattccaaaca

SEQ ID NO: 163102 - DNA, 15 bp, Homo sapiens
cagtttattccaaac

SEQ ID NO: 163103 - DNA, 15 bp, Homo sapiens
tcagtttattccaaa

SEQ ID NO: 163104 - DNA, 15 bp, Homo sapiens
ctcagtttattccaa

SEQ ID NO: 163105 - DNA, 15 bp, Homo sapiens
cctcagtttattcca

SEQ ID NO: 163106 - DNA, 15 bp, Homo sapiens
ccctcagtttattcc

SEQ ID NO: 163107 - DNA, 15 bp, Homo sapiens
accctcagtttattc

SEQ ID NO: 163108 - DNA, 15 bp, Homo sapiens
taccctcagtttatt

SEQ ID NO: 163109 - DNA, 15 bp, Homo sapiens
ctaccctcagtttat

SEQ ID NO: 163110 - DNA, 15 bp, Homo sapiens
tctaccctcagttta

SEQ ID NO: 163111 - DNA, 15 bp, Homo sapiens
ttctaccctcagttt

SEQ ID NO: 163112 - DNA, 15 bp, Homo sapiens
attctaccctcagtt

SEQ ID NO: 163113 - DNA, 15 bp, Homo sapiens
cattctaccctcagt

SEQ ID NO: 163114 - DNA, 15 bp, Homo sapiens
acattctaccctcag

SEQ ID NO: 163115 - DNA, 15 bp, Homo sapiens
tacattctaccctca

SEQ ID NO: 163116 - DNA, 15 bp, Homo sapiens
atacattctaccctc

SEQ ID NO: 163117 - DNA, 15 bp, Homo sapiens
tatacattctaccct

SEQ ID NO: 163118 - DNA, 15 bp, Homo sapiens
atatacattctaccc

SEQ ID NO: 163119 - DNA, 15 bp, Homo sapiens
catatacattctacc

SEQ ID NO: 163120 - DNA, 15 bp, Homo sapiens
ccatatacattctac

SEQ ID NO: 163121 - DNA, 15 bp, Homo sapiens
accatatacattcta

SEQ ID NO: 163122 - DNA, 15 bp, Homo sapiens
caccatatacattct

SEQ ID NO: 163123 - DNA, 15 bp, Homo sapiens
acaccatatacattc

SEQ ID NO: 163124 - DNA, 15 bp, Homo sapiens
cacaccatatacatt

SEQ ID NO: 163125 - DNA, 15 bp, Homo sapiens
acacaccatatacat

SEQ ID NO: 163126 - DNA, 15 bp, Homo sapiens
cacacaccatataca

SEQ ID NO: 163127 - DNA, 15 bp, Homo sapiens
acacacaccatatac

SEQ ID NO: 163128 - DNA, 15 bp, Homo sapiens
tacacacaccatata

SEQ ID NO: 163129 - DNA, 15 bp, Homo sapiens
atacacacaccatat

SEQ ID NO: 163130 - DNA, 15 bp, Homo sapiens
catacacacaccata

SEQ ID NO: 163131 - DNA, 15 bp, Homo sapiens
acatacacacaccat

SEQ ID NO: 163132 - DNA, 15 bp, Homo sapiens
cacatacacacacca

SEQ ID NO: 163133 - DNA, 15 bp, Homo sapiens
ccacatacacacacc

SEQ ID NO: 163134 - DNA, 15 bp, Homo sapiens
accacatacacacac

SEQ ID NO: 163135 - DNA, 15 bp, Homo sapiens
caccacatacacaca

SEQ ID NO: 163136 - DNA, 15 bp, Homo sapiens
acaccacatacacac

SEQ ID NO: 163137 - DNA, 15 bp, Homo sapiens
cacaccacatacaca

SEQ ID NO: 163138 - DNA, 15 bp, Homo sapiens
acacaccacatacac

SEQ ID NO: 163139 - DNA, 15 bp, Homo sapiens
cacacaccacataca

SEQ ID NO: 163140 - DNA, 15 bp, Homo sapiens
acacacaccacatac

SEQ ID NO: 163141 - DNA, 15 bp, Homo sapiens
cacacacaccacata

SEQ ID NO: 163142 - DNA, 15 bp, Homo sapiens
acacacacaccacat

SEQ ID NO: 163143 - DNA, 15 bp, Homo sapiens
aacacacacaccaca

SEQ ID NO: 163144 - DNA, 15 bp, Homo sapiens
aaacacacacaccac

SEQ ID NO: 163145 - DNA, 15 bp, Homo sapiens
caaacacacacacca

SEQ ID NO: 163146 - DNA, 15 bp, Homo sapiens
acaaacacacacacc

SEQ ID NO: 163147 - DNA, 15 bp, Homo sapiens
cacaaacacacacac

SEQ ID NO: 163148 - DNA, 15 bp, Homo sapiens
acacaaacacacaca

SEQ ID NO: 163149 - DNA, 15 bp, Homo sapiens
cacacaaacacacac

SEQ ID NO: 163150 - DNA, 15 bp, Homo sapiens
acacacaaacacaca

SEQ ID NO: 163151 - DNA, 15 bp, Homo sapiens
cacacacaaacacac

SEQ ID NO: 163152 - DNA, 15 bp, Homo sapiens
acacacacaaacaca

SEQ ID NO: 163153 - DNA, 15 bp, Homo sapiens
cacacacacaaacac

SEQ ID NO: 163154 - DNA, 15 bp, Homo sapiens
acacacacacaaaca

SEQ ID NO: 163155 - DNA, 15 bp, Homo sapiens
cacacacacacaaac

SEQ ID NO: 163156 - DNA, 15 bp, Homo sapiens
acacacacacacaaa

SEQ ID NO: 163157 - DNA, 15 bp, Homo sapiens
cacacacacacacaa

SEQ ID NO: 163158 - DNA, 15 bp, Homo sapiens
acacacacacacaca

SEQ ID NO: 163159 - DNA, 15 bp, Homo sapiens
cacacacacacacac

SEQ ID NO: 163160 - DNA, 15 bp, Homo sapiens
tcacacacacacaca

SEQ ID NO: 163161 - DNA, 15 bp, Homo sapiens
ctcacacacacacac

SEQ ID NO: 163162 - DNA, 15 bp, Homo sapiens
tctcacacacacaca

SEQ ID NO: 163163 - DNA, 15 bp, Homo sapiens
ctctcacacacacac

SEQ ID NO: 163164 - DNA, 15 bp, Homo sapiens
tctctcacacacaca

SEQ ID NO: 163165 - DNA, 15 bp, Homo sapiens
ctctctcacacacac

SEQ ID NO: 163166 - DNA, 15 bp, Homo sapiens
tctctctcacacaca

SEQ ID NO: 163167 - DNA, 15 bp, Homo sapiens
ctctctctcacacac

SEQ ID NO: 163168 - DNA, 15 bp, Homo sapiens
tctctctctcacaca

SEQ ID NO: 163169 - DNA, 15 bp, Homo sapiens
ctctctctctcacac

SEQ ID NO: 163170 - DNA, 15 bp, Homo sapiens
tctctctctctcaca

SEQ ID NO: 163171 - DNA, 15 bp, Homo sapiens
ctctctctctctcac

SEQ ID NO: 163172 - DNA, 15 bp, Homo sapiens
tctctctctctctca

SEQ ID NO: 163173 - DNA, 15 bp, Homo sapiens
ctctctctctctctc

SEQ ID NO: 163174 - DNA, 15 bp, Homo sapiens
tctctctctctctct

SEQ ID NO: 163175 - DNA, 15 bp, Homo sapiens
gtctctctctctctc

SEQ ID NO: 163176 - DNA, 15 bp, Homo sapiens
tgtctctctctctct

SEQ ID NO: 163177 - DNA, 15 bp, Homo sapiens
ttgtctctctctctc

SEQ ID NO: 163178 - DNA, 15 bp, Homo sapiens
tttgtctctctctct

SEQ ID NO: 163179 - DNA, 15 bp, Homo sapiens
ttttgtctctctctc

SEQ ID NO: 163180 - DNA, 15 bp, Homo sapiens
cttttgtctctctct

SEQ ID NO: 163181 - DNA, 15 bp, Homo sapiens
tcttttgtctctctc

SEQ ID NO: 163182 - DNA, 15 bp, Homo sapiens
ctcttttgtctctct

SEQ ID NO: 163183 - DNA, 15 bp, Homo sapiens
tctcttttgtctctc

SEQ ID NO: 163184 - DNA, 15 bp, Homo sapiens
ctctcttttgtctct

SEQ ID NO: 163185 - DNA, 15 bp, Homo sapiens
tctctcttttgtctc

SEQ ID NO: 163186 - DNA, 15 bp, Homo sapiens
ctctctcttttgtct

SEQ ID NO: 163187 - DNA, 15 bp, Homo sapiens
tctctctcttttgtc

SEQ ID NO: 163188 - DNA, 15 bp, Homo sapiens
gtctctctcttttgt

SEQ ID NO: 163189 - DNA, 15 bp, Homo sapiens
tgtctctctcttttg

SEQ ID NO: 163190 - DNA, 15 bp, Homo sapiens
ctgtctctctctttt

SEQ ID NO: 163191 - DNA, 15 bp, Homo sapiens
tctgtctctctcttt

SEQ ID NO: 163192 - DNA, 15 bp, Homo sapiens
ttctgtctctctctt

SEQ ID NO: 163193 - DNA, 15 bp, Homo sapiens
cttctgtctctctct

SEQ ID NO: 163194 - DNA, 15 bp, Homo sapiens
ccttctgtctctctc

SEQ ID NO: 163195 - DNA, 15 bp, Homo sapiens
tccttctgtctctct

SEQ ID NO: 163196 - DNA, 15 bp, Homo sapiens
atccttctgtctctc

SEQ ID NO: 163197 - DNA, 15 bp, Homo sapiens
tatccttctgtctct

SEQ ID NO: 163198 - DNA, 15 bp, Homo sapiens
ctatccttctgtctc

SEQ ID NO: 163199 - DNA, 15 bp, Homo sapiens
tctatccttctgtct

SEQ ID NO: 163200 - DNA, 15 bp, Homo sapiens
ctctatccttctgtc

SEQ ID NO: 163201 - DNA, 15 bp, Homo sapiens
tctctatccttctgt

SEQ ID NO: 163202 - DNA, 15 bp, Homo sapiens
ctctctatccttctg

SEQ ID NO: 163203 - DNA, 15 bp, Homo sapiens
tctctctatccttct

SEQ ID NO: 163204 - DNA, 15 bp, Homo sapiens
ttctctctatccttc

SEQ ID NO: 163205 - DNA, 15 bp, Homo sapiens
tttctctctatcctt

SEQ ID NO: 163206 - DNA, 15 bp, Homo sapiens
gtttctctctatcct

SEQ ID NO: 163207 - DNA, 15 bp, Homo sapiens
tgtttctctctatcc

SEQ ID NO: 163208 - DNA, 15 bp, Homo sapiens
ctgtttctctctatc

SEQ ID NO: 163209 - DNA, 15 bp, Homo sapiens
tctgtttctctctat

SEQ ID NO: 163210 - DNA, 15 bp, Homo sapiens
atctgtttctctcta

SEQ ID NO: 163211 - DNA, 15 bp, Homo sapiens
catctgtttctctct

SEQ ID NO: 163212 - DNA, 15 bp, Homo sapiens
ccatctgtttctctc

SEQ ID NO: 163213 - DNA, 15 bp, Homo sapiens
cccatctgtttctct

SEQ ID NO: 163214 - DNA, 15 bp, Homo sapiens
gcccatctgtttctc

SEQ ID NO: 163215 - DNA, 15 bp, Homo sapiens
tgcccatctgtttct

SEQ ID NO: 163216 - DNA, 15 bp, Homo sapiens
gtgcccatctgtttc

SEQ ID NO: 163217 - DNA, 15 bp, Homo sapiens
tgtgcccatctgttt

SEQ ID NO: 163218 - DNA, 15 bp, Homo sapiens
ctgtgcccatctgtt

SEQ ID NO: 163219 - DNA, 15 bp, Homo sapiens
tctgtgcccatctgt

SEQ ID NO: 163220 - DNA, 15 bp, Homo sapiens
gtctgtgcccatctg

SEQ ID NO: 163221 - DNA, 15 bp, Homo sapiens
ggtctgtgcccatct

SEQ ID NO: 163222 - DNA, 15 bp, Homo sapiens
gggtctgtgcccatc

SEQ ID NO: 163223 - DNA, 15 bp, Homo sapiens
tgggtctgtgcccat

SEQ ID NO: 163224 - DNA, 15 bp, Homo sapiens
ctgggtctgtgccca

SEQ ID NO: 163225 - DNA, 15 bp, Homo sapiens
cctgggtctgtgccc

SEQ ID NO: 163226 - DNA, 15 bp, Homo sapiens
tcctgggtctgtgcc

SEQ ID NO: 163227 - DNA, 15 bp, Homo sapiens
gtcctgggtctgtgc

SEQ ID NO: 163228 - DNA, 15 bp, Homo sapiens
tgtcctgggtctgtg

SEQ ID NO: 163229 - DNA, 15 bp, Homo sapiens
atgtcctgggtctgt

SEQ ID NO: 163230 - DNA, 15 bp, Homo sapiens
catgtcctgggtctg

SEQ ID NO: 163231 - DNA, 15 bp, Homo sapiens
tcatgtcctgggtct

SEQ ID NO: 163232 - DNA, 15 bp, Homo sapiens
ctcatgtcctgggtc

SEQ ID NO: 163233 - DNA, 15 bp, Homo sapiens
actcatgtcctgggt

SEQ ID NO: 163234 - DNA, 15 bp, Homo sapiens
aactcatgtcctggg

SEQ ID NO: 163235 - DNA, 15 bp, Homo sapiens
gaactcatgtcctgg

SEQ ID NO: 163236 - DNA, 15 bp, Homo sapiens
tgaactcatgtcctg

SEQ ID NO: 163237 - DNA, 15 bp, Homo sapiens
ctgaactcatgtcct

SEQ ID NO: 163238 - DNA, 15 bp, Homo sapiens
gctgaactcatgtcc

SEQ ID NO: 163239 - DNA, 15 bp, Homo sapiens
ggctgaactcatgtc

SEQ ID NO: 163240 - DNA, 15 bp, Homo sapiens
aggctgaactcatgt

SEQ ID NO: 163241 - DNA, 15 bp, Homo sapiens
taggctgaactcatg

SEQ ID NO: 163242 - DNA, 15 bp, Homo sapiens
gtaggctgaactcat

SEQ ID NO: 163243 - DNA, 15 bp, Homo sapiens
tgtaggctgaactca

SEQ ID NO: 163244 - DNA, 15 bp, Homo sapiens
gtgtaggctgaactc

SEQ ID NO: 163245 - DNA, 15 bp, Homo sapiens
agtgtaggctgaact

SEQ ID NO: 163246 - DNA, 15 bp, Homo sapiens
cagtgtaggctgaac

SEQ ID NO: 163247 - DNA, 15 bp, Homo sapiens
tcagtgtaggctgaa

SEQ ID NO: 163248 - DNA, 15 bp, Homo sapiens
gtcagtgtaggctga

SEQ ID NO: 163249 - DNA, 15 bp, Homo sapiens
ggtcagtgtaggctg

SEQ ID NO: 163250 - DNA, 15 bp, Homo sapiens
tggtcagtgtaggct

SEQ ID NO: 163251 - DNA, 15 bp, Homo sapiens
ttggtcagtgtaggc

SEQ ID NO: 163252 - DNA, 15 bp, Homo sapiens
attggtcagtgtagg

SEQ ID NO: 163253 - DNA, 15 bp, Homo sapiens
tattggtcagtgtag

SEQ ID NO: 163254 - DNA, 15 bp, Homo sapiens
atattggtcagtgta

SEQ ID NO: 163255 - DNA, 15 bp, Homo sapiens
catattggtcagtgt

SEQ ID NO: 163256 - DNA, 15 bp, Homo sapiens
tcatattggtcagtg

SEQ ID NO: 163257 - DNA, 15 bp, Homo sapiens
gtcatattggtcagt

SEQ ID NO: 163258 - DNA, 15 bp, Homo sapiens
tgtcatattggtcag

SEQ ID NO: 163259 - DNA, 15 bp, Homo sapiens
ctgtcatattggtca

SEQ ID NO: 163260 - DNA, 15 bp, Homo sapiens
gctgtcatattggtc

SEQ ID NO: 163261 - DNA, 15 bp, Homo sapiens
ggctgtcatattggt

SEQ ID NO: 163262 - DNA, 15 bp, Homo sapiens
tggctgtcatattgg

SEQ ID NO: 163263 - DNA, 15 bp, Homo sapiens
gtggctgtcatattg

SEQ ID NO: 163264 - DNA, 15 bp, Homo sapiens
agtggctgtcatatt

SEQ ID NO: 163265 - DNA, 15 bp, Homo sapiens
cagtggctgtcatat

SEQ ID NO: 163266 - DNA, 15 bp, Homo sapiens
ccagtggctgtcata

SEQ ID NO: 163267 - DNA, 15 bp, Homo sapiens
gccagtggctgtcat

SEQ ID NO: 163268 - DNA, 15 bp, Homo sapiens
ggccagtggctgtca

SEQ ID NO: 163269 - DNA, 15 bp, Homo sapiens
tggccagtggctgtc

SEQ ID NO: 163270 - DNA, 15 bp, Homo sapiens
gtggccagtggctgt

SEQ ID NO: 163271 - DNA, 15 bp, Homo sapiens
agtggccagtggctg

SEQ ID NO: 163272 - DNA, 15 bp, Homo sapiens
aagtggccagtggct

SEQ ID NO: 163273 - DNA, 15 bp, Homo sapiens
caagtggccagtggc

SEQ ID NO: 163274 - DNA, 15 bp, Homo sapiens
tcaagtggccagtgg

SEQ ID NO: 163275 - DNA, 15 bp, Homo sapiens
ttcaagtggccagtg

SEQ ID NO: 163276 - DNA, 15 bp, Homo sapiens
tttcaagtggccagt

SEQ ID NO: 163277 - DNA, 15 bp, Homo sapiens
atttcaagtggccag

SEQ ID NO: 163278 - DNA, 15 bp, Homo sapiens
catttcaagtggcca

SEQ ID NO: 163279 - DNA, 15 bp, Homo sapiens
acatttcaagtggcc

SEQ ID NO: 163280 - DNA, 15 bp, Homo sapiens
cacatttcaagtggc

SEQ ID NO: 163281 - DNA, 15 bp, Homo sapiens
ccacatttcaagtgg

SEQ ID NO: 163282 - DNA, 15 bp, Homo sapiens
accacatttcaagtg

SEQ ID NO: 163283 - DNA, 15 bp, Homo sapiens
caccacatttcaagt

SEQ ID NO: 163284 - DNA, 15 bp, Homo sapiens
acaccacatttcaag

SEQ ID NO: 163285 - DNA, 15 bp, Homo sapiens
cacaccacatttcaa

SEQ ID NO: 163286 - DNA, 15 bp, Homo sapiens
tcacaccacatttca

SEQ ID NO: 163287 - DNA, 15 bp, Homo sapiens
ctcacaccacatttc

SEQ ID NO: 163288 - DNA, 15 bp, Homo sapiens
actcacaccacattt

SEQ ID NO: 163289 - DNA, 15 bp, Homo sapiens
aactcacaccacatt

SEQ ID NO: 163290 - DNA, 15 bp, Homo sapiens
caactcacaccacat

SEQ ID NO: 163291 - DNA, 15 bp, Homo sapiens
ccaactcacaccaca

SEQ ID NO: 163292 - DNA, 15 bp, Homo sapiens
cccaactcacaccac

SEQ ID NO: 163293 - DNA, 15 bp, Homo sapiens
tcccaactcacacca

SEQ ID NO: 163294 - DNA, 15 bp, Homo sapiens
atcccaactcacacc

SEQ ID NO: 163295 - DNA, 15 bp, Homo sapiens
tatcccaactcacac

SEQ ID NO: 163296 - DNA, 15 bp, Homo sapiens
atatcccaactcaca

SEQ ID NO: 163297 - DNA, 15 bp, Homo sapiens
catatcccaactcac

SEQ ID NO: 163298 - DNA, 15 bp, Homo sapiens
gcatatcccaactca

SEQ ID NO: 163299 - DNA, 15 bp, Homo sapiens
ggcatatcccaactc

SEQ ID NO: 163300 - DNA, 15 bp, Homo sapiens
tggcatatcccaact

SEQ ID NO: 163301 - DNA, 15 bp, Homo sapiens
ttggcatatcccaac

SEQ ID NO: 163302 - DNA, 15 bp, Homo sapiens
tttggcatatcccaa

SEQ ID NO: 163303 - DNA, 15 bp, Homo sapiens
ttttggcatatccca

SEQ ID NO: 163304 - DNA, 15 bp, Homo sapiens
cttttggcatatccc

SEQ ID NO: 163305 - DNA, 15 bp, Homo sapiens
acttttggcatatcc

SEQ ID NO: 163306 - DNA, 15 bp, Homo sapiens
cacttttggcatatc

SEQ ID NO: 163307 - DNA, 15 bp, Homo sapiens
acacttttggcatat

SEQ ID NO: 163308 - DNA, 15 bp, Homo sapiens
tacacttttggcata

SEQ ID NO: 163309 - DNA, 15 bp, Homo sapiens
ttacacttttggcat

SEQ ID NO: 163310 - DNA, 15 bp, Homo sapiens
tttacacttttggca

SEQ ID NO: 163311 - DNA, 15 bp, Homo sapiens
ttttacacttttggc

SEQ ID NO: 163312 - DNA, 15 bp, Homo sapiens
attttacacttttgg

SEQ ID NO: 163313 - DNA, 15 bp, Homo sapiens
cattttacacttttg

SEQ ID NO: 163314 - DNA, 15 bp, Homo sapiens
gcattttacactttt

SEQ ID NO: 163315 - DNA, 15 bp, Homo sapiens
tgcattttacacttt

SEQ ID NO: 163316 - DNA, 15 bp, Homo sapiens
gtgcattttacactt

SEQ ID NO: 163317 - DNA, 15 bp, Homo sapiens
tgtgcattttacact

SEQ ID NO: 163318 - DNA, 15 bp, Homo sapiens
gtgtgcattttacac

SEQ ID NO: 163319 - DNA, 15 bp, Homo sapiens
tgtgtgcattttaca

SEQ ID NO: 163320 - DNA, 15 bp, Homo sapiens
ttgtgtgcattttac

SEQ ID NO: 163321 - DNA, 15 bp, Homo sapiens
attgtgtgcatttta

SEQ ID NO: 163322 - DNA, 15 bp, Homo sapiens
tattgtgtgcatttt

SEQ ID NO: 163323 - DNA, 15 bp, Homo sapiens
atattgtgtgcattt

SEQ ID NO: 163324 - DNA, 15 bp, Homo sapiens
aatattgtgtgcatt

SEQ ID NO: 163325 - DNA, 15 bp, Homo sapiens
aaatattgtgtgcat

SEQ ID NO: 163326 - DNA, 15 bp, Homo sapiens
aaaatattgtgtgca

SEQ ID NO: 163327 - DNA, 15 bp, Homo sapiens
caaaatattgtgtgc

SEQ ID NO: 163328 - DNA, 15 bp, Homo sapiens
ggtaggggaatgagc

SEQ ID NO: 163329 - DNA, 15 bp, Homo sapiens
gggtaggggaatgag

SEQ ID NO: 163330 - DNA, 15 bp, Homo sapiens
agggtaggggaatga

SEQ ID NO: 163331 - DNA, 15 bp, Homo sapiens
cagggtaggggaatg

SEQ ID NO: 163332 - DNA, 15 bp, Homo sapiens
ccagggtaggggaat

SEQ ID NO: 163333 - DNA, 15 bp, Homo sapiens
accagggtaggggaa

SEQ ID NO: 163334 - DNA, 15 bp, Homo sapiens
gaccagggtagggga

SEQ ID NO: 163335 - DNA, 15 bp, Homo sapiens
ggaccagggtagggg

SEQ ID NO: 163336 - DNA, 15 bp, Homo sapiens
aggaccagggtaggg

SEQ ID NO: 163337 - DNA, 15 bp, Homo sapiens
aaggaccagggtagg

SEQ ID NO: 163338 - DNA, 15 bp, Homo sapiens
taaggaccagggtag

SEQ ID NO: 163339 - DNA, 15 bp, Homo sapiens
gtaaggaccagggta

SEQ ID NO: 163340 - DNA, 15 bp, Homo sapiens
ggtaaggaccagggt

SEQ ID NO: 163341 - DNA, 15 bp, Homo sapiens
aggtaaggaccaggg

SEQ ID NO: 163342 - DNA, 15 bp, Homo sapiens
gaggtaaggaccagg

SEQ ID NO: 163343 - DNA, 15 bp, Homo sapiens
agaggtaaggaccag

SEQ ID NO: 163344 - DNA, 15 bp, Homo sapiens
gagaggtaaggacca

SEQ ID NO: 163345 - DNA, 15 bp, Homo sapiens
ggagaggtaaggacc

SEQ ID NO: 163346 - DNA, 15 bp, Homo sapiens
tggagaggtaaggac

SEQ ID NO: 163347 - DNA, 15 bp, Homo sapiens
ttggagaggtaagga

SEQ ID NO: 163348 - DNA, 15 bp, Homo sapiens
attggagaggtaagg

SEQ ID NO: 163349 - DNA, 15 bp, Homo sapiens
tattggagaggtaag

SEQ ID NO: 163350 - DNA, 15 bp, Homo sapiens
gtattggagaggtaa

SEQ ID NO: 163351 - DNA, 15 bp, Homo sapiens
ggtattggagaggta

SEQ ID NO: 163352 - DNA, 15 bp, Homo sapiens
gggtattggagaggt

SEQ ID NO: 163353 - DNA, 15 bp, Homo sapiens
agggtattggagagg

SEQ ID NO: 163354 - DNA, 15 bp, Homo sapiens
cagggtattggagag

SEQ ID NO: 163355 - DNA, 15 bp, Homo sapiens
ccagggtattggaga

SEQ ID NO: 163356 - DNA, 15 bp, Homo sapiens
accagggtattggag

SEQ ID NO: 163357 - DNA, 15 bp, Homo sapiens
caccagggtattgga

SEQ ID NO: 163358 - DNA, 15 bp, Homo sapiens
tcaccagggtattgg

SEQ ID NO: 163359 - DNA, 15 bp, Homo sapiens
ctcaccagggtattg

SEQ ID NO: 163360 - DNA, 15 bp, Homo sapiens
cctcaccagggtatt

SEQ ID NO: 163361 - DNA, 15 bp, Homo sapiens
ccctcaccagggtat

SEQ ID NO: 163362 - DNA, 15 bp, Homo sapiens
tccctcaccagggta

SEQ ID NO: 163363 - DNA, 15 bp, Homo sapiens
ctccctcaccagggt

SEQ ID NO: 163364 - DNA, 15 bp, Homo sapiens
gctccctcaccaggg

SEQ ID NO: 163365 - DNA, 15 bp, Homo sapiens
cgctccctcaccagg

SEQ ID NO: 163366 - DNA, 15 bp, Homo sapiens
ccgctccctcaccag

SEQ ID NO: 163367 - DNA, 15 bp, Homo sapiens
cccgctccctcacca

SEQ ID NO: 163368 - DNA, 15 bp, Homo sapiens
gcccgctccctcacc

SEQ ID NO: 163369 - DNA, 15 bp, Homo sapiens
ggcccgctccctcac

SEQ ID NO: 163370 - DNA, 15 bp, Homo sapiens
aggcccgctccctca

SEQ ID NO: 163371 - DNA, 15 bp, Homo sapiens
taggcccgctccctc

SEQ ID NO: 163372 - DNA, 15 bp, Homo sapiens
gtaggcccgctccct

SEQ ID NO: 163373 - DNA, 15 bp, Homo sapiens
agtaggcccgctccc

SEQ ID NO: 163374 - DNA, 15 bp, Homo sapiens
cagtaggcccgctcc

SEQ ID NO: 163375 - DNA, 15 bp, Homo sapiens
tcagtaggcccgctc

SEQ ID NO: 163376 - DNA, 15 bp, Homo sapiens
ctcagtaggcccgct

SEQ ID NO: 163377 - DNA, 15 bp, Homo sapiens
cctcagtaggcccgc

SEQ ID NO: 163378 - DNA, 15 bp, Homo sapiens
tcctcagtaggcccg

SEQ ID NO: 163379 - DNA, 15 bp, Homo sapiens
ctcctcagtaggccc

SEQ ID NO: 163380 - DNA, 15 bp, Homo sapiens
tctcctcagtaggcc

SEQ ID NO: 163381 - DNA, 15 bp, Homo sapiens
gtctcctcagtaggc

SEQ ID NO: 163382 - DNA, 15 bp, Homo sapiens
tgtctcctcagtagg

SEQ ID NO: 163383 - DNA, 15 bp, Homo sapiens
ctgtctcctcagtag

SEQ ID NO: 163384 - DNA, 15 bp, Homo sapiens
cctgtctcctcagta

SEQ ID NO: 163385 - DNA, 15 bp, Homo sapiens
gcctgtctcctcagt

SEQ ID NO: 163386 - DNA, 15 bp, Homo sapiens
tgcctgtctcctcag

SEQ ID NO: 163387 - DNA, 15 bp, Homo sapiens
ttgcctgtctcctca

SEQ ID NO: 163388 - DNA, 15 bp, Homo sapiens
cttgcctgtctcctc

SEQ ID NO: 163389 - DNA, 15 bp, Homo sapiens
gcttgcctgtctcct

SEQ ID NO: 163390 - DNA, 15 bp, Homo sapiens
ggcttgcctgtctcc

SEQ ID NO: 163391 - DNA, 15 bp, Homo sapiens
aggcttgcctgtctc

SEQ ID NO: 163392 - DNA, 15 bp, Homo sapiens
aaggcttgcctgtct

SEQ ID NO: 163393 - DNA, 15 bp, Homo sapiens
aaaggcttgcctgtc

SEQ ID NO: 163394 - DNA, 15 bp, Homo sapiens
caaaggcttgcctgt

SEQ ID NO: 163395 - DNA, 15 bp, Homo sapiens
tcaaaggcttgcctg

SEQ ID NO: 163396 - DNA, 15 bp, Homo sapiens
gtcaaaggcttgcct

SEQ ID NO: 163397 - DNA, 15 bp, Homo sapiens
tgtcaaaggcttgcc

SEQ ID NO: 163398 - DNA, 15 bp, Homo sapiens
gtgtcaaaggcttgc

SEQ ID NO: 163399 - DNA, 15 bp, Homo sapiens
agtgtcaaaggcttg

SEQ ID NO: 163400 - DNA, 15 bp, Homo sapiens
gagtgtcaaaggctt

SEQ ID NO: 163401 - DNA, 15 bp, Homo sapiens
tgagtgtcaaaggct

SEQ ID NO: 163402 - DNA, 15 bp, Homo sapiens
ttgagtgtcaaaggc

SEQ ID NO: 163403 - DNA, 15 bp, Homo sapiens
tttgagtgtcaaagg

SEQ ID NO: 163404 - DNA, 15 bp, Homo sapiens
ctttgagtgtcaaag

SEQ ID NO: 163405 - DNA, 15 bp, Homo sapiens
actttgagtgtcaaa

SEQ ID NO: 163406 - DNA, 15 bp, Homo sapiens
aactttgagtgtcaa

SEQ ID NO: 163407 - DNA, 15 bp, Homo sapiens
taactttgagtgtca

SEQ ID NO: 163408 - DNA, 15 bp, Homo sapiens
ttaactttgagtgtc

SEQ ID NO: 163409 - DNA, 15 bp, Homo sapiens
tttaactttgagtgt

SEQ ID NO: 163410 - DNA, 15 bp, Homo sapiens
ttttaactttgagtg

SEQ ID NO: 163411 - DNA, 15 bp, Homo sapiens
attttaactttgagt

SEQ ID NO: 163412 - DNA, 15 bp, Homo sapiens
gattttaactttgag

SEQ ID NO: 163413 - DNA, 15 bp, Homo sapiens
tgattttaactttga

SEQ ID NO: 163414 - DNA, 15 bp, Homo sapiens
ctgattttaactttg

SEQ ID NO: 163415 - DNA, 15 bp, Homo sapiens
tctgattttaacttt

SEQ ID NO: 163416 - DNA, 15 bp, Homo sapiens
gtctgattttaactt

SEQ ID NO: 163417 - DNA, 15 bp, Homo sapiens
tgtctgattttaact

SEQ ID NO: 163418 - DNA, 15 bp, Homo sapiens
gtgtctgattttaac

SEQ ID NO: 163419 - DNA, 15 bp, Homo sapiens
tgtgtctgattttaa

SEQ ID NO: 163420 - DNA, 15 bp, Homo sapiens
ttgtgtctgatttta

SEQ ID NO: 163421 - DNA, 15 bp, Homo sapiens
gttgtgtctgatttt

SEQ ID NO: 163422 - DNA, 15 bp, Homo sapiens
agttgtgtctgattt

SEQ ID NO: 163423 - DNA, 15 bp, Homo sapiens
cagttgtgtctgatt

SEQ ID NO: 163424 - DNA, 15 bp, Homo sapiens
ccagttgtgtctgat

SEQ ID NO: 163425 - DNA, 15 bp, Homo sapiens
tccagttgtgtctga

SEQ ID NO: 163426 - DNA, 15 bp, Homo sapiens
atccagttgtgtctg

SEQ ID NO: 163427 - DNA, 15 bp, Homo sapiens
aatccagttgtgtct

SEQ ID NO: 163428 - DNA, 15 bp, Homo sapiens
gaatccagttgtgtc

SEQ ID NO: 163429 - DNA, 15 bp, Homo sapiens
tgaatccagttgtgt

SEQ ID NO: 163430 - DNA, 15 bp, Homo sapiens
ttgaatccagttgtg

SEQ ID NO: 163431 - DNA, 15 bp, Homo sapiens
tttgaatccagttgt

SEQ ID NO: 163432 - DNA, 15 bp, Homo sapiens
atttgaatccagttg

SEQ ID NO: 163433 - DNA, 15 bp, Homo sapiens
tatttgaatccagtt

SEQ ID NO: 163434 - DNA, 15 bp, Homo sapiens
atatttgaatccagt

SEQ ID NO: 163435 - DNA, 15 bp, Homo sapiens
tatatttgaatccag

SEQ ID NO: 163436 - DNA, 15 bp, Homo sapiens
ctatatttgaatcca

SEQ ID NO: 163437 - DNA, 15 bp, Homo sapiens
cctatatttgaatcc

SEQ ID NO: 163438 - DNA, 15 bp, Homo sapiens
ccctatatttgaatc

SEQ ID NO: 163439 - DNA, 15 bp, Homo sapiens
accctatatttgaat

SEQ ID NO: 163440 - DNA, 15 bp, Homo sapiens
gaccctatatttgaa

SEQ ID NO: 163441 - DNA, 15 bp, Homo sapiens
agaccctatatttga

SEQ ID NO: 163442 - DNA, 15 bp, Homo sapiens
cagaccctatatttg

SEQ ID NO: 163443 - DNA, 15 bp, Homo sapiens
gcagaccctatattt

SEQ ID NO: 163444 - DNA, 15 bp, Homo sapiens
agcagaccctatatt

SEQ ID NO: 163445 - DNA, 15 bp, Homo sapiens
tagcagaccctatat

SEQ ID NO: 163446 - DNA, 15 bp, Homo sapiens
atagcagaccctata

SEQ ID NO: 163447 - DNA, 15 bp, Homo sapiens
aatagcagaccctat

SEQ ID NO: 163448 - DNA, 15 bp, Homo sapiens
taatagcagacccta

SEQ ID NO: 163449 - DNA, 15 bp, Homo sapiens
ctaatagcagaccct

SEQ ID NO: 163450 - DNA, 15 bp, Homo sapiens
gctaatagcagaccc

SEQ ID NO: 163451 - DNA, 15 bp, Homo sapiens
agctaatagcagacc

SEQ ID NO: 163452 - DNA, 15 bp, Homo sapiens
cagctaatagcagac

SEQ ID NO: 163453 - DNA, 15 bp, Homo sapiens
ccagctaatagcaga

SEQ ID NO: 163454 - DNA, 15 bp, Homo sapiens
accagctaatagcag

SEQ ID NO: 163455 - DNA, 15 bp, Homo sapiens
caccagctaatagca

SEQ ID NO: 163456 - DNA, 15 bp, Homo sapiens
tcaccagctaatagc

SEQ ID NO: 163457 - DNA, 15 bp, Homo sapiens
atcaccagctaatag

SEQ ID NO: 163458 - DNA, 15 bp, Homo sapiens
gatcaccagctaata

SEQ ID NO: 163459 - DNA, 15 bp, Homo sapiens
agatcaccagctaat

SEQ ID NO: 163460 - DNA, 15 bp, Homo sapiens
cagatcaccagctaa

SEQ ID NO: 163461 - DNA, 15 bp, Homo sapiens
ccagatcaccagcta

SEQ ID NO: 163462 - DNA, 15 bp, Homo sapiens
tccagatcaccagct

SEQ ID NO: 163463 - DNA, 15 bp, Homo sapiens
ctccagatcaccagc

SEQ ID NO: 163464 - DNA, 15 bp, Homo sapiens
actccagatcaccag

SEQ ID NO: 163465 - DNA, 15 bp, Homo sapiens
aactccagatcacca

SEQ ID NO: 163466 - DNA, 15 bp, Homo sapiens
caactccagatcacc

SEQ ID NO: 163467 - DNA, 15 bp, Homo sapiens
ccaactccagatcac

SEQ ID NO: 163468 - DNA, 15 bp, Homo sapiens
tccaactccagatca

SEQ ID NO: 163469 - DNA, 15 bp, Homo sapiens
gtccaactccagatc

SEQ ID NO: 163470 - DNA, 15 bp, Homo sapiens
tgtccaactccagat

SEQ ID NO: 163471 - DNA, 15 bp, Homo sapiens
gtgtccaactccaga

SEQ ID NO: 163472 - DNA, 15 bp, Homo sapiens
agtgtccaactccag

SEQ ID NO: 163473 - DNA, 15 bp, Homo sapiens
aagtgtccaactcca

SEQ ID NO: 163474 - DNA, 15 bp, Homo sapiens
caagtgtccaactcc

SEQ ID NO: 163475 - DNA, 15 bp, Homo sapiens
ccaagtgtccaactc

SEQ ID NO: 163476 - DNA, 15 bp, Homo sapiens
accaagtgtccaact

SEQ ID NO: 163477 - DNA, 15 bp, Homo sapiens
aaccaagtgtccaac

SEQ ID NO: 163478 - DNA, 15 bp, Homo sapiens
taaccaagtgtccaa

SEQ ID NO: 163479 - DNA, 15 bp, Homo sapiens
ataaccaagtgtcca

SEQ ID NO: 163480 - DNA, 15 bp, Homo sapiens
gataaccaagtgtcc

SEQ ID NO: 163481 - DNA, 15 bp, Homo sapiens
ggataaccaagtgtc

SEQ ID NO: 163482 - DNA, 15 bp, Homo sapiens
gggataaccaagtgt

SEQ ID NO: 163483 - DNA, 15 bp, Homo sapiens
ggggataaccaagtg

SEQ ID NO: 163484 - DNA, 15 bp, Homo sapiens
tggggataaccaagt

SEQ ID NO: 163485 - DNA, 15 bp, Homo sapiens
ttggggataaccaag

SEQ ID NO: 163486 - DNA, 15 bp, Homo sapiens
attggggataaccaa

SEQ ID NO: 163487 - DNA, 15 bp, Homo sapiens
tattggggataacca

SEQ ID NO: 163488 - DNA, 15 bp, Homo sapiens
gtattggggataacc

SEQ ID NO: 163489 - DNA, 15 bp, Homo sapiens
tgtattggggataac

SEQ ID NO: 163490 - DNA, 15 bp, Homo sapiens
atgtattggggataa

SEQ ID NO: 163491 - DNA, 15 bp, Homo sapiens
catgtattggggata

SEQ ID NO: 163492 - DNA, 15 bp, Homo sapiens
acatgtattggggat

SEQ ID NO: 163493 - DNA, 15 bp, Homo sapiens
gacatgtattgggga

SEQ ID NO: 163494 - DNA, 15 bp, Homo sapiens
ggacatgtattgggg

SEQ ID NO: 163495 - DNA, 15 bp, Homo sapiens
aggacatgtattggg

SEQ ID NO: 163496 - DNA, 15 bp, Homo sapiens
aaggacatgtattgg

SEQ ID NO: 163497 - DNA, 15 bp, Homo sapiens
taaggacatgtattg

SEQ ID NO: 163498 - DNA, 15 bp, Homo sapiens
ataaggacatgtatt

SEQ ID NO: 163499 - DNA, 15 bp, Homo sapiens
gataaggacatgtat

SEQ ID NO: 163500 - DNA, 15 bp, Homo sapiens
agataaggacatgta

SEQ ID NO: 163501 - DNA, 15 bp, Homo sapiens
cagataaggacatgt

SEQ ID NO: 163502 - DNA, 15 bp, Homo sapiens
acagataaggacatg

SEQ ID NO: 163503 - DNA, 15 bp, Homo sapiens
tacagataaggacat

SEQ ID NO: 163504 - DNA, 15 bp, Homo sapiens
ttacagataaggaca

SEQ ID NO: 163505 - DNA, 15 bp, Homo sapiens
tttacagataaggac

SEQ ID NO: 163506 - DNA, 15 bp, Homo sapiens
atttacagataagga

SEQ ID NO: 163507 - DNA, 15 bp, Homo sapiens
tatttacagataagg

SEQ ID NO: 163508 - DNA, 15 bp, Homo sapiens
ttatttacagataag

SEQ ID NO: 163509 - DNA, 15 bp, Homo sapiens
cttatttacagataa

SEQ ID NO: 163510 - DNA, 15 bp, Homo sapiens
ccttatttacagata

SEQ ID NO: 163511 - DNA, 15 bp, Homo sapiens
tccttatttacagat

SEQ ID NO: 163512 - DNA, 15 bp, Homo sapiens
atccttatttacaga

SEQ ID NO: 163513 - DNA, 15 bp, Homo sapiens
gatccttatttacag

SEQ ID NO: 163514 - DNA, 15 bp, Homo sapiens
tgatccttatttaca

SEQ ID NO: 163515 - DNA, 15 bp, Homo sapiens
atgatccttatttac

SEQ ID NO: 163516 - DNA, 15 bp, Homo sapiens
tatgatccttattta

SEQ ID NO: 163517 - DNA, 15 bp, Homo sapiens
ttatgatccttattt

SEQ ID NO: 163518 - DNA, 15 bp, Homo sapiens
cttatgatccttatt

SEQ ID NO: 163519 - DNA, 15 bp, Homo sapiens
gcttatgatccttat

SEQ ID NO: 163520 - DNA, 15 bp, Homo sapiens
agcttatgatcctta

SEQ ID NO: 163521 - DNA, 15 bp, Homo sapiens
gagcttatgatcctt

SEQ ID NO: 163522 - DNA, 15 bp, Homo sapiens
agagcttatgatcct

SEQ ID NO: 163523 - DNA, 15 bp, Homo sapiens
tagagcttatgatcc

SEQ ID NO: 163524 - DNA, 15 bp, Homo sapiens
atagagcttatgatc

SEQ ID NO: 163525 - DNA, 15 bp, Homo sapiens
gatagagcttatgat

SEQ ID NO: 163526 - DNA, 15 bp, Homo sapiens
tgatagagcttatga

SEQ ID NO: 163527 - DNA, 15 bp, Homo sapiens
gtgatagagcttatg

SEQ ID NO: 163528 - DNA, 15 bp, Homo sapiens
tgtgatagagcttat

SEQ ID NO: 163529 - DNA, 15 bp, Homo sapiens
atgtgatagagctta

SEQ ID NO: 163530 - DNA, 15 bp, Homo sapiens
tatgtgatagagctt

SEQ ID NO: 163531 - DNA, 15 bp, Homo sapiens
ctatgtgatagagct

SEQ ID NO: 163532 - DNA, 15 bp, Homo sapiens
cctatgtgatagagc

SEQ ID NO: 163533 - DNA, 15 bp, Homo sapiens
ccctatgtgatagag

SEQ ID NO: 163534 - DNA, 15 bp, Homo sapiens
accctatgtgataga

SEQ ID NO: 163535 - DNA, 15 bp, Homo sapiens
aaccctatgtgatag

SEQ ID NO: 163536 - DNA, 15 bp, Homo sapiens
taaccctatgtgata

SEQ ID NO: 163537 - DNA, 15 bp, Homo sapiens
ataaccctatgtgat

SEQ ID NO: 163538 - DNA, 15 bp, Homo sapiens
cataaccctatgtga

SEQ ID NO: 163539 - DNA, 15 bp, Homo sapiens
ccataaccctatgtg

SEQ ID NO: 163540 - DNA, 15 bp, Homo sapiens
tccataaccctatgt

SEQ ID NO: 163541 - DNA, 15 bp, Homo sapiens
ctccataaccctatg

SEQ ID NO: 163542 - DNA, 15 bp, Homo sapiens
cctccataaccctat

SEQ ID NO: 163543 - DNA, 15 bp, Homo sapiens
ccctccataacccta

SEQ ID NO: 163544 - DNA, 15 bp, Homo sapiens
cccctccataaccct

SEQ ID NO: 163545 - DNA, 15 bp, Homo sapiens
tcccctccataaccc

SEQ ID NO: 163546 - DNA, 15 bp, Homo sapiens
atcccctccataacc

SEQ ID NO: 163547 - DNA, 15 bp, Homo sapiens
aatcccctccataac

SEQ ID NO: 163548 - DNA, 15 bp, Homo sapiens
caatcccctccataa

SEQ ID NO: 163549 - DNA, 15 bp, Homo sapiens
tcaatcccctccata

SEQ ID NO: 163550 - DNA, 15 bp, Homo sapiens
ctcaatcccctccat

SEQ ID NO: 163551 - DNA, 15 bp, Homo sapiens
tctcaatcccctcca

SEQ ID NO: 163552 - DNA, 15 bp, Homo sapiens
gtctcaatcccctcc

SEQ ID NO: 163553 - DNA, 15 bp, Homo sapiens
tgtctcaatcccctc

SEQ ID NO: 163554 - DNA, 15 bp, Homo sapiens
gtgtctcaatcccct

SEQ ID NO: 163555 - DNA, 15 bp, Homo sapiens
agtgtctcaatcccc

SEQ ID NO: 163556 - DNA, 15 bp, Homo sapiens
cagtgtctcaatccc

SEQ ID NO: 163557 - DNA, 15 bp, Homo sapiens
ccagtgtctcaatcc

SEQ ID NO: 163558 - DNA, 15 bp, Homo sapiens
gccagtgtctcaatc

SEQ ID NO: 163559 - DNA, 15 bp, Homo sapiens
ggccagtgtctcaat

SEQ ID NO: 163560 - DNA, 15 bp, Homo sapiens
gggccagtgtctcaa

SEQ ID NO: 163561 - DNA, 15 bp, Homo sapiens
ggggccagtgtctca

SEQ ID NO: 163562 - DNA, 15 bp, Homo sapiens
aggggccagtgtctc

SEQ ID NO: 163563 - DNA, 15 bp, Homo sapiens
caggggccagtgtct

SEQ ID NO: 163564 - DNA, 15 bp, Homo sapiens
tcaggggccagtgtc

SEQ ID NO: 163565 - DNA, 15 bp, Homo sapiens
ttcaggggccagtgt

SEQ ID NO: 163566 - DNA, 15 bp, Homo sapiens
tttcaggggccagtg

SEQ ID NO: 163567 - DNA, 15 bp, Homo sapiens
atttcaggggccagt

SEQ ID NO: 163568 - DNA, 15 bp, Homo sapiens
catttcaggggccag

SEQ ID NO: 163569 - DNA, 15 bp, Homo sapiens
ccatttcaggggcca

SEQ ID NO: 163570 - DNA, 15 bp, Homo sapiens
gccatttcaggggcc

SEQ ID NO: 163571 - DNA, 15 bp, Homo sapiens
tgccatttcaggggc

SEQ ID NO: 163572 - DNA, 15 bp, Homo sapiens
ttgccatttcagggg

SEQ ID NO: 163573 - DNA, 15 bp, Homo sapiens
gttgccatttcaggg

SEQ ID NO: 163574 - DNA, 15 bp, Homo sapiens
agttgccatttcagg

SEQ ID NO: 163575 - DNA, 15 bp, Homo sapiens
aagttgccatttcag

SEQ ID NO: 163576 - DNA, 15 bp, Homo sapiens
aaagttgccatttca

SEQ ID NO: 163577 - DNA, 15 bp, Homo sapiens
taaagttgccatttc

SEQ ID NO: 163578 - DNA, 15 bp, Homo sapiens
ctaaagttgccattt

SEQ ID NO: 163579 - DNA, 15 bp, Homo sapiens
actaaagttgccatt

SEQ ID NO: 163580 - DNA, 15 bp, Homo sapiens
gactaaagttgccat

SEQ ID NO: 163581 - DNA, 15 bp, Homo sapiens
tgactaaagttgcca

SEQ ID NO: 163582 - DNA, 15 bp, Homo sapiens
gtgactaaagttgcc

SEQ ID NO: 163583 - DNA, 15 bp, Homo sapiens
agtgactaaagttgc

SEQ ID NO: 163584 - DNA, 15 bp, Homo sapiens
aagtgactaaagttg

SEQ ID NO: 163585 - DNA, 15 bp, Homo sapiens
aaagtgactaaagtt

SEQ ID NO: 163586 - DNA, 15 bp, Homo sapiens
taaagtgactaaagt

SEQ ID NO: 163587 - DNA, 15 bp, Homo sapiens
ctaaagtgactaaag

SEQ ID NO: 163588 - DNA, 15 bp, Homo sapiens
actaaagtgactaaa

SEQ ID NO: 163589 - DNA, 15 bp, Homo sapiens
gactaaagtgactaa

SEQ ID NO: 163590 - DNA, 15 bp, Homo sapiens
tgactaaagtgacta

SEQ ID NO: 163591 - DNA, 15 bp, Homo sapiens
ttgactaaagtgact

SEQ ID NO: 163592 - DNA, 15 bp, Homo sapiens
tttgactaaagtgac

SEQ ID NO: 163593 - DNA, 15 bp, Homo sapiens
atttgactaaagtga

SEQ ID NO: 163594 - DNA, 15 bp, Homo sapiens
catttgactaaagtg

SEQ ID NO: 163595 - DNA, 15 bp, Homo sapiens
ccatttgactaaagt

SEQ ID NO: 163596 - DNA, 15 bp, Homo sapiens
gccatttgactaaag

SEQ ID NO: 163597 - DNA, 15 bp, Homo sapiens
tgccatttgactaaa

SEQ ID NO: 163598 - DNA, 15 bp, Homo sapiens
ctgccatttgactaa

SEQ ID NO: 163599 - DNA, 15 bp, Homo sapiens
tctgccatttgacta

SEQ ID NO: 163600 - DNA, 15 bp, Homo sapiens
ttctgccatttgact

SEQ ID NO: 163601 - DNA, 15 bp, Homo sapiens
gttctgccatttgac

SEQ ID NO: 163602 - DNA, 15 bp, Homo sapiens
agttctgccatttga

SEQ ID NO: 163603 - DNA, 15 bp, Homo sapiens
cagttctgccatttg

SEQ ID NO: 163604 - DNA, 15 bp, Homo sapiens
tcagttctgccattt

SEQ ID NO: 163605 - DNA, 15 bp, Homo sapiens
gtcagttctgccatt

SEQ ID NO: 163606 - DNA, 15 bp, Homo sapiens
ggtcagttctgccat

SEQ ID NO: 163607 - DNA, 15 bp, Homo sapiens
gggtcagttctgcca

SEQ ID NO: 163608 - DNA, 15 bp, Homo sapiens
tgggtcagttctgcc

SEQ ID NO: 163609 - DNA, 15 bp, Homo sapiens
atgggtcagttctgc

SEQ ID NO: 163610 - DNA, 15 bp, Homo sapiens
aatgggtcagttctg

SEQ ID NO: 163611 - DNA, 15 bp, Homo sapiens
aaatgggtcagttct

SEQ ID NO: 163612 - DNA, 15 bp, Homo sapiens
caaatgggtcagttc

SEQ ID NO: 163613 - DNA, 15 bp, Homo sapiens
acaaatgggtcagtt

SEQ ID NO: 163614 - DNA, 15 bp, Homo sapiens
gacaaatgggtcagt

SEQ ID NO: 163615 - DNA, 15 bp, Homo sapiens
ggacaaatgggtcag

SEQ ID NO: 163616 - DNA, 15 bp, Homo sapiens
aggacaaatgggtca

SEQ ID NO: 163617 - DNA, 15 bp, Homo sapiens
aaggacaaatgggtc

SEQ ID NO: 163618 - DNA, 15 bp, Homo sapiens
caaggacaaatgggt

SEQ ID NO: 163619 - DNA, 15 bp, Homo sapiens
ccaaggacaaatggg

SEQ ID NO: 163620 - DNA, 15 bp, Homo sapiens
cccaaggacaaatgg

SEQ ID NO: 163621 - DNA, 15 bp, Homo sapiens
ccccaaggacaaatg

SEQ ID NO: 163622 - DNA, 15 bp, Homo sapiens
tccccaaggacaaat

SEQ ID NO: 163623 - DNA, 15 bp, Homo sapiens
atccccaaggacaaa

SEQ ID NO: 163624 - DNA, 15 bp, Homo sapiens
gatccccaaggacaa

SEQ ID NO: 163625 - DNA, 15 bp, Homo sapiens
ggatccccaaggaca

SEQ ID NO: 163626 - DNA, 15 bp, Homo sapiens
tggatccccaaggac

SEQ ID NO: 163627 - DNA, 15 bp, Homo sapiens
ctggatccccaagga

SEQ ID NO: 163628 - DNA, 15 bp, Homo sapiens
tctggatccccaagg

SEQ ID NO: 163629 - DNA, 15 bp, Homo sapiens
ttctggatccccaag

SEQ ID NO: 163630 - DNA, 15 bp, Homo sapiens
cttctggatccccaa

SEQ ID NO: 163631 - DNA, 15 bp, Homo sapiens
acttctggatcccca

SEQ ID NO: 163632 - DNA, 15 bp, Homo sapiens
cacttctggatcccc

SEQ ID NO: 163633 - DNA, 15 bp, Homo sapiens
acacttctggatccc

SEQ ID NO: 163634 - DNA, 15 bp, Homo sapiens
aacacttctggatcc

SEQ ID NO: 163635 - DNA, 15 bp, Homo sapiens
aaacacttctggatc

SEQ ID NO: 163636 - DNA, 15 bp, Homo sapiens
aaaacacttctggat

SEQ ID NO: 163637 - DNA, 15 bp, Homo sapiens
gaaaacacttctgga

SEQ ID NO: 163638 - DNA, 15 bp, Homo sapiens
ggaaaacacttctgg

SEQ ID NO: 163639 - DNA, 15 bp, Homo sapiens
tggaaaacacttctg

SEQ ID NO: 163640 - DNA, 15 bp, Homo sapiens
ctggaaaacacttct

SEQ ID NO: 163641 - DNA, 15 bp, Homo sapiens
cctggaaaacacttc

SEQ ID NO: 163642 - DNA, 15 bp, Homo sapiens
ccctggaaaacactt

SEQ ID NO: 163643 - DNA, 15 bp, Homo sapiens
gccctggaaaacact

SEQ ID NO: 163644 - DNA, 15 bp, Homo sapiens
agccctggaaaacac

SEQ ID NO: 163645 - DNA, 15 bp, Homo sapiens
cagccctggaaaaca

SEQ ID NO: 163646 - DNA, 15 bp, Homo sapiens
gcagccctggaaaac

SEQ ID NO: 163647 - DNA, 15 bp, Homo sapiens
tgcagccctggaaaa

SEQ ID NO: 163648 - DNA, 15 bp, Homo sapiens
ctgcagccctggaaa

SEQ ID NO: 163649 - DNA, 15 bp, Homo sapiens
cctgcagccctggaa

SEQ ID NO: 163650 - DNA, 15 bp, Homo sapiens
tcctgcagccctgga

SEQ ID NO: 163651 - DNA, 15 bp, Homo sapiens
atcctgcagccctgg

SEQ ID NO: 163652 - DNA, 15 bp, Homo sapiens
tatcctgcagccctg

SEQ ID NO: 163653 - DNA, 15 bp, Homo sapiens
ctatcctgcagccct

SEQ ID NO: 163654 - DNA, 15 bp, Homo sapiens
actatcctgcagccc

SEQ ID NO: 163655 - DNA, 15 bp, Homo sapiens
tactatcctgcagcc

SEQ ID NO: 163656 - DNA, 15 bp, Homo sapiens
atactatcctgcagc

SEQ ID NO: 163657 - DNA, 15 bp, Homo sapiens
catactatcctgcag

SEQ ID NO: 163658 - DNA, 15 bp, Homo sapiens
tcatactatcctgca

SEQ ID NO: 163659 - DNA, 15 bp, Homo sapiens
ctcatactatcctgc

SEQ ID NO: 163660 - DNA, 15 bp, Homo sapiens
tctcatactatcctg

SEQ ID NO: 163661 - DNA, 15 bp, Homo sapiens
ctctcatactatcct

SEQ ID NO: 163662 - DNA, 15 bp, Homo sapiens
tctctcatactatcc

SEQ ID NO: 163663 - DNA, 15 bp, Homo sapiens
ctctctcatactatc

SEQ ID NO: 163664 - DNA, 15 bp, Homo sapiens
cctctctcatactat

SEQ ID NO: 163665 - DNA, 15 bp, Homo sapiens
ccctctctcatacta

SEQ ID NO: 163666 - DNA, 15 bp, Homo sapiens
cccctctctcatact

SEQ ID NO: 163667 - DNA, 15 bp, Homo sapiens
gcccctctctcatac

SEQ ID NO: 163668 - DNA, 15 bp, Homo sapiens
agcccctctctcata

SEQ ID NO: 163669 - DNA, 15 bp, Homo sapiens
cagcccctctctcat

SEQ ID NO: 163670 - DNA, 15 bp, Homo sapiens
acagcccctctctca

SEQ ID NO: 163671 - DNA, 15 bp, Homo sapiens
aacagcccctctctc

SEQ ID NO: 163672 - DNA, 15 bp, Homo sapiens
caacagcccctctct

SEQ ID NO: 163673 - DNA, 15 bp, Homo sapiens
ccaacagcccctctc

SEQ ID NO: 163674 - DNA, 15 bp, Homo sapiens
tccaacagcccctct

SEQ ID NO: 163675 - DNA, 15 bp, Homo sapiens
ctccaacagcccctc

SEQ ID NO: 163676 - DNA, 15 bp, Homo sapiens
tctccaacagcccct

SEQ ID NO: 163677 - DNA, 15 bp, Homo sapiens
gtctccaacagcccc

SEQ ID NO: 163678 - DNA, 15 bp, Homo sapiens
ggtctccaacagccc

SEQ ID NO: 163679 - DNA, 15 bp, Homo sapiens
gggtctccaacagcc

SEQ ID NO: 163680 - DNA, 15 bp, Homo sapiens
agggtctccaacagc

SEQ ID NO: 163681 - DNA, 15 bp, Homo sapiens
cagggtctccaacag

SEQ ID NO: 163682 - DNA, 15 bp, Homo sapiens
ccagggtctccaaca

SEQ ID NO: 163683 - DNA, 15 bp, Homo sapiens
cccagggtctccaac

SEQ ID NO: 163684 - DNA, 15 bp, Homo sapiens
acccagggtctccaa

SEQ ID NO: 163685 - DNA, 15 bp, Homo sapiens
gacccagggtctcca

SEQ ID NO: 163686 - DNA, 15 bp, Homo sapiens
agacccagggtctcc

SEQ ID NO: 163687 - DNA, 15 bp, Homo sapiens
gagacccagggtctc

SEQ ID NO: 163688 - DNA, 15 bp, Homo sapiens
agagacccagggtct

SEQ ID NO: 163689 - DNA, 15 bp, Homo sapiens
cagagacccagggtc

SEQ ID NO: 163690 - DNA, 15 bp, Homo sapiens
acagagacccagggt

SEQ ID NO: 163691 - DNA, 15 bp, Homo sapiens
tacagagacccaggg

SEQ ID NO: 163692 - DNA, 15 bp, Homo sapiens
gtacagagacccagg

SEQ ID NO: 163693 - DNA, 15 bp, Homo sapiens
agtacagagacccag

SEQ ID NO: 163694 - DNA, 15 bp, Homo sapiens
gagtacagagaccca

SEQ ID NO: 163695 - DNA, 15 bp, Homo sapiens
agagtacagagaccc

SEQ ID NO: 163696 - DNA, 15 bp, Homo sapiens
tagagtacagagacc

SEQ ID NO: 163697 - DNA, 15 bp, Homo sapiens
ctagagtacagagac

SEQ ID NO: 163698 - DNA, 15 bp, Homo sapiens
actagagtacagaga

SEQ ID NO: 163699 - DNA, 15 bp, Homo sapiens
cactagagtacagag

SEQ ID NO: 163700 - DNA, 15 bp, Homo sapiens
tcactagagtacaga

SEQ ID NO: 163701 - DNA, 15 bp, Homo sapiens
ttcactagagtacag

SEQ ID NO: 163702 - DNA, 15 bp, Homo sapiens
attcactagagtaca

SEQ ID NO: 163703 - DNA, 15 bp, Homo sapiens
cattcactagagtac

SEQ ID NO: 163704 - DNA, 15 bp, Homo sapiens
ccattcactagagta

SEQ ID NO: 163705 - DNA, 15 bp, Homo sapiens
gccattcactagagt

SEQ ID NO: 163706 - DNA, 15 bp, Homo sapiens
tgccattcactagag

SEQ ID NO: 163707 - DNA, 15 bp, Homo sapiens
ctgccattcactaga

SEQ ID NO: 163708 - DNA, 15 bp, Homo sapiens
cctgccattcactag

SEQ ID NO: 163709 - DNA, 15 bp, Homo sapiens
acctgccattcacta

SEQ ID NO: 163710 - DNA, 15 bp, Homo sapiens
cacctgccattcact

SEQ ID NO: 163711 - DNA, 15 bp, Homo sapiens
ccacctgccattcac

SEQ ID NO: 163712 - DNA, 15 bp, Homo sapiens
tccacctgccattca

SEQ ID NO: 163713 - DNA, 15 bp, Homo sapiens
ctccacctgccattc

SEQ ID NO: 163714 - DNA, 15 bp, Homo sapiens
actccacctgccatt

SEQ ID NO: 163715 - DNA, 15 bp, Homo sapiens
gactccacctgccat

SEQ ID NO: 163716 - DNA, 15 bp, Homo sapiens
ggactccacctgcca

SEQ ID NO: 163717 - DNA, 15 bp, Homo sapiens
tggactccacctgcc

SEQ ID NO: 163718 - DNA, 15 bp, Homo sapiens
ctggactccacctgc

SEQ ID NO: 163719 - DNA, 15 bp, Homo sapiens
cctggactccacctg

SEQ ID NO: 163720 - DNA, 15 bp, Homo sapiens
ccctggactccacct

SEQ ID NO: 163721 - DNA, 15 bp, Homo sapiens
gccctggactccacc

SEQ ID NO: 163722 - DNA, 15 bp, Homo sapiens
agccctggactccac

SEQ ID NO: 163723 - DNA, 15 bp, Homo sapiens
cagccctggactcca

SEQ ID NO: 163724 - DNA, 15 bp, Homo sapiens
tcagccctggactcc

SEQ ID NO: 163725 - DNA, 15 bp, Homo sapiens
ctcagccctggactc

SEQ ID NO: 163726 - DNA, 15 bp, Homo sapiens
gctcagccctggact

SEQ ID NO: 163727 - DNA, 15 bp, Homo sapiens
ggctcagccctggac

SEQ ID NO: 163728 - DNA, 15 bp, Homo sapiens
aggctcagccctgga

SEQ ID NO: 163729 - DNA, 15 bp, Homo sapiens
aaggctcagccctgg

SEQ ID NO: 163730 - DNA, 15 bp, Homo sapiens
caaggctcagccctg

SEQ ID NO: 163731 - DNA, 15 bp, Homo sapiens
tcaaggctcagccct

SEQ ID NO: 163732 - DNA, 15 bp, Homo sapiens
atcaaggctcagccc

SEQ ID NO: 163733 - DNA, 15 bp, Homo sapiens
gatcaaggctcagcc

SEQ ID NO: 163734 - DNA, 15 bp, Homo sapiens
tgatcaaggctcagc

SEQ ID NO: 163735 - DNA, 15 bp, Homo sapiens
ctgatcaaggctcag

SEQ ID NO: 163736 - DNA, 15 bp, Homo sapiens
actgatcaaggctca

SEQ ID NO: 163737 - DNA, 15 bp, Homo sapiens
cactgatcaaggctc

SEQ ID NO: 163738 - DNA, 15 bp, Homo sapiens
gcactgatcaaggct

SEQ ID NO: 163739 - DNA, 15 bp, Homo sapiens
cgcactgatcaaggc

SEQ ID NO: 163740 - DNA, 15 bp, Homo sapiens
ccgcactgatcaagg

SEQ ID NO: 163741 - DNA, 15 bp, Homo sapiens
tccgcactgatcaag

SEQ ID NO: 163742 - DNA, 15 bp, Homo sapiens
gtccgcactgatcaa

SEQ ID NO: 163743 - DNA, 15 bp, Homo sapiens
tgtccgcactgatca

SEQ ID NO: 163744 - DNA, 15 bp, Homo sapiens
atgtccgcactgatc

SEQ ID NO: 163745 - DNA, 15 bp, Homo sapiens
aatgtccgcactgat

SEQ ID NO: 163746 - DNA, 15 bp, Homo sapiens
caatgtccgcactga

SEQ ID NO: 163747 - DNA, 15 bp, Homo sapiens
acaatgtccgcactg

SEQ ID NO: 163748 - DNA, 15 bp, Homo sapiens
aacaatgtccgcact

SEQ ID NO: 163749 - DNA, 15 bp, Homo sapiens
gaacaatgtccgcac

SEQ ID NO: 163750 - DNA, 15 bp, Homo sapiens
agaacaatgtccgca

SEQ ID NO: 163751 - DNA, 15 bp, Homo sapiens
tagaacaatgtccgc

SEQ ID NO: 163752 - DNA, 15 bp, Homo sapiens
ttagaacaatgtccg

SEQ ID NO: 163753 - DNA, 15 bp, Homo sapiens
cttagaacaatgtcc

SEQ ID NO: 163754 - DNA, 15 bp, Homo sapiens
gcttagaacaatgtc

SEQ ID NO: 163755 - DNA, 15 bp, Homo sapiens
agcttagaacaatgt

SEQ ID NO: 163756 - DNA, 15 bp, Homo sapiens
cagcttagaacaatg

SEQ ID NO: 163757 - DNA, 15 bp, Homo sapiens
ccagcttagaacaat

SEQ ID NO: 163758 - DNA, 15 bp, Homo sapiens
cccagcttagaacaa

SEQ ID NO: 163759 - DNA, 15 bp, Homo sapiens
acccagcttagaaca

SEQ ID NO: 163760 - DNA, 15 bp, Homo sapiens
aacccagcttagaac

SEQ ID NO: 163761 - DNA, 15 bp, Homo sapiens
aaacccagcttagaa

SEQ ID NO: 163762 - DNA, 15 bp, Homo sapiens
gaaacccagcttaga

SEQ ID NO: 163763 - DNA, 15 bp, Homo sapiens
ggaaacccagcttag

SEQ ID NO: 163764 - DNA, 15 bp, Homo sapiens
aggaaacccagctta

SEQ ID NO: 163765 - DNA, 15 bp, Homo sapiens
gaggaaacccagctt

SEQ ID NO: 163766 - DNA, 15 bp, Homo sapiens
ggaggaaacccagct

SEQ ID NO: 163767 - DNA, 15 bp, Homo sapiens
aggaggaaacccagc

SEQ ID NO: 163768 - DNA, 15 bp, Homo sapiens
caggaggaaacccag

SEQ ID NO: 163769 - DNA, 15 bp, Homo sapiens
ccaggaggaaaccca

SEQ ID NO: 163770 - DNA, 15 bp, Homo sapiens
tccaggaggaaaccc

SEQ ID NO: 163771 - DNA, 15 bp, Homo sapiens
gtccaggaggaaacc

SEQ ID NO: 163772 - DNA, 15 bp, Homo sapiens
tgtccaggaggaaac

SEQ ID NO: 163773 - DNA, 15 bp, Homo sapiens
ctgtccaggaggaaa

SEQ ID NO: 163774 - DNA, 15 bp, Homo sapiens
cctgtccaggaggaa

SEQ ID NO: 163775 - DNA, 15 bp, Homo sapiens
tcctgtccaggagga

SEQ ID NO: 163776 - DNA, 15 bp, Homo sapiens
gtcctgtccaggagg

SEQ ID NO: 163777 - DNA, 15 bp, Homo sapiens
ggtcctgtccaggag

SEQ ID NO: 163778 - DNA, 15 bp, Homo sapiens
gggtcctgtccagga

SEQ ID NO: 163779 - DNA, 15 bp, Homo sapiens
tgggtcctgtccagg

SEQ ID NO: 163780 - DNA, 15 bp, Homo sapiens
cctgggtcctgtcca

SEQ ID NO: 163781 - DNA, 15 bp, Homo sapiens
gcctgggtcctgtcc

SEQ ID NO: 163782 - DNA, 15 bp, Homo sapiens
agcctgggtcctgtc

SEQ ID NO: 163783 - DNA, 15 bp, Homo sapiens
cagcctgggtcctgt

SEQ ID NO: 163784 - DNA, 15 bp, Homo sapiens
ccagcctgggtcctg

SEQ ID NO: 163785 - DNA, 15 bp, Homo sapiens
cccagcctgggtcct

SEQ ID NO: 163786 - DNA, 15 bp, Homo sapiens
ccccagcctgggtcc

SEQ ID NO: 163787 - DNA, 15 bp, Homo sapiens
cccccagcctgggtc

SEQ ID NO: 163788 - DNA, 15 bp, Homo sapiens
gcccccagcctgggt

SEQ ID NO: 163789 - DNA, 15 bp, Homo sapiens
agcccccagcctggg

SEQ ID NO: 163790 - DNA, 15 bp, Homo sapiens
cagcccccagcctgg

SEQ ID NO: 163791 - DNA, 15 bp, Homo sapiens
ccagcccccagcctg

SEQ ID NO: 163792 - DNA, 15 bp, Homo sapiens
cccagcccccagcct

SEQ ID NO: 163793 - DNA, 15 bp, Homo sapiens
ccccagcccccagcc

SEQ ID NO: 163794 - DNA, 15 bp, Homo sapiens
gccccagcccccagc

SEQ ID NO: 163795 - DNA, 15 bp, Homo sapiens
tgccccagcccccag

SEQ ID NO: 163796 - DNA, 15 bp, Homo sapiens
ctgccccagccccca

SEQ ID NO: 163797 - DNA, 15 bp, Homo sapiens
cctgccccagccccc

SEQ ID NO: 163798 - DNA, 15 bp, Homo sapiens
tcctgccccagcccc

SEQ ID NO: 163799 - DNA, 15 bp, Homo sapiens
ctcctgccccagccc

SEQ ID NO: 163800 - DNA, 15 bp, Homo sapiens
gctcctgccccagcc

SEQ ID NO: 163801 - DNA, 15 bp, Homo sapiens
tgctcctgccccagc

SEQ ID NO: 163802 - DNA, 15 bp, Homo sapiens
ttgctcctgccccag

SEQ ID NO: 163803 - DNA, 15 bp, Homo sapiens
gttgctcctgcccca

SEQ ID NO: 163804 - DNA, 15 bp, Homo sapiens
ggttgctcctgcccc

SEQ ID NO: 163805 - DNA, 15 bp, Homo sapiens
tggttgctcctgccc

SEQ ID NO: 163806 - DNA, 15 bp, Homo sapiens
ttggttgctcctgcc

SEQ ID NO: 163807 - DNA, 15 bp, Homo sapiens
cttggttgctcctgc

SEQ ID NO: 163808 - DNA, 15 bp, Homo sapiens
tcttggttgctcctg

SEQ ID NO: 163809 - DNA, 15 bp, Homo sapiens
ttcttggttgctcct

SEQ ID NO: 163810 - DNA, 15 bp, Homo sapiens
tttcttggttgctcc

SEQ ID NO: 163811 - DNA, 15 bp, Homo sapiens
gtttcttggttgctc

SEQ ID NO: 163812 - DNA, 15 bp, Homo sapiens
ggtttcttggttgct

SEQ ID NO: 163813 - DNA, 15 bp, Homo sapiens
tggtttcttggttgc

SEQ ID NO: 163814 - DNA, 15 bp, Homo sapiens
gtggtttcttggttg

SEQ ID NO: 163815 - DNA, 15 bp, Homo sapiens
tgtggtttcttggtt

SEQ ID NO: 163816 - DNA, 15 bp, Homo sapiens
atgtggtttcttggt

SEQ ID NO: 163817 - DNA, 15 bp, Homo sapiens
gatgtggtttcttgg

SEQ ID NO: 163818 - DNA, 15 bp, Homo sapiens
ggatgtggtttcttg

SEQ ID NO: 163819 - DNA, 15 bp, Homo sapiens
aggatgtggtttctt

SEQ ID NO: 163820 - DNA, 15 bp, Homo sapiens
caggatgtggtttct

SEQ ID NO: 163821 - DNA, 15 bp, Homo sapiens
gcaggatgtggtttc

SEQ ID NO: 163822 - DNA, 15 bp, Homo sapiens
ggcaggatgtggttt

SEQ ID NO: 163823 - DNA, 15 bp, Homo sapiens
gggcaggatgtggtt

SEQ ID NO: 163824 - DNA, 15 bp, Homo sapiens
agggcaggatgtggt

SEQ ID NO: 163825 - DNA, 15 bp, Homo sapiens
gagggcaggatgtgg

SEQ ID NO: 163826 - DNA, 15 bp, Homo sapiens
cgagggcaggatgtg

SEQ ID NO: 163827 - DNA, 15 bp, Homo sapiens
tcgagggcaggatgt

SEQ ID NO: 163828 - DNA, 15 bp, Homo sapiens
ttcgagggcaggatg

SEQ ID NO: 163829 - DNA, 15 bp, Homo sapiens
attcgagggcaggat

SEQ ID NO: 163830 - DNA, 15 bp, Homo sapiens
cattcgagggcagga

SEQ ID NO: 163831 - DNA, 15 bp, Homo sapiens
gcattcgagggcagg

SEQ ID NO: 163832 - DNA, 15 bp, Homo sapiens
ggcattcgagggcag

SEQ ID NO: 163833 - DNA, 15 bp, Homo sapiens
aggcattcgagggca

SEQ ID NO: 163834 - DNA, 15 bp, Homo sapiens
aaggcattcgagggc

SEQ ID NO: 163835 - DNA, 15 bp, Homo sapiens
caaggcattcgaggg

SEQ ID NO: 163836 - DNA, 15 bp, Homo sapiens
gcaaggcattcgagg

SEQ ID NO: 163837 - DNA, 15 bp, Homo sapiens
tgcaaggcattcgag

SEQ ID NO: 163838 - DNA, 15 bp, Homo sapiens
gtgcaaggcattcga

SEQ ID NO: 163839 - DNA, 15 bp, Homo sapiens
ggtgcaaggcattcg

SEQ ID NO: 163840 - DNA, 15 bp, Homo sapiens
tggtgcaaggcattc

SEQ ID NO: 163841 - DNA, 15 bp, Homo sapiens
ttggtgcaaggcatt

SEQ ID NO: 163842 - DNA, 15 bp, Homo sapiens
cttggtgcaaggcat

SEQ ID NO: 163843 - DNA, 15 bp, Homo sapiens
ccttggtgcaaggca

SEQ ID NO: 163844 - DNA, 15 bp, Homo sapiens
gccttggtgcaaggc

SEQ ID NO: 163845 - DNA, 15 bp, Homo sapiens
tgccttggtgcaagg

SEQ ID NO: 163846 - DNA, 15 bp, Homo sapiens
ttgccttggtgcaag

SEQ ID NO: 163847 - DNA, 15 bp, Homo sapiens
tttgccttggtgcaa

SEQ ID NO: 163848 - DNA, 15 bp, Homo sapiens
ttttgccttggtgca

SEQ ID NO: 163849 - DNA, 15 bp, Homo sapiens
gttttgccttggtgc

SEQ ID NO: 163850 - DNA, 15 bp, Homo sapiens
tgttttgccttggtg

SEQ ID NO: 163851 - DNA, 15 bp, Homo sapiens
ctgttttgccttggt

SEQ ID NO: 163852 - DNA, 15 bp, Homo sapiens
cctgttttgccttgg

SEQ ID NO: 163853 - DNA, 15 bp, Homo sapiens
gcctgttttgccttg

SEQ ID NO: 163854 - DNA, 15 bp, Homo sapiens
agcctgttttgcctt

SEQ ID NO: 163855 - DNA, 15 bp, Homo sapiens
aagcctgttttgcct

SEQ ID NO: 163856 - DNA, 15 bp, Homo sapiens
gaagcctgttttgcc

SEQ ID NO: 163857 - DNA, 15 bp, Homo sapiens
ggaagcctgttttgc

SEQ ID NO: 163858 - DNA, 15 bp, Homo sapiens
aggaagcctgttttg

SEQ ID NO: 163859 - DNA, 15 bp, Homo sapiens
gaggaagcctgtttt

SEQ ID NO: 163860 - DNA, 15 bp, Homo sapiens
tgaggaagcctgttt

SEQ ID NO: 163861 - DNA, 15 bp, Homo sapiens
ctgaggaagcctgtt

SEQ ID NO: 163862 - DNA, 15 bp, Homo sapiens
gctgaggaagcctgt

SEQ ID NO: 163863 - DNA, 15 bp, Homo sapiens
agctgaggaagcctg

SEQ ID NO: 163864 - DNA, 15 bp, Homo sapiens
cagctgaggaagcct

SEQ ID NO: 163865 - DNA, 15 bp, Homo sapiens
gcagctgaggaagcc

SEQ ID NO: 163866 - DNA, 15 bp, Homo sapiens
tgcagctgaggaagc

SEQ ID NO: 163867 - DNA, 15 bp, Homo sapiens
ctgcagctgaggaag

SEQ ID NO: 163868 - DNA, 15 bp, Homo sapiens
gctgcagctgaggaa

SEQ ID NO: 163869 - DNA, 15 bp, Homo sapiens
ggctgcagctgagga

SEQ ID NO: 163870 - DNA, 15 bp, Homo sapiens
aggctgcagctgagg

SEQ ID NO: 163871 - DNA, 15 bp, Homo sapiens
caggctgcagctgag

SEQ ID NO: 163872 - DNA, 15 bp, Homo sapiens
gcaggctgcagctga

SEQ ID NO: 163873 - DNA, 15 bp, Homo sapiens
ggcaggctgcagctg

SEQ ID NO: 163874 - DNA, 15 bp, Homo sapiens
gggcaggctgcagct

SEQ ID NO: 163875 - DNA, 15 bp, Homo sapiens
ggggcaggctgcagc

SEQ ID NO: 163876 - DNA, 15 bp, Homo sapiens
aggggcaggctgcag

SEQ ID NO: 163877 - DNA, 15 bp, Homo sapiens
taggggcaggctgca

SEQ ID NO: 163878 - DNA, 15 bp, Homo sapiens
ctaggggcaggctgc

SEQ ID NO: 163879 - DNA, 15 bp, Homo sapiens
cctaggggcaggctg

SEQ ID NO: 163880 - DNA, 15 bp, Homo sapiens
tcctaggggcaggct

SEQ ID NO: 163881 - DNA, 15 bp, Homo sapiens
ttcctaggggcaggc

SEQ ID NO: 163882 - DNA, 15 bp, Homo sapiens
tttcctaggggcagg

SEQ ID NO: 163883 - DNA, 15 bp, Homo sapiens
ttttcctaggggcag

SEQ ID NO: 163884 - DNA, 15 bp, Homo sapiens
attttcctaggggca

SEQ ID NO: 163885 - DNA, 15 bp, Homo sapiens
aattttcctaggggc

SEQ ID NO: 163886 - DNA, 15 bp, Homo sapiens
gaattttcctagggg

SEQ ID NO: 163887 - DNA, 15 bp, Homo sapiens
ggaattttcctaggg

SEQ ID NO: 163888 - DNA, 15 bp, Homo sapiens
aggaattttcctagg

SEQ ID NO: 163889 - DNA, 15 bp, Homo sapiens
taggaattttcctag

SEQ ID NO: 163890 - DNA, 15 bp, Homo sapiens
ataggaattttccta

SEQ ID NO: 163891 - DNA, 15 bp, Homo sapiens
cataggaattttcct

SEQ ID NO: 163892 - DNA, 15 bp, Homo sapiens
acataggaattttcc

SEQ ID NO: 163893 - DNA, 15 bp, Homo sapiens
cacataggaattttc

SEQ ID NO: 163894 - DNA, 15 bp, Homo sapiens
acacataggaatttt

SEQ ID NO: 163895 - DNA, 15 bp, Homo sapiens
cacacataggaattt

SEQ ID NO: 163896 - DNA, 15 bp, Homo sapiens
acacacataggaatt

SEQ ID NO: 163897 - DNA, 15 bp, Homo sapiens
cacacacataggaat

SEQ ID NO: 163898 - DNA, 15 bp, Homo sapiens
acacacacataggaa

SEQ ID NO: 163899 - DNA, 15 bp, Homo sapiens
cacacacacatagga

SEQ ID NO: 163900 - DNA, 15 bp, Homo sapiens
ccacacacacatagg

SEQ ID NO: 163901 - DNA, 15 bp, Homo sapiens
accacacacacatag

SEQ ID NO: 163902 - DNA, 15 bp, Homo sapiens
caccacacacacata

SEQ ID NO: 163903 - DNA, 15 bp, Homo sapiens
ccaccacacacacat

SEQ ID NO: 163904 - DNA, 15 bp, Homo sapiens
accaccacacacaca

SEQ ID NO: 163905 - DNA, 15 bp, Homo sapiens
caccaccacacacac

SEQ ID NO: 163906 - DNA, 15 bp, Homo sapiens
ccaccaccacacaca

SEQ ID NO: 163907 - DNA, 15 bp, Homo sapiens
accaccaccacacac

SEQ ID NO: 163908 - DNA, 15 bp, Homo sapiens
caccaccaccacaca

SEQ ID NO: 163909 - DNA, 15 bp, Homo sapiens
ccaccaccaccacac

SEQ ID NO: 163910 - DNA, 15 bp, Homo sapiens
accaccaccaccaca

SEQ ID NO: 163911 - DNA, 15 bp, Homo sapiens
caccaccaccaccac

SEQ ID NO: 163912 - DNA, 15 bp, Homo sapiens
ccaccaccaccacca

SEQ ID NO: 163913 - DNA, 15 bp, Homo sapiens
accaccaccaccacc

SEQ ID NO: 163914 - DNA, 15 bp, Homo sapiens
aaccaccaccaccac

SEQ ID NO: 163915 - DNA, 15 bp, Homo sapiens
caaccaccaccacca

SEQ ID NO: 163916 - DNA, 15 bp, Homo sapiens
ccaaccaccaccacc

SEQ ID NO: 163917 - DNA, 15 bp, Homo sapiens
tccaaccaccaccac

SEQ ID NO: 163918 - DNA, 15 bp, Homo sapiens
ctccaaccaccacca

SEQ ID NO: 163919 - DNA, 15 bp, Homo sapiens
cctccaaccaccacc

SEQ ID NO: 163920 - DNA, 15 bp, Homo sapiens
tcctccaaccaccac

SEQ ID NO: 163921 - DNA, 15 bp, Homo sapiens
ctcctccaaccacca

SEQ ID NO: 163922 - DNA, 15 bp, Homo sapiens
cctcctccaaccacc

SEQ ID NO: 163923 - DNA, 15 bp, Homo sapiens
ccctcctccaaccac

SEQ ID NO: 163924 - DNA, 15 bp, Homo sapiens
cccctcctccaacca

SEQ ID NO: 163925 - DNA, 15 bp, Homo sapiens
tcccctcctccaacc

SEQ ID NO: 163926 - DNA, 15 bp, Homo sapiens
gtcccctcctccaac

SEQ ID NO: 163927 - DNA, 15 bp, Homo sapiens
tgtcccctcctccaa

SEQ ID NO: 163928 - DNA, 15 bp, Homo sapiens
ctgtcccctcctcca

SEQ ID NO: 163929 - DNA, 15 bp, Homo sapiens
tctgtcccctcctcc

SEQ ID NO: 163930 - DNA, 15 bp, Homo sapiens
ctctgtcccctcctc

SEQ ID NO: 163931 - DNA, 15 bp, Homo sapiens
tctctgtcccctcct

SEQ ID NO: 163932 - DNA, 15 bp, Homo sapiens
atctctgtcccctcc

SEQ ID NO: 163933 - DNA, 15 bp, Homo sapiens
tatctctgtcccctc

SEQ ID NO: 163934 - DNA, 15 bp, Homo sapiens
gtatctctgtcccct

SEQ ID NO: 163935 - DNA, 15 bp, Homo sapiens
tgtatctctgtcccc

SEQ ID NO: 163936 - DNA, 15 bp, Homo sapiens
ctgtatctctgtccc

SEQ ID NO: 163937 - DNA, 15 bp, Homo sapiens
tctgtatctctgtcc

SEQ ID NO: 163938 - DNA, 15 bp, Homo sapiens
gtctgtatctctgtc

SEQ ID NO: 163939 - DNA, 15 bp, Homo sapiens
tgtctgtatctctgt

SEQ ID NO: 163940 - DNA, 15 bp, Homo sapiens
ctgtctgtatctctg

SEQ ID NO: 163941 - DNA, 15 bp, Homo sapiens
cctgtctgtatctct

SEQ ID NO: 163942 - DNA, 15 bp, Homo sapiens
acctgtctgtatctc

SEQ ID NO: 163943 - DNA, 15 bp, Homo sapiens
tacctgtctgtatct

SEQ ID NO: 163944 - DNA, 15 bp, Homo sapiens
ctacctgtctgtatc

SEQ ID NO: 163945 - DNA, 15 bp, Homo sapiens
actacctgtctgtat

SEQ ID NO: 163946 - DNA, 15 bp, Homo sapiens
gactacctgtctgta

SEQ ID NO: 163947 - DNA, 15 bp, Homo sapiens
agactacctgtctgt

SEQ ID NO: 163948 - DNA, 15 bp, Homo sapiens
cagactacctgtctg

SEQ ID NO: 163949 - DNA, 15 bp, Homo sapiens
tcagactacctgtct

SEQ ID NO: 163950 - DNA, 15 bp, Homo sapiens
ctcagactacctgtc

SEQ ID NO: 163951 - DNA, 15 bp, Homo sapiens
tctcagactacctgt

SEQ ID NO: 163952 - DNA, 15 bp, Homo sapiens
gtctcagactacctg

SEQ ID NO: 163953 - DNA, 15 bp, Homo sapiens
tgtctcagactacct

SEQ ID NO: 163954 - DNA, 15 bp, Homo sapiens
ctgtctcagactacc

SEQ ID NO: 163955 - DNA, 15 bp, Homo sapiens
tctgtctcagactac

SEQ ID NO: 163956 - DNA, 15 bp, Homo sapiens
gtctgtctcagacta

SEQ ID NO: 163957 - DNA, 15 bp, Homo sapiens
ggtctgtctcagact

SEQ ID NO: 163958 - DNA, 15 bp, Homo sapiens
tggtctgtctcagac

SEQ ID NO: 163959 - DNA, 15 bp, Homo sapiens
ctggtctgtctcaga

SEQ ID NO: 163960 - DNA, 15 bp, Homo sapiens
cctggtctgtctcag

SEQ ID NO: 163961 - DNA, 15 bp, Homo sapiens
ccctggtctgtctca

SEQ ID NO: 163962 - DNA, 15 bp, Homo sapiens
cccctggtctgtctc

SEQ ID NO: 163963 - DNA, 15 bp, Homo sapiens
ccccctggtctgtct

SEQ ID NO: 163964 - DNA, 15 bp, Homo sapiens
tccccctggtctgtc

SEQ ID NO: 163965 - DNA, 15 bp, Homo sapiens
ctccccctggtctgt

SEQ ID NO: 163966 - DNA, 15 bp, Homo sapiens
tctccccctggtctg

SEQ ID NO: 163967 - DNA, 15 bp, Homo sapiens
ttctccccctggtct

SEQ ID NO: 163968 - DNA, 15 bp, Homo sapiens
cttctccccctggtc

SEQ ID NO: 163969 - DNA, 15 bp, Homo sapiens
ccttctccccctggt

SEQ ID NO: 163970 - DNA, 15 bp, Homo sapiens
cccttctccccctgg

SEQ ID NO: 163971 - DNA, 15 bp, Homo sapiens
tcccttctccccctg

SEQ ID NO: 163972 - DNA, 15 bp, Homo sapiens
ctcccttctccccct

SEQ ID NO: 163973 - DNA, 15 bp, Homo sapiens
actcccttctccccc

SEQ ID NO: 163974 - DNA, 15 bp, Homo sapiens
tactcccttctcccc

SEQ ID NO: 163975 - DNA, 15 bp, Homo sapiens
ctactcccttctccc

SEQ ID NO: 163976 - DNA, 15 bp, Homo sapiens
cctactcccttctcc

SEQ ID NO: 163977 - DNA, 15 bp, Homo sapiens
gcctactcccttctc

SEQ ID NO: 163978 - DNA, 15 bp, Homo sapiens
agcctactcccttct

SEQ ID NO: 163979 - DNA, 15 bp, Homo sapiens
tagcctactcccttc

SEQ ID NO: 163980 - DNA, 15 bp, Homo sapiens
atagcctactccctt

SEQ ID NO: 163981 - DNA, 15 bp, Homo sapiens
tatagcctactccct

SEQ ID NO: 163982 - DNA, 15 bp, Homo sapiens
atatagcctactccc

SEQ ID NO: 163983 - DNA, 15 bp, Homo sapiens
catatagcctactcc

SEQ ID NO: 163984 - DNA, 15 bp, Homo sapiens
tcatatagcctactc

SEQ ID NO: 163985 - DNA, 15 bp, Homo sapiens
ttcatatagcctact

SEQ ID NO: 163986 - DNA, 15 bp, Homo sapiens
gttcatatagcctac

SEQ ID NO: 163987 - DNA, 15 bp, Homo sapiens
ggttcatatagccta

SEQ ID NO: 163988 - DNA, 15 bp, Homo sapiens
gggttcatatagcct

SEQ ID NO: 163989 - DNA, 15 bp, Homo sapiens
ggggttcatatagcc

SEQ ID NO: 163990 - DNA, 15 bp, Homo sapiens
gggggttcatatagc

SEQ ID NO: 163991 - DNA, 15 bp, Homo sapiens
tgggggttcatatag

SEQ ID NO: 163992 - DNA, 15 bp, Homo sapiens
ctgggggttcatata

SEQ ID NO: 163993 - DNA, 15 bp, Homo sapiens
actgggggttcatat

SEQ ID NO: 163994 - DNA, 15 bp, Homo sapiens
aactgggggttcata

SEQ ID NO: 163995 - DNA, 15 bp, Homo sapiens
gaactgggggttcat

SEQ ID NO: 163996 - DNA, 15 bp, Homo sapiens
ggaactgggggttca

SEQ ID NO: 163997 - DNA, 15 bp, Homo sapiens
gggaactgggggttc

SEQ ID NO: 163998 - DNA, 15 bp, Homo sapiens
tgggaactgggggtt

SEQ ID NO: 163999 - DNA, 15 bp, Homo sapiens
ctgggaactgggggt

SEQ ID NO: 164000 - DNA, 15 bp, Homo sapiens
cctgggaactggggg

SEQ ID NO: 164001 - DNA, 15 bp, Homo sapiens
acctgggaactgggg

SEQ ID NO: 164002 - DNA, 15 bp, Homo sapiens
tacctgggaactggg

SEQ ID NO: 164003 - DNA, 15 bp, Homo sapiens
atacctgggaactgg

SEQ ID NO: 164004 - DNA, 15 bp, Homo sapiens
catacctgggaactg

SEQ ID NO: 164005 - DNA, 15 bp, Homo sapiens
acatacctgggaact

SEQ ID NO: 164006 - DNA, 15 bp, Homo sapiens
cacatacctgggaac

SEQ ID NO: 164007 - DNA, 15 bp, Homo sapiens
acacatacctgggaa

SEQ ID NO: 164008 - DNA, 15 bp, Homo sapiens
cacacatacctggga

SEQ ID NO: 164009 - DNA, 15 bp, Homo sapiens
tcacacatacctggg

SEQ ID NO: 164010 - DNA, 15 bp, Homo sapiens
ctcacacatacctgg

SEQ ID NO: 164011 - DNA, 15 bp, Homo sapiens
actcacacatacctg

SEQ ID NO: 164012 - DNA, 15 bp, Homo sapiens
cactcacacatacct

SEQ ID NO: 164013 - DNA, 15 bp, Homo sapiens
tcactcacacatacc

SEQ ID NO: 164014 - DNA, 15 bp, Homo sapiens
gtcactcacacatac

SEQ ID NO: 164015 - DNA, 15 bp, Homo sapiens
ggtcactcacacata

SEQ ID NO: 164016 - DNA, 15 bp, Homo sapiens
gggtcactcacacat

SEQ ID NO: 164017 - DNA, 15 bp, Homo sapiens
agggtcactcacaca

SEQ ID NO: 164018 - DNA, 15 bp, Homo sapiens
cagggtcactcacac

SEQ ID NO: 164019 - DNA, 15 bp, Homo sapiens
acagggtcactcaca

SEQ ID NO: 164020 - DNA, 15 bp, Homo sapiens
cacagggtcactcac

SEQ ID NO: 164021 - DNA, 15 bp, Homo sapiens
acacagggtcactca

SEQ ID NO: 164022 - DNA, 15 bp, Homo sapiens
cacacagggtcactc

SEQ ID NO: 164023 - DNA, 15 bp, Homo sapiens
acacacagggtcact

SEQ ID NO: 164024 - DNA, 15 bp, Homo sapiens
tacacacagggtcac

SEQ ID NO: 164025 - DNA, 15 bp, Homo sapiens
ttacacacagggtca

SEQ ID NO: 164026 - DNA, 15 bp, Homo sapiens
gttacacacagggtc

SEQ ID NO: 164027 - DNA, 15 bp, Homo sapiens
tgttacacacagggt

SEQ ID NO: 164028 - DNA, 15 bp, Homo sapiens
ctgttacacacaggg

SEQ ID NO: 164029 - DNA, 15 bp, Homo sapiens
actgttacacacagg

SEQ ID NO: 164030 - DNA, 15 bp, Homo sapiens
gactgttacacacag

SEQ ID NO: 164031 - DNA, 15 bp, Homo sapiens
agactgttacacaca

SEQ ID NO: 164032 - DNA, 15 bp, Homo sapiens
cagactgttacacac

SEQ ID NO: 164033 - DNA, 15 bp, Homo sapiens
acagactgttacaca

SEQ ID NO: 164034 - DNA, 15 bp, Homo sapiens
cacagactgttacac

SEQ ID NO: 164035 - DNA, 15 bp, Homo sapiens
acacagactgttaca

SEQ ID NO: 164036 - DNA, 15 bp, Homo sapiens
cacacagactgttac

SEQ ID NO: 164037 - DNA, 15 bp, Homo sapiens
ccacacagactgtta

SEQ ID NO: 164038 - DNA, 15 bp, Homo sapiens
cccacacagactgtt

SEQ ID NO: 164039 - DNA, 15 bp, Homo sapiens
tcccacacagactgt

SEQ ID NO: 164040 - DNA, 15 bp, Homo sapiens
ttcccacacagactg

SEQ ID NO: 164041 - DNA, 15 bp, Homo sapiens
attcccacacagact

SEQ ID NO: 164042 - DNA, 15 bp, Homo sapiens
cattcccacacagac

SEQ ID NO: 164043 - DNA, 15 bp, Homo sapiens
tcattcccacacaga

SEQ ID NO: 164044 - DNA, 15 bp, Homo sapiens
ctcattcccacacag

SEQ ID NO: 164045 - DNA, 15 bp, Homo sapiens
actcattcccacaca

SEQ ID NO: 164046 - DNA, 15 bp, Homo sapiens
gactcattcccacac

SEQ ID NO: 164047 - DNA, 15 bp, Homo sapiens
ggactcattcccaca

SEQ ID NO: 164048 - DNA, 15 bp, Homo sapiens
gggactcattcccac

SEQ ID NO: 164049 - DNA, 15 bp, Homo sapiens
agggactcattccca

SEQ ID NO: 164050 - DNA, 15 bp, Homo sapiens
cagggactcattccc

SEQ ID NO: 164051 - DNA, 15 bp, Homo sapiens
acagggactcattcc

SEQ ID NO: 164052 - DNA, 15 bp, Homo sapiens
cacagggactcattc

SEQ ID NO: 164053 - DNA, 15 bp, Homo sapiens
acacagggactcatt

SEQ ID NO: 164054 - DNA, 15 bp, Homo sapiens
cacacagggactcat

SEQ ID NO: 164055 - DNA, 15 bp, Homo sapiens
acacacagggactca

SEQ ID NO: 164056 - DNA, 15 bp, Homo sapiens
cacacacagggactc

SEQ ID NO: 164057 - DNA, 15 bp, Homo sapiens
gcacacacagggact

SEQ ID NO: 164058 - DNA, 15 bp, Homo sapiens
tgcacacacagggac

SEQ ID NO: 164059 - DNA, 15 bp, Homo sapiens
ttgcacacacaggga

SEQ ID NO: 164060 - DNA, 15 bp, Homo sapiens
gttgcacacacaggg

SEQ ID NO: 164061 - DNA, 15 bp, Homo sapiens
tgttgcacacacagg

SEQ ID NO: 164062 - DNA, 15 bp, Homo sapiens
atgttgcacacacag

SEQ ID NO: 164063 - DNA, 15 bp, Homo sapiens
gatgttgcacacaca

SEQ ID NO: 164064 - DNA, 15 bp, Homo sapiens
agatgttgcacacac

SEQ ID NO: 164065 - DNA, 15 bp, Homo sapiens
gagatgttgcacaca

SEQ ID NO: 164066 - DNA, 15 bp, Homo sapiens
tgagatgttgcacac

SEQ ID NO: 164067 - DNA, 15 bp, Homo sapiens
ctgagatgttgcaca

SEQ ID NO: 164068 - DNA, 15 bp, Homo sapiens
gctgagatgttgcac

SEQ ID NO: 164069 - DNA, 15 bp, Homo sapiens
tgctgagatgttgca

SEQ ID NO: 164070 - DNA, 15 bp, Homo sapiens
atgctgagatgttgc

SEQ ID NO: 164071 - DNA, 15 bp, Homo sapiens
catgctgagatgttg

SEQ ID NO: 164072 - DNA, 15 bp, Homo sapiens
gcatgctgagatgtt

SEQ ID NO: 164073 - DNA, 15 bp, Homo sapiens
tgcatgctgagatgt

SEQ ID NO: 164074 - DNA, 15 bp, Homo sapiens
ttgcatgctgagatg

SEQ ID NO: 164075 - DNA, 15 bp, Homo sapiens
gttgcatgctgagat

SEQ ID NO: 164076 - DNA, 15 bp, Homo sapiens
agttgcatgctgaga

SEQ ID NO: 164077 - DNA, 15 bp, Homo sapiens
cagttgcatgctgag

SEQ ID NO: 164078 - DNA, 15 bp, Homo sapiens
acagttgcatgctga

SEQ ID NO: 164079 - DNA, 15 bp, Homo sapiens
tacagttgcatgctg

SEQ ID NO: 164080 - DNA, 15 bp, Homo sapiens
gtacagttgcatgct

SEQ ID NO: 164081 - DNA, 15 bp, Homo sapiens
tgtacagttgcatgc

SEQ ID NO: 164082 - DNA, 15 bp, Homo sapiens
atgtacagttgcatg

SEQ ID NO: 164083 - DNA, 15 bp, Homo sapiens
gatgtacagttgcat

SEQ ID NO: 164084 - DNA, 15 bp, Homo sapiens
agatgtacagttgca

SEQ ID NO: 164085 - DNA, 15 bp, Homo sapiens
cagatgtacagttgc

SEQ ID NO: 164086 - DNA, 15 bp, Homo sapiens
tcagatgtacagttg

SEQ ID NO: 164087 - DNA, 15 bp, Homo sapiens
gtcagatgtacagtt

SEQ ID NO: 164088 - DNA, 15 bp, Homo sapiens
tgtcagatgtacagt

SEQ ID NO: 164089 - DNA, 15 bp, Homo sapiens
ctgtcagatgtacag

SEQ ID NO: 164090 - DNA, 15 bp, Homo sapiens
actgtcagatgtaca

SEQ ID NO: 164091 - DNA, 15 bp, Homo sapiens
cactgtcagatgtac

SEQ ID NO: 164092 - DNA, 15 bp, Homo sapiens
acactgtcagatgta

SEQ ID NO: 164093 - DNA, 15 bp, Homo sapiens
gacactgtcagatgt

SEQ ID NO: 164094 - DNA, 15 bp, Homo sapiens
agacactgtcagatg

SEQ ID NO: 164095 - DNA, 15 bp, Homo sapiens
tagacactgtcagat

SEQ ID NO: 164096 - DNA, 15 bp, Homo sapiens
atagacactgtcaga

SEQ ID NO: 164097 - DNA, 15 bp, Homo sapiens
catagacactgtcag

SEQ ID NO: 164098 - DNA, 15 bp, Homo sapiens
acatagacactgtca

SEQ ID NO: 164099 - DNA, 15 bp, Homo sapiens
aacatagacactgtc

SEQ ID NO: 164100 - DNA, 15 bp, Homo sapiens
aaacatagacactgt

SEQ ID NO: 164101 - DNA, 15 bp, Homo sapiens
aaaacatagacactg

SEQ ID NO: 164102 - DNA, 15 bp, Homo sapiens
aaaaacatagacact

SEQ ID NO: 164103 - DNA, 15 bp, Homo sapiens
caaaaacatagacac

SEQ ID NO: 164104 - DNA, 15 bp, Homo sapiens
acaaaaacatagaca

SEQ ID NO: 164105 - DNA, 15 bp, Homo sapiens
cacaaaaacatagac

SEQ ID NO: 164106 - DNA, 15 bp, Homo sapiens
tcacaaaaacataga

SEQ ID NO: 164107 - DNA, 15 bp, Homo sapiens
gtcacaaaaacatag

SEQ ID NO: 164108 - DNA, 15 bp, Homo sapiens
ggtcacaaaaacata

SEQ ID NO: 164109 - DNA, 15 bp, Homo sapiens
gggtcacaaaaacat

SEQ ID NO: 164110 - DNA, 15 bp, Homo sapiens
agggtcacaaaaaca

SEQ ID NO: 164111 - DNA, 15 bp, Homo sapiens
cagggtcacaaaaac

SEQ ID NO: 164112 - DNA, 15 bp, Homo sapiens
gcagggtcacaaaaa

SEQ ID NO: 164113 - DNA, 15 bp, Homo sapiens
tgcagggtcacaaaa

SEQ ID NO: 164114 - DNA, 15 bp, Homo sapiens
atgcagggtcacaaa

SEQ ID NO: 164115 - DNA, 15 bp, Homo sapiens
tatgcagggtcacaa

SEQ ID NO: 164116 - DNA, 15 bp, Homo sapiens
atatgcagggtcaca

SEQ ID NO: 164117 - DNA, 15 bp, Homo sapiens
catatgcagggtcac

SEQ ID NO: 164118 - DNA, 15 bp, Homo sapiens
tcatatgcagggtca

SEQ ID NO: 164119 - DNA, 15 bp, Homo sapiens
atcatatgcagggtc

SEQ ID NO: 164120 - DNA, 15 bp, Homo sapiens
tatcatatgcagggt

SEQ ID NO: 164121 - DNA, 15 bp, Homo sapiens
gtatcatatgcaggg

SEQ ID NO: 164122 - DNA, 15 bp, Homo sapiens
agtatcatatgcagg

SEQ ID NO: 164123 - DNA, 15 bp, Homo sapiens
cagtatcatatgcag

SEQ ID NO: 164124 - DNA, 15 bp, Homo sapiens
acagtatcatatgca

SEQ ID NO: 164125 - DNA, 15 bp, Homo sapiens
cacagtatcatatgc

SEQ ID NO: 164126 - DNA, 15 bp, Homo sapiens
acacagtatcatatg

SEQ ID NO: 164127 - DNA, 15 bp, Homo sapiens
gacacagtatcatat

SEQ ID NO: 164128 - DNA, 15 bp, Homo sapiens
agacacagtatcata

SEQ ID NO: 164129 - DNA, 15 bp, Homo sapiens
cagacacagtatcat

SEQ ID NO: 164130 - DNA, 15 bp, Homo sapiens
acagacacagtatca

SEQ ID NO: 164131 - DNA, 15 bp, Homo sapiens
cacagacacagtatc

SEQ ID NO: 164132 - DNA, 15 bp, Homo sapiens
ccacagacacagtat

SEQ ID NO: 164133 - DNA, 15 bp, Homo sapiens
cccacagacacagta

SEQ ID NO: 164134 - DNA, 15 bp, Homo sapiens
tcccacagacacagt

SEQ ID NO: 164135 - DNA, 15 bp, Homo sapiens
ctcccacagacacag

SEQ ID NO: 164136 - DNA, 15 bp, Homo sapiens
cctcccacagacaca

SEQ ID NO: 164137 - DNA, 15 bp, Homo sapiens
ccctcccacagacac

SEQ ID NO: 164138 - DNA, 15 bp, Homo sapiens
accctcccacagaca

SEQ ID NO: 164139 - DNA, 15 bp, Homo sapiens
gaccctcccacagac

SEQ ID NO: 164140 - DNA, 15 bp, Homo sapiens
agaccctcccacaga

SEQ ID NO: 164141 - DNA, 15 bp, Homo sapiens
cagaccctcccacag

SEQ ID NO: 164142 - DNA, 15 bp, Homo sapiens
acagaccctcccaca

SEQ ID NO: 164143 - DNA, 15 bp, Homo sapiens
cacagaccctcccac

SEQ ID NO: 164144 - DNA, 15 bp, Homo sapiens
acacagaccctccca

SEQ ID NO: 164145 - DNA, 15 bp, Homo sapiens
cacacagaccctccc

SEQ ID NO: 164146 - DNA, 15 bp, Homo sapiens
acacacagaccctcc

SEQ ID NO: 164147 - DNA, 15 bp, Homo sapiens
cacacacagaccctc

SEQ ID NO: 164148 - DNA, 15 bp, Homo sapiens
acacacacagaccct

SEQ ID NO: 164149 - DNA, 15 bp, Homo sapiens
cacacacacagaccc

SEQ ID NO: 164150 - DNA, 15 bp, Homo sapiens
acacacacacagacc

SEQ ID NO: 164151 - DNA, 15 bp, Homo sapiens
cacacacacacagac

SEQ ID NO: 164152 - DNA, 15 bp, Homo sapiens
acacacacacacaga

SEQ ID NO: 164153 - DNA, 15 bp, Homo sapiens
cacacacacacacag

SEQ ID NO: 164154 - DNA, 15 bp, Homo sapiens
ccacacacacacaca

SEQ ID NO: 164155 - DNA, 15 bp, Homo sapiens
cccacacacacacac

SEQ ID NO: 164156 - DNA, 15 bp, Homo sapiens
ccccacacacacaca

SEQ ID NO: 164157 - DNA, 15 bp, Homo sapiens
cccccacacacacac

SEQ ID NO: 164158 - DNA, 15 bp, Homo sapiens
ccccccacacacaca

SEQ ID NO: 164159 - DNA, 15 bp, Homo sapiens
cccccccacacacac

SEQ ID NO: 164160 - DNA, 15 bp, Homo sapiens
ccccccccacacaca

SEQ ID NO: 164161 - DNA, 15 bp, Homo sapiens
cccccccccacacac

SEQ ID NO: 164162 - DNA, 15 bp, Homo sapiens
ccccccccccacaca

SEQ ID NO: 164163 - DNA, 15 bp, Homo sapiens
cccccccccccacac

SEQ ID NO: 164164 - DNA, 15 bp, Homo sapiens
gcccccccccccaca

SEQ ID NO: 164165 - DNA, 15 bp, Homo sapiens
tgcccccccccccac

SEQ ID NO: 164166 - DNA, 15 bp, Homo sapiens
atgccccccccccca

SEQ ID NO: 164167 - DNA, 15 bp, Homo sapiens
gatgccccccccccc

SEQ ID NO: 164168 - DNA, 15 bp, Homo sapiens
agatgcccccccccc

SEQ ID NO: 164169 - DNA, 15 bp, Homo sapiens
aagatgccccccccc

SEQ ID NO: 164170 - DNA, 15 bp, Homo sapiens
caagatgcccccccc

SEQ ID NO: 164171 - DNA, 15 bp, Homo sapiens
ccaagatgccccccc

SEQ ID NO: 164172 - DNA, 15 bp, Homo sapiens
accaagatgcccccc

SEQ ID NO: 164173 - DNA, 15 bp, Homo sapiens
caccaagatgccccc

SEQ ID NO: 164174 - DNA, 15 bp, Homo sapiens
acaccaagatgcccc

SEQ ID NO: 164175 - DNA, 15 bp, Homo sapiens
cacaccaagatgccc

SEQ ID NO: 164176 - DNA, 15 bp, Homo sapiens
acacaccaagatgcc

SEQ ID NO: 164177 - DNA, 15 bp, Homo sapiens
cacacaccaagatgc

SEQ ID NO: 164178 - DNA, 15 bp, Homo sapiens
tcacacaccaagatg

SEQ ID NO: 164179 - DNA, 15 bp, Homo sapiens
ttcacacaccaagat

SEQ ID NO: 164180 - DNA, 15 bp, Homo sapiens
attcacacaccaaga

SEQ ID NO: 164181 - DNA, 15 bp, Homo sapiens
cattcacacaccaag

SEQ ID NO: 164182 - DNA, 15 bp, Homo sapiens
ccattcacacaccaa

SEQ ID NO: 164183 - DNA, 15 bp, Homo sapiens
cccattcacacacca

SEQ ID NO: 164184 - DNA, 15 bp, Homo sapiens
acccattcacacacc

SEQ ID NO: 164185 - DNA, 15 bp, Homo sapiens
cacccattcacacac

SEQ ID NO: 164186 - DNA, 15 bp, Homo sapiens
acacccattcacaca

SEQ ID NO: 164187 - DNA, 15 bp, Homo sapiens
gacacccattcacac

SEQ ID NO: 164188 - DNA, 15 bp, Homo sapiens
tgacacccattcaca

SEQ ID NO: 164189 - DNA, 15 bp, Homo sapiens
ttgacacccattcac

SEQ ID NO: 164190 - DNA, 15 bp, Homo sapiens
gttgacacccattca

SEQ ID NO: 164191 - DNA, 15 bp, Homo sapiens
agttgacacccattc

SEQ ID NO: 164192 - DNA, 15 bp, Homo sapiens
tagttgacacccatt

SEQ ID NO: 164193 - DNA, 15 bp, Homo sapiens
ctagttgacacccat

SEQ ID NO: 164194 - DNA, 15 bp, Homo sapiens
actagttgacaccca

SEQ ID NO: 164195 - DNA, 15 bp, Homo sapiens
cactagttgacaccc

SEQ ID NO: 164196 - DNA, 15 bp, Homo sapiens
acactagttgacacc

SEQ ID NO: 164197 - DNA, 15 bp, Homo sapiens
cacactagttgacac

SEQ ID NO: 164198 - DNA, 15 bp, Homo sapiens
acacactagttgaca

SEQ ID NO: 164199 - DNA, 15 bp, Homo sapiens
cacacactagttgac

SEQ ID NO: 164200 - DNA, 15 bp, Homo sapiens
acacacactagttga

SEQ ID NO: 164201 - DNA, 15 bp, Homo sapiens
gacacacactagttg

SEQ ID NO: 164202 - DNA, 15 bp, Homo sapiens
agacacacactagtt

SEQ ID NO: 164203 - DNA, 15 bp, Homo sapiens
tagacacacactagt

SEQ ID NO: 164204 - DNA, 15 bp, Homo sapiens
atagacacacactag

SEQ ID NO: 164205 - DNA, 15 bp, Homo sapiens
tatagacacacacta

SEQ ID NO: 164206 - DNA, 15 bp, Homo sapiens
atatagacacacact

SEQ ID NO: 164207 - DNA, 15 bp, Homo sapiens
catatagacacacac

SEQ ID NO: 164208 - DNA, 15 bp, Homo sapiens
acatatagacacaca

SEQ ID NO: 164209 - DNA, 15 bp, Homo sapiens
cacatatagacacac

SEQ ID NO: 164210 - DNA, 15 bp, Homo sapiens
gcacatatagacaca

SEQ ID NO: 164211 - DNA, 15 bp, Homo sapiens
tgcacatatagacac

SEQ ID NO: 164212 - DNA, 15 bp, Homo sapiens
ctgcacatatagaca

SEQ ID NO: 164213 - DNA, 15 bp, Homo sapiens
cctgcacatatagac

SEQ ID NO: 164214 - DNA, 15 bp, Homo sapiens
tcctgcacatataga

SEQ ID NO: 164215 - DNA, 15 bp, Homo sapiens
ctcctgcacatatag

SEQ ID NO: 164216 - DNA, 15 bp, Homo sapiens
tctcctgcacatata

SEQ ID NO: 164217 - DNA, 15 bp, Homo sapiens
ctctcctgcacatat

SEQ ID NO: 164218 - DNA, 15 bp, Homo sapiens
tctctcctgcacata

SEQ ID NO: 164219 - DNA, 15 bp, Homo sapiens
atctctcctgcacat

SEQ ID NO: 164220 - DNA, 15 bp, Homo sapiens
tatctctcctgcaca

SEQ ID NO: 164221 - DNA, 15 bp, Homo sapiens
ctatctctcctgcac

SEQ ID NO: 164222 - DNA, 15 bp, Homo sapiens
actatctctcctgca

SEQ ID NO: 164223 - DNA, 15 bp, Homo sapiens
cactatctctcctgc

SEQ ID NO: 164224 - DNA, 15 bp, Homo sapiens
acactatctctcctg

SEQ ID NO: 164225 - DNA, 15 bp, Homo sapiens
cacactatctctcct

SEQ ID NO: 164226 - DNA, 15 bp, Homo sapiens
gcacactatctctcc

SEQ ID NO: 164227 - DNA, 15 bp, Homo sapiens
tgcacactatctctc

SEQ ID NO: 164228 - DNA, 15 bp, Homo sapiens
atgcacactatctct

SEQ ID NO: 164229 - DNA, 15 bp, Homo sapiens
catgcacactatctc

SEQ ID NO: 164230 - DNA, 15 bp, Homo sapiens
acatgcacactatct

SEQ ID NO: 164231 - DNA, 15 bp, Homo sapiens
cacatgcacactatc

SEQ ID NO: 164232 - DNA, 15 bp, Homo sapiens
tcacatgcacactat

SEQ ID NO: 164233 - DNA, 15 bp, Homo sapiens
ctcacatgcacacta

SEQ ID NO: 164234 - DNA, 15 bp, Homo sapiens
tctcacatgcacact

SEQ ID NO: 164235 - DNA, 15 bp, Homo sapiens
ctctcacatgcacac

SEQ ID NO: 164236 - DNA, 15 bp, Homo sapiens
actctcacatgcaca

SEQ ID NO: 164237 - DNA, 15 bp, Homo sapiens
cactctcacatgcac

SEQ ID NO: 164238 - DNA, 15 bp, Homo sapiens
acactctcacatgca

SEQ ID NO: 164239 - DNA, 15 bp, Homo sapiens
gacactctcacatgc

SEQ ID NO: 164240 - DNA, 15 bp, Homo sapiens
agacactctcacatg

SEQ ID NO: 164241 - DNA, 15 bp, Homo sapiens
cagacactctcacat

SEQ ID NO: 164242 - DNA, 15 bp, Homo sapiens
acagacactctcaca

SEQ ID NO: 164243 - DNA, 15 bp, Homo sapiens
cacagacactctcac

SEQ ID NO: 164244 - DNA, 15 bp, Homo sapiens
acacagacactctca

SEQ ID NO: 164245 - DNA, 15 bp, Homo sapiens
cacacagacactctc

SEQ ID NO: 164246 - DNA, 15 bp, Homo sapiens
acacacagacactct

SEQ ID NO: 164247 - DNA, 15 bp, Homo sapiens
aacacacagacactc

SEQ ID NO: 164248 - DNA, 15 bp, Homo sapiens
gaacacacagacact

SEQ ID NO: 164249 - DNA, 15 bp, Homo sapiens
ggaacacacagacac

SEQ ID NO: 164250 - DNA, 15 bp, Homo sapiens
aggaacacacagaca

SEQ ID NO: 164251 - DNA, 15 bp, Homo sapiens
gaggaacacacagac

SEQ ID NO: 164252 - DNA, 15 bp, Homo sapiens
agaggaacacacaga

SEQ ID NO: 164253 - DNA, 15 bp, Homo sapiens
cagaggaacacacag

SEQ ID NO: 164254 - DNA, 15 bp, Homo sapiens
acagaggaacacaca

SEQ ID NO: 164255 - DNA, 15 bp, Homo sapiens
cacagaggaacacac

SEQ ID NO: 164256 - DNA, 15 bp, Homo sapiens
acacagaggaacaca

SEQ ID NO: 164257 - DNA, 15 bp, Homo sapiens
cacacagaggaacac

SEQ ID NO: 164258 - DNA, 15 bp, Homo sapiens
acacacagaggaaca

SEQ ID NO: 164259 - DNA, 15 bp, Homo sapiens
cacacacagaggaac

SEQ ID NO: 164260 - DNA, 15 bp, Homo sapiens
acacacacagaggaa

SEQ ID NO: 164261 - DNA, 15 bp, Homo sapiens
cacacacacagagga

SEQ ID NO: 164262 - DNA, 15 bp, Homo sapiens
acacacacacagagg

SEQ ID NO: 164263 - DNA, 15 bp, Homo sapiens
cacacacacacagag

SEQ ID NO: 164264 - DNA, 15 bp, Homo sapiens
aacacacacacacag

SEQ ID NO: 164265 - DNA, 15 bp, Homo sapiens
caacacacacacaca

SEQ ID NO: 164266 - DNA, 15 bp, Homo sapiens
ccaacacacacacac

SEQ ID NO: 164267 - DNA, 15 bp, Homo sapiens
cccaacacacacaca

SEQ ID NO: 164268 - DNA, 15 bp, Homo sapiens
ccccaacacacacac

SEQ ID NO: 164269 - DNA, 15 bp, Homo sapiens
tccccaacacacaca

SEQ ID NO: 164270 - DNA, 15 bp, Homo sapiens
gtccccaacacacac

SEQ ID NO: 164271 - DNA, 15 bp, Homo sapiens
tgtccccaacacaca

SEQ ID NO: 164272 - DNA, 15 bp, Homo sapiens
ctgtccccaacacac

SEQ ID NO: 164273 - DNA, 15 bp, Homo sapiens
actgtccccaacaca

SEQ ID NO: 164274 - DNA, 15 bp, Homo sapiens
cactgtccccaacac

SEQ ID NO: 164275 - DNA, 15 bp, Homo sapiens
acactgtccccaaca

SEQ ID NO: 164276 - DNA, 15 bp, Homo sapiens
gacactgtccccaac

SEQ ID NO: 164277 - DNA, 15 bp, Homo sapiens
agacactgtccccaa

SEQ ID NO: 164278 - DNA, 15 bp, Homo sapiens
gagacactgtcccca

SEQ ID NO: 164279 - DNA, 15 bp, Homo sapiens
tgagacactgtcccc

SEQ ID NO: 164280 - DNA, 15 bp, Homo sapiens
ctgagacactgtccc

SEQ ID NO: 164281 - DNA, 15 bp, Homo sapiens
gctgagacactgtcc

SEQ ID NO: 164282 - DNA, 15 bp, Homo sapiens
tgctgagacactgtc

SEQ ID NO: 164283 - DNA, 15 bp, Homo sapiens
atgctgagacactgt

SEQ ID NO: 164284 - DNA, 15 bp, Homo sapiens
catgctgagacactg

SEQ ID NO: 164285 - DNA, 15 bp, Homo sapiens
gcatgctgagacact

SEQ ID NO: 164286 - DNA, 15 bp, Homo sapiens
cgcatgctgagacac

SEQ ID NO: 164287 - DNA, 15 bp, Homo sapiens
tcgcatgctgagaca

SEQ ID NO: 164288 - DNA, 15 bp, Homo sapiens
gtcgcatgctgagac

SEQ ID NO: 164289 - DNA, 15 bp, Homo sapiens
agtcgcatgctgaga

SEQ ID NO: 164290 - DNA, 15 bp, Homo sapiens
cagtcgcatgctgag

SEQ ID NO: 164291 - DNA, 15 bp, Homo sapiens
acagtcgcatgctga

SEQ ID NO: 164292 - DNA, 15 bp, Homo sapiens
cacagtcgcatgctg

SEQ ID NO: 164293 - DNA, 15 bp, Homo sapiens
acacagtcgcatgct

SEQ ID NO: 164294 - DNA, 15 bp, Homo sapiens
tacacagtcgcatgc

SEQ ID NO: 164295 - DNA, 15 bp, Homo sapiens
gtacacagtcgcatg

SEQ ID NO: 164296 - DNA, 15 bp, Homo sapiens
ggtacacagtcgcat

SEQ ID NO: 164297 - DNA, 15 bp, Homo sapiens
aggtacacagtcgca

SEQ ID NO: 164298 - DNA, 15 bp, Homo sapiens
caggtacacagtcgc

SEQ ID NO: 164299 - DNA, 15 bp, Homo sapiens
ccaggtacacagtcg

SEQ ID NO: 164300 - DNA, 15 bp, Homo sapiens
gccaggtacacagtc

SEQ ID NO: 164301 - DNA, 15 bp, Homo sapiens
tgccaggtacacagt

SEQ ID NO: 164302 - DNA, 15 bp, Homo sapiens
ctgccaggtacacag

SEQ ID NO: 164303 - DNA, 15 bp, Homo sapiens
actgccaggtacaca

SEQ ID NO: 164304 - DNA, 15 bp, Homo sapiens
gactgccaggtacac

SEQ ID NO: 164305 - DNA, 15 bp, Homo sapiens
agactgccaggtaca

SEQ ID NO: 164306 - DNA, 15 bp, Homo sapiens
cagactgccaggtac

SEQ ID NO: 164307 - DNA, 15 bp, Homo sapiens
acagactgccaggta

SEQ ID NO: 164308 - DNA, 15 bp, Homo sapiens
cacagactgccaggt

SEQ ID NO: 164309 - DNA, 15 bp, Homo sapiens
tcacagactgccagg

SEQ ID NO: 164310 - DNA, 15 bp, Homo sapiens
ctcacagactgccag

SEQ ID NO: 164311 - DNA, 15 bp, Homo sapiens
actcacagactgcca

SEQ ID NO: 164312 - DNA, 15 bp, Homo sapiens
cactcacagactgcc

SEQ ID NO: 164313 - DNA, 15 bp, Homo sapiens
tcactcacagactgc

SEQ ID NO: 164314 - DNA, 15 bp, Homo sapiens
atcactcacagactg

SEQ ID NO: 164315 - DNA, 15 bp, Homo sapiens
aatcactcacagact

SEQ ID NO: 164316 - DNA, 15 bp, Homo sapiens
caatcactcacagac

SEQ ID NO: 164317 - DNA, 15 bp, Homo sapiens
acaatcactcacaga

SEQ ID NO: 164318 - DNA, 15 bp, Homo sapiens
cacaatcactcacag

SEQ ID NO: 164319 - DNA, 15 bp, Homo sapiens
acacaatcactcaca

SEQ ID NO: 164320 - DNA, 15 bp, Homo sapiens
cacacaatcactcac

SEQ ID NO: 164321 - DNA, 15 bp, Homo sapiens
acacacaatcactca

SEQ ID NO: 164322 - DNA, 15 bp, Homo sapiens
cacacacaatcactc

SEQ ID NO: 164323 - DNA, 15 bp, Homo sapiens
ccacacacaatcact

SEQ ID NO: 164324 - DNA, 15 bp, Homo sapiens
accacacacaatcac

SEQ ID NO: 164325 - DNA, 15 bp, Homo sapiens
caccacacacaatca

SEQ ID NO: 164326 - DNA, 15 bp, Homo sapiens
ccaccacacacaatc

SEQ ID NO: 164327 - DNA, 15 bp, Homo sapiens
cccaccacacacaat

SEQ ID NO: 164328 - DNA, 15 bp, Homo sapiens
tcccaccacacacaa

SEQ ID NO: 164329 - DNA, 15 bp, Homo sapiens
ctcccaccacacaca

SEQ ID NO: 164330 - DNA, 15 bp, Homo sapiens
tctcccaccacacac

SEQ ID NO: 164331 - DNA, 15 bp, Homo sapiens
ctctcccaccacaca

SEQ ID NO: 164332 - DNA, 15 bp, Homo sapiens
tctctcccaccacac

SEQ ID NO: 164333 - DNA, 15 bp, Homo sapiens
ctctctcccaccaca

SEQ ID NO: 164334 - DNA, 15 bp, Homo sapiens
actctctcccaccac

SEQ ID NO: 164335 - DNA, 15 bp, Homo sapiens
gactctctcccacca

SEQ ID NO: 164336 - DNA, 15 bp, Homo sapiens
agactctctcccacc

SEQ ID NO: 164337 - DNA, 15 bp, Homo sapiens
cagactctctcccac

SEQ ID NO: 164338 - DNA, 15 bp, Homo sapiens
acagactctctccca

SEQ ID NO: 164339 - DNA, 15 bp, Homo sapiens
cacagactctctccc

SEQ ID NO: 164340 - DNA, 15 bp, Homo sapiens
acacagactctctcc

SEQ ID NO: 164341 - DNA, 15 bp, Homo sapiens
gacacagactctctc

SEQ ID NO: 164342 - DNA, 15 bp, Homo sapiens
tgacacagactctct

SEQ ID NO: 164343 - DNA, 15 bp, Homo sapiens
ctgacacagactctc

SEQ ID NO: 164344 - DNA, 15 bp, Homo sapiens
actgacacagactct

SEQ ID NO: 164345 - DNA, 15 bp, Homo sapiens
cactgacacagactc

SEQ ID NO: 164346 - DNA, 15 bp, Homo sapiens
acactgacacagact

SEQ ID NO: 164347 - DNA, 15 bp, Homo sapiens
gacactgacacagac

SEQ ID NO: 164348 - DNA, 15 bp, Homo sapiens
agacactgacacaga

SEQ ID NO: 164349 - DNA, 15 bp, Homo sapiens
gagacactgacacag

SEQ ID NO: 164350 - DNA, 15 bp, Homo sapiens
tgagacactgacaca

SEQ ID NO: 164351 - DNA, 15 bp, Homo sapiens
ctgagacactgacac

SEQ ID NO: 164352 - DNA, 15 bp, Homo sapiens
actgagacactgaca

SEQ ID NO: 164353 - DNA, 15 bp, Homo sapiens
tactgagacactgac

SEQ ID NO: 164354 - DNA, 15 bp, Homo sapiens
atactgagacactga

SEQ ID NO: 164355 - DNA, 15 bp, Homo sapiens
aatactgagacactg

SEQ ID NO: 164356 - DNA, 15 bp, Homo sapiens
caatactgagacact

SEQ ID NO: 164357 - DNA, 15 bp, Homo sapiens
ccaatactgagacac

SEQ ID NO: 164358 - DNA, 15 bp, Homo sapiens
cccaatactgagaca

SEQ ID NO: 164359 - DNA, 15 bp, Homo sapiens
tcccaatactgagac

SEQ ID NO: 164360 - DNA, 15 bp, Homo sapiens
ttcccaatactgaga

SEQ ID NO: 164361 - DNA, 15 bp, Homo sapiens
attcccaatactgag

SEQ ID NO: 164362 - DNA, 15 bp, Homo sapiens
cattcccaatactga

SEQ ID NO: 164363 - DNA, 15 bp, Homo sapiens
acattcccaatactg

SEQ ID NO: 164364 - DNA, 15 bp, Homo sapiens
cacattcccaatact

SEQ ID NO: 164365 - DNA, 15 bp, Homo sapiens
gcacattcccaatac

SEQ ID NO: 164366 - DNA, 15 bp, Homo sapiens
agcacattcccaata

SEQ ID NO: 164367 - DNA, 15 bp, Homo sapiens
aagcacattcccaat

SEQ ID NO: 164368 - DNA, 15 bp, Homo sapiens
caagcacattcccaa

SEQ ID NO: 164369 - DNA, 15 bp, Homo sapiens
ccaagcacattccca

SEQ ID NO: 164370 - DNA, 15 bp, Homo sapiens
cccaagcacattccc

SEQ ID NO: 164371 - DNA, 15 bp, Homo sapiens
ccccaagcacattcc

SEQ ID NO: 164372 - DNA, 15 bp, Homo sapiens
cccccaagcacattc

SEQ ID NO: 164373 - DNA, 15 bp, Homo sapiens
gcccccaagcacatt

SEQ ID NO: 164374 - DNA, 15 bp, Homo sapiens
cgcccccaagcacat

SEQ ID NO: 164375 - DNA, 15 bp, Homo sapiens
acgcccccaagcaca

SEQ ID NO: 164376 - DNA, 15 bp, Homo sapiens
cacgcccccaagcac

SEQ ID NO: 164377 - DNA, 15 bp, Homo sapiens
acacgcccccaagca

SEQ ID NO: 164378 - DNA, 15 bp, Homo sapiens
cacacgcccccaagc

SEQ ID NO: 164379 - DNA, 15 bp, Homo sapiens
acacacgcccccaag

SEQ ID NO: 164380 - DNA, 15 bp, Homo sapiens
cacacacgcccccaa

SEQ ID NO: 164381 - DNA, 15 bp, Homo sapiens
tcacacacgccccca

SEQ ID NO: 164382 - DNA, 15 bp, Homo sapiens
atcacacacgccccc

SEQ ID NO: 164383 - DNA, 15 bp, Homo sapiens
catcacacacgcccc

SEQ ID NO: 164384 - DNA, 15 bp, Homo sapiens
tcatcacacacgccc

SEQ ID NO: 164385 - DNA, 15 bp, Homo sapiens
atcatcacacacgcc

SEQ ID NO: 164386 - DNA, 15 bp, Homo sapiens
catcatcacacacgc

SEQ ID NO: 164387 - DNA, 15 bp, Homo sapiens
gcatcatcacacacg

SEQ ID NO: 164388 - DNA, 15 bp, Homo sapiens
cgcatcatcacacac

SEQ ID NO: 164389 - DNA, 15 bp, Homo sapiens
acgcatcatcacaca

SEQ ID NO: 164390 - DNA, 15 bp, Homo sapiens
cacgcatcatcacac

SEQ ID NO: 164391 - DNA, 15 bp, Homo sapiens
acacgcatcatcaca

SEQ ID NO: 164392 - DNA, 15 bp, Homo sapiens
cacacgcatcatcac

SEQ ID NO: 164393 - DNA, 15 bp, Homo sapiens
tcacacgcatcatca

SEQ ID NO: 164394 - DNA, 15 bp, Homo sapiens
gtcacacgcatcatc

SEQ ID NO: 164395 - DNA, 15 bp, Homo sapiens
ggtcacacgcatcat

SEQ ID NO: 164396 - DNA, 15 bp, Homo sapiens
cggtcacacgcatca

SEQ ID NO: 164397 - DNA, 15 bp, Homo sapiens
acggtcacacgcatc

SEQ ID NO: 164398 - DNA, 15 bp, Homo sapiens
cacggtcacacgcat

SEQ ID NO: 164399 - DNA, 15 bp, Homo sapiens
acacggtcacacgca

SEQ ID NO: 164400 - DNA, 15 bp, Homo sapiens
cacacggtcacacgc

SEQ ID NO: 164401 - DNA, 15 bp, Homo sapiens
acacacggtcacacg

SEQ ID NO: 164402 - DNA, 15 bp, Homo sapiens
gacacacggtcacac

SEQ ID NO: 164403 - DNA, 15 bp, Homo sapiens
ggacacacggtcaca

SEQ ID NO: 164404 - DNA, 15 bp, Homo sapiens
tggacacacggtcac

SEQ ID NO: 164405 - DNA, 15 bp, Homo sapiens
gtggacacacggtca

SEQ ID NO: 164406 - DNA, 15 bp, Homo sapiens
cgtggacacacggtc

SEQ ID NO: 164407 - DNA, 15 bp, Homo sapiens
acgtggacacacggt

SEQ ID NO: 164408 - DNA, 15 bp, Homo sapiens
cacgtggacacacgg

SEQ ID NO: 164409 - DNA, 15 bp, Homo sapiens
ccacgtggacacacg

SEQ ID NO: 164410 - DNA, 15 bp, Homo sapiens
cccacgtggacacac

SEQ ID NO: 164411 - DNA, 15 bp, Homo sapiens
ccccacgtggacaca

SEQ ID NO: 164412 - DNA, 15 bp, Homo sapiens
cccccacgtggacac

SEQ ID NO: 164413 - DNA, 15 bp, Homo sapiens
acccccacgtggaca

SEQ ID NO: 164414 - DNA, 15 bp, Homo sapiens
aacccccacgtggac

SEQ ID NO: 164415 - DNA, 15 bp, Homo sapiens
aaacccccacgtgga

SEQ ID NO: 164416 - DNA, 15 bp, Homo sapiens
aaaacccccacgtgg

SEQ ID NO: 164417 - DNA, 15 bp, Homo sapiens
aaaaacccccacgtg

SEQ ID NO: 164418 - DNA, 15 bp, Homo sapiens
caaaaacccccacgt

SEQ ID NO: 164419 - DNA, 15 bp, Homo sapiens
acaaaaacccccacg

SEQ ID NO: 164420 - DNA, 15 bp, Homo sapiens
cacaaaaacccccac

SEQ ID NO: 164421 - DNA, 15 bp, Homo sapiens
tcacaaaaaccccca

SEQ ID NO: 164422 - DNA, 15 bp, Homo sapiens
gtcacaaaaaccccc

SEQ ID NO: 164423 - DNA, 15 bp, Homo sapiens
agtcacaaaaacccc

SEQ ID NO: 164424 - DNA, 15 bp, Homo sapiens
cagtcacaaaaaccc

SEQ ID NO: 164425 - DNA, 15 bp, Homo sapiens
acagtcacaaaaacc

SEQ ID NO: 164426 - DNA, 15 bp, Homo sapiens
tacagtcacaaaaac

SEQ ID NO: 164427 - DNA, 15 bp, Homo sapiens
ttacagtcacaaaaa

SEQ ID NO: 164428 - DNA, 15 bp, Homo sapiens
cttacagtcacaaaa

SEQ ID NO: 164429 - DNA, 15 bp, Homo sapiens
tcttacagtcacaaa

SEQ ID NO: 164430 - DNA, 15 bp, Homo sapiens
ttcttacagtcacaa

SEQ ID NO: 164431 - DNA, 15 bp, Homo sapiens
gttcttacagtcaca

SEQ ID NO: 164432 - DNA, 15 bp, Homo sapiens
tgttcttacagtcac

SEQ ID NO: 164433 - DNA, 15 bp, Homo sapiens
atgttcttacagtca

SEQ ID NO: 164434 - DNA, 15 bp, Homo sapiens
catgttcttacagtc

SEQ ID NO: 164435 - DNA, 15 bp, Homo sapiens
acatgttcttacagt

SEQ ID NO: 164436 - DNA, 15 bp, Homo sapiens
cacatgttcttacag

SEQ ID NO: 164437 - DNA, 15 bp, Homo sapiens
acacatgttcttaca

SEQ ID NO: 164438 - DNA, 15 bp, Homo sapiens
cacacatgttcttac

SEQ ID NO: 164439 - DNA, 15 bp, Homo sapiens
acacacatgttctta

SEQ ID NO: 164440 - DNA, 15 bp, Homo sapiens
tacacacatgttctt

SEQ ID NO: 164441 - DNA, 15 bp, Homo sapiens
ctacacacatgttct

SEQ ID NO: 164442 - DNA, 15 bp, Homo sapiens
actacacacatgttc

SEQ ID NO: 164443 - DNA, 15 bp, Homo sapiens
tactacacacatgtt

SEQ ID NO: 164444 - DNA, 15 bp, Homo sapiens
atactacacacatgt

SEQ ID NO: 164445 - DNA, 15 bp, Homo sapiens
aatactacacacatg

SEQ ID NO: 164446 - DNA, 15 bp, Homo sapiens
gaatactacacacat

SEQ ID NO: 164447 - DNA, 15 bp, Homo sapiens
ggaatactacacaca

SEQ ID NO: 164448 - DNA, 15 bp, Homo sapiens
aggaatactacacac

SEQ ID NO: 164449 - DNA, 15 bp, Homo sapiens
aaggaatactacaca

SEQ ID NO: 164450 - DNA, 15 bp, Homo sapiens
aaaggaatactacac

SEQ ID NO: 164451 - DNA, 15 bp, Homo sapiens
aaaaggaatactaca

SEQ ID NO: 164452 - DNA, 15 bp, Homo sapiens
gaaaaggaatactac

SEQ ID NO: 164453 - DNA, 15 bp, Homo sapiens
ggaaaaggaatacta

SEQ ID NO: 164454 - DNA, 15 bp, Homo sapiens
aggaaaaggaatact

SEQ ID NO: 164455 - DNA, 15 bp, Homo sapiens
caggaaaaggaatac

SEQ ID NO: 164456 - DNA, 15 bp, Homo sapiens
acaggaaaaggaata

SEQ ID NO: 164457 - DNA, 15 bp, Homo sapiens
gacaggaaaaggaat

SEQ ID NO: 164458 - DNA, 15 bp, Homo sapiens
ggacaggaaaaggaa

SEQ ID NO: 164459 - DNA, 15 bp, Homo sapiens
aggacaggaaaagga

SEQ ID NO: 164460 - DNA, 15 bp, Homo sapiens
aaggacaggaaaagg

SEQ ID NO: 164461 - DNA, 15 bp, Homo sapiens
aaaggacaggaaaag

SEQ ID NO: 164462 - DNA, 15 bp, Homo sapiens
gaaaggacaggaaaa

SEQ ID NO: 164463 - DNA, 15 bp, Homo sapiens
cgaaaggacaggaaa

SEQ ID NO: 164464 - DNA, 15 bp, Homo sapiens
acgaaaggacaggaa

SEQ ID NO: 164465 - DNA, 15 bp, Homo sapiens
aacgaaaggacagga

SEQ ID NO: 164466 - DNA, 15 bp, Homo sapiens
gaacgaaaggacagg

SEQ ID NO: 164467 - DNA, 15 bp, Homo sapiens
tgaacgaaaggacag

SEQ ID NO: 164468 - DNA, 15 bp, Homo sapiens
ctgaacgaaaggaca

SEQ ID NO: 164469 - DNA, 15 bp, Homo sapiens
tctgaacgaaaggac

SEQ ID NO: 164470 - DNA, 15 bp, Homo sapiens
atctgaacgaaagga

SEQ ID NO: 164471 - DNA, 15 bp, Homo sapiens
tatctgaacgaaagg

SEQ ID NO: 164472 - DNA, 15 bp, Homo sapiens
atatctgaacgaaag

SEQ ID NO: 164473 - DNA, 15 bp, Homo sapiens
gatatctgaacgaaa

SEQ ID NO: 164474 - DNA, 15 bp, Homo sapiens
agatatctgaacgaa

SEQ ID NO: 164475 - DNA, 15 bp, Homo sapiens
tagatatctgaacga

SEQ ID NO: 164476 - DNA, 15 bp, Homo sapiens
ttagatatctgaacg

SEQ ID NO: 164477 - DNA, 15 bp, Homo sapiens
tttagatatctgaac

SEQ ID NO: 164478 - DNA, 15 bp, Homo sapiens
ctttagatatctgaa

SEQ ID NO: 164479 - DNA, 15 bp, Homo sapiens
gctttagatatctga

SEQ ID NO: 164480 - DNA, 15 bp, Homo sapiens
ggctttagatatctg

SEQ ID NO: 164481 - DNA, 15 bp, Homo sapiens
gggctttagatatct

SEQ ID NO: 164482 - DNA, 15 bp, Homo sapiens
agggctttagatatc

SEQ ID NO: 164483 - DNA, 15 bp, Homo sapiens
aagggctttagatat

SEQ ID NO: 164484 - DNA, 15 bp, Homo sapiens
taagggctttagata

SEQ ID NO: 164485 - DNA, 15 bp, Homo sapiens
ctaagggctttagat

SEQ ID NO: 164486 - DNA, 15 bp, Homo sapiens
cctaagggctttaga

SEQ ID NO: 164487 - DNA, 15 bp, Homo sapiens
ccctaagggctttag

SEQ ID NO: 164488 - DNA, 15 bp, Homo sapiens
tccctaagggcttta

SEQ ID NO: 164489 - DNA, 15 bp, Homo sapiens
ttccctaagggcttt

SEQ ID NO: 164490 - DNA, 15 bp, Homo sapiens
tttccctaagggctt

SEQ ID NO: 164491 - DNA, 15 bp, Homo sapiens
ttttccctaagggct

SEQ ID NO: 164492 - DNA, 15 bp, Homo sapiens
tttttccctaagggc

SEQ ID NO: 164493 - DNA, 15 bp, Homo sapiens
ttttttccctaaggg

SEQ ID NO: 164494 - DNA, 15 bp, Homo sapiens
tttttttccctaagg

SEQ ID NO: 164495 - DNA, 15 bp, Homo sapiens
ttttttttccctaag

SEQ ID NO: 164496 - DNA, 15 bp, Homo sapiens
attttttttccctaa

SEQ ID NO: 164497 - DNA, 15 bp, Homo sapiens
cattttttttcccta

SEQ ID NO: 164498 - DNA, 15 bp, Homo sapiens
ccattttttttccct

SEQ ID NO: 164499 - DNA, 15 bp, Homo sapiens
tccattttttttccc

SEQ ID NO: 164500 - DNA, 15 bp, Homo sapiens
atccattttttttcc

SEQ ID NO: 164501 - DNA, 15 bp, Homo sapiens
aatccattttttttc

SEQ ID NO: 164502 - DNA, 15 bp, Homo sapiens
caatccatttttttt

SEQ ID NO: 164503 - DNA, 15 bp, Homo sapiens
acaatccattttttt

SEQ ID NO: 164504 - DNA, 15 bp, Homo sapiens
tacaatccatttttt

SEQ ID NO: 164505 - DNA, 15 bp, Homo sapiens
ttacaatccattttt

SEQ ID NO: 164506 - DNA, 15 bp, Homo sapiens
cttacaatccatttt

SEQ ID NO: 164507 - DNA, 15 bp, Homo sapiens
gcttacaatccattt

SEQ ID NO: 164508 - DNA, 15 bp, Homo sapiens
agcttacaatccatt

SEQ ID NO: 164509 - DNA, 15 bp, Homo sapiens
gagcttacaatccat

SEQ ID NO: 164510 - DNA, 15 bp, Homo sapiens
agagcttacaatcca

SEQ ID NO: 164511 - DNA, 15 bp, Homo sapiens
cagagcttacaatcc

SEQ ID NO: 164512 - DNA, 15 bp, Homo sapiens
tcagagcttacaatc

SEQ ID NO: 164513 - DNA, 15 bp, Homo sapiens
ctcagagcttacaat

SEQ ID NO: 164514 - DNA, 15 bp, Homo sapiens
gctcagagcttacaa

SEQ ID NO: 164515 - DNA, 15 bp, Homo sapiens
agctcagagcttaca

SEQ ID NO: 164516 - DNA, 15 bp, Homo sapiens
aagctcagagcttac

SEQ ID NO: 164517 - DNA, 15 bp, Homo sapiens
aaagctcagagctta

SEQ ID NO: 164518 - DNA, 15 bp, Homo sapiens
aaaagctcagagctt

SEQ ID NO: 164519 - DNA, 15 bp, Homo sapiens
caaaagctcagagct

SEQ ID NO: 164520 - DNA, 15 bp, Homo sapiens
tcaaaagctcagagc

SEQ ID NO: 164521 - DNA, 15 bp, Homo sapiens
ttcaaaagctcagag

SEQ ID NO: 164522 - DNA, 15 bp, Homo sapiens
tttcaaaagctcaga

SEQ ID NO: 164523 - DNA, 15 bp, Homo sapiens
ttttcaaaagctcag

SEQ ID NO: 164524 - DNA, 15 bp, Homo sapiens
tttttcaaaagctca

SEQ ID NO: 164525 - DNA, 15 bp, Homo sapiens
ttttttcaaaagctc

SEQ ID NO: 164526 - DNA, 15 bp, Homo sapiens
tttttttcaaaagct

SEQ ID NO: 164527 - DNA, 15 bp, Homo sapiens
ttttttttcaaaagc

SEQ ID NO: 164528 - DNA, 15 bp, Homo sapiens
cttttttttcaaaag

SEQ ID NO: 164529 - DNA, 15 bp, Homo sapiens
tcttttttttcaaaa

SEQ ID NO: 164530 - DNA, 15 bp, Homo sapiens
ttcttttttttcaaa

SEQ ID NO: 164531 - DNA, 15 bp, Homo sapiens
tttcttttttttcaa

SEQ ID NO: 164532 - DNA, 15 bp, Homo sapiens
ctttcttttttttca

SEQ ID NO: 164533 - DNA, 15 bp, Homo sapiens
tctttcttttttttc

SEQ ID NO: 164534 - DNA, 15 bp, Homo sapiens
ttctttctttttttt

SEQ ID NO: 164535 - DNA, 15 bp, Homo sapiens
tttctttcttttttt

SEQ ID NO: 164536 - DNA, 15 bp, Homo sapiens
ctttctttctttttt

SEQ ID NO: 164537 - DNA, 15 bp, Homo sapiens
tctttctttcttttt

SEQ ID NO: 164538 - DNA, 15 bp, Homo sapiens
ttctttctttctttt

SEQ ID NO: 164539 - DNA, 15 bp, Homo sapiens
tttctttctttcttt

SEQ ID NO: 164540 - DNA, 15 bp, Homo sapiens
ctttctttctttctt

SEQ ID NO: 164541 - DNA, 15 bp, Homo sapiens
tctttctttctttct

SEQ ID NO: 164542 - DNA, 15 bp, Homo sapiens
ttctttctttctttc

SEQ ID NO: 164543 - DNA, 15 bp, Homo sapiens
ttttctttctttctt

SEQ ID NO: 164544 - DNA, 15 bp, Homo sapiens
tttttctttctttct

SEQ ID NO: 164545 - DNA, 15 bp, Homo sapiens
gtttttctttctttc

SEQ ID NO: 164546 - DNA, 15 bp, Homo sapiens
tgtttttctttcttt

SEQ ID NO: 164547 - DNA, 15 bp, Homo sapiens
ttgtttttctttctt

SEQ ID NO: 164548 - DNA, 15 bp, Homo sapiens
cttgtttttctttct

SEQ ID NO: 164549 - DNA, 15 bp, Homo sapiens
ccttgtttttctttc

SEQ ID NO: 164550 - DNA, 15 bp, Homo sapiens
cccttgtttttcttt

SEQ ID NO: 164551 - DNA, 15 bp, Homo sapiens
ccccttgtttttctt

SEQ ID NO: 164552 - DNA, 15 bp, Homo sapiens
gccccttgtttttct

SEQ ID NO: 164553 - DNA, 15 bp, Homo sapiens
cgccccttgtttttc

SEQ ID NO: 164554 - DNA, 15 bp, Homo sapiens
ccgccccttgttttt

SEQ ID NO: 164555 - DNA, 15 bp, Homo sapiens
accgccccttgtttt

SEQ ID NO: 164556 - DNA, 15 bp, Homo sapiens
gaccgccccttgttt

SEQ ID NO: 164557 - DNA, 15 bp, Homo sapiens
tgaccgccccttgtt

SEQ ID NO: 164558 - DNA, 15 bp, Homo sapiens
ttgaccgccccttgt

SEQ ID NO: 164559 - DNA, 15 bp, Homo sapiens
tttgaccgccccttg

SEQ ID NO: 164560 - DNA, 15 bp, Homo sapiens
ctttgaccgcccctt

SEQ ID NO: 164561 - DNA, 15 bp, Homo sapiens
tctttgaccgcccct

SEQ ID NO: 164562 - DNA, 15 bp, Homo sapiens
ctctttgaccgcccc

SEQ ID NO: 164563 - DNA, 15 bp, Homo sapiens
tctctttgaccgccc

SEQ ID NO: 164564 - DNA, 15 bp, Homo sapiens
gtctctttgaccgcc

SEQ ID NO: 164565 - DNA, 15 bp, Homo sapiens
tgtctctttgaccgc

SEQ ID NO: 164566 - DNA, 15 bp, Homo sapiens
ctgtctctttgaccg

SEQ ID NO: 164567 - DNA, 15 bp, Homo sapiens
cctgtctctttgacc

SEQ ID NO: 164568 - DNA, 15 bp, Homo sapiens
ccctgtctctttgac

SEQ ID NO: 164569 - DNA, 15 bp, Homo sapiens
cccctgtctctttga

SEQ ID NO: 164570 - DNA, 15 bp, Homo sapiens
acccctgtctctttg

SEQ ID NO: 164571 - DNA, 15 bp, Homo sapiens
gacccctgtctcttt

SEQ ID NO: 164572 - DNA, 15 bp, Homo sapiens
agacccctgtctctt

SEQ ID NO: 164573 - DNA, 15 bp, Homo sapiens
cagacccctgtctct

SEQ ID NO: 164574 - DNA, 15 bp, Homo sapiens
acagacccctgtctc

SEQ ID NO: 164575 - DNA, 15 bp, Homo sapiens
aacagacccctgtct

SEQ ID NO: 164576 - DNA, 15 bp, Homo sapiens
caacagacccctgtc

SEQ ID NO: 164577 - DNA, 15 bp, Homo sapiens
tcaacagacccctgt

SEQ ID NO: 164578 - DNA, 15 bp, Homo sapiens
atcaacagacccctg

SEQ ID NO: 164579 - DNA, 15 bp, Homo sapiens
catcaacagacccct

SEQ ID NO: 164580 - DNA, 15 bp, Homo sapiens
ccatcaacagacccc

SEQ ID NO: 164581 - DNA, 15 bp, Homo sapiens
tccatcaacagaccc

SEQ ID NO: 164582 - DNA, 15 bp, Homo sapiens
ttccatcaacagacc

SEQ ID NO: 164583 - DNA, 15 bp, Homo sapiens
cttccatcaacagac

SEQ ID NO: 164584 - DNA, 15 bp, Homo sapiens
ccttccatcaacaga

SEQ ID NO: 164585 - DNA, 15 bp, Homo sapiens
cccttccatcaacag

SEQ ID NO: 164586 - DNA, 15 bp, Homo sapiens
ccccttccatcaaca

SEQ ID NO: 164587 - DNA, 15 bp, Homo sapiens
accccttccatcaac

SEQ ID NO: 164588 - DNA, 15 bp, Homo sapiens
caccccttccatcaa

SEQ ID NO: 164589 - DNA, 15 bp, Homo sapiens
tcaccccttccatca

SEQ ID NO: 164590 - DNA, 15 bp, Homo sapiens
atcaccccttccatc

SEQ ID NO: 164591 - DNA, 15 bp, Homo sapiens
aatcaccccttccat

SEQ ID NO: 164592 - DNA, 15 bp, Homo sapiens
aaatcaccccttcca

SEQ ID NO: 164593 - DNA, 15 bp, Homo sapiens
caaatcaccccttcc

SEQ ID NO: 164594 - DNA, 15 bp, Homo sapiens
tcaaatcaccccttc

SEQ ID NO: 164595 - DNA, 15 bp, Homo sapiens
gtcaaatcacccctt

SEQ ID NO: 164596 - DNA, 15 bp, Homo sapiens
agtcaaatcacccct

SEQ ID NO: 164597 - DNA, 15 bp, Homo sapiens
aagtcaaatcacccc

SEQ ID NO: 164598 - DNA, 15 bp, Homo sapiens
gaagtcaaatcaccc

SEQ ID NO: 164599 - DNA, 15 bp, Homo sapiens
agaagtcaaatcacc

SEQ ID NO: 164600 - DNA, 15 bp, Homo sapiens
cagaagtcaaatcac

SEQ ID NO: 164601 - DNA, 15 bp, Homo sapiens
ccagaagtcaaatca

SEQ ID NO: 164602 - DNA, 15 bp, Homo sapiens
cccagaagtcaaatc

SEQ ID NO: 164603 - DNA, 15 bp, Homo sapiens
tcccagaagtcaaat

SEQ ID NO: 164604 - DNA, 15 bp, Homo sapiens
ctcccagaagtcaaa

SEQ ID NO: 164605 - DNA, 15 bp, Homo sapiens
cctcccagaagtcaa

SEQ ID NO: 164606 - DNA, 15 bp, Homo sapiens
acctcccagaagtca

SEQ ID NO: 164607 - DNA, 15 bp, Homo sapiens
cacctcccagaagtc

SEQ ID NO: 164608 - DNA, 15 bp, Homo sapiens
tcacctcccagaagt

SEQ ID NO: 164609 - DNA, 15 bp, Homo sapiens
gtcacctcccagaag

SEQ ID NO: 164610 - DNA, 15 bp, Homo sapiens
tgtcacctcccagaa

SEQ ID NO: 164611 - DNA, 15 bp, Homo sapiens
gtgtcacctcccaga

SEQ ID NO: 164612 - DNA, 15 bp, Homo sapiens
tgtgtcacctcccag

SEQ ID NO: 164613 - DNA, 15 bp, Homo sapiens
ctgtgtcacctccca

SEQ ID NO: 164614 - DNA, 15 bp, Homo sapiens
tctgtgtcacctccc

SEQ ID NO: 164615 - DNA, 15 bp, Homo sapiens
ctctgtgtcacctcc

SEQ ID NO: 164616 - DNA, 15 bp, Homo sapiens
cctctgtgtcacctc

SEQ ID NO: 164617 - DNA, 15 bp, Homo sapiens
tcctctgtgtcacct

SEQ ID NO: 164618 - DNA, 15 bp, Homo sapiens
ttcctctgtgtcacc

SEQ ID NO: 164619 - DNA, 15 bp, Homo sapiens
cttcctctgtgtcac

SEQ ID NO: 164620 - DNA, 15 bp, Homo sapiens
ccttcctctgtgtca

SEQ ID NO: 164621 - DNA, 15 bp, Homo sapiens
tccttcctctgtgtc

SEQ ID NO: 164622 - DNA, 15 bp, Homo sapiens
ctccttcctctgtgt

SEQ ID NO: 164623 - DNA, 15 bp, Homo sapiens
cctccttcctctgtg

SEQ ID NO: 164624 - DNA, 15 bp, Homo sapiens
acctccttcctctgt

SEQ ID NO: 164625 - DNA, 15 bp, Homo sapiens
aacctccttcctctg

SEQ ID NO: 164626 - DNA, 15 bp, Homo sapiens
caacctccttcctct

SEQ ID NO: 164627 - DNA, 15 bp, Homo sapiens
ccaacctccttcctc

SEQ ID NO: 164628 - DNA, 15 bp, Homo sapiens
cccaacctccttcct

SEQ ID NO: 164629 - DNA, 15 bp, Homo sapiens
ccccaacctccttcc

SEQ ID NO: 164630 - DNA, 15 bp, Homo sapiens
accccaacctccttc

SEQ ID NO: 164631 - DNA, 15 bp, Homo sapiens
gaccccaacctcctt

SEQ ID NO: 164632 - DNA, 15 bp, Homo sapiens
ggaccccaacctcct

SEQ ID NO: 164633 - DNA, 15 bp, Homo sapiens
aggaccccaacctcc

SEQ ID NO: 164634 - DNA, 15 bp, Homo sapiens
caggaccccaacctc

SEQ ID NO: 164635 - DNA, 15 bp, Homo sapiens
ccaggaccccaacct

SEQ ID NO: 164636 - DNA, 15 bp, Homo sapiens
cccaggaccccaacc

SEQ ID NO: 164637 - DNA, 15 bp, Homo sapiens
tcccaggaccccaac

SEQ ID NO: 164638 - DNA, 15 bp, Homo sapiens
ctcccaggaccccaa

SEQ ID NO: 164639 - DNA, 15 bp, Homo sapiens
cctcccaggacccca

SEQ ID NO: 164640 - DNA, 15 bp, Homo sapiens
tcctcccaggacccc

SEQ ID NO: 164641 - DNA, 15 bp, Homo sapiens
ctcctcccaggaccc

SEQ ID NO: 164642 - DNA, 15 bp, Homo sapiens
tctcctcccaggacc

SEQ ID NO: 164643 - DNA, 15 bp, Homo sapiens
atctcctcccaggac

SEQ ID NO: 164644 - DNA, 15 bp, Homo sapiens
catctcctcccagga

SEQ ID NO: 164645 - DNA, 15 bp, Homo sapiens
gcatctcctcccagg

SEQ ID NO: 164646 - DNA, 15 bp, Homo sapiens
ggcatctcctcccag

SEQ ID NO: 164647 - DNA, 15 bp, Homo sapiens
tggcatctcctccca

SEQ ID NO: 164648 - DNA, 15 bp, Homo sapiens
ctggcatctcctccc

SEQ ID NO: 164649 - DNA, 15 bp, Homo sapiens
cctggcatctcctcc

SEQ ID NO: 164650 - DNA, 15 bp, Homo sapiens
ccctggcatctcctc

SEQ ID NO: 164651 - DNA, 15 bp, Homo sapiens
tccctggcatctcct

SEQ ID NO: 164652 - DNA, 15 bp, Homo sapiens
ttccctggcatctcc

SEQ ID NO: 164653 - DNA, 15 bp, Homo sapiens
gttccctggcatctc

SEQ ID NO: 164654 - DNA, 15 bp, Homo sapiens
ggttccctggcatct

SEQ ID NO: 164655 - DNA, 15 bp, Homo sapiens
aggttccctggcatc

SEQ ID NO: 164656 - DNA, 15 bp, Homo sapiens
caggttccctggcat

SEQ ID NO: 164657 - DNA, 15 bp, Homo sapiens
tcaggttccctggca

SEQ ID NO: 164658 - DNA, 15 bp, Homo sapiens
ttcaggttccctggc

SEQ ID NO: 164659 - DNA, 15 bp, Homo sapiens
cttcaggttccctgg

SEQ ID NO: 164660 - DNA, 15 bp, Homo sapiens
ccttcaggttccctg

SEQ ID NO: 164661 - DNA, 15 bp, Homo sapiens
cccttcaggttccct

SEQ ID NO: 164662 - DNA, 15 bp, Homo sapiens
gcccttcaggttccc

SEQ ID NO: 164663 - DNA, 15 bp, Homo sapiens
agcccttcaggttcc

SEQ ID NO: 164664 - DNA, 15 bp, Homo sapiens
cagcccttcaggttc

SEQ ID NO: 164665 - DNA, 15 bp, Homo sapiens
ccagcccttcaggtt

SEQ ID NO: 164666 - DNA, 15 bp, Homo sapiens
tccagcccttcaggt

SEQ ID NO: 164667 - DNA, 15 bp, Homo sapiens
gtccagcccttcagg

SEQ ID NO: 164668 - DNA, 15 bp, Homo sapiens
agtccagcccttcag

SEQ ID NO: 164669 - DNA, 15 bp, Homo sapiens
aagtccagcccttca

SEQ ID NO: 164670 - DNA, 15 bp, Homo sapiens
taagtccagcccttc

SEQ ID NO: 164671 - DNA, 15 bp, Homo sapiens
ctaagtccagccctt

SEQ ID NO: 164672 - DNA, 15 bp, Homo sapiens
actaagtccagccct

SEQ ID NO: 164673 - DNA, 15 bp, Homo sapiens
aactaagtccagccc

SEQ ID NO: 164674 - DNA, 15 bp, Homo sapiens
caactaagtccagcc

SEQ ID NO: 164675 - DNA, 15 bp, Homo sapiens
ccaactaagtccagc

SEQ ID NO: 164676 - DNA, 15 bp, Homo sapiens
cccaactaagtccag

SEQ ID NO: 164677 - DNA, 15 bp, Homo sapiens
ccccaactaagtcca

SEQ ID NO: 164678 - DNA, 15 bp, Homo sapiens
cccccaactaagtcc

SEQ ID NO: 164679 - DNA, 15 bp, Homo sapiens
tcccccaactaagtc

SEQ ID NO: 164680 - DNA, 15 bp, Homo sapiens
gtcccccaactaagt

SEQ ID NO: 164681 - DNA, 15 bp, Homo sapiens
agtcccccaactaag

SEQ ID NO: 164682 - DNA, 15 bp, Homo sapiens
gagtcccccaactaa

SEQ ID NO: 164683 - DNA, 15 bp, Homo sapiens
ggagtcccccaacta

SEQ ID NO: 164684 - DNA, 15 bp, Homo sapiens
tggagtcccccaact

SEQ ID NO: 164685 - DNA, 15 bp, Homo sapiens
ctggagtcccccaac

SEQ ID NO: 164686 - DNA, 15 bp, Homo sapiens
tctggagtcccccaa

SEQ ID NO: 164687 - DNA, 15 bp, Homo sapiens
ttctggagtccccca

SEQ ID NO: 164688 - DNA, 15 bp, Homo sapiens
tttctggagtccccc

SEQ ID NO: 164689 - DNA, 15 bp, Homo sapiens
atttctggagtcccc

SEQ ID NO: 164690 - DNA, 15 bp, Homo sapiens
aatttctggagtccc

SEQ ID NO: 164691 - DNA, 15 bp, Homo sapiens
aaatttctggagtcc

SEQ ID NO: 164692 - DNA, 15 bp, Homo sapiens
caaatttctggagtc

SEQ ID NO: 164693 - DNA, 15 bp, Homo sapiens
tcaaatttctggagt

SEQ ID NO: 164694 - DNA, 15 bp, Homo sapiens
ctcaaatttctggag

SEQ ID NO: 164695 - DNA, 15 bp, Homo sapiens
actcaaatttctgga

SEQ ID NO: 164696 - DNA, 15 bp, Homo sapiens
aactcaaatttctgg

SEQ ID NO: 164697 - DNA, 15 bp, Homo sapiens
caactcaaatttctg

SEQ ID NO: 164698 - DNA, 15 bp, Homo sapiens
ccaactcaaatttct

SEQ ID NO: 164699 - DNA, 15 bp, Homo sapiens
tccaactcaaatttc

SEQ ID NO: 164700 - DNA, 15 bp, Homo sapiens
ttccaactcaaattt

SEQ ID NO: 164701 - DNA, 15 bp, Homo sapiens
attccaactcaaatt

SEQ ID NO: 164702 - DNA, 15 bp, Homo sapiens
gattccaactcaaat

SEQ ID NO: 164703 - DNA, 15 bp, Homo sapiens
ggattccaactcaaa

SEQ ID NO: 164704 - DNA, 15 bp, Homo sapiens
gggattccaactcaa

SEQ ID NO: 164705 - DNA, 15 bp, Homo sapiens
agggattccaactca

SEQ ID NO: 164706 - DNA, 15 bp, Homo sapiens
gagggattccaactc

SEQ ID NO: 164707 - DNA, 15 bp, Homo sapiens
ggagggattccaact

SEQ ID NO: 164708 - DNA, 15 bp, Homo sapiens
aggagggattccaac

SEQ ID NO: 164709 - DNA, 15 bp, Homo sapiens
aaggagggattccaa

SEQ ID NO: 164710 - DNA, 15 bp, Homo sapiens
gaaggagggattcca

SEQ ID NO: 164711 - DNA, 15 bp, Homo sapiens
ggaaggagggattcc

SEQ ID NO: 164712 - DNA, 15 bp, Homo sapiens
aggaaggagggattc

SEQ ID NO: 164713 - DNA, 15 bp, Homo sapiens
gaggaaggagggatt

SEQ ID NO: 164714 - DNA, 15 bp, Homo sapiens
ggaggaaggagggat

SEQ ID NO: 164715 - DNA, 15 bp, Homo sapiens
aggaggaaggaggga

SEQ ID NO: 164716 - DNA, 15 bp, Homo sapiens
aaggaggaaggaggg

SEQ ID NO: 164717 - DNA, 15 bp, Homo sapiens
gaaggaggaaggagg

SEQ ID NO: 164718 - DNA, 15 bp, Homo sapiens
agaaggaggaaggag

SEQ ID NO: 164719 - DNA, 15 bp, Homo sapiens
cagaaggaggaagga

SEQ ID NO: 164720 - DNA, 15 bp, Homo sapiens
tcagaaggaggaagg

SEQ ID NO: 164721 - DNA, 15 bp, Homo sapiens
ctcagaaggaggaag

SEQ ID NO: 164722 - DNA, 15 bp, Homo sapiens
tctcagaaggaggaa

SEQ ID NO: 164723 - DNA, 15 bp, Homo sapiens
ctctcagaaggagga

SEQ ID NO: 164724 - DNA, 15 bp, Homo sapiens
cctctcagaaggagg

SEQ ID NO: 164725 - DNA, 15 bp, Homo sapiens
gcctctcagaaggag

SEQ ID NO: 164726 - DNA, 15 bp, Homo sapiens
ggcctctcagaagga

SEQ ID NO: 164727 - DNA, 15 bp, Homo sapiens
aggcctctcagaagg

SEQ ID NO: 164728 - DNA, 15 bp, Homo sapiens
aaggcctctcagaag

SEQ ID NO: 164729 - DNA, 15 bp, Homo sapiens
gaaggcctctcagaa

SEQ ID NO: 164730 - DNA, 15 bp, Homo sapiens
ggaaggcctctcaga

SEQ ID NO: 164731 - DNA, 15 bp, Homo sapiens
aggaaggcctctcag

SEQ ID NO: 164732 - DNA, 15 bp, Homo sapiens
caggaaggcctctca

SEQ ID NO: 164733 - DNA, 15 bp, Homo sapiens
gcaggaaggcctctc

SEQ ID NO: 164734 - DNA, 15 bp, Homo sapiens
tgcaggaaggcctct

SEQ ID NO: 164735 - DNA, 15 bp, Homo sapiens
atgcaggaaggcctc

SEQ ID NO: 164736 - DNA, 15 bp, Homo sapiens
catgcaggaaggcct

SEQ ID NO: 164737 - DNA, 15 bp, Homo sapiens
acatgcaggaaggcc

SEQ ID NO: 164738 - DNA, 15 bp, Homo sapiens
gacatgcaggaaggc

SEQ ID NO: 164739 - DNA, 15 bp, Homo sapiens
agacatgcaggaagg

SEQ ID NO: 164740 - DNA, 15 bp, Homo sapiens
gagacatgcaggaag

SEQ ID NO: 164741 - DNA, 15 bp, Homo sapiens
ggagacatgcaggaa

SEQ ID NO: 164742 - DNA, 15 bp, Homo sapiens
gggagacatgcagga

SEQ ID NO: 164743 - DNA, 15 bp, Homo sapiens
tgggagacatgcagg

SEQ ID NO: 164744 - DNA, 15 bp, Homo sapiens
gtgggagacatgcag

SEQ ID NO: 164745 - DNA, 15 bp, Homo sapiens
ggtgggagacatgca

SEQ ID NO: 164746 - DNA, 15 bp, Homo sapiens
aggtgggagacatgc

SEQ ID NO: 164747 - DNA, 15 bp, Homo sapiens
gaggtgggagacatg

SEQ ID NO: 164748 - DNA, 15 bp, Homo sapiens
agaggtgggagacat

SEQ ID NO: 164749 - DNA, 15 bp, Homo sapiens
cagaggtgggagaca

SEQ ID NO: 164750 - DNA, 15 bp, Homo sapiens
acagaggtgggagac

SEQ ID NO: 164751 - DNA, 15 bp, Homo sapiens
cacagaggtgggaga

SEQ ID NO: 164752 - DNA, 15 bp, Homo sapiens
gcacagaggtgggag

SEQ ID NO: 164753 - DNA, 15 bp, Homo sapiens
ggcacagaggtggga

SEQ ID NO: 164754 - DNA, 15 bp, Homo sapiens
tggcacagaggtggg

SEQ ID NO: 164755 - DNA, 15 bp, Homo sapiens
gtggcacagaggtgg

SEQ ID NO: 164756 - DNA, 15 bp, Homo sapiens
ggtggcacagaggtg

SEQ ID NO: 164757 - DNA, 15 bp, Homo sapiens
aggtggcacagaggt

SEQ ID NO: 164758 - DNA, 15 bp, Homo sapiens
gaggtggcacagagg

SEQ ID NO: 164759 - DNA, 15 bp, Homo sapiens
ggaggtggcacagag

SEQ ID NO: 164760 - DNA, 15 bp, Homo sapiens
aggaggtggcacaga

SEQ ID NO: 164761 - DNA, 15 bp, Homo sapiens
aaggaggtggcacag

SEQ ID NO: 164762 - DNA, 15 bp, Homo sapiens
gaaggaggtggcaca

SEQ ID NO: 164763 - DNA, 15 bp, Homo sapiens
ggaaggaggtggcac

SEQ ID NO: 164764 - DNA, 15 bp, Homo sapiens
gggaaggaggtggca

SEQ ID NO: 164765 - DNA, 15 bp, Homo sapiens
cgggaaggaggtggc

SEQ ID NO: 164766 - DNA, 15 bp, Homo sapiens
acgggaaggaggtgg

SEQ ID NO: 164767 - DNA, 15 bp, Homo sapiens
gacgggaaggaggtg

SEQ ID NO: 164768 - DNA, 15 bp, Homo sapiens
tgacgggaaggaggt

SEQ ID NO: 164769 - DNA, 15 bp, Homo sapiens
gtgacgggaaggagg

SEQ ID NO: 164770 - DNA, 15 bp, Homo sapiens
ggtgacgggaaggag

SEQ ID NO: 164771 - DNA, 15 bp, Homo sapiens
tggtgacgggaagga

SEQ ID NO: 164772 - DNA, 15 bp, Homo sapiens
ttggtgacgggaagg

SEQ ID NO: 164773 - DNA, 15 bp, Homo sapiens
tttggtgacgggaag

SEQ ID NO: 164774 - DNA, 15 bp, Homo sapiens
ttttggtgacgggaa

SEQ ID NO: 164775 - DNA, 15 bp, Homo sapiens
attttggtgacggga

SEQ ID NO: 164776 - DNA, 15 bp, Homo sapiens
cattttggtgacggg

SEQ ID NO: 164777 - DNA, 15 bp, Homo sapiens
ccattttggtgacgg

SEQ ID NO: 164778 - DNA, 15 bp, Homo sapiens
accattttggtgacg

SEQ ID NO: 164779 - DNA, 15 bp, Homo sapiens
gaccattttggtgac

SEQ ID NO: 164780 - DNA, 15 bp, Homo sapiens
ggaccattttggtga

SEQ ID NO: 164781 - DNA, 15 bp, Homo sapiens
gggaccattttggtg

SEQ ID NO: 164782 - DNA, 15 bp, Homo sapiens
ggggaccattttggt

SEQ ID NO: 164783 - DNA, 15 bp, Homo sapiens
tggggaccattttgg

SEQ ID NO: 164784 - DNA, 15 bp, Homo sapiens
ctggggaccattttg

SEQ ID NO: 164785 - DNA, 15 bp, Homo sapiens
tctggggaccatttt

SEQ ID NO: 164786 - DNA, 15 bp, Homo sapiens
ctctggggaccattt

SEQ ID NO: 164787 - DNA, 15 bp, Homo sapiens
tctctggggaccatt

SEQ ID NO: 164788 - DNA, 15 bp, Homo sapiens
ttctctggggaccat

SEQ ID NO: 164789 - DNA, 15 bp, Homo sapiens
tttctctggggacca

SEQ ID NO: 164790 - DNA, 15 bp, Homo sapiens
ctttctctggggacc

SEQ ID NO: 164791 - DNA, 15 bp, Homo sapiens
tctttctctggggac

SEQ ID NO: 164792 - DNA, 15 bp, Homo sapiens
ttctttctctgggga

SEQ ID NO: 164793 - DNA, 15 bp, Homo sapiens
tttctttctctgggg

SEQ ID NO: 164794 - DNA, 15 bp, Homo sapiens
ctttctttctctggg

SEQ ID NO: 164795 - DNA, 15 bp, Homo sapiens
tctttctttctctgg

SEQ ID NO: 164796 - DNA, 15 bp, Homo sapiens
ttctttctttctctg

SEQ ID NO: 164797 - DNA, 15 bp, Homo sapiens
attctttctttctct

SEQ ID NO: 164798 - DNA, 15 bp, Homo sapiens
gattctttctttctc

SEQ ID NO: 164799 - DNA, 15 bp, Homo sapiens
agattctttctttct

SEQ ID NO: 164800 - DNA, 15 bp, Homo sapiens
cagattctttctttc

SEQ ID NO: 164801 - DNA, 15 bp, Homo sapiens
tcagattctttcttt

SEQ ID NO: 164802 - DNA, 15 bp, Homo sapiens
atcagattctttctt

SEQ ID NO: 164803 - DNA, 15 bp, Homo sapiens
tatcagattctttct

SEQ ID NO: 164804 - DNA, 15 bp, Homo sapiens
gtatcagattctttc

SEQ ID NO: 164805 - DNA, 15 bp, Homo sapiens
tgtatcagattcttt

SEQ ID NO: 164806 - DNA, 15 bp, Homo sapiens
gtgtatcagattctt

SEQ ID NO: 164807 - DNA, 15 bp, Homo sapiens
agtgtatcagattct

SEQ ID NO: 164808 - DNA, 15 bp, Homo sapiens
aagtgtatcagattc

SEQ ID NO: 164809 - DNA, 15 bp, Homo sapiens
taagtgtatcagatt

SEQ ID NO: 164810 - DNA, 15 bp, Homo sapiens
ataagtgtatcagat

SEQ ID NO: 164811 - DNA, 15 bp, Homo sapiens
aataagtgtatcaga

SEQ ID NO: 164812 - DNA, 15 bp, Homo sapiens
gaataagtgtatcag

SEQ ID NO: 164813 - DNA, 15 bp, Homo sapiens
cgaataagtgtatca

SEQ ID NO: 164814 - DNA, 15 bp, Homo sapiens
gcgaataagtgtatc

SEQ ID NO: 164815 - DNA, 15 bp, Homo sapiens
tgcgaataagtgtat

SEQ ID NO: 164816 - DNA, 15 bp, Homo sapiens
gtgcgaataagtgta

SEQ ID NO: 164817 - DNA, 15 bp, Homo sapiens
agtgcgaataagtgt

SEQ ID NO: 164818 - DNA, 15 bp, Homo sapiens
cagtgcgaataagtg

SEQ ID NO: 164819 - DNA, 15 bp, Homo sapiens
tcagtgcgaataagt

SEQ ID NO: 164820 - DNA, 15 bp, Homo sapiens
ctcagtgcgaataag

SEQ ID NO: 164821 - DNA, 15 bp, Homo sapiens
tctcagtgcgaataa

SEQ ID NO: 164822 - DNA, 15 bp, Homo sapiens
ttctcagtgcgaata

SEQ ID NO: 164823 - DNA, 15 bp, Homo sapiens
tttctcagtgcgaat

SEQ ID NO: 164824 - DNA, 15 bp, Homo sapiens
atttctcagtgcgaa

SEQ ID NO: 164825 - DNA, 15 bp, Homo sapiens
tatttctcagtgcga

SEQ ID NO: 164826 - DNA, 15 bp, Homo sapiens
ctatttctcagtgcg

SEQ ID NO: 164827 - DNA, 15 bp, Homo sapiens
cctatttctcagtgc

SEQ ID NO: 164828 - DNA, 15 bp, Homo sapiens
tcctatttctcagtg

SEQ ID NO: 164829 - DNA, 15 bp, Homo sapiens
ctcctatttctcagt

SEQ ID NO: 164830 - DNA, 15 bp, Homo sapiens
actcctatttctcag

SEQ ID NO: 164831 - DNA, 15 bp, Homo sapiens
cactcctatttctca

SEQ ID NO: 164832 - DNA, 15 bp, Homo sapiens
gcactcctatttctc

SEQ ID NO: 164833 - DNA, 15 bp, Homo sapiens
ggcactcctatttct

SEQ ID NO: 164834 - DNA, 15 bp, Homo sapiens
aggcactcctatttc

SEQ ID NO: 164835 - DNA, 15 bp, Homo sapiens
aaggcactcctattt

SEQ ID NO: 164836 - DNA, 15 bp, Homo sapiens
aaaggcactcctatt

SEQ ID NO: 164837 - DNA, 15 bp, Homo sapiens
gaaaggcactcctat

SEQ ID NO: 164838 - DNA, 15 bp, Homo sapiens
tgaaaggcactccta

SEQ ID NO: 164839 - DNA, 15 bp, Homo sapiens
ctgaaaggcactcct

SEQ ID NO: 164840 - DNA, 15 bp, Homo sapiens
tctgaaaggcactcc

SEQ ID NO: 164841 - DNA, 15 bp, Homo sapiens
atctgaaaggcactc

SEQ ID NO: 164842 - DNA, 15 bp, Homo sapiens
aatctgaaaggcact

SEQ ID NO: 164843 - DNA, 15 bp, Homo sapiens
caatctgaaaggcac

SEQ ID NO: 164844 - DNA, 15 bp, Homo sapiens
ccaatctgaaaggca

SEQ ID NO: 164845 - DNA, 15 bp, Homo sapiens
gccaatctgaaaggc

SEQ ID NO: 164846 - DNA, 15 bp, Homo sapiens
tgccaatctgaaagg

SEQ ID NO: 164847 - DNA, 15 bp, Homo sapiens
ctgccaatctgaaag

SEQ ID NO: 164848 - DNA, 15 bp, Homo sapiens
gctgccaatctgaaa

SEQ ID NO: 164849 - DNA, 15 bp, Homo sapiens
ggctgccaatctgaa

SEQ ID NO: 164850 - DNA, 15 bp, Homo sapiens
tggctgccaatctga

SEQ ID NO: 164851 - DNA, 15 bp, Homo sapiens
ctggctgccaatctg

SEQ ID NO: 164852 - DNA, 15 bp, Homo sapiens
actggctgccaatct

SEQ ID NO: 164853 - DNA, 15 bp, Homo sapiens
cactggctgccaatc

SEQ ID NO: 164854 - DNA, 15 bp, Homo sapiens
acactggctgccaat

SEQ ID NO: 164855 - DNA, 15 bp, Homo sapiens
aacactggctgccaa

SEQ ID NO: 164856 - DNA, 15 bp, Homo sapiens
aaacactggctgcca

SEQ ID NO: 164857 - DNA, 15 bp, Homo sapiens
caaacactggctgcc

SEQ ID NO: 164858 - DNA, 15 bp, Homo sapiens
ccaaacactggctgc

SEQ ID NO: 164859 - DNA, 15 bp, Homo sapiens
tccaaacactggctg

SEQ ID NO: 164860 - DNA, 15 bp, Homo sapiens
ctccaaacactggct

SEQ ID NO: 164861 - DNA, 15 bp, Homo sapiens
tctccaaacactggc

SEQ ID NO: 164862 - DNA, 15 bp, Homo sapiens
ctctccaaacactgg

SEQ ID NO: 164863 - DNA, 15 bp, Homo sapiens
cctctccaaacactg

SEQ ID NO: 164864 - DNA, 15 bp, Homo sapiens
ccctctccaaacact

SEQ ID NO: 164865 - DNA, 15 bp, Homo sapiens
tccctctccaaacac

SEQ ID NO: 164866 - DNA, 15 bp, Homo sapiens
ctccctctccaaaca

SEQ ID NO: 164867 - DNA, 15 bp, Homo sapiens
gctccctctccaaac

SEQ ID NO: 164868 - DNA, 15 bp, Homo sapiens
ggctccctctccaaa

SEQ ID NO: 164869 - DNA, 15 bp, Homo sapiens
gggctccctctccaa

SEQ ID NO: 164870 - DNA, 15 bp, Homo sapiens
ggggctccctctcca

SEQ ID NO: 164871 - DNA, 15 bp, Homo sapiens
aggggctccctctcc

SEQ ID NO: 164872 - DNA, 15 bp, Homo sapiens
aaggggctccctctc

SEQ ID NO: 164873 - DNA, 15 bp, Homo sapiens
gaaggggctccctct

SEQ ID NO: 164874 - DNA, 15 bp, Homo sapiens
ggaaggggctccctc

SEQ ID NO: 164875 - DNA, 15 bp, Homo sapiens
aggaaggggctccct

SEQ ID NO: 164876 - DNA, 15 bp, Homo sapiens
caggaaggggctccc

SEQ ID NO: 164877 - DNA, 15 bp, Homo sapiens
ccaggaaggggctcc

SEQ ID NO: 164878 - DNA, 15 bp, Homo sapiens
cccaggaaggggctc

SEQ ID NO: 164879 - DNA, 15 bp, Homo sapiens
ccccaggaaggggct

SEQ ID NO: 164880 - DNA, 15 bp, Homo sapiens
accccaggaaggggc

SEQ ID NO: 164881 - DNA, 15 bp, Homo sapiens
caccccaggaagggg

SEQ ID NO: 164882 - DNA, 15 bp, Homo sapiens
acaccccaggaaggg

SEQ ID NO: 164883 - DNA, 15 bp, Homo sapiens
aacaccccaggaagg

SEQ ID NO: 164884 - DNA, 15 bp, Homo sapiens
caacaccccaggaag

SEQ ID NO: 164885 - DNA, 15 bp, Homo sapiens
ccaacaccccaggaa

SEQ ID NO: 164886 - DNA, 15 bp, Homo sapiens
tccaacaccccagga

SEQ ID NO: 164887 - DNA, 15 bp, Homo sapiens
ttccaacaccccagg

SEQ ID NO: 164888 - DNA, 15 bp, Homo sapiens
tttccaacaccccag

SEQ ID NO: 164889 - DNA, 15 bp, Homo sapiens
ctttccaacacccca

SEQ ID NO: 164890 - DNA, 15 bp, Homo sapiens
gctttccaacacccc

SEQ ID NO: 164891 - DNA, 15 bp, Homo sapiens
ggctttccaacaccc

SEQ ID NO: 164892 - DNA, 15 bp, Homo sapiens
gggctttccaacacc

SEQ ID NO: 164893 - DNA, 15 bp, Homo sapiens
tgggctttccaacac

SEQ ID NO: 164894 - DNA, 15 bp, Homo sapiens
gtgggctttccaaca

SEQ ID NO: 164895 - DNA, 15 bp, Homo sapiens
ggtgggctttccaac

SEQ ID NO: 164896 - DNA, 15 bp, Homo sapiens
tggtgggctttccaa

SEQ ID NO: 164897 - DNA, 15 bp, Homo sapiens
gtggtgggctttcca

SEQ ID NO: 164898 - DNA, 15 bp, Homo sapiens
ggtggtgggctttcc

SEQ ID NO: 164899 - DNA, 15 bp, Homo sapiens
gggtggtgggctttc

SEQ ID NO: 164900 - DNA, 15 bp, Homo sapiens
ggggtggtgggcttt

SEQ ID NO: 164901 - DNA, 15 bp, Homo sapiens
cggggtggtgggctt

SEQ ID NO: 164902 - DNA, 15 bp, Homo sapiens
ccggggtggtgggct

SEQ ID NO: 164903 - DNA, 15 bp, Homo sapiens
cccggggtggtgggc

SEQ ID NO: 164904 - DNA, 15 bp, Homo sapiens
ccccggggtggtggg

SEQ ID NO: 164905 - DNA, 15 bp, Homo sapiens
cccccggggtggtgg

SEQ ID NO: 164906 - DNA, 15 bp, Homo sapiens
gcccccggggtggtg

SEQ ID NO: 164907 - DNA, 15 bp, Homo sapiens
agcccccggggtggt

SEQ ID NO: 164908 - DNA, 15 bp, Homo sapiens
aagcccccggggtgg

SEQ ID NO: 164909 - DNA, 15 bp, Homo sapiens
gaagcccccggggtg

SEQ ID NO: 164910 - DNA, 15 bp, Homo sapiens
ggaagcccccggggt

SEQ ID NO: 164911 - DNA, 15 bp, Homo sapiens
tggaagcccccgggg

SEQ ID NO: 164912 - DNA, 15 bp, Homo sapiens
gtggaagcccccggg

SEQ ID NO: 164913 - DNA, 15 bp, Homo sapiens
agtggaagcccccgg

SEQ ID NO: 164914 - DNA, 15 bp, Homo sapiens
gagtggaagcccccg

SEQ ID NO: 164915 - DNA, 15 bp, Homo sapiens
ggagtggaagccccc

SEQ ID NO: 164916 - DNA, 15 bp, Homo sapiens
tggagtggaagcccc

SEQ ID NO: 164917 - DNA, 15 bp, Homo sapiens
gtggagtggaagccc

SEQ ID NO: 164918 - DNA, 15 bp, Homo sapiens
ggtggagtggaagcc

SEQ ID NO: 164919 - DNA, 15 bp, Homo sapiens
aggtggagtggaagc

SEQ ID NO: 164920 - DNA, 15 bp, Homo sapiens
caggtggagtggaag

SEQ ID NO: 164921 - DNA, 15 bp, Homo sapiens
gcaggtggagtggaa

SEQ ID NO: 164922 - DNA, 15 bp, Homo sapiens
agcaggtggagtgga

SEQ ID NO: 164923 - DNA, 15 bp, Homo sapiens
aagcaggtggagtgg

SEQ ID NO: 164924 - DNA, 15 bp, Homo sapiens
gaagcaggtggagtg

SEQ ID NO: 164925 - DNA, 15 bp, Homo sapiens
ggaagcaggtggagt

SEQ ID NO: 164926 - DNA, 15 bp, Homo sapiens
aggaagcaggtggag

SEQ ID NO: 164927 - DNA, 15 bp, Homo sapiens
aaggaagcaggtgga

SEQ ID NO: 164928 - DNA, 15 bp, Homo sapiens
gaaggaagcaggtgg

SEQ ID NO: 164929 - DNA, 15 bp, Homo sapiens
agaaggaagcaggtg

SEQ ID NO: 164930 - DNA, 15 bp, Homo sapiens
gagaaggaagcaggt

SEQ ID NO: 164931 - DNA, 15 bp, Homo sapiens
agagaaggaagcagg

SEQ ID NO: 164932 - DNA, 15 bp, Homo sapiens
cagagaaggaagcag

SEQ ID NO: 164933 - DNA, 15 bp, Homo sapiens
gcagagaaggaagca

SEQ ID NO: 164934 - DNA, 15 bp, Homo sapiens
agcagagaaggaagc

SEQ ID NO: 164935 - DNA, 15 bp, Homo sapiens
cagcagagaaggaag

SEQ ID NO: 164936 - DNA, 15 bp, Homo sapiens
acagcagagaaggaa

SEQ ID NO: 164937 - DNA, 15 bp, Homo sapiens
gacagcagagaagga

SEQ ID NO: 164938 - DNA, 15 bp, Homo sapiens
ggacagcagagaagg

SEQ ID NO: 164939 - DNA, 15 bp, Homo sapiens
aggacagcagagaag

SEQ ID NO: 164940 - DNA, 15 bp, Homo sapiens
aaggacagcagagaa

SEQ ID NO: 164941 - DNA, 15 bp, Homo sapiens
gaaggacagcagaga

SEQ ID NO: 164942 - DNA, 15 bp, Homo sapiens
ggaaggacagcagag

SEQ ID NO: 164943 - DNA, 15 bp, Homo sapiens
aggaaggacagcaga

SEQ ID NO: 164944 - DNA, 15 bp, Homo sapiens
aaggaaggacagcag

SEQ ID NO: 164945 - DNA, 15 bp, Homo sapiens
gaaggaaggacagca

SEQ ID NO: 164946 - DNA, 15 bp, Homo sapiens
ggaaggaaggacagc

SEQ ID NO: 164947 - DNA, 15 bp, Homo sapiens
tggaaggaaggacag

SEQ ID NO: 164948 - DNA, 15 bp, Homo sapiens
ttggaaggaaggaca

SEQ ID NO: 164949 - DNA, 15 bp, Homo sapiens
gttggaaggaaggac

SEQ ID NO: 164950 - DNA, 15 bp, Homo sapiens
cgttggaaggaagga

SEQ ID NO: 164951 - DNA, 15 bp, Homo sapiens
gcgttggaaggaagg

SEQ ID NO: 164952 - DNA, 15 bp, Homo sapiens
agcgttggaaggaag

SEQ ID NO: 164953 - DNA, 15 bp, Homo sapiens
cagcgttggaaggaa

SEQ ID NO: 164954 - DNA, 15 bp, Homo sapiens
gcagcgttggaagga

SEQ ID NO: 164955 - DNA, 15 bp, Homo sapiens
ggcagcgttggaagg

SEQ ID NO: 164956 - DNA, 15 bp, Homo sapiens
aggcagcgttggaag

SEQ ID NO: 164957 - DNA, 15 bp, Homo sapiens
caggcagcgttggaa

SEQ ID NO: 164958 - DNA, 15 bp, Homo sapiens
gcaggcagcgttgga

SEQ ID NO: 164959 - DNA, 15 bp, Homo sapiens
agcaggcagcgttgg

SEQ ID NO: 164960 - DNA, 15 bp, Homo sapiens
aagcaggcagcgttg

SEQ ID NO: 164961 - DNA, 15 bp, Homo sapiens
caagcaggcagcgtt

SEQ ID NO: 164962 - DNA, 15 bp, Homo sapiens
acaagcaggcagcgt

SEQ ID NO: 164963 - DNA, 15 bp, Homo sapiens
tacaagcaggcagcg

SEQ ID NO: 164964 - DNA, 15 bp, Homo sapiens
gtacaagcaggcagc

SEQ ID NO: 164965 - DNA, 15 bp, Homo sapiens
tgtacaagcaggcag

SEQ ID NO: 164966 - DNA, 15 bp, Homo sapiens
ctgtacaagcaggca

SEQ ID NO: 164967 - DNA, 15 bp, Homo sapiens
cctgtacaagcaggc

SEQ ID NO: 164968 - DNA, 15 bp, Homo sapiens
ccctgtacaagcagg

SEQ ID NO: 164969 - DNA, 15 bp, Homo sapiens
gccctgtacaagcag

SEQ ID NO: 164970 - DNA, 15 bp, Homo sapiens
agccctgtacaagca

SEQ ID NO: 164971 - DNA, 15 bp, Homo sapiens
aagccctgtacaagc

SEQ ID NO: 164972 - DNA, 15 bp, Homo sapiens
caagccctgtacaag

SEQ ID NO: 164973 - DNA, 15 bp, Homo sapiens
tcaagccctgtacaa

SEQ ID NO: 164974 - DNA, 15 bp, Homo sapiens
ctcaagccctgtaca

SEQ ID NO: 164975 - DNA, 15 bp, Homo sapiens
tctcaagccctgtac

SEQ ID NO: 164976 - DNA, 15 bp, Homo sapiens
ttctcaagccctgta

SEQ ID NO: 164977 - DNA, 15 bp, Homo sapiens
cttctcaagccctgt

SEQ ID NO: 164978 - DNA, 15 bp, Homo sapiens
acttctcaagccctg

SEQ ID NO: 164979 - DNA, 15 bp, Homo sapiens
gacttctcaagccct

SEQ ID NO: 164980 - DNA, 15 bp, Homo sapiens
tgacttctcaagccc

SEQ ID NO: 164981 - DNA, 15 bp, Homo sapiens
gtgacttctcaagcc

SEQ ID NO: 164982 - DNA, 15 bp, Homo sapiens
tgtgacttctcaagc

SEQ ID NO: 164983 - DNA, 15 bp, Homo sapiens
ttgtgacttctcaag

SEQ ID NO: 164984 - DNA, 15 bp, Homo sapiens
tttgtgacttctcaa

SEQ ID NO: 164985 - DNA, 15 bp, Homo sapiens
ctttgtgacttctca

SEQ ID NO: 164986 - DNA, 15 bp, Homo sapiens
tctttgtgacttctc

SEQ ID NO: 164987 - DNA, 15 bp, Homo sapiens
atctttgtgacttct

SEQ ID NO: 164988 - DNA, 15 bp, Homo sapiens
aatctttgtgacttc

SEQ ID NO: 164989 - DNA, 15 bp, Homo sapiens
aaatctttgtgactt

SEQ ID NO: 164990 - DNA, 15 bp, Homo sapiens
aaaatctttgtgact

SEQ ID NO: 164991 - DNA, 15 bp, Homo sapiens
gaaaatctttgtgac

SEQ ID NO: 164992 - DNA, 15 bp, Homo sapiens
tgaaaatctttgtga

SEQ ID NO: 164993 - DNA, 15 bp, Homo sapiens
gtgaaaatctttgtg

SEQ ID NO: 164994 - DNA, 15 bp, Homo sapiens
ggtgaaaatctttgt

SEQ ID NO: 164995 - DNA, 15 bp, Homo sapiens
aggtgaaaatctttg

SEQ ID NO: 164996 - DNA, 15 bp, Homo sapiens
caggtgaaaatcttt

SEQ ID NO: 164997 - DNA, 15 bp, Homo sapiens
gcaggtgaaaatctt

SEQ ID NO: 164998 - DNA, 15 bp, Homo sapiens
agcaggtgaaaatct

SEQ ID NO: 164999 - DNA, 15 bp, Homo sapiens
aagcaggtgaaaatc

SEQ ID NO: 165000 - DNA, 15 bp, Homo sapiens
aaagcaggtgaaaat

SEQ ID NO: 165001 - DNA, 15 bp, Homo sapiens
taaagcaggtgaaaa

SEQ ID NO: 165002 - DNA, 15 bp, Homo sapiens
ataaagcaggtgaaa

SEQ ID NO: 165003 - DNA, 15 bp, Homo sapiens
gataaagcaggtgaa

SEQ ID NO: 165004 - DNA, 15 bp, Homo sapiens
agataaagcaggtga

SEQ ID NO: 165005 - DNA, 15 bp, Homo sapiens
aagataaagcaggtg

SEQ ID NO: 165006 - DNA, 15 bp, Homo sapiens
caagataaagcaggt

SEQ ID NO: 165007 - DNA, 15 bp, Homo sapiens
acaagataaagcagg

SEQ ID NO: 165008 - DNA, 15 bp, Homo sapiens
aacaagataaagcag

SEQ ID NO: 165009 - DNA, 15 bp, Homo sapiens
caacaagataaagca

SEQ ID NO: 165010 - DNA, 15 bp, Homo sapiens
ccaacaagataaagc

SEQ ID NO: 165011 - DNA, 15 bp, Homo sapiens
tccaacaagataaag

SEQ ID NO: 165012 - DNA, 15 bp, Homo sapiens
atccaacaagataaa

SEQ ID NO: 165013 - DNA, 15 bp, Homo sapiens
gatccaacaagataa

SEQ ID NO: 165014 - DNA, 15 bp, Homo sapiens
agatccaacaagata

SEQ ID NO: 165015 - DNA, 15 bp, Homo sapiens
cagatccaacaagat

SEQ ID NO: 165016 - DNA, 15 bp, Homo sapiens
acagatccaacaaga

SEQ ID NO: 165017 - DNA, 15 bp, Homo sapiens
cacagatccaacaag

SEQ ID NO: 165018 - DNA, 15 bp, Homo sapiens
gcacagatccaacaa

SEQ ID NO: 165019 - DNA, 15 bp, Homo sapiens
tgcacagatccaaca

SEQ ID NO: 165020 - DNA, 15 bp, Homo sapiens
ctgcacagatccaac

SEQ ID NO: 165021 - DNA, 15 bp, Homo sapiens
actgcacagatccaa

SEQ ID NO: 165022 - DNA, 15 bp, Homo sapiens
aactgcacagatcca

SEQ ID NO: 165023 - DNA, 15 bp, Homo sapiens
aaactgcacagatcc

SEQ ID NO: 165024 - DNA, 15 bp, Homo sapiens
caaactgcacagatc

SEQ ID NO: 165025 - DNA, 15 bp, Homo sapiens
tcaaactgcacagat

SEQ ID NO: 165026 - DNA, 15 bp, Homo sapiens
ctcaaactgcacaga

SEQ ID NO: 165027 - DNA, 15 bp, Homo sapiens
tctcaaactgcacag

SEQ ID NO: 165028 - DNA, 15 bp, Homo sapiens
ttctcaaactgcaca

SEQ ID NO: 165029 - DNA, 15 bp, Homo sapiens
cttctcaaactgcac

SEQ ID NO: 165030 - DNA, 15 bp, Homo sapiens
tcttctcaaactgca

SEQ ID NO: 165031 - DNA, 15 bp, Homo sapiens
ttcttctcaaactgc

SEQ ID NO: 165032 - DNA, 15 bp, Homo sapiens
attcttctcaaactg

SEQ ID NO: 165033 - DNA, 15 bp, Homo sapiens
cattcttctcaaact

SEQ ID NO: 165034 - DNA, 15 bp, Homo sapiens
tcattcttctcaaac

SEQ ID NO: 165035 - DNA, 15 bp, Homo sapiens
atcattcttctcaaa

SEQ ID NO: 165036 - DNA, 15 bp, Homo sapiens
tatcattcttctcaa

SEQ ID NO: 165037 - DNA, 15 bp, Homo sapiens
atatcattcttctca

SEQ ID NO: 165038 - DNA, 15 bp, Homo sapiens
catatcattcttctc

SEQ ID NO: 165039 - DNA, 15 bp, Homo sapiens
gcatatcattcttct

SEQ ID NO: 165040 - DNA, 15 bp, Homo sapiens
ggcatatcattcttc

SEQ ID NO: 165041 - DNA, 15 bp, Homo sapiens
gggcatatcattctt

SEQ ID NO: 165042 - DNA, 15 bp, Homo sapiens
tgggcatatcattct

SEQ ID NO: 165043 - DNA, 15 bp, Homo sapiens
atgggcatatcattc

SEQ ID NO: 165044 - DNA, 15 bp, Homo sapiens
aatgggcatatcatt

SEQ ID NO: 165045 - DNA, 15 bp, Homo sapiens
aaatgggcatatcat

SEQ ID NO: 165046 - DNA, 15 bp, Homo sapiens
aaaatgggcatatca

SEQ ID NO: 165047 - DNA, 15 bp, Homo sapiens
taaaatgggcatatc

SEQ ID NO: 165048 - DNA, 15 bp, Homo sapiens
ataaaatgggcatat

SEQ ID NO: 165049 - DNA, 15 bp, Homo sapiens
cataaaatgggcata

SEQ ID NO: 165050 - DNA, 15 bp, Homo sapiens
ccataaaatgggcat

SEQ ID NO: 165051 - DNA, 15 bp, Homo sapiens
tccataaaatgggca

SEQ ID NO: 165052 - DNA, 15 bp, Homo sapiens
gtccataaaatgggc

SEQ ID NO: 165053 - DNA, 15 bp, Homo sapiens
cgtccataaaatggg

SEQ ID NO: 165054 - DNA, 15 bp, Homo sapiens
ccgtccataaaatgg

SEQ ID NO: 165055 - DNA, 15 bp, Homo sapiens
gccgtccataaaatg

SEQ ID NO: 165056 - DNA, 15 bp, Homo sapiens
tgccgtccataaaat

SEQ ID NO: 165057 - DNA, 15 bp, Homo sapiens
ctgccgtccataaaa

SEQ ID NO: 165058 - DNA, 15 bp, Homo sapiens
tctgccgtccataaa

SEQ ID NO: 165059 - DNA, 15 bp, Homo sapiens
ttctgccgtccataa

SEQ ID NO: 165060 - DNA, 15 bp, Homo sapiens
gttctgccgtccata

SEQ ID NO: 165061 - DNA, 15 bp, Homo sapiens
agttctgccgtccat

SEQ ID NO: 165062 - DNA, 15 bp, Homo sapiens
cagttctgccgtcca

SEQ ID NO: 165063 - DNA, 15 bp, Homo sapiens
ccagttctgccgtcc

SEQ ID NO: 165064 - DNA, 15 bp, Homo sapiens
gccagttctgccgtc

SEQ ID NO: 165065 - DNA, 15 bp, Homo sapiens
tgccagttctgccgt

SEQ ID NO: 165066 - DNA, 15 bp, Homo sapiens
ttgccagttctgccg

SEQ ID NO: 165067 - DNA, 15 bp, Homo sapiens
gttgccagttctgcc

SEQ ID NO: 165068 - DNA, 15 bp, Homo sapiens
agttgccagttctgc

SEQ ID NO: 165069 - DNA, 15 bp, Homo sapiens
cagttgccagttctg

SEQ ID NO: 165070 - DNA, 15 bp, Homo sapiens
tcagttgccagttct

SEQ ID NO: 165071 - DNA, 15 bp, Homo sapiens
atcagttgccagttc

SEQ ID NO: 165072 - DNA, 15 bp, Homo sapiens
catcagttgccagtt

SEQ ID NO: 165073 - DNA, 15 bp, Homo sapiens
tcatcagttgccagt

SEQ ID NO: 165074 - DNA, 15 bp, Homo sapiens
ctcatcagttgccag

SEQ ID NO: 165075 - DNA, 15 bp, Homo sapiens
cctcatcagttgcca

SEQ ID NO: 165076 - DNA, 15 bp, Homo sapiens
tcctcatcagttgcc

SEQ ID NO: 165077 - DNA, 15 bp, Homo sapiens
ttcctcatcagttgc

SEQ ID NO: 165078 - DNA, 15 bp, Homo sapiens
tttcctcatcagttg

SEQ ID NO: 165079 - DNA, 15 bp, Homo sapiens
gtttcctcatcagtt

SEQ ID NO: 165080 - DNA, 15 bp, Homo sapiens
agtttcctcatcagt

SEQ ID NO: 165081 - DNA, 15 bp, Homo sapiens
cagtttcctcatcag

SEQ ID NO: 165082 - DNA, 15 bp, Homo sapiens
tcagtttcctcatca

SEQ ID NO: 165083 - DNA, 15 bp, Homo sapiens
ctcagtttcctcatc

SEQ ID NO: 165084 - DNA, 15 bp, Homo sapiens
cctcagtttcctcat

SEQ ID NO: 165085 - DNA, 15 bp, Homo sapiens
acctcagtttcctca

SEQ ID NO: 165086 - DNA, 15 bp, Homo sapiens
gacctcagtttcctc

SEQ ID NO: 165087 - DNA, 15 bp, Homo sapiens
ggacctcagtttcct

SEQ ID NO: 165088 - DNA, 15 bp, Homo sapiens
aggacctcagtttcc

SEQ ID NO: 165089 - DNA, 15 bp, Homo sapiens
taggacctcagtttc

SEQ ID NO: 165090 - DNA, 15 bp, Homo sapiens
ttaggacctcagttt

SEQ ID NO: 165091 - DNA, 15 bp, Homo sapiens
tttaggacctcagtt

SEQ ID NO: 165092 - DNA, 15 bp, Homo sapiens
ttttaggacctcagt

SEQ ID NO: 165093 - DNA, 15 bp, Homo sapiens
cttttaggacctcag

SEQ ID NO: 165094 - DNA, 15 bp, Homo sapiens
tcttttaggacctca

SEQ ID NO: 165095 - DNA, 15 bp, Homo sapiens
atcttttaggacctc

SEQ ID NO: 165096 - DNA, 15 bp, Homo sapiens
tatcttttaggacct

SEQ ID NO: 165097 - DNA, 15 bp, Homo sapiens
ttatcttttaggacc

SEQ ID NO: 165098 - DNA, 15 bp, Homo sapiens
tttatcttttaggac

SEQ ID NO: 165099 - DNA, 15 bp, Homo sapiens
atttatcttttagga

SEQ ID NO: 165100 - DNA, 15 bp, Homo sapiens
gatttatcttttagg

SEQ ID NO: 165101 - DNA, 15 bp, Homo sapiens
cgatttatcttttag

SEQ ID NO: 165102 - DNA, 15 bp, Homo sapiens
acgatttatctttta

SEQ ID NO: 165103 - DNA, 15 bp, Homo sapiens
cacgatttatctttt

SEQ ID NO: 165104 - DNA, 15 bp, Homo sapiens
acacgatttatcttt

SEQ ID NO: 165105 - DNA, 15 bp, Homo sapiens
gacacgatttatctt

SEQ ID NO: 165106 - DNA, 15 bp, Homo sapiens
ggacacgatttatct

SEQ ID NO: 165107 - DNA, 15 bp, Homo sapiens
gggacacgatttatc

SEQ ID NO: 165108 - DNA, 15 bp, Homo sapiens
tgggacacgatttat

SEQ ID NO: 165109 - DNA, 15 bp, Homo sapiens
gtgggacacgattta

SEQ ID NO: 165110 - DNA, 15 bp, Homo sapiens
tgtgggacacgattt

SEQ ID NO: 165111 - DNA, 15 bp, Homo sapiens
ctgtgggacacgatt

SEQ ID NO: 165112 - DNA, 15 bp, Homo sapiens
actgtgggacacgat

SEQ ID NO: 165113 - DNA, 15 bp, Homo sapiens
gactgtgggacacga

SEQ ID NO: 165114 - DNA, 15 bp, Homo sapiens
ggactgtgggacacg

SEQ ID NO: 165115 - DNA, 15 bp, Homo sapiens
aggactgtgggacac

SEQ ID NO: 165116 - DNA, 15 bp, Homo sapiens
caggactgtgggaca

SEQ ID NO: 165117 - DNA, 15 bp, Homo sapiens
gcaggactgtgggac

SEQ ID NO: 165118 - DNA, 15 bp, Homo sapiens
tgcaggactgtggga

SEQ ID NO: 165119 - DNA, 15 bp, Homo sapiens
atgcaggactgtggg

SEQ ID NO: 165120 - DNA, 15 bp, Homo sapiens
aatgcaggactgtgg

SEQ ID NO: 165121 - DNA, 15 bp, Homo sapiens
taatgcaggactgtg

SEQ ID NO: 165122 - DNA, 15 bp, Homo sapiens
ttaatgcaggactgt

SEQ ID NO: 165123 - DNA, 15 bp, Homo sapiens
gttaatgcaggactg

SEQ ID NO: 165124 - DNA, 15 bp, Homo sapiens
tgttaatgcaggact

SEQ ID NO: 165125 - DNA, 15 bp, Homo sapiens
ctgttaatgcaggac

SEQ ID NO: 165126 - DNA, 15 bp, Homo sapiens
tctgttaatgcagga

SEQ ID NO: 165127 - DNA, 15 bp, Homo sapiens
ctctgttaatgcagg

SEQ ID NO: 165128 - DNA, 15 bp, Homo sapiens
gctctgttaatgcag

SEQ ID NO: 165129 - DNA, 15 bp, Homo sapiens
agctctgttaatgca

SEQ ID NO: 165130 - DNA, 15 bp, Homo sapiens
cagctctgttaatgc

SEQ ID NO: 165131 - DNA, 15 bp, Homo sapiens
ccagctctgttaatg

SEQ ID NO: 165132 - DNA, 15 bp, Homo sapiens
cccagctctgttaat

SEQ ID NO: 165133 - DNA, 15 bp, Homo sapiens
tcccagctctgttaa

SEQ ID NO: 165134 - DNA, 15 bp, Homo sapiens
atcccagctctgtta

SEQ ID NO: 165135 - DNA, 15 bp, Homo sapiens
aatcccagctctgtt

SEQ ID NO: 165136 - DNA, 15 bp, Homo sapiens
aaatcccagctctgt

SEQ ID NO: 165137 - DNA, 15 bp, Homo sapiens
taaatcccagctctg

SEQ ID NO: 165138 - DNA, 15 bp, Homo sapiens
ctaaatcccagctct

SEQ ID NO: 165139 - DNA, 15 bp, Homo sapiens
tctaaatcccagctc

SEQ ID NO: 165140 - DNA, 15 bp, Homo sapiens
gtctaaatcccagct

SEQ ID NO: 165141 - DNA, 15 bp, Homo sapiens
ggtctaaatcccagc

SEQ ID NO: 165142 - DNA, 15 bp, Homo sapiens
tggtctaaatcccag

SEQ ID NO: 165143 - DNA, 15 bp, Homo sapiens
ttggtctaaatccca

SEQ ID NO: 165144 - DNA, 15 bp, Homo sapiens
cttggtctaaatccc

SEQ ID NO: 165145 - DNA, 15 bp, Homo sapiens
tcttggtctaaatcc

SEQ ID NO: 165146 - DNA, 15 bp, Homo sapiens
ttcttggtctaaatc

SEQ ID NO: 165147 - DNA, 15 bp, Homo sapiens
gttcttggtctaaat

SEQ ID NO: 165148 - DNA, 15 bp, Homo sapiens
agttcttggtctaaa

SEQ ID NO: 165149 - DNA, 15 bp, Homo sapiens
aagttcttggtctaa

SEQ ID NO: 165150 - DNA, 15 bp, Homo sapiens
taagttcttggtcta

SEQ ID NO: 165151 - DNA, 15 bp, Homo sapiens
ataagttcttggtct

SEQ ID NO: 165152 - DNA, 15 bp, Homo sapiens
tataagttcttggtc

SEQ ID NO: 165153 - DNA, 15 bp, Homo sapiens
ttataagttcttggt

SEQ ID NO: 165154 - DNA, 15 bp, Homo sapiens
tttataagttcttgg

SEQ ID NO: 165155 - DNA, 15 bp, Homo sapiens
atttataagttcttg

SEQ ID NO: 165156 - DNA, 15 bp, Homo sapiens
gatttataagttctt

SEQ ID NO: 165157 - DNA, 15 bp, Homo sapiens
cgatttataagttct

SEQ ID NO: 165158 - DNA, 15 bp, Homo sapiens
gcgatttataagttc

SEQ ID NO: 165159 - DNA, 15 bp, Homo sapiens
agcgatttataagtt

SEQ ID NO: 165160 - DNA, 15 bp, Homo sapiens
cagcgatttataagt

SEQ ID NO: 165161 - DNA, 15 bp, Homo sapiens
acagcgatttataag

SEQ ID NO: 165162 - DNA, 15 bp, Homo sapiens
gacagcgatttataa

SEQ ID NO: 165163 - DNA, 15 bp, Homo sapiens
ggacagcgatttata

SEQ ID NO: 165164 - DNA, 15 bp, Homo sapiens
tggacagcgatttat

SEQ ID NO: 165165 - DNA, 15 bp, Homo sapiens
ctggacagcgattta

SEQ ID NO: 165166 - DNA, 15 bp, Homo sapiens
actggacagcgattt

SEQ ID NO: 165167 - DNA, 15 bp, Homo sapiens
cactggacagcgatt

SEQ ID NO: 165168 - DNA, 15 bp, Homo sapiens
gcactggacagcgat

SEQ ID NO: 165169 - DNA, 15 bp, Homo sapiens
agcactggacagcga

SEQ ID NO: 165170 - DNA, 15 bp, Homo sapiens
gagcactggacagcg

SEQ ID NO: 165171 - DNA, 15 bp, Homo sapiens
ggagcactggacagc

SEQ ID NO: 165172 - DNA, 15 bp, Homo sapiens
aggagcactggacag

SEQ ID NO: 165173 - DNA, 15 bp, Homo sapiens
aaggagcactggaca

SEQ ID NO: 165174 - DNA, 15 bp, Homo sapiens
gaaggagcactggac

SEQ ID NO: 165175 - DNA, 15 bp, Homo sapiens
ggaaggagcactgga

SEQ ID NO: 165176 - DNA, 15 bp, Homo sapiens
aggaaggagcactgg

SEQ ID NO: 165177 - DNA, 15 bp, Homo sapiens
caggaaggagcactg

SEQ ID NO: 165178 - DNA, 15 bp, Homo sapiens
acaggaaggagcact

SEQ ID NO: 165179 - DNA, 15 bp, Homo sapiens
tacaggaaggagcac

SEQ ID NO: 165180 - DNA, 15 bp, Homo sapiens
ctacaggaaggagca

SEQ ID NO: 165181 - DNA, 15 bp, Homo sapiens
tctacaggaaggagc

SEQ ID NO: 165182 - DNA, 15 bp, Homo sapiens
gtctacaggaaggag

SEQ ID NO: 165183 - DNA, 15 bp, Homo sapiens
ggtctacaggaagga

SEQ ID NO: 165184 - DNA, 15 bp, Homo sapiens
tggtctacaggaagg

SEQ ID NO: 165185 - DNA, 15 bp, Homo sapiens
gtggtctacaggaag

SEQ ID NO: 165186 - DNA, 15 bp, Homo sapiens
tgtggtctacaggaa

SEQ ID NO: 165187 - DNA, 15 bp, Homo sapiens
gtgtggtctacagga

SEQ ID NO: 165188 - DNA, 15 bp, Homo sapiens
ggtgtggtctacagg

SEQ ID NO: 165189 - DNA, 15 bp, Homo sapiens
tggtgtggtctacag

SEQ ID NO: 165190 - DNA, 15 bp, Homo sapiens
gtggtgtggtctaca

SEQ ID NO: 165191 - DNA, 15 bp, Homo sapiens
agtggtgtggtctac

SEQ ID NO: 165192 - DNA, 15 bp, Homo sapiens
gagtggtgtggtcta

SEQ ID NO: 165193 - DNA, 15 bp, Homo sapiens
ggagtggtgtggtct

SEQ ID NO: 165194 - DNA, 15 bp, Homo sapiens
gggagtggtgtggtc

SEQ ID NO: 165195 - DNA, 15 bp, Homo sapiens
agggagtggtgtggt

SEQ ID NO: 165196 - DNA, 15 bp, Homo sapiens
gagggagtggtgtgg

SEQ ID NO: 165197 - DNA, 15 bp, Homo sapiens
ggagggagtggtgtg

SEQ ID NO: 165198 - DNA, 15 bp, Homo sapiens
aggagggagtggtgt

SEQ ID NO: 165199 - DNA, 15 bp, Homo sapiens
caggagggagtggtg

SEQ ID NO: 165200 - DNA, 15 bp, Homo sapiens
ccaggagggagtggt

SEQ ID NO: 165201 - DNA, 15 bp, Homo sapiens
accaggagggagtgg

SEQ ID NO: 165202 - DNA, 15 bp, Homo sapiens
caccaggagggagtg

SEQ ID NO: 165203 - DNA, 15 bp, Homo sapiens
acaccaggagggagt

SEQ ID NO: 165204 - DNA, 15 bp, Homo sapiens
gacaccaggagggag

SEQ ID NO: 165205 - DNA, 15 bp, Homo sapiens
ggacaccaggaggga

SEQ ID NO: 165206 - DNA, 15 bp, Homo sapiens
aggacaccaggaggg

SEQ ID NO: 165207 - DNA, 15 bp, Homo sapiens
gaggacaccaggagg

SEQ ID NO: 165208 - DNA, 15 bp, Homo sapiens
agaggacaccaggag

SEQ ID NO: 165209 - DNA, 15 bp, Homo sapiens
aagaggacaccagga

SEQ ID NO: 165210 - DNA, 15 bp, Homo sapiens
aaagaggacaccagg

SEQ ID NO: 165211 - DNA, 15 bp, Homo sapiens
gaaagaggacaccag

SEQ ID NO: 165212 - DNA, 15 bp, Homo sapiens
ggaaagaggacacca

SEQ ID NO: 165213 - DNA, 15 bp, Homo sapiens
aggaaagaggacacc

SEQ ID NO: 165214 - DNA, 15 bp, Homo sapiens
caggaaagaggacac

SEQ ID NO: 165215 - DNA, 15 bp, Homo sapiens
acaggaaagaggaca

SEQ ID NO: 165216 - DNA, 15 bp, Homo sapiens
gacaggaaagaggac

SEQ ID NO: 165217 - DNA, 15 bp, Homo sapiens
agacaggaaagagga

SEQ ID NO: 165218 - DNA, 15 bp, Homo sapiens
gagacaggaaagagg

SEQ ID NO: 165219 - DNA, 15 bp, Homo sapiens
ggagacaggaaagag

SEQ ID NO: 165220 - DNA, 15 bp, Homo sapiens
aggagacaggaaaga

SEQ ID NO: 165221 - DNA, 15 bp, Homo sapiens
caggagacaggaaag

SEQ ID NO: 165222 - DNA, 15 bp, Homo sapiens
gcaggagacaggaaa

SEQ ID NO: 165223 - DNA, 15 bp, Homo sapiens
agcaggagacaggaa

SEQ ID NO: 165224 - DNA, 15 bp, Homo sapiens
aagcaggagacagga

SEQ ID NO: 165225 - DNA, 15 bp, Homo sapiens
gaagcaggagacagg

SEQ ID NO: 165226 - DNA, 15 bp, Homo sapiens
ggaagcaggagacag

SEQ ID NO: 165227 - DNA, 15 bp, Homo sapiens
aggaagcaggagaca

SEQ ID NO: 165228 - DNA, 15 bp, Homo sapiens
gaggaagcaggagac

SEQ ID NO: 165229 - DNA, 15 bp, Homo sapiens
ggaggaagcaggaga

SEQ ID NO: 165230 - DNA, 15 bp, Homo sapiens
tggaggaagcaggag

SEQ ID NO: 165231 - DNA, 15 bp, Homo sapiens
ttggaggaagcagga

SEQ ID NO: 165232 - DNA, 15 bp, Homo sapiens
tttggaggaagcagg

SEQ ID NO: 165233 - DNA, 15 bp, Homo sapiens
ttttggaggaagcag

SEQ ID NO: 165234 - DNA, 15 bp, Homo sapiens
tttttggaggaagca

SEQ ID NO: 165235 - DNA, 15 bp, Homo sapiens
gtttttggaggaagc

SEQ ID NO: 165236 - DNA, 15 bp, Homo sapiens
agtttttggaggaag

SEQ ID NO: 165237 - DNA, 15 bp, Homo sapiens
gagtttttggaggaa

SEQ ID NO: 165238 - DNA, 15 bp, Homo sapiens
ggagtttttggagga

SEQ ID NO: 165239 - DNA, 15 bp, Homo sapiens
aggagtttttggagg

SEQ ID NO: 165240 - DNA, 15 bp, Homo sapiens
caggagtttttggag

SEQ ID NO: 165241 - DNA, 15 bp, Homo sapiens
tcaggagtttttgga

SEQ ID NO: 165242 - DNA, 15 bp, Homo sapiens
ttcaggagtttttgg

SEQ ID NO: 165243 - DNA, 15 bp, Homo sapiens
attcaggagtttttg

SEQ ID NO: 165244 - DNA, 15 bp, Homo sapiens
gattcaggagttttt

SEQ ID NO: 165245 - DNA, 15 bp, Homo sapiens
agattcaggagtttt

SEQ ID NO: 165246 - DNA, 15 bp, Homo sapiens
cagattcaggagttt

SEQ ID NO: 165247 - DNA, 15 bp, Homo sapiens
tcagattcaggagtt

SEQ ID NO: 165248 - DNA, 15 bp, Homo sapiens
ctcagattcaggagt

SEQ ID NO: 165249 - DNA, 15 bp, Homo sapiens
cctcagattcaggag

SEQ ID NO: 165250 - DNA, 15 bp, Homo sapiens
ccctcagattcagga

SEQ ID NO: 165251 - DNA, 15 bp, Homo sapiens
tccctcagattcagg

SEQ ID NO: 165252 - DNA, 15 bp, Homo sapiens
atccctcagattcag

SEQ ID NO: 165253 - DNA, 15 bp, Homo sapiens
catccctcagattca

SEQ ID NO: 165254 - DNA, 15 bp, Homo sapiens
gcatccctcagattc

SEQ ID NO: 165255 - DNA, 15 bp, Homo sapiens
ggcatccctcagatt

SEQ ID NO: 165256 - DNA, 15 bp, Homo sapiens
gggcatccctcagat

SEQ ID NO: 165257 - DNA, 15 bp, Homo sapiens
ggggcatccctcaga

SEQ ID NO: 165258 - DNA, 15 bp, Homo sapiens
aggggcatccctcag

SEQ ID NO: 165259 - DNA, 15 bp, Homo sapiens
aaggggcatccctca

SEQ ID NO: 165260 - DNA, 15 bp, Homo sapiens
gaaggggcatccctc

SEQ ID NO: 165261 - DNA, 15 bp, Homo sapiens
ggaaggggcatccct

SEQ ID NO: 165262 - DNA, 15 bp, Homo sapiens
aggaaggggcatccc

SEQ ID NO: 165263 - DNA, 15 bp, Homo sapiens
aaggaaggggcatcc

SEQ ID NO: 165264 - DNA, 15 bp, Homo sapiens
ccccatagggttttg

SEQ ID NO: 165265 - DNA, 15 bp, Homo sapiens
gccccatagggtttt

SEQ ID NO: 165266 - DNA, 15 bp, Homo sapiens
agccccatagggttt

SEQ ID NO: 165267 - DNA, 15 bp, Homo sapiens
cagccccatagggtt

SEQ ID NO: 165268 - DNA, 15 bp, Homo sapiens
ccagccccatagggt

SEQ ID NO: 165269 - DNA, 15 bp, Homo sapiens
tccagccccataggg

SEQ ID NO: 165270 - DNA, 15 bp, Homo sapiens
ttccagccccatagg

SEQ ID NO: 165271 - DNA, 15 bp, Homo sapiens
tttccagccccatag

SEQ ID NO: 165272 - DNA, 15 bp, Homo sapiens
atttccagccccata

SEQ ID NO: 165273 - DNA, 15 bp, Homo sapiens
tatttccagccccat

SEQ ID NO: 165274 - DNA, 15 bp, Homo sapiens
gtatttccagcccca

SEQ ID NO: 165275 - DNA, 15 bp, Homo sapiens
agtatttccagcccc

SEQ ID NO: 165276 - DNA, 15 bp, Homo sapiens
gagtatttccagccc

SEQ ID NO: 165277 - DNA, 15 bp, Homo sapiens
ggagtatttccagcc

SEQ ID NO: 165278 - DNA, 15 bp, Homo sapiens
aggagtatttccagc

SEQ ID NO: 165279 - DNA, 15 bp, Homo sapiens
caggagtatttccag

SEQ ID NO: 165280 - DNA, 15 bp, Homo sapiens
acaggagtatttcca

SEQ ID NO: 165281 - DNA, 15 bp, Homo sapiens
aacaggagtatttcc

SEQ ID NO: 165282 - DNA, 15 bp, Homo sapiens
aaacaggagtatttc

SEQ ID NO: 165283 - DNA, 15 bp, Homo sapiens
aaaacaggagtattt

SEQ ID NO: 165284 - DNA, 15 bp, Homo sapiens
taaaacaggagtatt

SEQ ID NO: 165285 - DNA, 15 bp, Homo sapiens
gtaaaacaggagtat

SEQ ID NO: 165286 - DNA, 15 bp, Homo sapiens
tgtaaaacaggagta

SEQ ID NO: 165287 - DNA, 15 bp, Homo sapiens
ctgtaaaacaggagt

SEQ ID NO: 165288 - DNA, 15 bp, Homo sapiens
tctgtaaaacaggag

SEQ ID NO: 165289 - DNA, 15 bp, Homo sapiens
atctgtaaaacagga

SEQ ID NO: 165290 - DNA, 15 bp, Homo sapiens
gatctgtaaaacagg

SEQ ID NO: 165291 - DNA, 15 bp, Homo sapiens
tgatctgtaaaacag

SEQ ID NO: 165292 - DNA, 15 bp, Homo sapiens
ctgatctgtaaaaca

SEQ ID NO: 165293 - DNA, 15 bp, Homo sapiens
cctgatctgtaaaac

SEQ ID NO: 165294 - DNA, 15 bp, Homo sapiens
tcctgatctgtaaaa

SEQ ID NO: 165295 - DNA, 15 bp, Homo sapiens
ttcctgatctgtaaa

SEQ ID NO: 165296 - DNA, 15 bp, Homo sapiens
tttcctgatctgtaa

SEQ ID NO: 165297 - DNA, 15 bp, Homo sapiens
gtttcctgatctgta

SEQ ID NO: 165298 - DNA, 15 bp, Homo sapiens
tgtttcctgatctgt

SEQ ID NO: 165299 - DNA, 15 bp, Homo sapiens
ctgtttcctgatctg

SEQ ID NO: 165300 - DNA, 15 bp, Homo sapiens
tctgtttcctgatct

SEQ ID NO: 165301 - DNA, 15 bp, Homo sapiens
gtctgtttcctgatc

SEQ ID NO: 165302 - DNA, 15 bp, Homo sapiens
tgtctgtttcctgat

SEQ ID NO: 165303 - DNA, 15 bp, Homo sapiens
atgtctgtttcctga

SEQ ID NO: 165304 - DNA, 15 bp, Homo sapiens
aatgtctgtttcctg

SEQ ID NO: 165305 - DNA, 15 bp, Homo sapiens
taatgtctgtttcct

SEQ ID NO: 165306 - DNA, 15 bp, Homo sapiens
ttaatgtctgtttcc

SEQ ID NO: 165307 - DNA, 15 bp, Homo sapiens
cttaatgtctgtttc

SEQ ID NO: 165308 - DNA, 15 bp, Homo sapiens
acttaatgtctgttt

SEQ ID NO: 165309 - DNA, 15 bp, Homo sapiens
aacttaatgtctgtt

SEQ ID NO: 165310 - DNA, 15 bp, Homo sapiens
taacttaatgtctgt

SEQ ID NO: 165311 - DNA, 15 bp, Homo sapiens
gtaacttaatgtctg

SEQ ID NO: 165312 - DNA, 15 bp, Homo sapiens
agtaacttaatgtct

SEQ ID NO: 165313 - DNA, 15 bp, Homo sapiens
aagtaacttaatgtc

SEQ ID NO: 165314 - DNA, 15 bp, Homo sapiens
caagtaacttaatgt

SEQ ID NO: 165315 - DNA, 15 bp, Homo sapiens
gcaagtaacttaatg

SEQ ID NO: 165316 - DNA, 15 bp, Homo sapiens
agcaagtaacttaat

SEQ ID NO: 165317 - DNA, 15 bp, Homo sapiens
gagcaagtaacttaa

SEQ ID NO: 165318 - DNA, 15 bp, Homo sapiens
tgagcaagtaactta

SEQ ID NO: 165319 - DNA, 15 bp, Homo sapiens
ttgagcaagtaactt

SEQ ID NO: 165320 - DNA, 15 bp, Homo sapiens
cttgagcaagtaact

SEQ ID NO: 165321 - DNA, 15 bp, Homo sapiens
ccttgagcaagtaac

SEQ ID NO: 165322 - DNA, 15 bp, Homo sapiens
accttgagcaagtaa

SEQ ID NO: 165323 - DNA, 15 bp, Homo sapiens
gaccttgagcaagta

SEQ ID NO: 165324 - DNA, 15 bp, Homo sapiens
ggaccttgagcaagt

SEQ ID NO: 165325 - DNA, 15 bp, Homo sapiens
aggaccttgagcaag

SEQ ID NO: 165326 - DNA, 15 bp, Homo sapiens
caggaccttgagcaa

SEQ ID NO: 165327 - DNA, 15 bp, Homo sapiens
gcaggaccttgagca

SEQ ID NO: 165328 - DNA, 15 bp, Homo sapiens
ggcaggaccttgagc

SEQ ID NO: 165329 - DNA, 15 bp, Homo sapiens
tggcaggaccttgag

SEQ ID NO: 165330 - DNA, 15 bp, Homo sapiens
gtggcaggaccttga

SEQ ID NO: 165331 - DNA, 15 bp, Homo sapiens
agtggcaggaccttg

SEQ ID NO: 165332 - DNA, 15 bp, Homo sapiens
cagtggcaggacctt

SEQ ID NO: 165333 - DNA, 15 bp, Homo sapiens
tcagtggcaggacct

SEQ ID NO: 165334 - DNA, 15 bp, Homo sapiens
atcagtggcaggacc

SEQ ID NO: 165335 - DNA, 15 bp, Homo sapiens
tatcagtggcaggac

SEQ ID NO: 165336 - DNA, 15 bp, Homo sapiens
ttatcagtggcagga

SEQ ID NO: 165337 - DNA, 15 bp, Homo sapiens
cttatcagtggcagg

SEQ ID NO: 165338 - DNA, 15 bp, Homo sapiens
acttatcagtggcag

SEQ ID NO: 165339 - DNA, 15 bp, Homo sapiens
cacttatcagtggca

SEQ ID NO: 165340 - DNA, 15 bp, Homo sapiens
ccacttatcagtggc

SEQ ID NO: 165341 - DNA, 15 bp, Homo sapiens
gccacttatcagtgg

SEQ ID NO: 165342 - DNA, 15 bp, Homo sapiens
tgccacttatcagtg

SEQ ID NO: 165343 - DNA, 15 bp, Homo sapiens
ttgccacttatcagt

SEQ ID NO: 165344 - DNA, 15 bp, Homo sapiens
cttgccacttatcag

SEQ ID NO: 165345 - DNA, 15 bp, Homo sapiens
acttgccacttatca

SEQ ID NO: 165346 - DNA, 15 bp, Homo sapiens
cacttgccacttatc

SEQ ID NO: 165347 - DNA, 15 bp, Homo sapiens
gcacttgccacttat

SEQ ID NO: 165348 - DNA, 15 bp, Homo sapiens
ggcacttgccactta

SEQ ID NO: 165349 - DNA, 15 bp, Homo sapiens
gggcacttgccactt

SEQ ID NO: 165350 - DNA, 15 bp, Homo sapiens
ggggcacttgccact

SEQ ID NO: 165351 - DNA, 15 bp, Homo sapiens
aggggcacttgccac

SEQ ID NO: 165352 - DNA, 15 bp, Homo sapiens
caggggcacttgcca

SEQ ID NO: 165353 - DNA, 15 bp, Homo sapiens
gcaggggcacttgcc

SEQ ID NO: 165354 - DNA, 15 bp, Homo sapiens
agcaggggcacttgc

SEQ ID NO: 165355 - DNA, 15 bp, Homo sapiens
aagcaggggcacttg

SEQ ID NO: 165356 - DNA, 15 bp, Homo sapiens
caagcaggggcactt

SEQ ID NO: 165357 - DNA, 15 bp, Homo sapiens
ccaagcaggggcact

SEQ ID NO: 165358 - DNA, 15 bp, Homo sapiens
gccaagcaggggcac

SEQ ID NO: 165359 - DNA, 15 bp, Homo sapiens
agccaagcaggggca

SEQ ID NO: 165360 - DNA, 15 bp, Homo sapiens
gagccaagcaggggc

SEQ ID NO: 165361 - DNA, 15 bp, Homo sapiens
agagccaagcagggg

SEQ ID NO: 165362 - DNA, 15 bp, Homo sapiens
aagagccaagcaggg

SEQ ID NO: 165363 - DNA, 15 bp, Homo sapiens
caagagccaagcagg

SEQ ID NO: 165364 - DNA, 15 bp, Homo sapiens
gcaagagccaagcag

SEQ ID NO: 165365 - DNA, 15 bp, Homo sapiens
agcaagagccaagca

SEQ ID NO: 165366 - DNA, 15 bp, Homo sapiens
cagcaagagccaagc

SEQ ID NO: 165367 - DNA, 15 bp, Homo sapiens
ccagcaagagccaag

SEQ ID NO: 165368 - DNA, 15 bp, Homo sapiens
cccagcaagagccaa

SEQ ID NO: 165369 - DNA, 15 bp, Homo sapiens
acccagcaagagcca

SEQ ID NO: 165370 - DNA, 15 bp, Homo sapiens
cacccagcaagagcc

SEQ ID NO: 165371 - DNA, 15 bp, Homo sapiens
ccacccagcaagagc

SEQ ID NO: 165372 - DNA, 15 bp, Homo sapiens
cccacccagcaagag

SEQ ID NO: 165373 - DNA, 15 bp, Homo sapiens
ccccacccagcaaga

SEQ ID NO: 165374 - DNA, 15 bp, Homo sapiens
tccccacccagcaag

SEQ ID NO: 165375 - DNA, 15 bp, Homo sapiens
ttccccacccagcaa

SEQ ID NO: 165376 - DNA, 15 bp, Homo sapiens
tttccccacccagca

SEQ ID NO: 165377 - DNA, 15 bp, Homo sapiens
ctttccccacccagc

SEQ ID NO: 165378 - DNA, 15 bp, Homo sapiens
actttccccacccag

SEQ ID NO: 165379 - DNA, 15 bp, Homo sapiens
cactttccccaccca

SEQ ID NO: 165380 - DNA, 15 bp, Homo sapiens
gcactttccccaccc

SEQ ID NO: 165381 - DNA, 15 bp, Homo sapiens
agcactttccccacc

SEQ ID NO: 165382 - DNA, 15 bp, Homo sapiens
aagcactttccccac

SEQ ID NO: 165383 - DNA, 15 bp, Homo sapiens
caagcactttcccca

SEQ ID NO: 165384 - DNA, 15 bp, Homo sapiens
ccaagcactttcccc

SEQ ID NO: 165385 - DNA, 15 bp, Homo sapiens
gccaagcactttccc

SEQ ID NO: 165386 - DNA, 15 bp, Homo sapiens
tgccaagcactttcc

SEQ ID NO: 165387 - DNA, 15 bp, Homo sapiens
atgccaagcactttc

SEQ ID NO: 165388 - DNA, 15 bp, Homo sapiens
tatgccaagcacttt

SEQ ID NO: 165389 - DNA, 15 bp, Homo sapiens
gtatgccaagcactt

SEQ ID NO: 165390 - DNA, 15 bp, Homo sapiens
tgtatgccaagcact

SEQ ID NO: 165391 - DNA, 15 bp, Homo sapiens
ctgtatgccaagcac

SEQ ID NO: 165392 - DNA, 15 bp, Homo sapiens
actgtatgccaagca

SEQ ID NO: 165393 - DNA, 15 bp, Homo sapiens
tactgtatgccaagc

SEQ ID NO: 165394 - DNA, 15 bp, Homo sapiens
ttactgtatgccaag

SEQ ID NO: 165395 - DNA, 15 bp, Homo sapiens
cttactgtatgccaa

SEQ ID NO: 165396 - DNA, 15 bp, Homo sapiens
gcttactgtatgcca

SEQ ID NO: 165397 - DNA, 15 bp, Homo sapiens
tgcttactgtatgcc

SEQ ID NO: 165398 - DNA, 15 bp, Homo sapiens
atgcttactgtatgc

SEQ ID NO: 165399 - DNA, 15 bp, Homo sapiens
aatgcttactgtatg

SEQ ID NO: 165400 - DNA, 15 bp, Homo sapiens
gaatgcttactgtat

SEQ ID NO: 165401 - DNA, 15 bp, Homo sapiens
tgaatgcttactgta

SEQ ID NO: 165402 - DNA, 15 bp, Homo sapiens
ctgaatgcttactgt

SEQ ID NO: 165403 - DNA, 15 bp, Homo sapiens
gctgaatgcttactg

SEQ ID NO: 165404 - DNA, 15 bp, Homo sapiens
tgctgaatgcttact

SEQ ID NO: 165405 - DNA, 15 bp, Homo sapiens
ctgctgaatgcttac

SEQ ID NO: 165406 - DNA, 15 bp, Homo sapiens
tctgctgaatgctta

SEQ ID NO: 165407 - DNA, 15 bp, Homo sapiens
ctctgctgaatgctt

SEQ ID NO: 165408 - DNA, 15 bp, Homo sapiens
cctctgctgaatgct

SEQ ID NO: 165409 - DNA, 15 bp, Homo sapiens
acctctgctgaatgc

SEQ ID NO: 165410 - DNA, 15 bp, Homo sapiens
aacctctgctgaatg

SEQ ID NO: 165411 - DNA, 15 bp, Homo sapiens
taacctctgctgaat

SEQ ID NO: 165412 - DNA, 15 bp, Homo sapiens
ctaacctctgctgaa

SEQ ID NO: 165413 - DNA, 15 bp, Homo sapiens
actaacctctgctga

SEQ ID NO: 165414 - DNA, 15 bp, Homo sapiens
cactaacctctgctg

SEQ ID NO: 165415 - DNA, 15 bp, Homo sapiens
ccactaacctctgct

SEQ ID NO: 165416 - DNA, 15 bp, Homo sapiens
gccactaacctctgc

SEQ ID NO: 165417 - DNA, 15 bp, Homo sapiens
tgccactaacctctg

SEQ ID NO: 165418 - DNA, 15 bp, Homo sapiens
atgccactaacctct

SEQ ID NO: 165419 - DNA, 15 bp, Homo sapiens
catgccactaacctc

SEQ ID NO: 165420 - DNA, 15 bp, Homo sapiens
gcatgccactaacct

SEQ ID NO: 165421 - DNA, 15 bp, Homo sapiens
tgcatgccactaacc

SEQ ID NO: 165422 - DNA, 15 bp, Homo sapiens
ctgcatgccactaac

SEQ ID NO: 165423 - DNA, 15 bp, Homo sapiens
gctgcatgccactaa

SEQ ID NO: 165424 - DNA, 15 bp, Homo sapiens
ggctgcatgccacta

SEQ ID NO: 165425 - DNA, 15 bp, Homo sapiens
aggctgcatgccact

SEQ ID NO: 165426 - DNA, 15 bp, Homo sapiens
gaggctgcatgccac

SEQ ID NO: 165427 - DNA, 15 bp, Homo sapiens
ggaggctgcatgcca

SEQ ID NO: 165428 - DNA, 15 bp, Homo sapiens
cggaggctgcatgcc

SEQ ID NO: 165429 - DNA, 15 bp, Homo sapiens
tcggaggctgcatgc

SEQ ID NO: 165430 - DNA, 15 bp, Homo sapiens
ctcggaggctgcatg

SEQ ID NO: 165431 - DNA, 15 bp, Homo sapiens
cctcggaggctgcat

SEQ ID NO: 165432 - DNA, 15 bp, Homo sapiens
tcctcggaggctgca

SEQ ID NO: 165433 - DNA, 15 bp, Homo sapiens
ctcctcggaggctgc

SEQ ID NO: 165434 - DNA, 15 bp, Homo sapiens
cctcctcggaggctg

SEQ ID NO: 165435 - DNA, 15 bp, Homo sapiens
ccctcctcggaggct

SEQ ID NO: 165436 - DNA, 15 bp, Homo sapiens
cccctcctcggaggc

SEQ ID NO: 165437 - DNA, 15 bp, Homo sapiens
tcccctcctcggagg

SEQ ID NO: 165438 - DNA, 15 bp, Homo sapiens
ctcccctcctcggag

SEQ ID NO: 165439 - DNA, 15 bp, Homo sapiens
cctcccctcctcgga

SEQ ID NO: 165440 - DNA, 15 bp, Homo sapiens
ccctcccctcctcgg

SEQ ID NO: 165441 - DNA, 15 bp, Homo sapiens
cccctcccctcctcg

SEQ ID NO: 165442 - DNA, 15 bp, Homo sapiens
acccctcccctcctc

SEQ ID NO: 165443 - DNA, 15 bp, Homo sapiens
gacccctcccctcct

SEQ ID NO: 165444 - DNA, 15 bp, Homo sapiens
agacccctcccctcc

SEQ ID NO: 165445 - DNA, 15 bp, Homo sapiens
aagacccctcccctc

SEQ ID NO: 165446 - DNA, 15 bp, Homo sapiens
caagacccctcccct

SEQ ID NO: 165447 - DNA, 15 bp, Homo sapiens
ccaagacccctcccc

SEQ ID NO: 165448 - DNA, 15 bp, Homo sapiens
cccaagacccctccc

SEQ ID NO: 165449 - DNA, 15 bp, Homo sapiens
ccccaagacccctcc

SEQ ID NO: 165450 - DNA, 15 bp, Homo sapiens
tccccaagacccctc

SEQ ID NO: 165451 - DNA, 15 bp, Homo sapiens
ttccccaagacccct

SEQ ID NO: 165452 - DNA, 15 bp, Homo sapiens
cttccccaagacccc

SEQ ID NO: 165453 - DNA, 15 bp, Homo sapiens
ccttccccaagaccc

SEQ ID NO: 165454 - DNA, 15 bp, Homo sapiens
cccttccccaagacc

SEQ ID NO: 165455 - DNA, 15 bp, Homo sapiens
tcccttccccaagac

SEQ ID NO: 165456 - DNA, 15 bp, Homo sapiens
ctcccttccccaaga

SEQ ID NO: 165457 - DNA, 15 bp, Homo sapiens
cctcccttccccaag

SEQ ID NO: 165458 - DNA, 15 bp, Homo sapiens
ccctcccttccccaa

SEQ ID NO: 165459 - DNA, 15 bp, Homo sapiens
tccctcccttcccca

SEQ ID NO: 165460 - DNA, 15 bp, Homo sapiens
ttccctcccttcccc

SEQ ID NO: 165461 - DNA, 15 bp, Homo sapiens
tttccctcccttccc

SEQ ID NO: 165462 - DNA, 15 bp, Homo sapiens
ctttccctcccttcc

SEQ ID NO: 165463 - DNA, 15 bp, Homo sapiens
cctttccctcccttc

SEQ ID NO: 165464 - DNA, 15 bp, Homo sapiens
ccctttccctccctt

SEQ ID NO: 165465 - DNA, 15 bp, Homo sapiens
gccctttccctccct

SEQ ID NO: 165466 - DNA, 15 bp, Homo sapiens
ggccctttccctccc

SEQ ID NO: 165467 - DNA, 15 bp, Homo sapiens
tggccctttccctcc

SEQ ID NO: 165468 - DNA, 15 bp, Homo sapiens
atggccctttccctc

SEQ ID NO: 165469 - DNA, 15 bp, Homo sapiens
catggccctttccct

SEQ ID NO: 165470 - DNA, 15 bp, Homo sapiens
ccatggccctttccc

SEQ ID NO: 165471 - DNA, 15 bp, Homo sapiens
gccatggccctttcc

SEQ ID NO: 165472 - DNA, 15 bp, Homo sapiens
ggccatggccctttc

SEQ ID NO: 165473 - DNA, 15 bp, Homo sapiens
tggccatggcccttt

SEQ ID NO: 165474 - DNA, 15 bp, Homo sapiens
ctggccatggccctt

SEQ ID NO: 165475 - DNA, 15 bp, Homo sapiens
actggccatggccct

SEQ ID NO: 165476 - DNA, 15 bp, Homo sapiens
gactggccatggccc

SEQ ID NO: 165477 - DNA, 15 bp, Homo sapiens
tgactggccatggcc

SEQ ID NO: 165478 - DNA, 15 bp, Homo sapiens
gtgactggccatggc

SEQ ID NO: 165479 - DNA, 15 bp, Homo sapiens
tgtgactggccatgg

SEQ ID NO: 165480 - DNA, 15 bp, Homo sapiens
ttgtgactggccatg

SEQ ID NO: 165481 - DNA, 15 bp, Homo sapiens
cttgtgactggccat

SEQ ID NO: 165482 - DNA, 15 bp, Homo sapiens
gcttgtgactggcca

SEQ ID NO: 165483 - DNA, 15 bp, Homo sapiens
tgcttgtgactggcc

SEQ ID NO: 165484 - DNA, 15 bp, Homo sapiens
ctgcttgtgactggc

SEQ ID NO: 165485 - DNA, 15 bp, Homo sapiens
cctgcttgtgactgg

SEQ ID NO: 165486 - DNA, 15 bp, Homo sapiens
ccctgcttgtgactg

SEQ ID NO: 165487 - DNA, 15 bp, Homo sapiens
tccctgcttgtgact

SEQ ID NO: 165488 - DNA, 15 bp, Homo sapiens
gtccctgcttgtgac

SEQ ID NO: 165489 - DNA, 15 bp, Homo sapiens
agtccctgcttgtga

SEQ ID NO: 165490 - DNA, 15 bp, Homo sapiens
gagtccctgcttgtg

SEQ ID NO: 165491 - DNA, 15 bp, Homo sapiens
tgagtccctgcttgt

SEQ ID NO: 165492 - DNA, 15 bp, Homo sapiens
ctgagtccctgcttg

SEQ ID NO: 165493 - DNA, 15 bp, Homo sapiens
tctgagtccctgctt

SEQ ID NO: 165494 - DNA, 15 bp, Homo sapiens
ctctgagtccctgct

SEQ ID NO: 165495 - DNA, 15 bp, Homo sapiens
tctctgagtccctgc

SEQ ID NO: 165496 - DNA, 15 bp, Homo sapiens
gtctctgagtccctg

SEQ ID NO: 165497 - DNA, 15 bp, Homo sapiens
agtctctgagtccct

SEQ ID NO: 165498 - DNA, 15 bp, Homo sapiens
cagtctctgagtccc

SEQ ID NO: 165499 - DNA, 15 bp, Homo sapiens
acagtctctgagtcc

SEQ ID NO: 165500 - DNA, 15 bp, Homo sapiens
aacagtctctgagtc

SEQ ID NO: 165501 - DNA, 15 bp, Homo sapiens
gaacagtctctgagt

SEQ ID NO: 165502 - DNA, 15 bp, Homo sapiens
agaacagtctctgag

SEQ ID NO: 165503 - DNA, 15 bp, Homo sapiens
aagaacagtctctga

SEQ ID NO: 165504 - DNA, 15 bp, Homo sapiens
aaagaacagtctctg

SEQ ID NO: 165505 - DNA, 15 bp, Homo sapiens
gaaagaacagtctct

SEQ ID NO: 165506 - DNA, 15 bp, Homo sapiens
agaaagaacagtctc

SEQ ID NO: 165507 - DNA, 15 bp, Homo sapiens
cagaaagaacagtct

SEQ ID NO: 165508 - DNA, 15 bp, Homo sapiens
gcagaaagaacagtc

SEQ ID NO: 165509 - DNA, 15 bp, Homo sapiens
agcagaaagaacagt

SEQ ID NO: 165510 - DNA, 15 bp, Homo sapiens
gagcagaaagaacag

SEQ ID NO: 165511 - DNA, 15 bp, Homo sapiens
ggagcagaaagaaca

SEQ ID NO: 165512 - DNA, 15 bp, Homo sapiens
gggagcagaaagaac

SEQ ID NO: 165513 - DNA, 15 bp, Homo sapiens
tgggagcagaaagaa

SEQ ID NO: 165514 - DNA, 15 bp, Homo sapiens
ctgggagcagaaaga

SEQ ID NO: 165515 - DNA, 15 bp, Homo sapiens
tctgggagcagaaag

SEQ ID NO: 165516 - DNA, 15 bp, Homo sapiens
gtctgggagcagaaa

SEQ ID NO: 165517 - DNA, 15 bp, Homo sapiens
agtctgggagcagaa

SEQ ID NO: 165518 - DNA, 15 bp, Homo sapiens
aagtctgggagcaga

SEQ ID NO: 165519 - DNA, 15 bp, Homo sapiens
caagtctgggagcag

SEQ ID NO: 165520 - DNA, 15 bp, Homo sapiens
acaagtctgggagca

SEQ ID NO: 165521 - DNA, 15 bp, Homo sapiens
aacaagtctgggagc

SEQ ID NO: 165522 - DNA, 15 bp, Homo sapiens
gaacaagtctgggag

SEQ ID NO: 165523 - DNA, 15 bp, Homo sapiens
agaacaagtctggga

SEQ ID NO: 165524 - DNA, 15 bp, Homo sapiens
cagaacaagtctggg

SEQ ID NO: 165525 - DNA, 15 bp, Homo sapiens
gcagaacaagtctgg

SEQ ID NO: 165526 - DNA, 15 bp, Homo sapiens
tgcagaacaagtctg

SEQ ID NO: 165527 - DNA, 15 bp, Homo sapiens
ttgcagaacaagtct

SEQ ID NO: 165528 - DNA, 15 bp, Homo sapiens
gttgcagaacaagtc

SEQ ID NO: 165529 - DNA, 15 bp, Homo sapiens
ggttgcagaacaagt

SEQ ID NO: 165530 - DNA, 15 bp, Homo sapiens
cggttgcagaacaag

SEQ ID NO: 165531 - DNA, 15 bp, Homo sapiens
ccggttgcagaacaa

SEQ ID NO: 165532 - DNA, 15 bp, Homo sapiens
tccggttgcagaaca

SEQ ID NO: 165533 - DNA, 15 bp, Homo sapiens
gtccggttgcagaac

SEQ ID NO: 165534 - DNA, 15 bp, Homo sapiens
ggtccggttgcagaa

SEQ ID NO: 165535 - DNA, 15 bp, Homo sapiens
aggtccggttgcaga

SEQ ID NO: 165536 - DNA, 15 bp, Homo sapiens
aaggtccggttgcag

SEQ ID NO: 165537 - DNA, 15 bp, Homo sapiens
gaaggtccggttgca

SEQ ID NO: 165538 - DNA, 15 bp, Homo sapiens
cgaaggtccggttgc

SEQ ID NO: 165539 - DNA, 15 bp, Homo sapiens
tcgaaggtccggttg

SEQ ID NO: 165540 - DNA, 15 bp, Homo sapiens
atcgaaggtccggtt

SEQ ID NO: 165541 - DNA, 15 bp, Homo sapiens
catcgaaggtccggt

SEQ ID NO: 165542 - DNA, 15 bp, Homo sapiens
tcatcgaaggtccgg

SEQ ID NO: 165543 - DNA, 15 bp, Homo sapiens
ttcatcgaaggtccg

SEQ ID NO: 165544 - DNA, 15 bp, Homo sapiens
attcatcgaaggtcc

SEQ ID NO: 165545 - DNA, 15 bp, Homo sapiens
tattcatcgaaggtc

SEQ ID NO: 165546 - DNA, 15 bp, Homo sapiens
gtattcatcgaaggt

SEQ ID NO: 165547 - DNA, 15 bp, Homo sapiens
cgtattcatcgaagg

SEQ ID NO: 165548 - DNA, 15 bp, Homo sapiens
gcgtattcatcgaag

SEQ ID NO: 165549 - DNA, 15 bp, Homo sapiens
ggcgtattcatcgaa

SEQ ID NO: 165550 - DNA, 15 bp, Homo sapiens
aggcgtattcatcga

SEQ ID NO: 165551 - DNA, 15 bp, Homo sapiens
caggcgtattcatcg

SEQ ID NO: 165552 - DNA, 15 bp, Homo sapiens
gcaggcgtattcatc

SEQ ID NO: 165553 - DNA, 15 bp, Homo sapiens
agcaggcgtattcat

SEQ ID NO: 165554 - DNA, 15 bp, Homo sapiens
cagcaggcgtattca

SEQ ID NO: 165555 - DNA, 15 bp, Homo sapiens
ccagcaggcgtattc

SEQ ID NO: 165556 - DNA, 15 bp, Homo sapiens
gccagcaggcgtatt

SEQ ID NO: 165557 - DNA, 15 bp, Homo sapiens
ggccagcaggcgtat

SEQ ID NO: 165558 - DNA, 15 bp, Homo sapiens
tggccagcaggcgta

SEQ ID NO: 165559 - DNA, 15 bp, Homo sapiens
ctggccagcaggcgt

SEQ ID NO: 165560 - DNA, 15 bp, Homo sapiens
tctggccagcaggcg

SEQ ID NO: 165561 - DNA, 15 bp, Homo sapiens
atctggccagcaggc

SEQ ID NO: 165562 - DNA, 15 bp, Homo sapiens
catctggccagcagg

SEQ ID NO: 165563 - DNA, 15 bp, Homo sapiens
ccatctggccagcag

SEQ ID NO: 165564 - DNA, 15 bp, Homo sapiens
cccatctggccagca

SEQ ID NO: 165565 - DNA, 15 bp, Homo sapiens
ccccatctggccagc

SEQ ID NO: 165566 - DNA, 15 bp, Homo sapiens
tccccatctggccag

SEQ ID NO: 165567 - DNA, 15 bp, Homo sapiens
ctccccatctggcca

SEQ ID NO: 165568 - DNA, 15 bp, Homo sapiens
gctccccatctggcc

SEQ ID NO: 165569 - DNA, 15 bp, Homo sapiens
ggctccccatctggc

SEQ ID NO: 165570 - DNA, 15 bp, Homo sapiens
tggctccccatctgg

SEQ ID NO: 165571 - DNA, 15 bp, Homo sapiens
ctggctccccatctg

SEQ ID NO: 165572 - DNA, 15 bp, Homo sapiens
cctggctccccatct

SEQ ID NO: 165573 - DNA, 15 bp, Homo sapiens
gcctggctccccatc

SEQ ID NO: 165574 - DNA, 15 bp, Homo sapiens
agcctggctccccat

SEQ ID NO: 165575 - DNA, 15 bp, Homo sapiens
gagcctggctcccca

SEQ ID NO: 165576 - DNA, 15 bp, Homo sapiens
cgagcctggctcccc

SEQ ID NO: 165577 - DNA, 15 bp, Homo sapiens
acgagcctggctccc

SEQ ID NO: 165578 - DNA, 15 bp, Homo sapiens
aacgagcctggctcc

SEQ ID NO: 165579 - DNA, 15 bp, Homo sapiens
gaacgagcctggctc

SEQ ID NO: 165580 - DNA, 15 bp, Homo sapiens
cgaacgagcctggct

SEQ ID NO: 165581 - DNA, 15 bp, Homo sapiens
acgaacgagcctggc

SEQ ID NO: 165582 - DNA, 15 bp, Homo sapiens
cacgaacgagcctgg

SEQ ID NO: 165583 - DNA, 15 bp, Homo sapiens
tcacgaacgagcctg

SEQ ID NO: 165584 - DNA, 15 bp, Homo sapiens
ttcacgaacgagcct

SEQ ID NO: 165585 - DNA, 15 bp, Homo sapiens
attcacgaacgagcc

SEQ ID NO: 165586 - DNA, 15 bp, Homo sapiens
cattcacgaacgagc

SEQ ID NO: 165587 - DNA, 15 bp, Homo sapiens
acattcacgaacgag

SEQ ID NO: 165588 - DNA, 15 bp, Homo sapiens
gacattcacgaacga

SEQ ID NO: 165589 - DNA, 15 bp, Homo sapiens
tgacattcacgaacg

SEQ ID NO: 165590 - DNA, 15 bp, Homo sapiens
ctgacattcacgaac

SEQ ID NO: 165591 - DNA, 15 bp, Homo sapiens
gctgacattcacgaa

SEQ ID NO: 165592 - DNA, 15 bp, Homo sapiens
agctgacattcacga

SEQ ID NO: 165593 - DNA, 15 bp, Homo sapiens
cagctgacattcacg

SEQ ID NO: 165594 - DNA, 15 bp, Homo sapiens
gcagctgacattcac

SEQ ID NO: 165595 - DNA, 15 bp, Homo sapiens
ggcagctgacattca

SEQ ID NO: 165596 - DNA, 15 bp, Homo sapiens
gggcagctgacattc

SEQ ID NO: 165597 - DNA, 15 bp, Homo sapiens
ggggcagctgacatt

SEQ ID NO: 165598 - DNA, 15 bp, Homo sapiens
aggggcagctgacat

SEQ ID NO: 165599 - DNA, 15 bp, Homo sapiens
caggggcagctgaca

SEQ ID NO: 165600 - DNA, 15 bp, Homo sapiens
ccaggggcagctgac

SEQ ID NO: 165601 - DNA, 15 bp, Homo sapiens
accaggggcagctga

SEQ ID NO: 165602 - DNA, 15 bp, Homo sapiens
taccaggggcagctg

SEQ ID NO: 165603 - DNA, 15 bp, Homo sapiens
gtaccaggggcagct

SEQ ID NO: 165604 - DNA, 15 bp, Homo sapiens
ggtaccaggggcagc

SEQ ID NO: 165605 - DNA, 15 bp, Homo sapiens
aggtaccaggggcag

SEQ ID NO: 165606 - DNA, 15 bp, Homo sapiens
caggtaccaggggca

SEQ ID NO: 165607 - DNA, 15 bp, Homo sapiens
gcaggtaccaggggc

SEQ ID NO: 165608 - DNA, 15 bp, Homo sapiens
ggcaggtaccagggg

SEQ ID NO: 165609 - DNA, 15 bp, Homo sapiens
gggcaggtaccaggg

SEQ ID NO: 165610 - DNA, 15 bp, Homo sapiens
agggcaggtaccagg

SEQ ID NO: 165611 - DNA, 15 bp, Homo sapiens
cagggcaggtaccag

SEQ ID NO: 165612 - DNA, 15 bp, Homo sapiens
ccagggcaggtacca

SEQ ID NO: 165613 - DNA, 15 bp, Homo sapiens
cccagggcaggtacc

SEQ ID NO: 165614 - DNA, 15 bp, Homo sapiens
gcccagggcaggtac

SEQ ID NO: 165615 - DNA, 15 bp, Homo sapiens
ggcccagggcaggta

SEQ ID NO: 165616 - DNA, 15 bp, Homo sapiens
tggcccagggcaggt

SEQ ID NO: 165617 - DNA, 15 bp, Homo sapiens
ctggcccagggcagg

SEQ ID NO: 165618 - DNA, 15 bp, Homo sapiens
gctggcccagggcag

SEQ ID NO: 165619 - DNA, 15 bp, Homo sapiens
tgctggcccagggca

SEQ ID NO: 165620 - DNA, 15 bp, Homo sapiens
ctgctggcccagggc

SEQ ID NO: 165621 - DNA, 15 bp, Homo sapiens
actgctggcccaggg

SEQ ID NO: 165622 - DNA, 15 bp, Homo sapiens
cactgctggcccagg

SEQ ID NO: 165623 - DNA, 15 bp, Homo sapiens
ccactgctggcccag

SEQ ID NO: 165624 - DNA, 15 bp, Homo sapiens
accactgctggccca

SEQ ID NO: 165625 - DNA, 15 bp, Homo sapiens
caccactgctggccc

SEQ ID NO: 165626 - DNA, 15 bp, Homo sapiens
tcaccactgctggcc

SEQ ID NO: 165627 - DNA, 15 bp, Homo sapiens
ctcaccactgctggc

SEQ ID NO: 165628 - DNA, 15 bp, Homo sapiens
gctcaccactgctgg

SEQ ID NO: 165629 - DNA, 15 bp, Homo sapiens
ggctcaccactgctg

SEQ ID NO: 165630 - DNA, 15 bp, Homo sapiens
gggctcaccactgct

SEQ ID NO: 165631 - DNA, 15 bp, Homo sapiens
ggggctcaccactgc

SEQ ID NO: 165632 - DNA, 15 bp, Homo sapiens
gggggctcaccactg

SEQ ID NO: 165633 - DNA, 15 bp, Homo sapiens
agggggctcaccact

SEQ ID NO: 165634 - DNA, 15 bp, Homo sapiens
gagggggctcaccac

SEQ ID NO: 165635 - DNA, 15 bp, Homo sapiens
ggagggggctcacca

SEQ ID NO: 165636 - DNA, 15 bp, Homo sapiens
gggagggggctcacc

SEQ ID NO: 165637 - DNA, 15 bp, Homo sapiens
ggggagggggctcac

SEQ ID NO: 165638 - DNA, 15 bp, Homo sapiens
cggggagggggctca

SEQ ID NO: 165639 - DNA, 15 bp, Homo sapiens
tcggggagggggctc

SEQ ID NO: 165640 - DNA, 15 bp, Homo sapiens
gtcggggagggggct

SEQ ID NO: 165641 - DNA, 15 bp, Homo sapiens
ggtcggggagggggc

SEQ ID NO: 165642 - DNA, 15 bp, Homo sapiens
aggtcggggaggggg

SEQ ID NO: 165643 - DNA, 15 bp, Homo sapiens
caggtcggggagggg

SEQ ID NO: 165644 - DNA, 15 bp, Homo sapiens
ccaggtcggggaggg

SEQ ID NO: 165645 - DNA, 15 bp, Homo sapiens
accaggtcggggagg

SEQ ID NO: 165646 - DNA, 15 bp, Homo sapiens
taccaggtcggggag

SEQ ID NO: 165647 - DNA, 15 bp, Homo sapiens
gtaccaggtcgggga

SEQ ID NO: 165648 - DNA, 15 bp, Homo sapiens
ggtaccaggtcgggg

SEQ ID NO: 165649 - DNA, 15 bp, Homo sapiens
aggtaccaggtcggg

SEQ ID NO: 165650 - DNA, 15 bp, Homo sapiens
caggtaccaggtcgg

SEQ ID NO: 165651 - DNA, 15 bp, Homo sapiens
gcaggtaccaggtcg

SEQ ID NO: 165652 - DNA, 15 bp, Homo sapiens
ggcaggtaccaggtc

SEQ ID NO: 165653 - DNA, 15 bp, Homo sapiens
gggcaggtaccaggt

SEQ ID NO: 165654 - DNA, 15 bp, Homo sapiens
ttcaccactgctggc

SEQ ID NO: 165655 - DNA, 15 bp, Homo sapiens
gttcaccactgctgg

SEQ ID NO: 165656 - DNA, 15 bp, Homo sapiens
ggttcaccactgctg

SEQ ID NO: 165657 - DNA, 15 bp, Homo sapiens
gggttcaccactgct

SEQ ID NO: 165658 - DNA, 15 bp, Homo sapiens
ggggttcaccactgc

SEQ ID NO: 165659 - DNA, 15 bp, Homo sapiens
gggggttcaccactg

SEQ ID NO: 165660 - DNA, 15 bp, Homo sapiens
agggggttcaccact

SEQ ID NO: 165661 - DNA, 15 bp, Homo sapiens
gagggggttcaccac

SEQ ID NO: 165662 - DNA, 15 bp, Homo sapiens
ggagggggttcacca

SEQ ID NO: 165663 - DNA, 15 bp, Homo sapiens
gggagggggttcacc

SEQ ID NO: 165664 - DNA, 15 bp, Homo sapiens
ggggagggggttcac

SEQ ID NO: 165665 - DNA, 15 bp, Homo sapiens
cggggagggggttca

SEQ ID NO: 165666 - DNA, 15 bp, Homo sapiens
tcggggagggggttc

SEQ ID NO: 165667 - DNA, 15 bp, Homo sapiens
gtcggggagggggtt

SEQ ID NO: 165668 - DNA, 15 bp, Homo sapiens
ggtcggggagggggt

SEQ ID NO: 165669 - DNA, 15 bp, Homo sapiens
ataccaggtcgggga

SEQ ID NO: 165670 - DNA, 15 bp, Homo sapiens
gataccaggtcgggg

SEQ ID NO: 165671 - DNA, 15 bp, Homo sapiens
agataccaggtcggg

SEQ ID NO: 165672 - DNA, 15 bp, Homo sapiens
cagataccaggtcgg

SEQ ID NO: 165673 - DNA, 15 bp, Homo sapiens
gcagataccaggtcg

SEQ ID NO: 165674 - DNA, 15 bp, Homo sapiens
ggcagataccaggtc

SEQ ID NO: 165675 - DNA, 15 bp, Homo sapiens
gggcagataccaggt

SEQ ID NO: 165676 - DNA, 15 bp, Homo sapiens
agggcagataccagg

SEQ ID NO: 165677 - DNA, 15 bp, Homo sapiens
cagggcagataccag

SEQ ID NO: 165678 - DNA, 15 bp, Homo sapiens
ccagggcagatacca

SEQ ID NO: 165679 - DNA, 15 bp, Homo sapiens
cccagggcagatacc

SEQ ID NO: 165680 - DNA, 15 bp, Homo sapiens
gcccagggcagatac

SEQ ID NO: 165681 - DNA, 15 bp, Homo sapiens
ggcccagggcagata

SEQ ID NO: 165682 - DNA, 15 bp, Homo sapiens
tggcccagggcagat

SEQ ID NO: 165683 - DNA, 15 bp, Homo sapiens
ctggcccagggcaga

SEQ ID NO: 165684 - DNA, 15 bp, Homo sapiens
tcaggtcggggaggg

SEQ ID NO: 165685 - DNA, 15 bp, Homo sapiens
atcaggtcggggagg

SEQ ID NO: 165686 - DNA, 15 bp, Homo sapiens
tatcaggtcggggag

SEQ ID NO: 165687 - DNA, 15 bp, Homo sapiens
gtatcaggtcgggga

SEQ ID NO: 165688 - DNA, 15 bp, Homo sapiens
ggtatcaggtcgggg

SEQ ID NO: 165689 - DNA, 15 bp, Homo sapiens
aggtatcaggtcggg

SEQ ID NO: 165690 - DNA, 15 bp, Homo sapiens
caggtatcaggtcgg

SEQ ID NO: 165691 - DNA, 15 bp, Homo sapiens
gcaggtatcaggtcg

SEQ ID NO: 165692 - DNA, 15 bp, Homo sapiens
ggcaggtatcaggtc

SEQ ID NO: 165693 - DNA, 15 bp, Homo sapiens
gggcaggtatcaggt

SEQ ID NO: 165694 - DNA, 15 bp, Homo sapiens
agggcaggtatcagg

SEQ ID NO: 165695 - DNA, 15 bp, Homo sapiens
cagggcaggtatcag

SEQ ID NO: 165696 - DNA, 15 bp, Homo sapiens
ccagggcaggtatca

SEQ ID NO: 165697 - DNA, 15 bp, Homo sapiens
cccagggcaggtatc

SEQ ID NO: 165698 - DNA, 15 bp, Homo sapiens
gcccagggcaggtat

SEQ ID NO: 165699 - DNA, 15 bp, Homo sapiens
agggagggggctcac

SEQ ID NO: 165700 - DNA, 15 bp, Homo sapiens
cagggagggggctca

SEQ ID NO: 165701 - DNA, 15 bp, Homo sapiens
tcagggagggggctc

SEQ ID NO: 165702 - DNA, 15 bp, Homo sapiens
gtcagggagggggct

SEQ ID NO: 165703 - DNA, 15 bp, Homo sapiens
ggtcagggagggggc

SEQ ID NO: 165704 - DNA, 15 bp, Homo sapiens
aggtcagggaggggg

SEQ ID NO: 165705 - DNA, 15 bp, Homo sapiens
caggtcagggagggg

SEQ ID NO: 165706 - DNA, 15 bp, Homo sapiens
ccaggtcagggaggg

SEQ ID NO: 165707 - DNA, 15 bp, Homo sapiens
accaggtcagggagg

SEQ ID NO: 165708 - DNA, 15 bp, Homo sapiens
taccaggtcagggag

SEQ ID NO: 165709 - DNA, 15 bp, Homo sapiens
gtaccaggtcaggga

SEQ ID NO: 165710 - DNA, 15 bp, Homo sapiens
ggtaccaggtcaggg

SEQ ID NO: 165711 - DNA, 15 bp, Homo sapiens
aggtaccaggtcagg

SEQ ID NO: 165712 - DNA, 15 bp, Homo sapiens
caggtaccaggtcag

SEQ ID NO: 165713 - DNA, 15 bp, Homo sapiens
gcaggtaccaggtca

SEQ ID NO: 165714 - DNA, 15 bp, Homo sapiens
tagggagggggctca

SEQ ID NO: 165715 - DNA, 15 bp, Homo sapiens
ttagggagggggctc

SEQ ID NO: 165716 - DNA, 15 bp, Homo sapiens
gttagggagggggct

SEQ ID NO: 165717 - DNA, 15 bp, Homo sapiens
ggttagggagggggc

SEQ ID NO: 165718 - DNA, 15 bp, Homo sapiens
aggttagggaggggg

SEQ ID NO: 165719 - DNA, 15 bp, Homo sapiens
caggttagggagggg

SEQ ID NO: 165720 - DNA, 15 bp, Homo sapiens
ccaggttagggaggg

SEQ ID NO: 165721 - DNA, 15 bp, Homo sapiens
accaggttagggagg

SEQ ID NO: 165722 - DNA, 15 bp, Homo sapiens
taccaggttagggag

SEQ ID NO: 165723 - DNA, 15 bp, Homo sapiens
gtaccaggttaggga

SEQ ID NO: 165724 - DNA, 15 bp, Homo sapiens
ggtaccaggttaggg

SEQ ID NO: 165725 - DNA, 15 bp, Homo sapiens
aggtaccaggttagg

SEQ ID NO: 165726 - DNA, 15 bp, Homo sapiens
caggtaccaggttag

SEQ ID NO: 165727 - DNA, 15 bp, Homo sapiens
gcaggtaccaggtta

SEQ ID NO: 165728 - DNA, 15 bp, Homo sapiens
ggcaggtaccaggtt

SEQ ID NO: 165729 - DNA, 15 bp, Homo sapiens
cggcaggtaccaggt

SEQ ID NO: 165730 - DNA, 15 bp, Homo sapiens
acggcaggtaccagg

SEQ ID NO: 165731 - DNA, 15 bp, Homo sapiens
cacggcaggtaccag

SEQ ID NO: 165732 - DNA, 15 bp, Homo sapiens
ccacggcaggtacca

SEQ ID NO: 165733 - DNA, 15 bp, Homo sapiens
cccacggcaggtacc

SEQ ID NO: 165734 - DNA, 15 bp, Homo sapiens
acccacggcaggtac

SEQ ID NO: 165735 - DNA, 15 bp, Homo sapiens
gacccacggcaggta

SEQ ID NO: 165736 - DNA, 15 bp, Homo sapiens
tgacccacggcaggt

SEQ ID NO: 165737 - DNA, 15 bp, Homo sapiens
ctgacccacggcagg

SEQ ID NO: 165738 - DNA, 15 bp, Homo sapiens
gctgacccacggcag

SEQ ID NO: 165739 - DNA, 15 bp, Homo sapiens
tgctgacccacggca

SEQ ID NO: 165740 - DNA, 15 bp, Homo sapiens
ctgctgacccacggc

SEQ ID NO: 165741 - DNA, 15 bp, Homo sapiens
actgctgacccacgg

SEQ ID NO: 165742 - DNA, 15 bp, Homo sapiens
cactgctgacccacg

SEQ ID NO: 165743 - DNA, 15 bp, Homo sapiens
ccactgctgacccac

SEQ ID NO: 165744 - DNA, 15 bp, Homo sapiens
accactgctgaccca

SEQ ID NO: 165745 - DNA, 15 bp, Homo sapiens
caccactgctgaccc

SEQ ID NO: 165746 - DNA, 15 bp, Homo sapiens
tcaccactgctgacc

SEQ ID NO: 165747 - DNA, 15 bp, Homo sapiens
ctcaccactgctgac

SEQ ID NO: 165748 - DNA, 15 bp, Homo sapiens
gctcaccactgctga

SEQ ID NO: 165749 - DNA, 15 bp, Homo sapiens
acccagggcaggtac

SEQ ID NO: 165750 - DNA, 15 bp, Homo sapiens
gacccagggcaggta

SEQ ID NO: 165751 - DNA, 15 bp, Homo sapiens
tgacccagggcaggt

SEQ ID NO: 165752 - DNA, 15 bp, Homo sapiens
ctgacccagggcagg

SEQ ID NO: 165753 - DNA, 15 bp, Homo sapiens
gctgacccagggcag

SEQ ID NO: 165754 - DNA, 15 bp, Homo sapiens
tgctgacccagggca

SEQ ID NO: 165755 - DNA, 15 bp, Homo sapiens
ctgctgacccagggc

SEQ ID NO: 165756 - DNA, 15 bp, Homo sapiens
actgctgacccaggg

SEQ ID NO: 165757 - DNA, 15 bp, Homo sapiens
cactgctgacccagg

SEQ ID NO: 165758 - DNA, 15 bp, Homo sapiens
ccactgctgacccag

SEQ ID NO: 165759 - DNA, 15 bp, Homo sapiens
agctcaccactgctg

SEQ ID NO: 165760 - DNA, 15 bp, Homo sapiens
gagctcaccactgct

SEQ ID NO: 165761 - DNA, 15 bp, Homo sapiens
ggagctcaccactgc

SEQ ID NO: 165762 - DNA, 15 bp, Homo sapiens
gggagctcaccactg

SEQ ID NO: 165763 - DNA, 15 bp, Homo sapiens
agggagctcaccact

SEQ ID NO: 165764 - DNA, 15 bp, Homo sapiens
gagggagctcaccac

SEQ ID NO: 165765 - DNA, 15 bp, Homo sapiens
ggagggagctcacca

SEQ ID NO: 165766 - DNA, 15 bp, Homo sapiens
gggagggagctcacc

SEQ ID NO: 165767 - DNA, 15 bp, Homo sapiens
ggggagggagctcac

SEQ ID NO: 165768 - DNA, 15 bp, Homo sapiens
gggggagggagctca

SEQ ID NO: 165769 - DNA, 15 bp, Homo sapiens
tgggggagggagctc

SEQ ID NO: 165770 - DNA, 15 bp, Homo sapiens
gtgggggagggagct

SEQ ID NO: 165771 - DNA, 15 bp, Homo sapiens
ggtgggggagggagc

SEQ ID NO: 165772 - DNA, 15 bp, Homo sapiens
cggtgggggagggag

SEQ ID NO: 165773 - DNA, 15 bp, Homo sapiens
acggtgggggaggga

SEQ ID NO: 165774 - DNA, 15 bp, Homo sapiens
gacggtgggggaggg

SEQ ID NO: 165775 - DNA, 15 bp, Homo sapiens
ggacggtgggggagg

SEQ ID NO: 165776 - DNA, 15 bp, Homo sapiens
gggacggtgggggag

SEQ ID NO: 165777 - DNA, 15 bp, Homo sapiens
ggggacggtggggga

SEQ ID NO: 165778 - DNA, 15 bp, Homo sapiens
aggggacggtggggg

SEQ ID NO: 165779 - DNA, 15 bp, Homo sapiens
caggggacggtgggg

SEQ ID NO: 165780 - DNA, 15 bp, Homo sapiens
acaggggacggtggg

SEQ ID NO: 165781 - DNA, 15 bp, Homo sapiens
tacaggggacggtgg

SEQ ID NO: 165782 - DNA, 15 bp, Homo sapiens
atacaggggacggtg

SEQ ID NO: 165783 - DNA, 15 bp, Homo sapiens
gatacaggggacggt

SEQ ID NO: 165784 - DNA, 15 bp, Homo sapiens
cgatacaggggacgg

SEQ ID NO: 165785 - DNA, 15 bp, Homo sapiens
tcgatacaggggacg

SEQ ID NO: 165786 - DNA, 15 bp, Homo sapiens
ctcgatacaggggac

SEQ ID NO: 165787 - DNA, 15 bp, Homo sapiens
cctcgatacagggga

SEQ ID NO: 165788 - DNA, 15 bp, Homo sapiens
tcctcgatacagggg

SEQ ID NO: 165789 - DNA, 15 bp, Homo sapiens
ctcctcgatacaggg

SEQ ID NO: 165790 - DNA, 15 bp, Homo sapiens
cctcctcgatacagg

SEQ ID NO: 165791 - DNA, 15 bp, Homo sapiens
gcctcctcgatacag

SEQ ID NO: 165792 - DNA, 15 bp, Homo sapiens
agcctcctcgataca

SEQ ID NO: 165793 - DNA, 15 bp, Homo sapiens
cagcctcctcgatac

SEQ ID NO: 165794 - DNA, 15 bp, Homo sapiens
tcagcctcctcgata

SEQ ID NO: 165795 - DNA, 15 bp, Homo sapiens
ctcagcctcctcgat

SEQ ID NO: 165796 - DNA, 15 bp, Homo sapiens
cctcagcctcctcga

SEQ ID NO: 165797 - DNA, 15 bp, Homo sapiens
acctcagcctcctcg

SEQ ID NO: 165798 - DNA, 15 bp, Homo sapiens
gacctcagcctcctc

SEQ ID NO: 165799 - DNA, 15 bp, Homo sapiens
tgacctcagcctcct

SEQ ID NO: 165800 - DNA, 15 bp, Homo sapiens
ttgacctcagcctcc

SEQ ID NO: 165801 - DNA, 15 bp, Homo sapiens
cttgacctcagcctc

SEQ ID NO: 165802 - DNA, 15 bp, Homo sapiens
ccttgacctcagcct

SEQ ID NO: 165803 - DNA, 15 bp, Homo sapiens
gccttgacctcagcc

SEQ ID NO: 165804 - DNA, 15 bp, Homo sapiens
cgccttgacctcagc

SEQ ID NO: 165805 - DNA, 15 bp, Homo sapiens
gcgccttgacctcag

SEQ ID NO: 165806 - DNA, 15 bp, Homo sapiens
agcgccttgacctca

SEQ ID NO: 165807 - DNA, 15 bp, Homo sapiens
cagcgccttgacctc

SEQ ID NO: 165808 - DNA, 15 bp, Homo sapiens
gcagcgccttgacct

SEQ ID NO: 165809 - DNA, 15 bp, Homo sapiens
agcagcgccttgacc

SEQ ID NO: 165810 - DNA, 15 bp, Homo sapiens
aagcagcgccttgac

SEQ ID NO: 165811 - DNA, 15 bp, Homo sapiens
gaagcagcgccttga

SEQ ID NO: 165812 - DNA, 15 bp, Homo sapiens
ggaagcagcgccttg

SEQ ID NO: 165813 - DNA, 15 bp, Homo sapiens
aggaagcagcgcctt

SEQ ID NO: 165814 - DNA, 15 bp, Homo sapiens
aaggaagcagcgcct

SEQ ID NO: 165815 - DNA, 15 bp, Homo sapiens
aaaggaagcagcgcc

SEQ ID NO: 165816 - DNA, 15 bp, Homo sapiens
gaaaggaagcagcgc

SEQ ID NO: 165817 - DNA, 15 bp, Homo sapiens
ggaaaggaagcagcg

SEQ ID NO: 165818 - DNA, 15 bp, Homo sapiens
aggaaaggaagcagc

SEQ ID NO: 165819 - DNA, 15 bp, Homo sapiens
gaggaaaggaagcag

SEQ ID NO: 165820 - DNA, 15 bp, Homo sapiens
agaggaaaggaagca

SEQ ID NO: 165821 - DNA, 15 bp, Homo sapiens
cagaggaaaggaagc

SEQ ID NO: 165822 - DNA, 15 bp, Homo sapiens
tcagaggaaaggaag

SEQ ID NO: 165823 - DNA, 15 bp, Homo sapiens
ctcagaggaaaggaa

SEQ ID NO: 165824 - DNA, 15 bp, Homo sapiens
tctcagaggaaagga

SEQ ID NO: 165825 - DNA, 15 bp, Homo sapiens
gtctcagaggaaagg

SEQ ID NO: 165826 - DNA, 15 bp, Homo sapiens
tgtctcagaggaaag

SEQ ID NO: 165827 - DNA, 15 bp, Homo sapiens
gtgtctcagaggaaa

SEQ ID NO: 165828 - DNA, 15 bp, Homo sapiens
tgtgtctcagaggaa

SEQ ID NO: 165829 - DNA, 15 bp, Homo sapiens
ctgtgtctcagagga

SEQ ID NO: 165830 - DNA, 15 bp, Homo sapiens
gctgtgtctcagagg

SEQ ID NO: 165831 - DNA, 15 bp, Homo sapiens
ggctgtgtctcagag

SEQ ID NO: 165832 - DNA, 15 bp, Homo sapiens
gggctgtgtctcaga

SEQ ID NO: 165833 - DNA, 15 bp, Homo sapiens
agggctgtgtctcag

SEQ ID NO: 165834 - DNA, 15 bp, Homo sapiens
gagggctgtgtctca

SEQ ID NO: 165835 - DNA, 15 bp, Homo sapiens
ggagggctgtgtctc

SEQ ID NO: 165836 - DNA, 15 bp, Homo sapiens
gggagggctgtgtct

SEQ ID NO: 165837 - DNA, 15 bp, Homo sapiens
ggggagggctgtgtc

SEQ ID NO: 165838 - DNA, 15 bp, Homo sapiens
tggggagggctgtgt

SEQ ID NO: 165839 - DNA, 15 bp, Homo sapiens
gtggggagggctgtg

SEQ ID NO: 165840 - DNA, 15 bp, Homo sapiens
ggtggggagggctgt

SEQ ID NO: 165841 - DNA, 15 bp, Homo sapiens
gggtggggagggctg

SEQ ID NO: 165842 - DNA, 15 bp, Homo sapiens
tgggtggggagggct

SEQ ID NO: 165843 - DNA, 15 bp, Homo sapiens
ctgggtggggagggc

SEQ ID NO: 165844 - DNA, 15 bp, Homo sapiens
tctgggtggggaggg

SEQ ID NO: 165845 - DNA, 15 bp, Homo sapiens
ttctgggtggggagg

SEQ ID NO: 165846 - DNA, 15 bp, Homo sapiens
attctgggtggggag

SEQ ID NO: 165847 - DNA, 15 bp, Homo sapiens
cattctgggtgggga

SEQ ID NO: 165848 - DNA, 15 bp, Homo sapiens
acattctgggtgggg

SEQ ID NO: 165849 - DNA, 15 bp, Homo sapiens
gacattctgggtggg

SEQ ID NO: 165850 - DNA, 15 bp, Homo sapiens
agacattctgggtgg

SEQ ID NO: 165851 - DNA, 15 bp, Homo sapiens
aagacattctgggtg

SEQ ID NO: 165852 - DNA, 15 bp, Homo sapiens
aaagacattctgggt

SEQ ID NO: 165853 - DNA, 15 bp, Homo sapiens
taaagacattctggg

SEQ ID NO: 165854 - DNA, 15 bp, Homo sapiens
ctaaagacattctgg

SEQ ID NO: 165855 - DNA, 15 bp, Homo sapiens
cctaaagacattctg

SEQ ID NO: 165856 - DNA, 15 bp, Homo sapiens
gcctaaagacattct

SEQ ID NO: 165857 - DNA, 15 bp, Homo sapiens
ggcctaaagacattc

SEQ ID NO: 165858 - DNA, 15 bp, Homo sapiens
aggcctaaagacatt

SEQ ID NO: 165859 - DNA, 15 bp, Homo sapiens
gaggcctaaagacat

SEQ ID NO: 165860 - DNA, 15 bp, Homo sapiens
ggaggcctaaagaca

SEQ ID NO: 165861 - DNA, 15 bp, Homo sapiens
aggaggcctaaagac

SEQ ID NO: 165862 - DNA, 15 bp, Homo sapiens
taggaggcctaaaga

SEQ ID NO: 165863 - DNA, 15 bp, Homo sapiens
ctaggaggcctaaag

SEQ ID NO: 165864 - DNA, 15 bp, Homo sapiens
actaggaggcctaaa

SEQ ID NO: 165865 - DNA, 15 bp, Homo sapiens
cactaggaggcctaa

SEQ ID NO: 165866 - DNA, 15 bp, Homo sapiens
tcactaggaggccta

SEQ ID NO: 165867 - DNA, 15 bp, Homo sapiens
ctcactaggaggcct

SEQ ID NO: 165868 - DNA, 15 bp, Homo sapiens
actcactaggaggcc

SEQ ID NO: 165869 - DNA, 15 bp, Homo sapiens
cactcactaggaggc

SEQ ID NO: 165870 - DNA, 15 bp, Homo sapiens
ccactcactaggagg

SEQ ID NO: 165871 - DNA, 15 bp, Homo sapiens
accactcactaggag

SEQ ID NO: 165872 - DNA, 15 bp, Homo sapiens
gaccactcactagga

SEQ ID NO: 165873 - DNA, 15 bp, Homo sapiens
ggaccactcactagg

SEQ ID NO: 165874 - DNA, 15 bp, Homo sapiens
cggaccactcactag

SEQ ID NO: 165875 - DNA, 15 bp, Homo sapiens
gcggaccactcacta

SEQ ID NO: 165876 - DNA, 15 bp, Homo sapiens
ggcggaccactcact

SEQ ID NO: 165877 - DNA, 15 bp, Homo sapiens
aggcggaccactcac

SEQ ID NO: 165878 - DNA, 15 bp, Homo sapiens
caggcggaccactca

SEQ ID NO: 165879 - DNA, 15 bp, Homo sapiens
gcaggcggaccactc

SEQ ID NO: 165880 - DNA, 15 bp, Homo sapiens
ggcaggcggaccact

SEQ ID NO: 165881 - DNA, 15 bp, Homo sapiens
aggcaggcggaccac

SEQ ID NO: 165882 - DNA, 15 bp, Homo sapiens
aaggcaggcggacca

SEQ ID NO: 165883 - DNA, 15 bp, Homo sapiens
aaaggcaggcggacc

SEQ ID NO: 165884 - DNA, 15 bp, Homo sapiens
gaaaggcaggcggac

SEQ ID NO: 165885 - DNA, 15 bp, Homo sapiens
ggaaaggcaggcgga

SEQ ID NO: 165886 - DNA, 15 bp, Homo sapiens
aggaaaggcaggcgg

SEQ ID NO: 165887 - DNA, 15 bp, Homo sapiens
caggaaaggcaggcg

SEQ ID NO: 165888 - DNA, 15 bp, Homo sapiens
ccaggaaaggcaggc

SEQ ID NO: 165889 - DNA, 15 bp, Homo sapiens
cccaggaaaggcagg

SEQ ID NO: 165890 - DNA, 15 bp, Homo sapiens
ccccaggaaaggcag

SEQ ID NO: 165891 - DNA, 15 bp, Homo sapiens
accccaggaaaggca

SEQ ID NO: 165892 - DNA, 15 bp, Homo sapiens
caccccaggaaaggc

SEQ ID NO: 165893 - DNA, 15 bp, Homo sapiens
tcaccccaggaaagg

SEQ ID NO: 165894 - DNA, 15 bp, Homo sapiens
ctcaccccaggaaag

SEQ ID NO: 165895 - DNA, 15 bp, Homo sapiens
cctcaccccaggaaa

SEQ ID NO: 165896 - DNA, 15 bp, Homo sapiens
ccctcaccccaggaa

SEQ ID NO: 165897 - DNA, 15 bp, Homo sapiens
cccctcaccccagga

SEQ ID NO: 165898 - DNA, 15 bp, Homo sapiens
tcccctcaccccagg

SEQ ID NO: 165899 - DNA, 15 bp, Homo sapiens
ctcccctcaccccag

SEQ ID NO: 165900 - DNA, 15 bp, Homo sapiens
gctcccctcacccca

SEQ ID NO: 165901 - DNA, 15 bp, Homo sapiens
tgctcccctcacccc

SEQ ID NO: 165902 - DNA, 15 bp, Homo sapiens
ctgctcccctcaccc

SEQ ID NO: 165903 - DNA, 15 bp, Homo sapiens
actgctcccctcacc

SEQ ID NO: 165904 - DNA, 15 bp, Homo sapiens
gactgctcccctcac

SEQ ID NO: 165905 - DNA, 15 bp, Homo sapiens
tgactgctcccctca

SEQ ID NO: 165906 - DNA, 15 bp, Homo sapiens
ctgactgctcccctc

SEQ ID NO: 165907 - DNA, 15 bp, Homo sapiens
actgactgctcccct

SEQ ID NO: 165908 - DNA, 15 bp, Homo sapiens
tactgactgctcccc

SEQ ID NO: 165909 - DNA, 15 bp, Homo sapiens
ctactgactgctccc

SEQ ID NO: 165910 - DNA, 15 bp, Homo sapiens
actactgactgctcc

SEQ ID NO: 165911 - DNA, 15 bp, Homo sapiens
cactactgactgctc

SEQ ID NO: 165912 - DNA, 15 bp, Homo sapiens
tcactactgactgct

SEQ ID NO: 165913 - DNA, 15 bp, Homo sapiens
atcactactgactgc

SEQ ID NO: 165914 - DNA, 15 bp, Homo sapiens
tatcactactgactg

SEQ ID NO: 165915 - DNA, 15 bp, Homo sapiens
ttatcactactgact

SEQ ID NO: 165916 - DNA, 15 bp, Homo sapiens
cttatcactactgac

SEQ ID NO: 165917 - DNA, 15 bp, Homo sapiens
acttatcactactga

SEQ ID NO: 165918 - DNA, 15 bp, Homo sapiens
aacttatcactactg

SEQ ID NO: 165919 - DNA, 15 bp, Homo sapiens
aaacttatcactact

SEQ ID NO: 165920 - DNA, 15 bp, Homo sapiens
gaaacttatcactac

SEQ ID NO: 165921 - DNA, 15 bp, Homo sapiens
tgaaacttatcacta

SEQ ID NO: 165922 - DNA, 15 bp, Homo sapiens
atgaaacttatcact

SEQ ID NO: 165923 - DNA, 15 bp, Homo sapiens
catgaaacttatcac

SEQ ID NO: 165924 - DNA, 15 bp, Homo sapiens
tcatgaaacttatca

SEQ ID NO: 165925 - DNA, 15 bp, Homo sapiens
atcatgaaacttatc

SEQ ID NO: 165926 - DNA, 15 bp, Homo sapiens
catcatgaaacttat

SEQ ID NO: 165927 - DNA, 15 bp, Homo sapiens
ccatcatgaaactta

SEQ ID NO: 165928 - DNA, 15 bp, Homo sapiens
gccatcatgaaactt

SEQ ID NO: 165929 - DNA, 15 bp, Homo sapiens
ggccatcatgaaact

SEQ ID NO: 165930 - DNA, 15 bp, Homo sapiens
aggccatcatgaaac

SEQ ID NO: 165931 - DNA, 15 bp, Homo sapiens
caggccatcatgaaa

SEQ ID NO: 165932 - DNA, 15 bp, Homo sapiens
tcaggccatcatgaa

SEQ ID NO: 165933 - DNA, 15 bp, Homo sapiens
ctcaggccatcatga

SEQ ID NO: 165934 - DNA, 15 bp, Homo sapiens
cctcaggccatcatg

SEQ ID NO: 165935 - DNA, 15 bp, Homo sapiens
acctcaggccatcat

SEQ ID NO: 165936 - DNA, 15 bp, Homo sapiens
tacctcaggccatca

SEQ ID NO: 165937 - DNA, 15 bp, Homo sapiens
gtacctcaggccatc

SEQ ID NO: 165938 - DNA, 15 bp, Homo sapiens
ggtacctcaggccat

SEQ ID NO: 165939 - DNA, 15 bp, Homo sapiens
tggtacctcaggcca

SEQ ID NO: 165940 - DNA, 15 bp, Homo sapiens
gtggtacctcaggcc

SEQ ID NO: 165941 - DNA, 15 bp, Homo sapiens
ggtggtacctcaggc

SEQ ID NO: 165942 - DNA, 15 bp, Homo sapiens
aggtggtacctcagg

SEQ ID NO: 165943 - DNA, 15 bp, Homo sapiens
caggtggtacctcag

SEQ ID NO: 165944 - DNA, 15 bp, Homo sapiens
ccaggtggtacctca

SEQ ID NO: 165945 - DNA, 15 bp, Homo sapiens
cccaggtggtacctc

SEQ ID NO: 165946 - DNA, 15 bp, Homo sapiens
acccaggtggtacct

SEQ ID NO: 165947 - DNA, 15 bp, Homo sapiens
gacccaggtggtacc

SEQ ID NO: 165948 - DNA, 15 bp, Homo sapiens
agacccaggtggtac

SEQ ID NO: 165949 - DNA, 15 bp, Homo sapiens
cagacccaggtggta

SEQ ID NO: 165950 - DNA, 15 bp, Homo sapiens
ccagacccaggtggt

SEQ ID NO: 165951 - DNA, 15 bp, Homo sapiens
cccagacccaggtgg

SEQ ID NO: 165952 - DNA, 15 bp, Homo sapiens
gcccagacccaggtg

SEQ ID NO: 165953 - DNA, 15 bp, Homo sapiens
cgcccagacccaggt

SEQ ID NO: 165954 - DNA, 15 bp, Homo sapiens
acgcccagacccagg

SEQ ID NO: 165955 - DNA, 15 bp, Homo sapiens
cacgcccagacccag

SEQ ID NO: 165956 - DNA, 15 bp, Homo sapiens
tcacgcccagaccca

SEQ ID NO: 165957 - DNA, 15 bp, Homo sapiens
ctcacgcccagaccc

SEQ ID NO: 165958 - DNA, 15 bp, Homo sapiens
cctcacgcccagacc

SEQ ID NO: 165959 - DNA, 15 bp, Homo sapiens
gcctcacgcccagac

SEQ ID NO: 165960 - DNA, 15 bp, Homo sapiens
ggcctcacgcccaga

SEQ ID NO: 165961 - DNA, 15 bp, Homo sapiens
tggcctcacgcccag

SEQ ID NO: 165962 - DNA, 15 bp, Homo sapiens
ctggcctcacgccca

SEQ ID NO: 165963 - DNA, 15 bp, Homo sapiens
actggcctcacgccc

SEQ ID NO: 165964 - DNA, 15 bp, Homo sapiens
cactggcctcacgcc

SEQ ID NO: 165965 - DNA, 15 bp, Homo sapiens
gcactggcctcacgc

SEQ ID NO: 165966 - DNA, 15 bp, Homo sapiens
agcactggcctcacg

SEQ ID NO: 165967 - DNA, 15 bp, Homo sapiens
cagcactggcctcac

SEQ ID NO: 165968 - DNA, 15 bp, Homo sapiens
ccagcactggcctca

SEQ ID NO: 165969 - DNA, 15 bp, Homo sapiens
gccagcactggcctc

SEQ ID NO: 165970 - DNA, 15 bp, Homo sapiens
ggccagcactggcct

SEQ ID NO: 165971 - DNA, 15 bp, Homo sapiens
tggccagcactggcc

SEQ ID NO: 165972 - DNA, 15 bp, Homo sapiens
ctggccagcactggc

SEQ ID NO: 165973 - DNA, 15 bp, Homo sapiens
actggccagcactgg

SEQ ID NO: 165974 - DNA, 15 bp, Homo sapiens
cactggccagcactg

SEQ ID NO: 165975 - DNA, 15 bp, Homo sapiens
acactggccagcact

SEQ ID NO: 165976 - DNA, 15 bp, Homo sapiens
cacactggccagcac

SEQ ID NO: 165977 - DNA, 15 bp, Homo sapiens
acacactggccagca

SEQ ID NO: 165978 - DNA, 15 bp, Homo sapiens
cacacactggccagc

SEQ ID NO: 165979 - DNA, 15 bp, Homo sapiens
ccacacactggccag

SEQ ID NO: 165980 - DNA, 15 bp, Homo sapiens
cccacacactggcca

SEQ ID NO: 165981 - DNA, 15 bp, Homo sapiens
ccccacacactggcc

SEQ ID NO: 165982 - DNA, 15 bp, Homo sapiens
tccccacacactggc

SEQ ID NO: 165983 - DNA, 15 bp, Homo sapiens
ttccccacacactgg

SEQ ID NO: 165984 - DNA, 15 bp, Homo sapiens
cttccccacacactg

SEQ ID NO: 165985 - DNA, 15 bp, Homo sapiens
ccttccccacacact

SEQ ID NO: 165986 - DNA, 15 bp, Homo sapiens
cccttccccacacac

SEQ ID NO: 165987 - DNA, 15 bp, Homo sapiens
tcccttccccacaca

SEQ ID NO: 165988 - DNA, 15 bp, Homo sapiens
ttcccttccccacac

SEQ ID NO: 165989 - DNA, 15 bp, Homo sapiens
tttcccttccccaca

SEQ ID NO: 165990 - DNA, 15 bp, Homo sapiens
ctttcccttccccac

SEQ ID NO: 165991 - DNA, 15 bp, Homo sapiens
actttcccttcccca

SEQ ID NO: 165992 - DNA, 15 bp, Homo sapiens
tactttcccttcccc

SEQ ID NO: 165993 - DNA, 15 bp, Homo sapiens
ttactttcccttccc

SEQ ID NO: 165994 - DNA, 15 bp, Homo sapiens
cttactttcccttcc

SEQ ID NO: 165995 - DNA, 15 bp, Homo sapiens
acttactttcccttc

SEQ ID NO: 165996 - DNA, 15 bp, Homo sapiens
cacttactttccctt

SEQ ID NO: 165997 - DNA, 15 bp, Homo sapiens
acacttactttccct

SEQ ID NO: 165998 - DNA, 15 bp, Homo sapiens
gacacttactttccc

SEQ ID NO: 165999 - DNA, 15 bp, Homo sapiens
agacacttactttcc

SEQ ID NO: 166000 - DNA, 15 bp, Homo sapiens
cagacacttactttc

SEQ ID NO: 166001 - DNA, 15 bp, Homo sapiens
tcagacacttacttt

SEQ ID NO: 166002 - DNA, 15 bp, Homo sapiens
ttcagacacttactt

SEQ ID NO: 166003 - DNA, 15 bp, Homo sapiens
cttcagacacttact

SEQ ID NO: 166004 - DNA, 15 bp, Homo sapiens
tcttcagacacttac

SEQ ID NO: 166005 - DNA, 15 bp, Homo sapiens
ctcttcagacactta

SEQ ID NO: 166006 - DNA, 15 bp, Homo sapiens
tctcttcagacactt

SEQ ID NO: 166007 - DNA, 15 bp, Homo sapiens
ttctcttcagacact

SEQ ID NO: 166008 - DNA, 15 bp, Homo sapiens
tttctcttcagacac

SEQ ID NO: 166009 - DNA, 15 bp, Homo sapiens
atttctcttcagaca

SEQ ID NO: 166010 - DNA, 15 bp, Homo sapiens
catttctcttcagac

SEQ ID NO: 166011 - DNA, 15 bp, Homo sapiens
gcatttctcttcaga

SEQ ID NO: 166012 - DNA, 15 bp, Homo sapiens
cgcatttctcttcag

SEQ ID NO: 166013 - DNA, 15 bp, Homo sapiens
tcgcatttctcttca

SEQ ID NO: 166014 - DNA, 15 bp, Homo sapiens
gtcgcatttctcttc

SEQ ID NO: 166015 - DNA, 15 bp, Homo sapiens
ggtcgcatttctctt

SEQ ID NO: 166016 - DNA, 15 bp, Homo sapiens
gggtcgcatttctct

SEQ ID NO: 166017 - DNA, 15 bp, Homo sapiens
ggggtcgcatttctc

SEQ ID NO: 166018 - DNA, 15 bp, Homo sapiens
aggggtcgcatttct

SEQ ID NO: 166019 - DNA, 15 bp, Homo sapiens
aaggggtcgcatttc

SEQ ID NO: 166020 - DNA, 15 bp, Homo sapiens
gaaggggtcgcattt

SEQ ID NO: 166021 - DNA, 15 bp, Homo sapiens
ggaaggggtcgcatt

SEQ ID NO: 166022 - DNA, 15 bp, Homo sapiens
tggaaggggtcgcat

SEQ ID NO: 166023 - DNA, 15 bp, Homo sapiens
ttggaaggggtcgca

SEQ ID NO: 166024 - DNA, 15 bp, Homo sapiens
attggaaggggtcgc

SEQ ID NO: 166025 - DNA, 15 bp, Homo sapiens
aattggaaggggtcg

SEQ ID NO: 166026 - DNA, 15 bp, Homo sapiens
gaattggaaggggtc

SEQ ID NO: 166027 - DNA, 15 bp, Homo sapiens
tgaattggaaggggt

SEQ ID NO: 166028 - DNA, 15 bp, Homo sapiens
ctgaattggaagggg

SEQ ID NO: 166029 - DNA, 15 bp, Homo sapiens
actgaattggaaggg

SEQ ID NO: 166030 - DNA, 15 bp, Homo sapiens
tactgaattggaagg

SEQ ID NO: 166031 - DNA, 15 bp, Homo sapiens
ctactgaattggaag

SEQ ID NO: 166032 - DNA, 15 bp, Homo sapiens
actactgaattggaa

SEQ ID NO: 166033 - DNA, 15 bp, Homo sapiens
gactactgaattgga

SEQ ID NO: 166034 - DNA, 15 bp, Homo sapiens
tgactactgaattgg

SEQ ID NO: 166035 - DNA, 15 bp, Homo sapiens
ctgactactgaattg

SEQ ID NO: 166036 - DNA, 15 bp, Homo sapiens
cctgactactgaatt

SEQ ID NO: 166037 - DNA, 15 bp, Homo sapiens
tcctgactactgaat

SEQ ID NO: 166038 - DNA, 15 bp, Homo sapiens
ttcctgactactgaa

SEQ ID NO: 166039 - DNA, 15 bp, Homo sapiens
tttcctgactactga

SEQ ID NO: 166040 - DNA, 15 bp, Homo sapiens
ttttcctgactactg

SEQ ID NO: 166041 - DNA, 15 bp, Homo sapiens
cttttcctgactact

SEQ ID NO: 166042 - DNA, 15 bp, Homo sapiens
tcttttcctgactac

SEQ ID NO: 166043 - DNA, 15 bp, Homo sapiens
ctcttttcctgacta

SEQ ID NO: 166044 - DNA, 15 bp, Homo sapiens
gctcttttcctgact

SEQ ID NO: 166045 - DNA, 15 bp, Homo sapiens
agctcttttcctgac

SEQ ID NO: 166046 - DNA, 15 bp, Homo sapiens
cagctcttttcctga

SEQ ID NO: 166047 - DNA, 15 bp, Homo sapiens
ccagctcttttcctg

SEQ ID NO: 166048 - DNA, 15 bp, Homo sapiens
cccagctcttttcct

SEQ ID NO: 166049 - DNA, 15 bp, Homo sapiens
acccagctcttttcc

SEQ ID NO: 166050 - DNA, 15 bp, Homo sapiens
cacccagctcttttc

SEQ ID NO: 166051 - DNA, 15 bp, Homo sapiens
ccacccagctctttt

SEQ ID NO: 166052 - DNA, 15 bp, Homo sapiens
cccacccagctcttt

SEQ ID NO: 166053 - DNA, 15 bp, Homo sapiens
ccccacccagctctt

SEQ ID NO: 166054 - DNA, 15 bp, Homo sapiens
tccccacccagctct

SEQ ID NO: 166055 - DNA, 15 bp, Homo sapiens
gtccccacccagctc

SEQ ID NO: 166056 - DNA, 15 bp, Homo sapiens
tgtccccacccagct

SEQ ID NO: 166057 - DNA, 15 bp, Homo sapiens
ctgtccccacccagc

SEQ ID NO: 166058 - DNA, 15 bp, Homo sapiens
tctgtccccacccag

SEQ ID NO: 166059 - DNA, 15 bp, Homo sapiens
gtctgtccccaccca

SEQ ID NO: 166060 - DNA, 15 bp, Homo sapiens
agtctgtccccaccc

SEQ ID NO: 166061 - DNA, 15 bp, Homo sapiens
gagtctgtccccacc

SEQ ID NO: 166062 - DNA, 15 bp, Homo sapiens
agagtctgtccccac

SEQ ID NO: 166063 - DNA, 15 bp, Homo sapiens
aagagtctgtcccca

SEQ ID NO: 166064 - DNA, 15 bp, Homo sapiens
caagagtctgtcccc

SEQ ID NO: 166065 - DNA, 15 bp, Homo sapiens
gcaagagtctgtccc

SEQ ID NO: 166066 - DNA, 15 bp, Homo sapiens
cgcaagagtctgtcc

SEQ ID NO: 166067 - DNA, 15 bp, Homo sapiens
ccgcaagagtctgtc

SEQ ID NO: 166068 - DNA, 15 bp, Homo sapiens
cccgcaagagtctgt

SEQ ID NO: 166069 - DNA, 15 bp, Homo sapiens
ccccgcaagagtctg

SEQ ID NO: 166070 - DNA, 15 bp, Homo sapiens
tccccgcaagagtct

SEQ ID NO: 166071 - DNA, 15 bp, Homo sapiens
ctccccgcaagagtc

SEQ ID NO: 166072 - DNA, 15 bp, Homo sapiens
cctccccgcaagagt

SEQ ID NO: 166073 - DNA, 15 bp, Homo sapiens
ccctccccgcaagag

SEQ ID NO: 166074 - DNA, 15 bp, Homo sapiens
tccctccccgcaaga

SEQ ID NO: 166075 - DNA, 15 bp, Homo sapiens
ttccctccccgcaag

SEQ ID NO: 166076 - DNA, 15 bp, Homo sapiens
cttccctccccgcaa

SEQ ID NO: 166077 - DNA, 15 bp, Homo sapiens
gcttccctccccgca

SEQ ID NO: 166078 - DNA, 15 bp, Homo sapiens
agcttccctccccgc

SEQ ID NO: 166079 - DNA, 15 bp, Homo sapiens
tagcttccctccccg

SEQ ID NO: 166080 - DNA, 15 bp, Homo sapiens
gtagcttccctcccc

SEQ ID NO: 166081 - DNA, 15 bp, Homo sapiens
ggtagcttccctccc

SEQ ID NO: 166082 - DNA, 15 bp, Homo sapiens
gggtagcttccctcc

SEQ ID NO: 166083 - DNA, 15 bp, Homo sapiens
tgggtagcttccctc

SEQ ID NO: 166084 - DNA, 15 bp, Homo sapiens
ctgggtagcttccct

SEQ ID NO: 166085 - DNA, 15 bp, Homo sapiens
cctgggtagcttccc

SEQ ID NO: 166086 - DNA, 15 bp, Homo sapiens
ccctgggtagcttcc

SEQ ID NO: 166087 - DNA, 15 bp, Homo sapiens
accctgggtagcttc

SEQ ID NO: 166088 - DNA, 15 bp, Homo sapiens
caccctgggtagctt

SEQ ID NO: 166089 - DNA, 15 bp, Homo sapiens
acaccctgggtagct

SEQ ID NO: 166090 - DNA, 15 bp, Homo sapiens
gacaccctgggtagc

SEQ ID NO: 166091 - DNA, 15 bp, Homo sapiens
agacaccctgggtag

SEQ ID NO: 166092 - DNA, 15 bp, Homo sapiens
cagacaccctgggta

SEQ ID NO: 166093 - DNA, 15 bp, Homo sapiens
gcagacaccctgggt

SEQ ID NO: 166094 - DNA, 15 bp, Homo sapiens
agcagacaccctggg

SEQ ID NO: 166095 - DNA, 15 bp, Homo sapiens
cagcagacaccctgg

SEQ ID NO: 166096 - DNA, 15 bp, Homo sapiens
acagcagacaccctg

SEQ ID NO: 166097 - DNA, 15 bp, Homo sapiens
cacagcagacaccct

SEQ ID NO: 166098 - DNA, 15 bp, Homo sapiens
acacagcagacaccc

SEQ ID NO: 166099 - DNA, 15 bp, Homo sapiens
cacacagcagacacc

SEQ ID NO: 166100 - DNA, 15 bp, Homo sapiens
acacacagcagacac

SEQ ID NO: 166101 - DNA, 15 bp, Homo sapiens
tacacacagcagaca

SEQ ID NO: 166102 - DNA, 15 bp, Homo sapiens
atacacacagcagac

SEQ ID NO: 166103 - DNA, 15 bp, Homo sapiens
tatacacacagcaga

SEQ ID NO: 166104 - DNA, 15 bp, Homo sapiens
gtatacacacagcag

SEQ ID NO: 166105 - DNA, 15 bp, Homo sapiens
tgtatacacacagca

SEQ ID NO: 166106 - DNA, 15 bp, Homo sapiens
atgtatacacacagc

SEQ ID NO: 166107 - DNA, 15 bp, Homo sapiens
catgtatacacacag

SEQ ID NO: 166108 - DNA, 15 bp, Homo sapiens
acatgtatacacaca

SEQ ID NO: 166109 - DNA, 15 bp, Homo sapiens
tacatgtatacacac

SEQ ID NO: 166110 - DNA, 15 bp, Homo sapiens
atacatgtatacaca

SEQ ID NO: 166111 - DNA, 15 bp, Homo sapiens
catacatgtatacac

SEQ ID NO: 166112 - DNA, 15 bp, Homo sapiens
acatacatgtataca

SEQ ID NO: 166113 - DNA, 15 bp, Homo sapiens
tacatacatgtatac

SEQ ID NO: 166114 - DNA, 15 bp, Homo sapiens
atacatacatgtata

SEQ ID NO: 166115 - DNA, 15 bp, Homo sapiens
catacatacatgtat

SEQ ID NO: 166116 - DNA, 15 bp, Homo sapiens
tcatacatacatgta

SEQ ID NO: 166117 - DNA, 15 bp, Homo sapiens
atcatacatacatgt

SEQ ID NO: 166118 - DNA, 15 bp, Homo sapiens
tatcatacatacatg

SEQ ID NO: 166119 - DNA, 15 bp, Homo sapiens
atatcatacatacat

SEQ ID NO: 166120 - DNA, 15 bp, Homo sapiens
catatcatacataca

SEQ ID NO: 166121 - DNA, 15 bp, Homo sapiens
acatatcatacatac

SEQ ID NO: 166122 - DNA, 15 bp, Homo sapiens
cacatatcatacata

SEQ ID NO: 166123 - DNA, 15 bp, Homo sapiens
acacatatcatacat

SEQ ID NO: 166124 - DNA, 15 bp, Homo sapiens
tacacatatcataca

SEQ ID NO: 166125 - DNA, 15 bp, Homo sapiens
atacacatatcatac

SEQ ID NO: 166126 - DNA, 15 bp, Homo sapiens
catacacatatcata

SEQ ID NO: 166127 - DNA, 15 bp, Homo sapiens
gcatacacatatcat

SEQ ID NO: 166128 - DNA, 15 bp, Homo sapiens
tgcatacacatatca

SEQ ID NO: 166129 - DNA, 15 bp, Homo sapiens
ctgcatacacatatc

SEQ ID NO: 166130 - DNA, 15 bp, Homo sapiens
cctgcatacacatat

SEQ ID NO: 166131 - DNA, 15 bp, Homo sapiens
acctgcatacacata

SEQ ID NO: 166132 - DNA, 15 bp, Homo sapiens
cacctgcatacacat

SEQ ID NO: 166133 - DNA, 15 bp, Homo sapiens
ccacctgcatacaca

SEQ ID NO: 166134 - DNA, 15 bp, Homo sapiens
gccacctgcatacac

SEQ ID NO: 166135 - DNA, 15 bp, Homo sapiens
ggccacctgcataca

SEQ ID NO: 166136 - DNA, 15 bp, Homo sapiens
gggccacctgcatac

SEQ ID NO: 166137 - DNA, 15 bp, Homo sapiens
tgggccacctgcata

SEQ ID NO: 166138 - DNA, 15 bp, Homo sapiens
atgggccacctgcat

SEQ ID NO: 166139 - DNA, 15 bp, Homo sapiens
tatgggccacctgca

SEQ ID NO: 166140 - DNA, 15 bp, Homo sapiens
gtatgggccacctgc

SEQ ID NO: 166141 - DNA, 15 bp, Homo sapiens
ggtatgggccacctg

SEQ ID NO: 166142 - DNA, 15 bp, Homo sapiens
aggtatgggccacct

SEQ ID NO: 166143 - DNA, 15 bp, Homo sapiens
caggtatgggccacc

SEQ ID NO: 166144 - DNA, 15 bp, Homo sapiens
ccaggtatgggccac

SEQ ID NO: 166145 - DNA, 15 bp, Homo sapiens
gccaggtatgggcca

SEQ ID NO: 166146 - DNA, 15 bp, Homo sapiens
tgccaggtatgggcc

SEQ ID NO: 166147 - DNA, 15 bp, Homo sapiens
ctgccaggtatgggc

SEQ ID NO: 166148 - DNA, 15 bp, Homo sapiens
actgccaggtatggg

SEQ ID NO: 166149 - DNA, 15 bp, Homo sapiens
cactgccaggtatgg

SEQ ID NO: 166150 - DNA, 15 bp, Homo sapiens
tcactgccaggtatg

SEQ ID NO: 166151 - DNA, 15 bp, Homo sapiens
gtcactgccaggtat

SEQ ID NO: 166152 - DNA, 15 bp, Homo sapiens
tgtcactgccaggta

SEQ ID NO: 166153 - DNA, 15 bp, Homo sapiens
atgtcactgccaggt

SEQ ID NO: 166154 - DNA, 15 bp, Homo sapiens
aatgtcactgccagg

SEQ ID NO: 166155 - DNA, 15 bp, Homo sapiens
aaatgtcactgccag

SEQ ID NO: 166156 - DNA, 15 bp, Homo sapiens
taaatgtcactgcca

SEQ ID NO: 166157 - DNA, 15 bp, Homo sapiens
ctaaatgtcactgcc

SEQ ID NO: 166158 - DNA, 15 bp, Homo sapiens
gctaaatgtcactgc

SEQ ID NO: 166159 - DNA, 15 bp, Homo sapiens
agctaaatgtcactg

SEQ ID NO: 166160 - DNA, 15 bp, Homo sapiens
tagctaaatgtcact

SEQ ID NO: 166161 - DNA, 15 bp, Homo sapiens
gtagctaaatgtcac

SEQ ID NO: 166162 - DNA, 15 bp, Homo sapiens
agtagctaaatgtca

SEQ ID NO: 166163 - DNA, 15 bp, Homo sapiens
aagtagctaaatgtc

SEQ ID NO: 166164 - DNA, 15 bp, Homo sapiens
gaagtagctaaatgt

SEQ ID NO: 166165 - DNA, 15 bp, Homo sapiens
ggaagtagctaaatg

SEQ ID NO: 166166 - DNA, 15 bp, Homo sapiens
aggaagtagctaaat

SEQ ID NO: 166167 - DNA, 15 bp, Homo sapiens
gaggaagtagctaaa

SEQ ID NO: 166168 - DNA, 15 bp, Homo sapiens
tgaggaagtagctaa

SEQ ID NO: 166169 - DNA, 15 bp, Homo sapiens
gtgaggaagtagcta

SEQ ID NO: 166170 - DNA, 15 bp, Homo sapiens
agtgaggaagtagct

SEQ ID NO: 166171 - DNA, 15 bp, Homo sapiens
gagtgaggaagtagc

SEQ ID NO: 166172 - DNA, 15 bp, Homo sapiens
agagtgaggaagtag

SEQ ID NO: 166173 - DNA, 15 bp, Homo sapiens
aagagtgaggaagta

SEQ ID NO: 166174 - DNA, 15 bp, Homo sapiens
aaagagtgaggaagt

SEQ ID NO: 166175 - DNA, 15 bp, Homo sapiens
taaagagtgaggaag

SEQ ID NO: 166176 - DNA, 15 bp, Homo sapiens
ctaaagagtgaggaa

SEQ ID NO: 166177 - DNA, 15 bp, Homo sapiens
tctaaagagtgagga

SEQ ID NO: 166178 - DNA, 15 bp, Homo sapiens
ctctaaagagtgagg

SEQ ID NO: 166179 - DNA, 15 bp, Homo sapiens
cctctaaagagtgag

SEQ ID NO: 166180 - DNA, 15 bp, Homo sapiens
acctctaaagagtga

SEQ ID NO: 166181 - DNA, 15 bp, Homo sapiens
aacctctaaagagtg

SEQ ID NO: 166182 - DNA, 15 bp, Homo sapiens
gaacctctaaagagt

SEQ ID NO: 166183 - DNA, 15 bp, Homo sapiens
tgaacctctaaagag

SEQ ID NO: 166184 - DNA, 15 bp, Homo sapiens
gtgaacctctaaaga

SEQ ID NO: 166185 - DNA, 15 bp, Homo sapiens
agtgaacctctaaag

SEQ ID NO: 166186 - DNA, 15 bp, Homo sapiens
cagtgaacctctaaa

SEQ ID NO: 166187 - DNA, 15 bp, Homo sapiens
ccagtgaacctctaa

SEQ ID NO: 166188 - DNA, 15 bp, Homo sapiens
cccagtgaacctcta

SEQ ID NO: 166189 - DNA, 15 bp, Homo sapiens
tcccagtgaacctct

SEQ ID NO: 166190 - DNA, 15 bp, Homo sapiens
ctcccagtgaacctc

SEQ ID NO: 166191 - DNA, 15 bp, Homo sapiens
tctcccagtgaacct

SEQ ID NO: 166192 - DNA, 15 bp, Homo sapiens
ttctcccagtgaacc

SEQ ID NO: 166193 - DNA, 15 bp, Homo sapiens
cttctcccagtgaac

SEQ ID NO: 166194 - DNA, 15 bp, Homo sapiens
acttctcccagtgaa

SEQ ID NO: 166195 - DNA, 15 bp, Homo sapiens
cacttctcccagtga

SEQ ID NO: 166196 - DNA, 15 bp, Homo sapiens
tcacttctcccagtg

SEQ ID NO: 166197 - DNA, 15 bp, Homo sapiens
atcacttctcccagt

SEQ ID NO: 166198 - DNA, 15 bp, Homo sapiens
gatcacttctcccag

SEQ ID NO: 166199 - DNA, 15 bp, Homo sapiens
tgatcacttctccca

SEQ ID NO: 166200 - DNA, 15 bp, Homo sapiens
ctgatcacttctccc

SEQ ID NO: 166201 - DNA, 15 bp, Homo sapiens
cctgatcacttctcc

SEQ ID NO: 166202 - DNA, 15 bp, Homo sapiens
ccctgatcacttctc

SEQ ID NO: 166203 - DNA, 15 bp, Homo sapiens
gccctgatcacttct

SEQ ID NO: 166204 - DNA, 15 bp, Homo sapiens
tgccctgatcacttc

SEQ ID NO: 166205 - DNA, 15 bp, Homo sapiens
atgccctgatcactt

SEQ ID NO: 166206 - DNA, 15 bp, Homo sapiens
aatgccctgatcact

SEQ ID NO: 166207 - DNA, 15 bp, Homo sapiens
caatgccctgatcac

SEQ ID NO: 166208 - DNA, 15 bp, Homo sapiens
ccaatgccctgatca

SEQ ID NO: 166209 - DNA, 15 bp, Homo sapiens
accaatgccctgatc

SEQ ID NO: 166210 - DNA, 15 bp, Homo sapiens
caccaatgccctgat

SEQ ID NO: 166211 - DNA, 15 bp, Homo sapiens
ccaccaatgccctga

SEQ ID NO: 166212 - DNA, 15 bp, Homo sapiens
cccaccaatgccctg

SEQ ID NO: 166213 - DNA, 15 bp, Homo sapiens
ccccaccaatgccct

SEQ ID NO: 166214 - DNA, 15 bp, Homo sapiens
accccaccaatgccc

SEQ ID NO: 166215 - DNA, 15 bp, Homo sapiens
caccccaccaatgcc

SEQ ID NO: 166216 - DNA, 15 bp, Homo sapiens
tcaccccaccaatgc

SEQ ID NO: 166217 - DNA, 15 bp, Homo sapiens
gtcaccccaccaatg

SEQ ID NO: 166218 - DNA, 15 bp, Homo sapiens
cgtcaccccaccaat

SEQ ID NO: 166219 - DNA, 15 bp, Homo sapiens
tcgtcaccccaccaa

SEQ ID NO: 166220 - DNA, 15 bp, Homo sapiens
ttcgtcaccccacca

SEQ ID NO: 166221 - DNA, 15 bp, Homo sapiens
gttcgtcaccccacc

SEQ ID NO: 166222 - DNA, 15 bp, Homo sapiens
ggttcgtcaccccac

SEQ ID NO: 166223 - DNA, 15 bp, Homo sapiens
gggttcgtcacccca

SEQ ID NO: 166224 - DNA, 15 bp, Homo sapiens
ggggttcgtcacccc

SEQ ID NO: 166225 - DNA, 15 bp, Homo sapiens
tggggttcgtcaccc

SEQ ID NO: 166226 - DNA, 15 bp, Homo sapiens
gtggggttcgtcacc

SEQ ID NO: 166227 - DNA, 15 bp, Homo sapiens
ggtggggttcgtcac

SEQ ID NO: 166228 - DNA, 15 bp, Homo sapiens
tggtggggttcgtca

SEQ ID NO: 166229 - DNA, 15 bp, Homo sapiens
ctggtggggttcgtc

SEQ ID NO: 166230 - DNA, 15 bp, Homo sapiens
tctggtggggttcgt

SEQ ID NO: 166231 - DNA, 15 bp, Homo sapiens
gtctggtggggttcg

SEQ ID NO: 166232 - DNA, 15 bp, Homo sapiens
agtctggtggggttc

SEQ ID NO: 166233 - DNA, 15 bp, Homo sapiens
gagtctggtggggtt

SEQ ID NO: 166234 - DNA, 15 bp, Homo sapiens
tgagtctggtggggt

SEQ ID NO: 166235 - DNA, 15 bp, Homo sapiens
ctgagtctggtgggg

SEQ ID NO: 166236 - DNA, 15 bp, Homo sapiens
gctgagtctggtggg

SEQ ID NO: 166237 - DNA, 15 bp, Homo sapiens
ggctgagtctggtgg

SEQ ID NO: 166238 - DNA, 15 bp, Homo sapiens
gggctgagtctggtg

SEQ ID NO: 166239 - DNA, 15 bp, Homo sapiens
agggctgagtctggt

SEQ ID NO: 166240 - DNA, 15 bp, Homo sapiens
gagggctgagtctgg

SEQ ID NO: 166241 - DNA, 15 bp, Homo sapiens
ggagggctgagtctg

SEQ ID NO: 166242 - DNA, 15 bp, Homo sapiens
aggagggctgagtct

SEQ ID NO: 166243 - DNA, 15 bp, Homo sapiens
gaggagggctgagtc

SEQ ID NO: 166244 - DNA, 15 bp, Homo sapiens
tgaggagggctgagt

SEQ ID NO: 166245 - DNA, 15 bp, Homo sapiens
ctgaggagggctgag

SEQ ID NO: 166246 - DNA, 15 bp, Homo sapiens
gctgaggagggctga

SEQ ID NO: 166247 - DNA, 15 bp, Homo sapiens
agctgaggagggctg

SEQ ID NO: 166248 - DNA, 15 bp, Homo sapiens
gagctgaggagggct

SEQ ID NO: 166249 - DNA, 15 bp, Homo sapiens
tgagctgaggagggc

SEQ ID NO: 166250 - DNA, 15 bp, Homo sapiens
gtgagctgaggaggg

SEQ ID NO: 166251 - DNA, 15 bp, Homo sapiens
agtgagctgaggagg

SEQ ID NO: 166252 - DNA, 15 bp, Homo sapiens
gagtgagctgaggag

SEQ ID NO: 166253 - DNA, 15 bp, Homo sapiens
ggagtgagctgagga

SEQ ID NO: 166254 - DNA, 15 bp, Homo sapiens
aggagtgagctgagg

SEQ ID NO: 166255 - DNA, 15 bp, Homo sapiens
caggagtgagctgag

SEQ ID NO: 166256 - DNA, 15 bp, Homo sapiens
gcaggagtgagctga

SEQ ID NO: 166257 - DNA, 15 bp, Homo sapiens
ggcaggagtgagctg

SEQ ID NO: 166258 - DNA, 15 bp, Homo sapiens
aggcaggagtgagct

SEQ ID NO: 166259 - DNA, 15 bp, Homo sapiens
caggcaggagtgagc

SEQ ID NO: 166260 - DNA, 15 bp, Homo sapiens
gcaggcaggagtgag

SEQ ID NO: 166261 - DNA, 15 bp, Homo sapiens
tgcaggcaggagtga

SEQ ID NO: 166262 - DNA, 15 bp, Homo sapiens
ttgcaggcaggagtg

SEQ ID NO: 166263 - DNA, 15 bp, Homo sapiens
cttgcaggcaggagt

SEQ ID NO: 166264 - DNA, 15 bp, Homo sapiens
ccttgcaggcaggag

SEQ ID NO: 166265 - DNA, 15 bp, Homo sapiens
cccttgcaggcagga

SEQ ID NO: 166266 - DNA, 15 bp, Homo sapiens
ccccttgcaggcagg

SEQ ID NO: 166267 - DNA, 15 bp, Homo sapiens
cccccttgcaggcag

SEQ ID NO: 166268 - DNA, 15 bp, Homo sapiens
tcccccttgcaggca

SEQ ID NO: 166269 - DNA, 15 bp, Homo sapiens
gtcccccttgcaggc

SEQ ID NO: 166270 - DNA, 15 bp, Homo sapiens
ggtcccccttgcagg

SEQ ID NO: 166271 - DNA, 15 bp, Homo sapiens
aggtcccccttgcag

SEQ ID NO: 166272 - DNA, 15 bp, Homo sapiens
aaggtcccccttgca

SEQ ID NO: 166273 - DNA, 15 bp, Homo sapiens
caaggtcccccttgc

SEQ ID NO: 166274 - DNA, 15 bp, Homo sapiens
acaaggtcccccttg

SEQ ID NO: 166275 - DNA, 15 bp, Homo sapiens
tacaaggtccccctt

SEQ ID NO: 166276 - DNA, 15 bp, Homo sapiens
gtacaaggtccccct

SEQ ID NO: 166277 - DNA, 15 bp, Homo sapiens
agtacaaggtccccc

SEQ ID NO: 166278 - DNA, 15 bp, Homo sapiens
cagtacaaggtcccc

SEQ ID NO: 166279 - DNA, 15 bp, Homo sapiens
ccagtacaaggtccc

SEQ ID NO: 166280 - DNA, 15 bp, Homo sapiens
cccagtacaaggtcc

SEQ ID NO: 166281 - DNA, 15 bp, Homo sapiens
ccccagtacaaggtc

SEQ ID NO: 166282 - DNA, 15 bp, Homo sapiens
tccccagtacaaggt

SEQ ID NO: 166283 - DNA, 15 bp, Homo sapiens
ttccccagtacaagg

SEQ ID NO: 166284 - DNA, 15 bp, Homo sapiens
cttccccagtacaag

SEQ ID NO: 166285 - DNA, 15 bp, Homo sapiens
tcttccccagtacaa

SEQ ID NO: 166286 - DNA, 15 bp, Homo sapiens
atcttccccagtaca

SEQ ID NO: 166287 - DNA, 15 bp, Homo sapiens
catcttccccagtac

SEQ ID NO: 166288 - DNA, 15 bp, Homo sapiens
acatcttccccagta

SEQ ID NO: 166289 - DNA, 15 bp, Homo sapiens
cacatcttccccagt

SEQ ID NO: 166290 - DNA, 15 bp, Homo sapiens
tcacatcttccccag

SEQ ID NO: 166291 - DNA, 15 bp, Homo sapiens
gtcacatcttcccca

SEQ ID NO: 166292 - DNA, 15 bp, Homo sapiens
agtcacatcttcccc

SEQ ID NO: 166293 - DNA, 15 bp, Homo sapiens
cagtcacatcttccc

SEQ ID NO: 166294 - DNA, 15 bp, Homo sapiens
ccagtcacatcttcc

SEQ ID NO: 166295 - DNA, 15 bp, Homo sapiens
cccagtcacatcttc

SEQ ID NO: 166296 - DNA, 15 bp, Homo sapiens
acccagtcacatctt

SEQ ID NO: 166297 - DNA, 15 bp, Homo sapiens
tacccagtcacatct

SEQ ID NO: 166298 - DNA, 15 bp, Homo sapiens
ctacccagtcacatc

SEQ ID NO: 166299 - DNA, 15 bp, Homo sapiens
cctacccagtcacat

SEQ ID NO: 166300 - DNA, 15 bp, Homo sapiens
acctacccagtcaca

SEQ ID NO: 166301 - DNA, 15 bp, Homo sapiens
cacctacccagtcac

SEQ ID NO: 166302 - DNA, 15 bp, Homo sapiens
ccacctacccagtca

SEQ ID NO: 166303 - DNA, 15 bp, Homo sapiens
cccacctacccagtc

SEQ ID NO: 166304 - DNA, 15 bp, Homo sapiens
tcccacctacccagt

SEQ ID NO: 166305 - DNA, 15 bp, Homo sapiens
ttcccacctacccag

SEQ ID NO: 166306 - DNA, 15 bp, Homo sapiens
cttcccacctaccca

SEQ ID NO: 166307 - DNA, 15 bp, Homo sapiens
ccttcccacctaccc

SEQ ID NO: 166308 - DNA, 15 bp, Homo sapiens
accttcccacctacc

SEQ ID NO: 166309 - DNA, 15 bp, Homo sapiens
gaccttcccacctac

SEQ ID NO: 166310 - DNA, 15 bp, Homo sapiens
tgaccttcccaccta

SEQ ID NO: 166311 - DNA, 15 bp, Homo sapiens
atgaccttcccacct

SEQ ID NO: 166312 - DNA, 15 bp, Homo sapiens
aatgaccttcccacc

SEQ ID NO: 166313 - DNA, 15 bp, Homo sapiens
aaatgaccttcccac

SEQ ID NO: 166314 - DNA, 15 bp, Homo sapiens
gaaatgaccttccca

SEQ ID NO: 166315 - DNA, 15 bp, Homo sapiens
tgaaatgaccttccc

SEQ ID NO: 166316 - DNA, 15 bp, Homo sapiens
atgaaatgaccttcc

SEQ ID NO: 166317 - DNA, 15 bp, Homo sapiens
aatgaaatgaccttc

SEQ ID NO: 166318 - DNA, 15 bp, Homo sapiens
caatgaaatgacctt

SEQ ID NO: 166319 - DNA, 15 bp, Homo sapiens
ccaatgaaatgacct

SEQ ID NO: 166320 - DNA, 15 bp, Homo sapiens
cccaatgaaatgacc

SEQ ID NO: 166321 - DNA, 15 bp, Homo sapiens
ccccaatgaaatgac

SEQ ID NO: 166322 - DNA, 15 bp, Homo sapiens
cccccaatgaaatga

SEQ ID NO: 166323 - DNA, 15 bp, Homo sapiens
acccccaatgaaatg

SEQ ID NO: 166324 - DNA, 15 bp, Homo sapiens
tacccccaatgaaat

SEQ ID NO: 166325 - DNA, 15 bp, Homo sapiens
gtacccccaatgaaa

SEQ ID NO: 166326 - DNA, 15 bp, Homo sapiens
tgtacccccaatgaa

SEQ ID NO: 166327 - DNA, 15 bp, Homo sapiens
ctgtacccccaatga

SEQ ID NO: 166328 - DNA, 15 bp, Homo sapiens
tctgtacccccaatg

SEQ ID NO: 166329 - DNA, 15 bp, Homo sapiens
ctctgtacccccaat

SEQ ID NO: 166330 - DNA, 15 bp, Homo sapiens
tctctgtacccccaa

SEQ ID NO: 166331 - DNA, 15 bp, Homo sapiens
atctctgtaccccca

SEQ ID NO: 166332 - DNA, 15 bp, Homo sapiens
aatctctgtaccccc

SEQ ID NO: 166333 - DNA, 15 bp, Homo sapiens
aaatctctgtacccc

SEQ ID NO: 166334 - DNA, 15 bp, Homo sapiens
caaatctctgtaccc

SEQ ID NO: 166335 - DNA, 15 bp, Homo sapiens
gcaaatctctgtacc

SEQ ID NO: 166336 - DNA, 15 bp, Homo sapiens
tgcaaatctctgtac

SEQ ID NO: 166337 - DNA, 15 bp, Homo sapiens
ctgcaaatctctgta

SEQ ID NO: 166338 - DNA, 15 bp, Homo sapiens
tctgcaaatctctgt

SEQ ID NO: 166339 - DNA, 15 bp, Homo sapiens
ctctgcaaatctctg

SEQ ID NO: 166340 - DNA, 15 bp, Homo sapiens
cctctgcaaatctct

SEQ ID NO: 166341 - DNA, 15 bp, Homo sapiens
gcctctgcaaatctc

SEQ ID NO: 166342 - DNA, 15 bp, Homo sapiens
agcctctgcaaatct

SEQ ID NO: 166343 - DNA, 15 bp, Homo sapiens
cagcctctgcaaatc

SEQ ID NO: 166344 - DNA, 15 bp, Homo sapiens
gcagcctctgcaaat

SEQ ID NO: 166345 - DNA, 15 bp, Homo sapiens
tgcagcctctgcaaa

SEQ ID NO: 166346 - DNA, 15 bp, Homo sapiens
ttgcagcctctgcaa

SEQ ID NO: 166347 - DNA, 15 bp, Homo sapiens
cttgcagcctctgca

SEQ ID NO: 166348 - DNA, 15 bp, Homo sapiens
tcttgcagcctctgc

SEQ ID NO: 166349 - DNA, 15 bp, Homo sapiens
ctcttgcagcctctg

SEQ ID NO: 166350 - DNA, 15 bp, Homo sapiens
cctcttgcagcctct

SEQ ID NO: 166351 - DNA, 15 bp, Homo sapiens
tcctcttgcagcctc

SEQ ID NO: 166352 - DNA, 15 bp, Homo sapiens
atcctcttgcagcct

SEQ ID NO: 166353 - DNA, 15 bp, Homo sapiens
gatcctcttgcagcc

SEQ ID NO: 166354 - DNA, 15 bp, Homo sapiens
ggatcctcttgcagc

SEQ ID NO: 166355 - DNA, 15 bp, Homo sapiens
gggatcctcttgcag

SEQ ID NO: 166356 - DNA, 15 bp, Homo sapiens
agggatcctcttgca

SEQ ID NO: 166357 - DNA, 15 bp, Homo sapiens
cagggatcctcttgc

SEQ ID NO: 166358 - DNA, 15 bp, Homo sapiens
tcagggatcctcttg

SEQ ID NO: 166359 - DNA, 15 bp, Homo sapiens
gtcagggatcctctt

SEQ ID NO: 166360 - DNA, 15 bp, Homo sapiens
agtcagggatcctct

SEQ ID NO: 166361 - DNA, 15 bp, Homo sapiens
cagtcagggatcctc

SEQ ID NO: 166362 - DNA, 15 bp, Homo sapiens
ccagtcagggatcct

SEQ ID NO: 166363 - DNA, 15 bp, Homo sapiens
tccagtcagggatcc

SEQ ID NO: 166364 - DNA, 15 bp, Homo sapiens
ctccagtcagggatc

SEQ ID NO: 166365 - DNA, 15 bp, Homo sapiens
cctccagtcagggat

SEQ ID NO: 166366 - DNA, 15 bp, Homo sapiens
ccctccagtcaggga

SEQ ID NO: 166367 - DNA, 15 bp, Homo sapiens
accctccagtcaggg

SEQ ID NO: 166368 - DNA, 15 bp, Homo sapiens
aaccctccagtcagg

SEQ ID NO: 166369 - DNA, 15 bp, Homo sapiens
taaccctccagtcag

SEQ ID NO: 166370 - DNA, 15 bp, Homo sapiens
ctaaccctccagtca

SEQ ID NO: 166371 - DNA, 15 bp, Homo sapiens
actaaccctccagtc

SEQ ID NO: 166372 - DNA, 15 bp, Homo sapiens
aactaaccctccagt

SEQ ID NO: 166373 - DNA, 15 bp, Homo sapiens
taactaaccctccag

SEQ ID NO: 166374 - DNA, 15 bp, Homo sapiens
ttaactaaccctcca

SEQ ID NO: 166375 - DNA, 15 bp, Homo sapiens
attaactaaccctcc

SEQ ID NO: 166376 - DNA, 15 bp, Homo sapiens
cattaactaaccctc

SEQ ID NO: 166377 - DNA, 15 bp, Homo sapiens
acattaactaaccct

SEQ ID NO: 166378 - DNA, 15 bp, Homo sapiens
cacattaactaaccc

SEQ ID NO: 166379 - DNA, 15 bp, Homo sapiens
gcacattaactaacc

SEQ ID NO: 166380 - DNA, 15 bp, Homo sapiens
ggcacattaactaac

SEQ ID NO: 166381 - DNA, 15 bp, Homo sapiens
gggcacattaactaa

SEQ ID NO: 166382 - DNA, 15 bp, Homo sapiens
ggggcacattaacta

SEQ ID NO: 166383 - DNA, 15 bp, Homo sapiens
cggggcacattaact

SEQ ID NO: 166384 - DNA, 15 bp, Homo sapiens
gcggggcacattaac

SEQ ID NO: 166385 - DNA, 15 bp, Homo sapiens
agcggggcacattaa

SEQ ID NO: 166386 - DNA, 15 bp, Homo sapiens
tagcggggcacatta

SEQ ID NO: 166387 - DNA, 15 bp, Homo sapiens
atagcggggcacatt

SEQ ID NO: 166388 - DNA, 15 bp, Homo sapiens
gatagcggggcacat

SEQ ID NO: 166389 - DNA, 15 bp, Homo sapiens
agatagcggggcaca

SEQ ID NO: 166390 - DNA, 15 bp, Homo sapiens
tagatagcggggcac

SEQ ID NO: 166391 - DNA, 15 bp, Homo sapiens
atagatagcggggca

SEQ ID NO: 166392 - DNA, 15 bp, Homo sapiens
gatagatagcggggc

SEQ ID NO: 166393 - DNA, 15 bp, Homo sapiens
ggatagatagcgggg

SEQ ID NO: 166394 - DNA, 15 bp, Homo sapiens
gggatagatagcggg

SEQ ID NO: 166395 - DNA, 15 bp, Homo sapiens
tgggatagatagcgg

SEQ ID NO: 166396 - DNA, 15 bp, Homo sapiens
ctgggatagatagcg

SEQ ID NO: 166397 - DNA, 15 bp, Homo sapiens
gctgggatagatagc

SEQ ID NO: 166398 - DNA, 15 bp, Homo sapiens
ggctgggatagatag

SEQ ID NO: 166399 - DNA, 15 bp, Homo sapiens
aggctgggatagata

SEQ ID NO: 166400 - DNA, 15 bp, Homo sapiens
gaggctgggatagat

SEQ ID NO: 166401 - DNA, 15 bp, Homo sapiens
ggaggctgggataga

SEQ ID NO: 166402 - DNA, 15 bp, Homo sapiens
gggaggctgggatag

SEQ ID NO: 166403 - DNA, 15 bp, Homo sapiens
agggaggctgggata

SEQ ID NO: 166404 - DNA, 15 bp, Homo sapiens
aagggaggctgggat

SEQ ID NO: 166405 - DNA, 15 bp, Homo sapiens
caagggaggctggga

SEQ ID NO: 166406 - DNA, 15 bp, Homo sapiens
gcaagggaggctggg

SEQ ID NO: 166407 - DNA, 15 bp, Homo sapiens
agcaagggaggctgg

SEQ ID NO: 166408 - DNA, 15 bp, Homo sapiens
cagcaagggaggctg

SEQ ID NO: 166409 - DNA, 15 bp, Homo sapiens
tcagcaagggaggct

SEQ ID NO: 166410 - DNA, 15 bp, Homo sapiens
ctcagcaagggaggc

SEQ ID NO: 166411 - DNA, 15 bp, Homo sapiens
gctcagcaagggagg

SEQ ID NO: 166412 - DNA, 15 bp, Homo sapiens
ggctcagcaagggag

SEQ ID NO: 166413 - DNA, 15 bp, Homo sapiens
gggctcagcaaggga

SEQ ID NO: 166414 - DNA, 15 bp, Homo sapiens
tgggctcagcaaggg

SEQ ID NO: 166415 - DNA, 15 bp, Homo sapiens
ctgggctcagcaagg

SEQ ID NO: 166416 - DNA, 15 bp, Homo sapiens
actgggctcagcaag

SEQ ID NO: 166417 - DNA, 15 bp, Homo sapiens
aactgggctcagcaa

SEQ ID NO: 166418 - DNA, 15 bp, Homo sapiens
aaactgggctcagca

SEQ ID NO: 166419 - DNA, 15 bp, Homo sapiens
gaaactgggctcagc

SEQ ID NO: 166420 - DNA, 15 bp, Homo sapiens
tgaaactgggctcag

SEQ ID NO: 166421 - DNA, 15 bp, Homo sapiens
gtgaaactgggctca

SEQ ID NO: 166422 - DNA, 15 bp, Homo sapiens
ggtgaaactgggctc

SEQ ID NO: 166423 - DNA, 15 bp, Homo sapiens
gggtgaaactgggct

SEQ ID NO: 166424 - DNA, 15 bp, Homo sapiens
tgggtgaaactgggc

SEQ ID NO: 166425 - DNA, 15 bp, Homo sapiens
ctgggtgaaactggg

SEQ ID NO: 166426 - DNA, 15 bp, Homo sapiens
cctgggtgaaactgg

SEQ ID NO: 166427 - DNA, 15 bp, Homo sapiens
gcctgggtgaaactg

SEQ ID NO: 166428 - DNA, 15 bp, Homo sapiens
tgcctgggtgaaact

SEQ ID NO: 166429 - DNA, 15 bp, Homo sapiens
gtgcctgggtgaaac

SEQ ID NO: 166430 - DNA, 15 bp, Homo sapiens
ggtgcctgggtgaaa

SEQ ID NO: 166431 - DNA, 15 bp, Homo sapiens
cggtgcctgggtgaa

SEQ ID NO: 166432 - DNA, 15 bp, Homo sapiens
acggtgcctgggtga

SEQ ID NO: 166433 - DNA, 15 bp, Homo sapiens
cacggtgcctgggtg

SEQ ID NO: 166434 - DNA, 15 bp, Homo sapiens
ccacggtgcctgggt

SEQ ID NO: 166435 - DNA, 15 bp, Homo sapiens
tccacggtgcctggg

SEQ ID NO: 166436 - DNA, 15 bp, Homo sapiens
ctccacggtgcctgg

SEQ ID NO: 166437 - DNA, 15 bp, Homo sapiens
cctccacggtgcctg

SEQ ID NO: 166438 - DNA, 15 bp, Homo sapiens
tcctccacggtgcct

SEQ ID NO: 166439 - DNA, 15 bp, Homo sapiens
atcctccacggtgcc

SEQ ID NO: 166440 - DNA, 15 bp, Homo sapiens
tatcctccacggtgc

SEQ ID NO: 166441 - DNA, 15 bp, Homo sapiens
ttatcctccacggtg

SEQ ID NO: 166442 - DNA, 15 bp, Homo sapiens
gttatcctccacggt

SEQ ID NO: 166443 - DNA, 15 bp, Homo sapiens
tgttatcctccacgg

SEQ ID NO: 166444 - DNA, 15 bp, Homo sapiens
ctgttatcctccacg

SEQ ID NO: 166445 - DNA, 15 bp, Homo sapiens
cctgttatcctccac

SEQ ID NO: 166446 - DNA, 15 bp, Homo sapiens
tcctgttatcctcca

SEQ ID NO: 166447 - DNA, 15 bp, Homo sapiens
ctcctgttatcctcc

SEQ ID NO: 166448 - DNA, 15 bp, Homo sapiens
tctcctgttatcctc

SEQ ID NO: 166449 - DNA, 15 bp, Homo sapiens
gtctcctgttatcct

SEQ ID NO: 166450 - DNA, 15 bp, Homo sapiens
tgtctcctgttatcc

SEQ ID NO: 166451 - DNA, 15 bp, Homo sapiens
ttgtctcctgttatc

SEQ ID NO: 166452 - DNA, 15 bp, Homo sapiens
cttgtctcctgttat

SEQ ID NO: 166453 - DNA, 15 bp, Homo sapiens
gcttgtctcctgtta

SEQ ID NO: 166454 - DNA, 15 bp, Homo sapiens
tgcttgtctcctgtt

SEQ ID NO: 166455 - DNA, 15 bp, Homo sapiens
gtgcttgtctcctgt

SEQ ID NO: 166456 - DNA, 15 bp, Homo sapiens
ggtgcttgtctcctg

SEQ ID NO: 166457 - DNA, 15 bp, Homo sapiens
gggtgcttgtctcct

SEQ ID NO: 166458 - DNA, 15 bp, Homo sapiens
agggtgcttgtctcc

SEQ ID NO: 166459 - DNA, 15 bp, Homo sapiens
gagggtgcttgtctc

SEQ ID NO: 166460 - DNA, 15 bp, Homo sapiens
tgagggtgcttgtct

SEQ ID NO: 166461 - DNA, 15 bp, Homo sapiens
atgagggtgcttgtc

SEQ ID NO: 166462 - DNA, 15 bp, Homo sapiens
catgagggtgcttgt

SEQ ID NO: 166463 - DNA, 15 bp, Homo sapiens
ccatgagggtgcttg

SEQ ID NO: 166464 - DNA, 15 bp, Homo sapiens
gccatgagggtgctt

SEQ ID NO: 166465 - DNA, 15 bp, Homo sapiens
tgccatgagggtgct

SEQ ID NO: 166466 - DNA, 15 bp, Homo sapiens
ttgccatgagggtgc

SEQ ID NO: 166467 - DNA, 15 bp, Homo sapiens
cttgccatgagggtg

SEQ ID NO: 166468 - DNA, 15 bp, Homo sapiens
ccttgccatgagggt

SEQ ID NO: 166469 - DNA, 15 bp, Homo sapiens
tccttgccatgaggg

SEQ ID NO: 166470 - DNA, 15 bp, Homo sapiens
ctccttgccatgagg

SEQ ID NO: 166471 - DNA, 15 bp, Homo sapiens
gctccttgccatgag

SEQ ID NO: 166472 - DNA, 15 bp, Homo sapiens
agctccttgccatga

SEQ ID NO: 166473 - DNA, 15 bp, Homo sapiens
gagctccttgccatg

SEQ ID NO: 166474 - DNA, 15 bp, Homo sapiens
ggagctccttgccat

SEQ ID NO: 166475 - DNA, 15 bp, Homo sapiens
gggagctccttgcca

SEQ ID NO: 166476 - DNA, 15 bp, Homo sapiens
tgggagctccttgcc

SEQ ID NO: 166477 - DNA, 15 bp, Homo sapiens
ctgggagctccttgc

SEQ ID NO: 166478 - DNA, 15 bp, Homo sapiens
actgggagctccttg

SEQ ID NO: 166479 - DNA, 15 bp, Homo sapiens
gactgggagctcctt

SEQ ID NO: 166480 - DNA, 15 bp, Homo sapiens
agactgggagctcct

SEQ ID NO: 166481 - DNA, 15 bp, Homo sapiens
gagactgggagctcc

SEQ ID NO: 166482 - DNA, 15 bp, Homo sapiens
ggagactgggagctc

SEQ ID NO: 166483 - DNA, 15 bp, Homo sapiens
tggagactgggagct

SEQ ID NO: 166484 - DNA, 15 bp, Homo sapiens
atggagactgggagc

SEQ ID NO: 166485 - DNA, 15 bp, Homo sapiens
tatggagactgggag

SEQ ID NO: 166486 - DNA, 15 bp, Homo sapiens
ttatggagactggga

SEQ ID NO: 166487 - DNA, 15 bp, Homo sapiens
cttatggagactggg

SEQ ID NO: 166488 - DNA, 15 bp, Homo sapiens
ccttatggagactgg

SEQ ID NO: 166489 - DNA, 15 bp, Homo sapiens
cccttatggagactg

SEQ ID NO: 166490 - DNA, 15 bp, Homo sapiens
ccccttatggagact

SEQ ID NO: 166491 - DNA, 15 bp, Homo sapiens
tccccttatggagac

SEQ ID NO: 166492 - DNA, 15 bp, Homo sapiens
ctccccttatggaga

SEQ ID NO: 166493 - DNA, 15 bp, Homo sapiens
tctccccttatggag

SEQ ID NO: 166494 - DNA, 15 bp, Homo sapiens
ttctccccttatgga

SEQ ID NO: 166495 - DNA, 15 bp, Homo sapiens
tttctccccttatgg

SEQ ID NO: 166496 - DNA, 15 bp, Homo sapiens
ttttctccccttatg

SEQ ID NO: 166497 - DNA, 15 bp, Homo sapiens
cttttctccccttat

SEQ ID NO: 166498 - DNA, 15 bp, Homo sapiens
tcttttctcccctta

SEQ ID NO: 166499 - DNA, 15 bp, Homo sapiens
atcttttctcccctt

SEQ ID NO: 166500 - DNA, 15 bp, Homo sapiens
tatcttttctcccct

SEQ ID NO: 166501 - DNA, 15 bp, Homo sapiens
atatcttttctcccc

SEQ ID NO: 166502 - DNA, 15 bp, Homo sapiens
aatatcttttctccc

SEQ ID NO: 166503 - DNA, 15 bp, Homo sapiens
aaatatcttttctcc

SEQ ID NO: 166504 - DNA, 15 bp, Homo sapiens
gaaatatcttttctc

SEQ ID NO: 166505 - DNA, 15 bp, Homo sapiens
ggaaatatcttttct

SEQ ID NO: 166506 - DNA, 15 bp, Homo sapiens
gggaaatatcttttc

SEQ ID NO: 166507 - DNA, 15 bp, Homo sapiens
agggaaatatctttt

SEQ ID NO: 166508 - DNA, 15 bp, Homo sapiens
tagggaaatatcttt

SEQ ID NO: 166509 - DNA, 15 bp, Homo sapiens
atagggaaatatctt

SEQ ID NO: 166510 - DNA, 15 bp, Homo sapiens
gatagggaaatatct

SEQ ID NO: 166511 - DNA, 15 bp, Homo sapiens
tgatagggaaatatc

SEQ ID NO: 166512 - DNA, 15 bp, Homo sapiens
atgatagggaaatat

SEQ ID NO: 166513 - DNA, 15 bp, Homo sapiens
gatgatagggaaata

SEQ ID NO: 166514 - DNA, 15 bp, Homo sapiens
tgatgatagggaaat

SEQ ID NO: 166515 - DNA, 15 bp, Homo sapiens
atgatgatagggaaa

SEQ ID NO: 166516 - DNA, 15 bp, Homo sapiens
gatgatgatagggaa

SEQ ID NO: 166517 - DNA, 15 bp, Homo sapiens
tgatgatgataggga

SEQ ID NO: 166518 - DNA, 15 bp, Homo sapiens
atgatgatgataggg

SEQ ID NO: 166519 - DNA, 15 bp, Homo sapiens
gatgatgatgatagg

SEQ ID NO: 166520 - DNA, 15 bp, Homo sapiens
tgatgatgatgatag

SEQ ID NO: 166521 - DNA, 15 bp, Homo sapiens
atgatgatgatgata

SEQ ID NO: 166522 - DNA, 15 bp, Homo sapiens
gatgatgatgatgat

SEQ ID NO: 166523 - DNA, 15 bp, Homo sapiens
tgatgatgatgatga

SEQ ID NO: 166524 - DNA, 15 bp, Homo sapiens
atgatgatgatgatg

SEQ ID NO: 166525 - DNA, 15 bp, Homo sapiens
gtgatgatgatgatg

SEQ ID NO: 166526 - DNA, 15 bp, Homo sapiens
ggtgatgatgatgat

SEQ ID NO: 166527 - DNA, 15 bp, Homo sapiens
tggtgatgatgatga

SEQ ID NO: 166528 - DNA, 15 bp, Homo sapiens
atggtgatgatgatg

SEQ ID NO: 166529 - DNA, 15 bp, Homo sapiens
gatggtgatgatgat

SEQ ID NO: 166530 - DNA, 15 bp, Homo sapiens
tgatggtgatgatga

SEQ ID NO: 166531 - DNA, 15 bp, Homo sapiens
gtgatggtgatgatg

SEQ ID NO: 166532 - DNA, 15 bp, Homo sapiens
ggtgatggtgatgat

SEQ ID NO: 166533 - DNA, 15 bp, Homo sapiens
tggtgatggtgatga

SEQ ID NO: 166534 - DNA, 15 bp, Homo sapiens
atggtgatggtgatg

SEQ ID NO: 166535 - DNA, 15 bp, Homo sapiens
gatggtgatggtgat

SEQ ID NO: 166536 - DNA, 15 bp, Homo sapiens
tgatggtgatggtga

SEQ ID NO: 166537 - DNA, 15 bp, Homo sapiens
atgatggtgatggtg

SEQ ID NO: 166538 - DNA, 15 bp, Homo sapiens
gatgatggtgatggt

SEQ ID NO: 166539 - DNA, 15 bp, Homo sapiens
tgatgatggtgatgg

SEQ ID NO: 166540 - DNA, 15 bp, Homo sapiens
atgatgatggtgatg

SEQ ID NO: 166541 - DNA, 15 bp, Homo sapiens
gatgatgatggtgat

SEQ ID NO: 166542 - DNA, 15 bp, Homo sapiens
cgatgatgatggtga

SEQ ID NO: 166543 - DNA, 15 bp, Homo sapiens
acgatgatgatggtg

SEQ ID NO: 166544 - DNA, 15 bp, Homo sapiens
gacgatgatgatggt

SEQ ID NO: 166545 - DNA, 15 bp, Homo sapiens
tgacgatgatgatgg

SEQ ID NO: 166546 - DNA, 15 bp, Homo sapiens
atgacgatgatgatg

SEQ ID NO: 166547 - DNA, 15 bp, Homo sapiens
gatgacgatgatgat

SEQ ID NO: 166548 - DNA, 15 bp, Homo sapiens
tgatgacgatgatga

SEQ ID NO: 166549 - DNA, 15 bp, Homo sapiens
atgatgacgatgatg

SEQ ID NO: 166550 - DNA, 15 bp, Homo sapiens
tatgatgacgatgat

SEQ ID NO: 166551 - DNA, 15 bp, Homo sapiens
ctatgatgacgatga

SEQ ID NO: 166552 - DNA, 15 bp, Homo sapiens
gctatgatgacgatg

SEQ ID NO: 166553 - DNA, 15 bp, Homo sapiens
ggctatgatgacgat

SEQ ID NO: 166554 - DNA, 15 bp, Homo sapiens
tggctatgatgacga

SEQ ID NO: 166555 - DNA, 15 bp, Homo sapiens
ctggctatgatgacg

SEQ ID NO: 166556 - DNA, 15 bp, Homo sapiens
gctggctatgatgac

SEQ ID NO: 166557 - DNA, 15 bp, Homo sapiens
tgctggctatgatga

SEQ ID NO: 166558 - DNA, 15 bp, Homo sapiens
atgctggctatgatg

SEQ ID NO: 166559 - DNA, 15 bp, Homo sapiens
aatgctggctatgat

SEQ ID NO: 166560 - DNA, 15 bp, Homo sapiens
aaatgctggctatga

SEQ ID NO: 166561 - DNA, 15 bp, Homo sapiens
taaatgctggctatg

SEQ ID NO: 166562 - DNA, 15 bp, Homo sapiens
ataaatgctggctat

SEQ ID NO: 166563 - DNA, 15 bp, Homo sapiens
aataaatgctggcta

SEQ ID NO: 166564 - DNA, 15 bp, Homo sapiens
caataaatgctggct

SEQ ID NO: 166565 - DNA, 15 bp, Homo sapiens
tcaataaatgctggc

SEQ ID NO: 166566 - DNA, 15 bp, Homo sapiens
ctcaataaatgctgg

SEQ ID NO: 166567 - DNA, 15 bp, Homo sapiens
actcaataaatgctg

SEQ ID NO: 166568 - DNA, 15 bp, Homo sapiens
tactcaataaatgct

SEQ ID NO: 166569 - DNA, 15 bp, Homo sapiens
gtactcaataaatgc

SEQ ID NO: 166570 - DNA, 15 bp, Homo sapiens
ggtactcaataaatg

SEQ ID NO: 166571 - DNA, 15 bp, Homo sapiens
aggtactcaataaat

SEQ ID NO: 166572 - DNA, 15 bp, Homo sapiens
taggtactcaataaa

SEQ ID NO: 166573 - DNA, 15 bp, Homo sapiens
gtaggtactcaataa

SEQ ID NO: 166574 - DNA, 15 bp, Homo sapiens
agtaggtactcaata

SEQ ID NO: 166575 - DNA, 15 bp, Homo sapiens
cagtaggtactcaat

SEQ ID NO: 166576 - DNA, 15 bp, Homo sapiens
acagtaggtactcaa

SEQ ID NO: 166577 - DNA, 15 bp, Homo sapiens
cacagtaggtactca

SEQ ID NO: 166578 - DNA, 15 bp, Homo sapiens
acacagtaggtactc

SEQ ID NO: 166579 - DNA, 15 bp, Homo sapiens
cacacagtaggtact

SEQ ID NO: 166580 - DNA, 15 bp, Homo sapiens
gcacacagtaggtac

SEQ ID NO: 166581 - DNA, 15 bp, Homo sapiens
ggcacacagtaggta

SEQ ID NO: 166582 - DNA, 15 bp, Homo sapiens
tggcacacagtaggt

SEQ ID NO: 166583 - DNA, 15 bp, Homo sapiens
ttggcacacagtagg

SEQ ID NO: 166584 - DNA, 15 bp, Homo sapiens
cttggcacacagtag

SEQ ID NO: 166585 - DNA, 15 bp, Homo sapiens
acttggcacacagta

SEQ ID NO: 166586 - DNA, 15 bp, Homo sapiens
gacttggcacacagt

SEQ ID NO: 166587 - DNA, 15 bp, Homo sapiens
ggacttggcacacag

SEQ ID NO: 166588 - DNA, 15 bp, Homo sapiens
aggacttggcacaca

SEQ ID NO: 166589 - DNA, 15 bp, Homo sapiens
caggacttggcacac

SEQ ID NO: 166590 - DNA, 15 bp, Homo sapiens
gcaggacttggcaca

SEQ ID NO: 166591 - DNA, 15 bp, Homo sapiens
ggcaggacttggcac

SEQ ID NO: 166592 - DNA, 15 bp, Homo sapiens
gggcaggacttggca

SEQ ID NO: 166593 - DNA, 15 bp, Homo sapiens
agggcaggacttggc

SEQ ID NO: 166594 - DNA, 15 bp, Homo sapiens
tagggcaggacttgg

SEQ ID NO: 166595 - DNA, 15 bp, Homo sapiens
ttagggcaggacttg

SEQ ID NO: 166596 - DNA, 15 bp, Homo sapiens
tttagggcaggactt

SEQ ID NO: 166597 - DNA, 15 bp, Homo sapiens
ttttagggcaggact

SEQ ID NO: 166598 - DNA, 15 bp, Homo sapiens
cttttagggcaggac

SEQ ID NO: 166599 - DNA, 15 bp, Homo sapiens
gcttttagggcagga

SEQ ID NO: 166600 - DNA, 15 bp, Homo sapiens
tgcttttagggcagg

SEQ ID NO: 166601 - DNA, 15 bp, Homo sapiens
ctgcttttagggcag

SEQ ID NO: 166602 - DNA, 15 bp, Homo sapiens
cctgcttttagggca

SEQ ID NO: 166603 - DNA, 15 bp, Homo sapiens
ccctgcttttagggc

SEQ ID NO: 166604 - DNA, 15 bp, Homo sapiens
gccctgcttttaggg

SEQ ID NO: 166605 - DNA, 15 bp, Homo sapiens
agccctgcttttagg

SEQ ID NO: 166606 - DNA, 15 bp, Homo sapiens
aagccctgcttttag

SEQ ID NO: 166607 - DNA, 15 bp, Homo sapiens
aaagccctgctttta

SEQ ID NO: 166608 - DNA, 15 bp, Homo sapiens
taaagccctgctttt

SEQ ID NO: 166609 - DNA, 15 bp, Homo sapiens
ataaagccctgcttt

SEQ ID NO: 166610 - DNA, 15 bp, Homo sapiens
tataaagccctgctt

SEQ ID NO: 166611 - DNA, 15 bp, Homo sapiens
ttataaagccctgct

SEQ ID NO: 166612 - DNA, 15 bp, Homo sapiens
gttataaagccctgc

SEQ ID NO: 166613 - DNA, 15 bp, Homo sapiens
agttataaagccctg

SEQ ID NO: 166614 - DNA, 15 bp, Homo sapiens
tagttataaagccct

SEQ ID NO: 166615 - DNA, 15 bp, Homo sapiens
gtagttataaagccc

SEQ ID NO: 166616 - DNA, 15 bp, Homo sapiens
ggtagttataaagcc

SEQ ID NO: 166617 - DNA, 15 bp, Homo sapiens
gggtagttataaagc

SEQ ID NO: 166618 - DNA, 15 bp, Homo sapiens
agggtagttataaag

SEQ ID NO: 166619 - DNA, 15 bp, Homo sapiens
cagggtagttataaa

SEQ ID NO: 166620 - DNA, 15 bp, Homo sapiens
acagggtagttataa

SEQ ID NO: 166621 - DNA, 15 bp, Homo sapiens
cacagggtagttata

SEQ ID NO: 166622 - DNA, 15 bp, Homo sapiens
ccacagggtagttat

SEQ ID NO: 166623 - DNA, 15 bp, Homo sapiens
accacagggtagtta

SEQ ID NO: 166624 - DNA, 15 bp, Homo sapiens
aaccacagggtagtt

SEQ ID NO: 166625 - DNA, 15 bp, Homo sapiens
taaccacagggtagt

SEQ ID NO: 166626 - DNA, 15 bp, Homo sapiens
ataaccacagggtag

SEQ ID NO: 166627 - DNA, 15 bp, Homo sapiens
tataaccacagggta

SEQ ID NO: 166628 - DNA, 15 bp, Homo sapiens
gtataaccacagggt

SEQ ID NO: 166629 - DNA, 15 bp, Homo sapiens
ggtataaccacaggg

SEQ ID NO: 166630 - DNA, 15 bp, Homo sapiens
aggtataaccacagg

SEQ ID NO: 166631 - DNA, 15 bp, Homo sapiens
caggtataaccacag

SEQ ID NO: 166632 - DNA, 15 bp, Homo sapiens
gcaggtataaccaca

SEQ ID NO: 166633 - DNA, 15 bp, Homo sapiens
agcaggtataaccac

SEQ ID NO: 166634 - DNA, 15 bp, Homo sapiens
cagcaggtataacca

SEQ ID NO: 166635 - DNA, 15 bp, Homo sapiens
acagcaggtataacc

SEQ ID NO: 166636 - DNA, 15 bp, Homo sapiens
tacagcaggtataac

SEQ ID NO: 166637 - DNA, 15 bp, Homo sapiens
gtacagcaggtataa

SEQ ID NO: 166638 - DNA, 15 bp, Homo sapiens
tgtacagcaggtata

SEQ ID NO: 166639 - DNA, 15 bp, Homo sapiens
ctgtacagcaggtat

SEQ ID NO: 166640 - DNA, 15 bp, Homo sapiens
tctgtacagcaggta

SEQ ID NO: 166641 - DNA, 15 bp, Homo sapiens
atctgtacagcaggt

SEQ ID NO: 166642 - DNA, 15 bp, Homo sapiens
catctgtacagcagg

SEQ ID NO: 166643 - DNA, 15 bp, Homo sapiens
tcatctgtacagcag

SEQ ID NO: 166644 - DNA, 15 bp, Homo sapiens
ctcatctgtacagca

SEQ ID NO: 166645 - DNA, 15 bp, Homo sapiens
cctcatctgtacagc

SEQ ID NO: 166646 - DNA, 15 bp, Homo sapiens
tcctcatctgtacag

SEQ ID NO: 166647 - DNA, 15 bp, Homo sapiens
ttcctcatctgtaca

SEQ ID NO: 166648 - DNA, 15 bp, Homo sapiens
tttcctcatctgtac

SEQ ID NO: 166649 - DNA, 15 bp, Homo sapiens
gtttcctcatctgta

SEQ ID NO: 166650 - DNA, 15 bp, Homo sapiens
agtttcctcatctgt

SEQ ID NO: 166651 - DNA, 15 bp, Homo sapiens
cagtttcctcatctg

SEQ ID NO: 166652 - DNA, 15 bp, Homo sapiens
tcagtttcctcatct

SEQ ID NO: 166653 - DNA, 15 bp, Homo sapiens
ttcagtttcctcatc

SEQ ID NO: 166654 - DNA, 15 bp, Homo sapiens
cttcagtttcctcat

SEQ ID NO: 166655 - DNA, 15 bp, Homo sapiens
gcttcagtttcctca

SEQ ID NO: 166656 - DNA, 15 bp, Homo sapiens
tgcttcagtttcctc

SEQ ID NO: 166657 - DNA, 15 bp, Homo sapiens
gtgcttcagtttcct

SEQ ID NO: 166658 - DNA, 15 bp, Homo sapiens
tgtgcttcagtttcc

SEQ ID NO: 166659 - DNA, 15 bp, Homo sapiens
ttgtgcttcagtttc

SEQ ID NO: 166660 - DNA, 15 bp, Homo sapiens
tttgtgcttcagttt

SEQ ID NO: 166661 - DNA, 15 bp, Homo sapiens
ttttgtgcttcagtt

SEQ ID NO: 166662 - DNA, 15 bp, Homo sapiens
tttttgtgcttcagt

SEQ ID NO: 166663 - DNA, 15 bp, Homo sapiens
ctttttgtgcttcag

SEQ ID NO: 166664 - DNA, 15 bp, Homo sapiens
actttttgtgcttca

SEQ ID NO: 166665 - DNA, 15 bp, Homo sapiens
aactttttgtgcttc

SEQ ID NO: 166666 - DNA, 15 bp, Homo sapiens
aaactttttgtgctt

SEQ ID NO: 166667 - DNA, 15 bp, Homo sapiens
taaactttttgtgct

SEQ ID NO: 166668 - DNA, 15 bp, Homo sapiens
ttaaactttttgtgc

SEQ ID NO: 166669 - DNA, 15 bp, Homo sapiens
cttaaactttttgtg

SEQ ID NO: 166670 - DNA, 15 bp, Homo sapiens
acttaaactttttgt

SEQ ID NO: 166671 - DNA, 15 bp, Homo sapiens
gacttaaactttttg

SEQ ID NO: 166672 - DNA, 15 bp, Homo sapiens
tgacttaaacttttt

SEQ ID NO: 166673 - DNA, 15 bp, Homo sapiens
gtgacttaaactttt

SEQ ID NO: 166674 - DNA, 15 bp, Homo sapiens
agtgacttaaacttt

SEQ ID NO: 166675 - DNA, 15 bp, Homo sapiens
aagtgacttaaactt

SEQ ID NO: 166676 - DNA, 15 bp, Homo sapiens
caagtgacttaaact

SEQ ID NO: 166677 - DNA, 15 bp, Homo sapiens
acaagtgacttaaac

SEQ ID NO: 166678 - DNA, 15 bp, Homo sapiens
aacaagtgacttaaa

SEQ ID NO: 166679 - DNA, 15 bp, Homo sapiens
gaacaagtgacttaa

SEQ ID NO: 166680 - DNA, 15 bp, Homo sapiens
ggaacaagtgactta

SEQ ID NO: 166681 - DNA, 15 bp, Homo sapiens
tggaacaagtgactt

SEQ ID NO: 166682 - DNA, 15 bp, Homo sapiens
ttggaacaagtgact

SEQ ID NO: 166683 - DNA, 15 bp, Homo sapiens
tttggaacaagtgac

SEQ ID NO: 166684 - DNA, 15 bp, Homo sapiens
atttggaacaagtga

SEQ ID NO: 166685 - DNA, 15 bp, Homo sapiens
catttggaacaagtg

SEQ ID NO: 166686 - DNA, 15 bp, Homo sapiens
tcatttggaacaagt

SEQ ID NO: 166687 - DNA, 15 bp, Homo sapiens
atcatttggaacaag

SEQ ID NO: 166688 - DNA, 15 bp, Homo sapiens
catcatttggaacaa

SEQ ID NO: 166689 - DNA, 15 bp, Homo sapiens
acatcatttggaaca

SEQ ID NO: 166690 - DNA, 15 bp, Homo sapiens
cacatcatttggaac

SEQ ID NO: 166691 - DNA, 15 bp, Homo sapiens
ccacatcatttggaa

SEQ ID NO: 166692 - DNA, 15 bp, Homo sapiens
accacatcatttgga

SEQ ID NO: 166693 - DNA, 15 bp, Homo sapiens
gaccacatcatttgg

SEQ ID NO: 166694 - DNA, 15 bp, Homo sapiens
tgaccacatcatttg

SEQ ID NO: 166695 - DNA, 15 bp, Homo sapiens
ttgaccacatcattt

SEQ ID NO: 166696 - DNA, 15 bp, Homo sapiens
attgaccacatcatt

SEQ ID NO: 166697 - DNA, 15 bp, Homo sapiens
cattgaccacatcat

SEQ ID NO: 166698 - DNA, 15 bp, Homo sapiens
ccattgaccacatca

SEQ ID NO: 166699 - DNA, 15 bp, Homo sapiens
gccattgaccacatc

SEQ ID NO: 166700 - DNA, 15 bp, Homo sapiens
tgccattgaccacat

SEQ ID NO: 166701 - DNA, 15 bp, Homo sapiens
ctgccattgaccaca

SEQ ID NO: 166702 - DNA, 15 bp, Homo sapiens
tctgccattgaccac

SEQ ID NO: 166703 - DNA, 15 bp, Homo sapiens
ctctgccattgacca

SEQ ID NO: 166704 - DNA, 15 bp, Homo sapiens
gctctgccattgacc

SEQ ID NO: 166705 - DNA, 15 bp, Homo sapiens
ggctctgccattgac

SEQ ID NO: 166706 - DNA, 15 bp, Homo sapiens
tggctctgccattga

SEQ ID NO: 166707 - DNA, 15 bp, Homo sapiens
ctggctctgccattg

SEQ ID NO: 166708 - DNA, 15 bp, Homo sapiens
cctggctctgccatt

SEQ ID NO: 166709 - DNA, 15 bp, Homo sapiens
tcctggctctgccat

SEQ ID NO: 166710 - DNA, 15 bp, Homo sapiens
atcctggctctgcca

SEQ ID NO: 166711 - DNA, 15 bp, Homo sapiens
aatcctggctctgcc

SEQ ID NO: 166712 - DNA, 15 bp, Homo sapiens
aaatcctggctctgc

SEQ ID NO: 166713 - DNA, 15 bp, Homo sapiens
caaatcctggctctg

SEQ ID NO: 166714 - DNA, 15 bp, Homo sapiens
tcaaatcctggctct

SEQ ID NO: 166715 - DNA, 15 bp, Homo sapiens
ttcaaatcctggctc

SEQ ID NO: 166716 - DNA, 15 bp, Homo sapiens
attcaaatcctggct

SEQ ID NO: 166717 - DNA, 15 bp, Homo sapiens
gattcaaatcctggc

SEQ ID NO: 166718 - DNA, 15 bp, Homo sapiens
ggattcaaatcctgg

SEQ ID NO: 166719 - DNA, 15 bp, Homo sapiens
tggattcaaatcctg

SEQ ID NO: 166720 - DNA, 15 bp, Homo sapiens
ttggattcaaatcct

SEQ ID NO: 166721 - DNA, 15 bp, Homo sapiens
attggattcaaatcc

SEQ ID NO: 166722 - DNA, 15 bp, Homo sapiens
aattggattcaaatc

SEQ ID NO: 166723 - DNA, 15 bp, Homo sapiens
gaattggattcaaat

SEQ ID NO: 166724 - DNA, 15 bp, Homo sapiens
cgaattggattcaaa

SEQ ID NO: 166725 - DNA, 15 bp, Homo sapiens
acgaattggattcaa

SEQ ID NO: 166726 - DNA, 15 bp, Homo sapiens
cacgaattggattca

SEQ ID NO: 166727 - DNA, 15 bp, Homo sapiens
gcacgaattggattc

SEQ ID NO: 166728 - DNA, 15 bp, Homo sapiens
agcacgaattggatt

SEQ ID NO: 166729 - DNA, 15 bp, Homo sapiens
gagcacgaattggat

SEQ ID NO: 166730 - DNA, 15 bp, Homo sapiens
ggagcacgaattgga

SEQ ID NO: 166731 - DNA, 15 bp, Homo sapiens
aggagcacgaattgg

SEQ ID NO: 166732 - DNA, 15 bp, Homo sapiens
taggagcacgaattg

SEQ ID NO: 166733 - DNA, 15 bp, Homo sapiens
ataggagcacgaatt

SEQ ID NO: 166734 - DNA, 15 bp, Homo sapiens
gataggagcacgaat

SEQ ID NO: 166735 - DNA, 15 bp, Homo sapiens
tgataggagcacgaa

SEQ ID NO: 166736 - DNA, 15 bp, Homo sapiens
atgataggagcacga

SEQ ID NO: 166737 - DNA, 15 bp, Homo sapiens
gatgataggagcacg

SEQ ID NO: 166738 - DNA, 15 bp, Homo sapiens
tgatgataggagcac

SEQ ID NO: 166739 - DNA, 15 bp, Homo sapiens
gtgatgataggagca

SEQ ID NO: 166740 - DNA, 15 bp, Homo sapiens
tgtgatgataggagc

SEQ ID NO: 166741 - DNA, 15 bp, Homo sapiens
gtgtgatgataggag

SEQ ID NO: 166742 - DNA, 15 bp, Homo sapiens
ggtgtgatgatagga

SEQ ID NO: 166743 - DNA, 15 bp, Homo sapiens
aggtgtgatgatagg

SEQ ID NO: 166744 - DNA, 15 bp, Homo sapiens
aaggtgtgatgatag

SEQ ID NO: 166745 - DNA, 15 bp, Homo sapiens
caaggtgtgatgata

SEQ ID NO: 166746 - DNA, 15 bp, Homo sapiens
tcaaggtgtgatgat

SEQ ID NO: 166747 - DNA, 15 bp, Homo sapiens
ttcaaggtgtgatga

SEQ ID NO: 166748 - DNA, 15 bp, Homo sapiens
cttcaaggtgtgatg

SEQ ID NO: 166749 - DNA, 15 bp, Homo sapiens
ccttcaaggtgtgat

SEQ ID NO: 166750 - DNA, 15 bp, Homo sapiens
cccttcaaggtgtga

SEQ ID NO: 166751 - DNA, 15 bp, Homo sapiens
ccccttcaaggtgtg

SEQ ID NO: 166752 - DNA, 15 bp, Homo sapiens
gccccttcaaggtgt

SEQ ID NO: 166753 - DNA, 15 bp, Homo sapiens
agccccttcaaggtg

SEQ ID NO: 166754 - DNA, 15 bp, Homo sapiens
cagccccttcaaggt

SEQ ID NO: 166755 - DNA, 15 bp, Homo sapiens
ccagccccttcaagg

SEQ ID NO: 166756 - DNA, 15 bp, Homo sapiens
tccagccccttcaag

SEQ ID NO: 166757 - DNA, 15 bp, Homo sapiens
ctccagccccttcaa

SEQ ID NO: 166758 - DNA, 15 bp, Homo sapiens
gctccagccccttca

SEQ ID NO: 166759 - DNA, 15 bp, Homo sapiens
ggctccagccccttc

SEQ ID NO: 166760 - DNA, 15 bp, Homo sapiens
gggctccagcccctt

SEQ ID NO: 166761 - DNA, 15 bp, Homo sapiens
tgggctccagcccct

SEQ ID NO: 166762 - DNA, 15 bp, Homo sapiens
ttgggctccagcccc

SEQ ID NO: 166763 - DNA, 15 bp, Homo sapiens
cttgggctccagccc

SEQ ID NO: 166764 - DNA, 15 bp, Homo sapiens
gcttgggctccagcc

SEQ ID NO: 166765 - DNA, 15 bp, Homo sapiens
tgcttgggctccagc

SEQ ID NO: 166766 - DNA, 15 bp, Homo sapiens
ctgcttgggctccag

SEQ ID NO: 166767 - DNA, 15 bp, Homo sapiens
gctgcttgggctcca

SEQ ID NO: 166768 - DNA, 15 bp, Homo sapiens
tgctgcttgggctcc

SEQ ID NO: 166769 - DNA, 15 bp, Homo sapiens
ttgctgcttgggctc

SEQ ID NO: 166770 - DNA, 15 bp, Homo sapiens
gttgctgcttgggct

SEQ ID NO: 166771 - DNA, 15 bp, Homo sapiens
agttgctgcttgggc

SEQ ID NO: 166772 - DNA, 15 bp, Homo sapiens
cagttgctgcttggg

SEQ ID NO: 166773 - DNA, 15 bp, Homo sapiens
ccagttgctgcttgg

SEQ ID NO: 166774 - DNA, 15 bp, Homo sapiens
gccagttgctgcttg

SEQ ID NO: 166775 - DNA, 15 bp, Homo sapiens
ggccagttgctgctt

SEQ ID NO: 166776 - DNA, 15 bp, Homo sapiens
gggccagttgctgct

SEQ ID NO: 166777 - DNA, 15 bp, Homo sapiens
tgggccagttgctgc

SEQ ID NO: 166778 - DNA, 15 bp, Homo sapiens
ctgggccagttgctg

SEQ ID NO: 166779 - DNA, 15 bp, Homo sapiens
tctgggccagttgct

SEQ ID NO: 166780 - DNA, 15 bp, Homo sapiens
ttctgggccagttgc

SEQ ID NO: 166781 - DNA, 15 bp, Homo sapiens
tttctgggccagttg

SEQ ID NO: 166782 - DNA, 15 bp, Homo sapiens
gtttctgggccagtt

SEQ ID NO: 166783 - DNA, 15 bp, Homo sapiens
tgtttctgggccagt

SEQ ID NO: 166784 - DNA, 15 bp, Homo sapiens
ttgtttctgggccag

SEQ ID NO: 166785 - DNA, 15 bp, Homo sapiens
cttgtttctgggcca

SEQ ID NO: 166786 - DNA, 15 bp, Homo sapiens
acttgtttctgggcc

SEQ ID NO: 166787 - DNA, 15 bp, Homo sapiens
cacttgtttctgggc

SEQ ID NO: 166788 - DNA, 15 bp, Homo sapiens
gcacttgtttctggg

SEQ ID NO: 166789 - DNA, 15 bp, Homo sapiens
cgcacttgtttctgg

SEQ ID NO: 166790 - DNA, 15 bp, Homo sapiens
ccgcacttgtttctg

SEQ ID NO: 166791 - DNA, 15 bp, Homo sapiens
cccgcacttgtttct

SEQ ID NO: 166792 - DNA, 15 bp, Homo sapiens
gcccgcacttgtttc

SEQ ID NO: 166793 - DNA, 15 bp, Homo sapiens
tgcccgcacttgttt

SEQ ID NO: 166794 - DNA, 15 bp, Homo sapiens
atgcccgcacttgtt

SEQ ID NO: 166795 - DNA, 15 bp, Homo sapiens
catgcccgcacttgt

SEQ ID NO: 166796 - DNA, 15 bp, Homo sapiens
tcatgcccgcacttg

SEQ ID NO: 166797 - DNA, 15 bp, Homo sapiens
ctcatgcccgcactt

SEQ ID NO: 166798 - DNA, 15 bp, Homo sapiens
cctcatgcccgcact

SEQ ID NO: 166799 - DNA, 15 bp, Homo sapiens
acctcatgcccgcac

SEQ ID NO: 166800 - DNA, 15 bp, Homo sapiens
aacctcatgcccgca

SEQ ID NO: 166801 - DNA, 15 bp, Homo sapiens
taacctcatgcccgc

SEQ ID NO: 166802 - DNA, 15 bp, Homo sapiens
ataacctcatgcccg

SEQ ID NO: 166803 - DNA, 15 bp, Homo sapiens
cataacctcatgccc

SEQ ID NO: 166804 - DNA, 15 bp, Homo sapiens
gcataacctcatgcc

SEQ ID NO: 166805 - DNA, 15 bp, Homo sapiens
agcataacctcatgc

SEQ ID NO: 166806 - DNA, 15 bp, Homo sapiens
gagcataacctcatg

SEQ ID NO: 166807 - DNA, 15 bp, Homo sapiens
agagcataacctcat

SEQ ID NO: 166808 - DNA, 15 bp, Homo sapiens
cagagcataacctca

SEQ ID NO: 166809 - DNA, 15 bp, Homo sapiens
ccagagcataacctc

SEQ ID NO: 166810 - DNA, 15 bp, Homo sapiens
cccagagcataacct

SEQ ID NO: 166811 - DNA, 15 bp, Homo sapiens
ccccagagcataacc

SEQ ID NO: 166812 - DNA, 15 bp, Homo sapiens
tccccagagcataac

SEQ ID NO: 166813 - DNA, 15 bp, Homo sapiens
ttccccagagcataa

SEQ ID NO: 166814 - DNA, 15 bp, Homo sapiens
cttccccagagcata

SEQ ID NO: 166815 - DNA, 15 bp, Homo sapiens
gcttccccagagcat

SEQ ID NO: 166816 - DNA, 15 bp, Homo sapiens
ggcttccccagagca

SEQ ID NO: 166817 - DNA, 15 bp, Homo sapiens
tggcttccccagagc

SEQ ID NO: 166818 - DNA, 15 bp, Homo sapiens
ctggcttccccagag

SEQ ID NO: 166819 - DNA, 15 bp, Homo sapiens
cctggcttccccaga

SEQ ID NO: 166820 - DNA, 15 bp, Homo sapiens
acctggcttccccag

SEQ ID NO: 166821 - DNA, 15 bp, Homo sapiens
cacctggcttcccca

SEQ ID NO: 166822 - DNA, 15 bp, Homo sapiens
acacctggcttcccc

SEQ ID NO: 166823 - DNA, 15 bp, Homo sapiens
gacacctggcttccc

SEQ ID NO: 166824 - DNA, 15 bp, Homo sapiens
agacacctggcttcc

SEQ ID NO: 166825 - DNA, 15 bp, Homo sapiens
aagacacctggcttc

SEQ ID NO: 166826 - DNA, 15 bp, Homo sapiens
gaagacacctggctt

SEQ ID NO: 166827 - DNA, 15 bp, Homo sapiens
ggaagacacctggct

SEQ ID NO: 166828 - DNA, 15 bp, Homo sapiens
aggaagacacctggc

SEQ ID NO: 166829 - DNA, 15 bp, Homo sapiens
caggaagacacctgg

SEQ ID NO: 166830 - DNA, 15 bp, Homo sapiens
ccaggaagacacctg

SEQ ID NO: 166831 - DNA, 15 bp, Homo sapiens
tccaggaagacacct

SEQ ID NO: 166832 - DNA, 15 bp, Homo sapiens
ctccaggaagacacc

SEQ ID NO: 166833 - DNA, 15 bp, Homo sapiens
cctccaggaagacac

SEQ ID NO: 166834 - DNA, 15 bp, Homo sapiens
tcctccaggaagaca

SEQ ID NO: 166835 - DNA, 15 bp, Homo sapiens
ctcctccaggaagac

SEQ ID NO: 166836 - DNA, 15 bp, Homo sapiens
cctcctccaggaaga

SEQ ID NO: 166837 - DNA, 15 bp, Homo sapiens
acctcctccaggaag

SEQ ID NO: 166838 - DNA, 15 bp, Homo sapiens
cacctcctccaggaa

SEQ ID NO: 166839 - DNA, 15 bp, Homo sapiens
ccacctcctccagga

SEQ ID NO: 166840 - DNA, 15 bp, Homo sapiens
gccacctcctccagg

SEQ ID NO: 166841 - DNA, 15 bp, Homo sapiens
ggccacctcctccag

SEQ ID NO: 166842 - DNA, 15 bp, Homo sapiens
aggccacctcctcca

SEQ ID NO: 166843 - DNA, 15 bp, Homo sapiens
caggccacctcctcc

SEQ ID NO: 166844 - DNA, 15 bp, Homo sapiens
ccaggccacctcctc

SEQ ID NO: 166845 - DNA, 15 bp, Homo sapiens
accaggccacctcct

SEQ ID NO: 166846 - DNA, 15 bp, Homo sapiens
caccaggccacctcc

SEQ ID NO: 166847 - DNA, 15 bp, Homo sapiens
ccaccaggccacctc

SEQ ID NO: 166848 - DNA, 15 bp, Homo sapiens
cccaccaggccacct

SEQ ID NO: 166849 - DNA, 15 bp, Homo sapiens
ccccaccaggccacc

SEQ ID NO: 166850 - DNA, 15 bp, Homo sapiens
gccccaccaggccac

SEQ ID NO: 166851 - DNA, 15 bp, Homo sapiens
ggccccaccaggcca

SEQ ID NO: 166852 - DNA, 15 bp, Homo sapiens
gggccccaccaggcc

SEQ ID NO: 166853 - DNA, 15 bp, Homo sapiens
tgggccccaccaggc

SEQ ID NO: 166854 - DNA, 15 bp, Homo sapiens
ttgggccccaccagg

SEQ ID NO: 166855 - DNA, 15 bp, Homo sapiens
attgggccccaccag

SEQ ID NO: 166856 - DNA, 15 bp, Homo sapiens
cattgggccccacca

SEQ ID NO: 166857 - DNA, 15 bp, Homo sapiens
acattgggccccacc

SEQ ID NO: 166858 - DNA, 15 bp, Homo sapiens
tacattgggccccac

SEQ ID NO: 166859 - DNA, 15 bp, Homo sapiens
ttacattgggcccca

SEQ ID NO: 166860 - DNA, 15 bp, Homo sapiens
cttacattgggcccc

SEQ ID NO: 166861 - DNA, 15 bp, Homo sapiens
gcttacattgggccc

SEQ ID NO: 166862 - DNA, 15 bp, Homo sapiens
agcttacattgggcc

SEQ ID NO: 166863 - DNA, 15 bp, Homo sapiens
aagcttacattgggc

SEQ ID NO: 166864 - DNA, 15 bp, Homo sapiens
gaagcttacattggg

SEQ ID NO: 166865 - DNA, 15 bp, Homo sapiens
tgaagcttacattgg

SEQ ID NO: 166866 - DNA, 15 bp, Homo sapiens
gtgaagcttacattg

SEQ ID NO: 166867 - DNA, 15 bp, Homo sapiens
ggtgaagcttacatt

SEQ ID NO: 166868 - DNA, 15 bp, Homo sapiens
aggtgaagcttacat

SEQ ID NO: 166869 - DNA, 15 bp, Homo sapiens
aaggtgaagcttaca

SEQ ID NO: 166870 - DNA, 15 bp, Homo sapiens
caaggtgaagcttac

SEQ ID NO: 166871 - DNA, 15 bp, Homo sapiens
ccaaggtgaagctta

SEQ ID NO: 166872 - DNA, 15 bp, Homo sapiens
gccaaggtgaagctt

SEQ ID NO: 166873 - DNA, 15 bp, Homo sapiens
tgccaaggtgaagct

SEQ ID NO: 166874 - DNA, 15 bp, Homo sapiens
gtgccaaggtgaagc

SEQ ID NO: 166875 - DNA, 15 bp, Homo sapiens
cgtgccaaggtgaag

SEQ ID NO: 166876 - DNA, 15 bp, Homo sapiens
acgtgccaaggtgaa

SEQ ID NO: 166877 - DNA, 15 bp, Homo sapiens
cacgtgccaaggtga

SEQ ID NO: 166878 - DNA, 15 bp, Homo sapiens
ccacgtgccaaggtg

SEQ ID NO: 166879 - DNA, 15 bp, Homo sapiens
cccacgtgccaaggt

SEQ ID NO: 166880 - DNA, 15 bp, Homo sapiens
tcccacgtgccaagg

SEQ ID NO: 166881 - DNA, 15 bp, Homo sapiens
gtcccacgtgccaag

SEQ ID NO: 166882 - DNA, 15 bp, Homo sapiens
agtcccacgtgccaa

SEQ ID NO: 166883 - DNA, 15 bp, Homo sapiens
cagtcccacgtgcca

SEQ ID NO: 166884 - DNA, 15 bp, Homo sapiens
tcagtcccacgtgcc

SEQ ID NO: 166885 - DNA, 15 bp, Homo sapiens
ttcagtcccacgtgc

SEQ ID NO: 166886 - DNA, 15 bp, Homo sapiens
cttcagtcccacgtg

SEQ ID NO: 166887 - DNA, 15 bp, Homo sapiens
acttcagtcccacgt

SEQ ID NO: 166888 - DNA, 15 bp, Homo sapiens
gacttcagtcccacg

SEQ ID NO: 166889 - DNA, 15 bp, Homo sapiens
tgacttcagtcccac

SEQ ID NO: 166890 - DNA, 15 bp, Homo sapiens
ctgacttcagtccca

SEQ ID NO: 166891 - DNA, 15 bp, Homo sapiens
tctgacttcagtccc

SEQ ID NO: 166892 - DNA, 15 bp, Homo sapiens
atctgacttcagtcc

SEQ ID NO: 166893 - DNA, 15 bp, Homo sapiens
catctgacttcagtc

SEQ ID NO: 166894 - DNA, 15 bp, Homo sapiens
tcatctgacttcagt

SEQ ID NO: 166895 - DNA, 15 bp, Homo sapiens
ctcatctgacttcag

SEQ ID NO: 166896 - DNA, 15 bp, Homo sapiens
cctcatctgacttca

SEQ ID NO: 166897 - DNA, 15 bp, Homo sapiens
gcctcatctgacttc

SEQ ID NO: 166898 - DNA, 15 bp, Homo sapiens
ggcctcatctgactt

SEQ ID NO: 166899 - DNA, 15 bp, Homo sapiens
gggcctcatctgact

SEQ ID NO: 166900 - DNA, 15 bp, Homo sapiens
tgggcctcatctgac

SEQ ID NO: 166901 - DNA, 15 bp, Homo sapiens
ctgggcctcatctga

SEQ ID NO: 166902 - DNA, 15 bp, Homo sapiens
cctgggcctcatctg

SEQ ID NO: 166903 - DNA, 15 bp, Homo sapiens
gcctgggcctcatct

SEQ ID NO: 166904 - DNA, 15 bp, Homo sapiens
agcctgggcctcatc

SEQ ID NO: 166905 - DNA, 15 bp, Homo sapiens
cagcctgggcctcat

SEQ ID NO: 166906 - DNA, 15 bp, Homo sapiens
ccagcctgggcctca

SEQ ID NO: 166907 - DNA, 15 bp, Homo sapiens
accagcctgggcctc

SEQ ID NO: 166908 - DNA, 15 bp, Homo sapiens
gaccagcctgggcct

SEQ ID NO: 166909 - DNA, 15 bp, Homo sapiens
agaccagcctgggcc

SEQ ID NO: 166910 - DNA, 15 bp, Homo sapiens
gagaccagcctgggc

SEQ ID NO: 166911 - DNA, 15 bp, Homo sapiens
ggagaccagcctggg

SEQ ID NO: 166912 - DNA, 15 bp, Homo sapiens
aggagaccagcctgg

SEQ ID NO: 166913 - DNA, 15 bp, Homo sapiens
taggagaccagcctg

SEQ ID NO: 166914 - DNA, 15 bp, Homo sapiens
ttaggagaccagcct

SEQ ID NO: 166915 - DNA, 15 bp, Homo sapiens
tttaggagaccagcc

SEQ ID NO: 166916 - DNA, 15 bp, Homo sapiens
ttttaggagaccagc

SEQ ID NO: 166917 - DNA, 15 bp, Homo sapiens
cttttaggagaccag

SEQ ID NO: 166918 - DNA, 15 bp, Homo sapiens
acttttaggagacca

SEQ ID NO: 166919 - DNA, 15 bp, Homo sapiens
tacttttaggagacc

SEQ ID NO: 166920 - DNA, 15 bp, Homo sapiens
gtacttttaggagac

SEQ ID NO: 166921 - DNA, 15 bp, Homo sapiens
agtacttttaggaga

SEQ ID NO: 166922 - DNA, 15 bp, Homo sapiens
cagtacttttaggag

SEQ ID NO: 166923 - DNA, 15 bp, Homo sapiens
acagtacttttagga

SEQ ID NO: 166924 - DNA, 15 bp, Homo sapiens
gacagtacttttagg

SEQ ID NO: 166925 - DNA, 15 bp, Homo sapiens
agacagtacttttag

SEQ ID NO: 166926 - DNA, 15 bp, Homo sapiens
gagacagtactttta

SEQ ID NO: 166927 - DNA, 15 bp, Homo sapiens
ggagacagtactttt

SEQ ID NO: 166928 - DNA, 15 bp, Homo sapiens
aggagacagtacttt

SEQ ID NO: 166929 - DNA, 15 bp, Homo sapiens
aaggagacagtactt

SEQ ID NO: 166930 - DNA, 15 bp, Homo sapiens
caaggagacagtact

SEQ ID NO: 166931 - DNA, 15 bp, Homo sapiens
acaaggagacagtac

SEQ ID NO: 166932 - DNA, 15 bp, Homo sapiens
gacaaggagacagta

SEQ ID NO: 166933 - DNA, 15 bp, Homo sapiens
ggacaaggagacagt

SEQ ID NO: 166934 - DNA, 15 bp, Homo sapiens
tggacaaggagacag

SEQ ID NO: 166935 - DNA, 15 bp, Homo sapiens
gtggacaaggagaca

SEQ ID NO: 166936 - DNA, 15 bp, Homo sapiens
tgtggacaaggagac

SEQ ID NO: 166937 - DNA, 15 bp, Homo sapiens
gtgtggacaaggaga

SEQ ID NO: 166938 - DNA, 15 bp, Homo sapiens
agtgtggacaaggag

SEQ ID NO: 166939 - DNA, 15 bp, Homo sapiens
gagtgtggacaagga

SEQ ID NO: 166940 - DNA, 15 bp, Homo sapiens
tgagtgtggacaagg

SEQ ID NO: 166941 - DNA, 15 bp, Homo sapiens
gtgagtgtggacaag

SEQ ID NO: 166942 - DNA, 15 bp, Homo sapiens
tgtgagtgtggacaa

SEQ ID NO: 166943 - DNA, 15 bp, Homo sapiens
ctgtgagtgtggaca

SEQ ID NO: 166944 - DNA, 15 bp, Homo sapiens
actgtgagtgtggac

SEQ ID NO: 166945 - DNA, 15 bp, Homo sapiens
tactgtgagtgtgga

SEQ ID NO: 166946 - DNA, 15 bp, Homo sapiens
gtactgtgagtgtgg

SEQ ID NO: 166947 - DNA, 15 bp, Homo sapiens
tgtactgtgagtgtg

SEQ ID NO: 166948 - DNA, 15 bp, Homo sapiens
gtgtactgtgagtgt

SEQ ID NO: 166949 - DNA, 15 bp, Homo sapiens
agtgtactgtgagtg

SEQ ID NO: 166950 - DNA, 15 bp, Homo sapiens
gagtgtactgtgagt

SEQ ID NO: 166951 - DNA, 15 bp, Homo sapiens
tgagtgtactgtgag

SEQ ID NO: 166952 - DNA, 15 bp, Homo sapiens
gtgagtgtactgtga

SEQ ID NO: 166953 - DNA, 15 bp, Homo sapiens
ggtgagtgtactgtg

SEQ ID NO: 166954 - DNA, 15 bp, Homo sapiens
aggtgagtgtactgt

SEQ ID NO: 166955 - DNA, 15 bp, Homo sapiens
gaggtgagtgtactg

SEQ ID NO: 166956 - DNA, 15 bp, Homo sapiens
agaggtgagtgtact

SEQ ID NO: 166957 - DNA, 15 bp, Homo sapiens
gagaggtgagtgtac

SEQ ID NO: 166958 - DNA, 15 bp, Homo sapiens
ggagaggtgagtgta

SEQ ID NO: 166959 - DNA, 15 bp, Homo sapiens
gggagaggtgagtgt

SEQ ID NO: 166960 - DNA, 15 bp, Homo sapiens
ggggagaggtgagtg

SEQ ID NO: 166961 - DNA, 15 bp, Homo sapiens
tggggagaggtgagt

SEQ ID NO: 166962 - DNA, 15 bp, Homo sapiens
ttggggagaggtgag

SEQ ID NO: 166963 - DNA, 15 bp, Homo sapiens
cttggggagaggtga

SEQ ID NO: 166964 - DNA, 15 bp, Homo sapiens
ccttggggagaggtg

SEQ ID NO: 166965 - DNA, 15 bp, Homo sapiens
tccttggggagaggt

SEQ ID NO: 166966 - DNA, 15 bp, Homo sapiens
ctccttggggagagg

SEQ ID NO: 166967 - DNA, 15 bp, Homo sapiens
gctccttggggagag

SEQ ID NO: 166968 - DNA, 15 bp, Homo sapiens
tgctccttggggaga

SEQ ID NO: 166969 - DNA, 15 bp, Homo sapiens
ctgctccttggggag

SEQ ID NO: 166970 - DNA, 15 bp, Homo sapiens
cctgctccttgggga

SEQ ID NO: 166971 - DNA, 15 bp, Homo sapiens
ccctgctccttgggg

SEQ ID NO: 166972 - DNA, 15 bp, Homo sapiens
tccctgctccttggg

SEQ ID NO: 166973 - DNA, 15 bp, Homo sapiens
ctccctgctccttgg

SEQ ID NO: 166974 - DNA, 15 bp, Homo sapiens
tctccctgctccttg

SEQ ID NO: 166975 - DNA, 15 bp, Homo sapiens
ctctccctgctcctt

SEQ ID NO: 166976 - DNA, 15 bp, Homo sapiens
gctctccctgctcct

SEQ ID NO: 166977 - DNA, 15 bp, Homo sapiens
ggctctccctgctcc

SEQ ID NO: 166978 - DNA, 15 bp, Homo sapiens
aggctctccctgctc

SEQ ID NO: 166979 - DNA, 15 bp, Homo sapiens
caggctctccctgct

SEQ ID NO: 166980 - DNA, 15 bp, Homo sapiens
ccaggctctccctgc

SEQ ID NO: 166981 - DNA, 15 bp, Homo sapiens
cccaggctctccctg

SEQ ID NO: 166982 - DNA, 15 bp, Homo sapiens
gcccaggctctccct

SEQ ID NO: 166983 - DNA, 15 bp, Homo sapiens
ggcccaggctctccc

SEQ ID NO: 166984 - DNA, 15 bp, Homo sapiens
aggcccaggctctcc

SEQ ID NO: 166985 - DNA, 15 bp, Homo sapiens
taggcccaggctctc

SEQ ID NO: 166986 - DNA, 15 bp, Homo sapiens
ctaggcccaggctct

SEQ ID NO: 166987 - DNA, 15 bp, Homo sapiens
tctaggcccaggctc

SEQ ID NO: 166988 - DNA, 15 bp, Homo sapiens
ttctaggcccaggct

SEQ ID NO: 166989 - DNA, 15 bp, Homo sapiens
cttctaggcccaggc

SEQ ID NO: 166990 - DNA, 15 bp, Homo sapiens
ccttctaggcccagg

SEQ ID NO: 166991 - DNA, 15 bp, Homo sapiens
tccttctaggcccag

SEQ ID NO: 166992 - DNA, 15 bp, Homo sapiens
ctccttctaggccca

SEQ ID NO: 166993 - DNA, 15 bp, Homo sapiens
cctccttctaggccc

SEQ ID NO: 166994 - DNA, 15 bp, Homo sapiens
gcctccttctaggcc

SEQ ID NO: 166995 - DNA, 15 bp, Homo sapiens
tgcctccttctaggc

SEQ ID NO: 166996 - DNA, 15 bp, Homo sapiens
ctgcctccttctagg

SEQ ID NO: 166997 - DNA, 15 bp, Homo sapiens
cctgcctccttctag

SEQ ID NO: 166998 - DNA, 15 bp, Homo sapiens
tcctgcctccttcta

SEQ ID NO: 166999 - DNA, 15 bp, Homo sapiens
ctcctgcctccttct

SEQ ID NO: 167000 - DNA, 15 bp, Homo sapiens
gctcctgcctccttc

SEQ ID NO: 167001 - DNA, 15 bp, Homo sapiens
ggctcctgcctcctt

SEQ ID NO: 167002 - DNA, 15 bp, Homo sapiens
aggctcctgcctcct

SEQ ID NO: 167003 - DNA, 15 bp, Homo sapiens
caggctcctgcctcc

SEQ ID NO: 167004 - DNA, 15 bp, Homo sapiens
ccaggctcctgcctc

SEQ ID NO: 167005 - DNA, 15 bp, Homo sapiens
cccaggctcctgcct

SEQ ID NO: 167006 - DNA, 15 bp, Homo sapiens
gcccaggctcctgcc

SEQ ID NO: 167007 - DNA, 15 bp, Homo sapiens
ggcccaggctcctgc

SEQ ID NO: 167008 - DNA, 15 bp, Homo sapiens
gggcccaggctcctg

SEQ ID NO: 167009 - DNA, 15 bp, Homo sapiens
tgggcccaggctcct

SEQ ID NO: 167010 - DNA, 15 bp, Homo sapiens
atgggcccaggctcc

SEQ ID NO: 167011 - DNA, 15 bp, Homo sapiens
gatgggcccaggctc

SEQ ID NO: 167012 - DNA, 15 bp, Homo sapiens
tgatgggcccaggct

SEQ ID NO: 167013 - DNA, 15 bp, Homo sapiens
ctgatgggcccaggc

SEQ ID NO: 167014 - DNA, 15 bp, Homo sapiens
actgatgggcccagg

SEQ ID NO: 167015 - DNA, 15 bp, Homo sapiens
cactgatgggcccag

SEQ ID NO: 167016 - DNA, 15 bp, Homo sapiens
ccactgatgggccca

SEQ ID NO: 167017 - DNA, 15 bp, Homo sapiens
gccactgatgggccc

SEQ ID NO: 167018 - DNA, 15 bp, Homo sapiens
ggccactgatgggcc

SEQ ID NO: 167019 - DNA, 15 bp, Homo sapiens
aggccactgatgggc

SEQ ID NO: 167020 - DNA, 15 bp, Homo sapiens
caggccactgatggg

SEQ ID NO: 167021 - DNA, 15 bp, Homo sapiens
gcaggccactgatgg

SEQ ID NO: 167022 - DNA, 15 bp, Homo sapiens
ggcaggccactgatg

SEQ ID NO: 167023 - DNA, 15 bp, Homo sapiens
aggcaggccactgat

SEQ ID NO: 167024 - DNA, 15 bp, Homo sapiens
aaggcaggccactga

SEQ ID NO: 167025 - DNA, 15 bp, Homo sapiens
gaaggcaggccactg

SEQ ID NO: 167026 - DNA, 15 bp, Homo sapiens
agaaggcaggccact

SEQ ID NO: 167027 - DNA, 15 bp, Homo sapiens
gagaaggcaggccac

SEQ ID NO: 167028 - DNA, 15 bp, Homo sapiens
ggagaaggcaggcca

SEQ ID NO: 167029 - DNA, 15 bp, Homo sapiens
tggagaaggcaggcc

SEQ ID NO: 167030 - DNA, 15 bp, Homo sapiens
ttggagaaggcaggc

SEQ ID NO: 167031 - DNA, 15 bp, Homo sapiens
attggagaaggcagg

SEQ ID NO: 167032 - DNA, 15 bp, Homo sapiens
tattggagaaggcag

SEQ ID NO: 167033 - DNA, 15 bp, Homo sapiens
gtattggagaaggca

SEQ ID NO: 167034 - DNA, 15 bp, Homo sapiens
agtattggagaaggc

SEQ ID NO: 167035 - DNA, 15 bp, Homo sapiens
cagtattggagaagg

SEQ ID NO: 167036 - DNA, 15 bp, Homo sapiens
gcagtattggagaag

SEQ ID NO: 167037 - DNA, 15 bp, Homo sapiens
ggcagtattggagaa

SEQ ID NO: 167038 - DNA, 15 bp, Homo sapiens
aggcagtattggaga

SEQ ID NO: 167039 - DNA, 15 bp, Homo sapiens
caggcagtattggag

SEQ ID NO: 167040 - DNA, 15 bp, Homo sapiens
acaggcagtattgga

SEQ ID NO: 167041 - DNA, 15 bp, Homo sapiens
aacaggcagtattgg

SEQ ID NO: 167042 - DNA, 15 bp, Homo sapiens
caacaggcagtattg

SEQ ID NO: 167043 - DNA, 15 bp, Homo sapiens
ccaacaggcagtatt

SEQ ID NO: 167044 - DNA, 15 bp, Homo sapiens
tccaacaggcagtat

SEQ ID NO: 167045 - DNA, 15 bp, Homo sapiens
ttccaacaggcagta

SEQ ID NO: 167046 - DNA, 15 bp, Homo sapiens
cttccaacaggcagt

SEQ ID NO: 167047 - DNA, 15 bp, Homo sapiens
gcttccaacaggcag

SEQ ID NO: 167048 - DNA, 15 bp, Homo sapiens
tgcttccaacaggca

SEQ ID NO: 167049 - DNA, 15 bp, Homo sapiens
gtgcttccaacaggc

SEQ ID NO: 167050 - DNA, 15 bp, Homo sapiens
agtgcttccaacagg

SEQ ID NO: 167051 - DNA, 15 bp, Homo sapiens
aagtgcttccaacag

SEQ ID NO: 167052 - DNA, 15 bp, Homo sapiens
aaagtgcttccaaca

SEQ ID NO: 167053 - DNA, 15 bp, Homo sapiens
gaaagtgcttccaac

SEQ ID NO: 167054 - DNA, 15 bp, Homo sapiens
ggaaagtgcttccaa

SEQ ID NO: 167055 - DNA, 15 bp, Homo sapiens
cggaaagtgcttcca

SEQ ID NO: 167056 - DNA, 15 bp, Homo sapiens
acggaaagtgcttcc

SEQ ID NO: 167057 - DNA, 15 bp, Homo sapiens
cacggaaagtgcttc

SEQ ID NO: 167058 - DNA, 15 bp, Homo sapiens
gcacggaaagtgctt

SEQ ID NO: 167059 - DNA, 15 bp, Homo sapiens
agcacggaaagtgct

SEQ ID NO: 167060 - DNA, 15 bp, Homo sapiens
tagcacggaaagtgc

SEQ ID NO: 167061 - DNA, 15 bp, Homo sapiens
gtagcacggaaagtg

SEQ ID NO: 167062 - DNA, 15 bp, Homo sapiens
tgtagcacggaaagt

SEQ ID NO: 167063 - DNA, 15 bp, Homo sapiens
gtgtagcacggaaag

SEQ ID NO: 167064 - DNA, 15 bp, Homo sapiens
agtgtagcacggaaa

SEQ ID NO: 167065 - DNA, 15 bp, Homo sapiens
gagtgtagcacggaa

SEQ ID NO: 167066 - DNA, 15 bp, Homo sapiens
agagtgtagcacgga

SEQ ID NO: 167067 - DNA, 15 bp, Homo sapiens
aagagtgtagcacgg

SEQ ID NO: 167068 - DNA, 15 bp, Homo sapiens
aaagagtgtagcacg

SEQ ID NO: 167069 - DNA, 15 bp, Homo sapiens
aaaagagtgtagcac

SEQ ID NO: 167070 - DNA, 15 bp, Homo sapiens
gaaaagagtgtagca

SEQ ID NO: 167071 - DNA, 15 bp, Homo sapiens
tgaaaagagtgtagc

SEQ ID NO: 167072 - DNA, 15 bp, Homo sapiens
atgaaaagagtgtag

SEQ ID NO: 167073 - DNA, 15 bp, Homo sapiens
gatgaaaagagtgta

SEQ ID NO: 167074 - DNA, 15 bp, Homo sapiens
ggatgaaaagagtgt

SEQ ID NO: 167075 - DNA, 15 bp, Homo sapiens
aggatgaaaagagtg

SEQ ID NO: 167076 - DNA, 15 bp, Homo sapiens
gaggatgaaaagagt

SEQ ID NO: 167077 - DNA, 15 bp, Homo sapiens
tgaggatgaaaagag

SEQ ID NO: 167078 - DNA, 15 bp, Homo sapiens
gtgaggatgaaaaga

SEQ ID NO: 167079 - DNA, 15 bp, Homo sapiens
tgtgaggatgaaaag

SEQ ID NO: 167080 - DNA, 15 bp, Homo sapiens
ttgtgaggatgaaaa

SEQ ID NO: 167081 - DNA, 15 bp, Homo sapiens
gttgtgaggatgaaa

SEQ ID NO: 167082 - DNA, 15 bp, Homo sapiens
ggttgtgaggatgaa

SEQ ID NO: 167083 - DNA, 15 bp, Homo sapiens
gggttgtgaggatga

SEQ ID NO: 167084 - DNA, 15 bp, Homo sapiens
agggttgtgaggatg

SEQ ID NO: 167085 - DNA, 15 bp, Homo sapiens
gagggttgtgaggat

SEQ ID NO: 167086 - DNA, 15 bp, Homo sapiens
agagggttgtgagga

SEQ ID NO: 167087 - DNA, 15 bp, Homo sapiens
cagagggttgtgagg

SEQ ID NO: 167088 - DNA, 15 bp, Homo sapiens
tcagagggttgtgag

SEQ ID NO: 167089 - DNA, 15 bp, Homo sapiens
ctcagagggttgtga

SEQ ID NO: 167090 - DNA, 15 bp, Homo sapiens
cctcagagggttgtg

SEQ ID NO: 167091 - DNA, 15 bp, Homo sapiens
gcctcagagggttgt

SEQ ID NO: 167092 - DNA, 15 bp, Homo sapiens
tgcctcagagggttg

SEQ ID NO: 167093 - DNA, 15 bp, Homo sapiens
ttgcctcagagggtt

SEQ ID NO: 167094 - DNA, 15 bp, Homo sapiens
cttgcctcagagggt

SEQ ID NO: 167095 - DNA, 15 bp, Homo sapiens
acttgcctcagaggg

SEQ ID NO: 167096 - DNA, 15 bp, Homo sapiens
tacttgcctcagagg

SEQ ID NO: 167097 - DNA, 15 bp, Homo sapiens
gtacttgcctcagag

SEQ ID NO: 167098 - DNA, 15 bp, Homo sapiens
agtacttgcctcaga

SEQ ID NO: 167099 - DNA, 15 bp, Homo sapiens
gagtacttgcctcag

SEQ ID NO: 167100 - DNA, 15 bp, Homo sapiens
agagtacttgcctca

SEQ ID NO: 167101 - DNA, 15 bp, Homo sapiens
cagagtacttgcctc

SEQ ID NO: 167102 - DNA, 15 bp, Homo sapiens
tcagagtacttgcct

SEQ ID NO: 167103 - DNA, 15 bp, Homo sapiens
atcagagtacttgcc

SEQ ID NO: 167104 - DNA, 15 bp, Homo sapiens
aatcagagtacttgc

SEQ ID NO: 167105 - DNA, 15 bp, Homo sapiens
taatcagagtacttg

SEQ ID NO: 167106 - DNA, 15 bp, Homo sapiens
gtaatcagagtactt

SEQ ID NO: 167107 - DNA, 15 bp, Homo sapiens
ggtaatcagagtact

SEQ ID NO: 167108 - DNA, 15 bp, Homo sapiens
gggtaatcagagtac

SEQ ID NO: 167109 - DNA, 15 bp, Homo sapiens
agggtaatcagagta

SEQ ID NO: 167110 - DNA, 15 bp, Homo sapiens
gagggtaatcagagt

SEQ ID NO: 167111 - DNA, 15 bp, Homo sapiens
ggagggtaatcagag

SEQ ID NO: 167112 - DNA, 15 bp, Homo sapiens
gggagggtaatcaga

SEQ ID NO: 167113 - DNA, 15 bp, Homo sapiens
tgggagggtaatcag

SEQ ID NO: 167114 - DNA, 15 bp, Homo sapiens
atgggagggtaatca

SEQ ID NO: 167115 - DNA, 15 bp, Homo sapiens
aatgggagggtaatc

SEQ ID NO: 167116 - DNA, 15 bp, Homo sapiens
aaatgggagggtaat

SEQ ID NO: 167117 - DNA, 15 bp, Homo sapiens
aaaatgggagggtaa

SEQ ID NO: 167118 - DNA, 15 bp, Homo sapiens
gaaaatgggagggta

SEQ ID NO: 167119 - DNA, 15 bp, Homo sapiens
tgaaaatgggagggt

SEQ ID NO: 167120 - DNA, 15 bp, Homo sapiens
ctgaaaatgggaggg

SEQ ID NO: 167121 - DNA, 15 bp, Homo sapiens
tctgaaaatgggagg

SEQ ID NO: 167122 - DNA, 15 bp, Homo sapiens
atctgaaaatgggag

SEQ ID NO: 167123 - DNA, 15 bp, Homo sapiens
catctgaaaatggga

SEQ ID NO: 167124 - DNA, 15 bp, Homo sapiens
ccatctgaaaatggg

SEQ ID NO: 167125 - DNA, 15 bp, Homo sapiens
cccatctgaaaatgg

SEQ ID NO: 167126 - DNA, 15 bp, Homo sapiens
ccccatctgaaaatg

SEQ ID NO: 167127 - DNA, 15 bp, Homo sapiens
tccccatctgaaaat

SEQ ID NO: 167128 - DNA, 15 bp, Homo sapiens
ttccccatctgaaaa

SEQ ID NO: 167129 - DNA, 15 bp, Homo sapiens
tttccccatctgaaa

SEQ ID NO: 167130 - DNA, 15 bp, Homo sapiens
gtttccccatctgaa

SEQ ID NO: 167131 - DNA, 15 bp, Homo sapiens
agtttccccatctga

SEQ ID NO: 167132 - DNA, 15 bp, Homo sapiens
tagtttccccatctg

SEQ ID NO: 167133 - DNA, 15 bp, Homo sapiens
ttagtttccccatct

SEQ ID NO: 167134 - DNA, 15 bp, Homo sapiens
cttagtttccccatc

SEQ ID NO: 167135 - DNA, 15 bp, Homo sapiens
ccttagtttccccat

SEQ ID NO: 167136 - DNA, 15 bp, Homo sapiens
gccttagtttcccca

SEQ ID NO: 167137 - DNA, 15 bp, Homo sapiens
tgccttagtttcccc

SEQ ID NO: 167138 - DNA, 15 bp, Homo sapiens
gtgccttagtttccc

SEQ ID NO: 167139 - DNA, 15 bp, Homo sapiens
tgtgccttagtttcc

SEQ ID NO: 167140 - DNA, 15 bp, Homo sapiens
ctgtgccttagtttc

SEQ ID NO: 167141 - DNA, 15 bp, Homo sapiens
tctgtgccttagttt

SEQ ID NO: 167142 - DNA, 15 bp, Homo sapiens
ctctgtgccttagtt

SEQ ID NO: 167143 - DNA, 15 bp, Homo sapiens
cctctgtgccttagt

SEQ ID NO: 167144 - DNA, 15 bp, Homo sapiens
acctctgtgccttag

SEQ ID NO: 167145 - DNA, 15 bp, Homo sapiens
cacctctgtgcctta

SEQ ID NO: 167146 - DNA, 15 bp, Homo sapiens
gcacctctgtgcctt

SEQ ID NO: 167147 - DNA, 15 bp, Homo sapiens
agcacctctgtgcct

SEQ ID NO: 167148 - DNA, 15 bp, Homo sapiens
gagcacctctgtgcc

SEQ ID NO: 167149 - DNA, 15 bp, Homo sapiens
tgagcacctctgtgc

SEQ ID NO: 167150 - DNA, 15 bp, Homo sapiens
ctgagcacctctgtg

SEQ ID NO: 167151 - DNA, 15 bp, Homo sapiens
actgagcacctctgt

SEQ ID NO: 167152 - DNA, 15 bp, Homo sapiens
cactgagcacctctg

SEQ ID NO: 167153 - DNA, 15 bp, Homo sapiens
tcactgagcacctct

SEQ ID NO: 167154 - DNA, 15 bp, Homo sapiens
gtcactgagcacctc

SEQ ID NO: 167155 - DNA, 15 bp, Homo sapiens
agtcactgagcacct

SEQ ID NO: 167156 - DNA, 15 bp, Homo sapiens
aagtcactgagcacc

SEQ ID NO: 167157 - DNA, 15 bp, Homo sapiens
aaagtcactgagcac

SEQ ID NO: 167158 - DNA, 15 bp, Homo sapiens
aaaagtcactgagca

SEQ ID NO: 167159 - DNA, 15 bp, Homo sapiens
caaaagtcactgagc

SEQ ID NO: 167160 - DNA, 15 bp, Homo sapiens
gcaaaagtcactgag

SEQ ID NO: 167161 - DNA, 15 bp, Homo sapiens
tgcaaaagtcactga

SEQ ID NO: 167162 - DNA, 15 bp, Homo sapiens
ttgcaaaagtcactg

SEQ ID NO: 167163 - DNA, 15 bp, Homo sapiens
cttgcaaaagtcact

SEQ ID NO: 167164 - DNA, 15 bp, Homo sapiens
gcttgcaaaagtcac

SEQ ID NO: 167165 - DNA, 15 bp, Homo sapiens
agcttgcaaaagtca

SEQ ID NO: 167166 - DNA, 15 bp, Homo sapiens
gagcttgcaaaagtc

SEQ ID NO: 167167 - DNA, 15 bp, Homo sapiens
tgagcttgcaaaagt

SEQ ID NO: 167168 - DNA, 15 bp, Homo sapiens
gtgagcttgcaaaag

SEQ ID NO: 167169 - DNA, 15 bp, Homo sapiens
tgtgagcttgcaaaa

SEQ ID NO: 167170 - DNA, 15 bp, Homo sapiens
gtgtgagcttgcaaa

SEQ ID NO: 167171 - DNA, 15 bp, Homo sapiens
tgtgtgagcttgcaa

SEQ ID NO: 167172 - DNA, 15 bp, Homo sapiens
ctgtgtgagcttgca

SEQ ID NO: 167173 - DNA, 15 bp, Homo sapiens
gctgtgtgagcttgc

SEQ ID NO: 167174 - DNA, 15 bp, Homo sapiens
ggctgtgtgagcttg

SEQ ID NO: 167175 - DNA, 15 bp, Homo sapiens
tggctgtgtgagctt

SEQ ID NO: 167176 - DNA, 15 bp, Homo sapiens
atggctgtgtgagct

SEQ ID NO: 167177 - DNA, 15 bp, Homo sapiens
aatggctgtgtgagc

SEQ ID NO: 167178 - DNA, 15 bp, Homo sapiens
taatggctgtgtgag

SEQ ID NO: 167179 - DNA, 15 bp, Homo sapiens
ctaatggctgtgtga

SEQ ID NO: 167180 - DNA, 15 bp, Homo sapiens
actaatggctgtgtg

SEQ ID NO: 167181 - DNA, 15 bp, Homo sapiens
cactaatggctgtgt

SEQ ID NO: 167182 - DNA, 15 bp, Homo sapiens
ccactaatggctgtg

SEQ ID NO: 167183 - DNA, 15 bp, Homo sapiens
cccactaatggctgt

SEQ ID NO: 167184 - DNA, 15 bp, Homo sapiens
gcccactaatggctg

SEQ ID NO: 167185 - DNA, 15 bp, Homo sapiens
cgcccactaatggct

SEQ ID NO: 167186 - DNA, 15 bp, Homo sapiens
tcgcccactaatggc

SEQ ID NO: 167187 - DNA, 15 bp, Homo sapiens
gtcgcccactaatgg

SEQ ID NO: 167188 - DNA, 15 bp, Homo sapiens
ggtcgcccactaatg

SEQ ID NO: 167189 - DNA, 15 bp, Homo sapiens
gggtcgcccactaat

SEQ ID NO: 167190 - DNA, 15 bp, Homo sapiens
tgggtcgcccactaa

SEQ ID NO: 167191 - DNA, 15 bp, Homo sapiens
ctgggtcgcccacta

SEQ ID NO: 167192 - DNA, 15 bp, Homo sapiens
tctgggtcgcccact

SEQ ID NO: 167193 - DNA, 15 bp, Homo sapiens
ttctgggtcgcccac

SEQ ID NO: 167194 - DNA, 15 bp, Homo sapiens
cttctgggtcgccca

SEQ ID NO: 167195 - DNA, 15 bp, Homo sapiens
gcttctgggtcgccc

SEQ ID NO: 167196 - DNA, 15 bp, Homo sapiens
agcttctgggtcgcc

SEQ ID NO: 167197 - DNA, 15 bp, Homo sapiens
aagcttctgggtcgc

SEQ ID NO: 167198 - DNA, 15 bp, Homo sapiens
caagcttctgggtcg

SEQ ID NO: 167199 - DNA, 15 bp, Homo sapiens
ccaagcttctgggtc

SEQ ID NO: 167200 - DNA, 15 bp, Homo sapiens
accaagcttctgggt

SEQ ID NO: 167201 - DNA, 15 bp, Homo sapiens
aaccaagcttctggg

SEQ ID NO: 167202 - DNA, 15 bp, Homo sapiens
aaaccaagcttctgg

SEQ ID NO: 167203 - DNA, 15 bp, Homo sapiens
taaaccaagcttctg

SEQ ID NO: 167204 - DNA, 15 bp, Homo sapiens
ctaaaccaagcttct

SEQ ID NO: 167205 - DNA, 15 bp, Homo sapiens
tctaaaccaagcttc

SEQ ID NO: 167206 - DNA, 15 bp, Homo sapiens
ctctaaaccaagctt

SEQ ID NO: 167207 - DNA, 15 bp, Homo sapiens
actctaaaccaagct

SEQ ID NO: 167208 - DNA, 15 bp, Homo sapiens
gactctaaaccaagc

SEQ ID NO: 167209 - DNA, 15 bp, Homo sapiens
tgactctaaaccaag

SEQ ID NO: 167210 - DNA, 15 bp, Homo sapiens
ctgactctaaaccaa

SEQ ID NO: 167211 - DNA, 15 bp, Homo sapiens
actgactctaaacca

SEQ ID NO: 167212 - DNA, 15 bp, Homo sapiens
cactgactctaaacc

SEQ ID NO: 167213 - DNA, 15 bp, Homo sapiens
acactgactctaaac

SEQ ID NO: 167214 - DNA, 15 bp, Homo sapiens
cacactgactctaaa

SEQ ID NO: 167215 - DNA, 15 bp, Homo sapiens
ccacactgactctaa

SEQ ID NO: 167216 - DNA, 15 bp, Homo sapiens
gccacactgactcta

SEQ ID NO: 167217 - DNA, 15 bp, Homo sapiens
agccacactgactct

SEQ ID NO: 167218 - DNA, 15 bp, Homo sapiens
tagccacactgactc

SEQ ID NO: 167219 - DNA, 15 bp, Homo sapiens
ttagccacactgact

SEQ ID NO: 167220 - DNA, 15 bp, Homo sapiens
attagccacactgac

SEQ ID NO: 167221 - DNA, 15 bp, Homo sapiens
aattagccacactga

SEQ ID NO: 167222 - DNA, 15 bp, Homo sapiens
caattagccacactg

SEQ ID NO: 167223 - DNA, 15 bp, Homo sapiens
gcaattagccacact

SEQ ID NO: 167224 - DNA, 15 bp, Homo sapiens
agcaattagccacac

SEQ ID NO: 167225 - DNA, 15 bp, Homo sapiens
tagcaattagccaca

SEQ ID NO: 167226 - DNA, 15 bp, Homo sapiens
gtagcaattagccac

SEQ ID NO: 167227 - DNA, 15 bp, Homo sapiens
tgtagcaattagcca

SEQ ID NO: 167228 - DNA, 15 bp, Homo sapiens
gtgtagcaattagcc

SEQ ID NO: 167229 - DNA, 15 bp, Homo sapiens
ggtgtagcaattagc

SEQ ID NO: 167230 - DNA, 15 bp, Homo sapiens
tggtgtagcaattag

SEQ ID NO: 167231 - DNA, 15 bp, Homo sapiens
ttggtgtagcaatta

SEQ ID NO: 167232 - DNA, 15 bp, Homo sapiens
tttggtgtagcaatt

SEQ ID NO: 167233 - DNA, 15 bp, Homo sapiens
ctttggtgtagcaat

SEQ ID NO: 167234 - DNA, 15 bp, Homo sapiens
actttggtgtagcaa

SEQ ID NO: 167235 - DNA, 15 bp, Homo sapiens
gactttggtgtagca

SEQ ID NO: 167236 - DNA, 15 bp, Homo sapiens
agactttggtgtagc

SEQ ID NO: 167237 - DNA, 15 bp, Homo sapiens
aagactttggtgtag

SEQ ID NO: 167238 - DNA, 15 bp, Homo sapiens
gaagactttggtgta

SEQ ID NO: 167239 - DNA, 15 bp, Homo sapiens
ggaagactttggtgt

SEQ ID NO: 167240 - DNA, 15 bp, Homo sapiens
aggaagactttggtg

SEQ ID NO: 167241 - DNA, 15 bp, Homo sapiens
aaggaagactttggt

SEQ ID NO: 167242 - DNA, 15 bp, Homo sapiens
caaggaagactttgg

SEQ ID NO: 167243 - DNA, 15 bp, Homo sapiens
ccaaggaagactttg

SEQ ID NO: 167244 - DNA, 15 bp, Homo sapiens
cccaaggaagacttt

SEQ ID NO: 167245 - DNA, 15 bp, Homo sapiens
ccccaaggaagactt

SEQ ID NO: 167246 - DNA, 15 bp, Homo sapiens
cccccaaggaagact

SEQ ID NO: 167247 - DNA, 15 bp, Homo sapiens
acccccaaggaagac

SEQ ID NO: 167248 - DNA, 15 bp, Homo sapiens
cacccccaaggaaga

SEQ ID NO: 167249 - DNA, 15 bp, Homo sapiens
acacccccaaggaag

SEQ ID NO: 167250 - DNA, 15 bp, Homo sapiens
cacacccccaaggaa

SEQ ID NO: 167251 - DNA, 15 bp, Homo sapiens
acacacccccaagga

SEQ ID NO: 167252 - DNA, 15 bp, Homo sapiens
cacacacccccaagg

SEQ ID NO: 167253 - DNA, 15 bp, Homo sapiens
acacacacccccaag

SEQ ID NO: 167254 - DNA, 15 bp, Homo sapiens
cacacacacccccaa

SEQ ID NO: 167255 - DNA, 15 bp, Homo sapiens
acacacacaccccca

SEQ ID NO: 167256 - DNA, 15 bp, Homo sapiens
cacacacacaccccc

SEQ ID NO: 167257 - DNA, 15 bp, Homo sapiens
acacacacacacccc

SEQ ID NO: 167258 - DNA, 15 bp, Homo sapiens
cacacacacacaccc

SEQ ID NO: 167259 - DNA, 15 bp, Homo sapiens
gcacacacacacacc

SEQ ID NO: 167260 - DNA, 15 bp, Homo sapiens
ggcacacacacacac

SEQ ID NO: 167261 - DNA, 15 bp, Homo sapiens
gggcacacacacaca

SEQ ID NO: 167262 - DNA, 15 bp, Homo sapiens
agggcacacacacac

SEQ ID NO: 167263 - DNA, 15 bp, Homo sapiens
aagggcacacacaca

SEQ ID NO: 167264 - DNA, 15 bp, Homo sapiens
caagggcacacacac

SEQ ID NO: 167265 - DNA, 15 bp, Homo sapiens
gcaagggcacacaca

SEQ ID NO: 167266 - DNA, 15 bp, Homo sapiens
tgcaagggcacacac

SEQ ID NO: 167267 - DNA, 15 bp, Homo sapiens
atgcaagggcacaca

SEQ ID NO: 167268 - DNA, 15 bp, Homo sapiens
catgcaagggcacac

SEQ ID NO: 167269 - DNA, 15 bp, Homo sapiens
acatgcaagggcaca

SEQ ID NO: 167270 - DNA, 15 bp, Homo sapiens
cacatgcaagggcac

SEQ ID NO: 167271 - DNA, 15 bp, Homo sapiens
ccacatgcaagggca

SEQ ID NO: 167272 - DNA, 15 bp, Homo sapiens
gccacatgcaagggc

SEQ ID NO: 167273 - DNA, 15 bp, Homo sapiens
agccacatgcaaggg

SEQ ID NO: 167274 - DNA, 15 bp, Homo sapiens
gagccacatgcaagg

SEQ ID NO: 167275 - DNA, 15 bp, Homo sapiens
agagccacatgcaag

SEQ ID NO: 167276 - DNA, 15 bp, Homo sapiens
cagagccacatgcaa

SEQ ID NO: 167277 - DNA, 15 bp, Homo sapiens
ccagagccacatgca

SEQ ID NO: 167278 - DNA, 15 bp, Homo sapiens
gccagagccacatgc

SEQ ID NO: 167279 - DNA, 15 bp, Homo sapiens
ggccagagccacatg

SEQ ID NO: 167280 - DNA, 15 bp, Homo sapiens
aggccagagccacat

SEQ ID NO: 167281 - DNA, 15 bp, Homo sapiens
caggccagagccaca

SEQ ID NO: 167282 - DNA, 15 bp, Homo sapiens
ccaggccagagccac

SEQ ID NO: 167283 - DNA, 15 bp, Homo sapiens
tccaggccagagcca

SEQ ID NO: 167284 - DNA, 15 bp, Homo sapiens
ctccaggccagagcc

SEQ ID NO: 167285 - DNA, 15 bp, Homo sapiens
tctccaggccagagc

SEQ ID NO: 167286 - DNA, 15 bp, Homo sapiens
gtctccaggccagag

SEQ ID NO: 167287 - DNA, 15 bp, Homo sapiens
tgtctccaggccaga

SEQ ID NO: 167288 - DNA, 15 bp, Homo sapiens
ctgtctccaggccag

SEQ ID NO: 167289 - DNA, 15 bp, Homo sapiens
cctgtctccaggcca

SEQ ID NO: 167290 - DNA, 15 bp, Homo sapiens
acctgtctccaggcc

SEQ ID NO: 167291 - DNA, 15 bp, Homo sapiens
cacctgtctccaggc

SEQ ID NO: 167292 - DNA, 15 bp, Homo sapiens
tcacctgtctccagg

SEQ ID NO: 167293 - DNA, 15 bp, Homo sapiens
ctcacctgtctccag

SEQ ID NO: 167294 - DNA, 15 bp, Homo sapiens
actcacctgtctcca

SEQ ID NO: 167295 - DNA, 15 bp, Homo sapiens
cactcacctgtctcc

SEQ ID NO: 167296 - DNA, 15 bp, Homo sapiens
tcactcacctgtctc

SEQ ID NO: 167297 - DNA, 15 bp, Homo sapiens
atcactcacctgtct

SEQ ID NO: 167298 - DNA, 15 bp, Homo sapiens
gatcactcacctgtc

SEQ ID NO: 167299 - DNA, 15 bp, Homo sapiens
agatcactcacctgt

SEQ ID NO: 167300 - DNA, 15 bp, Homo sapiens
cagatcactcacctg

SEQ ID NO: 167301 - DNA, 15 bp, Homo sapiens
ccagatcactcacct

SEQ ID NO: 167302 - DNA, 15 bp, Homo sapiens
tccagatcactcacc

SEQ ID NO: 167303 - DNA, 15 bp, Homo sapiens
atccagatcactcac

SEQ ID NO: 167304 - DNA, 15 bp, Homo sapiens
catccagatcactca

SEQ ID NO: 167305 - DNA, 15 bp, Homo sapiens
gcatccagatcactc

SEQ ID NO: 167306 - DNA, 15 bp, Homo sapiens
ggcatccagatcact

SEQ ID NO: 167307 - DNA, 15 bp, Homo sapiens
gggcatccagatcac

SEQ ID NO: 167308 - DNA, 15 bp, Homo sapiens
agggcatccagatca

SEQ ID NO: 167309 - DNA, 15 bp, Homo sapiens
gagggcatccagatc

SEQ ID NO: 167310 - DNA, 15 bp, Homo sapiens
agagggcatccagat

SEQ ID NO: 167311 - DNA, 15 bp, Homo sapiens
cagagggcatccaga

SEQ ID NO: 167312 - DNA, 15 bp, Homo sapiens
gcagagggcatccag

SEQ ID NO: 167313 - DNA, 15 bp, Homo sapiens
agcagagggcatcca

SEQ ID NO: 167314 - DNA, 15 bp, Homo sapiens
cagcagagggcatcc

SEQ ID NO: 167315 - DNA, 15 bp, Homo sapiens
acagcagagggcatc

SEQ ID NO: 167316 - DNA, 15 bp, Homo sapiens
gacagcagagggcat

SEQ ID NO: 167317 - DNA, 15 bp, Homo sapiens
agacagcagagggca

SEQ ID NO: 167318 - DNA, 15 bp, Homo sapiens
cagacagcagagggc

SEQ ID NO: 167319 - DNA, 15 bp, Homo sapiens
ccagacagcagaggg

SEQ ID NO: 167320 - DNA, 15 bp, Homo sapiens
cccagacagcagagg

SEQ ID NO: 167321 - DNA, 15 bp, Homo sapiens
gcccagacagcagag

SEQ ID NO: 167322 - DNA, 15 bp, Homo sapiens
tgcccagacagcaga

SEQ ID NO: 167323 - DNA, 15 bp, Homo sapiens
gtgcccagacagcag

SEQ ID NO: 167324 - DNA, 15 bp, Homo sapiens
tgtgcccagacagca

SEQ ID NO: 167325 - DNA, 15 bp, Homo sapiens
gtgtgcccagacagc

SEQ ID NO: 167326 - DNA, 15 bp, Homo sapiens
ggtgtgcccagacag

SEQ ID NO: 167327 - DNA, 15 bp, Homo sapiens
aggtgtgcccagaca

SEQ ID NO: 167328 - DNA, 15 bp, Homo sapiens
gaggtgtgcccagac

SEQ ID NO: 167329 - DNA, 15 bp, Homo sapiens
agaggtgtgcccaga

SEQ ID NO: 167330 - DNA, 15 bp, Homo sapiens
tagaggtgtgcccag

SEQ ID NO: 167331 - DNA, 15 bp, Homo sapiens
ctagaggtgtgccca

SEQ ID NO: 167332 - DNA, 15 bp, Homo sapiens
cctagaggtgtgccc

SEQ ID NO: 167333 - DNA, 15 bp, Homo sapiens
ccctagaggtgtgcc

SEQ ID NO: 167334 - DNA, 15 bp, Homo sapiens
tccctagaggtgtgc

SEQ ID NO: 167335 - DNA, 15 bp, Homo sapiens
gtccctagaggtgtg

SEQ ID NO: 167336 - DNA, 15 bp, Homo sapiens
tgtccctagaggtgt

SEQ ID NO: 167337 - DNA, 15 bp, Homo sapiens
ctgtccctagaggtg

SEQ ID NO: 167338 - DNA, 15 bp, Homo sapiens
cctgtccctagaggt

SEQ ID NO: 167339 - DNA, 15 bp, Homo sapiens
ccctgtccctagagg

SEQ ID NO: 167340 - DNA, 15 bp, Homo sapiens
cccctgtccctagag

SEQ ID NO: 167341 - DNA, 15 bp, Homo sapiens
acccctgtccctaga

SEQ ID NO: 167342 - DNA, 15 bp, Homo sapiens
cacccctgtccctag

SEQ ID NO: 167343 - DNA, 15 bp, Homo sapiens
tcacccctgtcccta

SEQ ID NO: 167344 - DNA, 15 bp, Homo sapiens
ctcacccctgtccct

SEQ ID NO: 167345 - DNA, 15 bp, Homo sapiens
gctcacccctgtccc

SEQ ID NO: 167346 - DNA, 15 bp, Homo sapiens
agctcacccctgtcc

SEQ ID NO: 167347 - DNA, 15 bp, Homo sapiens
cagctcacccctgtc

SEQ ID NO: 167348 - DNA, 15 bp, Homo sapiens
acagctcacccctgt

SEQ ID NO: 167349 - DNA, 15 bp, Homo sapiens
gacagctcacccctg

SEQ ID NO: 167350 - DNA, 15 bp, Homo sapiens
agacagctcacccct

SEQ ID NO: 167351 - DNA, 15 bp, Homo sapiens
cagacagctcacccc

SEQ ID NO: 167352 - DNA, 15 bp, Homo sapiens
gcagacagctcaccc

SEQ ID NO: 167353 - DNA, 15 bp, Homo sapiens
ggcagacagctcacc

SEQ ID NO: 167354 - DNA, 15 bp, Homo sapiens
gggcagacagctcac

SEQ ID NO: 167355 - DNA, 15 bp, Homo sapiens
agggcagacagctca

SEQ ID NO: 167356 - DNA, 15 bp, Homo sapiens
gagggcagacagctc

SEQ ID NO: 167357 - DNA, 15 bp, Homo sapiens
agagggcagacagct

SEQ ID NO: 167358 - DNA, 15 bp, Homo sapiens
gagagggcagacagc

SEQ ID NO: 167359 - DNA, 15 bp, Homo sapiens
ggagagggcagacag

SEQ ID NO: 167360 - DNA, 15 bp, Homo sapiens
aggagagggcagaca

SEQ ID NO: 167361 - DNA, 15 bp, Homo sapiens
taggagagggcagac

SEQ ID NO: 167362 - DNA, 15 bp, Homo sapiens
ataggagagggcaga

SEQ ID NO: 167363 - DNA, 15 bp, Homo sapiens
cataggagagggcag

SEQ ID NO: 167364 - DNA, 15 bp, Homo sapiens
tcataggagagggca

SEQ ID NO: 167365 - DNA, 15 bp, Homo sapiens
ttcataggagagggc

SEQ ID NO: 167366 - DNA, 15 bp, Homo sapiens
gttcataggagaggg

SEQ ID NO: 167367 - DNA, 15 bp, Homo sapiens
agttcataggagagg

SEQ ID NO: 167368 - DNA, 15 bp, Homo sapiens
gagttcataggagag

SEQ ID NO: 167369 - DNA, 15 bp, Homo sapiens
agagttcataggaga

SEQ ID NO: 167370 - DNA, 15 bp, Homo sapiens
cagagttcataggag

SEQ ID NO: 167371 - DNA, 15 bp, Homo sapiens
gcagagttcatagga

SEQ ID NO: 167372 - DNA, 15 bp, Homo sapiens
tgcagagttcatagg

SEQ ID NO: 167373 - DNA, 15 bp, Homo sapiens
ttgcagagttcatag

SEQ ID NO: 167374 - DNA, 15 bp, Homo sapiens
attgcagagttcata

SEQ ID NO: 167375 - DNA, 15 bp, Homo sapiens
gattgcagagttcat

SEQ ID NO: 167376 - DNA, 15 bp, Homo sapiens
agattgcagagttca

SEQ ID NO: 167377 - DNA, 15 bp, Homo sapiens
cagattgcagagttc

SEQ ID NO: 167378 - DNA, 15 bp, Homo sapiens
ccagattgcagagtt

SEQ ID NO: 167379 - DNA, 15 bp, Homo sapiens
accagattgcagagt

SEQ ID NO: 167380 - DNA, 15 bp, Homo sapiens
caccagattgcagag

SEQ ID NO: 167381 - DNA, 15 bp, Homo sapiens
ccaccagattgcaga

SEQ ID NO: 167382 - DNA, 15 bp, Homo sapiens
accaccagattgcag

SEQ ID NO: 167383 - DNA, 15 bp, Homo sapiens
aaccaccagattgca

SEQ ID NO: 167384 - DNA, 15 bp, Homo sapiens
gaaccaccagattgc

SEQ ID NO: 167385 - DNA, 15 bp, Homo sapiens
agaaccaccagattg

SEQ ID NO: 167386 - DNA, 15 bp, Homo sapiens
cagaaccaccagatt

SEQ ID NO: 167387 - DNA, 15 bp, Homo sapiens
gcagaaccaccagat

SEQ ID NO: 167388 - DNA, 15 bp, Homo sapiens
agcagaaccaccaga

SEQ ID NO: 167389 - DNA, 15 bp, Homo sapiens
cagcagaaccaccag

SEQ ID NO: 167390 - DNA, 15 bp, Homo sapiens
tcagcagaaccacca

SEQ ID NO: 167391 - DNA, 15 bp, Homo sapiens
gtcagcagaaccacc

SEQ ID NO: 167392 - DNA, 15 bp, Homo sapiens
agtcagcagaaccac

SEQ ID NO: 167393 - DNA, 15 bp, Homo sapiens
tagtcagcagaacca

SEQ ID NO: 167394 - DNA, 15 bp, Homo sapiens
ctagtcagcagaacc

SEQ ID NO: 167395 - DNA, 15 bp, Homo sapiens
gctagtcagcagaac

SEQ ID NO: 167396 - DNA, 15 bp, Homo sapiens
ggctagtcagcagaa

SEQ ID NO: 167397 - DNA, 15 bp, Homo sapiens
cggctagtcagcaga

SEQ ID NO: 167398 - DNA, 15 bp, Homo sapiens
acggctagtcagcag

SEQ ID NO: 167399 - DNA, 15 bp, Homo sapiens
cacggctagtcagca

SEQ ID NO: 167400 - DNA, 15 bp, Homo sapiens
acacggctagtcagc

SEQ ID NO: 167401 - DNA, 15 bp, Homo sapiens
tacacggctagtcag

SEQ ID NO: 167402 - DNA, 15 bp, Homo sapiens
ttacacggctagtca

SEQ ID NO: 167403 - DNA, 15 bp, Homo sapiens
cttacacggctagtc

SEQ ID NO: 167404 - DNA, 15 bp, Homo sapiens
gcttacacggctagt

SEQ ID NO: 167405 - DNA, 15 bp, Homo sapiens
tgcttacacggctag

SEQ ID NO: 167406 - DNA, 15 bp, Homo sapiens
ctgcttacacggcta

SEQ ID NO: 167407 - DNA, 15 bp, Homo sapiens
cctgcttacacggct

SEQ ID NO: 167408 - DNA, 15 bp, Homo sapiens
tcctgcttacacggc

SEQ ID NO: 167409 - DNA, 15 bp, Homo sapiens
ctcctgcttacacgg

SEQ ID NO: 167410 - DNA, 15 bp, Homo sapiens
gctcctgcttacacg

SEQ ID NO: 167411 - DNA, 15 bp, Homo sapiens
tgctcctgcttacac

SEQ ID NO: 167412 - DNA, 15 bp, Homo sapiens
ttgctcctgcttaca

SEQ ID NO: 167413 - DNA, 15 bp, Homo sapiens
cttgctcctgcttac

SEQ ID NO: 167414 - DNA, 15 bp, Homo sapiens
acttgctcctgctta

SEQ ID NO: 167415 - DNA, 15 bp, Homo sapiens
aacttgctcctgctt

SEQ ID NO: 167416 - DNA, 15 bp, Homo sapiens
caacttgctcctgct

SEQ ID NO: 167417 - DNA, 15 bp, Homo sapiens
gcaacttgctcctgc

SEQ ID NO: 167418 - DNA, 15 bp, Homo sapiens
ggcaacttgctcctg

SEQ ID NO: 167419 - DNA, 15 bp, Homo sapiens
tggcaacttgctcct

SEQ ID NO: 167420 - DNA, 15 bp, Homo sapiens
ctggcaacttgctcc

SEQ ID NO: 167421 - DNA, 15 bp, Homo sapiens
tctggcaacttgctc

SEQ ID NO: 167422 - DNA, 15 bp, Homo sapiens
gtctggcaacttgct

SEQ ID NO: 167423 - DNA, 15 bp, Homo sapiens
ggtctggcaacttgc

SEQ ID NO: 167424 - DNA, 15 bp, Homo sapiens
aggtctggcaacttg

SEQ ID NO: 167425 - DNA, 15 bp, Homo sapiens
gaggtctggcaactt

SEQ ID NO: 167426 - DNA, 15 bp, Homo sapiens
agaggtctggcaact

SEQ ID NO: 167427 - DNA, 15 bp, Homo sapiens
gagaggtctggcaac

SEQ ID NO: 167428 - DNA, 15 bp, Homo sapiens
agagaggtctggcaa

SEQ ID NO: 167429 - DNA, 15 bp, Homo sapiens
cagagaggtctggca

SEQ ID NO: 167430 - DNA, 15 bp, Homo sapiens
acagagaggtctggc

SEQ ID NO: 167431 - DNA, 15 bp, Homo sapiens
cacagagaggtctgg

SEQ ID NO: 167432 - DNA, 15 bp, Homo sapiens
gcacagagaggtctg

SEQ ID NO: 167433 - DNA, 15 bp, Homo sapiens
ggcacagagaggtct

SEQ ID NO: 167434 - DNA, 15 bp, Homo sapiens
aggcacagagaggtc

SEQ ID NO: 167435 - DNA, 15 bp, Homo sapiens
aaggcacagagaggt

SEQ ID NO: 167436 - DNA, 15 bp, Homo sapiens
caaggcacagagagg

SEQ ID NO: 167437 - DNA, 15 bp, Homo sapiens
ccaaggcacagagag

SEQ ID NO: 167438 - DNA, 15 bp, Homo sapiens
accaaggcacagaga

SEQ ID NO: 167439 - DNA, 15 bp, Homo sapiens
aaccaaggcacagag

SEQ ID NO: 167440 - DNA, 15 bp, Homo sapiens
caaccaaggcacaga

SEQ ID NO: 167441 - DNA, 15 bp, Homo sapiens
tcaaccaaggcacag

SEQ ID NO: 167442 - DNA, 15 bp, Homo sapiens
gtcaaccaaggcaca

SEQ ID NO: 167443 - DNA, 15 bp, Homo sapiens
agtcaaccaaggcac

SEQ ID NO: 167444 - DNA, 15 bp, Homo sapiens
gagtcaaccaaggca

SEQ ID NO: 167445 - DNA, 15 bp, Homo sapiens
tgagtcaaccaaggc

SEQ ID NO: 167446 - DNA, 15 bp, Homo sapiens
atgagtcaaccaagg

SEQ ID NO: 167447 - DNA, 15 bp, Homo sapiens
gatgagtcaaccaag

SEQ ID NO: 167448 - DNA, 15 bp, Homo sapiens
agatgagtcaaccaa

SEQ ID NO: 167449 - DNA, 15 bp, Homo sapiens
cagatgagtcaacca

SEQ ID NO: 167450 - DNA, 15 bp, Homo sapiens
ccagatgagtcaacc

SEQ ID NO: 167451 - DNA, 15 bp, Homo sapiens
cccagatgagtcaac

SEQ ID NO: 167452 - DNA, 15 bp, Homo sapiens
tcccagatgagtcaa

SEQ ID NO: 167453 - DNA, 15 bp, Homo sapiens
ctcccagatgagtca

SEQ ID NO: 167454 - DNA, 15 bp, Homo sapiens
tctcccagatgagtc

SEQ ID NO: 167455 - DNA, 15 bp, Homo sapiens
atctcccagatgagt

SEQ ID NO: 167456 - DNA, 15 bp, Homo sapiens
catctcccagatgag

SEQ ID NO: 167457 - DNA, 15 bp, Homo sapiens
ccatctcccagatga

SEQ ID NO: 167458 - DNA, 15 bp, Homo sapiens
accatctcccagatg

SEQ ID NO: 167459 - DNA, 15 bp, Homo sapiens
taccatctcccagat

SEQ ID NO: 167460 - DNA, 15 bp, Homo sapiens
ataccatctcccaga

SEQ ID NO: 167461 - DNA, 15 bp, Homo sapiens
tataccatctcccag

SEQ ID NO: 167462 - DNA, 15 bp, Homo sapiens
ctataccatctccca

SEQ ID NO: 167463 - DNA, 15 bp, Homo sapiens
tctataccatctccc

SEQ ID NO: 167464 - DNA, 15 bp, Homo sapiens
ctctataccatctcc

SEQ ID NO: 167465 - DNA, 15 bp, Homo sapiens
gctctataccatctc

SEQ ID NO: 167466 - DNA, 15 bp, Homo sapiens
ggctctataccatct

SEQ ID NO: 167467 - DNA, 15 bp, Homo sapiens
tggctctataccatc

SEQ ID NO: 167468 - DNA, 15 bp, Homo sapiens
ttggctctataccat

SEQ ID NO: 167469 - DNA, 15 bp, Homo sapiens
cttggctctatacca

SEQ ID NO: 167470 - DNA, 15 bp, Homo sapiens
acttggctctatacc

SEQ ID NO: 167471 - DNA, 15 bp, Homo sapiens
cacttggctctatac

SEQ ID NO: 167472 - DNA, 15 bp, Homo sapiens
tcacttggctctata

SEQ ID NO: 167473 - DNA, 15 bp, Homo sapiens
gtcacttggctctat

SEQ ID NO: 167474 - DNA, 15 bp, Homo sapiens
tgtcacttggctcta

SEQ ID NO: 167475 - DNA, 15 bp, Homo sapiens
atgtcacttggctct

SEQ ID NO: 167476 - DNA, 15 bp, Homo sapiens
catgtcacttggctc

SEQ ID NO: 167477 - DNA, 15 bp, Homo sapiens
ccatgtcacttggct

SEQ ID NO: 167478 - DNA, 15 bp, Homo sapiens
cccatgtcacttggc

SEQ ID NO: 167479 - DNA, 15 bp, Homo sapiens
acccatgtcacttgg

SEQ ID NO: 167480 - DNA, 15 bp, Homo sapiens
cacccatgtcacttg

SEQ ID NO: 167481 - DNA, 15 bp, Homo sapiens
acacccatgtcactt

SEQ ID NO: 167482 - DNA, 15 bp, Homo sapiens
gacacccatgtcact

SEQ ID NO: 167483 - DNA, 15 bp, Homo sapiens
cgacacccatgtcac

SEQ ID NO: 167484 - DNA, 15 bp, Homo sapiens
ccgacacccatgtca

SEQ ID NO: 167485 - DNA, 15 bp, Homo sapiens
cccgacacccatgtc

SEQ ID NO: 167486 - DNA, 15 bp, Homo sapiens
tcccgacacccatgt

SEQ ID NO: 167487 - DNA, 15 bp, Homo sapiens
ctcccgacacccatg

SEQ ID NO: 167488 - DNA, 15 bp, Homo sapiens
cctcccgacacccat

SEQ ID NO: 167489 - DNA, 15 bp, Homo sapiens
tcctcccgacaccca

SEQ ID NO: 167490 - DNA, 15 bp, Homo sapiens
gtcctcccgacaccc

SEQ ID NO: 167491 - DNA, 15 bp, Homo sapiens
ggtcctcccgacacc

SEQ ID NO: 167492 - DNA, 15 bp, Homo sapiens
tggtcctcccgacac

SEQ ID NO: 167493 - DNA, 15 bp, Homo sapiens
gtggtcctcccgaca

SEQ ID NO: 167494 - DNA, 15 bp, Homo sapiens
tgtggtcctcccgac

SEQ ID NO: 167495 - DNA, 15 bp, Homo sapiens
ctgtggtcctcccga

SEQ ID NO: 167496 - DNA, 15 bp, Homo sapiens
cctgtggtcctcccg

SEQ ID NO: 167497 - DNA, 15 bp, Homo sapiens
ccctgtggtcctccc

SEQ ID NO: 167498 - DNA, 15 bp, Homo sapiens
gccctgtggtcctcc

SEQ ID NO: 167499 - DNA, 15 bp, Homo sapiens
ggccctgtggtcctc

SEQ ID NO: 167500 - DNA, 15 bp, Homo sapiens
aggccctgtggtcct

SEQ ID NO: 167501 - DNA, 15 bp, Homo sapiens
aaggccctgtggtcc

SEQ ID NO: 167502 - DNA, 15 bp, Homo sapiens
caaggccctgtggtc

SEQ ID NO: 167503 - DNA, 15 bp, Homo sapiens
tcaaggccctgtggt

SEQ ID NO: 167504 - DNA, 15 bp, Homo sapiens
ctcaaggccctgtgg

SEQ ID NO: 167505 - DNA, 15 bp, Homo sapiens
tctcaaggccctgtg

SEQ ID NO: 167506 - DNA, 15 bp, Homo sapiens
ttctcaaggccctgt

SEQ ID NO: 167507 - DNA, 15 bp, Homo sapiens
tttctcaaggccctg

SEQ ID NO: 167508 - DNA, 15 bp, Homo sapiens
atttctcaaggccct

SEQ ID NO: 167509 - DNA, 15 bp, Homo sapiens
catttctcaaggccc

SEQ ID NO: 167510 - DNA, 15 bp, Homo sapiens
ccatttctcaaggcc

SEQ ID NO: 167511 - DNA, 15 bp, Homo sapiens
accatttctcaaggc

SEQ ID NO: 167512 - DNA, 15 bp, Homo sapiens
taccatttctcaagg

SEQ ID NO: 167513 - DNA, 15 bp, Homo sapiens
ctaccatttctcaag

SEQ ID NO: 167514 - DNA, 15 bp, Homo sapiens
gctaccatttctcaa

SEQ ID NO: 167515 - DNA, 15 bp, Homo sapiens
agctaccatttctca

SEQ ID NO: 167516 - DNA, 15 bp, Homo sapiens
cagctaccatttctc

SEQ ID NO: 167517 - DNA, 15 bp, Homo sapiens
acagctaccatttct

SEQ ID NO: 167518 - DNA, 15 bp, Homo sapiens
aacagctaccatttc

SEQ ID NO: 167519 - DNA, 15 bp, Homo sapiens
taacagctaccattt

SEQ ID NO: 167520 - DNA, 15 bp, Homo sapiens
ttaacagctaccatt

SEQ ID NO: 167521 - DNA, 15 bp, Homo sapiens
attaacagctaccat

SEQ ID NO: 167522 - DNA, 15 bp, Homo sapiens
gggcagcagagtcgg

SEQ ID NO: 167523 - DNA, 15 bp, Homo sapiens
agggcagcagagtcg

SEQ ID NO: 167524 - DNA, 15 bp, Homo sapiens
gagggcagcagagtc

SEQ ID NO: 167525 - DNA, 15 bp, Homo sapiens
agagggcagcagagt

SEQ ID NO: 167526 - DNA, 15 bp, Homo sapiens
gagagggcagcagag

SEQ ID NO: 167527 - DNA, 15 bp, Homo sapiens
ggagagggcagcaga

SEQ ID NO: 167528 - DNA, 15 bp, Homo sapiens
aggagagggcagcag

SEQ ID NO: 167529 - DNA, 15 bp, Homo sapiens
gaggagagggcagca

SEQ ID NO: 167530 - DNA, 15 bp, Homo sapiens
tgaggagagggcagc

SEQ ID NO: 167531 - DNA, 15 bp, Homo sapiens
gtgaggagagggcag

SEQ ID NO: 167532 - DNA, 15 bp, Homo sapiens
agtgaggagagggca

SEQ ID NO: 167533 - DNA, 15 bp, Homo sapiens
gagtgaggagagggc

SEQ ID NO: 167534 - DNA, 15 bp, Homo sapiens
ggagtgaggagaggg

SEQ ID NO: 167535 - DNA, 15 bp, Homo sapiens
gggagtgaggagagg

SEQ ID NO: 167536 - DNA, 15 bp, Homo sapiens
agggagtgaggagag

SEQ ID NO: 167537 - DNA, 15 bp, Homo sapiens
cagggagtgaggaga

SEQ ID NO: 167538 - DNA, 15 bp, Homo sapiens
tcagggagtgaggag

SEQ ID NO: 167539 - DNA, 15 bp, Homo sapiens
ctcagggagtgagga

SEQ ID NO: 167540 - DNA, 15 bp, Homo sapiens
actcagggagtgagg

SEQ ID NO: 167541 - DNA, 15 bp, Homo sapiens
aactcagggagtgag

SEQ ID NO: 167542 - DNA, 15 bp, Homo sapiens
taactcagggagtga

SEQ ID NO: 167543 - DNA, 15 bp, Homo sapiens
gtaactcagggagtg

SEQ ID NO: 167544 - DNA, 15 bp, Homo sapiens
cgtaactcagggagt

SEQ ID NO: 167545 - DNA, 15 bp, Homo sapiens
ccgtaactcagggag

SEQ ID NO: 167546 - DNA, 15 bp, Homo sapiens
tccgtaactcaggga

SEQ ID NO: 167547 - DNA, 15 bp, Homo sapiens
atccgtaactcaggg

SEQ ID NO: 167548 - DNA, 15 bp, Homo sapiens
catccgtaactcagg

SEQ ID NO: 167549 - DNA, 15 bp, Homo sapiens
gcatccgtaactcag

SEQ ID NO: 167550 - DNA, 15 bp, Homo sapiens
agcatccgtaactca

SEQ ID NO: 167551 - DNA, 15 bp, Homo sapiens
gagcatccgtaactc

SEQ ID NO: 167552 - DNA, 15 bp, Homo sapiens
tgagcatccgtaact

SEQ ID NO: 167553 - DNA, 15 bp, Homo sapiens
ctgagcatccgtaac

SEQ ID NO: 167554 - DNA, 15 bp, Homo sapiens
tctgagcatccgtaa

SEQ ID NO: 167555 - DNA, 15 bp, Homo sapiens
ctctgagcatccgta

SEQ ID NO: 167556 - DNA, 15 bp, Homo sapiens
tctctgagcatccgt

SEQ ID NO: 167557 - DNA, 15 bp, Homo sapiens
gtctctgagcatccg

SEQ ID NO: 167558 - DNA, 15 bp, Homo sapiens
tgtctctgagcatcc

SEQ ID NO: 167559 - DNA, 15 bp, Homo sapiens
ttgtctctgagcatc

SEQ ID NO: 167560 - DNA, 15 bp, Homo sapiens
gttgtctctgagcat

SEQ ID NO: 167561 - DNA, 15 bp, Homo sapiens
agttgtctctgagca

SEQ ID NO: 167562 - DNA, 15 bp, Homo sapiens
tagttgtctctgagc

SEQ ID NO: 167563 - DNA, 15 bp, Homo sapiens
gtagttgtctctgag

SEQ ID NO: 167564 - DNA, 15 bp, Homo sapiens
ggtagttgtctctga

SEQ ID NO: 167565 - DNA, 15 bp, Homo sapiens
tggtagttgtctctg

SEQ ID NO: 167566 - DNA, 15 bp, Homo sapiens
gtggtagttgtctct

SEQ ID NO: 167567 - DNA, 15 bp, Homo sapiens
tgtggtagttgtctc

SEQ ID NO: 167568 - DNA, 15 bp, Homo sapiens
ctgtggtagttgtct

SEQ ID NO: 167569 - DNA, 15 bp, Homo sapiens
cctgtggtagttgtc

SEQ ID NO: 167570 - DNA, 15 bp, Homo sapiens
gcctgtggtagttgt

SEQ ID NO: 167571 - DNA, 15 bp, Homo sapiens
agcctgtggtagttg

SEQ ID NO: 167572 - DNA, 15 bp, Homo sapiens
gagcctgtggtagtt

SEQ ID NO: 167573 - DNA, 15 bp, Homo sapiens
tgagcctgtggtagt

SEQ ID NO: 167574 - DNA, 15 bp, Homo sapiens
ttgagcctgtggtag

SEQ ID NO: 167575 - DNA, 15 bp, Homo sapiens
cttgagcctgtggta

SEQ ID NO: 167576 - DNA, 15 bp, Homo sapiens
gcttgagcctgtggt

SEQ ID NO: 167577 - DNA, 15 bp, Homo sapiens
agcttgagcctgtgg

SEQ ID NO: 167578 - DNA, 15 bp, Homo sapiens
cagcttgagcctgtg

SEQ ID NO: 167579 - DNA, 15 bp, Homo sapiens
gcagcttgagcctgt

SEQ ID NO: 167580 - DNA, 15 bp, Homo sapiens
cgcagcttgagcctg

SEQ ID NO: 167581 - DNA, 15 bp, Homo sapiens
acgcagcttgagcct

SEQ ID NO: 167582 - DNA, 15 bp, Homo sapiens
tacgcagcttgagcc

SEQ ID NO: 167583 - DNA, 15 bp, Homo sapiens
ttacgcagcttgagc

SEQ ID NO: 167584 - DNA, 15 bp, Homo sapiens
attacgcagcttgag

SEQ ID NO: 167585 - DNA, 15 bp, Homo sapiens
aattacgcagcttga

SEQ ID NO: 167586 - DNA, 15 bp, Homo sapiens
caattacgcagcttg

SEQ ID NO: 167587 - DNA, 15 bp, Homo sapiens
gcaattacgcagctt

SEQ ID NO: 167588 - DNA, 15 bp, Homo sapiens
agcaattacgcagct

SEQ ID NO: 167589 - DNA, 15 bp, Homo sapiens
cagcaattacgcagc

SEQ ID NO: 167590 - DNA, 15 bp, Homo sapiens
gcagcaattacgcag

SEQ ID NO: 167591 - DNA, 15 bp, Homo sapiens
ggcagcaattacgca

SEQ ID NO: 167592 - DNA, 15 bp, Homo sapiens
aggcagcaattacgc

SEQ ID NO: 167593 - DNA, 15 bp, Homo sapiens
gaggcagcaattacg

SEQ ID NO: 167594 - DNA, 15 bp, Homo sapiens
agaggcagcaattac

SEQ ID NO: 167595 - DNA, 15 bp, Homo sapiens
cagaggcagcaatta

SEQ ID NO: 167596 - DNA, 15 bp, Homo sapiens
ccagaggcagcaatt

SEQ ID NO: 167597 - DNA, 15 bp, Homo sapiens
gccagaggcagcaat

SEQ ID NO: 167598 - DNA, 15 bp, Homo sapiens
ggccagaggcagcaa

SEQ ID NO: 167599 - DNA, 15 bp, Homo sapiens
aggccagaggcagca

SEQ ID NO: 167600 - DNA, 15 bp, Homo sapiens
caggccagaggcagc

SEQ ID NO: 167601 - DNA, 15 bp, Homo sapiens
acaggccagaggcag

SEQ ID NO: 167602 - DNA, 15 bp, Homo sapiens
gacaggccagaggca

SEQ ID NO: 167603 - DNA, 15 bp, Homo sapiens
ggacaggccagaggc

SEQ ID NO: 167604 - DNA, 15 bp, Homo sapiens
aggacaggccagagg

SEQ ID NO: 167605 - DNA, 15 bp, Homo sapiens
caggacaggccagag

SEQ ID NO: 167606 - DNA, 15 bp, Homo sapiens
ccaggacaggccaga

SEQ ID NO: 167607 - DNA, 15 bp, Homo sapiens
tccaggacaggccag

SEQ ID NO: 167608 - DNA, 15 bp, Homo sapiens
ctccaggacaggcca

SEQ ID NO: 167609 - DNA, 15 bp, Homo sapiens
gctccaggacaggcc

SEQ ID NO: 167610 - DNA, 15 bp, Homo sapiens
agctccaggacaggc

SEQ ID NO: 167611 - DNA, 15 bp, Homo sapiens
aagctccaggacagg

SEQ ID NO: 167612 - DNA, 15 bp, Homo sapiens
aaagctccaggacag

SEQ ID NO: 167613 - DNA, 15 bp, Homo sapiens
gaaagctccaggaca

SEQ ID NO: 167614 - DNA, 15 bp, Homo sapiens
ggaaagctccaggac

SEQ ID NO: 167615 - DNA, 15 bp, Homo sapiens
aggaaagctccagga

SEQ ID NO: 167616 - DNA, 15 bp, Homo sapiens
aaggaaagctccagg

SEQ ID NO: 167617 - DNA, 15 bp, Homo sapiens
caaggaaagctccag

SEQ ID NO: 167618 - DNA, 15 bp, Homo sapiens
ccaaggaaagctcca

SEQ ID NO: 167619 - DNA, 15 bp, Homo sapiens
gccaaggaaagctcc

SEQ ID NO: 167620 - DNA, 15 bp, Homo sapiens
tgccaaggaaagctc

SEQ ID NO: 167621 - DNA, 15 bp, Homo sapiens
ttgccaaggaaagct

SEQ ID NO: 167622 - DNA, 15 bp, Homo sapiens
tttgccaaggaaagc

SEQ ID NO: 167623 - DNA, 15 bp, Homo sapiens
ctttgccaaggaaag

SEQ ID NO: 167624 - DNA, 15 bp, Homo sapiens
cctttgccaaggaaa

SEQ ID NO: 167625 - DNA, 15 bp, Homo sapiens
acctttgccaaggaa

SEQ ID NO: 167626 - DNA, 15 bp, Homo sapiens
aacctttgccaagga

SEQ ID NO: 167627 - DNA, 15 bp, Homo sapiens
caacctttgccaagg

SEQ ID NO: 167628 - DNA, 15 bp, Homo sapiens
ccaacctttgccaag

SEQ ID NO: 167629 - DNA, 15 bp, Homo sapiens
gccaacctttgccaa

SEQ ID NO: 167630 - DNA, 15 bp, Homo sapiens
tgccaacctttgcca

SEQ ID NO: 167631 - DNA, 15 bp, Homo sapiens
ctgccaacctttgcc

SEQ ID NO: 167632 - DNA, 15 bp, Homo sapiens
gctgccaacctttgc

SEQ ID NO: 167633 - DNA, 15 bp, Homo sapiens
cgctgccaacctttg

SEQ ID NO: 167634 - DNA, 15 bp, Homo sapiens
ccgctgccaaccttt

SEQ ID NO: 167635 - DNA, 15 bp, Homo sapiens
tccgctgccaacctt

SEQ ID NO: 167636 - DNA, 15 bp, Homo sapiens
ctccgctgccaacct

SEQ ID NO: 167637 - DNA, 15 bp, Homo sapiens
cctccgctgccaacc

SEQ ID NO: 167638 - DNA, 15 bp, Homo sapiens
gcctccgctgccaac

SEQ ID NO: 167639 - DNA, 15 bp, Homo sapiens
agcctccgctgccaa

SEQ ID NO: 167640 - DNA, 15 bp, Homo sapiens
aagcctccgctgcca

SEQ ID NO: 167641 - DNA, 15 bp, Homo sapiens
gaagcctccgctgcc

SEQ ID NO: 167642 - DNA, 15 bp, Homo sapiens
ggaagcctccgctgc

SEQ ID NO: 167643 - DNA, 15 bp, Homo sapiens
gggaagcctccgctg

SEQ ID NO: 167644 - DNA, 15 bp, Homo sapiens
agggaagcctccgct

SEQ ID NO: 167645 - DNA, 15 bp, Homo sapiens
cagggaagcctccgc

SEQ ID NO: 167646 - DNA, 15 bp, Homo sapiens
tcagggaagcctccg

SEQ ID NO: 167647 - DNA, 15 bp, Homo sapiens
gtcagggaagcctcc

SEQ ID NO: 167648 - DNA, 15 bp, Homo sapiens
ggtcagggaagcctc

SEQ ID NO: 167649 - DNA, 15 bp, Homo sapiens
gggtcagggaagcct

SEQ ID NO: 167650 - DNA, 15 bp, Homo sapiens
ggggtcagggaagcc

SEQ ID NO: 167651 - DNA, 15 bp, Homo sapiens
gggggtcagggaagc

SEQ ID NO: 167652 - DNA, 15 bp, Homo sapiens
tgggggtcagggaag

SEQ ID NO: 167653 - DNA, 15 bp, Homo sapiens
gtgggggtcagggaa

SEQ ID NO: 167654 - DNA, 15 bp, Homo sapiens
ggtgggggtcaggga

SEQ ID NO: 167655 - DNA, 15 bp, Homo sapiens
gggtgggggtcaggg

SEQ ID NO: 167656 - DNA, 15 bp, Homo sapiens
tgggtgggggtcagg

SEQ ID NO: 167657 - DNA, 15 bp, Homo sapiens
ctgggtgggggtcag

SEQ ID NO: 167658 - DNA, 15 bp, Homo sapiens
cctgggtgggggtca

SEQ ID NO: 167659 - DNA, 15 bp, Homo sapiens
acctgggtgggggtc

SEQ ID NO: 167660 - DNA, 15 bp, Homo sapiens
cacctgggtgggggt

SEQ ID NO: 167661 - DNA, 15 bp, Homo sapiens
acacctgggtggggg

SEQ ID NO: 167662 - DNA, 15 bp, Homo sapiens
cacacctgggtgggg

SEQ ID NO: 167663 - DNA, 15 bp, Homo sapiens
acacacctgggtggg

SEQ ID NO: 167664 - DNA, 15 bp, Homo sapiens
cacacacctgggtgg

SEQ ID NO: 167665 - DNA, 15 bp, Homo sapiens
ccacacacctgggtg

SEQ ID NO: 167666 - DNA, 15 bp, Homo sapiens
cccacacacctgggt

SEQ ID NO: 167667 - DNA, 15 bp, Homo sapiens
tcccacacacctggg

SEQ ID NO: 167668 - DNA, 15 bp, Homo sapiens
ctcccacacacctgg

SEQ ID NO: 167669 - DNA, 15 bp, Homo sapiens
gctcccacacacctg

SEQ ID NO: 167670 - DNA, 15 bp, Homo sapiens
tgctcccacacacct

SEQ ID NO: 167671 - DNA, 15 bp, Homo sapiens
ctgctcccacacacc

SEQ ID NO: 167672 - DNA, 15 bp, Homo sapiens
actgctcccacacac

SEQ ID NO: 167673 - DNA, 15 bp, Homo sapiens
aactgctcccacaca

SEQ ID NO: 167674 - DNA, 15 bp, Homo sapiens
gaactgctcccacac

SEQ ID NO: 167675 - DNA, 15 bp, Homo sapiens
agaactgctcccaca

SEQ ID NO: 167676 - DNA, 15 bp, Homo sapiens
cagaactgctcccac

SEQ ID NO: 167677 - DNA, 15 bp, Homo sapiens
tcagaactgctccca

SEQ ID NO: 167678 - DNA, 15 bp, Homo sapiens
ttcagaactgctccc

SEQ ID NO: 167679 - DNA, 15 bp, Homo sapiens
cttcagaactgctcc

SEQ ID NO: 167680 - DNA, 15 bp, Homo sapiens
tcttcagaactgctc

SEQ ID NO: 167681 - DNA, 15 bp, Homo sapiens
ttcttcagaactgct

SEQ ID NO: 167682 - DNA, 15 bp, Homo sapiens
cttcttcagaactgc

SEQ ID NO: 167683 - DNA, 15 bp, Homo sapiens
ccttcttcagaactg

SEQ ID NO: 167684 - DNA, 15 bp, Homo sapiens
cccttcttcagaact

SEQ ID NO: 167685 - DNA, 15 bp, Homo sapiens
ccccttcttcagaac

SEQ ID NO: 167686 - DNA, 15 bp, Homo sapiens
tccccttcttcagaa

SEQ ID NO: 167687 - DNA, 15 bp, Homo sapiens
gtccccttcttcaga

SEQ ID NO: 167688 - DNA, 15 bp, Homo sapiens
tgtccccttcttcag

SEQ ID NO: 167689 - DNA, 15 bp, Homo sapiens
ctgtccccttcttca

SEQ ID NO: 167690 - DNA, 15 bp, Homo sapiens
actgtccccttcttc

SEQ ID NO: 167691 - DNA, 15 bp, Homo sapiens
aactgtccccttctt

SEQ ID NO: 167692 - DNA, 15 bp, Homo sapiens
gaactgtccccttct

SEQ ID NO: 167693 - DNA, 15 bp, Homo sapiens
agaactgtccccttc

SEQ ID NO: 167694 - DNA, 15 bp, Homo sapiens
cagaactgtcccctt

SEQ ID NO: 167695 - DNA, 15 bp, Homo sapiens
ccagaactgtcccct

SEQ ID NO: 167696 - DNA, 15 bp, Homo sapiens
tccagaactgtcccc

SEQ ID NO: 167697 - DNA, 15 bp, Homo sapiens
ctccagaactgtccc

SEQ ID NO: 167698 - DNA, 15 bp, Homo sapiens
gctccagaactgtcc

SEQ ID NO: 167699 - DNA, 15 bp, Homo sapiens
agctccagaactgtc

SEQ ID NO: 167700 - DNA, 15 bp, Homo sapiens
aagctccagaactgt

SEQ ID NO: 167701 - DNA, 15 bp, Homo sapiens
aaagctccagaactg

SEQ ID NO: 167702 - DNA, 15 bp, Homo sapiens
gaaagctccagaact

SEQ ID NO: 167703 - DNA, 15 bp, Homo sapiens
agaaagctccagaac

SEQ ID NO: 167704 - DNA, 15 bp, Homo sapiens
aagaaagctccagaa

SEQ ID NO: 167705 - DNA, 15 bp, Homo sapiens
caagaaagctccaga

SEQ ID NO: 167706 - DNA, 15 bp, Homo sapiens
ccaagaaagctccag

SEQ ID NO: 167707 - DNA, 15 bp, Homo sapiens
cccaagaaagctcca

SEQ ID NO: 167708 - DNA, 15 bp, Homo sapiens
gcccaagaaagctcc

SEQ ID NO: 167709 - DNA, 15 bp, Homo sapiens
agcccaagaaagctc

SEQ ID NO: 167710 - DNA, 15 bp, Homo sapiens
cagcccaagaaagct

SEQ ID NO: 167711 - DNA, 15 bp, Homo sapiens
tcagcccaagaaagc

SEQ ID NO: 167712 - DNA, 15 bp, Homo sapiens
atcagcccaagaaag

SEQ ID NO: 167713 - DNA, 15 bp, Homo sapiens
gatcagcccaagaaa

SEQ ID NO: 167714 - DNA, 15 bp, Homo sapiens
tgatcagcccaagaa

SEQ ID NO: 167715 - DNA, 15 bp, Homo sapiens
ttgatcagcccaaga

SEQ ID NO: 167716 - DNA, 15 bp, Homo sapiens
cttgatcagcccaag

SEQ ID NO: 167717 - DNA, 15 bp, Homo sapiens
gcttgatcagcccaa

SEQ ID NO: 167718 - DNA, 15 bp, Homo sapiens
cgcttgatcagccca

SEQ ID NO: 167719 - DNA, 15 bp, Homo sapiens
tcgcttgatcagccc

SEQ ID NO: 167720 - DNA, 15 bp, Homo sapiens
ctcgcttgatcagcc

SEQ ID NO: 167721 - DNA, 15 bp, Homo sapiens
actcgcttgatcagc

SEQ ID NO: 167722 - DNA, 15 bp, Homo sapiens
tactcgcttgatcag

SEQ ID NO: 167723 - DNA, 15 bp, Homo sapiens
ctactcgcttgatca

SEQ ID NO: 167724 - DNA, 15 bp, Homo sapiens
gctactcgcttgatc

SEQ ID NO: 167725 - DNA, 15 bp, Homo sapiens
ggctactcgcttgat

SEQ ID NO: 167726 - DNA, 15 bp, Homo sapiens
aggctactcgcttga

SEQ ID NO: 167727 - DNA, 15 bp, Homo sapiens
caggctactcgcttg

SEQ ID NO: 167728 - DNA, 15 bp, Homo sapiens
acaggctactcgctt

SEQ ID NO: 167729 - DNA, 15 bp, Homo sapiens
cacaggctactcgct

SEQ ID NO: 167730 - DNA, 15 bp, Homo sapiens
ccacaggctactcgc

SEQ ID NO: 167731 - DNA, 15 bp, Homo sapiens
tccacaggctactcg

SEQ ID NO: 167732 - DNA, 15 bp, Homo sapiens
ctccacaggctactc

SEQ ID NO: 167733 - DNA, 15 bp, Homo sapiens
tctccacaggctact

SEQ ID NO: 167734 - DNA, 15 bp, Homo sapiens
ttctccacaggctac

SEQ ID NO: 167735 - DNA, 15 bp, Homo sapiens
tttctccacaggcta

SEQ ID NO: 167736 - DNA, 15 bp, Homo sapiens
gtttctccacaggct

SEQ ID NO: 167737 - DNA, 15 bp, Homo sapiens
cgtttctccacaggc

SEQ ID NO: 167738 - DNA, 15 bp, Homo sapiens
acgtttctccacagg

SEQ ID NO: 167739 - DNA, 15 bp, Homo sapiens
gacgtttctccacag

SEQ ID NO: 167740 - DNA, 15 bp, Homo sapiens
tgacgtttctccaca

SEQ ID NO: 167741 - DNA, 15 bp, Homo sapiens
gtgacgtttctccac

SEQ ID NO: 167742 - DNA, 15 bp, Homo sapiens
tgtgacgtttctcca

SEQ ID NO: 167743 - DNA, 15 bp, Homo sapiens
ctgtgacgtttctcc

SEQ ID NO: 167744 - DNA, 15 bp, Homo sapiens
actgtgacgtttctc

SEQ ID NO: 167745 - DNA, 15 bp, Homo sapiens
cactgtgacgtttct

SEQ ID NO: 167746 - DNA, 15 bp, Homo sapiens
acactgtgacgtttc

SEQ ID NO: 167747 - DNA, 15 bp, Homo sapiens
cacactgtgacgttt

SEQ ID NO: 167748 - DNA, 15 bp, Homo sapiens
gcacactgtgacgtt

SEQ ID NO: 167749 - DNA, 15 bp, Homo sapiens
ggcacactgtgacgt

SEQ ID NO: 167750 - DNA, 15 bp, Homo sapiens
gggcacactgtgacg

SEQ ID NO: 167751 - DNA, 15 bp, Homo sapiens
agggcacactgtgac

SEQ ID NO: 167752 - DNA, 15 bp, Homo sapiens
cagggcacactgtga

SEQ ID NO: 167753 - DNA, 15 bp, Homo sapiens
ccagggcacactgtg

SEQ ID NO: 167754 - DNA, 15 bp, Homo sapiens
accagggcacactgt

SEQ ID NO: 167755 - DNA, 15 bp, Homo sapiens
caccagggcacactg

SEQ ID NO: 167756 - DNA, 15 bp, Homo sapiens
acaccagggcacact

SEQ ID NO: 167757 - DNA, 15 bp, Homo sapiens
gacaccagggcacac

SEQ ID NO: 167758 - DNA, 15 bp, Homo sapiens
tgacaccagggcaca

SEQ ID NO: 167759 - DNA, 15 bp, Homo sapiens
ttgacaccagggcac

SEQ ID NO: 167760 - DNA, 15 bp, Homo sapiens
cttgacaccagggca

SEQ ID NO: 167761 - DNA, 15 bp, Homo sapiens
ccttgacaccagggc

SEQ ID NO: 167762 - DNA, 15 bp, Homo sapiens
tccttgacaccaggg

SEQ ID NO: 167763 - DNA, 15 bp, Homo sapiens
ctccttgacaccagg

SEQ ID NO: 167764 - DNA, 15 bp, Homo sapiens
tctccttgacaccag

SEQ ID NO: 167765 - DNA, 15 bp, Homo sapiens
ttctccttgacacca

SEQ ID NO: 167766 - DNA, 15 bp, Homo sapiens
cttctccttgacacc

SEQ ID NO: 167767 - DNA, 15 bp, Homo sapiens
ccttctccttgacac

SEQ ID NO: 167768 - DNA, 15 bp, Homo sapiens
tccttctccttgaca

SEQ ID NO: 167769 - DNA, 15 bp, Homo sapiens
ttccttctccttgac

SEQ ID NO: 167770 - DNA, 15 bp, Homo sapiens
cttccttctccttga

SEQ ID NO: 167771 - DNA, 15 bp, Homo sapiens
ccttccttctccttg

SEQ ID NO: 167772 - DNA, 15 bp, Homo sapiens
cccttccttctcctt

SEQ ID NO: 167773 - DNA, 15 bp, Homo sapiens
tcccttccttctcct

SEQ ID NO: 167774 - DNA, 15 bp, Homo sapiens
ctcccttccttctcc

SEQ ID NO: 167775 - DNA, 15 bp, Homo sapiens
actcccttccttctc

SEQ ID NO: 167776 - DNA, 15 bp, Homo sapiens
aactcccttccttct

SEQ ID NO: 167777 - DNA, 15 bp, Homo sapiens
taactcccttccttc

SEQ ID NO: 167778 - DNA, 15 bp, Homo sapiens
ataactcccttcctt

SEQ ID NO: 167779 - DNA, 15 bp, Homo sapiens
gataactcccttcct

SEQ ID NO: 167780 - DNA, 15 bp, Homo sapiens
agataactcccttcc

SEQ ID NO: 167781 - DNA, 15 bp, Homo sapiens
gagataactcccttc

SEQ ID NO: 167782 - DNA, 15 bp, Homo sapiens
tgagataactccctt

SEQ ID NO: 167783 - DNA, 15 bp, Homo sapiens
ctgagataactccct

SEQ ID NO: 167784 - DNA, 15 bp, Homo sapiens
cctgagataactccc

SEQ ID NO: 167785 - DNA, 15 bp, Homo sapiens
gcctgagataactcc

SEQ ID NO: 167786 - DNA, 15 bp, Homo sapiens
tgcctgagataactc

SEQ ID NO: 167787 - DNA, 15 bp, Homo sapiens
ctgcctgagataact

SEQ ID NO: 167788 - DNA, 15 bp, Homo sapiens
cctgcctgagataac

SEQ ID NO: 167789 - DNA, 15 bp, Homo sapiens
ccctgcctgagataa

SEQ ID NO: 167790 - DNA, 15 bp, Homo sapiens
accctgcctgagata

SEQ ID NO: 167791 - DNA, 15 bp, Homo sapiens
gaccctgcctgagat

SEQ ID NO: 167792 - DNA, 15 bp, Homo sapiens
ggaccctgcctgaga

SEQ ID NO: 167793 - DNA, 15 bp, Homo sapiens
aggaccctgcctgag

SEQ ID NO: 167794 - DNA, 15 bp, Homo sapiens
caggaccctgcctga

SEQ ID NO: 167795 - DNA, 15 bp, Homo sapiens
ccaggaccctgcctg

SEQ ID NO: 167796 - DNA, 15 bp, Homo sapiens
gccaggaccctgcct

SEQ ID NO: 167797 - DNA, 15 bp, Homo sapiens
tgccaggaccctgcc

SEQ ID NO: 167798 - DNA, 15 bp, Homo sapiens
ctgccaggaccctgc

SEQ ID NO: 167799 - DNA, 15 bp, Homo sapiens
tctgccaggaccctg

SEQ ID NO: 167800 - DNA, 15 bp, Homo sapiens
ttctgccaggaccct

SEQ ID NO: 167801 - DNA, 15 bp, Homo sapiens
tttctgccaggaccc

SEQ ID NO: 167802 - DNA, 15 bp, Homo sapiens
ttttctgccaggacc

SEQ ID NO: 167803 - DNA, 15 bp, Homo sapiens
gttttctgccaggac

SEQ ID NO: 167804 - DNA, 15 bp, Homo sapiens
tgttttctgccagga

SEQ ID NO: 167805 - DNA, 15 bp, Homo sapiens
atgttttctgccagg

SEQ ID NO: 167806 - DNA, 15 bp, Homo sapiens
catgttttctgccag

SEQ ID NO: 167807 - DNA, 15 bp, Homo sapiens
gcatgttttctgcca

SEQ ID NO: 167808 - DNA, 15 bp, Homo sapiens
agcatgttttctgcc

SEQ ID NO: 167809 - DNA, 15 bp, Homo sapiens
gagcatgttttctgc

SEQ ID NO: 167810 - DNA, 15 bp, Homo sapiens
tgagcatgttttctg

SEQ ID NO: 167811 - DNA, 15 bp, Homo sapiens
ctgagcatgttttct

SEQ ID NO: 167812 - DNA, 15 bp, Homo sapiens
actgagcatgttttc

SEQ ID NO: 167813 - DNA, 15 bp, Homo sapiens
aactgagcatgtttt

SEQ ID NO: 167814 - DNA, 15 bp, Homo sapiens
caactgagcatgttt

SEQ ID NO: 167815 - DNA, 15 bp, Homo sapiens
ccaactgagcatgtt

SEQ ID NO: 167816 - DNA, 15 bp, Homo sapiens
gccaactgagcatgt

SEQ ID NO: 167817 - DNA, 15 bp, Homo sapiens
tgccaactgagcatg

SEQ ID NO: 167818 - DNA, 15 bp, Homo sapiens
ttgccaactgagcat

SEQ ID NO: 167819 - DNA, 15 bp, Homo sapiens
attgccaactgagca

SEQ ID NO: 167820 - DNA, 15 bp, Homo sapiens
aattgccaactgagc

SEQ ID NO: 167821 - DNA, 15 bp, Homo sapiens
aaattgccaactgag

SEQ ID NO: 167822 - DNA, 15 bp, Homo sapiens
caaattgccaactga

SEQ ID NO: 167823 - DNA, 15 bp, Homo sapiens
ccaaattgccaactg

SEQ ID NO: 167824 - DNA, 15 bp, Homo sapiens
tccaaattgccaact

SEQ ID NO: 167825 - DNA, 15 bp, Homo sapiens
ctccaaattgccaac

SEQ ID NO: 167826 - DNA, 15 bp, Homo sapiens
tctccaaattgccaa

SEQ ID NO: 167827 - DNA, 15 bp, Homo sapiens
ctctccaaattgcca

SEQ ID NO: 167828 - DNA, 15 bp, Homo sapiens
tctctccaaattgcc

SEQ ID NO: 167829 - DNA, 15 bp, Homo sapiens
ttctctccaaattgc

SEQ ID NO: 167830 - DNA, 15 bp, Homo sapiens
attctctccaaattg

SEQ ID NO: 167831 - DNA, 15 bp, Homo sapiens
aattctctccaaatt

SEQ ID NO: 167832 - DNA, 15 bp, Homo sapiens
aaattctctccaaat

SEQ ID NO: 167833 - DNA, 15 bp, Homo sapiens
taaattctctccaaa

SEQ ID NO: 167834 - DNA, 15 bp, Homo sapiens
ttaaattctctccaa

SEQ ID NO: 167835 - DNA, 15 bp, Homo sapiens
attaaattctctcca

SEQ ID NO: 167836 - DNA, 15 bp, Homo sapiens
cattaaattctctcc

SEQ ID NO: 167837 - DNA, 15 bp, Homo sapiens
acattaaattctctc

SEQ ID NO: 167838 - DNA, 15 bp, Homo sapiens
aacattaaattctct

SEQ ID NO: 167839 - DNA, 15 bp, Homo sapiens
caacattaaattctc

SEQ ID NO: 167840 - DNA, 15 bp, Homo sapiens
ccaacattaaattct

SEQ ID NO: 167841 - DNA, 15 bp, Homo sapiens
cccaacattaaattc

SEQ ID NO: 167842 - DNA, 15 bp, Homo sapiens
ccccaacattaaatt

SEQ ID NO: 167843 - DNA, 15 bp, Homo sapiens
tccccaacattaaat

SEQ ID NO: 167844 - DNA, 15 bp, Homo sapiens
ctccccaacattaaa

SEQ ID NO: 167845 - DNA, 15 bp, Homo sapiens
cctccccaacattaa

SEQ ID NO: 167846 - DNA, 15 bp, Homo sapiens
ccctccccaacatta

SEQ ID NO: 167847 - DNA, 15 bp, Homo sapiens
cccctccccaacatt

SEQ ID NO: 167848 - DNA, 15 bp, Homo sapiens
acccctccccaacat

SEQ ID NO: 167849 - DNA, 15 bp, Homo sapiens
gacccctccccaaca

SEQ ID NO: 167850 - DNA, 15 bp, Homo sapiens
tgacccctccccaac

SEQ ID NO: 167851 - DNA, 15 bp, Homo sapiens
atgacccctccccaa

SEQ ID NO: 167852 - DNA, 15 bp, Homo sapiens
aatgacccctcccca

SEQ ID NO: 167853 - DNA, 15 bp, Homo sapiens
aaatgacccctcccc

SEQ ID NO: 167854 - DNA, 15 bp, Homo sapiens
aaaatgacccctccc

SEQ ID NO: 167855 - DNA, 15 bp, Homo sapiens
gaaaatgacccctcc

SEQ ID NO: 167856 - DNA, 15 bp, Homo sapiens
tgaaaatgacccctc

SEQ ID NO: 167857 - DNA, 15 bp, Homo sapiens
ctgaaaatgacccct

SEQ ID NO: 167858 - DNA, 15 bp, Homo sapiens
tctgaaaatgacccc

SEQ ID NO: 167859 - DNA, 15 bp, Homo sapiens
ctctgaaaatgaccc

SEQ ID NO: 167860 - DNA, 15 bp, Homo sapiens
cctctgaaaatgacc

SEQ ID NO: 167861 - DNA, 15 bp, Homo sapiens
gcctctgaaaatgac

SEQ ID NO: 167862 - DNA, 15 bp, Homo sapiens
agcctctgaaaatga

SEQ ID NO: 167863 - DNA, 15 bp, Homo sapiens
cagcctctgaaaatg

SEQ ID NO: 167864 - DNA, 15 bp, Homo sapiens
ccagcctctgaaaat

SEQ ID NO: 167865 - DNA, 15 bp, Homo sapiens
gccagcctctgaaaa

SEQ ID NO: 167866 - DNA, 15 bp, Homo sapiens
tgccagcctctgaaa

SEQ ID NO: 167867 - DNA, 15 bp, Homo sapiens
ttgccagcctctgaa

SEQ ID NO: 167868 - DNA, 15 bp, Homo sapiens
cttgccagcctctga

SEQ ID NO: 167869 - DNA, 15 bp, Homo sapiens
ccttgccagcctctg

SEQ ID NO: 167870 - DNA, 15 bp, Homo sapiens
accttgccagcctct

SEQ ID NO: 167871 - DNA, 15 bp, Homo sapiens
taccttgccagcctc

SEQ ID NO: 167872 - DNA, 15 bp, Homo sapiens
ttaccttgccagcct

SEQ ID NO: 167873 - DNA, 15 bp, Homo sapiens
tttaccttgccagcc

SEQ ID NO: 167874 - DNA, 15 bp, Homo sapiens
ctttaccttgccagc

SEQ ID NO: 167875 - DNA, 15 bp, Homo sapiens
cctttaccttgccag

SEQ ID NO: 167876 - DNA, 15 bp, Homo sapiens
ccctttaccttgcca

SEQ ID NO: 167877 - DNA, 15 bp, Homo sapiens
tccctttaccttgcc

SEQ ID NO: 167878 - DNA, 15 bp, Homo sapiens
gtccctttaccttgc

SEQ ID NO: 167879 - DNA, 15 bp, Homo sapiens
ggtccctttaccttg

SEQ ID NO: 167880 - DNA, 15 bp, Homo sapiens
tggtccctttacctt

SEQ ID NO: 167881 - DNA, 15 bp, Homo sapiens
ttggtccctttacct

SEQ ID NO: 167882 - DNA, 15 bp, Homo sapiens
attggtccctttacc

SEQ ID NO: 167883 - DNA, 15 bp, Homo sapiens
cattggtccctttac

SEQ ID NO: 167884 - DNA, 15 bp, Homo sapiens
tcattggtcccttta

SEQ ID NO: 167885 - DNA, 15 bp, Homo sapiens
ctcattggtcccttt

SEQ ID NO: 167886 - DNA, 15 bp, Homo sapiens
cctcattggtccctt

SEQ ID NO: 167887 - DNA, 15 bp, Homo sapiens
gcctcattggtccct

SEQ ID NO: 167888 - DNA, 15 bp, Homo sapiens
tgcctcattggtccc

SEQ ID NO: 167889 - DNA, 15 bp, Homo sapiens
atgcctcattggtcc

SEQ ID NO: 167890 - DNA, 15 bp, Homo sapiens
tatgcctcattggtc

SEQ ID NO: 167891 - DNA, 15 bp, Homo sapiens
atatgcctcattggt

SEQ ID NO: 167892 - DNA, 15 bp, Homo sapiens
tatatgcctcattgg

SEQ ID NO: 167893 - DNA, 15 bp, Homo sapiens
ttatatgcctcattg

SEQ ID NO: 167894 - DNA, 15 bp, Homo sapiens
tttatatgcctcatt

SEQ ID NO: 167895 - DNA, 15 bp, Homo sapiens
ctttatatgcctcat

SEQ ID NO: 167896 - DNA, 15 bp, Homo sapiens
gctttatatgcctca

SEQ ID NO: 167897 - DNA, 15 bp, Homo sapiens
tgctttatatgcctc

SEQ ID NO: 167898 - DNA, 15 bp, Homo sapiens
gtgctttatatgcct

SEQ ID NO: 167899 - DNA, 15 bp, Homo sapiens
ggtgctttatatgcc

SEQ ID NO: 167900 - DNA, 15 bp, Homo sapiens
tggtgctttatatgc

SEQ ID NO: 167901 - DNA, 15 bp, Homo sapiens
ctggtgctttatatg

SEQ ID NO: 167902 - DNA, 15 bp, Homo sapiens
cctggtgctttatat

SEQ ID NO: 167903 - DNA, 15 bp, Homo sapiens
ccctggtgctttata

SEQ ID NO: 167904 - DNA, 15 bp, Homo sapiens
tccctggtgctttat

SEQ ID NO: 167905 - DNA, 15 bp, Homo sapiens
gtccctggtgcttta

SEQ ID NO: 167906 - DNA, 15 bp, Homo sapiens
agtccctggtgcttt

SEQ ID NO: 167907 - DNA, 15 bp, Homo sapiens
tagtccctggtgctt

SEQ ID NO: 167908 - DNA, 15 bp, Homo sapiens
gtagtccctggtgct

SEQ ID NO: 167909 - DNA, 15 bp, Homo sapiens
tgtagtccctggtgc

SEQ ID NO: 167910 - DNA, 15 bp, Homo sapiens
ttgtagtccctggtg

SEQ ID NO: 167911 - DNA, 15 bp, Homo sapiens
gttgtagtccctggt

SEQ ID NO: 167912 - DNA, 15 bp, Homo sapiens
tgttgtagtccctgg

SEQ ID NO: 167913 - DNA, 15 bp, Homo sapiens
ttgttgtagtccctg

SEQ ID NO: 167914 - DNA, 15 bp, Homo sapiens
attgttgtagtccct

SEQ ID NO: 167915 - DNA, 15 bp, Homo sapiens
cattgttgtagtccc

SEQ ID NO: 167916 - DNA, 15 bp, Homo sapiens
ccattgttgtagtcc

SEQ ID NO: 167917 - DNA, 15 bp, Homo sapiens
tccattgttgtagtc

SEQ ID NO: 167918 - DNA, 15 bp, Homo sapiens
ttccattgttgtagt

SEQ ID NO: 167919 - DNA, 15 bp, Homo sapiens
tttccattgttgtag

SEQ ID NO: 167920 - DNA, 15 bp, Homo sapiens
ctttccattgttgta

SEQ ID NO: 167921 - DNA, 15 bp, Homo sapiens
gctttccattgttgt

SEQ ID NO: 167922 - DNA, 15 bp, Homo sapiens
agctttccattgttg

SEQ ID NO: 167923 - DNA, 15 bp, Homo sapiens
aagctttccattgtt

SEQ ID NO: 167924 - DNA, 15 bp, Homo sapiens
caagctttccattgt

SEQ ID NO: 167925 - DNA, 15 bp, Homo sapiens
tcaagctttccattg

SEQ ID NO: 167926 - DNA, 15 bp, Homo sapiens
ctcaagctttccatt

SEQ ID NO: 167927 - DNA, 15 bp, Homo sapiens
gctcaagctttccat

SEQ ID NO: 167928 - DNA, 15 bp, Homo sapiens
tgctcaagctttcca

SEQ ID NO: 167929 - DNA, 15 bp, Homo sapiens
gtgctcaagctttcc

SEQ ID NO: 167930 - DNA, 15 bp, Homo sapiens
ggtgctcaagctttc

SEQ ID NO: 167931 - DNA, 15 bp, Homo sapiens
gggtgctcaagcttt

SEQ ID NO: 167932 - DNA, 15 bp, Homo sapiens
ggggtgctcaagctt

SEQ ID NO: 167933 - DNA, 15 bp, Homo sapiens
aggggtgctcaagct

SEQ ID NO: 167934 - DNA, 15 bp, Homo sapiens
taggggtgctcaagc

SEQ ID NO: 167935 - DNA, 15 bp, Homo sapiens
ctaggggtgctcaag

SEQ ID NO: 167936 - DNA, 15 bp, Homo sapiens
tctaggggtgctcaa

SEQ ID NO: 167937 - DNA, 15 bp, Homo sapiens
gtctaggggtgctca

SEQ ID NO: 167938 - DNA, 15 bp, Homo sapiens
ggtctaggggtgctc

SEQ ID NO: 167939 - DNA, 15 bp, Homo sapiens
aggtctaggggtgct

SEQ ID NO: 167940 - DNA, 15 bp, Homo sapiens
caggtctaggggtgc

SEQ ID NO: 167941 - DNA, 15 bp, Homo sapiens
tcaggtctaggggtg

SEQ ID NO: 167942 - DNA, 15 bp, Homo sapiens
ctcaggtctaggggt

SEQ ID NO: 167943 - DNA, 15 bp, Homo sapiens
tctcaggtctagggg

SEQ ID NO: 167944 - DNA, 15 bp, Homo sapiens
ttctcaggtctaggg

SEQ ID NO: 167945 - DNA, 15 bp, Homo sapiens
cttctcaggtctagg

SEQ ID NO: 167946 - DNA, 15 bp, Homo sapiens
ccttctcaggtctag

SEQ ID NO: 167947 - DNA, 15 bp, Homo sapiens
tccttctcaggtcta

SEQ ID NO: 167948 - DNA, 15 bp, Homo sapiens
ttccttctcaggtct

SEQ ID NO: 167949 - DNA, 15 bp, Homo sapiens
cttccttctcaggtc

SEQ ID NO: 167950 - DNA, 15 bp, Homo sapiens
ccttccttctcaggt

SEQ ID NO: 167951 - DNA, 15 bp, Homo sapiens
cccttccttctcagg

SEQ ID NO: 167952 - DNA, 15 bp, Homo sapiens
tcccttccttctcag

SEQ ID NO: 167953 - DNA, 15 bp, Homo sapiens
gtcccttccttctca

SEQ ID NO: 167954 - DNA, 15 bp, Homo sapiens
tgtcccttccttctc

SEQ ID NO: 167955 - DNA, 15 bp, Homo sapiens
ttgtcccttccttct

SEQ ID NO: 167956 - DNA, 15 bp, Homo sapiens
cttgtcccttccttc

SEQ ID NO: 167957 - DNA, 15 bp, Homo sapiens
tcttgtcccttcctt

SEQ ID NO: 167958 - DNA, 15 bp, Homo sapiens
ttcttgtcccttcct

SEQ ID NO: 167959 - DNA, 15 bp, Homo sapiens
attcttgtcccttcc

SEQ ID NO: 167960 - DNA, 15 bp, Homo sapiens
cattcttgtcccttc

SEQ ID NO: 167961 - DNA, 15 bp, Homo sapiens
ccattcttgtccctt

SEQ ID NO: 167962 - DNA, 15 bp, Homo sapiens
cccattcttgtccct

SEQ ID NO: 167963 - DNA, 15 bp, Homo sapiens
ccccattcttgtccc

SEQ ID NO: 167964 - DNA, 15 bp, Homo sapiens
gccccattcttgtcc

SEQ ID NO: 167965 - DNA, 15 bp, Homo sapiens
agccccattcttgtc

SEQ ID NO: 167966 - DNA, 15 bp, Homo sapiens
cagccccattcttgt

SEQ ID NO: 167967 - DNA, 15 bp, Homo sapiens
ccagccccattcttg

SEQ ID NO: 167968 - DNA, 15 bp, Homo sapiens
cccagccccattctt

SEQ ID NO: 167969 - DNA, 15 bp, Homo sapiens
ccccagccccattct

SEQ ID NO: 167970 - DNA, 15 bp, Homo sapiens
cccccagccccattc

SEQ ID NO: 167971 - DNA, 15 bp, Homo sapiens
ccccccagccccatt

SEQ ID NO: 167972 - DNA, 15 bp, Homo sapiens
accccccagccccat

SEQ ID NO: 167973 - DNA, 15 bp, Homo sapiens
gaccccccagcccca

SEQ ID NO: 167974 - DNA, 15 bp, Homo sapiens
ggaccccccagcccc

SEQ ID NO: 167975 - DNA, 15 bp, Homo sapiens
gggaccccccagccc

SEQ ID NO: 167976 - DNA, 15 bp, Homo sapiens
ggggaccccccagcc

SEQ ID NO: 167977 - DNA, 15 bp, Homo sapiens
tggggaccccccagc

SEQ ID NO: 167978 - DNA, 15 bp, Homo sapiens
atggggaccccccag

SEQ ID NO: 167979 - DNA, 15 bp, Homo sapiens
catggggacccccca

SEQ ID NO: 167980 - DNA, 15 bp, Homo sapiens
tcatggggacccccc

SEQ ID NO: 167981 - DNA, 15 bp, Homo sapiens
gtcatggggaccccc

SEQ ID NO: 167982 - DNA, 15 bp, Homo sapiens
tgtcatggggacccc

SEQ ID NO: 167983 - DNA, 15 bp, Homo sapiens
ctgtcatggggaccc

SEQ ID NO: 167984 - DNA, 15 bp, Homo sapiens
gctgtcatggggacc

SEQ ID NO: 167985 - DNA, 15 bp, Homo sapiens
agctgtcatggggac

SEQ ID NO: 167986 - DNA, 15 bp, Homo sapiens
cagctgtcatgggga

SEQ ID NO: 167987 - DNA, 15 bp, Homo sapiens
ccagctgtcatgggg

SEQ ID NO: 167988 - DNA, 15 bp, Homo sapiens
cccagctgtcatggg

SEQ ID NO: 167989 - DNA, 15 bp, Homo sapiens
gcccagctgtcatgg

SEQ ID NO: 167990 - DNA, 15 bp, Homo sapiens
agcccagctgtcatg

SEQ ID NO: 167991 - DNA, 15 bp, Homo sapiens
tagcccagctgtcat

SEQ ID NO: 167992 - DNA, 15 bp, Homo sapiens
gtagcccagctgtca

SEQ ID NO: 167993 - DNA, 15 bp, Homo sapiens
tgtagcccagctgtc

SEQ ID NO: 167994 - DNA, 15 bp, Homo sapiens
ttgtagcccagctgt

SEQ ID NO: 167995 - DNA, 15 bp, Homo sapiens
attgtagcccagctg

SEQ ID NO: 167996 - DNA, 15 bp, Homo sapiens
cattgtagcccagct

SEQ ID NO: 167997 - DNA, 15 bp, Homo sapiens
ccattgtagcccagc

SEQ ID NO: 167998 - DNA, 15 bp, Homo sapiens
tccattgtagcccag

SEQ ID NO: 167999 - DNA, 15 bp, Homo sapiens
ctccattgtagccca

SEQ ID NO: 168000 - DNA, 15 bp, Homo sapiens
tctccattgtagccc

SEQ ID NO: 168001 - DNA, 15 bp, Homo sapiens
ttctccattgtagcc

SEQ ID NO: 168002 - DNA, 15 bp, Homo sapiens
cttctccattgtagc

SEQ ID NO: 168003 - DNA, 15 bp, Homo sapiens
gcttctccattgtag

SEQ ID NO: 168004 - DNA, 15 bp, Homo sapiens
ggcttctccattgta

SEQ ID NO: 168005 - DNA, 15 bp, Homo sapiens
tggcttctccattgt

SEQ ID NO: 168006 - DNA, 15 bp, Homo sapiens
gtggcttctccattg

SEQ ID NO: 168007 - DNA, 15 bp, Homo sapiens
ggtggcttctccatt

SEQ ID NO: 168008 - DNA, 15 bp, Homo sapiens
gggtggcttctccat

SEQ ID NO: 168009 - DNA, 15 bp, Homo sapiens
tgggtggcttctcca

SEQ ID NO: 168010 - DNA, 15 bp, Homo sapiens
ctgggtggcttctcc

SEQ ID NO: 168011 - DNA, 15 bp, Homo sapiens
gctgggtggcttctc

SEQ ID NO: 168012 - DNA, 15 bp, Homo sapiens
tgctgggtggcttct

SEQ ID NO: 168013 - DNA, 15 bp, Homo sapiens
ctgctgggtggcttc

SEQ ID NO: 168014 - DNA, 15 bp, Homo sapiens
cctgctgggtggctt

SEQ ID NO: 168015 - DNA, 15 bp, Homo sapiens
ccctgctgggtggct

SEQ ID NO: 168016 - DNA, 15 bp, Homo sapiens
gccctgctgggtggc

SEQ ID NO: 168017 - DNA, 15 bp, Homo sapiens
agccctgctgggtgg

SEQ ID NO: 168018 - DNA, 15 bp, Homo sapiens
cagccctgctgggtg

SEQ ID NO: 168019 - DNA, 15 bp, Homo sapiens
acagccctgctgggt

SEQ ID NO: 168020 - DNA, 15 bp, Homo sapiens
cacagccctgctggg

SEQ ID NO: 168021 - DNA, 15 bp, Homo sapiens
ccacagccctgctgg

SEQ ID NO: 168022 - DNA, 15 bp, Homo sapiens
gccacagccctgctg

SEQ ID NO: 168023 - DNA, 15 bp, Homo sapiens
ggccacagccctgct

SEQ ID NO: 168024 - DNA, 15 bp, Homo sapiens
tggccacagccctgc

SEQ ID NO: 168025 - DNA, 15 bp, Homo sapiens
gtggccacagccctg

SEQ ID NO: 168026 - DNA, 15 bp, Homo sapiens
tgtggccacagccct

SEQ ID NO: 168027 - DNA, 15 bp, Homo sapiens
ctgtggccacagccc

SEQ ID NO: 168028 - DNA, 15 bp, Homo sapiens
tctgtggccacagcc

SEQ ID NO: 168029 - DNA, 15 bp, Homo sapiens
ctctgtggccacagc

SEQ ID NO: 168030 - DNA, 15 bp, Homo sapiens
cctctgtggccacag

SEQ ID NO: 168031 - DNA, 15 bp, Homo sapiens
ccctctgtggccaca

SEQ ID NO: 168032 - DNA, 15 bp, Homo sapiens
cccctctgtggccac

SEQ ID NO: 168033 - DNA, 15 bp, Homo sapiens
tcccctctgtggcca

SEQ ID NO: 168034 - DNA, 15 bp, Homo sapiens
gtcccctctgtggcc

SEQ ID NO: 168035 - DNA, 15 bp, Homo sapiens
tgtcccctctgtggc

SEQ ID NO: 168036 - DNA, 15 bp, Homo sapiens
ttgtcccctctgtgg

SEQ ID NO: 168037 - DNA, 15 bp, Homo sapiens
tttgtcccctctgtg

SEQ ID NO: 168038 - DNA, 15 bp, Homo sapiens
ctttgtcccctctgt

SEQ ID NO: 168039 - DNA, 15 bp, Homo sapiens
actttgtcccctctg

SEQ ID NO: 168040 - DNA, 15 bp, Homo sapiens
gactttgtcccctct

SEQ ID NO: 168041 - DNA, 15 bp, Homo sapiens
tgactttgtcccctc

SEQ ID NO: 168042 - DNA, 15 bp, Homo sapiens
gtgactttgtcccct

SEQ ID NO: 168043 - DNA, 15 bp, Homo sapiens
tgtgactttgtcccc

SEQ ID NO: 168044 - DNA, 15 bp, Homo sapiens
ctgtgactttgtccc

SEQ ID NO: 168045 - DNA, 15 bp, Homo sapiens
cctgtgactttgtcc

SEQ ID NO: 168046 - DNA, 15 bp, Homo sapiens
gcctgtgactttgtc

SEQ ID NO: 168047 - DNA, 15 bp, Homo sapiens
tgcctgtgactttgt

SEQ ID NO: 168048 - DNA, 15 bp, Homo sapiens
ctgcctgtgactttg

SEQ ID NO: 168049 - DNA, 15 bp, Homo sapiens
tctgcctgtgacttt

SEQ ID NO: 168050 - DNA, 15 bp, Homo sapiens
gtctgcctgtgactt

SEQ ID NO: 168051 - DNA, 15 bp, Homo sapiens
agtctgcctgtgact

SEQ ID NO: 168052 - DNA, 15 bp, Homo sapiens
aagtctgcctgtgac

SEQ ID NO: 168053 - DNA, 15 bp, Homo sapiens
gaagtctgcctgtga

SEQ ID NO: 168054 - DNA, 15 bp, Homo sapiens
tgaagtctgcctgtg

SEQ ID NO: 168055 - DNA, 15 bp, Homo sapiens
ttgaagtctgcctgt

SEQ ID NO: 168056 - DNA, 15 bp, Homo sapiens
tttgaagtctgcctg

SEQ ID NO: 168057 - DNA, 15 bp, Homo sapiens
atttgaagtctgcct

SEQ ID NO: 168058 - DNA, 15 bp, Homo sapiens
gatttgaagtctgcc

SEQ ID NO: 168059 - DNA, 15 bp, Homo sapiens
tgatttgaagtctgc

SEQ ID NO: 168060 - DNA, 15 bp, Homo sapiens
ttgatttgaagtctg

SEQ ID NO: 168061 - DNA, 15 bp, Homo sapiens
cttgatttgaagtct

SEQ ID NO: 168062 - DNA, 15 bp, Homo sapiens
ccttgatttgaagtc

SEQ ID NO: 168063 - DNA, 15 bp, Homo sapiens
gccttgatttgaagt

SEQ ID NO: 168064 - DNA, 15 bp, Homo sapiens
tgccttgatttgaag

SEQ ID NO: 168065 - DNA, 15 bp, Homo sapiens
ctgccttgatttgaa

SEQ ID NO: 168066 - DNA, 15 bp, Homo sapiens
cctgccttgatttga

SEQ ID NO: 168067 - DNA, 15 bp, Homo sapiens
ccctgccttgatttg

SEQ ID NO: 168068 - DNA, 15 bp, Homo sapiens
tccctgccttgattt

SEQ ID NO: 168069 - DNA, 15 bp, Homo sapiens
ctccctgccttgatt

SEQ ID NO: 168070 - DNA, 15 bp, Homo sapiens
cctccctgccttgat

SEQ ID NO: 168071 - DNA, 15 bp, Homo sapiens
ccctccctgccttga

SEQ ID NO: 168072 - DNA, 15 bp, Homo sapiens
tccctccctgccttg

SEQ ID NO: 168073 - DNA, 15 bp, Homo sapiens
ctccctccctgcctt

SEQ ID NO: 168074 - DNA, 15 bp, Homo sapiens
gctccctccctgcct

SEQ ID NO: 168075 - DNA, 15 bp, Homo sapiens
tgctccctccctgcc

SEQ ID NO: 168076 - DNA, 15 bp, Homo sapiens
ctgctccctccctgc

SEQ ID NO: 168077 - DNA, 15 bp, Homo sapiens
cctgctccctccctg

SEQ ID NO: 168078 - DNA, 15 bp, Homo sapiens
ccctgctccctccct

SEQ ID NO: 168079 - DNA, 15 bp, Homo sapiens
cccctgctccctccc

SEQ ID NO: 168080 - DNA, 15 bp, Homo sapiens
tcccctgctccctcc

SEQ ID NO: 168081 - DNA, 15 bp, Homo sapiens
ctcccctgctccctc

SEQ ID NO: 168082 - DNA, 15 bp, Homo sapiens
tctcccctgctccct

SEQ ID NO: 168083 - DNA, 15 bp, Homo sapiens
ttctcccctgctccc

SEQ ID NO: 168084 - DNA, 15 bp, Homo sapiens
gttctcccctgctcc

SEQ ID NO: 168085 - DNA, 15 bp, Homo sapiens
tgttctcccctgctc

SEQ ID NO: 168086 - DNA, 15 bp, Homo sapiens
gtgttctcccctgct

SEQ ID NO: 168087 - DNA, 15 bp, Homo sapiens
ggtgttctcccctgc

SEQ ID NO: 168088 - DNA, 15 bp, Homo sapiens
gggtgttctcccctg

SEQ ID NO: 168089 - DNA, 15 bp, Homo sapiens
tgggtgttctcccct

SEQ ID NO: 168090 - DNA, 15 bp, Homo sapiens
ctgggtgttctcccc

SEQ ID NO: 168091 - DNA, 15 bp, Homo sapiens
gctgggtgttctccc

SEQ ID NO: 168092 - DNA, 15 bp, Homo sapiens
ggctgggtgttctcc

SEQ ID NO: 168093 - DNA, 15 bp, Homo sapiens
aggctgggtgttctc

SEQ ID NO: 168094 - DNA, 15 bp, Homo sapiens
gaggctgggtgttct

SEQ ID NO: 168095 - DNA, 15 bp, Homo sapiens
agaggctgggtgttc

SEQ ID NO: 168096 - DNA, 15 bp, Homo sapiens
gagaggctgggtgtt

SEQ ID NO: 168097 - DNA, 15 bp, Homo sapiens
agagaggctgggtgt

SEQ ID NO: 168098 - DNA, 15 bp, Homo sapiens
gagagaggctgggtg

SEQ ID NO: 168099 - DNA, 15 bp, Homo sapiens
agagagaggctgggt

SEQ ID NO: 168100 - DNA, 15 bp, Homo sapiens
gagagagaggctggg

SEQ ID NO: 168101 - DNA, 15 bp, Homo sapiens
ggagagagaggctgg

SEQ ID NO: 168102 - DNA, 15 bp, Homo sapiens
gggagagagaggctg

SEQ ID NO: 168103 - DNA, 15 bp, Homo sapiens
agggagagagaggct

SEQ ID NO: 168104 - DNA, 15 bp, Homo sapiens
agagggagagagagg

SEQ ID NO: 168105 - DNA, 15 bp, Homo sapiens
cagagggagagagag

SEQ ID NO: 168106 - DNA, 15 bp, Homo sapiens
gcagagggagagaga

SEQ ID NO: 168107 - DNA, 15 bp, Homo sapiens
ggcagagggagagag

SEQ ID NO: 168108 - DNA, 15 bp, Homo sapiens
gggcagagggagaga

SEQ ID NO: 168109 - DNA, 15 bp, Homo sapiens
agggcagagggagag

SEQ ID NO: 168110 - DNA, 15 bp, Homo sapiens
aagggcagagggaga

SEQ ID NO: 168111 - DNA, 15 bp, Homo sapiens
gaagggcagagggag

SEQ ID NO: 168112 - DNA, 15 bp, Homo sapiens
ggaagggcagaggga

SEQ ID NO: 168113 - DNA, 15 bp, Homo sapiens
tggaagggcagaggg

SEQ ID NO: 168114 - DNA, 15 bp, Homo sapiens
atggaagggcagagg

SEQ ID NO: 168115 - DNA, 15 bp, Homo sapiens
gatggaagggcagag

SEQ ID NO: 168116 - DNA, 15 bp, Homo sapiens
agatggaagggcaga

SEQ ID NO: 168117 - DNA, 15 bp, Homo sapiens
aagatggaagggcag

SEQ ID NO: 168118 - DNA, 15 bp, Homo sapiens
gaagatggaagggca

SEQ ID NO: 168119 - DNA, 15 bp, Homo sapiens
agaagatggaagggc

SEQ ID NO: 168120 - DNA, 15 bp, Homo sapiens
cagaagatggaaggg

SEQ ID NO: 168121 - DNA, 15 bp, Homo sapiens
gcagaagatggaagg

SEQ ID NO: 168122 - DNA, 15 bp, Homo sapiens
ggcagaagatggaag

SEQ ID NO: 168123 - DNA, 15 bp, Homo sapiens
tggcagaagatggaa

SEQ ID NO: 168124 - DNA, 15 bp, Homo sapiens
ttggcagaagatgga

SEQ ID NO: 168125 - DNA, 15 bp, Homo sapiens
attggcagaagatgg

SEQ ID NO: 168126 - DNA, 15 bp, Homo sapiens
cattggcagaagatg

SEQ ID NO: 168127 - DNA, 15 bp, Homo sapiens
gcattggcagaagat

SEQ ID NO: 168128 - DNA, 15 bp, Homo sapiens
ggcattggcagaaga

SEQ ID NO: 168129 - DNA, 15 bp, Homo sapiens
aggcattggcagaag

SEQ ID NO: 168130 - DNA, 15 bp, Homo sapiens
gaggcattggcagaa

SEQ ID NO: 168131 - DNA, 15 bp, Homo sapiens
ggaggcattggcaga

SEQ ID NO: 168132 - DNA, 15 bp, Homo sapiens
gggaggcattggcag

SEQ ID NO: 168133 - DNA, 15 bp, Homo sapiens
tgggaggcattggca

SEQ ID NO: 168134 - DNA, 15 bp, Homo sapiens
gtgggaggcattggc

SEQ ID NO: 168135 - DNA, 15 bp, Homo sapiens
agtgggaggcattgg

SEQ ID NO: 168136 - DNA, 15 bp, Homo sapiens
cagtgggaggcattg

SEQ ID NO: 168137 - DNA, 15 bp, Homo sapiens
ccagtgggaggcatt

SEQ ID NO: 168138 - DNA, 15 bp, Homo sapiens
gccagtgggaggcat

SEQ ID NO: 168139 - DNA, 15 bp, Homo sapiens
ggccagtgggaggca

SEQ ID NO: 168140 - DNA, 15 bp, Homo sapiens
gggccagtgggaggc

SEQ ID NO: 168141 - DNA, 15 bp, Homo sapiens
tgggccagtgggagg

SEQ ID NO: 168142 - DNA, 15 bp, Homo sapiens
ttgggccagtgggag

SEQ ID NO: 168143 - DNA, 15 bp, Homo sapiens
gttgggccagtggga

SEQ ID NO: 168144 - DNA, 15 bp, Homo sapiens
ggttgggccagtggg

SEQ ID NO: 168145 - DNA, 15 bp, Homo sapiens
gggttgggccagtgg

SEQ ID NO: 168146 - DNA, 15 bp, Homo sapiens
tgggttgggccagtg

SEQ ID NO: 168147 - DNA, 15 bp, Homo sapiens
ttgggttgggccagt

SEQ ID NO: 168148 - DNA, 15 bp, Homo sapiens
gttgggttgggccag

SEQ ID NO: 168149 - DNA, 15 bp, Homo sapiens
tgttgggttgggcca

SEQ ID NO: 168150 - DNA, 15 bp, Homo sapiens
ctgttgggttgggcc

SEQ ID NO: 168151 - DNA, 15 bp, Homo sapiens
tctgttgggttgggc

SEQ ID NO: 168152 - DNA, 15 bp, Homo sapiens
ctctgttgggttggg

SEQ ID NO: 168153 - DNA, 15 bp, Homo sapiens
cctctgttgggttgg

SEQ ID NO: 168154 - DNA, 15 bp, Homo sapiens
gcctctgttgggttg

SEQ ID NO: 168155 - DNA, 15 bp, Homo sapiens
ggcctctgttgggtt

SEQ ID NO: 168156 - DNA, 15 bp, Homo sapiens
tggcctctgttgggt

SEQ ID NO: 168157 - DNA, 15 bp, Homo sapiens
ctggcctctgttggg

SEQ ID NO: 168158 - DNA, 15 bp, Homo sapiens
cctggcctctgttgg

SEQ ID NO: 168159 - DNA, 15 bp, Homo sapiens
ccctggcctctgttg

SEQ ID NO: 168160 - DNA, 15 bp, Homo sapiens
tccctggcctctgtt

SEQ ID NO: 168161 - DNA, 15 bp, Homo sapiens
ttccctggcctctgt

SEQ ID NO: 168162 - DNA, 15 bp, Homo sapiens
cttccctggcctctg

SEQ ID NO: 168163 - DNA, 15 bp, Homo sapiens
gcttccctggcctct

SEQ ID NO: 168164 - DNA, 15 bp, Homo sapiens
ggcttccctggcctc

SEQ ID NO: 168165 - DNA, 15 bp, Homo sapiens
cggcttccctggcct

SEQ ID NO: 168166 - DNA, 15 bp, Homo sapiens
tcggcttccctggcc

SEQ ID NO: 168167 - DNA, 15 bp, Homo sapiens
ctcggcttccctggc

SEQ ID NO: 168168 - DNA, 15 bp, Homo sapiens
cctcggcttccctgg

SEQ ID NO: 168169 - DNA, 15 bp, Homo sapiens
ccctcggcttccctg

SEQ ID NO: 168170 - DNA, 15 bp, Homo sapiens
cccctcggcttccct

SEQ ID NO: 168171 - DNA, 15 bp, Homo sapiens
acccctcggcttccc

SEQ ID NO: 168172 - DNA, 15 bp, Homo sapiens
cacccctcggcttcc

SEQ ID NO: 168173 - DNA, 15 bp, Homo sapiens
gcacccctcggcttc

SEQ ID NO: 168174 - DNA, 15 bp, Homo sapiens
agcacccctcggctt

SEQ ID NO: 168175 - DNA, 15 bp, Homo sapiens
cagcacccctcggct

SEQ ID NO: 168176 - DNA, 15 bp, Homo sapiens
acagcacccctcggc

SEQ ID NO: 168177 - DNA, 15 bp, Homo sapiens
gacagcacccctcgg

SEQ ID NO: 168178 - DNA, 15 bp, Homo sapiens
ggacagcacccctcg

SEQ ID NO: 168179 - DNA, 15 bp, Homo sapiens
gggacagcacccctc

SEQ ID NO: 168180 - DNA, 15 bp, Homo sapiens
tgggacagcacccct

SEQ ID NO: 168181 - DNA, 15 bp, Homo sapiens
atgggacagcacccc

SEQ ID NO: 168182 - DNA, 15 bp, Homo sapiens
catgggacagcaccc

SEQ ID NO: 168183 - DNA, 15 bp, Homo sapiens
ccatgggacagcacc

SEQ ID NO: 168184 - DNA, 15 bp, Homo sapiens
gccatgggacagcac

SEQ ID NO: 168185 - DNA, 15 bp, Homo sapiens
agccatgggacagca

SEQ ID NO: 168186 - DNA, 15 bp, Homo sapiens
gagccatgggacagc

SEQ ID NO: 168187 - DNA, 15 bp, Homo sapiens
tgagccatgggacag

SEQ ID NO: 168188 - DNA, 15 bp, Homo sapiens
ctgagccatgggaca

SEQ ID NO: 168189 - DNA, 15 bp, Homo sapiens
cctgagccatgggac

SEQ ID NO: 168190 - DNA, 15 bp, Homo sapiens
gcctgagccatggga

SEQ ID NO: 168191 - DNA, 15 bp, Homo sapiens
agcctgagccatggg

SEQ ID NO: 168192 - DNA, 15 bp, Homo sapiens
aagcctgagccatgg

SEQ ID NO: 168193 - DNA, 15 bp, Homo sapiens
gaagcctgagccatg

SEQ ID NO: 168194 - DNA, 15 bp, Homo sapiens
agaagcctgagccat

SEQ ID NO: 168195 - DNA, 15 bp, Homo sapiens
tagaagcctgagcca

SEQ ID NO: 168196 - DNA, 15 bp, Homo sapiens
ctagaagcctgagcc

SEQ ID NO: 168197 - DNA, 15 bp, Homo sapiens
tctagaagcctgagc

SEQ ID NO: 168198 - DNA, 15 bp, Homo sapiens
ctctagaagcctgag

SEQ ID NO: 168199 - DNA, 15 bp, Homo sapiens
actctagaagcctga

SEQ ID NO: 168200 - DNA, 15 bp, Homo sapiens
aactctagaagcctg

SEQ ID NO: 168201 - DNA, 15 bp, Homo sapiens
gaactctagaagcct

SEQ ID NO: 168202 - DNA, 15 bp, Homo sapiens
tgaactctagaagcc

SEQ ID NO: 168203 - DNA, 15 bp, Homo sapiens
ctgaactctagaagc

SEQ ID NO: 168204 - DNA, 15 bp, Homo sapiens
tctgaactctagaag

SEQ ID NO: 168205 - DNA, 15 bp, Homo sapiens
ttctgaactctagaa

SEQ ID NO: 168206 - DNA, 15 bp, Homo sapiens
attctgaactctaga

SEQ ID NO: 168207 - DNA, 15 bp, Homo sapiens
cattctgaactctag

SEQ ID NO: 168208 - DNA, 15 bp, Homo sapiens
ccattctgaactcta

SEQ ID NO: 168209 - DNA, 15 bp, Homo sapiens
tccattctgaactct

SEQ ID NO: 168210 - DNA, 15 bp, Homo sapiens
ctccattctgaactc

SEQ ID NO: 168211 - DNA, 15 bp, Homo sapiens
gctccattctgaact

SEQ ID NO: 168212 - DNA, 15 bp, Homo sapiens
tgctccattctgaac

SEQ ID NO: 168213 - DNA, 15 bp, Homo sapiens
ctgctccattctgaa

SEQ ID NO: 168214 - DNA, 15 bp, Homo sapiens
tctgctccattctga

SEQ ID NO: 168215 - DNA, 15 bp, Homo sapiens
ctctgctccattctg

SEQ ID NO: 168216 - DNA, 15 bp, Homo sapiens
cctctgctccattct

SEQ ID NO: 168217 - DNA, 15 bp, Homo sapiens
tcctctgctccattc

SEQ ID NO: 168218 - DNA, 15 bp, Homo sapiens
ctcctctgctccatt

SEQ ID NO: 168219 - DNA, 15 bp, Homo sapiens
actcctctgctccat

SEQ ID NO: 168220 - DNA, 15 bp, Homo sapiens
cactcctctgctcca

SEQ ID NO: 168221 - DNA, 15 bp, Homo sapiens
ccactcctctgctcc

SEQ ID NO: 168222 - DNA, 15 bp, Homo sapiens
accactcctctgctc

SEQ ID NO: 168223 - DNA, 15 bp, Homo sapiens
caccactcctctgct

SEQ ID NO: 168224 - DNA, 15 bp, Homo sapiens
tcaccactcctctgc

SEQ ID NO: 168225 - DNA, 15 bp, Homo sapiens
atcaccactcctctg

SEQ ID NO: 168226 - DNA, 15 bp, Homo sapiens
gatcaccactcctct

SEQ ID NO: 168227 - DNA, 15 bp, Homo sapiens
agatcaccactcctc

SEQ ID NO: 168228 - DNA, 15 bp, Homo sapiens
cagatcaccactcct

SEQ ID NO: 168229 - DNA, 15 bp, Homo sapiens
tcagatcaccactcc

SEQ ID NO: 168230 - DNA, 15 bp, Homo sapiens
ctcagatcaccactc

SEQ ID NO: 168231 - DNA, 15 bp, Homo sapiens
tctcagatcaccact

SEQ ID NO: 168232 - DNA, 15 bp, Homo sapiens
ttctcagatcaccac

SEQ ID NO: 168233 - DNA, 15 bp, Homo sapiens
tttctcagatcacca

SEQ ID NO: 168234 - DNA, 15 bp, Homo sapiens
gtttctcagatcacc

SEQ ID NO: 168235 - DNA, 15 bp, Homo sapiens
tgtttctcagatcac

SEQ ID NO: 168236 - DNA, 15 bp, Homo sapiens
ctgtttctcagatca

SEQ ID NO: 168237 - DNA, 15 bp, Homo sapiens
gctgtttctcagatc

SEQ ID NO: 168238 - DNA, 15 bp, Homo sapiens
tgctgtttctcagat

SEQ ID NO: 168239 - DNA, 15 bp, Homo sapiens
ttgctgtttctcaga

SEQ ID NO: 168240 - DNA, 15 bp, Homo sapiens
tttgctgtttctcag

SEQ ID NO: 168241 - DNA, 15 bp, Homo sapiens
ttttgctgtttctca

SEQ ID NO: 168242 - DNA, 15 bp, Homo sapiens
cttttgctgtttctc

SEQ ID NO: 168243 - DNA, 15 bp, Homo sapiens
acttttgctgtttct

SEQ ID NO: 168244 - DNA, 15 bp, Homo sapiens
gacttttgctgtttc

SEQ ID NO: 168245 - DNA, 15 bp, Homo sapiens
tgacttttgctgttt

SEQ ID NO: 168246 - DNA, 15 bp, Homo sapiens
ttgacttttgctgtt

SEQ ID NO: 168247 - DNA, 15 bp, Homo sapiens
tttgacttttgctgt

SEQ ID NO: 168248 - DNA, 15 bp, Homo sapiens
ttttgacttttgctg

SEQ ID NO: 168249 - DNA, 15 bp, Homo sapiens
gttttgacttttgct

SEQ ID NO: 168250 - DNA, 15 bp, Homo sapiens
tgttttgacttttgc

SEQ ID NO: 168251 - DNA, 15 bp, Homo sapiens
ttgttttgacttttg

SEQ ID NO: 168252 - DNA, 15 bp, Homo sapiens
attgttttgactttt

SEQ ID NO: 168253 - DNA, 15 bp, Homo sapiens
gattgttttgacttt

SEQ ID NO: 168254 - DNA, 15 bp, Homo sapiens
tgattgttttgactt

SEQ ID NO: 168255 - DNA, 15 bp, Homo sapiens
gtgattgttttgact

SEQ ID NO: 168256 - DNA, 15 bp, Homo sapiens
ggtgattgttttgac

SEQ ID NO: 168257 - DNA, 15 bp, Homo sapiens
tggtgattgttttga

SEQ ID NO: 168258 - DNA, 15 bp, Homo sapiens
ctggtgattgttttg

SEQ ID NO: 168259 - DNA, 15 bp, Homo sapiens
tctggtgattgtttt

SEQ ID NO: 168260 - DNA, 15 bp, Homo sapiens
gtctggtgattgttt

SEQ ID NO: 168261 - DNA, 15 bp, Homo sapiens
ggtctggtgattgtt

SEQ ID NO: 168262 - DNA, 15 bp, Homo sapiens
gggtctggtgattgt

SEQ ID NO: 168263 - DNA, 15 bp, Homo sapiens
ggggtctggtgattg

SEQ ID NO: 168264 - DNA, 15 bp, Homo sapiens
aggggtctggtgatt

SEQ ID NO: 168265 - DNA, 15 bp, Homo sapiens
caggggtctggtgat

SEQ ID NO: 168266 - DNA, 15 bp, Homo sapiens
tcaggggtctggtga

SEQ ID NO: 168267 - DNA, 15 bp, Homo sapiens
ctcaggggtctggtg

SEQ ID NO: 168268 - DNA, 15 bp, Homo sapiens
gctcaggggtctggt

SEQ ID NO: 168269 - DNA, 15 bp, Homo sapiens
agctcaggggtctgg

SEQ ID NO: 168270 - DNA, 15 bp, Homo sapiens
cagctcaggggtctg

SEQ ID NO: 168271 - DNA, 15 bp, Homo sapiens
ccagctcaggggtct

SEQ ID NO: 168272 - DNA, 15 bp, Homo sapiens
cccagctcaggggtc

SEQ ID NO: 168273 - DNA, 15 bp, Homo sapiens
acccagctcaggggt

SEQ ID NO: 168274 - DNA, 15 bp, Homo sapiens
aacccagctcagggg

SEQ ID NO: 168275 - DNA, 15 bp, Homo sapiens
caacccagctcaggg

SEQ ID NO: 168276 - DNA, 15 bp, Homo sapiens
acaacccagctcagg

SEQ ID NO: 168277 - DNA, 15 bp, Homo sapiens
cacaacccagctcag

SEQ ID NO: 168278 - DNA, 15 bp, Homo sapiens
acacaacccagctca

SEQ ID NO: 168279 - DNA, 15 bp, Homo sapiens
aacacaacccagctc

SEQ ID NO: 168280 - DNA, 15 bp, Homo sapiens
taacacaacccagct

SEQ ID NO: 168281 - DNA, 15 bp, Homo sapiens
ctaacacaacccagc

SEQ ID NO: 168282 - DNA, 15 bp, Homo sapiens
cctaacacaacccag

SEQ ID NO: 168283 - DNA, 15 bp, Homo sapiens
tcctaacacaaccca

SEQ ID NO: 168284 - DNA, 15 bp, Homo sapiens
ctcctaacacaaccc

SEQ ID NO: 168285 - DNA, 15 bp, Homo sapiens
gctcctaacacaacc

SEQ ID NO: 168286 - DNA, 15 bp, Homo sapiens
agctcctaacacaac

SEQ ID NO: 168287 - DNA, 15 bp, Homo sapiens
tagctcctaacacaa

SEQ ID NO: 168288 - DNA, 15 bp, Homo sapiens
ctagctcctaacaca

SEQ ID NO: 168289 - DNA, 15 bp, Homo sapiens
cctagctcctaacac

SEQ ID NO: 168290 - DNA, 15 bp, Homo sapiens
ccctagctcctaaca

SEQ ID NO: 168291 - DNA, 15 bp, Homo sapiens
tccctagctcctaac

SEQ ID NO: 168292 - DNA, 15 bp, Homo sapiens
atccctagctcctaa

SEQ ID NO: 168293 - DNA, 15 bp, Homo sapiens
catccctagctccta

SEQ ID NO: 168294 - DNA, 15 bp, Homo sapiens
gcatccctagctcct

SEQ ID NO: 168295 - DNA, 15 bp, Homo sapiens
ggcatccctagctcc

SEQ ID NO: 168296 - DNA, 15 bp, Homo sapiens
tggcatccctagctc

SEQ ID NO: 168297 - DNA, 15 bp, Homo sapiens
gtggcatccctagct

SEQ ID NO: 168298 - DNA, 15 bp, Homo sapiens
agtggcatccctagc

SEQ ID NO: 168299 - DNA, 15 bp, Homo sapiens
cagtggcatccctag

SEQ ID NO: 168300 - DNA, 15 bp, Homo sapiens
tcagtggcatcccta

SEQ ID NO: 168301 - DNA, 15 bp, Homo sapiens
ctcagtggcatccct

SEQ ID NO: 168302 - DNA, 15 bp, Homo sapiens
tctcagtggcatccc

SEQ ID NO: 168303 - DNA, 15 bp, Homo sapiens
gtctcagtggcatcc

SEQ ID NO: 168304 - DNA, 15 bp, Homo sapiens
ggtctcagtggcatc

SEQ ID NO: 168305 - DNA, 15 bp, Homo sapiens
aggtctcagtggcat

SEQ ID NO: 168306 - DNA, 15 bp, Homo sapiens
aaggtctcagtggca

SEQ ID NO: 168307 - DNA, 15 bp, Homo sapiens
taaggtctcagtggc

SEQ ID NO: 168308 - DNA, 15 bp, Homo sapiens
ctaaggtctcagtgg

SEQ ID NO: 168309 - DNA, 15 bp, Homo sapiens
tctaaggtctcagtg

SEQ ID NO: 168310 - DNA, 15 bp, Homo sapiens
ctctaaggtctcagt

SEQ ID NO: 168311 - DNA, 15 bp, Homo sapiens
cctctaaggtctcag

SEQ ID NO: 168312 - DNA, 15 bp, Homo sapiens
acctctaaggtctca

SEQ ID NO: 168313 - DNA, 15 bp, Homo sapiens
cacctctaaggtctc

SEQ ID NO: 168314 - DNA, 15 bp, Homo sapiens
acacctctaaggtct

SEQ ID NO: 168315 - DNA, 15 bp, Homo sapiens
cacacctctaaggtc

SEQ ID NO: 168316 - DNA, 15 bp, Homo sapiens
acacacctctaaggt

SEQ ID NO: 168317 - DNA, 15 bp, Homo sapiens
cacacacctctaagg

SEQ ID NO: 168318 - DNA, 15 bp, Homo sapiens
tcacacacctctaag

SEQ ID NO: 168319 - DNA, 15 bp, Homo sapiens
ctcacacacctctaa

SEQ ID NO: 168320 - DNA, 15 bp, Homo sapiens
actcacacacctcta

SEQ ID NO: 168321 - DNA, 15 bp, Homo sapiens
cactcacacacctct

SEQ ID NO: 168322 - DNA, 15 bp, Homo sapiens
acactcacacacctc

SEQ ID NO: 168323 - DNA, 15 bp, Homo sapiens
cacactcacacacct

SEQ ID NO: 168324 - DNA, 15 bp, Homo sapiens
acacactcacacacc

SEQ ID NO: 168325 - DNA, 15 bp, Homo sapiens
cacacactcacacac

SEQ ID NO: 168326 - DNA, 15 bp, Homo sapiens
gcacacactcacaca

SEQ ID NO: 168327 - DNA, 15 bp, Homo sapiens
tgcacacactcacac

SEQ ID NO: 168328 - DNA, 15 bp, Homo sapiens
atgcacacactcaca

SEQ ID NO: 168329 - DNA, 15 bp, Homo sapiens
aatgcacacactcac

SEQ ID NO: 168330 - DNA, 15 bp, Homo sapiens
caatgcacacactca

SEQ ID NO: 168331 - DNA, 15 bp, Homo sapiens
ccaatgcacacactc

SEQ ID NO: 168332 - DNA, 15 bp, Homo sapiens
cccaatgcacacact

SEQ ID NO: 168333 - DNA, 15 bp, Homo sapiens
ccccaatgcacacac

SEQ ID NO: 168334 - DNA, 15 bp, Homo sapiens
tccccaatgcacaca

SEQ ID NO: 168335 - DNA, 15 bp, Homo sapiens
ctccccaatgcacac

SEQ ID NO: 168336 - DNA, 15 bp, Homo sapiens
tctccccaatgcaca

SEQ ID NO: 168337 - DNA, 15 bp, Homo sapiens
ttctccccaatgcac

SEQ ID NO: 168338 - DNA, 15 bp, Homo sapiens
cttctccccaatgca

SEQ ID NO: 168339 - DNA, 15 bp, Homo sapiens
ccttctccccaatgc

SEQ ID NO: 168340 - DNA, 15 bp, Homo sapiens
cccttctccccaatg

SEQ ID NO: 168341 - DNA, 15 bp, Homo sapiens
ccccttctccccaat

SEQ ID NO: 168342 - DNA, 15 bp, Homo sapiens
accccttctccccaa

SEQ ID NO: 168343 - DNA, 15 bp, Homo sapiens
taccccttctcccca

SEQ ID NO: 168344 - DNA, 15 bp, Homo sapiens
ttaccccttctcccc

SEQ ID NO: 168345 - DNA, 15 bp, Homo sapiens
gttaccccttctccc

SEQ ID NO: 168346 - DNA, 15 bp, Homo sapiens
ggttaccccttctcc

SEQ ID NO: 168347 - DNA, 15 bp, Homo sapiens
gggttaccccttctc

SEQ ID NO: 168348 - DNA, 15 bp, Homo sapiens
ggggttaccccttct

SEQ ID NO: 168349 - DNA, 15 bp, Homo sapiens
gggggttaccccttc

SEQ ID NO: 168350 - DNA, 15 bp, Homo sapiens
ggggggttacccctt

SEQ ID NO: 168351 - DNA, 15 bp, Homo sapiens
aggggggttacccct

SEQ ID NO: 168352 - DNA, 15 bp, Homo sapiens
gaggggggttacccc

SEQ ID NO: 168353 - DNA, 15 bp, Homo sapiens
ggaggggggttaccc

SEQ ID NO: 168354 - DNA, 15 bp, Homo sapiens
tggaggggggttacc

SEQ ID NO: 168355 - DNA, 15 bp, Homo sapiens
atggaggggggttac

SEQ ID NO: 168356 - DNA, 15 bp, Homo sapiens
catggaggggggtta

SEQ ID NO: 168357 - DNA, 15 bp, Homo sapiens
ccatggaggggggtt

SEQ ID NO: 168358 - DNA, 15 bp, Homo sapiens
tccatggaggggggt

SEQ ID NO: 168359 - DNA, 15 bp, Homo sapiens
ctccatggagggggg

SEQ ID NO: 168360 - DNA, 15 bp, Homo sapiens
gctccatggaggggg

SEQ ID NO: 168361 - DNA, 15 bp, Homo sapiens
agctccatggagggg

SEQ ID NO: 168362 - DNA, 15 bp, Homo sapiens
cagctccatggaggg

SEQ ID NO: 168363 - DNA, 15 bp, Homo sapiens
tcagctccatggagg

SEQ ID NO: 168364 - DNA, 15 bp, Homo sapiens
ttcagctccatggag

SEQ ID NO: 168365 - DNA, 15 bp, Homo sapiens
cttcagctccatgga

SEQ ID NO: 168366 - DNA, 15 bp, Homo sapiens
ccttcagctccatgg

SEQ ID NO: 168367 - DNA, 15 bp, Homo sapiens
accttcagctccatg

SEQ ID NO: 168368 - DNA, 15 bp, Homo sapiens
gaccttcagctccat

SEQ ID NO: 168369 - DNA, 15 bp, Homo sapiens
cgaccttcagctcca

SEQ ID NO: 168370 - DNA, 15 bp, Homo sapiens
ccgaccttcagctcc

SEQ ID NO: 168371 - DNA, 15 bp, Homo sapiens
gccgaccttcagctc

SEQ ID NO: 168372 - DNA, 15 bp, Homo sapiens
agccgaccttcagct

SEQ ID NO: 168373 - DNA, 15 bp, Homo sapiens
gagccgaccttcagc

SEQ ID NO: 168374 - DNA, 15 bp, Homo sapiens
tgagccgaccttcag

SEQ ID NO: 168375 - DNA, 15 bp, Homo sapiens
ctgagccgaccttca

SEQ ID NO: 168376 - DNA, 15 bp, Homo sapiens
gctgagccgaccttc

SEQ ID NO: 168377 - DNA, 15 bp, Homo sapiens
tgctgagccgacctt

SEQ ID NO: 168378 - DNA, 15 bp, Homo sapiens
ctgctgagccgacct

SEQ ID NO: 168379 - DNA, 15 bp, Homo sapiens
gctgctgagccgacc

SEQ ID NO: 168380 - DNA, 15 bp, Homo sapiens
ggctgctgagccgac

SEQ ID NO: 168381 - DNA, 15 bp, Homo sapiens
gggctgctgagccga

SEQ ID NO: 168382 - DNA, 15 bp, Homo sapiens
tgggctgctgagccg

SEQ ID NO: 168383 - DNA, 15 bp, Homo sapiens
ctgggctgctgagcc

SEQ ID NO: 168384 - DNA, 15 bp, Homo sapiens
cctgggctgctgagc

SEQ ID NO: 168385 - DNA, 15 bp, Homo sapiens
gcctgggctgctgag

SEQ ID NO: 168386 - DNA, 15 bp, Homo sapiens
tgcctgggctgctga

SEQ ID NO: 168387 - DNA, 15 bp, Homo sapiens
ctgcctgggctgctg

SEQ ID NO: 168388 - DNA, 15 bp, Homo sapiens
actgcctgggctgct

SEQ ID NO: 168389 - DNA, 15 bp, Homo sapiens
cactgcctgggctgc

SEQ ID NO: 168390 - DNA, 15 bp, Homo sapiens
ccactgcctgggctg

SEQ ID NO: 168391 - DNA, 15 bp, Homo sapiens
accactgcctgggct

SEQ ID NO: 168392 - DNA, 15 bp, Homo sapiens
taccactgcctgggc

SEQ ID NO: 168393 - DNA, 15 bp, Homo sapiens
gtaccactgcctggg

SEQ ID NO: 168394 - DNA, 15 bp, Homo sapiens
agtaccactgcctgg

SEQ ID NO: 168395 - DNA, 15 bp, Homo sapiens
cagtaccactgcctg

SEQ ID NO: 168396 - DNA, 15 bp, Homo sapiens
tcagtaccactgcct

SEQ ID NO: 168397 - DNA, 15 bp, Homo sapiens
ctcagtaccactgcc

SEQ ID NO: 168398 - DNA, 15 bp, Homo sapiens
cctcagtaccactgc

SEQ ID NO: 168399 - DNA, 15 bp, Homo sapiens
ccctcagtaccactg

SEQ ID NO: 168400 - DNA, 15 bp, Homo sapiens
tccctcagtaccact

SEQ ID NO: 168401 - DNA, 15 bp, Homo sapiens
ctccctcagtaccac

SEQ ID NO: 168402 - DNA, 15 bp, Homo sapiens
cctccctcagtacca

SEQ ID NO: 168403 - DNA, 15 bp, Homo sapiens
gcctccctcagtacc

SEQ ID NO: 168404 - DNA, 15 bp, Homo sapiens
ggcctccctcagtac

SEQ ID NO: 168405 - DNA, 15 bp, Homo sapiens
tggcctccctcagta

SEQ ID NO: 168406 - DNA, 15 bp, Homo sapiens
ctggcctccctcagt

SEQ ID NO: 168407 - DNA, 15 bp, Homo sapiens
tctggcctccctcag

SEQ ID NO: 168408 - DNA, 15 bp, Homo sapiens
ctctggcctccctca

SEQ ID NO: 168409 - DNA, 15 bp, Homo sapiens
gctctggcctccctc

SEQ ID NO: 168410 - DNA, 15 bp, Homo sapiens
ggctctggcctccct

SEQ ID NO: 168411 - DNA, 15 bp, Homo sapiens
tggctctggcctccc

SEQ ID NO: 168412 - DNA, 15 bp, Homo sapiens
gtggctctggcctcc

SEQ ID NO: 168413 - DNA, 15 bp, Homo sapiens
ggtggctctggcctc

SEQ ID NO: 168414 - DNA, 15 bp, Homo sapiens
gggtggctctggcct

SEQ ID NO: 168415 - DNA, 15 bp, Homo sapiens
ggggtggctctggcc

SEQ ID NO: 168416 - DNA, 15 bp, Homo sapiens
aggggtggctctggc

SEQ ID NO: 168417 - DNA, 15 bp, Homo sapiens
aaggggtggctctgg

SEQ ID NO: 168418 - DNA, 15 bp, Homo sapiens
gaaggggtggctctg

SEQ ID NO: 168419 - DNA, 15 bp, Homo sapiens
agaaggggtggctct

SEQ ID NO: 168420 - DNA, 15 bp, Homo sapiens
cagaaggggtggctc

SEQ ID NO: 168421 - DNA, 15 bp, Homo sapiens
gcagaaggggtggct

SEQ ID NO: 168422 - DNA, 15 bp, Homo sapiens
ggcagaaggggtggc

SEQ ID NO: 168423 - DNA, 15 bp, Homo sapiens
tggcagaaggggtgg

SEQ ID NO: 168424 - DNA, 15 bp, Homo sapiens
ctggcagaaggggtg

SEQ ID NO: 168425 - DNA, 15 bp, Homo sapiens
cctggcagaaggggt

SEQ ID NO: 168426 - DNA, 15 bp, Homo sapiens
tcctggcagaagggg

SEQ ID NO: 168427 - DNA, 15 bp, Homo sapiens
ctcctggcagaaggg

SEQ ID NO: 168428 - DNA, 15 bp, Homo sapiens
actcctggcagaagg

SEQ ID NO: 168429 - DNA, 15 bp, Homo sapiens
cactcctggcagaag

SEQ ID NO: 168430 - DNA, 15 bp, Homo sapiens
acactcctggcagaa

SEQ ID NO: 168431 - DNA, 15 bp, Homo sapiens
cacactcctggcaga

SEQ ID NO: 168432 - DNA, 15 bp, Homo sapiens
ccacactcctggcag

SEQ ID NO: 168433 - DNA, 15 bp, Homo sapiens
gccacactcctggca

SEQ ID NO: 168434 - DNA, 15 bp, Homo sapiens
cgccacactcctggc

SEQ ID NO: 168435 - DNA, 15 bp, Homo sapiens
ccgccacactcctgg

SEQ ID NO: 168436 - DNA, 15 bp, Homo sapiens
gccgccacactcctg

SEQ ID NO: 168437 - DNA, 15 bp, Homo sapiens
tgccgccacactcct

SEQ ID NO: 168438 - DNA, 15 bp, Homo sapiens
atgccgccacactcc

SEQ ID NO: 168439 - DNA, 15 bp, Homo sapiens
aatgccgccacactc

SEQ ID NO: 168440 - DNA, 15 bp, Homo sapiens
taatgccgccacact

SEQ ID NO: 168441 - DNA, 15 bp, Homo sapiens
ctaatgccgccacac

SEQ ID NO: 168442 - DNA, 15 bp, Homo sapiens
cctaatgccgccaca

SEQ ID NO: 168443 - DNA, 15 bp, Homo sapiens
tcctaatgccgccac

SEQ ID NO: 168444 - DNA, 15 bp, Homo sapiens
ttcctaatgccgcca

SEQ ID NO: 168445 - DNA, 15 bp, Homo sapiens
cttcctaatgccgcc

SEQ ID NO: 168446 - DNA, 15 bp, Homo sapiens
ccttcctaatgccgc

SEQ ID NO: 168447 - DNA, 15 bp, Homo sapiens
gccttcctaatgccg

SEQ ID NO: 168448 - DNA, 15 bp, Homo sapiens
agccttcctaatgcc

SEQ ID NO: 168449 - DNA, 15 bp, Homo sapiens
aagccttcctaatgc

SEQ ID NO: 168450 - DNA, 15 bp, Homo sapiens
gaagccttcctaatg

SEQ ID NO: 168451 - DNA, 15 bp, Homo sapiens
ggaagccttcctaat

SEQ ID NO: 168452 - DNA, 15 bp, Homo sapiens
tggaagccttcctaa

SEQ ID NO: 168453 - DNA, 15 bp, Homo sapiens
ctggaagccttccta

SEQ ID NO: 168454 - DNA, 15 bp, Homo sapiens
cctggaagccttcct

SEQ ID NO: 168455 - DNA, 15 bp, Homo sapiens
ccctggaagccttcc

SEQ ID NO: 168456 - DNA, 15 bp, Homo sapiens
tccctggaagccttc

SEQ ID NO: 168457 - DNA, 15 bp, Homo sapiens
gtccctggaagcctt

SEQ ID NO: 168458 - DNA, 15 bp, Homo sapiens
tgtccctggaagcct

SEQ ID NO: 168459 - DNA, 15 bp, Homo sapiens
ctgtccctggaagcc

SEQ ID NO: 168460 - DNA, 15 bp, Homo sapiens
cctgtccctggaagc

SEQ ID NO: 168461 - DNA, 15 bp, Homo sapiens
acctgtccctggaag

SEQ ID NO: 168462 - DNA, 15 bp, Homo sapiens
cacctgtccctggaa

SEQ ID NO: 168463 - DNA, 15 bp, Homo sapiens
tcacctgtccctgga

SEQ ID NO: 168464 - DNA, 15 bp, Homo sapiens
gtcacctgtccctgg

SEQ ID NO: 168465 - DNA, 15 bp, Homo sapiens
tgtcacctgtccctg

SEQ ID NO: 168466 - DNA, 15 bp, Homo sapiens
gtgtcacctgtccct

SEQ ID NO: 168467 - DNA, 15 bp, Homo sapiens
agtgtcacctgtccc

SEQ ID NO: 168468 - DNA, 15 bp, Homo sapiens
cagtgtcacctgtcc

SEQ ID NO: 168469 - DNA, 15 bp, Homo sapiens
ccagtgtcacctgtc

SEQ ID NO: 168470 - DNA, 15 bp, Homo sapiens
cccagtgtcacctgt

SEQ ID NO: 168471 - DNA, 15 bp, Homo sapiens
ccccagtgtcacctg

SEQ ID NO: 168472 - DNA, 15 bp, Homo sapiens
gccccagtgtcacct

SEQ ID NO: 168473 - DNA, 15 bp, Homo sapiens
ggccccagtgtcacc

SEQ ID NO: 168474 - DNA, 15 bp, Homo sapiens
tggccccagtgtcac

SEQ ID NO: 168475 - DNA, 15 bp, Homo sapiens
ctggccccagtgtca

SEQ ID NO: 168476 - DNA, 15 bp, Homo sapiens
tctggccccagtgtc

SEQ ID NO: 168477 - DNA, 15 bp, Homo sapiens
gtctggccccagtgt

SEQ ID NO: 168478 - DNA, 15 bp, Homo sapiens
cgtctggccccagtg

SEQ ID NO: 168479 - DNA, 15 bp, Homo sapiens
acgtctggccccagt

SEQ ID NO: 168480 - DNA, 15 bp, Homo sapiens
cacgtctggccccag

SEQ ID NO: 168481 - DNA, 15 bp, Homo sapiens
tcacgtctggcccca

SEQ ID NO: 168482 - DNA, 15 bp, Homo sapiens
ttcacgtctggcccc

SEQ ID NO: 168483 - DNA, 15 bp, Homo sapiens
tttcacgtctggccc

SEQ ID NO: 168484 - DNA, 15 bp, Homo sapiens
ctttcacgtctggcc

SEQ ID NO: 168485 - DNA, 15 bp, Homo sapiens
tctttcacgtctggc

SEQ ID NO: 168486 - DNA, 15 bp, Homo sapiens
ttctttcacgtctgg

SEQ ID NO: 168487 - DNA, 15 bp, Homo sapiens
gttctttcacgtctg

SEQ ID NO: 168488 - DNA, 15 bp, Homo sapiens
tgttctttcacgtct

SEQ ID NO: 168489 - DNA, 15 bp, Homo sapiens
ctgttctttcacgtc

SEQ ID NO: 168490 - DNA, 15 bp, Homo sapiens
cctgttctttcacgt

SEQ ID NO: 168491 - DNA, 15 bp, Homo sapiens
gcctgttctttcacg

SEQ ID NO: 168492 - DNA, 15 bp, Homo sapiens
tgcctgttctttcac

SEQ ID NO: 168493 - DNA, 15 bp, Homo sapiens
ctgcctgttctttca

SEQ ID NO: 168494 - DNA, 15 bp, Homo sapiens
tctgcctgttctttc

SEQ ID NO: 168495 - DNA, 15 bp, Homo sapiens
atctgcctgttcttt

SEQ ID NO: 168496 - DNA, 15 bp, Homo sapiens
catctgcctgttctt

SEQ ID NO: 168497 - DNA, 15 bp, Homo sapiens
gcatctgcctgttct

SEQ ID NO: 168498 - DNA, 15 bp, Homo sapiens
tgcatctgcctgttc

SEQ ID NO: 168499 - DNA, 15 bp, Homo sapiens
ctgcatctgcctgtt

SEQ ID NO: 168500 - DNA, 15 bp, Homo sapiens
tctgcatctgcctgt

SEQ ID NO: 168501 - DNA, 15 bp, Homo sapiens
ttctgcatctgcctg

SEQ ID NO: 168502 - DNA, 15 bp, Homo sapiens
cttctgcatctgcct

SEQ ID NO: 168503 - DNA, 15 bp, Homo sapiens
ccttctgcatctgcc

SEQ ID NO: 168504 - DNA, 15 bp, Homo sapiens
cccttctgcatctgc

SEQ ID NO: 168505 - DNA, 15 bp, Homo sapiens
tcccttctgcatctg

SEQ ID NO: 168506 - DNA, 15 bp, Homo sapiens
ttcccttctgcatct

SEQ ID NO: 168507 - DNA, 15 bp, Homo sapiens
tttcccttctgcatc

SEQ ID NO: 168508 - DNA, 15 bp, Homo sapiens
ttttcccttctgcat

SEQ ID NO: 168509 - DNA, 15 bp, Homo sapiens
cttttcccttctgca

SEQ ID NO: 168510 - DNA, 15 bp, Homo sapiens
ccttttcccttctgc

SEQ ID NO: 168511 - DNA, 15 bp, Homo sapiens
tccttttcccttctg

SEQ ID NO: 168512 - DNA, 15 bp, Homo sapiens
ttccttttcccttct

SEQ ID NO: 168513 - DNA, 15 bp, Homo sapiens
cttccttttcccttc

SEQ ID NO: 168514 - DNA, 15 bp, Homo sapiens
gcttccttttccctt

SEQ ID NO: 168515 - DNA, 15 bp, Homo sapiens
agcttccttttccct

SEQ ID NO: 168516 - DNA, 15 bp, Homo sapiens
gagcttccttttccc

SEQ ID NO: 168517 - DNA, 15 bp, Homo sapiens
ggagcttccttttcc

SEQ ID NO: 168518 - DNA, 15 bp, Homo sapiens
aggagcttccttttc

SEQ ID NO: 168519 - DNA, 15 bp, Homo sapiens
gaggagcttcctttt

SEQ ID NO: 168520 - DNA, 15 bp, Homo sapiens
ggaggagcttccttt

SEQ ID NO: 168521 - DNA, 15 bp, Homo sapiens
tggaggagcttcctt

SEQ ID NO: 168522 - DNA, 15 bp, Homo sapiens
ttggaggagcttcct

SEQ ID NO: 168523 - DNA, 15 bp, Homo sapiens
cttggaggagcttcc

SEQ ID NO: 168524 - DNA, 15 bp, Homo sapiens
ccttggaggagcttc

SEQ ID NO: 168525 - DNA, 15 bp, Homo sapiens
tccttggaggagctt

SEQ ID NO: 168526 - DNA, 15 bp, Homo sapiens
ttccttggaggagct

SEQ ID NO: 168527 - DNA, 15 bp, Homo sapiens
attccttggaggagc

SEQ ID NO: 168528 - DNA, 15 bp, Homo sapiens
cattccttggaggag

SEQ ID NO: 168529 - DNA, 15 bp, Homo sapiens
tcattccttggagga

SEQ ID NO: 168530 - DNA, 15 bp, Homo sapiens
ctcattccttggagg

SEQ ID NO: 168531 - DNA, 15 bp, Homo sapiens
cctcattccttggag

SEQ ID NO: 168532 - DNA, 15 bp, Homo sapiens
ccctcattccttgga

SEQ ID NO: 168533 - DNA, 15 bp, Homo sapiens
accctcattccttgg

SEQ ID NO: 168534 - DNA, 15 bp, Homo sapiens
aaccctcattccttg

SEQ ID NO: 168535 - DNA, 15 bp, Homo sapiens
gaaccctcattcctt

SEQ ID NO: 168536 - DNA, 15 bp, Homo sapiens
ggaaccctcattcct

SEQ ID NO: 168537 - DNA, 15 bp, Homo sapiens
tggaaccctcattcc

SEQ ID NO: 168538 - DNA, 15 bp, Homo sapiens
ctggaaccctcattc

SEQ ID NO: 168539 - DNA, 15 bp, Homo sapiens
cctggaaccctcatt

SEQ ID NO: 168540 - DNA, 15 bp, Homo sapiens
gcctggaaccctcat

SEQ ID NO: 168541 - DNA, 15 bp, Homo sapiens
tgcctggaaccctca

SEQ ID NO: 168542 - DNA, 15 bp, Homo sapiens
ctgcctggaaccctc

SEQ ID NO: 168543 - DNA, 15 bp, Homo sapiens
gctgcctggaaccct

SEQ ID NO: 168544 - DNA, 15 bp, Homo sapiens
tgctgcctggaaccc

SEQ ID NO: 168545 - DNA, 15 bp, Homo sapiens
gtgctgcctggaacc

SEQ ID NO: 168546 - DNA, 15 bp, Homo sapiens
ggtgctgcctggaac

SEQ ID NO: 168547 - DNA, 15 bp, Homo sapiens
gggtgctgcctggaa

SEQ ID NO: 168548 - DNA, 15 bp, Homo sapiens
agggtgctgcctgga

SEQ ID NO: 168549 - DNA, 15 bp, Homo sapiens
cagggtgctgcctgg

SEQ ID NO: 168550 - DNA, 15 bp, Homo sapiens
ccagggtgctgcctg

SEQ ID NO: 168551 - DNA, 15 bp, Homo sapiens
tccagggtgctgcct

SEQ ID NO: 168552 - DNA, 15 bp, Homo sapiens
gtccagggtgctgcc

SEQ ID NO: 168553 - DNA, 15 bp, Homo sapiens
tgtccagggtgctgc

SEQ ID NO: 168554 - DNA, 15 bp, Homo sapiens
atgtccagggtgctg

SEQ ID NO: 168555 - DNA, 15 bp, Homo sapiens
catgtccagggtgct

SEQ ID NO: 168556 - DNA, 15 bp, Homo sapiens
ccatgtccagggtgc

SEQ ID NO: 168557 - DNA, 15 bp, Homo sapiens
cccatgtccagggtg

SEQ ID NO: 168558 - DNA, 15 bp, Homo sapiens
ccccatgtccagggt

SEQ ID NO: 168559 - DNA, 15 bp, Homo sapiens
gccccatgtccaggg

SEQ ID NO: 168560 - DNA, 15 bp, Homo sapiens
ggccccatgtccagg

SEQ ID NO: 168561 - DNA, 15 bp, Homo sapiens
tggccccatgtccag

SEQ ID NO: 168562 - DNA, 15 bp, Homo sapiens
ctggccccatgtcca

SEQ ID NO: 168563 - DNA, 15 bp, Homo sapiens
cctggccccatgtcc

SEQ ID NO: 168564 - DNA, 15 bp, Homo sapiens
gcctggccccatgtc

SEQ ID NO: 168565 - DNA, 15 bp, Homo sapiens
ggcctggccccatgt

SEQ ID NO: 168566 - DNA, 15 bp, Homo sapiens
tggcctggccccatg

SEQ ID NO: 168567 - DNA, 15 bp, Homo sapiens
gtggcctggccccat

SEQ ID NO: 168568 - DNA, 15 bp, Homo sapiens
cgtggcctggcccca

SEQ ID NO: 168569 - DNA, 15 bp, Homo sapiens
ccgtggcctggcccc

SEQ ID NO: 168570 - DNA, 15 bp, Homo sapiens
cccgtggcctggccc

SEQ ID NO: 168571 - DNA, 15 bp, Homo sapiens
gcccgtggcctggcc

SEQ ID NO: 168572 - DNA, 15 bp, Homo sapiens
ggcccgtggcctggc

SEQ ID NO: 168573 - DNA, 15 bp, Homo sapiens
aggcccgtggcctgg

SEQ ID NO: 168574 - DNA, 15 bp, Homo sapiens
gaggcccgtggcctg

SEQ ID NO: 168575 - DNA, 15 bp, Homo sapiens
cgaggcccgtggcct

SEQ ID NO: 168576 - DNA, 15 bp, Homo sapiens
ccgaggcccgtggcc

SEQ ID NO: 168577 - DNA, 15 bp, Homo sapiens
tccgaggcccgtggc

SEQ ID NO: 168578 - DNA, 15 bp, Homo sapiens
ttccgaggcccgtgg

SEQ ID NO: 168579 - DNA, 15 bp, Homo sapiens
gttccgaggcccgtg

SEQ ID NO: 168580 - DNA, 15 bp, Homo sapiens
agttccgaggcccgt

SEQ ID NO: 168581 - DNA, 15 bp, Homo sapiens
tagttccgaggcccg

SEQ ID NO: 168582 - DNA, 15 bp, Homo sapiens
gtagttccgaggccc

SEQ ID NO: 168583 - DNA, 15 bp, Homo sapiens
cgtagttccgaggcc

SEQ ID NO: 168584 - DNA, 15 bp, Homo sapiens
gcgtagttccgaggc

SEQ ID NO: 168585 - DNA, 15 bp, Homo sapiens
tgcgtagttccgagg

SEQ ID NO: 168586 - DNA, 15 bp, Homo sapiens
ctgcgtagttccgag

SEQ ID NO: 168587 - DNA, 15 bp, Homo sapiens
actgcgtagttccga

SEQ ID NO: 168588 - DNA, 15 bp, Homo sapiens
cactgcgtagttccg

SEQ ID NO: 168589 - DNA, 15 bp, Homo sapiens
acactgcgtagttcc

SEQ ID NO: 168590 - DNA, 15 bp, Homo sapiens
gacactgcgtagttc

SEQ ID NO: 168591 - DNA, 15 bp, Homo sapiens
ggacactgcgtagtt

SEQ ID NO: 168592 - DNA, 15 bp, Homo sapiens
aggacactgcgtagt

SEQ ID NO: 168593 - DNA, 15 bp, Homo sapiens
caggacactgcgtag

SEQ ID NO: 168594 - DNA, 15 bp, Homo sapiens
ccaggacactgcgta

SEQ ID NO: 168595 - DNA, 15 bp, Homo sapiens
tccaggacactgcgt

SEQ ID NO: 168596 - DNA, 15 bp, Homo sapiens
ctccaggacactgcg

SEQ ID NO: 168597 - DNA, 15 bp, Homo sapiens
tctccaggacactgc

SEQ ID NO: 168598 - DNA, 15 bp, Homo sapiens
ttctccaggacactg

SEQ ID NO: 168599 - DNA, 15 bp, Homo sapiens
cttctccaggacact

SEQ ID NO: 168600 - DNA, 15 bp, Homo sapiens
gcttctccaggacac

SEQ ID NO: 168601 - DNA, 15 bp, Homo sapiens
ggcttctccaggaca

SEQ ID NO: 168602 - DNA, 15 bp, Homo sapiens
tggcttctccaggac

SEQ ID NO: 168603 - DNA, 15 bp, Homo sapiens
ctggcttctccagga

SEQ ID NO: 168604 - DNA, 15 bp, Homo sapiens
gctggcttctccagg

SEQ ID NO: 168605 - DNA, 15 bp, Homo sapiens
ggctggcttctccag

SEQ ID NO: 168606 - DNA, 15 bp, Homo sapiens
tggctggcttctcca

SEQ ID NO: 168607 - DNA, 15 bp, Homo sapiens
ttggctggcttctcc

SEQ ID NO: 168608 - DNA, 15 bp, Homo sapiens
cttggctggcttctc

SEQ ID NO: 168609 - DNA, 15 bp, Homo sapiens
gcttggctggcttct

SEQ ID NO: 168610 - DNA, 15 bp, Homo sapiens
ggcttggctggcttc

SEQ ID NO: 168611 - DNA, 15 bp, Homo sapiens
gggcttggctggctt

SEQ ID NO: 168612 - DNA, 15 bp, Homo sapiens
agggcttggctggct

SEQ ID NO: 168613 - DNA, 15 bp, Homo sapiens
aagggcttggctggc

SEQ ID NO: 168614 - DNA, 15 bp, Homo sapiens
caagggcttggctgg

SEQ ID NO: 168615 - DNA, 15 bp, Homo sapiens
tcaagggcttggctg

SEQ ID NO: 168616 - DNA, 15 bp, Homo sapiens
ttcaagggcttggct

SEQ ID NO: 168617 - DNA, 15 bp, Homo sapiens
attcaagggcttggc

SEQ ID NO: 168618 - DNA, 15 bp, Homo sapiens
aattcaagggcttgg

SEQ ID NO: 168619 - DNA, 15 bp, Homo sapiens
gaattcaagggcttg

SEQ ID NO: 168620 - DNA, 15 bp, Homo sapiens
agaattcaagggctt

SEQ ID NO: 168621 - DNA, 15 bp, Homo sapiens
cagaattcaagggct

SEQ ID NO: 168622 - DNA, 15 bp, Homo sapiens
tcagaattcaagggc

SEQ ID NO: 168623 - DNA, 15 bp, Homo sapiens
gtcagaattcaaggg

SEQ ID NO: 168624 - DNA, 15 bp, Homo sapiens
ggtcagaattcaagg

SEQ ID NO: 168625 - DNA, 15 bp, Homo sapiens
gggtcagaattcaag

SEQ ID NO: 168626 - DNA, 15 bp, Homo sapiens
ggggtcagaattcaa

SEQ ID NO: 168627 - DNA, 15 bp, Homo sapiens
aggggtcagaattca

SEQ ID NO: 168628 - DNA, 15 bp, Homo sapiens
gaggggtcagaattc

SEQ ID NO: 168629 - DNA, 15 bp, Homo sapiens
agaggggtcagaatt

SEQ ID NO: 168630 - DNA, 15 bp, Homo sapiens
tagaggggtcagaat

SEQ ID NO: 168631 - DNA, 15 bp, Homo sapiens
ttagaggggtcagaa

SEQ ID NO: 168632 - DNA, 15 bp, Homo sapiens
attagaggggtcaga

SEQ ID NO: 168633 - DNA, 15 bp, Homo sapiens
aattagaggggtcag

SEQ ID NO: 168634 - DNA, 15 bp, Homo sapiens
caattagaggggtca

SEQ ID NO: 168635 - DNA, 15 bp, Homo sapiens
tcaattagaggggtc

SEQ ID NO: 168636 - DNA, 15 bp, Homo sapiens
ctcaattagaggggt

SEQ ID NO: 168637 - DNA, 15 bp, Homo sapiens
tctcaattagagggg

SEQ ID NO: 168638 - DNA, 15 bp, Homo sapiens
ttctcaattagaggg

SEQ ID NO: 168639 - DNA, 15 bp, Homo sapiens
gttctcaattagagg

SEQ ID NO: 168640 - DNA, 15 bp, Homo sapiens
agttctcaattagag

SEQ ID NO: 168641 - DNA, 15 bp, Homo sapiens
aagttctcaattaga

SEQ ID NO: 168642 - DNA, 15 bp, Homo sapiens
caagttctcaattag

SEQ ID NO: 168643 - DNA, 15 bp, Homo sapiens
ccaagttctcaatta

SEQ ID NO: 168644 - DNA, 15 bp, Homo sapiens
cccaagttctcaatt

SEQ ID NO: 168645 - DNA, 15 bp, Homo sapiens
acccaagttctcaat

SEQ ID NO: 168646 - DNA, 15 bp, Homo sapiens
gacccaagttctcaa

SEQ ID NO: 168647 - DNA, 15 bp, Homo sapiens
agacccaagttctca

SEQ ID NO: 168648 - DNA, 15 bp, Homo sapiens
gagacccaagttctc

SEQ ID NO: 168649 - DNA, 15 bp, Homo sapiens
tgagacccaagttct

SEQ ID NO: 168650 - DNA, 15 bp, Homo sapiens
ctgagacccaagttc

SEQ ID NO: 168651 - DNA, 15 bp, Homo sapiens
cctgagacccaagtt

SEQ ID NO: 168652 - DNA, 15 bp, Homo sapiens
tcctgagacccaagt

SEQ ID NO: 168653 - DNA, 15 bp, Homo sapiens
atcctgagacccaag

SEQ ID NO: 168654 - DNA, 15 bp, Homo sapiens
aatcctgagacccaa

SEQ ID NO: 168655 - DNA, 15 bp, Homo sapiens
caatcctgagaccca

SEQ ID NO: 168656 - DNA, 15 bp, Homo sapiens
acaatcctgagaccc

SEQ ID NO: 168657 - DNA, 15 bp, Homo sapiens
cacaatcctgagacc

SEQ ID NO: 168658 - DNA, 15 bp, Homo sapiens
gcacaatcctgagac

SEQ ID NO: 168659 - DNA, 15 bp, Homo sapiens
tgcacaatcctgaga

SEQ ID NO: 168660 - DNA, 15 bp, Homo sapiens
ctgcacaatcctgag

SEQ ID NO: 168661 - DNA, 15 bp, Homo sapiens
tctgcacaatcctga

SEQ ID NO: 168662 - DNA, 15 bp, Homo sapiens
ctctgcacaatcctg

SEQ ID NO: 168663 - DNA, 15 bp, Homo sapiens
tctctgcacaatcct

SEQ ID NO: 168664 - DNA, 15 bp, Homo sapiens
ctctctgcacaatcc

SEQ ID NO: 168665 - DNA, 15 bp, Homo sapiens
tctctctgcacaatc

SEQ ID NO: 168666 - DNA, 15 bp, Homo sapiens
ctctctctgcacaat

SEQ ID NO: 168667 - DNA, 15 bp, Homo sapiens
gctctctctgcacaa

SEQ ID NO: 168668 - DNA, 15 bp, Homo sapiens
tgctctctctgcaca

SEQ ID NO: 168669 - DNA, 15 bp, Homo sapiens
ctgctctctctgcac

SEQ ID NO: 168670 - DNA, 15 bp, Homo sapiens
cctgctctctctgca

SEQ ID NO: 168671 - DNA, 15 bp, Homo sapiens
tcctgctctctctgc

SEQ ID NO: 168672 - DNA, 15 bp, Homo sapiens
ctcctgctctctctg

SEQ ID NO: 168673 - DNA, 15 bp, Homo sapiens
gctcctgctctctct

SEQ ID NO: 168674 - DNA, 15 bp, Homo sapiens
tgctcctgctctctc

SEQ ID NO: 168675 - DNA, 15 bp, Homo sapiens
ctgctcctgctctct

SEQ ID NO: 168676 - DNA, 15 bp, Homo sapiens
tctgctcctgctctc

SEQ ID NO: 168677 - DNA, 15 bp, Homo sapiens
atctgctcctgctct

SEQ ID NO: 168678 - DNA, 15 bp, Homo sapiens
catctgctcctgctc

SEQ ID NO: 168679 - DNA, 15 bp, Homo sapiens
tcatctgctcctgct

SEQ ID NO: 168680 - DNA, 15 bp, Homo sapiens
ctcatctgctcctgc

SEQ ID NO: 168681 - DNA, 15 bp, Homo sapiens
actcatctgctcctg

SEQ ID NO: 168682 - DNA, 15 bp, Homo sapiens
gactcatctgctcct

SEQ ID NO: 168683 - DNA, 15 bp, Homo sapiens
tgactcatctgctcc

SEQ ID NO: 168684 - DNA, 15 bp, Homo sapiens
ttgactcatctgctc

SEQ ID NO: 168685 - DNA, 15 bp, Homo sapiens
tttgactcatctgct

SEQ ID NO: 168686 - DNA, 15 bp, Homo sapiens
ctttgactcatctgc

SEQ ID NO: 168687 - DNA, 15 bp, Homo sapiens
tctttgactcatctg

SEQ ID NO: 168688 - DNA, 15 bp, Homo sapiens
gtctttgactcatct

SEQ ID NO: 168689 - DNA, 15 bp, Homo sapiens
tgtctttgactcatc

SEQ ID NO: 168690 - DNA, 15 bp, Homo sapiens
ctgtctttgactcat

SEQ ID NO: 168691 - DNA, 15 bp, Homo sapiens
tctgtctttgactca

SEQ ID NO: 168692 - DNA, 15 bp, Homo sapiens
ttctgtctttgactc

SEQ ID NO: 168693 - DNA, 15 bp, Homo sapiens
cttctgtctttgact

SEQ ID NO: 168694 - DNA, 15 bp, Homo sapiens
tcttctgtctttgac

SEQ ID NO: 168695 - DNA, 15 bp, Homo sapiens
atcttctgtctttga

SEQ ID NO: 168696 - DNA, 15 bp, Homo sapiens
tatcttctgtctttg

SEQ ID NO: 168697 - DNA, 15 bp, Homo sapiens
atatcttctgtcttt

SEQ ID NO: 168698 - DNA, 15 bp, Homo sapiens
aatatcttctgtctt

SEQ ID NO: 168699 - DNA, 15 bp, Homo sapiens
gaatatcttctgtct

SEQ ID NO: 168700 - DNA, 15 bp, Homo sapiens
tgaatatcttctgtc

SEQ ID NO: 168701 - DNA, 15 bp, Homo sapiens
ttgaatatcttctgt

SEQ ID NO: 168702 - DNA, 15 bp, Homo sapiens
tttgaatatcttctg

SEQ ID NO: 168703 - DNA, 15 bp, Homo sapiens
ctttgaatatcttct

SEQ ID NO: 168704 - DNA, 15 bp, Homo sapiens
cctttgaatatcttc

SEQ ID NO: 168705 - DNA, 15 bp, Homo sapiens
tcctttgaatatctt

SEQ ID NO: 168706 - DNA, 15 bp, Homo sapiens
ttcctttgaatatct

SEQ ID NO: 168707 - DNA, 15 bp, Homo sapiens
tttcctttgaatatc

SEQ ID NO: 168708 - DNA, 15 bp, Homo sapiens
atttcctttgaatat

SEQ ID NO: 168709 - DNA, 15 bp, Homo sapiens
catttcctttgaata

SEQ ID NO: 168710 - DNA, 15 bp, Homo sapiens
ccatttcctttgaat

SEQ ID NO: 168711 - DNA, 15 bp, Homo sapiens
gccatttcctttgaa

SEQ ID NO: 168712 - DNA, 15 bp, Homo sapiens
agccatttcctttga

SEQ ID NO: 168713 - DNA, 15 bp, Homo sapiens
cagccatttcctttg

SEQ ID NO: 168714 - DNA, 15 bp, Homo sapiens
ccagccatttccttt

SEQ ID NO: 168715 - DNA, 15 bp, Homo sapiens
accagccatttcctt

SEQ ID NO: 168716 - DNA, 15 bp, Homo sapiens
taccagccatttcct

SEQ ID NO: 168717 - DNA, 15 bp, Homo sapiens
gtaccagccatttcc

SEQ ID NO: 168718 - DNA, 15 bp, Homo sapiens
tgtaccagccatttc

SEQ ID NO: 168719 - DNA, 15 bp, Homo sapiens
ttgtaccagccattt

SEQ ID NO: 168720 - DNA, 15 bp, Homo sapiens
tttgtaccagccatt

SEQ ID NO: 168721 - DNA, 15 bp, Homo sapiens
gtttgtaccagccat

SEQ ID NO: 168722 - DNA, 15 bp, Homo sapiens
cgtttgtaccagcca

SEQ ID NO: 168723 - DNA, 15 bp, Homo sapiens
tcgtttgtaccagcc

SEQ ID NO: 168724 - DNA, 15 bp, Homo sapiens
ctcgtttgtaccagc

SEQ ID NO: 168725 - DNA, 15 bp, Homo sapiens
tctcgtttgtaccag

SEQ ID NO: 168726 - DNA, 15 bp, Homo sapiens
gtctcgtttgtacca

SEQ ID NO: 168727 - DNA, 15 bp, Homo sapiens
agtctcgtttgtacc

SEQ ID NO: 168728 - DNA, 15 bp, Homo sapiens
cagtctcgtttgtac

SEQ ID NO: 168729 - DNA, 15 bp, Homo sapiens
ccagtctcgtttgta

SEQ ID NO: 168730 - DNA, 15 bp, Homo sapiens
cccagtctcgtttgt

SEQ ID NO: 168731 - DNA, 15 bp, Homo sapiens
tcccagtctcgtttg

SEQ ID NO: 168732 - DNA, 15 bp, Homo sapiens
ctcccagtctcgttt

SEQ ID NO: 168733 - DNA, 15 bp, Homo sapiens
cctcccagtctcgtt

SEQ ID NO: 168734 - DNA, 15 bp, Homo sapiens
tcctcccagtctcgt

SEQ ID NO: 168735 - DNA, 15 bp, Homo sapiens
ctcctcccagtctcg

SEQ ID NO: 168736 - DNA, 15 bp, Homo sapiens
tctcctcccagtctc

SEQ ID NO: 168737 - DNA, 15 bp, Homo sapiens
ttctcctcccagtct

SEQ ID NO: 168738 - DNA, 15 bp, Homo sapiens
cttctcctcccagtc

SEQ ID NO: 168739 - DNA, 15 bp, Homo sapiens
ccttctcctcccagt

SEQ ID NO: 168740 - DNA, 15 bp, Homo sapiens
gccttctcctcccag

SEQ ID NO: 168741 - DNA, 15 bp, Homo sapiens
agccttctcctccca

SEQ ID NO: 168742 - DNA, 15 bp, Homo sapiens
cagccttctcctccc

SEQ ID NO: 168743 - DNA, 15 bp, Homo sapiens
tcagccttctcctcc

SEQ ID NO: 168744 - DNA, 15 bp, Homo sapiens
ttcagccttctcctc

SEQ ID NO: 168745 - DNA, 15 bp, Homo sapiens
cttcagccttctcct

SEQ ID NO: 168746 - DNA, 15 bp, Homo sapiens
acttcagccttctcc

SEQ ID NO: 168747 - DNA, 15 bp, Homo sapiens
cacttcagccttctc

SEQ ID NO: 168748 - DNA, 15 bp, Homo sapiens
ccacttcagccttct

SEQ ID NO: 168749 - DNA, 15 bp, Homo sapiens
gccacttcagccttc

SEQ ID NO: 168750 - DNA, 15 bp, Homo sapiens
agccacttcagcctt

SEQ ID NO: 168751 - DNA, 15 bp, Homo sapiens
aagccacttcagcct

SEQ ID NO: 168752 - DNA, 15 bp, Homo sapiens
gaagccacttcagcc

SEQ ID NO: 168753 - DNA, 15 bp, Homo sapiens
tgaagccacttcagc

SEQ ID NO: 168754 - DNA, 15 bp, Homo sapiens
ctgaagccacttcag

SEQ ID NO: 168755 - DNA, 15 bp, Homo sapiens
tctgaagccacttca

SEQ ID NO: 168756 - DNA, 15 bp, Homo sapiens
ctctgaagccacttc

SEQ ID NO: 168757 - DNA, 15 bp, Homo sapiens
tctctgaagccactt

SEQ ID NO: 168758 - DNA, 15 bp, Homo sapiens
ctctctgaagccact

SEQ ID NO: 168759 - DNA, 15 bp, Homo sapiens
gctctctgaagccac

SEQ ID NO: 168760 - DNA, 15 bp, Homo sapiens
ggctctctgaagcca

SEQ ID NO: 168761 - DNA, 15 bp, Homo sapiens
aggctctctgaagcc

SEQ ID NO: 168762 - DNA, 15 bp, Homo sapiens
caggctctctgaagc

SEQ ID NO: 168763 - DNA, 15 bp, Homo sapiens
acaggctctctgaag

SEQ ID NO: 168764 - DNA, 15 bp, Homo sapiens
aacaggctctctgaa

SEQ ID NO: 168765 - DNA, 15 bp, Homo sapiens
caacaggctctctga

SEQ ID NO: 168766 - DNA, 15 bp, Homo sapiens
ccaacaggctctctg

SEQ ID NO: 168767 - DNA, 15 bp, Homo sapiens
gccaacaggctctct

SEQ ID NO: 168768 - DNA, 15 bp, Homo sapiens
ggccaacaggctctc

SEQ ID NO: 168769 - DNA, 15 bp, Homo sapiens
cggccaacaggctct

SEQ ID NO: 168770 - DNA, 15 bp, Homo sapiens
gcggccaacaggctc

SEQ ID NO: 168771 - DNA, 15 bp, Homo sapiens
ggcggccaacaggct

SEQ ID NO: 168772 - DNA, 15 bp, Homo sapiens
gggcggccaacaggc

SEQ ID NO: 168773 - DNA, 15 bp, Homo sapiens
cgggcggccaacagg

SEQ ID NO: 168774 - DNA, 15 bp, Homo sapiens
tcgggcggccaacag

SEQ ID NO: 168775 - DNA, 15 bp, Homo sapiens
ctcgggcggccaaca

SEQ ID NO: 168776 - DNA, 15 bp, Homo sapiens
cctcgggcggccaac

SEQ ID NO: 168777 - DNA, 15 bp, Homo sapiens
ccctcgggcggccaa

SEQ ID NO: 168778 - DNA, 15 bp, Homo sapiens
gccctcgggcggcca

SEQ ID NO: 168779 - DNA, 15 bp, Homo sapiens
ggccctcgggcggcc

SEQ ID NO: 168780 - DNA, 15 bp, Homo sapiens
gggccctcgggcggc

SEQ ID NO: 168781 - DNA, 15 bp, Homo sapiens
agggccctcgggcgg

SEQ ID NO: 168782 - DNA, 15 bp, Homo sapiens
aagggccctcgggcg

SEQ ID NO: 168783 - DNA, 15 bp, Homo sapiens
gaagggccctcgggc

SEQ ID NO: 168784 - DNA, 15 bp, Homo sapiens
tgaagggccctcggg

SEQ ID NO: 168785 - DNA, 15 bp, Homo sapiens
ctgaagggccctcgg

SEQ ID NO: 168786 - DNA, 15 bp, Homo sapiens
gctgaagggccctcg

SEQ ID NO: 168787 - DNA, 15 bp, Homo sapiens
tgctgaagggccctc

SEQ ID NO: 168788 - DNA, 15 bp, Homo sapiens
ctgctgaagggccct

SEQ ID NO: 168789 - DNA, 15 bp, Homo sapiens
gctgctgaagggccc

SEQ ID NO: 168790 - DNA, 15 bp, Homo sapiens
ggctgctgaagggcc

SEQ ID NO: 168791 - DNA, 15 bp, Homo sapiens
aggctgctgaagggc

SEQ ID NO: 168792 - DNA, 15 bp, Homo sapiens
gaggctgctgaaggg

SEQ ID NO: 168793 - DNA, 15 bp, Homo sapiens
cgaggctgctgaagg

SEQ ID NO: 168794 - DNA, 15 bp, Homo sapiens
acgaggctgctgaag

SEQ ID NO: 168795 - DNA, 15 bp, Homo sapiens
aacgaggctgctgaa

SEQ ID NO: 168796 - DNA, 15 bp, Homo sapiens
aaacgaggctgctga

SEQ ID NO: 168797 - DNA, 15 bp, Homo sapiens
taaacgaggctgctg

SEQ ID NO: 168798 - DNA, 15 bp, Homo sapiens
gtaaacgaggctgct

SEQ ID NO: 168799 - DNA, 15 bp, Homo sapiens
ggtaaacgaggctgc

SEQ ID NO: 168800 - DNA, 15 bp, Homo sapiens
gggtaaacgaggctg

SEQ ID NO: 168801 - DNA, 15 bp, Homo sapiens
tgggtaaacgaggct

SEQ ID NO: 168802 - DNA, 15 bp, Homo sapiens
gtgggtaaacgaggc

SEQ ID NO: 168803 - DNA, 15 bp, Homo sapiens
tgtgggtaaacgagg

SEQ ID NO: 168804 - DNA, 15 bp, Homo sapiens
ttgtgggtaaacgag

SEQ ID NO: 168805 - DNA, 15 bp, Homo sapiens
tttgtgggtaaacga

SEQ ID NO: 168806 - DNA, 15 bp, Homo sapiens
gtttgtgggtaaacg

SEQ ID NO: 168807 - DNA, 15 bp, Homo sapiens
tgtttgtgggtaaac

SEQ ID NO: 168808 - DNA, 15 bp, Homo sapiens
ctgtttgtgggtaaa

SEQ ID NO: 168809 - DNA, 15 bp, Homo sapiens
gctgtttgtgggtaa

SEQ ID NO: 168810 - DNA, 15 bp, Homo sapiens
agctgtttgtgggta

SEQ ID NO: 168811 - DNA, 15 bp, Homo sapiens
cagctgtttgtgggt

SEQ ID NO: 168812 - DNA, 15 bp, Homo sapiens
tcagctgtttgtggg

SEQ ID NO: 168813 - DNA, 15 bp, Homo sapiens
atcagctgtttgtgg

SEQ ID NO: 168814 - DNA, 15 bp, Homo sapiens
gatcagctgtttgtg

SEQ ID NO: 168815 - DNA, 15 bp, Homo sapiens
agatcagctgtttgt

SEQ ID NO: 168816 - DNA, 15 bp, Homo sapiens
cagatcagctgtttg

SEQ ID NO: 168817 - DNA, 15 bp, Homo sapiens
gcagatcagctgttt

SEQ ID NO: 168818 - DNA, 15 bp, Homo sapiens
agcagatcagctgtt

SEQ ID NO: 168819 - DNA, 15 bp, Homo sapiens
aagcagatcagctgt

SEQ ID NO: 168820 - DNA, 15 bp, Homo sapiens
caagcagatcagctg

SEQ ID NO: 168821 - DNA, 15 bp, Homo sapiens
acaagcagatcagct

SEQ ID NO: 168822 - DNA, 15 bp, Homo sapiens
aacaagcagatcagc

SEQ ID NO: 168823 - DNA, 15 bp, Homo sapiens
taacaagcagatcag

SEQ ID NO: 168824 - DNA, 15 bp, Homo sapiens
gtaacaagcagatca

SEQ ID NO: 168825 - DNA, 15 bp, Homo sapiens
tgtaacaagcagatc

SEQ ID NO: 168826 - DNA, 15 bp, Homo sapiens
ttgtaacaagcagat

SEQ ID NO: 168827 - DNA, 15 bp, Homo sapiens
tttgtaacaagcaga

SEQ ID NO: 168828 - DNA, 15 bp, Homo sapiens
atttgtaacaagcag

SEQ ID NO: 168829 - DNA, 15 bp, Homo sapiens
gatttgtaacaagca

SEQ ID NO: 168830 - DNA, 15 bp, Homo sapiens
tgatttgtaacaagc

SEQ ID NO: 168831 - DNA, 15 bp, Homo sapiens
atgatttgtaacaag

SEQ ID NO: 168832 - DNA, 15 bp, Homo sapiens
aatgatttgtaacaa

SEQ ID NO: 168833 - DNA, 15 bp, Homo sapiens
gaatgatttgtaaca

SEQ ID NO: 168834 - DNA, 15 bp, Homo sapiens
ggaatgatttgtaac

SEQ ID NO: 168835 - DNA, 15 bp, Homo sapiens
tggaatgatttgtaa

SEQ ID NO: 168836 - DNA, 15 bp, Homo sapiens
ctggaatgatttgta

SEQ ID NO: 168837 - DNA, 15 bp, Homo sapiens
gctggaatgatttgt

SEQ ID NO: 168838 - DNA, 15 bp, Homo sapiens
ggctggaatgatttg

SEQ ID NO: 168839 - DNA, 15 bp, Homo sapiens
aggctggaatgattt

SEQ ID NO: 168840 - DNA, 15 bp, Homo sapiens
gaggctggaatgatt

SEQ ID NO: 168841 - DNA, 15 bp, Homo sapiens
tgaggctggaatgat

SEQ ID NO: 168842 - DNA, 15 bp, Homo sapiens
atgaggctggaatga

SEQ ID NO: 168843 - DNA, 15 bp, Homo sapiens
aatgaggctggaatg

SEQ ID NO: 168844 - DNA, 15 bp, Homo sapiens
taatgaggctggaat

SEQ ID NO: 168845 - DNA, 15 bp, Homo sapiens
ctaatgaggctggaa

SEQ ID NO: 168846 - DNA, 15 bp, Homo sapiens
gctaatgaggctgga

SEQ ID NO: 168847 - DNA, 15 bp, Homo sapiens
agctaatgaggctgg

SEQ ID NO: 168848 - DNA, 15 bp, Homo sapiens
tagctaatgaggctg

SEQ ID NO: 168849 - DNA, 15 bp, Homo sapiens
gtagctaatgaggct

SEQ ID NO: 168850 - DNA, 15 bp, Homo sapiens
tgtagctaatgaggc

SEQ ID NO: 168851 - DNA, 15 bp, Homo sapiens
gtgtagctaatgagg

SEQ ID NO: 168852 - DNA, 15 bp, Homo sapiens
ggtgtagctaatgag

SEQ ID NO: 168853 - DNA, 15 bp, Homo sapiens
aggtgtagctaatga

SEQ ID NO: 168854 - DNA, 15 bp, Homo sapiens
gaggtgtagctaatg

SEQ ID NO: 168855 - DNA, 15 bp, Homo sapiens
ggaggtgtagctaat

SEQ ID NO: 168856 - DNA, 15 bp, Homo sapiens
aggaggtgtagctaa

SEQ ID NO: 168857 - DNA, 15 bp, Homo sapiens
gaggaggtgtagcta

SEQ ID NO: 168858 - DNA, 15 bp, Homo sapiens
ggaggaggtgtagct

SEQ ID NO: 168859 - DNA, 15 bp, Homo sapiens
aggaggaggtgtagc

SEQ ID NO: 168860 - DNA, 15 bp, Homo sapiens
caggaggaggtgtag

SEQ ID NO: 168861 - DNA, 15 bp, Homo sapiens
tcaggaggaggtgta

SEQ ID NO: 168862 - DNA, 15 bp, Homo sapiens
atcaggaggaggtgt

SEQ ID NO: 168863 - DNA, 15 bp, Homo sapiens
gatcaggaggaggtg

SEQ ID NO: 168864 - DNA, 15 bp, Homo sapiens
ggatcaggaggaggt

SEQ ID NO: 168865 - DNA, 15 bp, Homo sapiens
gggatcaggaggagg

SEQ ID NO: 168866 - DNA, 15 bp, Homo sapiens
agggatcaggaggag

SEQ ID NO: 168867 - DNA, 15 bp, Homo sapiens
tagggatcaggagga

SEQ ID NO: 168868 - DNA, 15 bp, Homo sapiens
gtagggatcaggagg

SEQ ID NO: 168869 - DNA, 15 bp, Homo sapiens
ggtagggatcaggag

SEQ ID NO: 168870 - DNA, 15 bp, Homo sapiens
aggtagggatcagga

SEQ ID NO: 168871 - DNA, 15 bp, Homo sapiens
caggtagggatcagg

SEQ ID NO: 168872 - DNA, 15 bp, Homo sapiens
acaggtagggatcag

SEQ ID NO: 168873 - DNA, 15 bp, Homo sapiens
aacaggtagggatca

SEQ ID NO: 168874 - DNA, 15 bp, Homo sapiens
aaacaggtagggatc

SEQ ID NO: 168875 - DNA, 15 bp, Homo sapiens
caaacaggtagggat

SEQ ID NO: 168876 - DNA, 15 bp, Homo sapiens
acaaacaggtaggga

SEQ ID NO: 168877 - DNA, 15 bp, Homo sapiens
aacaaacaggtaggg

SEQ ID NO: 168878 - DNA, 15 bp, Homo sapiens
taacaaacaggtagg

SEQ ID NO: 168879 - DNA, 15 bp, Homo sapiens
ctaacaaacaggtag

SEQ ID NO: 168880 - DNA, 15 bp, Homo sapiens
gctaacaaacaggta

SEQ ID NO: 168881 - DNA, 15 bp, Homo sapiens
agctaacaaacaggt

SEQ ID NO: 168882 - DNA, 15 bp, Homo sapiens
aagctaacaaacagg

SEQ ID NO: 168883 - DNA, 15 bp, Homo sapiens
taagctaacaaacag

SEQ ID NO: 168884 - DNA, 15 bp, Homo sapiens
ctaagctaacaaaca

SEQ ID NO: 168885 - DNA, 15 bp, Homo sapiens
actaagctaacaaac

SEQ ID NO: 168886 - DNA, 15 bp, Homo sapiens
aactaagctaacaaa

SEQ ID NO: 168887 - DNA, 15 bp, Homo sapiens
gaactaagctaacaa

SEQ ID NO: 168888 - DNA, 15 bp, Homo sapiens
agaactaagctaaca

SEQ ID NO: 168889 - DNA, 15 bp, Homo sapiens
tagaactaagctaac

SEQ ID NO: 168890 - DNA, 15 bp, Homo sapiens
ttagaactaagctaa

SEQ ID NO: 168891 - DNA, 15 bp, Homo sapiens
attagaactaagcta

SEQ ID NO: 168892 - DNA, 15 bp, Homo sapiens
aattagaactaagct

SEQ ID NO: 168893 - DNA, 15 bp, Homo sapiens
taattagaactaagc

SEQ ID NO: 168894 - DNA, 15 bp, Homo sapiens
ataattagaactaag

SEQ ID NO: 168895 - DNA, 15 bp, Homo sapiens
tataattagaactaa

SEQ ID NO: 168896 - DNA, 15 bp, Homo sapiens
atataattagaacta

SEQ ID NO: 168897 - DNA, 15 bp, Homo sapiens
catataattagaact

SEQ ID NO: 168898 - DNA, 15 bp, Homo sapiens
tcatataattagaac

SEQ ID NO: 168899 - DNA, 15 bp, Homo sapiens
ctcatataattagaa

SEQ ID NO: 168900 - DNA, 15 bp, Homo sapiens
tctcatataattaga

SEQ ID NO: 168901 - DNA, 15 bp, Homo sapiens
ctctcatataattag

SEQ ID NO: 168902 - DNA, 15 bp, Homo sapiens
actctcatataatta

SEQ ID NO: 168903 - DNA, 15 bp, Homo sapiens
gactctcatataatt

SEQ ID NO: 168904 - DNA, 15 bp, Homo sapiens
tgactctcatataat

SEQ ID NO: 168905 - DNA, 15 bp, Homo sapiens
atgactctcatataa

SEQ ID NO: 168906 - DNA, 15 bp, Homo sapiens
tatgactctcatata

SEQ ID NO: 168907 - DNA, 15 bp, Homo sapiens
ttatgactctcatat

SEQ ID NO: 168908 - DNA, 15 bp, Homo sapiens
tttatgactctcata

SEQ ID NO: 168909 - DNA, 15 bp, Homo sapiens
ttttatgactctcat

SEQ ID NO: 168910 - DNA, 15 bp, Homo sapiens
attttatgactctca

SEQ ID NO: 168911 - DNA, 15 bp, Homo sapiens
cattttatgactctc

SEQ ID NO: 168912 - DNA, 15 bp, Homo sapiens
gcattttatgactct

SEQ ID NO: 168913 - DNA, 15 bp, Homo sapiens
agcattttatgactc

SEQ ID NO: 168914 - DNA, 15 bp, Homo sapiens
aagcattttatgact

SEQ ID NO: 168915 - DNA, 15 bp, Homo sapiens
aaagcattttatgac

SEQ ID NO: 168916 - DNA, 15 bp, Homo sapiens
taaagcattttatga

SEQ ID NO: 168917 - DNA, 15 bp, Homo sapiens
ttaaagcattttatg

SEQ ID NO: 168918 - DNA, 15 bp, Homo sapiens
tttaaagcattttat

SEQ ID NO: 168919 - DNA, 15 bp, Homo sapiens
ttttaaagcatttta

SEQ ID NO: 168920 - DNA, 15 bp, Homo sapiens
tttttaaagcatttt

SEQ ID NO: 168921 - DNA, 15 bp, Homo sapiens
atttttaaagcattt

SEQ ID NO: 168922 - DNA, 15 bp, Homo sapiens
tatttttaaagcatt

SEQ ID NO: 168923 - DNA, 15 bp, Homo sapiens
ttatttttaaagcat

SEQ ID NO: 168924 - DNA, 15 bp, Homo sapiens
gttatttttaaagca

SEQ ID NO: 168925 - DNA, 15 bp, Homo sapiens
ggttatttttaaagc

SEQ ID NO: 168926 - DNA, 15 bp, Homo sapiens
aggttatttttaaag

SEQ ID NO: 168927 - DNA, 15 bp, Homo sapiens
taggttatttttaaa

SEQ ID NO: 168928 - DNA, 15 bp, Homo sapiens
ataggttatttttaa

SEQ ID NO: 168929 - DNA, 15 bp, Homo sapiens
tataggttattttta

SEQ ID NO: 168930 - DNA, 15 bp, Homo sapiens
ttataggttattttt

SEQ ID NO: 168931 - DNA, 15 bp, Homo sapiens
gttataggttatttt

SEQ ID NO: 168932 - DNA, 15 bp, Homo sapiens
agttataggttattt

SEQ ID NO: 168933 - DNA, 15 bp, Homo sapiens
gagttataggttatt

SEQ ID NO: 168934 - DNA, 15 bp, Homo sapiens
tgagttataggttat

SEQ ID NO: 168935 - DNA, 15 bp, Homo sapiens
gtgagttataggtta

SEQ ID NO: 168936 - DNA, 15 bp, Homo sapiens
tgtgagttataggtt

SEQ ID NO: 168937 - DNA, 15 bp, Homo sapiens
ctgtgagttataggt

SEQ ID NO: 168938 - DNA, 15 bp, Homo sapiens
actgtgagttatagg

SEQ ID NO: 168939 - DNA, 15 bp, Homo sapiens
aactgtgagttatag

SEQ ID NO: 168940 - DNA, 15 bp, Homo sapiens
gaactgtgagttata

SEQ ID NO: 168941 - DNA, 15 bp, Homo sapiens
agaactgtgagttat

SEQ ID NO: 168942 - DNA, 15 bp, Homo sapiens
aagaactgtgagtta

SEQ ID NO: 168943 - DNA, 15 bp, Homo sapiens
caagaactgtgagtt

SEQ ID NO: 168944 - DNA, 15 bp, Homo sapiens
ccaagaactgtgagt

SEQ ID NO: 168945 - DNA, 15 bp, Homo sapiens
tccaagaactgtgag

SEQ ID NO: 168946 - DNA, 15 bp, Homo sapiens
ttccaagaactgtga

SEQ ID NO: 168947 - DNA, 15 bp, Homo sapiens
tttccaagaactgtg

SEQ ID NO: 168948 - DNA, 15 bp, Homo sapiens
gtttccaagaactgt

SEQ ID NO: 168949 - DNA, 15 bp, Homo sapiens
agtttccaagaactg

SEQ ID NO: 168950 - DNA, 15 bp, Homo sapiens
gagtttccaagaact

SEQ ID NO: 168951 - DNA, 15 bp, Homo sapiens
agagtttccaagaac

SEQ ID NO: 168952 - DNA, 15 bp, Homo sapiens
cagagtttccaagaa

SEQ ID NO: 168953 - DNA, 15 bp, Homo sapiens
ccagagtttccaaga

SEQ ID NO: 168954 - DNA, 15 bp, Homo sapiens
gccagagtttccaag

SEQ ID NO: 168955 - DNA, 15 bp, Homo sapiens
cgccagagtttccaa

SEQ ID NO: 168956 - DNA, 15 bp, Homo sapiens
ccgccagagtttcca

SEQ ID NO: 168957 - DNA, 15 bp, Homo sapiens
cccgccagagtttcc

SEQ ID NO: 168958 - DNA, 15 bp, Homo sapiens
acccgccagagtttc

SEQ ID NO: 168959 - DNA, 15 bp, Homo sapiens
cacccgccagagttt

SEQ ID NO: 168960 - DNA, 15 bp, Homo sapiens
gcacccgccagagtt

SEQ ID NO: 168961 - DNA, 15 bp, Homo sapiens
ggcacccgccagagt

SEQ ID NO: 168962 - DNA, 15 bp, Homo sapiens
aggcacccgccagag

SEQ ID NO: 168963 - DNA, 15 bp, Homo sapiens
gaggcacccgccaga

SEQ ID NO: 168964 - DNA, 15 bp, Homo sapiens
ggaggcacccgccag

SEQ ID NO: 168965 - DNA, 15 bp, Homo sapiens
gggaggcacccgcca

SEQ ID NO: 168966 - DNA, 15 bp, Homo sapiens
ggggaggcacccgcc

SEQ ID NO: 168967 - DNA, 15 bp, Homo sapiens
aggggaggcacccgc

SEQ ID NO: 168968 - DNA, 15 bp, Homo sapiens
caggggaggcacccg

SEQ ID NO: 168969 - DNA, 15 bp, Homo sapiens
tcaggggaggcaccc

SEQ ID NO: 168970 - DNA, 15 bp, Homo sapiens
ctcaggggaggcacc

SEQ ID NO: 168971 - DNA, 15 bp, Homo sapiens
actcaggggaggcac

SEQ ID NO: 168972 - DNA, 15 bp, Homo sapiens
tactcaggggaggca

SEQ ID NO: 168973 - DNA, 15 bp, Homo sapiens
ttactcaggggaggc

SEQ ID NO: 168974 - DNA, 15 bp, Homo sapiens
attactcaggggagg

SEQ ID NO: 168975 - DNA, 15 bp, Homo sapiens
cattactcaggggag

SEQ ID NO: 168976 - DNA, 15 bp, Homo sapiens
acattactcagggga

SEQ ID NO: 168977 - DNA, 15 bp, Homo sapiens
cacattactcagggg

SEQ ID NO: 168978 - DNA, 15 bp, Homo sapiens
ccacattactcaggg

SEQ ID NO: 168979 - DNA, 15 bp, Homo sapiens
tccacattactcagg

SEQ ID NO: 168980 - DNA, 15 bp, Homo sapiens
ctccacattactcag

SEQ ID NO: 168981 - DNA, 15 bp, Homo sapiens
gctccacattactca

SEQ ID NO: 168982 - DNA, 15 bp, Homo sapiens
ggctccacattactc

SEQ ID NO: 168983 - DNA, 15 bp, Homo sapiens
aggctccacattact

SEQ ID NO: 168984 - DNA, 15 bp, Homo sapiens
caggctccacattac

SEQ ID NO: 168985 - DNA, 15 bp, Homo sapiens
ccaggctccacatta

SEQ ID NO: 168986 - DNA, 15 bp, Homo sapiens
cccaggctccacatt

SEQ ID NO: 168987 - DNA, 15 bp, Homo sapiens
ccccaggctccacat

SEQ ID NO: 168988 - DNA, 15 bp, Homo sapiens
cccccaggctccaca

SEQ ID NO: 168989 - DNA, 15 bp, Homo sapiens
acccccaggctccac

SEQ ID NO: 168990 - DNA, 15 bp, Homo sapiens
aacccccaggctcca

SEQ ID NO: 168991 - DNA, 15 bp, Homo sapiens
aaacccccaggctcc

SEQ ID NO: 168992 - DNA, 15 bp, Homo sapiens
aaaacccccaggctc

SEQ ID NO: 168993 - DNA, 15 bp, Homo sapiens
aaaaacccccaggct

SEQ ID NO: 168994 - DNA, 15 bp, Homo sapiens
taaaaacccccaggc

SEQ ID NO: 168995 - DNA, 15 bp, Homo sapiens
gtaaaaacccccagg

SEQ ID NO: 168996 - DNA, 15 bp, Homo sapiens
cgtaaaaacccccag

SEQ ID NO: 168997 - DNA, 15 bp, Homo sapiens
tcgtaaaaaccccca

SEQ ID NO: 168998 - DNA, 15 bp, Homo sapiens
gtcgtaaaaaccccc

SEQ ID NO: 168999 - DNA, 15 bp, Homo sapiens
tgtcgtaaaaacccc

SEQ ID NO: 169000 - DNA, 15 bp, Homo sapiens
ctgtcgtaaaaaccc

SEQ ID NO: 169001 - DNA, 15 bp, Homo sapiens
gctgtcgtaaaaacc

SEQ ID NO: 169002 - DNA, 15 bp, Homo sapiens
ggctgtcgtaaaaac

SEQ ID NO: 169003 - DNA, 15 bp, Homo sapiens
aggctgtcgtaaaaa

SEQ ID NO: 169004 - DNA, 15 bp, Homo sapiens
caggctgtcgtaaaa

SEQ ID NO: 169005 - DNA, 15 bp, Homo sapiens
ccaggctgtcgtaaa

SEQ ID NO: 169006 - DNA, 15 bp, Homo sapiens
cccaggctgtcgtaa

SEQ ID NO: 169007 - DNA, 15 bp, Homo sapiens
ccccaggctgtcgta

SEQ ID NO: 169008 - DNA, 15 bp, Homo sapiens
accccaggctgtcgt

SEQ ID NO: 169009 - DNA, 15 bp, Homo sapiens
aaccccaggctgtcg

SEQ ID NO: 169010 - DNA, 15 bp, Homo sapiens
caaccccaggctgtc

SEQ ID NO: 169011 - DNA, 15 bp, Homo sapiens
gcaaccccaggctgt

SEQ ID NO: 169012 - DNA, 15 bp, Homo sapiens
ggcaaccccaggctg

SEQ ID NO: 169013 - DNA, 15 bp, Homo sapiens
tggcaaccccaggct

SEQ ID NO: 169014 - DNA, 15 bp, Homo sapiens
ttggcaaccccaggc

SEQ ID NO: 169015 - DNA, 15 bp, Homo sapiens
cttggcaaccccagg

SEQ ID NO: 169016 - DNA, 15 bp, Homo sapiens
ccttggcaaccccag

SEQ ID NO: 169017 - DNA, 15 bp, Homo sapiens
cccttggcaacccca

SEQ ID NO: 169018 - DNA, 15 bp, Homo sapiens
ccccttggcaacccc

SEQ ID NO: 169019 - DNA, 15 bp, Homo sapiens
tccccttggcaaccc

SEQ ID NO: 169020 - DNA, 15 bp, Homo sapiens
ttccccttggcaacc

SEQ ID NO: 169021 - DNA, 15 bp, Homo sapiens
tttccccttggcaac

SEQ ID NO: 169022 - DNA, 15 bp, Homo sapiens
gtttccccttggcaa

SEQ ID NO: 169023 - DNA, 15 bp, Homo sapiens
agtttccccttggca

SEQ ID NO: 169024 - DNA, 15 bp, Homo sapiens
cagtttccccttggc

SEQ ID NO: 169025 - DNA, 15 bp, Homo sapiens
tcagtttccccttgg

SEQ ID NO: 169026 - DNA, 15 bp, Homo sapiens
ctcagtttccccttg

SEQ ID NO: 169027 - DNA, 15 bp, Homo sapiens
cctcagtttcccctt

SEQ ID NO: 169028 - DNA, 15 bp, Homo sapiens
gcctcagtttcccct

SEQ ID NO: 169029 - DNA, 15 bp, Homo sapiens
ggcctcagtttcccc

SEQ ID NO: 169030 - DNA, 15 bp, Homo sapiens
gggcctcagtttccc

SEQ ID NO: 169031 - DNA, 15 bp, Homo sapiens
tgggcctcagtttcc

SEQ ID NO: 169032 - DNA, 15 bp, Homo sapiens
ttgggcctcagtttc

SEQ ID NO: 169033 - DNA, 15 bp, Homo sapiens
cttgggcctcagttt

SEQ ID NO: 169034 - DNA, 15 bp, Homo sapiens
gcttgggcctcagtt

SEQ ID NO: 169035 - DNA, 15 bp, Homo sapiens
agcttgggcctcagt

SEQ ID NO: 169036 - DNA, 15 bp, Homo sapiens
aagcttgggcctcag

SEQ ID NO: 169037 - DNA, 15 bp, Homo sapiens
caagcttgggcctca

SEQ ID NO: 169038 - DNA, 15 bp, Homo sapiens
acaagcttgggcctc

SEQ ID NO: 169039 - DNA, 15 bp, Homo sapiens
gacaagcttgggcct

SEQ ID NO: 169040 - DNA, 15 bp, Homo sapiens
ggacaagcttgggcc

SEQ ID NO: 169041 - DNA, 15 bp, Homo sapiens
gggacaagcttgggc

SEQ ID NO: 169042 - DNA, 15 bp, Homo sapiens
ggggacaagcttggg

SEQ ID NO: 169043 - DNA, 15 bp, Homo sapiens
tggggacaagcttgg

SEQ ID NO: 169044 - DNA, 15 bp, Homo sapiens
ctggggacaagcttg

SEQ ID NO: 169045 - DNA, 15 bp, Homo sapiens
tctggggacaagctt

SEQ ID NO: 169046 - DNA, 15 bp, Homo sapiens
ctctggggacaagct

SEQ ID NO: 169047 - DNA, 15 bp, Homo sapiens
cctctggggacaagc

SEQ ID NO: 169048 - DNA, 15 bp, Homo sapiens
tcctctggggacaag

SEQ ID NO: 169049 - DNA, 15 bp, Homo sapiens
ctcctctggggacaa

SEQ ID NO: 169050 - DNA, 15 bp, Homo sapiens
actcctctggggaca

SEQ ID NO: 169051 - DNA, 15 bp, Homo sapiens
aactcctctggggac

SEQ ID NO: 169052 - DNA, 15 bp, Homo sapiens
gaactcctctgggga

SEQ ID NO: 169053 - DNA, 15 bp, Homo sapiens
agaactcctctgggg

SEQ ID NO: 169054 - DNA, 15 bp, Homo sapiens
cagaactcctctggg

SEQ ID NO: 169055 - DNA, 15 bp, Homo sapiens
ccagaactcctctgg

SEQ ID NO: 169056 - DNA, 15 bp, Homo sapiens
gccagaactcctctg

SEQ ID NO: 169057 - DNA, 15 bp, Homo sapiens
agccagaactcctct

SEQ ID NO: 169058 - DNA, 15 bp, Homo sapiens
cagccagaactcctc

SEQ ID NO: 169059 - DNA, 15 bp, Homo sapiens
tcagccagaactcct

SEQ ID NO: 169060 - DNA, 15 bp, Homo sapiens
ttcagccagaactcc

SEQ ID NO: 169061 - DNA, 15 bp, Homo sapiens
cttcagccagaactc

SEQ ID NO: 169062 - DNA, 15 bp, Homo sapiens
acttcagccagaact

SEQ ID NO: 169063 - DNA, 15 bp, Homo sapiens
cacttcagccagaac

SEQ ID NO: 169064 - DNA, 15 bp, Homo sapiens
ccacttcagccagaa

SEQ ID NO: 169065 - DNA, 15 bp, Homo sapiens
accacttcagccaga

SEQ ID NO: 169066 - DNA, 15 bp, Homo sapiens
caccacttcagccag

SEQ ID NO: 169067 - DNA, 15 bp, Homo sapiens
acaccacttcagcca

SEQ ID NO: 169068 - DNA, 15 bp, Homo sapiens
gacaccacttcagcc

SEQ ID NO: 169069 - DNA, 15 bp, Homo sapiens
tgacaccacttcagc

SEQ ID NO: 169070 - DNA, 15 bp, Homo sapiens
gtgacaccacttcag

SEQ ID NO: 169071 - DNA, 15 bp, Homo sapiens
tgtgacaccacttca

SEQ ID NO: 169072 - DNA, 15 bp, Homo sapiens
ttgtgacaccacttc

SEQ ID NO: 169073 - DNA, 15 bp, Homo sapiens
cttgtgacaccactt

SEQ ID NO: 169074 - DNA, 15 bp, Homo sapiens
gcttgtgacaccact

SEQ ID NO: 169075 - DNA, 15 bp, Homo sapiens
agcttgtgacaccac

SEQ ID NO: 169076 - DNA, 15 bp, Homo sapiens
gagcttgtgacacca

SEQ ID NO: 169077 - DNA, 15 bp, Homo sapiens
ggagcttgtgacacc

SEQ ID NO: 169078 - DNA, 15 bp, Homo sapiens
tggagcttgtgacac

SEQ ID NO: 169079 - DNA, 15 bp, Homo sapiens
atggagcttgtgaca

SEQ ID NO: 169080 - DNA, 15 bp, Homo sapiens
gatggagcttgtgac

SEQ ID NO: 169081 - DNA, 15 bp, Homo sapiens
agatggagcttgtga

SEQ ID NO: 169082 - DNA, 15 bp, Homo sapiens
gagatggagcttgtg

SEQ ID NO: 169083 - DNA, 15 bp, Homo sapiens
ggagatggagcttgt

SEQ ID NO: 169084 - DNA, 15 bp, Homo sapiens
tggagatggagcttg

SEQ ID NO: 169085 - DNA, 15 bp, Homo sapiens
ctggagatggagctt

SEQ ID NO: 169086 - DNA, 15 bp, Homo sapiens
gctggagatggagct

SEQ ID NO: 169087 - DNA, 15 bp, Homo sapiens
ggctggagatggagc

SEQ ID NO: 169088 - DNA, 15 bp, Homo sapiens
aggctggagatggag

SEQ ID NO: 169089 - DNA, 15 bp, Homo sapiens
gaggctggagatgga

SEQ ID NO: 169090 - DNA, 15 bp, Homo sapiens
tgaggctggagatgg

SEQ ID NO: 169091 - DNA, 15 bp, Homo sapiens
ctgaggctggagatg

SEQ ID NO: 169092 - DNA, 15 bp, Homo sapiens
actgaggctggagat

SEQ ID NO: 169093 - DNA, 15 bp, Homo sapiens
cactgaggctggaga

SEQ ID NO: 169094 - DNA, 15 bp, Homo sapiens
tcactgaggctggag

SEQ ID NO: 169095 - DNA, 15 bp, Homo sapiens
ttcactgaggctgga

SEQ ID NO: 169096 - DNA, 15 bp, Homo sapiens
cttcactgaggctgg

SEQ ID NO: 169097 - DNA, 15 bp, Homo sapiens
ccttcactgaggctg

SEQ ID NO: 169098 - DNA, 15 bp, Homo sapiens
tccttcactgaggct

SEQ ID NO: 169099 - DNA, 15 bp, Homo sapiens
ctccttcactgaggc

SEQ ID NO: 169100 - DNA, 15 bp, Homo sapiens
actccttcactgagg

SEQ ID NO: 169101 - DNA, 15 bp, Homo sapiens
cactccttcactgag

SEQ ID NO: 169102 - DNA, 15 bp, Homo sapiens
gcactccttcactga

SEQ ID NO: 169103 - DNA, 15 bp, Homo sapiens
ggcactccttcactg

SEQ ID NO: 169104 - DNA, 15 bp, Homo sapiens
gggcactccttcact

SEQ ID NO: 169105 - DNA, 15 bp, Homo sapiens
ggggcactccttcac

SEQ ID NO: 169106 - DNA, 15 bp, Homo sapiens
aggggcactccttca

SEQ ID NO: 169107 - DNA, 15 bp, Homo sapiens
aaggggcactccttc

SEQ ID NO: 169108 - DNA, 15 bp, Homo sapiens
gaaggggcactcctt

SEQ ID NO: 169109 - DNA, 15 bp, Homo sapiens
tgaaggggcactcct

SEQ ID NO: 169110 - DNA, 15 bp, Homo sapiens
ttgaaggggcactcc

SEQ ID NO: 169111 - DNA, 15 bp, Homo sapiens
cttgaaggggcactc

SEQ ID NO: 169112 - DNA, 15 bp, Homo sapiens
tcttgaaggggcact

SEQ ID NO: 169113 - DNA, 15 bp, Homo sapiens
ttcttgaaggggcac

SEQ ID NO: 169114 - DNA, 15 bp, Homo sapiens
tttcttgaaggggca

SEQ ID NO: 169115 - DNA, 15 bp, Homo sapiens
gtttcttgaaggggc

SEQ ID NO: 169116 - DNA, 15 bp, Homo sapiens
ggtttcttgaagggg

SEQ ID NO: 169117 - DNA, 15 bp, Homo sapiens
cggtttcttgaaggg

SEQ ID NO: 169118 - DNA, 15 bp, Homo sapiens
ccggtttcttgaagg

SEQ ID NO: 169119 - DNA, 15 bp, Homo sapiens
gccggtttcttgaag

SEQ ID NO: 169120 - DNA, 15 bp, Homo sapiens
tgccggtttcttgaa

SEQ ID NO: 169121 - DNA, 15 bp, Homo sapiens
atgccggtttcttga

SEQ ID NO: 169122 - DNA, 15 bp, Homo sapiens
catgccggtttcttg

SEQ ID NO: 169123 - DNA, 15 bp, Homo sapiens
ccatgccggtttctt

SEQ ID NO: 169124 - DNA, 15 bp, Homo sapiens
cccatgccggtttct

SEQ ID NO: 169125 - DNA, 15 bp, Homo sapiens
ccccatgccggtttc

SEQ ID NO: 169126 - DNA, 15 bp, Homo sapiens
cccccatgccggttt

SEQ ID NO: 169127 - DNA, 15 bp, Homo sapiens
tcccccatgccggtt

SEQ ID NO: 169128 - DNA, 15 bp, Homo sapiens
ctcccccatgccggt

SEQ ID NO: 169129 - DNA, 15 bp, Homo sapiens
cctcccccatgccgg

SEQ ID NO: 169130 - DNA, 15 bp, Homo sapiens
tcctcccccatgccg

SEQ ID NO: 169131 - DNA, 15 bp, Homo sapiens
atcctcccccatgcc

SEQ ID NO: 169132 - DNA, 15 bp, Homo sapiens
catcctcccccatgc

SEQ ID NO: 169133 - DNA, 15 bp, Homo sapiens
acatcctcccccatg

SEQ ID NO: 169134 - DNA, 15 bp, Homo sapiens
aacatcctcccccat

SEQ ID NO: 169135 - DNA, 15 bp, Homo sapiens
aaacatcctccccca

SEQ ID NO: 169136 - DNA, 15 bp, Homo sapiens
gaaacatcctccccc

SEQ ID NO: 169137 - DNA, 15 bp, Homo sapiens
tgaaacatcctcccc

SEQ ID NO: 169138 - DNA, 15 bp, Homo sapiens
ttgaaacatcctccc

SEQ ID NO: 169139 - DNA, 15 bp, Homo sapiens
tttgaaacatcctcc

SEQ ID NO: 169140 - DNA, 15 bp, Homo sapiens
ctttgaaacatcctc

SEQ ID NO: 169141 - DNA, 15 bp, Homo sapiens
cctttgaaacatcct

SEQ ID NO: 169142 - DNA, 15 bp, Homo sapiens
acctttgaaacatcc

SEQ ID NO: 169143 - DNA, 15 bp, Homo sapiens
gacctttgaaacatc

SEQ ID NO: 169144 - DNA, 15 bp, Homo sapiens
agacctttgaaacat

SEQ ID NO: 169145 - DNA, 15 bp, Homo sapiens
tagacctttgaaaca

SEQ ID NO: 169146 - DNA, 15 bp, Homo sapiens
gtagacctttgaaac

SEQ ID NO: 169147 - DNA, 15 bp, Homo sapiens
agtagacctttgaaa

SEQ ID NO: 169148 - DNA, 15 bp, Homo sapiens
tagtagacctttgaa

SEQ ID NO: 169149 - DNA, 15 bp, Homo sapiens
atagtagacctttga

SEQ ID NO: 169150 - DNA, 15 bp, Homo sapiens
catagtagacctttg

SEQ ID NO: 169151 - DNA, 15 bp, Homo sapiens
acatagtagaccttt

SEQ ID NO: 169152 - DNA, 15 bp, Homo sapiens
tacatagtagacctt

SEQ ID NO: 169153 - DNA, 15 bp, Homo sapiens
gtacatagtagacct

SEQ ID NO: 169154 - DNA, 15 bp, Homo sapiens
ggtacatagtagacc

SEQ ID NO: 169155 - DNA, 15 bp, Homo sapiens
cggtacatagtagac

SEQ ID NO: 169156 - DNA, 15 bp, Homo sapiens
ccggtacatagtaga

SEQ ID NO: 169157 - DNA, 15 bp, Homo sapiens
cccggtacatagtag

SEQ ID NO: 169158 - DNA, 15 bp, Homo sapiens
gcccggtacatagta

SEQ ID NO: 169159 - DNA, 15 bp, Homo sapiens
tgcccggtacatagt

SEQ ID NO: 169160 - DNA, 15 bp, Homo sapiens
gtgcccggtacatag

SEQ ID NO: 169161 - DNA, 15 bp, Homo sapiens
agtgcccggtacata

SEQ ID NO: 169162 - DNA, 15 bp, Homo sapiens
aagtgcccggtacat

SEQ ID NO: 169163 - DNA, 15 bp, Homo sapiens
gaagtgcccggtaca

SEQ ID NO: 169164 - DNA, 15 bp, Homo sapiens
tgaagtgcccggtac

SEQ ID NO: 169165 - DNA, 15 bp, Homo sapiens
gtgaagtgcccggta

SEQ ID NO: 169166 - DNA, 15 bp, Homo sapiens
tgtgaagtgcccggt

SEQ ID NO: 169167 - DNA, 15 bp, Homo sapiens
atgtgaagtgcccgg

SEQ ID NO: 169168 - DNA, 15 bp, Homo sapiens
catgtgaagtgcccg

SEQ ID NO: 169169 - DNA, 15 bp, Homo sapiens
gcatgtgaagtgccc

SEQ ID NO: 169170 - DNA, 15 bp, Homo sapiens
agcatgtgaagtgcc

SEQ ID NO: 169171 - DNA, 15 bp, Homo sapiens
aagcatgtgaagtgc

SEQ ID NO: 169172 - DNA, 15 bp, Homo sapiens
aaagcatgtgaagtg

SEQ ID NO: 169173 - DNA, 15 bp, Homo sapiens
taaagcatgtgaagt

SEQ ID NO: 169174 - DNA, 15 bp, Homo sapiens
ataaagcatgtgaag

SEQ ID NO: 169175 - DNA, 15 bp, Homo sapiens
gataaagcatgtgaa

SEQ ID NO: 169176 - DNA, 15 bp, Homo sapiens
agataaagcatgtga

SEQ ID NO: 169177 - DNA, 15 bp, Homo sapiens
aagataaagcatgtg

SEQ ID NO: 169178 - DNA, 15 bp, Homo sapiens
gaagataaagcatgt

SEQ ID NO: 169179 - DNA, 15 bp, Homo sapiens
agaagataaagcatg

SEQ ID NO: 169180 - DNA, 15 bp, Homo sapiens
cagaagataaagcat

SEQ ID NO: 169181 - DNA, 15 bp, Homo sapiens
ccagaagataaagca

SEQ ID NO: 169182 - DNA, 15 bp, Homo sapiens
cccagaagataaagc

SEQ ID NO: 169183 - DNA, 15 bp, Homo sapiens
tcccagaagataaag

SEQ ID NO: 169184 - DNA, 15 bp, Homo sapiens
ttcccagaagataaa

SEQ ID NO: 169185 - DNA, 15 bp, Homo sapiens
cttcccagaagataa

SEQ ID NO: 169186 - DNA, 15 bp, Homo sapiens
acttcccagaagata

SEQ ID NO: 169187 - DNA, 15 bp, Homo sapiens
gacttcccagaagat

SEQ ID NO: 169188 - DNA, 15 bp, Homo sapiens
tgacttcccagaaga

SEQ ID NO: 169189 - DNA, 15 bp, Homo sapiens
atgacttcccagaag

SEQ ID NO: 169190 - DNA, 15 bp, Homo sapiens
aatgacttcccagaa

SEQ ID NO: 169191 - DNA, 15 bp, Homo sapiens
taatgacttcccaga

SEQ ID NO: 169192 - DNA, 15 bp, Homo sapiens
ataatgacttcccag

SEQ ID NO: 169193 - DNA, 15 bp, Homo sapiens
cataatgacttccca

SEQ ID NO: 169194 - DNA, 15 bp, Homo sapiens
gcataatgacttccc

SEQ ID NO: 169195 - DNA, 15 bp, Homo sapiens
agcataatgacttcc

SEQ ID NO: 169196 - DNA, 15 bp, Homo sapiens
aagcataatgacttc

SEQ ID NO: 169197 - DNA, 15 bp, Homo sapiens
gaagcataatgactt

SEQ ID NO: 169198 - DNA, 15 bp, Homo sapiens
ggaagcataatgact

SEQ ID NO: 169199 - DNA, 15 bp, Homo sapiens
gggaagcataatgac

SEQ ID NO: 169200 - DNA, 15 bp, Homo sapiens
tgggaagcataatga

SEQ ID NO: 169201 - DNA, 15 bp, Homo sapiens
atgggaagcataatg

SEQ ID NO: 169202 - DNA, 15 bp, Homo sapiens
aatgggaagcataat

SEQ ID NO: 169203 - DNA, 15 bp, Homo sapiens
aaatgggaagcataa

SEQ ID NO: 169204 - DNA, 15 bp, Homo sapiens
aaaatgggaagcata

SEQ ID NO: 169205 - DNA, 15 bp, Homo sapiens
taaaatgggaagcat

SEQ ID NO: 169206 - DNA, 15 bp, Homo sapiens
gtaaaatgggaagca

SEQ ID NO: 169207 - DNA, 15 bp, Homo sapiens
tgtaaaatgggaagc

SEQ ID NO: 169208 - DNA, 15 bp, Homo sapiens
ctgtaaaatgggaag

SEQ ID NO: 169209 - DNA, 15 bp, Homo sapiens
tctgtaaaatgggaa

SEQ ID NO: 169210 - DNA, 15 bp, Homo sapiens
atctgtaaaatggga

SEQ ID NO: 169211 - DNA, 15 bp, Homo sapiens
tatctgtaaaatggg

SEQ ID NO: 169212 - DNA, 15 bp, Homo sapiens
ttatctgtaaaatgg

SEQ ID NO: 169213 - DNA, 15 bp, Homo sapiens
cttatctgtaaaatg

SEQ ID NO: 169214 - DNA, 15 bp, Homo sapiens
ccttatctgtaaaat

SEQ ID NO: 169215 - DNA, 15 bp, Homo sapiens
tccttatctgtaaaa

SEQ ID NO: 169216 - DNA, 15 bp, Homo sapiens
ttccttatctgtaaa

SEQ ID NO: 169217 - DNA, 15 bp, Homo sapiens
tttccttatctgtaa

SEQ ID NO: 169218 - DNA, 15 bp, Homo sapiens
gtttccttatctgta

SEQ ID NO: 169219 - DNA, 15 bp, Homo sapiens
agtttccttatctgt

SEQ ID NO: 169220 - DNA, 15 bp, Homo sapiens
cagtttccttatctg

SEQ ID NO: 169221 - DNA, 15 bp, Homo sapiens
tcagtttccttatct

SEQ ID NO: 169222 - DNA, 15 bp, Homo sapiens
ctcagtttccttatc

SEQ ID NO: 169223 - DNA, 15 bp, Homo sapiens
cctcagtttccttat

SEQ ID NO: 169224 - DNA, 15 bp, Homo sapiens
gcctcagtttcctta

SEQ ID NO: 169225 - DNA, 15 bp, Homo sapiens
ggcctcagtttcctt

SEQ ID NO: 169226 - DNA, 15 bp, Homo sapiens
aggcctcagtttcct

SEQ ID NO: 169227 - DNA, 15 bp, Homo sapiens
caggcctcagtttcc

SEQ ID NO: 169228 - DNA, 15 bp, Homo sapiens
tcaggcctcagtttc

SEQ ID NO: 169229 - DNA, 15 bp, Homo sapiens
ctcaggcctcagttt

SEQ ID NO: 169230 - DNA, 15 bp, Homo sapiens
cctcaggcctcagtt

SEQ ID NO: 169231 - DNA, 15 bp, Homo sapiens
tcctcaggcctcagt

SEQ ID NO: 169232 - DNA, 15 bp, Homo sapiens
atcctcaggcctcag

SEQ ID NO: 169233 - DNA, 15 bp, Homo sapiens
catcctcaggcctca

SEQ ID NO: 169234 - DNA, 15 bp, Homo sapiens
acatcctcaggcctc

SEQ ID NO: 169235 - DNA, 15 bp, Homo sapiens
cacatcctcaggcct

SEQ ID NO: 169236 - DNA, 15 bp, Homo sapiens
tcacatcctcaggcc

SEQ ID NO: 169237 - DNA, 15 bp, Homo sapiens
ttcacatcctcaggc

SEQ ID NO: 169238 - DNA, 15 bp, Homo sapiens
cttcacatcctcagg

SEQ ID NO: 169239 - DNA, 15 bp, Homo sapiens
ccttcacatcctcag

SEQ ID NO: 169240 - DNA, 15 bp, Homo sapiens
cccttcacatcctca

SEQ ID NO: 169241 - DNA, 15 bp, Homo sapiens
tcccttcacatcctc

SEQ ID NO: 169242 - DNA, 15 bp, Homo sapiens
gtcccttcacatcct

SEQ ID NO: 169243 - DNA, 15 bp, Homo sapiens
tgtcccttcacatcc

SEQ ID NO: 169244 - DNA, 15 bp, Homo sapiens
atgtcccttcacatc

SEQ ID NO: 169245 - DNA, 15 bp, Homo sapiens
catgtcccttcacat

SEQ ID NO: 169246 - DNA, 15 bp, Homo sapiens
gcatgtcccttcaca

SEQ ID NO: 169247 - DNA, 15 bp, Homo sapiens
agcatgtcccttcac

SEQ ID NO: 169248 - DNA, 15 bp, Homo sapiens
gagcatgtcccttca

SEQ ID NO: 169249 - DNA, 15 bp, Homo sapiens
tgagcatgtcccttc

SEQ ID NO: 169250 - DNA, 15 bp, Homo sapiens
ttgagcatgtccctt

SEQ ID NO: 169251 - DNA, 15 bp, Homo sapiens
gttgagcatgtccct

SEQ ID NO: 169252 - DNA, 15 bp, Homo sapiens
tgttgagcatgtccc

SEQ ID NO: 169253 - DNA, 15 bp, Homo sapiens
atgttgagcatgtcc

SEQ ID NO: 169254 - DNA, 15 bp, Homo sapiens
gatgttgagcatgtc

SEQ ID NO: 169255 - DNA, 15 bp, Homo sapiens
ggatgttgagcatgt

SEQ ID NO: 169256 - DNA, 15 bp, Homo sapiens
gggatgttgagcatg

SEQ ID NO: 169257 - DNA, 15 bp, Homo sapiens
tgggatgttgagcat

SEQ ID NO: 169258 - DNA, 15 bp, Homo sapiens
gtgggatgttgagca

SEQ ID NO: 169259 - DNA, 15 bp, Homo sapiens
tgtgggatgttgagc

SEQ ID NO: 169260 - DNA, 15 bp, Homo sapiens
ctgtgggatgttgag

SEQ ID NO: 169261 - DNA, 15 bp, Homo sapiens
gctgtgggatgttga

SEQ ID NO: 169262 - DNA, 15 bp, Homo sapiens
agctgtgggatgttg

SEQ ID NO: 169263 - DNA, 15 bp, Homo sapiens
cagctgtgggatgtt

SEQ ID NO: 169264 - DNA, 15 bp, Homo sapiens
ccagctgtgggatgt

SEQ ID NO: 169265 - DNA, 15 bp, Homo sapiens
accagctgtgggatg

SEQ ID NO: 169266 - DNA, 15 bp, Homo sapiens
aaccagctgtgggat

SEQ ID NO: 169267 - DNA, 15 bp, Homo sapiens
caaccagctgtggga

SEQ ID NO: 169268 - DNA, 15 bp, Homo sapiens
tcaaccagctgtggg

SEQ ID NO: 169269 - DNA, 15 bp, Homo sapiens
ttcaaccagctgtgg

SEQ ID NO: 169270 - DNA, 15 bp, Homo sapiens
cttcaaccagctgtg

SEQ ID NO: 169271 - DNA, 15 bp, Homo sapiens
ccttcaaccagctgt

SEQ ID NO: 169272 - DNA, 15 bp, Homo sapiens
gccttcaaccagctg

SEQ ID NO: 169273 - DNA, 15 bp, Homo sapiens
tgccttcaaccagct

SEQ ID NO: 169274 - DNA, 15 bp, Homo sapiens
ctgccttcaaccagc

SEQ ID NO: 169275 - DNA, 15 bp, Homo sapiens
tctgccttcaaccag

SEQ ID NO: 169276 - DNA, 15 bp, Homo sapiens
ttctgccttcaacca

SEQ ID NO: 169277 - DNA, 15 bp, Homo sapiens
gttctgccttcaacc

SEQ ID NO: 169278 - DNA, 15 bp, Homo sapiens
ggttctgccttcaac

SEQ ID NO: 169279 - DNA, 15 bp, Homo sapiens
tggttctgccttcaa

SEQ ID NO: 169280 - DNA, 15 bp, Homo sapiens
ctggttctgccttca

SEQ ID NO: 169281 - DNA, 15 bp, Homo sapiens
cctggttctgccttc

SEQ ID NO: 169282 - DNA, 15 bp, Homo sapiens
tcctggttctgcctt

SEQ ID NO: 169283 - DNA, 15 bp, Homo sapiens
atcctggttctgcct

SEQ ID NO: 169284 - DNA, 15 bp, Homo sapiens
aatcctggttctgcc

SEQ ID NO: 169285 - DNA, 15 bp, Homo sapiens
aaatcctggttctgc

SEQ ID NO: 169286 - DNA, 15 bp, Homo sapiens
caaatcctggttctg

SEQ ID NO: 169287 - DNA, 15 bp, Homo sapiens
tcaaatcctggttct

SEQ ID NO: 169288 - DNA, 15 bp, Homo sapiens
ttcaaatcctggttc

SEQ ID NO: 169289 - DNA, 15 bp, Homo sapiens
gttcaaatcctggtt

SEQ ID NO: 169290 - DNA, 15 bp, Homo sapiens
agttcaaatcctggt

SEQ ID NO: 169291 - DNA, 15 bp, Homo sapiens
aagttcaaatcctgg

SEQ ID NO: 169292 - DNA, 15 bp, Homo sapiens
caagttcaaatcctg

SEQ ID NO: 169293 - DNA, 15 bp, Homo sapiens
tcaagttcaaatcct

SEQ ID NO: 169294 - DNA, 15 bp, Homo sapiens
ctcaagttcaaatcc

SEQ ID NO: 169295 - DNA, 15 bp, Homo sapiens
actcaagttcaaatc

SEQ ID NO: 169296 - DNA, 15 bp, Homo sapiens
gactcaagttcaaat

SEQ ID NO: 169297 - DNA, 15 bp, Homo sapiens
agactcaagttcaaa

SEQ ID NO: 169298 - DNA, 15 bp, Homo sapiens
cagactcaagttcaa

SEQ ID NO: 169299 - DNA, 15 bp, Homo sapiens
acagactcaagttca

SEQ ID NO: 169300 - DNA, 15 bp, Homo sapiens
cacagactcaagttc

SEQ ID NO: 169301 - DNA, 15 bp, Homo sapiens
acacagactcaagtt

SEQ ID NO: 169302 - DNA, 15 bp, Homo sapiens
aacacagactcaagt

SEQ ID NO: 169303 - DNA, 15 bp, Homo sapiens
caacacagactcaag

SEQ ID NO: 169304 - DNA, 15 bp, Homo sapiens
acaacacagactcaa

SEQ ID NO: 169305 - DNA, 15 bp, Homo sapiens
aacaacacagactca

SEQ ID NO: 169306 - DNA, 15 bp, Homo sapiens
gaacaacacagactc

SEQ ID NO: 169307 - DNA, 15 bp, Homo sapiens
tgaacaacacagact

SEQ ID NO: 169308 - DNA, 15 bp, Homo sapiens
ctgaacaacacagac

SEQ ID NO: 169309 - DNA, 15 bp, Homo sapiens
tctgaacaacacaga

SEQ ID NO: 169310 - DNA, 15 bp, Homo sapiens
ttctgaacaacacag

SEQ ID NO: 169311 - DNA, 15 bp, Homo sapiens
gttctgaacaacaca

SEQ ID NO: 169312 - DNA, 15 bp, Homo sapiens
ggttctgaacaacac

SEQ ID NO: 169313 - DNA, 15 bp, Homo sapiens
aggttctgaacaaca

SEQ ID NO: 169314 - DNA, 15 bp, Homo sapiens
caggttctgaacaac

SEQ ID NO: 169315 - DNA, 15 bp, Homo sapiens
tcaggttctgaacaa

SEQ ID NO: 169316 - DNA, 15 bp, Homo sapiens
ctcaggttctgaaca

SEQ ID NO: 169317 - DNA, 15 bp, Homo sapiens
gctcaggttctgaac

SEQ ID NO: 169318 - DNA, 15 bp, Homo sapiens
agctcaggttctgaa

SEQ ID NO: 169319 - DNA, 15 bp, Homo sapiens
gagctcaggttctga

SEQ ID NO: 169320 - DNA, 15 bp, Homo sapiens
ggagctcaggttctg

SEQ ID NO: 169321 - DNA, 15 bp, Homo sapiens
aggagctcaggttct

SEQ ID NO: 169322 - DNA, 15 bp, Homo sapiens
aaggagctcaggttc

SEQ ID NO: 169323 - DNA, 15 bp, Homo sapiens
gaaggagctcaggtt

SEQ ID NO: 169324 - DNA, 15 bp, Homo sapiens
agaaggagctcaggt

SEQ ID NO: 169325 - DNA, 15 bp, Homo sapiens
gagaaggagctcagg

SEQ ID NO: 169326 - DNA, 15 bp, Homo sapiens
ggagaaggagctcag

SEQ ID NO: 169327 - DNA, 15 bp, Homo sapiens
aggagaaggagctca

SEQ ID NO: 169328 - DNA, 15 bp, Homo sapiens
taggagaaggagctc

SEQ ID NO: 169329 - DNA, 15 bp, Homo sapiens
ttaggagaaggagct

SEQ ID NO: 169330 - DNA, 15 bp, Homo sapiens
cttaggagaaggagc

SEQ ID NO: 169331 - DNA, 15 bp, Homo sapiens
gcttaggagaaggag

SEQ ID NO: 169332 - DNA, 15 bp, Homo sapiens
ggcttaggagaagga

SEQ ID NO: 169333 - DNA, 15 bp, Homo sapiens
gggcttaggagaagg

SEQ ID NO: 169334 - DNA, 15 bp, Homo sapiens
agggcttaggagaag

SEQ ID NO: 169335 - DNA, 15 bp, Homo sapiens
cagggcttaggagaa

SEQ ID NO: 169336 - DNA, 15 bp, Homo sapiens
tcagggcttaggaga

SEQ ID NO: 169337 - DNA, 15 bp, Homo sapiens
atcagggcttaggag

SEQ ID NO: 169338 - DNA, 15 bp, Homo sapiens
catcagggcttagga

SEQ ID NO: 169339 - DNA, 15 bp, Homo sapiens
gcatcagggcttagg

SEQ ID NO: 169340 - DNA, 15 bp, Homo sapiens
agcatcagggcttag

SEQ ID NO: 169341 - DNA, 15 bp, Homo sapiens
gagcatcagggctta

SEQ ID NO: 169342 - DNA, 15 bp, Homo sapiens
agagcatcagggctt

SEQ ID NO: 169343 - DNA, 15 bp, Homo sapiens
tagagcatcagggct

SEQ ID NO: 169344 - DNA, 15 bp, Homo sapiens
gtagagcatcagggc

SEQ ID NO: 169345 - DNA, 15 bp, Homo sapiens
tgtagagcatcaggg

SEQ ID NO: 169346 - DNA, 15 bp, Homo sapiens
ctgtagagcatcagg

SEQ ID NO: 169347 - DNA, 15 bp, Homo sapiens
actgtagagcatcag

SEQ ID NO: 169348 - DNA, 15 bp, Homo sapiens
tactgtagagcatca

SEQ ID NO: 169349 - DNA, 15 bp, Homo sapiens
gtactgtagagcatc

SEQ ID NO: 169350 - DNA, 15 bp, Homo sapiens
ggtactgtagagcat

SEQ ID NO: 169351 - DNA, 15 bp, Homo sapiens
gggtactgtagagca

SEQ ID NO: 169352 - DNA, 15 bp, Homo sapiens
agggtactgtagagc

SEQ ID NO: 169353 - DNA, 15 bp, Homo sapiens
aagggtactgtagag

SEQ ID NO: 169354 - DNA, 15 bp, Homo sapiens
gaagggtactgtaga

SEQ ID NO: 169355 - DNA, 15 bp, Homo sapiens
tgaagggtactgtag

SEQ ID NO: 169356 - DNA, 15 bp, Homo sapiens
gtgaagggtactgta

SEQ ID NO: 169357 - DNA, 15 bp, Homo sapiens
ggtgaagggtactgt

SEQ ID NO: 169358 - DNA, 15 bp, Homo sapiens
gggtgaagggtactg

SEQ ID NO: 169359 - DNA, 15 bp, Homo sapiens
agggtgaagggtact

SEQ ID NO: 169360 - DNA, 15 bp, Homo sapiens
cagggtgaagggtac

SEQ ID NO: 169361 - DNA, 15 bp, Homo sapiens
ccagggtgaagggta

SEQ ID NO: 169362 - DNA, 15 bp, Homo sapiens
gccagggtgaagggt

SEQ ID NO: 169363 - DNA, 15 bp, Homo sapiens
ggccagggtgaaggg

SEQ ID NO: 169364 - DNA, 15 bp, Homo sapiens
aggccagggtgaagg

SEQ ID NO: 169365 - DNA, 15 bp, Homo sapiens
aaggccagggtgaag

SEQ ID NO: 169366 - DNA, 15 bp, Homo sapiens
caaggccagggtgaa

SEQ ID NO: 169367 - DNA, 15 bp, Homo sapiens
tcaaggccagggtga

SEQ ID NO: 169368 - DNA, 15 bp, Homo sapiens
ctcaaggccagggtg

SEQ ID NO: 169369 - DNA, 15 bp, Homo sapiens
gctcaaggccagggt

SEQ ID NO: 169370 - DNA, 15 bp, Homo sapiens
agctcaaggccaggg

SEQ ID NO: 169371 - DNA, 15 bp, Homo sapiens
cagctcaaggccagg

SEQ ID NO: 169372 - DNA, 15 bp, Homo sapiens
tcagctcaaggccag

SEQ ID NO: 169373 - DNA, 15 bp, Homo sapiens
atcagctcaaggcca

SEQ ID NO: 169374 - DNA, 15 bp, Homo sapiens
catcagctcaaggcc

SEQ ID NO: 169375 - DNA, 15 bp, Homo sapiens
gcatcagctcaaggc

SEQ ID NO: 169376 - DNA, 15 bp, Homo sapiens
ggcatcagctcaagg

SEQ ID NO: 169377 - DNA, 15 bp, Homo sapiens
aggcatcagctcaag

SEQ ID NO: 169378 - DNA, 15 bp, Homo sapiens
aaggcatcagctcaa

SEQ ID NO: 169379 - DNA, 15 bp, Homo sapiens
gaaggcatcagctca

SEQ ID NO: 169380 - DNA, 15 bp, Homo sapiens
tgaaggcatcagctc

SEQ ID NO: 169381 - DNA, 15 bp, Homo sapiens
atgaaggcatcagct

SEQ ID NO: 169382 - DNA, 15 bp, Homo sapiens
aatgaaggcatcagc

SEQ ID NO: 169383 - DNA, 15 bp, Homo sapiens
aaatgaaggcatcag

SEQ ID NO: 169384 - DNA, 15 bp, Homo sapiens
gaaatgaaggcatca

SEQ ID NO: 169385 - DNA, 15 bp, Homo sapiens
cgaaatgaaggcatc

SEQ ID NO: 169386 - DNA, 15 bp, Homo sapiens
tcgaaatgaaggcat

SEQ ID NO: 169387 - DNA, 15 bp, Homo sapiens
ctcgaaatgaaggca

SEQ ID NO: 169388 - DNA, 15 bp, Homo sapiens
gctcgaaatgaaggc

SEQ ID NO: 169389 - DNA, 15 bp, Homo sapiens
ggctcgaaatgaagg

SEQ ID NO: 169390 - DNA, 15 bp, Homo sapiens
aggctcgaaatgaag

SEQ ID NO: 169391 - DNA, 15 bp, Homo sapiens
caggctcgaaatgaa

SEQ ID NO: 169392 - DNA, 15 bp, Homo sapiens
ccaggctcgaaatga

SEQ ID NO: 169393 - DNA, 15 bp, Homo sapiens
gccaggctcgaaatg

SEQ ID NO: 169394 - DNA, 15 bp, Homo sapiens
ggccaggctcgaaat

SEQ ID NO: 169395 - DNA, 15 bp, Homo sapiens
aggccaggctcgaaa

SEQ ID NO: 169396 - DNA, 15 bp, Homo sapiens
aaggccaggctcgaa

SEQ ID NO: 169397 - DNA, 15 bp, Homo sapiens
aaaggccaggctcga

SEQ ID NO: 169398 - DNA, 15 bp, Homo sapiens
caaaggccaggctcg

SEQ ID NO: 169399 - DNA, 15 bp, Homo sapiens
tcaaaggccaggctc

SEQ ID NO: 169400 - DNA, 15 bp, Homo sapiens
gtcaaaggccaggct

SEQ ID NO: 169401 - DNA, 15 bp, Homo sapiens
ggtcaaaggccaggc

SEQ ID NO: 169402 - DNA, 15 bp, Homo sapiens
gggtcaaaggccagg

SEQ ID NO: 169403 - DNA, 15 bp, Homo sapiens
agggtcaaaggccag

SEQ ID NO: 169404 - DNA, 15 bp, Homo sapiens
gagggtcaaaggcca

SEQ ID NO: 169405 - DNA, 15 bp, Homo sapiens
tgagggtcaaaggcc

SEQ ID NO: 169406 - DNA, 15 bp, Homo sapiens
gtgagggtcaaaggc

SEQ ID NO: 169407 - DNA, 15 bp, Homo sapiens
ggtgagggtcaaagg

SEQ ID NO: 169408 - DNA, 15 bp, Homo sapiens
aggtgagggtcaaag

SEQ ID NO: 169409 - DNA, 15 bp, Homo sapiens
gaggtgagggtcaaa

SEQ ID NO: 169410 - DNA, 15 bp, Homo sapiens
tgaggtgagggtcaa

SEQ ID NO: 169411 - DNA, 15 bp, Homo sapiens
gtgaggtgagggtca

SEQ ID NO: 169412 - DNA, 15 bp, Homo sapiens
agtgaggtgagggtc

SEQ ID NO: 169413 - DNA, 15 bp, Homo sapiens
gagtgaggtgagggt

SEQ ID NO: 169414 - DNA, 15 bp, Homo sapiens
ggagtgaggtgaggg

SEQ ID NO: 169415 - DNA, 15 bp, Homo sapiens
gggagtgaggtgagg

SEQ ID NO: 169416 - DNA, 15 bp, Homo sapiens
agggagtgaggtgag

SEQ ID NO: 169417 - DNA, 15 bp, Homo sapiens
aagggagtgaggtga

SEQ ID NO: 169418 - DNA, 15 bp, Homo sapiens
caagggagtgaggtg

SEQ ID NO: 169419 - DNA, 15 bp, Homo sapiens
ccaagggagtgaggt

SEQ ID NO: 169420 - DNA, 15 bp, Homo sapiens
cccaagggagtgagg

SEQ ID NO: 169421 - DNA, 15 bp, Homo sapiens
ccccaagggagtgag

SEQ ID NO: 169422 - DNA, 15 bp, Homo sapiens
tccccaagggagtga

SEQ ID NO: 169423 - DNA, 15 bp, Homo sapiens
ctccccaagggagtg

SEQ ID NO: 169424 - DNA, 15 bp, Homo sapiens
cctccccaagggagt

SEQ ID NO: 169425 - DNA, 15 bp, Homo sapiens
gcctccccaagggag

SEQ ID NO: 169426 - DNA, 15 bp, Homo sapiens
ggcctccccaaggga

SEQ ID NO: 169427 - DNA, 15 bp, Homo sapiens
gggcctccccaaggg

SEQ ID NO: 169428 - DNA, 15 bp, Homo sapiens
agggcctccccaagg

SEQ ID NO: 169429 - DNA, 15 bp, Homo sapiens
cagggcctccccaag

SEQ ID NO: 169430 - DNA, 15 bp, Homo sapiens
acagggcctccccaa

SEQ ID NO: 169431 - DNA, 15 bp, Homo sapiens
cacagggcctcccca

SEQ ID NO: 169432 - DNA, 15 bp, Homo sapiens
gcacagggcctcccc

SEQ ID NO: 169433 - DNA, 15 bp, Homo sapiens
ggcacagggcctccc

SEQ ID NO: 169434 - DNA, 15 bp, Homo sapiens
aggcacagggcctcc

SEQ ID NO: 169435 - DNA, 15 bp, Homo sapiens
caggcacagggcctc

SEQ ID NO: 169436 - DNA, 15 bp, Homo sapiens
ccaggcacagggcct

SEQ ID NO: 169437 - DNA, 15 bp, Homo sapiens
gccaggcacagggcc

SEQ ID NO: 169438 - DNA, 15 bp, Homo sapiens
ggccaggcacagggc

SEQ ID NO: 169439 - DNA, 15 bp, Homo sapiens
aggccaggcacaggg

SEQ ID NO: 169440 - DNA, 15 bp, Homo sapiens
gaggccaggcacagg

SEQ ID NO: 169441 - DNA, 15 bp, Homo sapiens
agaggccaggcacag

SEQ ID NO: 169442 - DNA, 15 bp, Homo sapiens
gagaggccaggcaca

SEQ ID NO: 169443 - DNA, 15 bp, Homo sapiens
agagaggccaggcac

SEQ ID NO: 169444 - DNA, 15 bp, Homo sapiens
cagagaggccaggca

SEQ ID NO: 169445 - DNA, 15 bp, Homo sapiens
tcagagaggccaggc

SEQ ID NO: 169446 - DNA, 15 bp, Homo sapiens
ctcagagaggccagg

SEQ ID NO: 169447 - DNA, 15 bp, Homo sapiens
actcagagaggccag

SEQ ID NO: 169448 - DNA, 15 bp, Homo sapiens
gactcagagaggcca

SEQ ID NO: 169449 - DNA, 15 bp, Homo sapiens
agactcagagaggcc

SEQ ID NO: 169450 - DNA, 15 bp, Homo sapiens
gagactcagagaggc

SEQ ID NO: 169451 - DNA, 15 bp, Homo sapiens
tgagactcagagagg

SEQ ID NO: 169452 - DNA, 15 bp, Homo sapiens
ctgagactcagagag

SEQ ID NO: 169453 - DNA, 15 bp, Homo sapiens
gctgagactcagaga

SEQ ID NO: 169454 - DNA, 15 bp, Homo sapiens
agctgagactcagag

SEQ ID NO: 169455 - DNA, 15 bp, Homo sapiens
aagctgagactcaga

SEQ ID NO: 169456 - DNA, 15 bp, Homo sapiens
gaagctgagactcag

SEQ ID NO: 169457 - DNA, 15 bp, Homo sapiens
agaagctgagactca

SEQ ID NO: 169458 - DNA, 15 bp, Homo sapiens
cagaagctgagactc

SEQ ID NO: 169459 - DNA, 15 bp, Homo sapiens
gcagaagctgagact

SEQ ID NO: 169460 - DNA, 15 bp, Homo sapiens
tgcagaagctgagac

SEQ ID NO: 169461 - DNA, 15 bp, Homo sapiens
atgcagaagctgaga

SEQ ID NO: 169462 - DNA, 15 bp, Homo sapiens
gatgcagaagctgag

SEQ ID NO: 169463 - DNA, 15 bp, Homo sapiens
agatgcagaagctga

SEQ ID NO: 169464 - DNA, 15 bp, Homo sapiens
cagatgcagaagctg

SEQ ID NO: 169465 - DNA, 15 bp, Homo sapiens
acagatgcagaagct

SEQ ID NO: 169466 - DNA, 15 bp, Homo sapiens
tacagatgcagaagc

SEQ ID NO: 169467 - DNA, 15 bp, Homo sapiens
ttacagatgcagaag

SEQ ID NO: 169468 - DNA, 15 bp, Homo sapiens
tttacagatgcagaa

SEQ ID NO: 169469 - DNA, 15 bp, Homo sapiens
ttttacagatgcaga

SEQ ID NO: 169470 - DNA, 15 bp, Homo sapiens
attttacagatgcag

SEQ ID NO: 169471 - DNA, 15 bp, Homo sapiens
cattttacagatgca

SEQ ID NO: 169472 - DNA, 15 bp, Homo sapiens
ccattttacagatgc

SEQ ID NO: 169473 - DNA, 15 bp, Homo sapiens
cccattttacagatg

SEQ ID NO: 169474 - DNA, 15 bp, Homo sapiens
ccccattttacagat

SEQ ID NO: 169475 - DNA, 15 bp, Homo sapiens
cccccattttacaga

SEQ ID NO: 169476 - DNA, 15 bp, Homo sapiens
gcccccattttacag

SEQ ID NO: 169477 - DNA, 15 bp, Homo sapiens
ggcccccattttaca

SEQ ID NO: 169478 - DNA, 15 bp, Homo sapiens
gggcccccattttac

SEQ ID NO: 169479 - DNA, 15 bp, Homo sapiens
tgggcccccatttta

SEQ ID NO: 169480 - DNA, 15 bp, Homo sapiens
ctgggcccccatttt

SEQ ID NO: 169481 - DNA, 15 bp, Homo sapiens
actgggcccccattt

SEQ ID NO: 169482 - DNA, 15 bp, Homo sapiens
tactgggcccccatt

SEQ ID NO: 169483 - DNA, 15 bp, Homo sapiens
ctactgggcccccat

SEQ ID NO: 169484 - DNA, 15 bp, Homo sapiens
actactgggccccca

SEQ ID NO: 169485 - DNA, 15 bp, Homo sapiens
gactactgggccccc

SEQ ID NO: 169486 - DNA, 15 bp, Homo sapiens
ggactactgggcccc

SEQ ID NO: 169487 - DNA, 15 bp, Homo sapiens
aggactactgggccc

SEQ ID NO: 169488 - DNA, 15 bp, Homo sapiens
aaggactactgggcc

SEQ ID NO: 169489 - DNA, 15 bp, Homo sapiens
caaggactactgggc

SEQ ID NO: 169490 - DNA, 15 bp, Homo sapiens
gcaaggactactggg

SEQ ID NO: 169491 - DNA, 15 bp, Homo sapiens
agcaaggactactgg

SEQ ID NO: 169492 - DNA, 15 bp, Homo sapiens
cagcaaggactactg

SEQ ID NO: 169493 - DNA, 15 bp, Homo sapiens
ccagcaaggactact

SEQ ID NO: 169494 - DNA, 15 bp, Homo sapiens
gccagcaaggactac

SEQ ID NO: 169495 - DNA, 15 bp, Homo sapiens
ggccagcaaggacta

SEQ ID NO: 169496 - DNA, 15 bp, Homo sapiens
tggccagcaaggact

SEQ ID NO: 169497 - DNA, 15 bp, Homo sapiens
gtggccagcaaggac

SEQ ID NO: 169498 - DNA, 15 bp, Homo sapiens
ggtggccagcaagga

SEQ ID NO: 169499 - DNA, 15 bp, Homo sapiens
aggtggccagcaagg

SEQ ID NO: 169500 - DNA, 15 bp, Homo sapiens
gaggtggccagcaag

SEQ ID NO: 169501 - DNA, 15 bp, Homo sapiens
cgaggtggccagcaa

SEQ ID NO: 169502 - DNA, 15 bp, Homo sapiens
acgaggtggccagca

SEQ ID NO: 169503 - DNA, 15 bp, Homo sapiens
aacgaggtggccagc

SEQ ID NO: 169504 - DNA, 15 bp, Homo sapiens
caacgaggtggccag

SEQ ID NO: 169505 - DNA, 15 bp, Homo sapiens
gcaacgaggtggcca

SEQ ID NO: 169506 - DNA, 15 bp, Homo sapiens
ggcaacgaggtggcc

SEQ ID NO: 169507 - DNA, 15 bp, Homo sapiens
tggcaacgaggtggc

SEQ ID NO: 169508 - DNA, 15 bp, Homo sapiens
ctggcaacgaggtgg

SEQ ID NO: 169509 - DNA, 15 bp, Homo sapiens
cctggcaacgaggtg

SEQ ID NO: 169510 - DNA, 15 bp, Homo sapiens
ccctggcaacgaggt

SEQ ID NO: 169511 - DNA, 15 bp, Homo sapiens
accctggcaacgagg

SEQ ID NO: 169512 - DNA, 15 bp, Homo sapiens
caccctggcaacgag

SEQ ID NO: 169513 - DNA, 15 bp, Homo sapiens
gcaccctggcaacga

SEQ ID NO: 169514 - DNA, 15 bp, Homo sapiens
tgcaccctggcaacg

SEQ ID NO: 169515 - DNA, 15 bp, Homo sapiens
ctgcaccctggcaac

SEQ ID NO: 169516 - DNA, 15 bp, Homo sapiens
cctgcaccctggcaa

SEQ ID NO: 169517 - DNA, 15 bp, Homo sapiens
tcctgcaccctggca

SEQ ID NO: 169518 - DNA, 15 bp, Homo sapiens
ctcctgcaccctggc

SEQ ID NO: 169519 - DNA, 15 bp, Homo sapiens
gctcctgcaccctgg

SEQ ID NO: 169520 - DNA, 15 bp, Homo sapiens
agctcctgcaccctg

SEQ ID NO: 169521 - DNA, 15 bp, Homo sapiens
tagctcctgcaccct

SEQ ID NO: 169522 - DNA, 15 bp, Homo sapiens
ttagctcctgcaccc

SEQ ID NO: 169523 - DNA, 15 bp, Homo sapiens
attagctcctgcacc

SEQ ID NO: 169524 - DNA, 15 bp, Homo sapiens
cattagctcctgcac

SEQ ID NO: 169525 - DNA, 15 bp, Homo sapiens
ccattagctcctgca

SEQ ID NO: 169526 - DNA, 15 bp, Homo sapiens
tccattagctcctgc

SEQ ID NO: 169527 - DNA, 15 bp, Homo sapiens
atccattagctcctg

SEQ ID NO: 169528 - DNA, 15 bp, Homo sapiens
aatccattagctcct

SEQ ID NO: 169529 - DNA, 15 bp, Homo sapiens
gaatccattagctcc

SEQ ID NO: 169530 - DNA, 15 bp, Homo sapiens
tgaatccattagctc

SEQ ID NO: 169531 - DNA, 15 bp, Homo sapiens
atgaatccattagct

SEQ ID NO: 169532 - DNA, 15 bp, Homo sapiens
catgaatccattagc

SEQ ID NO: 169533 - DNA, 15 bp, Homo sapiens
tcatgaatccattag

SEQ ID NO: 169534 - DNA, 15 bp, Homo sapiens
ctcatgaatccatta

SEQ ID NO: 169535 - DNA, 15 bp, Homo sapiens
gctcatgaatccatt

SEQ ID NO: 169536 - DNA, 15 bp, Homo sapiens
tgctcatgaatccat

SEQ ID NO: 169537 - DNA, 15 bp, Homo sapiens
ctgctcatgaatcca

SEQ ID NO: 169538 - DNA, 15 bp, Homo sapiens
gctgctcatgaatcc

SEQ ID NO: 169539 - DNA, 15 bp, Homo sapiens
agctgctcatgaatc

SEQ ID NO: 169540 - DNA, 15 bp, Homo sapiens
gagctgctcatgaat

SEQ ID NO: 169541 - DNA, 15 bp, Homo sapiens
agagctgctcatgaa

SEQ ID NO: 169542 - DNA, 15 bp, Homo sapiens
gagagctgctcatga

SEQ ID NO: 169543 - DNA, 15 bp, Homo sapiens
ggagagctgctcatg

SEQ ID NO: 169544 - DNA, 15 bp, Homo sapiens
tggagagctgctcat

SEQ ID NO: 169545 - DNA, 15 bp, Homo sapiens
gtggagagctgctca

SEQ ID NO: 169546 - DNA, 15 bp, Homo sapiens
tgtggagagctgctc

SEQ ID NO: 169547 - DNA, 15 bp, Homo sapiens
ctgtggagagctgct

SEQ ID NO: 169548 - DNA, 15 bp, Homo sapiens
gctgtggagagctgc

SEQ ID NO: 169549 - DNA, 15 bp, Homo sapiens
ggctgtggagagctg

SEQ ID NO: 169550 - DNA, 15 bp, Homo sapiens
gggctgtggagagct

SEQ ID NO: 169551 - DNA, 15 bp, Homo sapiens
agggctgtggagagc

SEQ ID NO: 169552 - DNA, 15 bp, Homo sapiens
cagggctgtggagag

SEQ ID NO: 169553 - DNA, 15 bp, Homo sapiens
tcagggctgtggaga

SEQ ID NO: 169554 - DNA, 15 bp, Homo sapiens
ctcagggctgtggag

SEQ ID NO: 169555 - DNA, 15 bp, Homo sapiens
actcagggctgtgga

SEQ ID NO: 169556 - DNA, 15 bp, Homo sapiens
cactcagggctgtgg

SEQ ID NO: 169557 - DNA, 15 bp, Homo sapiens
gcactcagggctgtg

SEQ ID NO: 169558 - DNA, 15 bp, Homo sapiens
ggcactcagggctgt

SEQ ID NO: 169559 - DNA, 15 bp, Homo sapiens
tggcactcagggctg

SEQ ID NO: 169560 - DNA, 15 bp, Homo sapiens
ctggcactcagggct

SEQ ID NO: 169561 - DNA, 15 bp, Homo sapiens
gctggcactcagggc

SEQ ID NO: 169562 - DNA, 15 bp, Homo sapiens
tgctggcactcaggg

SEQ ID NO: 169563 - DNA, 15 bp, Homo sapiens
atgctggcactcagg

SEQ ID NO: 169564 - DNA, 15 bp, Homo sapiens
gatgctggcactcag

SEQ ID NO: 169565 - DNA, 15 bp, Homo sapiens
ggatgctggcactca

SEQ ID NO: 169566 - DNA, 15 bp, Homo sapiens
tggatgctggcactc

SEQ ID NO: 169567 - DNA, 15 bp, Homo sapiens
gtggatgctggcact

SEQ ID NO: 169568 - DNA, 15 bp, Homo sapiens
cgtggatgctggcac

SEQ ID NO: 169569 - DNA, 15 bp, Homo sapiens
acgtggatgctggca

SEQ ID NO: 169570 - DNA, 15 bp, Homo sapiens
cacgtggatgctggc

SEQ ID NO: 169571 - DNA, 15 bp, Homo sapiens
ccacgtggatgctgg

SEQ ID NO: 169572 - DNA, 15 bp, Homo sapiens
tccacgtggatgctg

SEQ ID NO: 169573 - DNA, 15 bp, Homo sapiens
ttccacgtggatgct

SEQ ID NO: 169574 - DNA, 15 bp, Homo sapiens
cttccacgtggatgc

SEQ ID NO: 169575 - DNA, 15 bp, Homo sapiens
ccttccacgtggatg

SEQ ID NO: 169576 - DNA, 15 bp, Homo sapiens
cccttccacgtggat

SEQ ID NO: 169577 - DNA, 15 bp, Homo sapiens
gcccttccacgtgga

SEQ ID NO: 169578 - DNA, 15 bp, Homo sapiens
cgcccttccacgtgg

SEQ ID NO: 169579 - DNA, 15 bp, Homo sapiens
ccgcccttccacgtg

SEQ ID NO: 169580 - DNA, 15 bp, Homo sapiens
gccgcccttccacgt

SEQ ID NO: 169581 - DNA, 15 bp, Homo sapiens
agccgcccttccacg

SEQ ID NO: 169582 - DNA, 15 bp, Homo sapiens
cagccgcccttccac

SEQ ID NO: 169583 - DNA, 15 bp, Homo sapiens
acagccgcccttcca

SEQ ID NO: 169584 - DNA, 15 bp, Homo sapiens
aacagccgcccttcc

SEQ ID NO: 169585 - DNA, 15 bp, Homo sapiens
taacagccgcccttc

SEQ ID NO: 169586 - DNA, 15 bp, Homo sapiens
ctaacagccgccctt

SEQ ID NO: 169587 - DNA, 15 bp, Homo sapiens
gctaacagccgccct

SEQ ID NO: 169588 - DNA, 15 bp, Homo sapiens
agctaacagccgccc

SEQ ID NO: 169589 - DNA, 15 bp, Homo sapiens
aagctaacagccgcc

SEQ ID NO: 169590 - DNA, 15 bp, Homo sapiens
caagctaacagccgc

SEQ ID NO: 169591 - DNA, 15 bp, Homo sapiens
tcaagctaacagccg

SEQ ID NO: 169592 - DNA, 15 bp, Homo sapiens
atcaagctaacagcc

SEQ ID NO: 169593 - DNA, 15 bp, Homo sapiens
aatcaagctaacagc

SEQ ID NO: 169594 - DNA, 15 bp, Homo sapiens
taatcaagctaacag

SEQ ID NO: 169595 - DNA, 15 bp, Homo sapiens
gtaatcaagctaaca

SEQ ID NO: 169596 - DNA, 15 bp, Homo sapiens
tgtaatcaagctaac

SEQ ID NO: 169597 - DNA, 15 bp, Homo sapiens
ctgtaatcaagctaa

SEQ ID NO: 169598 - DNA, 15 bp, Homo sapiens
cctgtaatcaagcta

SEQ ID NO: 169599 - DNA, 15 bp, Homo sapiens
gcctgtaatcaagct

SEQ ID NO: 169600 - DNA, 15 bp, Homo sapiens
cgcctgtaatcaagc

SEQ ID NO: 169601 - DNA, 15 bp, Homo sapiens
gcgcctgtaatcaag

SEQ ID NO: 169602 - DNA, 15 bp, Homo sapiens
ggcgcctgtaatcaa

SEQ ID NO: 169603 - DNA, 15 bp, Homo sapiens
cggcgcctgtaatca

SEQ ID NO: 169604 - DNA, 15 bp, Homo sapiens
gcggcgcctgtaatc

SEQ ID NO: 169605 - DNA, 15 bp, Homo sapiens
tgcggcgcctgtaat

SEQ ID NO: 169606 - DNA, 15 bp, Homo sapiens
ctgcggcgcctgtaa

SEQ ID NO: 169607 - DNA, 15 bp, Homo sapiens
gctgcggcgcctgta

SEQ ID NO: 169608 - DNA, 15 bp, Homo sapiens
tgctgcggcgcctgt

SEQ ID NO: 169609 - DNA, 15 bp, Homo sapiens
ctgctgcggcgcctg

SEQ ID NO: 169610 - DNA, 15 bp, Homo sapiens
gctgctgcggcgcct

SEQ ID NO: 169611 - DNA, 15 bp, Homo sapiens
agctgctgcggcgcc

SEQ ID NO: 169612 - DNA, 15 bp, Homo sapiens
aagctgctgcggcgc

SEQ ID NO: 169613 - DNA, 15 bp, Homo sapiens
gaagctgctgcggcg

SEQ ID NO: 169614 - DNA, 15 bp, Homo sapiens
ggaagctgctgcggc

SEQ ID NO: 169615 - DNA, 15 bp, Homo sapiens
cggaagctgctgcgg

SEQ ID NO: 169616 - DNA, 15 bp, Homo sapiens
ccggaagctgctgcg

SEQ ID NO: 169617 - DNA, 15 bp, Homo sapiens
cccggaagctgctgc

SEQ ID NO: 169618 - DNA, 15 bp, Homo sapiens
tcccggaagctgctg

SEQ ID NO: 169619 - DNA, 15 bp, Homo sapiens
ctcccggaagctgct

SEQ ID NO: 169620 - DNA, 15 bp, Homo sapiens
cctcccggaagctgc

SEQ ID NO: 169621 - DNA, 15 bp, Homo sapiens
ccctcccggaagctg

SEQ ID NO: 169622 - DNA, 15 bp, Homo sapiens
cccctcccggaagct

SEQ ID NO: 169623 - DNA, 15 bp, Homo sapiens
tcccctcccggaagc

SEQ ID NO: 169624 - DNA, 15 bp, Homo sapiens
ttcccctcccggaag

SEQ ID NO: 169625 - DNA, 15 bp, Homo sapiens
cttcccctcccggaa

SEQ ID NO: 169626 - DNA, 15 bp, Homo sapiens
acttcccctcccgga

SEQ ID NO: 169627 - DNA, 15 bp, Homo sapiens
cacttcccctcccgg

SEQ ID NO: 169628 - DNA, 15 bp, Homo sapiens
acacttcccctcccg

SEQ ID NO: 169629 - DNA, 15 bp, Homo sapiens
aacacttcccctccc

SEQ ID NO: 169630 - DNA, 15 bp, Homo sapiens
aaacacttcccctcc

SEQ ID NO: 169631 - DNA, 15 bp, Homo sapiens
taaacacttcccctc

SEQ ID NO: 169632 - DNA, 15 bp, Homo sapiens
ttaaacacttcccct

SEQ ID NO: 169633 - DNA, 15 bp, Homo sapiens
attaaacacttcccc

SEQ ID NO: 169634 - DNA, 15 bp, Homo sapiens
aattaaacacttccc

SEQ ID NO: 169635 - DNA, 15 bp, Homo sapiens
caattaaacacttcc

SEQ ID NO: 169636 - DNA, 15 bp, Homo sapiens
ccaattaaacacttc

SEQ ID NO: 169637 - DNA, 15 bp, Homo sapiens
cccaattaaacactt

SEQ ID NO: 169638 - DNA, 15 bp, Homo sapiens
ccccaattaaacact

SEQ ID NO: 169639 - DNA, 15 bp, Homo sapiens
cccccaattaaacac

SEQ ID NO: 169640 - DNA, 15 bp, Homo sapiens
acccccaattaaaca

SEQ ID NO: 169641 - DNA, 15 bp, Homo sapiens
aacccccaattaaac

SEQ ID NO: 169642 - DNA, 15 bp, Homo sapiens
aaacccccaattaaa

SEQ ID NO: 169643 - DNA, 15 bp, Homo sapiens
aaaacccccaattaa

SEQ ID NO: 169644 - DNA, 15 bp, Homo sapiens
taaaacccccaatta

SEQ ID NO: 169645 - DNA, 15 bp, Homo sapiens
ataaaacccccaatt

SEQ ID NO: 169646 - DNA, 15 bp, Homo sapiens
aataaaacccccaat

SEQ ID NO: 169647 - DNA, 15 bp, Homo sapiens
aaataaaacccccaa

SEQ ID NO: 169648 - DNA, 15 bp, Homo sapiens
gaaataaaaccccca

SEQ ID NO: 169649 - DNA, 15 bp, Homo sapiens
ggaaataaaaccccc

SEQ ID NO: 169650 - DNA, 15 bp, Homo sapiens
tggaaataaaacccc

SEQ ID NO: 169651 - DNA, 15 bp, Homo sapiens
ctggaaataaaaccc

SEQ ID NO: 169652 - DNA, 15 bp, Homo sapiens
gctggaaataaaacc

SEQ ID NO: 169653 - DNA, 15 bp, Homo sapiens
tgctggaaataaaac

SEQ ID NO: 169654 - DNA, 15 bp, Homo sapiens
ctgctggaaataaaa

SEQ ID NO: 169655 - DNA, 15 bp, Homo sapiens
gctgctggaaataaa

SEQ ID NO: 169656 - DNA, 15 bp, Homo sapiens
tgctgctggaaataa

SEQ ID NO: 169657 - DNA, 15 bp, Homo sapiens
ctgctgctggaaata

SEQ ID NO: 169658 - DNA, 15 bp, Homo sapiens
cctgctgctggaaat

SEQ ID NO: 169659 - DNA, 15 bp, Homo sapiens
ccctgctgctggaaa

SEQ ID NO: 169660 - DNA, 15 bp, Homo sapiens
accctgctgctggaa

SEQ ID NO: 169661 - DNA, 15 bp, Homo sapiens
gaccctgctgctgga

SEQ ID NO: 169662 - DNA, 15 bp, Homo sapiens
agaccctgctgctgg

SEQ ID NO: 169663 - DNA, 15 bp, Homo sapiens
cagaccctgctgctg

SEQ ID NO: 169664 - DNA, 15 bp, Homo sapiens
ccagaccctgctgct

SEQ ID NO: 169665 - DNA, 15 bp, Homo sapiens
gccagaccctgctgc

SEQ ID NO: 169666 - DNA, 15 bp, Homo sapiens
agccagaccctgctg

SEQ ID NO: 169667 - DNA, 15 bp, Homo sapiens
aagccagaccctgct

SEQ ID NO: 169668 - DNA, 15 bp, Homo sapiens
taagccagaccctgc

SEQ ID NO: 169669 - DNA, 15 bp, Homo sapiens
ttaagccagaccctg

SEQ ID NO: 169670 - DNA, 15 bp, Homo sapiens
attaagccagaccct

SEQ ID NO: 169671 - DNA, 15 bp, Homo sapiens
cattaagccagaccc

SEQ ID NO: 169672 - DNA, 15 bp, Homo sapiens
tcattaagccagacc

SEQ ID NO: 169673 - DNA, 15 bp, Homo sapiens
ttcattaagccagac

SEQ ID NO: 169674 - DNA, 15 bp, Homo sapiens
tttcattaagccaga

SEQ ID NO: 169675 - DNA, 15 bp, Homo sapiens
atttcattaagccag

SEQ ID NO: 169676 - DNA, 15 bp, Homo sapiens
tatttcattaagcca

SEQ ID NO: 169677 - DNA, 15 bp, Homo sapiens
atatttcattaagcc

SEQ ID NO: 169678 - DNA, 15 bp, Homo sapiens
gatatttcattaagc

SEQ ID NO: 169679 - DNA, 15 bp, Homo sapiens
ggatatttcattaag

SEQ ID NO: 169680 - DNA, 15 bp, Homo sapiens
gggatatttcattaa

SEQ ID NO: 169681 - DNA, 15 bp, Homo sapiens
agggatatttcatta

SEQ ID NO: 169682 - DNA, 15 bp, Homo sapiens
cagggatatttcatt

SEQ ID NO: 169683 - DNA, 15 bp, Homo sapiens
ccagggatatttcat

SEQ ID NO: 169684 - DNA, 15 bp, Homo sapiens
cccagggatatttca

SEQ ID NO: 169685 - DNA, 15 bp, Homo sapiens
gcccagggatatttc

SEQ ID NO: 169686 - DNA, 15 bp, Homo sapiens
ggcccagggatattt

SEQ ID NO: 169687 - DNA, 15 bp, Homo sapiens
aggcccagggatatt

SEQ ID NO: 169688 - DNA, 15 bp, Homo sapiens
gaggcccagggatat

SEQ ID NO: 169689 - DNA, 15 bp, Homo sapiens
ggaggcccagggata

SEQ ID NO: 169690 - DNA, 15 bp, Homo sapiens
aggaggcccagggat

SEQ ID NO: 169691 - DNA, 15 bp, Homo sapiens
caggaggcccaggga

SEQ ID NO: 169692 - DNA, 15 bp, Homo sapiens
ccaggaggcccaggg

SEQ ID NO: 169693 - DNA, 15 bp, Homo sapiens
gccaggaggcccagg

SEQ ID NO: 169694 - DNA, 15 bp, Homo sapiens
tgccaggaggcccag

SEQ ID NO: 169695 - DNA, 15 bp, Homo sapiens
atgccaggaggccca

SEQ ID NO: 169696 - DNA, 15 bp, Homo sapiens
catgccaggaggccc

SEQ ID NO: 169697 - DNA, 15 bp, Homo sapiens
acatgccaggaggcc

SEQ ID NO: 169698 - DNA, 15 bp, Homo sapiens
cacatgccaggaggc

SEQ ID NO: 169699 - DNA, 15 bp, Homo sapiens
ccacatgccaggagg

SEQ ID NO: 169700 - DNA, 15 bp, Homo sapiens
gccacatgccaggag

SEQ ID NO: 169701 - DNA, 15 bp, Homo sapiens
agccacatgccagga

SEQ ID NO: 169702 - DNA, 15 bp, Homo sapiens
cagccacatgccagg

SEQ ID NO: 169703 - DNA, 15 bp, Homo sapiens
gcagccacatgccag

SEQ ID NO: 169704 - DNA, 15 bp, Homo sapiens
ggcagccacatgcca

SEQ ID NO: 169705 - DNA, 15 bp, Homo sapiens
gggcagccacatgcc

SEQ ID NO: 169706 - DNA, 15 bp, Homo sapiens
agggcagccacatgc

SEQ ID NO: 169707 - DNA, 15 bp, Homo sapiens
cagggcagccacatg

SEQ ID NO: 169708 - DNA, 15 bp, Homo sapiens
gcagggcagccacat

SEQ ID NO: 169709 - DNA, 15 bp, Homo sapiens
agcagggcagccaca

SEQ ID NO: 169710 - DNA, 15 bp, Homo sapiens
cagcagggcagccac

SEQ ID NO: 169711 - DNA, 15 bp, Homo sapiens
gcagcagggcagcca

SEQ ID NO: 169712 - DNA, 15 bp, Homo sapiens
ggcagcagggcagcc

SEQ ID NO: 169713 - DNA, 15 bp, Homo sapiens
aggcagcagggcagc

SEQ ID NO: 169714 - DNA, 15 bp, Homo sapiens
gaggcagcagggcag

SEQ ID NO: 169715 - DNA, 15 bp, Homo sapiens
ggaggcagcagggca

SEQ ID NO: 169716 - DNA, 15 bp, Homo sapiens
gggaggcagcagggc

SEQ ID NO: 169717 - DNA, 15 bp, Homo sapiens
agggaggcagcaggg

SEQ ID NO: 169718 - DNA, 15 bp, Homo sapiens
cagggaggcagcagg

SEQ ID NO: 169719 - DNA, 15 bp, Homo sapiens
acagggaggcagcag

SEQ ID NO: 169720 - DNA, 15 bp, Homo sapiens
cacagggaggcagca

SEQ ID NO: 169721 - DNA, 15 bp, Homo sapiens
acacagggaggcagc

SEQ ID NO: 169722 - DNA, 15 bp, Homo sapiens
aacacagggaggcag

SEQ ID NO: 169723 - DNA, 15 bp, Homo sapiens
caacacagggaggca

SEQ ID NO: 169724 - DNA, 15 bp, Homo sapiens
tcaacacagggaggc

SEQ ID NO: 169725 - DNA, 15 bp, Homo sapiens
gtcaacacagggagg

SEQ ID NO: 169726 - DNA, 15 bp, Homo sapiens
tgtcaacacagggag

SEQ ID NO: 169727 - DNA, 15 bp, Homo sapiens
ttgtcaacacaggga

SEQ ID NO: 169728 - DNA, 15 bp, Homo sapiens
cttgtcaacacaggg

SEQ ID NO: 169729 - DNA, 15 bp, Homo sapiens
gcttgtcaacacagg

SEQ ID NO: 169730 - DNA, 15 bp, Homo sapiens
ggcttgtcaacacag

SEQ ID NO: 169731 - DNA, 15 bp, Homo sapiens
aggcttgtcaacaca

SEQ ID NO: 169732 - DNA, 15 bp, Homo sapiens
aaggcttgtcaacac

SEQ ID NO: 169733 - DNA, 15 bp, Homo sapiens
caaggcttgtcaaca

SEQ ID NO: 169734 - DNA, 15 bp, Homo sapiens
tcaaggcttgtcaac

SEQ ID NO: 169735 - DNA, 15 bp, Homo sapiens
ctcaaggcttgtcaa

SEQ ID NO: 169736 - DNA, 15 bp, Homo sapiens
gctcaaggcttgtca

SEQ ID NO: 169737 - DNA, 15 bp, Homo sapiens
ggctcaaggcttgtc

SEQ ID NO: 169738 - DNA, 15 bp, Homo sapiens
tggctcaaggcttgt

SEQ ID NO: 169739 - DNA, 15 bp, Homo sapiens
ttggctcaaggcttg

SEQ ID NO: 169740 - DNA, 15 bp, Homo sapiens
tttggctcaaggctt

SEQ ID NO: 169741 - DNA, 15 bp, Homo sapiens
atttggctcaaggct

SEQ ID NO: 169742 - DNA, 15 bp, Homo sapiens
gatttggctcaaggc

SEQ ID NO: 169743 - DNA, 15 bp, Homo sapiens
ggatttggctcaagg

SEQ ID NO: 169744 - DNA, 15 bp, Homo sapiens
gggatttggctcaag

SEQ ID NO: 169745 - DNA, 15 bp, Homo sapiens
agggatttggctcaa

SEQ ID NO: 169746 - DNA, 15 bp, Homo sapiens
cagggatttggctca

SEQ ID NO: 169747 - DNA, 15 bp, Homo sapiens
ccagggatttggctc

SEQ ID NO: 169748 - DNA, 15 bp, Homo sapiens
gccagggatttggct

SEQ ID NO: 169749 - DNA, 15 bp, Homo sapiens
agccagggatttggc

SEQ ID NO: 169750 - DNA, 15 bp, Homo sapiens
cagccagggatttgg

SEQ ID NO: 169751 - DNA, 15 bp, Homo sapiens
acagccagggatttg

SEQ ID NO: 169752 - DNA, 15 bp, Homo sapiens
cacagccagggattt

SEQ ID NO: 169753 - DNA, 15 bp, Homo sapiens
tcacagccagggatt

SEQ ID NO: 169754 - DNA, 15 bp, Homo sapiens
atcacagccagggat

SEQ ID NO: 169755 - DNA, 15 bp, Homo sapiens
aatcacagccaggga

SEQ ID NO: 169756 - DNA, 15 bp, Homo sapiens
aaatcacagccaggg

SEQ ID NO: 169757 - DNA, 15 bp, Homo sapiens
taaatcacagccagg

SEQ ID NO: 169758 - DNA, 15 bp, Homo sapiens
gtaaatcacagccag

SEQ ID NO: 169759 - DNA, 15 bp, Homo sapiens
ggtaaatcacagcca

SEQ ID NO: 169760 - DNA, 15 bp, Homo sapiens
tggtaaatcacagcc

SEQ ID NO: 169761 - DNA, 15 bp, Homo sapiens
ctggtaaatcacagc

SEQ ID NO: 169762 - DNA, 15 bp, Homo sapiens
gctggtaaatcacag

SEQ ID NO: 169763 - DNA, 15 bp, Homo sapiens
agctggtaaatcaca

SEQ ID NO: 169764 - DNA, 15 bp, Homo sapiens
gagctggtaaatcac

SEQ ID NO: 169765 - DNA, 15 bp, Homo sapiens
ggagctggtaaatca

SEQ ID NO: 169766 - DNA, 15 bp, Homo sapiens
aggagctggtaaatc

SEQ ID NO: 169767 - DNA, 15 bp, Homo sapiens
gaggagctggtaaat

SEQ ID NO: 169768 - DNA, 15 bp, Homo sapiens
ggaggagctggtaaa

SEQ ID NO: 169769 - DNA, 15 bp, Homo sapiens
gggaggagctggtaa

SEQ ID NO: 169770 - DNA, 15 bp, Homo sapiens
tgggaggagctggta

SEQ ID NO: 169771 - DNA, 15 bp, Homo sapiens
ttgggaggagctggt

SEQ ID NO: 169772 - DNA, 15 bp, Homo sapiens
cttgggaggagctgg

SEQ ID NO: 169773 - DNA, 15 bp, Homo sapiens
acttgggaggagctg

SEQ ID NO: 169774 - DNA, 15 bp, Homo sapiens
gacttgggaggagct

SEQ ID NO: 169775 - DNA, 15 bp, Homo sapiens
tgacttgggaggagc

SEQ ID NO: 169776 - DNA, 15 bp, Homo sapiens
ctgacttgggaggag

SEQ ID NO: 169777 - DNA, 15 bp, Homo sapiens
tctgacttgggagga

SEQ ID NO: 169778 - DNA, 15 bp, Homo sapiens
atctgacttgggagg

SEQ ID NO: 169779 - DNA, 15 bp, Homo sapiens
tatctgacttgggag

SEQ ID NO: 169780 - DNA, 15 bp, Homo sapiens
ttatctgacttggga

SEQ ID NO: 169781 - DNA, 15 bp, Homo sapiens
tttatctgacttggg

SEQ ID NO: 169782 - DNA, 15 bp, Homo sapiens
ctttatctgacttgg

SEQ ID NO: 169783 - DNA, 15 bp, Homo sapiens
gctttatctgacttg

SEQ ID NO: 169784 - DNA, 15 bp, Homo sapiens
agctttatctgactt

SEQ ID NO: 169785 - DNA, 15 bp, Homo sapiens
cagctttatctgact

SEQ ID NO: 169786 - DNA, 15 bp, Homo sapiens
ccagctttatctgac

SEQ ID NO: 169787 - DNA, 15 bp, Homo sapiens
cccagctttatctga

SEQ ID NO: 169788 - DNA, 15 bp, Homo sapiens
acccagctttatctg

SEQ ID NO: 169789 - DNA, 15 bp, Homo sapiens
aacccagctttatct

SEQ ID NO: 169790 - DNA, 15 bp, Homo sapiens
caacccagctttatc

SEQ ID NO: 169791 - DNA, 15 bp, Homo sapiens
tcaacccagctttat

SEQ ID NO: 169792 - DNA, 15 bp, Homo sapiens
atcaacccagcttta

SEQ ID NO: 169793 - DNA, 15 bp, Homo sapiens
tatcaacccagcttt

SEQ ID NO: 169794 - DNA, 15 bp, Homo sapiens
ttatcaacccagctt

SEQ ID NO: 169795 - DNA, 15 bp, Homo sapiens
cttatcaacccagct

SEQ ID NO: 169796 - DNA, 15 bp, Homo sapiens
acttatcaacccagc

SEQ ID NO: 169797 - DNA, 15 bp, Homo sapiens
tacttatcaacccag

SEQ ID NO: 169798 - DNA, 15 bp, Homo sapiens
ctacttatcaaccca

SEQ ID NO: 169799 - DNA, 15 bp, Homo sapiens
cctacttatcaaccc

SEQ ID NO: 169800 - DNA, 15 bp, Homo sapiens
ccctacttatcaacc

SEQ ID NO: 169801 - DNA, 15 bp, Homo sapiens
gccctacttatcaac

SEQ ID NO: 169802 - DNA, 15 bp, Homo sapiens
agccctacttatcaa

SEQ ID NO: 169803 - DNA, 15 bp, Homo sapiens
tagccctacttatca

SEQ ID NO: 169804 - DNA, 15 bp, Homo sapiens
atagccctacttatc

SEQ ID NO: 169805 - DNA, 15 bp, Homo sapiens
catagccctacttat

SEQ ID NO: 169806 - DNA, 15 bp, Homo sapiens
gcatagccctactta

SEQ ID NO: 169807 - DNA, 15 bp, Homo sapiens
ggcatagccctactt

SEQ ID NO: 169808 - DNA, 15 bp, Homo sapiens
gggcatagccctact

SEQ ID NO: 169809 - DNA, 15 bp, Homo sapiens
agggcatagccctac

SEQ ID NO: 169810 - DNA, 15 bp, Homo sapiens
cagggcatagcccta

SEQ ID NO: 169811 - DNA, 15 bp, Homo sapiens
tcagggcatagccct

SEQ ID NO: 169812 - DNA, 15 bp, Homo sapiens
gtcagggcatagccc

SEQ ID NO: 169813 - DNA, 15 bp, Homo sapiens
ggtcagggcatagcc

SEQ ID NO: 169814 - DNA, 15 bp, Homo sapiens
gggtcagggcatagc

SEQ ID NO: 169815 - DNA, 15 bp, Homo sapiens
tgggtcagggcatag

SEQ ID NO: 169816 - DNA, 15 bp, Homo sapiens
gtgggtcagggcata

SEQ ID NO: 169817 - DNA, 15 bp, Homo sapiens
ggtgggtcagggcat

SEQ ID NO: 169818 - DNA, 15 bp, Homo sapiens
gggtgggtcagggca

SEQ ID NO: 169819 - DNA, 15 bp, Homo sapiens
ggggtgggtcagggc

SEQ ID NO: 169820 - DNA, 15 bp, Homo sapiens
tggggtgggtcaggg

SEQ ID NO: 169821 - DNA, 15 bp, Homo sapiens
gtggggtgggtcagg

SEQ ID NO: 169822 - DNA, 15 bp, Homo sapiens
ggtggggtgggtcag

SEQ ID NO: 169823 - DNA, 15 bp, Homo sapiens
aggtggggtgggtca

SEQ ID NO: 169824 - DNA, 15 bp, Homo sapiens
gaggtggggtgggtc

SEQ ID NO: 169825 - DNA, 15 bp, Homo sapiens
ggaggtggggtgggt

SEQ ID NO: 169826 - DNA, 15 bp, Homo sapiens
tggaggtggggtggg

SEQ ID NO: 169827 - DNA, 15 bp, Homo sapiens
ctggaggtggggtgg

SEQ ID NO: 169828 - DNA, 15 bp, Homo sapiens
gctggaggtggggtg

SEQ ID NO: 169829 - DNA, 15 bp, Homo sapiens
ggctggaggtggggt

SEQ ID NO: 169830 - DNA, 15 bp, Homo sapiens
tggctggaggtgggg

SEQ ID NO: 169831 - DNA, 15 bp, Homo sapiens
ttggctggaggtggg

SEQ ID NO: 169832 - DNA, 15 bp, Homo sapiens
cttggctggaggtgg

SEQ ID NO: 169833 - DNA, 15 bp, Homo sapiens
ccttggctggaggtg

SEQ ID NO: 169834 - DNA, 15 bp, Homo sapiens
accttggctggaggt

SEQ ID NO: 169835 - DNA, 15 bp, Homo sapiens
caccttggctggagg

SEQ ID NO: 169836 - DNA, 15 bp, Homo sapiens
ccaccttggctggag

SEQ ID NO: 169837 - DNA, 15 bp, Homo sapiens
cccaccttggctgga

SEQ ID NO: 169838 - DNA, 15 bp, Homo sapiens
gcccaccttggctgg

SEQ ID NO: 169839 - DNA, 15 bp, Homo sapiens
tgcccaccttggctg

SEQ ID NO: 169840 - DNA, 15 bp, Homo sapiens
atgcccaccttggct

SEQ ID NO: 169841 - DNA, 15 bp, Homo sapiens
gatgcccaccttggc

SEQ ID NO: 169842 - DNA, 15 bp, Homo sapiens
agatgcccaccttgg

SEQ ID NO: 169843 - DNA, 15 bp, Homo sapiens
cagatgcccaccttg

SEQ ID NO: 169844 - DNA, 15 bp, Homo sapiens
ccagatgcccacctt

SEQ ID NO: 169845 - DNA, 15 bp, Homo sapiens
cccagatgcccacct

SEQ ID NO: 169846 - DNA, 15 bp, Homo sapiens
ccccagatgcccacc

SEQ ID NO: 169847 - DNA, 15 bp, Homo sapiens
tccccagatgcccac

SEQ ID NO: 169848 - DNA, 15 bp, Homo sapiens
atccccagatgccca

SEQ ID NO: 169849 - DNA, 15 bp, Homo sapiens
gatccccagatgccc

SEQ ID NO: 169850 - DNA, 15 bp, Homo sapiens
tgatccccagatgcc

SEQ ID NO: 169851 - DNA, 15 bp, Homo sapiens
atgatccccagatgc

SEQ ID NO: 169852 - DNA, 15 bp, Homo sapiens
catgatccccagatg

SEQ ID NO: 169853 - DNA, 15 bp, Homo sapiens
ccatgatccccagat

SEQ ID NO: 169854 - DNA, 15 bp, Homo sapiens
cccatgatccccaga

SEQ ID NO: 169855 - DNA, 15 bp, Homo sapiens
gcccatgatccccag

SEQ ID NO: 169856 - DNA, 15 bp, Homo sapiens
ggcccatgatcccca

SEQ ID NO: 169857 - DNA, 15 bp, Homo sapiens
gggcccatgatcccc

SEQ ID NO: 169858 - DNA, 15 bp, Homo sapiens
tgggcccatgatccc

SEQ ID NO: 169859 - DNA, 15 bp, Homo sapiens
ctgggcccatgatcc

SEQ ID NO: 169860 - DNA, 15 bp, Homo sapiens
gctgggcccatgatc

SEQ ID NO: 169861 - DNA, 15 bp, Homo sapiens
ggctgggcccatgat

SEQ ID NO: 169862 - DNA, 15 bp, Homo sapiens
tggctgggcccatga

SEQ ID NO: 169863 - DNA, 15 bp, Homo sapiens
ctggctgggcccatg

SEQ ID NO: 169864 - DNA, 15 bp, Homo sapiens
cctggctgggcccat

SEQ ID NO: 169865 - DNA, 15 bp, Homo sapiens
tcctggctgggccca

SEQ ID NO: 169866 - DNA, 15 bp, Homo sapiens
ttcctggctgggccc

SEQ ID NO: 169867 - DNA, 15 bp, Homo sapiens
gttcctggctgggcc

SEQ ID NO: 169868 - DNA, 15 bp, Homo sapiens
ggttcctggctgggc

SEQ ID NO: 169869 - DNA, 15 bp, Homo sapiens
tggttcctggctggg

SEQ ID NO: 169870 - DNA, 15 bp, Homo sapiens
ctggttcctggctgg

SEQ ID NO: 169871 - DNA, 15 bp, Homo sapiens
gctggttcctggctg

SEQ ID NO: 169872 - DNA, 15 bp, Homo sapiens
ggctggttcctggct

SEQ ID NO: 169873 - DNA, 15 bp, Homo sapiens
aggctggttcctggc

SEQ ID NO: 169874 - DNA, 15 bp, Homo sapiens
caggctggttcctgg

SEQ ID NO: 169875 - DNA, 15 bp, Homo sapiens
ccaggctggttcctg

SEQ ID NO: 169876 - DNA, 15 bp, Homo sapiens
gccaggctggttcct

SEQ ID NO: 169877 - DNA, 15 bp, Homo sapiens
agccaggctggttcc

SEQ ID NO: 169878 - DNA, 15 bp, Homo sapiens
aagccaggctggttc

SEQ ID NO: 169879 - DNA, 15 bp, Homo sapiens
aaagccaggctggtt

SEQ ID NO: 169880 - DNA, 15 bp, Homo sapiens
aaaagccaggctggt

SEQ ID NO: 169881 - DNA, 15 bp, Homo sapiens
taaaagccaggctgg

SEQ ID NO: 169882 - DNA, 15 bp, Homo sapiens
ttaaaagccaggctg

SEQ ID NO: 169883 - DNA, 15 bp, Homo sapiens
attaaaagccaggct

SEQ ID NO: 169884 - DNA, 15 bp, Homo sapiens
tattaaaagccaggc

SEQ ID NO: 169885 - DNA, 15 bp, Homo sapiens
atattaaaagccagg

SEQ ID NO: 169886 - DNA, 15 bp, Homo sapiens
aatattaaaagccag

SEQ ID NO: 169887 - DNA, 15 bp, Homo sapiens
aaatattaaaagcca

SEQ ID NO: 169888 - DNA, 15 bp, Homo sapiens
caaatattaaaagcc

SEQ ID NO: 169889 - DNA, 15 bp, Homo sapiens
tcaaatattaaaagc

SEQ ID NO: 169890 - DNA, 15 bp, Homo sapiens
atcaaatattaaaag

SEQ ID NO: 169891 - DNA, 15 bp, Homo sapiens
catcaaatattaaaa

SEQ ID NO: 169892 - DNA, 15 bp, Homo sapiens
acatcaaatattaaa

SEQ ID NO: 169893 - DNA, 15 bp, Homo sapiens
aacatcaaatattaa

SEQ ID NO: 169894 - DNA, 15 bp, Homo sapiens
taacatcaaatatta

SEQ ID NO: 169895 - DNA, 15 bp, Homo sapiens
ttaacatcaaatatt

SEQ ID NO: 169896 - DNA, 15 bp, Homo sapiens
attaacatcaaatat

SEQ ID NO: 169897 - DNA, 15 bp, Homo sapiens
cattaacatcaaata

SEQ ID NO: 169898 - DNA, 15 bp, Homo sapiens
tcattaacatcaaat

SEQ ID NO: 169899 - DNA, 15 bp, Homo sapiens
ttcattaacatcaaa

SEQ ID NO: 169900 - DNA, 15 bp, Homo sapiens
cttcattaacatcaa

SEQ ID NO: 169901 - DNA, 15 bp, Homo sapiens
ccttcattaacatca

SEQ ID NO: 169902 - DNA, 15 bp, Homo sapiens
cccttcattaacatc

SEQ ID NO: 169903 - DNA, 15 bp, Homo sapiens
acccttcattaacat

SEQ ID NO: 169904 - DNA, 15 bp, Homo sapiens
tacccttcattaaca

SEQ ID NO: 169905 - DNA, 15 bp, Homo sapiens
ttacccttcattaac

SEQ ID NO: 169906 - DNA, 15 bp, Homo sapiens
attacccttcattaa

SEQ ID NO: 169907 - DNA, 15 bp, Homo sapiens
aattacccttcatta

SEQ ID NO: 169908 - DNA, 15 bp, Homo sapiens
caattacccttcatt

SEQ ID NO: 169909 - DNA, 15 bp, Homo sapiens
tcaattacccttcat

SEQ ID NO: 169910 - DNA, 15 bp, Homo sapiens
gtcaattacccttca

SEQ ID NO: 169911 - DNA, 15 bp, Homo sapiens
tgtcaattacccttc

SEQ ID NO: 169912 - DNA, 15 bp, Homo sapiens
ctgtcaattaccctt

SEQ ID NO: 169913 - DNA, 15 bp, Homo sapiens
tctgtcaattaccct

SEQ ID NO: 169914 - DNA, 15 bp, Homo sapiens
atctgtcaattaccc

SEQ ID NO: 169915 - DNA, 15 bp, Homo sapiens
catctgtcaattacc

SEQ ID NO: 169916 - DNA, 15 bp, Homo sapiens
gcatctgtcaattac

SEQ ID NO: 169917 - DNA, 15 bp, Homo sapiens
tgcatctgtcaatta

SEQ ID NO: 169918 - DNA, 15 bp, Homo sapiens
gtgcatctgtcaatt

SEQ ID NO: 169919 - DNA, 15 bp, Homo sapiens
agtgcatctgtcaat

SEQ ID NO: 169920 - DNA, 15 bp, Homo sapiens
aagtgcatctgtcaa

SEQ ID NO: 169921 - DNA, 15 bp, Homo sapiens
caagtgcatctgtca

SEQ ID NO: 169922 - DNA, 15 bp, Homo sapiens
gcaagtgcatctgtc

SEQ ID NO: 169923 - DNA, 15 bp, Homo sapiens
tgcaagtgcatctgt

SEQ ID NO: 169924 - DNA, 15 bp, Homo sapiens
gtgcaagtgcatctg

SEQ ID NO: 169925 - DNA, 15 bp, Homo sapiens
tgtgcaagtgcatct

SEQ ID NO: 169926 - DNA, 15 bp, Homo sapiens
ctgtgcaagtgcatc

SEQ ID NO: 169927 - DNA, 15 bp, Homo sapiens
cctgtgcaagtgcat

SEQ ID NO: 169928 - DNA, 15 bp, Homo sapiens
gcctgtgcaagtgca

SEQ ID NO: 169929 - DNA, 15 bp, Homo sapiens
agcctgtgcaagtgc

SEQ ID NO: 169930 - DNA, 15 bp, Homo sapiens
gagcctgtgcaagtg

SEQ ID NO: 169931 - DNA, 15 bp, Homo sapiens
tgagcctgtgcaagt

SEQ ID NO: 169932 - DNA, 15 bp, Homo sapiens
gtgagcctgtgcaag

SEQ ID NO: 169933 - DNA, 15 bp, Homo sapiens
agtgagcctgtgcaa

SEQ ID NO: 169934 - DNA, 15 bp, Homo sapiens
cagtgagcctgtgca

SEQ ID NO: 169935 - DNA, 15 bp, Homo sapiens
tcagtgagcctgtgc

SEQ ID NO: 169936 - DNA, 15 bp, Homo sapiens
ctcagtgagcctgtg

SEQ ID NO: 169937 - DNA, 15 bp, Homo sapiens
gctcagtgagcctgt

SEQ ID NO: 169938 - DNA, 15 bp, Homo sapiens
cgctcagtgagcctg

SEQ ID NO: 169939 - DNA, 15 bp, Homo sapiens
tcgctcagtgagcct

SEQ ID NO: 169940 - DNA, 15 bp, Homo sapiens
ctcgctcagtgagcc

SEQ ID NO: 169941 - DNA, 15 bp, Homo sapiens
cctcgctcagtgagc

SEQ ID NO: 169942 - DNA, 15 bp, Homo sapiens
ccctcgctcagtgag

SEQ ID NO: 169943 - DNA, 15 bp, Homo sapiens
tccctcgctcagtga

SEQ ID NO: 169944 - DNA, 15 bp, Homo sapiens
gtccctcgctcagtg

SEQ ID NO: 169945 - DNA, 15 bp, Homo sapiens
tgtccctcgctcagt

SEQ ID NO: 169946 - DNA, 15 bp, Homo sapiens
gtgtccctcgctcag

SEQ ID NO: 169947 - DNA, 15 bp, Homo sapiens
tgtgtccctcgctca

SEQ ID NO: 169948 - DNA, 15 bp, Homo sapiens
ctgtgtccctcgctc

SEQ ID NO: 169949 - DNA, 15 bp, Homo sapiens
actgtgtccctcgct

SEQ ID NO: 169950 - DNA, 15 bp, Homo sapiens
cactgtgtccctcgc

SEQ ID NO: 169951 - DNA, 15 bp, Homo sapiens
tcactgtgtccctcg

SEQ ID NO: 169952 - DNA, 15 bp, Homo sapiens
atcactgtgtccctc

SEQ ID NO: 169953 - DNA, 15 bp, Homo sapiens
gatcactgtgtccct

SEQ ID NO: 169954 - DNA, 15 bp, Homo sapiens
ggatcactgtgtccc

SEQ ID NO: 169955 - DNA, 15 bp, Homo sapiens
aggatcactgtgtcc

SEQ ID NO: 169956 - DNA, 15 bp, Homo sapiens
aaggatcactgtgtc

SEQ ID NO: 169957 - DNA, 15 bp, Homo sapiens
aaaggatcactgtgt

SEQ ID NO: 169958 - DNA, 15 bp, Homo sapiens
caaaggatcactgtg

SEQ ID NO: 169959 - DNA, 15 bp, Homo sapiens
tcaaaggatcactgt

SEQ ID NO: 169960 - DNA, 15 bp, Homo sapiens
gtcaaaggatcactg

SEQ ID NO: 169961 - DNA, 15 bp, Homo sapiens
agtcaaaggatcact

SEQ ID NO: 169962 - DNA, 15 bp, Homo sapiens
gagtcaaaggatcac

SEQ ID NO: 169963 - DNA, 15 bp, Homo sapiens
agagtcaaaggatca

SEQ ID NO: 169964 - DNA, 15 bp, Homo sapiens
cagagtcaaaggatc

SEQ ID NO: 169965 - DNA, 15 bp, Homo sapiens
acagagtcaaaggat

SEQ ID NO: 169966 - DNA, 15 bp, Homo sapiens
cacagagtcaaagga

SEQ ID NO: 169967 - DNA, 15 bp, Homo sapiens
gcacagagtcaaagg

SEQ ID NO: 169968 - DNA, 15 bp, Homo sapiens
agcacagagtcaaag

SEQ ID NO: 169969 - DNA, 15 bp, Homo sapiens
tagcacagagtcaaa

SEQ ID NO: 169970 - DNA, 15 bp, Homo sapiens
ctagcacagagtcaa

SEQ ID NO: 169971 - DNA, 15 bp, Homo sapiens
actagcacagagtca

SEQ ID NO: 169972 - DNA, 15 bp, Homo sapiens
tactagcacagagtc

SEQ ID NO: 169973 - DNA, 15 bp, Homo sapiens
ttactagcacagagt

SEQ ID NO: 169974 - DNA, 15 bp, Homo sapiens
attactagcacagag

SEQ ID NO: 169975 - DNA, 15 bp, Homo sapiens
cattactagcacaga

SEQ ID NO: 169976 - DNA, 15 bp, Homo sapiens
gcattactagcacag

SEQ ID NO: 169977 - DNA, 15 bp, Homo sapiens
tgcattactagcaca

SEQ ID NO: 169978 - DNA, 15 bp, Homo sapiens
gtgcattactagcac

SEQ ID NO: 169979 - DNA, 15 bp, Homo sapiens
tgtgcattactagca

SEQ ID NO: 169980 - DNA, 15 bp, Homo sapiens
gtgtgcattactagc

SEQ ID NO: 169981 - DNA, 15 bp, Homo sapiens
tgtgtgcattactag

SEQ ID NO: 169982 - DNA, 15 bp, Homo sapiens
atgtgtgcattacta

SEQ ID NO: 169983 - DNA, 15 bp, Homo sapiens
gatgtgtgcattact

SEQ ID NO: 169984 - DNA, 15 bp, Homo sapiens
agatgtgtgcattac

SEQ ID NO: 169985 - DNA, 15 bp, Homo sapiens
cagatgtgtgcatta

SEQ ID NO: 169986 - DNA, 15 bp, Homo sapiens
acagatgtgtgcatt

SEQ ID NO: 169987 - DNA, 15 bp, Homo sapiens
cacagatgtgtgcat

SEQ ID NO: 169988 - DNA, 15 bp, Homo sapiens
gcacagatgtgtgca

SEQ ID NO: 169989 - DNA, 15 bp, Homo sapiens
tgcacagatgtgtgc

SEQ ID NO: 169990 - DNA, 15 bp, Homo sapiens
gtgcacagatgtgtg

SEQ ID NO: 169991 - DNA, 15 bp, Homo sapiens
tgtgcacagatgtgt

SEQ ID NO: 169992 - DNA, 15 bp, Homo sapiens
gtgtgcacagatgtg

SEQ ID NO: 169993 - DNA, 15 bp, Homo sapiens
tgtgtgcacagatgt

SEQ ID NO: 169994 - DNA, 15 bp, Homo sapiens
gtgtgtgcacagatg

SEQ ID NO: 169995 - DNA, 15 bp, Homo sapiens
ggtgtgtgcacagat

SEQ ID NO: 169996 - DNA, 15 bp, Homo sapiens
tggtgtgtgcacaga

SEQ ID NO: 169997 - DNA, 15 bp, Homo sapiens
gtggtgtgtgcacag

SEQ ID NO: 169998 - DNA, 15 bp, Homo sapiens
ggtggtgtgtgcaca

SEQ ID NO: 169999 - DNA, 15 bp, Homo sapiens
aggtggtgtgtgcac

SEQ ID NO: 170000 - DNA, 15 bp, Homo sapiens
gaggtggtgtgtgca

SEQ ID NO: 170001 - DNA, 15 bp, Homo sapiens
ggaggtggtgtgtgc

SEQ ID NO: 170002 - DNA, 15 bp, Homo sapiens
gggaggtggtgtgtg

SEQ ID NO: 170003 - DNA, 15 bp, Homo sapiens
ggggaggtggtgtgt

SEQ ID NO: 170004 - DNA, 15 bp, Homo sapiens
tggggaggtggtgtg

SEQ ID NO: 170005 - DNA, 15 bp, Homo sapiens
gtggggaggtggtgt

SEQ ID NO: 170006 - DNA, 15 bp, Homo sapiens
ggtggggaggtggtg

SEQ ID NO: 170007 - DNA, 15 bp, Homo sapiens
gggtggggaggtggt

SEQ ID NO: 170008 - DNA, 15 bp, Homo sapiens
agggtggggaggtgg

SEQ ID NO: 170009 - DNA, 15 bp, Homo sapiens
gagggtggggaggtg

SEQ ID NO: 170010 - DNA, 15 bp, Homo sapiens
ggagggtggggaggt

SEQ ID NO: 170011 - DNA, 15 bp, Homo sapiens
gggagggtggggagg

SEQ ID NO: 170012 - DNA, 15 bp, Homo sapiens
tgggagggtggggag

SEQ ID NO: 170013 - DNA, 15 bp, Homo sapiens
ttgggagggtgggga

SEQ ID NO: 170014 - DNA, 15 bp, Homo sapiens
gttgggagggtgggg

SEQ ID NO: 170015 - DNA, 15 bp, Homo sapiens
agttgggagggtggg

SEQ ID NO: 170016 - DNA, 15 bp, Homo sapiens
cagttgggagggtgg

SEQ ID NO: 170017 - DNA, 15 bp, Homo sapiens
ccagttgggagggtg

SEQ ID NO: 170018 - DNA, 15 bp, Homo sapiens
gccagttgggagggt

SEQ ID NO: 170019 - DNA, 15 bp, Homo sapiens
agccagttgggaggg

SEQ ID NO: 170020 - DNA, 15 bp, Homo sapiens
gagccagttgggagg

SEQ ID NO: 170021 - DNA, 15 bp, Homo sapiens
agagccagttgggag

SEQ ID NO: 170022 - DNA, 15 bp, Homo sapiens
cagagccagttggga

SEQ ID NO: 170023 - DNA, 15 bp, Homo sapiens
tcagagccagttggg

SEQ ID NO: 170024 - DNA, 15 bp, Homo sapiens
ttcagagccagttgg

SEQ ID NO: 170025 - DNA, 15 bp, Homo sapiens
gttcagagccagttg

SEQ ID NO: 170026 - DNA, 15 bp, Homo sapiens
tgttcagagccagtt

SEQ ID NO: 170027 - DNA, 15 bp, Homo sapiens
ctgttcagagccagt

SEQ ID NO: 170028 - DNA, 15 bp, Homo sapiens
tctgttcagagccag

SEQ ID NO: 170029 - DNA, 15 bp, Homo sapiens
ctctgttcagagcca

SEQ ID NO: 170030 - DNA, 15 bp, Homo sapiens
cctctgttcagagcc

SEQ ID NO: 170031 - DNA, 15 bp, Homo sapiens
ccctctgttcagagc

SEQ ID NO: 170032 - DNA, 15 bp, Homo sapiens
tccctctgttcagag

SEQ ID NO: 170033 - DNA, 15 bp, Homo sapiens
ctccctctgttcaga

SEQ ID NO: 170034 - DNA, 15 bp, Homo sapiens
gctccctctgttcag

SEQ ID NO: 170035 - DNA, 15 bp, Homo sapiens
tgctccctctgttca

SEQ ID NO: 170036 - DNA, 15 bp, Homo sapiens
ctgctccctctgttc

SEQ ID NO: 170037 - DNA, 15 bp, Homo sapiens
cctgctccctctgtt

SEQ ID NO: 170038 - DNA, 15 bp, Homo sapiens
tcctgctccctctgt

SEQ ID NO: 170039 - DNA, 15 bp, Homo sapiens
ttcctgctccctctg

SEQ ID NO: 170040 - DNA, 15 bp, Homo sapiens
attcctgctccctct

SEQ ID NO: 170041 - DNA, 15 bp, Homo sapiens
cattcctgctccctc

SEQ ID NO: 170042 - DNA, 15 bp, Homo sapiens
ccattcctgctccct

SEQ ID NO: 170043 - DNA, 15 bp, Homo sapiens
accattcctgctccc

SEQ ID NO: 170044 - DNA, 15 bp, Homo sapiens
caccattcctgctcc

SEQ ID NO: 170045 - DNA, 15 bp, Homo sapiens
gcaccattcctgctc

SEQ ID NO: 170046 - DNA, 15 bp, Homo sapiens
tgcaccattcctgct

SEQ ID NO: 170047 - DNA, 15 bp, Homo sapiens
ctgcaccattcctgc

SEQ ID NO: 170048 - DNA, 15 bp, Homo sapiens
gctgcaccattcctg

SEQ ID NO: 170049 - DNA, 15 bp, Homo sapiens
cgctgcaccattcct

SEQ ID NO: 170050 - DNA, 15 bp, Homo sapiens
ccgctgcaccattcc

SEQ ID NO: 170051 - DNA, 15 bp, Homo sapiens
gccgctgcaccattc

SEQ ID NO: 170052 - DNA, 15 bp, Homo sapiens
ggccgctgcaccatt

SEQ ID NO: 170053 - DNA, 15 bp, Homo sapiens
cggccgctgcaccat

SEQ ID NO: 170054 - DNA, 15 bp, Homo sapiens
ccggccgctgcacca

SEQ ID NO: 170055 - DNA, 15 bp, Homo sapiens
cccggccgctgcacc

SEQ ID NO: 170056 - DNA, 15 bp, Homo sapiens
ccccggccgctgcac

SEQ ID NO: 170057 - DNA, 15 bp, Homo sapiens
cccccggccgctgca

SEQ ID NO: 170058 - DNA, 15 bp, Homo sapiens
acccccggccgctgc

SEQ ID NO: 170059 - DNA, 15 bp, Homo sapiens
gacccccggccgctg

SEQ ID NO: 170060 - DNA, 15 bp, Homo sapiens
ggacccccggccgct

SEQ ID NO: 170061 - DNA, 15 bp, Homo sapiens
tggacccccggccgc

SEQ ID NO: 170062 - DNA, 15 bp, Homo sapiens
gtggacccccggccg

SEQ ID NO: 170063 - DNA, 15 bp, Homo sapiens
tgtggacccccggcc

SEQ ID NO: 170064 - DNA, 15 bp, Homo sapiens
gtgtggacccccggc

SEQ ID NO: 170065 - DNA, 15 bp, Homo sapiens
agtgtggacccccgg

SEQ ID NO: 170066 - DNA, 15 bp, Homo sapiens
cagtgtggacccccg

SEQ ID NO: 170067 - DNA, 15 bp, Homo sapiens
ccagtgtggaccccc

SEQ ID NO: 170068 - DNA, 15 bp, Homo sapiens
gccagtgtggacccc

SEQ ID NO: 170069 - DNA, 15 bp, Homo sapiens
tgccagtgtggaccc

SEQ ID NO: 170070 - DNA, 15 bp, Homo sapiens
ttgccagtgtggacc

SEQ ID NO: 170071 - DNA, 15 bp, Homo sapiens
cttgccagtgtggac

SEQ ID NO: 170072 - DNA, 15 bp, Homo sapiens
ccttgccagtgtgga

SEQ ID NO: 170073 - DNA, 15 bp, Homo sapiens
cccttgccagtgtgg

SEQ ID NO: 170074 - DNA, 15 bp, Homo sapiens
ccccttgccagtgtg

SEQ ID NO: 170075 - DNA, 15 bp, Homo sapiens
cccccttgccagtgt

SEQ ID NO: 170076 - DNA, 15 bp, Homo sapiens
gcccccttgccagtg

SEQ ID NO: 170077 - DNA, 15 bp, Homo sapiens
ggcccccttgccagt

SEQ ID NO: 170078 - DNA, 15 bp, Homo sapiens
aggcccccttgccag

SEQ ID NO: 170079 - DNA, 15 bp, Homo sapiens
caggcccccttgcca

SEQ ID NO: 170080 - DNA, 15 bp, Homo sapiens
gcaggcccccttgcc

SEQ ID NO: 170081 - DNA, 15 bp, Homo sapiens
agcaggcccccttgc

SEQ ID NO: 170082 - DNA, 15 bp, Homo sapiens
cagcaggcccccttg

SEQ ID NO: 170083 - DNA, 15 bp, Homo sapiens
ccagcaggccccctt

SEQ ID NO: 170084 - DNA, 15 bp, Homo sapiens
cccagcaggccccct

SEQ ID NO: 170085 - DNA, 15 bp, Homo sapiens
tcccagcaggccccc

SEQ ID NO: 170086 - DNA, 15 bp, Homo sapiens
ctcccagcaggcccc

SEQ ID NO: 170087 - DNA, 15 bp, Homo sapiens
cctcccagcaggccc

SEQ ID NO: 170088 - DNA, 15 bp, Homo sapiens
tcctcccagcaggcc

SEQ ID NO: 170089 - DNA, 15 bp, Homo sapiens
ctcctcccagcaggc

SEQ ID NO: 170090 - DNA, 15 bp, Homo sapiens
tctcctcccagcagg

SEQ ID NO: 170091 - DNA, 15 bp, Homo sapiens
gtctcctcccagcag

SEQ ID NO: 170092 - DNA, 15 bp, Homo sapiens
agtctcctcccagca

SEQ ID NO: 170093 - DNA, 15 bp, Homo sapiens
cagtctcctcccagc

SEQ ID NO: 170094 - DNA, 15 bp, Homo sapiens
tcagtctcctcccag

SEQ ID NO: 170095 - DNA, 15 bp, Homo sapiens
ttcagtctcctccca

SEQ ID NO: 170096 - DNA, 15 bp, Homo sapiens
attcagtctcctccc

SEQ ID NO: 170097 - DNA, 15 bp, Homo sapiens
cattcagtctcctcc

SEQ ID NO: 170098 - DNA, 15 bp, Homo sapiens
acattcagtctcctc

SEQ ID NO: 170099 - DNA, 15 bp, Homo sapiens
aacattcagtctcct

SEQ ID NO: 170100 - DNA, 15 bp, Homo sapiens
caacattcagtctcc

SEQ ID NO: 170101 - DNA, 15 bp, Homo sapiens
tcaacattcagtctc

SEQ ID NO: 170102 - DNA, 15 bp, Homo sapiens
ctcaacattcagtct

SEQ ID NO: 170103 - DNA, 15 bp, Homo sapiens
tctcaacattcagtc

SEQ ID NO: 170104 - DNA, 15 bp, Homo sapiens
ttctcaacattcagt

SEQ ID NO: 170105 - DNA, 15 bp, Homo sapiens
tttctcaacattcag

SEQ ID NO: 170106 - DNA, 15 bp, Homo sapiens
atttctcaacattca

SEQ ID NO: 170107 - DNA, 15 bp, Homo sapiens
gatttctcaacattc

SEQ ID NO: 170108 - DNA, 15 bp, Homo sapiens
agatttctcaacatt

SEQ ID NO: 170109 - DNA, 15 bp, Homo sapiens
cagatttctcaacat

SEQ ID NO: 170110 - DNA, 15 bp, Homo sapiens
tcagatttctcaaca

SEQ ID NO: 170111 - DNA, 15 bp, Homo sapiens
ctcagatttctcaac

SEQ ID NO: 170112 - DNA, 15 bp, Homo sapiens
gctcagatttctcaa

SEQ ID NO: 170113 - DNA, 15 bp, Homo sapiens
ggctcagatttctca

SEQ ID NO: 170114 - DNA, 15 bp, Homo sapiens
gggctcagatttctc

SEQ ID NO: 170115 - DNA, 15 bp, Homo sapiens
tgggctcagatttct

SEQ ID NO: 170116 - DNA, 15 bp, Homo sapiens
ctgggctcagatttc

SEQ ID NO: 170117 - DNA, 15 bp, Homo sapiens
tctgggctcagattt

SEQ ID NO: 170118 - DNA, 15 bp, Homo sapiens
ctctgggctcagatt

SEQ ID NO: 170119 - DNA, 15 bp, Homo sapiens
cctctgggctcagat

SEQ ID NO: 170120 - DNA, 15 bp, Homo sapiens
tcctctgggctcaga

SEQ ID NO: 170121 - DNA, 15 bp, Homo sapiens
ttcctctgggctcag

SEQ ID NO: 170122 - DNA, 15 bp, Homo sapiens
cttcctctgggctca

SEQ ID NO: 170123 - DNA, 15 bp, Homo sapiens
ccttcctctgggctc

SEQ ID NO: 170124 - DNA, 15 bp, Homo sapiens
cccttcctctgggct

SEQ ID NO: 170125 - DNA, 15 bp, Homo sapiens
gcccttcctctgggc

SEQ ID NO: 170126 - DNA, 15 bp, Homo sapiens
tgcccttcctctggg

SEQ ID NO: 170127 - DNA, 15 bp, Homo sapiens
ctgcccttcctctgg

SEQ ID NO: 170128 - DNA, 15 bp, Homo sapiens
tctgcccttcctctg

SEQ ID NO: 170129 - DNA, 15 bp, Homo sapiens
ctctgcccttcctct

SEQ ID NO: 170130 - DNA, 15 bp, Homo sapiens
cctctgcccttcctc

SEQ ID NO: 170131 - DNA, 15 bp, Homo sapiens
tcctctgcccttcct

SEQ ID NO: 170132 - DNA, 15 bp, Homo sapiens
ctcctctgcccttcc

SEQ ID NO: 170133 - DNA, 15 bp, Homo sapiens
tctcctctgcccttc

SEQ ID NO: 170134 - DNA, 15 bp, Homo sapiens
ttctcctctgccctt

SEQ ID NO: 170135 - DNA, 15 bp, Homo sapiens
attctcctctgccct

SEQ ID NO: 170136 - DNA, 15 bp, Homo sapiens
cattctcctctgccc

SEQ ID NO: 170137 - DNA, 15 bp, Homo sapiens
ccattctcctctgcc

SEQ ID NO: 170138 - DNA, 15 bp, Homo sapiens
gccattctcctctgc

SEQ ID NO: 170139 - DNA, 15 bp, Homo sapiens
tgccattctcctctg

SEQ ID NO: 170140 - DNA, 15 bp, Homo sapiens
gtgccattctcctct

SEQ ID NO: 170141 - DNA, 15 bp, Homo sapiens
tgtgccattctcctc

SEQ ID NO: 170142 - DNA, 15 bp, Homo sapiens
atgtgccattctcct

SEQ ID NO: 170143 - DNA, 15 bp, Homo sapiens
catgtgccattctcc

SEQ ID NO: 170144 - DNA, 15 bp, Homo sapiens
gcatgtgccattctc

SEQ ID NO: 170145 - DNA, 15 bp, Homo sapiens
ggcatgtgccattct

SEQ ID NO: 170146 - DNA, 15 bp, Homo sapiens
tggcatgtgccattc

SEQ ID NO: 170147 - DNA, 15 bp, Homo sapiens
gtggcatgtgccatt

SEQ ID NO: 170148 - DNA, 15 bp, Homo sapiens
tgtggcatgtgccat

SEQ ID NO: 170149 - DNA, 15 bp, Homo sapiens
atgtggcatgtgcca

SEQ ID NO: 170150 - DNA, 15 bp, Homo sapiens
aatgtggcatgtgcc

SEQ ID NO: 170151 - DNA, 15 bp, Homo sapiens
gaatgtggcatgtgc

SEQ ID NO: 170152 - DNA, 15 bp, Homo sapiens
agaatgtggcatgtg

SEQ ID NO: 170153 - DNA, 15 bp, Homo sapiens
aagaatgtggcatgt

SEQ ID NO: 170154 - DNA, 15 bp, Homo sapiens
aaagaatgtggcatg

SEQ ID NO: 170155 - DNA, 15 bp, Homo sapiens
gaaagaatgtggcat

SEQ ID NO: 170156 - DNA, 15 bp, Homo sapiens
ggaaagaatgtggca

SEQ ID NO: 170157 - DNA, 15 bp, Homo sapiens
aggaaagaatgtggc

SEQ ID NO: 170158 - DNA, 15 bp, Homo sapiens
taggaaagaatgtgg

SEQ ID NO: 170159 - DNA, 15 bp, Homo sapiens
ataggaaagaatgtg

SEQ ID NO: 170160 - DNA, 15 bp, Homo sapiens
aataggaaagaatgt

SEQ ID NO: 170161 - DNA, 15 bp, Homo sapiens
taataggaaagaatg

SEQ ID NO: 170162 - DNA, 15 bp, Homo sapiens
ttaataggaaagaat

SEQ ID NO: 170163 - DNA, 15 bp, Homo sapiens
gttaataggaaagaa

SEQ ID NO: 170164 - DNA, 15 bp, Homo sapiens
tgttaataggaaaga

SEQ ID NO: 170165 - DNA, 15 bp, Homo sapiens
ctgttaataggaaag

SEQ ID NO: 170166 - DNA, 15 bp, Homo sapiens
gctgttaataggaaa

SEQ ID NO: 170167 - DNA, 15 bp, Homo sapiens
tgctgttaataggaa

SEQ ID NO: 170168 - DNA, 15 bp, Homo sapiens
ttgctgttaatagga

SEQ ID NO: 170169 - DNA, 15 bp, Homo sapiens
cttgctgttaatagg

SEQ ID NO: 170170 - DNA, 15 bp, Homo sapiens
acttgctgttaatag

SEQ ID NO: 170171 - DNA, 15 bp, Homo sapiens
aacttgctgttaata

SEQ ID NO: 170172 - DNA, 15 bp, Homo sapiens
aaacttgctgttaat

SEQ ID NO: 170173 - DNA, 15 bp, Homo sapiens
caaacttgctgttaa

SEQ ID NO: 170174 - DNA, 15 bp, Homo sapiens
ccaaacttgctgtta

SEQ ID NO: 170175 - DNA, 15 bp, Homo sapiens
gccaaacttgctgtt

SEQ ID NO: 170176 - DNA, 15 bp, Homo sapiens
agccaaacttgctgt

SEQ ID NO: 170177 - DNA, 15 bp, Homo sapiens
cagccaaacttgctg

SEQ ID NO: 170178 - DNA, 15 bp, Homo sapiens
gcagccaaacttgct

SEQ ID NO: 170179 - DNA, 15 bp, Homo sapiens
agcagccaaacttgc

SEQ ID NO: 170180 - DNA, 15 bp, Homo sapiens
tagcagccaaacttg

SEQ ID NO: 170181 - DNA, 15 bp, Homo sapiens
ttagcagccaaactt

SEQ ID NO: 170182 - DNA, 15 bp, Homo sapiens
gttagcagccaaact

SEQ ID NO: 170183 - DNA, 15 bp, Homo sapiens
agttagcagccaaac

SEQ ID NO: 170184 - DNA, 15 bp, Homo sapiens
aagttagcagccaaa

SEQ ID NO: 170185 - DNA, 15 bp, Homo sapiens
caagttagcagccaa

SEQ ID NO: 170186 - DNA, 15 bp, Homo sapiens
ccaagttagcagcca

SEQ ID NO: 170187 - DNA, 15 bp, Homo sapiens
cccaagttagcagcc

SEQ ID NO: 170188 - DNA, 15 bp, Homo sapiens
tcccaagttagcagc

SEQ ID NO: 170189 - DNA, 15 bp, Homo sapiens
gtcccaagttagcag

SEQ ID NO: 170190 - DNA, 15 bp, Homo sapiens
ggtcccaagttagca

SEQ ID NO: 170191 - DNA, 15 bp, Homo sapiens
aggtcccaagttagc

SEQ ID NO: 170192 - DNA, 15 bp, Homo sapiens
gaggtcccaagttag

SEQ ID NO: 170193 - DNA, 15 bp, Homo sapiens
ggaggtcccaagtta

SEQ ID NO: 170194 - DNA, 15 bp, Homo sapiens
cggaggtcccaagtt

SEQ ID NO: 170195 - DNA, 15 bp, Homo sapiens
ccggaggtcccaagt

SEQ ID NO: 170196 - DNA, 15 bp, Homo sapiens
tccggaggtcccaag

SEQ ID NO: 170197 - DNA, 15 bp, Homo sapiens
ctccggaggtcccaa

SEQ ID NO: 170198 - DNA, 15 bp, Homo sapiens
cctccggaggtccca

SEQ ID NO: 170199 - DNA, 15 bp, Homo sapiens
gcctccggaggtccc

SEQ ID NO: 170200 - DNA, 15 bp, Homo sapiens
tgcctccggaggtcc

SEQ ID NO: 170201 - DNA, 15 bp, Homo sapiens
ttgcctccggaggtc

SEQ ID NO: 170202 - DNA, 15 bp, Homo sapiens
tttgcctccggaggt

SEQ ID NO: 170203 - DNA, 15 bp, Homo sapiens
ctttgcctccggagg

SEQ ID NO: 170204 - DNA, 15 bp, Homo sapiens
tctttgcctccggag

SEQ ID NO: 170205 - DNA, 15 bp, Homo sapiens
ctctttgcctccgga

SEQ ID NO: 170206 - DNA, 15 bp, Homo sapiens
gctctttgcctccgg

SEQ ID NO: 170207 - DNA, 15 bp, Homo sapiens
agctctttgcctccg

SEQ ID NO: 170208 - DNA, 15 bp, Homo sapiens
cagctctttgcctcc

SEQ ID NO: 170209 - DNA, 15 bp, Homo sapiens
ccagctctttgcctc

SEQ ID NO: 170210 - DNA, 15 bp, Homo sapiens
gccagctctttgcct

SEQ ID NO: 170211 - DNA, 15 bp, Homo sapiens
cgccagctctttgcc

SEQ ID NO: 170212 - DNA, 15 bp, Homo sapiens
ccgccagctctttgc

SEQ ID NO: 170213 - DNA, 15 bp, Homo sapiens
tccgccagctctttg

SEQ ID NO: 170214 - DNA, 15 bp, Homo sapiens
atccgccagctcttt

SEQ ID NO: 170215 - DNA, 15 bp, Homo sapiens
aatccgccagctctt

SEQ ID NO: 170216 - DNA, 15 bp, Homo sapiens
aaatccgccagctct

SEQ ID NO: 170217 - DNA, 15 bp, Homo sapiens
aaaatccgccagctc

SEQ ID NO: 170218 - DNA, 15 bp, Homo sapiens
taaaatccgccagct

SEQ ID NO: 170219 - DNA, 15 bp, Homo sapiens
ctaaaatccgccagc

SEQ ID NO: 170220 - DNA, 15 bp, Homo sapiens
actaaaatccgccag

SEQ ID NO: 170221 - DNA, 15 bp, Homo sapiens
gactaaaatccgcca

SEQ ID NO: 170222 - DNA, 15 bp, Homo sapiens
agactaaaatccgcc

SEQ ID NO: 170223 - DNA, 15 bp, Homo sapiens
aagactaaaatccgc

SEQ ID NO: 170224 - DNA, 15 bp, Homo sapiens
caagactaaaatccg

SEQ ID NO: 170225 - DNA, 15 bp, Homo sapiens
tcaagactaaaatcc

SEQ ID NO: 170226 - DNA, 15 bp, Homo sapiens
gtcaagactaaaatc

SEQ ID NO: 170227 - DNA, 15 bp, Homo sapiens
agtcaagactaaaat

SEQ ID NO: 170228 - DNA, 15 bp, Homo sapiens
gagtcaagactaaaa

SEQ ID NO: 170229 - DNA, 15 bp, Homo sapiens
agagtcaagactaaa

SEQ ID NO: 170230 - DNA, 15 bp, Homo sapiens
cagagtcaagactaa

SEQ ID NO: 170231 - DNA, 15 bp, Homo sapiens
gcagagtcaagacta

SEQ ID NO: 170232 - DNA, 15 bp, Homo sapiens
agcagagtcaagact

SEQ ID NO: 170233 - DNA, 15 bp, Homo sapiens
tagcagagtcaagac

SEQ ID NO: 170234 - DNA, 15 bp, Homo sapiens
gtagcagagtcaaga

SEQ ID NO: 170235 - DNA, 15 bp, Homo sapiens
agtagcagagtcaag

SEQ ID NO: 170236 - DNA, 15 bp, Homo sapiens
aagtagcagagtcaa

SEQ ID NO: 170237 - DNA, 15 bp, Homo sapiens
aaagtagcagagtca

SEQ ID NO: 170238 - DNA, 15 bp, Homo sapiens
gaaagtagcagagtc

SEQ ID NO: 170239 - DNA, 15 bp, Homo sapiens
agaaagtagcagagt

SEQ ID NO: 170240 - DNA, 15 bp, Homo sapiens
tagaaagtagcagag

SEQ ID NO: 170241 - DNA, 15 bp, Homo sapiens
ctagaaagtagcaga

SEQ ID NO: 170242 - DNA, 15 bp, Homo sapiens
actagaaagtagcag

SEQ ID NO: 170243 - DNA, 15 bp, Homo sapiens
aactagaaagtagca

SEQ ID NO: 170244 - DNA, 15 bp, Homo sapiens
caactagaaagtagc

SEQ ID NO: 170245 - DNA, 15 bp, Homo sapiens
ctctccttgcctggc

SEQ ID NO: 170246 - DNA, 15 bp, Homo sapiens
cctctccttgcctgg

SEQ ID NO: 170247 - DNA, 15 bp, Homo sapiens
ccctctccttgcctg

SEQ ID NO: 170248 - DNA, 15 bp, Homo sapiens
cccctctccttgcct

SEQ ID NO: 170249 - DNA, 15 bp, Homo sapiens
gcccctctccttgcc

SEQ ID NO: 170250 - DNA, 15 bp, Homo sapiens
agcccctctccttgc

SEQ ID NO: 170251 - DNA, 15 bp, Homo sapiens
cagcccctctccttg

SEQ ID NO: 170252 - DNA, 15 bp, Homo sapiens
ccagcccctctcctt

SEQ ID NO: 170253 - DNA, 15 bp, Homo sapiens
tccagcccctctcct

SEQ ID NO: 170254 - DNA, 15 bp, Homo sapiens
ttccagcccctctcc

SEQ ID NO: 170255 - DNA, 15 bp, Homo sapiens
cttccagcccctctc

SEQ ID NO: 170256 - DNA, 15 bp, Homo sapiens
acttccagcccctct

SEQ ID NO: 170257 - DNA, 15 bp, Homo sapiens
cacttccagcccctc

SEQ ID NO: 170258 - DNA, 15 bp, Homo sapiens
acacttccagcccct

SEQ ID NO: 170259 - DNA, 15 bp, Homo sapiens
cacacttccagcccc

SEQ ID NO: 170260 - DNA, 15 bp, Homo sapiens
tcacacttccagccc

SEQ ID NO: 170261 - DNA, 15 bp, Homo sapiens
ctcacacttccagcc

SEQ ID NO: 170262 - DNA, 15 bp, Homo sapiens
cctcacacttccagc

SEQ ID NO: 170263 - DNA, 15 bp, Homo sapiens
ccctcacacttccag

SEQ ID NO: 170264 - DNA, 15 bp, Homo sapiens
cccctcacacttcca

SEQ ID NO: 170265 - DNA, 15 bp, Homo sapiens
gcccctcacacttcc

SEQ ID NO: 170266 - DNA, 15 bp, Homo sapiens
agcccctcacacttc

SEQ ID NO: 170267 - DNA, 15 bp, Homo sapiens
aagcccctcacactt

SEQ ID NO: 170268 - DNA, 15 bp, Homo sapiens
caagcccctcacact

SEQ ID NO: 170269 - DNA, 15 bp, Homo sapiens
ccaagcccctcacac

SEQ ID NO: 170270 - DNA, 15 bp, Homo sapiens
cccaagcccctcaca

SEQ ID NO: 170271 - DNA, 15 bp, Homo sapiens
ccccaagcccctcac

SEQ ID NO: 170272 - DNA, 15 bp, Homo sapiens
gccccaagcccctca

SEQ ID NO: 170273 - DNA, 15 bp, Homo sapiens
tgccccaagcccctc

SEQ ID NO: 170274 - DNA, 15 bp, Homo sapiens
ctgccccaagcccct

SEQ ID NO: 170275 - DNA, 15 bp, Homo sapiens
cctgccccaagcccc

SEQ ID NO: 170276 - DNA, 15 bp, Homo sapiens
ccctgccccaagccc

SEQ ID NO: 170277 - DNA, 15 bp, Homo sapiens
tccctgccccaagcc

SEQ ID NO: 170278 - DNA, 15 bp, Homo sapiens
ctccctgccccaagc

SEQ ID NO: 170279 - DNA, 15 bp, Homo sapiens
tctccctgccccaag

SEQ ID NO: 170280 - DNA, 15 bp, Homo sapiens
ctctccctgccccaa

SEQ ID NO: 170281 - DNA, 15 bp, Homo sapiens
cctctccctgcccca

SEQ ID NO: 170282 - DNA, 15 bp, Homo sapiens
gcctctccctgcccc

SEQ ID NO: 170283 - DNA, 15 bp, Homo sapiens
ggcctctccctgccc

SEQ ID NO: 170284 - DNA, 15 bp, Homo sapiens
aggcctctccctgcc

SEQ ID NO: 170285 - DNA, 15 bp, Homo sapiens
gaggcctctccctgc

SEQ ID NO: 170286 - DNA, 15 bp, Homo sapiens
cgaggcctctccctg

SEQ ID NO: 170287 - DNA, 15 bp, Homo sapiens
ccgaggcctctccct

SEQ ID NO: 170288 - DNA, 15 bp, Homo sapiens
gccgaggcctctccc

SEQ ID NO: 170289 - DNA, 15 bp, Homo sapiens
tgccgaggcctctcc

SEQ ID NO: 170290 - DNA, 15 bp, Homo sapiens
atgccgaggcctctc

SEQ ID NO: 170291 - DNA, 15 bp, Homo sapiens
catgccgaggcctct

SEQ ID NO: 170292 - DNA, 15 bp, Homo sapiens
acatgccgaggcctc

SEQ ID NO: 170293 - DNA, 15 bp, Homo sapiens
tacatgccgaggcct

SEQ ID NO: 170294 - DNA, 15 bp, Homo sapiens
ctacatgccgaggcc

SEQ ID NO: 170295 - DNA, 15 bp, Homo sapiens
tctacatgccgaggc

SEQ ID NO: 170296 - DNA, 15 bp, Homo sapiens
gtctacatgccgagg

SEQ ID NO: 170297 - DNA, 15 bp, Homo sapiens
agtctacatgccgag

SEQ ID NO: 170298 - DNA, 15 bp, Homo sapiens
cagtctacatgccga

SEQ ID NO: 170299 - DNA, 15 bp, Homo sapiens
acagtctacatgccg

SEQ ID NO: 170300 - DNA, 15 bp, Homo sapiens
cacagtctacatgcc

SEQ ID NO: 170301 - DNA, 15 bp, Homo sapiens
ccacagtctacatgc

SEQ ID NO: 170302 - DNA, 15 bp, Homo sapiens
gccacagtctacatg

SEQ ID NO: 170303 - DNA, 15 bp, Homo sapiens
agccacagtctacat

SEQ ID NO: 170304 - DNA, 15 bp, Homo sapiens
gagccacagtctaca

SEQ ID NO: 170305 - DNA, 15 bp, Homo sapiens
agagccacagtctac

SEQ ID NO: 170306 - DNA, 15 bp, Homo sapiens
cagagccacagtcta

SEQ ID NO: 170307 - DNA, 15 bp, Homo sapiens
ccagagccacagtct

SEQ ID NO: 170308 - DNA, 15 bp, Homo sapiens
gccagagccacagtc

SEQ ID NO: 170309 - DNA, 15 bp, Homo sapiens
ggccagagccacagt

SEQ ID NO: 170310 - DNA, 15 bp, Homo sapiens
aggccagagccacag

SEQ ID NO: 170311 - DNA, 15 bp, Homo sapiens
gcaggccagagccac

SEQ ID NO: 170312 - DNA, 15 bp, Homo sapiens
ggcaggccagagcca

SEQ ID NO: 170313 - DNA, 15 bp, Homo sapiens
tggcaggccagagcc

SEQ ID NO: 170314 - DNA, 15 bp, Homo sapiens
ctggcaggccagagc

SEQ ID NO: 170315 - DNA, 15 bp, Homo sapiens
gctggcaggccagag

SEQ ID NO: 170316 - DNA, 15 bp, Homo sapiens
ggctggcaggccaga

SEQ ID NO: 170317 - DNA, 15 bp, Homo sapiens
gggctggcaggccag

SEQ ID NO: 170318 - DNA, 15 bp, Homo sapiens
ggggctggcaggcca

SEQ ID NO: 170319 - DNA, 15 bp, Homo sapiens
aggggctggcaggcc

SEQ ID NO: 170320 - DNA, 15 bp, Homo sapiens
gaggggctggcaggc

SEQ ID NO: 170321 - DNA, 15 bp, Homo sapiens
agaggggctggcagg

SEQ ID NO: 170322 - DNA, 15 bp, Homo sapiens
gagaggggctggcag

SEQ ID NO: 170323 - DNA, 15 bp, Homo sapiens
ggagaggggctggca

SEQ ID NO: 170324 - DNA, 15 bp, Homo sapiens
gggagaggggctggc

SEQ ID NO: 170325 - DNA, 15 bp, Homo sapiens
ggggagaggggctgg

SEQ ID NO: 170326 - DNA, 15 bp, Homo sapiens
aggggagaggggctg

SEQ ID NO: 170327 - DNA, 15 bp, Homo sapiens
aaggggagaggggct

SEQ ID NO: 170328 - DNA, 15 bp, Homo sapiens
gaaggggagaggggc

SEQ ID NO: 170329 - DNA, 15 bp, Homo sapiens
agaaggggagagggg

SEQ ID NO: 170330 - DNA, 15 bp, Homo sapiens
cagaaggggagaggg

SEQ ID NO: 170331 - DNA, 15 bp, Homo sapiens
acagaaggggagagg

SEQ ID NO: 170332 - DNA, 15 bp, Homo sapiens
gacagaaggggagag

SEQ ID NO: 170333 - DNA, 15 bp, Homo sapiens
agacagaaggggaga

SEQ ID NO: 170334 - DNA, 15 bp, Homo sapiens
aagacagaaggggag

SEQ ID NO: 170335 - DNA, 15 bp, Homo sapiens
aaagacagaagggga

SEQ ID NO: 170336 - DNA, 15 bp, Homo sapiens
gaaagacagaagggg

SEQ ID NO: 170337 - DNA, 15 bp, Homo sapiens
ggaaagacagaaggg

SEQ ID NO: 170338 - DNA, 15 bp, Homo sapiens
gggaaagacagaagg

SEQ ID NO: 170339 - DNA, 15 bp, Homo sapiens
agggaaagacagaag

SEQ ID NO: 170340 - DNA, 15 bp, Homo sapiens
gagggaaagacagaa

SEQ ID NO: 170341 - DNA, 15 bp, Homo sapiens
agagggaaagacaga

SEQ ID NO: 170342 - DNA, 15 bp, Homo sapiens
gagagggaaagacag

SEQ ID NO: 170343 - DNA, 15 bp, Homo sapiens
agagagggaaagaca

SEQ ID NO: 170344 - DNA, 15 bp, Homo sapiens
gagagagggaaagac

SEQ ID NO: 170345 - DNA, 15 bp, Homo sapiens
agagagagggaaaga

SEQ ID NO: 170346 - DNA, 15 bp, Homo sapiens
aagagagagggaaag

SEQ ID NO: 170347 - DNA, 15 bp, Homo sapiens
taagagagagggaaa

SEQ ID NO: 170348 - DNA, 15 bp, Homo sapiens
ctaagagagagggaa

SEQ ID NO: 170349 - DNA, 15 bp, Homo sapiens
cctaagagagaggga

SEQ ID NO: 170350 - DNA, 15 bp, Homo sapiens
acctaagagagaggg

SEQ ID NO: 170351 - DNA, 15 bp, Homo sapiens
cacctaagagagagg

SEQ ID NO: 170352 - DNA, 15 bp, Homo sapiens
acacctaagagagag

SEQ ID NO: 170353 - DNA, 15 bp, Homo sapiens
aacacctaagagaga

SEQ ID NO: 170354 - DNA, 15 bp, Homo sapiens
gaacacctaagagag

SEQ ID NO: 170355 - DNA, 15 bp, Homo sapiens
ggaacacctaagaga

SEQ ID NO: 170356 - DNA, 15 bp, Homo sapiens
gggaacacctaagag

SEQ ID NO: 170357 - DNA, 15 bp, Homo sapiens
ggggaacacctaaga

SEQ ID NO: 170358 - DNA, 15 bp, Homo sapiens
aggggaacacctaag

SEQ ID NO: 170359 - DNA, 15 bp, Homo sapiens
caggggaacacctaa

SEQ ID NO: 170360 - DNA, 15 bp, Homo sapiens
gcaggggaacaccta

SEQ ID NO: 170361 - DNA, 15 bp, Homo sapiens
agcaggggaacacct

SEQ ID NO: 170362 - DNA, 15 bp, Homo sapiens
cagcaggggaacacc

SEQ ID NO: 170363 - DNA, 15 bp, Homo sapiens
acagcaggggaacac

SEQ ID NO: 170364 - DNA, 15 bp, Homo sapiens
aacagcaggggaaca

SEQ ID NO: 170365 - DNA, 15 bp, Homo sapiens
aaacagcaggggaac

SEQ ID NO: 170366 - DNA, 15 bp, Homo sapiens
caaacagcaggggaa

SEQ ID NO: 170367 - DNA, 15 bp, Homo sapiens
acaaacagcagggga

SEQ ID NO: 170368 - DNA, 15 bp, Homo sapiens
aacaaacagcagggg

SEQ ID NO: 170369 - DNA, 15 bp, Homo sapiens
caacaaacagcaggg

SEQ ID NO: 170370 - DNA, 15 bp, Homo sapiens
acaacaaacagcagg

SEQ ID NO: 170371 - DNA, 15 bp, Homo sapiens
gacaacaaacagcag

SEQ ID NO: 170372 - DNA, 15 bp, Homo sapiens
ggacaacaaacagca

SEQ ID NO: 170373 - DNA, 15 bp, Homo sapiens
gggacaacaaacagc

SEQ ID NO: 170374 - DNA, 15 bp, Homo sapiens
ggggacaacaaacag

SEQ ID NO: 170375 - DNA, 15 bp, Homo sapiens
aggggacaacaaaca

SEQ ID NO: 170376 - DNA, 15 bp, Homo sapiens
caggggacaacaaac

SEQ ID NO: 170377 - DNA, 15 bp, Homo sapiens
ccaggggacaacaaa

SEQ ID NO: 170378 - DNA, 15 bp, Homo sapiens
cccaggggacaacaa

SEQ ID NO: 170379 - DNA, 15 bp, Homo sapiens
ccccaggggacaaca

SEQ ID NO: 170380 - DNA, 15 bp, Homo sapiens
gccccaggggacaac

SEQ ID NO: 170381 - DNA, 15 bp, Homo sapiens
tgccccaggggacaa

SEQ ID NO: 170382 - DNA, 15 bp, Homo sapiens
atgccccaggggaca

SEQ ID NO: 170383 - DNA, 15 bp, Homo sapiens
aatgccccaggggac

SEQ ID NO: 170384 - DNA, 15 bp, Homo sapiens
caatgccccagggga

SEQ ID NO: 170385 - DNA, 15 bp, Homo sapiens
acaatgccccagggg

SEQ ID NO: 170386 - DNA, 15 bp, Homo sapiens
gacaatgccccaggg

SEQ ID NO: 170387 - DNA, 15 bp, Homo sapiens
tgacaatgccccagg

SEQ ID NO: 170388 - DNA, 15 bp, Homo sapiens
ttgacaatgccccag

SEQ ID NO: 170389 - DNA, 15 bp, Homo sapiens
cttgacaatgcccca

SEQ ID NO: 170390 - DNA, 15 bp, Homo sapiens
acttgacaatgcccc

SEQ ID NO: 170391 - DNA, 15 bp, Homo sapiens
tacttgacaatgccc

SEQ ID NO: 170392 - DNA, 15 bp, Homo sapiens
gtacttgacaatgcc

SEQ ID NO: 170393 - DNA, 15 bp, Homo sapiens
ggtacttgacaatgc

SEQ ID NO: 170394 - DNA, 15 bp, Homo sapiens
aggtacttgacaatg

SEQ ID NO: 170395 - DNA, 15 bp, Homo sapiens
gaggtacttgacaat

SEQ ID NO: 170396 - DNA, 15 bp, Homo sapiens
agaggtacttgacaa

SEQ ID NO: 170397 - DNA, 15 bp, Homo sapiens
tagaggtacttgaca

SEQ ID NO: 170398 - DNA, 15 bp, Homo sapiens
atagaggtacttgac

SEQ ID NO: 170399 - DNA, 15 bp, Homo sapiens
catagaggtacttga

SEQ ID NO: 170400 - DNA, 15 bp, Homo sapiens
tcatagaggtacttg

SEQ ID NO: 170401 - DNA, 15 bp, Homo sapiens
ctcatagaggtactt

SEQ ID NO: 170402 - DNA, 15 bp, Homo sapiens
cctcatagaggtact

SEQ ID NO: 170403 - DNA, 15 bp, Homo sapiens
tcctcatagaggtac

SEQ ID NO: 170404 - DNA, 15 bp, Homo sapiens
gtcctcatagaggta

SEQ ID NO: 170405 - DNA, 15 bp, Homo sapiens
cgtcctcatagaggt

SEQ ID NO: 170406 - DNA, 15 bp, Homo sapiens
tcgtcctcatagagg

SEQ ID NO: 170407 - DNA, 15 bp, Homo sapiens
ctcgtcctcatagag

SEQ ID NO: 170408 - DNA, 15 bp, Homo sapiens
cctcgtcctcataga

SEQ ID NO: 170409 - DNA, 15 bp, Homo sapiens
ccctcgtcctcatag

SEQ ID NO: 170410 - DNA, 15 bp, Homo sapiens
cccctcgtcctcata

SEQ ID NO: 170411 - DNA, 15 bp, Homo sapiens
acccctcgtcctcat

SEQ ID NO: 170412 - DNA, 15 bp, Homo sapiens
cacccctcgtcctca

SEQ ID NO: 170413 - DNA, 15 bp, Homo sapiens
tcacccctcgtcctc

SEQ ID NO: 170414 - DNA, 15 bp, Homo sapiens
ctcacccctcgtcct

SEQ ID NO: 170415 - DNA, 15 bp, Homo sapiens
actcacccctcgtcc

SEQ ID NO: 170416 - DNA, 15 bp, Homo sapiens
cactcacccctcgtc

SEQ ID NO: 170417 - DNA, 15 bp, Homo sapiens
acactcacccctcgt

SEQ ID NO: 170418 - DNA, 15 bp, Homo sapiens
gacactcacccctcg

SEQ ID NO: 170419 - DNA, 15 bp, Homo sapiens
ggacactcacccctc

SEQ ID NO: 170420 - DNA, 15 bp, Homo sapiens
aggacactcacccct

SEQ ID NO: 170421 - DNA, 15 bp, Homo sapiens
caggacactcacccc

SEQ ID NO: 170422 - DNA, 15 bp, Homo sapiens
gcaggacactcaccc

SEQ ID NO: 170423 - DNA, 15 bp, Homo sapiens
agcaggacactcacc

SEQ ID NO: 170424 - DNA, 15 bp, Homo sapiens
gagcaggacactcac

SEQ ID NO: 170425 - DNA, 15 bp, Homo sapiens
ggagcaggacactca

SEQ ID NO: 170426 - DNA, 15 bp, Homo sapiens
tggagcaggacactc

SEQ ID NO: 170427 - DNA, 15 bp, Homo sapiens
ttggagcaggacact

SEQ ID NO: 170428 - DNA, 15 bp, Homo sapiens
cttggagcaggacac

SEQ ID NO: 170429 - DNA, 15 bp, Homo sapiens
ccttggagcaggaca

SEQ ID NO: 170430 - DNA, 15 bp, Homo sapiens
cccttggagcaggac

SEQ ID NO: 170431 - DNA, 15 bp, Homo sapiens
ccccttggagcagga

SEQ ID NO: 170432 - DNA, 15 bp, Homo sapiens
cccccttggagcagg

SEQ ID NO: 170433 - DNA, 15 bp, Homo sapiens
gcccccttggagcag

SEQ ID NO: 170434 - DNA, 15 bp, Homo sapiens
cgcccccttggagca

SEQ ID NO: 170435 - DNA, 15 bp, Homo sapiens
ccgcccccttggagc

SEQ ID NO: 170436 - DNA, 15 bp, Homo sapiens
cccgcccccttggag

SEQ ID NO: 170437 - DNA, 15 bp, Homo sapiens
acccgcccccttgga

SEQ ID NO: 170438 - DNA, 15 bp, Homo sapiens
cacccgcccccttgg

SEQ ID NO: 170439 - DNA, 15 bp, Homo sapiens
acacccgcccccttg

SEQ ID NO: 170440 - DNA, 15 bp, Homo sapiens
cacacccgccccctt

SEQ ID NO: 170441 - DNA, 15 bp, Homo sapiens
gcacacccgccccct

SEQ ID NO: 170442 - DNA, 15 bp, Homo sapiens
ggcacacccgccccc

SEQ ID NO: 170443 - DNA, 15 bp, Homo sapiens
gggcacacccgcccc

SEQ ID NO: 170444 - DNA, 15 bp, Homo sapiens
tgggcacacccgccc

SEQ ID NO: 170445 - DNA, 15 bp, Homo sapiens
ctgggcacacccgcc

SEQ ID NO: 170446 - DNA, 15 bp, Homo sapiens
cctgggcacacccgc

SEQ ID NO: 170447 - DNA, 15 bp, Homo sapiens
acctgggcacacccg

SEQ ID NO: 170448 - DNA, 15 bp, Homo sapiens
gacctgggcacaccc

SEQ ID NO: 170449 - DNA, 15 bp, Homo sapiens
ggacctgggcacacc

SEQ ID NO: 170450 - DNA, 15 bp, Homo sapiens
gggacctgggcacac

SEQ ID NO: 170451 - DNA, 15 bp, Homo sapiens
ggggacctgggcaca

SEQ ID NO: 170452 - DNA, 15 bp, Homo sapiens
tggggacctgggcac

SEQ ID NO: 170453 - DNA, 15 bp, Homo sapiens
atggggacctgggca

SEQ ID NO: 170454 - DNA, 15 bp, Homo sapiens
gatggggacctgggc

SEQ ID NO: 170455 - DNA, 15 bp, Homo sapiens
ggatggggacctggg

SEQ ID NO: 170456 - DNA, 15 bp, Homo sapiens
aggatggggacctgg

SEQ ID NO: 170457 - DNA, 15 bp, Homo sapiens
gaggatggggacctg

SEQ ID NO: 170458 - DNA, 15 bp, Homo sapiens
tgaggatggggacct

SEQ ID NO: 170459 - DNA, 15 bp, Homo sapiens
ttgaggatggggacc

SEQ ID NO: 170460 - DNA, 15 bp, Homo sapiens
cttgaggatggggac

SEQ ID NO: 170461 - DNA, 15 bp, Homo sapiens
ccttgaggatgggga

SEQ ID NO: 170462 - DNA, 15 bp, Homo sapiens
accttgaggatgggg

SEQ ID NO: 170463 - DNA, 15 bp, Homo sapiens
gaccttgaggatggg

SEQ ID NO: 170464 - DNA, 15 bp, Homo sapiens
ggaccttgaggatgg

SEQ ID NO: 170465 - DNA, 15 bp, Homo sapiens
tggaccttgaggatg

SEQ ID NO: 170466 - DNA, 15 bp, Homo sapiens
atggaccttgaggat

SEQ ID NO: 170467 - DNA, 15 bp, Homo sapiens
catggaccttgagga

SEQ ID NO: 170468 - DNA, 15 bp, Homo sapiens
ccatggaccttgagg

SEQ ID NO: 170469 - DNA, 15 bp, Homo sapiens
cccatggaccttgag

SEQ ID NO: 170470 - DNA, 15 bp, Homo sapiens
tcccatggaccttga

SEQ ID NO: 170471 - DNA, 15 bp, Homo sapiens
atcccatggaccttg

SEQ ID NO: 170472 - DNA, 15 bp, Homo sapiens
aatcccatggacctt

SEQ ID NO: 170473 - DNA, 15 bp, Homo sapiens
gaatcccatggacct

SEQ ID NO: 170474 - DNA, 15 bp, Homo sapiens
ggaatcccatggacc

SEQ ID NO: 170475 - DNA, 15 bp, Homo sapiens
aggaatcccatggac

SEQ ID NO: 170476 - DNA, 15 bp, Homo sapiens
aaggaatcccatgga

SEQ ID NO: 170477 - DNA, 15 bp, Homo sapiens
caaggaatcccatgg

SEQ ID NO: 170478 - DNA, 15 bp, Homo sapiens
ccaaggaatcccatg

SEQ ID NO: 170479 - DNA, 15 bp, Homo sapiens
accaaggaatcccat

SEQ ID NO: 170480 - DNA, 15 bp, Homo sapiens
taccaaggaatccca

SEQ ID NO: 170481 - DNA, 15 bp, Homo sapiens
gtaccaaggaatccc

SEQ ID NO: 170482 - DNA, 15 bp, Homo sapiens
ggtaccaaggaatcc

SEQ ID NO: 170483 - DNA, 15 bp, Homo sapiens
aggtaccaaggaatc

SEQ ID NO: 170484 - DNA, 15 bp, Homo sapiens
caggtaccaaggaat

SEQ ID NO: 170485 - DNA, 15 bp, Homo sapiens
ccaggtaccaaggaa

SEQ ID NO: 170486 - DNA, 15 bp, Homo sapiens
cccaggtaccaagga

SEQ ID NO: 170487 - DNA, 15 bp, Homo sapiens
ccccaggtaccaagg

SEQ ID NO: 170488 - DNA, 15 bp, Homo sapiens
gccccaggtaccaag

SEQ ID NO: 170489 - DNA, 15 bp, Homo sapiens
tgccccaggtaccaa

SEQ ID NO: 170490 - DNA, 15 bp, Homo sapiens
gtgccccaggtacca

SEQ ID NO: 170491 - DNA, 15 bp, Homo sapiens
ggtgccccaggtacc

SEQ ID NO: 170492 - DNA, 15 bp, Homo sapiens
gggtgccccaggtac

SEQ ID NO: 170493 - DNA, 15 bp, Homo sapiens
tgggtgccccaggta

SEQ ID NO: 170494 - DNA, 15 bp, Homo sapiens
atgggtgccccaggt

SEQ ID NO: 170495 - DNA, 15 bp, Homo sapiens
gatgggtgccccagg

SEQ ID NO: 170496 - DNA, 15 bp, Homo sapiens
agatgggtgccccag

SEQ ID NO: 170497 - DNA, 15 bp, Homo sapiens
cagatgggtgcccca

SEQ ID NO: 170498 - DNA, 15 bp, Homo sapiens
acagatgggtgcccc

SEQ ID NO: 170499 - DNA, 15 bp, Homo sapiens
aacagatgggtgccc

SEQ ID NO: 170500 - DNA, 15 bp, Homo sapiens
caacagatgggtgcc

SEQ ID NO: 170501 - DNA, 15 bp, Homo sapiens
tcaacagatgggtgc

SEQ ID NO: 170502 - DNA, 15 bp, Homo sapiens
ctcaacagatgggtg

SEQ ID NO: 170503 - DNA, 15 bp, Homo sapiens
tctcaacagatgggt

SEQ ID NO: 170504 - DNA, 15 bp, Homo sapiens
ctctcaacagatggg

SEQ ID NO: 170505 - DNA, 15 bp, Homo sapiens
cctctcaacagatgg

SEQ ID NO: 170506 - DNA, 15 bp, Homo sapiens
tcctctcaacagatg

SEQ ID NO: 170507 - DNA, 15 bp, Homo sapiens
atcctctcaacagat

SEQ ID NO: 170508 - DNA, 15 bp, Homo sapiens
tatcctctcaacaga

SEQ ID NO: 170509 - DNA, 15 bp, Homo sapiens
ttatcctctcaacag

SEQ ID NO: 170510 - DNA, 15 bp, Homo sapiens
tttatcctctcaaca

SEQ ID NO: 170511 - DNA, 15 bp, Homo sapiens
ctttatcctctcaac

SEQ ID NO: 170512 - DNA, 15 bp, Homo sapiens
cctttatcctctcaa

SEQ ID NO: 170513 - DNA, 15 bp, Homo sapiens
ccctttatcctctca

SEQ ID NO: 170514 - DNA, 15 bp, Homo sapiens
cccctttatcctctc

SEQ ID NO: 170515 - DNA, 15 bp, Homo sapiens
ccccctttatcctct

SEQ ID NO: 170516 - DNA, 15 bp, Homo sapiens
cccccctttatcctc

SEQ ID NO: 170517 - DNA, 15 bp, Homo sapiens
acccccctttatcct

SEQ ID NO: 170518 - DNA, 15 bp, Homo sapiens
tacccccctttatcc

SEQ ID NO: 170519 - DNA, 15 bp, Homo sapiens
gtacccccctttatc

SEQ ID NO: 170520 - DNA, 15 bp, Homo sapiens
ggtacccccctttat

SEQ ID NO: 170521 - DNA, 15 bp, Homo sapiens
tggtaccccccttta

SEQ ID NO: 170522 - DNA, 15 bp, Homo sapiens
ctggtaccccccttt

SEQ ID NO: 170523 - DNA, 15 bp, Homo sapiens
cctggtacccccctt

SEQ ID NO: 170524 - DNA, 15 bp, Homo sapiens
tcctggtacccccct

SEQ ID NO: 170525 - DNA, 15 bp, Homo sapiens
ctcctggtacccccc

SEQ ID NO: 170526 - DNA, 15 bp, Homo sapiens
gctcctggtaccccc

SEQ ID NO: 170527 - DNA, 15 bp, Homo sapiens
agctcctggtacccc

SEQ ID NO: 170528 - DNA, 15 bp, Homo sapiens
aagctcctggtaccc

SEQ ID NO: 170529 - DNA, 15 bp, Homo sapiens
taagctcctggtacc

SEQ ID NO: 170530 - DNA, 15 bp, Homo sapiens
ctaagctcctggtac

SEQ ID NO: 170531 - DNA, 15 bp, Homo sapiens
tctaagctcctggta

SEQ ID NO: 170532 - DNA, 15 bp, Homo sapiens
ttctaagctcctggt

SEQ ID NO: 170533 - DNA, 15 bp, Homo sapiens
cttctaagctcctgg

SEQ ID NO: 170534 - DNA, 15 bp, Homo sapiens
ccttctaagctcctg

SEQ ID NO: 170535 - DNA, 15 bp, Homo sapiens
accttctaagctcct

SEQ ID NO: 170536 - DNA, 15 bp, Homo sapiens
caccttctaagctcc

SEQ ID NO: 170537 - DNA, 15 bp, Homo sapiens
tcaccttctaagctc

SEQ ID NO: 170538 - DNA, 15 bp, Homo sapiens
ttcaccttctaagct

SEQ ID NO: 170539 - DNA, 15 bp, Homo sapiens
attcaccttctaagc

SEQ ID NO: 170540 - DNA, 15 bp, Homo sapiens
aattcaccttctaag

SEQ ID NO: 170541 - DNA, 15 bp, Homo sapiens
aaattcaccttctaa

SEQ ID NO: 170542 - DNA, 15 bp, Homo sapiens
taaattcaccttcta

SEQ ID NO: 170543 - DNA, 15 bp, Homo sapiens
ctaaattcaccttct

SEQ ID NO: 170544 - DNA, 15 bp, Homo sapiens
actaaattcaccttc

SEQ ID NO: 170545 - DNA, 15 bp, Homo sapiens
aactaaattcacctt

SEQ ID NO: 170546 - DNA, 15 bp, Homo sapiens
gaactaaattcacct

SEQ ID NO: 170547 - DNA, 15 bp, Homo sapiens
agaactaaattcacc

SEQ ID NO: 170548 - DNA, 15 bp, Homo sapiens
gagaactaaattcac

SEQ ID NO: 170549 - DNA, 15 bp, Homo sapiens
agagaactaaattca

SEQ ID NO: 170550 - DNA, 15 bp, Homo sapiens
tagagaactaaattc

SEQ ID NO: 170551 - DNA, 15 bp, Homo sapiens
ttagagaactaaatt

SEQ ID NO: 170552 - DNA, 15 bp, Homo sapiens
attagagaactaaat

SEQ ID NO: 170553 - DNA, 15 bp, Homo sapiens
gattagagaactaaa

SEQ ID NO: 170554 - DNA, 15 bp, Homo sapiens
agattagagaactaa

SEQ ID NO: 170555 - DNA, 15 bp, Homo sapiens
gagattagagaacta

SEQ ID NO: 170556 - DNA, 15 bp, Homo sapiens
ggagattagagaact

SEQ ID NO: 170557 - DNA, 15 bp, Homo sapiens
gggagattagagaac

SEQ ID NO: 170558 - DNA, 15 bp, Homo sapiens
ggggagattagagaa

SEQ ID NO: 170559 - DNA, 15 bp, Homo sapiens
aggggagattagaga

SEQ ID NO: 170560 - DNA, 15 bp, Homo sapiens
gaggggagattagag

SEQ ID NO: 170561 - DNA, 15 bp, Homo sapiens
ggaggggagattaga

SEQ ID NO: 170562 - DNA, 15 bp, Homo sapiens
gggaggggagattag

SEQ ID NO: 170563 - DNA, 15 bp, Homo sapiens
agggaggggagatta

SEQ ID NO: 170564 - DNA, 15 bp, Homo sapiens
cagggaggggagatt

SEQ ID NO: 170565 - DNA, 15 bp, Homo sapiens
gcagggaggggagat

SEQ ID NO: 170566 - DNA, 15 bp, Homo sapiens
ggcagggaggggaga

SEQ ID NO: 170567 - DNA, 15 bp, Homo sapiens
gggcagggaggggag

SEQ ID NO: 170568 - DNA, 15 bp, Homo sapiens
ggggcagggagggga

SEQ ID NO: 170569 - DNA, 15 bp, Homo sapiens
aggggcagggagggg

SEQ ID NO: 170570 - DNA, 15 bp, Homo sapiens
caggggcagggaggg

SEQ ID NO: 170571 - DNA, 15 bp, Homo sapiens
gcaggggcagggagg

SEQ ID NO: 170572 - DNA, 15 bp, Homo sapiens
ggcaggggcagggag

SEQ ID NO: 170573 - DNA, 15 bp, Homo sapiens
gggcaggggcaggga

SEQ ID NO: 170574 - DNA, 15 bp, Homo sapiens
ggggcaggggcaggg

SEQ ID NO: 170575 - DNA, 15 bp, Homo sapiens
aggggcaggggcagg

SEQ ID NO: 170576 - DNA, 15 bp, Homo sapiens
caggggcaggggcag

SEQ ID NO: 170577 - DNA, 15 bp, Homo sapiens
gcaggggcaggggca

SEQ ID NO: 170578 - DNA, 15 bp, Homo sapiens
ggcaggggcaggggc

SEQ ID NO: 170579 - DNA, 15 bp, Homo sapiens
gggcaggggcagggg

SEQ ID NO: 170580 - DNA, 15 bp, Homo sapiens
acaggggcaggggca

SEQ ID NO: 170581 - DNA, 15 bp, Homo sapiens
gacaggggcaggggc

SEQ ID NO: 170582 - DNA, 15 bp, Homo sapiens
ggacaggggcagggg

SEQ ID NO: 170583 - DNA, 15 bp, Homo sapiens
gggacaggggcaggg

SEQ ID NO: 170584 - DNA, 15 bp, Homo sapiens
tgggacaggggcagg

SEQ ID NO: 170585 - DNA, 15 bp, Homo sapiens
ctgggacaggggcag

SEQ ID NO: 170586 - DNA, 15 bp, Homo sapiens
cctgggacaggggca

SEQ ID NO: 170587 - DNA, 15 bp, Homo sapiens
tcctgggacaggggc

SEQ ID NO: 170588 - DNA, 15 bp, Homo sapiens
atcctgggacagggg

SEQ ID NO: 170589 - DNA, 15 bp, Homo sapiens
aatcctgggacaggg

SEQ ID NO: 170590 - DNA, 15 bp, Homo sapiens
caatcctgggacagg

SEQ ID NO: 170591 - DNA, 15 bp, Homo sapiens
acaatcctgggacag

SEQ ID NO: 170592 - DNA, 15 bp, Homo sapiens
aacaatcctgggaca

SEQ ID NO: 170593 - DNA, 15 bp, Homo sapiens
aaacaatcctgggac

SEQ ID NO: 170594 - DNA, 15 bp, Homo sapiens
caaacaatcctggga

SEQ ID NO: 170595 - DNA, 15 bp, Homo sapiens
tcaaacaatcctggg

SEQ ID NO: 170596 - DNA, 15 bp, Homo sapiens
atcaaacaatcctgg

SEQ ID NO: 170597 - DNA, 15 bp, Homo sapiens
catcaaacaatcctg

SEQ ID NO: 170598 - DNA, 15 bp, Homo sapiens
tcatcaaacaatcct

SEQ ID NO: 170599 - DNA, 15 bp, Homo sapiens
gtcatcaaacaatcc

SEQ ID NO: 170600 - DNA, 15 bp, Homo sapiens
agtcatcaaacaatc

SEQ ID NO: 170601 - DNA, 15 bp, Homo sapiens
tagtcatcaaacaat

SEQ ID NO: 170602 - DNA, 15 bp, Homo sapiens
ttagtcatcaaacaa

SEQ ID NO: 170603 - DNA, 15 bp, Homo sapiens
gttagtcatcaaaca

SEQ ID NO: 170604 - DNA, 15 bp, Homo sapiens
cgttagtcatcaaac

SEQ ID NO: 170605 - DNA, 15 bp, Homo sapiens
ccgttagtcatcaaa

SEQ ID NO: 170606 - DNA, 15 bp, Homo sapiens
tccgttagtcatcaa

SEQ ID NO: 170607 - DNA, 15 bp, Homo sapiens
ttccgttagtcatca

SEQ ID NO: 170608 - DNA, 15 bp, Homo sapiens
gttccgttagtcatc

SEQ ID NO: 170609 - DNA, 15 bp, Homo sapiens
agttccgttagtcat

SEQ ID NO: 170610 - DNA, 15 bp, Homo sapiens
cagttccgttagtca

SEQ ID NO: 170611 - DNA, 15 bp, Homo sapiens
ccagttccgttagtc

SEQ ID NO: 170612 - DNA, 15 bp, Homo sapiens
cccagttccgttagt

SEQ ID NO: 170613 - DNA, 15 bp, Homo sapiens
acccagttccgttag

SEQ ID NO: 170614 - DNA, 15 bp, Homo sapiens
gacccagttccgtta

SEQ ID NO: 170615 - DNA, 15 bp, Homo sapiens
agacccagttccgtt

SEQ ID NO: 170616 - DNA, 15 bp, Homo sapiens
cagacccagttccgt

SEQ ID NO: 170617 - DNA, 15 bp, Homo sapiens
acagacccagttccg

SEQ ID NO: 170618 - DNA, 15 bp, Homo sapiens
cacagacccagttcc

SEQ ID NO: 170619 - DNA, 15 bp, Homo sapiens
ccacagacccagttc

SEQ ID NO: 170620 - DNA, 15 bp, Homo sapiens
cccacagacccagtt

SEQ ID NO: 170621 - DNA, 15 bp, Homo sapiens
ccccacagacccagt

SEQ ID NO: 170622 - DNA, 15 bp, Homo sapiens
accccacagacccag

SEQ ID NO: 170623 - DNA, 15 bp, Homo sapiens
taccccacagaccca

SEQ ID NO: 170624 - DNA, 15 bp, Homo sapiens
gtaccccacagaccc

SEQ ID NO: 170625 - DNA, 15 bp, Homo sapiens
tgtaccccacagacc

SEQ ID NO: 170626 - DNA, 15 bp, Homo sapiens
atgtaccccacagac

SEQ ID NO: 170627 - DNA, 15 bp, Homo sapiens
catgtaccccacaga

SEQ ID NO: 170628 - DNA, 15 bp, Homo sapiens
ccatgtaccccacag

SEQ ID NO: 170629 - DNA, 15 bp, Homo sapiens
accatgtaccccaca

SEQ ID NO: 170630 - DNA, 15 bp, Homo sapiens
caccatgtaccccac

SEQ ID NO: 170631 - DNA, 15 bp, Homo sapiens
gcaccatgtacccca

SEQ ID NO: 170632 - DNA, 15 bp, Homo sapiens
ggcaccatgtacccc

SEQ ID NO: 170633 - DNA, 15 bp, Homo sapiens
gggcaccatgtaccc

SEQ ID NO: 170634 - DNA, 15 bp, Homo sapiens
agggcaccatgtacc

SEQ ID NO: 170635 - DNA, 15 bp, Homo sapiens
gagggcaccatgtac

SEQ ID NO: 170636 - DNA, 15 bp, Homo sapiens
ggagggcaccatgta

SEQ ID NO: 170637 - DNA, 15 bp, Homo sapiens
aggagggcaccatgt

SEQ ID NO: 170638 - DNA, 15 bp, Homo sapiens
caggagggcaccatg

SEQ ID NO: 170639 - DNA, 15 bp, Homo sapiens
gcaggagggcaccat

SEQ ID NO: 170640 - DNA, 15 bp, Homo sapiens
tgcaggagggcacca

SEQ ID NO: 170641 - DNA, 15 bp, Homo sapiens
ctgcaggagggcacc

SEQ ID NO: 170642 - DNA, 15 bp, Homo sapiens
cctgcaggagggcac

SEQ ID NO: 170643 - DNA, 15 bp, Homo sapiens
acctgcaggagggca

SEQ ID NO: 170644 - DNA, 15 bp, Homo sapiens
aacctgcaggagggc

SEQ ID NO: 170645 - DNA, 15 bp, Homo sapiens
aaacctgcaggaggg

SEQ ID NO: 170646 - DNA, 15 bp, Homo sapiens
aaaacctgcaggagg

SEQ ID NO: 170647 - DNA, 15 bp, Homo sapiens
aaaaacctgcaggag

SEQ ID NO: 170648 - DNA, 15 bp, Homo sapiens
gaaaaacctgcagga

SEQ ID NO: 170649 - DNA, 15 bp, Homo sapiens
agaaaaacctgcagg

SEQ ID NO: 170650 - DNA, 15 bp, Homo sapiens
cagaaaaacctgcag

SEQ ID NO: 170651 - DNA, 15 bp, Homo sapiens
acagaaaaacctgca

SEQ ID NO: 170652 - DNA, 15 bp, Homo sapiens
tacagaaaaacctgc

SEQ ID NO: 170653 - DNA, 15 bp, Homo sapiens
ttacagaaaaacctg

SEQ ID NO: 170654 - DNA, 15 bp, Homo sapiens
attacagaaaaacct

SEQ ID NO: 170655 - DNA, 15 bp, Homo sapiens
tattacagaaaaacc

SEQ ID NO: 170656 - DNA, 15 bp, Homo sapiens
atattacagaaaaac

SEQ ID NO: 170657 - DNA, 15 bp, Homo sapiens
gatattacagaaaaa

SEQ ID NO: 170658 - DNA, 15 bp, Homo sapiens
agatattacagaaaa

SEQ ID NO: 170659 - DNA, 15 bp, Homo sapiens
cagatattacagaaa

SEQ ID NO: 170660 - DNA, 15 bp, Homo sapiens
gcagatattacagaa

SEQ ID NO: 170661 - DNA, 15 bp, Homo sapiens
tgcagatattacaga

SEQ ID NO: 170662 - DNA, 15 bp, Homo sapiens
ttgcagatattacag

SEQ ID NO: 170663 - DNA, 15 bp, Homo sapiens
cttgcagatattaca

SEQ ID NO: 170664 - DNA, 15 bp, Homo sapiens
acttgcagatattac

SEQ ID NO: 170665 - DNA, 15 bp, Homo sapiens
cacttgcagatatta

SEQ ID NO: 170666 - DNA, 15 bp, Homo sapiens
tcacttgcagatatt

SEQ ID NO: 170667 - DNA, 15 bp, Homo sapiens
ttcacttgcagatat

SEQ ID NO: 170668 - DNA, 15 bp, Homo sapiens
tttcacttgcagata

SEQ ID NO: 170669 - DNA, 15 bp, Homo sapiens
atttcacttgcagat

SEQ ID NO: 170670 - DNA, 15 bp, Homo sapiens
catttcacttgcaga

SEQ ID NO: 170671 - DNA, 15 bp, Homo sapiens
acatttcacttgcag

SEQ ID NO: 170672 - DNA, 15 bp, Homo sapiens
aacatttcacttgca

SEQ ID NO: 170673 - DNA, 15 bp, Homo sapiens
aaacatttcacttgc

SEQ ID NO: 170674 - DNA, 15 bp, Homo sapiens
caaacatttcacttg

SEQ ID NO: 170675 - DNA, 15 bp, Homo sapiens
acaaacatttcactt

SEQ ID NO: 170676 - DNA, 15 bp, Homo sapiens
cacaaacatttcact

SEQ ID NO: 170677 - DNA, 15 bp, Homo sapiens
acacaaacatttcac

SEQ ID NO: 170678 - DNA, 15 bp, Homo sapiens
gacacaaacatttca

SEQ ID NO: 170679 - DNA, 15 bp, Homo sapiens
tgacacaaacatttc

SEQ ID NO: 170680 - DNA, 15 bp, Homo sapiens
atgacacaaacattt

SEQ ID NO: 170681 - DNA, 15 bp, Homo sapiens
aatgacacaaacatt

SEQ ID NO: 170682 - DNA, 15 bp, Homo sapiens
aaatgacacaaacat

SEQ ID NO: 170683 - DNA, 15 bp, Homo sapiens
aaaatgacacaaaca

SEQ ID NO: 170684 - DNA, 15 bp, Homo sapiens
caaaatgacacaaac

SEQ ID NO: 170685 - DNA, 15 bp, Homo sapiens
acaaaatgacacaaa

SEQ ID NO: 170686 - DNA, 15 bp, Homo sapiens
tacaaaatgacacaa

SEQ ID NO: 170687 - DNA, 15 bp, Homo sapiens
atacaaaatgacaca

SEQ ID NO: 170688 - DNA, 15 bp, Homo sapiens
tatacaaaatgacac

SEQ ID NO: 170689 - DNA, 15 bp, Homo sapiens
atatacaaaatgaca

SEQ ID NO: 170690 - DNA, 15 bp, Homo sapiens
catatacaaaatgac

SEQ ID NO: 170691 - DNA, 15 bp, Homo sapiens
tcatatacaaaatga

SEQ ID NO: 170692 - DNA, 15 bp, Homo sapiens
atcatatacaaaatg

SEQ ID NO: 170693 - DNA, 15 bp, Homo sapiens
catcatatacaaaat

SEQ ID NO: 170694 - DNA, 15 bp, Homo sapiens
gcatcatatacaaaa

SEQ ID NO: 170695 - DNA, 15 bp, Homo sapiens
agcatcatatacaaa

SEQ ID NO: 170696 - DNA, 15 bp, Homo sapiens
cagcatcatatacaa

SEQ ID NO: 170697 - DNA, 15 bp, Homo sapiens
ccagcatcatataca

SEQ ID NO: 170698 - DNA, 15 bp, Homo sapiens
cccagcatcatatac

SEQ ID NO: 170699 - DNA, 15 bp, Homo sapiens
acccagcatcatata

SEQ ID NO: 170700 - DNA, 15 bp, Homo sapiens
tacccagcatcatat

SEQ ID NO: 170701 - DNA, 15 bp, Homo sapiens
gtacccagcatcata

SEQ ID NO: 170702 - DNA, 15 bp, Homo sapiens
tgtacccagcatcat

SEQ ID NO: 170703 - DNA, 15 bp, Homo sapiens
gtgtacccagcatca

SEQ ID NO: 170704 - DNA, 15 bp, Homo sapiens
tgtgtacccagcatc

SEQ ID NO: 170705 - DNA, 15 bp, Homo sapiens
gtgtgtacccagcat

SEQ ID NO: 170706 - DNA, 15 bp, Homo sapiens
tgtgtgtacccagca

SEQ ID NO: 170707 - DNA, 15 bp, Homo sapiens
atgtgtgtacccagc

SEQ ID NO: 170708 - DNA, 15 bp, Homo sapiens
catgtgtgtacccag

SEQ ID NO: 170709 - DNA, 15 bp, Homo sapiens
tcatgtgtgtaccca

SEQ ID NO: 170710 - DNA, 15 bp, Homo sapiens
gtcatgtgtgtaccc

SEQ ID NO: 170711 - DNA, 15 bp, Homo sapiens
agtcatgtgtgtacc

SEQ ID NO: 170712 - DNA, 15 bp, Homo sapiens
cagtcatgtgtgtac

SEQ ID NO: 170713 - DNA, 15 bp, Homo sapiens
acagtcatgtgtgta

SEQ ID NO: 170714 - DNA, 15 bp, Homo sapiens
cacagtcatgtgtgt

SEQ ID NO: 170715 - DNA, 15 bp, Homo sapiens
acacagtcatgtgtg

SEQ ID NO: 170716 - DNA, 15 bp, Homo sapiens
aacacagtcatgtgt

SEQ ID NO: 170717 - DNA, 15 bp, Homo sapiens
caacacagtcatgtg

SEQ ID NO: 170718 - DNA, 15 bp, Homo sapiens
ccaacacagtcatgt

SEQ ID NO: 170719 - DNA, 15 bp, Homo sapiens
accaacacagtcatg

SEQ ID NO: 170720 - DNA, 15 bp, Homo sapiens
taccaacacagtcat

SEQ ID NO: 170721 - DNA, 15 bp, Homo sapiens
ctaccaacacagtca

SEQ ID NO: 170722 - DNA, 15 bp, Homo sapiens
cctaccaacacagtc

SEQ ID NO: 170723 - DNA, 15 bp, Homo sapiens
acctaccaacacagt

SEQ ID NO: 170724 - DNA, 15 bp, Homo sapiens
gacctaccaacacag

SEQ ID NO: 170725 - DNA, 15 bp, Homo sapiens
ggacctaccaacaca

SEQ ID NO: 170726 - DNA, 15 bp, Homo sapiens
aggacctaccaacac

SEQ ID NO: 170727 - DNA, 15 bp, Homo sapiens
aaggacctaccaaca

SEQ ID NO: 170728 - DNA, 15 bp, Homo sapiens
caaggacctaccaac

SEQ ID NO: 170729 - DNA, 15 bp, Homo sapiens
tcaaggacctaccaa

SEQ ID NO: 170730 - DNA, 15 bp, Homo sapiens
ttcaaggacctacca

SEQ ID NO: 170731 - DNA, 15 bp, Homo sapiens
tttcaaggacctacc

SEQ ID NO: 170732 - DNA, 15 bp, Homo sapiens
ctttcaaggacctac

SEQ ID NO: 170733 - DNA, 15 bp, Homo sapiens
gctttcaaggaccta

SEQ ID NO: 170734 - DNA, 15 bp, Homo sapiens
agctttcaaggacct

SEQ ID NO: 170735 - DNA, 15 bp, Homo sapiens
aagctttcaaggacc

SEQ ID NO: 170736 - DNA, 15 bp, Homo sapiens
caagctttcaaggac

SEQ ID NO: 170737 - DNA, 15 bp, Homo sapiens
acaagctttcaagga

SEQ ID NO: 170738 - DNA, 15 bp, Homo sapiens
aacaagctttcaagg

SEQ ID NO: 170739 - DNA, 15 bp, Homo sapiens
aaacaagctttcaag

SEQ ID NO: 170740 - DNA, 15 bp, Homo sapiens
caaacaagctttcaa

SEQ ID NO: 170741 - DNA, 15 bp, Homo sapiens
ccaaacaagctttca

SEQ ID NO: 170742 - DNA, 15 bp, Homo sapiens
cccaaacaagctttc

SEQ ID NO: 170743 - DNA, 15 bp, Homo sapiens
ccccaaacaagcttt

SEQ ID NO: 170744 - DNA, 15 bp, Homo sapiens
cccccaaacaagctt

SEQ ID NO: 170745 - DNA, 15 bp, Homo sapiens
gcccccaaacaagct

SEQ ID NO: 170746 - DNA, 15 bp, Homo sapiens
agcccccaaacaagc

SEQ ID NO: 170747 - DNA, 15 bp, Homo sapiens
cagcccccaaacaag

SEQ ID NO: 170748 - DNA, 15 bp, Homo sapiens
acagcccccaaacaa

SEQ ID NO: 170749 - DNA, 15 bp, Homo sapiens
cacagcccccaaaca

SEQ ID NO: 170750 - DNA, 15 bp, Homo sapiens
acacagcccccaaac

SEQ ID NO: 170751 - DNA, 15 bp, Homo sapiens
cacacagcccccaaa

SEQ ID NO: 170752 - DNA, 15 bp, Homo sapiens
gcacacagcccccaa

SEQ ID NO: 170753 - DNA, 15 bp, Homo sapiens
tgcacacagccccca

SEQ ID NO: 170754 - DNA, 15 bp, Homo sapiens
atgcacacagccccc

SEQ ID NO: 170755 - DNA, 15 bp, Homo sapiens
gatgcacacagcccc

SEQ ID NO: 170756 - DNA, 15 bp, Homo sapiens
agatgcacacagccc

SEQ ID NO: 170757 - DNA, 15 bp, Homo sapiens
gagatgcacacagcc

SEQ ID NO: 170758 - DNA, 15 bp, Homo sapiens
agagatgcacacagc

SEQ ID NO: 170759 - DNA, 15 bp, Homo sapiens
cagagatgcacacag

SEQ ID NO: 170760 - DNA, 15 bp, Homo sapiens
acagagatgcacaca

SEQ ID NO: 170761 - DNA, 15 bp, Homo sapiens
cacagagatgcacac

SEQ ID NO: 170762 - DNA, 15 bp, Homo sapiens
acacagagatgcaca

SEQ ID NO: 170763 - DNA, 15 bp, Homo sapiens
tacacagagatgcac

SEQ ID NO: 170764 - DNA, 15 bp, Homo sapiens
atacacagagatgca

SEQ ID NO: 170765 - DNA, 15 bp, Homo sapiens
catacacagagatgc

SEQ ID NO: 170766 - DNA, 15 bp, Homo sapiens
tcatacacagagatg

SEQ ID NO: 170767 - DNA, 15 bp, Homo sapiens
gtcatacacagagat

SEQ ID NO: 170768 - DNA, 15 bp, Homo sapiens
agtcatacacagaga

SEQ ID NO: 170769 - DNA, 15 bp, Homo sapiens
cagtcatacacagag

SEQ ID NO: 170770 - DNA, 15 bp, Homo sapiens
acagtcatacacaga

SEQ ID NO: 170771 - DNA, 15 bp, Homo sapiens
cacagtcatacacag

SEQ ID NO: 170772 - DNA, 15 bp, Homo sapiens
acacagtcatacaca

SEQ ID NO: 170773 - DNA, 15 bp, Homo sapiens
tacacagtcatacac

SEQ ID NO: 170774 - DNA, 15 bp, Homo sapiens
atacacagtcataca

SEQ ID NO: 170775 - DNA, 15 bp, Homo sapiens
aatacacagtcatac

SEQ ID NO: 170776 - DNA, 15 bp, Homo sapiens
aaatacacagtcata

SEQ ID NO: 170777 - DNA, 15 bp, Homo sapiens
caaatacacagtcat

SEQ ID NO: 170778 - DNA, 15 bp, Homo sapiens
ccaaatacacagtca

SEQ ID NO: 170779 - DNA, 15 bp, Homo sapiens
tccaaatacacagtc

SEQ ID NO: 170780 - DNA, 15 bp, Homo sapiens
gtccaaatacacagt

SEQ ID NO: 170781 - DNA, 15 bp, Homo sapiens
agtccaaatacacag

SEQ ID NO: 170782 - DNA, 15 bp, Homo sapiens
tagtccaaatacaca

SEQ ID NO: 170783 - DNA, 15 bp, Homo sapiens
atagtccaaatacac

SEQ ID NO: 170784 - DNA, 15 bp, Homo sapiens
catagtccaaataca

SEQ ID NO: 170785 - DNA, 15 bp, Homo sapiens
gcatagtccaaatac

SEQ ID NO: 170786 - DNA, 15 bp, Homo sapiens
cgcatagtccaaata

SEQ ID NO: 170787 - DNA, 15 bp, Homo sapiens
acgcatagtccaaat

SEQ ID NO: 170788 - DNA, 15 bp, Homo sapiens
cacgcatagtccaaa

SEQ ID NO: 170789 - DNA, 15 bp, Homo sapiens
acacgcatagtccaa

SEQ ID NO: 170790 - DNA, 15 bp, Homo sapiens
cacacgcatagtcca

SEQ ID NO: 170791 - DNA, 15 bp, Homo sapiens
acacacgcatagtcc

SEQ ID NO: 170792 - DNA, 15 bp, Homo sapiens
cacacacgcatagtc

SEQ ID NO: 170793 - DNA, 15 bp, Homo sapiens
acacacacgcatagt

SEQ ID NO: 170794 - DNA, 15 bp, Homo sapiens
aacacacacgcatag

SEQ ID NO: 170795 - DNA, 15 bp, Homo sapiens
caacacacacgcata

SEQ ID NO: 170796 - DNA, 15 bp, Homo sapiens
acaacacacacgcat

SEQ ID NO: 170797 - DNA, 15 bp, Homo sapiens
cacaacacacacgca

SEQ ID NO: 170798 - DNA, 15 bp, Homo sapiens
acacaacacacacgc

SEQ ID NO: 170799 - DNA, 15 bp, Homo sapiens
cacacaacacacacg

SEQ ID NO: 170800 - DNA, 15 bp, Homo sapiens
ccacacaacacacac

SEQ ID NO: 170801 - DNA, 15 bp, Homo sapiens
gccacacaacacaca

SEQ ID NO: 170802 - DNA, 15 bp, Homo sapiens
agccacacaacacac

SEQ ID NO: 170803 - DNA, 15 bp, Homo sapiens
cagccacacaacaca

SEQ ID NO: 170804 - DNA, 15 bp, Homo sapiens
acagccacacaacac

SEQ ID NO: 170805 - DNA, 15 bp, Homo sapiens
cacagccacacaaca

SEQ ID NO: 170806 - DNA, 15 bp, Homo sapiens
gcacagccacacaac

SEQ ID NO: 170807 - DNA, 15 bp, Homo sapiens
tgcacagccacacaa

SEQ ID NO: 170808 - DNA, 15 bp, Homo sapiens
gtgcacagccacaca

SEQ ID NO: 170809 - DNA, 15 bp, Homo sapiens
agtgcacagccacac

SEQ ID NO: 170810 - DNA, 15 bp, Homo sapiens
cagtgcacagccaca

SEQ ID NO: 170811 - DNA, 15 bp, Homo sapiens
ccagtgcacagccac

SEQ ID NO: 170812 - DNA, 15 bp, Homo sapiens
gccagtgcacagcca

SEQ ID NO: 170813 - DNA, 15 bp, Homo sapiens
tgccagtgcacagcc

SEQ ID NO: 170814 - DNA, 15 bp, Homo sapiens
ctgccagtgcacagc

SEQ ID NO: 170815 - DNA, 15 bp, Homo sapiens
cctgccagtgcacag

SEQ ID NO: 170816 - DNA, 15 bp, Homo sapiens
ccctgccagtgcaca

SEQ ID NO: 170817 - DNA, 15 bp, Homo sapiens
gccctgccagtgcac

SEQ ID NO: 170818 - DNA, 15 bp, Homo sapiens
agccctgccagtgca

SEQ ID NO: 170819 - DNA, 15 bp, Homo sapiens
gagccctgccagtgc

SEQ ID NO: 170820 - DNA, 15 bp, Homo sapiens
agagccctgccagtg

SEQ ID NO: 170821 - DNA, 15 bp, Homo sapiens
cagagccctgccagt

SEQ ID NO: 170822 - DNA, 15 bp, Homo sapiens
acagagccctgccag

SEQ ID NO: 170823 - DNA, 15 bp, Homo sapiens
cacagagccctgcca

SEQ ID NO: 170824 - DNA, 15 bp, Homo sapiens
ccacagagccctgcc

SEQ ID NO: 170825 - DNA, 15 bp, Homo sapiens
cccacagagccctgc

SEQ ID NO: 170826 - DNA, 15 bp, Homo sapiens
acccacagagccctg

SEQ ID NO: 170827 - DNA, 15 bp, Homo sapiens
gacccacagagccct

SEQ ID NO: 170828 - DNA, 15 bp, Homo sapiens
ggacccacagagccc

SEQ ID NO: 170829 - DNA, 15 bp, Homo sapiens
tggacccacagagcc

SEQ ID NO: 170830 - DNA, 15 bp, Homo sapiens
atggacccacagagc

SEQ ID NO: 170831 - DNA, 15 bp, Homo sapiens
catggacccacagag

SEQ ID NO: 170832 - DNA, 15 bp, Homo sapiens
ccatggacccacaga

SEQ ID NO: 170833 - DNA, 15 bp, Homo sapiens
cccatggacccacag

SEQ ID NO: 170834 - DNA, 15 bp, Homo sapiens
tcccatggacccaca

SEQ ID NO: 170835 - DNA, 15 bp, Homo sapiens
gtcccatggacccac

SEQ ID NO: 170836 - DNA, 15 bp, Homo sapiens
agtcccatggaccca

SEQ ID NO: 170837 - DNA, 15 bp, Homo sapiens
cagtcccatggaccc

SEQ ID NO: 170838 - DNA, 15 bp, Homo sapiens
ccagtcccatggacc

SEQ ID NO: 170839 - DNA, 15 bp, Homo sapiens
accagtcccatggac

SEQ ID NO: 170840 - DNA, 15 bp, Homo sapiens
aaccagtcccatgga

SEQ ID NO: 170841 - DNA, 15 bp, Homo sapiens
aaaccagtcccatgg

SEQ ID NO: 170842 - DNA, 15 bp, Homo sapiens
aaaaccagtcccatg

SEQ ID NO: 170843 - DNA, 15 bp, Homo sapiens
aaaaaccagtcccat

SEQ ID NO: 170844 - DNA, 15 bp, Homo sapiens
caaaaaccagtccca

SEQ ID NO: 170845 - DNA, 15 bp, Homo sapiens
ccaaaaaccagtccc

SEQ ID NO: 170846 - DNA, 15 bp, Homo sapiens
cccaaaaaccagtcc

SEQ ID NO: 170847 - DNA, 15 bp, Homo sapiens
acccaaaaaccagtc

SEQ ID NO: 170848 - DNA, 15 bp, Homo sapiens
cacccaaaaaccagt

SEQ ID NO: 170849 - DNA, 15 bp, Homo sapiens
ccacccaaaaaccag

SEQ ID NO: 170850 - DNA, 15 bp, Homo sapiens
gccacccaaaaacca

SEQ ID NO: 170851 - DNA, 15 bp, Homo sapiens
agccacccaaaaacc

SEQ ID NO: 170852 - DNA, 15 bp, Homo sapiens
gagccacccaaaaac

SEQ ID NO: 170853 - DNA, 15 bp, Homo sapiens
ggagccacccaaaaa

SEQ ID NO: 170854 - DNA, 15 bp, Homo sapiens
aggagccacccaaaa

SEQ ID NO: 170855 - DNA, 15 bp, Homo sapiens
caggagccacccaaa

SEQ ID NO: 170856 - DNA, 15 bp, Homo sapiens
ccaggagccacccaa

SEQ ID NO: 170857 - DNA, 15 bp, Homo sapiens
cccaggagccaccca

SEQ ID NO: 170858 - DNA, 15 bp, Homo sapiens
tcccaggagccaccc

SEQ ID NO: 170859 - DNA, 15 bp, Homo sapiens
ctcccaggagccacc

SEQ ID NO: 170860 - DNA, 15 bp, Homo sapiens
gctcccaggagccac

SEQ ID NO: 170861 - DNA, 15 bp, Homo sapiens
agctcccaggagcca

SEQ ID NO: 170862 - DNA, 15 bp, Homo sapiens
cagctcccaggagcc

SEQ ID NO: 170863 - DNA, 15 bp, Homo sapiens
acagctcccaggagc

SEQ ID NO: 170864 - DNA, 15 bp, Homo sapiens
cacagctcccaggag

SEQ ID NO: 170865 - DNA, 15 bp, Homo sapiens
acacagctcccagga

SEQ ID NO: 170866 - DNA, 15 bp, Homo sapiens
cacacagctcccagg

SEQ ID NO: 170867 - DNA, 15 bp, Homo sapiens
acacacagctcccag

SEQ ID NO: 170868 - DNA, 15 bp, Homo sapiens
cacacacagctccca

SEQ ID NO: 170869 - DNA, 15 bp, Homo sapiens
acacacacagctccc

SEQ ID NO: 170870 - DNA, 15 bp, Homo sapiens
cacacacacagctcc

SEQ ID NO: 170871 - DNA, 15 bp, Homo sapiens
ccacacacacagctc

SEQ ID NO: 170872 - DNA, 15 bp, Homo sapiens
gccacacacacagct

SEQ ID NO: 170873 - DNA, 15 bp, Homo sapiens
tgccacacacacagc

SEQ ID NO: 170874 - DNA, 15 bp, Homo sapiens
gtgccacacacacag

SEQ ID NO: 170875 - DNA, 15 bp, Homo sapiens
agtgccacacacaca

SEQ ID NO: 170876 - DNA, 15 bp, Homo sapiens
gagtgccacacacac

SEQ ID NO: 170877 - DNA, 15 bp, Homo sapiens
tgagtgccacacaca

SEQ ID NO: 170878 - DNA, 15 bp, Homo sapiens
ttgagtgccacacac

SEQ ID NO: 170879 - DNA, 15 bp, Homo sapiens
gttgagtgccacaca

SEQ ID NO: 170880 - DNA, 15 bp, Homo sapiens
tgttgagtgccacac

SEQ ID NO: 170881 - DNA, 15 bp, Homo sapiens
atgttgagtgccaca

SEQ ID NO: 170882 - DNA, 15 bp, Homo sapiens
catgttgagtgccac

SEQ ID NO: 170883 - DNA, 15 bp, Homo sapiens
ccatgttgagtgcca

SEQ ID NO: 170884 - DNA, 15 bp, Homo sapiens
gccatgttgagtgcc

SEQ ID NO: 170885 - DNA, 15 bp, Homo sapiens
ggccatgttgagtgc

SEQ ID NO: 170886 - DNA, 15 bp, Homo sapiens
tggccatgttgagtg

SEQ ID NO: 170887 - DNA, 15 bp, Homo sapiens
atggccatgttgagt

SEQ ID NO: 170888 - DNA, 15 bp, Homo sapiens
catggccatgttgag

SEQ ID NO: 170889 - DNA, 15 bp, Homo sapiens
acatggccatgttga

SEQ ID NO: 170890 - DNA, 15 bp, Homo sapiens
cacatggccatgttg

SEQ ID NO: 170891 - DNA, 15 bp, Homo sapiens
gcacatggccatgtt

SEQ ID NO: 170892 - DNA, 15 bp, Homo sapiens
tgcacatggccatgt

SEQ ID NO: 170893 - DNA, 15 bp, Homo sapiens
atgcacatggccatg

SEQ ID NO: 170894 - DNA, 15 bp, Homo sapiens
aatgcacatggccat

SEQ ID NO: 170895 - DNA, 15 bp, Homo sapiens
caatgcacatggcca

SEQ ID NO: 170896 - DNA, 15 bp, Homo sapiens
ccaatgcacatggcc

SEQ ID NO: 170897 - DNA, 15 bp, Homo sapiens
gccaatgcacatggc

SEQ ID NO: 170898 - DNA, 15 bp, Homo sapiens
cgccaatgcacatgg

SEQ ID NO: 170899 - DNA, 15 bp, Homo sapiens
ccgccaatgcacatg

SEQ ID NO: 170900 - DNA, 15 bp, Homo sapiens
gccgccaatgcacat

SEQ ID NO: 170901 - DNA, 15 bp, Homo sapiens
ggccgccaatgcaca

SEQ ID NO: 170902 - DNA, 15 bp, Homo sapiens
aggccgccaatgcac

SEQ ID NO: 170903 - DNA, 15 bp, Homo sapiens
gaggccgccaatgca

SEQ ID NO: 170904 - DNA, 15 bp, Homo sapiens
agaggccgccaatgc

SEQ ID NO: 170905 - DNA, 15 bp, Homo sapiens
cagaggccgccaatg

SEQ ID NO: 170906 - DNA, 15 bp, Homo sapiens
acagaggccgccaat

SEQ ID NO: 170907 - DNA, 15 bp, Homo sapiens
cacagaggccgccaa

SEQ ID NO: 170908 - DNA, 15 bp, Homo sapiens
gcacagaggccgcca

SEQ ID NO: 170909 - DNA, 15 bp, Homo sapiens
ggcacagaggccgcc

SEQ ID NO: 170910 - DNA, 15 bp, Homo sapiens
aggcacagaggccgc

SEQ ID NO: 170911 - DNA, 15 bp, Homo sapiens
caggcacagaggccg

SEQ ID NO: 170912 - DNA, 15 bp, Homo sapiens
gcaggcacagaggcc

SEQ ID NO: 170913 - DNA, 15 bp, Homo sapiens
tgcaggcacagaggc

SEQ ID NO: 170914 - DNA, 15 bp, Homo sapiens
gtgcaggcacagagg

SEQ ID NO: 170915 - DNA, 15 bp, Homo sapiens
ggtgcaggcacagag

SEQ ID NO: 170916 - DNA, 15 bp, Homo sapiens
aggtgcaggcacaga

SEQ ID NO: 170917 - DNA, 15 bp, Homo sapiens
caggtgcaggcacag

SEQ ID NO: 170918 - DNA, 15 bp, Homo sapiens
tcaggtgcaggcaca

SEQ ID NO: 170919 - DNA, 15 bp, Homo sapiens
ctcaggtgcaggcac

SEQ ID NO: 170920 - DNA, 15 bp, Homo sapiens
gctcaggtgcaggca

SEQ ID NO: 170921 - DNA, 15 bp, Homo sapiens
agctcaggtgcaggc

SEQ ID NO: 170922 - DNA, 15 bp, Homo sapiens
cagctcaggtgcagg

SEQ ID NO: 170923 - DNA, 15 bp, Homo sapiens
ccagctcaggtgcag

SEQ ID NO: 170924 - DNA, 15 bp, Homo sapiens
cccagctcaggtgca

SEQ ID NO: 170925 - DNA, 15 bp, Homo sapiens
ccccagctcaggtgc

SEQ ID NO: 170926 - DNA, 15 bp, Homo sapiens
cccccagctcaggtg

SEQ ID NO: 170927 - DNA, 15 bp, Homo sapiens
acccccagctcaggt

SEQ ID NO: 170928 - DNA, 15 bp, Homo sapiens
gacccccagctcagg

SEQ ID NO: 170929 - DNA, 15 bp, Homo sapiens
ggacccccagctcag

SEQ ID NO: 170930 - DNA, 15 bp, Homo sapiens
aggacccccagctca

SEQ ID NO: 170931 - DNA, 15 bp, Homo sapiens
caggacccccagctc

SEQ ID NO: 170932 - DNA, 15 bp, Homo sapiens
acaggacccccagct

SEQ ID NO: 170933 - DNA, 15 bp, Homo sapiens
cacaggacccccagc

SEQ ID NO: 170934 - DNA, 15 bp, Homo sapiens
tcacaggacccccag

SEQ ID NO: 170935 - DNA, 15 bp, Homo sapiens
ctcacaggaccccca

SEQ ID NO: 170936 - DNA, 15 bp, Homo sapiens
actcacaggaccccc

SEQ ID NO: 170937 - DNA, 15 bp, Homo sapiens
gactcacaggacccc

SEQ ID NO: 170938 - DNA, 15 bp, Homo sapiens
ggactcacaggaccc

SEQ ID NO: 170939 - DNA, 15 bp, Homo sapiens
aggactcacaggacc

SEQ ID NO: 170940 - DNA, 15 bp, Homo sapiens
caggactcacaggac

SEQ ID NO: 170941 - DNA, 15 bp, Homo sapiens
gcaggactcacagga

SEQ ID NO: 170942 - DNA, 15 bp, Homo sapiens
agcaggactcacagg

SEQ ID NO: 170943 - DNA, 15 bp, Homo sapiens
cagcaggactcacag

SEQ ID NO: 170944 - DNA, 15 bp, Homo sapiens
ccagcaggactcaca

SEQ ID NO: 170945 - DNA, 15 bp, Homo sapiens
tccagcaggactcac

SEQ ID NO: 170946 - DNA, 15 bp, Homo sapiens
atccagcaggactca

SEQ ID NO: 170947 - DNA, 15 bp, Homo sapiens
catccagcaggactc

SEQ ID NO: 170948 - DNA, 15 bp, Homo sapiens
gcatccagcaggact

SEQ ID NO: 170949 - DNA, 15 bp, Homo sapiens
tgcatccagcaggac

SEQ ID NO: 170950 - DNA, 15 bp, Homo sapiens
atgcatccagcagga

SEQ ID NO: 170951 - DNA, 15 bp, Homo sapiens
catgcatccagcagg

SEQ ID NO: 170952 - DNA, 15 bp, Homo sapiens
acatgcatccagcag

SEQ ID NO: 170953 - DNA, 15 bp, Homo sapiens
cacatgcatccagca

SEQ ID NO: 170954 - DNA, 15 bp, Homo sapiens
acacatgcatccagc

SEQ ID NO: 170955 - DNA, 15 bp, Homo sapiens
cacacatgcatccag

SEQ ID NO: 170956 - DNA, 15 bp, Homo sapiens
gcacacatgcatcca

SEQ ID NO: 170957 - DNA, 15 bp, Homo sapiens
tgcacacatgcatcc

SEQ ID NO: 170958 - DNA, 15 bp, Homo sapiens
atgcacacatgcatc

SEQ ID NO: 170959 - DNA, 15 bp, Homo sapiens
gatgcacacatgcat

SEQ ID NO: 170960 - DNA, 15 bp, Homo sapiens
agatgcacacatgca

SEQ ID NO: 170961 - DNA, 15 bp, Homo sapiens
gagatgcacacatgc

SEQ ID NO: 170962 - DNA, 15 bp, Homo sapiens
agagatgcacacatg

SEQ ID NO: 170963 - DNA, 15 bp, Homo sapiens
gagagatgcacacat

SEQ ID NO: 170964 - DNA, 15 bp, Homo sapiens
agagagatgcacaca

SEQ ID NO: 170965 - DNA, 15 bp, Homo sapiens
gagagagatgcacac

SEQ ID NO: 170966 - DNA, 15 bp, Homo sapiens
ggagagagatgcaca

SEQ ID NO: 170967 - DNA, 15 bp, Homo sapiens
gggagagagatgcac

SEQ ID NO: 170968 - DNA, 15 bp, Homo sapiens
agggagagagatgca

SEQ ID NO: 170969 - DNA, 15 bp, Homo sapiens
gagggagagagatgc

SEQ ID NO: 170970 - DNA, 15 bp, Homo sapiens
ggagggagagagatg

SEQ ID NO: 170971 - DNA, 15 bp, Homo sapiens
gggagggagagagat

SEQ ID NO: 170972 - DNA, 15 bp, Homo sapiens
ggggagggagagaga

SEQ ID NO: 170973 - DNA, 15 bp, Homo sapiens
tggggagggagagag

SEQ ID NO: 170974 - DNA, 15 bp, Homo sapiens
ctggggagggagaga

SEQ ID NO: 170975 - DNA, 15 bp, Homo sapiens
gctggggagggagag

SEQ ID NO: 170976 - DNA, 15 bp, Homo sapiens
agctggggagggaga

SEQ ID NO: 170977 - DNA, 15 bp, Homo sapiens
cagctggggagggag

SEQ ID NO: 170978 - DNA, 15 bp, Homo sapiens
gcagctggggaggga

SEQ ID NO: 170979 - DNA, 15 bp, Homo sapiens
agcagctggggaggg

SEQ ID NO: 170980 - DNA, 15 bp, Homo sapiens
cagcagctggggagg

SEQ ID NO: 170981 - DNA, 15 bp, Homo sapiens
ccagcagctggggag

SEQ ID NO: 170982 - DNA, 15 bp, Homo sapiens
tccagcagctgggga

SEQ ID NO: 170983 - DNA, 15 bp, Homo sapiens
gtccagcagctgggg

SEQ ID NO: 170984 - DNA, 15 bp, Homo sapiens
ggtccagcagctggg

SEQ ID NO: 170985 - DNA, 15 bp, Homo sapiens
tggtccagcagctgg

SEQ ID NO: 170986 - DNA, 15 bp, Homo sapiens
ctggtccagcagctg

SEQ ID NO: 170987 - DNA, 15 bp, Homo sapiens
cctggtccagcagct

SEQ ID NO: 170988 - DNA, 15 bp, Homo sapiens
tcctggtccagcagc

SEQ ID NO: 170989 - DNA, 15 bp, Homo sapiens
ttcctggtccagcag

SEQ ID NO: 170990 - DNA, 15 bp, Homo sapiens
gttcctggtccagca

SEQ ID NO: 170991 - DNA, 15 bp, Homo sapiens
agttcctggtccagc

SEQ ID NO: 170992 - DNA, 15 bp, Homo sapiens
gagttcctggtccag

SEQ ID NO: 170993 - DNA, 15 bp, Homo sapiens
ggagttcctggtcca

SEQ ID NO: 170994 - DNA, 15 bp, Homo sapiens
tggagttcctggtcc

SEQ ID NO: 170995 - DNA, 15 bp, Homo sapiens
ttggagttcctggtc

SEQ ID NO: 170996 - DNA, 15 bp, Homo sapiens
gttggagttcctggt

SEQ ID NO: 170997 - DNA, 15 bp, Homo sapiens
tgttggagttcctgg

SEQ ID NO: 170998 - DNA, 15 bp, Homo sapiens
atgttggagttcctg

SEQ ID NO: 170999 - DNA, 15 bp, Homo sapiens
catgttggagttcct

SEQ ID NO: 171000 - DNA, 15 bp, Homo sapiens
tcatgttggagttcc

SEQ ID NO: 171001 - DNA, 15 bp, Homo sapiens
ttcatgttggagttc

SEQ ID NO: 171002 - DNA, 15 bp, Homo sapiens
gttcatgttggagtt

SEQ ID NO: 171003 - DNA, 15 bp, Homo sapiens
agttcatgttggagt

SEQ ID NO: 171004 - DNA, 15 bp, Homo sapiens
tagttcatgttggag

SEQ ID NO: 171005 - DNA, 15 bp, Homo sapiens
gtagttcatgttgga

SEQ ID NO: 171006 - DNA, 15 bp, Homo sapiens
agtagttcatgttgg

SEQ ID NO: 171007 - DNA, 15 bp, Homo sapiens
cagtagttcatgttg

SEQ ID NO: 171008 - DNA, 15 bp, Homo sapiens
ccagtagttcatgtt

SEQ ID NO: 171009 - DNA, 15 bp, Homo sapiens
gccagtagttcatgt

SEQ ID NO: 171010 - DNA, 15 bp, Homo sapiens
agccagtagttcatg

SEQ ID NO: 171011 - DNA, 15 bp, Homo sapiens
gagccagtagttcat

SEQ ID NO: 171012 - DNA, 15 bp, Homo sapiens
tgagccagtagttca

SEQ ID NO: 171013 - DNA, 15 bp, Homo sapiens
atgagccagtagttc

SEQ ID NO: 171014 - DNA, 15 bp, Homo sapiens
aatgagccagtagtt

SEQ ID NO: 171015 - DNA, 15 bp, Homo sapiens
taatgagccagtagt

SEQ ID NO: 171016 - DNA, 15 bp, Homo sapiens
ataatgagccagtag

SEQ ID NO: 171017 - DNA, 15 bp, Homo sapiens
gataatgagccagta

SEQ ID NO: 171018 - DNA, 15 bp, Homo sapiens
ggataatgagccagt

SEQ ID NO: 171019 - DNA, 15 bp, Homo sapiens
cggataatgagccag

SEQ ID NO: 171020 - DNA, 15 bp, Homo sapiens
ccggataatgagcca

SEQ ID NO: 171021 - DNA, 15 bp, Homo sapiens
gccggataatgagcc

SEQ ID NO: 171022 - DNA, 15 bp, Homo sapiens
agccggataatgagc

SEQ ID NO: 171023 - DNA, 15 bp, Homo sapiens
cagccggataatgag

SEQ ID NO: 171024 - DNA, 15 bp, Homo sapiens
gcagccggataatga

SEQ ID NO: 171025 - DNA, 15 bp, Homo sapiens
ggcagccggataatg

SEQ ID NO: 171026 - DNA, 15 bp, Homo sapiens
gggcagccggataat

SEQ ID NO: 171027 - DNA, 15 bp, Homo sapiens
tgggcagccggataa

SEQ ID NO: 171028 - DNA, 15 bp, Homo sapiens
atgggcagccggata

SEQ ID NO: 171029 - DNA, 15 bp, Homo sapiens
aatgggcagccggat

SEQ ID NO: 171030 - DNA, 15 bp, Homo sapiens
gaatgggcagccgga

SEQ ID NO: 171031 - DNA, 15 bp, Homo sapiens
agaatgggcagccgg

SEQ ID NO: 171032 - DNA, 15 bp, Homo sapiens
gagaatgggcagccg

SEQ ID NO: 171033 - DNA, 15 bp, Homo sapiens
agagaatgggcagcc

SEQ ID NO: 171034 - DNA, 15 bp, Homo sapiens
aagagaatgggcagc

SEQ ID NO: 171035 - DNA, 15 bp, Homo sapiens
aaagagaatgggcag

SEQ ID NO: 171036 - DNA, 15 bp, Homo sapiens
caaagagaatgggca

SEQ ID NO: 171037 - DNA, 15 bp, Homo sapiens
gcaaagagaatgggc

SEQ ID NO: 171038 - DNA, 15 bp, Homo sapiens
ggcaaagagaatggg

SEQ ID NO: 171039 - DNA, 15 bp, Homo sapiens
tggcaaagagaatgg

SEQ ID NO: 171040 - DNA, 15 bp, Homo sapiens
atggcaaagagaatg

SEQ ID NO: 171041 - DNA, 15 bp, Homo sapiens
aatggcaaagagaat

SEQ ID NO: 171042 - DNA, 15 bp, Homo sapiens
caatggcaaagagaa

SEQ ID NO: 171043 - DNA, 15 bp, Homo sapiens
ccaatggcaaagaga

SEQ ID NO: 171044 - DNA, 15 bp, Homo sapiens
cccaatggcaaagag

SEQ ID NO: 171045 - DNA, 15 bp, Homo sapiens
ccccaatggcaaaga

SEQ ID NO: 171046 - DNA, 15 bp, Homo sapiens
accccaatggcaaag

SEQ ID NO: 171047 - DNA, 15 bp, Homo sapiens
caccccaatggcaaa

SEQ ID NO: 171048 - DNA, 15 bp, Homo sapiens
tcaccccaatggcaa

SEQ ID NO: 171049 - DNA, 15 bp, Homo sapiens
ctcaccccaatggca

SEQ ID NO: 171050 - DNA, 15 bp, Homo sapiens
actcaccccaatggc

SEQ ID NO: 171051 - DNA, 15 bp, Homo sapiens
cactcaccccaatgg

SEQ ID NO: 171052 - DNA, 15 bp, Homo sapiens
tcactcaccccaatg

SEQ ID NO: 171053 - DNA, 15 bp, Homo sapiens
atcactcaccccaat

SEQ ID NO: 171054 - DNA, 15 bp, Homo sapiens
catcactcaccccaa

SEQ ID NO: 171055 - DNA, 15 bp, Homo sapiens
ccatcactcacccca

SEQ ID NO: 171056 - DNA, 15 bp, Homo sapiens
accatcactcacccc

SEQ ID NO: 171057 - DNA, 15 bp, Homo sapiens
caccatcactcaccc

SEQ ID NO: 171058 - DNA, 15 bp, Homo sapiens
acaccatcactcacc

SEQ ID NO: 171059 - DNA, 15 bp, Homo sapiens
gacaccatcactcac

SEQ ID NO: 171060 - DNA, 15 bp, Homo sapiens
tgacaccatcactca

SEQ ID NO: 171061 - DNA, 15 bp, Homo sapiens
ctgacaccatcactc

SEQ ID NO: 171062 - DNA, 15 bp, Homo sapiens
cctgacaccatcact

SEQ ID NO: 171063 - DNA, 15 bp, Homo sapiens
ccctgacaccatcac

SEQ ID NO: 171064 - DNA, 15 bp, Homo sapiens
tccctgacaccatca

SEQ ID NO: 171065 - DNA, 15 bp, Homo sapiens
atccctgacaccatc

SEQ ID NO: 171066 - DNA, 15 bp, Homo sapiens
catccctgacaccat

SEQ ID NO: 171067 - DNA, 15 bp, Homo sapiens
ccatccctgacacca

SEQ ID NO: 171068 - DNA, 15 bp, Homo sapiens
cccatccctgacacc

SEQ ID NO: 171069 - DNA, 15 bp, Homo sapiens
tcccatccctgacac

SEQ ID NO: 171070 - DNA, 15 bp, Homo sapiens
ctcccatccctgaca

SEQ ID NO: 171071 - DNA, 15 bp, Homo sapiens
actcccatccctgac

SEQ ID NO: 171072 - DNA, 15 bp, Homo sapiens
cactcccatccctga

SEQ ID NO: 171073 - DNA, 15 bp, Homo sapiens
ccactcccatccctg

SEQ ID NO: 171074 - DNA, 15 bp, Homo sapiens
gccactcccatccct

SEQ ID NO: 171075 - DNA, 15 bp, Homo sapiens
tgccactcccatccc

SEQ ID NO: 171076 - DNA, 15 bp, Homo sapiens
ctgccactcccatcc

SEQ ID NO: 171077 - DNA, 15 bp, Homo sapiens
gctgccactcccatc

SEQ ID NO: 171078 - DNA, 15 bp, Homo sapiens
agctgccactcccat

SEQ ID NO: 171079 - DNA, 15 bp, Homo sapiens
tagctgccactccca

SEQ ID NO: 171080 - DNA, 15 bp, Homo sapiens
atagctgccactccc

SEQ ID NO: 171081 - DNA, 15 bp, Homo sapiens
catagctgccactcc

SEQ ID NO: 171082 - DNA, 15 bp, Homo sapiens
tcatagctgccactc

SEQ ID NO: 171083 - DNA, 15 bp, Homo sapiens
atcatagctgccact

SEQ ID NO: 171084 - DNA, 15 bp, Homo sapiens
tatcatagctgccac

SEQ ID NO: 171085 - DNA, 15 bp, Homo sapiens
ctatcatagctgcca

SEQ ID NO: 171086 - DNA, 15 bp, Homo sapiens
cctatcatagctgcc

SEQ ID NO: 171087 - DNA, 15 bp, Homo sapiens
ccctatcatagctgc

SEQ ID NO: 171088 - DNA, 15 bp, Homo sapiens
gccctatcatagctg

SEQ ID NO: 171089 - DNA, 15 bp, Homo sapiens
agccctatcatagct

SEQ ID NO: 171090 - DNA, 15 bp, Homo sapiens
cagccctatcatagc

SEQ ID NO: 171091 - DNA, 15 bp, Homo sapiens
ccagccctatcatag

SEQ ID NO: 171092 - DNA, 15 bp, Homo sapiens
cccagccctatcata

SEQ ID NO: 171093 - DNA, 15 bp, Homo sapiens
gcccagccctatcat

SEQ ID NO: 171094 - DNA, 15 bp, Homo sapiens
agcccagccctatca

SEQ ID NO: 171095 - DNA, 15 bp, Homo sapiens
cagcccagccctatc

SEQ ID NO: 171096 - DNA, 15 bp, Homo sapiens
ccagcccagccctat

SEQ ID NO: 171097 - DNA, 15 bp, Homo sapiens
accagcccagcccta

SEQ ID NO: 171098 - DNA, 15 bp, Homo sapiens
caccagcccagccct

SEQ ID NO: 171099 - DNA, 15 bp, Homo sapiens
gcaccagcccagccc

SEQ ID NO: 171100 - DNA, 15 bp, Homo sapiens
ggcaccagcccagcc

SEQ ID NO: 171101 - DNA, 15 bp, Homo sapiens
gggcaccagcccagc

SEQ ID NO: 171102 - DNA, 15 bp, Homo sapiens
ggggcaccagcccag

SEQ ID NO: 171103 - DNA, 15 bp, Homo sapiens
gggggcaccagccca

SEQ ID NO: 171104 - DNA, 15 bp, Homo sapiens
agggggcaccagccc

SEQ ID NO: 171105 - DNA, 15 bp, Homo sapiens
cagggggcaccagcc

SEQ ID NO: 171106 - DNA, 15 bp, Homo sapiens
gcagggggcaccagc

SEQ ID NO: 171107 - DNA, 15 bp, Homo sapiens
ggcagggggcaccag

SEQ ID NO: 171108 - DNA, 15 bp, Homo sapiens
tggcagggggcacca

SEQ ID NO: 171109 - DNA, 15 bp, Homo sapiens
ttggcagggggcacc

SEQ ID NO: 171110 - DNA, 15 bp, Homo sapiens
attggcagggggcac

SEQ ID NO: 171111 - DNA, 15 bp, Homo sapiens
gattggcagggggca

SEQ ID NO: 171112 - DNA, 15 bp, Homo sapiens
ggattggcagggggc

SEQ ID NO: 171113 - DNA, 15 bp, Homo sapiens
gggattggcaggggg

SEQ ID NO: 171114 - DNA, 15 bp, Homo sapiens
ggggattggcagggg

SEQ ID NO: 171115 - DNA, 15 bp, Homo sapiens
cggggattggcaggg

SEQ ID NO: 171116 - DNA, 15 bp, Homo sapiens
ccggggattggcagg

SEQ ID NO: 171117 - DNA, 15 bp, Homo sapiens
gccggggattggcag

SEQ ID NO: 171118 - DNA, 15 bp, Homo sapiens
ggccggggattggca

SEQ ID NO: 171119 - DNA, 15 bp, Homo sapiens
gggccggggattggc

SEQ ID NO: 171120 - DNA, 15 bp, Homo sapiens
ggggccggggattgg

SEQ ID NO: 171121 - DNA, 15 bp, Homo sapiens
tggggccggggattg

SEQ ID NO: 171122 - DNA, 15 bp, Homo sapiens
gtggggccggggatt

SEQ ID NO: 171123 - DNA, 15 bp, Homo sapiens
ggtggggccggggat

SEQ ID NO: 171124 - DNA, 15 bp, Homo sapiens
gggtggggccgggga

SEQ ID NO: 171125 - DNA, 15 bp, Homo sapiens
ggggtggggccgggg

SEQ ID NO: 171126 - DNA, 15 bp, Homo sapiens
cggggtggggccggg

SEQ ID NO: 171127 - DNA, 15 bp, Homo sapiens
gcggggtggggccgg

SEQ ID NO: 171128 - DNA, 15 bp, Homo sapiens
tgcggggtggggccg

SEQ ID NO: 171129 - DNA, 15 bp, Homo sapiens
ctgcggggtggggcc

SEQ ID NO: 171130 - DNA, 15 bp, Homo sapiens
cctgcggggtggggc

SEQ ID NO: 171131 - DNA, 15 bp, Homo sapiens
acctgcggggtgggg

SEQ ID NO: 171132 - DNA, 15 bp, Homo sapiens
cacctgcggggtggg

SEQ ID NO: 171133 - DNA, 15 bp, Homo sapiens
tcacctgcggggtgg

SEQ ID NO: 171134 - DNA, 15 bp, Homo sapiens
ttcacctgcggggtg

SEQ ID NO: 171135 - DNA, 15 bp, Homo sapiens
gttcacctgcggggt

SEQ ID NO: 171136 - DNA, 15 bp, Homo sapiens
agttcacctgcgggg

SEQ ID NO: 171137 - DNA, 15 bp, Homo sapiens
aagttcacctgcggg

SEQ ID NO: 171138 - DNA, 15 bp, Homo sapiens
gaagttcacctgcgg

SEQ ID NO: 171139 - DNA, 15 bp, Homo sapiens
ggaagttcacctgcg

SEQ ID NO: 171140 - DNA, 15 bp, Homo sapiens
aggaagttcacctgc

SEQ ID NO: 171141 - DNA, 15 bp, Homo sapiens
gaggaagttcacctg

SEQ ID NO: 171142 - DNA, 15 bp, Homo sapiens
tgaggaagttcacct

SEQ ID NO: 171143 - DNA, 15 bp, Homo sapiens
atgaggaagttcacc

SEQ ID NO: 171144 - DNA, 15 bp, Homo sapiens
gatgaggaagttcac

SEQ ID NO: 171145 - DNA, 15 bp, Homo sapiens
agatgaggaagttca

SEQ ID NO: 171146 - DNA, 15 bp, Homo sapiens
aagatgaggaagttc

SEQ ID NO: 171147 - DNA, 15 bp, Homo sapiens
aaagatgaggaagtt

SEQ ID NO: 171148 - DNA, 15 bp, Homo sapiens
caaagatgaggaagt

SEQ ID NO: 171149 - DNA, 15 bp, Homo sapiens
acaaagatgaggaag

SEQ ID NO: 171150 - DNA, 15 bp, Homo sapiens
aacaaagatgaggaa

SEQ ID NO: 171151 - DNA, 15 bp, Homo sapiens
gaacaaagatgagga

SEQ ID NO: 171152 - DNA, 15 bp, Homo sapiens
cgaacaaagatgagg

SEQ ID NO: 171153 - DNA, 15 bp, Homo sapiens
ccgaacaaagatgag

SEQ ID NO: 171154 - DNA, 15 bp, Homo sapiens
cccgaacaaagatga

SEQ ID NO: 171155 - DNA, 15 bp, Homo sapiens
acccgaacaaagatg

SEQ ID NO: 171156 - DNA, 15 bp, Homo sapiens
gacccgaacaaagat

SEQ ID NO: 171157 - DNA, 15 bp, Homo sapiens
tgacccgaacaaaga

SEQ ID NO: 171158 - DNA, 15 bp, Homo sapiens
atgacccgaacaaag

SEQ ID NO: 171159 - DNA, 15 bp, Homo sapiens
gatgacccgaacaaa

SEQ ID NO: 171160 - DNA, 15 bp, Homo sapiens
agatgacccgaacaa

SEQ ID NO: 171161 - DNA, 15 bp, Homo sapiens
cagatgacccgaaca

SEQ ID NO: 171162 - DNA, 15 bp, Homo sapiens
gcagatgacccgaac

SEQ ID NO: 171163 - DNA, 15 bp, Homo sapiens
tgcagatgacccgaa

SEQ ID NO: 171164 - DNA, 15 bp, Homo sapiens
atgcagatgacccga

SEQ ID NO: 171165 - DNA, 15 bp, Homo sapiens
gatgcagatgacccg

SEQ ID NO: 171166 - DNA, 15 bp, Homo sapiens
cgatgcagatgaccc

SEQ ID NO: 171167 - DNA, 15 bp, Homo sapiens
acgatgcagatgacc

SEQ ID NO: 171168 - DNA, 15 bp, Homo sapiens
cacgatgcagatgac

SEQ ID NO: 171169 - DNA, 15 bp, Homo sapiens
ccacgatgcagatga

SEQ ID NO: 171170 - DNA, 15 bp, Homo sapiens
accacgatgcagatg

SEQ ID NO: 171171 - DNA, 15 bp, Homo sapiens
taccacgatgcagat

SEQ ID NO: 171172 - DNA, 15 bp, Homo sapiens
ataccacgatgcaga

SEQ ID NO: 171173 - DNA, 15 bp, Homo sapiens
gataccacgatgcag

SEQ ID NO: 171174 - DNA, 15 bp, Homo sapiens
ggataccacgatgca

SEQ ID NO: 171175 - DNA, 15 bp, Homo sapiens
tggataccacgatgc

SEQ ID NO: 171176 - DNA, 15 bp, Homo sapiens
ttggataccacgatg

SEQ ID NO: 171177 - DNA, 15 bp, Homo sapiens
tttggataccacgat

SEQ ID NO: 171178 - DNA, 15 bp, Homo sapiens
gtttggataccacga

SEQ ID NO: 171179 - DNA, 15 bp, Homo sapiens
agtttggataccacg

SEQ ID NO: 171180 - DNA, 15 bp, Homo sapiens
cagtttggataccac

SEQ ID NO: 171181 - DNA, 15 bp, Homo sapiens
tcagtttggatacca

SEQ ID NO: 171182 - DNA, 15 bp, Homo sapiens
ttcagtttggatacc

SEQ ID NO: 171183 - DNA, 15 bp, Homo sapiens
cttcagtttggatac

SEQ ID NO: 171184 - DNA, 15 bp, Homo sapiens
ccttcagtttggata

SEQ ID NO: 171185 - DNA, 15 bp, Homo sapiens
gccttcagtttggat

SEQ ID NO: 171186 - DNA, 15 bp, Homo sapiens
ggccttcagtttgga

SEQ ID NO: 171187 - DNA, 15 bp, Homo sapiens
tggccttcagtttgg

SEQ ID NO: 171188 - DNA, 15 bp, Homo sapiens
ttggccttcagtttg

SEQ ID NO: 171189 - DNA, 15 bp, Homo sapiens
attggccttcagttt

SEQ ID NO: 171190 - DNA, 15 bp, Homo sapiens
gattggccttcagtt

SEQ ID NO: 171191 - DNA, 15 bp, Homo sapiens
agattggccttcagt

SEQ ID NO: 171192 - DNA, 15 bp, Homo sapiens
gagattggccttcag

SEQ ID NO: 171193 - DNA, 15 bp, Homo sapiens
tgagattggccttca

SEQ ID NO: 171194 - DNA, 15 bp, Homo sapiens
atgagattggccttc

SEQ ID NO: 171195 - DNA, 15 bp, Homo sapiens
catgagattggcctt

SEQ ID NO: 171196 - DNA, 15 bp, Homo sapiens
acatgagattggcct

SEQ ID NO: 171197 - DNA, 15 bp, Homo sapiens
cacatgagattggcc

SEQ ID NO: 171198 - DNA, 15 bp, Homo sapiens
gcacatgagattggc

SEQ ID NO: 171199 - DNA, 15 bp, Homo sapiens
tgcacatgagattgg

SEQ ID NO: 171200 - DNA, 15 bp, Homo sapiens
ttgcacatgagattg

SEQ ID NO: 171201 - DNA, 15 bp, Homo sapiens
cttgcacatgagatt

SEQ ID NO: 171202 - DNA, 15 bp, Homo sapiens
tcttgcacatgagat

SEQ ID NO: 171203 - DNA, 15 bp, Homo sapiens
gtcttgcacatgaga

SEQ ID NO: 171204 - DNA, 15 bp, Homo sapiens
tgtcttgcacatgag

SEQ ID NO: 171205 - DNA, 15 bp, Homo sapiens
ctgtcttgcacatga

SEQ ID NO: 171206 - DNA, 15 bp, Homo sapiens
tctgtcttgcacatg

SEQ ID NO: 171207 - DNA, 15 bp, Homo sapiens
gtctgtcttgcacat

SEQ ID NO: 171208 - DNA, 15 bp, Homo sapiens
tgtctgtcttgcaca

SEQ ID NO: 171209 - DNA, 15 bp, Homo sapiens
atgtctgtcttgcac

SEQ ID NO: 171210 - DNA, 15 bp, Homo sapiens
gatgtctgtcttgca

SEQ ID NO: 171211 - DNA, 15 bp, Homo sapiens
tgatgtctgtcttgc

SEQ ID NO: 171212 - DNA, 15 bp, Homo sapiens
ttgatgtctgtcttg

SEQ ID NO: 171213 - DNA, 15 bp, Homo sapiens
tttgatgtctgtctt

SEQ ID NO: 171214 - DNA, 15 bp, Homo sapiens
atttgatgtctgtct

SEQ ID NO: 171215 - DNA, 15 bp, Homo sapiens
catttgatgtctgtc

SEQ ID NO: 171216 - DNA, 15 bp, Homo sapiens
gcatttgatgtctgt

SEQ ID NO: 171217 - DNA, 15 bp, Homo sapiens
tgcatttgatgtctg

SEQ ID NO: 171218 - DNA, 15 bp, Homo sapiens
ctgcatttgatgtct

SEQ ID NO: 171219 - DNA, 15 bp, Homo sapiens
cctgcatttgatgtc

SEQ ID NO: 171220 - DNA, 15 bp, Homo sapiens
acctgcatttgatgt

SEQ ID NO: 171221 - DNA, 15 bp, Homo sapiens
cacctgcatttgatg

SEQ ID NO: 171222 - DNA, 15 bp, Homo sapiens
tcacctgcatttgat

SEQ ID NO: 171223 - DNA, 15 bp, Homo sapiens
atcacctgcatttga

SEQ ID NO: 171224 - DNA, 15 bp, Homo sapiens
catcacctgcatttg

SEQ ID NO: 171225 - DNA, 15 bp, Homo sapiens
acatcacctgcattt

SEQ ID NO: 171226 - DNA, 15 bp, Homo sapiens
tacatcacctgcatt

SEQ ID NO: 171227 - DNA, 15 bp, Homo sapiens
ttacatcacctgcat

SEQ ID NO: 171228 - DNA, 15 bp, Homo sapiens
gttacatcacctgca

SEQ ID NO: 171229 - DNA, 15 bp, Homo sapiens
agttacatcacctgc

SEQ ID NO: 171230 - DNA, 15 bp, Homo sapiens
cagttacatcacctg

SEQ ID NO: 171231 - DNA, 15 bp, Homo sapiens
tcagttacatcacct

SEQ ID NO: 171232 - DNA, 15 bp, Homo sapiens
ctcagttacatcacc

SEQ ID NO: 171233 - DNA, 15 bp, Homo sapiens
gctcagttacatcac

SEQ ID NO: 171234 - DNA, 15 bp, Homo sapiens
agctcagttacatca

SEQ ID NO: 171235 - DNA, 15 bp, Homo sapiens
cagctcagttacatc

SEQ ID NO: 171236 - DNA, 15 bp, Homo sapiens
ccagctcagttacat

SEQ ID NO: 171237 - DNA, 15 bp, Homo sapiens
gccagctcagttaca

SEQ ID NO: 171238 - DNA, 15 bp, Homo sapiens
agccagctcagttac

SEQ ID NO: 171239 - DNA, 15 bp, Homo sapiens
aagccagctcagtta

SEQ ID NO: 171240 - DNA, 15 bp, Homo sapiens
aaagccagctcagtt

SEQ ID NO: 171241 - DNA, 15 bp, Homo sapiens
taaagccagctcagt

SEQ ID NO: 171242 - DNA, 15 bp, Homo sapiens
gtaaagccagctcag

SEQ ID NO: 171243 - DNA, 15 bp, Homo sapiens
agtaaagccagctca

SEQ ID NO: 171244 - DNA, 15 bp, Homo sapiens
cagtaaagccagctc

SEQ ID NO: 171245 - DNA, 15 bp, Homo sapiens
tcagtaaagccagct

SEQ ID NO: 171246 - DNA, 15 bp, Homo sapiens
ctcagtaaagccagc

SEQ ID NO: 171247 - DNA, 15 bp, Homo sapiens
cctcagtaaagccag

SEQ ID NO: 171248 - DNA, 15 bp, Homo sapiens
tcctcagtaaagcca

SEQ ID NO: 171249 - DNA, 15 bp, Homo sapiens
gtcctcagtaaagcc

SEQ ID NO: 171250 - DNA, 15 bp, Homo sapiens
ggtcctcagtaaagc

SEQ ID NO: 171251 - DNA, 15 bp, Homo sapiens
gggtcctcagtaaag

SEQ ID NO: 171252 - DNA, 15 bp, Homo sapiens
agggtcctcagtaaa

SEQ ID NO: 171253 - DNA, 15 bp, Homo sapiens
gagggtcctcagtaa

SEQ ID NO: 171254 - DNA, 15 bp, Homo sapiens
tgagggtcctcagta

SEQ ID NO: 171255 - DNA, 15 bp, Homo sapiens
ctgagggtcctcagt

SEQ ID NO: 171256 - DNA, 15 bp, Homo sapiens
gctgagggtcctcag

SEQ ID NO: 171257 - DNA, 15 bp, Homo sapiens
tgctgagggtcctca

SEQ ID NO: 171258 - DNA, 15 bp, Homo sapiens
ttgctgagggtcctc

SEQ ID NO: 171259 - DNA, 15 bp, Homo sapiens
cttgctgagggtcct

SEQ ID NO: 171260 - DNA, 15 bp, Homo sapiens
acttgctgagggtcc

SEQ ID NO: 171261 - DNA, 15 bp, Homo sapiens
cacttgctgagggtc

SEQ ID NO: 171262 - DNA, 15 bp, Homo sapiens
gcacttgctgagggt

SEQ ID NO: 171263 - DNA, 15 bp, Homo sapiens
ggcacttgctgaggg

SEQ ID NO: 171264 - DNA, 15 bp, Homo sapiens
gggcacttgctgagg

SEQ ID NO: 171265 - DNA, 15 bp, Homo sapiens
ggggcacttgctgag

SEQ ID NO: 171266 - DNA, 15 bp, Homo sapiens
aggggcacttgctga

SEQ ID NO: 171267 - DNA, 15 bp, Homo sapiens
aaggggcacttgctg

SEQ ID NO: 171268 - DNA, 15 bp, Homo sapiens
aaaggggcacttgct

SEQ ID NO: 171269 - DNA, 15 bp, Homo sapiens
gaaaggggcacttgc

SEQ ID NO: 171270 - DNA, 15 bp, Homo sapiens
ggaaaggggcacttg

SEQ ID NO: 171271 - DNA, 15 bp, Homo sapiens
aggaaaggggcactt

SEQ ID NO: 171272 - DNA, 15 bp, Homo sapiens
aaggaaaggggcact

SEQ ID NO: 171273 - DNA, 15 bp, Homo sapiens
gaaggaaaggggcac

SEQ ID NO: 171274 - DNA, 15 bp, Homo sapiens
agaaggaaaggggca

SEQ ID NO: 171275 - DNA, 15 bp, Homo sapiens
tagaaggaaaggggc

SEQ ID NO: 171276 - DNA, 15 bp, Homo sapiens
ctagaaggaaagggg

SEQ ID NO: 171277 - DNA, 15 bp, Homo sapiens
gctagaaggaaaggg

SEQ ID NO: 171278 - DNA, 15 bp, Homo sapiens
tgctagaaggaaagg

SEQ ID NO: 171279 - DNA, 15 bp, Homo sapiens
ctgctagaaggaaag

SEQ ID NO: 171280 - DNA, 15 bp, Homo sapiens
tctgctagaaggaaa

SEQ ID NO: 171281 - DNA, 15 bp, Homo sapiens
ctctgctagaaggaa

SEQ ID NO: 171282 - DNA, 15 bp, Homo sapiens
tctctgctagaagga

SEQ ID NO: 171283 - DNA, 15 bp, Homo sapiens
ctctctgctagaagg

SEQ ID NO: 171284 - DNA, 15 bp, Homo sapiens
tctctctgctagaag

SEQ ID NO: 171285 - DNA, 15 bp, Homo sapiens
ctctctctgctagaa

SEQ ID NO: 171286 - DNA, 15 bp, Homo sapiens
tctctctctgctaga

SEQ ID NO: 171287 - DNA, 15 bp, Homo sapiens
ctctctctctgctag

SEQ ID NO: 171288 - DNA, 15 bp, Homo sapiens
tctctctctctgcta

SEQ ID NO: 171289 - DNA, 15 bp, Homo sapiens
ctctctctctctgct

SEQ ID NO: 171290 - DNA, 15 bp, Homo sapiens
tctctctctctctgc

SEQ ID NO: 171291 - DNA, 15 bp, Homo sapiens
ctctctctctctctg

SEQ ID NO: 171292 - DNA, 15 bp, Homo sapiens
tctctctctctctct

SEQ ID NO: 171293 - DNA, 15 bp, Homo sapiens
ctctctctctctctc

SEQ ID NO: 171294 - DNA, 15 bp, Homo sapiens
atctctctctctctc

SEQ ID NO: 171295 - DNA, 15 bp, Homo sapiens
gatctctctctctct

SEQ ID NO: 171296 - DNA, 15 bp, Homo sapiens
ggatctctctctctc

SEQ ID NO: 171297 - DNA, 15 bp, Homo sapiens
aggatctctctctct

SEQ ID NO: 171298 - DNA, 15 bp, Homo sapiens
caggatctctctctc

SEQ ID NO: 171299 - DNA, 15 bp, Homo sapiens
ccaggatctctctct

SEQ ID NO: 171300 - DNA, 15 bp, Homo sapiens
cccaggatctctctc

SEQ ID NO: 171301 - DNA, 15 bp, Homo sapiens
tcccaggatctctct

SEQ ID NO: 171302 - DNA, 15 bp, Homo sapiens
atcccaggatctctc

SEQ ID NO: 171303 - DNA, 15 bp, Homo sapiens
catcccaggatctct

SEQ ID NO: 171304 - DNA, 15 bp, Homo sapiens
gcatcccaggatctc

SEQ ID NO: 171305 - DNA, 15 bp, Homo sapiens
agcatcccaggatct

SEQ ID NO: 171306 - DNA, 15 bp, Homo sapiens
aagcatcccaggatc

SEQ ID NO: 171307 - DNA, 15 bp, Homo sapiens
taagcatcccaggat

SEQ ID NO: 171308 - DNA, 15 bp, Homo sapiens
ctaagcatcccagga

SEQ ID NO: 171309 - DNA, 15 bp, Homo sapiens
gctaagcatcccagg

SEQ ID NO: 171310 - DNA, 15 bp, Homo sapiens
agctaagcatcccag

SEQ ID NO: 171311 - DNA, 15 bp, Homo sapiens
aagctaagcatccca

SEQ ID NO: 171312 - DNA, 15 bp, Homo sapiens
taagctaagcatccc

SEQ ID NO: 171313 - DNA, 15 bp, Homo sapiens
ctaagctaagcatcc

SEQ ID NO: 171314 - DNA, 15 bp, Homo sapiens
tctaagctaagcatc

SEQ ID NO: 171315 - DNA, 15 bp, Homo sapiens
ctctaagctaagcat

SEQ ID NO: 171316 - DNA, 15 bp, Homo sapiens
gctctaagctaagca

SEQ ID NO: 171317 - DNA, 15 bp, Homo sapiens
ggctctaagctaagc

SEQ ID NO: 171318 - DNA, 15 bp, Homo sapiens
gggctctaagctaag

SEQ ID NO: 171319 - DNA, 15 bp, Homo sapiens
agggctctaagctaa

SEQ ID NO: 171320 - DNA, 15 bp, Homo sapiens
tagggctctaagcta

SEQ ID NO: 171321 - DNA, 15 bp, Homo sapiens
gtagggctctaagct

SEQ ID NO: 171322 - DNA, 15 bp, Homo sapiens
tgtagggctctaagc

SEQ ID NO: 171323 - DNA, 15 bp, Homo sapiens
gtgtagggctctaag

SEQ ID NO: 171324 - DNA, 15 bp, Homo sapiens
agtgtagggctctaa

SEQ ID NO: 171325 - DNA, 15 bp, Homo sapiens
tagtgtagggctcta

SEQ ID NO: 171326 - DNA, 15 bp, Homo sapiens
gtagtgtagggctct

SEQ ID NO: 171327 - DNA, 15 bp, Homo sapiens
ggtagtgtagggctc

SEQ ID NO: 171328 - DNA, 15 bp, Homo sapiens
gggtagtgtagggct

SEQ ID NO: 171329 - DNA, 15 bp, Homo sapiens
agggtagtgtagggc

SEQ ID NO: 171330 - DNA, 15 bp, Homo sapiens
gagggtagtgtaggg

SEQ ID NO: 171331 - DNA, 15 bp, Homo sapiens
agagggtagtgtagg

SEQ ID NO: 171332 - DNA, 15 bp, Homo sapiens
gagagggtagtgtag

SEQ ID NO: 171333 - DNA, 15 bp, Homo sapiens
ggagagggtagtgta

SEQ ID NO: 171334 - DNA, 15 bp, Homo sapiens
aggagagggtagtgt

SEQ ID NO: 171335 - DNA, 15 bp, Homo sapiens
aaggagagggtagtg

SEQ ID NO: 171336 - DNA, 15 bp, Homo sapiens
gaaggagagggtagt

SEQ ID NO: 171337 - DNA, 15 bp, Homo sapiens
ggaaggagagggtag

SEQ ID NO: 171338 - DNA, 15 bp, Homo sapiens
tggaaggagagggta

SEQ ID NO: 171339 - DNA, 15 bp, Homo sapiens
gtggaaggagagggt

SEQ ID NO: 171340 - DNA, 15 bp, Homo sapiens
ggtggaaggagaggg

SEQ ID NO: 171341 - DNA, 15 bp, Homo sapiens
gggtggaaggagagg

SEQ ID NO: 171342 - DNA, 15 bp, Homo sapiens
tgggtggaaggagag

SEQ ID NO: 171343 - DNA, 15 bp, Homo sapiens
ctgggtggaaggaga

SEQ ID NO: 171344 - DNA, 15 bp, Homo sapiens
cctgggtggaaggag

SEQ ID NO: 171345 - DNA, 15 bp, Homo sapiens
gcctgggtggaagga

SEQ ID NO: 171346 - DNA, 15 bp, Homo sapiens
ggcctgggtggaagg

SEQ ID NO: 171347 - DNA, 15 bp, Homo sapiens
aggcctgggtggaag

SEQ ID NO: 171348 - DNA, 15 bp, Homo sapiens
caggcctgggtggaa

SEQ ID NO: 171349 - DNA, 15 bp, Homo sapiens
ccaggcctgggtgga

SEQ ID NO: 171350 - DNA, 15 bp, Homo sapiens
gccaggcctgggtgg

SEQ ID NO: 171351 - DNA, 15 bp, Homo sapiens
ggccaggcctgggtg

SEQ ID NO: 171352 - DNA, 15 bp, Homo sapiens
aggccaggcctgggt

SEQ ID NO: 171353 - DNA, 15 bp, Homo sapiens
aaggccaggcctggg

SEQ ID NO: 171354 - DNA, 15 bp, Homo sapiens
caaggccaggcctgg

SEQ ID NO: 171355 - DNA, 15 bp, Homo sapiens
ccaaggccaggcctg

SEQ ID NO: 171356 - DNA, 15 bp, Homo sapiens
tccaaggccaggcct

SEQ ID NO: 171357 - DNA, 15 bp, Homo sapiens
gtccaaggccaggcc

SEQ ID NO: 171358 - DNA, 15 bp, Homo sapiens
ggtccaaggccaggc

SEQ ID NO: 171359 - DNA, 15 bp, Homo sapiens
gggtccaaggccagg

SEQ ID NO: 171360 - DNA, 15 bp, Homo sapiens
ggggtccaaggccag

SEQ ID NO: 171361 - DNA, 15 bp, Homo sapiens
tggggtccaaggcca

SEQ ID NO: 171362 - DNA, 15 bp, Homo sapiens
ttggggtccaaggcc

SEQ ID NO: 171363 - DNA, 15 bp, Homo sapiens
tttggggtccaaggc

SEQ ID NO: 171364 - DNA, 15 bp, Homo sapiens
gtttggggtccaagg

SEQ ID NO: 171365 - DNA, 15 bp, Homo sapiens
ggtttggggtccaag

SEQ ID NO: 171366 - DNA, 15 bp, Homo sapiens
gggtttggggtccaa

SEQ ID NO: 171367 - DNA, 15 bp, Homo sapiens
agggtttggggtcca

SEQ ID NO: 171368 - DNA, 15 bp, Homo sapiens
aagggtttggggtcc

SEQ ID NO: 171369 - DNA, 15 bp, Homo sapiens
caagggtttggggtc

SEQ ID NO: 171370 - DNA, 15 bp, Homo sapiens
gcaagggtttggggt

SEQ ID NO: 171371 - DNA, 15 bp, Homo sapiens
agcaagggtttgggg

SEQ ID NO: 171372 - DNA, 15 bp, Homo sapiens
aagcaagggtttggg

SEQ ID NO: 171373 - DNA, 15 bp, Homo sapiens
aaagcaagggtttgg

SEQ ID NO: 171374 - DNA, 15 bp, Homo sapiens
aaaagcaagggtttg

SEQ ID NO: 171375 - DNA, 15 bp, Homo sapiens
caaaagcaagggttt

SEQ ID NO: 171376 - DNA, 15 bp, Homo sapiens
gcaaaagcaagggtt

SEQ ID NO: 171377 - DNA, 15 bp, Homo sapiens
ggcaaaagcaagggt

SEQ ID NO: 171378 - DNA, 15 bp, Homo sapiens
gggcaaaagcaaggg

SEQ ID NO: 171379 - DNA, 15 bp, Homo sapiens
agggcaaaagcaagg

SEQ ID NO: 171380 - DNA, 15 bp, Homo sapiens
cagggcaaaagcaag

SEQ ID NO: 171381 - DNA, 15 bp, Homo sapiens
acagggcaaaagcaa

SEQ ID NO: 171382 - DNA, 15 bp, Homo sapiens
gacagggcaaaagca

SEQ ID NO: 171383 - DNA, 15 bp, Homo sapiens
agacagggcaaaagc

SEQ ID NO: 171384 - DNA, 15 bp, Homo sapiens
gagacagggcaaaag

SEQ ID NO: 171385 - DNA, 15 bp, Homo sapiens
agagacagggcaaaa

SEQ ID NO: 171386 - DNA, 15 bp, Homo sapiens
cagagacagggcaaa

SEQ ID NO: 171387 - DNA, 15 bp, Homo sapiens
ccagagacagggcaa

SEQ ID NO: 171388 - DNA, 15 bp, Homo sapiens
cccagagacagggca

SEQ ID NO: 171389 - DNA, 15 bp, Homo sapiens
gcccagagacagggc

SEQ ID NO: 171390 - DNA, 15 bp, Homo sapiens
tgcccagagacaggg

SEQ ID NO: 171391 - DNA, 15 bp, Homo sapiens
ctgcccagagacagg

SEQ ID NO: 171392 - DNA, 15 bp, Homo sapiens
gctgcccagagacag

SEQ ID NO: 171393 - DNA, 15 bp, Homo sapiens
ggctgcccagagaca

SEQ ID NO: 171394 - DNA, 15 bp, Homo sapiens
gggctgcccagagac

SEQ ID NO: 171395 - DNA, 15 bp, Homo sapiens
ggggctgcccagaga

SEQ ID NO: 171396 - DNA, 15 bp, Homo sapiens
aggggctgcccagag

SEQ ID NO: 171397 - DNA, 15 bp, Homo sapiens
caggggctgcccaga

SEQ ID NO: 171398 - DNA, 15 bp, Homo sapiens
ccaggggctgcccag

SEQ ID NO: 171399 - DNA, 15 bp, Homo sapiens
tccaggggctgccca

SEQ ID NO: 171400 - DNA, 15 bp, Homo sapiens
gtccaggggctgccc

SEQ ID NO: 171401 - DNA, 15 bp, Homo sapiens
agtccaggggctgcc

SEQ ID NO: 171402 - DNA, 15 bp, Homo sapiens
aagtccaggggctgc

SEQ ID NO: 171403 - DNA, 15 bp, Homo sapiens
caagtccaggggctg

SEQ ID NO: 171404 - DNA, 15 bp, Homo sapiens
acaagtccaggggct

SEQ ID NO: 171405 - DNA, 15 bp, Homo sapiens
aacaagtccaggggc

SEQ ID NO: 171406 - DNA, 15 bp, Homo sapiens
caacaagtccagggg

SEQ ID NO: 171407 - DNA, 15 bp, Homo sapiens
ccaacaagtccaggg

SEQ ID NO: 171408 - DNA, 15 bp, Homo sapiens
cccaacaagtccagg

SEQ ID NO: 171409 - DNA, 15 bp, Homo sapiens
ccccaacaagtccag

SEQ ID NO: 171410 - DNA, 15 bp, Homo sapiens
accccaacaagtcca

SEQ ID NO: 171411 - DNA, 15 bp, Homo sapiens
gaccccaacaagtcc

SEQ ID NO: 171412 - DNA, 15 bp, Homo sapiens
agaccccaacaagtc

SEQ ID NO: 171413 - DNA, 15 bp, Homo sapiens
aagaccccaacaagt

SEQ ID NO: 171414 - DNA, 15 bp, Homo sapiens
caagaccccaacaag

SEQ ID NO: 171415 - DNA, 15 bp, Homo sapiens
tcaagaccccaacaa

SEQ ID NO: 171416 - DNA, 15 bp, Homo sapiens
gtcaagaccccaaca

SEQ ID NO: 171417 - DNA, 15 bp, Homo sapiens
ggtcaagaccccaac

SEQ ID NO: 171418 - DNA, 15 bp, Homo sapiens
aggtcaagaccccaa

SEQ ID NO: 171419 - DNA, 15 bp, Homo sapiens
gaggtcaagacccca

SEQ ID NO: 171420 - DNA, 15 bp, Homo sapiens
agaggtcaagacccc

SEQ ID NO: 171421 - DNA, 15 bp, Homo sapiens
tagaggtcaagaccc

SEQ ID NO: 171422 - DNA, 15 bp, Homo sapiens
atagaggtcaagacc

SEQ ID NO: 171423 - DNA, 15 bp, Homo sapiens
aatagaggtcaagac

SEQ ID NO: 171424 - DNA, 15 bp, Homo sapiens
gaatagaggtcaaga

SEQ ID NO: 171425 - DNA, 15 bp, Homo sapiens
agaatagaggtcaag

SEQ ID NO: 171426 - DNA, 15 bp, Homo sapiens
aagaatagaggtcaa

SEQ ID NO: 171427 - DNA, 15 bp, Homo sapiens
aaagaatagaggtca

SEQ ID NO: 171428 - DNA, 15 bp, Homo sapiens
gaaagaatagaggtc

SEQ ID NO: 171429 - DNA, 15 bp, Homo sapiens
ggaaagaatagaggt

SEQ ID NO: 171430 - DNA, 15 bp, Homo sapiens
gggaaagaatagagg

SEQ ID NO: 171431 - DNA, 15 bp, Homo sapiens
agggaaagaatagag

SEQ ID NO: 171432 - DNA, 15 bp, Homo sapiens
gagggaaagaataga

SEQ ID NO: 171433 - DNA, 15 bp, Homo sapiens
ggagggaaagaatag

SEQ ID NO: 171434 - DNA, 15 bp, Homo sapiens
tggagggaaagaata

SEQ ID NO: 171435 - DNA, 15 bp, Homo sapiens
ctggagggaaagaat

SEQ ID NO: 171436 - DNA, 15 bp, Homo sapiens
cctggagggaaagaa

SEQ ID NO: 171437 - DNA, 15 bp, Homo sapiens
gcctggagggaaaga

SEQ ID NO: 171438 - DNA, 15 bp, Homo sapiens
tgcctggagggaaag

SEQ ID NO: 171439 - DNA, 15 bp, Homo sapiens
ctgcctggagggaaa

SEQ ID NO: 171440 - DNA, 15 bp, Homo sapiens
gctgcctggagggaa

SEQ ID NO: 171441 - DNA, 15 bp, Homo sapiens
ggctgcctggaggga

SEQ ID NO: 171442 - DNA, 15 bp, Homo sapiens
aggctgcctggaggg

SEQ ID NO: 171443 - DNA, 15 bp, Homo sapiens
caggctgcctggagg

SEQ ID NO: 171444 - DNA, 15 bp, Homo sapiens
acaggctgcctggag

SEQ ID NO: 171445 - DNA, 15 bp, Homo sapiens
gacaggctgcctgga

SEQ ID NO: 171446 - DNA, 15 bp, Homo sapiens
ggacaggctgcctgg

SEQ ID NO: 171447 - DNA, 15 bp, Homo sapiens
gggacaggctgcctg

SEQ ID NO: 171448 - DNA, 15 bp, Homo sapiens
tgggacaggctgcct

SEQ ID NO: 171449 - DNA, 15 bp, Homo sapiens
ctgggacaggctgcc

SEQ ID NO: 171450 - DNA, 15 bp, Homo sapiens
cctgggacaggctgc

SEQ ID NO: 171451 - DNA, 15 bp, Homo sapiens
ccctgggacaggctg

SEQ ID NO: 171452 - DNA, 15 bp, Homo sapiens
accctgggacaggct

SEQ ID NO: 171453 - DNA, 15 bp, Homo sapiens
taccctgggacaggc

SEQ ID NO: 171454 - DNA, 15 bp, Homo sapiens
ataccctgggacagg

SEQ ID NO: 171455 - DNA, 15 bp, Homo sapiens
aataccctgggacag

SEQ ID NO: 171456 - DNA, 15 bp, Homo sapiens
aaataccctgggaca

SEQ ID NO: 171457 - DNA, 15 bp, Homo sapiens
caaataccctgggac

SEQ ID NO: 171458 - DNA, 15 bp, Homo sapiens
ccaaataccctggga

SEQ ID NO: 171459 - DNA, 15 bp, Homo sapiens
cccaaataccctggg

SEQ ID NO: 171460 - DNA, 15 bp, Homo sapiens
ccccaaataccctgg

SEQ ID NO: 171461 - DNA, 15 bp, Homo sapiens
accccaaataccctg

SEQ ID NO: 171462 - DNA, 15 bp, Homo sapiens
caccccaaataccct

SEQ ID NO: 171463 - DNA, 15 bp, Homo sapiens
ccaccccaaataccc

SEQ ID NO: 171464 - DNA, 15 bp, Homo sapiens
cccaccccaaatacc

SEQ ID NO: 171465 - DNA, 15 bp, Homo sapiens
tcccaccccaaatac

SEQ ID NO: 171466 - DNA, 15 bp, Homo sapiens
ctcccaccccaaata

SEQ ID NO: 171467 - DNA, 15 bp, Homo sapiens
tctcccaccccaaat

SEQ ID NO: 171468 - DNA, 15 bp, Homo sapiens
ttctcccaccccaaa

SEQ ID NO: 171469 - DNA, 15 bp, Homo sapiens
gttctcccaccccaa

SEQ ID NO: 171470 - DNA, 15 bp, Homo sapiens
tgttctcccacccca

SEQ ID NO: 171471 - DNA, 15 bp, Homo sapiens
atgttctcccacccc

SEQ ID NO: 171472 - DNA, 15 bp, Homo sapiens
gatgttctcccaccc

SEQ ID NO: 171473 - DNA, 15 bp, Homo sapiens
ggatgttctcccacc

SEQ ID NO: 171474 - DNA, 15 bp, Homo sapiens
tggatgttctcccac

SEQ ID NO: 171475 - DNA, 15 bp, Homo sapiens
atggatgttctccca

SEQ ID NO: 171476 - DNA, 15 bp, Homo sapiens
catggatgttctccc

SEQ ID NO: 171477 - DNA, 15 bp, Homo sapiens
tcatggatgttctcc

SEQ ID NO: 171478 - DNA, 15 bp, Homo sapiens
gtcatggatgttctc

SEQ ID NO: 171479 - DNA, 15 bp, Homo sapiens
ggtcatggatgttct

SEQ ID NO: 171480 - DNA, 15 bp, Homo sapiens
gggtcatggatgttc

SEQ ID NO: 171481 - DNA, 15 bp, Homo sapiens
tgggtcatggatgtt

SEQ ID NO: 171482 - DNA, 15 bp, Homo sapiens
ctgggtcatggatgt

SEQ ID NO: 171483 - DNA, 15 bp, Homo sapiens
tctgggtcatggatg

SEQ ID NO: 171484 - DNA, 15 bp, Homo sapiens
atctgggtcatggat

SEQ ID NO: 171485 - DNA, 15 bp, Homo sapiens
tatctgggtcatgga

SEQ ID NO: 171486 - DNA, 15 bp, Homo sapiens
atatctgggtcatgg

SEQ ID NO: 171487 - DNA, 15 bp, Homo sapiens
gatatctgggtcatg

SEQ ID NO: 171488 - DNA, 15 bp, Homo sapiens
tgatatctgggtcat

SEQ ID NO: 171489 - DNA, 15 bp, Homo sapiens
ctgatatctgggtca

SEQ ID NO: 171490 - DNA, 15 bp, Homo sapiens
cctgatatctgggtc

SEQ ID NO: 171491 - DNA, 15 bp, Homo sapiens
tcctgatatctgggt

SEQ ID NO: 171492 - DNA, 15 bp, Homo sapiens
gtcctgatatctggg

SEQ ID NO: 171493 - DNA, 15 bp, Homo sapiens
agtcctgatatctgg

SEQ ID NO: 171494 - DNA, 15 bp, Homo sapiens
aagtcctgatatctg

SEQ ID NO: 171495 - DNA, 15 bp, Homo sapiens
caagtcctgatatct

SEQ ID NO: 171496 - DNA, 15 bp, Homo sapiens
ccaagtcctgatatc

SEQ ID NO: 171497 - DNA, 15 bp, Homo sapiens
accaagtcctgatat

SEQ ID NO: 171498 - DNA, 15 bp, Homo sapiens
taccaagtcctgata

SEQ ID NO: 171499 - DNA, 15 bp, Homo sapiens
ctaccaagtcctgat

SEQ ID NO: 171500 - DNA, 15 bp, Homo sapiens
cctaccaagtcctga

SEQ ID NO: 171501 - DNA, 15 bp, Homo sapiens
tcctaccaagtcctg

SEQ ID NO: 171502 - DNA, 15 bp, Homo sapiens
ttcctaccaagtcct

SEQ ID NO: 171503 - DNA, 15 bp, Homo sapiens
cttcctaccaagtcc

SEQ ID NO: 171504 - DNA, 15 bp, Homo sapiens
acttcctaccaagtc

SEQ ID NO: 171505 - DNA, 15 bp, Homo sapiens
cacttcctaccaagt

SEQ ID NO: 171506 - DNA, 15 bp, Homo sapiens
ccacttcctaccaag

SEQ ID NO: 171507 - DNA, 15 bp, Homo sapiens
cccacttcctaccaa

SEQ ID NO: 171508 - DNA, 15 bp, Homo sapiens
ccccacttcctacca

SEQ ID NO: 171509 - DNA, 15 bp, Homo sapiens
tccccacttcctacc

SEQ ID NO: 171510 - DNA, 15 bp, Homo sapiens
ctccccacttcctac

SEQ ID NO: 171511 - DNA, 15 bp, Homo sapiens
cctccccacttccta

SEQ ID NO: 171512 - DNA, 15 bp, Homo sapiens
ccctccccacttcct

SEQ ID NO: 171513 - DNA, 15 bp, Homo sapiens
accctccccacttcc

SEQ ID NO: 171514 - DNA, 15 bp, Homo sapiens
taccctccccacttc

SEQ ID NO: 171515 - DNA, 15 bp, Homo sapiens
ctaccctccccactt

SEQ ID NO: 171516 - DNA, 15 bp, Homo sapiens
tctaccctccccact

SEQ ID NO: 171517 - DNA, 15 bp, Homo sapiens
ctctaccctccccac

SEQ ID NO: 171518 - DNA, 15 bp, Homo sapiens
tctctaccctcccca

SEQ ID NO: 171519 - DNA, 15 bp, Homo sapiens
ttctctaccctcccc

SEQ ID NO: 171520 - DNA, 15 bp, Homo sapiens
tttctctaccctccc

SEQ ID NO: 171521 - DNA, 15 bp, Homo sapiens
ctttctctaccctcc

SEQ ID NO: 171522 - DNA, 15 bp, Homo sapiens
cctttctctaccctc

SEQ ID NO: 171523 - DNA, 15 bp, Homo sapiens
ccctttctctaccct

SEQ ID NO: 171524 - DNA, 15 bp, Homo sapiens
tccctttctctaccc

SEQ ID NO: 171525 - DNA, 15 bp, Homo sapiens
ttccctttctctacc

SEQ ID NO: 171526 - DNA, 15 bp, Homo sapiens
cttccctttctctac

SEQ ID NO: 171527 - DNA, 15 bp, Homo sapiens
tcttccctttctcta

SEQ ID NO: 171528 - DNA, 15 bp, Homo sapiens
ttcttccctttctct

SEQ ID NO: 171529 - DNA, 15 bp, Homo sapiens
cttcttccctttctc

SEQ ID NO: 171530 - DNA, 15 bp, Homo sapiens
tcttcttccctttct

SEQ ID NO: 171531 - DNA, 15 bp, Homo sapiens
ctcttcttccctttc

SEQ ID NO: 171532 - DNA, 15 bp, Homo sapiens
actcttcttcccttt

SEQ ID NO: 171533 - DNA, 15 bp, Homo sapiens
gactcttcttccctt

SEQ ID NO: 171534 - DNA, 15 bp, Homo sapiens
ggactcttcttccct

SEQ ID NO: 171535 - DNA, 15 bp, Homo sapiens
tggactcttcttccc

SEQ ID NO: 171536 - DNA, 15 bp, Homo sapiens
atggactcttcttcc

SEQ ID NO: 171537 - DNA, 15 bp, Homo sapiens
catggactcttcttc

SEQ ID NO: 171538 - DNA, 15 bp, Homo sapiens
ccatggactcttctt

SEQ ID NO: 171539 - DNA, 15 bp, Homo sapiens
cccatggactcttct

SEQ ID NO: 171540 - DNA, 15 bp, Homo sapiens
tcccatggactcttc

SEQ ID NO: 171541 - DNA, 15 bp, Homo sapiens
ctcccatggactctt

SEQ ID NO: 171542 - DNA, 15 bp, Homo sapiens
tctcccatggactct

SEQ ID NO: 171543 - DNA, 15 bp, Homo sapiens
ctctcccatggactc

SEQ ID NO: 171544 - DNA, 15 bp, Homo sapiens
cctctcccatggact

SEQ ID NO: 171545 - DNA, 15 bp, Homo sapiens
acctctcccatggac

SEQ ID NO: 171546 - DNA, 15 bp, Homo sapiens
gacctctcccatgga

SEQ ID NO: 171547 - DNA, 15 bp, Homo sapiens
ggacctctcccatgg

SEQ ID NO: 171548 - DNA, 15 bp, Homo sapiens
tggacctctcccatg

SEQ ID NO: 171549 - DNA, 15 bp, Homo sapiens
ctggacctctcccat

SEQ ID NO: 171550 - DNA, 15 bp, Homo sapiens
tctggacctctccca

SEQ ID NO: 171551 - DNA, 15 bp, Homo sapiens
ttctggacctctccc

SEQ ID NO: 171552 - DNA, 15 bp, Homo sapiens
attctggacctctcc

SEQ ID NO: 171553 - DNA, 15 bp, Homo sapiens
cattctggacctctc

SEQ ID NO: 171554 - DNA, 15 bp, Homo sapiens
tcattctggacctct

SEQ ID NO: 171555 - DNA, 15 bp, Homo sapiens
gtcattctggacctc

SEQ ID NO: 171556 - DNA, 15 bp, Homo sapiens
agtcattctggacct

SEQ ID NO: 171557 - DNA, 15 bp, Homo sapiens
gagtcattctggacc

SEQ ID NO: 171558 - DNA, 15 bp, Homo sapiens
cgagtcattctggac

SEQ ID NO: 171559 - DNA, 15 bp, Homo sapiens
tcgagtcattctgga

SEQ ID NO: 171560 - DNA, 15 bp, Homo sapiens
ctcgagtcattctgg

SEQ ID NO: 171561 - DNA, 15 bp, Homo sapiens
tctcgagtcattctg

SEQ ID NO: 171562 - DNA, 15 bp, Homo sapiens
atctcgagtcattct

SEQ ID NO: 171563 - DNA, 15 bp, Homo sapiens
gatctcgagtcattc

SEQ ID NO: 171564 - DNA, 15 bp, Homo sapiens
agatctcgagtcatt

SEQ ID NO: 171565 - DNA, 15 bp, Homo sapiens
gagatctcgagtcat

SEQ ID NO: 171566 - DNA, 15 bp, Homo sapiens
agagatctcgagtca

SEQ ID NO: 171567 - DNA, 15 bp, Homo sapiens
cagagatctcgagtc

SEQ ID NO: 171568 - DNA, 15 bp, Homo sapiens
gcagagatctcgagt

SEQ ID NO: 171569 - DNA, 15 bp, Homo sapiens
ggcagagatctcgag

SEQ ID NO: 171570 - DNA, 15 bp, Homo sapiens
gggcagagatctcga

SEQ ID NO: 171571 - DNA, 15 bp, Homo sapiens
agggcagagatctcg

SEQ ID NO: 171572 - DNA, 15 bp, Homo sapiens
cagggcagagatctc

SEQ ID NO: 171573 - DNA, 15 bp, Homo sapiens
gcagggcagagatct

SEQ ID NO: 171574 - DNA, 15 bp, Homo sapiens
ggcagggcagagatc

SEQ ID NO: 171575 - DNA, 15 bp, Homo sapiens
gggcagggcagagat

SEQ ID NO: 171576 - DNA, 15 bp, Homo sapiens
ggggcagggcagaga

SEQ ID NO: 171577 - DNA, 15 bp, Homo sapiens
aggggcagggcagag

SEQ ID NO: 171578 - DNA, 15 bp, Homo sapiens
gaggggcagggcaga

SEQ ID NO: 171579 - DNA, 15 bp, Homo sapiens
tgaggggcagggcag

SEQ ID NO: 171580 - DNA, 15 bp, Homo sapiens
ctgaggggcagggca

SEQ ID NO: 171581 - DNA, 15 bp, Homo sapiens
tctgaggggcagggc

SEQ ID NO: 171582 - DNA, 15 bp, Homo sapiens
gtctgaggggcaggg

SEQ ID NO: 171583 - DNA, 15 bp, Homo sapiens
agtctgaggggcagg

SEQ ID NO: 171584 - DNA, 15 bp, Homo sapiens
aagtctgaggggcag

SEQ ID NO: 171585 - DNA, 15 bp, Homo sapiens
caagtctgaggggca

SEQ ID NO: 171586 - DNA, 15 bp, Homo sapiens
gcaagtctgaggggc

SEQ ID NO: 171587 - DNA, 15 bp, Homo sapiens
ggcaagtctgagggg

SEQ ID NO: 171588 - DNA, 15 bp, Homo sapiens
tggcaagtctgaggg

SEQ ID NO: 171589 - DNA, 15 bp, Homo sapiens
ttggcaagtctgagg

SEQ ID NO: 171590 - DNA, 15 bp, Homo sapiens
cttggcaagtctgag

SEQ ID NO: 171591 - DNA, 15 bp, Homo sapiens
acttggcaagtctga

SEQ ID NO: 171592 - DNA, 15 bp, Homo sapiens
gacttggcaagtctg

SEQ ID NO: 171593 - DNA, 15 bp, Homo sapiens
ggacttggcaagtct

SEQ ID NO: 171594 - DNA, 15 bp, Homo sapiens
tggacttggcaagtc

SEQ ID NO: 171595 - DNA, 15 bp, Homo sapiens
gtggacttggcaagt

SEQ ID NO: 171596 - DNA, 15 bp, Homo sapiens
cgtggacttggcaag

SEQ ID NO: 171597 - DNA, 15 bp, Homo sapiens
gcgtggacttggcaa

SEQ ID NO: 171598 - DNA, 15 bp, Homo sapiens
agcgtggacttggca

SEQ ID NO: 171599 - DNA, 15 bp, Homo sapiens
cagcgtggacttggc

SEQ ID NO: 171600 - DNA, 15 bp, Homo sapiens
tcagcgtggacttgg

SEQ ID NO: 171601 - DNA, 15 bp, Homo sapiens
gtcagcgtggacttg

SEQ ID NO: 171602 - DNA, 15 bp, Homo sapiens
tgtcagcgtggactt

SEQ ID NO: 171603 - DNA, 15 bp, Homo sapiens
gtgtcagcgtggact

SEQ ID NO: 171604 - DNA, 15 bp, Homo sapiens
agtgtcagcgtggac

SEQ ID NO: 171605 - DNA, 15 bp, Homo sapiens
gagtgtcagcgtgga

SEQ ID NO: 171606 - DNA, 15 bp, Homo sapiens
tgagtgtcagcgtgg

SEQ ID NO: 171607 - DNA, 15 bp, Homo sapiens
atgagtgtcagcgtg

SEQ ID NO: 171608 - DNA, 15 bp, Homo sapiens
gatgagtgtcagcgt

SEQ ID NO: 171609 - DNA, 15 bp, Homo sapiens
ggatgagtgtcagcg

SEQ ID NO: 171610 - DNA, 15 bp, Homo sapiens
gggatgagtgtcagc

SEQ ID NO: 171611 - DNA, 15 bp, Homo sapiens
ggggatgagtgtcag

SEQ ID NO: 171612 - DNA, 15 bp, Homo sapiens
gggggatgagtgtca

SEQ ID NO: 171613 - DNA, 15 bp, Homo sapiens
agggggatgagtgtc

SEQ ID NO: 171614 - DNA, 15 bp, Homo sapiens
cagggggatgagtgt

SEQ ID NO: 171615 - DNA, 15 bp, Homo sapiens
gcagggggatgagtg

SEQ ID NO: 171616 - DNA, 15 bp, Homo sapiens
agcagggggatgagt

SEQ ID NO: 171617 - DNA, 15 bp, Homo sapiens
cagcagggggatgag

SEQ ID NO: 171618 - DNA, 15 bp, Homo sapiens
ccagcagggggatga

SEQ ID NO: 171619 - DNA, 15 bp, Homo sapiens
cccagcagggggatg

SEQ ID NO: 171620 - DNA, 15 bp, Homo sapiens
ccccagcagggggat

SEQ ID NO: 171621 - DNA, 15 bp, Homo sapiens
tccccagcaggggga

SEQ ID NO: 171622 - DNA, 15 bp, Homo sapiens
gtccccagcaggggg

SEQ ID NO: 171623 - DNA, 15 bp, Homo sapiens
agtccccagcagggg

SEQ ID NO: 171624 - DNA, 15 bp, Homo sapiens
gagtccccagcaggg

SEQ ID NO: 171625 - DNA, 15 bp, Homo sapiens
tgagtccccagcagg

SEQ ID NO: 171626 - DNA, 15 bp, Homo sapiens
atgagtccccagcag

SEQ ID NO: 171627 - DNA, 15 bp, Homo sapiens
catgagtccccagca

SEQ ID NO: 171628 - DNA, 15 bp, Homo sapiens
tcatgagtccccagc

SEQ ID NO: 171629 - DNA, 15 bp, Homo sapiens
ctcatgagtccccag

SEQ ID NO: 171630 - DNA, 15 bp, Homo sapiens
cctcatgagtcccca

SEQ ID NO: 171631 - DNA, 15 bp, Homo sapiens
acctcatgagtcccc

SEQ ID NO: 171632 - DNA, 15 bp, Homo sapiens
gacctcatgagtccc

SEQ ID NO: 171633 - DNA, 15 bp, Homo sapiens
tgacctcatgagtcc

SEQ ID NO: 171634 - DNA, 15 bp, Homo sapiens
atgacctcatgagtc

SEQ ID NO: 171635 - DNA, 15 bp, Homo sapiens
gatgacctcatgagt

SEQ ID NO: 171636 - DNA, 15 bp, Homo sapiens
agatgacctcatgag

SEQ ID NO: 171637 - DNA, 15 bp, Homo sapiens
aagatgacctcatga

SEQ ID NO: 171638 - DNA, 15 bp, Homo sapiens
aaagatgacctcatg

SEQ ID NO: 171639 - DNA, 15 bp, Homo sapiens
caaagatgacctcat

SEQ ID NO: 171640 - DNA, 15 bp, Homo sapiens
gcaaagatgacctca

SEQ ID NO: 171641 - DNA, 15 bp, Homo sapiens
ggcaaagatgacctc

SEQ ID NO: 171642 - DNA, 15 bp, Homo sapiens
aggcaaagatgacct

SEQ ID NO: 171643 - DNA, 15 bp, Homo sapiens
aaggcaaagatgacc

SEQ ID NO: 171644 - DNA, 15 bp, Homo sapiens
aaaggcaaagatgac

SEQ ID NO: 171645 - DNA, 15 bp, Homo sapiens
caaaggcaaagatga

SEQ ID NO: 171646 - DNA, 15 bp, Homo sapiens
acaaaggcaaagatg

SEQ ID NO: 171647 - DNA, 15 bp, Homo sapiens
cacaaaggcaaagat

SEQ ID NO: 171648 - DNA, 15 bp, Homo sapiens
tcacaaaggcaaaga

SEQ ID NO: 171649 - DNA, 15 bp, Homo sapiens
atcacaaaggcaaag

SEQ ID NO: 171650 - DNA, 15 bp, Homo sapiens
catcacaaaggcaaa

SEQ ID NO: 171651 - DNA, 15 bp, Homo sapiens
ccatcacaaaggcaa

SEQ ID NO: 171652 - DNA, 15 bp, Homo sapiens
tccatcacaaaggca

SEQ ID NO: 171653 - DNA, 15 bp, Homo sapiens
gtccatcacaaaggc

SEQ ID NO: 171654 - DNA, 15 bp, Homo sapiens
cgtccatcacaaagg

SEQ ID NO: 171655 - DNA, 15 bp, Homo sapiens
tcgtccatcacaaag

SEQ ID NO: 171656 - DNA, 15 bp, Homo sapiens
ctcgtccatcacaaa

SEQ ID NO: 171657 - DNA, 15 bp, Homo sapiens
gctcgtccatcacaa

SEQ ID NO: 171658 - DNA, 15 bp, Homo sapiens
tgctcgtccatcaca

SEQ ID NO: 171659 - DNA, 15 bp, Homo sapiens
gtgctcgtccatcac

SEQ ID NO: 171660 - DNA, 15 bp, Homo sapiens
cgtgctcgtccatca

SEQ ID NO: 171661 - DNA, 15 bp, Homo sapiens
gcgtgctcgtccatc

SEQ ID NO: 171662 - DNA, 15 bp, Homo sapiens
ggcgtgctcgtccat

SEQ ID NO: 171663 - DNA, 15 bp, Homo sapiens
gggcgtgctcgtcca

SEQ ID NO: 171664 - DNA, 15 bp, Homo sapiens
cgggcgtgctcgtcc

SEQ ID NO: 171665 - DNA, 15 bp, Homo sapiens
ccgggcgtgctcgtc

SEQ ID NO: 171666 - DNA, 15 bp, Homo sapiens
cccgggcgtgctcgt

SEQ ID NO: 171667 - DNA, 15 bp, Homo sapiens
ccccgggcgtgctcg

SEQ ID NO: 171668 - DNA, 15 bp, Homo sapiens
cccccgggcgtgctc

SEQ ID NO: 171669 - DNA, 15 bp, Homo sapiens
tcccccgggcgtgct

SEQ ID NO: 171670 - DNA, 15 bp, Homo sapiens
gtcccccgggcgtgc

SEQ ID NO: 171671 - DNA, 15 bp, Homo sapiens
ggtcccccgggcgtg

SEQ ID NO: 171672 - DNA, 15 bp, Homo sapiens
gggtcccccgggcgt

SEQ ID NO: 171673 - DNA, 15 bp, Homo sapiens
agggtcccccgggcg

SEQ ID NO: 171674 - DNA, 15 bp, Homo sapiens
cagggtcccccgggc

SEQ ID NO: 171675 - DNA, 15 bp, Homo sapiens
gcagggtcccccggg

SEQ ID NO: 171676 - DNA, 15 bp, Homo sapiens
cgcagggtcccccgg

SEQ ID NO: 171677 - DNA, 15 bp, Homo sapiens
gcgcagggtcccccg

SEQ ID NO: 171678 - DNA, 15 bp, Homo sapiens
agcgcagggtccccc

SEQ ID NO: 171679 - DNA, 15 bp, Homo sapiens
aagcgcagggtcccc

SEQ ID NO: 171680 - DNA, 15 bp, Homo sapiens
gaagcgcagggtccc

SEQ ID NO: 171681 - DNA, 15 bp, Homo sapiens
tgaagcgcagggtcc

SEQ ID NO: 171682 - DNA, 15 bp, Homo sapiens
atgaagcgcagggtc

SEQ ID NO: 171683 - DNA, 15 bp, Homo sapiens
gatgaagcgcagggt

SEQ ID NO: 171684 - DNA, 15 bp, Homo sapiens
tgatgaagcgcaggg

SEQ ID NO: 171685 - DNA, 15 bp, Homo sapiens
ttgatgaagcgcagg

SEQ ID NO: 171686 - DNA, 15 bp, Homo sapiens
cttgatgaagcgcag

SEQ ID NO: 171687 - DNA, 15 bp, Homo sapiens
gcttgatgaagcgca

SEQ ID NO: 171688 - DNA, 15 bp, Homo sapiens
agcttgatgaagcgc

SEQ ID NO: 171689 - DNA, 15 bp, Homo sapiens
cagcttgatgaagcg

SEQ ID NO: 171690 - DNA, 15 bp, Homo sapiens
acagcttgatgaagc

SEQ ID NO: 171691 - DNA, 15 bp, Homo sapiens
aacagcttgatgaag

SEQ ID NO: 171692 - DNA, 15 bp, Homo sapiens
aaacagcttgatgaa

SEQ ID NO: 171693 - DNA, 15 bp, Homo sapiens
taaacagcttgatga

SEQ ID NO: 171694 - DNA, 15 bp, Homo sapiens
gtaaacagcttgatg

SEQ ID NO: 171695 - DNA, 15 bp, Homo sapiens
tgtaaacagcttgat

SEQ ID NO: 171696 - DNA, 15 bp, Homo sapiens
ctgtaaacagcttga

SEQ ID NO: 171697 - DNA, 15 bp, Homo sapiens
tctgtaaacagcttg

SEQ ID NO: 171698 - DNA, 15 bp, Homo sapiens
ctctgtaaacagctt

SEQ ID NO: 171699 - DNA, 15 bp, Homo sapiens
gctctgtaaacagct

SEQ ID NO: 171700 - DNA, 15 bp, Homo sapiens
agctctgtaaacagc

SEQ ID NO: 171701 - DNA, 15 bp, Homo sapiens
gagctctgtaaacag

SEQ ID NO: 171702 - DNA, 15 bp, Homo sapiens
agagctctgtaaaca

SEQ ID NO: 171703 - DNA, 15 bp, Homo sapiens
gagagctctgtaaac

SEQ ID NO: 171704 - DNA, 15 bp, Homo sapiens
ggagagctctgtaaa

SEQ ID NO: 171705 - DNA, 15 bp, Homo sapiens
aggagagctctgtaa

SEQ ID NO: 171706 - DNA, 15 bp, Homo sapiens
aaggagagctctgta

SEQ ID NO: 171707 - DNA, 15 bp, Homo sapiens
gaaggagagctctgt

SEQ ID NO: 171708 - DNA, 15 bp, Homo sapiens
tgaaggagagctctg

SEQ ID NO: 171709 - DNA, 15 bp, Homo sapiens
gtgaaggagagctct

SEQ ID NO: 171710 - DNA, 15 bp, Homo sapiens
ggtgaaggagagctc

SEQ ID NO: 171711 - DNA, 15 bp, Homo sapiens
aggtgaaggagagct

SEQ ID NO: 171712 - DNA, 15 bp, Homo sapiens
gaggtgaaggagagc

SEQ ID NO: 171713 - DNA, 15 bp, Homo sapiens
ggaggtgaaggagag

SEQ ID NO: 171714 - DNA, 15 bp, Homo sapiens
aggaggtgaaggaga

SEQ ID NO: 171715 - DNA, 15 bp, Homo sapiens
aaggaggtgaaggag

SEQ ID NO: 171716 - DNA, 15 bp, Homo sapiens
gaaggaggtgaagga

SEQ ID NO: 171717 - DNA, 15 bp, Homo sapiens
ggaaggaggtgaagg

SEQ ID NO: 171718 - DNA, 15 bp, Homo sapiens
tggaaggaggtgaag

SEQ ID NO: 171719 - DNA, 15 bp, Homo sapiens
ctggaaggaggtgaa

SEQ ID NO: 171720 - DNA, 15 bp, Homo sapiens
cctggaaggaggtga

SEQ ID NO: 171721 - DNA, 15 bp, Homo sapiens
acctggaaggaggtg

SEQ ID NO: 171722 - DNA, 15 bp, Homo sapiens
cacctggaaggaggt

SEQ ID NO: 171723 - DNA, 15 bp, Homo sapiens
tcacctggaaggagg

SEQ ID NO: 171724 - DNA, 15 bp, Homo sapiens
gtcacctggaaggag

SEQ ID NO: 171725 - DNA, 15 bp, Homo sapiens
agtcacctggaagga

SEQ ID NO: 171726 - DNA, 15 bp, Homo sapiens
aagtcacctggaagg

SEQ ID NO: 171727 - DNA, 15 bp, Homo sapiens
gaagtcacctggaag

SEQ ID NO: 171728 - DNA, 15 bp, Homo sapiens
tgaagtcacctggaa

SEQ ID NO: 171729 - DNA, 15 bp, Homo sapiens
atgaagtcacctgga

SEQ ID NO: 171730 - DNA, 15 bp, Homo sapiens
catgaagtcacctgg

SEQ ID NO: 171731 - DNA, 15 bp, Homo sapiens
gcatgaagtcacctg

SEQ ID NO: 171732 - DNA, 15 bp, Homo sapiens
agcatgaagtcacct

SEQ ID NO: 171733 - DNA, 15 bp, Homo sapiens
aagcatgaagtcacc

SEQ ID NO: 171734 - DNA, 15 bp, Homo sapiens
caagcatgaagtcac

SEQ ID NO: 171735 - DNA, 15 bp, Homo sapiens
ccaagcatgaagtca

SEQ ID NO: 171736 - DNA, 15 bp, Homo sapiens
cccaagcatgaagtc

SEQ ID NO: 171737 - DNA, 15 bp, Homo sapiens
ccccaagcatgaagt

SEQ ID NO: 171738 - DNA, 15 bp, Homo sapiens
tccccaagcatgaag

SEQ ID NO: 171739 - DNA, 15 bp, Homo sapiens
gtccccaagcatgaa

SEQ ID NO: 171740 - DNA, 15 bp, Homo sapiens
tgtccccaagcatga

SEQ ID NO: 171741 - DNA, 15 bp, Homo sapiens
gtgtccccaagcatg

SEQ ID NO: 171742 - DNA, 15 bp, Homo sapiens
agtgtccccaagcat

SEQ ID NO: 171743 - DNA, 15 bp, Homo sapiens
aagtgtccccaagca

SEQ ID NO: 171744 - DNA, 15 bp, Homo sapiens
caagtgtccccaagc

SEQ ID NO: 171745 - DNA, 15 bp, Homo sapiens
gcaagtgtccccaag

SEQ ID NO: 171746 - DNA, 15 bp, Homo sapiens
agcaagtgtccccaa

SEQ ID NO: 171747 - DNA, 15 bp, Homo sapiens
aagcaagtgtcccca

SEQ ID NO: 171748 - DNA, 15 bp, Homo sapiens
caagcaagtgtcccc

SEQ ID NO: 171749 - DNA, 15 bp, Homo sapiens
acaagcaagtgtccc

SEQ ID NO: 171750 - DNA, 15 bp, Homo sapiens
tacaagcaagtgtcc

SEQ ID NO: 171751 - DNA, 15 bp, Homo sapiens
ttacaagcaagtgtc

SEQ ID NO: 171752 - DNA, 15 bp, Homo sapiens
tttacaagcaagtgt

SEQ ID NO: 171753 - DNA, 15 bp, Homo sapiens
ctttacaagcaagtg

SEQ ID NO: 171754 - DNA, 15 bp, Homo sapiens
actttacaagcaagt

SEQ ID NO: 171755 - DNA, 15 bp, Homo sapiens
gactttacaagcaag

SEQ ID NO: 171756 - DNA, 15 bp, Homo sapiens
ggactttacaagcaa

SEQ ID NO: 171757 - DNA, 15 bp, Homo sapiens
aggactttacaagca

SEQ ID NO: 171758 - DNA, 15 bp, Homo sapiens
taggactttacaagc

SEQ ID NO: 171759 - DNA, 15 bp, Homo sapiens
ctaggactttacaag

SEQ ID NO: 171760 - DNA, 15 bp, Homo sapiens
tctaggactttacaa

SEQ ID NO: 171761 - DNA, 15 bp, Homo sapiens
ctctaggactttaca

SEQ ID NO: 171762 - DNA, 15 bp, Homo sapiens
actctaggactttac

SEQ ID NO: 171763 - DNA, 15 bp, Homo sapiens
cactctaggacttta

SEQ ID NO: 171764 - DNA, 15 bp, Homo sapiens
ccactctaggacttt

SEQ ID NO: 171765 - DNA, 15 bp, Homo sapiens
cccactctaggactt

SEQ ID NO: 171766 - DNA, 15 bp, Homo sapiens
ccccactctaggact

SEQ ID NO: 171767 - DNA, 15 bp, Homo sapiens
cccccactctaggac

SEQ ID NO: 171768 - DNA, 15 bp, Homo sapiens
acccccactctagga

SEQ ID NO: 171769 - DNA, 15 bp, Homo sapiens
cacccccactctagg

SEQ ID NO: 171770 - DNA, 15 bp, Homo sapiens
ccacccccactctag

SEQ ID NO: 171771 - DNA, 15 bp, Homo sapiens
cccacccccactcta

SEQ ID NO: 171772 - DNA, 15 bp, Homo sapiens
tcccacccccactct

SEQ ID NO: 171773 - DNA, 15 bp, Homo sapiens
gtcccacccccactc

SEQ ID NO: 171774 - DNA, 15 bp, Homo sapiens
tgtcccacccccact

SEQ ID NO: 171775 - DNA, 15 bp, Homo sapiens
ctgtcccacccccac

SEQ ID NO: 171776 - DNA, 15 bp, Homo sapiens
tctgtcccaccccca

SEQ ID NO: 171777 - DNA, 15 bp, Homo sapiens
gtctgtcccaccccc

SEQ ID NO: 171778 - DNA, 15 bp, Homo sapiens
tgtctgtcccacccc

SEQ ID NO: 171779 - DNA, 15 bp, Homo sapiens
gtgtctgtcccaccc

SEQ ID NO: 171780 - DNA, 15 bp, Homo sapiens
ggtgtctgtcccacc

SEQ ID NO: 171781 - DNA, 15 bp, Homo sapiens
tggtgtctgtcccac

SEQ ID NO: 171782 - DNA, 15 bp, Homo sapiens
ctggtgtctgtccca

SEQ ID NO: 171783 - DNA, 15 bp, Homo sapiens
gctggtgtctgtccc

SEQ ID NO: 171784 - DNA, 15 bp, Homo sapiens
ggctggtgtctgtcc

SEQ ID NO: 171785 - DNA, 15 bp, Homo sapiens
aggctggtgtctgtc

SEQ ID NO: 171786 - DNA, 15 bp, Homo sapiens
caggctggtgtctgt

SEQ ID NO: 171787 - DNA, 15 bp, Homo sapiens
gcaggctggtgtctg

SEQ ID NO: 171788 - DNA, 15 bp, Homo sapiens
tgcaggctggtgtct

SEQ ID NO: 171789 - DNA, 15 bp, Homo sapiens
atgcaggctggtgtc

SEQ ID NO: 171790 - DNA, 15 bp, Homo sapiens
gatgcaggctggtgt

SEQ ID NO: 171791 - DNA, 15 bp, Homo sapiens
tgatgcaggctggtg

SEQ ID NO: 171792 - DNA, 15 bp, Homo sapiens
atgatgcaggctggt

SEQ ID NO: 171793 - DNA, 15 bp, Homo sapiens
catgatgcaggctgg

SEQ ID NO: 171794 - DNA, 15 bp, Homo sapiens
gcatgatgcaggctg

SEQ ID NO: 171795 - DNA, 15 bp, Homo sapiens
tgcatgatgcaggct

SEQ ID NO: 171796 - DNA, 15 bp, Homo sapiens
ctgcatgatgcaggc

SEQ ID NO: 171797 - DNA, 15 bp, Homo sapiens
tctgcatgatgcagg

SEQ ID NO: 171798 - DNA, 15 bp, Homo sapiens
atctgcatgatgcag

SEQ ID NO: 171799 - DNA, 15 bp, Homo sapiens
catctgcatgatgca

SEQ ID NO: 171800 - DNA, 15 bp, Homo sapiens
ccatctgcatgatgc

SEQ ID NO: 171801 - DNA, 15 bp, Homo sapiens
tccatctgcatgatg

SEQ ID NO: 171802 - DNA, 15 bp, Homo sapiens
ttccatctgcatgat

SEQ ID NO: 171803 - DNA, 15 bp, Homo sapiens
tttccatctgcatga

SEQ ID NO: 171804 - DNA, 15 bp, Homo sapiens
ttttccatctgcatg

SEQ ID NO: 171805 - DNA, 15 bp, Homo sapiens
cttttccatctgcat

SEQ ID NO: 171806 - DNA, 15 bp, Homo sapiens
ccttttccatctgca

SEQ ID NO: 171807 - DNA, 15 bp, Homo sapiens
accttttccatctgc

SEQ ID NO: 171808 - DNA, 15 bp, Homo sapiens
caccttttccatctg

SEQ ID NO: 171809 - DNA, 15 bp, Homo sapiens
ccaccttttccatct

SEQ ID NO: 171810 - DNA, 15 bp, Homo sapiens
cccaccttttccatc

SEQ ID NO: 171811 - DNA, 15 bp, Homo sapiens
tcccaccttttccat

SEQ ID NO: 171812 - DNA, 15 bp, Homo sapiens
ttcccaccttttcca

SEQ ID NO: 171813 - DNA, 15 bp, Homo sapiens
cttcccaccttttcc

SEQ ID NO: 171814 - DNA, 15 bp, Homo sapiens
tcttcccaccttttc

SEQ ID NO: 171815 - DNA, 15 bp, Homo sapiens
gtcttcccacctttt

SEQ ID NO: 171816 - DNA, 15 bp, Homo sapiens
agtcttcccaccttt

SEQ ID NO: 171817 - DNA, 15 bp, Homo sapiens
cagtcttcccacctt

SEQ ID NO: 171818 - DNA, 15 bp, Homo sapiens
ccagtcttcccacct

SEQ ID NO: 171819 - DNA, 15 bp, Homo sapiens
cccagtcttcccacc

SEQ ID NO: 171820 - DNA, 15 bp, Homo sapiens
tcccagtcttcccac

SEQ ID NO: 171821 - DNA, 15 bp, Homo sapiens
gtcccagtcttccca

SEQ ID NO: 171822 - DNA, 15 bp, Homo sapiens
ggtcccagtcttccc

SEQ ID NO: 171823 - DNA, 15 bp, Homo sapiens
aggtcccagtcttcc

SEQ ID NO: 171824 - DNA, 15 bp, Homo sapiens
caggtcccagtcttc

SEQ ID NO: 171825 - DNA, 15 bp, Homo sapiens
ccaggtcccagtctt

SEQ ID NO: 171826 - DNA, 15 bp, Homo sapiens
tccaggtcccagtct

SEQ ID NO: 171827 - DNA, 15 bp, Homo sapiens
ctccaggtcccagtc

SEQ ID NO: 171828 - DNA, 15 bp, Homo sapiens
cctccaggtcccagt

SEQ ID NO: 171829 - DNA, 15 bp, Homo sapiens
ccctccaggtcccag

SEQ ID NO: 171830 - DNA, 15 bp, Homo sapiens
cccctccaggtccca

SEQ ID NO: 171831 - DNA, 15 bp, Homo sapiens
acccctccaggtccc

SEQ ID NO: 171832 - DNA, 15 bp, Homo sapiens
cacccctccaggtcc

SEQ ID NO: 171833 - DNA, 15 bp, Homo sapiens
tcacccctccaggtc

SEQ ID NO: 171834 - DNA, 15 bp, Homo sapiens
atcacccctccaggt

SEQ ID NO: 171835 - DNA, 15 bp, Homo sapiens
gatcacccctccagg

SEQ ID NO: 171836 - DNA, 15 bp, Homo sapiens
ggatcacccctccag

SEQ ID NO: 171837 - DNA, 15 bp, Homo sapiens
gggatcacccctcca

SEQ ID NO: 171838 - DNA, 15 bp, Homo sapiens
agggatcacccctcc

SEQ ID NO: 171839 - DNA, 15 bp, Homo sapiens
cagggatcacccctc

SEQ ID NO: 171840 - DNA, 15 bp, Homo sapiens
gcagggatcacccct

SEQ ID NO: 171841 - DNA, 15 bp, Homo sapiens
ggcagggatcacccc

SEQ ID NO: 171842 - DNA, 15 bp, Homo sapiens
gggcagggatcaccc

SEQ ID NO: 171843 - DNA, 15 bp, Homo sapiens
tgggcagggatcacc

SEQ ID NO: 171844 - DNA, 15 bp, Homo sapiens
ttgggcagggatcac

SEQ ID NO: 171845 - DNA, 15 bp, Homo sapiens
tttgggcagggatca

SEQ ID NO: 171846 - DNA, 15 bp, Homo sapiens
ctttgggcagggatc

SEQ ID NO: 171847 - DNA, 15 bp, Homo sapiens
actttgggcagggat

SEQ ID NO: 171848 - DNA, 15 bp, Homo sapiens
gactttgggcaggga

SEQ ID NO: 171849 - DNA, 15 bp, Homo sapiens
tgactttgggcaggg

SEQ ID NO: 171850 - DNA, 15 bp, Homo sapiens
gtgactttgggcagg

SEQ ID NO: 171851 - DNA, 15 bp, Homo sapiens
ggtgactttgggcag

SEQ ID NO: 171852 - DNA, 15 bp, Homo sapiens
aggtgactttgggca

SEQ ID NO: 171853 - DNA, 15 bp, Homo sapiens
taggtgactttgggc

SEQ ID NO: 171854 - DNA, 15 bp, Homo sapiens
ctaggtgactttggg

SEQ ID NO: 171855 - DNA, 15 bp, Homo sapiens
actaggtgactttgg

SEQ ID NO: 171856 - DNA, 15 bp, Homo sapiens
aactaggtgactttg

SEQ ID NO: 171857 - DNA, 15 bp, Homo sapiens
caactaggtgacttt

SEQ ID NO: 171858 - DNA, 15 bp, Homo sapiens
ccaactaggtgactt

SEQ ID NO: 171859 - DNA, 15 bp, Homo sapiens
tccaactaggtgact

SEQ ID NO: 171860 - DNA, 15 bp, Homo sapiens
ctccaactaggtgac

SEQ ID NO: 171861 - DNA, 15 bp, Homo sapiens
gctccaactaggtga

SEQ ID NO: 171862 - DNA, 15 bp, Homo sapiens
tgctccaactaggtg

SEQ ID NO: 171863 - DNA, 15 bp, Homo sapiens
ctgctccaactaggt

SEQ ID NO: 171864 - DNA, 15 bp, Homo sapiens
tctgctccaactagg

SEQ ID NO: 171865 - DNA, 15 bp, Homo sapiens
ctctgctccaactag

SEQ ID NO: 171866 - DNA, 15 bp, Homo sapiens
gctctgctccaacta

SEQ ID NO: 171867 - DNA, 15 bp, Homo sapiens
ggctctgctccaact

SEQ ID NO: 171868 - DNA, 15 bp, Homo sapiens
tggctctgctccaac

SEQ ID NO: 171869 - DNA, 15 bp, Homo sapiens
ctggctctgctccaa

SEQ ID NO: 171870 - DNA, 15 bp, Homo sapiens
tctggctctgctcca

SEQ ID NO: 171871 - DNA, 15 bp, Homo sapiens
ttctggctctgctcc

SEQ ID NO: 171872 - DNA, 15 bp, Homo sapiens
gttctggctctgctc

SEQ ID NO: 171873 - DNA, 15 bp, Homo sapiens
agttctggctctgct

SEQ ID NO: 171874 - DNA, 15 bp, Homo sapiens
tagttctggctctgc

SEQ ID NO: 171875 - DNA, 15 bp, Homo sapiens
ctagttctggctctg

SEQ ID NO: 171876 - DNA, 15 bp, Homo sapiens
actagttctggctct

SEQ ID NO: 171877 - DNA, 15 bp, Homo sapiens
tactagttctggctc

SEQ ID NO: 171878 - DNA, 15 bp, Homo sapiens
atactagttctggct

SEQ ID NO: 171879 - DNA, 15 bp, Homo sapiens
gatactagttctggc

SEQ ID NO: 171880 - DNA, 15 bp, Homo sapiens
ggatactagttctgg

SEQ ID NO: 171881 - DNA, 15 bp, Homo sapiens
gggatactagttctg

SEQ ID NO: 171882 - DNA, 15 bp, Homo sapiens
ggggatactagttct

SEQ ID NO: 171883 - DNA, 15 bp, Homo sapiens
tggggatactagttc

SEQ ID NO: 171884 - DNA, 15 bp, Homo sapiens
ctggggatactagtt

SEQ ID NO: 171885 - DNA, 15 bp, Homo sapiens
cctggggatactagt

SEQ ID NO: 171886 - DNA, 15 bp, Homo sapiens
acctggggatactag

SEQ ID NO: 171887 - DNA, 15 bp, Homo sapiens
cacctggggatacta

SEQ ID NO: 171888 - DNA, 15 bp, Homo sapiens
acacctggggatact

SEQ ID NO: 171889 - DNA, 15 bp, Homo sapiens
gacacctggggatac

SEQ ID NO: 171890 - DNA, 15 bp, Homo sapiens
ggacacctggggata

SEQ ID NO: 171891 - DNA, 15 bp, Homo sapiens
gggacacctggggat

SEQ ID NO: 171892 - DNA, 15 bp, Homo sapiens
tgggacacctgggga

SEQ ID NO: 171893 - DNA, 15 bp, Homo sapiens
ttgggacacctgggg

SEQ ID NO: 171894 - DNA, 15 bp, Homo sapiens
attgggacacctggg

SEQ ID NO: 171895 - DNA, 15 bp, Homo sapiens
tattgggacacctgg

SEQ ID NO: 171896 - DNA, 15 bp, Homo sapiens
gtattgggacacctg

SEQ ID NO: 171897 - DNA, 15 bp, Homo sapiens
ggtattgggacacct

SEQ ID NO: 171898 - DNA, 15 bp, Homo sapiens
aggtattgggacacc

SEQ ID NO: 171899 - DNA, 15 bp, Homo sapiens
caggtattgggacac

SEQ ID NO: 171900 - DNA, 15 bp, Homo sapiens
ccaggtattgggaca

SEQ ID NO: 171901 - DNA, 15 bp, Homo sapiens
cccaggtattgggac

SEQ ID NO: 171902 - DNA, 15 bp, Homo sapiens
gcccaggtattggga

SEQ ID NO: 171903 - DNA, 15 bp, Homo sapiens
ggcccaggtattggg

SEQ ID NO: 171904 - DNA, 15 bp, Homo sapiens
tggcccaggtattgg

SEQ ID NO: 171905 - DNA, 15 bp, Homo sapiens
ctggcccaggtattg

SEQ ID NO: 171906 - DNA, 15 bp, Homo sapiens
actggcccaggtatt

SEQ ID NO: 171907 - DNA, 15 bp, Homo sapiens
gactggcccaggtat

SEQ ID NO: 171908 - DNA, 15 bp, Homo sapiens
agactggcccaggta

SEQ ID NO: 171909 - DNA, 15 bp, Homo sapiens
aagactggcccaggt

SEQ ID NO: 171910 - DNA, 15 bp, Homo sapiens
gaagactggcccagg

SEQ ID NO: 171911 - DNA, 15 bp, Homo sapiens
agaagactggcccag

SEQ ID NO: 171912 - DNA, 15 bp, Homo sapiens
gagaagactggccca

SEQ ID NO: 171913 - DNA, 15 bp, Homo sapiens
agagaagactggccc

SEQ ID NO: 171914 - DNA, 15 bp, Homo sapiens
cagagaagactggcc

SEQ ID NO: 171915 - DNA, 15 bp, Homo sapiens
acagagaagactggc

SEQ ID NO: 171916 - DNA, 15 bp, Homo sapiens
tacagagaagactgg

SEQ ID NO: 171917 - DNA, 15 bp, Homo sapiens
ttacagagaagactg

SEQ ID NO: 171918 - DNA, 15 bp, Homo sapiens
cttacagagaagact

SEQ ID NO: 171919 - DNA, 15 bp, Homo sapiens
gcttacagagaagac

SEQ ID NO: 171920 - DNA, 15 bp, Homo sapiens
tgcttacagagaaga

SEQ ID NO: 171921 - DNA, 15 bp, Homo sapiens
gtgcttacagagaag

SEQ ID NO: 171922 - DNA, 15 bp, Homo sapiens
tgtgcttacagagaa

SEQ ID NO: 171923 - DNA, 15 bp, Homo sapiens
atgtgcttacagaga

SEQ ID NO: 171924 - DNA, 15 bp, Homo sapiens
catgtgcttacagag

SEQ ID NO: 171925 - DNA, 15 bp, Homo sapiens
ccatgtgcttacaga

SEQ ID NO: 171926 - DNA, 15 bp, Homo sapiens
cccatgtgcttacag

SEQ ID NO: 171927 - DNA, 15 bp, Homo sapiens
tcccatgtgcttaca

SEQ ID NO: 171928 - DNA, 15 bp, Homo sapiens
gtcccatgtgcttac

SEQ ID NO: 171929 - DNA, 15 bp, Homo sapiens
tgtcccatgtgctta

SEQ ID NO: 171930 - DNA, 15 bp, Homo sapiens
ttgtcccatgtgctt

SEQ ID NO: 171931 - DNA, 15 bp, Homo sapiens
cttgtcccatgtgct

SEQ ID NO: 171932 - DNA, 15 bp, Homo sapiens
tcttgtcccatgtgc

SEQ ID NO: 171933 - DNA, 15 bp, Homo sapiens
ttcttgtcccatgtg

SEQ ID NO: 171934 - DNA, 15 bp, Homo sapiens
cttcttgtcccatgt

SEQ ID NO: 171935 - DNA, 15 bp, Homo sapiens
gcttcttgtcccatg

SEQ ID NO: 171936 - DNA, 15 bp, Homo sapiens
ggcttcttgtcccat

SEQ ID NO: 171937 - DNA, 15 bp, Homo sapiens
aggcttcttgtccca

SEQ ID NO: 171938 - DNA, 15 bp, Homo sapiens
aaggcttcttgtccc

SEQ ID NO: 171939 - DNA, 15 bp, Homo sapiens
gaaggcttcttgtcc

SEQ ID NO: 171940 - DNA, 15 bp, Homo sapiens
ggaaggcttcttgtc

SEQ ID NO: 171941 - DNA, 15 bp, Homo sapiens
aggaaggcttcttgt

SEQ ID NO: 171942 - DNA, 15 bp, Homo sapiens
caggaaggcttcttg

SEQ ID NO: 171943 - DNA, 15 bp, Homo sapiens
ccaggaaggcttctt

SEQ ID NO: 171944 - DNA, 15 bp, Homo sapiens
tccaggaaggcttct

SEQ ID NO: 171945 - DNA, 15 bp, Homo sapiens
atccaggaaggcttc

SEQ ID NO: 171946 - DNA, 15 bp, Homo sapiens
catccaggaaggctt

SEQ ID NO: 171947 - DNA, 15 bp, Homo sapiens
acatccaggaaggct

SEQ ID NO: 171948 - DNA, 15 bp, Homo sapiens
tacatccaggaaggc

SEQ ID NO: 171949 - DNA, 15 bp, Homo sapiens
ctacatccaggaagg

SEQ ID NO: 171950 - DNA, 15 bp, Homo sapiens
gctacatccaggaag

SEQ ID NO: 171951 - DNA, 15 bp, Homo sapiens
agctacatccaggaa

SEQ ID NO: 171952 - DNA, 15 bp, Homo sapiens
gagctacatccagga

SEQ ID NO: 171953 - DNA, 15 bp, Homo sapiens
agagctacatccagg

SEQ ID NO: 171954 - DNA, 15 bp, Homo sapiens
cagagctacatccag

SEQ ID NO: 171955 - DNA, 15 bp, Homo sapiens
ccagagctacatcca

SEQ ID NO: 171956 - DNA, 15 bp, Homo sapiens
cccagagctacatcc

SEQ ID NO: 171957 - DNA, 15 bp, Homo sapiens
acccagagctacatc

SEQ ID NO: 171958 - DNA, 15 bp, Homo sapiens
tacccagagctacat

SEQ ID NO: 171959 - DNA, 15 bp, Homo sapiens
gtacccagagctaca

SEQ ID NO: 171960 - DNA, 15 bp, Homo sapiens
ggtacccagagctac

SEQ ID NO: 171961 - DNA, 15 bp, Homo sapiens
tggtacccagagcta

SEQ ID NO: 171962 - DNA, 15 bp, Homo sapiens
ctggtacccagagct

SEQ ID NO: 171963 - DNA, 15 bp, Homo sapiens
gctggtacccagagc

SEQ ID NO: 171964 - DNA, 15 bp, Homo sapiens
ggctggtacccagag

SEQ ID NO: 171965 - DNA, 15 bp, Homo sapiens
aggctggtacccaga

SEQ ID NO: 171966 - DNA, 15 bp, Homo sapiens
caggctggtacccag

SEQ ID NO: 171967 - DNA, 15 bp, Homo sapiens
ccaggctggtaccca

SEQ ID NO: 171968 - DNA, 15 bp, Homo sapiens
gccaggctggtaccc

SEQ ID NO: 171969 - DNA, 15 bp, Homo sapiens
tgccaggctggtacc

SEQ ID NO: 171970 - DNA, 15 bp, Homo sapiens
atgccaggctggtac

SEQ ID NO: 171971 - DNA, 15 bp, Homo sapiens
aatgccaggctggta

SEQ ID NO: 171972 - DNA, 15 bp, Homo sapiens
caatgccaggctggt

SEQ ID NO: 171973 - DNA, 15 bp, Homo sapiens
gcaatgccaggctgg

SEQ ID NO: 171974 - DNA, 15 bp, Homo sapiens
tgcaatgccaggctg

SEQ ID NO: 171975 - DNA, 15 bp, Homo sapiens
ctgcaatgccaggct

SEQ ID NO: 171976 - DNA, 15 bp, Homo sapiens
gctgcaatgccaggc

SEQ ID NO: 171977 - DNA, 15 bp, Homo sapiens
agctgcaatgccagg

SEQ ID NO: 171978 - DNA, 15 bp, Homo sapiens
cagctgcaatgccag

SEQ ID NO: 171979 - DNA, 15 bp, Homo sapiens
gcagctgcaatgcca

SEQ ID NO: 171980 - DNA, 15 bp, Homo sapiens
ggcagctgcaatgcc

SEQ ID NO: 171981 - DNA, 15 bp, Homo sapiens
tggcagctgcaatgc

SEQ ID NO: 171982 - DNA, 15 bp, Homo sapiens
atggcagctgcaatg

SEQ ID NO: 171983 - DNA, 15 bp, Homo sapiens
gatggcagctgcaat

SEQ ID NO: 171984 - DNA, 15 bp, Homo sapiens
agatggcagctgcaa

SEQ ID NO: 171985 - DNA, 15 bp, Homo sapiens
tagatggcagctgca

SEQ ID NO: 171986 - DNA, 15 bp, Homo sapiens
gtagatggcagctgc

SEQ ID NO: 171987 - DNA, 15 bp, Homo sapiens
agtagatggcagctg

SEQ ID NO: 171988 - DNA, 15 bp, Homo sapiens
aagtagatggcagct

SEQ ID NO: 171989 - DNA, 15 bp, Homo sapiens
caagtagatggcagc

SEQ ID NO: 171990 - DNA, 15 bp, Homo sapiens
ccaagtagatggcag

SEQ ID NO: 171991 - DNA, 15 bp, Homo sapiens
accaagtagatggca

SEQ ID NO: 171992 - DNA, 15 bp, Homo sapiens
caccaagtagatggc

SEQ ID NO: 171993 - DNA, 15 bp, Homo sapiens
ccaccaagtagatgg

SEQ ID NO: 171994 - DNA, 15 bp, Homo sapiens
gccaccaagtagatg

SEQ ID NO: 171995 - DNA, 15 bp, Homo sapiens
cgccaccaagtagat

SEQ ID NO: 171996 - DNA, 15 bp, Homo sapiens
tcgccaccaagtaga

SEQ ID NO: 171997 - DNA, 15 bp, Homo sapiens
ctcgccaccaagtag

SEQ ID NO: 171998 - DNA, 15 bp, Homo sapiens
gctcgccaccaagta

SEQ ID NO: 171999 - DNA, 15 bp, Homo sapiens
tgctcgccaccaagt

SEQ ID NO: 172000 - DNA, 15 bp, Homo sapiens
gtgctcgccaccaag

SEQ ID NO: 172001 - DNA, 15 bp, Homo sapiens
ggtgctcgccaccaa

SEQ ID NO: 172002 - DNA, 15 bp, Homo sapiens
gggtgctcgccacca

SEQ ID NO: 172003 - DNA, 15 bp, Homo sapiens
agggtgctcgccacc

SEQ ID NO: 172004 - DNA, 15 bp, Homo sapiens
cagggtgctcgccac

SEQ ID NO: 172005 - DNA, 15 bp, Homo sapiens
gcagggtgctcgcca

SEQ ID NO: 172006 - DNA, 15 bp, Homo sapiens
ggcagggtgctcgcc

SEQ ID NO: 172007 - DNA, 15 bp, Homo sapiens
tggcagggtgctcgc

SEQ ID NO: 172008 - DNA, 15 bp, Homo sapiens
ctggcagggtgctcg

SEQ ID NO: 172009 - DNA, 15 bp, Homo sapiens
cctggcagggtgctc

SEQ ID NO: 172010 - DNA, 15 bp, Homo sapiens
acctggcagggtgct

SEQ ID NO: 172011 - DNA, 15 bp, Homo sapiens
cacctggcagggtgc

SEQ ID NO: 172012 - DNA, 15 bp, Homo sapiens
gcacctggcagggtg

SEQ ID NO: 172013 - DNA, 15 bp, Homo sapiens
agcacctggcagggt

SEQ ID NO: 172014 - DNA, 15 bp, Homo sapiens
aagcacctggcaggg

SEQ ID NO: 172015 - DNA, 15 bp, Homo sapiens
aaagcacctggcagg

SEQ ID NO: 172016 - DNA, 15 bp, Homo sapiens
taaagcacctggcag

SEQ ID NO: 172017 - DNA, 15 bp, Homo sapiens
gtaaagcacctggca

SEQ ID NO: 172018 - DNA, 15 bp, Homo sapiens
tgtaaagcacctggc

SEQ ID NO: 172019 - DNA, 15 bp, Homo sapiens
atgtaaagcacctgg

SEQ ID NO: 172020 - DNA, 15 bp, Homo sapiens
catgtaaagcacctg

SEQ ID NO: 172021 - DNA, 15 bp, Homo sapiens
gcatgtaaagcacct

SEQ ID NO: 172022 - DNA, 15 bp, Homo sapiens
tgcatgtaaagcacc

SEQ ID NO: 172023 - DNA, 15 bp, Homo sapiens
atgcatgtaaagcac

SEQ ID NO: 172024 - DNA, 15 bp, Homo sapiens
aatgcatgtaaagca

SEQ ID NO: 172025 - DNA, 15 bp, Homo sapiens
caatgcatgtaaagc

SEQ ID NO: 172026 - DNA, 15 bp, Homo sapiens
acaatgcatgtaaag

SEQ ID NO: 172027 - DNA, 15 bp, Homo sapiens
cacaatgcatgtaaa

SEQ ID NO: 172028 - DNA, 15 bp, Homo sapiens
gcacaatgcatgtaa

SEQ ID NO: 172029 - DNA, 15 bp, Homo sapiens
tgcacaatgcatgta

SEQ ID NO: 172030 - DNA, 15 bp, Homo sapiens
atgcacaatgcatgt

SEQ ID NO: 172031 - DNA, 15 bp, Homo sapiens
aatgcacaatgcatg

SEQ ID NO: 172032 - DNA, 15 bp, Homo sapiens
aaatgcacaatgcat

SEQ ID NO: 172033 - DNA, 15 bp, Homo sapiens
taaatgcacaatgca

SEQ ID NO: 172034 - DNA, 15 bp, Homo sapiens
gtaaatgcacaatgc

SEQ ID NO: 172035 - DNA, 15 bp, Homo sapiens
agtaaatgcacaatg

SEQ ID NO: 172036 - DNA, 15 bp, Homo sapiens
gagtaaatgcacaat

SEQ ID NO: 172037 - DNA, 15 bp, Homo sapiens
ggagtaaatgcacaa

SEQ ID NO: 172038 - DNA, 15 bp, Homo sapiens
aggagtaaatgcaca

SEQ ID NO: 172039 - DNA, 15 bp, Homo sapiens
gaggagtaaatgcac

SEQ ID NO: 172040 - DNA, 15 bp, Homo sapiens
tgaggagtaaatgca

SEQ ID NO: 172041 - DNA, 15 bp, Homo sapiens
gtgaggagtaaatgc

SEQ ID NO: 172042 - DNA, 15 bp, Homo sapiens
tgtgaggagtaaatg

SEQ ID NO: 172043 - DNA, 15 bp, Homo sapiens
ctgtgaggagtaaat

SEQ ID NO: 172044 - DNA, 15 bp, Homo sapiens
tctgtgaggagtaaa

SEQ ID NO: 172045 - DNA, 15 bp, Homo sapiens
ttctgtgaggagtaa

SEQ ID NO: 172046 - DNA, 15 bp, Homo sapiens
gttctgtgaggagta

SEQ ID NO: 172047 - DNA, 15 bp, Homo sapiens
ggttctgtgaggagt

SEQ ID NO: 172048 - DNA, 15 bp, Homo sapiens
gggttctgtgaggag

SEQ ID NO: 172049 - DNA, 15 bp, Homo sapiens
tgggttctgtgagga

SEQ ID NO: 172050 - DNA, 15 bp, Homo sapiens
ctgggttctgtgagg

SEQ ID NO: 172051 - DNA, 15 bp, Homo sapiens
cctgggttctgtgag

SEQ ID NO: 172052 - DNA, 15 bp, Homo sapiens
tcctgggttctgtga

SEQ ID NO: 172053 - DNA, 15 bp, Homo sapiens
ctcctgggttctgtg

SEQ ID NO: 172054 - DNA, 15 bp, Homo sapiens
tctcctgggttctgt

SEQ ID NO: 172055 - DNA, 15 bp, Homo sapiens
atctcctgggttctg

SEQ ID NO: 172056 - DNA, 15 bp, Homo sapiens
catctcctgggttct

SEQ ID NO: 172057 - DNA, 15 bp, Homo sapiens
acatctcctgggttc

SEQ ID NO: 172058 - DNA, 15 bp, Homo sapiens
cacatctcctgggtt

SEQ ID NO: 172059 - DNA, 15 bp, Homo sapiens
gcacatctcctgggt

SEQ ID NO: 172060 - DNA, 15 bp, Homo sapiens
tgcacatctcctggg

SEQ ID NO: 172061 - DNA, 15 bp, Homo sapiens
ctgcacatctcctgg

SEQ ID NO: 172062 - DNA, 15 bp, Homo sapiens
cctgcacatctcctg

SEQ ID NO: 172063 - DNA, 15 bp, Homo sapiens
ccctgcacatctcct

SEQ ID NO: 172064 - DNA, 15 bp, Homo sapiens
accctgcacatctcc

SEQ ID NO: 172065 - DNA, 15 bp, Homo sapiens
aaccctgcacatctc

SEQ ID NO: 172066 - DNA, 15 bp, Homo sapiens
taaccctgcacatct

SEQ ID NO: 172067 - DNA, 15 bp, Homo sapiens
ctaaccctgcacatc

SEQ ID NO: 172068 - DNA, 15 bp, Homo sapiens
gctaaccctgcacat

SEQ ID NO: 172069 - DNA, 15 bp, Homo sapiens
ggctaaccctgcaca

SEQ ID NO: 172070 - DNA, 15 bp, Homo sapiens
aggctaaccctgcac

SEQ ID NO: 172071 - DNA, 15 bp, Homo sapiens
gaggctaaccctgca

SEQ ID NO: 172072 - DNA, 15 bp, Homo sapiens
tgaggctaaccctgc

SEQ ID NO: 172073 - DNA, 15 bp, Homo sapiens
gtgaggctaaccctg

SEQ ID NO: 172074 - DNA, 15 bp, Homo sapiens
agtgaggctaaccct

SEQ ID NO: 172075 - DNA, 15 bp, Homo sapiens
aagtgaggctaaccc

SEQ ID NO: 172076 - DNA, 15 bp, Homo sapiens
aaagtgaggctaacc

SEQ ID NO: 172077 - DNA, 15 bp, Homo sapiens
taaagtgaggctaac

SEQ ID NO: 172078 - DNA, 15 bp, Homo sapiens
gtaaagtgaggctaa

SEQ ID NO: 172079 - DNA, 15 bp, Homo sapiens
tgtaaagtgaggcta

SEQ ID NO: 172080 - DNA, 15 bp, Homo sapiens
ctgtaaagtgaggct

SEQ ID NO: 172081 - DNA, 15 bp, Homo sapiens
tctgtaaagtgaggc

SEQ ID NO: 172082 - DNA, 15 bp, Homo sapiens
ctctgtaaagtgagg

SEQ ID NO: 172083 - DNA, 15 bp, Homo sapiens
cctctgtaaagtgag

SEQ ID NO: 172084 - DNA, 15 bp, Homo sapiens
tcctctgtaaagtga

SEQ ID NO: 172085 - DNA, 15 bp, Homo sapiens
ctcctctgtaaagtg

SEQ ID NO: 172086 - DNA, 15 bp, Homo sapiens
tctcctctgtaaagt

SEQ ID NO: 172087 - DNA, 15 bp, Homo sapiens
gtctcctctgtaaag

SEQ ID NO: 172088 - DNA, 15 bp, Homo sapiens
agtctcctctgtaaa

SEQ ID NO: 172089 - DNA, 15 bp, Homo sapiens
gagtctcctctgtaa

SEQ ID NO: 172090 - DNA, 15 bp, Homo sapiens
tgagtctcctctgta

SEQ ID NO: 172091 - DNA, 15 bp, Homo sapiens
ctgagtctcctctgt

SEQ ID NO: 172092 - DNA, 15 bp, Homo sapiens
tctgagtctcctctg

SEQ ID NO: 172093 - DNA, 15 bp, Homo sapiens
ctctgagtctcctct

SEQ ID NO: 172094 - DNA, 15 bp, Homo sapiens
cctctgagtctcctc

SEQ ID NO: 172095 - DNA, 15 bp, Homo sapiens
acctctgagtctcct

SEQ ID NO: 172096 - DNA, 15 bp, Homo sapiens
cacctctgagtctcc

SEQ ID NO: 172097 - DNA, 15 bp, Homo sapiens
acacctctgagtctc

SEQ ID NO: 172098 - DNA, 15 bp, Homo sapiens
aacacctctgagtct

SEQ ID NO: 172099 - DNA, 15 bp, Homo sapiens
taacacctctgagtc

SEQ ID NO: 172100 - DNA, 15 bp, Homo sapiens
ttaacacctctgagt

SEQ ID NO: 172101 - DNA, 15 bp, Homo sapiens
tttaacacctctgag

SEQ ID NO: 172102 - DNA, 15 bp, Homo sapiens
ttttaacacctctga

SEQ ID NO: 172103 - DNA, 15 bp, Homo sapiens
gttttaacacctctg

SEQ ID NO: 172104 - DNA, 15 bp, Homo sapiens
ggttttaacacctct

SEQ ID NO: 172105 - DNA, 15 bp, Homo sapiens
tggttttaacacctc

SEQ ID NO: 172106 - DNA, 15 bp, Homo sapiens
ctggttttaacacct

SEQ ID NO: 172107 - DNA, 15 bp, Homo sapiens
tctggttttaacacc

SEQ ID NO: 172108 - DNA, 15 bp, Homo sapiens
ctctggttttaacac

SEQ ID NO: 172109 - DNA, 15 bp, Homo sapiens
actctggttttaaca

SEQ ID NO: 172110 - DNA, 15 bp, Homo sapiens
aactctggttttaac

SEQ ID NO: 172111 - DNA, 15 bp, Homo sapiens
taactctggttttaa

SEQ ID NO: 172112 - DNA, 15 bp, Homo sapiens
gtaactctggtttta

SEQ ID NO: 172113 - DNA, 15 bp, Homo sapiens
cgtaactctggtttt

SEQ ID NO: 172114 - DNA, 15 bp, Homo sapiens
ccgtaactctggttt

SEQ ID NO: 172115 - DNA, 15 bp, Homo sapiens
accgtaactctggtt

SEQ ID NO: 172116 - DNA, 15 bp, Homo sapiens
caccgtaactctggt

SEQ ID NO: 172117 - DNA, 15 bp, Homo sapiens
acaccgtaactctgg

SEQ ID NO: 172118 - DNA, 15 bp, Homo sapiens
gacaccgtaactctg

SEQ ID NO: 172119 - DNA, 15 bp, Homo sapiens
tgacaccgtaactct

SEQ ID NO: 172120 - DNA, 15 bp, Homo sapiens
gtgacaccgtaactc

SEQ ID NO: 172121 - DNA, 15 bp, Homo sapiens
tgtgacaccgtaact

SEQ ID NO: 172122 - DNA, 15 bp, Homo sapiens
ctgtgacaccgtaac

SEQ ID NO: 172123 - DNA, 15 bp, Homo sapiens
actgtgacaccgtaa

SEQ ID NO: 172124 - DNA, 15 bp, Homo sapiens
aactgtgacaccgta

SEQ ID NO: 172125 - DNA, 15 bp, Homo sapiens
aaactgtgacaccgt

SEQ ID NO: 172126 - DNA, 15 bp, Homo sapiens
gaaactgtgacaccg

SEQ ID NO: 172127 - DNA, 15 bp, Homo sapiens
tgaaactgtgacacc

SEQ ID NO: 172128 - DNA, 15 bp, Homo sapiens
ttgaaactgtgacac

SEQ ID NO: 172129 - DNA, 15 bp, Homo sapiens
tttgaaactgtgaca

SEQ ID NO: 172130 - DNA, 15 bp, Homo sapiens
ctttgaaactgtgac

SEQ ID NO: 172131 - DNA, 15 bp, Homo sapiens
tctttgaaactgtga

SEQ ID NO: 172132 - DNA, 15 bp, Homo sapiens
ttctttgaaactgtg

SEQ ID NO: 172133 - DNA, 15 bp, Homo sapiens
tttctttgaaactgt

SEQ ID NO: 172134 - DNA, 15 bp, Homo sapiens
ttttctttgaaactg

SEQ ID NO: 172135 - DNA, 15 bp, Homo sapiens
cttttctttgaaact

SEQ ID NO: 172136 - DNA, 15 bp, Homo sapiens
tcttttctttgaaac

SEQ ID NO: 172137 - DNA, 15 bp, Homo sapiens
ttcttttctttgaaa

SEQ ID NO: 172138 - DNA, 15 bp, Homo sapiens
gttcttttctttgaa

SEQ ID NO: 172139 - DNA, 15 bp, Homo sapiens
agttcttttctttga

SEQ ID NO: 172140 - DNA, 15 bp, Homo sapiens
cagttcttttctttg

SEQ ID NO: 172141 - DNA, 15 bp, Homo sapiens
tcagttcttttcttt

SEQ ID NO: 172142 - DNA, 15 bp, Homo sapiens
atcagttcttttctt

SEQ ID NO: 172143 - DNA, 15 bp, Homo sapiens
gatcagttcttttct

SEQ ID NO: 172144 - DNA, 15 bp, Homo sapiens
ggatcagttcttttc

SEQ ID NO: 172145 - DNA, 15 bp, Homo sapiens
aggatcagttctttt

SEQ ID NO: 172146 - DNA, 15 bp, Homo sapiens
gaggatcagttcttt

SEQ ID NO: 172147 - DNA, 15 bp, Homo sapiens
agaggatcagttctt

SEQ ID NO: 172148 - DNA, 15 bp, Homo sapiens
gagaggatcagttct

SEQ ID NO: 172149 - DNA, 15 bp, Homo sapiens
ggagaggatcagttc

SEQ ID NO: 172150 - DNA, 15 bp, Homo sapiens
tggagaggatcagtt

SEQ ID NO: 172151 - DNA, 15 bp, Homo sapiens
gtggagaggatcagt

SEQ ID NO: 172152 - DNA, 15 bp, Homo sapiens
agtggagaggatcag

SEQ ID NO: 172153 - DNA, 15 bp, Homo sapiens
tagtggagaggatca

SEQ ID NO: 172154 - DNA, 15 bp, Homo sapiens
ctagtggagaggatc

SEQ ID NO: 172155 - DNA, 15 bp, Homo sapiens
gctagtggagaggat

SEQ ID NO: 172156 - DNA, 15 bp, Homo sapiens
tgctagtggagagga

SEQ ID NO: 172157 - DNA, 15 bp, Homo sapiens
atgctagtggagagg

SEQ ID NO: 172158 - DNA, 15 bp, Homo sapiens
aatgctagtggagag

SEQ ID NO: 172159 - DNA, 15 bp, Homo sapiens
taatgctagtggaga

SEQ ID NO: 172160 - DNA, 15 bp, Homo sapiens
ctaatgctagtggag

SEQ ID NO: 172161 - DNA, 15 bp, Homo sapiens
tctaatgctagtgga

SEQ ID NO: 172162 - DNA, 15 bp, Homo sapiens
atctaatgctagtgg

SEQ ID NO: 172163 - DNA, 15 bp, Homo sapiens
catctaatgctagtg

SEQ ID NO: 172164 - DNA, 15 bp, Homo sapiens
tcatctaatgctagt

SEQ ID NO: 172165 - DNA, 15 bp, Homo sapiens
atcatctaatgctag

SEQ ID NO: 172166 - DNA, 15 bp, Homo sapiens
catcatctaatgcta

SEQ ID NO: 172167 - DNA, 15 bp, Homo sapiens
gcatcatctaatgct

SEQ ID NO: 172168 - DNA, 15 bp, Homo sapiens
agcatcatctaatgc

SEQ ID NO: 172169 - DNA, 15 bp, Homo sapiens
tagcatcatctaatg

SEQ ID NO: 172170 - DNA, 15 bp, Homo sapiens
ttagcatcatctaat

SEQ ID NO: 172171 - DNA, 15 bp, Homo sapiens
cttagcatcatctaa

SEQ ID NO: 172172 - DNA, 15 bp, Homo sapiens
ccttagcatcatcta

SEQ ID NO: 172173 - DNA, 15 bp, Homo sapiens
cccttagcatcatct

SEQ ID NO: 172174 - DNA, 15 bp, Homo sapiens
ccccttagcatcatc

SEQ ID NO: 172175 - DNA, 15 bp, Homo sapiens
cccccttagcatcat

SEQ ID NO: 172176 - DNA, 15 bp, Homo sapiens
acccccttagcatca

SEQ ID NO: 172177 - DNA, 15 bp, Homo sapiens
cacccccttagcatc

SEQ ID NO: 172178 - DNA, 15 bp, Homo sapiens
acacccccttagcat

SEQ ID NO: 172179 - DNA, 15 bp, Homo sapiens
tacacccccttagca

SEQ ID NO: 172180 - DNA, 15 bp, Homo sapiens
ttacacccccttagc

SEQ ID NO: 172181 - DNA, 15 bp, Homo sapiens
tttacacccccttag

SEQ ID NO: 172182 - DNA, 15 bp, Homo sapiens
ttttacaccccctta

SEQ ID NO: 172183 - DNA, 15 bp, Homo sapiens
tttttacaccccctt

SEQ ID NO: 172184 - DNA, 15 bp, Homo sapiens
atttttacaccccct

SEQ ID NO: 172185 - DNA, 15 bp, Homo sapiens
tatttttacaccccc

SEQ ID NO: 172186 - DNA, 15 bp, Homo sapiens
gtatttttacacccc

SEQ ID NO: 172187 - DNA, 15 bp, Homo sapiens
tgtatttttacaccc

SEQ ID NO: 172188 - DNA, 15 bp, Homo sapiens
ttgtatttttacacc

SEQ ID NO: 172189 - DNA, 15 bp, Homo sapiens
tttgtatttttacac

SEQ ID NO: 172190 - DNA, 15 bp, Homo sapiens
ttttgtatttttaca

SEQ ID NO: 172191 - DNA, 15 bp, Homo sapiens
tttttgtatttttac

SEQ ID NO: 172192 - DNA, 15 bp, Homo sapiens
tttttttgtattttt

SEQ ID NO: 172193 - DNA, 15 bp, Homo sapiens
gtttttttgtatttt

SEQ ID NO: 172194 - DNA, 15 bp, Homo sapiens
agtttttttgtattt

SEQ ID NO: 172195 - DNA, 15 bp, Homo sapiens
cagtttttttgtatt

SEQ ID NO: 172196 - DNA, 15 bp, Homo sapiens
ccagtttttttgtat

SEQ ID NO: 172197 - DNA, 15 bp, Homo sapiens
accagtttttttgta

SEQ ID NO: 172198 - DNA, 15 bp, Homo sapiens
gaccagtttttttgt

SEQ ID NO: 172199 - DNA, 15 bp, Homo sapiens
ggaccagtttttttg

SEQ ID NO: 172200 - DNA, 15 bp, Homo sapiens
gggaccagttttttt

SEQ ID NO: 172201 - DNA, 15 bp, Homo sapiens
agggaccagtttttt

SEQ ID NO: 172202 - DNA, 15 bp, Homo sapiens
cagggaccagttttt

SEQ ID NO: 172203 - DNA, 15 bp, Homo sapiens
gcagggaccagtttt

SEQ ID NO: 172204 - DNA, 15 bp, Homo sapiens
ggcagggaccagttt

SEQ ID NO: 172205 - DNA, 15 bp, Homo sapiens
aggcagggaccagtt

SEQ ID NO: 172206 - DNA, 15 bp, Homo sapiens
caggcagggaccagt

SEQ ID NO: 172207 - DNA, 15 bp, Homo sapiens
gcaggcagggaccag

SEQ ID NO: 172208 - DNA, 15 bp, Homo sapiens
ggcaggcagggacca

SEQ ID NO: 172209 - DNA, 15 bp, Homo sapiens
gggcaggcagggacc

SEQ ID NO: 172210 - DNA, 15 bp, Homo sapiens
ggggcaggcagggac

SEQ ID NO: 172211 - DNA, 15 bp, Homo sapiens
aggggcaggcaggga

SEQ ID NO: 172212 - DNA, 15 bp, Homo sapiens
gaggggcaggcaggg

SEQ ID NO: 172213 - DNA, 15 bp, Homo sapiens
tgaggggcaggcagg

SEQ ID NO: 172214 - DNA, 15 bp, Homo sapiens
ttgaggggcaggcag

SEQ ID NO: 172215 - DNA, 15 bp, Homo sapiens
cttgaggggcaggca

SEQ ID NO: 172216 - DNA, 15 bp, Homo sapiens
tcttgaggggcaggc

SEQ ID NO: 172217 - DNA, 15 bp, Homo sapiens
ctcttgaggggcagg

SEQ ID NO: 172218 - DNA, 15 bp, Homo sapiens
actcttgaggggcag

SEQ ID NO: 172219 - DNA, 15 bp, Homo sapiens
cactcttgaggggca

SEQ ID NO: 172220 - DNA, 15 bp, Homo sapiens
acactcttgaggggc

SEQ ID NO: 172221 - DNA, 15 bp, Homo sapiens
gacactcttgagggg

SEQ ID NO: 172222 - DNA, 15 bp, Homo sapiens
tgacactcttgaggg

SEQ ID NO: 172223 - DNA, 15 bp, Homo sapiens
atgacactcttgagg

SEQ ID NO: 172224 - DNA, 15 bp, Homo sapiens
catgacactcttgag

SEQ ID NO: 172225 - DNA, 15 bp, Homo sapiens
tcatgacactcttga

SEQ ID NO: 172226 - DNA, 15 bp, Homo sapiens
ctcatgacactcttg

SEQ ID NO: 172227 - DNA, 15 bp, Homo sapiens
tctcatgacactctt

SEQ ID NO: 172228 - DNA, 15 bp, Homo sapiens
atctcatgacactct

SEQ ID NO: 172229 - DNA, 15 bp, Homo sapiens
catctcatgacactc

SEQ ID NO: 172230 - DNA, 15 bp, Homo sapiens
gcatctcatgacact

SEQ ID NO: 172231 - DNA, 15 bp, Homo sapiens
ggcatctcatgacac

SEQ ID NO: 172232 - DNA, 15 bp, Homo sapiens
aggcatctcatgaca

SEQ ID NO: 172233 - DNA, 15 bp, Homo sapiens
caggcatctcatgac

SEQ ID NO: 172234 - DNA, 15 bp, Homo sapiens
gcaggcatctcatga

SEQ ID NO: 172235 - DNA, 15 bp, Homo sapiens
tgcaggcatctcatg

SEQ ID NO: 172236 - DNA, 15 bp, Homo sapiens
gtgcaggcatctcat

SEQ ID NO: 172237 - DNA, 15 bp, Homo sapiens
tgtgcaggcatctca

SEQ ID NO: 172238 - DNA, 15 bp, Homo sapiens
gtgtgcaggcatctc

SEQ ID NO: 172239 - DNA, 15 bp, Homo sapiens
tgtgtgcaggcatct

SEQ ID NO: 172240 - DNA, 15 bp, Homo sapiens
atgtgtgcaggcatc

SEQ ID NO: 172241 - DNA, 15 bp, Homo sapiens
catgtgtgcaggcat

SEQ ID NO: 172242 - DNA, 15 bp, Homo sapiens
acatgtgtgcaggca

SEQ ID NO: 172243 - DNA, 15 bp, Homo sapiens
cacatgtgtgcaggc

SEQ ID NO: 172244 - DNA, 15 bp, Homo sapiens
ccacatgtgtgcagg

SEQ ID NO: 172245 - DNA, 15 bp, Homo sapiens
cccacatgtgtgcag

SEQ ID NO: 172246 - DNA, 15 bp, Homo sapiens
gcccacatgtgtgca

SEQ ID NO: 172247 - DNA, 15 bp, Homo sapiens
agcccacatgtgtgc

SEQ ID NO: 172248 - DNA, 15 bp, Homo sapiens
gagcccacatgtgtg

SEQ ID NO: 172249 - DNA, 15 bp, Homo sapiens
tgagcccacatgtgt

SEQ ID NO: 172250 - DNA, 15 bp, Homo sapiens
atgagcccacatgtg

SEQ ID NO: 172251 - DNA, 15 bp, Homo sapiens
catgagcccacatgt

SEQ ID NO: 172252 - DNA, 15 bp, Homo sapiens
acatgagcccacatg

SEQ ID NO: 172253 - DNA, 15 bp, Homo sapiens
cacatgagcccacat

SEQ ID NO: 172254 - DNA, 15 bp, Homo sapiens
acacatgagcccaca

SEQ ID NO: 172255 - DNA, 15 bp, Homo sapiens
cacacatgagcccac

SEQ ID NO: 172256 - DNA, 15 bp, Homo sapiens
acacacatgagccca

SEQ ID NO: 172257 - DNA, 15 bp, Homo sapiens
cacacacatgagccc

SEQ ID NO: 172258 - DNA, 15 bp, Homo sapiens
acacacacatgagcc

SEQ ID NO: 172259 - DNA, 15 bp, Homo sapiens
tacacacacatgagc

SEQ ID NO: 172260 - DNA, 15 bp, Homo sapiens
atacacacacatgag

SEQ ID NO: 172261 - DNA, 15 bp, Homo sapiens
aatacacacacatga

SEQ ID NO: 172262 - DNA, 15 bp, Homo sapiens
aaatacacacacatg

SEQ ID NO: 172263 - DNA, 15 bp, Homo sapiens
taaatacacacacat

SEQ ID NO: 172264 - DNA, 15 bp, Homo sapiens
gtaaatacacacaca

SEQ ID NO: 172265 - DNA, 15 bp, Homo sapiens
tgtaaatacacacac

SEQ ID NO: 172266 - DNA, 15 bp, Homo sapiens
atgtaaatacacaca

SEQ ID NO: 172267 - DNA, 15 bp, Homo sapiens
tatgtaaatacacac

SEQ ID NO: 172268 - DNA, 15 bp, Homo sapiens
gtatgtaaatacaca

SEQ ID NO: 172269 - DNA, 15 bp, Homo sapiens
tgtatgtaaatacac

SEQ ID NO: 172270 - DNA, 15 bp, Homo sapiens
atgtatgtaaataca

SEQ ID NO: 172271 - DNA, 15 bp, Homo sapiens
catgtatgtaaatac

SEQ ID NO: 172272 - DNA, 15 bp, Homo sapiens
acatgtatgtaaata

SEQ ID NO: 172273 - DNA, 15 bp, Homo sapiens
cacatgtatgtaaat

SEQ ID NO: 172274 - DNA, 15 bp, Homo sapiens
gcacatgtatgtaaa

SEQ ID NO: 172275 - DNA, 15 bp, Homo sapiens
tgcacatgtatgtaa

SEQ ID NO: 172276 - DNA, 15 bp, Homo sapiens
ctgcacatgtatgta

SEQ ID NO: 172277 - DNA, 15 bp, Homo sapiens
tctgcacatgtatgt

SEQ ID NO: 172278 - DNA, 15 bp, Homo sapiens
gtctgcacatgtatg

SEQ ID NO: 172279 - DNA, 15 bp, Homo sapiens
tgtctgcacatgtat

SEQ ID NO: 172280 - DNA, 15 bp, Homo sapiens
atgtctgcacatgta

SEQ ID NO: 172281 - DNA, 15 bp, Homo sapiens
tatgtctgcacatgt

SEQ ID NO: 172282 - DNA, 15 bp, Homo sapiens
gtatgtctgcacatg

SEQ ID NO: 172283 - DNA, 15 bp, Homo sapiens
tgtatgtctgcacat

SEQ ID NO: 172284 - DNA, 15 bp, Homo sapiens
ctgtatgtctgcaca

SEQ ID NO: 172285 - DNA, 15 bp, Homo sapiens
tctgtatgtctgcac

SEQ ID NO: 172286 - DNA, 15 bp, Homo sapiens
ttctgtatgtctgca

SEQ ID NO: 172287 - DNA, 15 bp, Homo sapiens
gttctgtatgtctgc

SEQ ID NO: 172288 - DNA, 15 bp, Homo sapiens
tgttctgtatgtctg

SEQ ID NO: 172289 - DNA, 15 bp, Homo sapiens
gtgttctgtatgtct

SEQ ID NO: 172290 - DNA, 15 bp, Homo sapiens
tgtgttctgtatgtc

SEQ ID NO: 172291 - DNA, 15 bp, Homo sapiens
ttgtgttctgtatgt

SEQ ID NO: 172292 - DNA, 15 bp, Homo sapiens
attgtgttctgtatg

SEQ ID NO: 172293 - DNA, 15 bp, Homo sapiens
aattgtgttctgtat

SEQ ID NO: 172294 - DNA, 15 bp, Homo sapiens
gaattgtgttctgta

SEQ ID NO: 172295 - DNA, 15 bp, Homo sapiens
agaattgtgttctgt

SEQ ID NO: 172296 - DNA, 15 bp, Homo sapiens
cagaattgtgttctg

SEQ ID NO: 172297 - DNA, 15 bp, Homo sapiens
ccagaattgtgttct

SEQ ID NO: 172298 - DNA, 15 bp, Homo sapiens
tccagaattgtgttc

SEQ ID NO: 172299 - DNA, 15 bp, Homo sapiens
ctccagaattgtgtt

SEQ ID NO: 172300 - DNA, 15 bp, Homo sapiens
gctccagaattgtgt

SEQ ID NO: 172301 - DNA, 15 bp, Homo sapiens
ggctccagaattgtg

SEQ ID NO: 172302 - DNA, 15 bp, Homo sapiens
gggctccagaattgt

SEQ ID NO: 172303 - DNA, 15 bp, Homo sapiens
agggctccagaattg

SEQ ID NO: 172304 - DNA, 15 bp, Homo sapiens
cagggctccagaatt

SEQ ID NO: 172305 - DNA, 15 bp, Homo sapiens
ccagggctccagaat

SEQ ID NO: 172306 - DNA, 15 bp, Homo sapiens
cccagggctccagaa

SEQ ID NO: 172307 - DNA, 15 bp, Homo sapiens
acccagggctccaga

SEQ ID NO: 172308 - DNA, 15 bp, Homo sapiens
gacccagggctccag

SEQ ID NO: 172309 - DNA, 15 bp, Homo sapiens
agacccagggctcca

SEQ ID NO: 172310 - DNA, 15 bp, Homo sapiens
gagacccagggctcc

SEQ ID NO: 172311 - DNA, 15 bp, Homo sapiens
ggagacccagggctc

SEQ ID NO: 172312 - DNA, 15 bp, Homo sapiens
aggagacccagggct

SEQ ID NO: 172313 - DNA, 15 bp, Homo sapiens
aaggagacccagggc

SEQ ID NO: 172314 - DNA, 15 bp, Homo sapiens
gaaggagacccaggg

SEQ ID NO: 172315 - DNA, 15 bp, Homo sapiens
tgaaggagacccagg

SEQ ID NO: 172316 - DNA, 15 bp, Homo sapiens
atgaaggagacccag

SEQ ID NO: 172317 - DNA, 15 bp, Homo sapiens
catgaaggagaccca

SEQ ID NO: 172318 - DNA, 15 bp, Homo sapiens
tcatgaaggagaccc

SEQ ID NO: 172319 - DNA, 15 bp, Homo sapiens
ttcatgaaggagacc

SEQ ID NO: 172320 - DNA, 15 bp, Homo sapiens
gttcatgaaggagac

SEQ ID NO: 172321 - DNA, 15 bp, Homo sapiens
tgttcatgaaggaga

SEQ ID NO: 172322 - DNA, 15 bp, Homo sapiens
ctgttcatgaaggag

SEQ ID NO: 172323 - DNA, 15 bp, Homo sapiens
tctgttcatgaagga

SEQ ID NO: 172324 - DNA, 15 bp, Homo sapiens
atctgttcatgaagg

SEQ ID NO: 172325 - DNA, 15 bp, Homo sapiens
catctgttcatgaag

SEQ ID NO: 172326 - DNA, 15 bp, Homo sapiens
ccatctgttcatgaa

SEQ ID NO: 172327 - DNA, 15 bp, Homo sapiens
cccatctgttcatga

SEQ ID NO: 172328 - DNA, 15 bp, Homo sapiens
ccccatctgttcatg

SEQ ID NO: 172329 - DNA, 15 bp, Homo sapiens
gccccatctgttcat

SEQ ID NO: 172330 - DNA, 15 bp, Homo sapiens
agccccatctgttca

SEQ ID NO: 172331 - DNA, 15 bp, Homo sapiens
cagccccatctgttc

SEQ ID NO: 172332 - DNA, 15 bp, Homo sapiens
ccagccccatctgtt

SEQ ID NO: 172333 - DNA, 15 bp, Homo sapiens
tccagccccatctgt

SEQ ID NO: 172334 - DNA, 15 bp, Homo sapiens
ctccagccccatctg

SEQ ID NO: 172335 - DNA, 15 bp, Homo sapiens
actccagccccatct

SEQ ID NO: 172336 - DNA, 15 bp, Homo sapiens
cactccagccccatc

SEQ ID NO: 172337 - DNA, 15 bp, Homo sapiens
ccactccagccccat

SEQ ID NO: 172338 - DNA, 15 bp, Homo sapiens
cccactccagcccca

SEQ ID NO: 172339 - DNA, 15 bp, Homo sapiens
ccccactccagcccc

SEQ ID NO: 172340 - DNA, 15 bp, Homo sapiens
tccccactccagccc

SEQ ID NO: 172341 - DNA, 15 bp, Homo sapiens
ttccccactccagcc

SEQ ID NO: 172342 - DNA, 15 bp, Homo sapiens
attccccactccagc

SEQ ID NO: 172343 - DNA, 15 bp, Homo sapiens
tattccccactccag

SEQ ID NO: 172344 - DNA, 15 bp, Homo sapiens
atattccccactcca

SEQ ID NO: 172345 - DNA, 15 bp, Homo sapiens
aatattccccactcc

SEQ ID NO: 172346 - DNA, 15 bp, Homo sapiens
gaatattccccactc

SEQ ID NO: 172347 - DNA, 15 bp, Homo sapiens
agaatattccccact

SEQ ID NO: 172348 - DNA, 15 bp, Homo sapiens
gagaatattccccac

SEQ ID NO: 172349 - DNA, 15 bp, Homo sapiens
ggagaatattcccca

SEQ ID NO: 172350 - DNA, 15 bp, Homo sapiens
tggagaatattcccc

SEQ ID NO: 172351 - DNA, 15 bp, Homo sapiens
atggagaatattccc

SEQ ID NO: 172352 - DNA, 15 bp, Homo sapiens
catggagaatattcc

SEQ ID NO: 172353 - DNA, 15 bp, Homo sapiens
tcatggagaatattc

SEQ ID NO: 172354 - DNA, 15 bp, Homo sapiens
atcatggagaatatt

SEQ ID NO: 172355 - DNA, 15 bp, Homo sapiens
gatcatggagaatat

SEQ ID NO: 172356 - DNA, 15 bp, Homo sapiens
tgatcatggagaata

SEQ ID NO: 172357 - DNA, 15 bp, Homo sapiens
ctgatcatggagaat

SEQ ID NO: 172358 - DNA, 15 bp, Homo sapiens
tctgatcatggagaa

SEQ ID NO: 172359 - DNA, 15 bp, Homo sapiens
ctctgatcatggaga

SEQ ID NO: 172360 - DNA, 15 bp, Homo sapiens
actctgatcatggag

SEQ ID NO: 172361 - DNA, 15 bp, Homo sapiens
gactctgatcatgga

SEQ ID NO: 172362 - DNA, 15 bp, Homo sapiens
tgactctgatcatgg

SEQ ID NO: 172363 - DNA, 15 bp, Homo sapiens
atgactctgatcatg

SEQ ID NO: 172364 - DNA, 15 bp, Homo sapiens
aatgactctgatcat

SEQ ID NO: 172365 - DNA, 15 bp, Homo sapiens
caatgactctgatca

SEQ ID NO: 172366 - DNA, 15 bp, Homo sapiens
acaatgactctgatc

SEQ ID NO: 172367 - DNA, 15 bp, Homo sapiens
tacaatgactctgat

SEQ ID NO: 172368 - DNA, 15 bp, Homo sapiens
gtacaatgactctga

SEQ ID NO: 172369 - DNA, 15 bp, Homo sapiens
agtacaatgactctg

SEQ ID NO: 172370 - DNA, 15 bp, Homo sapiens
aagtacaatgactct

SEQ ID NO: 172371 - DNA, 15 bp, Homo sapiens
gaagtacaatgactc

SEQ ID NO: 172372 - DNA, 15 bp, Homo sapiens
tgaagtacaatgact

SEQ ID NO: 172373 - DNA, 15 bp, Homo sapiens
gtgaagtacaatgac

SEQ ID NO: 172374 - DNA, 15 bp, Homo sapiens
agtgaagtacaatga

SEQ ID NO: 172375 - DNA, 15 bp, Homo sapiens
cagtgaagtacaatg

SEQ ID NO: 172376 - DNA, 15 bp, Homo sapiens
ccagtgaagtacaat

SEQ ID NO: 172377 - DNA, 15 bp, Homo sapiens
tccagtgaagtacaa

SEQ ID NO: 172378 - DNA, 15 bp, Homo sapiens
atccagtgaagtaca

SEQ ID NO: 172379 - DNA, 15 bp, Homo sapiens
gatccagtgaagtac

SEQ ID NO: 172380 - DNA, 15 bp, Homo sapiens
tgatccagtgaagta

SEQ ID NO: 172381 - DNA, 15 bp, Homo sapiens
ctgatccagtgaagt

SEQ ID NO: 172382 - DNA, 15 bp, Homo sapiens
cctgatccagtgaag

SEQ ID NO: 172383 - DNA, 15 bp, Homo sapiens
gcctgatccagtgaa

SEQ ID NO: 172384 - DNA, 15 bp, Homo sapiens
ggcctgatccagtga

SEQ ID NO: 172385 - DNA, 15 bp, Homo sapiens
aggcctgatccagtg

SEQ ID NO: 172386 - DNA, 15 bp, Homo sapiens
gaggcctgatccagt

SEQ ID NO: 172387 - DNA, 15 bp, Homo sapiens
ggaggcctgatccag

SEQ ID NO: 172388 - DNA, 15 bp, Homo sapiens
aggaggcctgatcca

SEQ ID NO: 172389 - DNA, 15 bp, Homo sapiens
gaggaggcctgatcc

SEQ ID NO: 172390 - DNA, 15 bp, Homo sapiens
tgaggaggcctgatc

SEQ ID NO: 172391 - DNA, 15 bp, Homo sapiens
ttgaggaggcctgat

SEQ ID NO: 172392 - DNA, 15 bp, Homo sapiens
cttgaggaggcctga

SEQ ID NO: 172393 - DNA, 15 bp, Homo sapiens
ccttgaggaggcctg

SEQ ID NO: 172394 - DNA, 15 bp, Homo sapiens
tccttgaggaggcct

SEQ ID NO: 172395 - DNA, 15 bp, Homo sapiens
ctccttgaggaggcc

SEQ ID NO: 172396 - DNA, 15 bp, Homo sapiens
tctccttgaggaggc

SEQ ID NO: 172397 - DNA, 15 bp, Homo sapiens
ctctccttgaggagg

SEQ ID NO: 172398 - DNA, 15 bp, Homo sapiens
cctctccttgaggag

SEQ ID NO: 172399 - DNA, 15 bp, Homo sapiens
acctctccttgagga

SEQ ID NO: 172400 - DNA, 15 bp, Homo sapiens
aacctctccttgagg

SEQ ID NO: 172401 - DNA, 15 bp, Homo sapiens
caacctctccttgag

SEQ ID NO: 172402 - DNA, 15 bp, Homo sapiens
ccaacctctccttga

SEQ ID NO: 172403 - DNA, 15 bp, Homo sapiens
tccaacctctccttg

SEQ ID NO: 172404 - DNA, 15 bp, Homo sapiens
atccaacctctcctt

SEQ ID NO: 172405 - DNA, 15 bp, Homo sapiens
catccaacctctcct

SEQ ID NO: 172406 - DNA, 15 bp, Homo sapiens
acatccaacctctcc

SEQ ID NO: 172407 - DNA, 15 bp, Homo sapiens
tacatccaacctctc

SEQ ID NO: 172408 - DNA, 15 bp, Homo sapiens
ctacatccaacctct

SEQ ID NO: 172409 - DNA, 15 bp, Homo sapiens
cctacatccaacctc

SEQ ID NO: 172410 - DNA, 15 bp, Homo sapiens
tcctacatccaacct

SEQ ID NO: 172411 - DNA, 15 bp, Homo sapiens
atcctacatccaacc

SEQ ID NO: 172412 - DNA, 15 bp, Homo sapiens
gatcctacatccaac

SEQ ID NO: 172413 - DNA, 15 bp, Homo sapiens
agatcctacatccaa

SEQ ID NO: 172414 - DNA, 15 bp, Homo sapiens
gagatcctacatcca

SEQ ID NO: 172415 - DNA, 15 bp, Homo sapiens
agagatcctacatcc

SEQ ID NO: 172416 - DNA, 15 bp, Homo sapiens
tagagatcctacatc

SEQ ID NO: 172417 - DNA, 15 bp, Homo sapiens
gtagagatcctacat

SEQ ID NO: 172418 - DNA, 15 bp, Homo sapiens
tgtagagatcctaca

SEQ ID NO: 172419 - DNA, 15 bp, Homo sapiens
ctgtagagatcctac

SEQ ID NO: 172420 - DNA, 15 bp, Homo sapiens
gctgtagagatccta

SEQ ID NO: 172421 - DNA, 15 bp, Homo sapiens
agctgtagagatcct

SEQ ID NO: 172422 - DNA, 15 bp, Homo sapiens
aagctgtagagatcc

SEQ ID NO: 172423 - DNA, 15 bp, Homo sapiens
gaagctgtagagatc

SEQ ID NO: 172424 - DNA, 15 bp, Homo sapiens
agaagctgtagagat

SEQ ID NO: 172425 - DNA, 15 bp, Homo sapiens
cagaagctgtagaga

SEQ ID NO: 172426 - DNA, 15 bp, Homo sapiens
ccagaagctgtagag

SEQ ID NO: 172427 - DNA, 15 bp, Homo sapiens
cccagaagctgtaga

SEQ ID NO: 172428 - DNA, 15 bp, Homo sapiens
gcccagaagctgtag

SEQ ID NO: 172429 - DNA, 15 bp, Homo sapiens
tgcccagaagctgta

SEQ ID NO: 172430 - DNA, 15 bp, Homo sapiens
ctgcccagaagctgt

SEQ ID NO: 172431 - DNA, 15 bp, Homo sapiens
gctgcccagaagctg

SEQ ID NO: 172432 - DNA, 15 bp, Homo sapiens
agctgcccagaagct

SEQ ID NO: 172433 - DNA, 15 bp, Homo sapiens
aagctgcccagaagc

SEQ ID NO: 172434 - DNA, 15 bp, Homo sapiens
gaagctgcccagaag

SEQ ID NO: 172435 - DNA, 15 bp, Homo sapiens
agaagctgcccagaa

SEQ ID NO: 172436 - DNA, 15 bp, Homo sapiens
cagaagctgcccaga

SEQ ID NO: 172437 - DNA, 15 bp, Homo sapiens
tcagaagctgcccag

SEQ ID NO: 172438 - DNA, 15 bp, Homo sapiens
ctcagaagctgccca

SEQ ID NO: 172439 - DNA, 15 bp, Homo sapiens
gctcagaagctgccc

SEQ ID NO: 172440 - DNA, 15 bp, Homo sapiens
tgctcagaagctgcc

SEQ ID NO: 172441 - DNA, 15 bp, Homo sapiens
ctgctcagaagctgc

SEQ ID NO: 172442 - DNA, 15 bp, Homo sapiens
cctgctcagaagctg

SEQ ID NO: 172443 - DNA, 15 bp, Homo sapiens
ccctgctcagaagct

SEQ ID NO: 172444 - DNA, 15 bp, Homo sapiens
accctgctcagaagc

SEQ ID NO: 172445 - DNA, 15 bp, Homo sapiens
gaccctgctcagaag

SEQ ID NO: 172446 - DNA, 15 bp, Homo sapiens
agaccctgctcagaa

SEQ ID NO: 172447 - DNA, 15 bp, Homo sapiens
gagaccctgctcaga

SEQ ID NO: 172448 - DNA, 15 bp, Homo sapiens
ggagaccctgctcag

SEQ ID NO: 172449 - DNA, 15 bp, Homo sapiens
aggagaccctgctca

SEQ ID NO: 172450 - DNA, 15 bp, Homo sapiens
caggagaccctgctc

SEQ ID NO: 172451 - DNA, 15 bp, Homo sapiens
ccaggagaccctgct

SEQ ID NO: 172452 - DNA, 15 bp, Homo sapiens
tccaggagaccctgc

SEQ ID NO: 172453 - DNA, 15 bp, Homo sapiens
gtccaggagaccctg

SEQ ID NO: 172454 - DNA, 15 bp, Homo sapiens
ggtccaggagaccct

SEQ ID NO: 172455 - DNA, 15 bp, Homo sapiens
gggtccaggagaccc

SEQ ID NO: 172456 - DNA, 15 bp, Homo sapiens
ggggtccaggagacc

SEQ ID NO: 172457 - DNA, 15 bp, Homo sapiens
tggggtccaggagac

SEQ ID NO: 172458 - DNA, 15 bp, Homo sapiens
atggggtccaggaga

SEQ ID NO: 172459 - DNA, 15 bp, Homo sapiens
catggggtccaggag

SEQ ID NO: 172460 - DNA, 15 bp, Homo sapiens
ccatggggtccagga

SEQ ID NO: 172461 - DNA, 15 bp, Homo sapiens
gccatggggtccagg

SEQ ID NO: 172462 - DNA, 15 bp, Homo sapiens
tgccatggggtccag

SEQ ID NO: 172463 - DNA, 15 bp, Homo sapiens
gtgccatggggtcca

SEQ ID NO: 172464 - DNA, 15 bp, Homo sapiens
tgtgccatggggtcc

SEQ ID NO: 172465 - DNA, 15 bp, Homo sapiens
atgtgccatggggtc

SEQ ID NO: 172466 - DNA, 15 bp, Homo sapiens
catgtgccatggggt

SEQ ID NO: 172467 - DNA, 15 bp, Homo sapiens
gcatgtgccatgggg

SEQ ID NO: 172468 - DNA, 15 bp, Homo sapiens
ggcatgtgccatggg

SEQ ID NO: 172469 - DNA, 15 bp, Homo sapiens
aggcatgtgccatgg

SEQ ID NO: 172470 - DNA, 15 bp, Homo sapiens
caggcatgtgccatg

SEQ ID NO: 172471 - DNA, 15 bp, Homo sapiens
ccaggcatgtgccat

SEQ ID NO: 172472 - DNA, 15 bp, Homo sapiens
cccaggcatgtgcca

SEQ ID NO: 172473 - DNA, 15 bp, Homo sapiens
tcccaggcatgtgcc

SEQ ID NO: 172474 - DNA, 15 bp, Homo sapiens
ctcccaggcatgtgc

SEQ ID NO: 172475 - DNA, 15 bp, Homo sapiens
tctcccaggcatgtg

SEQ ID NO: 172476 - DNA, 15 bp, Homo sapiens
gtctcccaggcatgt

SEQ ID NO: 172477 - DNA, 15 bp, Homo sapiens
ggtctcccaggcatg

SEQ ID NO: 172478 - DNA, 15 bp, Homo sapiens
gggtctcccaggcat

SEQ ID NO: 172479 - DNA, 15 bp, Homo sapiens
tgggtctcccaggca

SEQ ID NO: 172480 - DNA, 15 bp, Homo sapiens
atgggtctcccaggc

SEQ ID NO: 172481 - DNA, 15 bp, Homo sapiens
catgggtctcccagg

SEQ ID NO: 172482 - DNA, 15 bp, Homo sapiens
ccatgggtctcccag

SEQ ID NO: 172483 - DNA, 15 bp, Homo sapiens
cccatgggtctccca

SEQ ID NO: 172484 - DNA, 15 bp, Homo sapiens
ccccatgggtctccc

SEQ ID NO: 172485 - DNA, 15 bp, Homo sapiens
tccccatgggtctcc

SEQ ID NO: 172486 - DNA, 15 bp, Homo sapiens
ctccccatgggtctc

SEQ ID NO: 172487 - DNA, 15 bp, Homo sapiens
tctccccatgggtct

SEQ ID NO: 172488 - DNA, 15 bp, Homo sapiens
ctctccccatgggtc

SEQ ID NO: 172489 - DNA, 15 bp, Homo sapiens
cctctccccatgggt

SEQ ID NO: 172490 - DNA, 15 bp, Homo sapiens
gcctctccccatggg

SEQ ID NO: 172491 - DNA, 15 bp, Homo sapiens
agcctctccccatgg

SEQ ID NO: 172492 - DNA, 15 bp, Homo sapiens
tagcctctccccatg

SEQ ID NO: 172493 - DNA, 15 bp, Homo sapiens
ctagcctctccccat

SEQ ID NO: 172494 - DNA, 15 bp, Homo sapiens
gctagcctctcccca

SEQ ID NO: 172495 - DNA, 15 bp, Homo sapiens
acagaattttccatt

SEQ ID NO: 172496 - DNA, 15 bp, Homo sapiens
cacagaattttccat

SEQ ID NO: 172497 - DNA, 15 bp, Homo sapiens
gcacagaattttcca

SEQ ID NO: 172498 - DNA, 15 bp, Homo sapiens
tgcacagaattttcc

SEQ ID NO: 172499 - DNA, 15 bp, Homo sapiens
atgcacagaattttc

SEQ ID NO: 172500 - DNA, 15 bp, Homo sapiens
tatgcacagaatttt

SEQ ID NO: 172501 - DNA, 15 bp, Homo sapiens
gtatgcacagaattt

SEQ ID NO: 172502 - DNA, 15 bp, Homo sapiens
tgtatgcacagaatt

SEQ ID NO: 172503 - DNA, 15 bp, Homo sapiens
ctgtatgcacagaat

SEQ ID NO: 172504 - DNA, 15 bp, Homo sapiens
actgtatgcacagaa

SEQ ID NO: 172505 - DNA, 15 bp, Homo sapiens
tactgtatgcacaga

SEQ ID NO: 172506 - DNA, 15 bp, Homo sapiens
ttactgtatgcacag

SEQ ID NO: 172507 - DNA, 15 bp, Homo sapiens
cttactgtatgcaca

SEQ ID NO: 172508 - DNA, 15 bp, Homo sapiens
acttactgtatgcac

SEQ ID NO: 172509 - DNA, 15 bp, Homo sapiens
cacttactgtatgca

SEQ ID NO: 172510 - DNA, 15 bp, Homo sapiens
gcacttactgtatgc

SEQ ID NO: 172511 - DNA, 15 bp, Homo sapiens
ggcacttactgtatg

SEQ ID NO: 172512 - DNA, 15 bp, Homo sapiens
gggcacttactgtat

SEQ ID NO: 172513 - DNA, 15 bp, Homo sapiens
tgggcacttactgta

SEQ ID NO: 172514 - DNA, 15 bp, Homo sapiens
ttgggcacttactgt

SEQ ID NO: 172515 - DNA, 15 bp, Homo sapiens
attgggcacttactg

SEQ ID NO: 172516 - DNA, 15 bp, Homo sapiens
tattgggcacttact

SEQ ID NO: 172517 - DNA, 15 bp, Homo sapiens
ttattgggcacttac

SEQ ID NO: 172518 - DNA, 15 bp, Homo sapiens
tttattgggcactta

SEQ ID NO: 172519 - DNA, 15 bp, Homo sapiens
atttattgggcactt

SEQ ID NO: 172520 - DNA, 15 bp, Homo sapiens
tatttattgggcact

SEQ ID NO: 172521 - DNA, 15 bp, Homo sapiens
atatttattgggcac

SEQ ID NO: 172522 - DNA, 15 bp, Homo sapiens
catatttattgggca

SEQ ID NO: 172523 - DNA, 15 bp, Homo sapiens
ccatatttattgggc

SEQ ID NO: 172524 - DNA, 15 bp, Homo sapiens
accatatttattggg

SEQ ID NO: 172525 - DNA, 15 bp, Homo sapiens
caccatatttattgg

SEQ ID NO: 172526 - DNA, 15 bp, Homo sapiens
tcaccatatttattg

SEQ ID NO: 172527 - DNA, 15 bp, Homo sapiens
atcaccatatttatt

SEQ ID NO: 172528 - DNA, 15 bp, Homo sapiens
aatcaccatatttat

SEQ ID NO: 172529 - DNA, 15 bp, Homo sapiens
aaatcaccatattta

SEQ ID NO: 172530 - DNA, 15 bp, Homo sapiens
aaaatcaccatattt

SEQ ID NO: 172531 - DNA, 15 bp, Homo sapiens
gaaaatcaccatatt

SEQ ID NO: 172532 - DNA, 15 bp, Homo sapiens
tgaaaatcaccatat

SEQ ID NO: 172533 - DNA, 15 bp, Homo sapiens
ttgaaaatcaccata

SEQ ID NO: 172534 - DNA, 15 bp, Homo sapiens
cttgaaaatcaccat

SEQ ID NO: 172535 - DNA, 15 bp, Homo sapiens
ccttgaaaatcacca

SEQ ID NO: 172536 - DNA, 15 bp, Homo sapiens
tccttgaaaatcacc

SEQ ID NO: 172537 - DNA, 15 bp, Homo sapiens
gtccttgaaaatcac

SEQ ID NO: 172538 - DNA, 15 bp, Homo sapiens
tgtccttgaaaatca

SEQ ID NO: 172539 - DNA, 15 bp, Homo sapiens
ttgtccttgaaaatc

SEQ ID NO: 172540 - DNA, 15 bp, Homo sapiens
attgtccttgaaaat

SEQ ID NO: 172541 - DNA, 15 bp, Homo sapiens
gattgtccttgaaaa

SEQ ID NO: 172542 - DNA, 15 bp, Homo sapiens
cgattgtccttgaaa

SEQ ID NO: 172543 - DNA, 15 bp, Homo sapiens
acgattgtccttgaa

SEQ ID NO: 172544 - DNA, 15 bp, Homo sapiens
cacgattgtccttga

SEQ ID NO: 172545 - DNA, 15 bp, Homo sapiens
tcacgattgtccttg

SEQ ID NO: 172546 - DNA, 15 bp, Homo sapiens
atcacgattgtcctt

SEQ ID NO: 172547 - DNA, 15 bp, Homo sapiens
aatcacgattgtcct

SEQ ID NO: 172548 - DNA, 15 bp, Homo sapiens
taatcacgattgtcc

SEQ ID NO: 172549 - DNA, 15 bp, Homo sapiens
gtaatcacgattgtc

SEQ ID NO: 172550 - DNA, 15 bp, Homo sapiens
tgtaatcacgattgt

SEQ ID NO: 172551 - DNA, 15 bp, Homo sapiens
ctgtaatcacgattg

SEQ ID NO: 172552 - DNA, 15 bp, Homo sapiens
cctgtaatcacgatt

SEQ ID NO: 172553 - DNA, 15 bp, Homo sapiens
ccctgtaatcacgat

SEQ ID NO: 172554 - DNA, 15 bp, Homo sapiens
cccctgtaatcacga

SEQ ID NO: 172555 - DNA, 15 bp, Homo sapiens
acccctgtaatcacg

SEQ ID NO: 172556 - DNA, 15 bp, Homo sapiens
gacccctgtaatcac

SEQ ID NO: 172557 - DNA, 15 bp, Homo sapiens
tgacccctgtaatca

SEQ ID NO: 172558 - DNA, 15 bp, Homo sapiens
gtgacccctgtaatc

SEQ ID NO: 172559 - DNA, 15 bp, Homo sapiens
tgtgacccctgtaat

SEQ ID NO: 172560 - DNA, 15 bp, Homo sapiens
ctgtgacccctgtaa

SEQ ID NO: 172561 - DNA, 15 bp, Homo sapiens
gctgtgacccctgta

SEQ ID NO: 172562 - DNA, 15 bp, Homo sapiens
tgctgtgacccctgt

SEQ ID NO: 172563 - DNA, 15 bp, Homo sapiens
ctgctgtgacccctg

SEQ ID NO: 172564 - DNA, 15 bp, Homo sapiens
tctgctgtgacccct

SEQ ID NO: 172565 - DNA, 15 bp, Homo sapiens
ctctgctgtgacccc

SEQ ID NO: 172566 - DNA, 15 bp, Homo sapiens
cctctgctgtgaccc

SEQ ID NO: 172567 - DNA, 15 bp, Homo sapiens
acctctgctgtgacc

SEQ ID NO: 172568 - DNA, 15 bp, Homo sapiens
aacctctgctgtgac

SEQ ID NO: 172569 - DNA, 15 bp, Homo sapiens
gaacctctgctgtga

SEQ ID NO: 172570 - DNA, 15 bp, Homo sapiens
tgaacctctgctgtg

SEQ ID NO: 172571 - DNA, 15 bp, Homo sapiens
ctgaacctctgctgt

SEQ ID NO: 172572 - DNA, 15 bp, Homo sapiens
cctgaacctctgctg

SEQ ID NO: 172573 - DNA, 15 bp, Homo sapiens
tcctgaacctctgct

SEQ ID NO: 172574 - DNA, 15 bp, Homo sapiens
ttcctgaacctctgc

SEQ ID NO: 172575 - DNA, 15 bp, Homo sapiens
tttcctgaacctctg

SEQ ID NO: 172576 - DNA, 15 bp, Homo sapiens
ttttcctgaacctct

SEQ ID NO: 172577 - DNA, 15 bp, Homo sapiens
cttttcctgaacctc

SEQ ID NO: 172578 - DNA, 15 bp, Homo sapiens
acttttcctgaacct

SEQ ID NO: 172579 - DNA, 15 bp, Homo sapiens
cacttttcctgaacc

SEQ ID NO: 172580 - DNA, 15 bp, Homo sapiens
gcacttttcctgaac

SEQ ID NO: 172581 - DNA, 15 bp, Homo sapiens
agcacttttcctgaa

SEQ ID NO: 172582 - DNA, 15 bp, Homo sapiens
cagcacttttcctga

SEQ ID NO: 172583 - DNA, 15 bp, Homo sapiens
tcagcacttttcctg

SEQ ID NO: 172584 - DNA, 15 bp, Homo sapiens
ttcagcacttttcct

SEQ ID NO: 172585 - DNA, 15 bp, Homo sapiens
cttcagcacttttcc

SEQ ID NO: 172586 - DNA, 15 bp, Homo sapiens
ccttcagcacttttc

SEQ ID NO: 172587 - DNA, 15 bp, Homo sapiens
tccttcagcactttt

SEQ ID NO: 172588 - DNA, 15 bp, Homo sapiens
ctccttcagcacttt

SEQ ID NO: 172589 - DNA, 15 bp, Homo sapiens
tctccttcagcactt

SEQ ID NO: 172590 - DNA, 15 bp, Homo sapiens
atctccttcagcact

SEQ ID NO: 172591 - DNA, 15 bp, Homo sapiens
catctccttcagcac

SEQ ID NO: 172592 - DNA, 15 bp, Homo sapiens
ccatctccttcagca

SEQ ID NO: 172593 - DNA, 15 bp, Homo sapiens
cccatctccttcagc

SEQ ID NO: 172594 - DNA, 15 bp, Homo sapiens
ccccatctccttcag

SEQ ID NO: 172595 - DNA, 15 bp, Homo sapiens
cccccatctccttca

SEQ ID NO: 172596 - DNA, 15 bp, Homo sapiens
gcccccatctccttc

SEQ ID NO: 172597 - DNA, 15 bp, Homo sapiens
tgcccccatctcctt

SEQ ID NO: 172598 - DNA, 15 bp, Homo sapiens
ctgcccccatctcct

SEQ ID NO: 172599 - DNA, 15 bp, Homo sapiens
tctgcccccatctcc

SEQ ID NO: 172600 - DNA, 15 bp, Homo sapiens
ttctgcccccatctc

SEQ ID NO: 172601 - DNA, 15 bp, Homo sapiens
cttctgcccccatct

SEQ ID NO: 172602 - DNA, 15 bp, Homo sapiens
ccttctgcccccatc

SEQ ID NO: 172603 - DNA, 15 bp, Homo sapiens
tccttctgcccccat

SEQ ID NO: 172604 - DNA, 15 bp, Homo sapiens
ctccttctgccccca

SEQ ID NO: 172605 - DNA, 15 bp, Homo sapiens
tctccttctgccccc

SEQ ID NO: 172606 - DNA, 15 bp, Homo sapiens
gtctccttctgcccc

SEQ ID NO: 172607 - DNA, 15 bp, Homo sapiens
tgtctccttctgccc

SEQ ID NO: 172608 - DNA, 15 bp, Homo sapiens
gtgtctccttctgcc

SEQ ID NO: 172609 - DNA, 15 bp, Homo sapiens
agtgtctccttctgc

SEQ ID NO: 172610 - DNA, 15 bp, Homo sapiens
cagtgtctccttctg

SEQ ID NO: 172611 - DNA, 15 bp, Homo sapiens
acagtgtctccttct

SEQ ID NO: 172612 - DNA, 15 bp, Homo sapiens
cacagtgtctccttc

SEQ ID NO: 172613 - DNA, 15 bp, Homo sapiens
acacagtgtctcctt

SEQ ID NO: 172614 - DNA, 15 bp, Homo sapiens
cacacagtgtctcct

SEQ ID NO: 172615 - DNA, 15 bp, Homo sapiens
acacacagtgtctcc

SEQ ID NO: 172616 - DNA, 15 bp, Homo sapiens
gacacacagtgtctc

SEQ ID NO: 172617 - DNA, 15 bp, Homo sapiens
tgacacacagtgtct

SEQ ID NO: 172618 - DNA, 15 bp, Homo sapiens
ctgacacacagtgtc

SEQ ID NO: 172619 - DNA, 15 bp, Homo sapiens
gctgacacacagtgt

SEQ ID NO: 172620 - DNA, 15 bp, Homo sapiens
tgctgacacacagtg

SEQ ID NO: 172621 - DNA, 15 bp, Homo sapiens
gtgctgacacacagt

SEQ ID NO: 172622 - DNA, 15 bp, Homo sapiens
ggtgctgacacacag

SEQ ID NO: 172623 - DNA, 15 bp, Homo sapiens
gggtgctgacacaca

SEQ ID NO: 172624 - DNA, 15 bp, Homo sapiens
agggtgctgacacac

SEQ ID NO: 172625 - DNA, 15 bp, Homo sapiens
cagggtgctgacaca

SEQ ID NO: 172626 - DNA, 15 bp, Homo sapiens
tcagggtgctgacac

SEQ ID NO: 172627 - DNA, 15 bp, Homo sapiens
ctcagggtgctgaca

SEQ ID NO: 172628 - DNA, 15 bp, Homo sapiens
tctcagggtgctgac

SEQ ID NO: 172629 - DNA, 15 bp, Homo sapiens
ttctcagggtgctga

SEQ ID NO: 172630 - DNA, 15 bp, Homo sapiens
cttctcagggtgctg

SEQ ID NO: 172631 - DNA, 15 bp, Homo sapiens
acttctcagggtgct

SEQ ID NO: 172632 - DNA, 15 bp, Homo sapiens
gacttctcagggtgc

SEQ ID NO: 172633 - DNA, 15 bp, Homo sapiens
ggacttctcagggtg

SEQ ID NO: 172634 - DNA, 15 bp, Homo sapiens
gggacttctcagggt

SEQ ID NO: 172635 - DNA, 15 bp, Homo sapiens
tgggacttctcaggg

SEQ ID NO: 172636 - DNA, 15 bp, Homo sapiens
atgggacttctcagg

SEQ ID NO: 172637 - DNA, 15 bp, Homo sapiens
tatgggacttctcag

SEQ ID NO: 172638 - DNA, 15 bp, Homo sapiens
ctatgggacttctca

SEQ ID NO: 172639 - DNA, 15 bp, Homo sapiens
cctatgggacttctc

SEQ ID NO: 172640 - DNA, 15 bp, Homo sapiens
acctatgggacttct

SEQ ID NO: 172641 - DNA, 15 bp, Homo sapiens
cacctatgggacttc

SEQ ID NO: 172642 - DNA, 15 bp, Homo sapiens
acacctatgggactt

SEQ ID NO: 172643 - DNA, 15 bp, Homo sapiens
gacacctatgggact

SEQ ID NO: 172644 - DNA, 15 bp, Homo sapiens
ggacacctatgggac

SEQ ID NO: 172645 - DNA, 15 bp, Homo sapiens
gggacacctatggga

SEQ ID NO: 172646 - DNA, 15 bp, Homo sapiens
agggacacctatggg

SEQ ID NO: 172647 - DNA, 15 bp, Homo sapiens
cagggacacctatgg

SEQ ID NO: 172648 - DNA, 15 bp, Homo sapiens
tcagggacacctatg

SEQ ID NO: 172649 - DNA, 15 bp, Homo sapiens
ttcagggacacctat

SEQ ID NO: 172650 - DNA, 15 bp, Homo sapiens
tttcagggacaccta

SEQ ID NO: 172651 - DNA, 15 bp, Homo sapiens
gtttcagggacacct

SEQ ID NO: 172652 - DNA, 15 bp, Homo sapiens
ggtttcagggacacc

SEQ ID NO: 172653 - DNA, 15 bp, Homo sapiens
aggtttcagggacac

SEQ ID NO: 172654 - DNA, 15 bp, Homo sapiens
gaggtttcagggaca

SEQ ID NO: 172655 - DNA, 15 bp, Homo sapiens
agaggtttcagggac

SEQ ID NO: 172656 - DNA, 15 bp, Homo sapiens
gagaggtttcaggga

SEQ ID NO: 172657 - DNA, 15 bp, Homo sapiens
agagaggtttcaggg

SEQ ID NO: 172658 - DNA, 15 bp, Homo sapiens
aagagaggtttcagg

SEQ ID NO: 172659 - DNA, 15 bp, Homo sapiens
aaagagaggtttcag

SEQ ID NO: 172660 - DNA, 15 bp, Homo sapiens
caaagagaggtttca

SEQ ID NO: 172661 - DNA, 15 bp, Homo sapiens
ccaaagagaggtttc

SEQ ID NO: 172662 - DNA, 15 bp, Homo sapiens
accaaagagaggttt

SEQ ID NO: 172663 - DNA, 15 bp, Homo sapiens
gaccaaagagaggtt

SEQ ID NO: 172664 - DNA, 15 bp, Homo sapiens
agaccaaagagaggt

SEQ ID NO: 172665 - DNA, 15 bp, Homo sapiens
gagaccaaagagagg

SEQ ID NO: 172666 - DNA, 15 bp, Homo sapiens
agagaccaaagagag

SEQ ID NO: 172667 - DNA, 15 bp, Homo sapiens
cagagaccaaagaga

SEQ ID NO: 172668 - DNA, 15 bp, Homo sapiens
ccagagaccaaagag

SEQ ID NO: 172669 - DNA, 15 bp, Homo sapiens
accagagaccaaaga

SEQ ID NO: 172670 - DNA, 15 bp, Homo sapiens
aaccagagaccaaag

SEQ ID NO: 172671 - DNA, 15 bp, Homo sapiens
aaaccagagaccaaa

SEQ ID NO: 172672 - DNA, 15 bp, Homo sapiens
gaaaccagagaccaa

SEQ ID NO: 172673 - DNA, 15 bp, Homo sapiens
ggaaaccagagacca

SEQ ID NO: 172674 - DNA, 15 bp, Homo sapiens
gggaaaccagagacc

SEQ ID NO: 172675 - DNA, 15 bp, Homo sapiens
cgggaaaccagagac

SEQ ID NO: 172676 - DNA, 15 bp, Homo sapiens
ccgggaaaccagaga

SEQ ID NO: 172677 - DNA, 15 bp, Homo sapiens
tccgggaaaccagag

SEQ ID NO: 172678 - DNA, 15 bp, Homo sapiens
ctccgggaaaccaga

SEQ ID NO: 172679 - DNA, 15 bp, Homo sapiens
cctccgggaaaccag

SEQ ID NO: 172680 - DNA, 15 bp, Homo sapiens
acctccgggaaacca

SEQ ID NO: 172681 - DNA, 15 bp, Homo sapiens
cacctccgggaaacc

SEQ ID NO: 172682 - DNA, 15 bp, Homo sapiens
acacctccgggaaac

SEQ ID NO: 172683 - DNA, 15 bp, Homo sapiens
cacacctccgggaaa

SEQ ID NO: 172684 - DNA, 15 bp, Homo sapiens
gcacacctccgggaa

SEQ ID NO: 172685 - DNA, 15 bp, Homo sapiens
ggcacacctccggga

SEQ ID NO: 172686 - DNA, 15 bp, Homo sapiens
aggcacacctccggg

SEQ ID NO: 172687 - DNA, 15 bp, Homo sapiens
gaggcacacctccgg

SEQ ID NO: 172688 - DNA, 15 bp, Homo sapiens
tgaggcacacctccg

SEQ ID NO: 172689 - DNA, 15 bp, Homo sapiens
ctgaggcacacctcc

SEQ ID NO: 172690 - DNA, 15 bp, Homo sapiens
actgaggcacacctc

SEQ ID NO: 172691 - DNA, 15 bp, Homo sapiens
aactgaggcacacct

SEQ ID NO: 172692 - DNA, 15 bp, Homo sapiens
aaactgaggcacacc

SEQ ID NO: 172693 - DNA, 15 bp, Homo sapiens
taaactgaggcacac

SEQ ID NO: 172694 - DNA, 15 bp, Homo sapiens
gtaaactgaggcaca

SEQ ID NO: 172695 - DNA, 15 bp, Homo sapiens
ggtaaactgaggcac

SEQ ID NO: 172696 - DNA, 15 bp, Homo sapiens
tggtaaactgaggca

SEQ ID NO: 172697 - DNA, 15 bp, Homo sapiens
atggtaaactgaggc

SEQ ID NO: 172698 - DNA, 15 bp, Homo sapiens
gatggtaaactgagg

SEQ ID NO: 172699 - DNA, 15 bp, Homo sapiens
agatggtaaactgag

SEQ ID NO: 172700 - DNA, 15 bp, Homo sapiens
aagatggtaaactga

SEQ ID NO: 172701 - DNA, 15 bp, Homo sapiens
aaagatggtaaactg

SEQ ID NO: 172702 - DNA, 15 bp, Homo sapiens
gaaagatggtaaact

SEQ ID NO: 172703 - DNA, 15 bp, Homo sapiens
ggaaagatggtaaac

SEQ ID NO: 172704 - DNA, 15 bp, Homo sapiens
gggaaagatggtaaa

SEQ ID NO: 172705 - DNA, 15 bp, Homo sapiens
ggggaaagatggtaa

SEQ ID NO: 172706 - DNA, 15 bp, Homo sapiens
gggggaaagatggta

SEQ ID NO: 172707 - DNA, 15 bp, Homo sapiens
ggggggaaagatggt

SEQ ID NO: 172708 - DNA, 15 bp, Homo sapiens
gggggggaaagatgg

SEQ ID NO: 172709 - DNA, 15 bp, Homo sapiens
agggggggaaagatg

SEQ ID NO: 172710 - DNA, 15 bp, Homo sapiens
gagggggggaaagat

SEQ ID NO: 172711 - DNA, 15 bp, Homo sapiens
agagggggggaaaga

SEQ ID NO: 172712 - DNA, 15 bp, Homo sapiens
gagagggggggaaag

SEQ ID NO: 172713 - DNA, 15 bp, Homo sapiens
ggagagggggggaaa

SEQ ID NO: 172714 - DNA, 15 bp, Homo sapiens
tggagagggggggaa

SEQ ID NO: 172715 - DNA, 15 bp, Homo sapiens
ctggagaggggggga

SEQ ID NO: 172716 - DNA, 15 bp, Homo sapiens
gctggagaggggggg

SEQ ID NO: 172717 - DNA, 15 bp, Homo sapiens
cgctggagagggggg

SEQ ID NO: 172718 - DNA, 15 bp, Homo sapiens
ccgctggagaggggg

SEQ ID NO: 172719 - DNA, 15 bp, Homo sapiens
tccgctggagagggg

SEQ ID NO: 172720 - DNA, 15 bp, Homo sapiens
ttccgctggagaggg

SEQ ID NO: 172721 - DNA, 15 bp, Homo sapiens
cttccgctggagagg

SEQ ID NO: 172722 - DNA, 15 bp, Homo sapiens
ccttccgctggagag

SEQ ID NO: 172723 - DNA, 15 bp, Homo sapiens
cccttccgctggaga

SEQ ID NO: 172724 - DNA, 15 bp, Homo sapiens
gcccttccgctggag

SEQ ID NO: 172725 - DNA, 15 bp, Homo sapiens
agcccttccgctgga

SEQ ID NO: 172726 - DNA, 15 bp, Homo sapiens
tagcccttccgctgg

SEQ ID NO: 172727 - DNA, 15 bp, Homo sapiens
atagcccttccgctg

SEQ ID NO: 172728 - DNA, 15 bp, Homo sapiens
catagcccttccgct

SEQ ID NO: 172729 - DNA, 15 bp, Homo sapiens
tcatagcccttccgc

SEQ ID NO: 172730 - DNA, 15 bp, Homo sapiens
ttcatagcccttccg

SEQ ID NO: 172731 - DNA, 15 bp, Homo sapiens
tttcatagcccttcc

SEQ ID NO: 172732 - DNA, 15 bp, Homo sapiens
gtttcatagcccttc

SEQ ID NO: 172733 - DNA, 15 bp, Homo sapiens
tgtttcatagccctt

SEQ ID NO: 172734 - DNA, 15 bp, Homo sapiens
ttgtttcatagccct

SEQ ID NO: 172735 - DNA, 15 bp, Homo sapiens
cttgtttcatagccc

SEQ ID NO: 172736 - DNA, 15 bp, Homo sapiens
gcttgtttcatagcc

SEQ ID NO: 172737 - DNA, 15 bp, Homo sapiens
ggcttgtttcatagc

SEQ ID NO: 172738 - DNA, 15 bp, Homo sapiens
aggcttgtttcatag

SEQ ID NO: 172739 - DNA, 15 bp, Homo sapiens
caggcttgtttcata

SEQ ID NO: 172740 - DNA, 15 bp, Homo sapiens
ccaggcttgtttcat

SEQ ID NO: 172741 - DNA, 15 bp, Homo sapiens
gccaggcttgtttca

SEQ ID NO: 172742 - DNA, 15 bp, Homo sapiens
ggccaggcttgtttc

SEQ ID NO: 172743 - DNA, 15 bp, Homo sapiens
aggccaggcttgttt

SEQ ID NO: 172744 - DNA, 15 bp, Homo sapiens
gaggccaggcttgtt

SEQ ID NO: 172745 - DNA, 15 bp, Homo sapiens
ggaggccaggcttgt

SEQ ID NO: 172746 - DNA, 15 bp, Homo sapiens
aggaggccaggcttg

SEQ ID NO: 172747 - DNA, 15 bp, Homo sapiens
caggaggccaggctt

SEQ ID NO: 172748 - DNA, 15 bp, Homo sapiens
ccaggaggccaggct

SEQ ID NO: 172749 - DNA, 15 bp, Homo sapiens
gccaggaggccaggc

SEQ ID NO: 172750 - DNA, 15 bp, Homo sapiens
tgccaggaggccagg

SEQ ID NO: 172751 - DNA, 15 bp, Homo sapiens
ctgccaggaggccag

SEQ ID NO: 172752 - DNA, 15 bp, Homo sapiens
gctgccaggaggcca

SEQ ID NO: 172753 - DNA, 15 bp, Homo sapiens
agctgccaggaggcc

SEQ ID NO: 172754 - DNA, 15 bp, Homo sapiens
cagctgccaggaggc

SEQ ID NO: 172755 - DNA, 15 bp, Homo sapiens
gcagctgccaggagg

SEQ ID NO: 172756 - DNA, 15 bp, Homo sapiens
tgcagctgccaggag

SEQ ID NO: 172757 - DNA, 15 bp, Homo sapiens
gtgcagctgccagga

SEQ ID NO: 172758 - DNA, 15 bp, Homo sapiens
tgtgcagctgccagg

SEQ ID NO: 172759 - DNA, 15 bp, Homo sapiens
ttgtgcagctgccag

SEQ ID NO: 172760 - DNA, 15 bp, Homo sapiens
cttgtgcagctgcca

SEQ ID NO: 172761 - DNA, 15 bp, Homo sapiens
acttgtgcagctgcc

SEQ ID NO: 172762 - DNA, 15 bp, Homo sapiens
cacttgtgcagctgc

SEQ ID NO: 172763 - DNA, 15 bp, Homo sapiens
ccacttgtgcagctg

SEQ ID NO: 172764 - DNA, 15 bp, Homo sapiens
cccacttgtgcagct

SEQ ID NO: 172765 - DNA, 15 bp, Homo sapiens
ccccacttgtgcagc

SEQ ID NO: 172766 - DNA, 15 bp, Homo sapiens
cccccacttgtgcag

SEQ ID NO: 172767 - DNA, 15 bp, Homo sapiens
gcccccacttgtgca

SEQ ID NO: 172768 - DNA, 15 bp, Homo sapiens
ggcccccacttgtgc

SEQ ID NO: 172769 - DNA, 15 bp, Homo sapiens
tggcccccacttgtg

SEQ ID NO: 172770 - DNA, 15 bp, Homo sapiens
gtggcccccacttgt

SEQ ID NO: 172771 - DNA, 15 bp, Homo sapiens
ggtggcccccacttg

SEQ ID NO: 172772 - DNA, 15 bp, Homo sapiens
tggtggcccccactt

SEQ ID NO: 172773 - DNA, 15 bp, Homo sapiens
gtggtggcccccact

SEQ ID NO: 172774 - DNA, 15 bp, Homo sapiens
agtggtggcccccac

SEQ ID NO: 172775 - DNA, 15 bp, Homo sapiens
cagtggtggccccca

SEQ ID NO: 172776 - DNA, 15 bp, Homo sapiens
ccagtggtggccccc

SEQ ID NO: 172777 - DNA, 15 bp, Homo sapiens
tccagtggtggcccc

SEQ ID NO: 172778 - DNA, 15 bp, Homo sapiens
gtccagtggtggccc

SEQ ID NO: 172779 - DNA, 15 bp, Homo sapiens
agtccagtggtggcc

SEQ ID NO: 172780 - DNA, 15 bp, Homo sapiens
gagtccagtggtggc

SEQ ID NO: 172781 - DNA, 15 bp, Homo sapiens
tgagtccagtggtgg

SEQ ID NO: 172782 - DNA, 15 bp, Homo sapiens
ctgagtccagtggtg

SEQ ID NO: 172783 - DNA, 15 bp, Homo sapiens
cctgagtccagtggt

SEQ ID NO: 172784 - DNA, 15 bp, Homo sapiens
ccctgagtccagtgg

SEQ ID NO: 172785 - DNA, 15 bp, Homo sapiens
gccctgagtccagtg

SEQ ID NO: 172786 - DNA, 15 bp, Homo sapiens
ggccctgagtccagt

SEQ ID NO: 172787 - DNA, 15 bp, Homo sapiens
gggccctgagtccag

SEQ ID NO: 172788 - DNA, 15 bp, Homo sapiens
ggggccctgagtcca

SEQ ID NO: 172789 - DNA, 15 bp, Homo sapiens
gggggccctgagtcc

SEQ ID NO: 172790 - DNA, 15 bp, Homo sapiens
tgggggccctgagtc

SEQ ID NO: 172791 - DNA, 15 bp, Homo sapiens
atgggggccctgagt

SEQ ID NO: 172792 - DNA, 15 bp, Homo sapiens
gatgggggccctgag

SEQ ID NO: 172793 - DNA, 15 bp, Homo sapiens
ggatgggggccctga

SEQ ID NO: 172794 - DNA, 15 bp, Homo sapiens
gggatgggggccctg

SEQ ID NO: 172795 - DNA, 15 bp, Homo sapiens
tgggatgggggccct

SEQ ID NO: 172796 - DNA, 15 bp, Homo sapiens
ctgggatgggggccc

SEQ ID NO: 172797 - DNA, 15 bp, Homo sapiens
gctgggatgggggcc

SEQ ID NO: 172798 - DNA, 15 bp, Homo sapiens
agctgggatgggggc

SEQ ID NO: 172799 - DNA, 15 bp, Homo sapiens
cagctgggatggggg

SEQ ID NO: 172800 - DNA, 15 bp, Homo sapiens
acagctgggatgggg

SEQ ID NO: 172801 - DNA, 15 bp, Homo sapiens
gacagctgggatggg

SEQ ID NO: 172802 - DNA, 15 bp, Homo sapiens
tgacagctgggatgg

SEQ ID NO: 172803 - DNA, 15 bp, Homo sapiens
ctgacagctgggatg

SEQ ID NO: 172804 - DNA, 15 bp, Homo sapiens
gctgacagctgggat

SEQ ID NO: 172805 - DNA, 15 bp, Homo sapiens
tgctgacagctggga

SEQ ID NO: 172806 - DNA, 15 bp, Homo sapiens
atgctgacagctggg

SEQ ID NO: 172807 - DNA, 15 bp, Homo sapiens
catgctgacagctgg

SEQ ID NO: 172808 - DNA, 15 bp, Homo sapiens
gcatgctgacagctg

SEQ ID NO: 172809 - DNA, 15 bp, Homo sapiens
cgcatgctgacagct

SEQ ID NO: 172810 - DNA, 15 bp, Homo sapiens
gcgcatgctgacagc

SEQ ID NO: 172811 - DNA, 15 bp, Homo sapiens
agcgcatgctgacag

SEQ ID NO: 172812 - DNA, 15 bp, Homo sapiens
gagcgcatgctgaca

SEQ ID NO: 172813 - DNA, 15 bp, Homo sapiens
ggagcgcatgctgac

SEQ ID NO: 172814 - DNA, 15 bp, Homo sapiens
gggagcgcatgctga

SEQ ID NO: 172815 - DNA, 15 bp, Homo sapiens
agggagcgcatgctg

SEQ ID NO: 172816 - DNA, 15 bp, Homo sapiens
aagggagcgcatgct

SEQ ID NO: 172817 - DNA, 15 bp, Homo sapiens
gaagggagcgcatgc

SEQ ID NO: 172818 - DNA, 15 bp, Homo sapiens
tgaagggagcgcatg

SEQ ID NO: 172819 - DNA, 15 bp, Homo sapiens
gtgaagggagcgcat

SEQ ID NO: 172820 - DNA, 15 bp, Homo sapiens
tgtgaagggagcgca

SEQ ID NO: 172821 - DNA, 15 bp, Homo sapiens
ttgtgaagggagcgc

SEQ ID NO: 172822 - DNA, 15 bp, Homo sapiens
tttgtgaagggagcg

SEQ ID NO: 172823 - DNA, 15 bp, Homo sapiens
ctttgtgaagggagc

SEQ ID NO: 172824 - DNA, 15 bp, Homo sapiens
tctttgtgaagggag

SEQ ID NO: 172825 - DNA, 15 bp, Homo sapiens
gtctttgtgaaggga

SEQ ID NO: 172826 - DNA, 15 bp, Homo sapiens
agtctttgtgaaggg

SEQ ID NO: 172827 - DNA, 15 bp, Homo sapiens
gagtctttgtgaagg

SEQ ID NO: 172828 - DNA, 15 bp, Homo sapiens
tgagtctttgtgaag

SEQ ID NO: 172829 - DNA, 15 bp, Homo sapiens
ctgagtctttgtgaa

SEQ ID NO: 172830 - DNA, 15 bp, Homo sapiens
gctgagtctttgtga

SEQ ID NO: 172831 - DNA, 15 bp, Homo sapiens
ggctgagtctttgtg

SEQ ID NO: 172832 - DNA, 15 bp, Homo sapiens
cggctgagtctttgt

SEQ ID NO: 172833 - DNA, 15 bp, Homo sapiens
ccggctgagtctttg

SEQ ID NO: 172834 - DNA, 15 bp, Homo sapiens
cccggctgagtcttt

SEQ ID NO: 172835 - DNA, 15 bp, Homo sapiens
gcccggctgagtctt

SEQ ID NO: 172836 - DNA, 15 bp, Homo sapiens
tgcccggctgagtct

SEQ ID NO: 172837 - DNA, 15 bp, Homo sapiens
ctgcccggctgagtc

SEQ ID NO: 172838 - DNA, 15 bp, Homo sapiens
cctgcccggctgagt

SEQ ID NO: 172839 - DNA, 15 bp, Homo sapiens
ccctgcccggctgag

SEQ ID NO: 172840 - DNA, 15 bp, Homo sapiens
tccctgcccggctga

SEQ ID NO: 172841 - DNA, 15 bp, Homo sapiens
ctccctgcccggctg

SEQ ID NO: 172842 - DNA, 15 bp, Homo sapiens
gctccctgcccggct

SEQ ID NO: 172843 - DNA, 15 bp, Homo sapiens
agctccctgcccggc

SEQ ID NO: 172844 - DNA, 15 bp, Homo sapiens
cagctccctgcccgg

SEQ ID NO: 172845 - DNA, 15 bp, Homo sapiens
ccagctccctgcccg

SEQ ID NO: 172846 - DNA, 15 bp, Homo sapiens
gccagctccctgccc

SEQ ID NO: 172847 - DNA, 15 bp, Homo sapiens
tgccagctccctgcc

SEQ ID NO: 172848 - DNA, 15 bp, Homo sapiens
atgccagctccctgc

SEQ ID NO: 172849 - DNA, 15 bp, Homo sapiens
tatgccagctccctg

SEQ ID NO: 172850 - DNA, 15 bp, Homo sapiens
gtatgccagctccct

SEQ ID NO: 172851 - DNA, 15 bp, Homo sapiens
tgtatgccagctccc

SEQ ID NO: 172852 - DNA, 15 bp, Homo sapiens
ttgtatgccagctcc

SEQ ID NO: 172853 - DNA, 15 bp, Homo sapiens
gttgtatgccagctc

SEQ ID NO: 172854 - DNA, 15 bp, Homo sapiens
tgttgtatgccagct

SEQ ID NO: 172855 - DNA, 15 bp, Homo sapiens
ctgttgtatgccagc

SEQ ID NO: 172856 - DNA, 15 bp, Homo sapiens
cctgttgtatgccag

SEQ ID NO: 172857 - DNA, 15 bp, Homo sapiens
ccctgttgtatgcca

SEQ ID NO: 172858 - DNA, 15 bp, Homo sapiens
accctgttgtatgcc

SEQ ID NO: 172859 - DNA, 15 bp, Homo sapiens
caccctgttgtatgc

SEQ ID NO: 172860 - DNA, 15 bp, Homo sapiens
ccaccctgttgtatg

SEQ ID NO: 172861 - DNA, 15 bp, Homo sapiens
gccaccctgttgtat

SEQ ID NO: 172862 - DNA, 15 bp, Homo sapiens
agccaccctgttgta

SEQ ID NO: 172863 - DNA, 15 bp, Homo sapiens
cagccaccctgttgt

SEQ ID NO: 172864 - DNA, 15 bp, Homo sapiens
acagccaccctgttg

SEQ ID NO: 172865 - DNA, 15 bp, Homo sapiens
tacagccaccctgtt

SEQ ID NO: 172866 - DNA, 15 bp, Homo sapiens
ctacagccaccctgt

SEQ ID NO: 172867 - DNA, 15 bp, Homo sapiens
cctacagccaccctg

SEQ ID NO: 172868 - DNA, 15 bp, Homo sapiens
acctacagccaccct

SEQ ID NO: 172869 - DNA, 15 bp, Homo sapiens
cacctacagccaccc

SEQ ID NO: 172870 - DNA, 15 bp, Homo sapiens
ccacctacagccacc

SEQ ID NO: 172871 - DNA, 15 bp, Homo sapiens
accacctacagccac

SEQ ID NO: 172872 - DNA, 15 bp, Homo sapiens
caccacctacagcca

SEQ ID NO: 172873 - DNA, 15 bp, Homo sapiens
acaccacctacagcc

SEQ ID NO: 172874 - DNA, 15 bp, Homo sapiens
gacaccacctacagc

SEQ ID NO: 172875 - DNA, 15 bp, Homo sapiens
agacaccacctacag

SEQ ID NO: 172876 - DNA, 15 bp, Homo sapiens
cagacaccacctaca

SEQ ID NO: 172877 - DNA, 15 bp, Homo sapiens
gcagacaccacctac

SEQ ID NO: 172878 - DNA, 15 bp, Homo sapiens
agcagacaccaccta

SEQ ID NO: 172879 - DNA, 15 bp, Homo sapiens
gagcagacaccacct

SEQ ID NO: 172880 - DNA, 15 bp, Homo sapiens
tgagcagacaccacc

SEQ ID NO: 172881 - DNA, 15 bp, Homo sapiens
ctgagcagacaccac

SEQ ID NO: 172882 - DNA, 15 bp, Homo sapiens
gctgagcagacacca

SEQ ID NO: 172883 - DNA, 15 bp, Homo sapiens
ggctgagcagacacc

SEQ ID NO: 172884 - DNA, 15 bp, Homo sapiens
aggctgagcagacac

SEQ ID NO: 172885 - DNA, 15 bp, Homo sapiens
gaggctgagcagaca

SEQ ID NO: 172886 - DNA, 15 bp, Homo sapiens
ggaggctgagcagac

SEQ ID NO: 172887 - DNA, 15 bp, Homo sapiens
aggaggctgagcaga

SEQ ID NO: 172888 - DNA, 15 bp, Homo sapiens
aaggaggctgagcag

SEQ ID NO: 172889 - DNA, 15 bp, Homo sapiens
gaaggaggctgagca

SEQ ID NO: 172890 - DNA, 15 bp, Homo sapiens
ggaaggaggctgagc

SEQ ID NO: 172891 - DNA, 15 bp, Homo sapiens
gggaaggaggctgag

SEQ ID NO: 172892 - DNA, 15 bp, Homo sapiens
agggaaggaggctga

SEQ ID NO: 172893 - DNA, 15 bp, Homo sapiens
gagggaaggaggctg

SEQ ID NO: 172894 - DNA, 15 bp, Homo sapiens
ggagggaaggaggct

SEQ ID NO: 172895 - DNA, 15 bp, Homo sapiens
gggagggaaggaggc

SEQ ID NO: 172896 - DNA, 15 bp, Homo sapiens
ggggagggaaggagg

SEQ ID NO: 172897 - DNA, 15 bp, Homo sapiens
gggggagggaaggag

SEQ ID NO: 172898 - DNA, 15 bp, Homo sapiens
tgggggagggaagga

SEQ ID NO: 172899 - DNA, 15 bp, Homo sapiens
gtgggggagggaagg

SEQ ID NO: 172900 - DNA, 15 bp, Homo sapiens
agtgggggagggaag

SEQ ID NO: 172901 - DNA, 15 bp, Homo sapiens
gagtgggggagggaa

SEQ ID NO: 172902 - DNA, 15 bp, Homo sapiens
tgagtgggggaggga

SEQ ID NO: 172903 - DNA, 15 bp, Homo sapiens
ttgagtgggggaggg

SEQ ID NO: 172904 - DNA, 15 bp, Homo sapiens
cttgagtgggggagg

SEQ ID NO: 172905 - DNA, 15 bp, Homo sapiens
gcttgagtgggggag

SEQ ID NO: 172906 - DNA, 15 bp, Homo sapiens
agcttgagtggggga

SEQ ID NO: 172907 - DNA, 15 bp, Homo sapiens
aagcttgagtggggg

SEQ ID NO: 172908 - DNA, 15 bp, Homo sapiens
caagcttgagtgggg

SEQ ID NO: 172909 - DNA, 15 bp, Homo sapiens
ccaagcttgagtggg

SEQ ID NO: 172910 - DNA, 15 bp, Homo sapiens
cccaagcttgagtgg

SEQ ID NO: 172911 - DNA, 15 bp, Homo sapiens
acccaagcttgagtg

SEQ ID NO: 172912 - DNA, 15 bp, Homo sapiens
aacccaagcttgagt

SEQ ID NO: 172913 - DNA, 15 bp, Homo sapiens
gaacccaagcttgag

SEQ ID NO: 172914 - DNA, 15 bp, Homo sapiens
tgaacccaagcttga

SEQ ID NO: 172915 - DNA, 15 bp, Homo sapiens
atgaacccaagcttg

SEQ ID NO: 172916 - DNA, 15 bp, Homo sapiens
catgaacccaagctt

SEQ ID NO: 172917 - DNA, 15 bp, Homo sapiens
tcatgaacccaagct

SEQ ID NO: 172918 - DNA, 15 bp, Homo sapiens
gtcatgaacccaagc

SEQ ID NO: 172919 - DNA, 15 bp, Homo sapiens
cgtcatgaacccaag

SEQ ID NO: 172920 - DNA, 15 bp, Homo sapiens
gcgtcatgaacccaa

SEQ ID NO: 172921 - DNA, 15 bp, Homo sapiens
agcgtcatgaaccca

SEQ ID NO: 172922 - DNA, 15 bp, Homo sapiens
cagcgtcatgaaccc

SEQ ID NO: 172923 - DNA, 15 bp, Homo sapiens
gcagcgtcatgaacc

SEQ ID NO: 172924 - DNA, 15 bp, Homo sapiens
tgcagcgtcatgaac

SEQ ID NO: 172925 - DNA, 15 bp, Homo sapiens
atgcagcgtcatgaa

SEQ ID NO: 172926 - DNA, 15 bp, Homo sapiens
catgcagcgtcatga

SEQ ID NO: 172927 - DNA, 15 bp, Homo sapiens
ccatgcagcgtcatg

SEQ ID NO: 172928 - DNA, 15 bp, Homo sapiens
cccatgcagcgtcat

SEQ ID NO: 172929 - DNA, 15 bp, Homo sapiens
tcccatgcagcgtca

SEQ ID NO: 172930 - DNA, 15 bp, Homo sapiens
gtcccatgcagcgtc

SEQ ID NO: 172931 - DNA, 15 bp, Homo sapiens
tgtcccatgcagcgt

SEQ ID NO: 172932 - DNA, 15 bp, Homo sapiens
gtgtcccatgcagcg

SEQ ID NO: 172933 - DNA, 15 bp, Homo sapiens
agtgtcccatgcagc

SEQ ID NO: 172934 - DNA, 15 bp, Homo sapiens
cagtgtcccatgcag

SEQ ID NO: 172935 - DNA, 15 bp, Homo sapiens
ccagtgtcccatgca

SEQ ID NO: 172936 - DNA, 15 bp, Homo sapiens
gccagtgtcccatgc

SEQ ID NO: 172937 - DNA, 15 bp, Homo sapiens
cgccagtgtcccatg

SEQ ID NO: 172938 - DNA, 15 bp, Homo sapiens
acgccagtgtcccat

SEQ ID NO: 172939 - DNA, 15 bp, Homo sapiens
gacgccagtgtccca

SEQ ID NO: 172940 - DNA, 15 bp, Homo sapiens
tgacgccagtgtccc

SEQ ID NO: 172941 - DNA, 15 bp, Homo sapiens
atgacgccagtgtcc

SEQ ID NO: 172942 - DNA, 15 bp, Homo sapiens
gatgacgccagtgtc

SEQ ID NO: 172943 - DNA, 15 bp, Homo sapiens
ggatgacgccagtgt

SEQ ID NO: 172944 - DNA, 15 bp, Homo sapiens
aggatgacgccagtg

SEQ ID NO: 172945 - DNA, 15 bp, Homo sapiens
caggatgacgccagt

SEQ ID NO: 172946 - DNA, 15 bp, Homo sapiens
ccaggatgacgccag

SEQ ID NO: 172947 - DNA, 15 bp, Homo sapiens
gccaggatgacgcca

SEQ ID NO: 172948 - DNA, 15 bp, Homo sapiens
tgccaggatgacgcc

SEQ ID NO: 172949 - DNA, 15 bp, Homo sapiens
ctgccaggatgacgc

SEQ ID NO: 172950 - DNA, 15 bp, Homo sapiens
cctgccaggatgacg

SEQ ID NO: 172951 - DNA, 15 bp, Homo sapiens
gcctgccaggatgac

SEQ ID NO: 172952 - DNA, 15 bp, Homo sapiens
tgcctgccaggatga

SEQ ID NO: 172953 - DNA, 15 bp, Homo sapiens
ctgcctgccaggatg

SEQ ID NO: 172954 - DNA, 15 bp, Homo sapiens
gctgcctgccaggat

SEQ ID NO: 172955 - DNA, 15 bp, Homo sapiens
ggctgcctgccagga

SEQ ID NO: 172956 - DNA, 15 bp, Homo sapiens
aggctgcctgccagg

SEQ ID NO: 172957 - DNA, 15 bp, Homo sapiens
gaggctgcctgccag

SEQ ID NO: 172958 - DNA, 15 bp, Homo sapiens
agaggctgcctgcca

SEQ ID NO: 172959 - DNA, 15 bp, Homo sapiens
cagaggctgcctgcc

SEQ ID NO: 172960 - DNA, 15 bp, Homo sapiens
ccagaggctgcctgc

SEQ ID NO: 172961 - DNA, 15 bp, Homo sapiens
cccagaggctgcctg

SEQ ID NO: 172962 - DNA, 15 bp, Homo sapiens
gcccagaggctgcct

SEQ ID NO: 172963 - DNA, 15 bp, Homo sapiens
ggcccagaggctgcc

SEQ ID NO: 172964 - DNA, 15 bp, Homo sapiens
tggcccagaggctgc

SEQ ID NO: 172965 - DNA, 15 bp, Homo sapiens
atggcccagaggctg

SEQ ID NO: 172966 - DNA, 15 bp, Homo sapiens
gatggcccagaggct

SEQ ID NO: 172967 - DNA, 15 bp, Homo sapiens
agatggcccagaggc

SEQ ID NO: 172968 - DNA, 15 bp, Homo sapiens
gagatggcccagagg

SEQ ID NO: 172969 - DNA, 15 bp, Homo sapiens
tgagatggcccagag

SEQ ID NO: 172970 - DNA, 15 bp, Homo sapiens
ttgagatggcccaga

SEQ ID NO: 172971 - DNA, 15 bp, Homo sapiens
gttgagatggcccag

SEQ ID NO: 172972 - DNA, 15 bp, Homo sapiens
agttgagatggccca

SEQ ID NO: 172973 - DNA, 15 bp, Homo sapiens
gagttgagatggccc

SEQ ID NO: 172974 - DNA, 15 bp, Homo sapiens
agagttgagatggcc

SEQ ID NO: 172975 - DNA, 15 bp, Homo sapiens
tagagttgagatggc

SEQ ID NO: 172976 - DNA, 15 bp, Homo sapiens
gtagagttgagatgg

SEQ ID NO: 172977 - DNA, 15 bp, Homo sapiens
agtagagttgagatg

SEQ ID NO: 172978 - DNA, 15 bp, Homo sapiens
gagtagagttgagat

SEQ ID NO: 172979 - DNA, 15 bp, Homo sapiens
tgagtagagttgaga

SEQ ID NO: 172980 - DNA, 15 bp, Homo sapiens
ctgagtagagttgag

SEQ ID NO: 172981 - DNA, 15 bp, Homo sapiens
actgagtagagttga

SEQ ID NO: 172982 - DNA, 15 bp, Homo sapiens
cactgagtagagttg

SEQ ID NO: 172983 - DNA, 15 bp, Homo sapiens
gcactgagtagagtt

SEQ ID NO: 172984 - DNA, 15 bp, Homo sapiens
tgcactgagtagagt

SEQ ID NO: 172985 - DNA, 15 bp, Homo sapiens
ctgcactgagtagag

SEQ ID NO: 172986 - DNA, 15 bp, Homo sapiens
tctgcactgagtaga

SEQ ID NO: 172987 - DNA, 15 bp, Homo sapiens
ttctgcactgagtag

SEQ ID NO: 172988 - DNA, 15 bp, Homo sapiens
tttctgcactgagta

SEQ ID NO: 172989 - DNA, 15 bp, Homo sapiens
ttttctgcactgagt

SEQ ID NO: 172990 - DNA, 15 bp, Homo sapiens
attttctgcactgag

SEQ ID NO: 172991 - DNA, 15 bp, Homo sapiens
cattttctgcactga

SEQ ID NO: 172992 - DNA, 15 bp, Homo sapiens
acattttctgcactg

SEQ ID NO: 172993 - DNA, 15 bp, Homo sapiens
aacattttctgcact

SEQ ID NO: 172994 - DNA, 15 bp, Homo sapiens
gaacattttctgcac

SEQ ID NO: 172995 - DNA, 15 bp, Homo sapiens
agaacattttctgca

SEQ ID NO: 172996 - DNA, 15 bp, Homo sapiens
aagaacattttctgc

SEQ ID NO: 172997 - DNA, 15 bp, Homo sapiens
aaagaacattttctg

SEQ ID NO: 172998 - DNA, 15 bp, Homo sapiens
aaaagaacattttct

SEQ ID NO: 172999 - DNA, 15 bp, Homo sapiens
taaaagaacattttc

SEQ ID NO: 173000 - DNA, 15 bp, Homo sapiens
ttaaaagaacatttt

SEQ ID NO: 173001 - DNA, 15 bp, Homo sapiens
cttaaaagaacattt

SEQ ID NO: 173002 - DNA, 15 bp, Homo sapiens
ccttaaaagaacatt

SEQ ID NO: 173003 - DNA, 15 bp, Homo sapiens
cccttaaaagaacat

SEQ ID NO: 173004 - DNA, 15 bp, Homo sapiens
tcccttaaaagaaca

SEQ ID NO: 173005 - DNA, 15 bp, Homo sapiens
atcccttaaaagaac

SEQ ID NO: 173006 - DNA, 15 bp, Homo sapiens
catcccttaaaagaa

SEQ ID NO: 173007 - DNA, 15 bp, Homo sapiens
ccatcccttaaaaga

SEQ ID NO: 173008 - DNA, 15 bp, Homo sapiens
gccatcccttaaaag

SEQ ID NO: 173009 - DNA, 15 bp, Homo sapiens
tgccatcccttaaaa

SEQ ID NO: 173010 - DNA, 15 bp, Homo sapiens
atgccatcccttaaa

SEQ ID NO: 173011 - DNA, 15 bp, Homo sapiens
catgccatcccttaa

SEQ ID NO: 173012 - DNA, 15 bp, Homo sapiens
gcatgccatccctta

SEQ ID NO: 173013 - DNA, 15 bp, Homo sapiens
tgcatgccatccctt

SEQ ID NO: 173014 - DNA, 15 bp, Homo sapiens
ctgcatgccatccct

SEQ ID NO: 173015 - DNA, 15 bp, Homo sapiens
gctgcatgccatccc

SEQ ID NO: 173016 - DNA, 15 bp, Homo sapiens
ggctgcatgccatcc

SEQ ID NO: 173017 - DNA, 15 bp, Homo sapiens
tggctgcatgccatc

SEQ ID NO: 173018 - DNA, 15 bp, Homo sapiens
atggctgcatgccat

SEQ ID NO: 173019 - DNA, 15 bp, Homo sapiens
tatggctgcatgcca

SEQ ID NO: 173020 - DNA, 15 bp, Homo sapiens
gtatggctgcatgcc

SEQ ID NO: 173021 - DNA, 15 bp, Homo sapiens
ggtatggctgcatgc

SEQ ID NO: 173022 - DNA, 15 bp, Homo sapiens
tggtatggctgcatg

SEQ ID NO: 173023 - DNA, 15 bp, Homo sapiens
ctggtatggctgcat

SEQ ID NO: 173024 - DNA, 15 bp, Homo sapiens
cctggtatggctgca

SEQ ID NO: 173025 - DNA, 15 bp, Homo sapiens
gcctggtatggctgc

SEQ ID NO: 173026 - DNA, 15 bp, Homo sapiens
cgcctggtatggctg

SEQ ID NO: 173027 - DNA, 15 bp, Homo sapiens
acgcctggtatggct

SEQ ID NO: 173028 - DNA, 15 bp, Homo sapiens
gacgcctggtatggc

SEQ ID NO: 173029 - DNA, 15 bp, Homo sapiens
agacgcctggtatgg

SEQ ID NO: 173030 - DNA, 15 bp, Homo sapiens
aagacgcctggtatg

SEQ ID NO: 173031 - DNA, 15 bp, Homo sapiens
caagacgcctggtat

SEQ ID NO: 173032 - DNA, 15 bp, Homo sapiens
gcaagacgcctggta

SEQ ID NO: 173033 - DNA, 15 bp, Homo sapiens
agcaagacgcctggt

SEQ ID NO: 173034 - DNA, 15 bp, Homo sapiens
cagcaagacgcctgg

SEQ ID NO: 173035 - DNA, 15 bp, Homo sapiens
ccagcaagacgcctg

SEQ ID NO: 173036 - DNA, 15 bp, Homo sapiens
cccagcaagacgcct

SEQ ID NO: 173037 - DNA, 15 bp, Homo sapiens
gcccagcaagacgcc

SEQ ID NO: 173038 - DNA, 15 bp, Homo sapiens
tgcccagcaagacgc

SEQ ID NO: 173039 - DNA, 15 bp, Homo sapiens
atgcccagcaagacg

SEQ ID NO: 173040 - DNA, 15 bp, Homo sapiens
tatgcccagcaagac

SEQ ID NO: 173041 - DNA, 15 bp, Homo sapiens
ctatgcccagcaaga

SEQ ID NO: 173042 - DNA, 15 bp, Homo sapiens
gctatgcccagcaag

SEQ ID NO: 173043 - DNA, 15 bp, Homo sapiens
agctatgcccagcaa

SEQ ID NO: 173044 - DNA, 15 bp, Homo sapiens
cagctatgcccagca

SEQ ID NO: 173045 - DNA, 15 bp, Homo sapiens
ccagctatgcccagc

SEQ ID NO: 173046 - DNA, 15 bp, Homo sapiens
tccagctatgcccag

SEQ ID NO: 173047 - DNA, 15 bp, Homo sapiens
atccagctatgccca

SEQ ID NO: 173048 - DNA, 15 bp, Homo sapiens
catccagctatgccc

SEQ ID NO: 173049 - DNA, 15 bp, Homo sapiens
ccatccagctatgcc

SEQ ID NO: 173050 - DNA, 15 bp, Homo sapiens
tccatccagctatgc

SEQ ID NO: 173051 - DNA, 15 bp, Homo sapiens
gtccatccagctatg

SEQ ID NO: 173052 - DNA, 15 bp, Homo sapiens
cgtccatccagctat

SEQ ID NO: 173053 - DNA, 15 bp, Homo sapiens
tcgtccatccagcta

SEQ ID NO: 173054 - DNA, 15 bp, Homo sapiens
gtcgtccatccagct

SEQ ID NO: 173055 - DNA, 15 bp, Homo sapiens
tgtcgtccatccagc

SEQ ID NO: 173056 - DNA, 15 bp, Homo sapiens
ttgtcgtccatccag

SEQ ID NO: 173057 - DNA, 15 bp, Homo sapiens
tttgtcgtccatcca

SEQ ID NO: 173058 - DNA, 15 bp, Homo sapiens
ctttgtcgtccatcc

SEQ ID NO: 173059 - DNA, 15 bp, Homo sapiens
cctttgtcgtccatc

SEQ ID NO: 173060 - DNA, 15 bp, Homo sapiens
tcctttgtcgtccat

SEQ ID NO: 173061 - DNA, 15 bp, Homo sapiens
ctcctttgtcgtcca

SEQ ID NO: 173062 - DNA, 15 bp, Homo sapiens
cctcctttgtcgtcc

SEQ ID NO: 173063 - DNA, 15 bp, Homo sapiens
tcctcctttgtcgtc

SEQ ID NO: 173064 - DNA, 15 bp, Homo sapiens
ctcctcctttgtcgt

SEQ ID NO: 173065 - DNA, 15 bp, Homo sapiens
tctcctcctttgtcg

SEQ ID NO: 173066 - DNA, 15 bp, Homo sapiens
ctctcctcctttgtc

SEQ ID NO: 173067 - DNA, 15 bp, Homo sapiens
cctctcctcctttgt

SEQ ID NO: 173068 - DNA, 15 bp, Homo sapiens
tcctctcctcctttg

SEQ ID NO: 173069 - DNA, 15 bp, Homo sapiens
ctcctctcctccttt

SEQ ID NO: 173070 - DNA, 15 bp, Homo sapiens
cctcctctcctcctt

SEQ ID NO: 173071 - DNA, 15 bp, Homo sapiens
ccctcctctcctcct

SEQ ID NO: 173072 - DNA, 15 bp, Homo sapiens
accctcctctcctcc

SEQ ID NO: 173073 - DNA, 15 bp, Homo sapiens
aaccctcctctcctc

SEQ ID NO: 173074 - DNA, 15 bp, Homo sapiens
caaccctcctctcct

SEQ ID NO: 173075 - DNA, 15 bp, Homo sapiens
acaaccctcctctcc

SEQ ID NO: 173076 - DNA, 15 bp, Homo sapiens
aacaaccctcctctc

SEQ ID NO: 173077 - DNA, 15 bp, Homo sapiens
aaacaaccctcctct

SEQ ID NO: 173078 - DNA, 15 bp, Homo sapiens
caaacaaccctcctc

SEQ ID NO: 173079 - DNA, 15 bp, Homo sapiens
gcaaacaaccctcct

SEQ ID NO: 173080 - DNA, 15 bp, Homo sapiens
tgcaaacaaccctcc

SEQ ID NO: 173081 - DNA, 15 bp, Homo sapiens
gtgcaaacaaccctc

SEQ ID NO: 173082 - DNA, 15 bp, Homo sapiens
tgtgcaaacaaccct

SEQ ID NO: 173083 - DNA, 15 bp, Homo sapiens
ctgtgcaaacaaccc

SEQ ID NO: 173084 - DNA, 15 bp, Homo sapiens
cctgtgcaaacaacc

SEQ ID NO: 173085 - DNA, 15 bp, Homo sapiens
ccctgtgcaaacaac

SEQ ID NO: 173086 - DNA, 15 bp, Homo sapiens
cccctgtgcaaacaa

SEQ ID NO: 173087 - DNA, 15 bp, Homo sapiens
gcccctgtgcaaaca

SEQ ID NO: 173088 - DNA, 15 bp, Homo sapiens
agcccctgtgcaaac

SEQ ID NO: 173089 - DNA, 15 bp, Homo sapiens
cagcccctgtgcaaa

SEQ ID NO: 173090 - DNA, 15 bp, Homo sapiens
ccagcccctgtgcaa

SEQ ID NO: 173091 - DNA, 15 bp, Homo sapiens
accagcccctgtgca

SEQ ID NO: 173092 - DNA, 15 bp, Homo sapiens
caccagcccctgtgc

SEQ ID NO: 173093 - DNA, 15 bp, Homo sapiens
ccaccagcccctgtg

SEQ ID NO: 173094 - DNA, 15 bp, Homo sapiens
cccaccagcccctgt

SEQ ID NO: 173095 - DNA, 15 bp, Homo sapiens
ccccaccagcccctg

SEQ ID NO: 173096 - DNA, 15 bp, Homo sapiens
tccccaccagcccct

SEQ ID NO: 173097 - DNA, 15 bp, Homo sapiens
ctccccaccagcccc

SEQ ID NO: 173098 - DNA, 15 bp, Homo sapiens
tctccccaccagccc

SEQ ID NO: 173099 - DNA, 15 bp, Homo sapiens
atctccccaccagcc

SEQ ID NO: 173100 - DNA, 15 bp, Homo sapiens
aatctccccaccagc

SEQ ID NO: 173101 - DNA, 15 bp, Homo sapiens
caatctccccaccag

SEQ ID NO: 173102 - DNA, 15 bp, Homo sapiens
ccaatctccccacca

SEQ ID NO: 173103 - DNA, 15 bp, Homo sapiens
gccaatctccccacc

SEQ ID NO: 173104 - DNA, 15 bp, Homo sapiens
ggccaatctccccac

SEQ ID NO: 173105 - DNA, 15 bp, Homo sapiens
gggccaatctcccca

SEQ ID NO: 173106 - DNA, 15 bp, Homo sapiens
ggggccaatctcccc

SEQ ID NO: 173107 - DNA, 15 bp, Homo sapiens
aggggccaatctccc

SEQ ID NO: 173108 - DNA, 15 bp, Homo sapiens
aaggggccaatctcc

SEQ ID NO: 173109 - DNA, 15 bp, Homo sapiens
taaggggccaatctc

SEQ ID NO: 173110 - DNA, 15 bp, Homo sapiens
ataaggggccaatct

SEQ ID NO: 173111 - DNA, 15 bp, Homo sapiens
gataaggggccaatc

SEQ ID NO: 173112 - DNA, 15 bp, Homo sapiens
ggataaggggccaat

SEQ ID NO: 173113 - DNA, 15 bp, Homo sapiens
tggataaggggccaa

SEQ ID NO: 173114 - DNA, 15 bp, Homo sapiens
gtggataaggggcca

SEQ ID NO: 173115 - DNA, 15 bp, Homo sapiens
tgtggataaggggcc

SEQ ID NO: 173116 - DNA, 15 bp, Homo sapiens
ctgtggataaggggc

SEQ ID NO: 173117 - DNA, 15 bp, Homo sapiens
gctgtggataagggg

SEQ ID NO: 173118 - DNA, 15 bp, Homo sapiens
ggctgtggataaggg

SEQ ID NO: 173119 - DNA, 15 bp, Homo sapiens
cggctgtggataagg

SEQ ID NO: 173120 - DNA, 15 bp, Homo sapiens
gcggctgtggataag

SEQ ID NO: 173121 - DNA, 15 bp, Homo sapiens
agcggctgtggataa

SEQ ID NO: 173122 - DNA, 15 bp, Homo sapiens
cagcggctgtggata

SEQ ID NO: 173123 - DNA, 15 bp, Homo sapiens
ccagcggctgtggat

SEQ ID NO: 173124 - DNA, 15 bp, Homo sapiens
gccagcggctgtgga

SEQ ID NO: 173125 - DNA, 15 bp, Homo sapiens
tgccagcggctgtgg

SEQ ID NO: 173126 - DNA, 15 bp, Homo sapiens
atgccagcggctgtg

SEQ ID NO: 173127 - DNA, 15 bp, Homo sapiens
gatgccagcggctgt

SEQ ID NO: 173128 - DNA, 15 bp, Homo sapiens
agatgccagcggctg

SEQ ID NO: 173129 - DNA, 15 bp, Homo sapiens
cagatgccagcggct

SEQ ID NO: 173130 - DNA, 15 bp, Homo sapiens
ccagatgccagcggc

SEQ ID NO: 173131 - DNA, 15 bp, Homo sapiens
gccagatgccagcgg

SEQ ID NO: 173132 - DNA, 15 bp, Homo sapiens
agccagatgccagcg

SEQ ID NO: 173133 - DNA, 15 bp, Homo sapiens
cagccagatgccagc

SEQ ID NO: 173134 - DNA, 15 bp, Homo sapiens
acagccagatgccag

SEQ ID NO: 173135 - DNA, 15 bp, Homo sapiens
gacagccagatgcca

SEQ ID NO: 173136 - DNA, 15 bp, Homo sapiens
agacagccagatgcc

SEQ ID NO: 173137 - DNA, 15 bp, Homo sapiens
aagacagccagatgc

SEQ ID NO: 173138 - DNA, 15 bp, Homo sapiens
caagacagccagatg

SEQ ID NO: 173139 - DNA, 15 bp, Homo sapiens
ccaagacagccagat

SEQ ID NO: 173140 - DNA, 15 bp, Homo sapiens
accaagacagccaga

SEQ ID NO: 173141 - DNA, 15 bp, Homo sapiens
caccaagacagccag

SEQ ID NO: 173142 - DNA, 15 bp, Homo sapiens
tcaccaagacagcca

SEQ ID NO: 173143 - DNA, 15 bp, Homo sapiens
gtcaccaagacagcc

SEQ ID NO: 173144 - DNA, 15 bp, Homo sapiens
agtcaccaagacagc

SEQ ID NO: 173145 - DNA, 15 bp, Homo sapiens
aagtcaccaagacag

SEQ ID NO: 173146 - DNA, 15 bp, Homo sapiens
caagtcaccaagaca

SEQ ID NO: 173147 - DNA, 15 bp, Homo sapiens
ccaagtcaccaagac

SEQ ID NO: 173148 - DNA, 15 bp, Homo sapiens
gccaagtcaccaaga

SEQ ID NO: 173149 - DNA, 15 bp, Homo sapiens
ggccaagtcaccaag

SEQ ID NO: 173150 - DNA, 15 bp, Homo sapiens
aggccaagtcaccaa

SEQ ID NO: 173151 - DNA, 15 bp, Homo sapiens
taggccaagtcacca

SEQ ID NO: 173152 - DNA, 15 bp, Homo sapiens
ttaggccaagtcacc

SEQ ID NO: 173153 - DNA, 15 bp, Homo sapiens
tttaggccaagtcac

SEQ ID NO: 173154 - DNA, 15 bp, Homo sapiens
ctttaggccaagtca

SEQ ID NO: 173155 - DNA, 15 bp, Homo sapiens
cctttaggccaagtc

SEQ ID NO: 173156 - DNA, 15 bp, Homo sapiens
ccctttaggccaagt

SEQ ID NO: 173157 - DNA, 15 bp, Homo sapiens
tccctttaggccaag

SEQ ID NO: 173158 - DNA, 15 bp, Homo sapiens
ttccctttaggccaa

SEQ ID NO: 173159 - DNA, 15 bp, Homo sapiens
cttccctttaggcca

SEQ ID NO: 173160 - DNA, 15 bp, Homo sapiens
ccttccctttaggcc

SEQ ID NO: 173161 - DNA, 15 bp, Homo sapiens
cccttccctttaggc

SEQ ID NO: 173162 - DNA, 15 bp, Homo sapiens
gcccttccctttagg

SEQ ID NO: 173163 - DNA, 15 bp, Homo sapiens
ggcccttccctttag

SEQ ID NO: 173164 - DNA, 15 bp, Homo sapiens
gggcccttcccttta

SEQ ID NO: 173165 - DNA, 15 bp, Homo sapiens
tgggcccttcccttt

SEQ ID NO: 173166 - DNA, 15 bp, Homo sapiens
ctgggcccttccctt

SEQ ID NO: 173167 - DNA, 15 bp, Homo sapiens
tctgggcccttccct

SEQ ID NO: 173168 - DNA, 15 bp, Homo sapiens
gtctgggcccttccc

SEQ ID NO: 173169 - DNA, 15 bp, Homo sapiens
ggtctgggcccttcc

SEQ ID NO: 173170 - DNA, 15 bp, Homo sapiens
gggtctgggcccttc

SEQ ID NO: 173171 - DNA, 15 bp, Homo sapiens
ggggtctgggccctt

SEQ ID NO: 173172 - DNA, 15 bp, Homo sapiens
tggggtctgggccct

SEQ ID NO: 173173 - DNA, 15 bp, Homo sapiens
ctggggtctgggccc

SEQ ID NO: 173174 - DNA, 15 bp, Homo sapiens
tctggggtctgggcc

SEQ ID NO: 173175 - DNA, 15 bp, Homo sapiens
gtctggggtctgggc

SEQ ID NO: 173176 - DNA, 15 bp, Homo sapiens
tgtctggggtctggg

SEQ ID NO: 173177 - DNA, 15 bp, Homo sapiens
gtgtctggggtctgg

SEQ ID NO: 173178 - DNA, 15 bp, Homo sapiens
agtgtctggggtctg

SEQ ID NO: 173179 - DNA, 15 bp, Homo sapiens
gagtgtctggggtct

SEQ ID NO: 173180 - DNA, 15 bp, Homo sapiens
agagtgtctggggtc

SEQ ID NO: 173181 - DNA, 15 bp, Homo sapiens
cagagtgtctggggt

SEQ ID NO: 173182 - DNA, 15 bp, Homo sapiens
ccagagtgtctgggg

SEQ ID NO: 173183 - DNA, 15 bp, Homo sapiens
accagagtgtctggg

SEQ ID NO: 173184 - DNA, 15 bp, Homo sapiens
caccagagtgtctgg

SEQ ID NO: 173185 - DNA, 15 bp, Homo sapiens
acaccagagtgtctg

SEQ ID NO: 173186 - DNA, 15 bp, Homo sapiens
cacaccagagtgtct

SEQ ID NO: 173187 - DNA, 15 bp, Homo sapiens
ccacaccagagtgtc

SEQ ID NO: 173188 - DNA, 15 bp, Homo sapiens
cccacaccagagtgt

SEQ ID NO: 173189 - DNA, 15 bp, Homo sapiens
tcccacaccagagtg

SEQ ID NO: 173190 - DNA, 15 bp, Homo sapiens
ttcccacaccagagt

SEQ ID NO: 173191 - DNA, 15 bp, Homo sapiens
cttcccacaccagag

SEQ ID NO: 173192 - DNA, 15 bp, Homo sapiens
ccttcccacaccaga

SEQ ID NO: 173193 - DNA, 15 bp, Homo sapiens
cccttcccacaccag

SEQ ID NO: 173194 - DNA, 15 bp, Homo sapiens
acccttcccacacca

SEQ ID NO: 173195 - DNA, 15 bp, Homo sapiens
cacccttcccacacc

SEQ ID NO: 173196 - DNA, 15 bp, Homo sapiens
ccacccttcccacac

SEQ ID NO: 173197 - DNA, 15 bp, Homo sapiens
cccacccttcccaca

SEQ ID NO: 173198 - DNA, 15 bp, Homo sapiens
ccccacccttcccac

SEQ ID NO: 173199 - DNA, 15 bp, Homo sapiens
tccccacccttccca

SEQ ID NO: 173200 - DNA, 15 bp, Homo sapiens
gtccccacccttccc

SEQ ID NO: 173201 - DNA, 15 bp, Homo sapiens
agtccccacccttcc

SEQ ID NO: 173202 - DNA, 15 bp, Homo sapiens
aagtccccacccttc

SEQ ID NO: 173203 - DNA, 15 bp, Homo sapiens
gaagtccccaccctt

SEQ ID NO: 173204 - DNA, 15 bp, Homo sapiens
tgaagtccccaccct

SEQ ID NO: 173205 - DNA, 15 bp, Homo sapiens
ttgaagtccccaccc

SEQ ID NO: 173206 - DNA, 15 bp, Homo sapiens
tttgaagtccccacc

SEQ ID NO: 173207 - DNA, 15 bp, Homo sapiens
ctttgaagtccccac

SEQ ID NO: 173208 - DNA, 15 bp, Homo sapiens
tctttgaagtcccca

SEQ ID NO: 173209 - DNA, 15 bp, Homo sapiens
ttctttgaagtcccc

SEQ ID NO: 173210 - DNA, 15 bp, Homo sapiens
cttctttgaagtccc

SEQ ID NO: 173211 - DNA, 15 bp, Homo sapiens
gcttctttgaagtcc

SEQ ID NO: 173212 - DNA, 15 bp, Homo sapiens
agcttctttgaagtc

SEQ ID NO: 173213 - DNA, 15 bp, Homo sapiens
gagcttctttgaagt

SEQ ID NO: 173214 - DNA, 15 bp, Homo sapiens
agagcttctttgaag

SEQ ID NO: 173215 - DNA, 15 bp, Homo sapiens
cagagcttctttgaa

SEQ ID NO: 173216 - DNA, 15 bp, Homo sapiens
ccagagcttctttga

SEQ ID NO: 173217 - DNA, 15 bp, Homo sapiens
tccagagcttctttg

SEQ ID NO: 173218 - DNA, 15 bp, Homo sapiens
ttccagagcttcttt

SEQ ID NO: 173219 - DNA, 15 bp, Homo sapiens
tttccagagcttctt

SEQ ID NO: 173220 - DNA, 15 bp, Homo sapiens
ctttccagagcttct

SEQ ID NO: 173221 - DNA, 15 bp, Homo sapiens
gctttccagagcttc

SEQ ID NO: 173222 - DNA, 15 bp, Homo sapiens
tgctttccagagctt

SEQ ID NO: 173223 - DNA, 15 bp, Homo sapiens
ttgctttccagagct

SEQ ID NO: 173224 - DNA, 15 bp, Homo sapiens
tttgctttccagagc

SEQ ID NO: 173225 - DNA, 15 bp, Homo sapiens
atttgctttccagag

SEQ ID NO: 173226 - DNA, 15 bp, Homo sapiens
catttgctttccaga

SEQ ID NO: 173227 - DNA, 15 bp, Homo sapiens
acatttgctttccag

SEQ ID NO: 173228 - DNA, 15 bp, Homo sapiens
tacatttgctttcca

SEQ ID NO: 173229 - DNA, 15 bp, Homo sapiens
atacatttgctttcc

SEQ ID NO: 173230 - DNA, 15 bp, Homo sapiens
catacatttgctttc

SEQ ID NO: 173231 - DNA, 15 bp, Homo sapiens
ccatacatttgcttt

SEQ ID NO: 173232 - DNA, 15 bp, Homo sapiens
cccatacatttgctt

SEQ ID NO: 173233 - DNA, 15 bp, Homo sapiens
tcccatacatttgct

SEQ ID NO: 173234 - DNA, 15 bp, Homo sapiens
ttcccatacatttgc

SEQ ID NO: 173235 - DNA, 15 bp, Homo sapiens
gttcccatacatttg

SEQ ID NO: 173236 - DNA, 15 bp, Homo sapiens
tgttcccatacattt

SEQ ID NO: 173237 - DNA, 15 bp, Homo sapiens
atgttcccatacatt

SEQ ID NO: 173238 - DNA, 15 bp, Homo sapiens
gatgttcccatacat

SEQ ID NO: 173239 - DNA, 15 bp, Homo sapiens
tgatgttcccataca

SEQ ID NO: 173240 - DNA, 15 bp, Homo sapiens
gtgatgttcccatac

SEQ ID NO: 173241 - DNA, 15 bp, Homo sapiens
ggtgatgttcccata

SEQ ID NO: 173242 - DNA, 15 bp, Homo sapiens
gggtgatgttcccat

SEQ ID NO: 173243 - DNA, 15 bp, Homo sapiens
tgggtgatgttccca

SEQ ID NO: 173244 - DNA, 15 bp, Homo sapiens
ctgggtgatgttccc

SEQ ID NO: 173245 - DNA, 15 bp, Homo sapiens
tctgggtgatgttcc

SEQ ID NO: 173246 - DNA, 15 bp, Homo sapiens
ttctgggtgatgttc

SEQ ID NO: 173247 - DNA, 15 bp, Homo sapiens
cttctgggtgatgtt

SEQ ID NO: 173248 - DNA, 15 bp, Homo sapiens
tcttctgggtgatgt

SEQ ID NO: 173249 - DNA, 15 bp, Homo sapiens
ctcttctgggtgatg

SEQ ID NO: 173250 - DNA, 15 bp, Homo sapiens
gctcttctgggtgat

SEQ ID NO: 173251 - DNA, 15 bp, Homo sapiens
tgctcttctgggtga

SEQ ID NO: 173252 - DNA, 15 bp, Homo sapiens
ctgctcttctgggtg

SEQ ID NO: 173253 - DNA, 15 bp, Homo sapiens
actgctcttctgggt

SEQ ID NO: 173254 - DNA, 15 bp, Homo sapiens
gactgctcttctggg

SEQ ID NO: 173255 - DNA, 15 bp, Homo sapiens
ggactgctcttctgg

SEQ ID NO: 173256 - DNA, 15 bp, Homo sapiens
tggactgctcttctg

SEQ ID NO: 173257 - DNA, 15 bp, Homo sapiens
ctggactgctcttct

SEQ ID NO: 173258 - DNA, 15 bp, Homo sapiens
tctggactgctcttc

SEQ ID NO: 173259 - DNA, 15 bp, Homo sapiens
gtctggactgctctt

SEQ ID NO: 173260 - DNA, 15 bp, Homo sapiens
ggtctggactgctct

SEQ ID NO: 173261 - DNA, 15 bp, Homo sapiens
gggtctggactgctc

SEQ ID NO: 173262 - DNA, 15 bp, Homo sapiens
ggggtctggactgct

SEQ ID NO: 173263 - DNA, 15 bp, Homo sapiens
gggggtctggactgc

SEQ ID NO: 173264 - DNA, 15 bp, Homo sapiens
ggggggtctggactg

SEQ ID NO: 173265 - DNA, 15 bp, Homo sapiens
tggggggtctggact

SEQ ID NO: 173266 - DNA, 15 bp, Homo sapiens
ctggggggtctggac

SEQ ID NO: 173267 - DNA, 15 bp, Homo sapiens
cctggggggtctgga

SEQ ID NO: 173268 - DNA, 15 bp, Homo sapiens
tcctggggggtctgg

SEQ ID NO: 173269 - DNA, 15 bp, Homo sapiens
gtcctggggggtctg

SEQ ID NO: 173270 - DNA, 15 bp, Homo sapiens
agtcctggggggtct

SEQ ID NO: 173271 - DNA, 15 bp, Homo sapiens
tagtcctggggggtc

SEQ ID NO: 173272 - DNA, 15 bp, Homo sapiens
ctagtcctggggggt

SEQ ID NO: 173273 - DNA, 15 bp, Homo sapiens
gctagtcctgggggg

SEQ ID NO: 173274 - DNA, 15 bp, Homo sapiens
agctagtcctggggg

SEQ ID NO: 173275 - DNA, 15 bp, Homo sapiens
aagctagtcctgggg

SEQ ID NO: 173276 - DNA, 15 bp, Homo sapiens
caagctagtcctggg

SEQ ID NO: 173277 - DNA, 15 bp, Homo sapiens
ccaagctagtcctgg

SEQ ID NO: 173278 - DNA, 15 bp, Homo sapiens
gccaagctagtcctg

SEQ ID NO: 173279 - DNA, 15 bp, Homo sapiens
tgccaagctagtcct

SEQ ID NO: 173280 - DNA, 15 bp, Homo sapiens
ctgccaagctagtcc

SEQ ID NO: 173281 - DNA, 15 bp, Homo sapiens
cctgccaagctagtc

SEQ ID NO: 173282 - DNA, 15 bp, Homo sapiens
acctgccaagctagt

SEQ ID NO: 173283 - DNA, 15 bp, Homo sapiens
aacctgccaagctag

SEQ ID NO: 173284 - DNA, 15 bp, Homo sapiens
gaacctgccaagcta

SEQ ID NO: 173285 - DNA, 15 bp, Homo sapiens
ggaacctgccaagct

SEQ ID NO: 173286 - DNA, 15 bp, Homo sapiens
tggaacctgccaagc

SEQ ID NO: 173287 - DNA, 15 bp, Homo sapiens
ctggaacctgccaag

SEQ ID NO: 173288 - DNA, 15 bp, Homo sapiens
gctggaacctgccaa

SEQ ID NO: 173289 - DNA, 15 bp, Homo sapiens
agctggaacctgcca

SEQ ID NO: 173290 - DNA, 15 bp, Homo sapiens
tagctggaacctgcc

SEQ ID NO: 173291 - DNA, 15 bp, Homo sapiens
ctagctggaacctgc

SEQ ID NO: 173292 - DNA, 15 bp, Homo sapiens
cctagctggaacctg

SEQ ID NO: 173293 - DNA, 15 bp, Homo sapiens
gcctagctggaacct

SEQ ID NO: 173294 - DNA, 15 bp, Homo sapiens
ggcctagctggaacc

SEQ ID NO: 173295 - DNA, 15 bp, Homo sapiens
aggcctagctggaac

SEQ ID NO: 173296 - DNA, 15 bp, Homo sapiens
gaggcctagctggaa

SEQ ID NO: 173297 - DNA, 15 bp, Homo sapiens
agaggcctagctgga

SEQ ID NO: 173298 - DNA, 15 bp, Homo sapiens
gagaggcctagctgg

SEQ ID NO: 173299 - DNA, 15 bp, Homo sapiens
ggagaggcctagctg

SEQ ID NO: 173300 - DNA, 15 bp, Homo sapiens
tggagaggcctagct

SEQ ID NO: 173301 - DNA, 15 bp, Homo sapiens
ctggagaggcctagc

SEQ ID NO: 173302 - DNA, 15 bp, Homo sapiens
cctggagaggcctag

SEQ ID NO: 173303 - DNA, 15 bp, Homo sapiens
ccctggagaggccta

SEQ ID NO: 173304 - DNA, 15 bp, Homo sapiens
tccctggagaggcct

SEQ ID NO: 173305 - DNA, 15 bp, Homo sapiens
gtccctggagaggcc

SEQ ID NO: 173306 - DNA, 15 bp, Homo sapiens
ggtccctggagaggc

SEQ ID NO: 173307 - DNA, 15 bp, Homo sapiens
tggtccctggagagg

SEQ ID NO: 173308 - DNA, 15 bp, Homo sapiens
ctggtccctggagag

SEQ ID NO: 173309 - DNA, 15 bp, Homo sapiens
tctggtccctggaga

SEQ ID NO: 173310 - DNA, 15 bp, Homo sapiens
ttctggtccctggag

SEQ ID NO: 173311 - DNA, 15 bp, Homo sapiens
attctggtccctgga

SEQ ID NO: 173312 - DNA, 15 bp, Homo sapiens
gattctggtccctgg

SEQ ID NO: 173313 - DNA, 15 bp, Homo sapiens
tgattctggtccctg

SEQ ID NO: 173314 - DNA, 15 bp, Homo sapiens
gtgattctggtccct

SEQ ID NO: 173315 - DNA, 15 bp, Homo sapiens
agtgattctggtccc

SEQ ID NO: 173316 - DNA, 15 bp, Homo sapiens
cagtgattctggtcc

SEQ ID NO: 173317 - DNA, 15 bp, Homo sapiens
ccagtgattctggtc

SEQ ID NO: 173318 - DNA, 15 bp, Homo sapiens
gccagtgattctggt

SEQ ID NO: 173319 - DNA, 15 bp, Homo sapiens
ggccagtgattctgg

SEQ ID NO: 173320 - DNA, 15 bp, Homo sapiens
tggccagtgattctg

SEQ ID NO: 173321 - DNA, 15 bp, Homo sapiens
gtggccagtgattct

SEQ ID NO: 173322 - DNA, 15 bp, Homo sapiens
ggtggccagtgattc

SEQ ID NO: 173323 - DNA, 15 bp, Homo sapiens
tggtggccagtgatt

SEQ ID NO: 173324 - DNA, 15 bp, Homo sapiens
gtggtggccagtgat

SEQ ID NO: 173325 - DNA, 15 bp, Homo sapiens
ggtggtggccagtga

SEQ ID NO: 173326 - DNA, 15 bp, Homo sapiens
cggtggtggccagtg

SEQ ID NO: 173327 - DNA, 15 bp, Homo sapiens
ccggtggtggccagt

SEQ ID NO: 173328 - DNA, 15 bp, Homo sapiens
cccggtggtggccag

SEQ ID NO: 173329 - DNA, 15 bp, Homo sapiens
tcccggtggtggcca

SEQ ID NO: 173330 - DNA, 15 bp, Homo sapiens
ctcccggtggtggcc

SEQ ID NO: 173331 - DNA, 15 bp, Homo sapiens
gctcccggtggtggc

SEQ ID NO: 173332 - DNA, 15 bp, Homo sapiens
ggctcccggtggtgg

SEQ ID NO: 173333 - DNA, 15 bp, Homo sapiens
tggctcccggtggtg

SEQ ID NO: 173334 - DNA, 15 bp, Homo sapiens
gtggctcccggtggt

SEQ ID NO: 173335 - DNA, 15 bp, Homo sapiens
tgtggctcccggtgg

SEQ ID NO: 173336 - DNA, 15 bp, Homo sapiens
ctgtggctcccggtg

SEQ ID NO: 173337 - DNA, 15 bp, Homo sapiens
gctgtggctcccggt

SEQ ID NO: 173338 - DNA, 15 bp, Homo sapiens
tgctgtggctcccgg

SEQ ID NO: 173339 - DNA, 15 bp, Homo sapiens
atgctgtggctcccg

SEQ ID NO: 173340 - DNA, 15 bp, Homo sapiens
aatgctgtggctccc

SEQ ID NO: 173341 - DNA, 15 bp, Homo sapiens
caatgctgtggctcc

SEQ ID NO: 173342 - DNA, 15 bp, Homo sapiens
gcaatgctgtggctc

SEQ ID NO: 173343 - DNA, 15 bp, Homo sapiens
ggcaatgctgtggct

SEQ ID NO: 173344 - DNA, 15 bp, Homo sapiens
tggcaatgctgtggc

SEQ ID NO: 173345 - DNA, 15 bp, Homo sapiens
gtggcaatgctgtgg

SEQ ID NO: 173346 - DNA, 15 bp, Homo sapiens
tgtggcaatgctgtg

SEQ ID NO: 173347 - DNA, 15 bp, Homo sapiens
ttgtggcaatgctgt

SEQ ID NO: 173348 - DNA, 15 bp, Homo sapiens
tttgtggcaatgctg

SEQ ID NO: 173349 - DNA, 15 bp, Homo sapiens
gtttgtggcaatgct

SEQ ID NO: 173350 - DNA, 15 bp, Homo sapiens
ggtttgtggcaatgc

SEQ ID NO: 173351 - DNA, 15 bp, Homo sapiens
gggtttgtggcaatg

SEQ ID NO: 173352 - DNA, 15 bp, Homo sapiens
agggtttgtggcaat

SEQ ID NO: 173353 - DNA, 15 bp, Homo sapiens
gagggtttgtggcaa

SEQ ID NO: 173354 - DNA, 15 bp, Homo sapiens
tgagggtttgtggca

SEQ ID NO: 173355 - DNA, 15 bp, Homo sapiens
ttgagggtttgtggc

SEQ ID NO: 173356 - DNA, 15 bp, Homo sapiens
cttgagggtttgtgg

SEQ ID NO: 173357 - DNA, 15 bp, Homo sapiens
ccttgagggtttgtg

SEQ ID NO: 173358 - DNA, 15 bp, Homo sapiens
cccttgagggtttgt

SEQ ID NO: 173359 - DNA, 15 bp, Homo sapiens
tcccttgagggtttg

SEQ ID NO: 173360 - DNA, 15 bp, Homo sapiens
atcccttgagggttt

SEQ ID NO: 173361 - DNA, 15 bp, Homo sapiens
catcccttgagggtt

SEQ ID NO: 173362 - DNA, 15 bp, Homo sapiens
ccatcccttgagggt

SEQ ID NO: 173363 - DNA, 15 bp, Homo sapiens
cccatcccttgaggg

SEQ ID NO: 173364 - DNA, 15 bp, Homo sapiens
ccccatcccttgagg

SEQ ID NO: 173365 - DNA, 15 bp, Homo sapiens
cccccatcccttgag

SEQ ID NO: 173366 - DNA, 15 bp, Homo sapiens
gcccccatcccttga

SEQ ID NO: 173367 - DNA, 15 bp, Homo sapiens
agcccccatcccttg

SEQ ID NO: 173368 - DNA, 15 bp, Homo sapiens
gagcccccatccctt

SEQ ID NO: 173369 - DNA, 15 bp, Homo sapiens
ggagcccccatccct

SEQ ID NO: 173370 - DNA, 15 bp, Homo sapiens
tggagcccccatccc

SEQ ID NO: 173371 - DNA, 15 bp, Homo sapiens
gtggagcccccatcc

SEQ ID NO: 173372 - DNA, 15 bp, Homo sapiens
tgtggagcccccatc

SEQ ID NO: 173373 - DNA, 15 bp, Homo sapiens
ctgtggagcccccat

SEQ ID NO: 173374 - DNA, 15 bp, Homo sapiens
actgtggagccccca

SEQ ID NO: 173375 - DNA, 15 bp, Homo sapiens
cactgtggagccccc

SEQ ID NO: 173376 - DNA, 15 bp, Homo sapiens
acactgtggagcccc

SEQ ID NO: 173377 - DNA, 15 bp, Homo sapiens
aacactgtggagccc

SEQ ID NO: 173378 - DNA, 15 bp, Homo sapiens
taacactgtggagcc

SEQ ID NO: 173379 - DNA, 15 bp, Homo sapiens
gtaacactgtggagc

SEQ ID NO: 173380 - DNA, 15 bp, Homo sapiens
agtaacactgtggag

SEQ ID NO: 173381 - DNA, 15 bp, Homo sapiens
aagtaacactgtgga

SEQ ID NO: 173382 - DNA, 15 bp, Homo sapiens
caagtaacactgtgg

SEQ ID NO: 173383 - DNA, 15 bp, Homo sapiens
ccaagtaacactgtg

SEQ ID NO: 173384 - DNA, 15 bp, Homo sapiens
tccaagtaacactgt

SEQ ID NO: 173385 - DNA, 15 bp, Homo sapiens
atccaagtaacactg

SEQ ID NO: 173386 - DNA, 15 bp, Homo sapiens
aatccaagtaacact

SEQ ID NO: 173387 - DNA, 15 bp, Homo sapiens
aaatccaagtaacac

SEQ ID NO: 173388 - DNA, 15 bp, Homo sapiens
caaatccaagtaaca

SEQ ID NO: 173389 - DNA, 15 bp, Homo sapiens
acaaatccaagtaac

SEQ ID NO: 173390 - DNA, 15 bp, Homo sapiens
gacaaatccaagtaa

SEQ ID NO: 173391 - DNA, 15 bp, Homo sapiens
agacaaatccaagta

SEQ ID NO: 173392 - DNA, 15 bp, Homo sapiens
gagacaaatccaagt

SEQ ID NO: 173393 - DNA, 15 bp, Homo sapiens
agagacaaatccaag

SEQ ID NO: 173394 - DNA, 15 bp, Homo sapiens
aagagacaaatccaa

SEQ ID NO: 173395 - DNA, 15 bp, Homo sapiens
aaagagacaaatcca

SEQ ID NO: 173396 - DNA, 15 bp, Homo sapiens
gaaagagacaaatcc

SEQ ID NO: 173397 - DNA, 15 bp, Homo sapiens
agaaagagacaaatc

SEQ ID NO: 173398 - DNA, 15 bp, Homo sapiens
cagaaagagacaaat

SEQ ID NO: 173399 - DNA, 15 bp, Homo sapiens
gcagaaagagacaaa

SEQ ID NO: 173400 - DNA, 15 bp, Homo sapiens
ggcagaaagagacaa

SEQ ID NO: 173401 - DNA, 15 bp, Homo sapiens
gggcagaaagagaca

SEQ ID NO: 173402 - DNA, 15 bp, Homo sapiens
ggggcagaaagagac

SEQ ID NO: 173403 - DNA, 15 bp, Homo sapiens
tggggcagaaagaga

SEQ ID NO: 173404 - DNA, 15 bp, Homo sapiens
ttggggcagaaagag

SEQ ID NO: 173405 - DNA, 15 bp, Homo sapiens
gttggggcagaaaga

SEQ ID NO: 173406 - DNA, 15 bp, Homo sapiens
tgttggggcagaaag

SEQ ID NO: 173407 - DNA, 15 bp, Homo sapiens
ttgttggggcagaaa

SEQ ID NO: 173408 - DNA, 15 bp, Homo sapiens
attgttggggcagaa

SEQ ID NO: 173409 - DNA, 15 bp, Homo sapiens
gattgttggggcaga

SEQ ID NO: 173410 - DNA, 15 bp, Homo sapiens
agattgttggggcag

SEQ ID NO: 173411 - DNA, 15 bp, Homo sapiens
cagattgttggggca

SEQ ID NO: 173412 - DNA, 15 bp, Homo sapiens
ccagattgttggggc

SEQ ID NO: 173413 - DNA, 15 bp, Homo sapiens
gccagattgttgggg

SEQ ID NO: 173414 - DNA, 15 bp, Homo sapiens
ggccagattgttggg

SEQ ID NO: 173415 - DNA, 15 bp, Homo sapiens
gggccagattgttgg

SEQ ID NO: 173416 - DNA, 15 bp, Homo sapiens
ggggccagattgttg

SEQ ID NO: 173417 - DNA, 15 bp, Homo sapiens
gggggccagattgtt

SEQ ID NO: 173418 - DNA, 15 bp, Homo sapiens
tgggggccagattgt

SEQ ID NO: 173419 - DNA, 15 bp, Homo sapiens
ttgggggccagattg

SEQ ID NO: 173420 - DNA, 15 bp, Homo sapiens
cttgggggccagatt

SEQ ID NO: 173421 - DNA, 15 bp, Homo sapiens
gcttgggggccagat

SEQ ID NO: 173422 - DNA, 15 bp, Homo sapiens
tgcttgggggccaga

SEQ ID NO: 173423 - DNA, 15 bp, Homo sapiens
atgcttgggggccag

SEQ ID NO: 173424 - DNA, 15 bp, Homo sapiens
gatgcttgggggcca

SEQ ID NO: 173425 - DNA, 15 bp, Homo sapiens
tgatgcttgggggcc

SEQ ID NO: 173426 - DNA, 15 bp, Homo sapiens
ctgatgcttgggggc

SEQ ID NO: 173427 - DNA, 15 bp, Homo sapiens
gctgatgcttggggg

SEQ ID NO: 173428 - DNA, 15 bp, Homo sapiens
ggctgatgcttgggg

SEQ ID NO: 173429 - DNA, 15 bp, Homo sapiens
gggctgatgcttggg

SEQ ID NO: 173430 - DNA, 15 bp, Homo sapiens
agggctgatgcttgg

SEQ ID NO: 173431 - DNA, 15 bp, Homo sapiens
gagggctgatgcttg

SEQ ID NO: 173432 - DNA, 15 bp, Homo sapiens
ggagggctgatgctt

SEQ ID NO: 173433 - DNA, 15 bp, Homo sapiens
aggagggctgatgct

SEQ ID NO: 173434 - DNA, 15 bp, Homo sapiens
caggagggctgatgc

SEQ ID NO: 173435 - DNA, 15 bp, Homo sapiens
tcaggagggctgatg

SEQ ID NO: 173436 - DNA, 15 bp, Homo sapiens
ctcaggagggctgat

SEQ ID NO: 173437 - DNA, 15 bp, Homo sapiens
tctcaggagggctga

SEQ ID NO: 173438 - DNA, 15 bp, Homo sapiens
ctctcaggagggctg

SEQ ID NO: 173439 - DNA, 15 bp, Homo sapiens
cctctcaggagggct

SEQ ID NO: 173440 - DNA, 15 bp, Homo sapiens
gcctctcaggagggc

SEQ ID NO: 173441 - DNA, 15 bp, Homo sapiens
agcctctcaggaggg

SEQ ID NO: 173442 - DNA, 15 bp, Homo sapiens
aagcctctcaggagg

SEQ ID NO: 173443 - DNA, 15 bp, Homo sapiens
aaagcctctcaggag

SEQ ID NO: 173444 - DNA, 15 bp, Homo sapiens
aaaagcctctcagga

SEQ ID NO: 173445 - DNA, 15 bp, Homo sapiens
gaaaagcctctcagg

SEQ ID NO: 173446 - DNA, 15 bp, Homo sapiens
ggaaaagcctctcag

SEQ ID NO: 173447 - DNA, 15 bp, Homo sapiens
aggaaaagcctctca

SEQ ID NO: 173448 - DNA, 15 bp, Homo sapiens
caggaaaagcctctc

SEQ ID NO: 173449 - DNA, 15 bp, Homo sapiens
tcaggaaaagcctct

SEQ ID NO: 173450 - DNA, 15 bp, Homo sapiens
atcaggaaaagcctc

SEQ ID NO: 173451 - DNA, 15 bp, Homo sapiens
catcaggaaaagcct

SEQ ID NO: 173452 - DNA, 15 bp, Homo sapiens
ccatcaggaaaagcc

SEQ ID NO: 173453 - DNA, 15 bp, Homo sapiens
cccatcaggaaaagc

SEQ ID NO: 173454 - DNA, 15 bp, Homo sapiens
ccccatcaggaaaag

SEQ ID NO: 173455 - DNA, 15 bp, Homo sapiens
tccccatcaggaaaa

SEQ ID NO: 173456 - DNA, 15 bp, Homo sapiens
ctccccatcaggaaa

SEQ ID NO: 173457 - DNA, 15 bp, Homo sapiens
cctccccatcaggaa

SEQ ID NO: 173458 - DNA, 15 bp, Homo sapiens
gcctccccatcagga

SEQ ID NO: 173459 - DNA, 15 bp, Homo sapiens
ggcctccccatcagg

SEQ ID NO: 173460 - DNA, 15 bp, Homo sapiens
tggcctccccatcag

SEQ ID NO: 173461 - DNA, 15 bp, Homo sapiens
ctggcctccccatca

SEQ ID NO: 173462 - DNA, 15 bp, Homo sapiens
tctggcctccccatc

SEQ ID NO: 173463 - DNA, 15 bp, Homo sapiens
ctctggcctccccat

SEQ ID NO: 173464 - DNA, 15 bp, Homo sapiens
gctctggcctcccca

SEQ ID NO: 173465 - DNA, 15 bp, Homo sapiens
ggctctggcctcccc

SEQ ID NO: 173466 - DNA, 15 bp, Homo sapiens
gggctctggcctccc

SEQ ID NO: 173467 - DNA, 15 bp, Homo sapiens
tgggctctggcctcc

SEQ ID NO: 173468 - DNA, 15 bp, Homo sapiens
ctgggctctggcctc

SEQ ID NO: 173469 - DNA, 15 bp, Homo sapiens
gctgggctctggcct

SEQ ID NO: 173470 - DNA, 15 bp, Homo sapiens
tgctgggctctggcc

SEQ ID NO: 173471 - DNA, 15 bp, Homo sapiens
gtgctgggctctggc

SEQ ID NO: 173472 - DNA, 15 bp, Homo sapiens
tgtgctgggctctgg

SEQ ID NO: 173473 - DNA, 15 bp, Homo sapiens
ttgtgctgggctctg

SEQ ID NO: 173474 - DNA, 15 bp, Homo sapiens
gttgtgctgggctct

SEQ ID NO: 173475 - DNA, 15 bp, Homo sapiens
tgttgtgctgggctc

SEQ ID NO: 173476 - DNA, 15 bp, Homo sapiens
ctgttgtgctgggct

SEQ ID NO: 173477 - DNA, 15 bp, Homo sapiens
cctgttgtgctgggc

SEQ ID NO: 173478 - DNA, 15 bp, Homo sapiens
ccctgttgtgctggg

SEQ ID NO: 173479 - DNA, 15 bp, Homo sapiens
tccctgttgtgctgg

SEQ ID NO: 173480 - DNA, 15 bp, Homo sapiens
atccctgttgtgctg

SEQ ID NO: 173481 - DNA, 15 bp, Homo sapiens
gatccctgttgtgct

SEQ ID NO: 173482 - DNA, 15 bp, Homo sapiens
ggatccctgttgtgc

SEQ ID NO: 173483 - DNA, 15 bp, Homo sapiens
aggatccctgttgtg

SEQ ID NO: 173484 - DNA, 15 bp, Homo sapiens
caggatccctgttgt

SEQ ID NO: 173485 - DNA, 15 bp, Homo sapiens
ccaggatccctgttg

SEQ ID NO: 173486 - DNA, 15 bp, Homo sapiens
gccaggatccctgtt

SEQ ID NO: 173487 - DNA, 15 bp, Homo sapiens
agccaggatccctgt

SEQ ID NO: 173488 - DNA, 15 bp, Homo sapiens
cagccaggatccctg

SEQ ID NO: 173489 - DNA, 15 bp, Homo sapiens
tcagccaggatccct

SEQ ID NO: 173490 - DNA, 15 bp, Homo sapiens
gtcagccaggatccc

SEQ ID NO: 173491 - DNA, 15 bp, Homo sapiens
agtcagccaggatcc

SEQ ID NO: 173492 - DNA, 15 bp, Homo sapiens
cagtcagccaggatc

SEQ ID NO: 173493 - DNA, 15 bp, Homo sapiens
tcagtcagccaggat

SEQ ID NO: 173494 - DNA, 15 bp, Homo sapiens
ctcagtcagccagga

SEQ ID NO: 173495 - DNA, 15 bp, Homo sapiens
gctcagtcagccagg

SEQ ID NO: 173496 - DNA, 15 bp, Homo sapiens
agctcagtcagccag

SEQ ID NO: 173497 - DNA, 15 bp, Homo sapiens
gagctcagtcagcca

SEQ ID NO: 173498 - DNA, 15 bp, Homo sapiens
ggagctcagtcagcc

SEQ ID NO: 173499 - DNA, 15 bp, Homo sapiens
gggagctcagtcagc

SEQ ID NO: 173500 - DNA, 15 bp, Homo sapiens
ggggagctcagtcag

SEQ ID NO: 173501 - DNA, 15 bp, Homo sapiens
aggggagctcagtca

SEQ ID NO: 173502 - DNA, 15 bp, Homo sapiens
caggggagctcagtc

SEQ ID NO: 173503 - DNA, 15 bp, Homo sapiens
ccaggggagctcagt

SEQ ID NO: 173504 - DNA, 15 bp, Homo sapiens
cccaggggagctcag

SEQ ID NO: 173505 - DNA, 15 bp, Homo sapiens
gcccaggggagctca

SEQ ID NO: 173506 - DNA, 15 bp, Homo sapiens
agcccaggggagctc

SEQ ID NO: 173507 - DNA, 15 bp, Homo sapiens
cagcccaggggagct

SEQ ID NO: 173508 - DNA, 15 bp, Homo sapiens
gcagcccaggggagc

SEQ ID NO: 173509 - DNA, 15 bp, Homo sapiens
tgcagcccaggggag

SEQ ID NO: 173510 - DNA, 15 bp, Homo sapiens
gtgcagcccagggga

SEQ ID NO: 173511 - DNA, 15 bp, Homo sapiens
ggtgcagcccagggg

SEQ ID NO: 173512 - DNA, 15 bp, Homo sapiens
gggtgcagcccaggg

SEQ ID NO: 173513 - DNA, 15 bp, Homo sapiens
ggggtgcagcccagg

SEQ ID NO: 173514 - DNA, 15 bp, Homo sapiens
gggggtgcagcccag

SEQ ID NO: 173515 - DNA, 15 bp, Homo sapiens
tgggggtgcagccca

SEQ ID NO: 173516 - DNA, 15 bp, Homo sapiens
atgggggtgcagccc

SEQ ID NO: 173517 - DNA, 15 bp, Homo sapiens
catgggggtgcagcc

SEQ ID NO: 173518 - DNA, 15 bp, Homo sapiens
ccatgggggtgcagc

SEQ ID NO: 173519 - DNA, 15 bp, Homo sapiens
accatgggggtgcag

SEQ ID NO: 173520 - DNA, 15 bp, Homo sapiens
gaccatgggggtgca

SEQ ID NO: 173521 - DNA, 15 bp, Homo sapiens
tgaccatgggggtgc

SEQ ID NO: 173522 - DNA, 15 bp, Homo sapiens
gtgaccatgggggtg

SEQ ID NO: 173523 - DNA, 15 bp, Homo sapiens
agtgaccatgggggt

SEQ ID NO: 173524 - DNA, 15 bp, Homo sapiens
cagtgaccatggggg

SEQ ID NO: 173525 - DNA, 15 bp, Homo sapiens
gcagtgaccatgggg

SEQ ID NO: 173526 - DNA, 15 bp, Homo sapiens
tgcagtgaccatggg

SEQ ID NO: 173527 - DNA, 15 bp, Homo sapiens
ctgcagtgaccatgg

SEQ ID NO: 173528 - DNA, 15 bp, Homo sapiens
actgcagtgaccatg

SEQ ID NO: 173529 - DNA, 15 bp, Homo sapiens
cactgcagtgaccat

SEQ ID NO: 173530 - DNA, 15 bp, Homo sapiens
acactgcagtgacca

SEQ ID NO: 173531 - DNA, 15 bp, Homo sapiens
gacactgcagtgacc

SEQ ID NO: 173532 - DNA, 15 bp, Homo sapiens
agacactgcagtgac

SEQ ID NO: 173533 - DNA, 15 bp, Homo sapiens
gagacactgcagtga

SEQ ID NO: 173534 - DNA, 15 bp, Homo sapiens
agagacactgcagtg

SEQ ID NO: 173535 - DNA, 15 bp, Homo sapiens
gagagacactgcagt

SEQ ID NO: 173536 - DNA, 15 bp, Homo sapiens
agagagacactgcag

SEQ ID NO: 173537 - DNA, 15 bp, Homo sapiens
tagagagacactgca

SEQ ID NO: 173538 - DNA, 15 bp, Homo sapiens
ctagagagacactgc

SEQ ID NO: 173539 - DNA, 15 bp, Homo sapiens
tctagagagacactg

SEQ ID NO: 173540 - DNA, 15 bp, Homo sapiens
atctagagagacact

SEQ ID NO: 173541 - DNA, 15 bp, Homo sapiens
catctagagagacac

SEQ ID NO: 173542 - DNA, 15 bp, Homo sapiens
ccatctagagagaca

SEQ ID NO: 173543 - DNA, 15 bp, Homo sapiens
gccatctagagagac

SEQ ID NO: 173544 - DNA, 15 bp, Homo sapiens
tgccatctagagaga

SEQ ID NO: 173545 - DNA, 15 bp, Homo sapiens
atgccatctagagag

SEQ ID NO: 173546 - DNA, 15 bp, Homo sapiens
gatgccatctagaga

SEQ ID NO: 173547 - DNA, 15 bp, Homo sapiens
tgatgccatctagag

SEQ ID NO: 173548 - DNA, 15 bp, Homo sapiens
ctgatgccatctaga

SEQ ID NO: 173549 - DNA, 15 bp, Homo sapiens
actgatgccatctag

SEQ ID NO: 173550 - DNA, 15 bp, Homo sapiens
aactgatgccatcta

SEQ ID NO: 173551 - DNA, 15 bp, Homo sapiens
caactgatgccatct

SEQ ID NO: 173552 - DNA, 15 bp, Homo sapiens
tcaactgatgccatc

SEQ ID NO: 173553 - DNA, 15 bp, Homo sapiens
ctcaactgatgccat

SEQ ID NO: 173554 - DNA, 15 bp, Homo sapiens
tctcaactgatgcca

SEQ ID NO: 173555 - DNA, 15 bp, Homo sapiens
ttctcaactgatgcc

SEQ ID NO: 173556 - DNA, 15 bp, Homo sapiens
cttctcaactgatgc

SEQ ID NO: 173557 - DNA, 15 bp, Homo sapiens
gcttctcaactgatg

SEQ ID NO: 173558 - DNA, 15 bp, Homo sapiens
ggcttctcaactgat

SEQ ID NO: 173559 - DNA, 15 bp, Homo sapiens
gggcttctcaactga

SEQ ID NO: 173560 - DNA, 15 bp, Homo sapiens
agggcttctcaactg

SEQ ID NO: 173561 - DNA, 15 bp, Homo sapiens
gagggcttctcaact

SEQ ID NO: 173562 - DNA, 15 bp, Homo sapiens
tgagggcttctcaac

SEQ ID NO: 173563 - DNA, 15 bp, Homo sapiens
gtgagggcttctcaa

SEQ ID NO: 173564 - DNA, 15 bp, Homo sapiens
agtgagggcttctca

SEQ ID NO: 173565 - DNA, 15 bp, Homo sapiens
cagtgagggcttctc

SEQ ID NO: 173566 - DNA, 15 bp, Homo sapiens
ccagtgagggcttct

SEQ ID NO: 173567 - DNA, 15 bp, Homo sapiens
gccagtgagggcttc

SEQ ID NO: 173568 - DNA, 15 bp, Homo sapiens
agccagtgagggctt

SEQ ID NO: 173569 - DNA, 15 bp, Homo sapiens
cagccagtgagggct

SEQ ID NO: 173570 - DNA, 15 bp, Homo sapiens
gcagccagtgagggc

SEQ ID NO: 173571 - DNA, 15 bp, Homo sapiens
ggcagccagtgaggg

SEQ ID NO: 173572 - DNA, 15 bp, Homo sapiens
gggcagccagtgagg

SEQ ID NO: 173573 - DNA, 15 bp, Homo sapiens
ggggcagccagtgag

SEQ ID NO: 173574 - DNA, 15 bp, Homo sapiens
aggggcagccagtga

SEQ ID NO: 173575 - DNA, 15 bp, Homo sapiens
aaggggcagccagtg

SEQ ID NO: 173576 - DNA, 15 bp, Homo sapiens
gaaggggcagccagt

SEQ ID NO: 173577 - DNA, 15 bp, Homo sapiens
ggaaggggcagccag

SEQ ID NO: 173578 - DNA, 15 bp, Homo sapiens
aggaaggggcagcca

SEQ ID NO: 173579 - DNA, 15 bp, Homo sapiens
gaggaaggggcagcc

SEQ ID NO: 173580 - DNA, 15 bp, Homo sapiens
ggaggaaggggcagc

SEQ ID NO: 173581 - DNA, 15 bp, Homo sapiens
gggaggaaggggcag

SEQ ID NO: 173582 - DNA, 15 bp, Homo sapiens
agggaggaaggggca

SEQ ID NO: 173583 - DNA, 15 bp, Homo sapiens
cagggaggaaggggc

SEQ ID NO: 173584 - DNA, 15 bp, Homo sapiens
gcagggaggaagggg

SEQ ID NO: 173585 - DNA, 15 bp, Homo sapiens
agcagggaggaaggg

SEQ ID NO: 173586 - DNA, 15 bp, Homo sapiens
cagcagggaggaagg

SEQ ID NO: 173587 - DNA, 15 bp, Homo sapiens
acagcagggaggaag

SEQ ID NO: 173588 - DNA, 15 bp, Homo sapiens
aacagcagggaggaa

SEQ ID NO: 173589 - DNA, 15 bp, Homo sapiens
aaacagcagggagga

SEQ ID NO: 173590 - DNA, 15 bp, Homo sapiens
gaaacagcagggagg

SEQ ID NO: 173591 - DNA, 15 bp, Homo sapiens
ggaaacagcagggag

SEQ ID NO: 173592 - DNA, 15 bp, Homo sapiens
gggaaacagcaggga

SEQ ID NO: 173593 - DNA, 15 bp, Homo sapiens
cgggaaacagcaggg

SEQ ID NO: 173594 - DNA, 15 bp, Homo sapiens
acgggaaacagcagg

SEQ ID NO: 173595 - DNA, 15 bp, Homo sapiens
gacgggaaacagcag

SEQ ID NO: 173596 - DNA, 15 bp, Homo sapiens
agacgggaaacagca

SEQ ID NO: 173597 - DNA, 15 bp, Homo sapiens
gagacgggaaacagc

SEQ ID NO: 173598 - DNA, 15 bp, Homo sapiens
tgagacgggaaacag

SEQ ID NO: 173599 - DNA, 15 bp, Homo sapiens
ctgagacgggaaaca

SEQ ID NO: 173600 - DNA, 15 bp, Homo sapiens
gctgagacgggaaac

SEQ ID NO: 173601 - DNA, 15 bp, Homo sapiens
ggctgagacgggaaa

SEQ ID NO: 173602 - DNA, 15 bp, Homo sapiens
tggctgagacgggaa

SEQ ID NO: 173603 - DNA, 15 bp, Homo sapiens
gtggctgagacggga

SEQ ID NO: 173604 - DNA, 15 bp, Homo sapiens
tgtggctgagacggg

SEQ ID NO: 173605 - DNA, 15 bp, Homo sapiens
atgtggctgagacgg

SEQ ID NO: 173606 - DNA, 15 bp, Homo sapiens
aatgtggctgagacg

SEQ ID NO: 173607 - DNA, 15 bp, Homo sapiens
gaatgtggctgagac

SEQ ID NO: 173608 - DNA, 15 bp, Homo sapiens
ggaatgtggctgaga

SEQ ID NO: 173609 - DNA, 15 bp, Homo sapiens
aggaatgtggctgag

SEQ ID NO: 173610 - DNA, 15 bp, Homo sapiens
aaggaatgtggctga

SEQ ID NO: 173611 - DNA, 15 bp, Homo sapiens
gaaggaatgtggctg

SEQ ID NO: 173612 - DNA, 15 bp, Homo sapiens
ggaaggaatgtggct

SEQ ID NO: 173613 - DNA, 15 bp, Homo sapiens
aggaaggaatgtggc

SEQ ID NO: 173614 - DNA, 15 bp, Homo sapiens
aaggaaggaatgtgg

SEQ ID NO: 173615 - DNA, 15 bp, Homo sapiens
gaaggaaggaatgtg

SEQ ID NO: 173616 - DNA, 15 bp, Homo sapiens
ggaaggaaggaatgt

SEQ ID NO: 173617 - DNA, 15 bp, Homo sapiens
gggaaggaaggaatg

SEQ ID NO: 173618 - DNA, 15 bp, Homo sapiens
agggaaggaaggaat

SEQ ID NO: 173619 - DNA, 15 bp, Homo sapiens
gagggaaggaaggaa

SEQ ID NO: 173620 - DNA, 15 bp, Homo sapiens
ggagggaaggaagga

SEQ ID NO: 173621 - DNA, 15 bp, Homo sapiens
gggagggaaggaagg

SEQ ID NO: 173622 - DNA, 15 bp, Homo sapiens
agggagggaaggaag

SEQ ID NO: 173623 - DNA, 15 bp, Homo sapiens
gagggagggaaggaa

SEQ ID NO: 173624 - DNA, 15 bp, Homo sapiens
ggagggagggaagga

SEQ ID NO: 173625 - DNA, 15 bp, Homo sapiens
aggagggagggaagg

SEQ ID NO: 173626 - DNA, 15 bp, Homo sapiens
gaggagggagggaag

SEQ ID NO: 173627 - DNA, 15 bp, Homo sapiens
ggaggagggagggaa

SEQ ID NO: 173628 - DNA, 15 bp, Homo sapiens
gggaggagggaggga

SEQ ID NO: 173629 - DNA, 15 bp, Homo sapiens
ggggaggagggaggg

SEQ ID NO: 173630 - DNA, 15 bp, Homo sapiens
aggggaggagggagg

SEQ ID NO: 173631 - DNA, 15 bp, Homo sapiens
caggggaggagggag

SEQ ID NO: 173632 - DNA, 15 bp, Homo sapiens
acaggggaggaggga

SEQ ID NO: 173633 - DNA, 15 bp, Homo sapiens
cacaggggaggaggg

SEQ ID NO: 173634 - DNA, 15 bp, Homo sapiens
tcacaggggaggagg

SEQ ID NO: 173635 - DNA, 15 bp, Homo sapiens
ctcacaggggaggag

SEQ ID NO: 173636 - DNA, 15 bp, Homo sapiens
cctcacaggggagga

SEQ ID NO: 173637 - DNA, 15 bp, Homo sapiens
acctcacaggggagg

SEQ ID NO: 173638 - DNA, 15 bp, Homo sapiens
cacctcacaggggag

SEQ ID NO: 173639 - DNA, 15 bp, Homo sapiens
gcacctcacagggga

SEQ ID NO: 173640 - DNA, 15 bp, Homo sapiens
agcacctcacagggg

SEQ ID NO: 173641 - DNA, 15 bp, Homo sapiens
cagcacctcacaggg

SEQ ID NO: 173642 - DNA, 15 bp, Homo sapiens
ccagcacctcacagg

SEQ ID NO: 173643 - DNA, 15 bp, Homo sapiens
cccagcacctcacag

SEQ ID NO: 173644 - DNA, 15 bp, Homo sapiens
ccccagcacctcaca

SEQ ID NO: 173645 - DNA, 15 bp, Homo sapiens
gccccagcacctcac

SEQ ID NO: 173646 - DNA, 15 bp, Homo sapiens
ggccccagcacctca

SEQ ID NO: 173647 - DNA, 15 bp, Homo sapiens
aggccccagcacctc

SEQ ID NO: 173648 - DNA, 15 bp, Homo sapiens
caggccccagcacct

SEQ ID NO: 173649 - DNA, 15 bp, Homo sapiens
ccaggccccagcacc

SEQ ID NO: 173650 - DNA, 15 bp, Homo sapiens
tccaggccccagcac

SEQ ID NO: 173651 - DNA, 15 bp, Homo sapiens
ctccaggccccagca

SEQ ID NO: 173652 - DNA, 15 bp, Homo sapiens
tctccaggccccagc

SEQ ID NO: 173653 - DNA, 15 bp, Homo sapiens
ctctccaggccccag

SEQ ID NO: 173654 - DNA, 15 bp, Homo sapiens
tctctccaggcccca

SEQ ID NO: 173655 - DNA, 15 bp, Homo sapiens
ttctctccaggcccc

SEQ ID NO: 173656 - DNA, 15 bp, Homo sapiens
cttctctccaggccc

SEQ ID NO: 173657 - DNA, 15 bp, Homo sapiens
gcttctctccaggcc

SEQ ID NO: 173658 - DNA, 15 bp, Homo sapiens
ggcttctctccaggc

SEQ ID NO: 173659 - DNA, 15 bp, Homo sapiens
gggcttctctccagg

SEQ ID NO: 173660 - DNA, 15 bp, Homo sapiens
agggcttctctccag

SEQ ID NO: 173661 - DNA, 15 bp, Homo sapiens
gagggcttctctcca

SEQ ID NO: 173662 - DNA, 15 bp, Homo sapiens
tgagggcttctctcc

SEQ ID NO: 173663 - DNA, 15 bp, Homo sapiens
ctgagggcttctctc

SEQ ID NO: 173664 - DNA, 15 bp, Homo sapiens
cctgagggcttctct

SEQ ID NO: 173665 - DNA, 15 bp, Homo sapiens
ccctgagggcttctc

SEQ ID NO: 173666 - DNA, 15 bp, Homo sapiens
tccctgagggcttct

SEQ ID NO: 173667 - DNA, 15 bp, Homo sapiens
ctccctgagggcttc

SEQ ID NO: 173668 - DNA, 15 bp, Homo sapiens
actccctgagggctt

SEQ ID NO: 173669 - DNA, 15 bp, Homo sapiens
aactccctgagggct

SEQ ID NO: 173670 - DNA, 15 bp, Homo sapiens
aaactccctgagggc

SEQ ID NO: 173671 - DNA, 15 bp, Homo sapiens
taaactccctgaggg

SEQ ID NO: 173672 - DNA, 15 bp, Homo sapiens
ctaaactccctgagg

SEQ ID NO: 173673 - DNA, 15 bp, Homo sapiens
tctaaactccctgag

SEQ ID NO: 173674 - DNA, 15 bp, Homo sapiens
ttctaaactccctga

SEQ ID NO: 173675 - DNA, 15 bp, Homo sapiens
cttctaaactccctg

SEQ ID NO: 173676 - DNA, 15 bp, Homo sapiens
ccttctaaactccct

SEQ ID NO: 173677 - DNA, 15 bp, Homo sapiens
cccttctaaactccc

SEQ ID NO: 173678 - DNA, 15 bp, Homo sapiens
acccttctaaactcc

SEQ ID NO: 173679 - DNA, 15 bp, Homo sapiens
gacccttctaaactc

SEQ ID NO: 173680 - DNA, 15 bp, Homo sapiens
agacccttctaaact

SEQ ID NO: 173681 - DNA, 15 bp, Homo sapiens
cagacccttctaaac

SEQ ID NO: 173682 - DNA, 15 bp, Homo sapiens
gcagacccttctaaa

SEQ ID NO: 173683 - DNA, 15 bp, Homo sapiens
agcagacccttctaa

SEQ ID NO: 173684 - DNA, 15 bp, Homo sapiens
cagcagacccttcta

SEQ ID NO: 173685 - DNA, 15 bp, Homo sapiens
acagcagacccttct

SEQ ID NO: 173686 - DNA, 15 bp, Homo sapiens
tacagcagacccttc

SEQ ID NO: 173687 - DNA, 15 bp, Homo sapiens
ctacagcagaccctt

SEQ ID NO: 173688 - DNA, 15 bp, Homo sapiens
tctacagcagaccct

SEQ ID NO: 173689 - DNA, 15 bp, Homo sapiens
gtctacagcagaccc

SEQ ID NO: 173690 - DNA, 15 bp, Homo sapiens
tgtctacagcagacc

SEQ ID NO: 173691 - DNA, 15 bp, Homo sapiens
gtgtctacagcagac

SEQ ID NO: 173692 - DNA, 15 bp, Homo sapiens
ggtgtctacagcaga

SEQ ID NO: 173693 - DNA, 15 bp, Homo sapiens
tggtgtctacagcag

SEQ ID NO: 173694 - DNA, 15 bp, Homo sapiens
ctggtgtctacagca

SEQ ID NO: 173695 - DNA, 15 bp, Homo sapiens
cctggtgtctacagc

SEQ ID NO: 173696 - DNA, 15 bp, Homo sapiens
tcctggtgtctacag

SEQ ID NO: 173697 - DNA, 15 bp, Homo sapiens
ttcctggtgtctaca

SEQ ID NO: 173698 - DNA, 15 bp, Homo sapiens
cttcctggtgtctac

SEQ ID NO: 173699 - DNA, 15 bp, Homo sapiens
ccttcctggtgtcta

SEQ ID NO: 173700 - DNA, 15 bp, Homo sapiens
gccttcctggtgtct

SEQ ID NO: 173701 - DNA, 15 bp, Homo sapiens
agccttcctggtgtc

SEQ ID NO: 173702 - DNA, 15 bp, Homo sapiens
cagccttcctggtgt

SEQ ID NO: 173703 - DNA, 15 bp, Homo sapiens
ccagccttcctggtg

SEQ ID NO: 173704 - DNA, 15 bp, Homo sapiens
cccagccttcctggt

SEQ ID NO: 173705 - DNA, 15 bp, Homo sapiens
ccccagccttcctgg

SEQ ID NO: 173706 - DNA, 15 bp, Homo sapiens
cccccagccttcctg

SEQ ID NO: 173707 - DNA, 15 bp, Homo sapiens
acccccagccttcct

SEQ ID NO: 173708 - DNA, 15 bp, Homo sapiens
aacccccagccttcc

SEQ ID NO: 173709 - DNA, 15 bp, Homo sapiens
caacccccagccttc

SEQ ID NO: 173710 - DNA, 15 bp, Homo sapiens
gcaacccccagcctt

SEQ ID NO: 173711 - DNA, 15 bp, Homo sapiens
ggcaacccccagcct

SEQ ID NO: 173712 - DNA, 15 bp, Homo sapiens
cggcaacccccagcc

SEQ ID NO: 173713 - DNA, 15 bp, Homo sapiens
acggcaacccccagc

SEQ ID NO: 173714 - DNA, 15 bp, Homo sapiens
gacggcaacccccag

SEQ ID NO: 173715 - DNA, 15 bp, Homo sapiens
ggacggcaaccccca

SEQ ID NO: 173716 - DNA, 15 bp, Homo sapiens
gggacggcaaccccc

SEQ ID NO: 173717 - DNA, 15 bp, Homo sapiens
ggggacggcaacccc

SEQ ID NO: 173718 - DNA, 15 bp, Homo sapiens
gggggacggcaaccc

SEQ ID NO: 173719 - DNA, 15 bp, Homo sapiens
agggggacggcaacc

SEQ ID NO: 173720 - DNA, 15 bp, Homo sapiens
aagggggacggcaac

SEQ ID NO: 173721 - DNA, 15 bp, Homo sapiens
gaagggggacggcaa

SEQ ID NO: 173722 - DNA, 15 bp, Homo sapiens
agaagggggacggca

SEQ ID NO: 173723 - DNA, 15 bp, Homo sapiens
gagaagggggacggc

SEQ ID NO: 173724 - DNA, 15 bp, Homo sapiens
tgagaagggggacgg

SEQ ID NO: 173725 - DNA, 15 bp, Homo sapiens
ttgagaagggggacg

SEQ ID NO: 173726 - DNA, 15 bp, Homo sapiens
cttgagaagggggac

SEQ ID NO: 173727 - DNA, 15 bp, Homo sapiens
gcttgagaaggggga

SEQ ID NO: 173728 - DNA, 15 bp, Homo sapiens
tgcttgagaaggggg

SEQ ID NO: 173729 - DNA, 15 bp, Homo sapiens
atgcttgagaagggg

SEQ ID NO: 173730 - DNA, 15 bp, Homo sapiens
gatgcttgagaaggg

SEQ ID NO: 173731 - DNA, 15 bp, Homo sapiens
ggatgcttgagaagg

SEQ ID NO: 173732 - DNA, 15 bp, Homo sapiens
tggatgcttgagaag

SEQ ID NO: 173733 - DNA, 15 bp, Homo sapiens
ttggatgcttgagaa

SEQ ID NO: 173734 - DNA, 15 bp, Homo sapiens
cttggatgcttgaga

SEQ ID NO: 173735 - DNA, 15 bp, Homo sapiens
gcttggatgcttgag

SEQ ID NO: 173736 - DNA, 15 bp, Homo sapiens
agcttggatgcttga

SEQ ID NO: 173737 - DNA, 15 bp, Homo sapiens
cagcttggatgcttg

SEQ ID NO: 173738 - DNA, 15 bp, Homo sapiens
tcagcttggatgctt

SEQ ID NO: 173739 - DNA, 15 bp, Homo sapiens
ttcagcttggatgct

SEQ ID NO: 173740 - DNA, 15 bp, Homo sapiens
tttcagcttggatgc

SEQ ID NO: 173741 - DNA, 15 bp, Homo sapiens
gtttcagcttggatg

SEQ ID NO: 173742 - DNA, 15 bp, Homo sapiens
agtttcagcttggat

SEQ ID NO: 173743 - DNA, 15 bp, Homo sapiens
cagtttcagcttgga

SEQ ID NO: 173744 - DNA, 15 bp, Homo sapiens
ccagtttcagcttgg

SEQ ID NO: 173745 - DNA, 15 bp, Homo sapiens
tccagtttcagcttg

SEQ ID NO: 173746 - DNA, 15 bp, Homo sapiens
gtccagtttcagctt

SEQ ID NO: 173747 - DNA, 15 bp, Homo sapiens
agtccagtttcagct

SEQ ID NO: 173748 - DNA, 15 bp, Homo sapiens
cagtccagtttcagc

SEQ ID NO: 173749 - DNA, 15 bp, Homo sapiens
acagtccagtttcag

SEQ ID NO: 173750 - DNA, 15 bp, Homo sapiens
cacagtccagtttca

SEQ ID NO: 173751 - DNA, 15 bp, Homo sapiens
gcacagtccagtttc

SEQ ID NO: 173752 - DNA, 15 bp, Homo sapiens
cgcacagtccagttt

SEQ ID NO: 173753 - DNA, 15 bp, Homo sapiens
gcgcacagtccagtt

SEQ ID NO: 173754 - DNA, 15 bp, Homo sapiens
agcgcacagtccagt

SEQ ID NO: 173755 - DNA, 15 bp, Homo sapiens
cagcgcacagtccag

SEQ ID NO: 173756 - DNA, 15 bp, Homo sapiens
acagcgcacagtcca

SEQ ID NO: 173757 - DNA, 15 bp, Homo sapiens
tacagcgcacagtcc

SEQ ID NO: 173758 - DNA, 15 bp, Homo sapiens
ttacagcgcacagtc

SEQ ID NO: 173759 - DNA, 15 bp, Homo sapiens
tttacagcgcacagt

SEQ ID NO: 173760 - DNA, 15 bp, Homo sapiens
ctttacagcgcacag

SEQ ID NO: 173761 - DNA, 15 bp, Homo sapiens
tctttacagcgcaca

SEQ ID NO: 173762 - DNA, 15 bp, Homo sapiens
gtctttacagcgcac

SEQ ID NO: 173763 - DNA, 15 bp, Homo sapiens
tgtctttacagcgca

SEQ ID NO: 173764 - DNA, 15 bp, Homo sapiens
ctgtctttacagcgc

SEQ ID NO: 173765 - DNA, 15 bp, Homo sapiens
tctgtctttacagcg

SEQ ID NO: 173766 - DNA, 15 bp, Homo sapiens
ctctgtctttacagc

SEQ ID NO: 173767 - DNA, 15 bp, Homo sapiens
actctgtctttacag

SEQ ID NO: 173768 - DNA, 15 bp, Homo sapiens
gactctgtctttaca

SEQ ID NO: 173769 - DNA, 15 bp, Homo sapiens
agactctgtctttac

SEQ ID NO: 173770 - DNA, 15 bp, Homo sapiens
gagactctgtcttta

SEQ ID NO: 173771 - DNA, 15 bp, Homo sapiens
agagactctgtcttt

SEQ ID NO: 173772 - DNA, 15 bp, Homo sapiens
gagagactctgtctt

SEQ ID NO: 173773 - DNA, 15 bp, Homo sapiens
agagagactctgtct

SEQ ID NO: 173774 - DNA, 15 bp, Homo sapiens
aagagagactctgtc

SEQ ID NO: 173775 - DNA, 15 bp, Homo sapiens
gaagagagactctgt

SEQ ID NO: 173776 - DNA, 15 bp, Homo sapiens
agaagagagactctg

SEQ ID NO: 173777 - DNA, 15 bp, Homo sapiens
gagaagagagactct

SEQ ID NO: 173778 - DNA, 15 bp, Homo sapiens
agagaagagagactc

SEQ ID NO: 173779 - DNA, 15 bp, Homo sapiens
gagagaagagagact

SEQ ID NO: 173780 - DNA, 15 bp, Homo sapiens
agagagaagagagac

SEQ ID NO: 173781 - DNA, 15 bp, Homo sapiens
gagagagaagagaga

SEQ ID NO: 173782 - DNA, 15 bp, Homo sapiens
ggagagagaagagag

SEQ ID NO: 173783 - DNA, 15 bp, Homo sapiens
gggagagagaagaga

SEQ ID NO: 173784 - DNA, 15 bp, Homo sapiens
tgggagagagaagag

SEQ ID NO: 173785 - DNA, 15 bp, Homo sapiens
atgggagagagaaga

SEQ ID NO: 173786 - DNA, 15 bp, Homo sapiens
gatgggagagagaag

SEQ ID NO: 173787 - DNA, 15 bp, Homo sapiens
agatgggagagagaa

SEQ ID NO: 173788 - DNA, 15 bp, Homo sapiens
gagatgggagagaga

SEQ ID NO: 173789 - DNA, 15 bp, Homo sapiens
ggagatgggagagag

SEQ ID NO: 173790 - DNA, 15 bp, Homo sapiens
aggagatgggagaga

SEQ ID NO: 173791 - DNA, 15 bp, Homo sapiens
caggagatgggagag

SEQ ID NO: 173792 - DNA, 15 bp, Homo sapiens
acaggagatgggaga

SEQ ID NO: 173793 - DNA, 15 bp, Homo sapiens
gacaggagatgggag

SEQ ID NO: 173794 - DNA, 15 bp, Homo sapiens
agacaggagatggga

SEQ ID NO: 173795 - DNA, 15 bp, Homo sapiens
gagacaggagatggg

SEQ ID NO: 173796 - DNA, 15 bp, Homo sapiens
ggagacaggagatgg

SEQ ID NO: 173797 - DNA, 15 bp, Homo sapiens
gggagacaggagatg

SEQ ID NO: 173798 - DNA, 15 bp, Homo sapiens
agggagacaggagat

SEQ ID NO: 173799 - DNA, 15 bp, Homo sapiens
cagggagacaggaga

SEQ ID NO: 173800 - DNA, 15 bp, Homo sapiens
acagggagacaggag

SEQ ID NO: 173801 - DNA, 15 bp, Homo sapiens
cacagggagacagga

SEQ ID NO: 173802 - DNA, 15 bp, Homo sapiens
acacagggagacagg

SEQ ID NO: 173803 - DNA, 15 bp, Homo sapiens
aacacagggagacag

SEQ ID NO: 173804 - DNA, 15 bp, Homo sapiens
aaacacagggagaca

SEQ ID NO: 173805 - DNA, 15 bp, Homo sapiens
gaaacacagggagac

SEQ ID NO: 173806 - DNA, 15 bp, Homo sapiens
tgaaacacagggaga

SEQ ID NO: 173807 - DNA, 15 bp, Homo sapiens
gtgaaacacagggag

SEQ ID NO: 173808 - DNA, 15 bp, Homo sapiens
ggtgaaacacaggga

SEQ ID NO: 173809 - DNA, 15 bp, Homo sapiens
gggtgaaacacaggg

SEQ ID NO: 173810 - DNA, 15 bp, Homo sapiens
agggtgaaacacagg

SEQ ID NO: 173811 - DNA, 15 bp, Homo sapiens
gagggtgaaacacag

SEQ ID NO: 173812 - DNA, 15 bp, Homo sapiens
ggagggtgaaacaca

SEQ ID NO: 173813 - DNA, 15 bp, Homo sapiens
gggagggtgaaacac

SEQ ID NO: 173814 - DNA, 15 bp, Homo sapiens
agggagggtgaaaca

SEQ ID NO: 173815 - DNA, 15 bp, Homo sapiens
gagggagggtgaaac

SEQ ID NO: 173816 - DNA, 15 bp, Homo sapiens
agagggagggtgaaa

SEQ ID NO: 173817 - DNA, 15 bp, Homo sapiens
gagagggagggtgaa

SEQ ID NO: 173818 - DNA, 15 bp, Homo sapiens
tgagagggagggtga

SEQ ID NO: 173819 - DNA, 15 bp, Homo sapiens
atgagagggagggtg

SEQ ID NO: 173820 - DNA, 15 bp, Homo sapiens
aatgagagggagggt

SEQ ID NO: 173821 - DNA, 15 bp, Homo sapiens
gaatgagagggaggg

SEQ ID NO: 173822 - DNA, 15 bp, Homo sapiens
agaatgagagggagg

SEQ ID NO: 173823 - DNA, 15 bp, Homo sapiens
gagaatgagagggag

SEQ ID NO: 173824 - DNA, 15 bp, Homo sapiens
agagaatgagaggga

SEQ ID NO: 173825 - DNA, 15 bp, Homo sapiens
aagagaatgagaggg

SEQ ID NO: 173826 - DNA, 15 bp, Homo sapiens
gaagagaatgagagg

SEQ ID NO: 173827 - DNA, 15 bp, Homo sapiens
ggaagagaatgagag

SEQ ID NO: 173828 - DNA, 15 bp, Homo sapiens
cggaagagaatgaga

SEQ ID NO: 173829 - DNA, 15 bp, Homo sapiens
acggaagagaatgag

SEQ ID NO: 173830 - DNA, 15 bp, Homo sapiens
aacggaagagaatga

SEQ ID NO: 173831 - DNA, 15 bp, Homo sapiens
taacggaagagaatg

SEQ ID NO: 173832 - DNA, 15 bp, Homo sapiens
ttaacggaagagaat

SEQ ID NO: 173833 - DNA, 15 bp, Homo sapiens
tttaacggaagagaa

SEQ ID NO: 173834 - DNA, 15 bp, Homo sapiens
atttaacggaagaga

SEQ ID NO: 173835 - DNA, 15 bp, Homo sapiens
tatttaacggaagag

SEQ ID NO: 173836 - DNA, 15 bp, Homo sapiens
ttatttaacggaaga

SEQ ID NO: 173837 - DNA, 15 bp, Homo sapiens
attatttaacggaag

SEQ ID NO: 173838 - DNA, 15 bp, Homo sapiens
tattatttaacggaa

SEQ ID NO: 173839 - DNA, 15 bp, Homo sapiens
gtattatttaacgga

SEQ ID NO: 173840 - DNA, 15 bp, Homo sapiens
agtattatttaacgg

SEQ ID NO: 173841 - DNA, 15 bp, Homo sapiens
cagtattatttaacg

SEQ ID NO: 173842 - DNA, 15 bp, Homo sapiens
acagtattatttaac

SEQ ID NO: 173843 - DNA, 15 bp, Homo sapiens
cacagtattatttaa

SEQ ID NO: 173844 - DNA, 15 bp, Homo sapiens
tcacagtattattta

SEQ ID NO: 173845 - DNA, 15 bp, Homo sapiens
atcacagtattattt

SEQ ID NO: 173846 - DNA, 15 bp, Homo sapiens
catcacagtattatt

SEQ ID NO: 173847 - DNA, 15 bp, Homo sapiens
ccatcacagtattat

SEQ ID NO: 173848 - DNA, 15 bp, Homo sapiens
tccatcacagtatta

SEQ ID NO: 173849 - DNA, 15 bp, Homo sapiens
atccatcacagtatt

SEQ ID NO: 173850 - DNA, 15 bp, Homo sapiens
aatccatcacagtat

SEQ ID NO: 173851 - DNA, 15 bp, Homo sapiens
caatccatcacagta

SEQ ID NO: 173852 - DNA, 15 bp, Homo sapiens
acaatccatcacagt

SEQ ID NO: 173853 - DNA, 15 bp, Homo sapiens
tacaatccatcacag

SEQ ID NO: 173854 - DNA, 15 bp, Homo sapiens
ttacaatccatcaca

SEQ ID NO: 173855 - DNA, 15 bp, Homo sapiens
tttacaatccatcac

SEQ ID NO: 173856 - DNA, 15 bp, Homo sapiens
ttttacaatccatca

SEQ ID NO: 173857 - DNA, 15 bp, Homo sapiens
cttttacaatccatc

SEQ ID NO: 173858 - DNA, 15 bp, Homo sapiens
ccttttacaatccat

SEQ ID NO: 173859 - DNA, 15 bp, Homo sapiens
accttttacaatcca

SEQ ID NO: 173860 - DNA, 15 bp, Homo sapiens
taccttttacaatcc

SEQ ID NO: 173861 - DNA, 15 bp, Homo sapiens
gtaccttttacaatc

SEQ ID NO: 173862 - DNA, 15 bp, Homo sapiens
agtaccttttacaat

SEQ ID NO: 173863 - DNA, 15 bp, Homo sapiens
aagtaccttttacaa

SEQ ID NO: 173864 - DNA, 15 bp, Homo sapiens
taagtaccttttaca

SEQ ID NO: 173865 - DNA, 15 bp, Homo sapiens
ctaagtaccttttac

SEQ ID NO: 173866 - DNA, 15 bp, Homo sapiens
gctaagtacctttta

SEQ ID NO: 173867 - DNA, 15 bp, Homo sapiens
agctaagtacctttt

SEQ ID NO: 173868 - DNA, 15 bp, Homo sapiens
cagctaagtaccttt

SEQ ID NO: 173869 - DNA, 15 bp, Homo sapiens
tcagctaagtacctt

SEQ ID NO: 173870 - DNA, 15 bp, Homo sapiens
ttcagctaagtacct

SEQ ID NO: 173871 - DNA, 15 bp, Homo sapiens
attcagctaagtacc

SEQ ID NO: 173872 - DNA, 15 bp, Homo sapiens
gattcagctaagtac

SEQ ID NO: 173873 - DNA, 15 bp, Homo sapiens
tgattcagctaagta

SEQ ID NO: 173874 - DNA, 15 bp, Homo sapiens
gtgattcagctaagt

SEQ ID NO: 173875 - DNA, 15 bp, Homo sapiens
tgtgattcagctaag

SEQ ID NO: 173876 - DNA, 15 bp, Homo sapiens
ctgtgattcagctaa

SEQ ID NO: 173877 - DNA, 15 bp, Homo sapiens
tctgtgattcagcta

SEQ ID NO: 173878 - DNA, 15 bp, Homo sapiens
ctctgtgattcagct

SEQ ID NO: 173879 - DNA, 15 bp, Homo sapiens
actctgtgattcagc

SEQ ID NO: 173880 - DNA, 15 bp, Homo sapiens
aactctgtgattcag

SEQ ID NO: 173881 - DNA, 15 bp, Homo sapiens
aaactctgtgattca

SEQ ID NO: 173882 - DNA, 15 bp, Homo sapiens
taaactctgtgattc

SEQ ID NO: 173883 - DNA, 15 bp, Homo sapiens
ctaaactctgtgatt

SEQ ID NO: 173884 - DNA, 15 bp, Homo sapiens
tctaaactctgtgat

SEQ ID NO: 173885 - DNA, 15 bp, Homo sapiens
ctctaaactctgtga

SEQ ID NO: 173886 - DNA, 15 bp, Homo sapiens
tctctaaactctgtg

SEQ ID NO: 173887 - DNA, 15 bp, Homo sapiens
atctctaaactctgt

SEQ ID NO: 173888 - DNA, 15 bp, Homo sapiens
catctctaaactctg

SEQ ID NO: 173889 - DNA, 15 bp, Homo sapiens
ccatctctaaactct

SEQ ID NO: 173890 - DNA, 15 bp, Homo sapiens
tccatctctaaactc

SEQ ID NO: 173891 - DNA, 15 bp, Homo sapiens
ttccatctctaaact

SEQ ID NO: 173892 - DNA, 15 bp, Homo sapiens
tttccatctctaaac

SEQ ID NO: 173893 - DNA, 15 bp, Homo sapiens
ttttccatctctaaa

SEQ ID NO: 173894 - DNA, 15 bp, Homo sapiens
cttttccatctctaa

SEQ ID NO: 173895 - DNA, 15 bp, Homo sapiens
tcttttccatctcta

SEQ ID NO: 173896 - DNA, 15 bp, Homo sapiens
gtcttttccatctct

SEQ ID NO: 173897 - DNA, 15 bp, Homo sapiens
ggtcttttccatctc

SEQ ID NO: 173898 - DNA, 15 bp, Homo sapiens
tggtcttttccatct

SEQ ID NO: 173899 - DNA, 15 bp, Homo sapiens
ttggtcttttccatc

SEQ ID NO: 173900 - DNA, 15 bp, Homo sapiens
attggtcttttccat

SEQ ID NO: 173901 - DNA, 15 bp, Homo sapiens
aattggtcttttcca

SEQ ID NO: 173902 - DNA, 15 bp, Homo sapiens
taattggtcttttcc

SEQ ID NO: 173903 - DNA, 15 bp, Homo sapiens
ctaattggtcttttc

SEQ ID NO: 173904 - DNA, 15 bp, Homo sapiens
cctaattggtctttt

SEQ ID NO: 173905 - DNA, 15 bp, Homo sapiens
acctaattggtcttt

SEQ ID NO: 173906 - DNA, 15 bp, Homo sapiens
gacctaattggtctt

SEQ ID NO: 173907 - DNA, 15 bp, Homo sapiens
tgacctaattggtct

SEQ ID NO: 173908 - DNA, 15 bp, Homo sapiens
atgacctaattggtc

SEQ ID NO: 173909 - DNA, 15 bp, Homo sapiens
gatgacctaattggt

SEQ ID NO: 173910 - DNA, 15 bp, Homo sapiens
tgatgacctaattgg

SEQ ID NO: 173911 - DNA, 15 bp, Homo sapiens
ttgatgacctaattg

SEQ ID NO: 173912 - DNA, 15 bp, Homo sapiens
cttgatgacctaatt

SEQ ID NO: 173913 - DNA, 15 bp, Homo sapiens
gcttgatgacctaat

SEQ ID NO: 173914 - DNA, 15 bp, Homo sapiens
agcttgatgacctaa

SEQ ID NO: 173915 - DNA, 15 bp, Homo sapiens
cagcttgatgaccta

SEQ ID NO: 173916 - DNA, 15 bp, Homo sapiens
tcagcttgatgacct

SEQ ID NO: 173917 - DNA, 15 bp, Homo sapiens
atcagcttgatgacc

SEQ ID NO: 173918 - DNA, 15 bp, Homo sapiens
gatcagcttgatgac

SEQ ID NO: 173919 - DNA, 15 bp, Homo sapiens
agatcagcttgatga

SEQ ID NO: 173920 - DNA, 15 bp, Homo sapiens
gagatcagcttgatg

SEQ ID NO: 173921 - DNA, 15 bp, Homo sapiens
agagatcagcttgat

SEQ ID NO: 173922 - DNA, 15 bp, Homo sapiens
gagagatcagcttga

SEQ ID NO: 173923 - DNA, 15 bp, Homo sapiens
agagagatcagcttg

SEQ ID NO: 173924 - DNA, 15 bp, Homo sapiens
gagagagatcagctt

SEQ ID NO: 173925 - DNA, 15 bp, Homo sapiens
ggagagagatcagct

SEQ ID NO: 173926 - DNA, 15 bp, Homo sapiens
aggagagagatcagc

SEQ ID NO: 173927 - DNA, 15 bp, Homo sapiens
caggagagagatcag

SEQ ID NO: 173928 - DNA, 15 bp, Homo sapiens
tcaggagagagatca

SEQ ID NO: 173929 - DNA, 15 bp, Homo sapiens
ctcaggagagagatc

SEQ ID NO: 173930 - DNA, 15 bp, Homo sapiens
cctcaggagagagat

SEQ ID NO: 173931 - DNA, 15 bp, Homo sapiens
tcctcaggagagaga

SEQ ID NO: 173932 - DNA, 15 bp, Homo sapiens
ctcctcaggagagag

SEQ ID NO: 173933 - DNA, 15 bp, Homo sapiens
gctcctcaggagaga

SEQ ID NO: 173934 - DNA, 15 bp, Homo sapiens
agctcctcaggagag

SEQ ID NO: 173935 - DNA, 15 bp, Homo sapiens
cagctcctcaggaga

SEQ ID NO: 173936 - DNA, 15 bp, Homo sapiens
gcagctcctcaggag

SEQ ID NO: 173937 - DNA, 15 bp, Homo sapiens
tgcagctcctcagga

SEQ ID NO: 173938 - DNA, 15 bp, Homo sapiens
ctgcagctcctcagg

SEQ ID NO: 173939 - DNA, 15 bp, Homo sapiens
tctgcagctcctcag

SEQ ID NO: 173940 - DNA, 15 bp, Homo sapiens
ttctgcagctcctca

SEQ ID NO: 173941 - DNA, 15 bp, Homo sapiens
tttctgcagctcctc

SEQ ID NO: 173942 - DNA, 15 bp, Homo sapiens
ttttctgcagctcct

SEQ ID NO: 173943 - DNA, 15 bp, Homo sapiens
attttctgcagctcc

SEQ ID NO: 173944 - DNA, 15 bp, Homo sapiens
tattttctgcagctc

SEQ ID NO: 173945 - DNA, 15 bp, Homo sapiens
ctattttctgcagct

SEQ ID NO: 173946 - DNA, 15 bp, Homo sapiens
cctattttctgcagc

SEQ ID NO: 173947 - DNA, 15 bp, Homo sapiens
tcctattttctgcag

SEQ ID NO: 173948 - DNA, 15 bp, Homo sapiens
ctcctattttctgca

SEQ ID NO: 173949 - DNA, 15 bp, Homo sapiens
tctcctattttctgc

SEQ ID NO: 173950 - DNA, 15 bp, Homo sapiens
gtctcctattttctg

SEQ ID NO: 173951 - DNA, 15 bp, Homo sapiens
tgtctcctattttct

SEQ ID NO: 173952 - DNA, 15 bp, Homo sapiens
ttgtctcctattttc

SEQ ID NO: 173953 - DNA, 15 bp, Homo sapiens
gttgtctcctatttt

SEQ ID NO: 173954 - DNA, 15 bp, Homo sapiens
tgttgtctcctattt

SEQ ID NO: 173955 - DNA, 15 bp, Homo sapiens
ttgttgtctcctatt

SEQ ID NO: 173956 - DNA, 15 bp, Homo sapiens
attgttgtctcctat

SEQ ID NO: 173957 - DNA, 15 bp, Homo sapiens
tattgttgtctccta

SEQ ID NO: 173958 - DNA, 15 bp, Homo sapiens
ttattgttgtctcct

SEQ ID NO: 173959 - DNA, 15 bp, Homo sapiens
tttattgttgtctcc

SEQ ID NO: 173960 - DNA, 15 bp, Homo sapiens
gtttattgttgtctc

SEQ ID NO: 173961 - DNA, 15 bp, Homo sapiens
tgtttattgttgtct

SEQ ID NO: 173962 - DNA, 15 bp, Homo sapiens
ttgtttattgttgtc

SEQ ID NO: 173963 - DNA, 15 bp, Homo sapiens
attgtttattgttgt

SEQ ID NO: 173964 - DNA, 15 bp, Homo sapiens
aattgtttattgttg

SEQ ID NO: 173965 - DNA, 15 bp, Homo sapiens
aaattgtttattgtt

SEQ ID NO: 173966 - DNA, 15 bp, Homo sapiens
aaaattgtttattgt

SEQ ID NO: 173967 - DNA, 15 bp, Homo sapiens
taaaattgtttattg

SEQ ID NO: 173968 - DNA, 15 bp, Homo sapiens
ataaaattgtttatt

SEQ ID NO: 173969 - DNA, 15 bp, Homo sapiens
aataaaattgtttat

SEQ ID NO: 173970 - DNA, 15 bp, Homo sapiens
caataaaattgttta

SEQ ID NO: 173971 - DNA, 15 bp, Homo sapiens
ccaataaaattgttt

SEQ ID NO: 173972 - DNA, 15 bp, Homo sapiens
cccaataaaattgtt

SEQ ID NO: 173973 - DNA, 15 bp, Homo sapiens
tcccaataaaattgt

SEQ ID NO: 173974 - DNA, 15 bp, Homo sapiens
atcccaataaaattg

SEQ ID NO: 173975 - DNA, 15 bp, Homo sapiens
tatcccaataaaatt

SEQ ID NO: 173976 - DNA, 15 bp, Homo sapiens
atatcccaataaaat

SEQ ID NO: 173977 - DNA, 15 bp, Homo sapiens
aatatcccaataaaa

SEQ ID NO: 173978 - DNA, 15 bp, Homo sapiens
taatatcccaataaa

SEQ ID NO: 173979 - DNA, 15 bp, Homo sapiens
ttaatatcccaataa

SEQ ID NO: 173980 - DNA, 15 bp, Homo sapiens
attaatatcccaata

SEQ ID NO: 173981 - DNA, 15 bp, Homo sapiens
aattaatatcccaat

SEQ ID NO: 173982 - DNA, 15 bp, Homo sapiens
aaattaatatcccaa

SEQ ID NO: 173983 - DNA, 15 bp, Homo sapiens
taaattaatatccca

SEQ ID NO: 173984 - DNA, 15 bp, Homo sapiens
ctaaattaatatccc

SEQ ID NO: 173985 - DNA, 15 bp, Homo sapiens
cctaaattaatatcc

SEQ ID NO: 173986 - DNA, 15 bp, Homo sapiens
tcctaaattaatatc

SEQ ID NO: 173987 - DNA, 15 bp, Homo sapiens
ctcctaaattaatat

SEQ ID NO: 173988 - DNA, 15 bp, Homo sapiens
gctcctaaattaata

SEQ ID NO: 173989 - DNA, 15 bp, Homo sapiens
ggctcctaaattaat

SEQ ID NO: 173990 - DNA, 15 bp, Homo sapiens
gggctcctaaattaa

SEQ ID NO: 173991 - DNA, 15 bp, Homo sapiens
cgggctcctaaatta

SEQ ID NO: 173992 - DNA, 15 bp, Homo sapiens
tcgggctcctaaatt

SEQ ID NO: 173993 - DNA, 15 bp, Homo sapiens
ttcgggctcctaaat

SEQ ID NO: 173994 - DNA, 15 bp, Homo sapiens
cttcgggctcctaaa

SEQ ID NO: 173995 - DNA, 15 bp, Homo sapiens
ccttcgggctcctaa

SEQ ID NO: 173996 - DNA, 15 bp, Homo sapiens
gccttcgggctccta

SEQ ID NO: 173997 - DNA, 15 bp, Homo sapiens
ggccttcgggctcct

SEQ ID NO: 173998 - DNA, 15 bp, Homo sapiens
aggccttcgggctcc

SEQ ID NO: 173999 - DNA, 15 bp, Homo sapiens
aaggccttcgggctc

SEQ ID NO: 174000 - DNA, 15 bp, Homo sapiens
caaggccttcgggct

SEQ ID NO: 174001 - DNA, 15 bp, Homo sapiens
tcaaggccttcgggc

SEQ ID NO: 174002 - DNA, 15 bp, Homo sapiens
gtcaaggccttcggg

SEQ ID NO: 174003 - DNA, 15 bp, Homo sapiens
agtcaaggccttcgg

SEQ ID NO: 174004 - DNA, 15 bp, Homo sapiens
aagtcaaggccttcg

SEQ ID NO: 174005 - DNA, 15 bp, Homo sapiens
caagtcaaggccttc

SEQ ID NO: 174006 - DNA, 15 bp, Homo sapiens
acaagtcaaggcctt

SEQ ID NO: 174007 - DNA, 15 bp, Homo sapiens
cacaagtcaaggcct

SEQ ID NO: 174008 - DNA, 15 bp, Homo sapiens
acacaagtcaaggcc

SEQ ID NO: 174009 - DNA, 15 bp, Homo sapiens
gacacaagtcaaggc

SEQ ID NO: 174010 - DNA, 15 bp, Homo sapiens
agacacaagtcaagg

SEQ ID NO: 174011 - DNA, 15 bp, Homo sapiens
gagacacaagtcaag

SEQ ID NO: 174012 - DNA, 15 bp, Homo sapiens
agagacacaagtcaa

SEQ ID NO: 174013 - DNA, 15 bp, Homo sapiens
aagagacacaagtca

SEQ ID NO: 174014 - DNA, 15 bp, Homo sapiens
taagagacacaagtc

SEQ ID NO: 174015 - DNA, 15 bp, Homo sapiens
ttaagagacacaagt

SEQ ID NO: 174016 - DNA, 15 bp, Homo sapiens
attaagagacacaag

SEQ ID NO: 174017 - DNA, 15 bp, Homo sapiens
tattaagagacacaa

SEQ ID NO: 174018 - DNA, 15 bp, Homo sapiens
atattaagagacaca

SEQ ID NO: 174019 - DNA, 15 bp, Homo sapiens
tatattaagagacac

SEQ ID NO: 174020 - DNA, 15 bp, Homo sapiens
ttatattaagagaca

SEQ ID NO: 174021 - DNA, 15 bp, Homo sapiens
attatattaagagac

SEQ ID NO: 174022 - DNA, 15 bp, Homo sapiens
cattatattaagaga

SEQ ID NO: 174023 - DNA, 15 bp, Homo sapiens
gcattatattaagag

SEQ ID NO: 174024 - DNA, 15 bp, Homo sapiens
tgcattatattaaga

SEQ ID NO: 174025 - DNA, 15 bp, Homo sapiens
ctgcattatattaag

SEQ ID NO: 174026 - DNA, 15 bp, Homo sapiens
actgcattatattaa

SEQ ID NO: 174027 - DNA, 15 bp, Homo sapiens
cactgcattatatta

SEQ ID NO: 174028 - DNA, 15 bp, Homo sapiens
ccactgcattatatt

SEQ ID NO: 174029 - DNA, 15 bp, Homo sapiens
tccactgcattatat

SEQ ID NO: 174030 - DNA, 15 bp, Homo sapiens
atccactgcattata

SEQ ID NO: 174031 - DNA, 15 bp, Homo sapiens
aatccactgcattat

SEQ ID NO: 174032 - DNA, 15 bp, Homo sapiens
aaatccactgcatta

SEQ ID NO: 174033 - DNA, 15 bp, Homo sapiens
gaaatccactgcatt

SEQ ID NO: 174034 - DNA, 15 bp, Homo sapiens
agaaatccactgcat

SEQ ID NO: 174035 - DNA, 15 bp, Homo sapiens
aagaaatccactgca

SEQ ID NO: 174036 - DNA, 15 bp, Homo sapiens
gaagaaatccactgc

SEQ ID NO: 174037 - DNA, 15 bp, Homo sapiens
ggaagaaatccactg

SEQ ID NO: 174038 - DNA, 15 bp, Homo sapiens
gggaagaaatccact

SEQ ID NO: 174039 - DNA, 15 bp, Homo sapiens
agggaagaaatccac

SEQ ID NO: 174040 - DNA, 15 bp, Homo sapiens
aagggaagaaatcca

SEQ ID NO: 174041 - DNA, 15 bp, Homo sapiens
gaagggaagaaatcc

SEQ ID NO: 174042 - DNA, 15 bp, Homo sapiens
ggaagggaagaaatc

SEQ ID NO: 174043 - DNA, 15 bp, Homo sapiens
gggaagggaagaaat

SEQ ID NO: 174044 - DNA, 15 bp, Homo sapiens
ggggaagggaagaaa

SEQ ID NO: 174045 - DNA, 15 bp, Homo sapiens
tggggaagggaagaa

SEQ ID NO: 174046 - DNA, 15 bp, Homo sapiens
gtggggaagggaaga

SEQ ID NO: 174047 - DNA, 15 bp, Homo sapiens
agtggggaagggaag

SEQ ID NO: 174048 - DNA, 15 bp, Homo sapiens
tagtggggaagggaa

SEQ ID NO: 174049 - DNA, 15 bp, Homo sapiens
ttagtggggaaggga

SEQ ID NO: 174050 - DNA, 15 bp, Homo sapiens
attagtggggaaggg

SEQ ID NO: 174051 - DNA, 15 bp, Homo sapiens
cattagtggggaagg

SEQ ID NO: 174052 - DNA, 15 bp, Homo sapiens
acattagtggggaag

SEQ ID NO: 174053 - DNA, 15 bp, Homo sapiens
tacattagtggggaa

SEQ ID NO: 174054 - DNA, 15 bp, Homo sapiens
ttacattagtgggga

SEQ ID NO: 174055 - DNA, 15 bp, Homo sapiens
attacattagtgggg

SEQ ID NO: 174056 - DNA, 15 bp, Homo sapiens
tattacattagtggg

SEQ ID NO: 174057 - DNA, 15 bp, Homo sapiens
ctattacattagtgg

SEQ ID NO: 174058 - DNA, 15 bp, Homo sapiens
actattacattagtg

SEQ ID NO: 174059 - DNA, 15 bp, Homo sapiens
cactattacattagt

SEQ ID NO: 174060 - DNA, 15 bp, Homo sapiens
ccactattacattag

SEQ ID NO: 174061 - DNA, 15 bp, Homo sapiens
cccactattacatta

SEQ ID NO: 174062 - DNA, 15 bp, Homo sapiens
ccccactattacatt

SEQ ID NO: 174063 - DNA, 15 bp, Homo sapiens
gccccactattacat

SEQ ID NO: 174064 - DNA, 15 bp, Homo sapiens
ggccccactattaca

SEQ ID NO: 174065 - DNA, 15 bp, Homo sapiens
tggccccactattac

SEQ ID NO: 174066 - DNA, 15 bp, Homo sapiens
atggccccactatta

SEQ ID NO: 174067 - DNA, 15 bp, Homo sapiens
aatggccccactatt

SEQ ID NO: 174068 - DNA, 15 bp, Homo sapiens
aaatggccccactat

SEQ ID NO: 174069 - DNA, 15 bp, Homo sapiens
aaaatggccccacta

SEQ ID NO: 174070 - DNA, 15 bp, Homo sapiens
caaaatggccccact

SEQ ID NO: 174071 - DNA, 15 bp, Homo sapiens
acaaaatggccccac

SEQ ID NO: 174072 - DNA, 15 bp, Homo sapiens
aacaaaatggcccca

SEQ ID NO: 174073 - DNA, 15 bp, Homo sapiens
taacaaaatggcccc

SEQ ID NO: 174074 - DNA, 15 bp, Homo sapiens
ctaacaaaatggccc

SEQ ID NO: 174075 - DNA, 15 bp, Homo sapiens
gctaacaaaatggcc

SEQ ID NO: 174076 - DNA, 15 bp, Homo sapiens
ggctaacaaaatggc

SEQ ID NO: 174077 - DNA, 15 bp, Homo sapiens
tggctaacaaaatgg

SEQ ID NO: 174078 - DNA, 15 bp, Homo sapiens
atggctaacaaaatg

SEQ ID NO: 174079 - DNA, 15 bp, Homo sapiens
aatggctaacaaaat

SEQ ID NO: 174080 - DNA, 15 bp, Homo sapiens
caatggctaacaaaa

SEQ ID NO: 174081 - DNA, 15 bp, Homo sapiens
ccaatggctaacaaa

SEQ ID NO: 174082 - DNA, 15 bp, Homo sapiens
accaatggctaacaa

SEQ ID NO: 174083 - DNA, 15 bp, Homo sapiens
aaccaatggctaaca

SEQ ID NO: 174084 - DNA, 15 bp, Homo sapiens
aaaccaatggctaac

SEQ ID NO: 174085 - DNA, 15 bp, Homo sapiens
caaaccaatggctaa

SEQ ID NO: 174086 - DNA, 15 bp, Homo sapiens
gcaaaccaatggcta

SEQ ID NO: 174087 - DNA, 15 bp, Homo sapiens
tgcaaaccaatggct

SEQ ID NO: 174088 - DNA, 15 bp, Homo sapiens
atgcaaaccaatggc

SEQ ID NO: 174089 - DNA, 15 bp, Homo sapiens
catgcaaaccaatgg

SEQ ID NO: 174090 - DNA, 15 bp, Homo sapiens
tcatgcaaaccaatg

SEQ ID NO: 174091 - DNA, 15 bp, Homo sapiens
atcatgcaaaccaat

SEQ ID NO: 174092 - DNA, 15 bp, Homo sapiens
catcatgcaaaccaa

SEQ ID NO: 174093 - DNA, 15 bp, Homo sapiens
ccatcatgcaaacca

SEQ ID NO: 174094 - DNA, 15 bp, Homo sapiens
gccatcatgcaaacc

SEQ ID NO: 174095 - DNA, 15 bp, Homo sapiens
agccatcatgcaaac

SEQ ID NO: 174096 - DNA, 15 bp, Homo sapiens
aagccatcatgcaaa

SEQ ID NO: 174097 - DNA, 15 bp, Homo sapiens
aaagccatcatgcaa

SEQ ID NO: 174098 - DNA, 15 bp, Homo sapiens
gaaagccatcatgca

SEQ ID NO: 174099 - DNA, 15 bp, Homo sapiens
cgaaagccatcatgc

SEQ ID NO: 174100 - DNA, 15 bp, Homo sapiens
acgaaagccatcatg

SEQ ID NO: 174101 - DNA, 15 bp, Homo sapiens
aacgaaagccatcat

SEQ ID NO: 174102 - DNA, 15 bp, Homo sapiens
aaacgaaagccatca

SEQ ID NO: 174103 - DNA, 15 bp, Homo sapiens
gaaacgaaagccatc

SEQ ID NO: 174104 - DNA, 15 bp, Homo sapiens
ggaaacgaaagccat

SEQ ID NO: 174105 - DNA, 15 bp, Homo sapiens
gggaaacgaaagcca

SEQ ID NO: 174106 - DNA, 15 bp, Homo sapiens
agggaaacgaaagcc

SEQ ID NO: 174107 - DNA, 15 bp, Homo sapiens
gagggaaacgaaagc

SEQ ID NO: 174108 - DNA, 15 bp, Homo sapiens
ggagggaaacgaaag

SEQ ID NO: 174109 - DNA, 15 bp, Homo sapiens
aggagggaaacgaaa

SEQ ID NO: 174110 - DNA, 15 bp, Homo sapiens
aaggagggaaacgaa

SEQ ID NO: 174111 - DNA, 15 bp, Homo sapiens
aaaggagggaaacga

SEQ ID NO: 174112 - DNA, 15 bp, Homo sapiens
aaaaggagggaaacg

SEQ ID NO: 174113 - DNA, 15 bp, Homo sapiens
gaaaaggagggaaac

SEQ ID NO: 174114 - DNA, 15 bp, Homo sapiens
ggaaaaggagggaaa

SEQ ID NO: 174115 - DNA, 15 bp, Homo sapiens
gggaaaaggagggaa

SEQ ID NO: 174116 - DNA, 15 bp, Homo sapiens
tgggaaaaggaggga

SEQ ID NO: 174117 - DNA, 15 bp, Homo sapiens
atgggaaaaggaggg

SEQ ID NO: 174118 - DNA, 15 bp, Homo sapiens
catgggaaaaggagg

SEQ ID NO: 174119 - DNA, 15 bp, Homo sapiens
ccatgggaaaaggag

SEQ ID NO: 174120 - DNA, 15 bp, Homo sapiens
tccatgggaaaagga

SEQ ID NO: 174121 - DNA, 15 bp, Homo sapiens
ttccatgggaaaagg

SEQ ID NO: 174122 - DNA, 15 bp, Homo sapiens
cttccatgggaaaag

SEQ ID NO: 174123 - DNA, 15 bp, Homo sapiens
ccttccatgggaaaa

SEQ ID NO: 174124 - DNA, 15 bp, Homo sapiens
accttccatgggaaa

SEQ ID NO: 174125 - DNA, 15 bp, Homo sapiens
gaccttccatgggaa

SEQ ID NO: 174126 - DNA, 15 bp, Homo sapiens
ggaccttccatggga

SEQ ID NO: 174127 - DNA, 15 bp, Homo sapiens
tggaccttccatggg

SEQ ID NO: 174128 - DNA, 15 bp, Homo sapiens
ctggaccttccatgg

SEQ ID NO: 174129 - DNA, 15 bp, Homo sapiens
gctggaccttccatg

SEQ ID NO: 174130 - DNA, 15 bp, Homo sapiens
agctggaccttccat

SEQ ID NO: 174131 - DNA, 15 bp, Homo sapiens
cagctggaccttcca

SEQ ID NO: 174132 - DNA, 15 bp, Homo sapiens
ccagctggaccttcc

SEQ ID NO: 174133 - DNA, 15 bp, Homo sapiens
tccagctggaccttc

SEQ ID NO: 174134 - DNA, 15 bp, Homo sapiens
ttccagctggacctt

SEQ ID NO: 174135 - DNA, 15 bp, Homo sapiens
attccagctggacct

SEQ ID NO: 174136 - DNA, 15 bp, Homo sapiens
aattccagctggacc

SEQ ID NO: 174137 - DNA, 15 bp, Homo sapiens
aaattccagctggac

SEQ ID NO: 174138 - DNA, 15 bp, Homo sapiens
gaaattccagctgga

SEQ ID NO: 174139 - DNA, 15 bp, Homo sapiens
cgaaattccagctgg

SEQ ID NO: 174140 - DNA, 15 bp, Homo sapiens
ccgaaattccagctg

SEQ ID NO: 174141 - DNA, 15 bp, Homo sapiens
tccgaaattccagct

SEQ ID NO: 174142 - DNA, 15 bp, Homo sapiens
ttccgaaattccagc

SEQ ID NO: 174143 - DNA, 15 bp, Homo sapiens
cttccgaaattccag

SEQ ID NO: 174144 - DNA, 15 bp, Homo sapiens
tcttccgaaattcca

SEQ ID NO: 174145 - DNA, 15 bp, Homo sapiens
ctcttccgaaattcc

SEQ ID NO: 174146 - DNA, 15 bp, Homo sapiens
gctcttccgaaattc

SEQ ID NO: 174147 - DNA, 15 bp, Homo sapiens
agctcttccgaaatt

SEQ ID NO: 174148 - DNA, 15 bp, Homo sapiens
cagctcttccgaaat

SEQ ID NO: 174149 - DNA, 15 bp, Homo sapiens
ccagctcttccgaaa

SEQ ID NO: 174150 - DNA, 15 bp, Homo sapiens
cccagctcttccgaa

SEQ ID NO: 174151 - DNA, 15 bp, Homo sapiens
tcccagctcttccga

SEQ ID NO: 174152 - DNA, 15 bp, Homo sapiens
ctcccagctcttccg

SEQ ID NO: 174153 - DNA, 15 bp, Homo sapiens
gctcccagctcttcc

SEQ ID NO: 174154 - DNA, 15 bp, Homo sapiens
cgctcccagctcttc

SEQ ID NO: 174155 - DNA, 15 bp, Homo sapiens
gcgctcccagctctt

SEQ ID NO: 174156 - DNA, 15 bp, Homo sapiens
agcgctcccagctct

SEQ ID NO: 174157 - DNA, 15 bp, Homo sapiens
cagcgctcccagctc

SEQ ID NO: 174158 - DNA, 15 bp, Homo sapiens
ccagcgctcccagct

SEQ ID NO: 174159 - DNA, 15 bp, Homo sapiens
gccagcgctcccagc

SEQ ID NO: 174160 - DNA, 15 bp, Homo sapiens
cgccagcgctcccag

SEQ ID NO: 174161 - DNA, 15 bp, Homo sapiens
ccgccagcgctccca

SEQ ID NO: 174162 - DNA, 15 bp, Homo sapiens
gccgccagcgctccc

SEQ ID NO: 174163 - DNA, 15 bp, Homo sapiens
agccgccagcgctcc

SEQ ID NO: 174164 - DNA, 15 bp, Homo sapiens
aagccgccagcgctc

SEQ ID NO: 174165 - DNA, 15 bp, Homo sapiens
caagccgccagcgct

SEQ ID NO: 174166 - DNA, 15 bp, Homo sapiens
tcaagccgccagcgc

SEQ ID NO: 174167 - DNA, 15 bp, Homo sapiens
ctcaagccgccagcg

SEQ ID NO: 174168 - DNA, 15 bp, Homo sapiens
gctcaagccgccagc

SEQ ID NO: 174169 - DNA, 15 bp, Homo sapiens
tgctcaagccgccag

SEQ ID NO: 174170 - DNA, 15 bp, Homo sapiens
gtgctcaagccgcca

SEQ ID NO: 174171 - DNA, 15 bp, Homo sapiens
agtgctcaagccgcc

SEQ ID NO: 174172 - DNA, 15 bp, Homo sapiens
aagtgctcaagccgc

SEQ ID NO: 174173 - DNA, 15 bp, Homo sapiens
caagtgctcaagccg

SEQ ID NO: 174174 - DNA, 15 bp, Homo sapiens
gcaagtgctcaagcc

SEQ ID NO: 174175 - DNA, 15 bp, Homo sapiens
tgcaagtgctcaagc

SEQ ID NO: 174176 - DNA, 15 bp, Homo sapiens
gtgcaagtgctcaag

SEQ ID NO: 174177 - DNA, 15 bp, Homo sapiens
tgtgcaagtgctcaa

SEQ ID NO: 174178 - DNA, 15 bp, Homo sapiens
atgtgcaagtgctca

SEQ ID NO: 174179 - DNA, 15 bp, Homo sapiens
gatgtgcaagtgctc

SEQ ID NO: 174180 - DNA, 15 bp, Homo sapiens
ggatgtgcaagtgct

SEQ ID NO: 174181 - DNA, 15 bp, Homo sapiens
tggatgtgcaagtgc

SEQ ID NO: 174182 - DNA, 15 bp, Homo sapiens
ctggatgtgcaagtg

SEQ ID NO: 174183 - DNA, 15 bp, Homo sapiens
tctggatgtgcaagt

SEQ ID NO: 174184 - DNA, 15 bp, Homo sapiens
ctctggatgtgcaag

SEQ ID NO: 174185 - DNA, 15 bp, Homo sapiens
cctctggatgtgcaa

SEQ ID NO: 174186 - DNA, 15 bp, Homo sapiens
ccctctggatgtgca

SEQ ID NO: 174187 - DNA, 15 bp, Homo sapiens
tccctctggatgtgc

SEQ ID NO: 174188 - DNA, 15 bp, Homo sapiens
gtccctctggatgtg

SEQ ID NO: 174189 - DNA, 15 bp, Homo sapiens
tgtccctctggatgt

SEQ ID NO: 174190 - DNA, 15 bp, Homo sapiens
ctgtccctctggatg

SEQ ID NO: 174191 - DNA, 15 bp, Homo sapiens
gctgtccctctggat

SEQ ID NO: 174192 - DNA, 15 bp, Homo sapiens
tgctgtccctctgga

SEQ ID NO: 174193 - DNA, 15 bp, Homo sapiens
ctgctgtccctctgg

SEQ ID NO: 174194 - DNA, 15 bp, Homo sapiens
gctgctgtccctctg

SEQ ID NO: 174195 - DNA, 15 bp, Homo sapiens
tgctgctgtccctct

SEQ ID NO: 174196 - DNA, 15 bp, Homo sapiens
atgctgctgtccctc

SEQ ID NO: 174197 - DNA, 15 bp, Homo sapiens
catgctgctgtccct

SEQ ID NO: 174198 - DNA, 15 bp, Homo sapiens
tcatgctgctgtccc

SEQ ID NO: 174199 - DNA, 15 bp, Homo sapiens
ttcatgctgctgtcc

SEQ ID NO: 174200 - DNA, 15 bp, Homo sapiens
cttcatgctgctgtc

SEQ ID NO: 174201 - DNA, 15 bp, Homo sapiens
gcttcatgctgctgt

SEQ ID NO: 174202 - DNA, 15 bp, Homo sapiens
ggcttcatgctgctg

SEQ ID NO: 174203 - DNA, 15 bp, Homo sapiens
gggcttcatgctgct

SEQ ID NO: 174204 - DNA, 15 bp, Homo sapiens
ggggcttcatgctgc

SEQ ID NO: 174205 - DNA, 15 bp, Homo sapiens
aggggcttcatgctg

SEQ ID NO: 174206 - DNA, 15 bp, Homo sapiens
gaggggcttcatgct

SEQ ID NO: 174207 - DNA, 15 bp, Homo sapiens
tgaggggcttcatgc

SEQ ID NO: 174208 - DNA, 15 bp, Homo sapiens
ttgaggggcttcatg

SEQ ID NO: 174209 - DNA, 15 bp, Homo sapiens
cttgaggggcttcat

SEQ ID NO: 174210 - DNA, 15 bp, Homo sapiens
acttgaggggcttca

SEQ ID NO: 174211 - DNA, 15 bp, Homo sapiens
cacttgaggggcttc

SEQ ID NO: 174212 - DNA, 15 bp, Homo sapiens
acacttgaggggctt

SEQ ID NO: 174213 - DNA, 15 bp, Homo sapiens
gacacttgaggggct

SEQ ID NO: 174214 - DNA, 15 bp, Homo sapiens
ggacacttgaggggc

SEQ ID NO: 174215 - DNA, 15 bp, Homo sapiens
gggacacttgagggg

SEQ ID NO: 174216 - DNA, 15 bp, Homo sapiens
tgggacacttgaggg

SEQ ID NO: 174217 - DNA, 15 bp, Homo sapiens
gtgggacacttgagg

SEQ ID NO: 174218 - DNA, 15 bp, Homo sapiens
ggtgggacacttgag

SEQ ID NO: 174219 - DNA, 15 bp, Homo sapiens
tggtgggacacttga

SEQ ID NO: 174220 - DNA, 15 bp, Homo sapiens
ctggtgggacacttg

SEQ ID NO: 174221 - DNA, 15 bp, Homo sapiens
gctggtgggacactt

SEQ ID NO: 174222 - DNA, 15 bp, Homo sapiens
tgctggtgggacact

SEQ ID NO: 174223 - DNA, 15 bp, Homo sapiens
ctgctggtgggacac

SEQ ID NO: 174224 - DNA, 15 bp, Homo sapiens
gctgctggtgggaca

SEQ ID NO: 174225 - DNA, 15 bp, Homo sapiens
ggctgctggtgggac

SEQ ID NO: 174226 - DNA, 15 bp, Homo sapiens
aggctgctggtggga

SEQ ID NO: 174227 - DNA, 15 bp, Homo sapiens
caggctgctggtggg

SEQ ID NO: 174228 - DNA, 15 bp, Homo sapiens
tcaggctgctggtgg

SEQ ID NO: 174229 - DNA, 15 bp, Homo sapiens
ctcaggctgctggtg

SEQ ID NO: 174230 - DNA, 15 bp, Homo sapiens
gctcaggctgctggt

SEQ ID NO: 174231 - DNA, 15 bp, Homo sapiens
tgctcaggctgctgg

SEQ ID NO: 174232 - DNA, 15 bp, Homo sapiens
ctgctcaggctgctg

SEQ ID NO: 174233 - DNA, 15 bp, Homo sapiens
actgctcaggctgct

SEQ ID NO: 174234 - DNA, 15 bp, Homo sapiens
cactgctcaggctgc

SEQ ID NO: 174235 - DNA, 15 bp, Homo sapiens
ccactgctcaggctg

SEQ ID NO: 174236 - DNA, 15 bp, Homo sapiens
tccactgctcaggct

SEQ ID NO: 174237 - DNA, 15 bp, Homo sapiens
ctccactgctcaggc

SEQ ID NO: 174238 - DNA, 15 bp, Homo sapiens
gctccactgctcagg

SEQ ID NO: 174239 - DNA, 15 bp, Homo sapiens
ggctccactgctcag

SEQ ID NO: 174240 - DNA, 15 bp, Homo sapiens
tggctccactgctca

SEQ ID NO: 174241 - DNA, 15 bp, Homo sapiens
gtggctccactgctc

SEQ ID NO: 174242 - DNA, 15 bp, Homo sapiens
cgtggctccactgct

SEQ ID NO: 174243 - DNA, 15 bp, Homo sapiens
ccgtggctccactgc

SEQ ID NO: 174244 - DNA, 15 bp, Homo sapiens
gccgtggctccactg

SEQ ID NO: 174245 - DNA, 15 bp, Homo sapiens
cgccgtggctccact

SEQ ID NO: 174246 - DNA, 15 bp, Homo sapiens
ccgccgtggctccac

SEQ ID NO: 174247 - DNA, 15 bp, Homo sapiens
cccgccgtggctcca

SEQ ID NO: 174248 - DNA, 15 bp, Homo sapiens
gcccgccgtggctcc

SEQ ID NO: 174249 - DNA, 15 bp, Homo sapiens
tgcccgccgtggctc

SEQ ID NO: 174250 - DNA, 15 bp, Homo sapiens
ctgcccgccgtggct

SEQ ID NO: 174251 - DNA, 15 bp, Homo sapiens
gctgcccgccgtggc

SEQ ID NO: 174252 - DNA, 15 bp, Homo sapiens
tgctgcccgccgtgg

SEQ ID NO: 174253 - DNA, 15 bp, Homo sapiens
ctgctgcccgccgtg

SEQ ID NO: 174254 - DNA, 15 bp, Homo sapiens
gctgctgcccgccgt

SEQ ID NO: 174255 - DNA, 15 bp, Homo sapiens
tgctgctgcccgccg

SEQ ID NO: 174256 - DNA, 15 bp, Homo sapiens
atgctgctgcccgcc

SEQ ID NO: 174257 - DNA, 15 bp, Homo sapiens
catgctgctgcccgc

SEQ ID NO: 174258 - DNA, 15 bp, Homo sapiens
acatgctgctgcccg

SEQ ID NO: 174259 - DNA, 15 bp, Homo sapiens
tacatgctgctgccc

SEQ ID NO: 174260 - DNA, 15 bp, Homo sapiens
gtacatgctgctgcc

SEQ ID NO: 174261 - DNA, 15 bp, Homo sapiens
tgtacatgctgctgc

SEQ ID NO: 174262 - DNA, 15 bp, Homo sapiens
gtgtacatgctgctg

SEQ ID NO: 174263 - DNA, 15 bp, Homo sapiens
tgtgtacatgctgct

SEQ ID NO: 174264 - DNA, 15 bp, Homo sapiens
ctgtgtacatgctgc

SEQ ID NO: 174265 - DNA, 15 bp, Homo sapiens
gctgtgtacatgctg

SEQ ID NO: 174266 - DNA, 15 bp, Homo sapiens
ggctgtgtacatgct

SEQ ID NO: 174267 - DNA, 15 bp, Homo sapiens
tggctgtgtacatgc

SEQ ID NO: 174268 - DNA, 15 bp, Homo sapiens
gtggctgtgtacatg

SEQ ID NO: 174269 - DNA, 15 bp, Homo sapiens
agtggctgtgtacat

SEQ ID NO: 174270 - DNA, 15 bp, Homo sapiens
aagtggctgtgtaca

SEQ ID NO: 174271 - DNA, 15 bp, Homo sapiens
caagtggctgtgtac

SEQ ID NO: 174272 - DNA, 15 bp, Homo sapiens
gcaagtggctgtgta

SEQ ID NO: 174273 - DNA, 15 bp, Homo sapiens
ggcaagtggctgtgt

SEQ ID NO: 174274 - DNA, 15 bp, Homo sapiens
tggcaagtggctgtg

SEQ ID NO: 174275 - DNA, 15 bp, Homo sapiens
ctggcaagtggctgt

SEQ ID NO: 174276 - DNA, 15 bp, Homo sapiens
cctggcaagtggctg

SEQ ID NO: 174277 - DNA, 15 bp, Homo sapiens
gcctggcaagtggct

SEQ ID NO: 174278 - DNA, 15 bp, Homo sapiens
ggcctggcaagtggc

SEQ ID NO: 174279 - DNA, 15 bp, Homo sapiens
aggcctggcaagtgg

SEQ ID NO: 174280 - DNA, 15 bp, Homo sapiens
gaggcctggcaagtg

SEQ ID NO: 174281 - DNA, 15 bp, Homo sapiens
ggaggcctggcaagt

SEQ ID NO: 174282 - DNA, 15 bp, Homo sapiens
aggaggcctggcaag

SEQ ID NO: 174283 - DNA, 15 bp, Homo sapiens
caggaggcctggcaa

SEQ ID NO: 174284 - DNA, 15 bp, Homo sapiens
gcaggaggcctggca

SEQ ID NO: 174285 - DNA, 15 bp, Homo sapiens
tgcaggaggcctggc

SEQ ID NO: 174286 - DNA, 15 bp, Homo sapiens
ctgcaggaggcctgg

SEQ ID NO: 174287 - DNA, 15 bp, Homo sapiens
gctgcaggaggcctg

SEQ ID NO: 174288 - DNA, 15 bp, Homo sapiens
agctgcaggaggcct

SEQ ID NO: 174289 - DNA, 15 bp, Homo sapiens
cagctgcaggaggcc

SEQ ID NO: 174290 - DNA, 15 bp, Homo sapiens
tcagctgcaggaggc

SEQ ID NO: 174291 - DNA, 15 bp, Homo sapiens
ctcagctgcaggagg

SEQ ID NO: 174292 - DNA, 15 bp, Homo sapiens
tctcagctgcaggag

SEQ ID NO: 174293 - DNA, 15 bp, Homo sapiens
gtctcagctgcagga

SEQ ID NO: 174294 - DNA, 15 bp, Homo sapiens
agtctcagctgcagg

SEQ ID NO: 174295 - DNA, 15 bp, Homo sapiens
gagtctcagctgcag

SEQ ID NO: 174296 - DNA, 15 bp, Homo sapiens
ggagtctcagctgca

SEQ ID NO: 174297 - DNA, 15 bp, Homo sapiens
tggagtctcagctgc

SEQ ID NO: 174298 - DNA, 15 bp, Homo sapiens
ctggagtctcagctg

SEQ ID NO: 174299 - DNA, 15 bp, Homo sapiens
gctggagtctcagct

SEQ ID NO: 174300 - DNA, 15 bp, Homo sapiens
cgctggagtctcagc

SEQ ID NO: 174301 - DNA, 15 bp, Homo sapiens
gcgctggagtctcag

SEQ ID NO: 174302 - DNA, 15 bp, Homo sapiens
ggcgctggagtctca

SEQ ID NO: 174303 - DNA, 15 bp, Homo sapiens
aggcgctggagtctc

SEQ ID NO: 174304 - DNA, 15 bp, Homo sapiens
caggcgctggagtct

SEQ ID NO: 174305 - DNA, 15 bp, Homo sapiens
gcaggcgctggagtc

SEQ ID NO: 174306 - DNA, 15 bp, Homo sapiens
ggcaggcgctggagt

SEQ ID NO: 174307 - DNA, 15 bp, Homo sapiens
gggcaggcgctggag

SEQ ID NO: 174308 - DNA, 15 bp, Homo sapiens
agggcaggcgctgga

SEQ ID NO: 174309 - DNA, 15 bp, Homo sapiens
gagggcaggcgctgg

SEQ ID NO: 174310 - DNA, 15 bp, Homo sapiens
ggagggcaggcgctg

SEQ ID NO: 174311 - DNA, 15 bp, Homo sapiens
gggagggcaggcgct

SEQ ID NO: 174312 - DNA, 15 bp, Homo sapiens
agggagggcaggcgc

SEQ ID NO: 174313 - DNA, 15 bp, Homo sapiens
cagggagggcaggcg

SEQ ID NO: 174314 - DNA, 15 bp, Homo sapiens
ccagggagggcaggc

SEQ ID NO: 174315 - DNA, 15 bp, Homo sapiens
cccagggagggcagg

SEQ ID NO: 174316 - DNA, 15 bp, Homo sapiens
ccccagggagggcag

SEQ ID NO: 174317 - DNA, 15 bp, Homo sapiens
accccagggagggca

SEQ ID NO: 174318 - DNA, 15 bp, Homo sapiens
gaccccagggagggc

SEQ ID NO: 174319 - DNA, 15 bp, Homo sapiens
ggaccccagggaggg

SEQ ID NO: 174320 - DNA, 15 bp, Homo sapiens
aggaccccagggagg

SEQ ID NO: 174321 - DNA, 15 bp, Homo sapiens
aaggaccccagggag

SEQ ID NO: 174322 - DNA, 15 bp, Homo sapiens
caaggaccccaggga

SEQ ID NO: 174323 - DNA, 15 bp, Homo sapiens
gcaaggaccccaggg

SEQ ID NO: 174324 - DNA, 15 bp, Homo sapiens
agcaaggaccccagg

SEQ ID NO: 174325 - DNA, 15 bp, Homo sapiens
cagcaaggaccccag

SEQ ID NO: 174326 - DNA, 15 bp, Homo sapiens
gcagcaaggacccca

SEQ ID NO: 174327 - DNA, 15 bp, Homo sapiens
tgcagcaaggacccc

SEQ ID NO: 174328 - DNA, 15 bp, Homo sapiens
ctgcagcaaggaccc

SEQ ID NO: 174329 - DNA, 15 bp, Homo sapiens
cctgcagcaaggacc

SEQ ID NO: 174330 - DNA, 15 bp, Homo sapiens
gcctgcagcaaggac

SEQ ID NO: 174331 - DNA, 15 bp, Homo sapiens
ggcctgcagcaagga

SEQ ID NO: 174332 - DNA, 15 bp, Homo sapiens
cggcctgcagcaagg

SEQ ID NO: 174333 - DNA, 15 bp, Homo sapiens
ccggcctgcagcaag

SEQ ID NO: 174334 - DNA, 15 bp, Homo sapiens
cccggcctgcagcaa

SEQ ID NO: 174335 - DNA, 15 bp, Homo sapiens
acccggcctgcagca

SEQ ID NO: 174336 - DNA, 15 bp, Homo sapiens
cacccggcctgcagc

SEQ ID NO: 174337 - DNA, 15 bp, Homo sapiens
ccacccggcctgcag

SEQ ID NO: 174338 - DNA, 15 bp, Homo sapiens
gccacccggcctgca

SEQ ID NO: 174339 - DNA, 15 bp, Homo sapiens
ggccacccggcctgc

SEQ ID NO: 174340 - DNA, 15 bp, Homo sapiens
tggccacccggcctg

SEQ ID NO: 174341 - DNA, 15 bp, Homo sapiens
ttggccacccggcct

SEQ ID NO: 174342 - DNA, 15 bp, Homo sapiens
attggccacccggcc

SEQ ID NO: 174343 - DNA, 15 bp, Homo sapiens
gattggccacccggc

SEQ ID NO: 174344 - DNA, 15 bp, Homo sapiens
ggattggccacccgg

SEQ ID NO: 174345 - DNA, 15 bp, Homo sapiens
tggattggccacccg

SEQ ID NO: 174346 - DNA, 15 bp, Homo sapiens
ctggattggccaccc

SEQ ID NO: 174347 - DNA, 15 bp, Homo sapiens
cctggattggccacc

SEQ ID NO: 174348 - DNA, 15 bp, Homo sapiens
acctggattggccac

SEQ ID NO: 174349 - DNA, 15 bp, Homo sapiens
cacctggattggcca

SEQ ID NO: 174350 - DNA, 15 bp, Homo sapiens
ccacctggattggcc

SEQ ID NO: 174351 - DNA, 15 bp, Homo sapiens
cccacctggattggc

SEQ ID NO: 174352 - DNA, 15 bp, Homo sapiens
tcccacctggattgg

SEQ ID NO: 174353 - DNA, 15 bp, Homo sapiens
ctcccacctggattg

SEQ ID NO: 174354 - DNA, 15 bp, Homo sapiens
tctcccacctggatt

SEQ ID NO: 174355 - DNA, 15 bp, Homo sapiens
ctctcccacctggat

SEQ ID NO: 174356 - DNA, 15 bp, Homo sapiens
tctctcccacctgga

SEQ ID NO: 174357 - DNA, 15 bp, Homo sapiens
gtctctcccacctgg

SEQ ID NO: 174358 - DNA, 15 bp, Homo sapiens
tgtctctcccacctg

SEQ ID NO: 174359 - DNA, 15 bp, Homo sapiens
gtgtctctcccacct

SEQ ID NO: 174360 - DNA, 15 bp, Homo sapiens
agtgtctctcccacc

SEQ ID NO: 174361 - DNA, 15 bp, Homo sapiens
gagtgtctctcccac

SEQ ID NO: 174362 - DNA, 15 bp, Homo sapiens
ggagtgtctctccca

SEQ ID NO: 174363 - DNA, 15 bp, Homo sapiens
gggagtgtctctccc

SEQ ID NO: 174364 - DNA, 15 bp, Homo sapiens
tgggagtgtctctcc

SEQ ID NO: 174365 - DNA, 15 bp, Homo sapiens
ctgggagtgtctctc

SEQ ID NO: 174366 - DNA, 15 bp, Homo sapiens
cctgggagtgtctct

SEQ ID NO: 174367 - DNA, 15 bp, Homo sapiens
ccctgggagtgtctc

SEQ ID NO: 174368 - DNA, 15 bp, Homo sapiens
tccctgggagtgtct

SEQ ID NO: 174369 - DNA, 15 bp, Homo sapiens
gtccctgggagtgtc

SEQ ID NO: 174370 - DNA, 15 bp, Homo sapiens
tgtccctgggagtgt

SEQ ID NO: 174371 - DNA, 15 bp, Homo sapiens
ttgtccctgggagtg

SEQ ID NO: 174372 - DNA, 15 bp, Homo sapiens
cttgtccctgggagt

SEQ ID NO: 174373 - DNA, 15 bp, Homo sapiens
ccttgtccctgggag

SEQ ID NO: 174374 - DNA, 15 bp, Homo sapiens
cccttgtccctggga

SEQ ID NO: 174375 - DNA, 15 bp, Homo sapiens
tcccttgtccctggg

SEQ ID NO: 174376 - DNA, 15 bp, Homo sapiens
ttcccttgtccctgg

SEQ ID NO: 174377 - DNA, 15 bp, Homo sapiens
cttcccttgtccctg

SEQ ID NO: 174378 - DNA, 15 bp, Homo sapiens
ccttcccttgtccct

SEQ ID NO: 174379 - DNA, 15 bp, Homo sapiens
tccttcccttgtccc

SEQ ID NO: 174380 - DNA, 15 bp, Homo sapiens
ttccttcccttgtcc

SEQ ID NO: 174381 - DNA, 15 bp, Homo sapiens
cttccttcccttgtc

SEQ ID NO: 174382 - DNA, 15 bp, Homo sapiens
ccttccttcccttgt

SEQ ID NO: 174383 - DNA, 15 bp, Homo sapiens
cccttccttcccttg

SEQ ID NO: 174384 - DNA, 15 bp, Homo sapiens
tcccttccttccctt

SEQ ID NO: 174385 - DNA, 15 bp, Homo sapiens
gtcccttccttccct

SEQ ID NO: 174386 - DNA, 15 bp, Homo sapiens
tgtcccttccttccc

SEQ ID NO: 174387 - DNA, 15 bp, Homo sapiens
gtgtcccttccttcc

SEQ ID NO: 174388 - DNA, 15 bp, Homo sapiens
tgtgtcccttccttc

SEQ ID NO: 174389 - DNA, 15 bp, Homo sapiens
gtgtgtcccttcctt

SEQ ID NO: 174390 - DNA, 15 bp, Homo sapiens
tgtgtgtcccttcct

SEQ ID NO: 174391 - DNA, 15 bp, Homo sapiens
gtgtgtgtcccttcc

SEQ ID NO: 174392 - DNA, 15 bp, Homo sapiens
tgtgtgtgtcccttc

SEQ ID NO: 174393 - DNA, 15 bp, Homo sapiens
gtgtgtgtgtccctt

SEQ ID NO: 174394 - DNA, 15 bp, Homo sapiens
tgtgtgtgtgtccct

SEQ ID NO: 174395 - DNA, 15 bp, Homo sapiens
gtgtgtgtgtgtccc

SEQ ID NO: 174396 - DNA, 15 bp, Homo sapiens
tgtgtgtgtgtgtcc

SEQ ID NO: 174397 - DNA, 15 bp, Homo sapiens
gtgtgtgtgtgtgtc

SEQ ID NO: 174398 - DNA, 15 bp, Homo sapiens
atgtgtgtgtgtgtg

SEQ ID NO: 174399 - DNA, 15 bp, Homo sapiens
tatgtgtgtgtgtgt

SEQ ID NO: 174400 - DNA, 15 bp, Homo sapiens
gtatgtgtgtgtgtg

SEQ ID NO: 174401 - DNA, 15 bp, Homo sapiens
tgtatgtgtgtgtgt

SEQ ID NO: 174402 - DNA, 15 bp, Homo sapiens
atgtatgtgtgtgtg

SEQ ID NO: 174403 - DNA, 15 bp, Homo sapiens
gatgtatgtgtgtgt

SEQ ID NO: 174404 - DNA, 15 bp, Homo sapiens
ggatgtatgtgtgtg

SEQ ID NO: 174405 - DNA, 15 bp, Homo sapiens
aggatgtatgtgtgt

SEQ ID NO: 174406 - DNA, 15 bp, Homo sapiens
caggatgtatgtgtg

SEQ ID NO: 174407 - DNA, 15 bp, Homo sapiens
gcaggatgtatgtgt

SEQ ID NO: 174408 - DNA, 15 bp, Homo sapiens
agcaggatgtatgtg

SEQ ID NO: 174409 - DNA, 15 bp, Homo sapiens
aagcaggatgtatgt

SEQ ID NO: 174410 - DNA, 15 bp, Homo sapiens
aaagcaggatgtatg

SEQ ID NO: 174411 - DNA, 15 bp, Homo sapiens
gaaagcaggatgtat

SEQ ID NO: 174412 - DNA, 15 bp, Homo sapiens
ggaaagcaggatgta

SEQ ID NO: 174413 - DNA, 15 bp, Homo sapiens
gggaaagcaggatgt

SEQ ID NO: 174414 - DNA, 15 bp, Homo sapiens
agggaaagcaggatg

SEQ ID NO: 174415 - DNA, 15 bp, Homo sapiens
gagggaaagcaggat

SEQ ID NO: 174416 - DNA, 15 bp, Homo sapiens
ggagggaaagcagga

SEQ ID NO: 174417 - DNA, 15 bp, Homo sapiens
gggagggaaagcagg

SEQ ID NO: 174418 - DNA, 15 bp, Homo sapiens
ggggagggaaagcag

SEQ ID NO: 174419 - DNA, 15 bp, Homo sapiens
tggggagggaaagca

SEQ ID NO: 174420 - DNA, 15 bp, Homo sapiens
ttggggagggaaagc

SEQ ID NO: 174421 - DNA, 15 bp, Homo sapiens
tttggggagggaaag

SEQ ID NO: 174422 - DNA, 15 bp, Homo sapiens
gtttggggagggaaa

SEQ ID NO: 174423 - DNA, 15 bp, Homo sapiens
ggtttggggagggaa

SEQ ID NO: 174424 - DNA, 15 bp, Homo sapiens
gggtttggggaggga

SEQ ID NO: 174425 - DNA, 15 bp, Homo sapiens
tgggtttggggaggg

SEQ ID NO: 174426 - DNA, 15 bp, Homo sapiens
atgggtttggggagg

SEQ ID NO: 174427 - DNA, 15 bp, Homo sapiens
gatgggtttggggag

SEQ ID NO: 174428 - DNA, 15 bp, Homo sapiens
tgatgggtttgggga

SEQ ID NO: 174429 - DNA, 15 bp, Homo sapiens
ctgatgggtttgggg

SEQ ID NO: 174430 - DNA, 15 bp, Homo sapiens
tctgatgggtttggg

SEQ ID NO: 174431 - DNA, 15 bp, Homo sapiens
gtctgatgggtttgg

SEQ ID NO: 174432 - DNA, 15 bp, Homo sapiens
tgtctgatgggtttg

SEQ ID NO: 174433 - DNA, 15 bp, Homo sapiens
ctgtctgatgggttt

SEQ ID NO: 174434 - DNA, 15 bp, Homo sapiens
cctgtctgatgggtt

SEQ ID NO: 174435 - DNA, 15 bp, Homo sapiens
acctgtctgatgggt

SEQ ID NO: 174436 - DNA, 15 bp, Homo sapiens
tacctgtctgatggg

SEQ ID NO: 174437 - DNA, 15 bp, Homo sapiens
ttacctgtctgatgg

SEQ ID NO: 174438 - DNA, 15 bp, Homo sapiens
tttacctgtctgatg

SEQ ID NO: 174439 - DNA, 15 bp, Homo sapiens
atttacctgtctgat

SEQ ID NO: 174440 - DNA, 15 bp, Homo sapiens
catttacctgtctga

SEQ ID NO: 174441 - DNA, 15 bp, Homo sapiens
ccatttacctgtctg

SEQ ID NO: 174442 - DNA, 15 bp, Homo sapiens
cccatttacctgtct

SEQ ID NO: 174443 - DNA, 15 bp, Homo sapiens
gcccatttacctgtc

SEQ ID NO: 174444 - DNA, 15 bp, Homo sapiens
tgcccatttacctgt

SEQ ID NO: 174445 - DNA, 15 bp, Homo sapiens
ctgcccatttacctg

SEQ ID NO: 174446 - DNA, 15 bp, Homo sapiens
actgcccatttacct

SEQ ID NO: 174447 - DNA, 15 bp, Homo sapiens
cactgcccatttacc

SEQ ID NO: 174448 - DNA, 15 bp, Homo sapiens
gcactgcccatttac

SEQ ID NO: 174449 - DNA, 15 bp, Homo sapiens
ggcactgcccattta

SEQ ID NO: 174450 - DNA, 15 bp, Homo sapiens
aggcactgcccattt

SEQ ID NO: 174451 - DNA, 15 bp, Homo sapiens
gaggcactgcccatt

SEQ ID NO: 174452 - DNA, 15 bp, Homo sapiens
ggaggcactgcccat

SEQ ID NO: 174453 - DNA, 15 bp, Homo sapiens
aggaggcactgccca

SEQ ID NO: 174454 - DNA, 15 bp, Homo sapiens
caggaggcactgccc

SEQ ID NO: 174455 - DNA, 15 bp, Homo sapiens
ccaggaggcactgcc

SEQ ID NO: 174456 - DNA, 15 bp, Homo sapiens
cccaggaggcactgc

SEQ ID NO: 174457 - DNA, 15 bp, Homo sapiens
tcccaggaggcactg

SEQ ID NO: 174458 - DNA, 15 bp, Homo sapiens
gtcccaggaggcact

SEQ ID NO: 174459 - DNA, 15 bp, Homo sapiens
ggtcccaggaggcac

SEQ ID NO: 174460 - DNA, 15 bp, Homo sapiens
tggtcccaggaggca

SEQ ID NO: 174461 - DNA, 15 bp, Homo sapiens
atggtcccaggaggc

SEQ ID NO: 174462 - DNA, 15 bp, Homo sapiens
catggtcccaggagg

SEQ ID NO: 174463 - DNA, 15 bp, Homo sapiens
ccatggtcccaggag

SEQ ID NO: 174464 - DNA, 15 bp, Homo sapiens
tccatggtcccagga

SEQ ID NO: 174465 - DNA, 15 bp, Homo sapiens
gtccatggtcccagg

SEQ ID NO: 174466 - DNA, 15 bp, Homo sapiens
tgtccatggtcccag

SEQ ID NO: 174467 - DNA, 15 bp, Homo sapiens
gtgtccatggtccca

SEQ ID NO: 174468 - DNA, 15 bp, Homo sapiens
tgtgtccatggtccc

SEQ ID NO: 174469 - DNA, 15 bp, Homo sapiens
atgtgtccatggtcc

SEQ ID NO: 174470 - DNA, 15 bp, Homo sapiens
aatgtgtccatggtc

SEQ ID NO: 174471 - DNA, 15 bp, Homo sapiens
aaatgtgtccatggt

SEQ ID NO: 174472 - DNA, 15 bp, Homo sapiens
aaaatgtgtccatgg

SEQ ID NO: 174473 - DNA, 15 bp, Homo sapiens
gaaaatgtgtccatg

SEQ ID NO: 174474 - DNA, 15 bp, Homo sapiens
agaaaatgtgtccat

SEQ ID NO: 174475 - DNA, 15 bp, Homo sapiens
gagaaaatgtgtcca

SEQ ID NO: 174476 - DNA, 15 bp, Homo sapiens
ggagaaaatgtgtcc

SEQ ID NO: 174477 - DNA, 15 bp, Homo sapiens
aggagaaaatgtgtc

SEQ ID NO: 174478 - DNA, 15 bp, Homo sapiens
taggagaaaatgtgt

SEQ ID NO: 174479 - DNA, 15 bp, Homo sapiens
ctaggagaaaatgtg

SEQ ID NO: 174480 - DNA, 15 bp, Homo sapiens
cctaggagaaaatgt

SEQ ID NO: 174481 - DNA, 15 bp, Homo sapiens
tcctaggagaaaatg

SEQ ID NO: 174482 - DNA, 15 bp, Homo sapiens
ctcctaggagaaaat

SEQ ID NO: 174483 - DNA, 15 bp, Homo sapiens
tctcctaggagaaaa

SEQ ID NO: 174484 - DNA, 15 bp, Homo sapiens
ttctcctaggagaaa

SEQ ID NO: 174485 - DNA, 15 bp, Homo sapiens
cttctcctaggagaa

SEQ ID NO: 174486 - DNA, 15 bp, Homo sapiens
gcttctcctaggaga

SEQ ID NO: 174487 - DNA, 15 bp, Homo sapiens
tgcttctcctaggag

SEQ ID NO: 174488 - DNA, 15 bp, Homo sapiens
ctgcttctcctagga

SEQ ID NO: 174489 - DNA, 15 bp, Homo sapiens
gctgcttctcctagg

SEQ ID NO: 174490 - DNA, 15 bp, Homo sapiens
ggctgcttctcctag

SEQ ID NO: 174491 - DNA, 15 bp, Homo sapiens
aggctgcttctccta

SEQ ID NO: 174492 - DNA, 15 bp, Homo sapiens
gaggctgcttctcct

SEQ ID NO: 174493 - DNA, 15 bp, Homo sapiens
ggaggctgcttctcc

SEQ ID NO: 174494 - DNA, 15 bp, Homo sapiens
aggaggctgcttctc

SEQ ID NO: 174495 - DNA, 15 bp, Homo sapiens
taggaggctgcttct

SEQ ID NO: 174496 - DNA, 15 bp, Homo sapiens
ttaggaggctgcttc

SEQ ID NO: 174497 - DNA, 15 bp, Homo sapiens
attaggaggctgctt

SEQ ID NO: 174498 - DNA, 15 bp, Homo sapiens
aattaggaggctgct

SEQ ID NO: 174499 - DNA, 15 bp, Homo sapiens
aaattaggaggctgc

SEQ ID NO: 174500 - DNA, 15 bp, Homo sapiens
caaattaggaggctg

SEQ ID NO: 174501 - DNA, 15 bp, Homo sapiens
tcaaattaggaggct

SEQ ID NO: 174502 - DNA, 15 bp, Homo sapiens
atcaaattaggaggc

SEQ ID NO: 174503 - DNA, 15 bp, Homo sapiens
gatcaaattaggagg

SEQ ID NO: 174504 - DNA, 15 bp, Homo sapiens
tgatcaaattaggag

SEQ ID NO: 174505 - DNA, 15 bp, Homo sapiens
gtgatcaaattagga

SEQ ID NO: 174506 - DNA, 15 bp, Homo sapiens
tgtgatcaaattagg

SEQ ID NO: 174507 - DNA, 15 bp, Homo sapiens
ctgtgatcaaattag

SEQ ID NO: 174508 - DNA, 15 bp, Homo sapiens
actgtgatcaaatta

SEQ ID NO: 174509 - DNA, 15 bp, Homo sapiens
cactgtgatcaaatt

SEQ ID NO: 174510 - DNA, 15 bp, Homo sapiens
ccactgtgatcaaat

SEQ ID NO: 174511 - DNA, 15 bp, Homo sapiens
gccactgtgatcaaa

SEQ ID NO: 174512 - DNA, 15 bp, Homo sapiens
cgccactgtgatcaa

SEQ ID NO: 174513 - DNA, 15 bp, Homo sapiens
tcgccactgtgatca

SEQ ID NO: 174514 - DNA, 15 bp, Homo sapiens
ctcgccactgtgatc

SEQ ID NO: 174515 - DNA, 15 bp, Homo sapiens
tctcgccactgtgat

SEQ ID NO: 174516 - DNA, 15 bp, Homo sapiens
ctctcgccactgtga

SEQ ID NO: 174517 - DNA, 15 bp, Homo sapiens
cctctcgccactgtg

SEQ ID NO: 174518 - DNA, 15 bp, Homo sapiens
tcctctcgccactgt

SEQ ID NO: 174519 - DNA, 15 bp, Homo sapiens
ctcctctcgccactg

SEQ ID NO: 174520 - DNA, 15 bp, Homo sapiens
tctcctctcgccact

SEQ ID NO: 174521 - DNA, 15 bp, Homo sapiens
ctctcctctcgccac

SEQ ID NO: 174522 - DNA, 15 bp, Homo sapiens
cctctcctctcgcca

SEQ ID NO: 174523 - DNA, 15 bp, Homo sapiens
tcctctcctctcgcc

SEQ ID NO: 174524 - DNA, 15 bp, Homo sapiens
ttcctctcctctcgc

SEQ ID NO: 174525 - DNA, 15 bp, Homo sapiens
tttcctctcctctcg

SEQ ID NO: 174526 - DNA, 15 bp, Homo sapiens
ttttcctctcctctc

SEQ ID NO: 174527 - DNA, 15 bp, Homo sapiens
tttttcctctcctct

SEQ ID NO: 174528 - DNA, 15 bp, Homo sapiens
gtttttcctctcctc

SEQ ID NO: 174529 - DNA, 15 bp, Homo sapiens
cgtttttcctctcct

SEQ ID NO: 174530 - DNA, 15 bp, Homo sapiens
tcgtttttcctctcc

SEQ ID NO: 174531 - DNA, 15 bp, Homo sapiens
atcgtttttcctctc

SEQ ID NO: 174532 - DNA, 15 bp, Homo sapiens
gatcgtttttcctct

SEQ ID NO: 174533 - DNA, 15 bp, Homo sapiens
cgatcgtttttcctc

SEQ ID NO: 174534 - DNA, 15 bp, Homo sapiens
gcgatcgtttttcct

SEQ ID NO: 174535 - DNA, 15 bp, Homo sapiens
agcgatcgtttttcc

SEQ ID NO: 174536 - DNA, 15 bp, Homo sapiens
cagcgatcgtttttc

SEQ ID NO: 174537 - DNA, 15 bp, Homo sapiens
acagcgatcgttttt

SEQ ID NO: 174538 - DNA, 15 bp, Homo sapiens
cacagcgatcgtttt

SEQ ID NO: 174539 - DNA, 15 bp, Homo sapiens
tcacagcgatcgttt

SEQ ID NO: 174540 - DNA, 15 bp, Homo sapiens
ttcacagcgatcgtt

SEQ ID NO: 174541 - DNA, 15 bp, Homo sapiens
tttcacagcgatcgt

SEQ ID NO: 174542 - DNA, 15 bp, Homo sapiens
ttttcacagcgatcg

SEQ ID NO: 174543 - DNA, 15 bp, Homo sapiens
attttcacagcgatc

SEQ ID NO: 174544 - DNA, 15 bp, Homo sapiens
cattttcacagcgat

SEQ ID NO: 174545 - DNA, 15 bp, Homo sapiens
tcattttcacagcga

SEQ ID NO: 174546 - DNA, 15 bp, Homo sapiens
ctcattttcacagcg

SEQ ID NO: 174547 - DNA, 15 bp, Homo sapiens
cctcattttcacagc

SEQ ID NO: 174548 - DNA, 15 bp, Homo sapiens
tcctcattttcacag

SEQ ID NO: 174549 - DNA, 15 bp, Homo sapiens
ctcctcattttcaca

SEQ ID NO: 174550 - DNA, 15 bp, Homo sapiens
cctcctcattttcac

SEQ ID NO: 174551 - DNA, 15 bp, Homo sapiens
tcctcctcattttca

SEQ ID NO: 174552 - DNA, 15 bp, Homo sapiens
atcctcctcattttc

SEQ ID NO: 174553 - DNA, 15 bp, Homo sapiens
aatcctcctcatttt

SEQ ID NO: 174554 - DNA, 15 bp, Homo sapiens
caatcctcctcattt

SEQ ID NO: 174555 - DNA, 15 bp, Homo sapiens
gcaatcctcctcatt

SEQ ID NO: 174556 - DNA, 15 bp, Homo sapiens
agcaatcctcctcat

SEQ ID NO: 174557 - DNA, 15 bp, Homo sapiens
aagcaatcctcctca

SEQ ID NO: 174558 - DNA, 15 bp, Homo sapiens
gaagcaatcctcctc

SEQ ID NO: 174559 - DNA, 15 bp, Homo sapiens
agaagcaatcctcct

SEQ ID NO: 174560 - DNA, 15 bp, Homo sapiens
aagaagcaatcctcc

SEQ ID NO: 174561 - DNA, 15 bp, Homo sapiens
caagaagcaatcctc

SEQ ID NO: 174562 - DNA, 15 bp, Homo sapiens
acaagaagcaatcct

SEQ ID NO: 174563 - DNA, 15 bp, Homo sapiens
cacaagaagcaatcc

SEQ ID NO: 174564 - DNA, 15 bp, Homo sapiens
tcacaagaagcaatc

SEQ ID NO: 174565 - DNA, 15 bp, Homo sapiens
ttcacaagaagcaat

SEQ ID NO: 174566 - DNA, 15 bp, Homo sapiens
tttcacaagaagcaa

SEQ ID NO: 174567 - DNA, 15 bp, Homo sapiens
gtttcacaagaagca

SEQ ID NO: 174568 - DNA, 15 bp, Homo sapiens
ggtttcacaagaagc

SEQ ID NO: 174569 - DNA, 15 bp, Homo sapiens
tggtttcacaagaag

SEQ ID NO: 174570 - DNA, 15 bp, Homo sapiens
gtggtttcacaagaa

SEQ ID NO: 174571 - DNA, 15 bp, Homo sapiens
tgtggtttcacaaga

SEQ ID NO: 174572 - DNA, 15 bp, Homo sapiens
ctgtggtttcacaag

SEQ ID NO: 174573 - DNA, 15 bp, Homo sapiens
cctgtggtttcacaa

SEQ ID NO: 174574 - DNA, 15 bp, Homo sapiens
gcctgtggtttcaca

SEQ ID NO: 174575 - DNA, 15 bp, Homo sapiens
ggcctgtggtttcac

SEQ ID NO: 174576 - DNA, 15 bp, Homo sapiens
gggcctgtggtttca

SEQ ID NO: 174577 - DNA, 15 bp, Homo sapiens
agggcctgtggtttc

SEQ ID NO: 174578 - DNA, 15 bp, Homo sapiens
aagggcctgtggttt

SEQ ID NO: 174579 - DNA, 15 bp, Homo sapiens
caagggcctgtggtt

SEQ ID NO: 174580 - DNA, 15 bp, Homo sapiens
ccaagggcctgtggt

SEQ ID NO: 174581 - DNA, 15 bp, Homo sapiens
cccaagggcctgtgg

SEQ ID NO: 174582 - DNA, 15 bp, Homo sapiens
ccccaagggcctgtg

SEQ ID NO: 174583 - DNA, 15 bp, Homo sapiens
accccaagggcctgt

SEQ ID NO: 174584 - DNA, 15 bp, Homo sapiens
aaccccaagggcctg

SEQ ID NO: 174585 - DNA, 15 bp, Homo sapiens
gaaccccaagggcct

SEQ ID NO: 174586 - DNA, 15 bp, Homo sapiens
ggaaccccaagggcc

SEQ ID NO: 174587 - DNA, 15 bp, Homo sapiens
gggaaccccaagggc

SEQ ID NO: 174588 - DNA, 15 bp, Homo sapiens
ggggaaccccaaggg

SEQ ID NO: 174589 - DNA, 15 bp, Homo sapiens
gggggaaccccaagg

SEQ ID NO: 174590 - DNA, 15 bp, Homo sapiens
tgggggaaccccaag

SEQ ID NO: 174591 - DNA, 15 bp, Homo sapiens
ctgggggaaccccaa

SEQ ID NO: 174592 - DNA, 15 bp, Homo sapiens
tctgggggaacccca

SEQ ID NO: 174593 - DNA, 15 bp, Homo sapiens
gtctgggggaacccc

SEQ ID NO: 174594 - DNA, 15 bp, Homo sapiens
tgtctgggggaaccc

SEQ ID NO: 174595 - DNA, 15 bp, Homo sapiens
ctgtctgggggaacc

SEQ ID NO: 174596 - DNA, 15 bp, Homo sapiens
tctgtctgggggaac

SEQ ID NO: 174597 - DNA, 15 bp, Homo sapiens
ctctgtctgggggaa

SEQ ID NO: 174598 - DNA, 15 bp, Homo sapiens
gctctgtctggggga

SEQ ID NO: 174599 - DNA, 15 bp, Homo sapiens
ggctctgtctggggg

SEQ ID NO: 174600 - DNA, 15 bp, Homo sapiens
cggctctgtctgggg

SEQ ID NO: 174601 - DNA, 15 bp, Homo sapiens
gcggctctgtctggg

SEQ ID NO: 174602 - DNA, 15 bp, Homo sapiens
tgcggctctgtctgg

SEQ ID NO: 174603 - DNA, 15 bp, Homo sapiens
ttgcggctctgtctg

SEQ ID NO: 174604 - DNA, 15 bp, Homo sapiens
tttgcggctctgtct

SEQ ID NO: 174605 - DNA, 15 bp, Homo sapiens
atttgcggctctgtc

SEQ ID NO: 174606 - DNA, 15 bp, Homo sapiens
gatttgcggctctgt

SEQ ID NO: 174607 - DNA, 15 bp, Homo sapiens
tgatttgcggctctg

SEQ ID NO: 174608 - DNA, 15 bp, Homo sapiens
ttgatttgcggctct

SEQ ID NO: 174609 - DNA, 15 bp, Homo sapiens
gttgatttgcggctc

SEQ ID NO: 174610 - DNA, 15 bp, Homo sapiens
ggttgatttgcggct

SEQ ID NO: 174611 - DNA, 15 bp, Homo sapiens
gggttgatttgcggc

SEQ ID NO: 174612 - DNA, 15 bp, Homo sapiens
ggggttgatttgcgg

SEQ ID NO: 174613 - DNA, 15 bp, Homo sapiens
tggggttgatttgcg

SEQ ID NO: 174614 - DNA, 15 bp, Homo sapiens
ctggggttgatttgc

SEQ ID NO: 174615 - DNA, 15 bp, Homo sapiens
tctggggttgatttg

SEQ ID NO: 174616 - DNA, 15 bp, Homo sapiens
gtctggggttgattt

SEQ ID NO: 174617 - DNA, 15 bp, Homo sapiens
agtctggggttgatt

SEQ ID NO: 174618 - DNA, 15 bp, Homo sapiens
gagtctggggttgat

SEQ ID NO: 174619 - DNA, 15 bp, Homo sapiens
tgagtctggggttga

SEQ ID NO: 174620 - DNA, 15 bp, Homo sapiens
ttgagtctggggttg

SEQ ID NO: 174621 - DNA, 15 bp, Homo sapiens
tttgagtctggggtt

SEQ ID NO: 174622 - DNA, 15 bp, Homo sapiens
gtttgagtctggggt

SEQ ID NO: 174623 - DNA, 15 bp, Homo sapiens
agtttgagtctgggg

SEQ ID NO: 174624 - DNA, 15 bp, Homo sapiens
gagtttgagtctggg

SEQ ID NO: 174625 - DNA, 15 bp, Homo sapiens
tgagtttgagtctgg

SEQ ID NO: 174626 - DNA, 15 bp, Homo sapiens
ttgagtttgagtctg

SEQ ID NO: 174627 - DNA, 15 bp, Homo sapiens
cttgagtttgagtct

SEQ ID NO: 174628 - DNA, 15 bp, Homo sapiens
ccttgagtttgagtc

SEQ ID NO: 174629 - DNA, 15 bp, Homo sapiens
accttgagtttgagt

SEQ ID NO: 174630 - DNA, 15 bp, Homo sapiens
gaccttgagtttgag

SEQ ID NO: 174631 - DNA, 15 bp, Homo sapiens
tgaccttgagtttga

SEQ ID NO: 174632 - DNA, 15 bp, Homo sapiens
ttgaccttgagtttg

SEQ ID NO: 174633 - DNA, 15 bp, Homo sapiens
gttgaccttgagttt

SEQ ID NO: 174634 - DNA, 15 bp, Homo sapiens
cgttgaccttgagtt

SEQ ID NO: 174635 - DNA, 15 bp, Homo sapiens
ccgttgaccttgagt

SEQ ID NO: 174636 - DNA, 15 bp, Homo sapiens
gccgttgaccttgag

SEQ ID NO: 174637 - DNA, 15 bp, Homo sapiens
agccgttgaccttga

SEQ ID NO: 174638 - DNA, 15 bp, Homo sapiens
aagccgttgaccttg

SEQ ID NO: 174639 - DNA, 15 bp, Homo sapiens
taagccgttgacctt

SEQ ID NO: 174640 - DNA, 15 bp, Homo sapiens
ataagccgttgacct

SEQ ID NO: 174641 - DNA, 15 bp, Homo sapiens
aataagccgttgacc

SEQ ID NO: 174642 - DNA, 15 bp, Homo sapiens
taataagccgttgac

SEQ ID NO: 174643 - DNA, 15 bp, Homo sapiens
ctaataagccgttga

SEQ ID NO: 174644 - DNA, 15 bp, Homo sapiens
actaataagccgttg

SEQ ID NO: 174645 - DNA, 15 bp, Homo sapiens
cactaataagccgtt

SEQ ID NO: 174646 - DNA, 15 bp, Homo sapiens
tcactaataagccgt

SEQ ID NO: 174647 - DNA, 15 bp, Homo sapiens
ttcactaataagccg

SEQ ID NO: 174648 - DNA, 15 bp, Homo sapiens
tttcactaataagcc

SEQ ID NO: 174649 - DNA, 15 bp, Homo sapiens
gtttcactaataagc

SEQ ID NO: 174650 - DNA, 15 bp, Homo sapiens
agtttcactaataag

SEQ ID NO: 174651 - DNA, 15 bp, Homo sapiens
cagtttcactaataa

SEQ ID NO: 174652 - DNA, 15 bp, Homo sapiens
ccagtttcactaata

SEQ ID NO: 174653 - DNA, 15 bp, Homo sapiens
cccagtttcactaat

SEQ ID NO: 174654 - DNA, 15 bp, Homo sapiens
ccccagtttcactaa

SEQ ID NO: 174655 - DNA, 15 bp, Homo sapiens
gccccagtttcacta

SEQ ID NO: 174656 - DNA, 15 bp, Homo sapiens
agccccagtttcact

SEQ ID NO: 174657 - DNA, 15 bp, Homo sapiens
aagccccagtttcac

SEQ ID NO: 174658 - DNA, 15 bp, Homo sapiens
caagccccagtttca

SEQ ID NO: 174659 - DNA, 15 bp, Homo sapiens
gcaagccccagtttc

SEQ ID NO: 174660 - DNA, 15 bp, Homo sapiens
tgcaagccccagttt

SEQ ID NO: 174661 - DNA, 15 bp, Homo sapiens
ttgcaagccccagtt

SEQ ID NO: 174662 - DNA, 15 bp, Homo sapiens
cttgcaagccccagt

SEQ ID NO: 174663 - DNA, 15 bp, Homo sapiens
tcttgcaagccccag

SEQ ID NO: 174664 - DNA, 15 bp, Homo sapiens
ctcttgcaagcccca

SEQ ID NO: 174665 - DNA, 15 bp, Homo sapiens
cctcttgcaagcccc

SEQ ID NO: 174666 - DNA, 15 bp, Homo sapiens
tcctcttgcaagccc

SEQ ID NO: 174667 - DNA, 15 bp, Homo sapiens
ctcctcttgcaagcc

SEQ ID NO: 174668 - DNA, 15 bp, Homo sapiens
cctcctcttgcaagc

SEQ ID NO: 174669 - DNA, 15 bp, Homo sapiens
acctcctcttgcaag

SEQ ID NO: 174670 - DNA, 15 bp, Homo sapiens
cacctcctcttgcaa

SEQ ID NO: 174671 - DNA, 15 bp, Homo sapiens
ccacctcctcttgca

SEQ ID NO: 174672 - DNA, 15 bp, Homo sapiens
accacctcctcttgc

SEQ ID NO: 174673 - DNA, 15 bp, Homo sapiens
aaccacctcctcttg

SEQ ID NO: 174674 - DNA, 15 bp, Homo sapiens
gaaccacctcctctt

SEQ ID NO: 174675 - DNA, 15 bp, Homo sapiens
agaaccacctcctct

SEQ ID NO: 174676 - DNA, 15 bp, Homo sapiens
cagaaccacctcctc

SEQ ID NO: 174677 - DNA, 15 bp, Homo sapiens
tcagaaccacctcct

SEQ ID NO: 174678 - DNA, 15 bp, Homo sapiens
ttcagaaccacctcc

SEQ ID NO: 174679 - DNA, 15 bp, Homo sapiens
tttcagaaccacctc

SEQ ID NO: 174680 - DNA, 15 bp, Homo sapiens
ctttcagaaccacct

SEQ ID NO: 174681 - DNA, 15 bp, Homo sapiens
actttcagaaccacc

SEQ ID NO: 174682 - DNA, 15 bp, Homo sapiens
cactttcagaaccac

SEQ ID NO: 174683 - DNA, 15 bp, Homo sapiens
ccactttcagaacca

SEQ ID NO: 174684 - DNA, 15 bp, Homo sapiens
gccactttcagaacc

SEQ ID NO: 174685 - DNA, 15 bp, Homo sapiens
agccactttcagaac

SEQ ID NO: 174686 - DNA, 15 bp, Homo sapiens
gagccactttcagaa

SEQ ID NO: 174687 - DNA, 15 bp, Homo sapiens
agagccactttcaga

SEQ ID NO: 174688 - DNA, 15 bp, Homo sapiens
aagagccactttcag

SEQ ID NO: 174689 - DNA, 15 bp, Homo sapiens
gaagagccactttca

SEQ ID NO: 174690 - DNA, 15 bp, Homo sapiens
agaagagccactttc

SEQ ID NO: 174691 - DNA, 15 bp, Homo sapiens
tagaagagccacttt

SEQ ID NO: 174692 - DNA, 15 bp, Homo sapiens
ttagaagagccactt

SEQ ID NO: 174693 - DNA, 15 bp, Homo sapiens
gttagaagagccact

SEQ ID NO: 174694 - DNA, 15 bp, Homo sapiens
ggttagaagagccac

SEQ ID NO: 174695 - DNA, 15 bp, Homo sapiens
aggttagaagagcca

SEQ ID NO: 174696 - DNA, 15 bp, Homo sapiens
gaggttagaagagcc

SEQ ID NO: 174697 - DNA, 15 bp, Homo sapiens
tgaggttagaagagc

SEQ ID NO: 174698 - DNA, 15 bp, Homo sapiens
ctgaggttagaagag

SEQ ID NO: 174699 - DNA, 15 bp, Homo sapiens
gctgaggttagaaga

SEQ ID NO: 174700 - DNA, 15 bp, Homo sapiens
ggctgaggttagaag

SEQ ID NO: 174701 - DNA, 15 bp, Homo sapiens
tggctgaggttagaa

SEQ ID NO: 174702 - DNA, 15 bp, Homo sapiens
ttggctgaggttaga

SEQ ID NO: 174703 - DNA, 15 bp, Homo sapiens
tttggctgaggttag

SEQ ID NO: 174704 - DNA, 15 bp, Homo sapiens
gtttggctgaggtta

SEQ ID NO: 174705 - DNA, 15 bp, Homo sapiens
tgtttggctgaggtt

SEQ ID NO: 174706 - DNA, 15 bp, Homo sapiens
gtgtttggctgaggt

SEQ ID NO: 174707 - DNA, 15 bp, Homo sapiens
tgtgtttggctgagg

SEQ ID NO: 174708 - DNA, 15 bp, Homo sapiens
ctgtgtttggctgag

SEQ ID NO: 174709 - DNA, 15 bp, Homo sapiens
tctgtgtttggctga

SEQ ID NO: 174710 - DNA, 15 bp, Homo sapiens
ctctgtgtttggctg

SEQ ID NO: 174711 - DNA, 15 bp, Homo sapiens
gctctgtgtttggct

SEQ ID NO: 174712 - DNA, 15 bp, Homo sapiens
cgctctgtgtttggc

SEQ ID NO: 174713 - DNA, 15 bp, Homo sapiens
ccgctctgtgtttgg

SEQ ID NO: 174714 - DNA, 15 bp, Homo sapiens
cccgctctgtgtttg

SEQ ID NO: 174715 - DNA, 15 bp, Homo sapiens
tcccgctctgtgttt

SEQ ID NO: 174716 - DNA, 15 bp, Homo sapiens
ctcccgctctgtgtt

SEQ ID NO: 174717 - DNA, 15 bp, Homo sapiens
actcccgctctgtgt

SEQ ID NO: 174718 - DNA, 15 bp, Homo sapiens
cactcccgctctgtg

SEQ ID NO: 174719 - DNA, 15 bp, Homo sapiens
tcactcccgctctgt

SEQ ID NO: 174720 - DNA, 15 bp, Homo sapiens
gtcactcccgctctg

SEQ ID NO: 174721 - DNA, 15 bp, Homo sapiens
cgtcactcccgctct

SEQ ID NO: 174722 - DNA, 15 bp, Homo sapiens
ccgtcactcccgctc

SEQ ID NO: 174723 - DNA, 15 bp, Homo sapiens
cccgtcactcccgct

SEQ ID NO: 174724 - DNA, 15 bp, Homo sapiens
tcccgtcactcccgc

SEQ ID NO: 174725 - DNA, 15 bp, Homo sapiens
ctcccgtcactcccg

SEQ ID NO: 174726 - DNA, 15 bp, Homo sapiens
gctcccgtcactccc

SEQ ID NO: 174727 - DNA, 15 bp, Homo sapiens
ggctcccgtcactcc

SEQ ID NO: 174728 - DNA, 15 bp, Homo sapiens
aggctcccgtcactc

SEQ ID NO: 174729 - DNA, 15 bp, Homo sapiens
gaggctcccgtcact

SEQ ID NO: 174730 - DNA, 15 bp, Homo sapiens
ggaggctcccgtcac

SEQ ID NO: 174731 - DNA, 15 bp, Homo sapiens
aggaggctcccgtca

SEQ ID NO: 174732 - DNA, 15 bp, Homo sapiens
gaggaggctcccgtc

SEQ ID NO: 174733 - DNA, 15 bp, Homo sapiens
agaggaggctcccgt

SEQ ID NO: 174734 - DNA, 15 bp, Homo sapiens
cagaggaggctcccg

SEQ ID NO: 174735 - DNA, 15 bp, Homo sapiens
gcagaggaggctccc

SEQ ID NO: 174736 - DNA, 15 bp, Homo sapiens
agcagaggaggctcc

SEQ ID NO: 174737 - DNA, 15 bp, Homo sapiens
aagcagaggaggctc

SEQ ID NO: 174738 - DNA, 15 bp, Homo sapiens
caagcagaggaggct

SEQ ID NO: 174739 - DNA, 15 bp, Homo sapiens
gcaagcagaggaggc

SEQ ID NO: 174740 - DNA, 15 bp, Homo sapiens
tgcaagcagaggagg

SEQ ID NO: 174741 - DNA, 15 bp, Homo sapiens
atgcaagcagaggag

SEQ ID NO: 174742 - DNA, 15 bp, Homo sapiens
gatgcaagcagagga

SEQ ID NO: 174743 - DNA, 15 bp, Homo sapiens
tgatgcaagcagagg

SEQ ID NO: 174744 - DNA, 15 bp, Homo sapiens
gtgatgcaagcagag

SEQ ID NO: 174745 - DNA, 15 bp, Homo sapiens
agtgatgcaagcaga

SEQ ID NO: 174746 - DNA, 15 bp, Homo sapiens
aagtgatgcaagcag

SEQ ID NO: 174747 - DNA, 15 bp, Homo sapiens
caagtgatgcaagca

SEQ ID NO: 174748 - DNA, 15 bp, Homo sapiens
ccaagtgatgcaagc

SEQ ID NO: 174749 - DNA, 15 bp, Homo sapiens
cccaagtgatgcaag

SEQ ID NO: 174750 - DNA, 15 bp, Homo sapiens
ccccaagtgatgcaa

SEQ ID NO: 174751 - DNA, 15 bp, Homo sapiens
accccaagtgatgca

SEQ ID NO: 174752 - DNA, 15 bp, Homo sapiens
gaccccaagtgatgc

SEQ ID NO: 174753 - DNA, 15 bp, Homo sapiens
tgaccccaagtgatg

SEQ ID NO: 174754 - DNA, 15 bp, Homo sapiens
gtgaccccaagtgat

SEQ ID NO: 174755 - DNA, 15 bp, Homo sapiens
ggtgaccccaagtga

SEQ ID NO: 174756 - DNA, 15 bp, Homo sapiens
tggtgaccccaagtg

SEQ ID NO: 174757 - DNA, 15 bp, Homo sapiens
gtggtgaccccaagt

SEQ ID NO: 174758 - DNA, 15 bp, Homo sapiens
ggtggtgaccccaag

SEQ ID NO: 174759 - DNA, 15 bp, Homo sapiens
gggtggtgaccccaa

SEQ ID NO: 174760 - DNA, 15 bp, Homo sapiens
agggtggtgacccca

SEQ ID NO: 174761 - DNA, 15 bp, Homo sapiens
gagggtggtgacccc

SEQ ID NO: 174762 - DNA, 15 bp, Homo sapiens
ggagggtggtgaccc

SEQ ID NO: 174763 - DNA, 15 bp, Homo sapiens
gggagggtggtgacc

SEQ ID NO: 174764 - DNA, 15 bp, Homo sapiens
ggggagggtggtgac

SEQ ID NO: 174765 - DNA, 15 bp, Homo sapiens
aggggagggtggtga

SEQ ID NO: 174766 - DNA, 15 bp, Homo sapiens
caggggagggtggtg

SEQ ID NO: 174767 - DNA, 15 bp, Homo sapiens
acaggggagggtggt

SEQ ID NO: 174768 - DNA, 15 bp, Homo sapiens
gacaggggagggtgg

SEQ ID NO: 174769 - DNA, 15 bp, Homo sapiens
agacaggggagggtg

SEQ ID NO: 174770 - DNA, 15 bp, Homo sapiens
aagacaggggagggt

SEQ ID NO: 174771 - DNA, 15 bp, Homo sapiens
gaagacaggggaggg

SEQ ID NO: 174772 - DNA, 15 bp, Homo sapiens
agaagacaggggagg

SEQ ID NO: 174773 - DNA, 15 bp, Homo sapiens
gagaagacaggggag

SEQ ID NO: 174774 - DNA, 15 bp, Homo sapiens
agagaagacagggga

SEQ ID NO: 174775 - DNA, 15 bp, Homo sapiens
gagagaagacagggg

SEQ ID NO: 174776 - DNA, 15 bp, Homo sapiens
tgagagaagacaggg

SEQ ID NO: 174777 - DNA, 15 bp, Homo sapiens
ttgagagaagacagg

SEQ ID NO: 174778 - DNA, 15 bp, Homo sapiens
tttgagagaagacag

SEQ ID NO: 174779 - DNA, 15 bp, Homo sapiens
ctttgagagaagaca

SEQ ID NO: 174780 - DNA, 15 bp, Homo sapiens
cctttgagagaagac

SEQ ID NO: 174781 - DNA, 15 bp, Homo sapiens
ccctttgagagaaga

SEQ ID NO: 174782 - DNA, 15 bp, Homo sapiens
tccctttgagagaag

SEQ ID NO: 174783 - DNA, 15 bp, Homo sapiens
ttccctttgagagaa

SEQ ID NO: 174784 - DNA, 15 bp, Homo sapiens
cttccctttgagaga

SEQ ID NO: 174785 - DNA, 15 bp, Homo sapiens
gcttccctttgagag

SEQ ID NO: 174786 - DNA, 15 bp, Homo sapiens
agcttccctttgaga

SEQ ID NO: 174787 - DNA, 15 bp, Homo sapiens
cagcttccctttgag

SEQ ID NO: 174788 - DNA, 15 bp, Homo sapiens
acagcttccctttga

SEQ ID NO: 174789 - DNA, 15 bp, Homo sapiens
aacagcttccctttg

SEQ ID NO: 174790 - DNA, 15 bp, Homo sapiens
aaacagcttcccttt

SEQ ID NO: 174791 - DNA, 15 bp, Homo sapiens
caaacagcttccctt

SEQ ID NO: 174792 - DNA, 15 bp, Homo sapiens
acaaacagcttccct

SEQ ID NO: 174793 - DNA, 15 bp, Homo sapiens
cacaaacagcttccc

SEQ ID NO: 174794 - DNA, 15 bp, Homo sapiens
acacaaacagcttcc

SEQ ID NO: 174795 - DNA, 15 bp, Homo sapiens
cacacaaacagcttc

SEQ ID NO: 174796 - DNA, 15 bp, Homo sapiens
acacacaaacagctt

SEQ ID NO: 174797 - DNA, 15 bp, Homo sapiens
gacacacaaacagct

SEQ ID NO: 174798 - DNA, 15 bp, Homo sapiens
ccagacacacaaaca

SEQ ID NO: 174799 - DNA, 15 bp, Homo sapiens
cccagacacacaaac

SEQ ID NO: 174800 - DNA, 15 bp, Homo sapiens
acccagacacacaaa

SEQ ID NO: 174801 - DNA, 15 bp, Homo sapiens
aacccagacacacaa

SEQ ID NO: 174802 - DNA, 15 bp, Homo sapiens
caacccagacacaca

SEQ ID NO: 174803 - DNA, 15 bp, Homo sapiens
gcaacccagacacac

SEQ ID NO: 174804 - DNA, 15 bp, Homo sapiens
agcaacccagacaca

SEQ ID NO: 174805 - DNA, 15 bp, Homo sapiens
aagcaacccagacac

SEQ ID NO: 174806 - DNA, 15 bp, Homo sapiens
taagcaacccagaca

SEQ ID NO: 174807 - DNA, 15 bp, Homo sapiens
ataagcaacccagac

SEQ ID NO: 174808 - DNA, 15 bp, Homo sapiens
aataagcaacccaga

SEQ ID NO: 174809 - DNA, 15 bp, Homo sapiens
aaataagcaacccag

SEQ ID NO: 174810 - DNA, 15 bp, Homo sapiens
gaaataagcaaccca

SEQ ID NO: 174811 - DNA, 15 bp, Homo sapiens
ggaaataagcaaccc

SEQ ID NO: 174812 - DNA, 15 bp, Homo sapiens
gggaaataagcaacc

SEQ ID NO: 174813 - DNA, 15 bp, Homo sapiens
agggaaataagcaac

SEQ ID NO: 174814 - DNA, 15 bp, Homo sapiens
gagggaaataagcaa

SEQ ID NO: 174815 - DNA, 15 bp, Homo sapiens
tgagggaaataagca

SEQ ID NO: 174816 - DNA, 15 bp, Homo sapiens
atgagggaaataagc

SEQ ID NO: 174817 - DNA, 15 bp, Homo sapiens
gatgagggaaataag

SEQ ID NO: 174818 - DNA, 15 bp, Homo sapiens
agatgagggaaataa

SEQ ID NO: 174819 - DNA, 15 bp, Homo sapiens
aagatgagggaaata

SEQ ID NO: 174820 - DNA, 15 bp, Homo sapiens
caagatgagggaaat

SEQ ID NO: 174821 - DNA, 15 bp, Homo sapiens
gcaagatgagggaaa

SEQ ID NO: 174822 - DNA, 15 bp, Homo sapiens
ggcaagatgagggaa

SEQ ID NO: 174823 - DNA, 15 bp, Homo sapiens
gggcaagatgaggga

SEQ ID NO: 174824 - DNA, 15 bp, Homo sapiens
ggggcaagatgaggg

SEQ ID NO: 174825 - DNA, 15 bp, Homo sapiens
gggggcaagatgagg

SEQ ID NO: 174826 - DNA, 15 bp, Homo sapiens
agggggcaagatgag

SEQ ID NO: 174827 - DNA, 15 bp, Homo sapiens
gagggggcaagatga

SEQ ID NO: 174828 - DNA, 15 bp, Homo sapiens
tgagggggcaagatg

SEQ ID NO: 174829 - DNA, 15 bp, Homo sapiens
atgagggggcaagat

SEQ ID NO: 174830 - DNA, 15 bp, Homo sapiens
gatgagggggcaaga

SEQ ID NO: 174831 - DNA, 15 bp, Homo sapiens
agatgagggggcaag

SEQ ID NO: 174832 - DNA, 15 bp, Homo sapiens
gagatgagggggcaa

SEQ ID NO: 174833 - DNA, 15 bp, Homo sapiens
tgagatgagggggca

SEQ ID NO: 174834 - DNA, 15 bp, Homo sapiens
gtgagatgagggggc

SEQ ID NO: 174835 - DNA, 15 bp, Homo sapiens
agtgagatgaggggg

SEQ ID NO: 174836 - DNA, 15 bp, Homo sapiens
cagtgagatgagggg

SEQ ID NO: 174837 - DNA, 15 bp, Homo sapiens
gcagtgagatgaggg

SEQ ID NO: 174838 - DNA, 15 bp, Homo sapiens
ggcagtgagatgagg

SEQ ID NO: 174839 - DNA, 15 bp, Homo sapiens
gggcagtgagatgag

SEQ ID NO: 174840 - DNA, 15 bp, Homo sapiens
tgggcagtgagatga

SEQ ID NO: 174841 - DNA, 15 bp, Homo sapiens
ctgggcagtgagatg

SEQ ID NO: 174842 - DNA, 15 bp, Homo sapiens
actgggcagtgagat

SEQ ID NO: 174843 - DNA, 15 bp, Homo sapiens
aactgggcagtgaga

SEQ ID NO: 174844 - DNA, 15 bp, Homo sapiens
aaactgggcagtgag

SEQ ID NO: 174845 - DNA, 15 bp, Homo sapiens
gaaactgggcagtga

SEQ ID NO: 174846 - DNA, 15 bp, Homo sapiens
agaaactgggcagtg

SEQ ID NO: 174847 - DNA, 15 bp, Homo sapiens
aagaaactgggcagt

SEQ ID NO: 174848 - DNA, 15 bp, Homo sapiens
aaagaaactgggcag

SEQ ID NO: 174849 - DNA, 15 bp, Homo sapiens
aaaagaaactgggca

SEQ ID NO: 174850 - DNA, 15 bp, Homo sapiens
aaaaagaaactgggc

SEQ ID NO: 174851 - DNA, 15 bp, Homo sapiens
caaaaagaaactggg

SEQ ID NO: 174852 - DNA, 15 bp, Homo sapiens
tcaaaaagaaactgg

SEQ ID NO: 174853 - DNA, 15 bp, Homo sapiens
ctcaaaaagaaactg

SEQ ID NO: 174854 - DNA, 15 bp, Homo sapiens
cctcaaaaagaaact

SEQ ID NO: 174855 - DNA, 15 bp, Homo sapiens
ccctcaaaaagaaac

SEQ ID NO: 174856 - DNA, 15 bp, Homo sapiens
cccctcaaaaagaaa

SEQ ID NO: 174857 - DNA, 15 bp, Homo sapiens
gcccctcaaaaagaa

SEQ ID NO: 174858 - DNA, 15 bp, Homo sapiens
agcccctcaaaaaga

SEQ ID NO: 174859 - DNA, 15 bp, Homo sapiens
aagcccctcaaaaag

SEQ ID NO: 174860 - DNA, 15 bp, Homo sapiens
aaagcccctcaaaaa

SEQ ID NO: 174861 - DNA, 15 bp, Homo sapiens
caaagcccctcaaaa

SEQ ID NO: 174862 - DNA, 15 bp, Homo sapiens
acaaagcccctcaaa

SEQ ID NO: 174863 - DNA, 15 bp, Homo sapiens
aacaaagcccctcaa

SEQ ID NO: 174864 - DNA, 15 bp, Homo sapiens
aaacaaagcccctca

SEQ ID NO: 174865 - DNA, 15 bp, Homo sapiens
caaacaaagcccctc

SEQ ID NO: 174866 - DNA, 15 bp, Homo sapiens
ccaaacaaagcccct

SEQ ID NO: 174867 - DNA, 15 bp, Homo sapiens
cccaaacaaagcccc

SEQ ID NO: 174868 - DNA, 15 bp, Homo sapiens
gcccaaacaaagccc

SEQ ID NO: 174869 - DNA, 15 bp, Homo sapiens
ggcccaaacaaagcc

SEQ ID NO: 174870 - DNA, 15 bp, Homo sapiens
tggcccaaacaaagc

SEQ ID NO: 174871 - DNA, 15 bp, Homo sapiens
gtggcccaaacaaag

SEQ ID NO: 174872 - DNA, 15 bp, Homo sapiens
agtggcccaaacaaa

SEQ ID NO: 174873 - DNA, 15 bp, Homo sapiens
cagtggcccaaacaa

SEQ ID NO: 174874 - DNA, 15 bp, Homo sapiens
gcagtggcccaaaca

SEQ ID NO: 174875 - DNA, 15 bp, Homo sapiens
ggcagtggcccaaac

SEQ ID NO: 174876 - DNA, 15 bp, Homo sapiens
tggcagtggcccaaa

SEQ ID NO: 174877 - DNA, 15 bp, Homo sapiens
ctggcagtggcccaa

SEQ ID NO: 174878 - DNA, 15 bp, Homo sapiens
gctggcagtggccca

SEQ ID NO: 174879 - DNA, 15 bp, Homo sapiens
tgctggcagtggccc

SEQ ID NO: 174880 - DNA, 15 bp, Homo sapiens
ctgctggcagtggcc

SEQ ID NO: 174881 - DNA, 15 bp, Homo sapiens
gctgctggcagtggc

SEQ ID NO: 174882 - DNA, 15 bp, Homo sapiens
agctgctggcagtgg

SEQ ID NO: 174883 - DNA, 15 bp, Homo sapiens
cagctgctggcagtg

SEQ ID NO: 174884 - DNA, 15 bp, Homo sapiens
acagctgctggcagt

SEQ ID NO: 174885 - DNA, 15 bp, Homo sapiens
aacagctgctggcag

SEQ ID NO: 174886 - DNA, 15 bp, Homo sapiens
aaacagctgctggca

SEQ ID NO: 174887 - DNA, 15 bp, Homo sapiens
gaaacagctgctggc

SEQ ID NO: 174888 - DNA, 15 bp, Homo sapiens
agaaacagctgctgg

SEQ ID NO: 174889 - DNA, 15 bp, Homo sapiens
cagaaacagctgctg

SEQ ID NO: 174890 - DNA, 15 bp, Homo sapiens
ccagaaacagctgct

SEQ ID NO: 174891 - DNA, 15 bp, Homo sapiens
tccagaaacagctgc

SEQ ID NO: 174892 - DNA, 15 bp, Homo sapiens
ttccagaaacagctg

SEQ ID NO: 174893 - DNA, 15 bp, Homo sapiens
tttccagaaacagct

SEQ ID NO: 174894 - DNA, 15 bp, Homo sapiens
atttccagaaacagc

SEQ ID NO: 174895 - DNA, 15 bp, Homo sapiens
catttccagaaacag

SEQ ID NO: 174896 - DNA, 15 bp, Homo sapiens
ccatttccagaaaca

SEQ ID NO: 174897 - DNA, 15 bp, Homo sapiens
gccatttccagaaac

SEQ ID NO: 174898 - DNA, 15 bp, Homo sapiens
agccatttccagaaa

SEQ ID NO: 174899 - DNA, 15 bp, Homo sapiens
cagccatttccagaa

SEQ ID NO: 174900 - DNA, 15 bp, Homo sapiens
acagccatttccaga

SEQ ID NO: 174901 - DNA, 15 bp, Homo sapiens
tacagccatttccag

SEQ ID NO: 174902 - DNA, 15 bp, Homo sapiens
ctacagccatttcca

SEQ ID NO: 174903 - DNA, 15 bp, Homo sapiens
cctacagccatttcc

SEQ ID NO: 174904 - DNA, 15 bp, Homo sapiens
acctacagccatttc

SEQ ID NO: 174905 - DNA, 15 bp, Homo sapiens
cacctacagccattt

SEQ ID NO: 174906 - DNA, 15 bp, Homo sapiens
ccacctacagccatt

SEQ ID NO: 174907 - DNA, 15 bp, Homo sapiens
accacctacagccat

SEQ ID NO: 174908 - DNA, 15 bp, Homo sapiens
aacaccacctacagc

SEQ ID NO: 174909 - DNA, 15 bp, Homo sapiens
caacaccacctacag

SEQ ID NO: 174910 - DNA, 15 bp, Homo sapiens
tcaacaccacctaca

SEQ ID NO: 174911 - DNA, 15 bp, Homo sapiens
ctcaacaccacctac

SEQ ID NO: 174912 - DNA, 15 bp, Homo sapiens
tctcaacaccaccta

SEQ ID NO: 174913 - DNA, 15 bp, Homo sapiens
ttctcaacaccacct

SEQ ID NO: 174914 - DNA, 15 bp, Homo sapiens
tttctcaacaccacc

SEQ ID NO: 174915 - DNA, 15 bp, Homo sapiens
ctttctcaacaccac

SEQ ID NO: 174916 - DNA, 15 bp, Homo sapiens
tctttctcaacacca

SEQ ID NO: 174917 - DNA, 15 bp, Homo sapiens
ttctttctcaacacc

SEQ ID NO: 174918 - DNA, 15 bp, Homo sapiens
attctttctcaacac

SEQ ID NO: 174919 - DNA, 15 bp, Homo sapiens
cattctttctcaaca

SEQ ID NO: 174920 - DNA, 15 bp, Homo sapiens
tcattctttctcaac

SEQ ID NO: 174921 - DNA, 15 bp, Homo sapiens
ctcattctttctcaa

SEQ ID NO: 174922 - DNA, 15 bp, Homo sapiens
gctcattctttctca

SEQ ID NO: 174923 - DNA, 15 bp, Homo sapiens
tgctcattctttctc

SEQ ID NO: 174924 - DNA, 15 bp, Homo sapiens
atgctcattctttct

SEQ ID NO: 174925 - DNA, 15 bp, Homo sapiens
aatgctcattctttc

SEQ ID NO: 174926 - DNA, 15 bp, Homo sapiens
caatgctcattcttt

SEQ ID NO: 174927 - DNA, 15 bp, Homo sapiens
tcaatgctcattctt

SEQ ID NO: 174928 - DNA, 15 bp, Homo sapiens
ctcaatgctcattct

SEQ ID NO: 174929 - DNA, 15 bp, Homo sapiens
tctcaatgctcattc

SEQ ID NO: 174930 - DNA, 15 bp, Homo sapiens
gtctcaatgctcatt

SEQ ID NO: 174931 - DNA, 15 bp, Homo sapiens
cgtctcaatgctcat

SEQ ID NO: 174932 - DNA, 15 bp, Homo sapiens
ccgtctcaatgctca

SEQ ID NO: 174933 - DNA, 15 bp, Homo sapiens
accgtctcaatgctc

SEQ ID NO: 174934 - DNA, 15 bp, Homo sapiens
caccgtctcaatgct

SEQ ID NO: 174935 - DNA, 15 bp, Homo sapiens
gcaccgtctcaatgc

SEQ ID NO: 174936 - DNA, 15 bp, Homo sapiens
agcaccgtctcaatg

SEQ ID NO: 174937 - DNA, 15 bp, Homo sapiens
gagcaccgtctcaat

SEQ ID NO: 174938 - DNA, 15 bp, Homo sapiens
cgagcaccgtctcaa

SEQ ID NO: 174939 - DNA, 15 bp, Homo sapiens
gcgagcaccgtctca

SEQ ID NO: 174940 - DNA, 15 bp, Homo sapiens
agcgagcaccgtctc

SEQ ID NO: 174941 - DNA, 15 bp, Homo sapiens
aagcgagcaccgtct

SEQ ID NO: 174942 - DNA, 15 bp, Homo sapiens
gaagcgagcaccgtc

SEQ ID NO: 174943 - DNA, 15 bp, Homo sapiens
agaagcgagcaccgt

SEQ ID NO: 174944 - DNA, 15 bp, Homo sapiens
gagaagcgagcaccg

SEQ ID NO: 174945 - DNA, 15 bp, Homo sapiens
ggagaagcgagcacc

SEQ ID NO: 174946 - DNA, 15 bp, Homo sapiens
aggagaagcgagcac

SEQ ID NO: 174947 - DNA, 15 bp, Homo sapiens
gaggagaagcgagca

SEQ ID NO: 174948 - DNA, 15 bp, Homo sapiens
ggaggagaagcgagc

SEQ ID NO: 174949 - DNA, 15 bp, Homo sapiens
tggaggagaagcgag

SEQ ID NO: 174950 - DNA, 15 bp, Homo sapiens
ctggaggagaagcga

SEQ ID NO: 174951 - DNA, 15 bp, Homo sapiens
cctggaggagaagcg

SEQ ID NO: 174952 - DNA, 15 bp, Homo sapiens
acctggaggagaagc

SEQ ID NO: 174953 - DNA, 15 bp, Homo sapiens
tacctggaggagaag

SEQ ID NO: 174954 - DNA, 15 bp, Homo sapiens
atacctggaggagaa

SEQ ID NO: 174955 - DNA, 15 bp, Homo sapiens
aatacctggaggaga

SEQ ID NO: 174956 - DNA, 15 bp, Homo sapiens
aaatacctggaggag

SEQ ID NO: 174957 - DNA, 15 bp, Homo sapiens
caaatacctggagga

SEQ ID NO: 174958 - DNA, 15 bp, Homo sapiens
tcaaatacctggagg

SEQ ID NO: 174959 - DNA, 15 bp, Homo sapiens
ctcaaatacctggag

SEQ ID NO: 174960 - DNA, 15 bp, Homo sapiens
actcaaatacctgga

SEQ ID NO: 174961 - DNA, 15 bp, Homo sapiens
aactcaaatacctgg

SEQ ID NO: 174962 - DNA, 15 bp, Homo sapiens
caactcaaatacctg

SEQ ID NO: 174963 - DNA, 15 bp, Homo sapiens
acaactcaaatacct

SEQ ID NO: 174964 - DNA, 15 bp, Homo sapiens
aacaactcaaatacc

SEQ ID NO: 174965 - DNA, 15 bp, Homo sapiens
aaacaactcaaatac

SEQ ID NO: 174966 - DNA, 15 bp, Homo sapiens
aaaacaactcaaata

SEQ ID NO: 174967 - DNA, 15 bp, Homo sapiens
caaaacaactcaaat

SEQ ID NO: 174968 - DNA, 15 bp, Homo sapiens
ccaaaacaactcaaa

SEQ ID NO: 174969 - DNA, 15 bp, Homo sapiens
accaaaacaactcaa

SEQ ID NO: 174970 - DNA, 15 bp, Homo sapiens
caccaaaacaactca

SEQ ID NO: 174971 - DNA, 15 bp, Homo sapiens
gcaccaaaacaactc

SEQ ID NO: 174972 - DNA, 15 bp, Homo sapiens
ggcaccaaaacaact

SEQ ID NO: 174973 - DNA, 15 bp, Homo sapiens
aggcaccaaaacaac

SEQ ID NO: 174974 - DNA, 15 bp, Homo sapiens
caggcaccaaaacaa

SEQ ID NO: 174975 - DNA, 15 bp, Homo sapiens
gcaggcaccaaaaca

SEQ ID NO: 174976 - DNA, 15 bp, Homo sapiens
ggcaggcaccaaaac

SEQ ID NO: 174977 - DNA, 15 bp, Homo sapiens
aggcaggcaccaaaa

SEQ ID NO: 174978 - DNA, 15 bp, Homo sapiens
gaggcaggcaccaaa

SEQ ID NO: 174979 - DNA, 15 bp, Homo sapiens
agaggcaggcaccaa

SEQ ID NO: 174980 - DNA, 15 bp, Homo sapiens
cagaggcaggcacca

SEQ ID NO: 174981 - DNA, 15 bp, Homo sapiens
gcagaggcaggcacc

SEQ ID NO: 174982 - DNA, 15 bp, Homo sapiens
ggcagaggcaggcac

SEQ ID NO: 174983 - DNA, 15 bp, Homo sapiens
tggcagaggcaggca

SEQ ID NO: 174984 - DNA, 15 bp, Homo sapiens
atggcagaggcaggc

SEQ ID NO: 174985 - DNA, 15 bp, Homo sapiens
catggcagaggcagg

SEQ ID NO: 174986 - DNA, 15 bp, Homo sapiens
gcatggcagaggcag

SEQ ID NO: 174987 - DNA, 15 bp, Homo sapiens
ggcatggcagaggca

SEQ ID NO: 174988 - DNA, 15 bp, Homo sapiens
gggcatggcagaggc

SEQ ID NO: 174989 - DNA, 15 bp, Homo sapiens
tgggcatggcagagg

SEQ ID NO: 174990 - DNA, 15 bp, Homo sapiens
ctgggcatggcagag

SEQ ID NO: 174991 - DNA, 15 bp, Homo sapiens
tctgggcatggcaga

SEQ ID NO: 174992 - DNA, 15 bp, Homo sapiens
ctctgggcatggcag

SEQ ID NO: 174993 - DNA, 15 bp, Homo sapiens
tctctgggcatggca

SEQ ID NO: 174994 - DNA, 15 bp, Homo sapiens
ttctctgggcatggc

SEQ ID NO: 174995 - DNA, 15 bp, Homo sapiens
attctctgggcatgg

SEQ ID NO: 174996 - DNA, 15 bp, Homo sapiens
gattctctgggcatg

SEQ ID NO: 174997 - DNA, 15 bp, Homo sapiens
tgattctctgggcat

SEQ ID NO: 174998 - DNA, 15 bp, Homo sapiens
ctgattctctgggca

SEQ ID NO: 174999 - DNA, 15 bp, Homo sapiens
cctgattctctgggc

SEQ ID NO: 175000 - DNA, 15 bp, Homo sapiens
ccctgattctctggg

SEQ ID NO: 175001 - DNA, 15 bp, Homo sapiens
gccctgattctctgg

SEQ ID NO: 175002 - DNA, 15 bp, Homo sapiens
tgccctgattctctg

SEQ ID NO: 175003 - DNA, 15 bp, Homo sapiens
ctgccctgattctct

SEQ ID NO: 175004 - DNA, 15 bp, Homo sapiens
cctgccctgattctc

SEQ ID NO: 175005 - DNA, 15 bp, Homo sapiens
gcctgccctgattct

SEQ ID NO: 175006 - DNA, 15 bp, Homo sapiens
agcctgccctgattc

SEQ ID NO: 175007 - DNA, 15 bp, Homo sapiens
aagcctgccctgatt

SEQ ID NO: 175008 - DNA, 15 bp, Homo sapiens
caagcctgccctgat

SEQ ID NO: 175009 - DNA, 15 bp, Homo sapiens
gcaagcctgccctga

SEQ ID NO: 175010 - DNA, 15 bp, Homo sapiens
ggcaagcctgccctg

SEQ ID NO: 175011 - DNA, 15 bp, Homo sapiens
tggcaagcctgccct

SEQ ID NO: 175012 - DNA, 15 bp, Homo sapiens
gtggcaagcctgccc

SEQ ID NO: 175013 - DNA, 15 bp, Homo sapiens
ggtggcaagcctgcc

SEQ ID NO: 175014 - DNA, 15 bp, Homo sapiens
cggtggcaagcctgc

SEQ ID NO: 175015 - DNA, 15 bp, Homo sapiens
ccggtggcaagcctg

SEQ ID NO: 175016 - DNA, 15 bp, Homo sapiens
cccggtggcaagcct

SEQ ID NO: 175017 - DNA, 15 bp, Homo sapiens
ccccggtggcaagcc

SEQ ID NO: 175018 - DNA, 15 bp, Homo sapiens
tccccggtggcaagc

SEQ ID NO: 175019 - DNA, 15 bp, Homo sapiens
ttccccggtggcaag

SEQ ID NO: 175020 - DNA, 15 bp, Homo sapiens
gttccccggtggcaa

SEQ ID NO: 175021 - DNA, 15 bp, Homo sapiens
ggttccccggtggca

SEQ ID NO: 175022 - DNA, 15 bp, Homo sapiens
gggttccccggtggc

SEQ ID NO: 175023 - DNA, 15 bp, Homo sapiens
tgggttccccggtgg

SEQ ID NO: 175024 - DNA, 15 bp, Homo sapiens
ctgggttccccggtg

SEQ ID NO: 175025 - DNA, 15 bp, Homo sapiens
gctgggttccccggt

SEQ ID NO: 175026 - DNA, 15 bp, Homo sapiens
ggctgggttccccgg

SEQ ID NO: 175027 - DNA, 15 bp, Homo sapiens
gggctgggttccccg

SEQ ID NO: 175028 - DNA, 15 bp, Homo sapiens
agggctgggttcccc

SEQ ID NO: 175029 - DNA, 15 bp, Homo sapiens
cagggctgggttccc

SEQ ID NO: 175030 - DNA, 15 bp, Homo sapiens
ccagggctgggttcc

SEQ ID NO: 175031 - DNA, 15 bp, Homo sapiens
cccagggctgggttc

SEQ ID NO: 175032 - DNA, 15 bp, Homo sapiens
ccccagggctgggtt

SEQ ID NO: 175033 - DNA, 15 bp, Homo sapiens
accccagggctgggt

SEQ ID NO: 175034 - DNA, 15 bp, Homo sapiens
taccccagggctggg

SEQ ID NO: 175035 - DNA, 15 bp, Homo sapiens
ataccccagggctgg

SEQ ID NO: 175036 - DNA, 15 bp, Homo sapiens
cataccccagggctg

SEQ ID NO: 175037 - DNA, 15 bp, Homo sapiens
tcataccccagggct

SEQ ID NO: 175038 - DNA, 15 bp, Homo sapiens
ctcataccccagggc

SEQ ID NO: 175039 - DNA, 15 bp, Homo sapiens
gctcataccccaggg

SEQ ID NO: 175040 - DNA, 15 bp, Homo sapiens
agctcataccccagg

SEQ ID NO: 175041 - DNA, 15 bp, Homo sapiens
cagctcataccccag

SEQ ID NO: 175042 - DNA, 15 bp, Homo sapiens
gcagctcatacccca

SEQ ID NO: 175043 - DNA, 15 bp, Homo sapiens
ggcagctcatacccc

SEQ ID NO: 175044 - DNA, 15 bp, Homo sapiens
tggcagctcataccc

SEQ ID NO: 175045 - DNA, 15 bp, Homo sapiens
ttggcagctcatacc

SEQ ID NO: 175046 - DNA, 15 bp, Homo sapiens
cttggcagctcatac

SEQ ID NO: 175047 - DNA, 15 bp, Homo sapiens
acttggcagctcata

SEQ ID NO: 175048 - DNA, 15 bp, Homo sapiens
gacttggcagctcat

SEQ ID NO: 175049 - DNA, 15 bp, Homo sapiens
agacttggcagctca

SEQ ID NO: 175050 - DNA, 15 bp, Homo sapiens
tagacttggcagctc

SEQ ID NO: 175051 - DNA, 15 bp, Homo sapiens
atagacttggcagct

SEQ ID NO: 175052 - DNA, 15 bp, Homo sapiens
aatagacttggcagc

SEQ ID NO: 175053 - DNA, 15 bp, Homo sapiens
aaatagacttggcag

SEQ ID NO: 175054 - DNA, 15 bp, Homo sapiens
aaaatagacttggca

SEQ ID NO: 175055 - DNA, 15 bp, Homo sapiens
taaaatagacttggc

SEQ ID NO: 175056 - DNA, 15 bp, Homo sapiens
ttaaaatagacttgg

SEQ ID NO: 175057 - DNA, 15 bp, Homo sapiens
tttaaaatagacttg

SEQ ID NO: 175058 - DNA, 15 bp, Homo sapiens
ctttaaaatagactt

SEQ ID NO: 175059 - DNA, 15 bp, Homo sapiens
tctttaaaatagact

SEQ ID NO: 175060 - DNA, 15 bp, Homo sapiens
gtctttaaaatagac

SEQ ID NO: 175061 - DNA, 15 bp, Homo sapiens
cgtctttaaaataga

SEQ ID NO: 175062 - DNA, 15 bp, Homo sapiens
gcgtctttaaaatag

SEQ ID NO: 175063 - DNA, 15 bp, Homo sapiens
agcgtctttaaaata

SEQ ID NO: 175064 - DNA, 15 bp, Homo sapiens
gagcgtctttaaaat

SEQ ID NO: 175065 - DNA, 15 bp, Homo sapiens
tgagcgtctttaaaa

SEQ ID NO: 175066 - DNA, 15 bp, Homo sapiens
ttgagcgtctttaaa

SEQ ID NO: 175067 - DNA, 15 bp, Homo sapiens
cttgagcgtctttaa

SEQ ID NO: 175068 - DNA, 15 bp, Homo sapiens
tcttgagcgtcttta

SEQ ID NO: 175069 - DNA, 15 bp, Homo sapiens
ttcttgagcgtcttt

SEQ ID NO: 175070 - DNA, 15 bp, Homo sapiens
attcttgagcgtctt

SEQ ID NO: 175071 - DNA, 15 bp, Homo sapiens
gattcttgagcgtct

SEQ ID NO: 175072 - DNA, 15 bp, Homo sapiens
ggattcttgagcgtc

SEQ ID NO: 175073 - DNA, 15 bp, Homo sapiens
aggattcttgagcgt

SEQ ID NO: 175074 - DNA, 15 bp, Homo sapiens
gaggattcttgagcg

SEQ ID NO: 175075 - DNA, 15 bp, Homo sapiens
agaggattcttgagc

SEQ ID NO: 175076 - DNA, 15 bp, Homo sapiens
cagaggattcttgag

SEQ ID NO: 175077 - DNA, 15 bp, Homo sapiens
ccagaggattcttga

SEQ ID NO: 175078 - DNA, 15 bp, Homo sapiens
cccagaggattcttg

SEQ ID NO: 175079 - DNA, 15 bp, Homo sapiens
ccccagaggattctt

SEQ ID NO: 175080 - DNA, 15 bp, Homo sapiens
accccagaggattct

SEQ ID NO: 175081 - DNA, 15 bp, Homo sapiens
aaccccagaggattc

SEQ ID NO: 175082 - DNA, 15 bp, Homo sapiens
gaaccccagaggatt

SEQ ID NO: 175083 - DNA, 15 bp, Homo sapiens
tgaaccccagaggat

SEQ ID NO: 175084 - DNA, 15 bp, Homo sapiens
atgaaccccagagga

SEQ ID NO: 175085 - DNA, 15 bp, Homo sapiens
gatgaaccccagagg

SEQ ID NO: 175086 - DNA, 15 bp, Homo sapiens
agatgaaccccagag

SEQ ID NO: 175087 - DNA, 15 bp, Homo sapiens
tagatgaaccccaga

SEQ ID NO: 175088 - DNA, 15 bp, Homo sapiens
ctagatgaaccccag

SEQ ID NO: 175089 - DNA, 15 bp, Homo sapiens
cctagatgaacccca

SEQ ID NO: 175090 - DNA, 15 bp, Homo sapiens
ccctagatgaacccc

SEQ ID NO: 175091 - DNA, 15 bp, Homo sapiens
tccctagatgaaccc

SEQ ID NO: 175092 - DNA, 15 bp, Homo sapiens
gtccctagatgaacc

SEQ ID NO: 175093 - DNA, 15 bp, Homo sapiens
tgtccctagatgaac

SEQ ID NO: 175094 - DNA, 15 bp, Homo sapiens
gtgtccctagatgaa

SEQ ID NO: 175095 - DNA, 15 bp, Homo sapiens
gcaatagtaccccag

SEQ ID NO: 175096 - DNA, 15 bp, Homo sapiens
agcaatagtacccca

SEQ ID NO: 175097 - DNA, 15 bp, Homo sapiens
cagcaatagtacccc

SEQ ID NO: 175098 - DNA, 15 bp, Homo sapiens
tcagcaatagtaccc

SEQ ID NO: 175099 - DNA, 15 bp, Homo sapiens
gtcagcaatagtacc

SEQ ID NO: 175100 - DNA, 15 bp, Homo sapiens
ggtcagcaatagtac

SEQ ID NO: 175101 - DNA, 15 bp, Homo sapiens
tggtcagcaatagta

SEQ ID NO: 175102 - DNA, 15 bp, Homo sapiens
ctggtcagcaatagt

SEQ ID NO: 175103 - DNA, 15 bp, Homo sapiens
gctggtcagcaatag

SEQ ID NO: 175104 - DNA, 15 bp, Homo sapiens
tgctggtcagcaata

SEQ ID NO: 175105 - DNA, 15 bp, Homo sapiens
ctgctggtcagcaat

SEQ ID NO: 175106 - DNA, 15 bp, Homo sapiens
cctgctggtcagcaa

SEQ ID NO: 175107 - DNA, 15 bp, Homo sapiens
ccctgctggtcagca

SEQ ID NO: 175108 - DNA, 15 bp, Homo sapiens
accctgctggtcagc

SEQ ID NO: 175109 - DNA, 15 bp, Homo sapiens
caccctgctggtcag

SEQ ID NO: 175110 - DNA, 15 bp, Homo sapiens
acaccctgctggtca

SEQ ID NO: 175111 - DNA, 15 bp, Homo sapiens
tacaccctgctggtc

SEQ ID NO: 175112 - DNA, 15 bp, Homo sapiens
ctacaccctgctggt

SEQ ID NO: 175113 - DNA, 15 bp, Homo sapiens
cctacaccctgctgg

SEQ ID NO: 175114 - DNA, 15 bp, Homo sapiens
gcctacaccctgctg

SEQ ID NO: 175115 - DNA, 15 bp, Homo sapiens
cgcctacaccctgct

SEQ ID NO: 175116 - DNA, 15 bp, Homo sapiens
gcgcctacaccctgc

SEQ ID NO: 175117 - DNA, 15 bp, Homo sapiens
agcgcctacaccctg

SEQ ID NO: 175118 - DNA, 15 bp, Homo sapiens
cagcgcctacaccct

SEQ ID NO: 175119 - DNA, 15 bp, Homo sapiens
gcagcgcctacaccc

SEQ ID NO: 175120 - DNA, 15 bp, Homo sapiens
agcagcgcctacacc

SEQ ID NO: 175121 - DNA, 15 bp, Homo sapiens
aagcagcgcctacac

SEQ ID NO: 175122 - DNA, 15 bp, Homo sapiens
aaagcagcgcctaca

SEQ ID NO: 175123 - DNA, 15 bp, Homo sapiens
aaaagcagcgcctac

SEQ ID NO: 175124 - DNA, 15 bp, Homo sapiens
caaaagcagcgccta

SEQ ID NO: 175125 - DNA, 15 bp, Homo sapiens
acaaaagcagcgcct

SEQ ID NO: 175126 - DNA, 15 bp, Homo sapiens
aacaaaagcagcgcc

SEQ ID NO: 175127 - DNA, 15 bp, Homo sapiens
aaacaaaagcagcgc

SEQ ID NO: 175128 - DNA, 15 bp, Homo sapiens
caaacaaaagcagcg

SEQ ID NO: 175129 - DNA, 15 bp, Homo sapiens
tcaaacaaaagcagc

SEQ ID NO: 175130 - DNA, 15 bp, Homo sapiens
ctcaaacaaaagcag

SEQ ID NO: 175131 - DNA, 15 bp, Homo sapiens
gctcaaacaaaagca

SEQ ID NO: 175132 - DNA, 15 bp, Homo sapiens
agctcaaacaaaagc

SEQ ID NO: 175133 - DNA, 15 bp, Homo sapiens
aagctcaaacaaaag

SEQ ID NO: 175134 - DNA, 15 bp, Homo sapiens
aaagctcaaacaaaa

SEQ ID NO: 175135 - DNA, 15 bp, Homo sapiens
caaagctcaaacaaa

SEQ ID NO: 175136 - DNA, 15 bp, Homo sapiens
acaaagctcaaacaa

SEQ ID NO: 175137 - DNA, 15 bp, Homo sapiens
tacaaagctcaaaca

SEQ ID NO: 175138 - DNA, 15 bp, Homo sapiens
ctacaaagctcaaac

SEQ ID NO: 175139 - DNA, 15 bp, Homo sapiens
gctacaaagctcaaa

SEQ ID NO: 175140 - DNA, 15 bp, Homo sapiens
ggctacaaagctcaa

SEQ ID NO: 175141 - DNA, 15 bp, Homo sapiens
tggctacaaagctca

SEQ ID NO: 175142 - DNA, 15 bp, Homo sapiens
gtggctacaaagctc

SEQ ID NO: 175143 - DNA, 15 bp, Homo sapiens
tgtggctacaaagct

SEQ ID NO: 175144 - DNA, 15 bp, Homo sapiens
ttgtggctacaaagc

SEQ ID NO: 175145 - DNA, 15 bp, Homo sapiens
cttgtggctacaaag

SEQ ID NO: 175146 - DNA, 15 bp, Homo sapiens
ccttgtggctacaaa

SEQ ID NO: 175147 - DNA, 15 bp, Homo sapiens
accttgtggctacaa

SEQ ID NO: 175148 - DNA, 15 bp, Homo sapiens
gaccttgtggctaca

SEQ ID NO: 175149 - DNA, 15 bp, Homo sapiens
agaccttgtggctac

SEQ ID NO: 175150 - DNA, 15 bp, Homo sapiens
cagaccttgtggcta

SEQ ID NO: 175151 - DNA, 15 bp, Homo sapiens
tcagaccttgtggct

SEQ ID NO: 175152 - DNA, 15 bp, Homo sapiens
atcagaccttgtggc

SEQ ID NO: 175153 - DNA, 15 bp, Homo sapiens
catcagaccttgtgg

SEQ ID NO: 175154 - DNA, 15 bp, Homo sapiens
acatcagaccttgtg

SEQ ID NO: 175155 - DNA, 15 bp, Homo sapiens
gacatcagaccttgt

SEQ ID NO: 175156 - DNA, 15 bp, Homo sapiens
agacatcagaccttg

SEQ ID NO: 175157 - DNA, 15 bp, Homo sapiens
cagacatcagacctt

SEQ ID NO: 175158 - DNA, 15 bp, Homo sapiens
acagacatcagacct

SEQ ID NO: 175159 - DNA, 15 bp, Homo sapiens
aacagacatcagacc

SEQ ID NO: 175160 - DNA, 15 bp, Homo sapiens
caacagacatcagac

SEQ ID NO: 175161 - DNA, 15 bp, Homo sapiens
acaacagacatcaga

SEQ ID NO: 175162 - DNA, 15 bp, Homo sapiens
cacaacagacatcag

SEQ ID NO: 175163 - DNA, 15 bp, Homo sapiens
tcacaacagacatca

SEQ ID NO: 175164 - DNA, 15 bp, Homo sapiens
ttcacaacagacatc

SEQ ID NO: 175165 - DNA, 15 bp, Homo sapiens
gttcacaacagacat

SEQ ID NO: 175166 - DNA, 15 bp, Homo sapiens
tgttcacaacagaca

SEQ ID NO: 175167 - DNA, 15 bp, Homo sapiens
ctgttcacaacagac

SEQ ID NO: 175168 - DNA, 15 bp, Homo sapiens
gctgttcacaacaga

SEQ ID NO: 175169 - DNA, 15 bp, Homo sapiens
tgctgttcacaacag

SEQ ID NO: 175170 - DNA, 15 bp, Homo sapiens
ctgctgttcacaaca

SEQ ID NO: 175171 - DNA, 15 bp, Homo sapiens
gctgctgttcacaac

SEQ ID NO: 175172 - DNA, 15 bp, Homo sapiens
agctgctgttcacaa

SEQ ID NO: 175173 - DNA, 15 bp, Homo sapiens
cagctgctgttcaca

SEQ ID NO: 175174 - DNA, 15 bp, Homo sapiens
tcagctgctgttcac

SEQ ID NO: 175175 - DNA, 15 bp, Homo sapiens
gtcagctgctgttca

SEQ ID NO: 175176 - DNA, 15 bp, Homo sapiens
agtcagctgctgttc

SEQ ID NO: 175177 - DNA, 15 bp, Homo sapiens
aagtcagctgctgtt

SEQ ID NO: 175178 - DNA, 15 bp, Homo sapiens
gaagtcagctgctgt

SEQ ID NO: 175179 - DNA, 15 bp, Homo sapiens
tgaagtcagctgctg

SEQ ID NO: 175180 - DNA, 15 bp, Homo sapiens
ctgaagtcagctgct

SEQ ID NO: 175181 - DNA, 15 bp, Homo sapiens
gctgaagtcagctgc

SEQ ID NO: 175182 - DNA, 15 bp, Homo sapiens
tgctgaagtcagctg

SEQ ID NO: 175183 - DNA, 15 bp, Homo sapiens
gtgctgaagtcagct

SEQ ID NO: 175184 - DNA, 15 bp, Homo sapiens
agtgctgaagtcagc

SEQ ID NO: 175185 - DNA, 15 bp, Homo sapiens
gagtgctgaagtcag

SEQ ID NO: 175186 - DNA, 15 bp, Homo sapiens
agagtgctgaagtca

SEQ ID NO: 175187 - DNA, 15 bp, Homo sapiens
cagagtgctgaagtc

SEQ ID NO: 175188 - DNA, 15 bp, Homo sapiens
ccagagtgctgaagt

SEQ ID NO: 175189 - DNA, 15 bp, Homo sapiens
gccagagtgctgaag

SEQ ID NO: 175190 - DNA, 15 bp, Homo sapiens
ggccagagtgctgaa

SEQ ID NO: 175191 - DNA, 15 bp, Homo sapiens
tggccagagtgctga

SEQ ID NO: 175192 - DNA, 15 bp, Homo sapiens
ctggccagagtgctg

SEQ ID NO: 175193 - DNA, 15 bp, Homo sapiens
gctggccagagtgct

SEQ ID NO: 175194 - DNA, 15 bp, Homo sapiens
agctggccagagtgc

SEQ ID NO: 175195 - DNA, 15 bp, Homo sapiens
aagctggccagagtg

SEQ ID NO: 175196 - DNA, 15 bp, Homo sapiens
gaagctggccagagt

SEQ ID NO: 175197 - DNA, 15 bp, Homo sapiens
ggaagctggccagag

SEQ ID NO: 175198 - DNA, 15 bp, Homo sapiens
aggaagctggccaga

SEQ ID NO: 175199 - DNA, 15 bp, Homo sapiens
gaggaagctggccag

SEQ ID NO: 175200 - DNA, 15 bp, Homo sapiens
tgaggaagctggcca

SEQ ID NO: 175201 - DNA, 15 bp, Homo sapiens
ttgaggaagctggcc

SEQ ID NO: 175202 - DNA, 15 bp, Homo sapiens
tttgaggaagctggc

SEQ ID NO: 175203 - DNA, 15 bp, Homo sapiens
gtttgaggaagctgg

SEQ ID NO: 175204 - DNA, 15 bp, Homo sapiens
agtttgaggaagctg

SEQ ID NO: 175205 - DNA, 15 bp, Homo sapiens
aagtttgaggaagct

SEQ ID NO: 175206 - DNA, 15 bp, Homo sapiens
caagtttgaggaagc

SEQ ID NO: 175207 - DNA, 15 bp, Homo sapiens
acaagtttgaggaag

SEQ ID NO: 175208 - DNA, 15 bp, Homo sapiens
aacaagtttgaggaa

SEQ ID NO: 175209 - DNA, 15 bp, Homo sapiens
taacaagtttgagga

SEQ ID NO: 175210 - DNA, 15 bp, Homo sapiens
ctaacaagtttgagg

SEQ ID NO: 175211 - DNA, 15 bp, Homo sapiens
actaacaagtttgag

SEQ ID NO: 175212 - DNA, 15 bp, Homo sapiens
cactaacaagtttga

SEQ ID NO: 175213 - DNA, 15 bp, Homo sapiens
ccactaacaagtttg

SEQ ID NO: 175214 - DNA, 15 bp, Homo sapiens
gccactaacaagttt

SEQ ID NO: 175215 - DNA, 15 bp, Homo sapiens
agccactaacaagtt

SEQ ID NO: 175216 - DNA, 15 bp, Homo sapiens
aagccactaacaagt

SEQ ID NO: 175217 - DNA, 15 bp, Homo sapiens
caagccactaacaag

SEQ ID NO: 175218 - DNA, 15 bp, Homo sapiens
gcaagccactaacaa

SEQ ID NO: 175219 - DNA, 15 bp, Homo sapiens
tgcaagccactaaca

SEQ ID NO: 175220 - DNA, 15 bp, Homo sapiens
atgcaagccactaac

SEQ ID NO: 175221 - DNA, 15 bp, Homo sapiens
aatgcaagccactaa

SEQ ID NO: 175222 - DNA, 15 bp, Homo sapiens
aaatgcaagccacta

SEQ ID NO: 175223 - DNA, 15 bp, Homo sapiens
aaaatgcaagccact

SEQ ID NO: 175224 - DNA, 15 bp, Homo sapiens
caaaatgcaagccac

SEQ ID NO: 175225 - DNA, 15 bp, Homo sapiens
acaaaatgcaagcca

SEQ ID NO: 175226 - DNA, 15 bp, Homo sapiens
gacaaaatgcaagcc

SEQ ID NO: 175227 - DNA, 15 bp, Homo sapiens
tgacaaaatgcaagc

SEQ ID NO: 175228 - DNA, 15 bp, Homo sapiens
ttgacaaaatgcaag

SEQ ID NO: 175229 - DNA, 15 bp, Homo sapiens
attgacaaaatgcaa

SEQ ID NO: 175230 - DNA, 15 bp, Homo sapiens
aattgacaaaatgca

SEQ ID NO: 175231 - DNA, 15 bp, Homo sapiens
aaattgacaaaatgc

SEQ ID NO: 175232 - DNA, 15 bp, Homo sapiens
aaaattgacaaaatg

SEQ ID NO: 175233 - DNA, 15 bp, Homo sapiens
aaaaattgacaaaat

SEQ ID NO: 175234 - DNA, 15 bp, Homo sapiens
gaaaaattgacaaaa

SEQ ID NO: 175235 - DNA, 15 bp, Homo sapiens
agaaaaattgacaaa

SEQ ID NO: 175236 - DNA, 15 bp, Homo sapiens
aagaaaaattgacaa

SEQ ID NO: 175237 - DNA, 15 bp, Homo sapiens
aaagaaaaattgaca

SEQ ID NO: 175238 - DNA, 15 bp, Homo sapiens
caaagaaaaattgac

SEQ ID NO: 175239 - DNA, 15 bp, Homo sapiens
gcaaagaaaaattga

SEQ ID NO: 175240 - DNA, 15 bp, Homo sapiens
ggcaaagaaaaattg

SEQ ID NO: 175241 - DNA, 15 bp, Homo sapiens
tggcaaagaaaaatt

SEQ ID NO: 175242 - DNA, 15 bp, Homo sapiens
atggcaaagaaaaat

SEQ ID NO: 175243 - DNA, 15 bp, Homo sapiens
aatggcaaagaaaaa

SEQ ID NO: 175244 - DNA, 15 bp, Homo sapiens
aaatggcaaagaaaa

SEQ ID NO: 175245 - DNA, 15 bp, Homo sapiens
gaaatggcaaagaaa

SEQ ID NO: 175246 - DNA, 15 bp, Homo sapiens
tgaaatggcaaagaa

SEQ ID NO: 175247 - DNA, 15 bp, Homo sapiens
ctgaaatggcaaaga

SEQ ID NO: 175248 - DNA, 15 bp, Homo sapiens
actgaaatggcaaag

SEQ ID NO: 175249 - DNA, 15 bp, Homo sapiens
gactgaaatggcaaa

SEQ ID NO: 175250 - DNA, 15 bp, Homo sapiens
agactgaaatggcaa

SEQ ID NO: 175251 - DNA, 15 bp, Homo sapiens
aagactgaaatggca

SEQ ID NO: 175252 - DNA, 15 bp, Homo sapiens
aaagactgaaatggc

SEQ ID NO: 175253 - DNA, 15 bp, Homo sapiens
gaaagactgaaatgg

SEQ ID NO: 175254 - DNA, 15 bp, Homo sapiens
tgaaagactgaaatg

SEQ ID NO: 175255 - DNA, 15 bp, Homo sapiens
ttgaaagactgaaat

SEQ ID NO: 175256 - DNA, 15 bp, Homo sapiens
cttgaaagactgaaa

SEQ ID NO: 175257 - DNA, 15 bp, Homo sapiens
gcttgaaagactgaa

SEQ ID NO: 175258 - DNA, 15 bp, Homo sapiens
tgcttgaaagactga

SEQ ID NO: 175259 - DNA, 15 bp, Homo sapiens
ctgcttgaaagactg

SEQ ID NO: 175260 - DNA, 15 bp, Homo sapiens
gctgcttgaaagact

SEQ ID NO: 175261 - DNA, 15 bp, Homo sapiens
agctgcttgaaagac

SEQ ID NO: 175262 - DNA, 15 bp, Homo sapiens
cagctgcttgaaaga

SEQ ID NO: 175263 - DNA, 15 bp, Homo sapiens
tcagctgcttgaaag

SEQ ID NO: 175264 - DNA, 15 bp, Homo sapiens
ttcagctgcttgaaa

SEQ ID NO: 175265 - DNA, 15 bp, Homo sapiens
attcagctgcttgaa

SEQ ID NO: 175266 - DNA, 15 bp, Homo sapiens
gattcagctgcttga

SEQ ID NO: 175267 - DNA, 15 bp, Homo sapiens
cgattcagctgcttg

SEQ ID NO: 175268 - DNA, 15 bp, Homo sapiens
gcgattcagctgctt

SEQ ID NO: 175269 - DNA, 15 bp, Homo sapiens
tgcgattcagctgct

SEQ ID NO: 175270 - DNA, 15 bp, Homo sapiens
ctgcgattcagctgc

SEQ ID NO: 175271 - DNA, 15 bp, Homo sapiens
tctgcgattcagctg

SEQ ID NO: 175272 - DNA, 15 bp, Homo sapiens
ttctgcgattcagct

SEQ ID NO: 175273 - DNA, 15 bp, Homo sapiens
gttctgcgattcagc

SEQ ID NO: 175274 - DNA, 15 bp, Homo sapiens
agttctgcgattcag

SEQ ID NO: 175275 - DNA, 15 bp, Homo sapiens
cagttctgcgattca

SEQ ID NO: 175276 - DNA, 15 bp, Homo sapiens
tcagttctgcgattc

SEQ ID NO: 175277 - DNA, 15 bp, Homo sapiens
ttcagttctgcgatt

SEQ ID NO: 175278 - DNA, 15 bp, Homo sapiens
tttcagttctgcgat

SEQ ID NO: 175279 - DNA, 15 bp, Homo sapiens
gtttcagttctgcga

SEQ ID NO: 175280 - DNA, 15 bp, Homo sapiens
tgtttcagttctgcg

SEQ ID NO: 175281 - DNA, 15 bp, Homo sapiens
ttgtttcagttctgc

SEQ ID NO: 175282 - DNA, 15 bp, Homo sapiens
tttgtttcagttctg

SEQ ID NO: 175283 - DNA, 15 bp, Homo sapiens
ttttgtttcagttct

SEQ ID NO: 175284 - DNA, 15 bp, Homo sapiens
gttttgtttcagttc

SEQ ID NO: 175285 - DNA, 15 bp, Homo sapiens
tgttttgtttcagtt

SEQ ID NO: 175286 - DNA, 15 bp, Homo sapiens
gtgttttgtttcagt

SEQ ID NO: 175287 - DNA, 15 bp, Homo sapiens
agtgttttgtttcag

SEQ ID NO: 175288 - DNA, 15 bp, Homo sapiens
aagtgttttgtttca

SEQ ID NO: 175289 - DNA, 15 bp, Homo sapiens
taagtgttttgtttc

SEQ ID NO: 175290 - DNA, 15 bp, Homo sapiens
ataagtgttttgttt

SEQ ID NO: 175291 - DNA, 15 bp, Homo sapiens
tataagtgttttgtt

SEQ ID NO: 175292 - DNA, 15 bp, Homo sapiens
atataagtgttttgt

SEQ ID NO: 175293 - DNA, 15 bp, Homo sapiens
aatataagtgttttg

SEQ ID NO: 175294 - DNA, 15 bp, Homo sapiens
caatataagtgtttt

SEQ ID NO: 175295 - DNA, 15 bp, Homo sapiens
gcaatataagtgttt

SEQ ID NO: 175296 - DNA, 15 bp, Homo sapiens
tgcaatataagtgtt

SEQ ID NO: 175297 - DNA, 15 bp, Homo sapiens
ttgcaatataagtgt

SEQ ID NO: 175298 - DNA, 15 bp, Homo sapiens
tttgcaatataagtg

SEQ ID NO: 175299 - DNA, 15 bp, Homo sapiens
ctttgcaatataagt

SEQ ID NO: 175300 - DNA, 15 bp, Homo sapiens
actttgcaatataag

SEQ ID NO: 175301 - DNA, 15 bp, Homo sapiens
aactttgcaatataa

SEQ ID NO: 175302 - DNA, 15 bp, Homo sapiens
gaactttgcaatata

SEQ ID NO: 175303 - DNA, 15 bp, Homo sapiens
ggaactttgcaatat

SEQ ID NO: 175304 - DNA, 15 bp, Homo sapiens
aggaactttgcaata

SEQ ID NO: 175305 - DNA, 15 bp, Homo sapiens
aaggaactttgcaat

SEQ ID NO: 175306 - DNA, 15 bp, Homo sapiens
gaaggaactttgcaa

SEQ ID NO: 175307 - DNA, 15 bp, Homo sapiens
ggaaggaactttgca

SEQ ID NO: 175308 - DNA, 15 bp, Homo sapiens
gggaaggaactttgc

SEQ ID NO: 175309 - DNA, 15 bp, Homo sapiens
agggaaggaactttg

SEQ ID NO: 175310 - DNA, 15 bp, Homo sapiens
aagggaaggaacttt

SEQ ID NO: 175311 - DNA, 15 bp, Homo sapiens
aaagggaaggaactt

SEQ ID NO: 175312 - DNA, 15 bp, Homo sapiens
taaagggaaggaact

SEQ ID NO: 175313 - DNA, 15 bp, Homo sapiens
ttaaagggaaggaac

SEQ ID NO: 175314 - DNA, 15 bp, Homo sapiens
tttaaagggaaggaa

SEQ ID NO: 175315 - DNA, 15 bp, Homo sapiens
ttttaaagggaagga

SEQ ID NO: 175316 - DNA, 15 bp, Homo sapiens
attttaaagggaagg

SEQ ID NO: 175317 - DNA, 15 bp, Homo sapiens
cattttaaagggaag

SEQ ID NO: 175318 - DNA, 15 bp, Homo sapiens
tcattttaaagggaa

SEQ ID NO: 175319 - DNA, 15 bp, Homo sapiens
ctcattttaaaggga

SEQ ID NO: 175320 - DNA, 15 bp, Homo sapiens
gctcattttaaaggg

SEQ ID NO: 175321 - DNA, 15 bp, Homo sapiens
agctcattttaaagg

SEQ ID NO: 175322 - DNA, 15 bp, Homo sapiens
aagctcattttaaag

SEQ ID NO: 175323 - DNA, 15 bp, Homo sapiens
gaagctcattttaaa

SEQ ID NO: 175324 - DNA, 15 bp, Homo sapiens
agaagctcattttaa

SEQ ID NO: 175325 - DNA, 15 bp, Homo sapiens
cagaagctcatttta

SEQ ID NO: 175326 - DNA, 15 bp, Homo sapiens
ccagaagctcatttt

SEQ ID NO: 175327 - DNA, 15 bp, Homo sapiens
tccagaagctcattt

SEQ ID NO: 175328 - DNA, 15 bp, Homo sapiens
atccagaagctcatt

SEQ ID NO: 175329 - DNA, 15 bp, Homo sapiens
aatccagaagctcat

SEQ ID NO: 175330 - DNA, 15 bp, Homo sapiens
caatccagaagctca

SEQ ID NO: 175331 - DNA, 15 bp, Homo sapiens
gcaatccagaagctc

SEQ ID NO: 175332 - DNA, 15 bp, Homo sapiens
tgcaatccagaagct

SEQ ID NO: 175333 - DNA, 15 bp, Homo sapiens
ctgcaatccagaagc

SEQ ID NO: 175334 - DNA, 15 bp, Homo sapiens
tctgcaatccagaag

SEQ ID NO: 175335 - DNA, 15 bp, Homo sapiens
ctctgcaatccagaa

SEQ ID NO: 175336 - DNA, 15 bp, Homo sapiens
tctctgcaatccaga

SEQ ID NO: 175337 - DNA, 15 bp, Homo sapiens
atctctgcaatccag

SEQ ID NO: 175338 - DNA, 15 bp, Homo sapiens
catctctgcaatcca

SEQ ID NO: 175339 - DNA, 15 bp, Homo sapiens
tcatctctgcaatcc

SEQ ID NO: 175340 - DNA, 15 bp, Homo sapiens
atcatctctgcaatc

SEQ ID NO: 175341 - DNA, 15 bp, Homo sapiens
aatcatctctgcaat

SEQ ID NO: 175342 - DNA, 15 bp, Homo sapiens
aaatcatctctgcaa

SEQ ID NO: 175343 - DNA, 15 bp, Homo sapiens
aaaatcatctctgca

SEQ ID NO: 175344 - DNA, 15 bp, Homo sapiens
aaaaatcatctctgc

SEQ ID NO: 175345 - DNA, 15 bp, Homo sapiens
aaaaaatcatctctg

SEQ ID NO: 175346 - DNA, 15 bp, Homo sapiens
taaaaaatcatctct

SEQ ID NO: 175347 - DNA, 15 bp, Homo sapiens
ataaaaaatcatctc

SEQ ID NO: 175348 - DNA, 15 bp, Homo sapiens
cataaaaaatcatct

SEQ ID NO: 175349 - DNA, 15 bp, Homo sapiens
ccataaaaaatcatc

SEQ ID NO: 175350 - DNA, 15 bp, Homo sapiens
accataaaaaatcat

SEQ ID NO: 175351 - DNA, 15 bp, Homo sapiens
gaccataaaaaatca

SEQ ID NO: 175352 - DNA, 15 bp, Homo sapiens
agaccataaaaaatc

SEQ ID NO: 175353 - DNA, 15 bp, Homo sapiens
aagaccataaaaaat

SEQ ID NO: 175354 - DNA, 15 bp, Homo sapiens
taagaccataaaaaa

SEQ ID NO: 175355 - DNA, 15 bp, Homo sapiens
ctaagaccataaaaa

SEQ ID NO: 175356 - DNA, 15 bp, Homo sapiens
gctaagaccataaaa

SEQ ID NO: 175357 - DNA, 15 bp, Homo sapiens
cgctaagaccataaa

SEQ ID NO: 175358 - DNA, 15 bp, Homo sapiens
acgctaagaccataa

SEQ ID NO: 175359 - DNA, 15 bp, Homo sapiens
cacgctaagaccata

SEQ ID NO: 175360 - DNA, 15 bp, Homo sapiens
gcacgctaagaccat

SEQ ID NO: 175361 - DNA, 15 bp, Homo sapiens
ggcacgctaagacca

SEQ ID NO: 175362 - DNA, 15 bp, Homo sapiens
aggcacgctaagacc

SEQ ID NO: 175363 - DNA, 15 bp, Homo sapiens
gaggcacgctaagac

SEQ ID NO: 175364 - DNA, 15 bp, Homo sapiens
tgaggcacgctaaga

SEQ ID NO: 175365 - DNA, 15 bp, Homo sapiens
atgaggcacgctaag

SEQ ID NO: 175366 - DNA, 15 bp, Homo sapiens
catgaggcacgctaa

SEQ ID NO: 175367 - DNA, 15 bp, Homo sapiens
gcatgaggcacgcta

SEQ ID NO: 175368 - DNA, 15 bp, Homo sapiens
agcatgaggcacgct

SEQ ID NO: 175369 - DNA, 15 bp, Homo sapiens
cagcatgaggcacgc

SEQ ID NO: 175370 - DNA, 15 bp, Homo sapiens
acagcatgaggcacg

SEQ ID NO: 175371 - DNA, 15 bp, Homo sapiens
tacagcatgaggcac

SEQ ID NO: 175372 - DNA, 15 bp, Homo sapiens
ctacagcatgaggca

SEQ ID NO: 175373 - DNA, 15 bp, Homo sapiens
tctacagcatgaggc

SEQ ID NO: 175374 - DNA, 15 bp, Homo sapiens
gtctacagcatgagg

SEQ ID NO: 175375 - DNA, 15 bp, Homo sapiens
ggtctacagcatgag

SEQ ID NO: 175376 - DNA, 15 bp, Homo sapiens
tggtctacagcatga

SEQ ID NO: 175377 - DNA, 15 bp, Homo sapiens
gtggtctacagcatg

SEQ ID NO: 175378 - DNA, 15 bp, Homo sapiens
tgtggtctacagcat

SEQ ID NO: 175379 - DNA, 15 bp, Homo sapiens
atgtggtctacagca

SEQ ID NO: 175380 - DNA, 15 bp, Homo sapiens
gatgtggtctacagc

SEQ ID NO: 175381 - DNA, 15 bp, Homo sapiens
cgatgtggtctacag

SEQ ID NO: 175382 - DNA, 15 bp, Homo sapiens
acgatgtggtctaca

SEQ ID NO: 175383 - DNA, 15 bp, Homo sapiens
aacgatgtggtctac

SEQ ID NO: 175384 - DNA, 15 bp, Homo sapiens
caacgatgtggtcta

SEQ ID NO: 175385 - DNA, 15 bp, Homo sapiens
ccaacgatgtggtct

SEQ ID NO: 175386 - DNA, 15 bp, Homo sapiens
tccaacgatgtggtc

SEQ ID NO: 175387 - DNA, 15 bp, Homo sapiens
ctccaacgatgtggt

SEQ ID NO: 175388 - DNA, 15 bp, Homo sapiens
gctccaacgatgtgg

SEQ ID NO: 175389 - DNA, 15 bp, Homo sapiens
agctccaacgatgtg

SEQ ID NO: 175390 - DNA, 15 bp, Homo sapiens
gagctccaacgatgt

SEQ ID NO: 175391 - DNA, 15 bp, Homo sapiens
agagctccaacgatg

SEQ ID NO: 175392 - DNA, 15 bp, Homo sapiens
cagagctccaacgat

SEQ ID NO: 175393 - DNA, 15 bp, Homo sapiens
ccagagctccaacga

SEQ ID NO: 175394 - DNA, 15 bp, Homo sapiens
cccagagctccaacg

SEQ ID NO: 175395 - DNA, 15 bp, Homo sapiens
tcccagagctccaac

SEQ ID NO: 175396 - DNA, 15 bp, Homo sapiens
ctcccagagctccaa

SEQ ID NO: 175397 - DNA, 15 bp, Homo sapiens
tctcccagagctcca

SEQ ID NO: 175398 - DNA, 15 bp, Homo sapiens
ctctcccagagctcc

SEQ ID NO: 175399 - DNA, 15 bp, Homo sapiens
gctctcccagagctc

SEQ ID NO: 175400 - DNA, 15 bp, Homo sapiens
agctctcccagagct

SEQ ID NO: 175401 - DNA, 15 bp, Homo sapiens
gagctctcccagagc

SEQ ID NO: 175402 - DNA, 15 bp, Homo sapiens
agagctctcccagag

SEQ ID NO: 175403 - DNA, 15 bp, Homo sapiens
cagagctctcccaga

SEQ ID NO: 175404 - DNA, 15 bp, Homo sapiens
tcagagctctcccag

SEQ ID NO: 175405 - DNA, 15 bp, Homo sapiens
ctcagagctctccca

SEQ ID NO: 175406 - DNA, 15 bp, Homo sapiens
gctcagagctctccc

SEQ ID NO: 175407 - DNA, 15 bp, Homo sapiens
tgctcagagctctcc

SEQ ID NO: 175408 - DNA, 15 bp, Homo sapiens
ctgctcagagctctc

SEQ ID NO: 175409 - DNA, 15 bp, Homo sapiens
tctgctcagagctct

SEQ ID NO: 175410 - DNA, 15 bp, Homo sapiens
ctctgctcagagctc

SEQ ID NO: 175411 - DNA, 15 bp, Homo sapiens
tctctgctcagagct

SEQ ID NO: 175412 - DNA, 15 bp, Homo sapiens
ttctctgctcagagc

SEQ ID NO: 175413 - DNA, 15 bp, Homo sapiens
tttctctgctcagag

SEQ ID NO: 175414 - DNA, 15 bp, Homo sapiens
ctttctctgctcaga

SEQ ID NO: 175415 - DNA, 15 bp, Homo sapiens
tctttctctgctcag

SEQ ID NO: 175416 - DNA, 15 bp, Homo sapiens
gtctttctctgctca

SEQ ID NO: 175417 - DNA, 15 bp, Homo sapiens
ggtctttctctgctc

SEQ ID NO: 175418 - DNA, 15 bp, Homo sapiens
aggtctttctctgct

SEQ ID NO: 175419 - DNA, 15 bp, Homo sapiens
aaggtctttctctgc

SEQ ID NO: 175420 - DNA, 15 bp, Homo sapiens
caaggtctttctctg

SEQ ID NO: 175421 - DNA, 15 bp, Homo sapiens
ccaaggtctttctct

SEQ ID NO: 175422 - DNA, 15 bp, Homo sapiens
accaaggtctttctc

SEQ ID NO: 175423 - DNA, 15 bp, Homo sapiens
caccaaggtctttct

SEQ ID NO: 175424 - DNA, 15 bp, Homo sapiens
tcaccaaggtctttc

SEQ ID NO: 175425 - DNA, 15 bp, Homo sapiens
atcaccaaggtcttt

SEQ ID NO: 175426 - DNA, 15 bp, Homo sapiens
gatcaccaaggtctt

SEQ ID NO: 175427 - DNA, 15 bp, Homo sapiens
ggatcaccaaggtct

SEQ ID NO: 175428 - DNA, 15 bp, Homo sapiens
gggatcaccaaggtc

SEQ ID NO: 175429 - DNA, 15 bp, Homo sapiens
ggggatcaccaaggt

SEQ ID NO: 175430 - DNA, 15 bp, Homo sapiens
gggggatcaccaagg

SEQ ID NO: 175431 - DNA, 15 bp, Homo sapiens
ggggggatcaccaag

SEQ ID NO: 175432 - DNA, 15 bp, Homo sapiens
aggggggatcaccaa

SEQ ID NO: 175433 - DNA, 15 bp, Homo sapiens
caggggggatcacca

SEQ ID NO: 175434 - DNA, 15 bp, Homo sapiens
ccaggggggatcacc

SEQ ID NO: 175435 - DNA, 15 bp, Homo sapiens
gccaggggggatcac

SEQ ID NO: 175436 - DNA, 15 bp, Homo sapiens
ggccaggggggatca

SEQ ID NO: 175437 - DNA, 15 bp, Homo sapiens
gggccaggggggatc

SEQ ID NO: 175438 - DNA, 15 bp, Homo sapiens
cgggccaggggggat

SEQ ID NO: 175439 - DNA, 15 bp, Homo sapiens
tcgggccagggggga

SEQ ID NO: 175440 - DNA, 15 bp, Homo sapiens
atcgggccagggggg

SEQ ID NO: 175441 - DNA, 15 bp, Homo sapiens
gatcgggccaggggg

SEQ ID NO: 175442 - DNA, 15 bp, Homo sapiens
agatcgggccagggg

SEQ ID NO: 175443 - DNA, 15 bp, Homo sapiens
tagatcgggccaggg

SEQ ID NO: 175444 - DNA, 15 bp, Homo sapiens
atagatcgggccagg

SEQ ID NO: 175445 - DNA, 15 bp, Homo sapiens
tatagatcgggccag

SEQ ID NO: 175446 - DNA, 15 bp, Homo sapiens
ctatagatcgggcca

SEQ ID NO: 175447 - DNA, 15 bp, Homo sapiens
cctatagatcgggcc

SEQ ID NO: 175448 - DNA, 15 bp, Homo sapiens
tcctatagatcgggc

SEQ ID NO: 175449 - DNA, 15 bp, Homo sapiens
atcctatagatcggg

SEQ ID NO: 175450 - DNA, 15 bp, Homo sapiens
aatcctatagatcgg

SEQ ID NO: 175451 - DNA, 15 bp, Homo sapiens
caatcctatagatcg

SEQ ID NO: 175452 - DNA, 15 bp, Homo sapiens
tcaatcctatagatc

SEQ ID NO: 175453 - DNA, 15 bp, Homo sapiens
ctcaatcctatagat

SEQ ID NO: 175454 - DNA, 15 bp, Homo sapiens
cctcaatcctataga

SEQ ID NO: 175455 - DNA, 15 bp, Homo sapiens
tcctcaatcctatag

SEQ ID NO: 175456 - DNA, 15 bp, Homo sapiens
ttcctcaatcctata

SEQ ID NO: 175457 - DNA, 15 bp, Homo sapiens
attcctcaatcctat

SEQ ID NO: 175458 - DNA, 15 bp, Homo sapiens
cattcctcaatccta

SEQ ID NO: 175459 - DNA, 15 bp, Homo sapiens
tcattcctcaatcct

SEQ ID NO: 175460 - DNA, 15 bp, Homo sapiens
ctcattcctcaatcc

SEQ ID NO: 175461 - DNA, 15 bp, Homo sapiens
cctcattcctcaatc

SEQ ID NO: 175462 - DNA, 15 bp, Homo sapiens
gcctcattcctcaat

SEQ ID NO: 175463 - DNA, 15 bp, Homo sapiens
agcctcattcctcaa

SEQ ID NO: 175464 - DNA, 15 bp, Homo sapiens
aagcctcattcctca

SEQ ID NO: 175465 - DNA, 15 bp, Homo sapiens
caagcctcattcctc

SEQ ID NO: 175466 - DNA, 15 bp, Homo sapiens
acaagcctcattcct

SEQ ID NO: 175467 - DNA, 15 bp, Homo sapiens
tacaagcctcattcc

SEQ ID NO: 175468 - DNA, 15 bp, Homo sapiens
ctacaagcctcattc

SEQ ID NO: 175469 - DNA, 15 bp, Homo sapiens
tctacaagcctcatt

SEQ ID NO: 175470 - DNA, 15 bp, Homo sapiens
ctctacaagcctcat

SEQ ID NO: 175471 - DNA, 15 bp, Homo sapiens
cctctacaagcctca

SEQ ID NO: 175472 - DNA, 15 bp, Homo sapiens
acctctacaagcctc

SEQ ID NO: 175473 - DNA, 15 bp, Homo sapiens
cacctctacaagcct

SEQ ID NO: 175474 - DNA, 15 bp, Homo sapiens
ccacctctacaagcc

SEQ ID NO: 175475 - DNA, 15 bp, Homo sapiens
gccacctctacaagc

SEQ ID NO: 175476 - DNA, 15 bp, Homo sapiens
agccacctctacaag

SEQ ID NO: 175477 - DNA, 15 bp, Homo sapiens
aagccacctctacaa

SEQ ID NO: 175478 - DNA, 15 bp, Homo sapiens
caagccacctctaca

SEQ ID NO: 175479 - DNA, 15 bp, Homo sapiens
gcaagccacctctac

SEQ ID NO: 175480 - DNA, 15 bp, Homo sapiens
ggcaagccacctcta

SEQ ID NO: 175481 - DNA, 15 bp, Homo sapiens
gggcaagccacctct

SEQ ID NO: 175482 - DNA, 15 bp, Homo sapiens
tgggcaagccacctc

SEQ ID NO: 175483 - DNA, 15 bp, Homo sapiens
ttgggcaagccacct

SEQ ID NO: 175484 - DNA, 15 bp, Homo sapiens
cttgggcaagccacc

SEQ ID NO: 175485 - DNA, 15 bp, Homo sapiens
ccttgggcaagccac

SEQ ID NO: 175486 - DNA, 15 bp, Homo sapiens
accttgggcaagcca

SEQ ID NO: 175487 - DNA, 15 bp, Homo sapiens
gaccttgggcaagcc

SEQ ID NO: 175488 - DNA, 15 bp, Homo sapiens
tgaccttgggcaagc

SEQ ID NO: 175489 - DNA, 15 bp, Homo sapiens
gtgaccttgggcaag

SEQ ID NO: 175490 - DNA, 15 bp, Homo sapiens
tgtgaccttgggcaa

SEQ ID NO: 175491 - DNA, 15 bp, Homo sapiens
ttgtgaccttgggca

SEQ ID NO: 175492 - DNA, 15 bp, Homo sapiens
gttgtgaccttgggc

SEQ ID NO: 175493 - DNA, 15 bp, Homo sapiens
tgttgtgaccttggg

SEQ ID NO: 175494 - DNA, 15 bp, Homo sapiens
gtgttgtgaccttgg

SEQ ID NO: 175495 - DNA, 15 bp, Homo sapiens
agtgttgtgaccttg

SEQ ID NO: 175496 - DNA, 15 bp, Homo sapiens
tagtgttgtgacctt

SEQ ID NO: 175497 - DNA, 15 bp, Homo sapiens
ctagtgttgtgacct

SEQ ID NO: 175498 - DNA, 15 bp, Homo sapiens
tctagtgttgtgacc

SEQ ID NO: 175499 - DNA, 15 bp, Homo sapiens
ctctagtgttgtgac

SEQ ID NO: 175500 - DNA, 15 bp, Homo sapiens
cctctagtgttgtga

SEQ ID NO: 175501 - DNA, 15 bp, Homo sapiens
ccctctagtgttgtg

SEQ ID NO: 175502 - DNA, 15 bp, Homo sapiens
accctctagtgttgt

SEQ ID NO: 175503 - DNA, 15 bp, Homo sapiens
caccctctagtgttg

SEQ ID NO: 175504 - DNA, 15 bp, Homo sapiens
ccaccctctagtgtt

SEQ ID NO: 175505 - DNA, 15 bp, Homo sapiens
accaccctctagtgt

SEQ ID NO: 175506 - DNA, 15 bp, Homo sapiens
aaccaccctctagtg

SEQ ID NO: 175507 - DNA, 15 bp, Homo sapiens
caaccaccctctagt

SEQ ID NO: 175508 - DNA, 15 bp, Homo sapiens
tcaaccaccctctag

SEQ ID NO: 175509 - DNA, 15 bp, Homo sapiens
ctcaaccaccctcta

SEQ ID NO: 175510 - DNA, 15 bp, Homo sapiens
gctcaaccaccctct

SEQ ID NO: 175511 - DNA, 15 bp, Homo sapiens
agctcaaccaccctc

SEQ ID NO: 175512 - DNA, 15 bp, Homo sapiens
cagctcaaccaccct

SEQ ID NO: 175513 - DNA, 15 bp, Homo sapiens
ccagctcaaccaccc

SEQ ID NO: 175514 - DNA, 15 bp, Homo sapiens
cccagctcaaccacc

SEQ ID NO: 175515 - DNA, 15 bp, Homo sapiens
gcccagctcaaccac

SEQ ID NO: 175516 - DNA, 15 bp, Homo sapiens
ggcccagctcaacca

SEQ ID NO: 175517 - DNA, 15 bp, Homo sapiens
tggcccagctcaacc

SEQ ID NO: 175518 - DNA, 15 bp, Homo sapiens
ctggcccagctcaac

SEQ ID NO: 175519 - DNA, 15 bp, Homo sapiens
cctggcccagctcaa

SEQ ID NO: 175520 - DNA, 15 bp, Homo sapiens
tcctggcccagctca

SEQ ID NO: 175521 - DNA, 15 bp, Homo sapiens
gtcctggcccagctc

SEQ ID NO: 175522 - DNA, 15 bp, Homo sapiens
ggtcctggcccagct

SEQ ID NO: 175523 - DNA, 15 bp, Homo sapiens
gggtcctggcccagc

SEQ ID NO: 175524 - DNA, 15 bp, Homo sapiens
tgggtcctggcccag

SEQ ID NO: 175525 - DNA, 15 bp, Homo sapiens
ctgggtcctggccca

SEQ ID NO: 175526 - DNA, 15 bp, Homo sapiens
tctgggtcctggccc

SEQ ID NO: 175527 - DNA, 15 bp, Homo sapiens
gtctgggtcctggcc

SEQ ID NO: 175528 - DNA, 15 bp, Homo sapiens
tgtctgggtcctggc

SEQ ID NO: 175529 - DNA, 15 bp, Homo sapiens
ttgtctgggtcctgg

SEQ ID NO: 175530 - DNA, 15 bp, Homo sapiens
cttgtctgggtcctg

SEQ ID NO: 175531 - DNA, 15 bp, Homo sapiens
gcttgtctgggtcct

SEQ ID NO: 175532 - DNA, 15 bp, Homo sapiens
ggcttgtctgggtcc

SEQ ID NO: 175533 - DNA, 15 bp, Homo sapiens
gggcttgtctgggtc

SEQ ID NO: 175534 - DNA, 15 bp, Homo sapiens
agggcttgtctgggt

SEQ ID NO: 175535 - DNA, 15 bp, Homo sapiens
aagggcttgtctggg

SEQ ID NO: 175536 - DNA, 15 bp, Homo sapiens
aaagggcttgtctgg

SEQ ID NO: 175537 - DNA, 15 bp, Homo sapiens
aaaagggcttgtctg

SEQ ID NO: 175538 - DNA, 15 bp, Homo sapiens
gaaaagggcttgtct

SEQ ID NO: 175539 - DNA, 15 bp, Homo sapiens
agaaaagggcttgtc

SEQ ID NO: 175540 - DNA, 15 bp, Homo sapiens
gagaaaagggcttgt

SEQ ID NO: 175541 - DNA, 15 bp, Homo sapiens
agagaaaagggcttg

SEQ ID NO: 175542 - DNA, 15 bp, Homo sapiens
gagagaaaagggctt

SEQ ID NO: 175543 - DNA, 15 bp, Homo sapiens
tgagagaaaagggct

SEQ ID NO: 175544 - DNA, 15 bp, Homo sapiens
ctgagagaaaagggc

SEQ ID NO: 175545 - DNA, 15 bp, Homo sapiens
actgagagaaaaggg

SEQ ID NO: 175546 - DNA, 15 bp, Homo sapiens
gactgagagaaaagg

SEQ ID NO: 175547 - DNA, 15 bp, Homo sapiens
agactgagagaaaag

SEQ ID NO: 175548 - DNA, 15 bp, Homo sapiens
tagactgagagaaaa

SEQ ID NO: 175549 - DNA, 15 bp, Homo sapiens
ctagactgagagaaa

SEQ ID NO: 175550 - DNA, 15 bp, Homo sapiens
actagactgagagaa

SEQ ID NO: 175551 - DNA, 15 bp, Homo sapiens
cactagactgagaga

SEQ ID NO: 175552 - DNA, 15 bp, Homo sapiens
tcactagactgagag

SEQ ID NO: 175553 - DNA, 15 bp, Homo sapiens
ctcactagactgaga

SEQ ID NO: 175554 - DNA, 15 bp, Homo sapiens
cctcactagactgag

SEQ ID NO: 175555 - DNA, 15 bp, Homo sapiens
gcctcactagactga

SEQ ID NO: 175556 - DNA, 15 bp, Homo sapiens
ggcctcactagactg

SEQ ID NO: 175557 - DNA, 15 bp, Homo sapiens
aggcctcactagact

SEQ ID NO: 175558 - DNA, 15 bp, Homo sapiens
gaggcctcactagac

SEQ ID NO: 175559 - DNA, 15 bp, Homo sapiens
agaggcctcactaga

SEQ ID NO: 175560 - DNA, 15 bp, Homo sapiens
cagaggcctcactag

SEQ ID NO: 175561 - DNA, 15 bp, Homo sapiens
ccagaggcctcacta

SEQ ID NO: 175562 - DNA, 15 bp, Homo sapiens
cccagaggcctcact

SEQ ID NO: 175563 - DNA, 15 bp, Homo sapiens
tcccagaggcctcac

SEQ ID NO: 175564 - DNA, 15 bp, Homo sapiens
ttcccagaggcctca

SEQ ID NO: 175565 - DNA, 15 bp, Homo sapiens
cttcccagaggcctc

SEQ ID NO: 175566 - DNA, 15 bp, Homo sapiens
ccttcccagaggcct

SEQ ID NO: 175567 - DNA, 15 bp, Homo sapiens
tccttcccagaggcc

SEQ ID NO: 175568 - DNA, 15 bp, Homo sapiens
atccttcccagaggc

SEQ ID NO: 175569 - DNA, 15 bp, Homo sapiens
tatccttcccagagg

SEQ ID NO: 175570 - DNA, 15 bp, Homo sapiens
ctatccttcccagag

SEQ ID NO: 175571 - DNA, 15 bp, Homo sapiens
cctatccttcccaga

SEQ ID NO: 175572 - DNA, 15 bp, Homo sapiens
acctatccttcccag

SEQ ID NO: 175573 - DNA, 15 bp, Homo sapiens
cacctatccttccca

SEQ ID NO: 175574 - DNA, 15 bp, Homo sapiens
tcacctatccttccc

SEQ ID NO: 175575 - DNA, 15 bp, Homo sapiens
ttcacctatccttcc

SEQ ID NO: 175576 - DNA, 15 bp, Homo sapiens
tttcacctatccttc

SEQ ID NO: 175577 - DNA, 15 bp, Homo sapiens
ttttcacctatcctt

SEQ ID NO: 175578 - DNA, 15 bp, Homo sapiens
gttttcacctatcct

SEQ ID NO: 175579 - DNA, 15 bp, Homo sapiens
agttttcacctatcc

SEQ ID NO: 175580 - DNA, 15 bp, Homo sapiens
tagttttcacctatc

SEQ ID NO: 175581 - DNA, 15 bp, Homo sapiens
atagttttcacctat

SEQ ID NO: 175582 - DNA, 15 bp, Homo sapiens
tatagttttcaccta

SEQ ID NO: 175583 - DNA, 15 bp, Homo sapiens
ttatagttttcacct

SEQ ID NO: 175584 - DNA, 15 bp, Homo sapiens
tttatagttttcacc

SEQ ID NO: 175585 - DNA, 15 bp, Homo sapiens
atttatagttttcac

SEQ ID NO: 175586 - DNA, 15 bp, Homo sapiens
tatttatagttttca

SEQ ID NO: 175587 - DNA, 15 bp, Homo sapiens
ctatttatagttttc

SEQ ID NO: 175588 - DNA, 15 bp, Homo sapiens
gctatttatagtttt

SEQ ID NO: 175589 - DNA, 15 bp, Homo sapiens
agctatttatagttt

SEQ ID NO: 175590 - DNA, 15 bp, Homo sapiens
cagctatttatagtt

SEQ ID NO: 175591 - DNA, 15 bp, Homo sapiens
acagctatttatagt

SEQ ID NO: 175592 - DNA, 15 bp, Homo sapiens
aacagctatttatag

SEQ ID NO: 175593 - DNA, 15 bp, Homo sapiens
gaacagctatttata

SEQ ID NO: 175594 - DNA, 15 bp, Homo sapiens
tgaacagctatttat

SEQ ID NO: 175595 - DNA, 15 bp, Homo sapiens
ttgaacagctattta

SEQ ID NO: 175596 - DNA, 15 bp, Homo sapiens
cttgaacagctattt

SEQ ID NO: 175597 - DNA, 15 bp, Homo sapiens
tcttgaacagctatt

SEQ ID NO: 175598 - DNA, 15 bp, Homo sapiens
atcttgaacagctat

SEQ ID NO: 175599 - DNA, 15 bp, Homo sapiens
tatcttgaacagcta

SEQ ID NO: 175600 - DNA, 15 bp, Homo sapiens
gtatcttgaacagct

SEQ ID NO: 175601 - DNA, 15 bp, Homo sapiens
agtatcttgaacagc

SEQ ID NO: 175602 - DNA, 15 bp, Homo sapiens
gagtatcttgaacag

SEQ ID NO: 175603 - DNA, 15 bp, Homo sapiens
agagtatcttgaaca

SEQ ID NO: 175604 - DNA, 15 bp, Homo sapiens
cagagtatcttgaac

SEQ ID NO: 175605 - DNA, 15 bp, Homo sapiens
tcagagtatcttgaa

SEQ ID NO: 175606 - DNA, 15 bp, Homo sapiens
ctcagagtatcttga

SEQ ID NO: 175607 - DNA, 15 bp, Homo sapiens
actcagagtatcttg

SEQ ID NO: 175608 - DNA, 15 bp, Homo sapiens
tactcagagtatctt

SEQ ID NO: 175609 - DNA, 15 bp, Homo sapiens
ttactcagagtatct

SEQ ID NO: 175610 - DNA, 15 bp, Homo sapiens
tttactcagagtatc

SEQ ID NO: 175611 - DNA, 15 bp, Homo sapiens
ttttactcagagtat

SEQ ID NO: 175612 - DNA, 15 bp, Homo sapiens
cttttactcagagta

SEQ ID NO: 175613 - DNA, 15 bp, Homo sapiens
acttttactcagagt

SEQ ID NO: 175614 - DNA, 15 bp, Homo sapiens
gacttttactcagag

SEQ ID NO: 175615 - DNA, 15 bp, Homo sapiens
tgacttttactcaga

SEQ ID NO: 175616 - DNA, 15 bp, Homo sapiens
ctgacttttactcag

SEQ ID NO: 175617 - DNA, 15 bp, Homo sapiens
actgacttttactca

SEQ ID NO: 175618 - DNA, 15 bp, Homo sapiens
cactgacttttactc

SEQ ID NO: 175619 - DNA, 15 bp, Homo sapiens
ccactgacttttact

SEQ ID NO: 175620 - DNA, 15 bp, Homo sapiens
accactgacttttac

SEQ ID NO: 175621 - DNA, 15 bp, Homo sapiens
caccactgactttta

SEQ ID NO: 175622 - DNA, 15 bp, Homo sapiens
acaccactgactttt

SEQ ID NO: 175623 - DNA, 15 bp, Homo sapiens
aacaccactgacttt

SEQ ID NO: 175624 - DNA, 15 bp, Homo sapiens
taacaccactgactt

SEQ ID NO: 175625 - DNA, 15 bp, Homo sapiens
ataacaccactgact

SEQ ID NO: 175626 - DNA, 15 bp, Homo sapiens
gataacaccactgac

SEQ ID NO: 175627 - DNA, 15 bp, Homo sapiens
agataacaccactga

SEQ ID NO: 175628 - DNA, 15 bp, Homo sapiens
cagataacaccactg

SEQ ID NO: 175629 - DNA, 15 bp, Homo sapiens
ccagataacaccact

SEQ ID NO: 175630 - DNA, 15 bp, Homo sapiens
tccagataacaccac

SEQ ID NO: 175631 - DNA, 15 bp, Homo sapiens
ttccagataacacca

SEQ ID NO: 175632 - DNA, 15 bp, Homo sapiens
attccagataacacc

SEQ ID NO: 175633 - DNA, 15 bp, Homo sapiens
aattccagataacac

SEQ ID NO: 175634 - DNA, 15 bp, Homo sapiens
aaattccagataaca

SEQ ID NO: 175635 - DNA, 15 bp, Homo sapiens
gaaattccagataac

SEQ ID NO: 175636 - DNA, 15 bp, Homo sapiens
agaaattccagataa

SEQ ID NO: 175637 - DNA, 15 bp, Homo sapiens
tagaaattccagata

SEQ ID NO: 175638 - DNA, 15 bp, Homo sapiens
gtagaaattccagat

SEQ ID NO: 175639 - DNA, 15 bp, Homo sapiens
agtagaaattccaga

SEQ ID NO: 175640 - DNA, 15 bp, Homo sapiens
cagtagaaattccag

SEQ ID NO: 175641 - DNA, 15 bp, Homo sapiens
tcagtagaaattcca

SEQ ID NO: 175642 - DNA, 15 bp, Homo sapiens
ttcagtagaaattcc

SEQ ID NO: 175643 - DNA, 15 bp, Homo sapiens
cttcagtagaaattc

SEQ ID NO: 175644 - DNA, 15 bp, Homo sapiens
tcttcagtagaaatt

SEQ ID NO: 175645 - DNA, 15 bp, Homo sapiens
ctcttcagtagaaat

SEQ ID NO: 175646 - DNA, 15 bp, Homo sapiens
cctcttcagtagaaa

SEQ ID NO: 175647 - DNA, 15 bp, Homo sapiens
tcctcttcagtagaa

SEQ ID NO: 175648 - DNA, 15 bp, Homo sapiens
ttcctcttcagtaga

SEQ ID NO: 175649 - DNA, 15 bp, Homo sapiens
tttcctcttcagtag

SEQ ID NO: 175650 - DNA, 15 bp, Homo sapiens
atttcctcttcagta

SEQ ID NO: 175651 - DNA, 15 bp, Homo sapiens
tatttcctcttcagt

SEQ ID NO: 175652 - DNA, 15 bp, Homo sapiens
gtatttcctcttcag

SEQ ID NO: 175653 - DNA, 15 bp, Homo sapiens
tgtatttcctcttca

SEQ ID NO: 175654 - DNA, 15 bp, Homo sapiens
ctgtatttcctcttc

SEQ ID NO: 175655 - DNA, 15 bp, Homo sapiens
gctgtatttcctctt

SEQ ID NO: 175656 - DNA, 15 bp, Homo sapiens
tgctgtatttcctct

SEQ ID NO: 175657 - DNA, 15 bp, Homo sapiens
ctgctgtatttcctc

SEQ ID NO: 175658 - DNA, 15 bp, Homo sapiens
gctgctgtatttcct

SEQ ID NO: 175659 - DNA, 15 bp, Homo sapiens
tgctgctgtatttcc

SEQ ID NO: 175660 - DNA, 15 bp, Homo sapiens
ttgctgctgtatttc

SEQ ID NO: 175661 - DNA, 15 bp, Homo sapiens
tttgctgctgtattt

SEQ ID NO: 175662 - DNA, 15 bp, Homo sapiens
ctttgctgctgtatt

SEQ ID NO: 175663 - DNA, 15 bp, Homo sapiens
cctttgctgctgtat

SEQ ID NO: 175664 - DNA, 15 bp, Homo sapiens
acctttgctgctgta

SEQ ID NO: 175665 - DNA, 15 bp, Homo sapiens
tacctttgctgctgt

SEQ ID NO: 175666 - DNA, 15 bp, Homo sapiens
ctacctttgctgctg

SEQ ID NO: 175667 - DNA, 15 bp, Homo sapiens
tctacctttgctgct

SEQ ID NO: 175668 - DNA, 15 bp, Homo sapiens
gtctacctttgctgc

SEQ ID NO: 175669 - DNA, 15 bp, Homo sapiens
agtctacctttgctg

SEQ ID NO: 175670 - DNA, 15 bp, Homo sapiens
gagtctacctttgct

SEQ ID NO: 175671 - DNA, 15 bp, Homo sapiens
tgagtctacctttgc

SEQ ID NO: 175672 - DNA, 15 bp, Homo sapiens
atgagtctacctttg

SEQ ID NO: 175673 - DNA, 15 bp, Homo sapiens
gatgagtctaccttt

SEQ ID NO: 175674 - DNA, 15 bp, Homo sapiens
tgatgagtctacctt

SEQ ID NO: 175675 - DNA, 15 bp, Homo sapiens
ctgatgagtctacct

SEQ ID NO: 175676 - DNA, 15 bp, Homo sapiens
tctgatgagtctacc

SEQ ID NO: 175677 - DNA, 15 bp, Homo sapiens
atctgatgagtctac

SEQ ID NO: 175678 - DNA, 15 bp, Homo sapiens
catctgatgagtcta

SEQ ID NO: 175679 - DNA, 15 bp, Homo sapiens
ccatctgatgagtct

SEQ ID NO: 175680 - DNA, 15 bp, Homo sapiens
accatctgatgagtc

SEQ ID NO: 175681 - DNA, 15 bp, Homo sapiens
caccatctgatgagt

SEQ ID NO: 175682 - DNA, 15 bp, Homo sapiens
tcaccatctgatgag

SEQ ID NO: 175683 - DNA, 15 bp, Homo sapiens
ttcaccatctgatga

SEQ ID NO: 175684 - DNA, 15 bp, Homo sapiens
tttcaccatctgatg

SEQ ID NO: 175685 - DNA, 15 bp, Homo sapiens
ctttcaccatctgat

SEQ ID NO: 175686 - DNA, 15 bp, Homo sapiens
actttcaccatctga

SEQ ID NO: 175687 - DNA, 15 bp, Homo sapiens
cactttcaccatctg

SEQ ID NO: 175688 - DNA, 15 bp, Homo sapiens
acactttcaccatct

SEQ ID NO: 175689 - DNA, 15 bp, Homo sapiens
gacactttcaccatc

SEQ ID NO: 175690 - DNA, 15 bp, Homo sapiens
tgacactttcaccat

SEQ ID NO: 175691 - DNA, 15 bp, Homo sapiens
atgacactttcacca

SEQ ID NO: 175692 - DNA, 15 bp, Homo sapiens
gatgacactttcacc

SEQ ID NO: 175693 - DNA, 15 bp, Homo sapiens
agatgacactttcac

SEQ ID NO: 175694 - DNA, 15 bp, Homo sapiens
gagatgacactttca

SEQ ID NO: 175695 - DNA, 15 bp, Homo sapiens
ggagatgacactttc

SEQ ID NO: 175696 - DNA, 15 bp, Homo sapiens
aggagatgacacttt

SEQ ID NO: 175697 - DNA, 15 bp, Homo sapiens
aaggagatgacactt

SEQ ID NO: 175698 - DNA, 15 bp, Homo sapiens
aaaggagatgacact

SEQ ID NO: 175699 - DNA, 15 bp, Homo sapiens
caaaggagatgacac

SEQ ID NO: 175700 - DNA, 15 bp, Homo sapiens
acaaaggagatgaca

SEQ ID NO: 175701 - DNA, 15 bp, Homo sapiens
tacaaaggagatgac

SEQ ID NO: 175702 - DNA, 15 bp, Homo sapiens
ttacaaaggagatga

SEQ ID NO: 175703 - DNA, 15 bp, Homo sapiens
attacaaaggagatg

SEQ ID NO: 175704 - DNA, 15 bp, Homo sapiens
aattacaaaggagat

SEQ ID NO: 175705 - DNA, 15 bp, Homo sapiens
aaattacaaaggaga

SEQ ID NO: 175706 - DNA, 15 bp, Homo sapiens
taaattacaaaggag

SEQ ID NO: 175707 - DNA, 15 bp, Homo sapiens
ataaattacaaagga

SEQ ID NO: 175708 - DNA, 15 bp, Homo sapiens
tataaattacaaagg

SEQ ID NO: 175709 - DNA, 15 bp, Homo sapiens
gtataaattacaaag

SEQ ID NO: 175710 - DNA, 15 bp, Homo sapiens
agtataaattacaaa

SEQ ID NO: 175711 - DNA, 15 bp, Homo sapiens
cagtataaattacaa

SEQ ID NO: 175712 - DNA, 15 bp, Homo sapiens
ccagtataaattaca

SEQ ID NO: 175713 - DNA, 15 bp, Homo sapiens
accagtataaattac

SEQ ID NO: 175714 - DNA, 15 bp, Homo sapiens
caccagtataaatta

SEQ ID NO: 175715 - DNA, 15 bp, Homo sapiens
tcaccagtataaatt

SEQ ID NO: 175716 - DNA, 15 bp, Homo sapiens
ctcaccagtataaat

SEQ ID NO: 175717 - DNA, 15 bp, Homo sapiens
tctcaccagtataaa

SEQ ID NO: 175718 - DNA, 15 bp, Homo sapiens
ctctcaccagtataa

SEQ ID NO: 175719 - DNA, 15 bp, Homo sapiens
cctctcaccagtata

SEQ ID NO: 175720 - DNA, 15 bp, Homo sapiens
tcctctcaccagtat

SEQ ID NO: 175721 - DNA, 15 bp, Homo sapiens
ctcctctcaccagta

SEQ ID NO: 175722 - DNA, 15 bp, Homo sapiens
cctcctctcaccagt

SEQ ID NO: 175723 - DNA, 15 bp, Homo sapiens
ccctcctctcaccag

SEQ ID NO: 175724 - DNA, 15 bp, Homo sapiens
cccctcctctcacca

SEQ ID NO: 175725 - DNA, 15 bp, Homo sapiens
tcccctcctctcacc

SEQ ID NO: 175726 - DNA, 15 bp, Homo sapiens
ttcccctcctctcac

SEQ ID NO: 175727 - DNA, 15 bp, Homo sapiens
cttcccctcctctca

SEQ ID NO: 175728 - DNA, 15 bp, Homo sapiens
ccttcccctcctctc

SEQ ID NO: 175729 - DNA, 15 bp, Homo sapiens
tccttcccctcctct

SEQ ID NO: 175730 - DNA, 15 bp, Homo sapiens
atccttcccctcctc

SEQ ID NO: 175731 - DNA, 15 bp, Homo sapiens
catccttcccctcct

SEQ ID NO: 175732 - DNA, 15 bp, Homo sapiens
acatccttcccctcc

SEQ ID NO: 175733 - DNA, 15 bp, Homo sapiens
cacatccttcccctc

SEQ ID NO: 175734 - DNA, 15 bp, Homo sapiens
gcacatccttcccct

SEQ ID NO: 175735 - DNA, 15 bp, Homo sapiens
agcacatccttcccc

SEQ ID NO: 175736 - DNA, 15 bp, Homo sapiens
aagcacatccttccc

SEQ ID NO: 175737 - DNA, 15 bp, Homo sapiens
aaagcacatccttcc

SEQ ID NO: 175738 - DNA, 15 bp, Homo sapiens
gaaagcacatccttc

SEQ ID NO: 175739 - DNA, 15 bp, Homo sapiens
ggaaagcacatcctt

SEQ ID NO: 175740 - DNA, 15 bp, Homo sapiens
aggaaagcacatcct

SEQ ID NO: 175741 - DNA, 15 bp, Homo sapiens
taggaaagcacatcc

SEQ ID NO: 175742 - DNA, 15 bp, Homo sapiens
ataggaaagcacatc

SEQ ID NO: 175743 - DNA, 15 bp, Homo sapiens
aataggaaagcacat

SEQ ID NO: 175744 - DNA, 15 bp, Homo sapiens
aaataggaaagcaca

SEQ ID NO: 175745 - DNA, 15 bp, Homo sapiens
aaaataggaaagcac

SEQ ID NO: 175746 - DNA, 15 bp, Homo sapiens
aaaaataggaaagca

SEQ ID NO: 175747 - DNA, 15 bp, Homo sapiens
taaaaataggaaagc

SEQ ID NO: 175748 - DNA, 15 bp, Homo sapiens
gtaaaaataggaaag

SEQ ID NO: 175749 - DNA, 15 bp, Homo sapiens
tgtaaaaataggaaa

SEQ ID NO: 175750 - DNA, 15 bp, Homo sapiens
gtgtaaaaataggaa

SEQ ID NO: 175751 - DNA, 15 bp, Homo sapiens
agtgtaaaaatagga

SEQ ID NO: 175752 - DNA, 15 bp, Homo sapiens
cagtgtaaaaatagg

SEQ ID NO: 175753 - DNA, 15 bp, Homo sapiens
ccagtgtaaaaatag

SEQ ID NO: 175754 - DNA, 15 bp, Homo sapiens
accagtgtaaaaata

SEQ ID NO: 175755 - DNA, 15 bp, Homo sapiens
taccagtgtaaaaat

SEQ ID NO: 175756 - DNA, 15 bp, Homo sapiens
gtaccagtgtaaaaa

SEQ ID NO: 175757 - DNA, 15 bp, Homo sapiens
agtaccagtgtaaaa

SEQ ID NO: 175758 - DNA, 15 bp, Homo sapiens
aagtaccagtgtaaa

SEQ ID NO: 175759 - DNA, 15 bp, Homo sapiens
gaagtaccagtgtaa

SEQ ID NO: 175760 - DNA, 15 bp, Homo sapiens
tgaagtaccagtgta

SEQ ID NO: 175761 - DNA, 15 bp, Homo sapiens
atgaagtaccagtgt

SEQ ID NO: 175762 - DNA, 15 bp, Homo sapiens
aatgaagtaccagtg

SEQ ID NO: 175763 - DNA, 15 bp, Homo sapiens
gaatgaagtaccagt

SEQ ID NO: 175764 - DNA, 15 bp, Homo sapiens
tgaatgaagtaccag

SEQ ID NO: 175765 - DNA, 15 bp, Homo sapiens
atgaatgaagtacca

SEQ ID NO: 175766 - DNA, 15 bp, Homo sapiens
gatgaatgaagtacc

SEQ ID NO: 175767 - DNA, 15 bp, Homo sapiens
ggatgaatgaagtac

SEQ ID NO: 175768 - DNA, 15 bp, Homo sapiens
aggatgaatgaagta

SEQ ID NO: 175769 - DNA, 15 bp, Homo sapiens
aaggatgaatgaagt

SEQ ID NO: 175770 - DNA, 15 bp, Homo sapiens
caaggatgaatgaag

SEQ ID NO: 175771 - DNA, 15 bp, Homo sapiens
acaaggatgaatgaa

SEQ ID NO: 175772 - DNA, 15 bp, Homo sapiens
gacaaggatgaatga

SEQ ID NO: 175773 - DNA, 15 bp, Homo sapiens
agacaaggatgaatg

SEQ ID NO: 175774 - DNA, 15 bp, Homo sapiens
aagacaaggatgaat

SEQ ID NO: 175775 - DNA, 15 bp, Homo sapiens
taagacaaggatgaa

SEQ ID NO: 175776 - DNA, 15 bp, Homo sapiens
ttaagacaaggatga

SEQ ID NO: 175777 - DNA, 15 bp, Homo sapiens
tttaagacaaggatg

SEQ ID NO: 175778 - DNA, 15 bp, Homo sapiens
gtttaagacaaggat

SEQ ID NO: 175779 - DNA, 15 bp, Homo sapiens
agtttaagacaagga

SEQ ID NO: 175780 - DNA, 15 bp, Homo sapiens
aagtttaagacaagg

SEQ ID NO: 175781 - DNA, 15 bp, Homo sapiens
taagtttaagacaag

SEQ ID NO: 175782 - DNA, 15 bp, Homo sapiens
ttaagtttaagacaa

SEQ ID NO: 175783 - DNA, 15 bp, Homo sapiens
cttaagtttaagaca

SEQ ID NO: 175784 - DNA, 15 bp, Homo sapiens
tcttaagtttaagac

SEQ ID NO: 175785 - DNA, 15 bp, Homo sapiens
ttcttaagtttaaga

SEQ ID NO: 175786 - DNA, 15 bp, Homo sapiens
tttcttaagtttaag

SEQ ID NO: 175787 - DNA, 15 bp, Homo sapiens
atttcttaagtttaa

SEQ ID NO: 175788 - DNA, 15 bp, Homo sapiens
catttcttaagttta

SEQ ID NO: 175789 - DNA, 15 bp, Homo sapiens
tcatttcttaagttt

SEQ ID NO: 175790 - DNA, 15 bp, Homo sapiens
ttcatttcttaagtt

SEQ ID NO: 175791 - DNA, 15 bp, Homo sapiens
tttcatttcttaagt

SEQ ID NO: 175792 - DNA, 15 bp, Homo sapiens
atttcatttcttaag

SEQ ID NO: 175793 - DNA, 15 bp, Homo sapiens
catttcatttcttaa

SEQ ID NO: 175794 - DNA, 15 bp, Homo sapiens
gcatttcatttctta

SEQ ID NO: 175795 - DNA, 15 bp, Homo sapiens
tgcatttcatttctt

SEQ ID NO: 175796 - DNA, 15 bp, Homo sapiens
atgcatttcatttct

SEQ ID NO: 175797 - DNA, 15 bp, Homo sapiens
gatgcatttcatttc

SEQ ID NO: 175798 - DNA, 15 bp, Homo sapiens
tgatgcatttcattt

SEQ ID NO: 175799 - DNA, 15 bp, Homo sapiens
ctgatgcatttcatt

SEQ ID NO: 175800 - DNA, 15 bp, Homo sapiens
cctgatgcatttcat

SEQ ID NO: 175801 - DNA, 15 bp, Homo sapiens
ccctgatgcatttca

SEQ ID NO: 175802 - DNA, 15 bp, Homo sapiens
gccctgatgcatttc

SEQ ID NO: 175803 - DNA, 15 bp, Homo sapiens
tgccctgatgcattt

SEQ ID NO: 175804 - DNA, 15 bp, Homo sapiens
gtgccctgatgcatt

SEQ ID NO: 175805 - DNA, 15 bp, Homo sapiens
tgtgccctgatgcat

SEQ ID NO: 175806 - DNA, 15 bp, Homo sapiens
gtgtgccctgatgca

SEQ ID NO: 175807 - DNA, 15 bp, Homo sapiens
tgtgtgccctgatgc

SEQ ID NO: 175808 - DNA, 15 bp, Homo sapiens
atgtgtgccctgatg

SEQ ID NO: 175809 - DNA, 15 bp, Homo sapiens
tatgtgtgccctgat

SEQ ID NO: 175810 - DNA, 15 bp, Homo sapiens
atatgtgtgccctga

SEQ ID NO: 175811 - DNA, 15 bp, Homo sapiens
tatatgtgtgccctg

SEQ ID NO: 175812 - DNA, 15 bp, Homo sapiens
gtatatgtgtgccct

SEQ ID NO: 175813 - DNA, 15 bp, Homo sapiens
tgtatatgtgtgccc

SEQ ID NO: 175814 - DNA, 15 bp, Homo sapiens
atgtatatgtgtgcc

SEQ ID NO: 175815 - DNA, 15 bp, Homo sapiens
tatgtatatgtgtgc

SEQ ID NO: 175816 - DNA, 15 bp, Homo sapiens
ctatgtatatgtgtg

SEQ ID NO: 175817 - DNA, 15 bp, Homo sapiens
tctatgtatatgtgt

SEQ ID NO: 175818 - DNA, 15 bp, Homo sapiens
ttctatgtatatgtg

SEQ ID NO: 175819 - DNA, 15 bp, Homo sapiens
tttctatgtatatgt

SEQ ID NO: 175820 - DNA, 15 bp, Homo sapiens
gtttctatgtatatg

SEQ ID NO: 175821 - DNA, 15 bp, Homo sapiens
tgtttctatgtatat

SEQ ID NO: 175822 - DNA, 15 bp, Homo sapiens
ctgtttctatgtata

SEQ ID NO: 175823 - DNA, 15 bp, Homo sapiens
gctgtttctatgtat

SEQ ID NO: 175824 - DNA, 15 bp, Homo sapiens
tgctgtttctatgta

SEQ ID NO: 175825 - DNA, 15 bp, Homo sapiens
gtgctgtttctatgt

SEQ ID NO: 175826 - DNA, 15 bp, Homo sapiens
tgtgctgtttctatg

SEQ ID NO: 175827 - DNA, 15 bp, Homo sapiens
atgtgctgtttctat

SEQ ID NO: 175828 - DNA, 15 bp, Homo sapiens
tatgtgctgtttcta

SEQ ID NO: 175829 - DNA, 15 bp, Homo sapiens
ttatgtgctgtttct

SEQ ID NO: 175830 - DNA, 15 bp, Homo sapiens
cttatgtgctgtttc

SEQ ID NO: 175831 - DNA, 15 bp, Homo sapiens
gcttatgtgctgttt

SEQ ID NO: 175832 - DNA, 15 bp, Homo sapiens
ggcttatgtgctgtt

SEQ ID NO: 175833 - DNA, 15 bp, Homo sapiens
tggcttatgtgctgt

SEQ ID NO: 175834 - DNA, 15 bp, Homo sapiens
atggcttatgtgctg

SEQ ID NO: 175835 - DNA, 15 bp, Homo sapiens
aatggcttatgtgct

SEQ ID NO: 175836 - DNA, 15 bp, Homo sapiens
aaatggcttatgtgc

SEQ ID NO: 175837 - DNA, 15 bp, Homo sapiens
aaaatggcttatgtg

SEQ ID NO: 175838 - DNA, 15 bp, Homo sapiens
caaaatggcttatgt

SEQ ID NO: 175839 - DNA, 15 bp, Homo sapiens
ccaaaatggcttatg

SEQ ID NO: 175840 - DNA, 15 bp, Homo sapiens
tccaaaatggcttat

SEQ ID NO: 175841 - DNA, 15 bp, Homo sapiens
atccaaaatggctta

SEQ ID NO: 175842 - DNA, 15 bp, Homo sapiens
catccaaaatggctt

SEQ ID NO: 175843 - DNA, 15 bp, Homo sapiens
ccatccaaaatggct

SEQ ID NO: 175844 - DNA, 15 bp, Homo sapiens
gccatccaaaatggc

SEQ ID NO: 175845 - DNA, 15 bp, Homo sapiens
tgccatccaaaatgg

SEQ ID NO: 175846 - DNA, 15 bp, Homo sapiens
ttgccatccaaaatg

SEQ ID NO: 175847 - DNA, 15 bp, Homo sapiens
attgccatccaaaat

SEQ ID NO: 175848 - DNA, 15 bp, Homo sapiens
aattgccatccaaaa

SEQ ID NO: 175849 - DNA, 15 bp, Homo sapiens
gaattgccatccaaa

SEQ ID NO: 175850 - DNA, 15 bp, Homo sapiens
ggaattgccatccaa

SEQ ID NO: 175851 - DNA, 15 bp, Homo sapiens
tggaattgccatcca

SEQ ID NO: 175852 - DNA, 15 bp, Homo sapiens
ctggaattgccatcc

SEQ ID NO: 175853 - DNA, 15 bp, Homo sapiens
gctggaattgccatc

SEQ ID NO: 175854 - DNA, 15 bp, Homo sapiens
tgctggaattgccat

SEQ ID NO: 175855 - DNA, 15 bp, Homo sapiens
gtgctggaattgcca

SEQ ID NO: 175856 - DNA, 15 bp, Homo sapiens
agtgctggaattgcc

SEQ ID NO: 175857 - DNA, 15 bp, Homo sapiens
gagtgctggaattgc

SEQ ID NO: 175858 - DNA, 15 bp, Homo sapiens
agagtgctggaattg

SEQ ID NO: 175859 - DNA, 15 bp, Homo sapiens
aagagtgctggaatt

SEQ ID NO: 175860 - DNA, 15 bp, Homo sapiens
aaagagtgctggaat

SEQ ID NO: 175861 - DNA, 15 bp, Homo sapiens
aaaagagtgctggaa

SEQ ID NO: 175862 - DNA, 15 bp, Homo sapiens
taaaagagtgctgga

SEQ ID NO: 175863 - DNA, 15 bp, Homo sapiens
ttaaaagagtgctgg

SEQ ID NO: 175864 - DNA, 15 bp, Homo sapiens
attaaaagagtgctg

SEQ ID NO: 175865 - DNA, 15 bp, Homo sapiens
cattaaaagagtgct

SEQ ID NO: 175866 - DNA, 15 bp, Homo sapiens
ccattaaaagagtgc

SEQ ID NO: 175867 - DNA, 15 bp, Homo sapiens
tccattaaaagagtg

SEQ ID NO: 175868 - DNA, 15 bp, Homo sapiens
atccattaaaagagt

SEQ ID NO: 175869 - DNA, 15 bp, Homo sapiens
aatccattaaaagag

SEQ ID NO: 175870 - DNA, 15 bp, Homo sapiens
caatccattaaaaga

SEQ ID NO: 175871 - DNA, 15 bp, Homo sapiens
ccaatccattaaaag

SEQ ID NO: 175872 - DNA, 15 bp, Homo sapiens
gccaatccattaaaa

SEQ ID NO: 175873 - DNA, 15 bp, Homo sapiens
agccaatccattaaa

SEQ ID NO: 175874 - DNA, 15 bp, Homo sapiens
aagccaatccattaa

SEQ ID NO: 175875 - DNA, 15 bp, Homo sapiens
taagccaatccatta

SEQ ID NO: 175876 - DNA, 15 bp, Homo sapiens
ttaagccaatccatt

SEQ ID NO: 175877 - DNA, 15 bp, Homo sapiens
attaagccaatccat

SEQ ID NO: 175878 - DNA, 15 bp, Homo sapiens
aattaagccaatcca

SEQ ID NO: 175879 - DNA, 15 bp, Homo sapiens
aaattaagccaatcc

SEQ ID NO: 175880 - DNA, 15 bp, Homo sapiens
aaaattaagccaatc

SEQ ID NO: 175881 - DNA, 15 bp, Homo sapiens
aaaaattaagccaat

SEQ ID NO: 175882 - DNA, 15 bp, Homo sapiens
aaaaaattaagccaa

SEQ ID NO: 175883 - DNA, 15 bp, Homo sapiens
aaaaaaattaagcca

SEQ ID NO: 175884 - DNA, 15 bp, Homo sapiens
aaaaaaaattaagcc

SEQ ID NO: 175885 - DNA, 15 bp, Homo sapiens
aaaaaaaaattaagc

SEQ ID NO: 175886 - DNA, 15 bp, Homo sapiens
gaaaaaaaaattaag

SEQ ID NO: 175887 - DNA, 15 bp, Homo sapiens
agaaaaaaaaattaa

SEQ ID NO: 175888 - DNA, 15 bp, Homo sapiens
cagaaaaaaaaatta

SEQ ID NO: 175889 - DNA, 15 bp, Homo sapiens
tcagaaaaaaaaatt

SEQ ID NO: 175890 - DNA, 15 bp, Homo sapiens
atcagaaaaaaaaat

SEQ ID NO: 175891 - DNA, 15 bp, Homo sapiens
catcagaaaaaaaaa

SEQ ID NO: 175892 - DNA, 15 bp, Homo sapiens
gcatcagaaaaaaaa

SEQ ID NO: 175893 - DNA, 15 bp, Homo sapiens
ggcatcagaaaaaaa

SEQ ID NO: 175894 - DNA, 15 bp, Homo sapiens
aggcatcagaaaaaa

SEQ ID NO: 175895 - DNA, 15 bp, Homo sapiens
gaggcatcagaaaaa

SEQ ID NO: 175896 - DNA, 15 bp, Homo sapiens
agaggcatcagaaaa

SEQ ID NO: 175897 - DNA, 15 bp, Homo sapiens
gagaggcatcagaaa

SEQ ID NO: 175898 - DNA, 15 bp, Homo sapiens
agagaggcatcagaa

SEQ ID NO: 175899 - DNA, 15 bp, Homo sapiens
tagagaggcatcaga

SEQ ID NO: 175900 - DNA, 15 bp, Homo sapiens
atagagaggcatcag

SEQ ID NO: 175901 - DNA, 15 bp, Homo sapiens
catagagaggcatca

SEQ ID NO: 175902 - DNA, 15 bp, Homo sapiens
acatagagaggcatc

SEQ ID NO: 175903 - DNA, 15 bp, Homo sapiens
cacatagagaggcat

SEQ ID NO: 175904 - DNA, 15 bp, Homo sapiens
acacatagagaggca

SEQ ID NO: 175905 - DNA, 15 bp, Homo sapiens
aacacatagagaggc

SEQ ID NO: 175906 - DNA, 15 bp, Homo sapiens
aaacacatagagagg

SEQ ID NO: 175907 - DNA, 15 bp, Homo sapiens
caaacacatagagag

SEQ ID NO: 175908 - DNA, 15 bp, Homo sapiens
tcaaacacatagaga

SEQ ID NO: 175909 - DNA, 15 bp, Homo sapiens
ttcaaacacatagag

SEQ ID NO: 175910 - DNA, 15 bp, Homo sapiens
tttcaaacacataga

SEQ ID NO: 175911 - DNA, 15 bp, Homo sapiens
ttttcaaacacatag

SEQ ID NO: 175912 - DNA, 15 bp, Homo sapiens
cttttcaaacacata

SEQ ID NO: 175913 - DNA, 15 bp, Homo sapiens
acttttcaaacacat

SEQ ID NO: 175914 - DNA, 15 bp, Homo sapiens
aacttttcaaacaca

SEQ ID NO: 175915 - DNA, 15 bp, Homo sapiens
caacttttcaaacac

SEQ ID NO: 175916 - DNA, 15 bp, Homo sapiens
acaacttttcaaaca

SEQ ID NO: 175917 - DNA, 15 bp, Homo sapiens
tacaacttttcaaac

SEQ ID NO: 175918 - DNA, 15 bp, Homo sapiens
atacaacttttcaaa

SEQ ID NO: 175919 - DNA, 15 bp, Homo sapiens
aatacaacttttcaa

SEQ ID NO: 175920 - DNA, 15 bp, Homo sapiens
caatacaacttttca

SEQ ID NO: 175921 - DNA, 15 bp, Homo sapiens
tcaatacaacttttc

SEQ ID NO: 175922 - DNA, 15 bp, Homo sapiens
atcaatacaactttt

SEQ ID NO: 175923 - DNA, 15 bp, Homo sapiens
tatcaatacaacttt

SEQ ID NO: 175924 - DNA, 15 bp, Homo sapiens
ctatcaatacaactt

SEQ ID NO: 175925 - DNA, 15 bp, Homo sapiens
actatcaatacaact

SEQ ID NO: 175926 - DNA, 15 bp, Homo sapiens
gactatcaatacaac

SEQ ID NO: 175927 - DNA, 15 bp, Homo sapiens
tgactatcaatacaa

SEQ ID NO: 175928 - DNA, 15 bp, Homo sapiens
gtgactatcaataca

SEQ ID NO: 175929 - DNA, 15 bp, Homo sapiens
tgtgactatcaatac

SEQ ID NO: 175930 - DNA, 15 bp, Homo sapiens
gtgtgactatcaata

SEQ ID NO: 175931 - DNA, 15 bp, Homo sapiens
tgtgtgactatcaat

SEQ ID NO: 175932 - DNA, 15 bp, Homo sapiens
ctgtgtgactatcaa

SEQ ID NO: 175933 - DNA, 15 bp, Homo sapiens
tctgtgtgactatca

SEQ ID NO: 175934 - DNA, 15 bp, Homo sapiens
ctctgtgtgactatc

SEQ ID NO: 175935 - DNA, 15 bp, Homo sapiens
actctgtgtgactat

SEQ ID NO: 175936 - DNA, 15 bp, Homo sapiens
cactctgtgtgacta

SEQ ID NO: 175937 - DNA, 15 bp, Homo sapiens
acactctgtgtgact

SEQ ID NO: 175938 - DNA, 15 bp, Homo sapiens
tacactctgtgtgac

SEQ ID NO: 175939 - DNA, 15 bp, Homo sapiens
gtacactctgtgtga

SEQ ID NO: 175940 - DNA, 15 bp, Homo sapiens
agtacactctgtgtg

SEQ ID NO: 175941 - DNA, 15 bp, Homo sapiens
tagtacactctgtgt

SEQ ID NO: 175942 - DNA, 15 bp, Homo sapiens
ttagtacactctgtg

SEQ ID NO: 175943 - DNA, 15 bp, Homo sapiens
tttagtacactctgt

SEQ ID NO: 175944 - DNA, 15 bp, Homo sapiens
ttttagtacactctg

SEQ ID NO: 175945 - DNA, 15 bp, Homo sapiens
attttagtacactct

SEQ ID NO: 175946 - DNA, 15 bp, Homo sapiens
tattttagtacactc

SEQ ID NO: 175947 - DNA, 15 bp, Homo sapiens
ttattttagtacact

SEQ ID NO: 175948 - DNA, 15 bp, Homo sapiens
gttattttagtacac

SEQ ID NO: 175949 - DNA, 15 bp, Homo sapiens
ggttattttagtaca

SEQ ID NO: 175950 - DNA, 15 bp, Homo sapiens
aggttattttagtac

SEQ ID NO: 175951 - DNA, 15 bp, Homo sapiens
taggttattttagta

SEQ ID NO: 175952 - DNA, 15 bp, Homo sapiens
ttaggttattttagt

SEQ ID NO: 175953 - DNA, 15 bp, Homo sapiens
tttaggttattttag

SEQ ID NO: 175954 - DNA, 15 bp, Homo sapiens
ttttaggttatttta

SEQ ID NO: 175955 - DNA, 15 bp, Homo sapiens
cttttaggttatttt

SEQ ID NO: 175956 - DNA, 15 bp, Homo sapiens
ccttttaggttattt

SEQ ID NO: 175957 - DNA, 15 bp, Homo sapiens
accttttaggttatt

SEQ ID NO: 175958 - DNA, 15 bp, Homo sapiens
gaccttttaggttat

SEQ ID NO: 175959 - DNA, 15 bp, Homo sapiens
agaccttttaggtta

SEQ ID NO: 175960 - DNA, 15 bp, Homo sapiens
aagaccttttaggtt

SEQ ID NO: 175961 - DNA, 15 bp, Homo sapiens
caagaccttttaggt

SEQ ID NO: 175962 - DNA, 15 bp, Homo sapiens
tcaagaccttttagg

SEQ ID NO: 175963 - DNA, 15 bp, Homo sapiens
ttcaagaccttttag

SEQ ID NO: 175964 - DNA, 15 bp, Homo sapiens
gttcaagacctttta

SEQ ID NO: 175965 - DNA, 15 bp, Homo sapiens
ggttcaagacctttt

SEQ ID NO: 175966 - DNA, 15 bp, Homo sapiens
aggttcaagaccttt

SEQ ID NO: 175967 - DNA, 15 bp, Homo sapiens
gaggttcaagacctt

SEQ ID NO: 175968 - DNA, 15 bp, Homo sapiens
ggaggttcaagacct

SEQ ID NO: 175969 - DNA, 15 bp, Homo sapiens
gggaggttcaagacc

SEQ ID NO: 175970 - DNA, 15 bp, Homo sapiens
ggggaggttcaagac

SEQ ID NO: 175971 - DNA, 15 bp, Homo sapiens
aggggaggttcaaga

SEQ ID NO: 175972 - DNA, 15 bp, Homo sapiens
aaggggaggttcaag

SEQ ID NO: 175973 - DNA, 15 bp, Homo sapiens
aaaggggaggttcaa

SEQ ID NO: 175974 - DNA, 15 bp, Homo sapiens
taaaggggaggttca

SEQ ID NO: 175975 - DNA, 15 bp, Homo sapiens
gtaaaggggaggttc

SEQ ID NO: 175976 - DNA, 15 bp, Homo sapiens
ggtaaaggggaggtt

SEQ ID NO: 175977 - DNA, 15 bp, Homo sapiens
aggtaaaggggaggt

SEQ ID NO: 175978 - DNA, 15 bp, Homo sapiens
gaggtaaaggggagg

SEQ ID NO: 175979 - DNA, 15 bp, Homo sapiens
agaggtaaaggggag

SEQ ID NO: 175980 - DNA, 15 bp, Homo sapiens
aagaggtaaagggga

SEQ ID NO: 175981 - DNA, 15 bp, Homo sapiens
aaagaggtaaagggg

SEQ ID NO: 175982 - DNA, 15 bp, Homo sapiens
taaagaggtaaaggg

SEQ ID NO: 175983 - DNA, 15 bp, Homo sapiens
ctaaagaggtaaagg

SEQ ID NO: 175984 - DNA, 15 bp, Homo sapiens
tctaaagaggtaaag

SEQ ID NO: 175985 - DNA, 15 bp, Homo sapiens
ttctaaagaggtaaa

SEQ ID NO: 175986 - DNA, 15 bp, Homo sapiens
gttctaaagaggtaa

SEQ ID NO: 175987 - DNA, 15 bp, Homo sapiens
ggttctaaagaggta

SEQ ID NO: 175988 - DNA, 15 bp, Homo sapiens
aggttctaaagaggt

SEQ ID NO: 175989 - DNA, 15 bp, Homo sapiens
gaggttctaaagagg

SEQ ID NO: 175990 - DNA, 15 bp, Homo sapiens
agaggttctaaagag

SEQ ID NO: 175991 - DNA, 15 bp, Homo sapiens
cagaggttctaaaga

SEQ ID NO: 175992 - DNA, 15 bp, Homo sapiens
tcagaggttctaaag

SEQ ID NO: 175993 - DNA, 15 bp, Homo sapiens
ttcagaggttctaaa

SEQ ID NO: 175994 - DNA, 15 bp, Homo sapiens
attcagaggttctaa

SEQ ID NO: 175995 - DNA, 15 bp, Homo sapiens
aattcagaggttcta

SEQ ID NO: 175996 - DNA, 15 bp, Homo sapiens
aaattcagaggttct

SEQ ID NO: 175997 - DNA, 15 bp, Homo sapiens
caaattcagaggttc

SEQ ID NO: 175998 - DNA, 15 bp, Homo sapiens
ccaaattcagaggtt

SEQ ID NO: 175999 - DNA, 15 bp, Homo sapiens
tccaaattcagaggt

SEQ ID NO: 176000 - DNA, 15 bp, Homo sapiens
ctccaaattcagagg

SEQ ID NO: 176001 - DNA, 15 bp, Homo sapiens
tctccaaattcagag

SEQ ID NO: 176002 - DNA, 15 bp, Homo sapiens
gtctccaaattcaga

SEQ ID NO: 176003 - DNA, 15 bp, Homo sapiens
tgtctccaaattcag

SEQ ID NO: 176004 - DNA, 15 bp, Homo sapiens
ctgtctccaaattca

SEQ ID NO: 176005 - DNA, 15 bp, Homo sapiens
gctgtctccaaattc

SEQ ID NO: 176006 - DNA, 15 bp, Homo sapiens
agctgtctccaaatt

SEQ ID NO: 176007 - DNA, 15 bp, Homo sapiens
tagctgtctccaaat

SEQ ID NO: 176008 - DNA, 15 bp, Homo sapiens
ctagctgtctccaaa

SEQ ID NO: 176009 - DNA, 15 bp, Homo sapiens
gctagctgtctccaa

SEQ ID NO: 176010 - DNA, 15 bp, Homo sapiens
tgctagctgtctcca

SEQ ID NO: 176011 - DNA, 15 bp, Homo sapiens
ttgctagctgtctcc

SEQ ID NO: 176012 - DNA, 15 bp, Homo sapiens
tttgctagctgtctc

SEQ ID NO: 176013 - DNA, 15 bp, Homo sapiens
gtttgctagctgtct

SEQ ID NO: 176014 - DNA, 15 bp, Homo sapiens
cgtttgctagctgtc

SEQ ID NO: 176015 - DNA, 15 bp, Homo sapiens
ccgtttgctagctgt

SEQ ID NO: 176016 - DNA, 15 bp, Homo sapiens
gccgtttgctagctg

SEQ ID NO: 176017 - DNA, 15 bp, Homo sapiens
tgccgtttgctagct

SEQ ID NO: 176018 - DNA, 15 bp, Homo sapiens
ttgccgtttgctagc

SEQ ID NO: 176019 - DNA, 15 bp, Homo sapiens
gttgccgtttgctag

SEQ ID NO: 176020 - DNA, 15 bp, Homo sapiens
agttgccgtttgcta

SEQ ID NO: 176021 - DNA, 15 bp, Homo sapiens
cagttgccgtttgct

SEQ ID NO: 176022 - DNA, 15 bp, Homo sapiens
acagttgccgtttgc

SEQ ID NO: 176023 - DNA, 15 bp, Homo sapiens
tacagttgccgtttg

SEQ ID NO: 176024 - DNA, 15 bp, Homo sapiens
ctacagttgccgttt

SEQ ID NO: 176025 - DNA, 15 bp, Homo sapiens
gctacagttgccgtt

SEQ ID NO: 176026 - DNA, 15 bp, Homo sapiens
ggctacagttgccgt

SEQ ID NO: 176027 - DNA, 15 bp, Homo sapiens
aggctacagttgccg

SEQ ID NO: 176028 - DNA, 15 bp, Homo sapiens
taggctacagttgcc

SEQ ID NO: 176029 - DNA, 15 bp, Homo sapiens
ctaggctacagttgc

SEQ ID NO: 176030 - DNA, 15 bp, Homo sapiens
gctaggctacagttg

SEQ ID NO: 176031 - DNA, 15 bp, Homo sapiens
tgctaggctacagtt

SEQ ID NO: 176032 - DNA, 15 bp, Homo sapiens
ttgctaggctacagt

SEQ ID NO: 176033 - DNA, 15 bp, Homo sapiens
tttgctaggctacag

SEQ ID NO: 176034 - DNA, 15 bp, Homo sapiens
ctttgctaggctaca

SEQ ID NO: 176035 - DNA, 15 bp, Homo sapiens
tctttgctaggctac

SEQ ID NO: 176036 - DNA, 15 bp, Homo sapiens
atctttgctaggcta

SEQ ID NO: 176037 - DNA, 15 bp, Homo sapiens
catctttgctaggct

SEQ ID NO: 176038 - DNA, 15 bp, Homo sapiens
ccatctttgctaggc

SEQ ID NO: 176039 - DNA, 15 bp, Homo sapiens
gccatctttgctagg

SEQ ID NO: 176040 - DNA, 15 bp, Homo sapiens
tgccatctttgctag

SEQ ID NO: 176041 - DNA, 15 bp, Homo sapiens
gtgccatctttgcta

SEQ ID NO: 176042 - DNA, 15 bp, Homo sapiens
tgtgccatctttgct

SEQ ID NO: 176043 - DNA, 15 bp, Homo sapiens
ctgtgccatctttgc

SEQ ID NO: 176044 - DNA, 15 bp, Homo sapiens
gctgtgccatctttg

SEQ ID NO: 176045 - DNA, 15 bp, Homo sapiens
tgctgtgccatcttt

SEQ ID NO: 176046 - DNA, 15 bp, Homo sapiens
gtgctgtgccatctt

SEQ ID NO: 176047 - DNA, 15 bp, Homo sapiens
ggtgctgtgccatct

SEQ ID NO: 176048 - DNA, 15 bp, Homo sapiens
tggtgctgtgccatc

SEQ ID NO: 176049 - DNA, 15 bp, Homo sapiens
gtggtgctgtgccat

SEQ ID NO: 176050 - DNA, 15 bp, Homo sapiens
tgtggtgctgtgcca

SEQ ID NO: 176051 - DNA, 15 bp, Homo sapiens
ttgtggtgctgtgcc

SEQ ID NO: 176052 - DNA, 15 bp, Homo sapiens
tttgtggtgctgtgc

SEQ ID NO: 176053 - DNA, 15 bp, Homo sapiens
ctttgtggtgctgtg

SEQ ID NO: 176054 - DNA, 15 bp, Homo sapiens
cctttgtggtgctgt

SEQ ID NO: 176055 - DNA, 15 bp, Homo sapiens
ccctttgtggtgctg

SEQ ID NO: 176056 - DNA, 15 bp, Homo sapiens
gccctttgtggtgct

SEQ ID NO: 176057 - DNA, 15 bp, Homo sapiens
tgccctttgtggtgc

SEQ ID NO: 176058 - DNA, 15 bp, Homo sapiens
ttgccctttgtggtg

SEQ ID NO: 176059 - DNA, 15 bp, Homo sapiens
tttgccctttgtggt

SEQ ID NO: 176060 - DNA, 15 bp, Homo sapiens
atttgccctttgtgg

SEQ ID NO: 176061 - DNA, 15 bp, Homo sapiens
catttgccctttgtg

SEQ ID NO: 176062 - DNA, 15 bp, Homo sapiens
ccatttgccctttgt

SEQ ID NO: 176063 - DNA, 15 bp, Homo sapiens
tccatttgccctttg

SEQ ID NO: 176064 - DNA, 15 bp, Homo sapiens
ctccatttgcccttt

SEQ ID NO: 176065 - DNA, 15 bp, Homo sapiens
actccatttgccctt

SEQ ID NO: 176066 - DNA, 15 bp, Homo sapiens
gactccatttgccct

SEQ ID NO: 176067 - DNA, 15 bp, Homo sapiens
tgactccatttgccc

SEQ ID NO: 176068 - DNA, 15 bp, Homo sapiens
ttgactccatttgcc

SEQ ID NO: 176069 - DNA, 15 bp, Homo sapiens
gttgactccatttgc

SEQ ID NO: 176070 - DNA, 15 bp, Homo sapiens
agttgactccatttg

SEQ ID NO: 176071 - DNA, 15 bp, Homo sapiens
gagttgactccattt

SEQ ID NO: 176072 - DNA, 15 bp, Homo sapiens
ggagttgactccatt

SEQ ID NO: 176073 - DNA, 15 bp, Homo sapiens
gggagttgactccat

SEQ ID NO: 176074 - DNA, 15 bp, Homo sapiens
agggagttgactcca

SEQ ID NO: 176075 - DNA, 15 bp, Homo sapiens
aagggagttgactcc

SEQ ID NO: 176076 - DNA, 15 bp, Homo sapiens
gaagggagttgactc

SEQ ID NO: 176077 - DNA, 15 bp, Homo sapiens
ggaagggagttgact

SEQ ID NO: 176078 - DNA, 15 bp, Homo sapiens
tggaagggagttgac

SEQ ID NO: 176079 - DNA, 15 bp, Homo sapiens
atggaagggagttga

SEQ ID NO: 176080 - DNA, 15 bp, Homo sapiens
catggaagggagttg

SEQ ID NO: 176081 - DNA, 15 bp, Homo sapiens
gcatggaagggagtt

SEQ ID NO: 176082 - DNA, 15 bp, Homo sapiens
agcatggaagggagt

SEQ ID NO: 176083 - DNA, 15 bp, Homo sapiens
gagcatggaagggag

SEQ ID NO: 176084 - DNA, 15 bp, Homo sapiens
agagcatggaaggga

SEQ ID NO: 176085 - DNA, 15 bp, Homo sapiens
cagagcatggaaggg

SEQ ID NO: 176086 - DNA, 15 bp, Homo sapiens
tcagagcatggaagg

SEQ ID NO: 176087 - DNA, 15 bp, Homo sapiens
ttcagagcatggaag

SEQ ID NO: 176088 - DNA, 15 bp, Homo sapiens
cttcagagcatggaa

SEQ ID NO: 176089 - DNA, 15 bp, Homo sapiens
ccttcagagcatgga

SEQ ID NO: 176090 - DNA, 15 bp, Homo sapiens
accttcagagcatgg

SEQ ID NO: 176091 - DNA, 15 bp, Homo sapiens
gaccttcagagcatg

SEQ ID NO: 176092 - DNA, 15 bp, Homo sapiens
agaccttcagagcat

SEQ ID NO: 176093 - DNA, 15 bp, Homo sapiens
aagaccttcagagca

SEQ ID NO: 176094 - DNA, 15 bp, Homo sapiens
caagaccttcagagc

SEQ ID NO: 176095 - DNA, 15 bp, Homo sapiens
ccaagaccttcagag

SEQ ID NO: 176096 - DNA, 15 bp, Homo sapiens
gccaagaccttcaga

SEQ ID NO: 176097 - DNA, 15 bp, Homo sapiens
ggccaagaccttcag

SEQ ID NO: 176098 - DNA, 15 bp, Homo sapiens
tggccaagaccttca

SEQ ID NO: 176099 - DNA, 15 bp, Homo sapiens
gtggccaagaccttc

SEQ ID NO: 176100 - DNA, 15 bp, Homo sapiens
agtggccaagacctt

SEQ ID NO: 176101 - DNA, 15 bp, Homo sapiens
gagtggccaagacct

SEQ ID NO: 176102 - DNA, 15 bp, Homo sapiens
agagtggccaagacc

SEQ ID NO: 176103 - DNA, 15 bp, Homo sapiens
gagagtggccaagac

SEQ ID NO: 176104 - DNA, 15 bp, Homo sapiens
tgagagtggccaaga

SEQ ID NO: 176105 - DNA, 15 bp, Homo sapiens
atgagagtggccaag

SEQ ID NO: 176106 - DNA, 15 bp, Homo sapiens
gatgagagtggccaa

SEQ ID NO: 176107 - DNA, 15 bp, Homo sapiens
tgatgagagtggcca

SEQ ID NO: 176108 - DNA, 15 bp, Homo sapiens
ctgatgagagtggcc

SEQ ID NO: 176109 - DNA, 15 bp, Homo sapiens
cctgatgagagtggc

SEQ ID NO: 176110 - DNA, 15 bp, Homo sapiens
ccctgatgagagtgg

SEQ ID NO: 176111 - DNA, 15 bp, Homo sapiens
accctgatgagagtg

SEQ ID NO: 176112 - DNA, 15 bp, Homo sapiens
aaccctgatgagagt

SEQ ID NO: 176113 - DNA, 15 bp, Homo sapiens
caaccctgatgagag

SEQ ID NO: 176114 - DNA, 15 bp, Homo sapiens
ccaaccctgatgaga

SEQ ID NO: 176115 - DNA, 15 bp, Homo sapiens
gccaaccctgatgag

SEQ ID NO: 176116 - DNA, 15 bp, Homo sapiens
agccaaccctgatga

SEQ ID NO: 176117 - DNA, 15 bp, Homo sapiens
cagccaaccctgatg

SEQ ID NO: 176118 - DNA, 15 bp, Homo sapiens
acagccaaccctgat

SEQ ID NO: 176119 - DNA, 15 bp, Homo sapiens
cacagccaaccctga

SEQ ID NO: 176120 - DNA, 15 bp, Homo sapiens
acacagccaaccctg

SEQ ID NO: 176121 - DNA, 15 bp, Homo sapiens
tacacagccaaccct

SEQ ID NO: 176122 - DNA, 15 bp, Homo sapiens
gtacacagccaaccc

SEQ ID NO: 176123 - DNA, 15 bp, Homo sapiens
agtacacagccaacc

SEQ ID NO: 176124 - DNA, 15 bp, Homo sapiens
tagtacacagccaac

SEQ ID NO: 176125 - DNA, 15 bp, Homo sapiens
atagtacacagccaa

SEQ ID NO: 176126 - DNA, 15 bp, Homo sapiens
gatagtacacagcca

SEQ ID NO: 176127 - DNA, 15 bp, Homo sapiens
ggatagtacacagcc

SEQ ID NO: 176128 - DNA, 15 bp, Homo sapiens
tggatagtacacagc

SEQ ID NO: 176129 - DNA, 15 bp, Homo sapiens
ctggatagtacacag

SEQ ID NO: 176130 - DNA, 15 bp, Homo sapiens
gctggatagtacaca

SEQ ID NO: 176131 - DNA, 15 bp, Homo sapiens
tgctggatagtacac

SEQ ID NO: 176132 - DNA, 15 bp, Homo sapiens
ctgctggatagtaca

SEQ ID NO: 176133 - DNA, 15 bp, Homo sapiens
gctgctggatagtac

SEQ ID NO: 176134 - DNA, 15 bp, Homo sapiens
agctgctggatagta

SEQ ID NO: 176135 - DNA, 15 bp, Homo sapiens
gagctgctggatagt

SEQ ID NO: 176136 - DNA, 15 bp, Homo sapiens
tgagctgctggatag

SEQ ID NO: 176137 - DNA, 15 bp, Homo sapiens
gtgagctgctggata

SEQ ID NO: 176138 - DNA, 15 bp, Homo sapiens
tgtgagctgctggat

SEQ ID NO: 176139 - DNA, 15 bp, Homo sapiens
ctgtgagctgctgga

SEQ ID NO: 176140 - DNA, 15 bp, Homo sapiens
actgtgagctgctgg

SEQ ID NO: 176141 - DNA, 15 bp, Homo sapiens
gactgtgagctgctg

SEQ ID NO: 176142 - DNA, 15 bp, Homo sapiens
tgactgtgagctgct

SEQ ID NO: 176143 - DNA, 15 bp, Homo sapiens
ctgactgtgagctgc

SEQ ID NO: 176144 - DNA, 15 bp, Homo sapiens
cctgactgtgagctg

SEQ ID NO: 176145 - DNA, 15 bp, Homo sapiens
tcctgactgtgagct

SEQ ID NO: 176146 - DNA, 15 bp, Homo sapiens
ctcctgactgtgagc

SEQ ID NO: 176147 - DNA, 15 bp, Homo sapiens
tctcctgactgtgag

SEQ ID NO: 176148 - DNA, 15 bp, Homo sapiens
gtctcctgactgtga

SEQ ID NO: 176149 - DNA, 15 bp, Homo sapiens
ggtctcctgactgtg

SEQ ID NO: 176150 - DNA, 15 bp, Homo sapiens
aggtctcctgactgt

SEQ ID NO: 176151 - DNA, 15 bp, Homo sapiens
gaggtctcctgactg

SEQ ID NO: 176152 - DNA, 15 bp, Homo sapiens
ggaggtctcctgact

SEQ ID NO: 176153 - DNA, 15 bp, Homo sapiens
gggaggtctcctgac

SEQ ID NO: 176154 - DNA, 15 bp, Homo sapiens
ggggaggtctcctga

SEQ ID NO: 176155 - DNA, 15 bp, Homo sapiens
aggggaggtctcctg

SEQ ID NO: 176156 - DNA, 15 bp, Homo sapiens
gaggggaggtctcct

SEQ ID NO: 176157 - DNA, 15 bp, Homo sapiens
ggaggggaggtctcc

SEQ ID NO: 176158 - DNA, 15 bp, Homo sapiens
aggaggggaggtctc

SEQ ID NO: 176159 - DNA, 15 bp, Homo sapiens
gaggaggggaggtct

SEQ ID NO: 176160 - DNA, 15 bp, Homo sapiens
tgaggaggggaggtc

SEQ ID NO: 176161 - DNA, 15 bp, Homo sapiens
ctgaggaggggaggt

SEQ ID NO: 176162 - DNA, 15 bp, Homo sapiens
actgaggaggggagg

SEQ ID NO: 176163 - DNA, 15 bp, Homo sapiens
gactgaggaggggag

SEQ ID NO: 176164 - DNA, 15 bp, Homo sapiens
ggactgaggagggga

SEQ ID NO: 176165 - DNA, 15 bp, Homo sapiens
gggactgaggagggg

SEQ ID NO: 176166 - DNA, 15 bp, Homo sapiens
agggactgaggaggg

SEQ ID NO: 176167 - DNA, 15 bp, Homo sapiens
gagggactgaggagg

SEQ ID NO: 176168 - DNA, 15 bp, Homo sapiens
ggagggactgaggag

SEQ ID NO: 176169 - DNA, 15 bp, Homo sapiens
gggagggactgagga

SEQ ID NO: 176170 - DNA, 15 bp, Homo sapiens
tgggagggactgagg

SEQ ID NO: 176171 - DNA, 15 bp, Homo sapiens
atgggagggactgag

SEQ ID NO: 176172 - DNA, 15 bp, Homo sapiens
aatgggagggactga

SEQ ID NO: 176173 - DNA, 15 bp, Homo sapiens
aaatgggagggactg

SEQ ID NO: 176174 - DNA, 15 bp, Homo sapiens
gaaatgggagggact

SEQ ID NO: 176175 - DNA, 15 bp, Homo sapiens
agaaatgggagggac

SEQ ID NO: 176176 - DNA, 15 bp, Homo sapiens
aagaaatgggaggga

SEQ ID NO: 176177 - DNA, 15 bp, Homo sapiens
aaagaaatgggaggg

SEQ ID NO: 176178 - DNA, 15 bp, Homo sapiens
gaaagaaatgggagg

SEQ ID NO: 176179 - DNA, 15 bp, Homo sapiens
agaaagaaatgggag

SEQ ID NO: 176180 - DNA, 15 bp, Homo sapiens
aagaaagaaatggga

SEQ ID NO: 176181 - DNA, 15 bp, Homo sapiens
gaagaaagaaatggg

SEQ ID NO: 176182 - DNA, 15 bp, Homo sapiens
ggaagaaagaaatgg

SEQ ID NO: 176183 - DNA, 15 bp, Homo sapiens
cggaagaaagaaatg

SEQ ID NO: 176184 - DNA, 15 bp, Homo sapiens
gcggaagaaagaaat

SEQ ID NO: 176185 - DNA, 15 bp, Homo sapiens
tgcggaagaaagaaa

SEQ ID NO: 176186 - DNA, 15 bp, Homo sapiens
ttgcggaagaaagaa

SEQ ID NO: 176187 - DNA, 15 bp, Homo sapiens
cttgcggaagaaaga

SEQ ID NO: 176188 - DNA, 15 bp, Homo sapiens
ccttgcggaagaaag

SEQ ID NO: 176189 - DNA, 15 bp, Homo sapiens
tccttgcggaagaaa

SEQ ID NO: 176190 - DNA, 15 bp, Homo sapiens
ttccttgcggaagaa

SEQ ID NO: 176191 - DNA, 15 bp, Homo sapiens
tttccttgcggaaga

SEQ ID NO: 176192 - DNA, 15 bp, Homo sapiens
ctttccttgcggaag

SEQ ID NO: 176193 - DNA, 15 bp, Homo sapiens
tctttccttgcggaa

SEQ ID NO: 176194 - DNA, 15 bp, Homo sapiens
ttctttccttgcgga

SEQ ID NO: 176195 - DNA, 15 bp, Homo sapiens
gttctttccttgcgg

SEQ ID NO: 176196 - DNA, 15 bp, Homo sapiens
tgttctttccttgcg

SEQ ID NO: 176197 - DNA, 15 bp, Homo sapiens
atgttctttccttgc

SEQ ID NO: 176198 - DNA, 15 bp, Homo sapiens
aatgttctttccttg

SEQ ID NO: 176199 - DNA, 15 bp, Homo sapiens
caatgttctttcctt

SEQ ID NO: 176200 - DNA, 15 bp, Homo sapiens
gcaatgttctttcct

SEQ ID NO: 176201 - DNA, 15 bp, Homo sapiens
tgcaatgttctttcc

SEQ ID NO: 176202 - DNA, 15 bp, Homo sapiens
atgcaatgttctttc

SEQ ID NO: 176203 - DNA, 15 bp, Homo sapiens
catgcaatgttcttt

SEQ ID NO: 176204 - DNA, 15 bp, Homo sapiens
acatgcaatgttctt

SEQ ID NO: 176205 - DNA, 15 bp, Homo sapiens
cacatgcaatgttct

SEQ ID NO: 176206 - DNA, 15 bp, Homo sapiens
ccacatgcaatgttc

SEQ ID NO: 176207 - DNA, 15 bp, Homo sapiens
cccacatgcaatgtt

SEQ ID NO: 176208 - DNA, 15 bp, Homo sapiens
gcccacatgcaatgt

SEQ ID NO: 176209 - DNA, 15 bp, Homo sapiens
cgcccacatgcaatg

SEQ ID NO: 176210 - DNA, 15 bp, Homo sapiens
acgcccacatgcaat

SEQ ID NO: 176211 - DNA, 15 bp, Homo sapiens
cacgcccacatgcaa

SEQ ID NO: 176212 - DNA, 15 bp, Homo sapiens
acacgcccacatgca

SEQ ID NO: 176213 - DNA, 15 bp, Homo sapiens
cacacgcccacatgc

SEQ ID NO: 176214 - DNA, 15 bp, Homo sapiens
acacacgcccacatg

SEQ ID NO: 176215 - DNA, 15 bp, Homo sapiens
cacacacgcccacat

SEQ ID NO: 176216 - DNA, 15 bp, Homo sapiens
acacacacgcccaca

SEQ ID NO: 176217 - DNA, 15 bp, Homo sapiens
cacacacacgcccac

SEQ ID NO: 176218 - DNA, 15 bp, Homo sapiens
acacacacacgccca

SEQ ID NO: 176219 - DNA, 15 bp, Homo sapiens
cacacacacacgccc

SEQ ID NO: 176220 - DNA, 15 bp, Homo sapiens
acacacacacacgcc

SEQ ID NO: 176221 - DNA, 15 bp, Homo sapiens
tacacacacacacgc

SEQ ID NO: 176222 - DNA, 15 bp, Homo sapiens
atacacacacacacg

SEQ ID NO: 176223 - DNA, 15 bp, Homo sapiens
catacacacacacac

SEQ ID NO: 176224 - DNA, 15 bp, Homo sapiens
acatacacacacaca

SEQ ID NO: 176225 - DNA, 15 bp, Homo sapiens
cacatacacacacac

SEQ ID NO: 176226 - DNA, 15 bp, Homo sapiens
acacatacacacaca

SEQ ID NO: 176227 - DNA, 15 bp, Homo sapiens
cacacatacacacac

SEQ ID NO: 176228 - DNA, 15 bp, Homo sapiens
acacacatacacaca

SEQ ID NO: 176229 - DNA, 15 bp, Homo sapiens
cacacacatacacac

SEQ ID NO: 176230 - DNA, 15 bp, Homo sapiens
gcacacacatacaca

SEQ ID NO: 176231 - DNA, 15 bp, Homo sapiens
tgcacacacatacac

SEQ ID NO: 176232 - DNA, 15 bp, Homo sapiens
atgcacacacataca

SEQ ID NO: 176233 - DNA, 15 bp, Homo sapiens
catgcacacacatac

SEQ ID NO: 176234 - DNA, 15 bp, Homo sapiens
acatgcacacacata

SEQ ID NO: 176235 - DNA, 15 bp, Homo sapiens
cacatgcacacacat

SEQ ID NO: 176236 - DNA, 15 bp, Homo sapiens
acacatgcacacaca

SEQ ID NO: 176237 - DNA, 15 bp, Homo sapiens
cacacatgcacacac

SEQ ID NO: 176238 - DNA, 15 bp, Homo sapiens
acacacatgcacaca

SEQ ID NO: 176239 - DNA, 15 bp, Homo sapiens
cacacacatgcacac

SEQ ID NO: 176240 - DNA, 15 bp, Homo sapiens
acacacacatgcaca

SEQ ID NO: 176241 - DNA, 15 bp, Homo sapiens
cacacacacatgcac

SEQ ID NO: 176242 - DNA, 15 bp, Homo sapiens
gcacacacacatgca

SEQ ID NO: 176243 - DNA, 15 bp, Homo sapiens
tgcacacacacatgc

SEQ ID NO: 176244 - DNA, 15 bp, Homo sapiens
atgcacacacacatg

SEQ ID NO: 176245 - DNA, 15 bp, Homo sapiens
catgcacacacacat

SEQ ID NO: 176246 - DNA, 15 bp, Homo sapiens
acatgcacacacaca

SEQ ID NO: 176247 - DNA, 15 bp, Homo sapiens
aacatgcacacacac

SEQ ID NO: 176248 - DNA, 15 bp, Homo sapiens
aaacatgcacacaca

SEQ ID NO: 176249 - DNA, 15 bp, Homo sapiens
gaaacatgcacacac

SEQ ID NO: 176250 - DNA, 15 bp, Homo sapiens
agaaacatgcacaca

SEQ ID NO: 176251 - DNA, 15 bp, Homo sapiens
aagaaacatgcacac

SEQ ID NO: 176252 - DNA, 15 bp, Homo sapiens
gaagaaacatgcaca

SEQ ID NO: 176253 - DNA, 15 bp, Homo sapiens
agaagaaacatgcac

SEQ ID NO: 176254 - DNA, 15 bp, Homo sapiens
cagaagaaacatgca

SEQ ID NO: 176255 - DNA, 15 bp, Homo sapiens
acagaagaaacatgc

SEQ ID NO: 176256 - DNA, 15 bp, Homo sapiens
cacagaagaaacatg

SEQ ID NO: 176257 - DNA, 15 bp, Homo sapiens
gcacagaagaaacat

SEQ ID NO: 176258 - DNA, 15 bp, Homo sapiens
tgcacagaagaaaca

SEQ ID NO: 176259 - DNA, 15 bp, Homo sapiens
atgcacagaagaaac

SEQ ID NO: 176260 - DNA, 15 bp, Homo sapiens
tatgcacagaagaaa

SEQ ID NO: 176261 - DNA, 15 bp, Homo sapiens
ctatgcacagaagaa

SEQ ID NO: 176262 - DNA, 15 bp, Homo sapiens
gctatgcacagaaga

SEQ ID NO: 176263 - DNA, 15 bp, Homo sapiens
tgctatgcacagaag

SEQ ID NO: 176264 - DNA, 15 bp, Homo sapiens
ctgctatgcacagaa

SEQ ID NO: 176265 - DNA, 15 bp, Homo sapiens
gctgctatgcacaga

SEQ ID NO: 176266 - DNA, 15 bp, Homo sapiens
tgctgctatgcacag

SEQ ID NO: 176267 - DNA, 15 bp, Homo sapiens
atgctgctatgcaca

SEQ ID NO: 176268 - DNA, 15 bp, Homo sapiens
tatgctgctatgcac

SEQ ID NO: 176269 - DNA, 15 bp, Homo sapiens
ttatgctgctatgca

SEQ ID NO: 176270 - DNA, 15 bp, Homo sapiens
tttatgctgctatgc

SEQ ID NO: 176271 - DNA, 15 bp, Homo sapiens
ctttatgctgctatg

SEQ ID NO: 176272 - DNA, 15 bp, Homo sapiens
actttatgctgctat

SEQ ID NO: 176273 - DNA, 15 bp, Homo sapiens
aactttatgctgcta

SEQ ID NO: 176274 - DNA, 15 bp, Homo sapiens
taactttatgctgct

SEQ ID NO: 176275 - DNA, 15 bp, Homo sapiens
ctaactttatgctgc

SEQ ID NO: 176276 - DNA, 15 bp, Homo sapiens
cctaactttatgctg

SEQ ID NO: 176277 - DNA, 15 bp, Homo sapiens
tcctaactttatgct

SEQ ID NO: 176278 - DNA, 15 bp, Homo sapiens
ctcctaactttatgc

SEQ ID NO: 176279 - DNA, 15 bp, Homo sapiens
tctcctaactttatg

SEQ ID NO: 176280 - DNA, 15 bp, Homo sapiens
atctcctaactttat

SEQ ID NO: 176281 - DNA, 15 bp, Homo sapiens
catctcctaacttta

SEQ ID NO: 176282 - DNA, 15 bp, Homo sapiens
tcatctcctaacttt

SEQ ID NO: 176283 - DNA, 15 bp, Homo sapiens
atcatctcctaactt

SEQ ID NO: 176284 - DNA, 15 bp, Homo sapiens
catcatctcctaact

SEQ ID NO: 176285 - DNA, 15 bp, Homo sapiens
tcatcatctcctaac

SEQ ID NO: 176286 - DNA, 15 bp, Homo sapiens
gtcatcatctcctaa

SEQ ID NO: 176287 - DNA, 15 bp, Homo sapiens
agtcatcatctccta

SEQ ID NO: 176288 - DNA, 15 bp, Homo sapiens
gagtcatcatctcct

SEQ ID NO: 176289 - DNA, 15 bp, Homo sapiens
ggagtcatcatctcc

SEQ ID NO: 176290 - DNA, 15 bp, Homo sapiens
tggagtcatcatctc

SEQ ID NO: 176291 - DNA, 15 bp, Homo sapiens
ctggagtcatcatct

SEQ ID NO: 176292 - DNA, 15 bp, Homo sapiens
tctggagtcatcatc

SEQ ID NO: 176293 - DNA, 15 bp, Homo sapiens
ttctggagtcatcat

SEQ ID NO: 176294 - DNA, 15 bp, Homo sapiens
attctggagtcatca

SEQ ID NO: 176295 - DNA, 15 bp, Homo sapiens
gattctggagtcatc

SEQ ID NO: 176296 - DNA, 15 bp, Homo sapiens
tgattctggagtcat

SEQ ID NO: 176297 - DNA, 15 bp, Homo sapiens
atgattctggagtca

SEQ ID NO: 176298 - DNA, 15 bp, Homo sapiens
gatgattctggagtc

SEQ ID NO: 176299 - DNA, 15 bp, Homo sapiens
tgatgattctggagt

SEQ ID NO: 176300 - DNA, 15 bp, Homo sapiens
gtgatgattctggag

SEQ ID NO: 176301 - DNA, 15 bp, Homo sapiens
tgtgatgattctgga

SEQ ID NO: 176302 - DNA, 15 bp, Homo sapiens
gtgtgatgattctgg

SEQ ID NO: 176303 - DNA, 15 bp, Homo sapiens
ggtgtgatgattctg

SEQ ID NO: 176304 - DNA, 15 bp, Homo sapiens
gggtgtgatgattct

SEQ ID NO: 176305 - DNA, 15 bp, Homo sapiens
cgggtgtgatgattc

SEQ ID NO: 176306 - DNA, 15 bp, Homo sapiens
gcgggtgtgatgatt

SEQ ID NO: 176307 - DNA, 15 bp, Homo sapiens
agcgggtgtgatgat

SEQ ID NO: 176308 - DNA, 15 bp, Homo sapiens
cagcgggtgtgatga

SEQ ID NO: 176309 - DNA, 15 bp, Homo sapiens
acagcgggtgtgatg

SEQ ID NO: 176310 - DNA, 15 bp, Homo sapiens
cacagcgggtgtgat

SEQ ID NO: 176311 - DNA, 15 bp, Homo sapiens
gcacagcgggtgtga

SEQ ID NO: 176312 - DNA, 15 bp, Homo sapiens
tgcacagcgggtgtg

SEQ ID NO: 176313 - DNA, 15 bp, Homo sapiens
ctgcacagcgggtgt

SEQ ID NO: 176314 - DNA, 15 bp, Homo sapiens
cctgcacagcgggtg

SEQ ID NO: 176315 - DNA, 15 bp, Homo sapiens
acctgcacagcgggt

SEQ ID NO: 176316 - DNA, 15 bp, Homo sapiens
gacctgcacagcggg

SEQ ID NO: 176317 - DNA, 15 bp, Homo sapiens
tgacctgcacagcgg

SEQ ID NO: 176318 - DNA, 15 bp, Homo sapiens
atgacctgcacagcg

SEQ ID NO: 176319 - DNA, 15 bp, Homo sapiens
tatgacctgcacagc

SEQ ID NO: 176320 - DNA, 15 bp, Homo sapiens
ctatgacctgcacag

SEQ ID NO: 176321 - DNA, 15 bp, Homo sapiens
cctatgacctgcaca

SEQ ID NO: 176322 - DNA, 15 bp, Homo sapiens
tcctatgacctgcac

SEQ ID NO: 176323 - DNA, 15 bp, Homo sapiens
gtcctatgacctgca

SEQ ID NO: 176324 - DNA, 15 bp, Homo sapiens
ggtcctatgacctgc

SEQ ID NO: 176325 - DNA, 15 bp, Homo sapiens
cggtcctatgacctg

SEQ ID NO: 176326 - DNA, 15 bp, Homo sapiens
gcggtcctatgacct

SEQ ID NO: 176327 - DNA, 15 bp, Homo sapiens
tgcggtcctatgacc

SEQ ID NO: 176328 - DNA, 15 bp, Homo sapiens
gtgcggtcctatgac

SEQ ID NO: 176329 - DNA, 15 bp, Homo sapiens
tgtgcggtcctatga

SEQ ID NO: 176330 - DNA, 15 bp, Homo sapiens
gtgtgcggtcctatg

SEQ ID NO: 176331 - DNA, 15 bp, Homo sapiens
ggtgtgcggtcctat

SEQ ID NO: 176332 - DNA, 15 bp, Homo sapiens
gggtgtgcggtccta

SEQ ID NO: 176333 - DNA, 15 bp, Homo sapiens
cgggtgtgcggtcct

SEQ ID NO: 176334 - DNA, 15 bp, Homo sapiens
tcgggtgtgcggtcc

SEQ ID NO: 176335 - DNA, 15 bp, Homo sapiens
ctcgggtgtgcggtc

SEQ ID NO: 176336 - DNA, 15 bp, Homo sapiens
cctcgggtgtgcggt

SEQ ID NO: 176337 - DNA, 15 bp, Homo sapiens
gcctcgggtgtgcgg

SEQ ID NO: 176338 - DNA, 15 bp, Homo sapiens
agcctcgggtgtgcg

SEQ ID NO: 176339 - DNA, 15 bp, Homo sapiens
cagcctcgggtgtgc

SEQ ID NO: 176340 - DNA, 15 bp, Homo sapiens
ccagcctcgggtgtg

SEQ ID NO: 176341 - DNA, 15 bp, Homo sapiens
cccagcctcgggtgt

SEQ ID NO: 176342 - DNA, 15 bp, Homo sapiens
tcccagcctcgggtg

SEQ ID NO: 176343 - DNA, 15 bp, Homo sapiens
ctcccagcctcgggt

SEQ ID NO: 176344 - DNA, 15 bp, Homo sapiens
actcccagcctcggg

SEQ ID NO: 176345 - DNA, 15 bp, Homo sapiens
gactcccagcctcgg

SEQ ID NO: 176346 - DNA, 15 bp, Homo sapiens
agactcccagcctcg

SEQ ID NO: 176347 - DNA, 15 bp, Homo sapiens
tagactcccagcctc

SEQ ID NO: 176348 - DNA, 15 bp, Homo sapiens
ttagactcccagcct

SEQ ID NO: 176349 - DNA, 15 bp, Homo sapiens
cttagactcccagcc

SEQ ID NO: 176350 - DNA, 15 bp, Homo sapiens
acttagactcccagc

SEQ ID NO: 176351 - DNA, 15 bp, Homo sapiens
cacttagactcccag

SEQ ID NO: 176352 - DNA, 15 bp, Homo sapiens
ccacttagactccca

SEQ ID NO: 176353 - DNA, 15 bp, Homo sapiens
accacttagactccc

SEQ ID NO: 176354 - DNA, 15 bp, Homo sapiens
taccacttagactcc

SEQ ID NO: 176355 - DNA, 15 bp, Homo sapiens
ctaccacttagactc

SEQ ID NO: 176356 - DNA, 15 bp, Homo sapiens
tctaccacttagact

SEQ ID NO: 176357 - DNA, 15 bp, Homo sapiens
atctaccacttagac

SEQ ID NO: 176358 - DNA, 15 bp, Homo sapiens
catctaccacttaga

SEQ ID NO: 176359 - DNA, 15 bp, Homo sapiens
gcatctaccacttag

SEQ ID NO: 176360 - DNA, 15 bp, Homo sapiens
agcatctaccactta

SEQ ID NO: 176361 - DNA, 15 bp, Homo sapiens
aagcatctaccactt

SEQ ID NO: 176362 - DNA, 15 bp, Homo sapiens
gaagcatctaccact

SEQ ID NO: 176363 - DNA, 15 bp, Homo sapiens
ggaagcatctaccac

SEQ ID NO: 176364 - DNA, 15 bp, Homo sapiens
aggaagcatctacca

SEQ ID NO: 176365 - DNA, 15 bp, Homo sapiens
gaggaagcatctacc

SEQ ID NO: 176366 - DNA, 15 bp, Homo sapiens
agaggaagcatctac

SEQ ID NO: 176367 - DNA, 15 bp, Homo sapiens
gagaggaagcatcta

SEQ ID NO: 176368 - DNA, 15 bp, Homo sapiens
ggagaggaagcatct

SEQ ID NO: 176369 - DNA, 15 bp, Homo sapiens
tggagaggaagcatc

SEQ ID NO: 176370 - DNA, 15 bp, Homo sapiens
atggagaggaagcat

SEQ ID NO: 176371 - DNA, 15 bp, Homo sapiens
catggagaggaagca

SEQ ID NO: 176372 - DNA, 15 bp, Homo sapiens
gcatggagaggaagc

SEQ ID NO: 176373 - DNA, 15 bp, Homo sapiens
cgcatggagaggaag

SEQ ID NO: 176374 - DNA, 15 bp, Homo sapiens
gcgcatggagaggaa

SEQ ID NO: 176375 - DNA, 15 bp, Homo sapiens
tgcgcatggagagga

SEQ ID NO: 176376 - DNA, 15 bp, Homo sapiens
ctgcgcatggagagg

SEQ ID NO: 176377 - DNA, 15 bp, Homo sapiens
tctgcgcatggagag

SEQ ID NO: 176378 - DNA, 15 bp, Homo sapiens
gtctgcgcatggaga

SEQ ID NO: 176379 - DNA, 15 bp, Homo sapiens
tgtctgcgcatggag

SEQ ID NO: 176380 - DNA, 15 bp, Homo sapiens
ctgtctgcgcatgga

SEQ ID NO: 176381 - DNA, 15 bp, Homo sapiens
cctgtctgcgcatgg

SEQ ID NO: 176382 - DNA, 15 bp, Homo sapiens
ccctgtctgcgcatg

SEQ ID NO: 176383 - DNA, 15 bp, Homo sapiens
gccctgtctgcgcat

SEQ ID NO: 176384 - DNA, 15 bp, Homo sapiens
agccctgtctgcgca

SEQ ID NO: 176385 - DNA, 15 bp, Homo sapiens
gagccctgtctgcgc

SEQ ID NO: 176386 - DNA, 15 bp, Homo sapiens
ggagccctgtctgcg

SEQ ID NO: 176387 - DNA, 15 bp, Homo sapiens
gggagccctgtctgc

SEQ ID NO: 176388 - DNA, 15 bp, Homo sapiens
tgggagccctgtctg

SEQ ID NO: 176389 - DNA, 15 bp, Homo sapiens
atgggagccctgtct

SEQ ID NO: 176390 - DNA, 15 bp, Homo sapiens
aatgggagccctgtc

SEQ ID NO: 176391 - DNA, 15 bp, Homo sapiens
taatgggagccctgt

SEQ ID NO: 176392 - DNA, 15 bp, Homo sapiens
ataatgggagccctg

SEQ ID NO: 176393 - DNA, 15 bp, Homo sapiens
aataatgggagccct

SEQ ID NO: 176394 - DNA, 15 bp, Homo sapiens
aaataatgggagccc

SEQ ID NO: 176395 - DNA, 15 bp, Homo sapiens
caaataatgggagcc

SEQ ID NO: 176396 - DNA, 15 bp, Homo sapiens
gcaaataatgggagc

SEQ ID NO: 176397 - DNA, 15 bp, Homo sapiens
agcaaataatgggag

SEQ ID NO: 176398 - DNA, 15 bp, Homo sapiens
tagcaaataatggga

SEQ ID NO: 176399 - DNA, 15 bp, Homo sapiens
ttagcaaataatggg

SEQ ID NO: 176400 - DNA, 15 bp, Homo sapiens
attagcaaataatgg

SEQ ID NO: 176401 - DNA, 15 bp, Homo sapiens
cattagcaaataatg

SEQ ID NO: 176402 - DNA, 15 bp, Homo sapiens
gcattagcaaataat

SEQ ID NO: 176403 - DNA, 15 bp, Homo sapiens
ggcattagcaaataa

SEQ ID NO: 176404 - DNA, 15 bp, Homo sapiens
aggcattagcaaata

SEQ ID NO: 176405 - DNA, 15 bp, Homo sapiens
caggcattagcaaat

SEQ ID NO: 176406 - DNA, 15 bp, Homo sapiens
gcaggcattagcaaa

SEQ ID NO: 176407 - DNA, 15 bp, Homo sapiens
cgcaggcattagcaa

SEQ ID NO: 176408 - DNA, 15 bp, Homo sapiens
tcgcaggcattagca

SEQ ID NO: 176409 - DNA, 15 bp, Homo sapiens
gtcgcaggcattagc

SEQ ID NO: 176410 - DNA, 15 bp, Homo sapiens
cgtcgcaggcattag

SEQ ID NO: 176411 - DNA, 15 bp, Homo sapiens
acgtcgcaggcatta

SEQ ID NO: 176412 - DNA, 15 bp, Homo sapiens
cacgtcgcaggcatt

SEQ ID NO: 176413 - DNA, 15 bp, Homo sapiens
gcacgtcgcaggcat

SEQ ID NO: 176414 - DNA, 15 bp, Homo sapiens
agcacgtcgcaggca

SEQ ID NO: 176415 - DNA, 15 bp, Homo sapiens
gagcacgtcgcaggc

SEQ ID NO: 176416 - DNA, 15 bp, Homo sapiens
tgagcacgtcgcagg

SEQ ID NO: 176417 - DNA, 15 bp, Homo sapiens
ctgagcacgtcgcag

SEQ ID NO: 176418 - DNA, 15 bp, Homo sapiens
cctgagcacgtcgca

SEQ ID NO: 176419 - DNA, 15 bp, Homo sapiens
ccctgagcacgtcgc

SEQ ID NO: 176420 - DNA, 15 bp, Homo sapiens
tccctgagcacgtcg

SEQ ID NO: 176421 - DNA, 15 bp, Homo sapiens
ttccctgagcacgtc

SEQ ID NO: 176422 - DNA, 15 bp, Homo sapiens
cttccctgagcacgt

SEQ ID NO: 176423 - DNA, 15 bp, Homo sapiens
ccttccctgagcacg

SEQ ID NO: 176424 - DNA, 15 bp, Homo sapiens
gccttccctgagcac

SEQ ID NO: 176425 - DNA, 15 bp, Homo sapiens
tgccttccctgagca

SEQ ID NO: 176426 - DNA, 15 bp, Homo sapiens
ttgccttccctgagc

SEQ ID NO: 176427 - DNA, 15 bp, Homo sapiens
tttgccttccctgag

SEQ ID NO: 176428 - DNA, 15 bp, Homo sapiens
ttttgccttccctga

SEQ ID NO: 176429 - DNA, 15 bp, Homo sapiens
attttgccttccctg

SEQ ID NO: 176430 - DNA, 15 bp, Homo sapiens
gattttgccttccct

SEQ ID NO: 176431 - DNA, 15 bp, Homo sapiens
agattttgccttccc

SEQ ID NO: 176432 - DNA, 15 bp, Homo sapiens
tagattttgccttcc

SEQ ID NO: 176433 - DNA, 15 bp, Homo sapiens
atagattttgccttc

SEQ ID NO: 176434 - DNA, 15 bp, Homo sapiens
aatagattttgcctt

SEQ ID NO: 176435 - DNA, 15 bp, Homo sapiens
gaatagattttgcct

SEQ ID NO: 176436 - DNA, 15 bp, Homo sapiens
ggaatagattttgcc

SEQ ID NO: 176437 - DNA, 15 bp, Homo sapiens
tggaatagattttgc

SEQ ID NO: 176438 - DNA, 15 bp, Homo sapiens
ttggaatagattttg

SEQ ID NO: 176439 - DNA, 15 bp, Homo sapiens
tttggaatagatttt

SEQ ID NO: 176440 - DNA, 15 bp, Homo sapiens
ctttggaatagattt

SEQ ID NO: 176441 - DNA, 15 bp, Homo sapiens
cctttggaatagatt

SEQ ID NO: 176442 - DNA, 15 bp, Homo sapiens
acctttggaatagat

SEQ ID NO: 176443 - DNA, 15 bp, Homo sapiens
aacctttggaataga

SEQ ID NO: 176444 - DNA, 15 bp, Homo sapiens
aaacctttggaatag

SEQ ID NO: 176445 - DNA, 15 bp, Homo sapiens
taaacctttggaata

SEQ ID NO: 176446 - DNA, 15 bp, Homo sapiens
ataaacctttggaat

SEQ ID NO: 176447 - DNA, 15 bp, Homo sapiens
aataaacctttggaa

SEQ ID NO: 176448 - DNA, 15 bp, Homo sapiens
aaataaacctttgga

SEQ ID NO: 176449 - DNA, 15 bp, Homo sapiens
aaaataaacctttgg

SEQ ID NO: 176450 - DNA, 15 bp, Homo sapiens
gaaaataaacctttg

SEQ ID NO: 176451 - DNA, 15 bp, Homo sapiens
ggaaaataaaccttt

SEQ ID NO: 176452 - DNA, 15 bp, Homo sapiens
gggaaaataaacctt

SEQ ID NO: 176453 - DNA, 15 bp, Homo sapiens
agggaaaataaacct

SEQ ID NO: 176454 - DNA, 15 bp, Homo sapiens
gagggaaaataaacc

SEQ ID NO: 176455 - DNA, 15 bp, Homo sapiens
agagggaaaataaac

SEQ ID NO: 176456 - DNA, 15 bp, Homo sapiens
cagagggaaaataaa

SEQ ID NO: 176457 - DNA, 15 bp, Homo sapiens
acagagggaaaataa

SEQ ID NO: 176458 - DNA, 15 bp, Homo sapiens
aacagagggaaaata

SEQ ID NO: 176459 - DNA, 15 bp, Homo sapiens
caacagagggaaaat

SEQ ID NO: 176460 - DNA, 15 bp, Homo sapiens
tcaacagagggaaaa

SEQ ID NO: 176461 - DNA, 15 bp, Homo sapiens
ttcaacagagggaaa

SEQ ID NO: 176462 - DNA, 15 bp, Homo sapiens
attcaacagagggaa

SEQ ID NO: 176463 - DNA, 15 bp, Homo sapiens
aattcaacagaggga

SEQ ID NO: 176464 - DNA, 15 bp, Homo sapiens
caattcaacagaggg

SEQ ID NO: 176465 - DNA, 15 bp, Homo sapiens
tcaattcaacagagg

SEQ ID NO: 176466 - DNA, 15 bp, Homo sapiens
atcaattcaacagag

SEQ ID NO: 176467 - DNA, 15 bp, Homo sapiens
aatcaattcaacaga

SEQ ID NO: 176468 - DNA, 15 bp, Homo sapiens
gaatcaattcaacag

SEQ ID NO: 176469 - DNA, 15 bp, Homo sapiens
agaatcaattcaaca

SEQ ID NO: 176470 - DNA, 15 bp, Homo sapiens
tagaatcaattcaac

SEQ ID NO: 176471 - DNA, 15 bp, Homo sapiens
ttagaatcaattcaa

SEQ ID NO: 176472 - DNA, 15 bp, Homo sapiens
attagaatcaattca

SEQ ID NO: 176473 - DNA, 15 bp, Homo sapiens
gattagaatcaattc

SEQ ID NO: 176474 - DNA, 15 bp, Homo sapiens
agattagaatcaatt

SEQ ID NO: 176475 - DNA, 15 bp, Homo sapiens
tagattagaatcaat

SEQ ID NO: 176476 - DNA, 15 bp, Homo sapiens
gtagattagaatcaa

SEQ ID NO: 176477 - DNA, 15 bp, Homo sapiens
tgtagattagaatca

SEQ ID NO: 176478 - DNA, 15 bp, Homo sapiens
ctgtagattagaatc

SEQ ID NO: 176479 - DNA, 15 bp, Homo sapiens
actgtagattagaat

SEQ ID NO: 176480 - DNA, 15 bp, Homo sapiens
cactgtagattagaa

SEQ ID NO: 176481 - DNA, 15 bp, Homo sapiens
gcactgtagattaga

SEQ ID NO: 176482 - DNA, 15 bp, Homo sapiens
agcactgtagattag

SEQ ID NO: 176483 - DNA, 15 bp, Homo sapiens
aagcactgtagatta

SEQ ID NO: 176484 - DNA, 15 bp, Homo sapiens
taagcactgtagatt

SEQ ID NO: 176485 - DNA, 15 bp, Homo sapiens
gtaagcactgtagat

SEQ ID NO: 176486 - DNA, 15 bp, Homo sapiens
ggtaagcactgtaga

SEQ ID NO: 176487 - DNA, 15 bp, Homo sapiens
gggtaagcactgtag

SEQ ID NO: 176488 - DNA, 15 bp, Homo sapiens
agggtaagcactgta

SEQ ID NO: 176489 - DNA, 15 bp, Homo sapiens
cagggtaagcactgt

SEQ ID NO: 176490 - DNA, 15 bp, Homo sapiens
gcagggtaagcactg

SEQ ID NO: 176491 - DNA, 15 bp, Homo sapiens
agcagggtaagcact

SEQ ID NO: 176492 - DNA, 15 bp, Homo sapiens
aagcagggtaagcac

SEQ ID NO: 176493 - DNA, 15 bp, Homo sapiens
aaagcagggtaagca

SEQ ID NO: 176494 - DNA, 15 bp, Homo sapiens
aaaagcagggtaagc

SEQ ID NO: 176495 - DNA, 15 bp, Homo sapiens
caaaagcagggtaag

SEQ ID NO: 176496 - DNA, 15 bp, Homo sapiens
ccaaaagcagggtaa

SEQ ID NO: 176497 - DNA, 15 bp, Homo sapiens
gccaaaagcagggta

SEQ ID NO: 176498 - DNA, 15 bp, Homo sapiens
agccaaaagcagggt

SEQ ID NO: 176499 - DNA, 15 bp, Homo sapiens
gagccaaaagcaggg

SEQ ID NO: 176500 - DNA, 15 bp, Homo sapiens
ggagccaaaagcagg

SEQ ID NO: 176501 - DNA, 15 bp, Homo sapiens
aggagccaaaagcag

SEQ ID NO: 176502 - DNA, 15 bp, Homo sapiens
taggagccaaaagca

SEQ ID NO: 176503 - DNA, 15 bp, Homo sapiens
gtaggagccaaaagc

SEQ ID NO: 176504 - DNA, 15 bp, Homo sapiens
cgtaggagccaaaag

SEQ ID NO: 176505 - DNA, 15 bp, Homo sapiens
tcgtaggagccaaaa

SEQ ID NO: 176506 - DNA, 15 bp, Homo sapiens
ctcgtaggagccaaa

SEQ ID NO: 176507 - DNA, 15 bp, Homo sapiens
cctcgtaggagccaa

SEQ ID NO: 176508 - DNA, 15 bp, Homo sapiens
gcctcgtaggagcca

SEQ ID NO: 176509 - DNA, 15 bp, Homo sapiens
tgcctcgtaggagcc

SEQ ID NO: 176510 - DNA, 15 bp, Homo sapiens
ttgcctcgtaggagc

SEQ ID NO: 176511 - DNA, 15 bp, Homo sapiens
tttgcctcgtaggag

SEQ ID NO: 176512 - DNA, 15 bp, Homo sapiens
gtttgcctcgtagga

SEQ ID NO: 176513 - DNA, 15 bp, Homo sapiens
agtttgcctcgtagg

SEQ ID NO: 176514 - DNA, 15 bp, Homo sapiens
tagtttgcctcgtag

SEQ ID NO: 176515 - DNA, 15 bp, Homo sapiens
atagtttgcctcgta

SEQ ID NO: 176516 - DNA, 15 bp, Homo sapiens
tatagtttgcctcgt

SEQ ID NO: 176517 - DNA, 15 bp, Homo sapiens
ttatagtttgcctcg

SEQ ID NO: 176518 - DNA, 15 bp, Homo sapiens
tttatagtttgcctc

SEQ ID NO: 176519 - DNA, 15 bp, Homo sapiens
ttttatagtttgcct

SEQ ID NO: 176520 - DNA, 15 bp, Homo sapiens
tttttatagtttgcc

SEQ ID NO: 176521 - DNA, 15 bp, Homo sapiens
atttttatagtttgc

SEQ ID NO: 176522 - DNA, 15 bp, Homo sapiens
aatttttatagtttg

SEQ ID NO: 176523 - DNA, 15 bp, Homo sapiens
gaatttttatagttt

SEQ ID NO: 176524 - DNA, 15 bp, Homo sapiens
agaatttttatagtt

SEQ ID NO: 176525 - DNA, 15 bp, Homo sapiens
gagaatttttatagt

SEQ ID NO: 176526 - DNA, 15 bp, Homo sapiens
tgagaatttttatag

SEQ ID NO: 176527 - DNA, 15 bp, Homo sapiens
ttgagaatttttata

SEQ ID NO: 176528 - DNA, 15 bp, Homo sapiens
tttgagaatttttat

SEQ ID NO: 176529 - DNA, 15 bp, Homo sapiens
atttgagaattttta

SEQ ID NO: 176530 - DNA, 15 bp, Homo sapiens
tatttgagaattttt

SEQ ID NO: 176531 - DNA, 15 bp, Homo sapiens
ttatttgagaatttt

SEQ ID NO: 176532 - DNA, 15 bp, Homo sapiens
tttatttgagaattt

SEQ ID NO: 176533 - DNA, 15 bp, Homo sapiens
ttttatttgagaatt

SEQ ID NO: 176534 - DNA, 15 bp, Homo sapiens
attttatttgagaat

SEQ ID NO: 176535 - DNA, 15 bp, Homo sapiens
tattttatttgagaa

SEQ ID NO: 176536 - DNA, 15 bp, Homo sapiens
gtattttatttgaga

SEQ ID NO: 176537 - DNA, 15 bp, Homo sapiens
tgtattttatttgag

SEQ ID NO: 176538 - DNA, 15 bp, Homo sapiens
ctgtattttatttga

SEQ ID NO: 176539 - DNA, 15 bp, Homo sapiens
tctgtattttatttg

SEQ ID NO: 176540 - DNA, 15 bp, Homo sapiens
ctctgtattttattt

SEQ ID NO: 176541 - DNA, 15 bp, Homo sapiens
cctctgtattttatt

SEQ ID NO: 176542 - DNA, 15 bp, Homo sapiens
gcctctgtattttat

SEQ ID NO: 176543 - DNA, 15 bp, Homo sapiens
agcctctgtatttta

SEQ ID NO: 176544 - DNA, 15 bp, Homo sapiens
aagcctctgtatttt

SEQ ID NO: 176545 - DNA, 15 bp, Homo sapiens
taagcctctgtattt

SEQ ID NO: 176546 - DNA, 15 bp, Homo sapiens
gtaagcctctgtatt

SEQ ID NO: 176547 - DNA, 15 bp, Homo sapiens
agtaagcctctgtat

SEQ ID NO: 176548 - DNA, 15 bp, Homo sapiens
gagtaagcctctgta

SEQ ID NO: 176549 - DNA, 15 bp, Homo sapiens
agagtaagcctctgt

SEQ ID NO: 176550 - DNA, 15 bp, Homo sapiens
cagagtaagcctctg

SEQ ID NO: 176551 - DNA, 15 bp, Homo sapiens
gcagagtaagcctct

SEQ ID NO: 176552 - DNA, 15 bp, Homo sapiens
tgcagagtaagcctc

SEQ ID NO: 176553 - DNA, 15 bp, Homo sapiens
ttgcagagtaagcct

SEQ ID NO: 176554 - DNA, 15 bp, Homo sapiens
tttgcagagtaagcc

SEQ ID NO: 176555 - DNA, 15 bp, Homo sapiens
ctttgcagagtaagc

SEQ ID NO: 176556 - DNA, 15 bp, Homo sapiens
tctttgcagagtaag

SEQ ID NO: 176557 - DNA, 15 bp, Homo sapiens
gtctttgcagagtaa

SEQ ID NO: 176558 - DNA, 15 bp, Homo sapiens
tgtctttgcagagta

SEQ ID NO: 176559 - DNA, 15 bp, Homo sapiens
gtgtctttgcagagt

SEQ ID NO: 176560 - DNA, 15 bp, Homo sapiens
ggtgtctttgcagag

SEQ ID NO: 176561 - DNA, 15 bp, Homo sapiens
aggtgtctttgcaga

SEQ ID NO: 176562 - DNA, 15 bp, Homo sapiens
caggtgtctttgcag

SEQ ID NO: 176563 - DNA, 15 bp, Homo sapiens
acaggtgtctttgca

SEQ ID NO: 176564 - DNA, 15 bp, Homo sapiens
cacaggtgtctttgc

SEQ ID NO: 176565 - DNA, 15 bp, Homo sapiens
acacaggtgtctttg

SEQ ID NO: 176566 - DNA, 15 bp, Homo sapiens
cacacaggtgtcttt

SEQ ID NO: 176567 - DNA, 15 bp, Homo sapiens
tcacacaggtgtctt

SEQ ID NO: 176568 - DNA, 15 bp, Homo sapiens
ttcacacaggtgtct

SEQ ID NO: 176569 - DNA, 15 bp, Homo sapiens
attcacacaggtgtc

SEQ ID NO: 176570 - DNA, 15 bp, Homo sapiens
cattcacacaggtgt

SEQ ID NO: 176571 - DNA, 15 bp, Homo sapiens
tcattcacacaggtg

SEQ ID NO: 176572 - DNA, 15 bp, Homo sapiens
gtcattcacacaggt

SEQ ID NO: 176573 - DNA, 15 bp, Homo sapiens
cgtcattcacacagg

SEQ ID NO: 176574 - DNA, 15 bp, Homo sapiens
acgtcattcacacag

SEQ ID NO: 176575 - DNA, 15 bp, Homo sapiens
cacgtcattcacaca

SEQ ID NO: 176576 - DNA, 15 bp, Homo sapiens
gcacgtcattcacac

SEQ ID NO: 176577 - DNA, 15 bp, Homo sapiens
agcacgtcattcaca

SEQ ID NO: 176578 - DNA, 15 bp, Homo sapiens
tagcacgtcattcac

SEQ ID NO: 176579 - DNA, 15 bp, Homo sapiens
ttagcacgtcattca

SEQ ID NO: 176580 - DNA, 15 bp, Homo sapiens
tttagcacgtcattc

SEQ ID NO: 176581 - DNA, 15 bp, Homo sapiens
gtttagcacgtcatt

SEQ ID NO: 176582 - DNA, 15 bp, Homo sapiens
tgtttagcacgtcat

SEQ ID NO: 176583 - DNA, 15 bp, Homo sapiens
atgtttagcacgtca

SEQ ID NO: 176584 - DNA, 15 bp, Homo sapiens
aatgtttagcacgtc

SEQ ID NO: 176585 - DNA, 15 bp, Homo sapiens
gaatgtttagcacgt

SEQ ID NO: 176586 - DNA, 15 bp, Homo sapiens
tgaatgtttagcacg

SEQ ID NO: 176587 - DNA, 15 bp, Homo sapiens
ctgaatgtttagcac

SEQ ID NO: 176588 - DNA, 15 bp, Homo sapiens
gctgaatgtttagca

SEQ ID NO: 176589 - DNA, 15 bp, Homo sapiens
tgctgaatgtttagc

SEQ ID NO: 176590 - DNA, 15 bp, Homo sapiens
ctgctgaatgtttag

SEQ ID NO: 176591 - DNA, 15 bp, Homo sapiens
tctgctgaatgttta

SEQ ID NO: 176592 - DNA, 15 bp, Homo sapiens
ttctgctgaatgttt

SEQ ID NO: 176593 - DNA, 15 bp, Homo sapiens
tttctgctgaatgtt

SEQ ID NO: 176594 - DNA, 15 bp, Homo sapiens
gtttctgctgaatgt

SEQ ID NO: 176595 - DNA, 15 bp, Homo sapiens
ggtttctgctgaatg

SEQ ID NO: 176596 - DNA, 15 bp, Homo sapiens
tggtttctgctgaat

SEQ ID NO: 176597 - DNA, 15 bp, Homo sapiens
ttggtttctgctgaa

SEQ ID NO: 176598 - DNA, 15 bp, Homo sapiens
tttggtttctgctga

SEQ ID NO: 176599 - DNA, 15 bp, Homo sapiens
atttggtttctgctg

SEQ ID NO: 176600 - DNA, 15 bp, Homo sapiens
aatttggtttctgct

SEQ ID NO: 176601 - DNA, 15 bp, Homo sapiens
taatttggtttctgc

SEQ ID NO: 176602 - DNA, 15 bp, Homo sapiens
ctaatttggtttctg

SEQ ID NO: 176603 - DNA, 15 bp, Homo sapiens
cctaatttggtttct

SEQ ID NO: 176604 - DNA, 15 bp, Homo sapiens
tcctaatttggtttc

SEQ ID NO: 176605 - DNA, 15 bp, Homo sapiens
atcctaatttggttt

SEQ ID NO: 176606 - DNA, 15 bp, Homo sapiens
gatcctaatttggtt

SEQ ID NO: 176607 - DNA, 15 bp, Homo sapiens
tgatcctaatttggt

SEQ ID NO: 176608 - DNA, 15 bp, Homo sapiens
ttgatcctaatttgg

SEQ ID NO: 176609 - DNA, 15 bp, Homo sapiens
gttgatcctaatttg

SEQ ID NO: 176610 - DNA, 15 bp, Homo sapiens
agttgatcctaattt

SEQ ID NO: 176611 - DNA, 15 bp, Homo sapiens
gagttgatcctaatt

SEQ ID NO: 176612 - DNA, 15 bp, Homo sapiens
agagttgatcctaat

SEQ ID NO: 176613 - DNA, 15 bp, Homo sapiens
aagagttgatcctaa

SEQ ID NO: 176614 - DNA, 15 bp, Homo sapiens
taagagttgatccta

SEQ ID NO: 176615 - DNA, 15 bp, Homo sapiens
ttaagagttgatcct

SEQ ID NO: 176616 - DNA, 15 bp, Homo sapiens
gttaagagttgatcc

SEQ ID NO: 176617 - DNA, 15 bp, Homo sapiens
tgttaagagttgatc

SEQ ID NO: 176618 - DNA, 15 bp, Homo sapiens
atgttaagagttgat

SEQ ID NO: 176619 - DNA, 15 bp, Homo sapiens
aatgttaagagttga

SEQ ID NO: 176620 - DNA, 15 bp, Homo sapiens
aaatgttaagagttg

SEQ ID NO: 176621 - DNA, 15 bp, Homo sapiens
aaaatgttaagagtt

SEQ ID NO: 176622 - DNA, 15 bp, Homo sapiens
aaaaatgttaagagt

SEQ ID NO: 176623 - DNA, 15 bp, Homo sapiens
aaaaaatgttaagag

SEQ ID NO: 176624 - DNA, 15 bp, Homo sapiens
gaaaaaatgttaaga

SEQ ID NO: 176625 - DNA, 15 bp, Homo sapiens
ggaaaaaatgttaag

SEQ ID NO: 176626 - DNA, 15 bp, Homo sapiens
gggaaaaaatgttaa

SEQ ID NO: 176627 - DNA, 15 bp, Homo sapiens
agggaaaaaatgtta

SEQ ID NO: 176628 - DNA, 15 bp, Homo sapiens
gagggaaaaaatgtt

SEQ ID NO: 176629 - DNA, 15 bp, Homo sapiens
agagggaaaaaatgt

SEQ ID NO: 176630 - DNA, 15 bp, Homo sapiens
aagagggaaaaaatg

SEQ ID NO: 176631 - DNA, 15 bp, Homo sapiens
aaagagggaaaaaat

SEQ ID NO: 176632 - DNA, 15 bp, Homo sapiens
aaaagagggaaaaaa

SEQ ID NO: 176633 - DNA, 15 bp, Homo sapiens
caaaagagggaaaaa

SEQ ID NO: 176634 - DNA, 15 bp, Homo sapiens
acaaaagagggaaaa

SEQ ID NO: 176635 - DNA, 15 bp, Homo sapiens
cacaaaagagggaaa

SEQ ID NO: 176636 - DNA, 15 bp, Homo sapiens
ccacaaaagagggaa

SEQ ID NO: 176637 - DNA, 15 bp, Homo sapiens
gccacaaaagaggga

SEQ ID NO: 176638 - DNA, 15 bp, Homo sapiens
agccacaaaagaggg

SEQ ID NO: 176639 - DNA, 15 bp, Homo sapiens
cagccacaaaagagg

SEQ ID NO: 176640 - DNA, 15 bp, Homo sapiens
ccagccacaaaagag

SEQ ID NO: 176641 - DNA, 15 bp, Homo sapiens
tccagccacaaaaga

SEQ ID NO: 176642 - DNA, 15 bp, Homo sapiens
ttccagccacaaaag

SEQ ID NO: 176643 - DNA, 15 bp, Homo sapiens
attccagccacaaaa

SEQ ID NO: 176644 - DNA, 15 bp, Homo sapiens
cattccagccacaaa

SEQ ID NO: 176645 - DNA, 15 bp, Homo sapiens
tcattccagccacaa

SEQ ID NO: 176646 - DNA, 15 bp, Homo sapiens
ctcattccagccaca

SEQ ID NO: 176647 - DNA, 15 bp, Homo sapiens
actcattccagccac

SEQ ID NO: 176648 - DNA, 15 bp, Homo sapiens
aactcattccagcca

SEQ ID NO: 176649 - DNA, 15 bp, Homo sapiens
gaactcattccagcc

SEQ ID NO: 176650 - DNA, 15 bp, Homo sapiens
ggaactcattccagc

SEQ ID NO: 176651 - DNA, 15 bp, Homo sapiens
gggaactcattccag

SEQ ID NO: 176652 - DNA, 15 bp, Homo sapiens
ggggaactcattcca

SEQ ID NO: 176653 - DNA, 15 bp, Homo sapiens
aggggaactcattcc

SEQ ID NO: 176654 - DNA, 15 bp, Homo sapiens
caggggaactcattc
